United States Patent Application Publication US 2007/0083945 A1 - sequence listing, part 40

SEQ ID NO: 271751 - DNA, 433 bp, Glycine max
  unsure (1)..(433): unsure at all n locations
tctatttcaacagatgaagatgaatctgtggccatatcatggactcttctaatgacaatagcatcacttcttgcactgaattgttgggagttggaagccatcttcttaatcagattcctagcctcaacatgagtcatatcaccaagagctccaccattggcagcatcaatcatactcctctccatgttgctaagtccctcatagaaatatngtaggaggagttgctcagaaatctggtggtaaggacaacttgcacacaatttcttgaatctttcccagtactcatacaagctctctccactaagttgcctgatgcctgaaatgtcttttctgatggcagtggtcctagatgtacggaagaatttctccaagaacactctcttaatgtcatcccagctggtaatggacctaggagcaatgtagtacaaccaat

SEQ ID NO: 271752 - DNA, 440 bp, Glycine max
  unsure (1)..(440): unsure at all n locations
agcttacccgttgtagaccgaagaacgatgacgaacgaacgaagaacggctganaatcttcgcgaaaatccccacggaaaccttacagaagcgcctcgtctcggattttcttcacagaaccaattttttttcactattttcaagtgattcttgaattgccaggagagctgaacgaaattcctcttcacttctccccctatttataggaaaatgggggagatgctagccacccagctcgccaaggcgagcaaggtgacttcctccagaagcaaccgccttcgggaggaatcttctggagggcccaagtgggcctggttgctatttgcacccccattttctctcaatacacctttgccttttttttggtgattctttnttcttanagttacggaaacttacgaatttcgtaacgatacctgttttctttccgtaatgttacg

SEQ ID NO: 271753 - DNA, 311 bp, Glycine max
tcgctcttttagccgctttttgctcatcatatgggcttctttggtcacatctggagtccaccttgagacactatcagtctgcttcatgattgaaaagcccatcttgttccagattcatagtggcccatcaaatggggctgtcatggccgcttttctcatgtcataaattatctctagactactaggattcagtgccgttgatccatgaatttgtctgggacaagcgacagagcacacataccttaacatcaatgtttgctgataacaatacagtaataccgagatgtaccagtcggacctactcttgggct

SEQ ID NO: 271754 - DNA, 422 bp, Glycine max
  unsure (1)..(422): unsure at all n locations
agctntgcgactcggtcgcttccttcgccaccacttttttgggccgtctagccctcaagggtcctttttttctgccttttctcattgtaatttgtataaaggaatgaattaaatgatatattatgtttgataagatgatgtaaaatagaactgccatagaatgtgctttattatgccccgtttaagtgtgtgtttggctcggcgtacggcaactgattccgagtctagaattgattttgaatacatcttcacttggttttatgttggagaagaattcataattgattccaggttcagagttgattatggattgaagcaaacttaagtagcttctgtgttacattaaaaattctgtactgcatcttactcctaacataattttatagtaaaacatgcaaacatcaactccatcatttcaaaat

SEQ ID NO: 271755 - DNA, 492 bp, Glycine max
  unsure (1)..(492): unsure at all n locations
tcttacattctnggttttttctcttgtaagtattcgtatagaaacttacccaaacaaaatatgagtgtttttcacaagttaaaattagtttatgagaaagttaatntatagaaattctcccaatattttaacctgtttcaaaggaaataaaattagtctaagctccaaaagaagaataagaagaaacaagtagactaactcatggccggaactaatttcaacaagtcaaaagcttgcttagtgacaagcataatgtttgaatgccgaaaattgtaatcaggtcagggtgaatattgtgctagtctttgacaactcagctataaattttgcaatgtatttctcttgctagacaagtctggcattgtagaatcaattgtgcacttgcttgttgaactcattgagataattgttctcatcctctgttggagggaattagcccttcttatctgatgataaanaacaatagatgcgctgaattgtgtaaaacgatac

SEQ ID NO: 271756 - DNA, 394 bp, Glycine max
  unsure (1)..(394): unsure at all n locations
agcttgtgaaanaaatgtataataatcatttgaatgttaagatcggcttagcgcggcgcccgctaagcgacgggtcttcgaaaaccaaatgtcttactcgcttaacgaggtatttcgctaagcgaggacgtccaaaatagcttggttaagagtaacatcagtacattgacaaatgcccaaggaagaggacagctgtgggattctacacaaacactctattttccttcttcctctctcatccaaaaatctccaattcttgcatttgcgtttgctgcattgcttctaacttcaacgatacaagtaagctccatacgatccttttctctgctattttgctcaaccttaggatagacaacctttacatctagcttcaataattgtaggattacaatat

SEQ ID NO: 271757 - DNA, 444 bp, Glycine max
  unsure (1)..(444): unsure at all n locations
gcctgaccactntntatctattacttaaatcattcatccttaagctattcctttattagcttcagaagcccatatatttccagttaaaatggtctgaccatgaaaattctcccatcacagatgctggcttacatattntaggcaccaaggaagtcctcacaatgtcatgatattcatgtaatgaattaaagttgcccaaataagtagctcttaagtcttaactaggttgttgttggtgtttttcctattatgggctagttagttgatacaagaataggatagtgtaatatagttcctggaaatnttggtggtcaattataatcaatctcttttctgcctaggatttggtaacattntttatattagaaaggtgtaatagcaatgatctacacattgttcaatttatgctgctttngctntcttctttattntctaagtaatctt

SEQ ID NO: 271758 - DNA, 436 bp, Glycine max
catgcaagcttaatctctatcccatactaactcataactgattaggaagggtattcttaacctagaacataattatagaaaactactattcaataattattcgattatgcatgcatgcaatacctagattgtgcactactacacttctgcataatttcattctgacataaaaaacataatatttttaaaaaaaattctaactcagttaccaaatgtgaaataaagttatcctgttgtccagcataacactaccaatacagtaatgcatcggttaattgaaatttggagtgatatgtttatttctgattcccatccccccactatccatacattgcaaattatgagccacacctcttagtacatagactatatgttaacagaaaaaaggatggagtagcaacatacagattctctagttcaagcttctcagcaatag

SEQ ID NO: 271759 - DNA, 474 bp, Glycine max
  unsure (1)..(474): unsure at all n locations
tatcttgaataacgttctatatggcttcaaatttttttatgtacgctnttggtattgtgccgctgaagttgttggaagagacataaaaatgactaaactgngaaatccatgcttggtctttaaactggcaatgggaccgtacaactttgtggctcgcaaaaccaatactttcagttcttgtagagtttgaagccaatggggaaagacatcctttattngattggttccaagatctaataccttcagactagtgcaattggacaaagattctggcaaaaaaccttctaattggttgccattgagatccagagtactgagccgacagntatttgcanaggtacttggcanagtgccatgaagctcgatcagttgtagatccaaaacttcaagggatgatgagttagcacggcatcgtggaatgattccagtcaacttgttgtgagacaagttgagaacattaattgaacttgcatt

SEQ ID NO: 271760 - DNA, 430 bp, Glycine max
  unsure (1)..(430): unsure at all n locations
agctntgaatgctctattcaatggagttgacaagaatatcttcagactgatcaacacatgcacagtggccaaagaagcatgggagatcctgaaaaccactcatgaaggaacctccaaagtgaagatgtccagattgcaactcttggctacaaaattcgaaaatctgaagatgaaggaggaagaatgtattcatgacttccacatgaacattcttgaaattgccaatgcttgcactgccttgggagagagaatgacagatgaaaagctggtgagaaagatcctcaaatccttgcctaagagatttgacatgaaagtcactgcaatagaggaggcccaagacatttgcaacatgagagtagatgaactcattggttcccttcaaacctttgagctaggactctcggatagggctgacaagaagagcaagaac

SEQ ID NO: 271761 - DNA, 444 bp, Glycine max
  unsure (1)..(444): unsure at all n locations
acacaaacaaattctttgttgatctttattgttgatngtgaacaatgactagggaaagagatgattctcttcaatatattagtgtacatttgaatgggcaaaatcatccttattggagttatgtgatgtngaaatttttgaaaggaaagaggacgcggngatatatttctagaacctatgttaagcaaatagataaacataatggaaaatatgaaactgagttgaaatattcgtgggaagcaaacaattcanagataatcacttggatcaacaattatgtttcacaatcgataggggttcacatgcaaaatatgaaacaacaaaagagggttgggatcacttgaataggttgtatgtgctgtccaactntgcaaaacaatatcagttggaggttgatatgtgggctcttcaacaaaacatgagcttattcaagaanntttattt

SEQ ID NO: 271762 - DNA, 427 bp, Glycine max
agcttttggaaggatcaaaaagtgctcttatgaatcctctcgtgcttatgccaccagtacctggaaggcctctcattttgtacatgacaatcttggacgagtcaatggggtgtatgctggggcaacatgacgaatccgggaagaaagagcgcgctgtttactacctaagtaagaagttcacgacctgtgagatgaattactccttgctcgaaagaacgtgttgtgctttagtatgggcatcccatcgcctaaggcagtacatgctgagccatactacctggttgatatccaaaatggacccggttaagtacatctttgaaaagccagctctcacgggacgaatcgcccggtggcaagtcctgctatccgagtttgatatagtctacgtcacccacaaggcgataaaaggaagcgccttagcagatta

SEQ ID NO: 271763 - DNA, 487 bp, Glycine max
  unsure (1)..(487): unsure at all n locations
ccttacanacgttctcttgcacaagacattctatttatctcgaaaaaaaaatgcacccatatacaatcaaggcagcttcgttacctagattatttacacgtacttccaaggtgtatttgttacttacatcacacacatctgcttggctaaattcacatacaagcatactcaaagcattntggggtaccaaaaattgcacatgtgcacatcttggtatttctaatacctatacatacacaaacttcatgatgaatcttgactatctacacaataaggtgctacatttcatgctctnttcaagtttttgctacctaaagccgcatgcaaattcaagtatatcttccttcgctgactaatattgtattcaaaataaaaggtatacatcttttggtaatgtatcttctttacataacatgcaacatacttatgtatanttttttgtgagacatcttgactaccacaaattatatgtacatacatccaagta

SEQ ID NO: 271764 - DNA, 431 bp, Glycine max
  unsure (1)..(431): unsure at all n locations
agctnttcttagacatttttaaatggctgcaaacaatagaatatgccaacatatgctaaattcatgaaggatttgcttacaaacaatagaataattatggatgatgaaacattggagctagaggcaggttgtagtgcaattattcataaatccattctatagaaatctcgagatcctagtagtttcacaattcctgtgactattagaagattattaataggaaaggcagttctttatttaggtgcaagtatcaacctaatgcccttgtccatgatcaagcggataggagaagtagacattagaccaacaaggatgactttgcagtttgctaacagaactatcaagcatccttatggcattattgaagatgtattggtaaaagttgacaaatttctctttctagtcaactttatggtgatggatatgaagac

SEQ ID NO: 271765 - DNA, 438 bp, Glycine max
cgacatggtttgcaggaaagagcacttccttggatgaaccttctcttgtcatctgggttttcaccattgacatttagtaactttacagaatcccaggctgagtgtttggtgcagaggactcctagcaaggggttccatgttgagaagaggcagtcttcccttgttctttgctggcaaaggaaggatctcatctcagtttcaacttggagatgctaagcagagccattctgcacctttgaacgaccaattaattctatattcgaaggtgctacataacttaccgcttctattgatctttcttgcttgaatttgccttggctatggttctatgctaattgtctgtgtttaggaattattattctcatgtaaggaagtgaacatattaattagcaatggcaacttatgagccctgatatgaagtgtattattataaacatg

SEQ ID NO: 271766 - DNA, 417 bp, Glycine max
  unsure (1)..(417): unsure at all n locations
agctntgcaacataggaattaaagaatgtgcttgctgggcatctggttccatggctgctgtcgaaggagatgggttggatgatgaagggatgtcctcggttctcgctctctttcttgatgccatcttcaagaaaagaatgtagataattacaagagttaagttgaaatcaacataaaggccgcttagctagatcaaattcacttagcggaccttcacaaaacaatacataccgcttagtgaaacatagctcgcttagcggatcttgaaggagaaagatatacccacttagcaacttatatagcctgctaagcctaaaagaaatctcacaaatatgcacttagctctggtaccatgcaactcacaattttctaagttatatacccggttgtcaactcacaattttctgagttattttg

SEQ ID NO: 271767 - DNA, 492 bp, Glycine max
  unsure (1)..(492): unsure at all n locations
tagagaggaagcttcaatggaggaaaaaaagagagaggnggggaggtcactatattgaagaatgaaaagagggagacaagttgaactttgaagtgtgtctcacaagactctcattcatcaaagttacaacaagtgttacatatgtgtcgcaacatgcccttttgcgggcgagcaaggcgaggctcacgggtgcgctntccaaaggaggaaagatgcgcggagtcgccaccaacgtttatttgtgggaaacgtcggaaaaaaccgaaggaaaccggtcaaaatgaaaattctaagttcgggagttgtatctacgtttgaggaaggtattagcacctctcacatttgtctcacaggacaacaacctcatttctagaattgtggaaattggattaccttaactnttatctcgttttattnatttgaggtcgacaaaagcggtgcttttgctcctacgtaccctccatcgaagaggaaatcagacctacgtagttc

SEQ ID NO: 271768 - DNA, 239 bp, Glycine max; identical to SEQ ID NO: 271714

SEQ ID NO: 271769 - DNA, 411 bp, Glycine max
  unsure (1)..(411): unsure at all n locations
tcgncttcttctttagtccagtcttcttctggcttcaattcatcagtgggctttccttctgtgtccagcatcttgggatgttcccagcctttgatgacagctttccaggttctgctatccagtgatttgagaaaggccaccatccttgctttccagtattcatagttggtcccatcccagaatggtggtctgttcactggtccgccttctttctccatgttcatcagaatntatctccctagatctcactcagtgatttcgagtgcctgctctgataccaattgaaattctgatactgnggacagatgtcgtacaggatgtcacgacatcacgcttcagaacatgcagatngtctttgactgtatgaacacgatanacaagtaaataacacaagagaattgtaacccagtt

SEQ ID NO: 271770 - DNA, 421 bp, Glycine max
agcttgttgtatatgtgagtaggaccatttattcttgtagttgaagtttttttcttctatagttgttttggccaagtcaatgtatgccttttagttctcccaatttggctgtgtgccagtgctttagcaatacttatgagaatgccttaatatctctaacttgtctgtaatcatgtttttttaatggtgcctttaagcatgcttaaccttttcgacttgcctatgagcaagttggtttaatgatacctatgagcttgtcttaatcttttcgacttgcctatgagcaagtgctttagcgatgcctatcaacacaccttaatcttcccgacttgcctataagcatgttgtttttttagctatcccttgtgagcacaccttaatcttcccagctgcctaagagcatgtcatttttctgtgatgc

SEQ ID NO: 271771 - DNA, 318 bp, Glycine max
  unsure (1)..(318): unsure at all n locations
agcatctaaaggtggaggggaactcgggggtgttgccatggctcctgcanaaattaaaataaaaatgaaacacaagttaattagaacaacatgtaagtatgaaattgtaaataaagacaattaattgtaaataaaccaaatataatttttcaacatgttaaacattatttgtgtatataccgcagttatgtagccgtattctcccatanaccttcatcatgatcattaaaatttgatgtacatcttcctcgtcattttcaacatttgtggaaggcaatttgtggngaaaacatatgcatctcgttaacatcaagtgtt

SEQ ID NO: 271772 - DNA, 404 bp, Glycine max
  unsure (1)..(404): unsure at all n locations
agctntgaagacatgtatatgaacctacacactcttatttagattctttntgtaaaatgttttatatatattatgtatagttctaaaaaaaaactctcaaaacaccttgaaccccttgagagaaagtactaagtgttgatattgtatattcgtctatatgacaattaaaagttagtcattgtgcaaaaaaaaaaaacaacaattttgtttgatttgtatagagtcagcagtagcttgataggacaaagaatattgagttgtaataagcttggtgtagagcttgtgttgtagagctagaagtgatagtgattaatacttgtaacttgctgaagttagtgaaatctggtggctaatcaagagttggacgtagcctcaatggtggagacaaattagatataaatttc

SEQ ID NO: 271773 - DNA, 285 bp, Glycine max
  unsure (1)..(285): unsure at all n locations
tacaattaatagtntctgtttatttatagaactaggctgaagaagataactaatcctctaatatggatcttcttcatcaagctcaagcccattacacgattaaacaaaaataggaattttgtaaatcacactgaacgtgtgcgctatggctgacagctcatgctaagcccaaaattctctcggttgggaatgggctaaaccagatagctcatgctaaaccagacaactcacgctaaacccgacagcttgcactaagccctagtgctaagctagacaactaatgct

SEQ ID NO: 271774 - DNA, 441 bp, Glycine max
agcttcagacaacttgttgtaatcaattacgatagacttataatcaattaaaataaagagttttgcctcttcaagaaacttttctaacttagaaacgtttcttcatactaaacatgatgatgaatgatacaagacaaatatcatatgtactaagatgcaacatagaaaataacaaccaatacaaatgccactcaagggagttaggcataaaaaagtcaaaacaccttcaagcttttccttgaccttcaagctttggcctttatgttgttcaccatgttgctcatgttgctccccctatctctaacataaaggagggatttcattaattatttaactaagaactaggtttttttatttttgttttgtgtttgtcacaaaataaataagatcacataaagtgcaagaaaaattaaatgacaataaaataatttagtaaagata

SEQ ID NO: 271775 - DNA, 495 bp, Glycine max
  unsure (1)..(495): unsure at all n locations
nggatgctaaacnnnnnacctacattaatcatgcntttgcagccnccccnacaaccctttactttggattgccanaattatttttggtgaacccccggggcctattaatagggacaccttttttgcctgaaccccctggccgggtccattgggctgccggaatggcacccaaaggtgctctttaagtcggggtcaaaacttagctatggttttccttaacaaactgaaggttctttaatatcggttgaataggctagcgcactatccagaactatataggaaatagaccaatttggaccaaaaaaactaaagaaataaatcagagtactcctccaaaacgaaagaagcccctttgcatgaaaaaaaaaaagagctctgatctcatttcgagtggcgtgtaagttgacacatcccgtcccgtcagtcagacaaccaccgggcaatggaacaccactttagcgccgggccccaaccgatacacctccaaaaacacac

SEQ ID NO: 271776 - DNA, 438 bp, Glycine max
  unsure (1)..(438): unsure at all n locations
agcttctatttataatgcanaattataactgattttgtccttttgtgctagcattatcctaacggaattacaaaatcaaaaggcaatggcagacaaaccaaggaaatgctgattttgttactggcaaaggagattttgatgcctactcaacaacttctctctgtctcagatgaaatcctttaggtatgctggtgtggtgctaatcctcttgggcctgttccttactgtttgtaccccttgtctgctagcatctgtttgcacccnctgattgctaacattccctgccgcttgcagaaacaccttgtcctcaagttggtagtcagcacggagttggtcccaatccttccaagaggtatcatcaggggatagaccatcccattggaccaagacctcccattttggcttatgagagtccgacaaacatctggagtccacaat

SEQ ID NO: 271777 - DNA, 554 bp, Glycine max
  unsure (1)..(554): unsure at all n locations
ggttccttttnnnnnnnngaattgnnnnnnnnnnnnannaagtttcttacnttgggcagatngccnnnnttagacacanncnacangnnnctactnnctatcttcataatatnacagctttagttctccgagggtccagaagagggggctgagatttgtattcgcaaactattccccacttaaaatttctatacatcttttaacccaagtcccaagattccctttaaaatgaattactaaataataattcaaagtggaactttctgcacacgatttgttaaccacaattgttcaaggttttgacggaagagagaattgcccattcgtttatgctggtttggcaatgatgttgtctacgtccagttccaccaaaccggtgggagttcactatcttggaattctttacagctgctgaacacacaaggaacttctctctttgtgagctatgtttacaacagagagcctcggctttagcccttgattggaagaaggaaaacagatatcttcttgagagattatttacatgaacctcattcttttgatttcaagtttcc

SEQ ID NO: 271778 - DNA, 441 bp, Glycine max
agcttgccttggcccttgatatatttgagggactcatggtcactatgaatgactaattccttgggataaaggtagtgttgccatgttttcaaagcccgtactaaggcatacaactccttatcataagttgaatagttaagggtaggaccacttaacttttcactaaaataagcaggaggatggcctgtttgcctcagcgcagccccaatcccaacatttgaagcatcacactcaatttcaaaagatttttgaaagtttggcaacgcaagtataggggcattagttagcttttgcttaagaacattgaaagcttcttcttgtttctctccccatttgaaaccagcatttttcttgagcacttcattgagaggtgctgccaatgtgctaacactcttcacaaatcgtctataaaaacttgctaagccatgaaaactcctcacc

SEQ ID NO: 271779 - DNA, 400 bp, Glycine max
  unsure (1)..(400): unsure at all n locations
cactacttataagggataatcatacactaaaaaattactatcaagctcggcattattttcaagaactntattgtttctttggtctgtcattttccatttaccattgtcttgtttcaataagtaggcatgttattgaattgaattgaattcttaagaatctangcattgtaatcgattaccagagacagaatacttagaggtttttcaaaaagaaagttgaatttgaatttaaatactgaatcgataccattaactgtatcgattccagtacgaaatttagaatttaaatgaaagtatgaccctcaatgatactgtgtatcgatacagtgaggatctaaattgtctaaagcacattttcaaagtttgaaaccacaaggctatttatgtatgctacaaattt

SEQ ID NO: 271780 - DNA, 443 bp, Glycine max
agcttagatagaaacattgaacacatgaaaataacctcaaatagataataaaaatatttacatcgagtactcagtagaaattcccaagaaaggattttagccctccgttacaagggagcagctttcataaataggagaaggatttcagagaaaataccagattacaaagcagtggggatgtctcctccacctctaagaacctagaaaataactctaaaacctagaatctacctaaaagttaggacctttgcttcctttctcagcttttcctcttttctctgcacacaattcgcagtcaattcagacctctttcacgtcgtcacactctcccctatttttctgcgcaaatcacgcttaaaaagggttttttgatctcgaaggcgcgcttagcaccattctcacgcatagcgcaagtaagtgatatttggcttagcaccaatctt

SEQ ID NO: 271781 - DNA, 485 bp, Glycine max
  unsure (1)..(485): unsure at all n locations
aatgtaaattctgatcgtcaatattttatcaacatctcatagggatgaatgactcgggcatactntaagcttatgcacggaaaatgtaattatgaaattgagatgcccgaagaaacaccatttcctaggtaaccatgcattangtaccatgttcaattattttgtttttaagtgaaacgggtttatgatcccaacatggttggctcctaacacatgaaactaagaatgtagtgtgaagtttcacgcttcccccttctttgtttttgttttgtagaggaaaacgcaaggatgagcaaacatgaaaacaaatggtatgcaattttgcagatcaaaaagttgggtgaacgcatatgcatgatgatgccatgactcatgcaaaatgtgaggctggaatatgataacggacaaatgcatgatatgtctattatgattgtatgaagagatgcttatgcgatgcatgatatgaatgcattttacggacacca

SEQ ID NO: 271782 - DNA, 60 bp, Glycine max
agcttatctataagtataagaagaattgcagaagtttctctgctccgcagttctgtacaa

SEQ ID NO: 271783 - DNA, 407 bp, Glycine max
agcttatagataatatggctgtcttctctcttcaattactggatggaaaacgtttataggcccaacagaaagtaatgatcgatttccagcaaccttgtgaaaaactaatgtatttttcatgggccagaagtatcatctaattggaaaggatattatatctgatattctacctgctatgccagtgaaaaatgctgaccaaacaaaaaattcaagacaaatcattcacaatttttcttcacaatattttcattcttatgaatatatagatacactaatattactggattgatgccgccacataatctgatttgttaactactccatgaaaatgaatttcatagatagataaaggctaccacgtattgtcttgttaagaagataatgaactttctcatgatgttcatcca

SEQ ID NO: 271784 - DNA, 497 bp, Glycine max
  unsure (1)..(497): unsure at all n locations
nnaaggtgtgtctananaggnnnnnnnnatcttgatcgcnnnaatgcccatgnngnnatagntangcancnaccncnanacacgaatgaanctctgatacaactagnncaccttttgttctcagaaatctcaagaagagggggctgaatttatactaacatctattccttaaaagggtcttaccttgctacttaaactaactgccaatttttagaattccaccgactcaaaatttcatttccccctctattggggcctccgtcaatttcatacacattggagggagaatcactggaaaatattacggtccattttaaaattgaatctaataaatttgataaaatggacactcctaataataaccctattattagaccatatgaatcgacaatatttctttttcttggtctgctattcataactattatatcctactgatatatattattcaaccatatcctgtaccattttgaaaacttatcgatctggtgcagccg

SEQ ID NO: 271785 - DNA, 430 bp, Glycine max
  unsure (1)..(430): unsure at all n locations
agctntaaaagaatggctaagattttgttaaaacatattcacttagacaatgaaggaaagctggagttgctgcacatgatgtccaacgttatgtcaaagaataagatcgggctgcacaatgcacaaggcaagataaagtgtcaaatgaagaattgaagctgcaggattcacgatgtcggatacaatgtccaggacatcctgcctgaaaatactggaattgctaaaagcattgaagctgcaagatccacgatgtcggatacaatgtccaggacatcctgcccgaaaatactggagttgctaaaagcattgaagttgcaggatccacgatgtctgatacgatgtccaggacatcttgcccgaacatactggacatataaatctgttatatctttaacagattattgtgcagttagcaagagattagatgatc

SEQ ID NO: 271786 - DNA, 148 bp, Glycine max
aaaaagccggagccaagcgggggaattaaataggccaggccaggccaggctttagtgaggccaggtcgaaggccccggtaggccggcctagccaattccaacccctaaccaccaggtagggcgggatttggaccggattcaaggcttt

SEQ ID NO: 271787 - DNA, 414 bp, Glycine max
  unsure (1)..(414): unsure at all n locations
agcttcgcggaaggaatgagcagcagcagaanagtttcttccggagagggtgggctctttataattttttattaaagggcagaattgtccattcataaaagttgctgggtgcaccagcaatattgttgggtgcacctagcatctcccctttctctcccccagtggcccaaatgatttgaagacaaatgttaattgcttctcttataacaaaataaaaaatatttataaaaaataattatttatttatatgcttaattgtattttatacttccaactttttcattttttgataaattaatttagcatattttacccctaacttataaaaaacacacaatttatctttctcattgaattggcgtgacatgttgacatagcataagaagtgacgataaaatncgttaaaaaataaaa

SEQ ID NO: 271788 - DNA, 211 bp, Glycine max
agcttgtctacttgcagaggaacttactatggagtgttgttcttgggcataaaaatatccattgggtgatatgagaagtagcttgtctctctaacatgatgggggtctaggaatcaaagatatttctcacttcaatacaagtctgatggctacatggatatgggctttatcttctaatcatacacaagtgtgggttataatcttatctgct

SEQ ID NO: 271789 - DNA, 422 bp, Glycine max
  unsure (1)..(422): unsure at all n locations
ttcgaggatttcataaaacagagcataaccaaaggtgtcatacaactagcacctatgcatagtgagtgagattcagatgttactcgagtgacttgaagtcttaaactctatctccgacgtcaaaccacacacaaccttttgataggtgtatactatacagcccgtgcgttaaacgtgatgcacgtctattccggtatagtgaacgctctagaaatttgtgcccaacatctcatatgaagcggnccccacttccacattcacatangtgagtctatcaagagtactcctgtagcctacgtattacactcaacataaagtatagatctcatgaagaattaagaattgttctcataactgatactcaggttacttcaggaatcatgctactttcacgtataacagcatgtgcatctcatatcact

SEQ ID NO: 271790 - DNA, 430 bp, Glycine max
agcttatgcgcatattttcttacgaacgttctcttgcacaagacattctattaactaagaaaaatgcacccatacacaatcaaggcggcttcgttacctagattatttacacgtacttgcaaggtgtatttgttacttacatcaaacacatctccttggctaaatttacatacatgcatactgaaagcattttggggtaccaaaaattgcacatgtgcacatcttggtatttctaatacctatacatacacaaacttcatgatgaatcttgactatcttcacaaaaaggtgctacacttcatcctttttctcaagtttttgctacctagagtcgcatgcaaattcaagcatattttcctttgctgactaaaattgtattcatattaaaaggtatactcttttgtaatatgttttcttcacatagcatgca

SEQ ID NO: 271791 - DNA, 449 bp, Glycine max
  unsure (1)..(449): unsure at all n locations
taactaatcaaatgggacagttggctacacagttaaatcaacaacagtcccagaattctgatagattaccttctcaatctgtccagaatcccaaaaatgtgagtgccattacattgaggtcaggaaagtagtgtcaaggaccttaacctgtagcatcttcatcatctgccaatgaacctgcccaacctcactctactccagaaaaagatgatgacaaaaatttaaagagtaagttacctaacaatntctatgcaggtgaatctaaagagaagcaacatatccctcttccattccctccaagagaaatttccaacanataaatggaagaggcaaagaaggagatcttggaaacatttagaaaagtagaggtaaacatacctctgctggatgcaatatagaaaattccaagatatgctaaattcttgaaggagttgtgcctaataagcgga

SEQ ID NO: 271792 - DNA, 423 bp, Glycine max
  unsure (1)..(423): unsure at all n locations
agctagaaagtattcttaattcatgaaaacatattatgttcatcacaatttaatgtttattcacactaagagtgcgtttgaatagagaattttaaccgaggaaagtaatttatcagagaatttaaatttctttaatctaaaattcattggttgaatgttttttttatgaagaatttaaatttttggaattttaaaatacaattttaaacaactaanaatgtgaaactttaatttacttctacaatgtgagaaattgaaattctcttcttgatagaagaacctttcaaaatgtttgtgtattttctttataaccttcatcctctcttccacctaagagttctctaaatcttattttcgaactcgcgactcttccttcacgccgatgatcctcttcttcaagaaacaccgtctgagctcgcagag

SEQ ID NO: 271793 - DNA, 425 bp, Glycine max
agcttcagtcacttgagaataaggctctgcatgaacttattttgagctgtaattacatctgcacatacttctggcttacatggtactccatttttgtttggttgatctgaaacatagtactccatgaacattgaaaacttgttcacatcctattcctatatttagagatgcccatacactaacttggcccaagcgcaatatggatactgctttggcatgtgtactcaatcaattataaactactgttgatatgatttttaaaataattattataaaaattaataaatttattatatatgatgagttatgattgaatgacggtctaaaatattcttataagtacataatctttatttgattttaatttctttactttcaattatttgcatctaatcttcttaatttctcaattattcaaattaagt

SEQ ID NO: 271794 - DNA, 440 bp, Glycine max
  unsure (1)..(440): unsure at all n locations
agctntattcaagacaaagaaattaaagatattcatgatggatgatcaagacagtctctagagtcttaggaagagtatattaaataggaagggaattcctaattgaagtagcaaaaggtttgaccaagaaatttaagttaaaaagtctttctcaagagatttactctctgataatcgattaccagtggccaaaaatgatttacaacaactattaaaatttgaattcaaaatttgcactgtgtaatcgattacacatatatggtaatcgattaccagcagttattgaacgttctaattcaaattttaaagcttgtaatcgattacacacatactgtaatcgattaccagaggagattctcacgacatattcttaacagtcacatcttttcattcggttcttacatggctatcacaggcctatatatatgtgacttgagaca

SEQ ID NO: 271795 - DNA, 408 bp, Glycine max
aaagcttacaaatatattttaagtttcttcccataaaccaaataacataaaatctggacaatataagataagatgggatgaaataaaatctggagaaaataaaatctagatgaaataaaatctggataagataatatttgataaaataaaattgtctgctctcttcaagtccaaccccaattccgaattcaagcccaattgcttataattctcctgaaattaaattaaataaaaaaattagtcaagtaggcccaaatgataaaactacataattaattcgacaattaaggcttatcagtaatttaaatggtgacaaaaagtgttaagaaataagagaacattatgacacatcaatctcgcacttgcatgcttagttatggtcactcaacattgggaaatggtttgatc

SEQ ID NO: 271796 - DNA, 174 bp, Glycine max
ctggtctctaaccactcccatcgccaacagtgattattgacttttcgcctcaactcgttacttaaacttaaacacgtgttcaactagctgcccacggtctcaatctccgccttctaactcatcactccccgtgtctgtaccctacaatgctgcatatacacaccctacgccccg

SEQ ID NO: 271797 - DNA, 357 bp, Glycine max
agcttgcatgatttacattctccccctttctcaagcaaattcttcttgacatcatcaaaatctgcatgatttacatgcttgttgctttggctcaaaatttgttctataattggtgcctagtttataccaattctagttctgaaatttcaattgaaaattagtgtgaaaacaagtgccaaaactagaggtttcttgagtctttttttctttgtttttttttttactttaatctacagccattctaagtttctctttgagtcctagcttgcttttatgttcttttcattgctctaattgttgaatcatccttgaaaatttgtcttgttaaaactatattggttcacctttcatctcatt

SEQ ID NO: 271798 - DNA, 333 bp, Glycine max
atacccgctgttgacgtgcttaagccattttacttaagtcatttctcgcttaacttaaaaataaaataaatttccaccgaacgtttgaattgtattatccattaacttcagttaaaataaattccgaccgttcggtcgtgccgtaaccacgttggaaatcaaaaagaggtaaaaaataatataataatcaaaaagacatcttttagtaaaataaagcggaaaatcaatcgtacgttttctctttgggatttctcattcttaatcgaattgattaataactaaagtgaaactaaaggctaaaatcaattcgcctagtcaagctcgtccataaaa

SEQ ID NO: 271799 - DNA, 500 bp, Glycine max
  unsure (1)..(500): unsure at all n locations
cggcnagcggggcgttgannccatccttgacccccgtggcagtagcgtcgacctgttggcatagcaagcttgtacttataaggtaagagatgcgttgttcattactttgacgctaacgcaagctcggacgactgaacgtatgctgatgctacgcatcttttaatgtgcgaatgactgatgttatagtgtaaatcatactcatcacgatagactctggttattgttctgttaacaatgcacgactttggatggagctaaaccaagttccgtgatatcaactgatatcgaaatatctgggtcaaccattaccgacgtatctgacagctgaagtatttataacaggatgcacagggatgataagcttaccgagccatagcaatggacatctgtataacctgatcctcagcggtttctacatgtgtgggtggacgacccattctcatatccatcctccacgaacaatatcatgagccctccatgggtaatcggtttattctacc

SEQ ID NO: 271800 - DNA, 239 bp, Glycine max; identical to SEQ ID NO: 271714

SEQ ID NO: 271801 - DNA, 410 bp, Glycine max
  unsure (1)..(410): unsure at all n locations
taagctggactctaccatattagaaatgcactaggcctaataacataactgtttatgccaggtcaagggggaagagtacccaagtgttatgttataagcagtattctggcgaaattgttagccatgtgagacttcttagtaagacattatggtttattttaatccctgaattggacttactcggtgagacaaagccttggtgagtgtgtgagttcctcatatggtatggttttttgttcttatatgacaagtatctttcttcagtaatgaagtaaataaaaatcttgtaacatgaataatgacagtgtacctaagaagttccttacagcatgtcttgacaatcacaggacanacatgatgatatagcttccatcttcctgaaacatacagatacataataattgtgcatg

SEQ ID NO: 271802 - DNA, 176 bp, Glycine max
agcttgaaaggaacttcccaaatgtgtaaccatgttagacgatatgacggcatcatcgccggcgtccacttctgaatggaggaaaaacgagctcctcctgaaacaagttctctcgggctgatgctgtcagctgttgaactctaactatccactccaacaaccgtgtccaacctgat

SEQ ID NO: 271803 - DNA, 282 bp, Glycine max
cccatatgtcctgaccaatgcaaagagattgaaatctagcaactggctgctccctatggacactcaattaaattttatggcaggagctaggctagatcatttcttatgttagcaaccacgttcaaaatgtctttatcattggcatcatcgagccttcggcgtcgaaaattacagcatacctcagtgaaccatttcaaactgtttacaggattttcagaagtggagctctttcaagctgggtttactgacactattctttccttttcttttatgtatctttct

SEQ ID NO: 271804 - DNA, 430 bp, Glycine max
  unsure (1)..(430): unsure at all n locations
agcttntacatgcatgttcacaccatatttactatacttcgatcaactgatgcaatctatttgattgaaaagatagtttatattactcttctaatgtagtcgacaactaaaaaaaatataacagaaagtaatgcttaagccattcaaatcaagtcattttgaatctcatcattactatcatgcatctcaaagagaatgagaatcaggcatcgtaatgcatagcacaacaaaacattaaaagaaaacatgtcttctaaagccaaccaaggtaaaaatgtatctatatttgtgaactttttcaaaattataacacatatataaaaacatggtggaacaatctgaccacatgcacaacacattccacacattatttctgaanatgagtggtaagggaatataataaggcattgttattaaaactgtacgtgca

SEQ ID NO: 271805 - DNA, 435 bp, Glycine max
agctttattcaagacaaagcaattaaagatattcatgatggatgatcaagacagtctatatagtcttagaaagggtatattaaatacgaagggaatttcaattgaagtagcaaaaggtttggccaacaaaattaagttaaaaagtcttttacaagaaatttactctctggtaatcggtggtaatcgattaccagtggccaaaactgatttacaacagctattaaaattcgaattcaaaatttgccctgtgtaatcgattacacatatatggtaatcgattaccaacagtttctgaacgttttaattcaaattttaaagcttgtaatcgattacacatatactgtaatcgattaccagagcagattttcagaaaatattctcaacagtcacatctttctatgtggttcttgaatggctatcaaaggcctatatata

SEQ ID NO: 271806 - DNA, 407 bp, Glycine max
agcttgaaggcaaactggatgcattggttaacatggtaacccagctggccttgaatcacaaatctgtacctgtcgcaagggtttgtggtttgagctcctctgctgaccaccatacagacctttgcccttccatgcagcaacctgtagcaattgagcagcctgaagcttatgctgcaaatatttacaatagacctcctcaacctcagcagcaaaatcaaccacagcagagcaattatgaccttctcagcaacagacacaaccctggatggaggaatcaccctaacctcagatgttccagccctcagcaacaacaacagcagactgctccttccttacaaaatgctgttggcccaagcagaccatacattccttcaccaatccaacaacagcaacaaccccagaaacaa

SEQ ID NO: 271807 - DNA, 436 bp, Glycine max
  unsure (1)..(436): unsure at all n locations
gttatcgtcatgtgaatttcctcagagcttctgttttcaatttcgagcgtctcgatatattacgggactcaatcaaacatccgaataaaaaagttattggcgtttgaatatgctcagagtntctgctttcaatctcaagtgtcttgatatattatgggactcaatcggacattcgaataaaaatctcttgtcatctgaatatgctcagagcttctattcttaatctcgattgtgtcgatatattacgagacccaatcgaacatccaaatgaaaagttatagtcgtttgaatttgctcagaagctttgttttcaatttcgagtagctcgatatattatacgtatcaatcggacatccaagtagaaaagtattatgcgttgaacttgcttagagcatatacttttcaatttcgagtgtcttagaatattaacggactc

SEQ ID NO: 271808 - DNA, 366 bp, Glycine max
agcttgcttctacaaactttagggtagattatcttacatttagctttagatttttaggattttaatgcttttttagaaatagtttaagattacgactttatatatgtttgtactgtattgattattttgggaacattgcatgtctgatatgccttttagaggcttgaaaagtgcaagaaaacgaactgtgttttctgcattttctggaaaacgcgatgaactctctaagcgagcattctgcgctaagcgagttcatcagtactcattgaatataggtgttctctgaagaactcactaagcacgcttaccatgctaagcgagttcatcttttaaggatgaacactcatccttttgccgagatgcctg

SEQ ID NO: 271809 - DNA, 431 bp, Glycine max
  unsure (1)..(431): unsure at all n locations
ttcaaccttgttcatgtnggtcgagaatgacaaataatcctacttatatgattactgaagaacgacagtgaacggtatgttttcgattacccagcttttctatctttctctgtggatggtcgtcatgatcagattttgtgggcttttgttgtgtgttgatcttgcgtggtttgcaatgttgtttttctgaatgagttgcgtttgaaaaaaatgtacataacttctttttgaattccctgatgtccattggtttcatgtgtttaatcnggntatatatgtcgatatacttatatgttcatatatatatatatcatcatctatcatcgtcatctatcatgatacacacaaggccctcacaattctatcgtggttcgagctctttgttcacaaacgtttgctgttggtcatcttgcatctgcatcaattactac

SEQ ID NO: 271810 - DNA, 400 bp, Glycine max
agctttaatcaacttataaagacacttattattggttacatagcaaagaggagaacacaaataaaatcaaactatacctttggatcaaaaagctattaaagcaaaaccctgccctatgggaaaaacctacaaagaaagaaaatgtttacaaatacgaaaaaaaaaatcagtttaatctctaataggtaccaatgtatagccaattgtgactactcactacacagaaaaagaatctattgcataattttggtacatccttaatggagccacttactatatgctggacaatatgaacacttatttaagaatgaatgacaatttgtaccgaacaatataatataaagatgacaattgaatcttcttgcttttattgtccagaggcccactcatgagtcattat

SEQ ID NO: 271811 - DNA, 432 bp, Glycine max
agcttatgctgcaaacatctacaacagacctcctcatcctcagctgcaaaatcagccacaacagaataattataacctctccagaaataggtacaattccgaatggaggaatcatcccaaccttagatggtcgaatccttcacaacaacagcagcaacaacaacaaccttattttcaaaatgatgctggcccaagcagaccatacgttcctccaccaatccaacagcaacaacaacaacagccccagaaacaacaaacagttgaggcccctccgcaacctctccttgaagaacttgtgaggcaaatgactatgcaaaacatgcagtttcaacaagagaccagagcctccattcagagcttaactaatcaaatgggacagttggctacacagttaaatcaacaatagtcccagaattctgatggattaccttc

SEQ ID NO: 271812 - DNA, 576 bp, Glycine max
  unsure (1)..(576): unsure at all n locations
naccttaattttnnnnnggggnnnnnnnnnnnngggacttaaactggacnatcatatgcannncnnccnncnnnngttnngnnacgagccgcaggtggctcatngatnccagattgcaccaaaaatggatagattatgtatggngatctgcagaagaacatagaccaattactcttgcaacaggtgcagattactgattcatggcaagttgagttactaggtttaccaaggcattaagttttccctcaagccttttatttccagtagatgaagatgaatccgtggccacctcatggactcctctgaagacaatagcatcagttcttacactgatttgtcggagttggaagtcatcttctcaatcaaatcctagcactagcangggtcatatcaccaagagcttcaccactggcagcatcaatcatactcctcttcatgttgctaagtccctcatagacattttaagaatgagttgctcataaatctgctgtgaggatagcttcacccatttcttgatcttcccattctatacaacttcttactagtttctgagcctaagtgctatttatggcaggn

SEQ ID NO: 271813 - DNA, 464 bp, Glycine max
  unsure (1)..(464): unsure at all n locations
agcttggctaactctatgggagatggggctatggttatgggtccagcaccgggtaccaagtcaatggaaaacttgatctctctctcaggtggtaaattggatatatcctcaggaaactctctgacaatagggaggtcacacatggaaaccttagtctctacttctaggttagacaagatcatgtacacttgagaatcttcttttaaagatgtcaacacttggttggtagagataaacatttcatccttactcattctagaatcatcaaacatgacagttttatcaaaacagtttaacaagacatggttggaagataaccagtccatacccaanataacatcaatttggctcacaggcaaagaaatcaaatcaattaagaatgttctaccaaaaatttcacacgacaactcacacatacattaaaaagaataagatgatntcatatctatcttaagcccctactt

SEQ ID NO: 271814 - DNA, 455 bp, Glycine max
  unsure (1)..(455): unsure at all n locations
tgccacccagctcgcccagatgagctatgttgcttcctccagagtgcaccacaatgatgcttgttatgcacaacaatgctctttttgacttccagaatgttgcgaaactttacggattgcgcaacaatgcttgttaaacatttcagaatgttacggaactttatggattgcacaacaattcttgttaaacattatgaagcggtcaagagaaggtcgtatgccaacaaataatgtccccttgacgaaattagggtatgacagtcgtccctctttacttatcttttattggagataaaagtgaagtaaagataagacactaatttcgttcgagtggaacatgattnggccgatcaatatccctacccgcggaacctgtcattcataaagaaaagcaaaggcatcatgagcgttagcaaaacttcagtgccttgaaagcgataaaatgggataatcac

SEQ ID NO: 271815 - DNA, 403 bp, Glycine max
  unsure (1)..(403): unsure at all n locations
acgtcaagtcctatgaagcacaatgacaaaagacattgaagtctatgagatgaagacattgtcatcttcgaaagcgtaaatgaaggcattgtcgcctttgaaagcatgaaatgattgaagacattgtcatcttaaaaatgtaaatgaaggtattgtcgccttttgaaagcatgaagtgactgaagacattgtcgtctttgaaatgtaaatgaaggcattgtcgccttttgaagacattctcatctttgaaatgtaaatgaaggcattgttgccttttgaagaaattttcgtcttcgaaatgtaaaatgaccataattgtctccgcatgccaacggactcgcttgtctctggaaggcanaggagactgcaatagtcttgaacacaacaataaaagaatggatga

SEQ ID NO: 271816 - DNA, 423 bp, Glycine max
  unsure (1)..(423): unsure at all n locations
atcagttatcaaaacccttcacgagaaaatctccccnttttagatttcttacaatgtcgcaagaatcagttccgtttgctgggaaatggcaccgttttacagtcatgcctgatggagaaaaggtggttccagaaccacatggtgacgccgaacacacagaaacctgggaatcggaggtgatgatccccttcgcagtagaaaggacagtttatgctttcggtggacctctgccagaccaagagtcactttcgagttcaatgaacaaggtatttccctgctacccaacttgcgaacccaagaattttgatagtgagccttacaactctaattgtttaagcaaacccaacaaactctttcgatccgccccgtcaatagcccatatggattacctacctcggcttgatagagtcgaacaagcatatg

SEQ ID NO: 271817 - DNA, 471 bp, Glycine max
agcttctcttggaccttaggcaaaccttcaactcatccttcaagatcaaactgtctacccgtgattggtccctttcctctctctggagcttaagctcgctgttactgccccacagagccccttggaatttgttccggccatgttcttccctacaggcccttttggtctcttgttccaaggccttggtggtagctatatttacgtctctcagttcggcattctcctttcggatcttaagagctactgatttgaacttttctttgactatttgggctttctcgagttctgccctaagggcttgcatctcttcgtcttcctccggcgcttcaacttgcatccctttagtggttctcaaactcgggagccaatccagaccttgcatgtgggctttcaaccacctacggtagccgctgataggcctgttgttactggctctgagttccttgtccttcttttgcaccatctcccatg

SEQ ID NO: 271818 - DNA, 434 bp, Glycine max
tcgcgggaaggaagagcggtggtcaaagctcgcgttggagacaagatagtgaaggaagcccgccctgccacataagtagaagctgtataagcgcgggtctgggagacacaggtcaagtggtcgcgatatgcgaagatgatgttccgagtacattggatttgatacgaccatgccctcctgatttccagctgggaaattggcgagtggaggaacgccccggcatttacgcaacgagcataatgtaaacctttatggttttaaaagctctatagttgggcctaggctttagagttattccttttgttaaggctttgtgtcttttgtttttgaatttataatacaaggatctttcttcatctgttcctacgtctctacccattctcattcatttgcatgtctacttctttttctgaaacggcagatccgatgacgag

SEQ ID NO: 271819 - DNA, 379 bp, Glycine max
  unsure (1)..(379): unsure at all n locations
agcttgagatgaggaagtgttgaagggtgaaactttctgctnttattgttgaccacagagtggtacctggagatatgtcgcgggggtcaggagaccttggggacgtcaggtggggtgctattgcccaaaaccaagcttgaccaatcccgacccaacccgggcatagtcggtcagtgagaacctgtgatgtacctaagcaggcgagctcctggcagtcaacagataaaaggaaaacaagaccacaaagcaaggaggcttgtggtggctggccagctgtgaattntgtgtaatatgtggattgtggcctctggtaatcgattaccaagggtgggtaatcgattacaaggcttaaaaatgaagacaggaggctaagatggtc

SEQ ID NO: 271820 - DNA, 387 bp, Glycine max
tccttaagaagattcctaaagaagctagagcttagctacacatacctctctaatagctaagctcacctccttgagatgagaagctagagcttagctacacaccccctataatagctaagctcacccccatgacaaaaaacatgaaaataataaaaaaaaagtccttattacaaagacaactcaaaatgccccgaaatacaaggctaaaaccctatactactagaatggccaaaatacaaggcctagacgaaggaaaaacctattctaatatttacaaagataagcgggctcatacttagcccatgggctcgaaatctaccctaaggctcatgagaaccctagggcctttccttggatctctagcccaatctacttggagtcttctag

SEQ ID NO: 271821 - DNA, 348 bp, Glycine max
  unsure (1)..(348): unsure at all n locations
gctatncaaatactcaaatggtcataactnatcatatctgttgtccgattgtggcgcggagtatatcgagacgctcgaaaccacacaccgaatactctcgagaaattcaaatggtcttaacttttcaaatagaagtccgattcacacgcataatatatcgagaagcttgaaattgaacaacggaagctctccagaaactcaaatggtcataaattgtcacaccgaagtactattcaagcgcataatacatcgagacgctggaaattgaacaacgaatgctctcgagaaatgcaaatgatcataacttttcatacagaagtgcgattctggcgcataatatatcgagaa

SEQ ID NO: 271822 - DNA, 404 bp, Glycine max
  unsure (1)..(404): unsure at all n locations
atggacctctcaagtgcttganagaatcaatgacaatgcttactaagatgagctgcccggtgagtatcatgttagttccaccttccatgtctctgatttatctctttatgatacagatggagaatccgatttgaggacaaatacttctcaagatggagagaatgatgaggacatgaccaacagcaatggcgaggatccacttgaaggacttggaggacctatgacaagggctagagcaaggaaagccaaggaagctcttcaacaagtgctgtccatactatttgaatacaagcccaagtttcaaggagaaaagtccaaggttgtgagttgtatcatggcccacatggaggactaaatgacaccactttatttcaatgttagagtgtntagtttgtctaaataat

SEQ ID NO: 271823 - DNA, 149 bp, Glycine max
aaatgatggcggcgctcagcgcatcctctctcactagacccagcttgaaggctcaacttatataatgaatctggtgcttaccgcatgatggcgcgcttagtgcatgtataattaatcttctcagagaggaagtggagcttatcgcatcc

SEQ ID NO: 271824 - DNA, 302 bp, Glycine max
  unsure (1)..(302): unsure at all n locations
tgatcaaaacaattctctaatcattccaatccactcaaatcatactatcgatcattcaaatcattctcaacactcatctcatgaaanacaatccactgcatatcaaattcaatcaattcactgttcaaacacgccttttgtacaagcactctattgattgcacaacaattatagtactgattttaaagagctgaacatagaaatgtatcttaatgactgaactaaatcataaatagctcaaaataactacatgttaaaatgccaaattaaatgtctgctctgtggtgccctgtcatgctcat

SEQ ID NO: 271825 - DNA, 416 bp, Glycine max
agctttctcggggccattcctgcgaaggcaaacgtttggaaagttagttctaccaagaaacgctacccttaagacaaaaaatggcatacacaccccttcaataaatacaaacatcaatgtaaatttagagcaagcttatgcgcatacttctttacgaacgttcacttgcacaagacattctattaactaagaaaaatgcacccatatacaatcaaggcaccttcgctacctagagtatttacatgtacttccaaggtgtatttgttacctacatcacacgcatttcctttgctaaatttacatacatgcatactcaaagcactctggctatcacaaattgcatacgtgcacattctggtatttctaatacctatacatacacacacttcatgatgaatcttgactatctacacaat

SEQ ID NO: 271826 - DNA, 381 bp, Glycine max
  unsure (1)..(381): unsure at all n locations
atagcctaggtagcttccttaagaaacttccttgagaagcttccttgcgaagcttgtttgagaagcttccttgagaagctagaccttagctacaaacacccctctaagaactaagctcacctccttgagaagcttccttgagaagctttcttgagaatattcctggagaagctagagcttagctacacacacccttctaatagctaagctcacctncttgagatgagaaactagaaatcaactacacacacccctataatagctaagctcacccttatgccaaaaatacatgacaatacaaaaaagtccctactacaaagactactcanaatgccctgaaatacaaggctaaacccctatacaacaagaatgggcaaaata

SEQ ID NO: 271827 - DNA, 521 bp, Glycine max
  unsure (1)..(521): unsure at all n locations
cgcccgacgacgggattgagatccatttcngaacttgagatactatctaggaacctggatgcattcnagtctagctgcgagcatgcaagctaggatgaaaccttacgtcataaaatgtatgtctgtgagtgggagatcaagatacctcggatatgcatggatacccagaggacatcctgacgagagctatatgtatatatacatacttgtctatatatgactctatctctatatatatgtatatatgagaacctgtgatgtacctaatcgggcgagctgctgcgaggcatcagattatacgaacacaataccacacaaacaagacgcttgatgtggctgtccagctgtgaattacgtctcatatgaggactgtggactcttgtaattgactaccaagctcggctattccctctatgttcacaaagaccacggacgctatattgtcttggaagtcctcaaaccctcggcgcctgtgttagcacatccacaacaatatcattgtctctatccacattccaggc

SEQ ID NO: 271828 - DNA, 181 bp, Glycine max
tctatccaaatggacttaccttgaattaattcctttgattgcccctttgagcctatgttcccctttctttgttttgaagctcattacaagccttaagtgagaaaccatgatatcaccttacccttaaggaattttggagctttggaattgttttggtaataagtgtgtgtggggggggggg

SEQ ID NO: 271829 - DNA, 330 bp, Glycine max
  unsure (1)..(330): unsure at all n locations
agctngtctttctcacggtctactataagaggcccatgaaattcagaaacctaatgactgccctcacgtactgtgtcgaccggggtgagaactgcttgacaagaaacttatggaagagaacatcgagcgtggacatgatgaacattcgcgtgctgggagcccaccacttaatttgtacccaccatagccagctgcatgacactcgaagtggaagatggcccgtactcancccgcctgggcaagctgacgtatgaagtggcacaagaaattgctgacaaaattgtcagttcatatatttgtttggttattgccattggcacataatggtta

SEQ ID NO: 271830 - DNA, 424 bp, Glycine max
  unsure (1)..(424): unsure at all n locations
tgagatgaggaagtgttgaagggtgaaacttcctgcttttattgttgaccacagagtggtacctggagatatgtcgcggnggtcaggagaccttgtggacgtcaggtggggtgctattgcccaaaaccaagcttgaccaatcccgacccaacccgggcatagtcggtcagcgagaacctgtaatgtacctaagcaggcgagctcctggcagtcaacagataaaaggaaaacaagaccacaaagcaaggaggcttgtggtggctggccagctgtgaattttgtataatatgtggattgtggcctctggtaatcgattactaagggtgggtaatcgattacaaggctaaaaattgaagacaggaggctaagatggtctctggtaatcgattaccacggngtgtaatcgattaccaggcttgaaaac

SEQ ID NO: 271831 - DNA, 358 bp, Glycine max
  unsure (1)..(358): unsure at all n locations
cattttcatagttgatacactggtaatgngtctactatcatgggtattcatctctttctccatcatcgccggcgccacttgagctgtcaggtctctccatcttttgggcatattctttgaaagattcgtgcccctttntgcacatgttctgtagttgcatcctatccagagccatatcagaattgtactgatactgtctaacgaaggcaaccattatgtccttccaagaatggactcgggaaggttccaagttagtgtactaagtaacaactacccccagtaagactttcttggaagaaatgtatcagcagctcctcatcttttgcgtatgcctccatcttctgacaatacatcttta

SEQ ID NO: 271832 - DNA, 337 bp, Glycine max
  unsure (1)..(337): unsure at all n locations
ntgccacanacacacttctgggtctgtttcttcctcgttntttatcacaagattgccactgtccaaaagcactactacaggattctgtgcttgtttgtgagagttgttggtgtaccagacaagatacgcattttgggtgagaacaagattgcctgtgttgttgagtgttatgatacccgaggaatcattgatggggttggccttattagcaacccaaacaactgtctggattgggatgttcttgtaccaaatacccacataacgtttatgggaataacctggtgatgtgccatcattttcttctattttctaaaccctttttgcaccattntaatta

SEQ ID NO: 271833 - DNA, 372 bp, Glycine max
  unsure (1)..(372): unsure at all n locations
agcttacattggtgtattganatctaacgctgatgaacgacatctattaatcaaatatgctgatgagttgcagcttctcacaaacagtctttggcagtcctgcacttagaagcatgcacctcactctttacacaatggttctattcatactttctgccaaaccatactgctgtggagtgtgacggactgtgttgcgccttttgatgcctattttactgcgacactcattgaactgctctgacacacactctatgccattgccaggtcttacaacttgaaatgctgataccaatgacagatgtcccaccggatgtcacgacatcacgcttgagaacatgcagatgatgtntgatccgatgaacagattaaaca

SEQ ID NO: 271834 - DNA, 269 bp, Glycine max
  unsure (1)..(269): unsure at all n locations
acacatgactngagaatcatcataagttgcatcaatgcttggacaaaattgacctggtgttcttatttctttccgattcttaacgtagtccaagtcataggaactcaaaggatacatttgtcctagtcgagaagaaccaacaaccaatagtcaaagagagattgacaaaagtagtaaaccacttttctttacaagacttgctatagaatcaatctcccgaaagctttcatgattcaaaattcatattcacaaggaagccaccatgatta

SEQ ID NO: 271835 - DNA, 354 bp, Glycine max
  unsure (1)..(354): unsure at all n locations
agctntacaactactataacctaacagttcacatcgaagcaacactagaatgctctaatgttacaagcctacaacagagataatataaattaattaatcgtttctttaattaattagccagtgaaagactatctataaccgcgtgaatggaataaatttattaattaatgaacaaaacattatccattattcttccccgtgtgatttcaaaaccatctcctcaaccgttggattccttgagactgtaatggcgataatacccttcgaagctctatataagcaaccacaccattgtccctaccatcacaaccacaaaccaagatcttaaaatatctctttcatacaagtttgttt

SEQ ID NO: 271836 - DNA, 425 bp, Glycine max
  unsure (1)..(425): unsure at all n locations
tgtacatacgcgcaatgaggctaaaatgacttntttaacagatcatacaaaagattatcataccttgaatggtttgaggagacccatacaaatttgcacccttcgtctttgtccatcagatactttatgcaatctccaggaaagatcgatatctaatacctatccagttgaacagcaagatagaaatttagcaacagtatttccagaggcaactatatatgcgttcccacaaaaacctttccagagatagccacacataaacagaacatcaacatcaagagtacataatggctttattcttggtcaaatctgaaacttcaaagctcagtctttatgccatatggcatctaatatcaaattcatggatagatgctggtaacatatttaatgcattcacttcaatgagttagtttccttatatttta

SEQ ID NO: 271837 - DNA, 385 bp, Glycine max
agcttcctcggggccatttcctgcgaaggcaaacatttggagagttagttctaccaagaaatgctattcttaaaacgaagatggcatacgacctcccccaataacacaaacatcaatgtaaatttagagcgaactcatgcgcatacttcctttcgaacattcactcgcaccagatattcttctaactaagaaaaatgcacccaggcacaatcaaggcaccttcgttacctagatcacttatatgtacttccaaggtgtatttgctacctacatcacatgcactctctttgctaaatttacatacatgcatactcaaagcatcttggctaccaaaaattgcatacgtgcacattctggtatttctaatacctatacatatacaaac

SEQ ID NO: 271838 - DNA, 452 bp, Glycine max
  unsure (1)..(452): unsure at all n locations
ctgatcaaatgactaaaattaattggcaaaaaagatatttagcagatagccaaaccaacttcactattcctagttagaaattccaatattctatattacctgctcattagctgtaggaggaaggcctccaacatacacccgcctagcatgtcatgtagcctgtaaattcagtacatcaaagataggccataatcaaggaaagtcatgctaaacttaaaatgaaacttaaataagactgtagtcagtctcagcaagcctccatactcggaaagactaaacttaaaatgttgtgttgacgaagttagtgagtgtctactctttttctataatgactctttttcttctcaatgaaagagaatattttctcccagcagcacagtgatactaaacaaacaaaagcgcaatanaaagaaacacatgntaaaagaagacagaacacacctttcacctac

SEQ ID NO: 271839 - DNA, 481 bp, Glycine max
gcttgtgtcgcagcaataattcctactacatatccaataaaatgaatagatttcgggtgcatcttccaaggaggaaggcgcgtggagtcgccaccaacgtttattcgaggaaaacatcagaaaaaccagaacgtgtggtctacgaactttaagtgtgaaaggttcgggagttgtttttacgcacgggaaaggtattagcaccccacgtgttagtcacaagggacgacaacctttaatcaagtgtgcaaatatgacttcaaaactatgtattttcccttttttatgttgttatgtattttcccttttttatgtttttataagctatttatgggtcttttgtatctcttatcattttgagcgcgacaaggggtgtttccttgctcctaactatcctcaattgtgatgaggaaatcatacctacgtaattctttgagaactaaacattggttaagtcgttttatcttctttccaagatagattt

SEQ ID NO: 271840 - DNA, 462 bp, Glycine max
  unsure (1)..(462): unsure at all n locations
cttatagaacatatcataaaagaactatgactattgaagaatctattcatgtttcctttgatgagtctaatgctatttctccaagaaaggatattttagatgatgttgcagaatctttagaacaaatgcatattcatggacaagattctaaaggaaaagggaaaggaagcaatgaagattctccagaagaagccaaatcaaatgatgaactntcaaaataatggaaagcttcaaaagatcaccctctagacaacattattggtgatatctgagaaggggtaacaactagacattctcttaaagatttatgcaataatatggctnttgtgtctatcggtgaacctaanaatataaatgaagccataatagatgatcattggatagttgctatgcaagaagaactaaatcagtttgaaagaaacaatgtgtgggaactagtagagaaactttgaaactacccca

SEQ ID NO: 271841 - DNA, 192 bp, Glycine max
tggccatctgagattatcttccataagtccatgcccaagggctaattcttgttcttcttgcgttcgagctcacgaccgtgaaggactttcagatgctgtctctcttgtgcacactatagtagactatactggagaacaaaccatatgatatggaggatttgaagcatgtaccatgtctaacatgttacattt

SEQ ID NO: 271842 - DNA, 442 bp, Glycine max
  unsure (1)..(442): unsure at all n locations
tcanaacacagcaacacataatctaggtgtccaacacccctccattcaatgggttntctaggtttgaaaagtgaaattgagaatgaggtaaatttgaagcaaactctcacctcacacaagtctataacatcaatctaaacttgctcaaactggatttacacctaaaatctcaccgaatcaaaatttgactcttcaacacccaattgtgccctagaaatggctctttggtcactntgatcattcgttcttctctctagcacagtccaagctttctcccaagtcctaaatgacatttcaagctagtattaactcactttaacctccatttaccacagaattcagacttaaccttccaactctcagagcctcactctttttccactcataacatcacattctcactntctaaccctangttaattctacccttcatctctaacag

SEQ ID NO: 271843 - DNA, 451 bp, Glycine max
  unsure (1)..(451): unsure at all n locations
agcttctaatttctatttccaaaacanaatcaaattattaaaatctcgaccattaatgagttgaccattatttgaccaaagaattttctctgaattattcttattctttctaggctttaggttaaaaacttcaaagtttaaccatgcttaggtatcctatgggtaacatctcattttctaccactccaatagtctaaaaacactactcaatcacacaaaaaagcaataacactatctaccacacacatggaaaattgggatgttacactcaacatctaattatctaggactaccttgagatcaaagtaccgctccactcttttgacctatctgaaagaatctttcccaccgaacaatggtatcttgagctctctctgatgattttctcttgggtttgaaacttacggtgttcttcctcttcagtcctggatttaggtctttcatttactga

SEQ ID NO: 271844 - DNA, 443 bp, Glycine max
  unsure (1)..(443): unsure at all n locations
tgtcaagccaaatgttatatccataaaaattaccaagttgtatgcaaattctttcatttggaaggtaacttactttacaccatgtatgttttaagttcagtttttatgtcttgctacttattttgtattaaaattttccttttttgtattattttattagagttgatatagaaattttgttattaacattttctattattttattaaattttttcttttctattattttattagaatttttaagtttttttaaaaaaacacactctaagatggtttttttgaaaaaccgtcttagaaaatgtacatcctaagatgattatttgaaaaattatcttagaattctcaatttttttaaaaaagaaacgaggattctaagtcgattnttcaaagaaccgtcttagaaaataaactntctaagacgattntttgaanaccatattaga

SEQ ID NO: 271845 - DNA, 465 bp, Glycine max
gcttttatgagaggatatgactcttcacaattgattgtgaatttcaacgttcagatacactggtaatcgattaccaatatcttgaaattgattacaccattttgaaatcaattggaacgttgcaatttcagttgaaaacttttgaaatcaaactttgccactggtaatcgattacaggaaactggtaactgattaccagagagtaaaaactctggtaacttataaaattttgagaaaaactcttttaaaaaacaaaattgtgctatgtttgtttttcttgaaaaatcttttcaatacttcccttgtgaagtcttcttgatttcttctcttgaatcttgaattcatcttctcttgaatcttggaatcaaacttctcttgatttttgaatcttcttgatttcttctcatgaaacttgaaagtaaacttgatcttgaatttgttgactgaatctcgaaatcattcttt

SEQ ID NO: 271846 - DNA, 463 bp, Glycine max
  unsure (1)..(463): unsure at all n locations
tatacatgcattctcatatccatgctcttattcaattacacataaaatgagatgcaatcatatgttcttttatgttatttccccctaacttctgcaaccacatatatgatggcagcagaaagaaaggataaaagctggtaatgcagctaacctaatttccaaacgaataaaacctgtgaagaagcaaccatactccaacttcagctatggtctgagtttcagttattccaccaacggtttggctcattattataatatgaaaattaatagagacaaaatataaaatataagggacaaaacagtgacaaaaacaccaaatgatattcatagttntattacttatagacanctcattggtacttcatatgtgtaataaaagaaataatgttgattntccttaattattctaacattaagagtaagttntaatgaaagagtaatattagattaacttttttaattc

SEQ ID NO: 271847 - DNA, 417 bp, Glycine max
agctcgcgcctactttgttactgagcaacatgccatggctattcactcacaagtaattaaaagagggtttcaggaagatactgttctttgtaatgccttgatgcatgcttatgcgaggtgtggctccttagctttgtcggaacaagtattcaatgaaatgggctgccatgatatggtttcttggaattcaatgctcaagtcttatgccatacatggtcaagctaaagatgcactggagctcttccacaaatgaatgtctgtcctgattctgcaacctttgtcgcgcttctctcagcttgcagtcatgttggacttgttgacgaacgagtgaaattgtttaactctatgtctgatgatcatggtgtctgttctcaactagatcactacttctgcatggttgacctttatggacgagct

SEQ ID NO: 271848 - DNA, 431 bp, Glycine max
catcagttgttggatgaaatgatttctagaggagttaaaccagactcttggagttataatgcaatacaagcttaccattgtgatcattgtgaggtcaataaagccctgaggttaatgtttagaatggaaaaagatatctgtcttcctgatcgccatacatataacatggtgctcaaattgctgattaggataggaaggtttgataaggtaactgaagtttgggagaacatggtggacaaaaagttttatccttctgtctcaacatattctgtcatgatccatggtttttgtaagaagaagggaaagctagaggaggcatgtaagtattttgaaatgatgattgatgaacgaataccaccatatgttactactgttgagatgctgaggaatcggcttttgggtttacggtttatagatcacattgaaatact

SEQ ID NO: 271849 - DNA, 404 bp, Glycine max
  unsure (1)..(404): unsure at all n locations
agctntgaggctggaaattgactgtagccctgcatgtgttcttagccgactgttgaatctttgtggcatattaaaataaaacccaacattttttctggaaaaataaacctttaagtttaaaattcatttttagtgcaatcctacaagctttaggcaaataaaaagataactgaacaaaaaaaaaggaagataatcgtcatactcagacatcaatgatgattctaagttagcctcgatcttacgttttcctttagaagatgcccaaaatcattgcaatgtccttatcataattatttttaaaacatggcaaacgattgacttgtactgatccactgatatgaacaagacataacaatatatggatagtgtaaacaggctcttgtaataatagaagatattgcgat

SEQ ID NO: 271850 - DNA, 373 bp, Glycine max
  unsure (1)..(373): unsure at all n locations
cccagactcatgcactccatgtcccagttagagaagaactcacttgctcgaactctatgccacaccttgaaatctggcctcgaacaatgcaccagctccactacttcttctacttctccttccctcttcaatcctcanacccttcaacatgactccgttattcagcacttcttggtctcggtctccgaagcaagatcaagtgtaaggcttttgtctcgcttcttaaccatgcaactgaggcacatgggaaacaaggtgtacgagaaagtctccttccttctccaaccctacgacgtgaaaatatctttctcagagagcccaacaagaagcttggttttgtacctagaagccctcttgaacagaaccttcttcg

SEQ ID NO: 271851 - DNA, 341 bp, Glycine max
agcttaccaatcatcatatatggacacactgtgcatataatcaatattcgagaatctcacgccagaagcctatcttttattacacttagaacagcacaacgtgtacacagagaaaatactagaaaagtcctagcctaatgaacacgcataataatacgtctactatctagatcgcacctcttcttatagttatcattaaaggtatttacatcgcctcgcatgtgagtcttaccgtcagaagcacatatacacattattccattaatgcgtcacatggtactctatatgactacggatctattactctatggctgcaaggactgctgacccttgcacctgat

SEQ ID NO: 271852 - DNA, 434 bp, Glycine max
  unsure (1)..(434): unsure at all n locations
tataagaaccaaaatgccttaatcatttccaaatatgcatgtgaattatgacgcatcaacaagaatcaagccaaggctattgtgcaagcaatcaatggggcaaaacacaccanatgattataatgatggatggctcaaattctcacaaaggtaaaatcatcactttcaaattgagctctcaaaactatcatgacatgtagagaagaatcaaggatttcaagtcacaaaatgtcaagaacttttattttcaaaacaattacccatttcttgaacatatcctataattcaaagaagaacatgcaaagtcgtacgtgcacacaaaattgacccaaaatattaaactgaaaatctgacgacactaacaacattaacaaattaacacaactagcaaaactaacaaaaccaacataactaacaaaaccaacgctgcggac

SEQ ID NO: 271853 - DNA, 383 bp, Glycine max
  unsure (1)..(383): unsure at all n locations
tgagaagtgaaaatgagaacggggtcaatttggagccaactcttacctcacacaagtctataaccttaatctaaacttgctcaaactggatttacgcctaatattccaccgaatcaagatttgactccctaacacccaattttaccatataaatgtctcttgccttcactatgggcactcatattcctcatttgcacagtctaagctttctcataagtcctaggtgacatttcacactatgattaactccctttaacctccaattaccactaaatcaagattgtggctttcaactctcaaagcctcactctgtttcactcagaacaccacattctcactttctaaccctagggtactttacccttctctgtagcagtntccat

SEQ ID NO: 271854 - DNA, 424 bp, Glycine max
  unsure (1)..(424): unsure at all n locations
tggacggtaatcattgcanaaggtttagcctagagttttccaatttggagactaaattaaaatgcaagatggttccgagtaaattcagaattctactcccttaaataaaaactcgttttttggacaaaaaactttgtcaaattgaaaggttgagaaaatcattatggtttgttttgttcggtttggtcccttgtctatgaattagtaattgttttaaaacattctctaatttagtaagggctacctagttacatagggttcgggtcatcagaaatattattttggtcatagaaatattaaataaattttctttatttaattggttaaatgtttcttattcaattggctaaggacatttatcataaatgtcaatattcttccttcaattggaaagggtataatattattaatatagaaatttata

SEQ ID NO: 271855 - DNA, 408 bp, Glycine max
  unsure (1)..(408): unsure at all n locations
agcttgcaaaggatgctgtgtaggttaggagaatcttaatccatggagcaatgcacaactatgattggccactttgatttgaatggagatggcctgctttgctttgatgaatttagagtaatgacgcagtgatgattntttatttctttatatgggaattgggggttggattaatatttcactcatttgttgcatatatttttagttttttcattgctaggcttttgtaagactcaatgtgagactgatcgatttgatgagctctataagcttcatatattatatggcacgacattctttgctacattntatttggaatcctaatctatctttgtataaacatcttattaactctcttatttcttcttatcacatcatataattaattatatataccaattatctctt

SEQ ID NO: 271856 - DNA, 333 bp, Glycine max
cggaagattccgctccgattgaacggttcctctctgtgtgaggtttcaacggagaacaacggcggtccgtggcggccaccggtggttgtgggtggtggagaataagcttgggacattgtggaagggttttggaagaaagaaggagaaaagaatgcgtgttttccaaggctacacgaaaaataatgttagacaagtggcctcagatatcttaagaagggggggttgaattaagatattccaaactatttcccctaattaaaaatctatatcactttttactcaagttatgaattcccttaatgacaatcttcttatatattaattcaaatgaag

SEQ ID NO: 271857 - DNA, 438 bp, Glycine max
  unsure (1)..(438): unsure at all n locations
agcttatccttgacaccggatgctgtcaccactggctcatctagtgaaaacacgtctctctgcaatgagaaagattcagagatgtgtaaatgcttcggaacaaatatcgccaactacattgttacatgagttaagataaaaaaatagataaaattaaacaggtatatacttatttaccctttaaacccatggatcttttacatttgaaaagtatctctcctccagtattcagttattgaaaatgaaaaaaacatacaagataggaatgtgcaacanacctgcaaaccaccttcagaaaagatgcgaagatagttaaaactagttaccgctgcaacccaagcagaaccaagtgcaacaaccttcacttcttctccttacagcgcatagaccactggcaaanatttaaacagtgagaatatggtangatntcacatcatg

SEQ ID NO: 271858 - DNA, 354 bp, Glycine max
  unsure (1)..(354): unsure at all n locations
agcttcatgatgatgaatcaagattgattcaagttgttntgatgatgaaaacaaagatgatgacgaaaagcccaagagaatgagttcaagattgagtcaagaacacttcaagaatcaagagaaatttgatttcaagtttgaagaatcaagaatcaagaataatcaagttgaagattcaagaatcaagaaaagactcaataaagataactactaaaaagtttttcaaaacattgagtagcacatgattttttcacaaaatcttttaccaaagactttttactctctggtaatcgattaccactttattgtcatcgattaccagtcgcatagattgttttcaaaaagctttcaact

SEQ ID NO: 271859 - DNA, 306 bp, Glycine max
cgatcaaaataattatctaatcattccaatccattcaaatcatacaattgctcattcaaatcattctcaaacactcatttcatgcaaaacaatccactgcatatcattttcaattaattcactgttcaaacaagctttatagtacaagcaaacaacttaaagtgctaaaaattaaagaactgaaatataaaaattgaaattaaaatgaccgaacaacaatcataaaataattgaaaataaactaaaatgttcaagatgcacaaatttaaatgtcccgctcttgtggttgctcttgtgcatgctcat

SEQ ID NO: 271860 - DNA, 394 bp, Glycine max
  unsure (1)..(394): unsure at all n locations
gtcacctgcggcatgcaagctttctccactaagtttcctgatgcctgaaatgtcttttctgatggcagtggtcctatatgcagggaagaatttctccaagaacactctcttaaggtcatcccagctgaaaatagatctgggagcaaggtagtatagccaatcttttgccactccttccagagaatgaggaaaagcctttagaaagatatgatcttcttggacatcagagggctctatggtggaacaaacaatatggaactccttaagatgtttatgaggatcttcacctgcaagaccatgaaacttgggtagcaaatgtattactccagtcttgagaacatatggataaataggacaaaataagacaataatacttaaaaaacaaaaaanactt

SEQ ID NO: 271861 - DNA, 450 bp, Glycine max
  unsure (1)..(450): unsure at all n locations
ctgcttctacaacttcttggtgtgtatccttgtatctattacctccttagttataaataaattgtgtcattacatcctanggtagacgacatgtgatgtacttgttgtatctgcctgagaattttctagttgttttgcaggtggggttggataattcttaggttgtttcgttcacacgtgacacctacacttttggcacacacgttgagatattgggctctatatgcgggtctgtgcgagccatagggagtggaggtcgatctgtggtcatgttaggtctccgactcgcttgatgacagtgaagcctcatctagagtttttctcttttggtgaggcattgccgctggtagtccctatcgctgcaatgttgttacctaagaggatgatatctctagaggccggtgaggttacataaaactacccttggaagttgtcacttggatagtggac

SEQ ID NO: 271862 - DNA, 452 bp, Glycine max
  unsure (1)..(452): unsure at all n locations
agctgggttcgaggtacttacccgttgaagatcgaataacgatgaagaacgaatgaagaacgtcgaagaacggctgaaacctttgcgagattcctcacggaaaacgttacggaaacgtttcggaagcgcctcggcttagattttcttcacggaaacaattttccaagcaaatttgaaagagagagaagtgcctaaagggctgggatccttttcttcttcattttctcncctatttatagcaaaataggggagatgcttgccgcccagctcgcccaggcgagctcagctcgcccaggcgagcagggttgctttctccagaagcaaccgccttctggaggaatcttctggagggcccacatgggcctgggtgctatttgcacccnncattttactaagttncacccctctgctggtttttggtgattcttttttcgtacaggtacggaaactta

SEQ ID NO: 271863 - DNA, 438 bp, Glycine max
  unsure (1)..(438): unsure at all n locations
ctccgtaagacttacggaaagatcttagagttgaccatagcagaagtgtccatagaaacaattgcatcactcacccaatactacgaccagcctttgaggtgcttcacattcggagatttccaattagtaccaaccattgaagaatttgaggaaattctaggatgtcctctcgggggaagaaaaccatatctttccttcgggtgtctcccctctttgagcagaattgcaactgtggtcaaggattcagcaagaggtttggaccgcataaaacagactcggaacggcatagcgggcctaccacaggggtacctagaagacaaggcgaggggtatggccaatcaaggagattgggtcccgtttatggatgtgttagctntgctaatttttggggtcgtcctctttccaaacgtggatggtttggtggacctagcagcaatc

SEQ ID NO: 271864 - DNA, 337 bp, Glycine max
  unsure (1)..(337): unsure at all n locations
cataatatcttgctgcatcaacggggaaggacatgcagcaatggttcttggcatgccaagaacagcaatcactctcaacaaaataatatatttgtgctggcaatcacacggagattggatacattgtcntgcacatctcacactaatacaattgacaatttcattgcccatagctggacacttaaacgtcaccacatgatgttaacagctgtgcatgcacaatagtacactaatttgcttaaaatgtggtatatattgaatcaaataaacaattatctcagcatactagccttatacagtctgcaggatgttcaagttacccatttataaaattgca

SEQ ID NO: 271865 - DNA, 378 bp, Glycine max
agattgagattgagccaaaccacaaataagagcgtgttttgtcgacgttttggtgtctgttatcagagcagcattgctttctttcttcctctgctgtatcagatgctcattctcatgctcgttattctaaatgattatgacgattatttatgcctcaacttctgactatgattgcagaaaactacatgactggataccgcgttgctctgaccgaaaaaagctcgcgtagtgatggaagaaatctgattggcagtggatgctatcttctcatggatactgtgctcttgcatttatggcattatatacgagccgacatcactgacttaaacaggttaccacattgacgatcataacgatgccttttcaacaagaccacac

SEQ ID NO: 271866 - DNA, 406 bp, Glycine max
agcttagcagggttgcgcttagtggctcatgaatttcaaatttttttactaagtatgtgggcttagcgagctaagctcgcttagcccaatggttgctgcaatgaaatgagcttatcccatataggctcggcttagcgcacgactttcaacaaaaaaaatgactaagttacctgagcttagcgaatcagccccgcttagccacaggtatctcctcaagaagatgaatgttcttccccaaaagatgaactcgcttaccacggtaagcgtgcttagtgagttcgtctgaaaatgcatatattcatgcaatatcgatgaagtcgcttagcacagaatgcgcgcttatttgagtaatattctattctggaataaatattaaagatatatttattagattatatctattagt

SEQ ID NO: 271867 - DNA, 447 bp, Glycine max
tccacaacatccaagtgattcaacatccaatcatcacaaactataataccaagcaaaacagggcaaaggcagaaaactctgcccaaaccaaaatcacagcttttcacactcaattaccccagtaatattctcttcgttccaattcgttaaccgttggatcgactcgaaaattttactggaagtctctagtacataagtctacattttgaccgttgggatctactagcaaatgtccagaaccccaagtgtactacactttccacagccagccatacacaagcatttttctgcacttttacaaaattctgctgcacatttcaacagcaaaattctgcataaagtgcagatttcgaaaaccactcttgccttcatccaattttgcccaaattgaatcctacaagtcctaaatcatgtctaaaccaagggcaagcttcagaccaaagcaac

SEQ ID NO: 271868 - DNA, 438 bp, Glycine max
  unsure (1)..(438): unsure at all n locations
tctaactacaaaattntcatttttaagtaattaagctatgcatttcacgagtgtaagaagatatatatatgaaaggttttggttggtttaattgtcaaagcataaaaaacgcacaggcacgcatctttgatccctcttcatgcttattttaatttatacatgtgaaccatcatcatccaaagtgacgatgaatttatgtaggcgcgggtatcaaatatacacacaattgaatattgctaataagctagatgttatcttatttggttcactaatctactccttgtagaaaataaaaattatagttaaaaacaccaattgggcgtgaggatatcctgactgctgtcattgtgcgaccagagcaccctanccgtgtttgtgcatgtggagccggtgtcaccataaagcaatactttggatcgacttcacgaacgttccaca

SEQ ID NO: 271869 - DNA, 409 bp, Glycine max
ttgctcgaccctcaaatgtgttttccttggatattctagattacttagaggttaccgatgttactctcctattcacaatcgttattatatctctacagatgttacattttttttttgaagaaaatccatactttgctccttccatggttgagtccaatattcttcaagaagtttttcctattccctatcttggtccatcaccttcttttcaggaatcagagtcaactgtagattctaccatagatattcctgacaatccttcacttgagcagactcaaagatcacccatcgtatatcgacgtcatcctcgaattcctgacgcagaacttgaaggtaatgaaagaccagctgaatcatgtcttactccagcagacaactcgaccatggacctacctgaagagaatcttga

SEQ ID NO: 271870 - DNA, 404 bp, Glycine max
agcttctcctccaattgtctataaataggtggagatgtgcaatgaacaagggttcatccccttaggcacttctctctctttcgaatttgcttggaaaaattgtctccgagaagaaaatccaagccgaggcgcttgcgaaacgtttccgtaacggttgcgtgaggaatttcgcgaaggtttcgaccggtcttcgacgttcttcattcggtcttcatcgctcttcgatcttcaacgggtaagtacctcgaaccaagcttttcgattcattctatgtacctgtggtaggccacattgcgtttcgagtatccttattctcgtttcatttactttctatacgcccttttgacgtgcttaagccattatatataagtcatttctcgcttaaactaaaaataaaataaatt

SEQ ID NO: 271871 - DNA, 439 bp, Glycine max
  unsure (1)..(439): unsure at all n locations
agctctgtccgcananatcactcacaaccattctaatgtccaatgccttaaacagtcttctttgcttttatcggttaacatggaccgttcaaaaccataaaatcaacatgtaactttaccacttttgcaagaactacgtaggtctgaattcctcatcgcaattgaggatacgtaggagcaaaagccccacttttgttgaccatcccaagagatcgttaatggtccaatgccttaacgtttctctcctttcaaaaacaagagatcgttaatggtccaatgccttaacgtttctctcctttcaaaatcaaaagatcgtttaatggtccaaacgccttagatgacctttgttcggttaaaattgatcttgtggaanaagatcacaacaacttaaccaacgtttagttctgaaagaactacatangtctgatttcctcatcgc

SEQ ID NO: 271872 - DNA, 426 bp, Glycine max
  unsure (1)..(426): unsure at all n locations
agcacttgaggattanagttgaccatancagatgtttccatagtattaattgcatcactcacccaatactacgaccagcctttgaggtgcttcacattcggagatttccaattagtaccaaccattgaagaatttgaggaaattctaggatgtcctctcgggggaagaaaaccatatctttccttcgggtgtctcccctctttgagcagaattgcaactgtggtcaaggattcagcaagaggtttggaccgcataaaacagactcggaacggcatagcgggcctaccacaggggtacctagaagacaaggcgaggggtatggccaatcaaggagaatgggtcccgtttatggatgtgttagctttgctaatttttggggtcgtcctctttccaaacgtggatggtttggtggacctagcagcaatc

SEQ ID NO: 271873 - DNA, 432 bp, Glycine max
  unsure (1)..(432): unsure at all n locations
agcttgaagaaagtgacagttgagagattntattttaactacatttgcggaatcgagagagggagggataaagacaacagtgtgaggactgagagcaaatcacgctaggatagatcctcagaaaccagaatgtctgttccattttgtctttatttttttacttggagtagtagaagtgattgacagctacagaactcatttgcaaccacttacgcatgactaattgagttaaacttcttcctttgtctattcgactttgtttcgtaattaataagattaattgcattttttttgtctttttttcatttctccaaagtttttatttgtcaatttgctcttcaactntttaattatttaattttcatttatttattaacttaatatttaatttataacaaanaaaaatatcgacattacactgtcttatactat

SEQ ID NO: 271874 - DNA, 429 bp, Glycine max
tcaggttgctcaattgctccaggttgctgcatggtatggcaaatgtctgtatggtggtcagcagaggatcacaaaccacaaacccttgcgacaggtacagatttctgattcaaggccagctgggttaccaagttgaccaacgcatgcaagttgccttcaagcttcttagtttcagatgatgcagatgggtttgtagctacctcatgcactcctctaatgactatggcatcatttttggcgctacactgctgggagttggaggccatcttctcaattaaatttctggcttcagcaggggtcatgtctccaagggctccaccactggcagcatctatcatacttctcttcatattactgagtccttcataaaaatattggagaagaagctgttctgaaatctgatggtggcggcaactggcacatagattc

SEQ ID NO: 271875 - DNA, 458 bp, Glycine max
  unsure (1)..(458): unsure at all n locations
agcttgtctttcacagccttcacatttataacaatataattaaggtagcgtcggatagggaaaacagttttttatattccgaaattatgctacgtgatattcttattaattattttagttatttattacatcaataagaataatttgatattnttatcgtaataaaaaaattaaattccaaaaattaagattcacacttccttaataagaaaatttttgcgacaaacttataaaaaatcattttcaaaaaatattatttatcaggaattctatttttttagaacgaatattaaacatgaaaaagtaaaattttgaacccacgatttgcaagaaattcaaaatttctcccccaatcaatcacctcctaaaggttaaacatgtacttatacatatatntaanacaataatcaatcatctcctaaaggttaaacatgctcttatacatatattttaatatt

SEQ ID NO: 271876 - DNA, 439 bp, Glycine max
  unsure (1)..(439): unsure at all n locations
cgatttgaccagttntgtagtttcgccggtcaacctcagggttgtcttcgtattatttgggctttccaattacaattcaaatatatagtatacagaaatatgaaattaaagtgggtttggacgaaacaatagataagagttatttatacacaagtatggtaaaagtttaaatatatttttagtcttttaaatttggattattatttttttctttctaaaatctgttttttagtcccttaattaaaaaaatagttgttttagtttcttctacgttcgaatcttaaaaaaaaccaaaaacatatttaaatttgtagtaaaatataaacttgtttgatagaaaagaacatacaatttccgtgaaatgatatatggtattatatacaacaatatttctttctactcaaagtacatatgaatataaaatattatatgcaaatat

SEQ ID NO: 271877 - DNA, 440 bp, Glycine max
  unsure (1)..(440): unsure at all n locations
agcttgcacaaaaatgatttgatcaaccaagaacttatatctatatgttcccgagcttcaaaggatgacaaaaagaaatttggaaccaagactgagagttttgcacgagaatggttaggaaacacgaagagaatgaagattaagagtctcttatcacagctctgagggaagaagccccaaggacaattgtatgaagcttggaagaagaagaagaagaagaaaatggactcctctccctcccttgaagaactcatgaacaacaatggagaatgaaggttccaagtttgatatttntggaggagtgaagagataaggctctaaggcttggtccaaatgaaacttggttaggcttaatgttgataagatcaaatcgacaaaatgaatgaccatctgatagccatggtggaagtgctaaatgccgccatatatgggtattttgc

SEQ ID NO: 271878 - DNA, 338 bp, Glycine max
cgagatgaggaagtgttgaagggtgaaacttcctgcttttattgttgaccacagagtggtacctggagatatgtcgcggtggtcatgagaccttgcggacgtcaggtggggtgctattgcccaaaaccaagcttgaccaatcccgacccaacccgggcatagtcggtcagtgagaacctgtgatgtacctaagcaggcgagctcctggcagtcaacagataaaaggaaaacaagaccactaagcaaggaggcttgtggtggctggccagctgtgaattttgtataatatgtggattgtggcctctggtaatcgattactgagggtgggtaatcgatta

SEQ ID NO: 271879 - DNA, 486 bp, Glycine max
  unsure (1)..(486): unsure at all n locations
agccgcgtttacgcatgtaagcatcatatgaccgtgcaaacggccttataacgaagctagactaaacgaggcctctgagaattctagctgagcctcatctatctatgtggtaattgaatggatgccacacgtctctaacatgcgacctgagacaccaataatgctactacttgctcagagctgaagggagttattctgttagaagcctgaatctgtctaccctcttacgaactaacttgacctcacttacttgcgactcaatccagacttatttgagcgctaataatgttgagtctcttactcacaagacagataaaaccttcacttctgcgtcatactgtcctaggactaacagaccgaggatctcttgatatgatagaatatcttgcacaaaagaatggttgaccgtgtgagaatagaacgtgtacaacgacataacatgatagtggaacaatcaagcgggatgacctgcgaccggacatatcn

SEQ ID NO: 271880 - DNA, 430 bp, Glycine max
agcttgtccatccacgatgtctccaatagaaaggtccacccctaaccatttgctcacacgaacatgaaattggacatcaccataatcaaatccatgtgtcccacactcaaagataagcttacaaaataattataattaaaacaatttaagaaacatcaattaactatgacataaactctatcatctttagatcatggtatttgaaagtaaataaaaccaataacatccagctcacataagccaaacatctcatattcaactatcatgaaacaattcaagaatcaacatcatgcatcaactatcaagcattatcaacatgagttcatcaatcatcatcaacatgaacaccaaacatcaacaccaacgacagactctacttcatggatatttacaccacatgaagggaataaccaagtacattccttaacat

SEQ ID NO: 271881 - DNA, 427 bp, Glycine max
  unsure (1)..(427): unsure at all n locations
tctgcagaaccttatccggagcattcttgctcaaatcaaaaacctggtacacaaatcaaattgtcttgccatcaaacaggttgtcccaccttataaaaacaaattcaaataatgtgccccacttgcagaaaaaaagactaaaaacaaaaaggaaaaaaacattatacctggtttttggtaagaagtgtactataggaaacaagaagctcccctccaagctggccaccacttttggtgtttatgaaagcaatcactggacaagcacgtacatgcgaaacacttttcacctcagatcccggcactaatatgtaatcaggaatacagaactccctcatatcataattaccatctcccattgctgttcccaactgcatatntntatcacacacataataaaaaatcatattcaagtttccaaatacataaa

SEQ ID NO: 271882 - DNA, 398 bp, Glycine max
  unsure (1)..(398): unsure at all n locations
agctnntggagggacgcaggtagtctgttctgaaggcaagcttctggagtcttttatttaatgaataaccgggtagggttgggtcgggtcggcccaactcctaccgcggacaaaaaccaaacaaattccgccatttncgtcatttccgccaccccgccacgaccgccatgactatggcggccgccatcccaaacccgcaacgccaccgctattcggtggcgtttttttgaaaatccgccaccaaaaaccgccatggccgccatttaacaacactgggacatgatattcgattgtgaataagtggatgtgtataacacttgatgttacattaattatattgggagctatgaattatacaataaccggaccagtgtttatgcgcagcgttaaagagaaag

SEQ ID NO: 271883 - DNA, 432 bp, Glycine max
cgtaatcgattacacatatactgtaattgattaccagagcagattttcagaaaatattctcaacagtcacatctttttatgtggttcttgaatggctatcataggcctatatatatgtgacttgagacacgaatttgctaagagtttttcagaacaaaaaggtcttattctcttataaagcaaaatcgttttatcctcttacaaattccttggccaaattacttgtgattcaataaggaattatttgagtgctcaaattgttcaatctatctctttcaagagagatttcttcttttcttcttcttcattctaaaaagggattaagagaccgagggtctcttgttgtgaaagaattctaaacacaaaggaagggttgtccttgtgtgtttagaacttgtaaaaggaatttacaagatagtggaactctcaagc

SEQ ID NO: 271884 - DNA, 470 bp, Glycine max
  unsure (1)..(470): unsure at all n locations
agcttgaagatgatgctttaatggagganaagaaagagagaaggcgggagcactaaattgaaggaataaaagagggagagaagtggaactttgaagtgtgtctcataagactctcattcatcaaagttacaacaagtgttacacatgcttttatttatagactaggtagcttccttgagaagctttcttgagaaaacttccttgagaagcttctttgagaaaacttccttgagaagctagagcttagctacacacacccctctcataactaagctcacctccttgagaagcttccttaagaagaattctaaagaagctagagcttagctacacatacctctctaatagctaagctcacctccttgagatgagaagctagaactcagctacacancccctataatagctaagctcacacncatgacaaanaacatganaatancaaaaaaagtccttactacaaagactac

SEQ ID NO: 271885 - DNA, 433 bp, Glycine max
tactcagcttaaacaaatttgttgcaagcaaattgatctatcgatttgagagctatcttatattgactgcttaacattgagaagactcacagccactatatcagggtcaacaatattagacaaggttttttgttatgtagagggagtgcacataattcagcaatacttgtacaccacacaagtagacctatttgactacttatgtactacatataatagtccatacctttgtaattagtacctctggtactttatttcaatataatatatttatctttgctgataaaaaaaaggtttaataagcatttttgggaagagctgaaagcacagtttctaaggtttattgcagaatttcatgtgaatgcttcatttcctaagggactcaattcctcattcattgaaaccagtaaaccagtatgcaacattttacatg

SEQ ID NO: 271886 - DNA, 447 bp, Glycine max
agcttgtagggttcaccccacattccgtcgtcatatgctaaacttgatcccatatctacttgataattcaatggtagccataaccctagccaaggttcatcaacctccatttctccgagaatacgactcgaacacaacgtgtgcttgtcacgaagaagccccggggcgttccattgagcattgtagggctctgaagtgtatggtgcgaggtctaattgatgctggctgaaatttgaggagaatcgtgtgtaaatcctgacattgacaagagatgccacacatggggcaattatgaaagctgttgttagatgtctctaatgactcaccaggattttcaactctcaccggaatgtgggtgtaagccattggtctcgttgctcaagcaacctgcgctcctgagtgttgactttcaagaccgttcaatcagagaatactcatcttgcacgt

SEQ ID NO: 271887 - DNA, 409 bp, Glycine max
  unsure (1)..(409): unsure at all n locations
tgtaggattatggngtacccatcacacgtggtactaggtggcggtcgggcgatggtgcaaaacaattctccacatccacaaatcacgtataaacccaccatcccctgttgcccacctcaactgagctcacgtactcccacatagcccttatcctcgttcctctcaacgccgggtccccatcaatcctcccaatcttccacaacatcaaagtaattcaaaatccaagaatcatgaactaacacagccaagaaaatagggcagaggcagaaaactctgcccaaaacacaaaccaacatcacaacttttcacactcaaataccccagtaatattctcttcgttccaattcgttaaccgttggatcgactcgaagattntactggacgtctctagcacataaatctacattat

SEQ ID NO: 271888 - DNA, 472 bp, Glycine max
  unsure (1)..(472): unsure at all n locations
agctngagctntcccgcttagtgagagtgcgcactattcgagttgtccaattctttcaatttttcttcaaggttttttttttcaatttttgcttcaattttccttcaaagcacttgaaatcttcttcttttaacttctgctaataaaaaactgcaaagatattaatttctttattatttcattaaaaacaacaatgaagtaaagaacttgcaatcattcttagccaaaattgactatcaaattaactcaaatttcgtagttatcattgtgttatacagaaggaaaaaaaatcaaactcaacgttaaatattcaattntatagatatagattcttgtgttgtataaaatgtgtatcgatcttccttgtgttttaattatatttaataaaaaataattntatatattaaatgtatatgacgtccataactataaatctactttttgaatgggaaacanaatatgaaaataacta

SEQ ID NO: 271889 - DNA, 449 bp, Glycine max
  unsure (1)..(449): unsure at all n locations
gctntcccagctgtccctcaagaagaaggaggagtaatagtccttatactcttcgtgctcccttaaccaagaatcccccaagagctccccaagttttgtccccttcaaatgcttgcacagatgccagtgattgttcatagcaaaaaagttggacagtataggatcatcataagccttgatccaagtctccacattctgttcaacagccttcactatgttcaaaatctcgttgacaaggagtttctcctgaaagctttggcgcttccaacttctatgaatgatcaggacctgagtcaatattggcttatagtcatccccaaggagcttgttacagtaatcagtgataaagctcaccaatctcggcacattaccatccatcgggggtggatntggcctctgcaactccacctgaaccaaaagctcccaaaaaatctccgcagccncatcaa

SEQ ID NO: 271890 - DNA, 284 bp, Glycine max
  unsure (1)..(284): unsure at all n locations
gtgaatnaaagaataatnaaagaacaacttaagtgaatnaagaaacaattaagaggttaagataagaagtaagaagaattcaagacttaagaaaaaagtttagaagtaagaaataagatntaagggttaagatctnaagaantaagatcaagattcaagacacaagattcaagaatcaagagaaggcttaatcaagataagtatgaaaaggttttctcaaaaattgagtagcacatgatntttctcanaacatgtttaccaaagagttttcactctctggtaat

SEQ ID NO: 271891 - DNA, 306 bp, Glycine max
  unsure (1)..(306): unsure at all n locations
ctctagctcggcggattgtggtcttaaaagttaaaatgtgatctgttgtgctattgtaaactctntttttatatgtgtaacaagttgtgaactatgtctgaactaccatggctgaaaacgtgtattattatttgtgactgtcaagattgtgagactttgaatcaatttttgttgacattattgatctaggtaactttaataaatatgatgcatcgaggcgatataatattttctcattttcctcatcatgtgttgaatatagtattatttcatctgtgcgtgtcacttatttcttaagtcttaacc

SEQ ID NO: 271892 - DNA, 159 bp, Glycine max
tgtataaacaccatcctggctgtgtcttgcgtcgagcactatactagacaccacttcctttgagtgaaggataatatcacaagaacgagcatagaatcgcgatcttatattttatcttttctaacaccttttcacaatcaaaccaagatttcctccgaa

SEQ ID NO: 271893 - DNA, 402 bp, Glycine max
  unsure (1)..(402): unsure at all n locations
ngaatcttggattggatacttgatgcttgatcttgtagtctagaatcaatcacttgggcttttggcctcatcaaaaatgcctggatcatgatcatgaagcttgcttctacaatctctcccttttatatgatgacaaacctaaaatcaataaacacatacagactctatcttctaatcgatcactcacttaattcccccactctgttttttgagtttaaacttcacttgaagttaacgtatctaattatatgagctcttgattcagtcccaattatttctacccctttggcatcaacaaaaagccaaagtgcgtatagagacattggatcatacacaaactcataatcatccgagcatttgaatccatacaacaagcagggaggacaataattcatacataaa

SEQ ID NO: 271894 - DNA, 343 bp, Glycine max
agcttagatatctctcagtctctccacaaccaacactaaaatcttatgaaaaaacctaacaactctgtttcacattcgagatttaagcttaaatacgcaattctgtcggtggccacatgcttagtgagatcatcgctcgcatagcatgcataagtggcttttggctgagcgccaatcttaccgcttatcctgaaggatgcaggcggtgcgcttagcgagttgacactcgctcaacgcttctgtacaactcatacttcttccagagtcttctatgcactcagccatcggatgtcgcgcttagcggattgctcgctcagcgcgtgaaacgacttaccgaatcaat

SEQ ID NO: 271895 - DNA, 446 bp, Glycine max
tcacctattacaggactgcgtgaaacaggcatatccctcaaactcttgtttctttagagcaagtgcttatcaacttctaaaagtaactttgtcaacttaaattggcaaatttaagctttaactatcactcgtactatggaacatttctgtaccatgaggtctttcgaagttttaaaagtgtgatcaaagagggggcaatgctaaaataactaatgatatatgaacaaaatatttctgaaaacaacaaaaaaggaaccactgggaaagaagggaaaccatgaaccttatattaaaaattattaatgatagctaaggcacaaatcattcacgttgcaactaccatttatcattaatgattattatcctaagacacacgaacatatgtatgcaaggccaaccagaacaaatagtcactagattgattctcatatcaatagacgatgtcc

SEQ ID NO: 271896 - DNA, 227 bp, Glycine max
gataggtatcacatcattgttaggcgcaatgactgttttatcataaacaatttggtaagatcaaaaatgatgaatggaacaagagatatgaatgcctccaccataatctaaaagctagccatcatgaagaagattataagtggatgtcgagaggatcataccactggcagaagaaacaccttgagggatgacaacattggtagcctgactgtcttaaagattcatca

SEQ ID NO: 271897 - DNA, 384 bp, Glycine max
  unsure (1)..(384): unsure at all n locations
cggctatgactatatacatacacccaatgcgagatatatgcctattatcatttacagattgacgatgacttgttttangaataaggatcatgaaggaagcattgctgcctataggaaaccttccatcaaagtcgagttcatccacaatatctctttgattcacgtttcaaaacccttcaacaagccttaataaaattgaaattaaatccatcgggtgtcgggcatttgcctccaccacaattccaaacagcctctctaatctcttggtcagaaatagaggaagtgatcccctctgttngattcaactatctcagatttattagagggtgcactataacgatcagcaccaatctgtacttctttctcgtctaccagctcaatatc

SEQ ID NO: 271898 - DNA, 318 bp, Glycine max
  unsure (1)..(318): unsure at all n locations
tgcgtgaaggattatataatttataaccacgggaatcatacatntatattcgttagtaatagtaaaaaacatgttctaccgagtgcaaaattattgtgaggattaacgaataaggcaacaatttttaaatgattgaaattatgagtctaccacgttggacttttgtatggcgcataattgcatatgaatagaggcaagggctcaccttgtacagaacagatacattcgacaattaaagatacatgtgattngaggcagagatgtccacattctctaagatacaacctactactgtccaaagcattaaaataaaagcta

SEQ ID NO: 271899 - DNA, 359 bp, Glycine max
tggtaccacttggactggctatgagaacttcacgttacccgaacacttggcattacgcccaaaacaggtccttttcaatatattagccacgggcaataacctccatagaaggtttttcttttaaaataatggagttaaatttgaattattaataaaaacccttcataccttatttcatccctcgtctaacactttatttattaaaatttaatccattattaattggcctaaaataaattattattaaggacgaatttaattttctatactagtaagcagcacattttccaaattgaattcagaatcaatggcttcatcttcgattctataccaataccatcatcagccatttttcatta

SEQ ID NO: 271900 - DNA, 312 bp, Glycine max
agcttgcacaaaaatgatttgatcaaccaagaacttatatctagatgttcccaagcttcaaaggatgacaaaaagaaatttggaaccaagactgagagttttgcacgaaaatggtaaggaaacaagaagagaatgaagattaagagtctcttatcaaagctttgagggaagaagccccaaggacaattgtatgaagcttggaagaagaagaagaagaagaaaatggactcctctccctcccttgaagaactcatgaacaacaatggagaatgaaggttccaagtttgatatttttggaggagtgaagagata

SEQ ID NO: 271901 - DNA, 389 bp, Glycine max
tgagatgaggaagtgttgaagggtgaaacttcctgcttttattgttgaccacagagtggtacctggagatatgtcgcgggggtcaggagaccttggggacgtcaggtggggtgctattgcccaaaaccaagcttgaccaatcccgacccaacccgggcatagtcggtcagtgagaacctgtgatgtacctaagcaggcgagctcctggcagtcaacagataaaaggaaaacaagaccacaaagcaaggaggcttgtggtggctggccagctgtgaattttgtataatatgtggattgtggcctctggtaatcgattactgagggtgggtaatcgattacaaggcttaaaattgaagacaggaggctaagatggtctctggtaatcgata

SEQ ID NO: 271902 - DNA, 402 bp, Glycine max
agcttgtaatcgattaacacgatacatcaaacttctatgcaagcttcagacaattgtgtaatcgattacgatcagcctataattgattaaaatagagagtgttaacttcagaagaatttttctaactctagaaaattttgttctacattatgatgcatgatgcacatatgaaaagatagatactaagatgcaacacacaatataacacttaatacacatgccattcaagagagtcggacatgtaaaagacaaaacttcttctctctgcctcagaaacctcactgcaccttaacctattcttctctcagtcactcaaaaaacttgaaaccctaattgtggcaataaatagaacaaccccgagttgtcaagtcacacctaactgtaaaacaacctcctctaata

SEQ ID NO: 271903 - DNA, 168 bp, Glycine max
  unsure (1)..(168): unsure at all n locations
ntgaaggtgcgcagcccaccatcttttcatagtagagtaccgataatgtgtctaccatcacgaatatcgtctccctttccattattgggggtaccacctgcgccgccagatccctccaccttttgggcgtgttctttgaatgatccgtaccccttttgcacatgttct

SEQ ID NO: 271904 - DNA, 329 bp, Glycine max
  unsure (1)..(329): unsure at all n locations
agctatgcgganttggtcttcgccagtgaaaggatcgatgtgggtccgaagagaggcagatgggatcattctactatgacgactgagatcactgntgcatatgaagatggtgataaagagggagatgaccatgctgtgactgccatatctatacggtcaaggtttccagcaacccaacattgtcgttactcagccaataacatacctcctccttacccaccacccagttatccacaaaggccatccctacatcgaccacaaagtctgtctaccgcactttcaatgacgaagaccacctttagcacanaccgcaacaaagaacaccatct

SEQ ID NO: 271905 - DNA, 386 bp, Glycine max
  unsure (1)..(386): unsure at all n locations
agcttganattgacaaacgaacaccctcgagaaattctaatggtcataacttgtcacacggaagttcgattaacgcgcagactatatcgagacgctcgaaattgagcaacgaatgctctcgagaaattcatatggccataacttgtcacacggatgtccgattcaggcgcataatatatcgagatactcgaaatctaacaacggatgctctcgaaaaattcaaatggtcataacttgtcacacggaagtccgattcaggcgcataatatatcgagacgctcgaaattgaacaacgaatgctatcgagaaattcaaatggacataacttgtcacacgaaagtccgattaacgcgcataatatatcgagaaatctatatgcgcataac

SEQ ID NO: 271906 - DNA, 444 bp, Glycine max
  unsure (1)..(444): unsure at all n locations
taacanaaggcatgcgaagtgggtggaattcctagagcaattcccttatgtttatcaaatataaaaaggcaaaaggtaatatagtagccgatgctctttctcggcgtcatgcattactttctatgcttgaaacaaaattggttggtcttgaatgtttgaaaagcatgtatgaaaatgatgaaacttttggagaaatttttaaaaattgtgaaaatttttcagaaaatggtttctttagacatgaaggctttcttttcaaagaaaacaaattgtgtgtgcctaaatgttctactagaaatttgcttgtttgtgaagcacatgaaggaggtttaatggggcattttggggtccaaaagactctagaaacattacaagaaccattttattggcctcatatgaaaaaggatgtgcagaaattttgtgaacattgcattgtatgtaaaa

SEQ ID NO: 271907 - DNA, 505 bp, Glycine max
atctctgagtcacctgcggcatgcaagcttcaacatcagaccacttccagggtgctggatctacttcacatggacttgatggggcctatgcaagttgaaagccttggaggaaagaggtatgcctatgttgttgtggatgatttctccagatttacctgggtcaactttatcagagagaaaacagacacctttgaagtattcaaagagttgagtctaagacttcaaagagaaaaagactgtgtcatcaagagaattacgagtgaccatggcagagagtttgaaaacagcaagtttactgaattctgcacatctgaaggcatcactcatgagttctctgcagccatcacacctcaacaaaatggcatagttgaaaggaaaaatagaactttgcaagaagctgctagggtcatgcttcatgccaaagaacttccctataatctctgggctgaagccatgaacacagcatgctatatccacaacagagtcacacttagaagggggactc

SEQ ID NO: 271908 - DNA, 444 bp, Glycine max
  unsure (1)..(444): unsure at all n locations
tgcctgggtgagttgatctagcacctcttggctcattntgtataataagccatgcagatcagaggaagaggaggaagtgcanaccagagggattgatattcgatatttgatattcaatatctttgtgaaagaaagaacttttatgaagggatttgtataaagggtggattgattcagtattaattgagttcggtttatgaaagttttgtgatacgatgcatacaaaagaagtttttgcaactctagttttaaaagttcgttttgttttgaaaaccaattcacccccttcttggtttgtgagtagcaccatctttttcaaagacaccacaaagagctgagagaaaagagagaaaagtggtgttgagctgtagatntgtgatcgtggatcacctncttcatcatttcttctattgatcttgtgctctatgcaatgatcgactagtt

SEQ ID NO: 271909 - DNA, 533 bp, Glycine max
  unsure (1)..(533): unsure at all n locations
cgcccgcgcgnnatgaganccatctggaccttgatcttggagtcactcgcaagctgcgagcttctcaggaagttgtgtcaagaaagcttcgcgttgaagctacctacactataagagattatggtgtgtcacactaggtgaactgtgatgactgataggactagtgagacacaacgtcgagttcaacatggcgtcgatttatggtgaaacaaattcgtgctcagccttcctatatcgctgcctctttcttttactgcataggagcatactctccaaactatatatccactgcttatcgaggaggtgaagctccctcttgcctggcctatttcttaatggatggcggctcctttcacttccattgcttaggatcccgtttgatctccatggcggaaaatcaccattanagaacggcagttgggcctacagatccaaactgcatacacgccacacacgctggctttgatcaagtgcggtaccctatggaccatcatcattatgcgcatgactacgagcaccctatgtgtcctcct

SEQ ID NO: 271910 - DNA, 449 bp, Glycine max
tattaactttgttgtttagaggagaagatatctgaaatgagtatcaaaatactttataataaaaatattaaaaaatactatatgaatgaatcttaatcaagtaattcacatattatatcatgtaaaacattaaaacatatagatattcacttatatcaaagcaatcaaacacaagtattgaagaataatgattatagatattattaaaatatttgaatgaaaatttcatgctaataagataaactcaatcaagaacacatactcaaaatttcaaacaatcaaaacaaacaaatgaaaaattgttagttatcataatcaaattgattgaagaaattttttaataagagaatagttttgatattacctttctcatgattaaggtgtctaaatcttcaaagatgaggatcttactttttctctatgtttatcattcttgagaaatgttctca

SEQ ID NO: 271911 - DNA, 469 bp, Glycine max
  unsure (1)..(469): unsure at all n locations
agctntgtgtaatgcttgagttaagtagcaagaagtgtcagtgataaatacttgtaactcgcgaaaattcgtggaacttggtggtttgcgaaaaactagacatagtcttagtggttgagacaaaccagtataaattctttgcatcttattctatttattcttttttattcaactaacctagggtttgaattttatctttgcttttgaaaaactatttattttacaaagatctgaaactattgtctgatctttccagcaaaaatctattgtctatttttttttaagtctcatcaaatgataacttcattattttagaaaaaggttttaaatttagtacaaaacacaatttaaccctctttcttgtgatattttcctttgcaattcggtatcagagcttagccttaaacggttaagcacctgatagtgtctagaggaaaagatcctaatgtcagataacaacaaaaacaac

SEQ ID NO: 271912 - DNA, 447 bp, Glycine max
  unsure (1)..(447): unsure at all n locations
ctagccttaggttgtaccatgttgctccccctatctctaatagatttaattgttatagtattgttgagataaactgcaaaattgatgaatgatttatgttctggaattatggtgattttctactgatagaattattgatatatatatatatatatatatatatatatatatatatatatatatatatatatatatatattatcattgttgaatgataagatagatagagtgtgaactccaacacacttttgtgtggcgtgtgaatatatattcaactatatatctgtatattgncattctatctgtatgcattgtggtttgggcacggcggtgtctgaccttgaaaaaattttttgttatgattgttagatggcagaatttacaactgttatgctatctgagtgtgtgtgtgacaagtggtttctatcacttaaagaaactattggg

SEQ ID NO: 271913 - DNA, 548 bp, Glycine max
  unsure (1)..(548): unsure at all n locations
cggacgagnagnnttttnannnncagnnnananacctgatnaccgtccgnangngcggngagncnttagagaannaccgaagcnaaannatnnnatgaatttanacaagnngagnnnnatttttataaatgagagnnatnttttttgggttggtgagagtgattntnataagttcttgagtgattgaagaanatggtggttatatnaaaggtgtttganatnntttgtgtgttganttagnnggaaagagtgattntttntttanannatgttatntttaannttgttgtttaaaaaaaaaattnnagaaaanttaattgtgtgtagaattatatngtgannattaatntngttntanttggttaaattaagtgattnttgaggntaaattgaaatntaaaaggagatnntttangtngttttggaatgattttagttggagngatgtagnttgagttataannatttttatatttantgtggaggangagataanntangtntttannatgnnnattatttattgtatgggaagatntagnttattg

SEQ ID NO: 271914 - DNA, 233 bp, Glycine max
tgcttgtttgtgagagatgttggtgtaccacacaagatacgcattttgggtgagaacaagattgcctgtgttgttgagtgttatgatacccgaggaatcattgatgggggtgggcttattagcaacccaaacaactgtctggattgggatgttcttgtaccaaatacccacataacgtttatgggaataacctggtgatgtgccatcattttcttctattatctaaacccttt

SEQ ID NO: 271915 - DNA, 437 bp, Glycine max
tcgatatattacgggactcagtcagacatacgagcagaatgttattggagtttgaatttgcgcacaagttctgcattcaatatagagcgattggatatattacgggacatagatgacacattcgaggaacatgatatatgccagatgatttggctctaacgactaacactctatttacagcgacttgatattatactggactcaatcagacatacgaatgaacagatattgtcgatagactcgaatctgaacttcaacatctatatataaatcgatatgtatatgactggtactacgtcagacatccgagggaacagttattgtcgatagaatcggctgagaggatcaacagtcacatacgagcgtctcggtatatacgggactccatccacacacgagaaatatgtattgtcgcatacttgactggaggactacac

SEQ ID NO: 271916 - DNA, 411 bp, Glycine max
  unsure (1)..(411): unsure at all n locations
ctgagcgaatataaacgacaataactntgtactcttatgtctgattgagtcccgacatatatggagacgctcgcaatagaatgtggaagctatgagcgaatttaaactactatagctttttactcaagatgtcatgattgagttccgtatatatagggagaccgtccaaattgaatgtggaagctgttgaccaattcatagcgctataacgcattactcagatgtctgattgagtctcgtcatataccgagacgctggaaatatgaatgtttgaactctcatctaatttagacaacaataacttcttactcggatgtctgattgagacctcgcatatatcaagacactcgaaagttgatcgttgaactctgagccaattcaaacgacaataacatttactcagatgtctga

SEQ ID NO: 271917 - DNA, 308 bp, Glycine max
  unsure (1)..(308): unsure at all n locations
ctgcagcttcccatcgcaccacttccagggtgctggatctactgcacatggacttgttggagcgtatgcaagttgaaagcctgggaggatagaggtatgcctatgttgttgcggatgatttctacagatatacctgtgtctactttatgagagagagcgcatactcctttgaagcattcaaatagccgagtatattacttcaatgagaaaaagactgccgaatacagacaatgcngcgtgaccaccgcaaacagttagatgaccgcacgttgagtgtatgctgcccatatgacagcctctctcatgag

SEQ ID NO: 271918 - DNA, 51 bp, Glycine max
tagtgctaaccagagggatcgatattctatatttcgctgctcaatatctgt

SEQ ID NO: 271919 - DNA, 194 bp, Glycine max
tatcttcacaacaagtaactgattctatttattatataaagaaacgactagctaactaacagctgtatatatagtgactgctaataaggaatggatgggccttgagtatggccatctattatacctaattaaactaattacacacaacacaaccttaactcactgcccaattatttaagtgcacagattctaac

SEQ ID NO: 271920 - DNA, 243 bp, Glycine max
acttttcaatgtatcaaacatagggacatgtagctagctgaatagactcatgtacagatagctaaacatatactcttatctatctctaatttctacatcagaccagatagattgagagcccctctacatgttcgtcaatgcatcatgtcatatctatgtcagataaatcttcgtaatcccatcacacataagatggttttgtatgtcatctaccacttggtgtctccattcaaatagtttata

SEQ ID NO: 271921 - DNA, 414 bp, Glycine max
gagctttgtgaaacccacatatcttatagatatactttgcgggttcacagacttatctactcaaagccgatgtgttgtgttctaggcatgactcacacttgataccattcacttaagtcttgacttcatgaccttatagaaaaaaacccttatctccatgcggctgcacctccttaaaccaatcccagctttggaccacacacctattttaaagaccctgaactttaacaatgaccacttccttcacgcgagtagtgcctctttcaatggcgatatctgaaagtgatcccaacctctgcgagccaccaggcttgcaagtcaacgactgcgccagccaccaccagtgtgactgcgctatgcaccctctatgcaagtacgtgagcctacaccttcgcggcacctcaacaagtacca

SEQ ID NO: 271922 - DNA, 427 bp, Glycine max
  unsure (1)..(427): unsure at all n locations
tgcactagaggatggaaacctanacctacttcttctactcagtgtgaccttgagctatacaaacatgttttgaaccataaagaactaatgttcttccaatgtatcaacttcctgctataaacaggtacactgatacactgcaggcacgtgcattagatgttgatgtctcaatgatcgtggaaaccagacttgcagctaggacgcaagctctacaattacaaatagttcctgtagttatttatttattgtgatacattaagaggtgttagttcttcgttttttgtacagactgatgaaattcattaggattgatcaagctaaattatgaattattgaattgtcattctgtataaattgttagataagtggttgttgtgacttctacagctntggcctatcttggattctctgccttaaatcatntaac

SEQ ID NO: 271923 - DNA, 367 bp, Glycine max
  unsure (1)..(367): unsure at all n locations
cgctctctagcttgtcattgggggtatttgatctccttttggtgctctacattgtgggagtgtgctcatatatgtggggcaattttgatttgttttcttgcatagattangttgaattaggggtgggtatgagatggccctaggcctataatgcattttgaaacaataggacatgccacattgtccccgttctcttgctattgatgcctaaacgcgcacccaccaagtgtttggtgaaatgcctcaatggcattagcgtgtgacttttgtaatgagacaacccatggggtattttggtttgtgcatattttctatcgttttggaatatgtattcattcccgaanaagggtagagtaattgccccaca

SEQ ID NO: 271924 - DNA, 376 bp, Glycine max
  unsure (1)..(376): unsure at all n locations
accttgaacaagcaactaactcctcttttaaaaccatgctatgtgctcgcgactggtccctctcttcccttcgcagcttgagttcactattgctaccccatagagctccgcgaaatttattccggccatactcttccttgcgagccctcttggtctcttgttcaagggctcttgcggtaattgcattctcttcccgtaacccggcacactccttncgaatgtgtgttgcggacaacttgaacttctccttggcgaattttcgctttcctaactcgcttttgagagctcggacttcttcgtcctctttcggtgcttcaaaactctcttcgctgacgacttttaacttggcgagccaatctaaaccctcgatatgaac

SEQ ID NO: 271925 - DNA, 410 bp, Glycine max
  unsure (1)..(410): unsure at all n locations
agcttgtagaatggctagacatgatacatgtcaggtcttggtttggttcaagggtaaaagggatgccccacattattttcatgacacaaatgcaaaaatgatgatttggaaattntatgcaaaactggtcatgcatgcacctatgcggacactcaagtgtcaaatttttatggtcatgtgatgctagggcttangatttatttcctctattttaaatcaacccaatgtttccaaaatatgttcttttatcaatttgtgcattcattcgagtccatttcgggcgtccggngaaatttcacagcattcacccttcaggtgtagacacgttttttttctcttcaaaaatcggtcatgatcaatgaatttttttttcgaagaagagttggaaatcatctcttttcaaaagcatg

SEQ ID NO: 271926 - DNA, 412 bp, Glycine max
  unsure (1)..(412): unsure at all n locations
tgagatgnaggaagtgtgaagggtgaaacttcctgcttttattgttgaccacagagtggtacctggagatatgtcgcgggggtcaggagaccttggggacgtcaggtggggtgctattgcccaaaaccaagcttgaccaatcccgacccaacccgggcatagtcggtcagtgagaacatgtgacgtacctaagcaggcgagctcctggcagtcaacagataaaaggaaaacaagaccacagagcaaggaggcttgtggtggctggccagctgtgaattntgtgtaatatgtggattgtggcctctggtaatcgattaccaagggtgggtaatcgattacaaggcttaaaattgaagacagggggctaagatggtctctggtaatcgattaccaaggggtgtaatcgattacc

SEQ ID NO: 271927 - DNA, 405 bp, Glycine max
  unsure (1)..(405): unsure at all n locations
agcttccctgattgttaaacattattattattgattactgatatatagctcgtccagcgatgtgtgatattttaacttaatttttggtcatgctcttcctagatactagtatggcgtaagccaattaagctagtagaacatattacttttatgtatataaggtaatagccttcttgactatttttttcctaagctttcttcaaaaaataaattattctttttcctattattttaaattgcttaatatattattgctcacactcttatgctttttgataagcgccatatctagctatctttgggattaaaatattagcacttatcttttgattagagtaantnttcttataaactacccttaaatatagttgttttatagatattgtacatttactaaagcctatg

SEQ ID NO: 271928 - DNA, 371 bp, Glycine max
ataaaagaaaattatggtcacattccacttttgagtaattatatttaaagggattaaggttacaacccatgattacatgaataccaatttcaacccttccaaggggcttggtttaaaataataggtagaagtaacttgggccttacacatttatcaaatcatttaggattatcattttttgaaagttgtaatgaaaagtttggctttaaaatgaaatccaattgaatgtaacaacttaagttattaatgtaaccttaactttgatgcacataactaaccaataaatatagcttacatgattcccttaatacatgtagaattattcccttatatgacgtgacacaagctttacacacacaacatgaatcttt

SEQ ID NO: 271929 - DNA, 209 bp, Glycine max
taactaacactcatctctactctgctgcacttcaggcagcatggtgacgacatacaaatcatccccttctgcgtgaagaacctcaatcttcttctgtaatagcacgccatcaccttgctcttggtgtttgcacatggagagataggagtgtgttattctatctatagggcgggtttggatccacacctgtgaccttcccacccgatgct

SEQ ID NO: 271930 - DNA, 441 bp, Glycine max
agcttctatggttaatgcaaatacatatattttatgactgcccggaagtacatttaaaattaatctgttaatcttgcattactctgcagctagagatgacttttaaaggagagtttgaagaagcctcaaaaacttcaaacaataaggtttgttgcttgttagtttaccaattgtctggtgctccttaaaaagttagttttcagaaacctttgagaaataatgttaaactcacgtggaagtgagttttcttgtgttgcattgcagcacacatgcttttcatgggcataaatgggctgattgtctattagctgctatctctaaactacaattcatctgctaatttataatattgctcctgttctaacagaaaatatgtttcaaaatataccaacatattctcgcatgggtagaagagcaaacttattggatagcgtttcgatt

SEQ ID NO: 271931 - DNA, 175 bp, Glycine max
gatacaacactcaaattcgagcgtctctgattattacgggcctcaatcagacattcgagtaagaagaaatcgccgtatgaattgcgtcacagctgaagcattcaattttgagcgtctcgatataccaccggactcaatcagacatccttttaaaaagttattgacgatggaattg

SEQ ID NO: 271932 - DNA, 407 bp, Glycine max
  unsure (1)..(407): unsure at all n locations
agctctcaatatgtcaacattgactcattctatcattttgattagaagttttgaactattgtatgtgtagtcgccgctcaagaaaacaagatacctggccattattttgatgctagacttacgcggttgataatattgataccatcaactacatgcgcaagataagacaccgtgaaaacagtgatatatataaagaatgaaatagtagagctttcaattcatatagaatcgatgcattgaatgactctataatataaaataatgtcacataatacatactctgacaaaatatattgaaagaatattatcacgcgtcgctcttgcgtctgatatattattgcatatggtagtatttaacgttctatattgcttattgtgattctcanagatggatgtggtggtgatga

SEQ ID NO: 271933 - DNA, 436 bp, Glycine max
tgctgtgaaaattattagccttcgctccaacctactcagtggttatcttcctgctgacattggttctcttccttctcttcagtatctctacctccaacataataacctttctggtgatatacctgcctcattgtctctccaactcgttgtactcgatttgtcatataattccttcaccggtgttattccgacgacatttcaaaatttgtcggaattaactagtttgaatctccagaacaactcgctatccggacagatacctaatctcaatgtcaatctgctcaagcttttgaatttaagctacaaccaattgaatggctcaattcctaaagctcttcagatttttccaaattcttcctttgaaggaaactctctcttatgtggaccacctctaaagccatgctctgtggttccccctacaccttctccttcctcg

SEQ ID NO: 271934 - DNA, 410 bp, Glycine max
  unsure (1)..(410): unsure at all n locations
agctnggcagcaatatagctcaatacattacatgttatagaaacccttatacctaaaacaccaccagcaacttactacaccaaatccttgcaatttttttccctatcttcctaatagcaggggtctcttacatgccacataaacctccaaaacaaacgaaacctatcaataaaaattaaaaaaaaaaaagaagaacaaactagcctccaaatccggagagggttcttccttgtctcttgagagcataaaccacatccattgccgtgacggtctttctcctaacgtgctcagtgtaggtaacggcgtcacgaatcacgttctacacaaagatcttgagcacgccacgtgtctcctagtagatgagaccactgatacgcttcacaccacccctgcgagccaaacgccgaatc

SEQ ID NO: 271935 - DNA, 449 bp, Glycine max
  unsure (1)..(449): unsure at all n locations
ctgattaatcgagcactgaaaagaatccactatgattgtttggattaagaaaaatattatagatgaaaagacgagcccttcgcaagtggattctttgttcaaatgatggcagcacttttttgacaatgagtgagtagcttgaaaattntgttgatagccaaataatcgggtcatagtttaaaatgattatataaaatggagtttttggtttggatattttttgcaaaagggaaattttgtttagtacgaaaatagttgacagaaagttaattngataaagaccttttgtttttttctcttttctctctcttggatgtcgcgagaaaaactgattaattattttcatgtttgttaacgttgttatctttcataaaaaaacgttttgtatcatgctagtttatttattgataaaaatcacatacatatatcacaggacttataataactta

SEQ ID NO: 271936 - DNA, 429 bp, Glycine max
agcttacacactggtataccatgctacagctgctccggccaagctgtcttgatatatatggaccaacaacttttcgtccgcagaatacgcccccatctttcggcaatacatccggagatgcccttttggacatgtcgtgcctttgtacttatcaaagtctggtactttgaacttgggagggatgacgatgttgggcacgagacataaatccgccaaatccgataatgggtaattgccaaggccctcaactgctcttaacctctcttcaagcacctcaatctttcccttatcttccgcgaagggaacatattcttttacaggtgtgggtgaggccgggatatggcggactatgttcggatggggtagttcatgtggggacggatctttgaggtggagcagggggccaagatgggtatctccttcctcatc

SEQ ID NO: 271937 - DNA, 444 bp, Glycine max
  unsure (1)..(444): unsure at all n locations
ctcacattcactttcttctacatcatattcaaacttgttcaaataaataataaagtcatctcgactcanagaaagtcatataagtctcatacaattaatatagaacctatatgctaatgtcacatcctatcagagcgtggtgttcccgtgtcctctagcatgaggttcttcatagtcatccacctattcatctgctcccccgaacacaagttcaagatcatcacaggatccaaacacaacaacacacagggagtgagttatcacattcctagctaatagagaaacaagacaattaaatatatatattatataaatgagataccacttgcttaaacatagctcacgtaacttcaccacttcgtcattcaaaattcacttttcaattatcaatcacattacacaagagtcccacacttcgatcaagatataataacacatcaatta

SEQ ID NO: 271938 - DNA, 416 bp, Glycine max
  unsure (1)..(416): unsure at all n locations
agcttctctctaagagggcatggaaggacgccgtgttagaaggatctaatgcggctccacaagcggacatagaatttgacagacaccggttccaaagtgaggaacaccaacgccgctttgaagcaatcaagagttggtctttcctcaaggagagacgggtccaactgagagagggagaatacactgtgttccacgaggaagttgtcaggaggcaatgtacttaactgacacagcccatggctaaatatgacccacaaatagtcatggaattctatgctaatgcatggcacatagaggagggagtcagggataagcgctcctgngtgtggngccaatgggtcccttntgatgaagataccattaatcagttcttgcggtatccgttgtgttggatcgagtggccttataataattaa

SEQ ID NO: 271939 - DNA, 438 bp, Glycine max
  unsure (1)..(438): unsure at all n locations
tcgggatcttgcacatgagtggccttggcatgctgttggggacatatcattggccatttcttgggtctttcttcttgtgtacacatggagagagaaacatgattagttaatttattttataattntgtatgtttttggtgcttgtggttgtagaaacaacatgacccaaattggccttgtgaatgctcagattcttgacataaatggagaaccattatatgagtattgttcttcttcaaagagagaatgaaagaggttgttgagtcaactttctggttcttcttcagttccttttctttctctcttatcaattcattggattgcttgcatactatcccacttaaacccattttgaatcgatttggattcttaatgctatgcgtgtgtgtctcattattagcattngctatgcttccatttatccaactgttacttaca

SEQ ID NO: 271940 - DNA, 429 bp, Glycine max
  unsure (1)..(429): unsure at all n locations
agctctgagccaattcatacgacaataactntntattggatgtctgattgagtcctgtcatatatcgagacgctcgaaattgaatgttgaatctctgagccaatccaaacgacaataactttttactcggatgtctgattgagtcccgtaatataacgagactctcaaaattgaatgttgaagctctgagctaattcaaacgacaataacttttaactcggatgtctgattgagtcctgtcatacatcgagacgctcgaaattgaatggtgaagctctgagccaattcaaacgacaataactttttactcggatgtctgattgactctcgtcacatatcgagacgctcgaaattgaatgttgaagctctgagccaattcacacgacaataactttttactcggatgtctgattgagtcccgtcatatat

SEQ ID NO: 271941 - DNA, 171 bp, Glycine max
  unsure (1)..(171): unsure at all n locations
ttcatttcagcgctcgatatattagggcctcatcagactccgagtaaaagtattgtcgttgaattggtagagcttaacattaatttcagcgttcgtatatgaccggactcacagacatncagtaaaagtattgcgttgaatggtcaagcttacattcatttgagcgttcgt

SEQ ID NO: 271942 - DNA, 458 bp, Glycine max
  unsure (1)..(458): unsure at all n locations
agcttcttaattactcattattgtaaaacaacaacttcaacaacaattntaaaacaacaacaacaacaacaacacacacaaacacacttaattactcattattttaacacacacacacacacacacacacacaccatacatgtacatatataagcttctcaattactcattattttaaaacaaccttatacacaatttaaattatttatcataaatataatgcataatttatatattttaaaacaaatatagtaagtcattcatctgaagcacaatcgactattcaataaaaataaaaaagcaagtcatgctacaaatttttttaaagattaaaaaataatatacatacttaaagataaaagatgaataaaatacatgcacatgctcatgcgtaacacatgcaattaactattntaaacattaaagaggaataatatacactgaagataacaaacatg

SEQ ID NO: 271943 - DNA, 372 bp, Glycine max
  unsure (1)..(372): unsure at all n locations
gtaaatactttcctgagttgcattattactggaatagtgcatattntttatacactcactaattctccgtcaatttgaattgtttaatcattgacatcatgcattgctttgtctaaaataaattaaaaattcatgttcatgctttctaatactgtaaaatagtttccccaactgtgctaaagccggaagaatgtctatntctggtacactccatttctgggaataccacaccaagagcccgcaacacactatactgtaagagtagacatgtgccttgtgcctcaacccacgggcatatcgccgagccatgatgaatattattgaacatacttttgtaccttgtaccttataagaacactgcctttacattta

SEQ ID NO: 271944 - DNA, 415 bp, Glycine max
  unsure (1)..(415): unsure at all n locations
acgcttgcaagagtttctacatccagccctatctgatataaaacatcttatgccttgaatttctaactcgacacgcaaccaattggcaaatcttattagaggaggtttacgaccatgtagtcctataaagacatcacaactctttagtctataagaagaaagtgatctacaacctggggttgatgatgttcttttgtttctgcctctcttgcttctcttctctttcagcccagaataaccatcatcataaggatggcaataaccagacacagtgctactagagatgccgactgaggaagatatgcgatcaaggttctgcaaatcacctgcattacagccagctggagatgcagccacctcagagaaggagcatccaacattcacaatagactntggttctggaatccctgaaatg

SEQ ID NO: 271945 - DNA, 444 bp, Glycine max
  unsure (1)..(444): unsure at all n locations
nggagaggatgctntaatggaggaaaagaaagagagaagaggggagcacgaaattgaaggaataaaagagggagaaaagtgtaactttgaagtgtgtttcatactactagaatgaccaaaatacaagacctaaaagaaggaaaaacctattctaatatttacaaagaagagtggatccaaccttgacccttgggctaaaaaatctaccctaaggttcgtgagaaccctanggccttcctttggatctctggcctaatctacttggagtcttctatccaatgtccttgtgggataggattgcatcagccacccncttatgcatcattntttaaggagacctttcggatgtctggttggntctttntttttctctcatatccatggatgtcattgatgattaagttcttatataactgggtaagtcacccnccttatgcatcattt

SEQ ID NO: 271946 - DNA, 333 bp, Glycine max
  unsure (1)..(333): unsure at all n locations
catgattggtgcatgatttgngacttgtaggattcaatttgggcacaattggatgagggaaagagtggatttcgaaatctgcactttatgcagaattttgctgttgaaatgtgcaacagaattttgcataagtgcagaaaaatgctatgtaattgctggttgtggaaagagtagtacaaaatgagttatggatggttgctagtacatcccaacagtcaaaatgtatacttatgtactagagacttccagtaaaattctcgagtcgatccaacggttaacgaattggaacgaaggacatgttactgncgtctttaagtgagaaaaagctgtgat

SEQ ID NO: 271947 - DNA, 347 bp, Glycine max
  unsure (1)..(347): unsure at all n locations
gtaacacaccattttctcatagtagaacaccggtagcgtgtctactatcattgttatcatctccctttccgccattgngggcgccacttgagctgccatatccctccacctttaggcatatcctttgaaagattcgtgctcttttttgcacatgttctgtagctgcattctatctggagtcatatcataattgtactgatactgcgtaatgaaagcaatcattatgtccttccaagaatggactcgggaaggttccagattagtgtaccaggtgacggctgccccagtaagactttctttgaaaaagtgcatcaataattnttcatctttcgcaaatatgctcccat

SEQ ID NO: 271948 - DNA, 456 bp, Glycine max
  unsure (1)..(456): unsure at all n locations
agctnttaaaatatataataaaagaactattattattgaagaatcaattcatgttgctgttgatgagactaactcagtctaagaaaggatatacttgatgacattacagatactttagaagatacacatattcatgaagaagtccacacaaacaaagaagaatgaaatagcaaagattctcaatccaaagaaaatcaaataaatgtggatcttccaagggagtggagaacttcaaggtgtcaccctcttgacaatatcatagttgacatctcacaaggggtaataactcaacactctcttatagatgcatgcaataacatggcttttgtctctttaattgaacctaaaaacataaataaagccataattgatgaatatctggatattactatgcacgaagaattaaatcaatttgcaagaaatcaagtatgggaattacgtgatagacttaatgat

SEQ ID NO: 271949 - DNA, 383 bp, Glycine max
  unsure (1)..(383): unsure at all n locations
tagtattagagtagatggaaatgatgctcttgttgtttatagtgcactacacactactagagaaatcgctataagagaaaacaggccagttttaatgaggtgcattgagctactgtaaaatcacaataatgtgtgactgtgatgtaagtgtggtgtatagggaaaaagggagcaaaacagatttggagggaaaagaagagaagaggagatgctggtggcgaggcaagagacgtgcgatggaagagtgattgctcatgtagacatggatngcttctacgttcaaggtaacataacccttccattctgctataatttgagaagcgaatgtagtgatatattattatacgaagctgttgtgcttgtgtagtggaatagagaaagca

SEQ ID NO: 271950 - DNA, 340 bp, Glycine max
  unsure (1)..(340): unsure at all n locations
atgcaagcttgtaatatatgtgatgtgcttctcatgcctattatnagcagattcagttccatatgcgagcgccaagaaacagaaataagaaagatttggatgcacccaagagctaagacaacagggtaatttacttactcgagcctcttatgttttggttgagattcatcgaggacaagtaatgcaacaaaaccaaacataaataagcgaaggtacaccaaatttcaacaaaacgtcctgtaaatgtatgatccccacatgcccaattccctactgtttacatttctagaaaaagtatgagttaaaaaactgcttcaacaattgcatgcttctttttggg

SEQ ID NO: 271951 - DNA, 198 bp, Glycine max
  unsure (1)..(198): unsure at all n locations
ctctntaccatttcgctgacggtgaatagtaaaaccgttctcttcatatgatggaagccacttacccatcgccaatgtttcgcggtgttcgtttcgttcttcgtggcttcaatcccgtcgcccaaaaccaggnttggcttctctctctcttttaggatgttctaataataggggttctcttcttaatttattcgatga

SEQ ID NO: 271952 - DNA, 461 bp, Glycine max
  unsure (1)..(461): unsure at all n locations
catgcaagcttgatcgaaacanaatcttatataaaaaataaaatgatttattttcttgtatttaaaattagaaaattgccattctaaggtgcaaattaattgcaccattctctttaattaatatttgttatttggcgattactatacaggtcttgattacaaagaaaataataagtgaattatatctttgccaaaattatctcattgttaacattaacagtaggttttaatttgaataagattatttctagagggtaaacagctttttatggagattttttttaaatgatatacttagtcaaataattaaaattatataaagaaattctttcctatgaaaaaaaaatatttttatcataaaaaattattaaaattgatgttctaccaaaaaaactaatcatcaaaatatttgaaaatacaaaaccaagtattaaaaataatgtcatattcattcttataat

SEQ ID NO: 271953 - DNA, 437 bp, Glycine max
  unsure (1)..(437): unsure at all n locations
gcccaagtgctagcgcccgctactcatccncatgttaagacttatgtggagaagtctatgttatcagctcttgctacgatgtggtatcctgtcacaaacaaggacttgatgaatttcatttttgagaggtggcaccaagagacatcttccttccacctacccgtcggagagatgtccatcactttggatgatatgtcttgtctgctacatttacctctgataggtagatccattgatcatgtctccttacattttgacaaaaaagtggtgaggatcttgcttatgacttatctaggcattttgacagagacagaggctacaatagcgacaaatgcaggtgccaaggtaaggttgacatggctagaagacctttatcaccgctatgtaaagtcaaactcatacgtttaggctaccatgacttatctcttgcacttgat

SEQ ID NO: 271954 - DNA, 440 bp, Glycine max
agcttgtctcagcgtttatgcgagacagagaccaacatgttagctatcatcgccaagtacgaagaagagttaggtctagccacggcccacgagcatagaatcgcggatgagtacgctcaagtatatgcggaaaaagaggctagaggaagggtgatcgactctttacaccaagaggcaaccatgtggatggatcggtttgctcttaccttgaacgggagtcaagaacttccccgattgctagctaaggccaaggcgatggcagacacctactccgcccccgaagagattcatgggcttctcggctattgtcagcatatgatagacttaatggcccacatagttagaaatcgttaggaaacttgtatggtctcttagaccttgactagatatgacttccttcttgaaaaaaatgagttggcccatgttctactcaaaaaaac

SEQ ID NO: 271955 - DNA, 447 bp, Glycine max
  unsure (1)..(447): unsure at all n locations
tagaagggccgagagggacgagtcaaggatggaaagcatggtgttagaggataagctgaaggcttatcaaagggcgaagagaagtttgacggaatagttgagcaaaacggaagataatatgttaacaattattgaccaatataaagagaaggtgaacctagctgctagtcatgggcagaggctggaggatgaacatgcaaaggtgtcataccctaatttcatccggggaccattttttggtggcatgcaaccttcgcttgaccgcctcgaggtacttaacacccatcgttaggtaatccataaagtttcgcgacattccgaaagtcgaaaagaagcattgttgcacaatccgtcaagttccgcaacattccggaagtcaaaaagggcattngtgcgtaatccgtaaagtttcgcaacattccagaaagaaaatgggtgtcgttacgt

SEQ ID NO: 271956 - DNA, 419 bp, Glycine max
aacttatgttgcatgttctttgtttcacagagaatgtcgaagaacacactaaagtgacgattcttatgactacaggtgtgttgtcgatgttctgcgttttccaagagttccatttgttgcagtttttttatataatggttaaacttttcttgcatgtactttgtttcacagacaaggtcgaagaacacactaaagcttcaatttttatctcaaaaaaacggttatttttatgacaacaggtgtgttttctttgtagttctatcaaagcttaatttttttggttatttttttgggtgttcctgatccttctcctaccttgatggtgctttctttgttttcccttccagtcttctacgttatctttcatttctatctgttggggcttttgtaattattgcttaaacttttcttgcgtgttc

SEQ ID NO: 271957 - DNA, 437 bp, Glycine max
tatcctgatgagggtgctccatatgttctcaagactggactaatacatttgctgcccaagtttcatggtcttgcaggtgaagatcctcataagcatcttaaggatttccatattgtttcttccaccatgaagccccctgatgtccaggaagatcatatctttctaaaggctttttctcgttctctgaagggagtggcaaaagattgactatactaccttgctcccaggtccattttcagctgggatgaccttaagagggtgttcttggaaaaattcttcccttcatctaggaccactgccatcagaaaagacatttcatgcatcaggcaacttagtggagagagcttgtatgagtactggtaaagattcaagaaatggtggtgcagctgtcctcaccaccagatttctaagcaactccttctgcagtatttcaatga

SEQ ID NO: 271958 - DNA, 439 bp, Glycine max
  unsure (1)..(439): unsure at all n locations
agcttagaacaatatacttgtccttcatttaactgtatttgggcttggcggccacgatcaacaaagtactttcgacacctactatatgttgatttgaccaacgctgttatcggtatgttgcgacaatccttcaaaaccttatttatacattctgagaggttggttgtcatgtggccatatcgacgtccttctctatcataagacattgtccattnttcctttgaaatgcgatcaatccatgttgctatggctggactcagttgacggaatttttctaaattttgatcaaaaatgtgcttgcaaggagtgcagcctgcacaaaattagttagcaacaacaattntaagtatatatgaaacttannataacgtgaccatcataaatgacatcttacccaatttcttcaatatttctttntttctggcattattgaatttgc

SEQ ID NO: 271959 - DNA, 434 bp, Glycine max
tttaagatatgataaataaaatggagatgatgcacatgaaagatattatctcaaaagcttaataatggaaaaaaattgagaggatccaaaccgggagggggggaaggtattctgttcattgaaacgagttaggtttttttgagcattgggaggtgcacgccctagaatcataatgattctagatcttttgagtgattcttcacaaacttgggtttatgttcaattgtcaaggctgaacgctggggactgtttcagggcctcaactctcaaattagtcaaggatatgattggaaataaaataaaaatgaaaagaaaaccgatagtagacatgaattctcaaactgttattttccttatttaagggaacagttccaagcttccagctactcatcattactacaatattttcttggttttaggtcaaaactacaatc

SEQ ID NO: 271960 - DNA, 417 bp, Glycine max
gcttcggaagagagtgccgacgtgcaagccctaaaggcagagcttgacagatttgtgtagtcgaagaggagttcaagtccatagccatcaaagtctgaaaagagtatgatgaactaacggatgtcaatatggccaccgatgaagccttggaatgataaacctagaaggcccgaaaggaagaacacgaccaaagcgaagttttgaggggctttatagggcaacaatagtgagctcaagctccgaagaggtgaaaggaatcatcacgggtcaaaggcatgatcttgaaagacgagctaaaggcttgccttatgtcgaaaagaaatttgtgccaacagtctagcgagactgaagggaatatgtgggccatcatcgatgagtgcaaagagaagctaaatctagcatcgactcgcgagcaaa

SEQ ID NO: 271961 - DNA, 446 bp, Glycine max
  unsure (1)..(446): unsure at all n locations
agaggatgcttcaatggaggagaaganagagggagagaaagagagaggggggagcacgaaattgaaggaagataaagggagagaagttgaactttgaggtgtgtctcacaagactctcattcatcaaagttacaacaagtgttacacatgcttctatttatagactaggtagcttccttgagaagctttcttgagaaaacttccttgagaagcttctttgagaaaactgtcttgagaagctagagcttagctacacacacccctctcataactaagctcacctccttgagaagcttccttaagaagattcctaaagaagctagagcttatctacacatacctctctaatagctaagctcaccttcttgagatgagaagctagaacttagctacacaccccctataatagctaagctcacccccatgacaagaaaacatgaaaatac

SEQ ID NO: 271962 - DNA, 457 bp, Glycine max
agtcttgtagttgccataatgatatccaaagacgggctctgctatgatagacctgctctaacaaagaagaagtgaatctatgctgaagtgttctacacgaaacctaaatagagaggttttccaacatgaaggaagtgtgcattcaatgcaagcatttaatgcttcaacaatcacaatcttcacatgcaagctcaagtgaattttctattcgtttaaaggaaacatacacttagagaagaagaagacctataaatactagaagctttgaagaaatgggatacgaacctatgcactaatatttgaattctttctataaaaagctttctatatattcttgcaaaattcaaaagctctcgaaacactttgaatatcttgatagacaagactaagagcttatggttcatattcgtctgagagaatgttaatatctattctgtgagcaaacgatcatcaaata

SEQ ID NO: 271963 - DNA, 360 bp, Glycine max
  unsure (1)..(360): unsure at all n locations
acattgtatgactttaagttntaaaaaatatgctgcccatttttgacgtaatgctgtcatcgtgtcagtgtctagtgccgtgccatcaccgaaccactacacattgtgaaaaacaaacaattaatcatttccattattgtgaagaaataacatatcaccatttgctttcaatgttttcggaatagaaaatttaccatactccaatcattcttcaaccctgcgccaattatgtttcacatccaatgcatcacataatacccatactcatatcctccgcgttgaacgtgactctacattcaatggaaaaaaaaatcaatgtttgtattaacatgtttaataaccatttaatttgcaaacttt

SEQ ID NO: 271964 - DNA, 394 bp, Glycine max
agcttgagacaaacagaagtgttctgcgataacaatcttgactagatattagtgttgaactctacatagcatggcaatctctctggcaaaccgagcctctctactagaaatctgctctgggggttcacccttattaataatcttaacagcacattctgattcttatatctgcggaataagatgatccaaccacaaggcacagagtcatcaagtaatcctctattccaattgaataatggatgccgaatatgtatttttctaaacaaacagattatatactacaagtttatgtgaaactgtacataaatctagacagacctaatgggagatgccaaagggaaaacaagataagagagcctacgttgagctgacttcacaaatcaaaacaaacttt

SEQ ID NO: 271965 - DNA, 412 bp, Glycine max
  unsure (1)..(412): unsure at all n locations
gggttcgaggtacttaccctntgaagatcgaagaacgatgaagaattaatgaagaacgtcggacaacggtcgaaacctttgtaaaattcttcacggaaaacgttactgaaacgtttctgaagcgcctcggcttagattatcgtcacggaaacaattattccaagccaattcgaaagagagagaagtgcctaaggggctgaacccttttcttcttcacttactcccctatttatagcaaaatacgggaggtgcttgccgcccagctcgcccaggcgagccatgttgcttcctccagaagcaacagccttctggaggaatattctggagggctcaagtgggcctgggtgctatttgcacccccatttttactaagtacacccncctctgctatcttttggtgattcttttttcg

SEQ ID NO: 271966 - DNA, 309 bp, Glycine max
cgctcgtacttcacaggtgatctgcggtgttcagcctgaaacaaatcaacttactaataatgagggtgtctgatcgactatgccggtggcaagcctcttaaacttgtgtaagaactcattgactaagcctctttgggtgaagatgaatagtgcgccctttggatcatcatataacgtgggagcgaaacaagtctccaccgcatggattaatgagggccctgaagagatcagaccgtttcgatgcatccactgaaactatcttagtgccggaccatccatgtaaaaagagggcacggtaatgcattcctc

SEQ ID NO: 271967 - DNA, 407 bp, Glycine max
  unsure (1)..(407): unsure at all n locations
gggatcaactcatattactttntagtattttactttgttcaaaaaattagacaagcgctaaatattgaaatgtctgatatttatgaaccacaagcagacattgttacagcttctttgtcaacatgtaattggactntgcaactatccaatcaatcatagttataaattagtaatcatatcacaaattatagatgaaaattacttatccattcatttaaagattaaccattggttaaaagaanaacttatacgatatcaattaattacatatataatatctatatctagaactataatgatctaattgtctaattgacacgattacaaacgtctcgtttaatatctttccgtcaagaataccttagcttatgttatatatatttcgcaacgacttcgttgacattaat

SEQ ID NO: 271968 - DNA, 426 bp, Glycine max
agcttctacttatgtggtatggcgggcttccttcactttcttgtctccaacgcgagctttgaccaccgctcttctttcccgcgatgcttctcttcatatctgcctgagtgggcttatagcctaaaccatacttcccacgatttcctttggcatttatcagggccgttgtctttgcctaaacccattccgggttcgtaaccgttccccaacataactcgggccatcattactgctgcatcggacaggcaaagctgcccatataaggagtccacagaggaaatgctgaccacctcacaagactggaaagcggtttctaacgcttcttctgcggcttctacataaggcatagaggatgggcagctcaccaagatgtctctctcgcctgacacgatgaccaaatgcccctccactacgaatatcaacttt

SEQ ID NO: 271969 - DNA, 434 bp, Glycine max
  unsure (1)..(434): unsure at all n locations
tgtccttggtttagacatgattggtacatganttgngacttgtatgattcaatttaggcaaaattggatgagggaaagagtggttttcgaaatctgcactctatgcagaattttgttgttgaaatgtgcagcagaattttgtacaagagtagaaaaatgcttgtgtatggctggctatgaaaagggtagtacatatgtggttatggacattttctagcagatcccaacggtcaaaatgtagacttatgtactatggacttccagtaaaattttcaagtcgatccaacggtgaacgaatgaaatgttactggggtctttaagtgagaaaaagctgtgattnttggtttgagttgtgggcagaagtttcttgcttttccctgtcttgcttgcttatgtagtttgtgatgagtggatgttgattacttgggatgtgt

SEQ ID NO: 271970 - DNA, 395 bp, Glycine max
  unsure (1)..(395): unsure at all n locations
agcttcatgatgaatcaagattaattcttagaagttttgatgatgacaaaaagctcacagatcaagaatgagttcaagattgaatcaagaacacttcaaggttcaagaggaaatttgatttcaagaatcaagaatcaagtttcaagattcaagcttccaagaattaagatcaagattcaagactcaagattcaagaatcaagagaagacttaatcaagataagtatgaatnttttttttcaaaaactgaatagcacatagatttttctcacaacttgtttaccaaagagtctttactctctggtaatcgattaccaaattgttgtaatcgattaccagtagcaaaatgtttntgaaaaagttttcaactgaatctacaacgtttcaattgatttc

SEQ ID NO: 271971 - DNA, 195 bp, Glycine max
tgaagacaagactatacgagggatcttccttgggtatagccatatctgcaaggctaccgtgtctacaacttgcaaactaagaaactcgtcatcaatcgagatgttgaagtttatgagtatgcttcttggaattgggatgaagaaaaagtggagaagaatgttcttatacctgctcaactacctcaagaagaagct

SEQ ID NO: 271972 - DNA, 430 bp, Glycine max
  unsure (1)..(430): unsure at all n locations
agctntataatgtacattccaatttctaatggctgttataaaacgtttaaaacttctgacaatcgattacaagccttgtgtaatcgattacagtcttaagatttaaattctactgttgtaagagcatttcaaaaattattgtggccactggtaatcaattacagcctctggtaatcgattactagagagtgaatatcatatttaagaaatctcacaaaaacttttggaaaatatcctttggccaaacctatgcatcatcaattaagaaactcttccttagattctaggaaccaagctcatcaattatcttgaatttctggattcttgacttggatcacacgtgagaagcgcttatctttgacatcatcaaaacttcatatcatatttgcttctacatctactatatactattacncacataccaacatga

SEQ ID NO: 271973 - DNA, 428 bp, Glycine max
  unsure (1)..(428): unsure at all n locations
tgttaattntttaaaatagttaaacaatacatgaaaactaatagctactcttaacactcttcttaacactcttcttaacactcgagtaaaattcatataacttctatatggatctcatcatccctgtgatttgtcacattccaaattgtaacacctacatgaatttcaacgattaagaaaaatacatctaaaaaactagagaatatattgataacattcttcaatagcatagtgttgattcattgacactatctgatacttatatttatctatttcttattacatattcctctctctggatatcgatgtatctttttcccaacaacatanatactcctgacttgtataataagggaggttagggaatacaatcgccaaaccatttgtgactactaccactttgtttattgcagcttgtcactaaacaa

SEQ ID NO: 271974 - DNA, 326 bp, Glycine max
  unsure (1)..(326): unsure at all n locations
agcttatggctattgtcgacccctatattaagaacccgtatgagtntttaaaaggaccaacaaaagaagtgttagagggaccataatatgcattattattgtgtggtcttcatccataaggctaatttgaacctgagccacctttgtagccttagtagtttccttggaagttatgctgaggtctcgcttgattctacacataatgggcctcttcttgttgataatcaccaggtgcagaacactggtcattttgatggtcaccaccacataagtcacatctcacaacttgttgaacttgatgaacttggtgtgttttatgtgatcca

SEQ ID NO: 271975 - DNA, 307 bp, Glycine max
  unsure (1)..(307): unsure at all n locations
gtataagtgcaggtctaatacacaaaggtcatgtcgccgcgatatgcgaggatgactccccgaggagatcggatttggtacggccatgtactcctgatttccgacaacgaaattggcaagtggaggagctgccacacgtttacgcgacaagcataatgtaaccctttgtagctttaaaactctacgggtgggcctaggctntagagtatcctttcgttaaggcattatgtcttttgttcttgagattataatatanagatctttcttcatttgtcctacgcctctacccattctcattcattgcatg

SEQ ID NO: 271976 - DNA, 477 bp, Glycine max
  unsure (1)..(477): unsure at all n locations
agcttcatgatgaatcaagattgattcaaagagttttgatgataacaaagatgatgacaaaaagctcaaaattcaagaacacttcatgataacaaagatgatgatctcaagaatcaaagaatgagttcaagattaaagcaagaacacttcaaggtttaaaaggaaatttgatttcaagaatcaagaatcaagtttcaagattcaagtttcaagaatcaagatcaagattcaagaatcaagagaagactcaatcaagataagtattaaaaaaaaatttcaaaaactgagtagcacatgaatttttctcaaaaccttttaccaaagagtttttactctctggtaatcgattaccagattattgtaatcgattactagtagcaaaatggttttcaaaaagctctcaactgaatntacaacgttccaattgatttcaaaatgttgtaatcgattacaatgatgtggtaatcgattatcagt

SEQ ID NO: 271977 - DNA, 449 bp, Glycine max
  unsure (1)..(449): unsure at all n locations
cttaagtttcctacacacaaacaggatataaaggaatgggttgcatctgaatcaaacaacacaagtaaaggaatcccatttatgaaacatctaccttggattagatctttggatttcaaaacttcagcaccattaagggtaaagacttttcacgtggtcttcagatgtctagtttggtcattcgggcctccaccattctgctctttcttgagtcgtgaacaatctctttgagtatgtcccttttgtccacaattaaaacatgttacgcctctatcgggacaattcgaggagatgtgccttggcttaccacatctgtaacaaatgatatgagtggaaaaagtattgggtttgctaccactaccacctgtaaatcccctagcaacaatcctcttattgtcatggcggttaccatattgcttangagaagtcgaatatggttttcctcgatg

SEQ ID NO: 271978 - DNA, 447 bp, Glycine max
agcttaacaattcaaggtgaacaagatctgcttgcctcagccattttatttattgtacaatcttgtatttggaaatctataattgacaacatctgcttgcctggattgctaatctagtgctggccttgcatcaatgtctccgggtgcaagaaattcaaggatattcgcccttgaaaaaatgattgctacttcttctacaacattgctgtcaatggcatctcatttgtcacaggcagaagagcgggaacgggttttcagtggcaagggacgttggaaccaactccgttcccttcctgaagccaagaatttgatgaatcatttgttcaatctggcatcttcctccaggtagagtagctttatctgcaaacaaaatttatggtccatgttgtgatgaatgactgaatctttgtctatgcctttctatatttcacgtgttcattgcgagat

SEQ ID NO: 271979 - DNA, 458 bp, Glycine max
  unsure (1)..(458): unsure at all n locations
ctatagaaactcagctnttacatctttgggtgtttccaagcacgagaaggtgacgggaaatatgggaaaatactatgcgttttctaggtttttttgtttgatctctttaaggttntgtggaaaatatagcggttgaccctcctaacatcggtagaagtcagtgattgcgttatttaggtgagtagctaatatacttagcgagtttcttaaagttcatttatggagaagcaagtatactttcgaacatatatgtttttggtaagctttgaaatttattttgagatcttgataatgtataaggatgaatgttgaactgtttgtttaactttatttatgttgagttcatgaatgatatatgtcgtttgctacaacgaagagataatgtagcctatgagttgatccctcatagtataatgatagatcgtcgttgctacaacgaagagataatgtatcctatg

SEQ ID NO: 271980 - DNA, 473 bp, Glycine max
  unsure (1)..(473): unsure at all n locations
agcttctattctggatgagagacagtttctcctattgaaggttatctctaccttactagaattatcctgtttgatttgctctatggaaggggcaagtttggggattgaaggtgtatccttatccatgacccatttttcaggaagagttacctcatcccattttatagttgcagggagagaaacattagcctttgtcatatcagtgataaacaaagtcgcctctcctttntgtggtttgattcttccctttcccatatacaaaagatttcaaaggactaaccgcctgagaattcttttgtatccctgtcgcaacctacccttcgacgggagggcgacgcgtgactcgcgggtgtgtgttccaagaaaggaatacgcgcggagtcgccaccaatgtttatttgaggaaaacatcgaaataaccggagaagacgtgatctatgaactctaagtgagacgtttgggagttgtattac

SEQ ID NO: 271981 - DNA, 146 bp, Glycine max
  unsure (1)..(146): unsure at all n locations
tcctgctataagctctggtctctgcagagcttcacacaacaaaatctctcanaactctctggaacttggacctttctctctctagaaaccctatacatgcaaagctatgaattccagtccaaactctccttctaaaatctgatttc

SEQ ID NO: 271982 - DNA, 468 bp, Glycine max
atggtcgttgagcaaggtgtcatgttgggactgtcttgtgcactaagcgagatgccttcttcacgctcagtctttttcatcatgtttttgcatcaattttctttcaatttttcttcttttgaatcctgctagtcaagaattaaaattttcattattctattaaaaccaacagtaatttagaggaaatcaattcattctaatcactttttaactattgaataaacttaaattttgtcgttatcaatctacaacacaaccaaaccaaataaatacacagtcaagctcggtccagaaaaattgatggtcaatttacattggataagcattttttggtttgaaaccgaccgaacctgtctgatgcaaacccatagaggtaggatccaatgtaagtatgtaactacaaaaaaaatgtattgtattatgggttagtttgaattattaataataagtatttataaaacacatatg

SEQ ID NO: 271983 - DNA, 447 bp, Glycine max
  unsure (1)..(447): unsure at all n locations
tgtttatgttattaggtgtcagaggcagccaaacaactgtgcttacaattgcttcaccagcacaattctataggaaaaactcacactacactacttattacaattgtttgtagcaccttccaaaagtggtttaatggatattgtttgtttgtctttatgagaccacatgccttttcatttcatcaattatgaaacttaatattgtgttgttccatgcaagtggatcagcaaacgtgaagatgtgtatcttgtcattaaagcatttgcagtaagtggggagtggatgaatgctgaagccaaacgctttgttcaaattctggtaagagctaagaaccaaggagttctctggaatgtagtcttggtttaatttattnttctggtgaaagacttttcttgaaaagtaatggccttaataaagtgattaatatacttttccatgatcagtat

SEQ ID NO: 271984 - DNA, 179 bp, Glycine max
  unsure (1)..(179): unsure at all n locations
agatgtagtagattagagttatggggaaagaaatnagaatttgaaaaataaaagtggattgggttaaagaagaagntnnattggttaggattaaaagagaaagtaattgaatgaaaaggaaaaaggaatggaggggagagaaagttntaattgagnnatataagaattatatttgaata

SEQ ID NO: 271985 - DNA, 336 bp, Glycine max
  unsure (1)..(336): unsure at all n locations
cggtggattgtggtcttaaaagttgaaatgtgatctgttgtgctattgtaaactctntttttatatgtgtaacaagttgtgaactctgtctgaactaccatggctgaaaacgtgtattattatttgtgactgtcaagattgtgagactntgaatcaatttttgttgacattattgatctacgtaactttaataaatatgatgcatcgaggtgatataatattttctcattttcctcatcatgttttgaatttagtattatttcatctgtgcatgtcacttatttcttaagtcttaacccatttaggagatttctaatcgtaggcttatagattata

SEQ ID NO: 271986 - DNA, 432 bp, Glycine max
agctatataagtgcgggtctgtgagacgaaggtcaagtggccgcgatatgtgaagatgatgttccaagtaccattggatttggtccgaccatgccctcctgattttcagctgggagattggcgggtggaggaacgccccggcatttacgcaacaggcataatgtaaacctttacggttttaaaagctctatagttgggcctaggctttagagttttcattttgataacgctctgcgtcttttgtctttgaatatataatacaaggatctttcttcatctgttcctggtctctacccattctcattcatttgcatgctcacttctttttctgaaacggcagattcgatgacgagtccctcgaaggtactaatacctgggactcgtctatcaacttcgagcaagaaatgaaccacacggaagatgaacgagatg

SEQ ID NO: 271987 - DNA, 429 bp, Glycine max
  unsure (1)..(429): unsure at all n locations
ctanaagaatggctaagaatttgttaaaacataagcacttagacaatgaaggaaagctggagttgctgcacatgatgtccaacgttatgtcaaagaataagatcgggctgcacaatgcacaaggcaagataaagtgtcaaatgaagaattgaagctgcaggattcacgatgtcggatacaatgtccaggacatcctgcccgaaaatactggagttgctgaaagcattgaagttgcaggatccacgatgtcggatacaatgtccaggacatcctgcccgaaaatactggagttgctgaaagcattgaagttgcaggatccgcgatgtcggatacgatgtccaggacatctggcccgaaaatactggacatataaatctgttatatctttaacagattattgtgcagttagcaagagattagatgatctat

SEQ ID NO: 271988 - DNA, 407 bp, Glycine max
agcttagcgcgtgaatagagaaaaggcttagcaagacatctctcgctaagcgtgtctctaggctcacttagctgaaatcatgtatcttgagtacacaggagtgggcgctgagtgtaaattaaaatcgctcagcgcacatattgccgcaaacatttgagcttagcggcatggaataacacttagctcaatcaaaatgaagtttggctgcaagaagttcagcttaaccacaatgattggcgctcagctctatgaacttcagttatagccgtaaagagttatgcttggcaacactgagtcgtgcttaaccaaggataaggtatcgcttagtggtttggttgtcgcttagtcaaattcagatcgaattgaagttggcttagctcagccttggccagcttagtggaccaaat

SEQ ID NO: 271989 - DNA, 427 bp, Glycine max
  unsure (1)..(427): unsure at all n locations
nntaaaattgaattaaaacgttcagaaactgctggtaatcgattaccatatatgtgtaatcgattacacagtgcaaactttgaattcaaattttaatagctgttgtaaatcagttttggccactggtaatcgattaccagagagtaaatttgttgaaaaagactttttaacttaaaattcttggtcaaaccttttgctacttcaattggaattcccctcctatttaatataccctttctaagactagagacttgtcttgatcatccatcttgaatatctttaatttctttgtcttgaataaagctttgagacgcatgtgaaactttggcatcatcaaaacattcagcttgatcttttgtctacaacaattacatagcaatcttcatgctgcttcattctatcttaatcccaagtaagtaatttcaat

SEQ ID NO: 271990 - DNA, 343 bp, Glycine max
  unsure (1)..(343): unsure at all n locations
agcttgcctgngtgggcctcaggccttcctctcagtcaccctaagtcttctaatgggcccaggagggcccacgggcagaagaatgtcccaaaatagaccattctcccctactttgaatntcctgctcatttccttctgaaacgccgcgaaaccttgcagattgtttgacaattggtgttaagcagctcaattaggctggcgagaatctatatgtttgcaaatgatcgtccccacacgacattatggtatgacagttgcccctctttacttatcttttattgtaaataaaagggaagtaaagatcaagacactaatttcgttcaagggatctcaccatgcaact

SEQ ID NO: 271991 - DNA, 441 bp, Glycine max
  unsure (1)..(441): unsure at all n locations
ttataagcgcgggtctgggagacaaaggtcaagtggtcgcgatatacgaagatgatgtttcgagtacattagattcagtacgaccatgccctcctgatttccagctgggaaattggcaagtggaggaacgccccggcatttacgcaacgagcataatgtaaacctttacggatntaaaagctctatagttgggcctaggctctagagtttttccttttgttaaggctatgagtctttcgttgttgattatataatacaaggatctttcttcatctgttcctacgtctctacccattctcattcatttgcatgtttacttctttatctgaaacggcagatacgatgacgagtcccccgaaggtactaatacctgggacccgcctatcgacttcgagcaagaaatgaatcaaacggaagatgaatgaaacgacgatgtgggac

SEQ ID NO: 271992 - DNA, 355 bp, Glycine max
agctcttgcggggacatcttgacttgctttccaatctgacattcaccacagattctgccttcttgtattctcagattgggaatgcctctaacagcacctttgtcaatgattttcttcatgcctcttaagtgcagatgtccaaatctttgatgccatattttgacttcatcttctttggaggatagacatgtggaggagtaactggcttcttgacgtgtccataggtaacagttgtcctttgatctgctgcccttcattagaacttcactcttctcatttgtcacgaagcattctgactttgtgaagattacattgaatccttcatcacacaactgactgatgctgatcaagtttg

SEQ ID NO: 271993 - DNA, 265 bp, Glycine max
  unsure (1)..(265): unsure at all n locations
nttagccaatacacacgacagacaactttgtgctcggatatctgattgagtccagtaatataacgagacgctcgaaattgaatgttgaagctcttagcgaattcaaacatcattaagtgtttactcggatgtgtgatgctgtcccgtcatatatcgagacgctcgaaattgaatgttgaaactctgagccgattagaacgacaataactttttactcagatgtctgatagagtcccgtcatatatcgagacgcttcgaattgaat

SEQ ID NO: 271994 - DNA, 412 bp, Glycine max
  unsure (1)..(412): unsure at all n locations
naagcttggagctngaagatgttntgtctttttacatgctcaactctctgagtggcatttgtattgattgttgcatcttagtctctatatttttatatgtacatcatgcattatcatatagaggaaataagattgtttctaaagttagaaacttcattagtgaataaaactcttcattttaatcgattacaaggaaaatcataatcgattacacaagtgtttgtagcctgcagaacgattcttgtttcggctaaatcgattgctagttaaccataatggattacacagtttagttgataccatgtctggtttttcatgagtctctactttaatcaattatcaactattcataatcgattacttcacttttaaaagtggtcccataagtgatcagaacactttaatcaattac

SEQ ID NO: 271995 - DNA, 259 bp, Glycine max
gaataaaaaatctgcacatgttacaagagtttgtggtctatgttcttctgcagatcatcatacagatctttgtccttctttgcatcaatctggagtcaatgagaaacctgaagcttatgctgcaaacatttataatagacctcctcagcagcaaaaccaacaacagcaaaataattatgacttttcaagcaatagatacaatccagattggaggaatcatccaaatctgaaatggacaagtgtcataccctaatttcgt

SEQ ID NO: 271996 - DNA, 200 bp, Glycine max
  unsure (1)..(200): unsure at all n locations
agctcttgtcgcataaaggtgctattgctttctctctttttgatggaagacagtntcgctctactaataacgatattgcctctgcccccatgtctgacgaggaacgtaacacggctatgatgtgcctctgacgagaatatttcatatagcgccaggcctggaagggtctttattagactatgtanggaagcatgtcgata

SEQ ID NO: 271997 - DNA, 409 bp, Glycine max
cggtgatcttgatggactttatagtgggcaatatctttggttcttgtttacgacgatgaaccagtcctaccagcatttaaagtcatgatggaaaacagggttggacgggtgcctttcatctccagagagaccatttggtcggtgggaatatatgtcttcgagacgttggatacttgctaaccgcaccacaaatctatctcgatactagttaatcatccattgtaatacacaaatgagcgtggataaccgcattgccatatctacttgtttggtctaactaaccgttcataccctgcgacacattggaattcacactattacacatgatttctggttaaaccttctgactgaagtatgatgctcgctgatacatattaatatgccatcccaagttacatgattagcgtcc

SEQ ID NO: 271998 - DNA, 359 bp, Glycine max
  unsure (1)..(359): unsure at all n locations
agcttgttgaanagaatacctcctaactttattatatattccaaatntaaaaagtctataaccaaagaaatacaaagtgaatatctgaaaaagtggaaacattctattcttcgagcagttctaccagtactggtcatgaaagccgtattaatcttaataggagctatctaggaaccactcagagaacatcacaaaacataatagttaatatacacctgacttcaagggaattgttaattactagcctattaaaccttattgatcttcaaatccctaatgttaaacccaaggaataagatcaagataaattatatcaaccaagaacaagtagcagatatctagatgacttaccaatgtca

SEQ ID NO: 271999 - DNA, 434 bp, Glycine max
  unsure (1)..(434): unsure at all n locations
gtgatccatcattcgggtctttagttcataatcacgacttaacactaagtagaatacgtatagcatgttaattgttataaatatcacgttaaatgcacatggtagcgtgaaaatgctgtcggttgttcatgaaaaatcatttcccttttcccaaaaccaaatcaaccaccaccctttgttttaccacatttcatgttagaaatcatacctccactaaatatctgtctcanacccaacagccaaacttacacacatgaatcacgacacatcattaaacgcaagacaactaatccctaatcttttaggactaatgagcaaaagattatgctnttcggcctaggggtttgacagcaacaaagaaagacctggtttgcatttgggtcttcttaaaactgaaataaccaatccctaatcttttatgactaaaatgacta

SEQ ID NO: 272000 - DNA, 435 bp, Glycine max
  unsure (1)..(435): unsure at all n locations
agctntgagcaaattcaaacgacaataacgttttactcgaatgtctgcatgaatcccgtaatatatcgagacgctcgaaattgaatgttgaagctctgagcaaattcaaacgacaatgacgttttactcggatgtctgattgagtcccgtcatatatcgagacgctcgaaattgactgttgaagctctgagaaaattcaaacgactataactttatactcggatgtctaattgagtcccgtaatataacgagacactcgaagatgaatgtcgaatctctgagccaattcagacgacaataactttttactcggatgtctgattgagtctcgtaatataacgagacgctcgaacatgaatgttgaagctctgagccaattcaaacgacaataactgtttactcggatgtctgattgagtcccgtaatatatccaca

SEQ ID NO: 272001 - DNA, 430 bp, Glycine max
tcaacattcaatgtcgagcgtctcgatatgttacgggactcaatcacacatccgagtaaaaagttattgtcgtttgagttggctcagagcgtcaacattcaatttcaaacgtctcgatatatgacgggactcaatcagacatccgagtaaaaagttattgtcgtttgaattggctgagagcttcaacattcaatttcgagcgtctcgatatgttacgggactcaatcagacatccgagtaaaaagatattgtcgtttgaattggctcagagcttcaacattcaatttcgagcgtctcgatatgtgacgggactgaatcagacatccgagtaaagagttattgtcgcttgaattggctcagagcttcaaccttcaatttcgagcgtctcgatatatgacgggactcaatcagacatcccgagtaaaagata

SEQ ID NO: 272002 - DNA, 401 bp, Glycine max
agcttgccacccagctcgcccaggcgagcagggttgcttcctctagaagcaacagccttctggaggaatcttctggagggcccaagtgggcctggttgctatttgcacccccatttttgctaagtacaccccctgcctttttttttggtgattcttttttcgtaaagctacggaaacttatgaatttcgtaacgatacttgttttctttccgtaatgttacggaaccttgcagattacataatcatccccttttttgacttacggaatgttacggaacctcaataattgtgccacgatgcttcgatttgatttccggtgtgtcacggaaccttacggattgtgcatcaatatttccttcttgtttccggcatgtcccgaaatttacaaaatgcctaatgat

SEQ ID NO: 272003 - DNA, 451 bp, Glycine max
taggttaaattagtctaaacttacgagggatcgaggtttactactttatgctatagcatagaacacaagaacatgattaattagagaaatatcttcatatacatcagcttgtttattagaaagacccaacgctttttacctattgctgtcaacttttacttacttgcatttactgtttttatcatagaagtagtttatttctgtttttaaccattgtttatttacttctgaataaaactctatctaataagaaagttccttgagttcgatactcagatcacttcgttttaattttaaatacttgacgacccggtgcactttccggcgaatcggatttcccttgaacatatttgtataaaggaaaattggaccaaaaagtaactgcaggggaaatccaacaaagtatttatggcgccgttgccatggaacttaattcattagaagagttcag

SEQ ID NO: 272004 - DNA, 455 bp, Glycine max
  unsure (1)..(455): unsure at all n locations
agcttgatcaaaacaattatttaatcattccaatccactcaaatcatacaatttctcattcaaattattctctaacactcattttataccaaacaatccactacatatcattttcaatcaattcattcttcaaacatgcttttggtacaagaaaacaactcaaagtgctgaaatttaaagaactaaaacataaaccaaactaaatactgataaactaaaatgttcatgctttgcagaaattaaactaaacacaatttaaacatcttgctcatcctaaggctgatcttcattaagatctagtgctggagctgctgatgaatcttggataggctactcaggctctgtgactagtgtagctggttgggtctccttaggaataggtgcaggagatgaatcangtatctaatctgtggaagtcccctcctcctgagccatgtgtgcatctgcatcaaaat

SEQ ID NO: 272005 - DNA, 439 bp, Glycine max
  unsure (1)..(439): unsure at all n locations
tcagaccaaagcaactcanaatctaggtatctaaaacccctcaatttagtggattttcaaggtttgagaagtgaaaatgagaatggggtaattttggagcaaactctcaactcaaacaagtctataacattaatctaaactctctcaaactggttttacgacgaaaactctgccgaatcaaaatttgactcctcaacacccaatttaccctanaaatggctcttgccttcactttggtcactcattttcctcctttgcacagcccaagctttcccacagtcctaaatgacatttcaaactangattaactcactttaacctccaattaccactaaatccagatttagcttttcaaaccctcaaagcatcacacttttccactcatatcactacattctcacttttcaaccgtaggttaactctacccttcatctctatc

SEQ ID NO: 272006 - DNA, 447 bp, Glycine max
  unsure (1)..(447): unsure at all n locations
agctntagcaatatcccttttcagagtttgcatctctagttatgtgataatgaatgttctctgatgttgtatatctccatttgttgaagtgatacactgctcgttgaaaatttgctgctactttttgcctttttgtttaatttgtgtgctagaatctgaatctattgtgctcatgaacaatacaatcatattaagatatatcattacccttaaactacataaatagaaattagtgtcataatttatggaattgaagttgattctacacagcctggtttggttattgacttatttatatcactgaacgatctgctttggttgtaggagagcagtttatatgttggagaatttaatattcatctttatatagtcagttaaccggctagtgcattntcgtttacatgcgtaggttattgttgatgttgttatatcaagtgactatcattg

SEQ ID NO: 272007 - DNA, 403 bp, Glycine max
  unsure (1)..(403): unsure at all n locations
tatagctgaggttggccaggcaggaacatagttcaaacctttataacttaccgtatgaatgcatggcgtctttgtgcaaaaactgttgatttgttaactaataatcatttaggtctcaccaagtaagatgcccatatctcattagctggaggaagaggctgaacccagtgccctggtattcggctggatgaagttgcaaggaaacaaaatcaaataagataaatgttttattttaatttttcatactcattgattacaatacataatagacattagcaaaaccaatacagttgcagataagccacataatagcggtgcaatgctntatgataagcaataactatcaaaagtcgtaaccacagcactaacatgtgaagtaaggacataggttgcataatatagt

SEQ ID NO: 272008 - DNA, 172 bp, Glycine max
ataactttgacattcaacctagcatccttacttgagaatagatctcaaactgctgactttttaaacacgctctctatcaggaaatcccagcttaaatgcatgtattattattatttgtggaggatgcatttacatgaattgaaccttgtatatattctatgcataggactat

SEQ ID NO: 272009 - DNA, 458 bp, Glycine max
  unsure (1)..(458): unsure at all n locations
ntatacaattaatatagaacctatatcctaatgtcacatcctatcagagtgttgtgttcccgtgtcttctagcatgaggttcttcatattcatccacctatctatctgctcccctgaacacaaagtttaagatcatcacaagatccaaacacaaacagcaaaccgggagtgagttatcgcattcctaactactagagagaaacaagacaacatatagtagccaaatacaatttacttagcatatctcacattatttcatcactttgtcattcaaaatttacttttcaatcatcaatcacaatacacaagaatcacacacttcgatcaagacataataacacatcaatttcataatgaacaattagcaagcgtatgcaacagttatgctaagactcaagcctatatgcaatgtggtaccatgtcagtgaanaacctcatcgggcgtctaggagtacatg

SEQ ID NO: 272010 - DNA, 318 bp, Glycine max
  unsure (1)..(318): unsure at all n locations
agcttntagtgaagagatctatgaggggcgccatgactgaagagaccagtgtcgccctcgagttngatagccaccgtttcaggagcgccgagcaccagcagcgcttcgaggccatcaaaggatggtcgttccaccaagagagacgcatccagctccgggacgatgagtacatcgattttcaggaagagatagctcgccgacgtcggacatcgctggtcattcccatggctaagtttgacccagatatagccctggagttttatgctaatgcttggcccacagaggagggagtgcggcacttgtattcatgggtgaggg

SEQ ID NO: 272011 - DNA, 410 bp, Glycine max
  unsure (1)..(410): unsure at all n locations
gggactngatcttggattagtgggctgaaccataactgaaattttgtaatcataattagtgaaattttggctccacaaattgaatttcaaatttccctccaattttatgtgacacttatgctataaatagaggccatgtgtatgcattttttcaactttaatcgtttgaaaattacacttcaaagttcaaagctcatttgaggaacaacattttgtgctccttctctccttctccctcccctcatcttctcctatcttcaaggtcttatccatgactttttcatcaatgtggtaattgatgccctctctaggagacacacattgttttgctccctaggagctcaaattttaggatttgataacatttgggacttgtatgctgtagatgaacattnttctcccattcatga

SEQ ID NO: 272012 - DNA, 399 bp, Glycine max
agcttcggcctactttgattcttacagttccgaaaacaaatattgagttccttttctacttctaaaatttgaaattgatcacattaattacccttcgggactgtatttcaaatatttgcttttgacattatcaaaaaaaaaaaaaacatttgtttttgaaataccgtttttgacttctaaattttgatcacattaaaaactaaaaatcacctttcactccttaacgaatcaagttgaagttgctgaaattatgttctttcgagacaaatttaataaatcctaccaaaattacagagttagtaatgcgactggtcctaaatcttttaggactaaaatgcgcactatcattctgtcaaccaaaatattggcagcttctgcgaacaatatagaatttataaa

SEQ ID NO: 272013 - DNA, 451 bp, Glycine max
agcttcccttgctcctctctgacttcgctgaccagcttcatgacctcacccttttgatcttcaagaacttccaaaacctctcccttgtcgtgcagaagtgaaatcacagtgtacattttcatccccatcgctcttgctaacaagctcattcttatgggcaaacggaagtagatgttcctcaaccatggattatgactaagaacttcttgtgctggagtgcgacaacagtctattgccacccagaattgtcccttttcgtttattcttacgttgtctggaaaccccggaaggtcagctaatagttccacacttccacttttaggaccctctgtccaaagcttcattagcctgtcatcgtgtcattttggaatgaatgtgttacgttatacatattacatatagagcacatattgtatatattcttatctaattacaatatattttttcaccc

SEQ ID NO: 272014 - DNA, 444 bp, Glycine max
  unsure (1)..(444): unsure at all n locations
tgttttccaacattcaggaataatggaatgtgatgttgcaaattttaattntccttgtaataaatcagtaaagtaaaaatgttaaattattcattctttcattgtaataaagaattgaaccttggaataattttttgttatataattaaactgactaaaaataactagcccaggtcttaacctttccagcattcctcatagttgcaattctttttttcttaaaaaccattttgcttctttcttaaaaatataacttctgctggattgcttangcactttcttgcatataagtagagcttaatatctttttctaggaattgtaaaattgtctagtaattgccatttttcctttggcagattgagaagcttagtgatacacagtgccagcctgaatcacagcttaagttcataacagaggcctcggtacaggtaaatgaagcttat

SEQ ID NO: 272015 - DNA, 425 bp, Glycine max
  unsure (1)..(425): unsure at all n locations
agcttattccttatttttaattntttttctttacaaatttaggttaattacaatggtaggaaaatttaaaatgtaacaagaaaattattttataaataataaaaataaatcttatatttatgtttctttctacttttcatattgaacaaattggtttggccgaaacaaagaaacatttttttttatttataaagagatttttagtaaaaaaaattcaaataacttctattttattttttaagttttatgtttagttctaaattttaaagttacttttaaatcctatgtgtcttatcttctaatctatcatatttggatcttatctttattagatattaatattttttgtctctattaaatatnttcttgtacttaaataacattttatttttatcatatatggctatttgtatttgaggtttctc

SEQ ID NO: 272016 - DNA, 428 bp, Glycine max
  unsure (1)..(428): unsure at all n locations
tgtgccgatcccacatagttggagcattctcgctaaacagtgtgacgctggctagtctccctatgattntacctagtgaaatgacttgacttaccagtacatggtctattttgtcatgtactcctaggcatccgatgagatttttcattggaatggtctcacattgcatataggattgagtcttagtgtatctgttgcataatgtttgtgtaatgatcattgtgaattgttacgttatggtgtgtaatgaattgtgtaagtgtgagatgttgtgttgtgcttaagatgtgttattttgaacacgtgattaatgtgaaggtgtgaaatttaattctgtgattaaatccttgggacaaatgatgttacgtaatgagtggtaaaatgacgcgaattgtctaagttgagcttgtatacttatactattatat

SEQ ID NO: 272017 - DNA, 403 bp, Glycine max
agcttgctccaaagcacaatgtttgcttacatgtaatggaaggaggtcaagaggttctgaaagtatgaaccaaaacataagatcacctagtgaggtaaaagcgtcaagcaaatgacgttaaagaagcgcttcctaagaggcaacccagttttaaattctactatttttattttttttgttttatgcatttaaatcatttggaacttgctatatagtctatacataggagtatatcatccaatctttgaatgcttaacataagggtttcaatttcatggaaaaaaggactgaaaaataacttagaaaaatattttttgaaaaaaaatagtcctttcgctaagcgcaagcctcgcactaagcgcatctctgttcatgtgttaatctacgagtctcaagcgcttag

SEQ ID NO: 272018 - DNA, 414 bp, Glycine max
  unsure (1)..(414): unsure at all n locations
tcgcactttgatatggagacacatgaacagcgctatgccatgacattcattgtgcttccaaccaagggtgaatatgggagaatggctttgagggtcccacttangccatcatgaaacttaacttccaacttcaaaatgggagacacatgaacaggccctaagcaaatcatgtggcttcggaacagaacgagaatggaggatngcctttgaggtcctctcttangcaatcatggaacacagcttcaaactcgaaagtggaggacacatgaacagccctaagcaataacattcatgtggctccggaacaggatgagaatggaggattgccttgagggtcctctcttangcaatcatggaacacagctccaaactcgaaagtggaggacacatgaacagccctaagcaaattcatgt

SEQ ID NO: 272019 - DNA, 363 bp, Glycine max
agctttaatcgattacaatgttttggtaatcgattaccagtgactctgaacgttgaaattcaaattcatatgcgaagagtcacatcctttcacataaaagccttgtgtaatcgattactcgatttgcgaatcgattaccagtgactgtttctgaaaaaatcataagatgtaactcttcaaaaaggttttgactttttcaaattggatttaagtttttctaaaggatataactcttctaaatggtcttcttgaccagacatgaagagtctataaaagcaaggctttgatttggattatcaattaattcaattctttcaatcttgaatacttttccaatcaatctcttacaatcctttactagcc

SEQ ID NO: 272020 - DNA, 332 bp, Glycine max
  unsure (1)..(332): unsure at all n locations
ctgcctttaaggcttgtacctcatcactntcttccgaagctttaacctcatcgtccctcacaggctttagatatgggagccaatccaatccttgtgttcggactctcagccacttatgatagccgccgatgatcccattactgcttcccctaagctctttgtcctttcttcacgccgcatcccatgccttgtgaactccttggagtaccctcgcgttgtggtcactaaaaccccgtgcgatgaaaggtgtgattctttcgtctaatggcgctcctctcatggcgtagccaagctgtcttatggcgagaacgggattataattaatacaaccc

SEQ ID NO: 272021 - DNA, 295 bp, Glycine max
  unsure (1)..(295): unsure at all n locations
agctnttatgtgaaaggatgtgactcttcacatttgaatttgaatttcaacgttaaggcactgataatcgattaccaaaacattgtaatagattacagccttttgaaattaattggaacgttgtaaattcaatatgaaaactttttcaaaacaattttgctactcgtaatcgattacagcaatcatgtgttgagaaaaatcatgtgctactcaatttttgagaaaaacttttcatacttatcttgattaagccttctcttgattcttgaatcttgagtcttgaatcatgatcttg

SEQ ID NO: 272022 - DNA, 429 bp, Glycine max
  unsure (1)..(429): unsure at all n locations
tgtaggattatggggtacccatcacatgtggtactaggtggcggtcgggcgatggtgcacaacaagttttccacatccacaatgcgcgcataaacccaccatcccctgttgcccacctccaactgagctcacgtactcccacgtagcccatatcctcgtttctctcaacaccgggtccccatcaatcctcccaagcttccccaacatcaaagtaatacaacattcacacagcacaagctatcacagccaagcaaaacagggcaaaggcagaaaactctgctcaaaacaccaaccaaaatcacagcttttctcacttaaagaccccagtaacaattccttcgatccaattcgttaaccgctggatcgaatccaaaattntactggaagtctctagtgcataagcctacattttgaccgttgggatctact

SEQ ID NO: 272023 - DNA, 454 bp, Glycine max
gaagcttggagccaaaatttcactaattatgattattgaattttagttatggttcagcccactaatccaagatcaattgcaagattctccactaagtgtgcttaggtgtcatgaggcatgtaaagcatgaaggacatgcacaaaatgtgattatatgatgtgacaatggggtgtagtaagcaaatgctcacctcctcctctaaaatttaattggattgggcttcaaccaattcaattaaatttatttccaactacacacatcaaatattcacttagtgcatgtgaaattacaaaactacccctaatacaaaaactagtctaggtgccctaaaatacaatggctgaaaatcctatatttccagcgtaccctacctacattatggagccctaaatacaaggccaaaaaataatgaaaccttaatctaatatgtacaaagataagtgggctcatact

SEQ ID NO: 272024 - DNA, 461 bp, Glycine max
tatatctggtcgagtgcaggtctgagcatacataatactcctaacaactgatacatacagaattgcttccatttgcttccgttccagatcatttttaggacattgtgcgagactaaatttgtctcctttctgaattggaacgggagatgctgagcacttttccatcctaaatctctctagtactttattgatatatgctttttgagacaagcctaacaatccttgtgatctatttcggaatatttctatccctatcacatagcttgcctcacccatatccttcatttcaaagttactagaaagaaacttcttagtctcatgaagaagaccaagatcattagttgcaagcaatatatcatcaacatacaggactagaaacataaccttacttccactgaccttcagatatacacaccgatcaatagtgttttccttagatccaaaggaaacaatggtatcat

SEQ ID NO: 272025 - DNA, 452 bp, Glycine max
agcttgtattgtcactcagatcttgactacgttataactgtttgaataaaatgagtttatcccatgtttttactgatcgaggccatacccgaatcaaataaacatgaaaatgaagtaactaggaagtgatcctaggtcgtttcccaacgagcaatgataaaccaaatgttcataatatacttgcagtaacagcaacgattggggggggggggggcaaaaattttctaattctctatgcgtttcgattcctgcaagtagcgttaatctccaaatctatgggaattaaatcacctacagcatatctcctttgcatacaaaacatgcagagcatcatttatccaattccaaataacaatattttctactagtactaagtattcgcacaaattatcaatgaatcacagaaaaagaatgatccaatgccttctaactgaactaaactttccaaattg

SEQ ID NO: 272026 - DNA, 465 bp, Glycine max
  unsure (1)..(465): unsure at all n locations
ntgagccaaaatcctgactcaccataaaccttgacccagggtgagaatgccaatccttaccctcggaagcaaaaaaaaagaggaggaggaaaatttccaatcaaagaggaagcaaaaaaaaggagagaaggaaaatttccaatcaaaggaaaaagagaggaaaggaaattcccaatcaaagagtgggagaaagcaaaaagaaaagaaagaaaaattctcaatcaaagaatgggagaaagaaaaaaagagaagtaaaaaagaagaaagctcctggtcgaagaaaccagaagaaatgtgccgagaggtccttggaccagacgatgtctgaacaatacagaattgtcaccaaatgaacaaaagaaagaaaaggaaaccatgacctanaagtggtcttcttcctttaattaccaaccaaaatcctgtgcgctagcaactntttcgcctcgcgcaaaaccaaaacagaaa

SEQ ID NO: 272027 - DNA, 450 bp, Glycine max
agcttccttgagataattcctaaagaagctagagcttagctacacacacctctctaatagctaagctcacctccttgagatgagaagctagagcttagctacacaccccctataatagctaagctcacccccatgacaaaatacatgaaaatacagaaaagtccctactacaaagactactcaaaatgcctcgaaatacaaggctaaaaccctatactactagaatggccgaaatacaaggcctaaacaaaggtaaaatctattctaatatttacaaagataagcaggctcatacttagcccatgggctcgaaatctaccttaaggctcatgagaaccctagggccttcccttggatctctggcccaatctacttggagtcttctatccaatgcccttgcgggatatgattgtatcattcctccctccttctcattctctctatttggtc

SEQ ID NO: 272028 - DNA, 423 bp, Glycine max
  unsure (1)..(423): unsure at all n locations
nttcgattcattctatgtacccgtagtggtccacattgtgtttcgtgcatttttattctcgttttgtttactttttatacccccctcttgacgtgcttaagccattttacttaagtcatttctcgcttaacttaaaaataaaataaatttccaccgaatgtttgaattgtattatccattaacttcggttaaaatcaattccgaccgttcggtcatgccgtaaccacgttggaaatcaaaaagaggtaaaaaataatataataatcaaaaaaatatctttttagtgaaataaagcggacaatcaatcggacgttttctctttgggatttctcattcttaatcgaattaattaataactaaagtgaaactaaggctaacatcaactcgcctagtcaagctcgtccacaaaaataggcttttgaa

SEQ ID NO: 272029 - DNA, 453 bp, Glycine max
agcgttcatagaagatatggagcgagaagaactctccctttcataatcgccctattggtgccatactggcattgacaataatgccagaatagtatctacacattatgtattccctagctaattaagacttaacagttgacacaatcagaccataatcttcacattctttgataaactattcactacgaatggcaaaagattaattatgtatagtgtaacatagcctgtacaaatacgtagagtgattcttctctggtgcactgcttggctactcgatattcatgccaatacatggagtaaaagtgcaatatactgataaatatgtcttcatcaaagtaaaggtaactcatgtgttaatcaatacacatggatataaaaataaacgcctttaattcggcattgaagccaagatagtatatattgacttcacatgctgacatgtagcttaaacta

SEQ ID NO: 272030 - DNA, 512 bp, Glycine max
  unsure (1)..(512): unsure at all n locations
aggcccccccgcgcggggcggtttgatacctagcaccctcgagacancctacgaaactcaagctattgtccttcttttgcacacgtgaattatcatggaacatgtttattatctacattaatatatatatatatatatatatatatatatatatatatatatatatataatgcgcttattaattattgttatcatttaaatatgtgtatctaatgatatgtcggatacatgtattttgtatagcgacgtgtgatatatattcgttacatataaatatatttacaagctctgaagtgagacatatattattatatacatgtttatctatttgctcagcctatttgtctctcaataatcgacattgaagatgttatagctatgctatgacatgatattgaaaattataccagccgatgtatatatatatgggttgtgtctagaaacaccgcttgaatgataatatgaatatgagaacaatgaagaaccgtgaatctgaccttgaactcggtgcc

SEQ ID NO: 272031 - DNA, 350 bp, Glycine max
agctatgctcatttgctgatcctttggatcatttgatgatgtttgtgttggctcggaggagctatagggaatggaatctccatgcccttaatgactttgatatttggaaatatgatcaatgcatttggagcaaccgaaaactccaacgaagttgttgatgaagtttctaaggtagttcctcagtaatcccgttgactataggtgtattagtaacttaacattctcagactcaacactccacgataaattactgagatcaggtgtcactgacatttgtatacttggccgcgggtacctctagagcgtcgctaccgcgtatgtacatcagattatctactcgatcttactgt

SEQ ID NO: 272032 - DNA, 459 bp, Glycine max
  unsure (1)..(459): unsure at all n locations
nncttttgtaccctataaaattaaggagtatttcccttatgtttcggatatgctaattcaaaatgtaaaaagagtattccttgattttattttattttttgatgggaaaaagttaaaatgagttgggttccgtgggctcatccagatcaggtcaggccttaatgctcaaaaaacacttataaagatactaataaattatctaccaataaaatcctcacattaaccacgcgaatcaaatttacatcattttgaaatgtgagttcgttcctcactaattgaaccaataccttgatttttatgagatacagaaagaaacatccttaactgtgatatagtacaaaaggatgatggggaagtgttagttcttgctgagtattttagatgttatttctatttactgtgttataggcattgtactgacatgtagcaatcttgtttcctacagtgcacccaatgaat

SEQ ID NO: 272033 - DNA, 388 bp, Glycine max
agcttgaacctccggttgtgcaatgctagtgattgattatggtgcacttgaacttgaatagtcttcatgggtcactctccttggctgctcagccatgatagtgtctcctctaactcctgtatgagattgcccatgagtaggaaaactagaagatgccttagaagatcgaggctcttctcctggagttgttgctgcttctaagtcctgcaaaaattttctaattctctatgcgtttcgattcctgcaagtagcgttaatctccaaatctatgggaattaaatcacctacagcatatctcctttgcatacaaaacaagcagagcaacaattatccaattccaaagaacaataaattctacagtaactaaatattcgcagaaataatcaat

SEQ ID NO: 272034 - DNA, 441 bp, Glycine max
  unsure (1)..(441): unsure at all n locations
tgaaggtgtgtagcccaccatcttttcatagtagtatattggtaatgcgtctactattattggcatcattgattttctctgtcattgaggtgctacttgagctgccaagtctctccacctttgggcgtatcctttgaaagatctgtgccctctttttgcacatgttctgtagttgcatcctatccgaagccattatactgacactgcctaacgaaggcaaccactaggtccttccaagaatggactcgggaaggttccaagttagtgtaccaggtaacagctaccccagtaagactctcttggaaggaatgtatcagcaattcctcatcttttgcgtatgcccccatcttccgaaaatacatctttagatgggtcttggcgcaagtagtccccttgtactcgtcaaagtccagcaccttgaacttgggangggtgatgata

SEQ ID NO: 272035 - DNA, 365 bp, Glycine max
agcttctaaaccctgcttcaccatattacaatttgcattccactgcctaaactcatgatttcacctatgcgatgtcttacccttcatatttcggcatgagggcgtacttccttggatttgatggatccgcttttaccatcaaacacctacgattgtttacctgttgaccatgttgaaaatgactcttgcttgcaattgatgtattgttcttcgagtcctacaactatcaatgcttggcacatcaatgcacccaaaatttttaaaagagcatttcctggtgtcaaaattaaatgtaggcaaaaaaggaacaaaactcgattgcataaccatgaagattacatcacgttatcttgctgacagttact

SEQ ID NO: 272036 - DNA, 79 bp, Glycine max
tgactctagcatatggtcgaatgatcgtgaaaagtggatccttctatacagatcctcatgcaggaaatatactgattcg

SEQ ID NO: 272037 - DNA, 313 bp, Glycine max
  unsure (1)..(313): unsure at all n locations
agctntgactaaaccaatggcatgctacactgtataagactaaactctattatcaaaattgtaactgttttctctatcctagggagttatgccacggaccaagggtacaggtggcttggttttctttattttatccaccaatatagcttgagtagttagaactgcaccagcaacagaaactgcactttgaagagcacaccttgcaacacgactaggatccgctactccagcattcaaaagatcttcatatgtgcctgtcattgcattatatccaattctccaatcatgtgttctaatcttctggacaacaatg

SEQ ID NO: 272038 - DNA, 419 bp, Glycine max
  unsure (1)..(419): unsure at all n locations
tcacanaaaattcaaaaccaatagcaacaaccatccaaaaattgttacaaacaaaaatacaatcatgcaacaacatcgcaataggaaaaaatcagtgaacgcttaaacaaaatcactgaacaccttcaaagggaacataccacttacctggaagacgattaccttacgaccggaacaaaataggaaccaccaccaatggaagaagtgaatggtagaagaacaccggaacaacaacaatcacgaccaaatgaccagaacaggaacacgaaccgaaacacgaacgaacgaccgtaacacgcgcgtaggcaaaaaaagaagaacaagcggataagaggaagatgaagaggaaatagcaccatatgaaatgtgagaagcanatgcactgtacgaatgactaactntaggattntatagtaata

SEQ ID NO: 272039 - DNA, 419 bp, Glycine max
  unsure (1)..(419): unsure at all n locations
agcttatttctttntgttcattgatccctattctataatattggtctgtttaactaaccctgtagatattaatttcacaatggaagtaaaggccattagaaatctagttgcctaattttttataattagctaatggacaattgtactaggatactctagttgataaattcataacccttgccgatagcaatgcggngggtggatccggagagctcgggcttgcgattccactggaggagggcagaggggggtttgggttctttgggggttacggttctgaaacccgtantataagcgcattatactgtctaatattgtcttctcaagtaaaggttacttatgcgttaataatacatctggattaaaaataatcgcctttcattcggcattgagccaatattgataacattgactttaca

SEQ ID NO: 272040 - DNA, 426 bp, Glycine max
ccttgagatgaggaagtgttgaagggtgaaacttcctgcttttattgttgaccacagagtggtacctggagatatgtcgcgggggtcaggagaccttggggacgtcaggtggggtgctattgcccaaaaccaagcttgaccaatcccgacccaacccgggcatagtcggtcagtgagaacctgtgatgtacctaagcaggcgagctcctggcagtcaacagataaaaggaaaacaagaccacaaagcaaggaggcttgtggtggctggccagctgtgaattttgtgtaatatgtgagatatggcctctggtaatcgattaccaagggtgggtaatcgattacaaggcttaaaaatgaagacaggaggctaagatggtctctggtaatcgattaccacggcgtgtaatcgattaccaggcttgaaaa

SEQ ID NO: 272041 - DNA, 444 bp, Glycine max
  unsure (1)..(444): unsure at all n locations
agctntccattctcttggaagttcatcattggatttgacttcttccggaggatcttcattgtttcctttatcatttcctttggaatcttgttcatgaatattcatatgttctaaagaatctgcaatatcatctagcatattctttcttgacagaatagcattagattcatcaaaggtaacatgaatggattcctcgatattcatagntcttttattatatatcctatatgctttgctttgtaatgaatatccaagaaaaataccttcatcagattttgcatcgaattttcctagattatctttaccattattaagcacaaagcacttgcaaccaaaaacatgtagatgagaaatattaggttttctaccattatataactcatatggggttctctnntaaatgggtcttatcaaggccctattcatgatgtaacatgcagtatt

SEQ ID NO: 272042 - DNA, 440 bp, Glycine max
  unsure (1)..(440): unsure at all n locations
ttaaaatttgaattaaaacgttcagaaactgctggtaatcgattaccatatatgtgtaatcgattacatagggaaaatnttgaattcaaattttaatagctgttgtaaatcagttttggccattagtaatcgattacatccgctggtaatcgattaccagagagtaaatttcttgtaaaagactttttagcttaattttcttgggccaaacctttgctacttcaattggaattcccttcctatttaatataccctttctaagactctatagactgtcttgatcatccatcttgaatatctttaattgctttgtcttgaataaagctttgagacgcatgtgatcttttggcatcatcaaaacatcggcttgatcctttgtctacatagaacagaaagaccttataaccctaaacaaagctctgaataatgaatggcataac

SEQ ID NO: 272043 - DNA, 434 bp, Glycine max
agctggaaaaccacgtaaagcacaatcaacttccacaacaaaatgaaaccccacattaaaattcttattgatacttttatatggttagccaagtggacaaaatgacccaataatttgataagaaccttcggacaatgccaccgcactgattaagaacttactaagaagagcaacaaactaaggtagagctcataccttgttaactggcagcgtagaaagctttgagctttgagcaccaacgattgttccaagagcagtgtagggttttcttcgacccacagttccaacaacagtgtagggttttcttcgacttttcttagataggagcttctgtgggttccagcgagcagttttcgacagtattgaaatgaatgtggtgcaatgtgggtgtcgaccaagcggtttccggcagatttcaggtgggaggagaaaga

SEQ ID NO: 272044 - DNA, 311 bp, Glycine max
tgttgacacgcggagatttacgtcatcttccgcgcacacaatatctgtcatactgacatttgagtcacgctgacgggcggaaatacccgagtggttatccgtataaacattcttttgctgtctgtaagacaaaaagcctgatagcacgcagagactaacgtcgtcttctgcatccttcgtcaatcgcggccgacaagcccgttggcacgcggagatttacgtcatcttccgcgctcacaagatctgtcatactgacatttgagtcacgctgacggacggaaatacccgagtgggtatccgtataaacattc

SEQ ID NO: 272045 - DNA, 443 bp, Glycine max
agcttcatgatgatgaatcaagttgattcaagtagttttgataatgacaaagatgttgacaaaaagcccaaagaatgatttcaagattaaatcaagaacaaattcaagaatcaagagaagtttgatttcaagattcaagaaaagatgaattcaagttccaagagaagaaatcaagaagacttcacaagggaagtattgaaaagattttttcaaacaacaaacatagcacaatttttttttcaaaggaggtttcataaaattttctaagttaccagagtttgtactctctggtaatcgattaccaatttcctgtaatcgattaccagtgggaaagtttgatttcaaaagttttcaactgaatttgcaacgttccaattgatttcaaaatggtgtaatcgattacaagatattggtaatcgattaccagtgcatctgaacgttgg

SEQ ID NO: 272046 - DNA, 411 bp, Glycine max
  unsure (1)..(411): unsure at all n locations
ntgcaganttggtcttcgcaggcaaaaggattgaagttggtctgaaagaggcaaatttaatcatcctgctttgatgaatgagaaaactggggcaaatcaagagggtgagaatgatggagaaacccatgttgtgactgccattcctatacggccaagtttcccaccaacccaacaatgtcattactcagccaataataacccttctccttagccaccacccagttatccacaaaggtcatccctaaatcaaccacaaagcctatctaccaaacttccaatcacgaacaccacctttagcacgaaccaaaacaccaaccaaggaaggaattttgcagcacagagcctgtagaattcaccccaattctggtgtcttatgctaacttgcttccttatctactcgataatgcaatg

SEQ ID NO: 272047 - DNA, 385 bp, Glycine max
  unsure (1)..(385): unsure at all n locations
agctntgactccaagagtttgatttggagatccgtgatctgagcggtgcgcagaacctcgtggctgaccacctgagtaggattgagcgtgcgtctgaggactcacctatttgggataattttccagatgaccatttgtacattctgtatgagatttttgattccttccccactccttggtttactaatattgtgaattatctggttgcttctgttcttcctcccttagcatctaaagctcaaactgataaaattaagagtgatgcgaagcattatatttatgatgacccctatttgtggaagttgtgcagggactatgttattaggatatgtattccagaccatgagattgacttggtcctgcaattctgtcatttatccgcacc

SEQ ID NO: 272048 - DNA, 353 bp, Glycine max
  unsure (1)..(353): unsure at all n locations
tctatactntatacaagaatgaagctctgataccacttgttatacaagtggcctcagatatcttaagaagggggggggggggtgaattaagatattccaaactacttccccaattaaaaatctatttcactctctattcaagttataaattcccttaacaatgaacttcctaaatattaatccaaataacaacaatttgaatctgaatataaaccaataataaacaaacgagtttattggaagacaaagtgcaaactcacatttatactggttcggccacaccctggtgcctacatccagtccctaagtaacccgcttgagagttcactatcttgtaaattccttttcaagtt

SEQ ID NO: 272049 - DNA, 451 bp, Glycine max
agcttaaaggaacactcaaatcgggtgtatttttccccaaggcctagacttcgaagagttcgtcagggcctctccctcgtgatttaggtccaacccataaaacattttaacactcagaccctatctatgaactatacaaaacagatgaatccttaattgttctcaaaataattttaactcgtcgcacctcaaagtgattcaactcgtcgggttcctaaagtggatctcatcacaatattcgtcccgcattaacttgtcgtccttaaagggtcttatagttgtgtaattgtatggttcatagctcacaacttaatatacataacatctcaatacacgtatgatctcataatttaacacatattcaacttgtcacatacacatagttcatcacactttcataatcccaagacatcacgttatcacacctcatgcatcatatacatatctcaca

SEQ ID NO: 272050 - DNA, 459 bp, Glycine max
  unsure (1)..(459): unsure at all n locations
ntaacanatctttctatgtggaaaattatccatgtttggttgacatagtcaataaacatttgtcatggtgaacaaacaatttcaaacttcttaaggcactcatcgaactcttccttaaaaggacaatcaactaaactcccctaggcttccataacataatctcatacatttttttgaccaacaagggatttacactttgccttcacattcttatcaatgtgaaaccgacacaacaagttggtacactcagggaatacaattttcactgcattcatcaatgctagatctctgccagtaacaataactctagggagggcatcacgtttgagaaatagacctcgaaatcattctagggtccaaacaacattatttagacgttctccctccaaataggaaaaaccagcagagaatgttatccatgttagtgtgacactaacaaagtcaagtaacgaaagtttg

SEQ ID NO: 272051 - DNA, 415 bp, Glycine max
agcttgtgtattcctgcatgctactaatatatggaattgcccattgctttgcctgagaataacaattggttgaccacaacagcgctgggggcggcaacggacaatggtctttcaaataaacctgttgtacatgaacaaacattatatcatgcgctgaccgtgccaaacgaacaatcgaagttattgcataattgttacactaactatatgcaatgtacctgaacaaaatgatttccaaacacgtgaccgacacatatgatgcggtggccagaagagtcaggtggtggttgacttctaagagggaaaaatgtcatgctttgttgttgggacaacgatacaaggattacgttataccgtgaagcaatcacatatcccatgtctgttatatccatccacttgtccacactaacctgaa

SEQ ID NO: 272052 - DNA, 263 bp, Glycine max
  unsure (1)..(263): unsure at all n locations
tgtctccattatttccaagtgggtgccttctcctatccttcctaagctatgaatgatgtgaaaaccaagatatgtgaatagagtaaccagaaacatgaatttaatatgaaaaatgagctatgaatttgactaaattaggcttangtgtcttcgtaagaaatgtatgcctagattatagctaacttacgagtcttcattaagatggtgcaatcatcttatgttcctactaatcttaggcatagtcgatgattgaactagcttga

SEQ ID NO: 272053 - DNA, 461 bp, Glycine max
  unsure (1)..(461): unsure at all n locations
agctntgagccaaaatcctgactcaccataaaccttgacccagggtgagaatgccaatccttaccctcgaaagcaaaaaaaaagaagagaaggaaaatttccaatcaaaggaaaaaggagaaggagaatttccaatcaaagaggaagcaaaaaaaggagagaaggaaaatttccaatcaaaggaaaaaagagaggaaaggaaattcccaatcaaagagtgggagaaagcaaaaagaaaagaaagaaaattcccaatcaaagaatgggagaaagaaaaaaagagaagcaaaaaagaagaaagctcctggtcaaagaaaccagaagaaatgtgccgagaggtccttggaccggacaatatctgaacaatacaaaattgtcaccaaatgaacaaaaagaaggaaaggaaaccacgacctanaatggtcttccccctttaattgccaaccaaaatcttgtccgct

SEQ ID NO: 272054 - DNA, 454 bp, Glycine max
  unsure (1)..(454): unsure at all n locations
tgtcaggttcaactntaattaagcgcttggggcatcctatggactgagcgaaaaggctcaggacatcaaacactacgcatcttttaaagcacaaagcgaggatcagaacctcaaccctatgttcatttaaaatactgcgatgagaaaattatagaggacaggaacccttgggggaaaccaagaagaacatacaaaagataaaaacatgcagcaacttctttaattgccccagatcttaagcgtagtatcgcttgacaacgtcggagttcatgggtgaaggtagctcctcgtcatccatgttggcgagcaccagggcccctccttagaaagccctttttacaacgaaaggcccttcgcagttcgaggcccactttcctctattgtcctttagagcttgggagactttcttcagcaccaagtccccttcgctgaacctgcgcgagcataccttctt

SEQ ID NO: 272055 - DNA, 320 bp, Glycine max
gacatccctctgaggatgagactaacttatactcatgttcatccgtatatccctcttgtaacactacactcaactcaagcaacctatgacagtctatgctactttatcctgcgcttgagccgcagatccctattgtgagactatgcctagactaaacaacatgaccgttacagcatcatgaacacacccggttggaggacagatccctctcgtaagagtaagaatccatcctgataccatcaacctctaccgtaacagtacaatgctgaatgctcaagccaactatgtgtgaacacacttggatgaccacaccaacagca

SEQ ID NO: 272056 - DNA, 287 bp, Glycine max
acatggttgctcttggtgcctaacacatgagacttagaatgtagtgtgaagattctcgcttcccgctttttgttttgttttgtaaaggaaaacgcagtgatgagcatacatgaaaacaaatggtatgcaattttgcagatcataaagtttgttgaacacatatgcatgatgatgccatgactcatgcaaaatgtgacgctggaatatgatcacggcctaatgcaggatatgtccattatgatgttatgaagagatgcttatgcgatgcatgatatgaatgctattta

SEQ ID NO: 272057 - DNA, 421 bp, Glycine max
  unsure (1)..(421): unsure at all n locations
gtaattaagtcatacaagtttcaagtggaaggcattttcttaaatgattatataactagtttaaaaatagaatcttagtttaattagttggcgactaactaaagtgtccaattgtatgacgcataatatttaaaataagctagagttgtaacaccctaaagaattacaactcaggctgactgaggaaactctatattgtgtcatctgtgcatgtatgagtttaattacagtagctatattttataatcatagaaacccgtgatatgtatgtgtgtgcgtgtgcgtgtgtgtgtgtgtgtgtgtgtgtgacgcatataataaacttgatcaagaaatatagactatctacgctacatttgcttttgtgcgtgaacagcagagagtattgagtcgccatataatgtgtctctatgtgaccgcn

SEQ ID NO: 272058 - DNA, 451 bp, Glycine max
  unsure (1)..(451): unsure at all n locations
tggattgattcagtccaagttgggatcgaggtttagtaatttatgctgcaacatagaacacaaaagcatgattgagtagagaaacatccttatatacatcagttggtttgttagaaagacccaacacttctacctactgttgtcaatttcacttacttgcatttttactgtttttattctagacttagtctaattctattttaaaccatcaattatcaatgtttctttcaacaatgccttatttctgaatttaacccggtcttagactagtttccctgagttcgatactcggattcattcattttaattattaaatacttgatgatccagtgcggtttctagcaaaccgggtttcccttgaatatatttgtacgaagaacaagtggaaaaaaaagtaaccacaggggaaatccaacaaagtatttatgggcgccgtgccggngatactata

SEQ ID NO: 272059 - DNA, 261 bp, Glycine max
agctagtaaggttaaagtctcacgattgtcacgtgttcatgcaacaatagttagctgaggctatataatacatattgccgaacaaagtcatgttagctgatactaccctgagcctatttctccatgctatgtggagcataatcattgatccgttctaaaatgatgagtaggaaaatgaggctgcaagtgaatcgtgccagatggagacgaatgtggaccctgctttattagacatcctgaatcacctgatcgagcatatgg

SEQ ID NO: 272060 - DNA, 456 bp, Glycine max
ctttagtaaataaataaatatagagcacataataggctgagtaccctaggtataaataactatgttaagtgaggtgtctcctcttggcctcattttcgtttttccccttctcttctcaaaactctttctttgtaccgcagcccaccaaacctgtctgagaaaaacgacgatctcagactcatttaccgttggatcgtcgtgaaattttagcagcacgttcgtaacccaattccgagcattctcactactgggaattgcaaaaacatgtcagagctaagagaaatacccttcgcaccgtagctttctcttttcccgcagaaacccaaaacagtctcagtaaaactatgatcccagtttctttaaccggtggattttcataaaatttgggtatgttgttcgaaattcaattgcgcacactttcaccgttgggtttcgcgagataatattcgtggaggg

SEQ ID NO: 272061 - DNA, 444 bp, Glycine max
agcttctcaaggaggtgagcttagttattagaggggtgtgtgtagctaagctctagcttctcaaggaagttttctcaaagaagcttctcaaggtagttttctcaagaaaacttctcaaggaagctacctagtctataaatagaaacatgtgtaacacttgttgtaactttgatgaatcaaagtcttatgagatacacttcaaagttccacttctttccctcttttattccttcaatttcgtgctccccccttctctttttcttttcctccattaaagcatcctcttcaagcttcttatccaaggcaattcttggtggtgaagctccttgttccttggctgattccctagtggatggtgcctcccctctcctcttatcctttgccttgcgctgcatctacatggtgaaaaatcaccattgaatgacctcattgaagttcaaagat

SEQ ID NO: 272062 - DNA, 421 bp, Glycine max
tcaagataagaccaaactcccttccaaaatctgatttcaggcttaaataggtgactatgtttgtgcttgcgcgcttagcgcaactctgaaccgcttaacgcgcattagtgaatttcggcttagcgcgtgcttttctcgctcagcggatggactgaagtggtgcgcttaacgggatgaaccttcgctcagcgaacatgcatagctcatccttcttccagattcttcctcgtgcttagccgaggaatgttgcgctcagcggatggcttgctatgccagtagattggcttagcgagcgtgtgaaaatcagcactccacaaactctgctaattaacctaaaattgagagaaaatgattattaaacacacaaaatggaagtactaagcatttattacctatctttaacaaaaagtaattaccacac

SEQ ID NO: 272063 - DNA, 392 bp, Glycine max
agctagatgtcattcaaaacacactatgtacacctagatgaagactaaacattcattgcttatttatttgtattcattatgcgatgataattcgttgtaacccgtcactagccaattaatattatcaactactcgttaggttaagcaaggaaattgtgggtccaacaaaaatcatttacgcgtacagcatacatcattgtcataattgacagcacataatgacattcatagtttacctgtaagaaaattggcacgtggatggaaatggttcttcatctatttcgtagaaagagctccgacccataagcggctgaaactgcatgatcatgctccagacacgaagatatataaagacgttgaagtattgaccaaggattataagtccctgcctt

SEQ ID NO: 272064 - DNA, 375 bp, Glycine max
tgtgaacaacaggatcaagttcttattagatggcttcaatcgacgctttcaacttcgattttatcttgtgttttgggatgtgttaattcttatgaagtatgggaaatgattcatgattattttcacaagcaaacaagagtcatgacgtgtccattgcacacggaatcaagagctacgatgctcggaggaaaattaatgcaataatttttgcttcaaatcaaacagatttttgactctcttgcctcggttggaagtcctatcatgctttaggagcatgtcaatttgatccttgaaggacttctgcctgattgtcactcagttatttctgtcattgaaagcaaattcaaacttaattagagtatatgtttgtataac

SEQ ID NO: 272065 - DNA, 447 bp, Glycine max
  unsure (1)..(447): unsure at all n locations
agctngaaggtaaactagatgccttggttaacctggtaacccaactggccatgaataaaaaatctgcacctgtcgccagactctgtggtttatgctcctctaccgaccaccacacagacctttgcccttctgtgcaacaatctgaagcaattgaacagcttgaagcttatgctgcaaacatctacaacagaacaattatgacctctctagcaacaggtacaatcccgggtggaggaatcatcccaaccttagatggtcgaatccttcacaacaacagcaacaacaaccttattttcaaaatgctgttggcccaagcagaccatgcgttcctccactaatctagcagcaacaacagcaacagcaacagccccaaaaataacaaatagttgaggcccctccgcaaccttcccttgaagaacttgtgaggaaaatggctatgcaaaacat

SEQ ID NO: 272066 - DNA, 416 bp, Glycine max
  unsure (1)..(416): unsure at all n locations
tctcccncattntcttataaatagggggagaagtgaagagtaatttcgttcagcccttctggtaattcagaatcacttaaaattagtgagaaaaattggtttcgtgaagaanattcaagccgaggcgcttncgtaacgtttccgtgggtgatttcgcgaaggttttcgaccattcttcgacgttcttcattcgttcttcggtcttcaaccggtaagttccctagatcgaacttttcaattcattctatgcacccttagtggttctcattgtttttacgtgctttcattntacattttcgtttactttccgtacccccttttgacgtgcttaagccatntatttaagtcatttctcgcttaaatctaaaaataaaataaatntccatcgatcgtttgaattgatcatccgtaatttc

SEQ ID NO: 272067 - DNA, 286 bp, Glycine max
agctctgacttgagtcatcacgagattatcaatatgtgaccagggcgtgaatctaattaataatctatctttcaatcttttttcatcatctctcaacatctttgaactctttctacagaactttctgatgcatctctcttcatctttcttaaagatatagttcaatactttttctttgaagaaaagttcttcgatcaaaaacttgtgttattcctcttttctatactcttctcccttcgccaaaggaacagaaggactaaccgcctaaattcttttgcgtctctct

SEQ ID NO: 272068 - DNA, 386 bp, Glycine max
  unsure (1)..(386): unsure at all n locations
tctcggctcatgctgngaacgcctctagttcaacacccgtgcagcctanagcacccacccagagggaagctgcccaagttccaactccgaacatgactcgaccggccggtgattccaacacgacaaggaacttccctccgaggccattgccggaattcaccccgctcccaatgacgtacgaagatcttctaccatccctcatcgtcaatcatttggccgtggtaactcccggaagggtcctcgaaccccctttcccgaagtggtatgaccctaatgcaacttgcaagtaccatggtggtgtcccggcgcattctgtcgaacaatgcttggcccttaatacaaggccaacatttaatggatgccggatgctgactttcaagagatcg

SEQ ID NO: 272069 - DNA, 269 bp, Glycine max
  unsure (1)..(269): unsure at all n locations
agcttcaacctttggtgctcatttctgctccaaatcgcgaaaggagggcatttttggagtcgtgaagtgcgtggctacgagtgggacttcgaaatttcaggtttgggtggacttctttctctcttaaatttcgtgggtatggagtcttgggagatatgatgggtggttttgntagtcttctgctgtgtgatgattatttgagaacgcatttgctgaaaacttgttgaaatggccatgtctggatgagttagacatacccattctgtttt

SEQ ID NO: 272070 - DNA, 455 bp, Glycine max
  unsure (1)..(455): unsure at all n locations
ctataaaactcaagctgcttggaaaaaagnnnnnnactccatattaggattttacctgacatctcaaacaaacaaatcaaacgtaacaagacaattatagttgctgtttgaatacctcacccactcaagtgtatcacacaattatggcttttctctaatgaaacactcttgccttttaccactctaattccccttgagttcttaggtaattcaagagattatggccacaacaaagaacaattcaccaatatgtgtaaggtaaggctagagagacaaggaaaaggttaaccaagaaaaaggctaacaatgtttttaggcacaaatgaaggaaataaaattcagaatttaggaattcaagtaacaatccttcatgcaaccaatatattaccttaaagagatttgtttaaagttcttcaagcatgaaccattcagcccaatctttatttatttattta

SEQ ID NO: 272071 - DNA, 453 bp, Glycine max
agcttaataaacttctaatccttccctcaacatgaccacccacccactttcacctagggtggtaatcccctctttaagctggataatttttctcatcttaagaaactctatatatagatctagcattataatcttaaaagaggaaacaaatatctaatttacaaaatatatctttaattctaaatagcatcctagaaataagataatatcatttttttaatctaaacaatatcctagagatttgaaattacaaatttgaattatttctcaacaattctttcctcaattaaaatttaatttcatcttcaatcttcttagctgcttgtcacgcttccgcttccactttgcttgcacaaaatctggtatgttctcgatctgctccacaagtaccgaatggtgacactattagacttgtaccgccaactacctccagtggaacatgccacttgacta

SEQ ID NO: 272072 - DNA, 458 bp, Glycine max
tcatcctcctctttgtgacaatcactggcttcttctcatcattgttttcagcatcatttcccaaagggtactcttcagtgacactactactagactttgttgtttgctttccgaatgaatgctcggattgaggcacaatattgttctttggtgcaacacttgttgtcccaatggacttgtttctcacacttgtcatgcttctcaaccttcctttccctaagtgatgctcgcaaagagagtaacccaccaaggtttgttgaaaacacctccatcctcttccgtttacacgactgcaccttgaaccttccattagtgcactaccccttaccctcttcttaccaacgtttgcttgttcgggtttcgtttcctttgttgccgcctcttcttggttctctacctcttcttcattgctatcgtcttgcctcgaactcttgttcatcttcctcttcattctcttc

SEQ ID NO: 272073 - DNA, 452 bp, Glycine max
agcttagaacaataaacttggccttctcttaattgtctttgggcttggcgaccatgatcaacaaagtactttcgacacctactatatgttgacttgaccaacgttgttattagaatgctgcgacaatctttcaacaccttattcacacattctgataggttggttgtcatgtgaccatatcgtcgtccagatgtatcgtaagccatgctacatttatccttggaaatgcgatcaatccatcttgctatggttggactcagtggacgaaatttttctaagttttgatcaaacacatgcttgcaaggagtgtacgctgcatcaaatatgttatcatcaaaagttgtacgtagacatcaaactcaaattaaattaatgtataaaataaaccttacccaatttcttgaacatctctttgtgtttcgcgtagttgaatatgcgatagaaattgctgg

SEQ ID NO: 272074 - DNA, 456 bp, Glycine max
  unsure (1)..(456): unsure at all n locations
ntgtgcgtaggaatttccagttatgtgcagganaagtttaatatgtctatgatgggagaaatgactttcttccttggacttcaagtcaagcaaatgaatcatggaaccttcctatgtcaaataaagtactatacaaaattgattaagaaattcagtgtggagaagtgcaaagaaacatcaacaccaatggcaacatccacttatcttgacttagacaaaaaaggtaaattggtagacgagtcaaagtacagacatatgattggttcacttctttatttgactacaagtcgacccaatattatgcatagtgtttgcttgtctgcaagatatcaagcaaatcccaaggaatccaatttaacttctatcaaagggattattaagtaacttaagggcacaaccaatgttggtttgtggtatcccaagggtacctctntgagnttaattcacttttctaat

SEQ ID NO: 272075 - DNA, 433 bp, Glycine max
agcttagatggagaagaagacagagcgcgagcttcataggtctcaccatattttttaaaatataagttcaacattggttttttaaaaaacaccgatgttaacatcagttttctggaaaaaaaaaaaaacaatgttaacatatcaaacgttaacatcggttttctaaaaacccgatgttaataaacatatgttaacatcggttattaaaaaaccgatgttaactaataaatgttaacatcggttctccaatgaccgatgttaatgaacttcgttaacatcgatttttcacaaaaccgatgttaacatatacacggtatttacaattatgtcaccgcgcatatgttaacatcggtttttttaacaaccgatgttaacacaccgatgttgaatccgctttttgtagtagtgatagctgcccttataagattatagt

SEQ ID NO: 272076 - DNA, 447 bp, Glycine max
  unsure (1)..(447): unsure at all n locations
ttgagtcttaggttaaatcacctaaggaattaggaatttggcttacaactcttagattaagaatctaacgaattagggatgaatcattctagtttgaatcttggttgcattgaattaagagattcattaggaacaaattatgtatgtagaactttatggatttgatctaaacgacattttctacttttgaatttgattttgttacgaaatttcttcaaaagaactataaatcagttattttttccatacagaattcttaattcgctgcaacaaaaagccaaaaacttttcttaaagatagaaaatcttgagacattcgccacaacaaattgacaacttgctacaacgaatgcttctaaaattcaattgttgatttcctatatgttccacataggctctgtggatacaataactganatacttattgattttattacaagtaaactac

SEQ ID NO: 272077 - DNA, 441 bp, Glycine max
agcttgttgacacgcggagatatacgtcaacttttgtgctcacaagatttgacatactgacatttgagtcacgttgacgggcggagataccctagtggttatccgtataaacattcttttttgctgtctgtaaaacgaaaagcctgatagcatgcagagactaacgtcgtcttctgcgcccatcgtcaatcgcggccgacaagcccgtagacacgcagagatttacgtcattttccgcgctcacaagatctgtcatactgacatttgagtcatgctgacggacggaaatacccaaggggatatccgtataaacattctgttttcctgtctgtaagacgatatgcctgacagcacgcagagactaacatcgtcttctgcgcccttggtgaatcgcggacgacaagcccgttacacgcagagatcacgtcatattcacgctca

SEQ ID NO: 272078 - DNA, 436 bp, Glycine max
  unsure (1)..(436): unsure at all n locations
cgctctanantacattgatgtttgtatttatgggaggaggttatatgccatttttgctttaagagtaacgtcccactggtaaaactaactttccaaatgtttgccttcgcaggaatggccccgaggaagcttgcctcaaagaggtccaggaaggacaaggcggccgaaggaactagttccgccccggagtacgacagtcaccgctttaggagcgttgtacaccagcagcgcttcgaagccatcaagggatggtcgtttctccgggagcgacgcgtccagctcagggacgacgagtatactgatttccaggaggaaatatggcgccggcggtgggcaccactggttactcccatggccaagtttgatccagaaatagtccttgangtttatgccaatgcttggccaacagaggagggcgtgcgtgacatgagatcct

SEQ ID NO: 272079 - DNA, 449 bp, Glycine max
  unsure (1)..(449): unsure at all n locations
agctngcattaaggataatcattagtagttgtcaatttgattatattactttcataaatcaattgattagtttgtttaaaacttgaaattagtggcatttaaataatcatgtttgttttggcagatcaaccacatgagtcagatttgcaaacaagagcagagcagcctagatcaagaacatatgcatgtctcgcgtccgtaaggggaaagtatagtccaatgtgcagtgtgctttttaatgacgagtatctcagtatttctctttataatgttttttcaattaaatatttggttgaatgagtggcaattattagatttgacaactgcaccactagcaattcttattaatgacccggattctatgtttgcttatgaatcatgatagtaacaatatctactgctataaataacaaaacacaatcagattaagaaagttatcgttacaagat

SEQ ID NO: 272080 - DNA, 459 bp, Glycine max
  unsure (1)..(459): unsure at all n locations
tataaactntgttacctgacattntgctctgttctcatctaaacgagttaaagcatgaanaatttttgcaggaatgttaggagcattcttcaagcatattaatgcactgcatttaaatacacatgaacgtttgcataaacaggcacaacatgcaatttcaagtttactcataaaaagccaagcttactttgtattgcaagggtttcccactactataactttgacattgcgggatgcaacggcatttaaagctcttccctgttgtacaaaaggtataatgtcattataattaacttcactttagcagaaagcaataagtatggtttaaatttcattatcattttacctgcgctgcataaatctgcccatttatgtctaacaagtctgctcgttccattccaggtcctcgaggctttgcacctattagcaaagcccattctgcatcttggaacacttcat

SEQ ID NO: 272081 - DNA, 446 bp, Glycine max
agacttgagggtgcgtagcccaccatctcttcatagtagaacaccggtcacgtgtctactatcattgggataatctctttctctgtttttgggggtgctacttgagttgccaagtctctccatctttgggcgtattctttgaaagattcgtgccccctttttgcacactttttgtagttgcatcctatccggagccatatcagaattgtactgacactgcctaatgaaggcaaccattaggtccttccaagaatggactcaagaaggttcctaagttagtataccaggcgacagttgtcctagtaagactttctcaggaaaaatgtatcaacagtttctcatcttttgcgtatgcccccatcttccgacagtacatctttagatggttcttggagcgagtagtccccttgtacttgccaaagtccggcaccttgaacttgggaatg

SEQ ID NO: 272082 - DNA, 449 bp, Glycine max
  unsure (1)..(449): unsure at all n locations
nttcgattcaatctatgtacccgtagtggtccacattgtgtttcgtgcatttttattctcgttttgtttactttttataccccctcttgacgtgcttgagccattttacttaagtcatttctcgcttaacttaaaaataaaataaatttccaccgaacttttgaattgtattatccattaacttcggttaaaataaattccgaccgttcggtcgtgccgtaaccacgttggaaatcaaaaagaggtaaaaaataatataataatcaaaaagacatctttagtaaaataaagcgaaaaatcaatcgggcgttttctctttgggatttctcattcttaatcgaattgattaataactaaagtgaaactaaaggctaaaatcaattcgcctagtcaagctcgtccataaaaataggcttttgaagttggcatttcatttctactaagaaaat

SEQ ID NO: 272083 - DNA, 442 bp, Glycine max
  unsure (1)..(442): unsure at all n locations
agcttgtaatcgattacacacatactgtaatcgattaccagaagagtttttcagaaaacattctcaacagtcacatctttgtgtgtggttcttgaatggctatcataggcctatatatatgtgacttgagacacgaatttgacaagagtttttcagaacaaaaaaggtcttatcctcttataaagagaaatcgttttatcctcttacaaattccttgggcaaattacttgtgattcaataaggtattatttgagtgctcaaattgttcaatctatctcttgcaagagagatttcttcttctcttgttcttcattctgaanagggattaagagaccgagggtctcttgttgtgaaagaattctaaacacaaaggaaggattgtccttgtgtgtttagaacttgtaaaaggaatttacaagatagtggaactctcaagcgggtt

SEQ ID NO: 272084 - DNA, 414 bp, Glycine max
  unsure (1)..(414): unsure at all n locations
ngacaagaggaagtgtagaagggtgaaacttcttgttnttattcgttgaccacagagtggtacctggagatatgtcgcgggggtcatgagaccttggggatgtcaagtggggtgctattacccaaaaccaagcttgaccaatcccgacccaacccgggcatagtcagtcagtgagaacctgcgatgtacctaagcaggcgagctcctggcagtcaacagataaaaagaactaagaccacaaagcaaggaggcttgtgtggtggctggccagctgtgaatcttgtgtgatatatgggttatggcctctggtaatcgattaccaagggtgggtaatcgattacaaggcttaaaaatgaagacaggaggctaagatggtctttggtaatcgattaccaaggggtgtaatcgattacc

SEQ ID NO: 272085 - DNA, 438 bp, Glycine max
agcttacaagcaagcttccatcatgtggtaatcaaagcacaagagcttcaagtaggtgctccttaaacctccattaatttttagctttaccttctcctccattgctgtttcctcatttttctctatgtatctccttacatgtcttgtgataaatgttgttaacataattctttagagtttccactgattaaacttgctatagaagctagatttgattttctatggttcaaatttcttgttcttgttcttgaaccatgagttgtgttgagtttaggttcctttgagttttgtcttgttatttttttttggctgaaacctaaaccataaaattcttataaaaacattaaagtagaagaaaacctcaaaaatctagagtgacttgttcacctattgtagttttgtcatagaagtcatgtctagtcatgatacttgtcccat

SEQ ID NO: 272086 - DNA, 400 bp, Glycine max
tctccctctgtaccctataaatagggggaggaggtgtcacaccctaatttcgtccggagacctttgcttgatgacatgcgacctttctttggtccttttgaggtgcttggcatccatcattaagcaatttgtgaaattccaggacatgccgaaaaaccaaaaaaatattgatgcacaatccgtaagtttccgtgacacaccggaaatcaaatggaagcatcgttgcataattaagtgaggttccgtaacattccgtaagtcaaaaaggggatgattatgtaatccgcaaggttccgtaacattacggaaagaaaacaagtatcgttacgaaattcgtaagtttccgtaactttacgaagaaagaatcaccataaataagcagaggggggtgtacttagta

SEQ ID NO: 272087 - DNA, 444 bp, Glycine max
  unsure (1)..(444): unsure at all n locations
agcttgagcaacatttattattttagcatttatagttatctttagtttataaatatgatgagagttttttttttcatttcttttcaactggacttctttctctctttttcaaatttaatttattcactcaacttttagtgaaatatacccatcgccatctctcgtccccttggaatgaaattaagttcttaaatattaaataatatgttcaacaattgaagggacgcatttcggaagaggaaaggttaccactctgggggttgtgtagcctccaattttacttttattcctctcctcaactttnttactaacaaaatattatgaggacaataatttataatttataaaatacaataacatggaggattcaaacaaagattagtttctgtgatagttgaaacttaccagtcaagctttgtagagattgttccagctcccaacaag

SEQ ID NO: 272088 - DNA, 446 bp, Glycine max
  unsure (1)..(446): unsure at all n locations
ntaggctgttcaattgcttaagattgctacacaaaaaggcataggtctgtgtgatggtcggcaaaggagcataaaccacagagtctagcgataggtgcaaattttttattcatggccagttgggttaccaagttaaccaaggcatctagtttaccttcaagcttcttagtttcagatgatgcagatgattttatggctacttcatgcactcctctaatgactatagcatcatttctggcgctaaactgtttggagttggaagccatcttctcaattaaatttctgactttagcaggggtcatgtctccaagggctccaccactggcagcatctatcatatttctctccatgttactgagtccttcataaaaatattggagaagaagctgctcaaaaatctggtagtgaaggcaactgacacatagttttttaaatctctcccaata

SEQ ID NO: 272089 - DNA, 437 bp, Glycine max
  unsure (1)..(437): unsure at all n locations
agcttccgttntcaatttcgaccgtctcgatatattaccggactcatccggacatccgtgtataaagttattttcatttcaatttgctcagagcttctagtctcaattttgagcgtctcgatatattacccgattcaatcggacatccgagtaaaaagttattgtcgtttgaatttgatacgagcttccattttcaatttggatcatctctcgataaattacgacactctggtgcgcatgcgaataaaaagatattgtcgttagacttttctaagagtttccatttgcaatctggagcgtctgcatatattacggcactcaaccacacatccgtgtatactgttagtgacattcaaatgttctcagagcttctagtctcaatttggagcgtctcgatatattacccgattcaatcggacatccgagtaaaaagatat

SEQ ID NO: 272090 - DNA, 456 bp, Glycine max
  unsure (1)..(456): unsure at all n locations
tattacggacctatgaatactcaagcttgagaatttcaaatgagaataactttntactcagatgtcttattgagtcccgtaatatatatcaagacgctcgaaattgaggaaagaagctctgagcaaattcaaatgacaataactttttactcggatgtcagattgaattcggtaatatatcgagacactcgaaattgtgatccgaggcgctgagaaacttcaaacgacattaactttatacacggatgtccaattgagtcccgtaatatatctagatgctcccaattgaaaacggaagctcatagaaaattcaaacaacaataaaattatcaaatgatgtccaactgagtcccgtaatatatcgagccgcaacgaattgaaaacggaagatcgtaccaaattcaaacgacaataactntttactcggatgtctgattgagtccccgtatatatcga

SEQ ID NO: 272091 - DNA, 356 bp, Glycine max
  unsure (1)..(356): unsure at all n locations
agctntgtggtcaacattggaggactaaaatcaatacacataaaatgaacatataaaacaataaatagtaattaatacaagagtagttaactaaaatgaatttctagtaatgtctactacatattaagatcatctagctgaatgaaaagttagtgttgaattcttatatgcgttgtaagtacgttctttgccatgaactaacttcagtagagcatgttatccattatggtgcattaagagataacggacagtcatcattgttaaaacaatgctccgtgatgattaatacaaggtataaattagggaacagctttacatgcttacaatactaaatatggagtttaggaaattatgtt

SEQ ID NO: 272092 - DNA, 438 bp, Glycine max
  unsure (1)..(438): unsure at all n locations
tagcccataaggttntccaaaagtggctatggaacttagcatctctatctgacacaatggtcctaggcaaaccatagagtctcacaacttccctaaagaagagttctgagatgtgagaaacatcatctaccttgtgtcatggtataaagtgtgtcatcttgctaaacctatccaccaccacaaagatagagtctacacctctttgggttctaggaagcccaaggacaaagtctatactaatgtctacccacggtgcaaatgggatgggtaagggtgtgtatagccaatgaggcatcaccttagacttggcttgtaaacaagtcacacacctagtgcaatgcttatggacatctctcttcatatgggattgttaacaacgagtgctcttttgatgtcaccttttgtggcacaatgattctccttcttaacaatcttctt

SEQ ID NO: 272093 - DNA, 347 bp, Glycine max
agcttgcctaattaacctgaaatagagagataatgattattaaatacacaaaatgaaaatacaaagtatttattacctatacttaatagataatacttataacattacaaaataaccataaattgggagagtttgatgcaatttgtacaagttatatacacaaactctacccctgattcaccaactggagaagcagctgatcaccctaattcccccaggaggaggagctgctgatatttctgattcctcatctggagaagttgctgctctatctgattccccagctcttccatctgatagatgaggagaatgctcacactgtctagatctctctgattataactata

SEQ ID NO: 272094 - DNA, 387 bp, Glycine max
  unsure (1)..(387): unsure at all n locations
tcatggtgattcanaggtgttttgatgataacaatgatgataacaaaagatgatgacaaaggtgatgacacaaacctcacagatcaatcaaataacaactcatgtaaattcaagagctcaagataagaatcaagaagaattcaagactcaagaagaaagttaagagtcaagaattaagattcaagactcaggattcaagaatcaagagaaggcttaattcaaaaatcaggttcaagattcaagaatcaagagaaggcttaatcaagataagtataaaaagtttttctcaaaaatcgagtagcacatgatttttctcaaaacatgtttaccaaagagttgttactctctggtaatcaattaccagattgctgtcatcgattaccagta

SEQ ID NO: 272095 - DNA, 458 bp, Glycine max
  unsure (1)..(458): unsure at all n locations
agcttgtgaccctgcataagtaagggtgaaagatgggggttaacaggataaaaaatatatttagtaacttaagatgaaattatttttgtatatgtaatgcttcttttatcctcaacccaaaaccatgttcataaaatcaaacaactaatcatgattcagggaaataaaaacggatcaagatgcatagacaagttataacatatttgcaccagaaggccacaaggctacactgccttgcagacacatcccttagaccataattttttcagagattaggagacttgcccttgttacagtacacagaattcaacaaaggttaaagaaaatcacaaaataataaattagtcccatgcttggtggcttatcaatccacgagcaaaacacattttttatatttcaaacacttttaccaattagttggttgccataccatcaacaagaagcatgtccnccacatt

SEQ ID NO: 272096 - DNA, 450 bp, Glycine max
  unsure (1)..(450): unsure at all n locations
tgaataataagaggattgattntttcaaaacatggtccagttaactagggggacacatatcagttatgagtggaaaggtacatacagaaagtgcagaagatgataacagcttatgcaacactaataagcctttacctgttgatttgttcttcaaaacattggagggtccacagttacaaactcctaaggtatgtgtttaccatctacaagtttaagtgtactcatgttcatcttgtgtaacaaataatccacttcctagataactttcaatgcagtttatgctaatccaactagttaagtttgagtcttatgttgaaataagttaatcattgtttcctaatgatcctttatcttttttgacactcactatgacataaataagttaaccattggtgtttgtctaatgtattntattttgatttacttcttcagaagtcttcagaagagatg

SEQ ID NO: 272097 - DNA, 444 bp, Glycine max
agcttcaaagataaaccttcttgaggttaccacgtccttcatttgcttaggcctctgcagcctgcacgcctctattgcatttaccgccggtcccccatgattggcaagtgaatttgtcttcacattcgggccatcttcttggaatgttagccaccccgcgtcaatcaagctttgcactttatgcttgagggccacgcactgctcgattgaatgtcccggagtacctccgccgtgatacgtgcaggtcgcgtcgaggttgtaccacctcgggaaaggagactagtagattcttccggggatcaccactaccaactggttggcgattaaggatggcaacaagtccccatatgacatcagaatcagggcgaactctggaagcttctttactggagggttcctccctggattggaacttgttccaggatcgaaatcacctgtgggatg

SEQ ID NO: 272098 - DNA, 448 bp, Glycine max
  unsure (1)..(448): unsure at all n locations
tcgatgccaccactgccttattgngaaaatgttggtggtgattctgagtgtgtttctactttggaggtaggttactgctaaatacttttttattttttattttaatttggatgtgtatcatttgatcactattatttacttttgagatatgtgtggtttttttactatagggacatgaaaatgaagtgaagtgtgtgtcttggaacgcggctgggacgttgcttgcaacttgtagtagagataagtctgtttggatatgggaagtgctgcccgggaatgagtttgagtgtgtgtcagtgctgcaaggacacacgcaggatgtgaaaatggtgaagtggcatcccacagaggatatcttgttttcatgttgctacgataatagtgttaaggtattgttgccaatgctaaaagagtatctcnctctttaatttcatttttgttcatttat

SEQ ID NO: 272099 - DNA, 439 bp, Glycine max
  unsure (1)..(439): unsure at all n locations
agcttgcctcatagaggtccaggaaggacaaggcggacgaaggaactagttccgctctggagtacgacagtcaccgcttcaggagcgttgtacaccagcagcgcttcgaagccatcaagggatggtcgtttctccgggagcgacgcgtccagctcagggacgacgagtatactgatttccaggaggaaataaggcgccggcggtgggcaccactggttactcccatggccgagtttgatccagaaatagtccttgagttttacgccaatgcttggccaacagaggagggcgtgcgtgacatgagatcctgngttaggggtcagtggatcccgttcgatgccgatgctatcagccagctcctgcgatatccgatggtattggaagagggccagtaatgcgagtatggccagaggaggaaccggtctgatgggttcgatga

SEQ ID NO: 272100 - DNA, 446 bp, Glycine max
taggttctaggagagcattcatccatagataaaacttcactttttcattcattcacatcccatacttgccttttagtcaggcactcaacttcatttcattattttgcagcattcacacttattaatttcatttgtacttacaattttttttaacacaatatatacaaagacattatgtgtatatagtgtgtgtatgctgtttactttgaccatttcaattcttacccagtgcctcccccaaatttagaacaaatttaccttgataattactctcccaaatttgggacaaatttgctttgaaccgcacttcttgtggatgatgctctcctacaacctaagtcaaggtagcaggagataacactgtataggctcagggttcaatcaatcaataattcatttagctcagactaggtacaagggataattcattcaagcacatggtcagc

SEQ ID NO: 272101 - DNA, 453 bp, Glycine max
  unsure (1)..(453): unsure at all n locations
agctntaacctcattgtctctcacagtctttagatttgggagccaatccaatccttgtgtccggactctcagccacttatgatagccgccgatgatcccattactgcttcccctaagctctctgtcctttcttcacgccgcatcccatgccttgcgaactccttggagtaccctagcattgtggtcactgaaacctcgtgcgatgaaaggcgtgatgctttcgtctgatggtactcctctcatgggacatccttcgcatgaagatagaatgctgattcttccttccttctagcgagggaaccatttaacagacgcccctccatgctagccaagagttggtcccaattcgtctttctttnttcgacgcacgagcggcgaccttgtagcggatagacgggcctaccttcttggagaaaaaggtgtgaaactaaccacacatagagagctggagta

SEQ ID NO: 272102 - DNA, 425 bp, Glycine max
  unsure (1)..(425): unsure at all n locations
tagacacacacacacacattnttttttggtttcgaacaaaacgtcgtatagtaagtacgacagagaaccaacaaacggtaaatcgcgacacgtaacaaaataacacgacgaacagtaacacctaaacgcaacgtcaaagcgactgaaagcagtaattacagggacaactgaaaagtaaagtcagcacataataacaatgaaagtagtaacgtgaataacaataaatgaaaatagataataatggaaaagaaatcacgagtccggtgatcctgatctcatggatctgcctcctcccaagaagtcaaataggtcagccatatcttcatcttcttgggcttcgtcctcagctccgggggcccctgcgggtcctgcccccgtctgagcatcaggccagtctgcaggccatgcgatcgtagcttcgaact

SEQ ID NO: 272103 - DNA, 455 bp, Glycine max
  unsure (1)..(455): unsure at all n locations
agcttgcctaattaagctaaaattgagagaaaatgattattaagcacacaaaatagaagtactaagtatttattacctatacttaacaaaaaatacttataacactacaaaataacaataaattggaagagtttgatacaatttacacaagttttatacataaaagttagtcgtattcatcgactaacagttgtcgggaggtttgcgtggaacatatgcaaattcctagcatcatatgcaccaccttgtgaagttgagggcatctgccttgagtgtcggccaattttagccactgcatactaccttggttgccaaagagcgacccccagtatgcaggtcgcagtttcctttatgcaacttccacatgacgtagtctacttgttggttgttcaggcacttaagcaagggtgttgtcatccttattntgaatagttcaccatcaaggatgacatagt

SEQ ID NO: 272104 - DNA, 442 bp, Glycine max
  unsure (1)..(442): unsure at all n locations
gcataaaagaaaatatagaanagaaataataatattaatatttataataaatacagagaggtttcctttgtaccagacaatgtctgaacaatgtgcagaattgtcaaaagcaaaaagaagggaaatagtaacaataacttggttaaaatcgagggatgcatgaagcaatcaccttcttagttaccaactgtcataccctaatttcgtccggcgacctttgcttgatgacatgcgaccattctttggtcctcgtgaggtgcttggcacccatcattaggcgatttgtgaaattccaggacatgccgaanaaaaccaaaaaatattgatgcagaatccgtaagtttccgtgacacaccggaaatcaaatggaagcatcgttgcataattaagtgaggatccgtaacattcttgtagttaaaaaggggatgattatgtaatccgc

SEQ ID NO: 272105 - DNA, 369 bp, Glycine max
agcttgaaggcaaactggatgcgttggtcaacttggtaacccagctggccttgaatcagaaatctatacctgtcgcaagggtttgtggatggtgctcctatgctgaccaccatacagacctttgtccttccatgcaacaaacctggagcaattgagcagcctgaagcttatgcatgaaatatttacaatagacctcctcaacctcagcagcaaaatcgaccacagcagagcaattatgacctttccagcaacagatacaaccctggatggaagaatcaccctaacctcagatggtccagccctcagcaacaacaacagcagcctgctccttccttccaaaatgttgctggcccaagcagaccatacatt

SEQ ID NO: 272106 - DNA, 457 bp, Glycine max
  unsure (1)..(457): unsure at all n locations
tgtctaccacacttccaatgatgaacaccacctttagcacataccaaaacaccaaccaagaaatgaattttgcagcgaaaaaacctgtagaattcaccctaaattccggtgtcatatgctaacttgctcccttatatacttgataatgcaatgatagccataacccctaccagggttccttaacctccatttttctgaggatacgactcgaacgcaacatgtgcatatcatggaagagttccaggacattccattgagcactgtatgacctcgaagcgtaaggtgcaaagtgtaattgatgtgggctggttgaaatttgagtagaatcgcttgtgaatcctaaacattgacaagcgacaccacacatggngtaattntgaaagctgttgttagatgtctctaatgactcatcaggattttcaaatttatgccattatcgttaaccacagttacaatg

SEQ ID NO: 272107 - DNA, 333 bp, Glycine max
agctactgttctggaggtggcgatcaaagacaatgatgttgttgcggatgactccgtacggagagagatgtttgatattaatgaactcccagaacgtgtgcctccagatagccctttggctccacatcggttcaggctgtaagatacgaggggtggctcagcctaaggacagtatacgttggcgcgttgcacgggaactcaggcagaccaggcatttcttgatgcatggccttctgatgcagcatctgttgtgcctcgacctgttgcaaacatcagatcaaaggtttaccttatccctactctctggtgtgtgacggtcaatgatattgacgc

SEQ ID NO: 272108 - DNA, 450 bp, Glycine max
  unsure (1)..(450): unsure at all n locations
cgcanagttnttctctgatggcgatgggaccaacactggtgaagcttctgaagctacagaatgcagatggctagtggctttccatgcaggcacgagagggcacagcaaccctgcatttgaatgattttttagtgaaaatcgttgctgaaacagagctggtcttttcagacgttcgtaacaagttccaacatgtggggaaaggttggagttggatctcaagtgaagctggccagcaagcttttgttctattgtcgggtaccgttgtttatcaaccatcattgcttgagtagctgagtacttagaattactataaactgcaacagaataaattatgtttagctatttatggacttaaatgaaatcaaggcctaggttatttgagttcaagagtaacactgaattccaaattacatttaagaagctaattcacagcttctgtttatttctaac

SEQ ID NO: 272109 - DNA, 383 bp, Glycine max
agcttcagaagcatctcaagcttacatgaagctacattcacggaaaaggatgtgccttatgcaatgattgtttattacaccagctcaagtcctactcctatcaactatgaacctccaaacgttgtgaccaacgatcaagttcacgatatgatcggtcaaccatggacacttttgttgagtgaaagagacaaaggaatgaatagtgtatactttctatgtagaatgtcatcgctacttaattcaccaatcaaggtgctaccttgttgcagaatctacaacaagctcagatgtctctatttgaagttgatgctgcacaccttgctgctgcatttgctatagcaacatgagttgattttccacctccatctatccagcaaccactt

SEQ ID NO: 272110 - DNA, 399 bp, Glycine max
  unsure (1)..(399): unsure at all n locations
cttcttggaccttangcagacctttagctcatccttcaagatcaaactgtctactcgtgatcggttcctttcctctctccggagcttaagctcgttgttactgccccacagagcccttcagaatttgtttcggccgtgttcttccctacgagcccttttggtctcttgctccaaggccttggtggtagctgtatttacatctctcagttcggcattctcctttcgaatcttaagagctgttgatttgaacctttctttgactgattgggcttgctcgagttctgccctaagggcctgcacctcttcatcttcctccggagcctcaacttccacccctttagtggttctcaaactcgggagccaatccaaaccttgcatgcgtgctttcaaccacttatg

SEQ ID NO: 272111 - DNA, 393 bp, Glycine max
agctttgatgaaacatttggagaggttaatgaaacaacgagatgatgcgctccatgacaggttggatcaaatggataatagacatcatactgaataataatggacgagaacagggaatgatggtgttcctacacaaaaccgaattgatggtattaaactcaacattcctccatttaaaggaatgaatgatccggaggcctacttggagtgggagatgaaaatagagcatgttttctcatgcacacaactatgaggaggaccagaaggtgaagcttgccgtcactgagttttccgactatgctcttgtgcggtggaacatgctacccaaggagagagcccgatatgaatatccattggttgatacctggacgagaatgatgaagatcatgacga

SEQ ID NO: 272112 - DNA, 452 bp, Glycine max
  unsure (1)..(452): unsure at all n locations
tgcacgattatggngtacccatcacatgtggtactatgtggcggtcgggcgatggtgcacaacaagttttccacatccacaaagcgcgcataaacccaccatcccctgttgcccacctccaactgagctcacgtactcccacgtagcccatatcctcgtttctctcaacaccgggtccccatcaatcctcccaagcttccccaacatcaaagtaatacaacattcaaacagcacaagctatcacagccaagcaaaacagggcaaaggcagaaaactctgcccaaaacaccaaccaaaatcatagcttttcacatacaaataccccagaaacatttccttcgttcccattgtttaaccgttggatcaactcgaaatttttactggaagtctctagtacataagcctacattntgaccgctgggatctactagcaaacatccagaactcattct

SEQ ID NO: 272113 - DNA, 438 bp, Glycine max
agcttagaaatgaaggcagcatgttttggaggcctctggtaatcgattaccaggctgtgtaatcgattacacagaggaacatgccactgttaatcgattaccagttatgtgtaatcgattacacagtgcatttttgcaggtttcatgtcctgaggctgtgtaattcgagtttagcctctggtaatcgattaccaaggctgtgtaatcgattaccagagatgaaaagccttgagataccccttttacttacatgtagtggttatgagacgcattgtgttgctccgtagttagatatcacgtgaaagagtctacccctttcttttatttcttgtagatcgtgatggcagtgcaactaatccatgaccgagtggagatggagtgcctatagggagcttgtgagaccctcgaaggcaatgcgaggtgccgatttcggggcac

SEQ ID NO: 272114 - DNA, 419 bp, Glycine max
  unsure (1)..(419): unsure at all n locations
tgagatgaggaagtgtagaagggtgaaacttcctgcttttattcgttgaccacagagtggtacctggagatatgtcgcggnggtcaggagaccttgnggatgtcaggtggggtgctattgcccaaaaccaagcttgaccaatcccgacccaacccgggcatagtcagtcagtgagaacctgtgatgtacctaaacaggcgagctcctggcagtcaacagataaaaggaacaaagaccacaaagcaaggaggcttgtggtggctggccagctgtgaatcttgtgtgatatatgggttgtggcctctggtaatcgattaccaagggtgggtaatcgattacaaggcttaaaaatgaagacaggaggctaagatggtctctggtaatcgattaccatggngtgtaatcgattaccaggcttg

SEQ ID NO: 272115 - DNA, 346 bp, Glycine max
agctcgaactattatacttattctaactttagatctcactagtaaccggaccattcaacatgtggatgttgacaatgcatttttaaatggattgctggagaaggattattatgacgacacagccccgggctttaaattagaaaaaaaaaaatctgctcttggttgtaagcttcagaaagctatttatgacttgaaacagactgctcaggcttggtaagagaggcctactaaaaccctcattgggtttggatttgttcagagtaaatgcgatccatctctcttagttctcaagactattgctggctgactttatgagctcatctacgtagatgacattatcttaaca

SEQ ID NO: 272116 - DNA, 393 bp, Glycine max
  unsure (1)..(393): unsure at all n locations
tntatcttttgcatatacatgtaccaattgaatcatagctatttattttcactagacattgggtgccatccagggaaaccttttcaaatttaaaccatcttaaataatctgaattacagtatatgcatctaattgacgttgtttgcttgcaaactaacttagtaccatggaggaaccaactttgggagaacagcctctgcttatgttataacaggctattatgatcaagccccacttgatgaatatggcaagtgcacaaaattattattttaacacctcatctcatttgatgtttataaatgttgcacactttcttattaggtttgctagggaacccaagtgggacatctcaagcgttacatgaagtaataagtcttgctctacacattatac

SEQ ID NO: 272117 - DNA, 356 bp, Glycine max
agcttgcgaaatgtgttgtacaatcgttcaaatgaaggtgcacaaatagcatggatattaacaagggttgtagccaagtccctagcattattcagccaccccccaaaaccaatcccttcgatcaaaaaagtgtaagtaggttcatttggcagacaccctttgtccaccatcgcagccaacacttcagtagcatcactaactctacccactctgcacaacccaagaagaacaatgttgtaactaacaacactgggcttacactcactactctccatctgcatgttcaccaacaactcaatggcctcatgcaccatcccatccctgcacaaacaagatataagcgaattatacgcgat

SEQ ID NO: 272118 - DNA, 408 bp, Glycine max
  unsure (1)..(408): unsure at all n locations
ctgatggataacctcaccacatgttcgtaatgtcatgaattgctaaatcttcctgagcagtttgctcatgatacactttcggagaatgacattcaggtaattcacatgatgcgctttatactgtctattgattgatattaataatatcatcagtgcaatgtctttcatttgttgtgattactactntaaatcttatttactctacgggcaaatatgatattatatttttttgtcacatgttttcagatcttccatacacctgaaggaatgcttttcaccgagcaaggggtttatgttgctgaatctgttactgcaaagaacacaaaacaagcaaagggtcgcttccggatgtatgatgatgaagatggcgaggtacattataatttcttccattttctttgctccatt

SEQ ID NO: 272119 - DNA, 434 bp, Glycine max
agcttatgagaacaaaattgcctcaatcatttctaaatatgcatgtgaattaggaagcatcaacgagaatcaagccaaggctattgtgcaagcaatcaatggggcaaaacacaccaaatgattatgatgatggatggctcaaattctcacaaaggtaaactcatcactttcaaattgagctttcaaaactatcatgacatgtagaggagaatcaaggatttcaagtcacaaaatgtcaagaacttttattttcaaaacaattacccatttcttgaacatatcctataattcaaagaaaaacatgcaaagtcgtacatgcacacaaaattgaccctaaatattaaactagaaatccgacgaaactaacaacattaacaaattaacacaactaacaaattaacaaaaccaacaaaactagcaaaaccaaagaacac

SEQ ID NO: 272120 - DNA, 452 bp, Glycine max
  unsure (1)..(452): unsure at all n locations
ctggagtttccaagtgccaattcgtcttcttcttttgtccagtcttcttctggcttcaattcattagtgggctttccttctgtgtccagcatcttgggatgttcccagcctttgatgacagctttccaggttctgctatccagtgatttgaggaaggccaccatccttgctttccagtattcatagttggttccatccacaatgggtggtctgttcactggtcctccttctttctccatgttcatcagaatttatctccctagatctcactcagtgatttacagtgcccgctctgataccaattgaaattctgatactgaggccagatgtcgtaccggatgtcacgacatcacgcttcagaacatgcagattatatttgactgtatgaacagattaaacaagtnaataacacaagagaattgtaacccagttcggtgcaacgtcacctacat

SEQ ID NO: 272121 - DNA, 450 bp, Glycine max
  unsure (1)..(450): unsure at all n locations
agcttgtaagagcttggtcacttcctttntcaccacatctataatgacggggttgagtcgtcgctgtggctacctcactggcttagctgcatcctctaaaagtatcctatgcatgcaggtagatgggctaataccaggaatgtctgctaaagtccatccaatggccttcttgtgcttcttgagcaccggcaacaacttctcctcttgctcaacatcaagggaagcagagatgatcactggaaatttgatgcaatcctaccccgcaagggcattggatagaagactccaagtagattgggccagagatccaagggaaggccctagggttctcatgagccttaaggtagattttgagcccatgggctaagtatgagcccgcttatctttgtaattattagaataggttttttccttcgtttaagccttggtatttggccattctagtagtat

SEQ ID NO: 272122 - DNA, 454 bp, Glycine max
  unsure (1)..(454): unsure at all n locations
tgcttcaaggtggaggcaattgagcgagaagttgaccttggaagtacttgtcaatgcgactgtaccatgctctcagtgcttgttntagtccataaaaagccttctttaacttgagaactttgtcttcttctaatgtcacctttaatgccaacggatgttcgatgtacacttcttgcacgaggactccattcacgaaggtagacttcacgtccatttgatgaattctccactagtgttgagttgccagagagattattagtacgatggtctccaggcgagcgaccagagcaaacacctcaacataattgataattgtgaaatttgaggtcatctgatagtccattttggctaagaatgattgtaatttctttactgtattgtttttttaataaaataataaagaaattaatatctttgcagttcttgattaacagaagttaaaagaacaatattt

SEQ ID NO: 272123 - DNA, 419 bp, Glycine max
agctctatcatactatactctaggtttctgcatgtcaatcttaatcgctacgatgcatatttttaggactgtggagaagtttcggctaatggggcttctgctcttcttgactgcacagctcttgaagatatcctgctgagtcataatgagagctttctatatgtttatatgtatatatatatattactaacatgaaatggtgcattctaacctccaagtgcaagacatggcatttgagccctgtcgtgaacttgtcgatggtgtacacattattcttccagcaatatatattatttctatcatgaaagcctgaacatgtcagctcgtgattatgtgataacttgattctcgtgatcaaataatgactgcatatataacaatataaatacaactgacaacacatgtcattctctctgctc

SEQ ID NO: 272124 - DNA, 377 bp, Glycine max
  unsure (1)..(377): unsure at all n locations
cttcgaacgccacgatcacgtgcgttggcgtnatgactctntttcgtggttttgtttattcatcccccntgggaatgaaactcgaacgaaccaagtcaagtaaatgctttccctgcacgtcgttttgcaaggattcgtctggcttctgcaacgagttgttgaagaacaccaacgcgagagttgacagtgtcggcgttgacttttctacgggtagttttgtaacttggcataactggttcacaatgaaaaaggagatgtgattatctagcttgagaaagtctctgtacaagaatcggtatatccacaccatggggagaagagggtcttcccgttcaaaaggtactaatctggcgactttgccgaacagctcaatgatg

SEQ ID NO: 272125 - DNA, 451 bp, Glycine max
  unsure (1)..(451): unsure at all n locations
agctntanagccacttaatgttaagaatgaggtggtaggttttagtaatagagtttatgtgccactagatacaactaatcaacttggtggtatgtaaagtttagtcaagaattatttctgtcaagaatcgaacttgggaactactcaaaccatttaatcttaactttaacacattaatcacttgtactcaatcacttggttattataaacttaagatacgaatcaaagaagcggtctcaagaaccaagagaggttctctcacacaaagtttataattctttcaataaaatgagtcttagtcttctcaaagttaaagatagactatttataccatgatctaaaaaactctaaaaagaggccccaaaactaataatgtcagcaaaggcccaaaaaatagaataagcaatcttaatctataagttgaatcacaattatgatctttaattctcct

SEQ ID NO: 272126 - DNA, 456 bp, Glycine max
tcttttggaccttgaataggcaactaactcctctttcaaaaccatgccatgtgctcgcgactggtccctttcttcccttcgcaacttgagttcactattgctaccccatagagctccgcgaaatttgtttcggccatactcttccttgcgagccctcttggtctcttgttcaagggctcttgcggtaattgcattctcttcccgtaacccggcacactccttccgaacgtgtgtagcggccaacttgaacttctccttggcaagttttgcctttcctaactcgcttttgagagtttggacttcttcgtcctcttccggtgcttcaaaactctcttcgctgacgacttttaacttggcgagccaatctaaacctcgtatatgaactttcatccattcgtggtacccatcaatgatgccattacgaatgcctctaagctcttgatcttttcttaacgg

SEQ ID NO: 272127 - DNA, 451 bp, Glycine max
  unsure (1)..(451): unsure at all n locations
agcttctccaagacatttaagaaagcaaattacataatcttattctcggtgttgtttaatcacattcttatctcaagtacaatttggagtagctcttggatcttccagagttacgaaaacatatcattaatatttattgatatttgatgatattttctaaattttatcaaaaaaagttagtaatatttttgcttagtgttagaccaaaaaatgttcttaaagatcaggtagtgaaagttcaacccaaaaaatatacttagaaaatatgagcataatgccactaaaaataacattnttttaaactatacttgacacttgtcatcagtaatttgattattgtcaaaatacttatactatttgattcatcaataatatctttgacccatttattagaaaaatctcatttattaatatgagtatttaataataattaatgttatactccatttct

SEQ ID NO: 272128 - DNA, 432 bp, Glycine max
actaagcttgtaatattattgggtaatgtgcctgttccattacgcccttaatgtatatagatgttacttcctcgttgacatcttttgtcttgaatggaattgccatgacaggtttattgatactgtctgtgacatttggtagttgatattgcgttgcgggagataattccgattggattaactcatcatccttcacttgctaatttgttatgacatttgttgttggatcacctatgatgtcttgtttccaagggtaatctatatcctttctgatggcataagcatgaaaccaatcacagaaaaggacactaattttgattctttcaacaaattcgtagaacttgtcttgcatctgttttctgtttgtacccttgtaatgttggaaaaaccatctccattgaggctcattctttggagaataaaaatctttcc

SEQ ID NO: 272129 - DNA, 375 bp, Glycine max
  unsure (1)..(375): unsure at all n locations
agctntgatggtgtcgagaagaaatcacatgtttgtcatcatcaaaaagggggagaatgtgaatgtatgtatacatgattttgatgatgtcaaaagaagaatcaaacaaggctcattttgcttcaagattaatacaagattgtttcaacaaacaaagccttaattcaagatttcttcaagatcaagccttacctcaaaatgtagagatttcaagtcatccaaggcacatgtaattgattaccaatacatgtaatcgattaccaaggcacatgaaagtgtgtaatcgattacacatcatatgtaatcgattaccagagactctgaacgttgggaattcaaattttaaatgaagagtcacaactgttcaagaaaaac

SEQ ID NO: 272130 - DNA, 431 bp, Glycine max
  unsure (1)..(431): unsure at all n locations
taagtgtggctggaaccaagcttaaaagtgaccaagcttaatcgtaggttgagccaggcttaagcgagatgacttgtaagggaaaatgagctactagatttcaagcttaagtgtggagcgaaccaagcttaagcatagggcaagccatgcttaaatgtgaaaccttgcaaaatgtgtatgaatggacttcaaatggatttcaattggaattcccttagtgtataagaattatgagatgcataaataggtttttaaggttatattatgagaatctacttttacgaagtatttatgagtttagatttgagtggacttaagtatgaattccttgcactttaattgatattattgaattggagaccgagattgtgatctttacgcaaattgtgtgttgaanacctaaattagtgagtgaatgtatgatgactttg

SEQ ID NO: 272131 - DNA, 426 bp, Glycine max
agcttgtcaaggaagtttctcaaggaagctacctaggctataaatagaagtatgtgtaacacttgtggtgactttgatgaatgagaatcttgtgagacacaactcaaagttcaacttctctcccccttttcctccttcaattttgtgctcccctctctatctttctctctctctttcttttcctccattgaagcatcctctccaagcttcttatccaaggcacattcttggtggcgaagctccttcttccatggcttattccctagtggatggagcctcctctcacctcttctcctttatcttccgctgcatctccatggtggaaaataagcattgaaggacctcattgaagctcacagatccagcctccatagaagctccacaagcaagcttccatcattcttctccttcctcaagaggaagtga

SEQ ID NO: 272132 - DNA, 447 bp, Glycine max
cgaagcagctccctcatcttcacctattattattatctctgaagactctatagagtcagcatctggatgagctactactccttctgctacccctgttttccatctaacagatgaggaggatacacaggaccagtcacaggaattctaaattcttgatttttcctttttggaaattattataactactatggtttagtacatttttttttgtgattttggtttataattataattatatacttgtgttttttttgtgaatacttagtgtgcatgttttgaagcatactgaacagcttaactagattctctgagtatacagtgcaaacacttgatctttttgtgaaattggtgttgtgaattgattgtggaatgaatgcatgattgaaatggagcttgtgttttatcatgagtattgagcaagtgtgtatgctagacaaagatagaaca

SEQ ID NO: 272133 - DNA, 425 bp, Glycine max
agcttctacatgtcaattactagcgtttcgagatattacgggactcaatcggacatccgagtaacaagttattgtacttggaattagctcaaggctactgtataccatttcgagcgtctagatatattacgggactcaatcggacatcagagtaaaaagttattgtagtttgaatttgctcagagcttcggtattccatttcgagcatctagatatattacgggactcaatcagacatccgagaaaaaagttattggagtttgaatatgctcagggcttcagtattccatttcgagcgtctcgatgtattacgggactcaatcagacatccgagtaaaaagttattgtcgtgtgaatttgctcagagcttctacattcgatttcgagctttacgatatattacgggactcaatcagacatccgag

SEQ ID NO: 272134 - DNA, 428 bp, Glycine max
  unsure (1)..(428): unsure at all n locations
ntgagcaaattcaaacgacaataactttntactcggatgtctgattgagtcccgtaatatatcgagacgctcgaaatggaataccgaagctctgagcaaattcaaacgacaataactttttactcggatgtcagattgagtcccgtaatatatcgagacgctcgaaatggaataccgaagctctgaacaaattcaaacgacaataaatttttactcggatgtctgattgagtcccgtaatatatcgagacgctcgaaattgaataccgaagctctgagcaaattcaaacgagaatcactttttactcggatgtctgattgaatcccgtaatatatcgagacgctcgaaattgaatatcgaagctctgagcaaattcaaacgacaataactttttactcggatgtctgattgagtcccgtaatatatcg

SEQ ID NO: 272135 - DNA, 438 bp, Glycine max
  unsure (1)..(438): unsure at all n locations
agcttgtcatgattgtaaggtctaaggaaagatataacaggagcaaccaaaggctntaaggaagttataatctagatttttgttgaaagggacagtatatggaacattaaaattcagagaggcagcaggcaatctatttatcaagtatactgctgtagtgcaagcaaaatcctataacattttggtgatgagtgtgaggacagatcaatctctgagtaataccttggtttgctaaaaaattggttagaggtctgaactgccctccccagtctgtttgaactcttttaattttggaatcaaactgaagttcagccattagcttgaactggtggaaaacagtgaaggtttctgaattattttaagcaaatagatccatgtaatagtaaaaaccatattttgaaggaatgtatgcaggactccatagatcactatgtatta

SEQ ID NO: 272136 - DNA, 439 bp, Glycine max
agcttgtagtggaacagataacggcaatgcatgtaggggacagtatgaggataactcggcagcctcatttaatcgataaagatgtcattttggagcagtcaacttgtatattttgagacatggaggactaacttaacccttaaaatttcttgttggtgcttctatatatcactagtggaaaggagacatattcattgcaacttgtaagagatgcagttgatggggtagtgtagaagagggttgatacatggctgcatccggttcaatgtcaacacgtttttaatggtagagaagttagatccctagatgtaccaaaaccagattcctttactaaaatgatgcagattctatcttgggatctgcttttcttgtggctgctattgcatgctcaggaatcttttttctttcattttggcaaggtacagccatataggtcagc

SEQ ID NO: 272137 - DNA, 402 bp, Glycine max
  unsure (1)..(402): unsure at all n locations
tatcgatgttgggcaagggatatgcgtccttggggcatgacttgttaacgtangtgtagtcagtgcacatatgccatttgccattggccctctctaccatgacaatgtgggtagccaagttgaatatctgaccttctaatacactaagccttgagtaactttgcaatcttttggctgacaccttttgccgctctctcccatctttttttttcttttcgtgagactagtttggtcagaggatagatggccaaattgtggcatatgatgctagcatgcatacttggcatattagacaactgtcatgcaaatagatttgtgtttcttcgtacgacttctgctacatgtttgtactcgccgctaatgaagtccttgctgagctaagtacactacccaggcttgggt

SEQ ID NO: 272138 - DNA, 439 bp, Glycine max
agcttgcaaaatctatatattataattgctttctaagaccctctgagaatgcatcatgttttggtaaaaaaaaaaaaaaatttaactcattctttgccccctcccctagctcttttactttttgtcattgatctcaaggaccaggttttcaatgaggttatataaatttttacatgggacaatgtcatgacagtgagtaagaaggaattgcaaatccatttccttattatatttaattttctaatttcatgattttttcctacttgtaacaccaatatcaaattctctgggattcttgctcttccatgctctatggtggtatttaacataaccattttttgataattcagtattattctgcacgattatatggtgacaataacattttttgtttcatgattgacattggaagcaagctgcgggatacaatcaaatcttt

SEQ ID NO: 272139 - DNA, 398 bp, Glycine max
  unsure (1)..(398): unsure at all n locations
tgtgcagttgtgctgtatctgggtacagtttaagtacagaccaatcctcatattcattcaattcaatggctctctactccttcttctctccctctcttttataccctccctcacatattccccgtcgacttttttgtcccaaggcttccttaagctcttcctcccctgaatccaaagcatcgcaaagtgtttcttctgcaacttccaccaccacttcccctaccccttcggttgagtctaggccacctgaccccgccttcaactatgcactcaccaaccctaacggcaacccaatcgtaaggattgttcgagccaccgagtcttccattgaaagggtatntctctacttctctgtcttaattctgaaaccgtattntatttaactcggctgagtagag

SEQ ID NO: 272140 - DNA, 436 bp, Glycine max
agcttgtgactgagggtggtaagattggattacaggtcaagtttgcattgatagactactagtagttattcattcattttctaagttacttctctttcatgtatatgtgaagagaagagaaaaatattagtagattgcatttgttattttttttttttttgtgaaattacagatcacatgtacataggcatatgcttaatttctgatgactttgtacagtacagtatacataatgagtggtggttaacttcagccacaagaaaattagaatgtggctataatactgcattggtttggtgttgagttttaatttacatttcaatcaatatcttaatattcaattcaaccatcttgggaaaaagttgaggaaaaaaaaagtaatggaatatattcgtggaagaactttttttgtgaaattacagatcacaaagaagta

SEQ ID NO: 272141 - DNA, 443 bp, Glycine max
  unsure (1)..(443): unsure at all n locations
taagttgacctctagtgttaaccattgacactattgttggttgttctatagtaggtgcagatggagaacaatcaatctcgccctataaaattgtggtggttctcgtggtatgagaatgatattaatttatgaatctttccttatagagtcattaacttagattttgaatttggttagcaatcctttaaattccttgtcaagttcagcatcaataccttcagctctatccttaatttgattcaccacaacctcatcaagcacaccacctaccagattcaagaaatcatccattgtatgctcaaagtaggcatgcacatctttggcaaggtgagcaatacatatgcggcacatgttcaagatatctntgtcattctccaactgaagcaatgcatcatcccattaatgctagggatcccaaaaaaaacacaacaacaaatctttga

SEQ ID NO: 272142 - DNA, 380 bp, Glycine max
  unsure (1)..(380): unsure at all n locations
agcttcaacagttgaatttgagcgatttgatatattacgatacttaatcggacatccgagtaaaaagttattgtcgttagaatttgctcagagcttcggtattccattacaagcatctcgatatattacgggactcaatcagacatccaagtaaaaagttattgacgtttgaatttgctcagagcttcgagaatcaatttcgagcttcttgatatattacgggactcagtcagacatccgagtaaaaagttattgtcgatcgaatttgctcagagcttcggtcttcaattacgagcgtctcgacatattacgggactcgatcacacatncgagtaaacaagtgagtgtcgtttgaattgagctcagagcttcaacattca

SEQ ID NO: 272143 - DNA, 343 bp, Glycine max
  unsure (1)..(343): unsure at all n locations
tgagcaacttcaaacaacaataactttntactcggatgtctgactgagtcccgtaacatatcgagacgctcgaaattgattatcgaagctctgagcaaattcaaacgacaataacttgttactcggatgtcagattgagtcccgtaatatatcgagacgctcaaaatggaataccgaagctctgagcaaattcaaacgacaataacttttttctcgaatgtctgattcagtcccgtaatatatcgaaacgctacaaattgaataccgaagctctgagcaaattcaaacgacaataactctttactcggatgtctgattgagtcccgcaatatatcgagacgct

SEQ ID NO: 272144 - DNA, 448 bp, Glycine max
  unsure (1)..(448): unsure at all n locations
agctntagtaacacccattggccaatctgaaattccccatcataccttcttaagaactccttccaaaaattgctcacgaaaacaggatccctgtcactaattatgacaactagtgctctatgtagtttgcaaatctggtccatgaaatattgagcaagtgttgccgctatatatggctgtgaaagggccacaaaatggacatacttgctcattcgatcaataacaacccacatggtgtccttgcaattggatttgtgagggccctcaataaaacccgttgttatactttcccaaatccgactaggaattggaagagggtgcaaagtctaggggtggcaattgtatcatacttacaccatgcacatgtatcacaatgttcaatgaaatcctgaacatctttaatcatccttttccaccaaaatagggatctcaatctctaatatgttgc

SEQ ID NO: 272145 - DNA, 450 bp, Glycine max
  unsure (1)..(450): unsure at all n locations
tcacttcacttcttcaagtggtgcaggatatgcttccagaggaaaacacttttccaaaaagttactattaggcaaagaagatactatgtccgatgggtatgaagtaccagaagattcatgcatgccctaatgattgcataatgtacataaatgagtttgaagaaatgcacaactacccctggtgtggggtatcacggtacaaagtgaaggatgatgacgagtgtagcaatgatgaaagcaccaagaaaggccccctaacaaaggtgttatggtatctttcgatcattcaaaggctcaagtgtttgtttgctaatgcagatgacacaaaagaccttacatggcatgcagatgggagaaattgtgatggaatgctccgccatctggattattcctcttagtggaagaagattaatagtctgtattcanaattacgcaaagaggcaagaaatc

SEQ ID NO: 272146 - DNA, 451 bp, Glycine max
agcttcatttactattaagttgtgaatgttcttcaaaaaggaaaagaaaaatagagaaaatcctcgatcaaagattggaggaaagcaaacgaaaaagagaaaatacctaatcaaagattggaggaaagtaaaagaaaaattctcaatcaaagatcacaagaaagcaaaagagaaatatacagaaaggtcgttggaccagacaatgtctgaataatgtacagagctgtcttaagagaaatagaaaagaaaggaaaccatgatttgaaacacatgaagctccctttcttggttaccaaccaaatctttgtgccccgtttctttcatgctgcgctaaacaaaacaaataactggaaaggataaggccgatacacccaaagccgaatttcccaccaataacagtttcccgaacgtcttgttgatccatgaatgcgcgtgttatctttgatttgat

SEQ ID NO: 272147 - DNA, 456 bp, Glycine max
cgacaagtcagtctgtttaagtaataataataataataattataataataatatataattattattattattattattaaatacctattattactataaaaaaaaagcttgttaagctttgtgttttaacgacatgaattcaatatgattctatttatcaattatttttggatttgtacattacttatacgaaattttataagtttctttttttagttaatatttcactaagttttaaaataattaattgatcaaagatatctttaagcaaacttttaaatagacttgaagacaaagtcgaacttttatgtaagtcaagccgagcctttgaaaaaaagcctatggcaggtaatgagttaagatcaagccttgggtattcaacttaagtcaagttcaagtctaataaaggttggcttgactcggcttattttcacccctagttatgatttaatttca

SEQ ID NO: 272148 - DNA, 413 bp, Glycine max
cgcaagcttgaggaaattcaaatgacaataacttttgactcaaatgtacgcttgagtcccgtaatatatcgagacgctcgtaaactttcgttgccgatgtcggctaggatttttttcgatcagtatcggtgaataaattttttttccacggtgggcaaatgttttccttgccgagtaaatgaaaacatggcggtgtcggccgaaacgcaacttcggttgagctcgaacgaaaaatcctagccgacctacattgtaaatttttacagcaacaccgaagtaaagagcatcctctaacgtgaaaaaatattatcggccatcatttgtaaaaaagcttgcgcaatgtcggctggaaaatatccgtgtgggttatttaccagcttatgttggctgctgttttatcaattgaatccctg

SEQ ID NO: 272149 - DNA, 414 bp, Glycine max
  unsure (1)..(414): unsure at all n locations
ntcattntcaattacgagcgtctcacaatcctacgggacacatttggacatccgagtgaaaagttattgtcgtttgaatttgtttagagcgtatgttttcaattacgagcgttttgatatcccacgggacacaatcggaaatccgagttaaaaattattgtcgtttgatttttctaaaagctttcattttcaattacgagcgtctcaaaatcctacgggacacaatcgaacatccgagtcaaaagctattgtcgtttgaatttgctcagagcttcagttttcaattacgagcgtctggatatattacaagactcaatcagacatccgagttaaaagttattgtcgttcgacttttcatagagctttcgttttcaattacagcgtctcgatatattacgagactatatcggacat

SEQ ID NO: 272150 - DNA, 305 bp, Glycine max
  unsure (1)..(305): unsure at all n locations
agctntaacctcatcgtctctcacagtctttatatttgggttccnatccaatccttgtgtccggactatcagccacttatgatagccgccgatgatcccattactgtctaccctaagctctctgaccttcttttgtaccaccccccatgccttgcggaccttctgaagtgtcttcacgctggtcttattgaagcctcatgaaatgacatgcgcgagaccatcctctaatggcgcccctctcataaggtagccaaatttgcttattgcaagaatgggatagtagctgatgcaacccctcatcacca

SEQ ID NO: 272151 - DNA, 432 bp, Glycine max
agcttctttttcttctcctctcaatagcaaggtctcttgaattcactcaaaggggaccttatttttttttaattcctagagcttctttagtctctaggttcatgtttcttctctttttcaaaaagccatgaaatgggttccatctaaaatcttaatggatggaccaaaatttgattgaagcttgttttggcattgagataggcctcctctagttgaatccatagcaagagtgaggaaagaaatctccaagatagtaccaagtttttatttttattttcttcttcaagaaaatcccaaaacctagttggtaagggaaacttaatttgcctcaccttgatgtctatgtttgtgtgattctgagtttgaaatggtttctatggtgttggttgatgagaaaattgtgtttatagagttgagaaagctttgggttgg

SEQ ID NO: 272152 - DNA, 454 bp, Glycine max
tcatgatgatgaaccaagccaatttgatgatgccaaaagctttactgattgattcaagacttcaagatcaagcatcaagaatccaattcaagattcaagattcaagagaagaaatcaagaagcaacatgtcaagacttcatataggataagtattaaaatatttttttcaaaaaccaaatagcacagttttgttttacaaaagaattctctcaaattttctaagttaccagagtgattactttctgataatcgattaccagttatcagtaatcgattaccaatgaccagtttggttttcaaaatgttttcaaatggtttgcaacgttccaaaatgattttcaaataatgtaatcgattacactatattagtaatcgattataagtgaatctgaatgttggaattcaaatccaattatgaagagtcacaaattttcataaaacacattgtgtaat

SEQ ID NO: 272153 - DNA, 342 bp, Glycine max
agctttagccttaggttgctccatgttgctgctccctctatctctaacaatctactcattgtgtttctttcattcgttcttacagttccgttggttaaggactggcatatgagaacatcaaatggaggtatatgttgccctattttataatctccttttattctcatggctaatgggtaacgtctgagtttcatgttctgatatctcactatttgctttccatgtctgatgctttatatattcttattttgaatccttaaatctatggttttgataggcctttcatttcatttattgggtgtgaagaaaaaaacaaagaaaatttgtaacacttgagagata

SEQ ID NO: 272154 - DNA, 428 bp, Glycine max
  unsure (1)..(428): unsure at all n locations
tgacaggttcaggtgcacgtgctgctactagtggagggacttcaatttgcttgccagacctcaaggtgatggcactcacattcttcggattctgcatagtttgtgaaggcaatttgtcagaattttgggactgagcttggttcaactgagtatccatctgtcccttttgatttgtcaaactctgaatggaggctctngtctcttgctaaaattgcatattctggatggtcattttccccactaactcctctaaggaaggttgagaaggggcctcagttgcttgttgtctttgttgttgttgctgctgttgcattggaggaggaacatatggcctgcttagactagcagcattctggaagagagggacaggctcgttgtgctgctgttgttgttgtggaggatttgcccatctcacacttggatgattc

SEQ ID NO: 272155 - DNA, 428 bp, Glycine max
  unsure (1)..(428): unsure at all n locations
agcttgtgcttgttntatttaaattccaaggatcatgagcaactaggtgtgttctgctatgacttgaaaaacaagagtgatcaaataacaagcagagatttaaaaggtactaggttgcctcctagtagcgcttctttaacgtcttgagctggacgcgtcatggcttgtcagtcacggacctagtactctgcttacctttggctttggactaggtcgcctattggtcggccatgggtcgtaagcaacgctctaacctttttatggatgagctgaggtgaactttaaaggtgatggcggtgcgtctgttgtccgctgccggccatccccaggccgatgtggtgtttcgccctgcgcctgcctgaggacgcagtacttctcgatgaaagctcaattaataaggagcctgatgaccttggtggaggtgacag

SEQ ID NO: 272156 - DNA, 453 bp, Glycine max
  unsure (1)..(453): unsure at all n locations
tccatcattntctaagttaccagagtatttactctctggtaatcgattaccagtttcatgtaatcgaataccagtgaccaaatttgatttcaaaatgtttttaactgatttgcaatgttccaaaatatttttcaaatagtgtaatcgattacctgtgtatctgaacgttggaattcaaatccaattgtgaagagtcacaacttttcataaaatgcattgtgtaatcgattacatgactatggtaatcgattaccagtgataacttttgaataaaaggtcaaaagttgtaactcttgacatgattttctcaaggttataactcttccaatggttttcttgatcagacatgaagagtctataaaagtaagaccttgacttgcattcaatagaactttntacaactctttgacaattttttagaacttctaagaattcctttctactcatctcact

SEQ ID NO: 272157 - DNA, 533 bp, Glycine max
  unsure (1)..(533): unsure at all n locations
cactcccaccgaccacccccctcntcaatccntttcttcatttatcaccccancagtacgcccatgacctgacgcttcgtgctcccgagatcccctagagcacgcgagtatgcggacatcaataggactagaactgtctgactcatatgtacacttgacgcccgaagtatatcgagacgctcgttaactatacgggccgatgacaggcactattgaatatggtgcgtatgcgagaagaaaaagtctttccacgatgggcaaatgttttcctagacgagtgatgaaagcaagcggagacggtcgcagcgctacttcgacatgactacaaaaaatgaacctagacgacctacagtgagaacttggacagctatactcgttttctggacctacagttcacgacggcaaaggttgcagtctcatgttaaacacctaccaatgaggccaaaaagctagagcttgatacaaccatttgactctgttgaacacagctcgctgaataatctgccgtgcaaatcgggagaataatatgcccg

SEQ ID NO: 272158 - DNA, 451 bp, Glycine max
  unsure (1)..(451): unsure at all n locations
ggctcncncaacaattccatggcatggagaagcaaatcatcatgaaggagaagaagaacaagcagcctagctctccacgtggaaggcttgcaagcttcttgaactctctcttcagccaatcagcatcaaagaagaagaagtcaaagtcaggctcacaatccatgaaagatgaagatgacagccctggtggaaggagaaggagaagaagcagcattagccatttcagaagctcaagcaccgcagattcaaagtccttgtactcctccttgagttcagagtttcgaactcctccttatgtacaaacaccaacaaagagctgcaaggaattcagaaccttctcatcagaaaaaaagcatgcactgtccttttcagcaaagtacaacaacaacaatggacaacaaataagatcatcaacaacaaccactttgcagaatgagttgttgtgggatga

SEQ ID NO: 272159 - DNA, 410 bp, Glycine max
agctccaaatatgtgctataactaggatacatacatatcctcgtagaagactaatttgaaaagctgcataagtgctgtctctggaaaaatatgctgacaatgacactgtctccatctgggtttggaagaattgctgccctatcttcttgaaactgatgacttactaaaccaaagagcacaggctttcccaaaccagaaatctgcttcatacactggcatggtcatcaagcttgtgagtatagtaggatgttatgatccccagcataggggacattcagacggcgtccttgtcccatgaaattaaaaagcccttatgtgatcgaattgctcttgccctaaaataacattcaattgtgaccttataaactcatccgtaatcacatgagctgcttcccttatcttttgatgat

SEQ ID NO: 272160 - DNA, 445 bp, Glycine max
taataagtccatctatggattgaaacaagcctcccgtttatggtatttaaaatttcatgaggtcatttcttcatttagctctgaagagaatgtcatggatcactgtatataccagaaggtcagtgggagtaagatttgtttccttgtattatatgtagatgacattctgcttgcgactaatgataagggtatgctatatgaggtgaaacaatttctctcaaagaactttgatatgaacgatatgggagaggcatcttatttcataggcataaagatccatagagaaagatctcgaggcattttaggcttgtctcaagatacctatatcaacgaagttttagagagatttaatatgacagattgttaccaagtgtagctcccattgtgaagggtgacaaatctgctttgagtcaatgctccaaaaatgattctgagcgggaacaca

SEQ ID NO: 272161 - DNA, 341 bp, Glycine max
cgcttatttccttgatattaggcttatgcctaagatcatacaattggatgggtgacattatatccttcacctttgaataactggatgctctgagaccgacccctgatgagggcatttggctcctttcttctatcatgcaataaataaccttgtatgctacacctttgtacataatcactgcatgtcatgttcacttgtggaccaatgagctgttctttatttgctcgacgacaagctaaactgctaatttgaagagtagttagtcgatgactactactaattattgtgtgtagatcttgtgaaaatcgtatcacatctcctccactttatagttattttgt

SEQ ID NO: 272162 - DNA, 442 bp, Glycine max
  unsure (1)..(442): unsure at all n locations
tagcgcgaagaagaccctcgaagaagcctaaaggtgcgcctagcgcanaatcccacgctaagcgtgtgaatgcctcgctaagcccagacattatcgcgctcagtgcatgatcaccccgctcagcccagaaggggcatgcatagcgtgaggcggcatggatcttaagctaccttgggcctataaaaggagtacgaaacaaaggagaaagacacaacgagactcatagctctctattcaatacacccaaagcctgagcatctctcataggggaaaccctctctctctagcctttctcccctcttcttttatccatccacattagctcttaaagtgtaaagcctctcatggcaatgagaggctaaacgccctctattgggagcctaatagccaacactctgtaatgaacctnctttactatctattaaatgcacgtcctatatct

SEQ ID NO: 272163 - DNA, 423 bp, Glycine max
agcttgttctttcagttatgtaggaaatattcatgtaaatgtcaccgataaacttcttgcagaagtttttcagagcgctggtcctcttgctggctgcaagctcataagaaaagaaaaggtttggttcactagtcaactctatggtctttgtcgatgatcattattgctgatactattattactacgctgctcataaatgacctatattaacaggccttgttttacaactaaaacaattctgttatttttccttagtgatgagtcagtgtttgtttttattccttaaaaaatctggttcgcataagaatttagattttagagctactttactctgaatttctcacggaactctcctacgaatctctaatcaatctacaaaggtgatagggtttcaaggagttctgaatcgatatgcatcatatt

SEQ ID NO: 272164 - DNA, 436 bp, Glycine max
  unsure (1)..(436): unsure at all n locations
tgatggtggatgaaaagagccttagattatatcggaatgaatcaatcggtcttgattttaaaaaaaataataataatcaaaatgactttgccttgccccaaaaatgtagtgtagtgggaggtttcacagttcattatcgagttgctccccctgtagtgattcctatgttattttatctaaatatggcagcatgatccctgtgcctcttacaactacaagctcattgaccaactgtgataaaaacaatggttaaaatatgcaatagcaagccactttcgccccaaaagacaccatggcatcattatcaacaaaaatcttaccgcttccaagaagctctaagtcattcttccatggcggaagacatcatngaaaaccatcatcactacaaatatcaatgagactacactctctacaacagacaaagaacattatcatt

SEQ ID NO: 272165 - DNA, 458 bp, Glycine max
  unsure (1)..(458): unsure at all n locations
agcttccactgtagtccctatatcatttgtatgaaaagtgcatcttgtagaatgaagcctaaagtctcgagattaggcatagacaaattgcttcttgaaaacctaggaccatgcccattaaggggataaggggacataacaatcaacatgcaaaggagaaattgtatacatgacaaacctgtactccaaatgtcggacactattagttgtcttctacaaaagccaagttcaattaggatgtaccaaaaaataaagacctaaattaaacaaaagtaaaacaacaacaacaaagaaagaaaacaccgacaatatggtagggaaccacaaaaataaagttggcatttaaagtaaccaaagaaatgaagagaaaacaaattttgccatcatctgctccatcatatggtaaacacactanagtaaggaaaggaatgacgctccaaaatggtactgaaaatcga

SEQ ID NO: 272166 - DNA, 458 bp, Glycine max
  unsure (1)..(458): unsure at all n locations
tgagttcttgagctattcctctcagccaaagagcttcctttatagcctctatcagtgcaatatactctccctctgtagtggataaagccaccaccttttgcaggcttactttctagctgatagttgtaccgaatgcattaaagttatatctagtgagtgatttcctagtgtcaaggcagccaacataatcaaagtccacaagcccttctatggcagctgaactgtaactgttcttatcagctctgccataagccagaccctttccaagtgaacctttgatgtatctcagaatccacttcaaggattgccaatgcaccttccttggatttgacatgaatatactcaccaaactcactgagtatgctatatcacgtagagtatacaccatggcatacatcanagagcctattgcatttgcataaggaattntagccataaattccttgtctctttctgag

SEQ ID NO: 272167 - DNA, 325 bp, Glycine max
agctatgcaagtgtcagtcaagtgtatggaccatgtcgtatcgcaagtgctcatacataatggctccagattaaacgtgatagcctaagagcactttggagaaattaccattcaccgcttgccacttaaagccgaattcaatgggggttcctgcctttaacggtacctctcgatatgataggggagatatcgatcttcccacacatatagggcctgacacctgtcatggcacctcacccatactggataataacctcttctacaactgattgatggggcgctcgtggatccactcacagggggttagaatgtgtacactatagca

SEQ ID NO: 272168 - DNA, 431 bp, Glycine max
tgttcgcacatcgttcgcgtgtatgacatccactccacaaggtttgaagttgaggagaccttcaatcctattacacaacgtggccgacaaaagtgggcagttaacttgaatggtcattattgtcaatgcagaaggtattctgcgcttcactatccatgttcacatattattgcagcttgtggttacgtgagcctgaactactaccaatatatacatgttgtttatacaaatgagcacatcgtaaaagcttactccgcacaatggtggcctcttgggaatgaagcgactattcctccttctaatgacgcatggacacttatccctgacccaacagcaattcgtgcgaaaggtcggcctaaatcaacaacgataaggaatgagatggattgcgtcgaaccctctgagcaccgaccaaaatgcagtatatgtgg

SEQ ID NO: 272169 - DNA, 455 bp, Glycine max
agcttcatgatgaatgaagagtgattcaaagatgttttgatgataacaaagatgataacaaaagatgatgactaaggtgatgacaaaaagctcagaggtcaatcaaagaatgagttcaagatattcaagataaaatcaagaacacatcaagattcaagaggaaagttaatttcaagaatcaagattcaagagatcaagattcatgactcaagactcaagaatcaagagaaggcttaatcaagataagtctgaaaaggtttatcaaaaattgagtggcacatggatttttctcaaaacatgtttacgaaagagtttttactctctggtaatcgattaccagattgttgtaatcgattatcagtagcaaaatggatttgaaatagttctcaaatgaatctacaacgtttcaattgatttcaaaaagctgtaatcgattacaatattttggtaatcga

SEQ ID NO: 272170 - DNA, 444 bp, Glycine max
tatgcgccattttccttacgaacgttctcttgcacaagacattctattaactaagaaaaatgcacccatacataatcaaggcagcttcattacctagattatttacacgtacttccaaggtgtatttgttacttacatcacacccatctccttggctaaatttacatacatgcatactcaaagcattttggggtaccaaaaattgcacatgtgcacatcttggtatttctaatacctatacatacgcaaacttcatgatgaatcttgactatcttcacaaaaaggtgctacatttcatgctcctttttcaagtttttgctacttaaagccgcatgcgaattcaagcatattttcctttgctgactaaaattgtattcaaattaaaaggtatatatttttttgtaatatgttttcttcacataacatgcaacacatttatataca

SEQ ID NO: 272171 - DNA, 224 bp, Glycine max
cttttgaaataggtcaagttcttcttgcgtcacctagacccaatgtcaaactgtccatatcattctatttgagagattaaaaggggcatggcctagattactaagacatgctcttgtttggactctagatgaaggatcatctatattacaacatactgaagaattccaacaacacaatcatgtatatgtaactcatactacaagacgggtatccaaagccagat

SEQ ID NO: 272172 - DNA, 449 bp, Glycine max
  unsure (1)..(449): unsure at all n locations
cctttaanagacacaacaaaagggtttttgaaaaaaatgtgtgtatcttgaggataaaaataatgaaggactttcccgaataccaaagcggacttagatgttttgcatggacttgataaaagaacaattgttgaaacaatgatttgatctgaatgtggaaacagaccctaagctttagtgactacgtaaccacaaaattctatattgagtgtccgcatggatatgttctacgattggttttgcatgaatttctaattgtcataacatatgattcatggaagtgatctangcattctttatttctaagccattggccaaacagttgtcccaatgtacattattttctgccatttgcaagccttttgagccagacatttgatttttaccagaaccctgacctangatgaaagtttcctaccttaccctaggataggagagcaggggtcttt

SEQ ID NO: 272173 - DNA, 234 bp, Glycine max
  unsure (1)..(234): unsure at all n locations
gtgcaatcttaacctataggatacgaactcttcctagtgttgagaaagaatacctcgacaatgcctacaagatcgacttgcctagggagtataaagaaacagccactttctgtgcggatgatctatctctntctgatgcgcatagaggagccttggattctatgacaaaaacttttgcatgagggagcgatgaggacgtaaccaatggcaacgaccacgaaggcgctttttgtg

SEQ ID NO: 272174 - DNA, 399 bp, Glycine max
tgcctcacagaggtccaagaaggataaggcggccgaagggactagttccgctcctgagtatgacagtcaccgctttatgagcgctgtacaccagtagcgcttcgaggccatcaagggatggtcgtttcgacgggagcgacgcgtccaactcatggacgacgagtatactgatttccaggaggagatagggcaccggcggtggacatcactggttacccccatggccaagttcgatccagaaatagtccttgagttttatgccaatgcttggccaacagaggagggcgtgcgtgacatgaggtcctgcgtaaggggtcagtggatcccgtttgatgccgacgctatcggccagctcctatgatatccgctggtgttggaagaacgccaacagtgtcagta

SEQ ID NO: 272175 - DNA, 420 bp, Glycine max
tgatgcacttgcacatacacacttcctttagatccccatggagaaatgcgttattgacatccaattggtgaatgaacccattgttgatagataccaaagccaaaaggtcgaactcggattatggttaactttgccattggagagaaagtattaaagtaatcacacccttaatatggttgcaattaacctttggtcaccaaccgagccttgaacctagctcttaatagatccatccagtttcctcttaattttgtacacccattggcagacaatgggcacaacattggcagagggacggatccaggaatgcattaaagggggtggggggtcgatctttttttacataattatttaacttctaataaataattatttgataaataaaagacttaaatatgtctttggtccctgatcataccg

SEQ ID NO: 272176 - DNA, 452 bp, Glycine max
  unsure (1)..(452): unsure at all n locations
tgtcttgtacacaccaagaaaaatcaataaatagatgacagggaataacaattttataaattaattntatcatgatttattcattctgtttttgtagcccacatcattaatattataagagttataggtggaaaaacattagttaattttacattgaaaaattgaaatgataattatttcaaaataatcttttttttacttgataattattatgggattgaggaactactctcttttatttaataatgttagttttttaaaatattttttcacctatttattagtcttaggttgtttcacctatttttaaaaattattctaaataaagaataataattntataaaactaaccttattaaacaaacgaaagaaagtactccctctatctatactaatcctcacgtaagaagaacaaatttgttctaaaataattcttattctagattttaatg

SEQ ID NO: 272177 - DNA, 313 bp, Glycine max
agcttggtctgattcattggactcatgtcattttcttggtgctcaacggatatggatacagaaactccctgacgcgtacaaccaccttggagaactatccattcatagcttcccactaatagccgatatcaatggaggtacatgccttcaacggtacccgccgagaggttatgggagagatacatctctctttcagataggccctcacacctgtcaagcatccttcctaagattgtgatattagccccccctacagctgtctgtcggggcgcccgcggatccactcagagggcgtagaaccctctacactcca

SEQ ID NO: 272178 - DNA, 309 bp, Glycine max
  unsure (1)..(309): unsure at all n locations
cgagttagctaggatagctctcccgccaactactctaattctcaatatagacgatcgcattgatcttccggatgcgctcacatcaatcatgacaatgacctgcttcagncttcatgtcagcttcatgaatcaaacgcgactatggcacctccccagcccaaaaagttagatctttgaagccactaactattaactaagctacgcttttgtgttcatttacctttgcagtgttaaatttggtcagaactacataaacctgacagaaagccgaaacgaataatccgtcgtggggtggcgggatgctgcata

SEQ ID NO: 272179 - DNA, 406 bp, Glycine max
  unsure (1)..(406): unsure at all n locations
agctntaagtatatgtactacctcagattttacttatttttccgaatcccttcttcaccaagtttgcttcttaaccaagtttggaagaagaaggaaaaaattaatatatatatatatatatatatatatatatatatatatatgtatatatatgaaagaagaaaaataagacttaaaagaacataataatgttatatatatgataaagtagaaatctggtctttgtatttatatatttgtatcgatatggtcccttaattaagagtgaaacatggatactttaatctcatagagtgcgtttgacaaactacattgtggatttcatcagcttattattgtaacacgtacatttagcttacttgatatctcagaatttgttacttatcaacaaggtcaccatggtagt

SEQ ID NO: 272180 - DNA, 452 bp, Glycine max
  unsure (1)..(452): unsure at all n locations
tcattctacatctganaaagaggatgagctagctaaacaaaagagaaagcttcctgatcatgagggagctaacaaaaattttcatgcaggtggaccttcttctagtagttctgacttgcagcagcctcctatccctcttccatttccacctagagcaattccaaacaaaaagatggaagaagtggataaaaagatcttggcgaccttcaggaaagtagaagtgaacatacctctactagatgccacaagcaaattccaagatatgtcaagtttctaaaggagctatgcactcacaaaaggaggctcaaaggtaatggaaggattagcatgggcagaaatgtgtaagcattgataggtaaatttgttcctcacattcctgagaaatgtaaggacctacgtactttctatataccttgcattattgcgaacaacaaatntgcgaatgccatgct

SEQ ID NO: 272181 - DNA, 368 bp, Glycine max
agactttaagttccagataagtaatcaatggtcctgctatttctatacacagagtcatgctgggctaccgtcttctgggaaacattacagagggctagctcttgggaaaggcatggcgtttttgagagagacttagcctttggatgcataaatcatctggcaagctctttgattagacatataagaatatgcaatgggtaaatatacggtatcgaggtttacctaacctgaattataagattaaccatcacatggatgccagctaggttttggctatacatcaacaataagtttgaaagcatgtcttgactgctattacaactgtatttatgtgaatggcggctagttatgacactatatatgggatg

SEQ ID NO: 272182 - DNA, 446 bp, Glycine max
  unsure (1)..(446): unsure at all n locations
nggacaaaatntcccatgctactatgaataactccaccacatgaagcaacacctgccacttgagcagaattggccctagtgtaaaacagctaaaatttgaactttgggtctaccaatatttattattaattttttaaagtaaaaaatatcacacatgttaattaaaagaccttacatattattattttctttaaagtaaaaaaatatattttaatttttattctaggtctcattttctattggaccgacacttcagttgagattaaaaatttcactaggagaatagctccaagtatttgtattgtagcatcactaacaacatcgtgtccattggttgcagcacacaggtattcacaactattcttcatgtccggaattagtgattcgatcaaaatactaatcaacatatgcggagatataaggtgggatagatgaataagatcact

SEQ ID NO: 272183 - DNA, 432 bp, Glycine max
  unsure (1)..(432): unsure at all n locations
agctntcaattgccatgatagcaaagtaaccccaaagcactgaggttggtatcttcttcaagagaggcatagcagcaacacaagctgcaaccatcaatgcctgcagcagattgctgaggcgctgttctttaacttcaactggcaaaaggtcatcaacatccttatctacatcgaaaacagcctcgtcaacaggggaatcaatgtatccatgacttgaagccagttggatggtggattccttcagctcctttagcccctgcttgaagaacaatatataggataaaggagagagagataacaaatttcaagtcaaattggaaatcataggattatacttaccagggcaggtggtatttggcgggctaatggagtctgcatttggtcatatgcttcttgcatatttcggtataattgacacaggttcatattttt

SEQ ID NO: 272184 - DNA, 384 bp, Glycine max
tagtgcatctgccatgctgaacaccttgaatcgatacacttattagcaatgttctgatgaaaatctctctggttgaatgggctaattcagtctgaatgaggcaatgatggtttttatgaccatttttgctgcctctattatgcatccactgttgaaaggaaattccctcaatgattgtttttgttgtgtcatgtggataaggatgtaaagatttgaaatttctcatatgcaacagttcgtgttcactgcctcagttttgacaactgctgcttagtagtaactaatgaatagtgtgtagtgtctctatatttgacggaatggatacagagggctatctatttaactcttaagattctgttctaatctggtaccagggtacgttag

SEQ ID NO: 272185 - DNA, 370 bp, Glycine max
  unsure (1)..(370): unsure at all n locations
agcttgagctgagcaaatggngaatatgagtgaccaaagtgaaagcaagagccatttctagggtaaattgggtgttgagaggtcaaattttgattcggtggagttttcgtcgtaaaaccagtttgagcaagtttagattaatgttatagacttgtgtgagatgagagtttgctccaaaattaccccattctcattttcacttctcaaaccttgaagatccactaaattgaggggttttagatacctagagtttaaattgcttaggtctgaagcttgtctttggtttagatatgatttatacatgaattangacttgtaggatccaatttgggcaaaattgggtgagggcaacagtgattttgaaaatctg

SEQ ID NO: 272186 - DNA, 393 bp, Glycine max
  unsure (1)..(393): unsure at all n locations
tcanaataaaaattaaccggtcgatgaacgaagaatggacgaagaacagtgaagaacgatcacgaaatcaatcatgaaaacgtttcagaagcgcctcaaccttatttttttcttcttctttctccttcttctcactaatttcactgaaaatatcctaatatatgatgttgaacccttctcctcagccccctcatgcctatttataggaaatgaggggtggaggttgcacaacagctcgcccaggcgagctggttacttcagccctaagttttctagtggcccaggcgagccaggggcctaaaaaagtcaccaaatgaccactttgccatcccttttgggtattctctgcattcttttcagacacatttgaaaacattaccgattgtgcacaat

SEQ ID NO: 272187 - DNA, 348 bp, Glycine max
agcttggagaggatgcttcaatggttgaaaagatagaaggagagaaagagagaggggggagcacgaaattgaaggaagataaatagagagaagttgaactttgagttatgtctcacacagactctcattcatcaaaggtacgccaagtgtacacatgcttctatttatatactaggcagcttccttgagaagcttacttgaaaacacctccttgacaagcttctttgacaatactttcttgagaagcttctttgagaaaacttccttgagaagcttcttagagaaaactcccttgagaagctatagcttagttacacatacccctctcataactaagctcaccttctt

SEQ ID NO: 272188 - DNA, 429 bp, Glycine max
  unsure (1)..(429): unsure at all n locations
tctttgaggcttaaattcaccagttgggctttcattcactatgatagatatggatgccgatgaaagggaccccttgacccagccaatccacctttcatgaaaccccattcttcttatcatataaaagaagaattgcccagacacccagtcataccctttctcaaaattcactttaaacaccaaacaagggcttttagatctnctaggctnctcaacaacctcataagcaatcaatactccatgaagcagctgtctgcccttgacaaaggctgattgcctttcatctaaaaggtgattcataaccttgctcagcctattagatagaactttagcaatgactcttgtaacacagcctatgacggatattggtctgaaatcactaatgaatcgagggtccttaatcttacggataacggcaatgaatgatga

SEQ ID NO: 272189 - DNA, 319 bp, Glycine max
  unsure (1)..(319): unsure at all n locations
cctcaaggaatacaagcacgacggcgcaaagcctccatggagtcaagtctatctttgttgacagtgattaatcaactggtgatgatgatgttagataggataatcatgatgctgacgattgcttgaactatgacgatgatgaggcccggcgactgaattcttatgtgattgtttttgaattaatggtattatgaaatgtcctattctgtgaatactcaaactttttttttacatatgactcccacatgttatgctctanatatgatggtatttgatgatgtttcaatttctaaattgtatatctgttagtacggatgtt

SEQ ID NO: 272190 - DNA, 385 bp, Glycine max
  unsure (1)..(385): unsure at all n locations
tgtcaaaaagggaagcaagttaaaaactctnttcaattataaaacgttgtttctacttcaaaaccctttgaactacttcacatagacttatttggtgcctctagaactatgagtttgggtggtaattactatggcttagttatagtagatgattactcaagattcacatggactttgtttttgaaaaccaaagatgaagcttttgatggtttttgcaaacttgccaaggtcattcaaaatgaaaaaaggtcttaacattgtttcacttagaaggtatcatggaggtgaatttcaaaatgagtctcttgaaatgttttgtgaagaaaatggaattcaccacaacttttctaccctaagaacacctcaacagaatggtgtcatggag

SEQ ID NO: 272191 - DNA, 364 bp, Glycine max
  unsure (1)..(364): unsure at all n locations
gatacatatgactcaatgcggtatttgaatcctagtagattaggaatccatctgtcattgtagactttgatatcccttccatttcccacccttcagtagcttcctgtttctataatccatttcgtagcatccatgcttctccaagccaaactcggttggtggccttttagtgcaataaaaggtgtacctcgggggaagtaattagctttgtacaccctngtcatttgaaatgagtctccaccattgtttggctaagaggcccaaattgaaagctttaacgtaccanaangcctaaagcacctttttttactatgacntaagtttgctcaactcagccaatggattttcagccttttaacatcac

SEQ ID NO: 272192 - DNA, 365 bp, Glycine max
ctagcacgcctcaactcattctcaagagattcctggtttttcttattggcggcttgtccaaaacagtgtttttttccctcaagtcattgaagattggtggcaatttctcaaccaacatggcaaactcagcaaaaatatccacctcaatttcagagttcatagcaatagaagaaacctcatcagccaaaactatcagctctgacaacaatttagaaaatattctctcttccatgacttccatcttgtcaatcaaaactgactttatgcagcaaaagacatatcagtcatccctcatcagttacagaagatcctcaatcaattgggaaacactcgatatctagaaaaaaaactgctaacaataaatg

SEQ ID NO: 272193 - DNA, 429 bp, Glycine max
  unsure (1)..(429): unsure at all n locations
agctttgctgcattaagggnnnattttatttatatatatncactaaaagagtnggaatatagatgtaaaataatcaaatatttaatttagatgtcaataaacaagaatattattgtatcggatattacttatattagatttgattttcttaaataacagtttaaatttgagtattgtggataaaaaaatataattcaaatgagagatctcattaaagataatgactcaaatacttcaacaaaaattaatcatagataaaacttattagtacttcacaccaatgtttaatgttttggtgataaaaaaaataaaatactattgaaaaaaaaggaattagtctttctatttaatagattctatatgattatatccaataataaagaatatattttctcacataatagtaataaagaatatatcgaaaagaaa

SEQ ID NO: 272194 - DNA, 405 bp, Glycine max
  unsure (1)..(405): unsure at all n locations
tgaccccaatttgatcaaaggtaaagctaacttgtattatacctattgcatcaagtggcctcagaataattaaaaatggggggttgaattaattattcctaaacctttactaattaaaaaattactcttctaaggattttactatgttgttaagtgaataaagagtagaagagaaacttaaccaaaactaaaagtggaaattaaatgcacagtggaaattaaaagagtagggaagaaggagacaaacacacaagagtttttatactggttcggcaacaacccgtgcctacatccagtccccaagcgacctgtggtccttgagatttcttttcaaaccttgtaaaaatctttntacaagcaaaaatccataagggatgtacccttccttgttctcttgaacaacct

SEQ ID NO: 272195 - DNA, 376 bp, Glycine max
  unsure (1)..(376): unsure at all n locations
ggggacctcatgagtctggtctttgctctccttttgaagagcaaacgcaagatgttagctacatggggaatcaacaaaggcagggatacaatcacggtggattctcaggtttccagcagggtccttcacttgtctttcacaaagtatgcatttatccaaagagaagaataaaatttaacctgaacagatagatgaagttaggcataagacagatatcaaggaaagtagcttaaaccacagtctcacggctactatttcactcaagcacaagtgttaaatctattcattaataacaactagcaagagatccaatctttaaatntcatcttatgacataaagtcagaaatgtataaatagaatcagaaggactttctc

SEQ ID NO: 272196 - DNA, 414 bp, Glycine max
tctagccaaatggacttaccttgaattaattccttataattctccctttgagcctatgttcccctttatttgttttgaagctcattacaagccttcagtgaaaaaccatgatatcaccttacccttaaggaattttggagctttggaattgttttgggaataagttgggaataagtgtggggggtatgtttcattggaagatatgatttttggtcatgcttaatgttttattttggccatgcttgatgtgtatatatattgcctagttctttctttaatcttcaaattcgtactgtttaaaaaaatgaaaatgaaaaaaagaaaaaaaaaatttcaattgctgcaaattctgcaaattcatactgtttaaaaaaaaaaaaagagaagaagaaaagaagtgaagttgaataaatg

SEQ ID NO: 272197 - DNA, 346 bp, Glycine max
  unsure (1)..(346): unsure at all n locations
ctatcattggtatcatttctttctctgtcattgagggaaccacttgggctaccaaatctctccacctttgggcgtattctttaaaagatccgtgcccctttttgcacatgttctgtagttgcatcctatctggagccatatcagaattgtactgataccgcctaacgaaggcaaccattangtacttccaagaatggactcaagaaggttccaagttagtgtaccaggtagcagctaccccaataagactttcttggggcaagtagtccccttgtacttgtcatagtccagagccgtgaacttgggaatgaccacgttcgggtactaagaacaactcttctatgtc

SEQ ID NO: 272198 - DNA, 404 bp, Glycine max
tatgctgcagacatttataatagaccccctcagcagttattaccttcaacagcagaataattatgatcttttaagctacagatacaatctaggttggagaaatcatccaaattcgagatgggcaagtcctccacaacaagaatagcatgtccctcccttccagaatgttgctagtccaagcaagccatatgttcctcctccaatagtgaggcaaatgaccatccataatatgcaatttcagcaagagacaagagcctccattcagagtctgacaaatcatatggggcagatggctactcagttgaaccaagctcagtcccaaaattcagacaaattgttttcacaaactatgcagaatccgaaaaatgtgagtgccatcaccttgaggtctggcaagcaaattg

SEQ ID NO: 272199 - DNA, 386 bp, Glycine max
agcttgctcatcgagtagataattttagatacgacattcctaacagggtgggagtaggaatagcggaggcaagatacgccgggtatactaattaaggaagaaaaatccataactgggaggttatgggataattcttaactaatcattttaaaaatcatcattttgcgtgcaacttataatttaacgaaaccaacctctgaaccaccctcggagatttattctgaggcgtttgatatatatattgcgtgctttcgaaaactggccccgacggacgcacacaaacgcgatgaattggaaccatacaaacggcacgcataccgaggtcaagattgtagcgtttcaaaggtcagatcctcctcactcttgtgactgagtatgggtcacag

SEQ ID NO: 272200 - DNA, 283 bp, Glycine max
aattatatatgggccattcggtatggtatatgcgaatggctttggataatgggattcagctcttgagggtggaatcatattctgttgatgtagccaatgatattaatgacactttggttcaagatggccaatttcacggttgggtcatgagatttgcaaaatcaaagatgagttgttgtgccaagcatggcctatcacttagtaaggattggcttttctttgcttcaattcctaactttgctttacattatggacgacaacgctgtaaacaatttgcgctcct

SEQ ID NO: 272201 - DNA, 420 bp, Glycine max
  unsure (1)..(420): unsure at all n locations
agcttcttcagtccaaaaatccctcanttctataatatgcatccaaactttattaactcgatttaagtctgatatctagttgatgatggcctaacaattgatttaagatagactctaatatcattttaagatatggagcctaactcaaccacacaaaacgagataggtgactgagggtagggaaagtacacagagagatagagactcaaaataataagaaagttgtccagtcttgcatcaaatcaaaaattaaaactcactgaagctaacatgaatagaataactgtgacaatcaaaggtgaaaaaattatccatacctggtgaaggggaaaaagatagccttgaataagctggcattctactccataaatatataccagaggacacaataaattatggattacggaattacccttattc

SEQ ID NO: 272202 - DNA, 357 bp, Glycine max
aaatacgctgctaacgacgacgtgcgtccacgaagcacatctcatggcttccaggcccacaaggacacaagactttgaagtgtagcaaatgtcgtcgctacctaccctccggcgggagggcgacacgagggctcacaggtgcatctttcaagaaaggaaaaagcacggagtcaccaccaacgtttattcgacgaaaacgtgggaaaaaccacaaaaggtgaggcctaagaaatttaattgtgaaaagtcccggagttgattttacgcactgggaaggtatcaacaccccatgcgttcctcacaagggacgacagcctgtaatcaagagtgcaaataatgactttctaatgctttatt

SEQ ID NO: 272203 - DNA, 407 bp, Glycine max
  unsure (1)..(407): unsure at all n locations
agctttgtatggtagaagggtgatgacttctctatgttggctagagcccagagaaaacctcaccttaggacctgtcataccctaatttcgtccggggacctttgcttgatgacatgcgaccattctttggtccttgtgaggtgcttgcatccatcattaggcaatttgtgaaattccaggacatgccgaaaaaccaaaaatatattgatgcacaatccgtaagtttccgtgacacaccggaaatcaaatggaagcatcgttgcataattaagtgaggtttcgtaacattccgtatgtcaaaagggggatgattatgtaatccgcaaggttccgtaacattacggaaagaaaacaagtatcgttacgagattcgtaagtttccgtaactttacgaanaaagaatcacc

SEQ ID NO: 272204 - DNA, 268 bp, Glycine max
agcctatgtgcccctgtatttgttttgaagctcattacatgccttcattgaaaaaccatgatataaccttacccttaaggaattttggagcttaggaattgtattgggaataagttgggaataagtgtggggggtctgtctcatcggaagatatgagggctggacatgcttaatgttttattctggccatgctagaagggtaaatatattgcctagggcttactgtaatcttcaaaatgatactcgttaagaaaacgaatgtgaaaaa

SEQ ID NO: 272205 - DNA, 419 bp, Glycine max
  unsure (1)..(419): unsure at all n locations
agctatgatgatgtcgagaaaatantgcttgatattgagcgtgatcatcaaaaagggggagaatgtggatcatgcattgttttgatgatgtcgaaacaaaatcacttgattgtcatcatcaaaaagggggagaatgtgaatgtatgaatacatgaattttgatgatgccaaagaagaatcaaacaaggccgttcaaaggataagcatttgtttcaagattaattcaacaaacaaagccttgtttcaagattcactaaagatcaagtcttgcctcacaacaaagggtttcaaagtcatgcaaggctctggtaatcggttgccaggaagtgtaatcgattaccagaagggaagaatgaanaagagctattgaaagggttttgaatntgaatttttgacatgtaatcgataccatatgtctc

SEQ ID NO: 272206 - DNA, 423 bp, Glycine max
  unsure (1)..(423): unsure at all n locations
tatgcgcatatttccctacgaacgttcacttgcttattacatcctattaactaagaaaaatgcacccatatacaatcaaggtagcttcattacctagattatttacacgtacttccaaggtgtatttgttatttacatcacacacgcctccttggctaaatttacatacatgcatactcaaagcattttggggtaccaaaaattgcacatgcgctcatcttggtatttctaatacctatacatatacaaacttcatgatgaatcttgactacctacgcaataaggtgctacatttcatgctttttttttcaagtttttgctacctaaagccacatgcaaattcaagcatattttcctttgctgactaaaattgtattcaaattagaaggtatatancttttttgtaatatgttttcttcacat

SEQ ID NO: 272207 - DNA, 225 bp, Glycine max
ctccttagacctccattaagtttttttgccttaccttcacttacattgttggatgttcattgttctccatcgcatctcctcacatgtcttgtgctgaatgctgataacacgattctttagaaatgccaccgagtgatcttgcatatagaagctagatttcattctctatggatcaaatttcgtgtgcatgttcttgaaccatgagatgtgtagagcttacgtgag

SEQ ID NO: 272208 - DNA, 113 bp, Glycine max
cttgaaatcacctcctttgacaatccctcacctataaatcatcttggccttattccaccactctcataaatgggagagaaatgttcatctaaagcatacaagttcctaatatt

SEQ ID NO: 272209 - DNA, 420 bp, Glycine max
  unsure (1)..(420): unsure at all n locations
gggggagaagcgaagaagaaataggttcatgctcatcaggcacttctatctctttcctatgagctgaggaagattattttcgcgacgaaaagacaagccgacgcacttccgttgcgttagcctgactnattacgcgaagattctggactgatctttagagactcattgttcgatcgatgcttattctagtcatggacgggtcagtacctcaaaacaagctggtcaattcactactatgtacccgaggagcgccacagtgggcctcacgtatgcagattctcgtatacagtaacattggatcacgccattggacgtgcataagccataccatcaaatgatgtcactgctaatccaaaaggcaacaaatatcgccagtcgtgtgagttgttgcatcgtcattttcgtagaatgacttccacg

SEQ ID NO: 272210 - DNA, 351 bp, Glycine max
  unsure (1)..(351): unsure at all n locations
tcggaagaaagtgatgaggtacaagccctaatagnttatcttgaaagagcctgagtagtcgaagagaagttcaagtccatagccatcaaagtctgaaaagagcatgatgaactaagggatgtcaatatggccaccgatgaagccttggaatgagaaaccaagaaggcccgaaaggaagaacacgaccaaagcaaagttttgaggggctttatagggcagcaatagtgagctcaagctccgaagaggtgaaaggaatcatcacgggtcaaaggcatgatcttgaaggatgagctaaaggtttgccttatgtcgaaaagaaatttgacccaacagttaagcgagactgaaggg

SEQ ID NO: 272211 - DNA, 375 bp, Glycine max
  unsure (1)..(375): unsure at all n locations
ttttccaacccttaaggacaaaataacgaccgctctagtgctagttttgcctaacccgagagaaccctttgaggtgtattgtgatgcatcaaagatgggtttaggttgagtgttgatgcaaaatggcccaagtagtggcctatgcttctaggcaactcaagactcatgagaggaattatcccacccatgatttggagttggttgctgtagttntttcccttaagatgtggaggcattacctgtttggctccaaatttgaggtgtttagtgatcataagagccttaagtacttgtttagtcagaaagagttgaacatacatcanaggagatggttagatgatgcaatcctaccccccccccccaagggcattggat

SEQ ID NO: 272212 - DNA, 425 bp, Glycine max
  unsure (1)..(425): unsure at all n locations
ncataacatcagcattaggatgtcataatctagtatttctttggcaaaagaagtggcactactagagacagtatttacaacataagtatttttttaccatggaaaaatatataatcagctatgttatggaacacttttacagacttttatttcaactacccctagacttatggtccttattaattatgcatggtgcaaggcccgcaccctaaaagtatatattattggcgtaaacttgaactcaaaatcatggactaaattggaactcaaattgcataaaataaaataatagaagtaggaatatatgtgaatatatatttgtgttgtattgaatagtatcaaatgatgacagaaaatcaacaaaattgtgtcatgatggagaatatcaaccacgagtgcctaatcaatggtactggttaatcaac

SEQ ID NO: 272213 - DNA, 421 bp, Glycine max
agcttataatggagaagtttgttgttcattccagtttgtgtagagaaggggattggaacttgatttggaagcttcatatcccacctcgggtaaagctatttctctggaagctgtgctgtgattgtctccatacaaagactaacctttgatctagaggagtggagtgctctatatatgttgtgttcacttagcgaaacaaaaatagagaatgcatttcacatgtttgcaacttgtcaggtgaatgagggttgttgggagaagcttaaccacaagcagcgtgttgatgattttgtgctcgaggttgatagccccatttttaagcttttgcagggtttgagagatcaacaaagaaggagagtagccatgcttctgtggagcatctggcgtcgacgaaatgagaagttatggaacaaccaagctg

SEQ ID NO: 272214 - DNA, 424 bp, Glycine max
  unsure (1)..(424): unsure at all n locations
tgagattgttttgctttaggaaataatgaaaacattantgtttaaatcgtgagatctacgtaggctcatgagagttttcgtagactcgaatagtagatttgtaaaagtttacttcaaataaaaaaataataaattaactataaatatcatatcaatttaacattttattaatattttaaagcacataagtaataagttcatccaattacaaaacataagctcttctccaacaaaaggtcatacaattagaaaacacaaatagagaagatgaacctgattggcagcaattgtttacgaatggaatgcaggatagagaacaagtgctgctgagtgagtgtactaatactctttggaatgataaagatatgaaaaagactcagccaaatagagaagaaaaatcaagacgacaactgtgattcatctt

SEQ ID NO: 272215 - DNA, 393 bp, Glycine max
ataacttcaaatagatcattagcagaaaagaataataattgttcacacttcacaggaaacaaaagctatgaaaaggactgaaaatttaaacagcagaatgagtttgtacctgtacaaacttggcaaagccagacccaagaggggatccaatgtacagagccattgaagctccatttagcaaggatgcgtatactagccatggccccatcatccgtccaagattagtgggccagcacactacatcacctttacgaacgtccatgtggcaccatgcatctgcagcagcttttagagagtaatattggtccatggaattgcctttggatcacctataccaccaaatgaggtacattatattagcttttggctagcttcatatggtgagtgaagtct

SEQ ID NO: 272216 - DNA, 425 bp, Glycine max
  unsure (1)..(425): unsure at all n locations
tgaacgcagaaatngaagaagacggagtttgtgttgcttttattcttctacgcattactgagcatgtacccgtccgacgacgcaaaaatagaagatgagggagggggccagtcgcactgctttgtactcgtctagatgctttttaggaggaattattaggtggcttgattaataatcattaacacataaataataaaaattatattcattaagctagagatatattcagtaatcatctaataaaaaataattatattatctcttaatttaagtaatcttaattaatttaaaatattaaattatttacacgttacataattattgatgggattatgggtgacttagtgacgtgatggttctagaccatcacctaataattactggtggtttagctgtcgatcctggacgaagtttatgtagtttgt

SEQ ID NO: 272217 - DNA, 422 bp, Glycine max
agcttaataaatctatatatgggggataactagcttcccgtcagtggtaccttaagtttcatgggataatttcttcatttggttttgaggaaaaccccatggatcaatgcatattccacaaggtcagtgggagtaaaatatgtttccttgttttatatgtagatgatattttacttgcagccaatgatcggggtttgctacatgaggtgaaacaatttctctctaagaattttgacatgaaggatatgggtgatgcatcttatgtcatcgacattaagattcatagagatagatctcgatgtattttgggtctatcacaggaaacctatatcaacaaaattgtagagagatttcaaatgatagattgttcaccaagtgttgctcccattgtgaagggtgataggtttaatttgaaccaatgt

SEQ ID NO: 272218 - DNA, 399 bp, Glycine max
  unsure (1)..(399): unsure at all n locations
gaaacatgtcactttccccatcgttanntcatacttggcataattggacatctacatgatcaaaatgttagattgaccatcagtgaatcacaaatcaaacgaactaatatgattaaaccacatctctctctctctctctcaaacgaattatttattaggtcaaatgttcaaacttcactcgcaaaattcgctcttaatatgtatagctagccaattcaatccaatttgtaacaatttaacataacccctaagtataaaaagaaaaaaaaaggttaacataaccgattataactcattgaaaacataataactcattgaaatttatgacccactatgtcttcgattgtatcagccatgtgaaaccattttttatatgcttatgcaaaaccagttttcacc

SEQ ID NO: 272219 - DNA, 137 bp, Glycine max
aacctcagggaagaaaaaaaaaaaatggaaaaagaaaaaatgtacaaggaaaatgcaagaacataagagaagaagaatgaagaaaagaaaacaacatcccttgaattcattggaggttgcaaggggggggggggggg

SEQ ID NO: 272220 - DNA, 421 bp, Glycine max
  unsure (1)..(421): unsure at all n locations
ngtaatgattataaaattaaatgtgctaagaagaaanatcgtttatacgtaaacacgacattgaagtaacttgggatgagtataaaatttgtgaacaaaccactttggctaaggaaatattgtacatgttatgatttatcatagaaaagctctcaaagatgttaggtacacctcaggtttttattataagaaattagagaaattgtattttatactatcacttatttctgataataagaataaaaaatagtataaatgtataccgtaagatatagacatgaatggacaccgcattaatatcttttatcaaatagatatctatttgattatttcaaaaatattattattgtaaattttagtaaagtaactaataataataattaggaatctcatatttctaaattaatgtctaattctacat

SEQ ID NO: 272221 - DNA, 211 bp, Glycine max
  unsure (1)..(211): unsure at all n locations
tacccatanagactacagaaaatggcgcgttaacgttgattacatcatcacggacggaacctgttgattgagatagtgatgaatgagggatagtagttatatattagcagactcacagtggacactaattttgttattggcaccaatcacaaatcacactattgagacagtaatcggataccagataagactactgtacactgttaataca

SEQ ID NO: 272222 - DNA, 416 bp, Glycine max
  unsure (1)..(416): unsure at all n locations
tcttagtctcagctgatgaagatgaattctnggctacttangctctcctctaatgacaatagcatcacttctggcactaaattgctgggagtttgaagccatcttctcaatcaaatttctggcttcagcaggggtcatgtctccaagggctccaccactggcagcatctatcatacttctctccatgttactgagtccttcacaaaaatattggaggcgaagctgcttagaaatctggtggtgagggcaattggcacatagtttcttaaatctctcccagtattcatataagctttctccactcagttgcctaatgcctgaaatatcttttctgatggtcgtggtcttggaagcagggaaatttttttctaagaatactttcttgaggtcatcccagctcgtgatggaccttggag

SEQ ID NO: 272223 - DNA, 428 bp, Glycine max
agcttggagatgatgcttcactgttttaaaagaaagagagagagacagaaagatgagggagcatggaattgaaggaggaaaagaagttgaactttgagttgtgtctcacaagactctcattcatcaaagttacaacaagtgttacacatgcttctatttatagcctaggtagcttccttgataaacttccttaagaagcttccttgataagcttgcttgagaaacttccttgagaaactcctttgagaagcttccttgataagctagagcttagctacacacccctctaatagctaagctcaccttcttgagaagctagagcttatctacacacacccctctaatagctaagctcgccttcttgagatgagaagctagaggttaactatacacatcctctataatagctaagctcaccccatgccaaa

SEQ ID NO: 272224 - DNA, 415 bp, Glycine max
tctatagaaggttcatttctaattgctcttcttttgtatcacctctcaatgagctggtgaagaagaatgtggcatttacctggggtgaaaaacaagagcaagcctttgctttgctcaaagaaaagcttactaaggcacctgttctagctcttcttgatatttctaaaattgttgagctagaatgtgatgcctctggagtgggagttggagctgtattgttacaaggtgggcaccctattttttattttagtgaaaaacttcatagtgccacccttaactaccccacctatgataaagagctttatgccttaataagagccctcctgacttgggaacattaccttgtttccaaggaatttgtcattcatagtgatcatcaatcacttaagtacactagagggcaaagaaatttaaa

SEQ ID NO: 272225 - DNA, 424 bp, Glycine max
  unsure (1)..(424): unsure at all n locations
agcttaattgactattntattaatcattgtctaataaaacctgaattttaggtagcatatatcatataattgattatttaactgcatgccttgagtaggaatttttgttgttgttctggtgtaggattatagcagcaaagtgtattttatgaagcaaaccgtgggtaatgcttgtggtacaatagggttgcttcatgcacttgggaacataacctccgaagtcaagcttggtatgtttccaacaatcacgcagcctcagttaaagttnttagtatatcaatcattaaatctcattcagttgtgttgcttttgttcttaccagttgaagggtcattctttgataagttttttaaatctactgcaagcatggatccattgcaggttatttgtttcttcctagccaaacctcctctcttttctttct

SEQ ID NO: 272226 - DNA, 396 bp, Glycine max
  unsure (1)..(396): unsure at all n locations
nttcctctaatttgctttgatagaatttccaagggttatatagaaagaaaagagattaaagccttcattttgtactgtcttcatgcgattcacttttctctctccatgaatattattttgcaaattacaacggtgaatgtgtgcgaaattgagttgcgaactaagtgtctatatttcacaatgatccaacgattaacgagttcgggatcctagttttactagacaagttttgagtctctacgaaaaaagagaaaactacgatgtgaatgacttttctcttagctttgacattttttcacaatttccaacggtgagaatgctcggattaagttgcgaacctggtgctgaaatatcacgacgatccaacggttaacgagttcgagatcatcattttac

SEQ ID NO: 272227 - DNA, 373 bp, Glycine max
  unsure (1)..(373): unsure at all n locations
agcttatatcagtatatggttgataatctggcaacgaaagaacaagaaaatttcttcttggcttatggaatttatagttggtcaaagggaataaatttgtcctgcatttatacttagctcatgctaaaggttgcttgcccagtcattttaaatgcagtattggaccgatccaccttacatatgccaactcttgcactcatctacctcttcaaaggtgcctgtacctcttccaacatttgtctgaaagaaatgaagtcgttatttaaatatgattgtattattcccataaactattttctgatatgttttacanatcgttagtcaacatgtaatcaaacgtgctcacatcatacaacattactcaataaataaa

SEQ ID NO: 272228 - DNA, 417 bp, Glycine max
  unsure (1)..(417): unsure at all n locations
taaactntcaaagttcaaaccattctgttcagtgaatcctgtgttgagtatatatatggccaattaattttgcaacgaaataattggcggctcatgcaagcaattggaagctaaggcaccgtatctatggtctgactgtgatcacaccacctcgttcttgtatatatcatggggaagtcaagaattgaagttcaatcactcacatcaaagggatttacaatagtcattgatcttttccaatgccctttcataggggaaagttttcaaaaggaatggttagttcaagtgttcaaccagtggccccgtgcaaaacccacgtcagatgcttcaaaatggttaataaaaaaaaaggctacaccctttttcttgtaagaaaaaaaaaactattgcagatggatggagagaacaattatgaaa

SEQ ID NO: 272229 - DNA, 426 bp, Glycine max
  unsure (1)..(426): unsure at all n locations
acacatacacctctaatagctaagctcacctccttgagatgagaagctagagcttatctacacacacccctctaatagccaagctcacccccatgccaaaatatatgaaaatacaaaaaattccctactacaaagactactcaaaatgccctacaatacaaggctaaaaccctatactactagaatgaccaaaatacaaggctcaaaagaaggaaaacctattctaatatttacaaagacaagtggacccaaccttggcccatgggctcagaaactaccctgaggttcatgagaatcttagggccttcttcagcagctctaacctactccttttggaagcctcggctcatggctccgggggctggtcccttnctanggaggatcgcatcatagagcatgtagaacacccctagagattnctctatt

SEQ ID NO: 272230 - DNA, 430 bp, Glycine max
ggtaggacggctggacatgatatatgtcagggtgaaggtaggttcagcggttcagggataaaggaatgtctcgcattatttccatgacacacatgcaacaatgatgatttggaaattttatgcaaaactggtcatgcatgcacccatgtggacactcaaacatcaagtttttatggtcatgtgacactagggctcaggattcattttccctatttaagtcaacccagtgtttccaaaacatgttcttttatcaattcatgcattcatccgagaccattttgggcgttcgggaaaattttcacagcattcacccttcaggtgcatacacattttttttcaaaaaccttgtgttctgaatggtaagttcatttcctttcaaaagcatgttggctttttagctaaccaaatttatttttcttttacttttttt

SEQ ID NO: 272231 - DNA, 318 bp, Glycine max
aaaatcatcatacaacccaatatgataaaacaaaaataaattctatttctgaaaaaaaaaggctattctactttaacctattgaataaaaatattttaattccaaattaagtttctcactactgctaattcaaacacacacttaccataaacacgcgccgttgcactcgaaaatcaattctcttccgctccagcaaaatcaaattagtaaagcgactgccacataatttactactaacaaaaaacaatcatcaatgcctcaaagctaaaccccacacccatcttctcaccttttccttctgcacacgaatatggcatc

SEQ ID NO: 272232 - DNA, 414 bp, Glycine max
tggttcccaatgctctattcagactctctcataatctgtatgtaaacctagaatctctattagacactatgctagatggcacaccatgtaatctaacaatctcactaatatacaaggaggtcaacttctccaaggaaaatatgatattaatgggaataaagtgagcaaacttggtcagtctatcaacaataacccagatagaatctaaatctctaggggtcctatgtagtcctccaacaaaatccatggaaatactgtcgcactttcactggggtatctccaagggttgtaacttccctaaaggcatctgatgttctatcttagccttttgacagactaaacatgcatacataaactcactaacctctgtcttcatgttgggccaccaaaacattatcttcagatctttataca

SEQ ID NO: 272233 - DNA, 455 bp, Glycine max
  unsure (1)..(455): unsure at all n locations
tcctgcttggctgcacaatattctctaaaattctcttgatctccctgttaaaaatttctgcctgtccattggtctgggggtggtatggtgtggataccctgtgtaccaccccgtactttttaagcaaggcatgcattgttctgttgcaaaaatgggttccttgatcactaacaatttctttatgtactccaaacctacaaaacagattagacctgacaaaatctacaacaactttagcatcattagttctagtgagcttggcttccacccattttgaaacatagtcaactgcaaggagaatgtaaacataaccaaaagagacaggaaaagggcccatgaaatctataccccagacatcaaacacctcacagaatatcatatgttgttgaggcatttgttgtcgccatgtaagtgtatttnctgctctctgacacttctcacaagtgctgcagatt

SEQ ID NO: 272234 - DNA, 416 bp, Glycine max
tgcagttcggattgtggacctgtggttggtctaggtgggttaaaagtataggcaccttgaaatggtcttgatggatggaagggtattttgtgatttagcttttgctttgtttcctaatgtgatagagtttatgctctattttattgttgtgccagagggatagaatccatgccattgttaagaaagaggatttggaatgttgggaagttgaagttaaggaaggaaaaacatattatatgtacaactttagggttgttccaaatgatgaccaatacagagtttgtgcacatccattcaagttttatttcacttgtggtacaactatgaggaaagtggatcttgctgaaattcctcttcaattatgaggctactatgttgattggtgaatcggtttcgctccttttcaagttagtttt

SEQ ID NO: 272235 - DNA, 398 bp, Glycine max
caagggctaacaaccaccgttagctactactggaaaggattccacgcaatgaaacaaaggtatatatagcaagtcagattaaactttaactcgcaaaatgggactcaaatctataatatatgtagatctatagattcccaatgtaaatgattgatccaagaaaaatgaaatgcaattttgtttttgtagtttgggagacgactcagacgagtatattgttgcgttgactgaagcaaataaaaaagaaaagtaaaaataaggacggatcttaaccaatggatcaacgttgatcaatcaataattatatattgagtctacgagacagtctaactaaaagaaaacaaagctagttttgcttcagatcatttcaattcttcaactgttacctaataaaagta

SEQ ID NO: 272236 - DNA, 389 bp, Glycine max
tgtgcatcctttgctatataaaccctcctcagagtggacttgttgctgaagcaacaaattgcatgcattaaattattgcattttcccaaagttccaattaatggtagattggtttggttggcaagtgtgcagtctcaattgctatttctgaagaatcaaggttgcaggggcgttagaattattcgcaaggtacacggttgtgcaagcagctgaagggttattcatgcatagtaaataattatatcataaacgcttcgaatgctacacaacaacatgatcaaacaatgcagactgaggtatgtcacttggtttctaatttaatgaacttgggctaatactgagaatctgttttaaagaaatggagaacagaggataacaacattctacat

SEQ ID NO: 272237 - DNA, 392 bp, Glycine max
  unsure (1)..(392): unsure at all n locations
cttgatcaaatttaaatgtttgaattgtttttaaaattataataaaatcaaatatgataaaataaaaataaattctatttctgaaaaaaaaagtcaattctactttaacctattgaataaaattattttaattcaaaattaattttttcactactgctaattcaaacacacacttaccataaacacgcgcgttgcactcgaaaatcaattttctcccgctccagcaaaatcaaattagtaaagcgattgccacataaatttatagtaacaaaaaacaatcatcaatgcctcaaagctaaaccccaaaccatcttcttcaccttttctctctgcacacgaatatggcatcaatntgcgacaaagatatccctcttcgactacacaacatcgac

SEQ ID NO: 272238 - DNA, 415 bp, Glycine max
  unsure (1)..(415): unsure at all n locations
ntatcaataaatntcaaccaaagctaaagattatgcttatattttctatatgaaaaagtgtattctttatattttgttcgtatgtggaggaggttaaattataattataattttcttatatttttaattttgtaattttgattttataaattattaaatatataaacatttgttcttattttattataatatatagattttttttaaattattttatatcatttaaatattatgaggatttgaaattataatttaacctttataaaaatagatgtaaggcaacatagagactgatgctattttgattttccaattgataattttttccctttgcaaacttttttttttctactccccacgcacccgttttaatcttagctgaaaagtttatatcatttggtgcgtaagtttactt

SEQ ID NO: 272239 - DNA, 393 bp, Glycine max
  unsure (1)..(393): unsure at all n locations
acacaaacatgtgcgcatccaccaccaatttctgccaactctttgaatttggaggggttttataaatacctcgatgaagcaatgaaccttgaatcgagttttaagaaccccccccccccaccccattatattttattgctattttattatttaatgattcgtagtcatcatgtgtgtttttcaattgttgtatttttgagttatcatcatgtgtgttttaatgccaaaagtttgaagtatagattgaaatcttgaagtgttggcatttttttcttgttattggccacttcgttaatgcgtttgagagtcaaatagagatttgaaagntatcttaatggcttcattgacataaaaactatgtgaatgaaacattattttaaccaaatcaactga

SEQ ID NO: 272240 - DNA, 415 bp, Glycine max
  unsure (1)..(415): unsure at all n locations
atctaaggcttaaattaaaatcagngatagtcgataatcattaatacatgaacacaaagtacatgtatgtgtcgaatgagtgggggagttgtagatccatactgatttaattagagcctcaaaattaatgcacatgctaatgtagcgacagatttgcattacaccaaaccatttatctaacttacacttttccgtaccttaacatcaactagggggagaaataaattatgcaacacataaacagatagtacattcaatcattcttacgcgaactttatcacaccaataatatgttctgaccaaccaacaattcgagactaattttgagtattcacatagtcagggatcaaactgctactaagacgctgaataaaatgctacttatgcactgagatgtttatatatgatataaaaa

SEQ ID NO: 272241 - DNA, 425 bp, Glycine max
  unsure (1)..(425): unsure at all n locations
agcttgcatcatatactaccactgtgattcacttactcaaacatgtgcgcatccaccaccaatttctgccaactctttgaatttggaggggttttataaatacctcgatgaagcaatgaaccttgaatcgagttttaagaaccccccccccccaccccattatattttattgctattttattatttaatgattcgtagtcatcatgtgtgtttttcaattgttgtatttttgagttatcatcatgtgtgtcttaatgccaagaagttgaagtatagattgaaatcttgaagtgttggcattntattcttgtttttggccacttcgctaatgcgtttgagagtcaaatagagacctgaaagatatcttaatggcttcattgacataaaaactatgtgaatgaaacactatgttaaccaaatcaact

SEQ ID NO: 272242 - DNA, 365 bp, Glycine max
  unsure (1)..(365): unsure at all n locations
ngaatctaaggcttaaattaaaatcagttatagtcgttatatatttatcatgaacacaaagtacatgtatgtgtcgaatgagtgggggagttgtagttcgatactgatttaattaagcctcaaaattaatgcacatgctaatgttggacagtatttgcatttcaccaaaccatttttttaacttacactttatcgtaccttaacatcaactatggggagaaataaattatgcaacacataaattgttagttgatgtaatcatttttatgttatttttctctcaccaaaaatattttttgaccaactcataattaaagactaattttctcgtttcacattgtcagggaataaacttccttcttata

SEQ ID NO: 272243 - DNA, 422 bp, Glycine max
  unsure (1)..(422): unsure at all n locations
acctgcatgctgcagcttttatagacttcagagntttganccgttgagagatcccaattagttgttgtctaatagctttggcacttgacacgaggttgctattgtacgaagagagagtgggggccacaaacactttagttagtagtgtttatggtagggtcgatggtctagggtctaaggtttaaggtgtatgttttacttattttaaggtttaggggttagttagtttatggtttagattttacgtgattagggtttatgcatgctatttaaatgaggattgagtgttataggttttcccattataggaattanggttttgttagcattgggtttaaggcttacttatttttggggttagggtttatggattttatggttagcgtttacttattttatgaattaaagtttaacatattcta

SEQ ID NO: 272244 - DNA, 425 bp, Glycine max
gcccttaaaatcaaagttccatctttggaagcaatgagttgctgagaggcaaatcagaaaagggaaaatgtctaacaatttcttcccacgcagattggagtaaggaaagtgataatcccatagagctacacacacttcagtttgtctgcaaaataattcacaccccaacatattttagagtcattttaaccatgaatttttcttttttgtctcttttgaaagatgggagacaaacaatgcatgtcttagtttctacatatgtgcaaattgtggatcaaacaagtataaagaaagagatatgaaagtccataagaatgatttaccgttcttgtatggtatgttatttgttgctgaatataattgaagttctgactataaaagcaaacaaaagaattatgggtctatcacagtggctacccttggct

SEQ ID NO: 272245 - DNA, 420 bp, Glycine max
  unsure (1)..(420): unsure at all n locations
agcttttggatgataatantgagatcntgtttatactnnctttaattccatgaacataaccgatatggtagtttcttttatgcctgttgattaagtcatctacggttttcggtttaatatcagtgaaggcaatgaggtctccaacctcaggctcatattttccattcacatcattgctgcttctgttcacagatatttggtagaacaagctcttggtaggtatgaagcttcttgacctctcgagttcaatgcttgagatttcgcaaaaggaagcccgcgacacacctttcaagttcgaacatagatcgctccgagtttcctcaatcagtgaaggaatgaaggagttcaagtaatctgctgttgacaggaatgtctgtgggatcttcattacctgagtggaaacaatgcttcaagcttaca

SEQ ID NO: 272246 - DNA, 419 bp, Glycine max
  unsure (1)..(419): unsure at all n locations
ntaaaattggaattaaaacgctcagaaactgtttttgtttgctattaccatatatgcgtaagcgattacacagtgcaaatttttaattcaaatcttaatagctgttgtaaatcagtttaggccactggtaattgattacatcctctggtaatcgattaccagagagtaaatttgttgaaaaagactttttaacttaaatttcttgggcaaaccttttgctacttcaattggaattcccttcctatttaatataccctttctaagactctatagactttcttgatcatccatcttgaatatctttaatttctttgtcttgaataaagctttgatacgcatgtgaaacttttgcatcatcaaaacaatcagctagatcctttgtctacagtactcatttatgaaaggtggaagattcaccc

SEQ ID NO: 272247 - DNA, 421 bp, Glycine max
agctttaaacttatacaaatattagctctgataccacttgttggacaagtggcctcagatatcttaagaagggggggttgaattaagatataacagactattccccaattaaaaattctacttttaatttaacccaacaacctatgattccttttaaacaagaactccaagataataatgcaaattaatcttactaaatagaaataataagcaataaacaataaaggagtttaagggaaaagaaaatgcaaactcagatttatactggttcggcgacacccttgtgcctacatccagtccccaagcaacccgcttgagagttccactatcttgcaaaatccctttacaagttctgaaccacacaaggacaacccttcctttgtgttcaaatttctttacaacaagagaccctcggtctctt

SEQ ID NO: 272248 - DNA, 421 bp, Glycine max
  unsure (1)..(421): unsure at all n locations
cttggtggttctgtttttggatctaggggtntttgtttattccttttgcccctttaatttgatttttgttttagttttttggatctgagttttttgaatacaatgtttaattattggatccaaatttttcaattccaatacaggagctcgtggtcagtttcaataccatgttctcatcttctctagcgccatcggtatcggtattggtcgtcaaagactctgataccgcaaattgatcaatagcacatagaccttcaaaaatcctaactcgaacttgatgacatggcttgcatcgccgtcaaacaaaacaatcccataactttctatgatactttgttcactcaaataagagcatgtctggaggttaaggttttggattggacgaatgcgagaaggggtagagcggtgacaagttggtaca

SEQ ID NO: 272249 - DNA, 419 bp, Glycine max
  unsure (1)..(419): unsure at all n locations
agctntgaatgcactattcaatggttttgacaagaacatcttcagactgatcaacacttgcacagtggccaaagatgcatgggagatcctgaaaatcactcatgaaggaacctccaaagtgaagatttccagattgcaactcttggctacaaaattcgaaaatctgaagatgaaggaggaagagtgtattcatgacttccacatgaacattcttgaaattgccaatgcctgcactgccttgggagagaggataacagatgaaaagctggtgagaaagatcctcagatccttgcctaagagatttgacatgaaagtcactgcaatagaggaggcccaagacatttgcaacatgagagtagatgaactcattggttctcttcanacctttgagctaggactctcggatagggctgaaaaga

SEQ ID NO: 272250 - DNA, 416 bp, Glycine max
  unsure (1)..(416): unsure at all n locations
tcaacattcaattntgagcgtctcgatatatgatgtgtctctttcacacatccgagtaaaaagttattgtcgctttaattggctcagaggttcaacattcaatttcgagcgtttcgctatattacgggactcaatctaacatccgagtaaaaagttattgtcgcttgaattggctcagggcttcaacattcaattttgagcgtctcgatatatgacgagactcaatcagacatccgcgtaaaaagctattgtcgtttgaattggctcagaggttcaacattcaattttgagcgtctcgatatgttacgggactcaatcagacctccgagtaaaaagctattgtcgtcttgaattgctcagagattcaacatttaaattcgagcgtctcgatatactatgggactcaatcagacatt

SEQ ID NO: 272251 - DNA, 436 bp, Glycine max
  unsure (1)..(436): unsure at all n locations
tttatctttgagcttcaatgaggtcctttaatggtgattttccaccatggagatgcagcggaagacaaaggagaatatgtgagaggaggcgccatccactatggaataagccatggaagaaggagcttcaccaccaagatgagccttggataagaagcttggaaagatgcttcaatggagcaaaagaaagagggagagaacgagagaagggggagcacgaaattgaaggaataaaagagggagagaagttgaactttgagttgtgtctcacaagactctcattcatcaaagttgcaacaagtgttacacatgtttctatttatagactagatagccttcttgagaagctttcttgagaaactttcttgagaagcttctttgagaaaaacttctctgagagctatgagctaacttcacaccccctcttattactaan

SEQ ID NO: 272252 - DNA, 159 bp, Glycine max
ctggaggcagactaaatgtgacttgactaagaaatgggcacttgcatccgacaaggaccgagtggacaacattgactgtgaaaaataaggcattagcaaggagaaatgggcccactctcgtccagacccggagatacccctcatgggacgaatatacgt

SEQ ID NO: 272253 - DNA, 333 bp, Glycine max
tcccgatcacatagcttgcctcacccatatctttcatttcaaaggtgctagagagaaactgcttagtctcatgaagaagaccaggatcattagcaagatatcatcaacatacataattagatagaggaccttacttccactgaccttcaaatatatgcaccgatcaacattgttttacttaaatgcgaaggaaacaatggtttcattgaacttgagataccataggcgggagacttgcttaagactatatattgatttcttataatgtgcacattttgtatttctttgcttgaactaagagtcccattggttggtgcatatgaacattcttct

SEQ ID NO: 272254 - DNA, 280 bp, Glycine max
  unsure (1)..(280): unsure at all n locations
gcacctttcttttcccaatacttacaaaaatatcatcgtagtngttttccacatgtcatgtngggaaggatgtgttttgctacaaagtactaatactttaattagctgcatgcatctatatctgataccaaggtattgatatatttcactggtacatacatgtgaagggaccaattctgtaaaaaaatcatgaaaatctaatatagtgacgtgtaacatataactaagtgttatatataaacatacaaagtattattacctgatgaaccaaatatgaaaa

SEQ ID NO: 272255 - DNA, 407 bp, Glycine max
  unsure (1)..(407): unsure at all n locations
agcttccttnnaaggcatcgtaccttataccaagctccatggtggtatgggcttttgacggcagtcgttgggatgtaaggggggagatcgatctcccgattcaaatcggaccccacgtgtgccaaattaccttccaagtaatggacgtaaatcctgcctacagttgcttattaggccgaccttggattcatttggttggggtggtcccgttaacactgcaccagaagttaaatattgtggtggagggatagctgattatagtttcgggaaaagaagacatacttgtaagctggccatctattatgccttatgttgaggctgcanaggattcattggaaacatctttccaggcattggaagttgtgagcaatgctttcgtggagtctccctcaatgcacccacgctca

SEQ ID NO: 272256 - DNA, 420 bp, Glycine max
  unsure (1)..(420): unsure at all n locations
taagctccttcaactgcacaaggctcttattattcgtttatagtatcctnggagaacacttgcacccgacgacttaccactgagcaaaaactctattcttctctctcttttggaccaaagtaatggcaagtctgtggggcacagtaatattttctttcccatcaagacctntggatgcaacttgtgatcgtatccccatatcagctagaccttgacgggtattcaagcaatcctttgtcttgccttgaatgttaaggagcgtcccaatcacactgtcacaaacatttttctccacatgcattacatcaatacaatgtattacgtctagatcagaccagtgctaaagattaaagtaaatggacctcttattccatatgcactcttactttattcttcttttgggtctttccaaatccattt

SEQ ID NO: 272257 - DNA, 384 bp, Glycine max
  unsure (1)..(384): unsure at all n locations
attgctgcacatgcaacattttaatactactgggctcttttttgttccttttttgttccatgatattacatatagaagaaccctgttctaaaaacattcccttttttgttcttaaatcttgccactgtaacctttttctaggcaaaagtgatgttaatatgttagtcattagtcataactccacgtgattagcacacaacatatacatttaatttgaatttcaaattgagagcaaataaattctgaggtcaaccactaaagatatgtttggatttctttcattcaaagctcacaatctagttacaacaatcacaaattaggctaacaaaaatttaattgtatgtagcaggttgttgtaacttttcanatttaattaagctcatg

SEQ ID NO: 272258 - DNA, 428 bp, Glycine max
  unsure (1)..(428): unsure at all n locations
acacaagaatactcagctttaactcaatttaagatatgccttcacnttcattgatccctttcatctctttggagcttaagctcattgttgctgccccacaaagctcctcggaacttgttttggtcgtgttcttctttttgggccttcttggtttctcgttccaaggcttcggcggtggcgatattgatgtcctttagttcatcgtactcctttcagactttgatggcgttgacttgaacttctatttgactgctcgggcttgttcaagctttgcttttaaggcttgtacctcctcactttcttctggagcttcagcctcttcctttctcgcagtccttagctttgggagccaatccaacccttgtgtccggactctcagccacttatgatagtcgttgatgatcccattactgcttcccctaagctct

SEQ ID NO: 272259 - DNA, 428 bp, Glycine max
agcttcttatccaaggcaattcttgttgttgaagctccttcttccttggcttattccctagtggatggtgcctcccctatcctcttctcctttgccttccgctgcatctccatggtgaaaaatcaccattgaaggacctcattgaagctcaaagatccagcctccatagaagctccacaagcaagcttccatcatgaatgaagtgatttctaatgttagtgtgtttagtcctctcatgatggacttgatccttggcaaaacaaaatgcatttagacagtggcaaaaaatgatagccttttttttgtggaaacccaagattgctaattagacccttcagccaagttcattcctttactggttcttccaacgccatgtactctacctttgtaatggatacagccaccatgggttgaagtgtagtcttcca

SEQ ID NO: 272260 - DNA, 284 bp, Glycine max
  unsure (1)..(284): unsure at all n locations
tctctcttgacgatactcacgagaagagacctaatggttattttagnacgtacacccgcgttggagcatatattatgaatataaggccgcataacggaatctaactcacatgtcactgctgccacaaattgaactatggactcttgagcaacattggtgaagaagcagtcattattccgtaatacatgtccataccaaattaggaatcctaagatctctgtcacattcgtattaaagatattttaccccatttgaccttttatgagtcaattgttagaacgaaa

SEQ ID NO: 272261 - DNA, 365 bp, Glycine max
aaaactcatggcagtgatcatacctttggtgagtaatgcacaaccggttggcgtccacgtttacttgtttatttatagaaatatatttaacatcaatgctaaattatataatgcctgttacaaattgtagaaaatcccataccaattctcagctgcacatctcccaacttacaaaactgaagttacacttcgtaattcaagaggtgaatgctggactgtgaactcggttccagatgcaaaaggtagaacagttcacaccttttgtggagggtggatggcctttgttcgtgataatgacatcaattttggagacacactgcattttgaactcgttgctcaatgtgagatgcacgtttacatatctg

SEQ ID NO: 272262 - DNA, 420 bp, Glycine max
  unsure (1)..(420): unsure at all n locations
tgtacacgccatattagcatgattatctactatgtgtaattttatttnctatnnnccattngncaacactcatgaattgatatccttaggaccccactaatcctttttttttttgacttggaaagcaatttgaacgccttttccagtttgctcgaaggattgaagacttgatgttcactgttgcacctgaagaggtttgtgtgtataatgcnttttaatcctccatagtttcctgctatgcagcatctagtcatgtctagaattctatttatgaaacaatctggttgcaatgtttattagtttctctggttgaaatcacgaggttttagatatagatgggggaagagagataaaagggaatgaaacagtgaattgatatttattgagatgtattacgaggttcatgaacggacttggaca

SEQ ID NO: 272263 - DNA, 421 bp, Glycine max
agcttatctggtttgaagttaattgtttatacatttgattggagtcatgatgcctaggcttgtgaactttccttgcttgcaaaatgtgtagatttgttgttagtgcattatttgtggatttcagattcatttttaggaagtttttggattgaagggcacattgcttcttggttgaataacctgtttgtacatagctgaaataaaattttcaatactagcactactggtccttttttttgcaattctattaccagcttttggtttttttatgtgtcaatttcttggcttattttacctaagattttgaattaatttaagacatgtttctttggagataattaggcaccaaacgtaaatacctcttacagcatacattcagaccttttttgtcgccttgtgagagataaatacctcttcatat

SEQ ID NO: 272264 - DNA, 426 bp, Glycine max
ctttagaaatttcaaaagtgatatcagatgcatccatttcttaaatcaaatatatagcatgtacggcgttactaattgcagtattgtgagtagtatattaacaaataaatgaatgcatagcataaattagtttttgcctgttccataaattgtaagatgatacgcaagcccttcttgcatgtgtgtgcaaaagaagtagatcaattgcattgtgtattaatatattatagttgttaattttctttacggtctctatcatgaactaccgcgatttggttgtttgctttaatttctaagtagataatattcctatttgtttttaatacaattgtagcaatgtgatatttaaatttacgatcacttgctagaatgctaatttatttttgaaaagaaaattcgtccttcatttggagtgtgcatatcctg

SEQ ID NO: 272265 - DNA, 316 bp, Glycine max
actcttttttctcatctagtagatcgttagaataattgaccatataagaagaagagccatcacactaactatcattactatcaaacagaacttgtggtgttttacaagtttcttacctttgacagggtatggtggcagatgcaagtcgaaaataccctcacaaagattactatttccagtcatcacaaatccacttgcattttgaaagacaccttcagttggcacctcaccattcaacatggtaaagaatacattgaaatattctaagaaataaatggtgttgagaacatcaggaattgatccacaaagtggtttt

SEQ ID NO: 272266 - DNA, 347 bp, Glycine max
  unsure (1)..(347): unsure at all n locations
tccaaatatcattnttcttgaatttttctagttcctcttgcatggattttacccagttcttatcttccatagcatcattaatatgcttggtttccacttctaaaatgagagttatgaaaccttgttgtctaagagatcctcttgtttggactttggttgaggggtctccaatgatttgactctctagatggttcttgcttagaatttgtccaattggttctctttgttcttgaggttgtcctgttacttgatcagacacattcgttcctgtaaattgttctaccaatggtccaatgtcttcattcagtcttaaatctgcaaaagattcatcaagctctgacattttt

SEQ ID NO: 272267 - DNA, 423 bp, Glycine max
agcttttggtacaaagaagatgtatttcaaagagattcaaggcttgtaaaggattgtaagagattgattggaaaagtattctagattgaaagaatgaattaatttaaaatgcaaaacaaagccttgcttttatagactcttcatgtctgatcaagatgaccatttagaagagttaaaacttttagaaaaacttaaaaccaatttgaaaaagtcaaaacctttttgaagagttacatcttttgatttattcagaaacaatcactggtaatcgattaccaaataagtgtaatcaattacataaagctttttgaaattaattggaacgttgtaaattcaatttgaaaactttttcaaaacaattttgctactggtaattgattacgacaatctggtaatcgattaccagagagtaaaaactctttg

SEQ ID NO: 272268 - DNA, 427 bp, Glycine max
  unsure (1)..(427): unsure at all n locations
tctagtatttataggccaactntgatcaagtatctagtactctaaatgaacatatttcctctcttaagtttacgtctgaagaatatggccattgagggattaaatgtgtgtattaaatgaatgtacttcttcatgtcgagaaaccgctttgtcgttggagtgttgaacactacagcaggaaaccacttccttttgcatcaaagcaggtctatgcagcagagcgctccttttaatggcgattgaggaatttcagagcttggattcatttattcttcatacgatttgatagatcctaagataatgtctctggaaaatagattgtagacatagagtattagactaagtcttaaatgccatctttaatgtcttattatatcatgattctatcttgctatcatcttaaacatcagacacagacttcgcgaaa

SEQ ID NO: 272269 - DNA, 421 bp, Glycine max
  unsure (1)..(421): unsure at all n locations
agcttagcacggttgcgcttatcgtgtccattatattcagaaaatttactaagtatgcgggcttagcgagtcatgctcgcttagcccaatggctaccgcaatgaaatgagcttagtcgagagaggctcggcttancgcacgacttccaacaaaaaatttgactaagttacgtgggcttagcgattcaacctcgcttagccacaagtatttcagcaagaggatgagtgttcatcctcaaaagatgaactcgcttagtgcggtaggcgtgcttagcgagtgcgtttggaaatgcataaattcaagcaattttgatgaactcgcttagcgcagtatgagcgcttaacgagttcatcgcgtttctagataaaatgtataacatgaacttcgttttcttctctttttagcctctaagaggcataat

SEQ ID NO: 272270 - DNA, 285 bp, Glycine max
gatcactatgagatatagtataaggggtgcatgacataaatgtagactcacatgtgagtgctccagaaatagaactatggacttttgagcaacatgttgaagaagctgtcattatttcttaaccatgtacataccaaattaggaatgctaatatctctgatacatatgtatgaaagatttcttaccccatttgtcgctttttgagtcaattgaaagaacaaaaactttaaactattcttagcctgagactaatgataaatacttgttgaacgtgatatttacatt

SEQ ID NO: 272271 - DNA, 406 bp, Glycine max
  unsure (1)..(406): unsure at all n locations
agctttgaacaatatactnggcctttatttaactatcactgggctcggtggccactctcaacaaagtacttttgacacctactgtacgttgatttgaccaaggctgttatgggaatgttgcgacaatccttcaaaaccttattgatacattctaataggttggttgtcatgtggtcatatcaacgtccttctctatcataagccatcgtccatttttcctttgaaatgcgatcaatccatgttgctatggctggacttagctcacgatatttttctaaattttgataaaaaaatgtgcttacaaggagtgtaggctgcataaaattagttatgaataacaattttaagtatatatggaagttaaataaacgtgaccatcaaatatgaaatcttacccaacttcttc

SEQ ID NO: 272272 - DNA, 394 bp, Glycine max
  unsure (1)..(394): unsure at all n locations
ntggagtttccagtgccattcggcncttcatagttcagacntcttctggcttcaatgcatcagtgggctttccttctgtgtccagcatcttgggatgttcccagcctttgatgacagctttccaggttctgctatccagtgatttgagaaaggccaccatccttgctttccagtattcatagttggtcccatccagaattggtggtctgttcactggtccgccttctttctccatgttcatcagaatctatctccctagatctcactcagtgatttcgagtgcctgctctgataccaattgaaattctgatactggggacagatgtcgtacaggatgtcacgacatcacgcttcagaacatgcagattgtctttgactgtttgaacagatttaa

SEQ ID NO: 272273 - DNA, 360 bp, Glycine max
catgaaccgcccacggtggaagatactcaatcgtcgtgcctcaagcatttaggagacaactcggcacttatcactccaaaagacggagcgagattacaagatgttttgaaaacagacaggttcgtagaacattccaaatcggtagtaaagcggccaccggaagagacttcagggcatacactcatgcggcataagaacaatgaagccccttcgagacgccagagatcgaaatgcctagaacaccgactcctttcttgcgggaacaatggcggcaatagatgcgacagcgacaaatcctcaaggcctgactttgctcaagatcatgaccacacttcctgcgcgagcatgatcccaaaacat

SEQ ID NO: 272274 - DNA, 327 bp, Glycine max
acaacaagttgttcgatgcacaatgctcgcataaacaacaccatcccctgttgcccaccttcaactgagcacacgtactcccacgaagcccatatgcgcgactctctcaataccgggtccccatacattctccccagctgtcccaccatgcaagccaaacagcgtttaaacagcacatgctagcacagcctagcaaaacagggcaaaggccgaaaagctctgctcaacacactaaccaaaagcatagctattctcacttaaagaccccaggaacaattccttcgatactattcgataaccggaggatcgactccaaaatagtaccgg

SEQ ID NO: 272275 - DNA, 437 bp, Glycine max
  unsure (1)..(437): unsure at all n locations
gatcttaagtcacctgcggcagcaagcttgtatggaagatcatatttattataaacaattttaaaatgggtcctccccacatacactaggtcagtttagtttaatgaaagggtcccatatatattgtagcaagttcatatttccacattatgatggaacccttggaccctactatatcagatcatgtcttgcttatcttttctttcttttatatatcctcttttttttttttttattcagttctcgttgcttattaagtattngaaatactgtttttttttgtgctccttctaaatactgattaacaaaataataataatttatatatattaaaatttacaataaaacacatttatatattttaataaaattttcatttataatccgttaactaatattctaaatacacatgttaatgttagcttctatttcaacat

SEQ ID NO: 272276 - DNA, 373 bp, Glycine max
ctatataatactcagctaagcaaattaagaaacacatctgaaagcatgttcttgttcctagctatataagttaatttgtaagactgacaatataaataattttctcttaatagttagatcaagactcttactctaaagataaataaacttggaaatacagatgtgcacatacagtcgtcacttattatcaccatcacgtagatatgataatggcaaatcataaatgggcaagacaagtttgttttctgaagtattaacatatcttctgacttagtacttttaatacgcactcgcttgtcgtgggctaaaggtcatgtgaatgccacttatttggaaacaagacacactattcaactagacttataaatttcac

SEQ ID NO: 272277 - DNA, 400 bp, Glycine max
  unsure (1)..(400): unsure at all n locations
agcttcaagtgcaaataatgcatattccttcccactttgtgctgaaattcaacttttttttataataaaaatgggggcagcaaggacgaattctagatcacttggtcataaaaggtttgacaccatatcaagaatcaacttatctaactttggggataattagtcactacctagcaaaaacgacgtctgacacatttgccagaagcatcaaaggaacacaagagggaggcacctcaaacaaaatacaacctaacacaaaagactttgcatggttagcaaagacaatggtcacagaattggcctctctaaagcaattgttgggtcttgatgatccactaaactggatgacctaccacaacttaattntgatgtttacaaaagtataaatggttgataaact

SEQ ID NO: 272278 - DNA, 442 bp, Glycine max
  unsure (1)..(442): unsure at all n locations
agatgaggaagtgtagaagggtgaaactttctgcttttatttgttgaccacagagtggtacctggagatatgtcgcggtggtcaggagaccttgnggacgtcaagtggggtgctattgcccaaaaccaagcttgaccaatcccgacccaacccgggcatagtcagtcagtgagaacctgtgatgtacctaagcaggcgagctcctggcagtcaacagataaaaggaacaaataccacaaaacaaggaggtttgagtggtggctggtcacctgtgaattttgattgatatatgggatatggcctctggtaatcgattaccaggcttataaatgaagacaggaggctaagatggtctctggtaatcgattaccaacgggtgtaatcgattaccaggctctaaaacgacgtcaagaagctaagagagcttttggtagtcgactan

SEQ ID NO: 272279 - DNA, 422 bp, Glycine max
  unsure (1)..(422): unsure at all n locations
agcttcttagtttcatatgatgcatttgggtttgnagctacctcatgcactcctctaatgactatggcatcatttctggcgctaaactgctgggagttggaggccatcttctcaattaaatttctggcttcagcaggagtcatgtctccaagggctccaccactggcagcatctatcatacttctctccatattactgagtccttcataaaaatattggagaagaagctgttctgaaatctgatggtgggggaaactggcacatagtttcttaaatctctcccagtactcatacaggctctctccactgagttgtctaatacctgagatatccttcctgatggctgtggtcctggaagcagggaaaattttttctaagaatactctcttaaggtcatcccagctcgtgatggatcttggagc

SEQ ID NO: 272280 - DNA, 409 bp, Glycine max
  unsure (1)..(409): unsure at all n locations
tgtaggattatggggtatccatcacatgtggtactatttggcggtcgggcgatggtgcacaacaagttttccacatccacaatgcgcgcataaacccaccatcccctgttgcccacctccaactgagctcacgtactcccacgtagcccatatcctcgtttctctcaataccgggtccccatcaatcctcccaagcttccacaacatccaagcaaaacaacatttaaacagcacaagctatcacagccaagcaaaacagggcaaaggcagaaaaactctgctcaacacactaaccaaaatcatagcttttctcacttaaagaccccagtaacaattccttcgatccaattcgttaaccgttggatcngactccaaaatttactggaagtctatagtgcataagcctaca

SEQ ID NO: 272281 - DNA, 394 bp, Glycine max
  unsure (1)..(394): unsure at all n locations
cggatgtgcgattgagtcccggaatatatcgagaggctccaaatngaaaacggaagctcatatcaaattcaaaggacaataactttttactcggatgtccaatagagtcccgtaatataatgaaacactccaaattgaaaatggaagctcgtatcaaattcaaacgacaataactttttactcagatctccaatagagtcccgtaatatatcacgacgctccaaattgaaattggaagctcgtatcaaattcaaacgacatttacttttaacttggatgtccgattgagtcccgtaatatatcgcgatgctccgaaatgaaagcagaagctctaagcaaattcaaacaacaataactttttattcggatgtccgaataagtcccgtaatatatc

SEQ ID NO: 272282 - DNA, 285 bp, Glycine max
tcagaaccacagggcatggcttctaaaccaataaggaactaattgaaatacagttcgggcacactaatcctaacaatccaaaactcacaatctataaaaaccctttggagataacaaaactttgcataaatatcaaatgtgagtttaatggcgaggaactcaacgaaaggaaacataatcgacaataaatatttgaattaaagtaatttaataaggagcaacatcccacacaaatatttgaaagtttgctcctcatttcttcctatttggaacacaaccaaatca

SEQ ID NO: 272283 - DNA, 391 bp, Glycine max
  unsure (1)..(391): unsure at all n locations
ctttgatacgccaaggttcanaatagtctaaggttgtgtttcaatggggtcttttatcgngggaacccaatgttgatatctggggcaaaacaaatttgggtgtcaaggtgtcggtctcgggccgaactcccatatcactccataaggcacgcgtgacaatgatgatttgaaaacaacatgcaaaattagtcatggctacagccaggtgggcactcaagcatcccgtttatggcattgtgatactactggtgggaatttacacaaacagacccaatgtttccaaattatgttctcccatcagttcaatgaattcatccattcttatttcggttatttcagaaaataaactcttagcgtcagtcccttgtttccagaagatatgtttgctctt

SEQ ID NO: 272284 - DNA, 421 bp, Glycine max
tcatggcaaagtatgtatggtagaacttcattattgttatttattatatacaaataagcttgttgcaattcttctagacttagagtgataacatgcagtcctcttgatcccttatctctcactgtctcgttatgccgagactccgaaaccacaacaagttttatcttttccatgtactcgaaacaaaactcagtagcttctttcgcaatgtacttttcaacaataaatgcttcaagacggcgtagattctttgtatacccttttaagatcttcatgtatcgctcaaccgggtacatccaccgcaaataaatgggaccacaacatttaatttccctcaccaaatgaacaattaagtgaaccgtgatgtcgaaaaatgaaggaggaaaatacatctccaactgacacaagataatagtagtct

SEQ ID NO: 272285 - DNA, 414 bp, Glycine max
  unsure (1)..(414): unsure at all n locations
actatgcagagaatatcctttttanatttccttatcngacttagcatcaaattttcctaagttatcttttccattattcaatacaaaacatttacaactaaagatatgaagatgtgagatgtttggttntctgccattgaacaattcatatggagttttctttaagatgggtcttattaaagccctatttaaaatgtagcatgcagtgttaacggcttcagcccaaaatttttttggaagaggtgtatcatttaataaagttctagcaatctcttccaaagatctattttttctttcaacaacaccattttgttgaggggttcttggtgcagaanaattatgctcaatcccatgcttattacaaaataattcaaattctttattttcaaactcacccccatgatcactcctaat

SEQ ID NO: 272286 - DNA, 409 bp, Glycine max
  unsure (1)..(409): unsure at all n locations
ntgaagaagcgtcaaagcaggaagtatgggtcaaggctattgatttgagatacagatgatcgagaaaagcaacacatgggagttagtaaatcgtccccatggaaaagatatcattagggttaagtgggtctataagacaaagctcaaccctgatggcaccatacagaaacacaatgcgaggctagtagctaagggttactcacagcaacccgaaattgactacaatgagacatttgcaccagtagcttgtcttgataccataagagctctaatagctcttgcgtcacaaaaaggatggagtatccatcaactagatgtcaaatcagccttccttaacggcgtacttgaagaagagatctatgtggagcaaccacaaagattcgtgtctgaaggcaaagaaaacaaagtg

SEQ ID NO: 272287 - DNA, 379 bp, Glycine max
  unsure (1)..(379): unsure at all n locations
aggggggagcacgaaattgaaggaagaaaaagggagagaagttgaactttgagttgtgtctcacaagactctcattcatcanagttacaacaagtgttacacatgcttctatttatagactaggtagcttccttgagaagctttcttaagaaaacttccttgagaagcttctttgagaaaacttccttgagaagctagagcttagctacacacacccatctaaaaactaagttcacctccttgagaagcttccttgagaagctagagcttagctacacacacccatctaaaaactaagctcacctccttgacaaaatacatgaaaagacaaaaaaaaaagtccctactacaaagactactcaaaatgccctgaaataca

SEQ ID NO: 272288 - DNA, 404 bp, Glycine max
  unsure (1)..(404): unsure at all n locations
gtcttatgttattatgttgctttattttctctacaggttctaccactaccgatgttgtttaatacttataacattggttttcccataactgatgtcatttntgcctttttttgtctatttgctactataccacattggttttggagagaattgatattgtataatggatttcaacatcgatttttataatcgatgttaaaaataacctacttttaacaatggtcatttcaacatcgactcaaaattgatgttgaatgtgaaaaaaaatcgatgttaaatgtcaattttgtagtagtacaccaacaatgtaaataagacagacaatagtgaaacagtaatggcgacaaccatataatcaagcaaataacattgaatcaaaaaagaaagtttatgaggcctacata

SEQ ID NO: 272289 - DNA, 331 bp, Glycine max
taacccagctggccttgaatcagatatctgtacctgtcgcaagggtttgcggattgtgctcctctgctgaccaccatacagacctttgccctttcatgcagcaacctggagcaattgagcagcctgaagcttatgctgcaaatatttacaatagacctcctcaacctcaacagcaaaatcaaccacagcagaacaattatgacctttccagcaatagatacaaccctggatggaggaatcaccctaacctcaaatggtccagccctcagcaacaacaacagcagcctgctccttccttccaaaatgttgttggcccaagcagaccatacat

SEQ ID NO: 272290 - DNA, 316 bp, Glycine max
aaaaactaagctgcaacttaaacatggaaacatataaaactaggatacttaattgaatagaaaaaataaataacatggcggtgcatgcatttgttggtacaccatatacatgtcatgtgtgaactaatggacaaaaataaaatggacccaagtttcccatattatttatttttaaaaaaatcataagtttcccagattattttatatccataatatctgactatactaatgctttaagatccactcgctgctttgaattcaactcattccaatcatggtcacgtaggaatatggcgaatggagtgtcaatttttta

SEQ ID NO: 272291 - DNA, 425 bp, Glycine max
  unsure (1)..(425): unsure at all n locations
tgtgtactangtgatgtaggtctcctacctcacttgtgtggtccacagcatctatttcgctgcatggacttcatgtggtctttaaggcttcaggcactgtancataattcttatattttctttcttacagacactcataagaactctttttttttgccccagaattttctgtatcaatcgttacgagggctcatatatgtacattcagcaaatgttttgcaccgtgatctaaagcctactaatttgctattgaatgccaattgtgaccttaagattgcggactttggtcttgctagaactacatctgacactgactttatgactgagtatgtggtcactagatggtaccgcgctcccgaattgcttctaattgttanaatatacagcgccattgatatatggctgctggatgctactcggagaat

SEQ ID NO: 272292 - DNA, 441 bp, Glycine max
  unsure (1)..(441): unsure at all n locations
cacaagaaactaagcttcctcagtagggttgtgtgaacgtgccatcatcnngtanatttcttgtctagatttcagggattgtcatcatcaaaaagggggagattgtagacaaaggatcaagctaaatgtagacaaaggatcaagctaaatgttttgatgatgccaaaggatcacatcacacgcttctcaaagctctattcaagacaaagaaattaaagatattcaagatgaatgatcaagacagtctctaaagtcttaggaagggtatatttaaaaggaagggaattccaattgaagtagcaaaaggtttggccaacaaatttaagataaaaagtctttttcaacaaatttactctctggtaatcgattactagaggatgtaatcgattaccagtggccaaaactgatttactacaactattaaaatttgaattcaatatt

SEQ ID NO: 272293 - DNA, 421 bp, Glycine max
  unsure (1)..(421): unsure at all n locations
cgatccttaagtcacctgcggcatgcaagcttatttgttgcatcntgtttgttgcattctattngctaacaagagtgtcacacatatcactgtggtattcttggactcattttgtgaccttaatcaacctggagggttttcatggggagcaattgcacttgtacatatgtatgagaatctaaatgttgcgtctaagcattcgactaaacatcttgtaggatatatcactttcttgcaggtaattatattgtttttttatcattgttatttgctttaaattttatatgttctatattgattacaattcttggtggtattttttaatgtgtgcagtcttggatctacaagcattctcctacaatcgcaaatatgattgctgatgagaattactatgagaggaaaccacatgcttgtcattgga

SEQ ID NO: 272294 - DNA, 419 bp, Glycine max
tccacaacatccaagcaaaacaatattcattttgcactagctatcacagccaagcaaaacagagcaaaggcaaaaaactctgctcaacacatcaaccaaaatcacaacttttctcacttaaagaccacagtaacaattccttcgatccaattcgttaaccgttggatcgactccaaaattttactggaagtctatagtgcataagcctacattttgaccgttgggatctacaagcaaacatccagaactcactctgcactgctctttccacaaccagttattttgacagcaaaattctgcataagtgcagatttcgaaaatcacacttcccctaatccaatcttgctcaaatcaaatcctacaagtcccaaatcaggtatcaaacatgtctaaaccaaagccaagcttcataccacagc

SEQ ID NO: 272295 - DNA, 434 bp, Glycine max
gttctgctgacgttgaagaatgaatgaatgaggtgaggttagggatgaaatgtcactcgaacttagagctagtaggtacttcaaccattgtcaggaccgacactgctatcatcatcaccactatcaatgtcactggtaataccaccatcaccactaccaattgtaacacctctgacataacccccacaaccaccatcaatgtcatcataactaccactattgtcaccacaaccaccaccaccatgtgaaaatccttcagcatctcaccaacacatcgacattgatactatcaccaccaccactaattccttgtctattaccaccaccaccactaccaatgtctctctcatcggttgctaccaccatattcgtacacgcactttgatcacaaccgtcatcaatggaactttcaccaacactgccgatcatccttg

SEQ ID NO: 272296 - DNA, 512 bp, Glycine max
  unsure (1)..(512): unsure at all n locations
cgccgcgtgntttgagcctgctatgcggcctcatatatagtgacctataaaactcaactcagctatttgtggaatgatgaccgttcctatcgacttctgcgcacgtcagaagaggtgtggctcgtagcacctgcagttgccttatgatcagaggaaccactggtatcctcatcaatctcctttaacatgctctgcttgattccctgacaagcatccatacaaccaggcttgttacaggctgtatcatacacctctaccgagcattcgtctatcacacatgaatggttgctataacatgggaaacctgatgaacctcgtgcanangatgatgctctcttgatagggaacaaacaatcttcatatgaagttaatgggaatctcagccatcttatcaatccgtggagaattgactgagatatctggtgaagacacgtgactaagcagactgacagacctgcaaggaggctgacgaataccacgccttgttggcactggaaatgatgctctgcgan

SEQ ID NO: 272297 - DNA, 411 bp, Glycine max
  unsure (1)..(411): unsure at all n locations
agctntaagcgttgtccattgtcgttctctttcttctcaaagntctcttctctagggtccaccaattctactgctccgagaggtctgacttctttgattatgaacggccctgaccatttggactttagcttacctgggaatagccttagccttgagttaaaaagtagtacatattgccctggctggaattctttcctttgtagcttcttgtcatgatatgccttcatcttttgcttgtagattctggatgactcataggaattcagtctcatttcttccaattccagtaactgtagcttcctcttttctctgcatgcactatcatcgaaattaagcaatttgagagcccaatatgctttgtgctccaactccactggtaagtgacatgcctttccatatactagctgaaat

SEQ ID NO: 272298 - DNA, 450 bp, Glycine max
aagagtgaaatatacataggcaaagaacatagcacgatgccaagttttgatcttttaggaagatttgtgagtttatgagtgattgtgagattcctagaagtggaggagacatccccactcctttgtaagcaagcaatttctcttgattcctcttcttcattgtaaaaggagcttccttgctatggaaggctaaaccctcagttggggattcttgctgagtaattgatgtaaaattttaccctatctaattaaggttgctctatgtgttcattatttctatcagcactttattattgcatgcttgtggcttgatcactcatatgtgtgtactgctaggggctctagcattgaaagatgtattgtctccttagaacttgatagagcaggattaggttaccgtatgtttggacacggagtgtggtaatatattttctattatgttgtgatcat

SEQ ID NO: 272299 - DNA, 435 bp, Glycine max
ctttagtttatgtaagacaaaaccatcaactttgaggctgcaattaaagcttctcccaaagaggctgtaattaagacaagctaggggtgaccttctaacaactgctttgtttctttccttcttccaaaatctgaaagaaaattgtcatttttttttgcaagacaagcttttttattttgaatatagccacatttctgcaagtgaggatagaggtctttagaagctacatttaattcatataggttctgttagcaaccaagaattgaaatgaggaacaaaataaaagattttattgactaataagataaaaacagaaaataggagagaaaactctctttcgagggttttcccttcacaaaggagtgtgtctttcacaaagagctaatgctcaatctacaaatgattagacctctctttcttctatgcttctttctg

SEQ ID NO: 272300 - DNA, 386 bp, Glycine max
taacaaaaggcatgcgaaatgggtggaattcctagttttctatccttatgttatcaaacataaaaagggaaaaggtcatattgtagccgatgctctttctcggcgtcatgcattactttctatgcttgaaacaaaattgattggtcttgaatgtctgaaaagcatgtatgaaaatgatgaaacttttggagaaatttttaaaaattgtgaaaaattttcagaaaatggtttctttagacatgaaggctttcttttcaaagaaaacaaattgtgtgtgcctaaatgttctactagaaattttcttgtttgtgaagcacatgaaagaggtttaatggggcattttggggtccaaaagactctataaacattacaagaacatttttatt

SEQ ID NO: 272301 - DNA, 418 bp, Glycine max
  unsure (1)..(418): unsure at all n locations
agctttggaaagcgtnngtttttattttctcgctaagccaaaagggggctccactcattcaaaggcaacaatctaaaaacctgagaagaagttgttgaaaagtttctaaagaaatacttcccagagtccaagactgcagaagggaaagctgcactctcttcatttcatcagattcctgatgaatttctgagtgaagcattggagagattcagaggcttgttaagaagaactcccactcatgggttttccgagccaatccaattgaatatgtttatagatgggctgagaccacaaaccaagcaactgttagatgcttctacaaggggaaagataaaattgaagaccccggaagaagctacagagctgattgagaacatgtcagccaatgatcatgccattctacgagacagacacccat

SEQ ID NO: 272302 - DNA, 417 bp, Glycine max
gtgcggtacttgtgcaagttaaagacaaaccgagagttgttagattgaatatcatggatgaggcattgatagaactcgttatcccccttttgcctcaagaagcacatatgcctatcattgaatctataaatcttggttggatgcaacatctgcaccatgcacatatgattggaggtgtcttgttatactctaaggtggatacaaaacgagagttttcatacatgtctttaaaataaaagagaatgatgtcgttttgattgaactcaacgtttggcttaagagaaaccgtcttcttagtagcatccctggtgaagttcatgttccaactatatggaaatgggcgcaaggcaacatagtcctttgggcttggatgaggcatgggtttgctatgaggaggaaccttacctttcttctttc

SEQ ID NO: 272303 - DNA, 401 bp, Glycine max
  unsure (1)..(401): unsure at all n locations
agctntaggatcaaacttttttctttcttttncacgcaactgttcttcattcttcttcctcttttcacttctgatcttcctttctcttgcacaaattatgggtatcttccattgatgatgatcatggaaggataaacattcaatcaatccaaggatccactccaagtaaggatgaatttgagttttggtttattatttctaatctgtgtgaatgtccatctttttcttcaatcctattttcgattatcatgattatgaatatgtttaggattgaaatcgaattagatgaaggattcctttcctaatttcaactctaatcacaaaatttttggatgatattccaacctaatctgtgatccctatgcaattagggattaatctcactgaaccactctatgaca

SEQ ID NO: 272304 - DNA, 411 bp, Glycine max
ctaaactttgtacaagaatgaagctctgtataccacttgttagacaagtggcctcagatatcttaagaaggggggggttgaattaagatattccaaacttttctcctaattaaaaatctatcttactttttacttaagttatgaattcccttaatgacaatcttcttaaatattaattcaaatgaagcaacttgaatataaatataaagcaataataaataaaggagattaagggaagagaaaatgcaaactcagttttatactggttcggccacacccttgtgcctacgtccagtccccaagcaacccgcttgagagttccactaacttgtaaattccttttacaagttctaaacacacaaggacaacccttcctttgtgtttagagattctttacaacaagaaacttac

SEQ ID NO: 272305 - DNA, 200 bp, Glycine max
  unsure (1)..(200): unsure at all n locations
acggaatcaaaaaatgccgaaaaggatgaccctagggctgcaaattcgtcaatcccgtgggtatggcttttgaaaagggggaaaagaggtttttgaatgtaaaaacgccccccctttcgtcatttttataatttggtgcaggggtggctcgcccanncnagcccanctcgaccactcgagctaacctgcacttctttatt

SEQ ID NO: 272306 - DNA, 421 bp, Glycine max
  unsure (1)..(421): unsure at all n locations
taaagtatgcccgagtcattcatccctatgagaagtttttgaagtattggcgatcagaattgccattccttggattatagggttgaaccaagctcatacttttacaaaaaggttcatcaagtcaagttgaaatatggaagtaaccgtcttgcaaaattggggcaaaagatgaatcgagtcacatcactgcttcgtctactgccaaacatatttaggattattgatgtccttgttacttccagtttcaccttgacaaagatgtcatggaccatgttgaaaatctaaattgattcaaccccatatcttgcgtaaaaattcgcaatacttcaactgtacatcattcgcatgcatccatgcttttcattgngtgcattgctcgttgcattcttttcttggaaaataaaataaaatgaaccttatc

SEQ ID NO: 272307 - DNA, 367 bp, Glycine max
  unsure (1)..(367): unsure at all n locations
agcccttataccttgaagtatgacaatcattatccatatgcatttaccaaaaaaaaaaatcagtatccataagtatattataatatatggaatatgtgtgtgtgtttgaacagtggtcacttcaattatctaataaggctntgcaatagaatctgggtccactaattttttttattaattcaagaatcatacgttaattcttgggccaatgttaagcatgaaaagtaaataaatgaatgaataccttgatttattcaagaatatgtgtgtttgaacaatggttccctcaattatctaataaggctttacaatagaattgaatatggatccactaatgttgaggcagtgttaagcaagaaacataaat

SEQ ID NO: 272308 - DNA, 114 bp, Glycine max
tgacactggggtcagtccctccatagtagtatatctcgcactcaatgagctcagtctattacaaagacaaccatgctctagtgcatccgtatggaattctgcttgcatcagtat

SEQ ID NO: 272309 - DNA, 259 bp, Glycine max
aggaactatctactgtataacatattcatatgctatgattgcggctcgtataaccgaagttccgaggtgcaccacaatatctactgctgagcgggatgtactaatatgggcctgctagcctgatattcaaaatgagtataccactttctattcaaggaagaattctccataagtcatgcctgtctctaagaatctttacaacccaacccacctctccttgttgaccgatactctctgtgcgaactgcaggctgacatga

SEQ ID NO: 272310 - DNA, 365 bp, Glycine max
  unsure (1)..(365): unsure at all n locations
tctctcgcatgggccaaggggtgtgtcttccatagaaagaaaacacgtggagtcaccaccaacgtttattcgaggaaaacgtcagaaaaaccaaaaatgataaaggtcgaaggtttgcatattttgaaaatgaaggtttgggagttgtttacacacggngaaggtattagcaccccacgcgcccttcataagggacaacaacctctaatcaagtgtgcaaatcatgatttcaatattatttatttccctacctctaatcaagtgtgcaaatcatgatttcaatattatttatttcccttttatctctattttccctttttatatatttttaattttctgtcctttctatgtctttctttttactt

SEQ ID NO: 272311 - DNA, 421 bp, Glycine max
gtagagtttcctattgttaaggaattatgtcttttgttcttgatgttataatataatgatctttcttcatctattcatgtgcctctacccattctcattcatttgcatgtttatttccttgttacgcttaaaaagatacagtcctgcgaaggtactaataccagggacccggccgtcgatttcgggcaagaagcaagtcgggtagagaatgaagaggacgaggatgtggggcttcccccagagctggagaggataatcgcgcaggaggaccgagagatgaggccgcatcaagaagagacagaactcgtggacctaggaatcgaaagtgggaaaaaggaagtaaaaataggcacgggtatgaccacacccgtccgtaaagaattaatggccctgttgagagactacctagacatctttgtct

SEQ ID NO: 272312 - DNA, 391 bp, Glycine max
  unsure (1)..(391): unsure at all n locations
gctctaaggaagctacctagtttattaatataagcatgngtaacactggctggaactttgatgaatgagagtcttgtgagacacaacttaaagttcaacttctatcccttagtcttacttgaatagcgtgctgcgcctccctattgatctacctcttacttattgtgcagtgaagcatgctctccaagcatcttatacaacggtcatgccggcggcgaagctgcatctgccatggctaattccttaatggatagcgcctcctctcaccttctttcctttgtcttccgctgcatctccatggtggaaaatcaccattaaaggaccccattgaagctcanagatccagcctccatagaagccccacaagcaagcttccatcagattacaacac

SEQ ID NO: 272313 - DNA, 343 bp, Glycine max
agcttacaggtgggaccgcgggacactatgcaagcaaaaatcattgatctcgatgcaacgcacgaattaacatagaattcagacaaacttatcggttgctcaaaatggataattgaatttcagtgtgctggttgaaaatagatacccccctttaattaatgacatcaacggatgtgtgtttccagtttaggcctatacaaagctattaatggtgagaatattattgcttctattaaataaaagtttcacaaatgcagttactttttaacacctgagtttgtgattgattctcccccatttgtcatcaagaaacgggtaattgcttcaccggcccgttgtttat

SEQ ID NO: 272314 - DNA, 412 bp, Glycine max
  unsure (1)..(412): unsure at all n locations
agctntgcagaattggtgttcactggctaaaggatcaaagnggntctagaaagaggcaaatatgttcatccagctntgatgaatgcaaaaactggggcaaatgaagaggatgagaatgagggagaaaccattgctatgtctgccattcctacacggtcaaatttcccataagcccaacaatgtcattactcagccaataacagtccctctcacctaatcatctacaaaagccatccccaaatcagccacaaggcctgcctgctcaccacacgcccaatgcctaaacaccacctatagcacaaacccaaaaggaattttgtagaaaaaagcctgtaggattcaccccanattccggtgtcatatgctaacttgctcccatatctacttgataatgcaatgctagccataaccc

SEQ ID NO: 272315 - DNA, 304 bp, Glycine max
acaattcctatcctataacatagaaagaccacaacacacaatcggctgtatgaaccatggaaataaacaacagaccgtgtataaactatgatctaatgttctacaggagataagagagcagccaacgatcttaccttctattaggggtctacttattacattggagccaccaataaaaccatcagaactctgaactggatcatctgaagcgataccaccaagtccaccgtaaccaaacgaaccagaaacatctatctcatatacaacaaaccgcctagttgagccactgtaaactgaaccattg

SEQ ID NO: 272316 - DNA, 421 bp, Glycine max
tgcattcggaattgtgaaagccccactctatctttattgattgttcctgccatctcagacgcacaaatcatacataacaggacaatcgttgctgttggtggaatacctcacccactcaagtgtatcacacaattgtggcttttctctaatgaaacatttttgccttttaccactctaattccccttgagttcttagacaattcaagagattatggccacaacaaagaacaattcaccaatatgtgtaaggtaaggctagagagacaaggaaaaggttaaccaagaaaaaagactaacaatgtttttaggcacaattaaaggaaataaaattcagaatttatgaattcaagtaacaatccttcatacaaccaatatattaccttaaagagatttttttaaaaaaagttcttcaagcatgaac

SEQ ID NO: 272317 - DNA, 387 bp, Glycine max
  unsure (1)..(387): unsure at all n locations
agcttggattgatttggactgactaggatcgangtttagnaatttaggctacaacatagaacacaaagcatgattgattagagaaatatatttatatgcattagctggggtgttagaaagacccaacatttctacctactgctctcacttttacttaccttgcattttatagtttttagcataaaggtttagtttaaattctgtgtgaaattatcaatcatacatgttctctcaacaatgcttcatttatgaacttaactcacgctaacattagttccctgtgttcaatactcagattcatccgttttaatttttaaatacttgatgatccggtgtgctttccggcaaaccgggtttcccatgaatatatgtgtacgaagaaaaagt

SEQ ID NO: 272318 - DNA, 415 bp, Glycine max
ctccgctgcttcacaatctccccctatgtgatgatgactttctttgttatcaagaaacacacacacacacacacactttttcctagtcgatcactcacataaatttccattctccccctattctccccctttgtttttgaatatatgcttcacttaaaattaagttaattactcatatgagttcttgatttaatccctatttctctccccctttggcatcaacaaaaagccaaagtgcgtaacaagtatgaaacatacaaatacaactaatcgttcacacaacaatcatggaaaaatataaactaatcatgaagcaagaaacttgactagatcaaatatatagaaaaatcacatagtcatataacataatttataattgctcaaacacaccatgcaaataaagaaatacttaatt

SEQ ID NO: 272319 - DNA, 414 bp, Glycine max
  unsure (1)..(414): unsure at all n locations
agcttctagccaaatggacttaccttgaattaattccttngatagcccttttgagccttgtttccctttccttgttttgaagctcactacaagccttaagtgaaaaaccatgatattaccatatccttaaggaattttggagctttggaattgttttgggaataagtgtggggggtttttgtttcattggacaacttgtgttgttgcctatgcttcatgatgtattttgggccatacttgatatacattgtatattggttaaatgcaggacatgctgaatgaaatgttgtctctcaaaggcaaaaaaaaaaaataaaatcgaatagtaaaaaaaacacaatgaaatgctttacgttgagtgaataagatcttaaatggcacaagaatgatgaaactctngggtctactcttcat

SEQ ID NO: 272320 - DNA, 239 bp, Glycine max
tctcccgcaagtttctataaatagggggagaagtgatgtgttatatggccggcccctgagacacttctctgtctttcgaatttgctaggaaaaattgtttgcgtgaacataatctaacccgaggcgctctgagcacgaatccgtaacgattgcacaacgaatagcttgagcgtgtaaaccattcttcagacctcttcattctttgttgctcaatcttccacctccaaccgattatgacc

SEQ ID NO: 272321 - DNA, 426 bp, Glycine max
  unsure (1)..(426): unsure at all n locations
agcttgaacttcctcattgtnnctanttctccaaaagcttcccctagtttccgcaacttgacaaaactagcaaccatctcgatacaagtattgttagagggtccaaatccagccatactcatttcttcaagaatctgttccaagtactccaaatttctagtcctcgccataagcatgagaagtgcattgtatgcttcagggcaatgcggttgttcagttttcctctccacccacctaaaataatgcaatgccaccctcacatcattcaatctccagatcactccaacaaccaactctggttgaggcatttcatcaaacgtgttgaaggcatcctcaagggcaggcccccaatgatatgtgtccaacacccggcagacatcgtgcactgtctttctcatgcccctcgatttgaatgcattgtcttgg

SEQ ID NO: 272322 - DNA, 339 bp, Glycine max
tgtaattactctcctgtaactaacaaatcataagactaatgttcattaatcactttctctcaatttctgctttcttcttcctcaagttattgcttcttcactcttgatcaccttcagttgaacttcatgagtaacaaaactactcgcaaaagggtgcgcacgcccttgtttttcaaatttataccatatgaagctcacatttttgtcaataattttgaactcaattcgggtcatgagttgtgtgttgtcctataagtttgatgcatggtttgctcttgtggcttgattttcttaccagatactacttcatgaaaggaacccgcacaattcgaaagatgt

SEQ ID NO: 272323 - DNA, 418 bp, Glycine max
agcttcacataacatattcttcacttcatacatttttggaatcatttgcatgttgctttttctattttttttaagcttcctctacttattgatatcttcagccaaattttaacgtagtatttggtacggtgaaatgaaaaagactctgtttttgttatagtaatagaataactgttgatttcgtcttttcatatccacttttaccctctttttagttctttttttggggttaaaagcacggtattttcacaattaaaaatcatgagattaacttttaagacagatattatcaaagtgaattgtctcattcaataaagtctttttcatacaccaggaaatcaaactcctgtcattatatttaagaaactcactcatctaccaactatgctgaaccgttgtgctatagaccaccatcatc

SEQ ID NO: 272324 - DNA, 433 bp, Glycine max
tggaattgtgatagccccactccatcattaggatttgctcctgccatcttaaacaaacaaatcaaacataacaagacaattatagttgctgcttgaatacctcacccactcaagtgtatcacacaattatggcttttctctaatgaaacatttttgccttttaccactctaattccccttgagttctaagacactcaagagactattggccacaccaaagaacaattcaccaatatgtgtaaggtaaggctatagagacaaggaaaaggttaaccacgaaaaacgactaccaatgtttctaggcacaattaaaggaaataaattcaaaattcaaggattcaagtaacattctctctaccacccaataattaactcttagagaatgtctttaaaaaggtctcaagcctgaaccattcagcccaattttactttt

SEQ ID NO: 272325 - DNA, 405 bp, Glycine max
  unsure (1)..(405): unsure at all n locations
agcttggttgcagtctcgtttaaatttatttggtacactatcnatttattcacctggatgtacatgaaatgtgtaaccatatagaggatctcataaattacctgaataatattatatttatatttatatttaacaaatgtatatatatggaggtatttcagtaattagggttttctgtcatcttcaccaattagggtttgatcttaagttgataaattagggtgcatagttagttcataaattttggtttatttctagttcaataattatccaatagtgtaagttgcacaattgttgtgtagccttatttcaccatacttgctaaatataacccattcttttatttacaaattatgataacatttacaaaatacagtaccaaaaatgatattaaaaatgtttacg

SEQ ID NO: 272326 - DNA, 422 bp, Glycine max
tgaaggtaaactagatgccttggttaacttggtaacttatctgaccatgaatcaaaaatctgcacctgtcgccagactctgtgatttatgctcctctgtcgaccactacatagacctttgcccttctgtgcaacaatctgaagcaattgaacagcctaaagcttatgctgcaaacatctacaacagacctcctcaacctcagcagcaaaatcagccacaacgaaacaattatgacctctccagcaacaggtacaatctcgggtggaggaatcatcctaaccttagatggtcgaatccttcacaacagcagcaacaacaacaacagccttattttcagaatgctgctggtccaagcaaaccatacgttcctccaccaatccaacagcaacaacagcaacagccccagaaacaacaaacagttg

SEQ ID NO: 272327 - DNA, 357 bp, Glycine max
  unsure (1)..(357): unsure at all n locations
tcccactcatngatgaattgtttatattcatatttcaaatttgttgccttattgaacttttctgcaatatttgcccaaccaagcttagtgaagtggctatgaggtttatttccaacattcacctcttctatgcacactttcaacataacctcaatatttttatcacaccattctgctttctttttttttcacaggaacttgattgagagacatttcacaagcttaatgaaacaaacaaaagtataaccctaatccataacaattcaaaatttaatgagaagaaaaagacattaatgaagaattggttaacctgtgatgctaacaaatgaagaatgagagataacgaaggatgatcga

SEQ ID NO: 272328 - DNA, 393 bp, Glycine max
tgccgccacggagttttccgactatgctcttgtgttttgtatcaagctacaaaaggagagagcaagaaatgaagagccaatggttgatacatggacggagatgaaaaagatcatgaggaagcggtatgtgccggctagttactcaagggacttgaaattcaagctccaaaaactaacccaaggcaacaagggggttgaggagtatttcaaggaaatggatgtgctcatgattcaagcaaatattgaagaagatgaggaggtaactatggctcgatttcttaatggtttgactaatgatatccgtgatattgttgagctgcaggagtttgttgaaatggatgatttgcttcacaaagcaatccaagtggagcaacaattaaaaaggaagggagt

SEQ ID NO: 272329 - DNA, 229 bp, Glycine max
gaaacaacatcttgatcaatatctttctaaggacaacatctcgagtattgcatatattgggttagccgaaaatctataagataggtcgaataaattcttttgaaatctttgccacttagttctttaattcatatacaacgaacccttttgattaactcagagttttatcaatatattgtatactagatcatatgaaatactattttatgacctttcaacatcaattcca

SEQ ID NO: 272330 - DNA, 116 bp, Glycine max
gatcgtgataaggctataatggattaaaacatatagtttttccttctgaagaaacttttgcaacttagaaatatttcttctcatttactcacgatgatgcataatgcacaaaagat

SEQ ID NO: 272331 - DNA, 524 bp, Glycine max
  unsure (1)..(524): unsure at all n locations
gganattgaaacgtctcgtcccgcgatccttaactcacctgcngcatgcaagctggtaagacttgattgtaaccagtagcattntataccttgaaaatccaatgttgttctcaaacacaaagtcgtaagcatatgtagcataagaatcacaacatatgatgtgttgaacattttcatactgtggatctggaaagaagtgaccatactgcaataaaatagtaagttattctatagactataataagtagatgcaaaattgtgaattgcaaatccatcccatacaacacacttacagaattgccaggtttaaattcagtcgaggttcttaaccgcaggacacaaccaaaaacatatggtcgactcagcattcgatacctgcaaagaggacagatcacaacatagtcacccaaagtgatatatgtgaaagtgagtacacaaatatcattgataggtaaggtgctattggtaacacttgtgatttcaactacagttgagtttagttacccaattagaagtcatgttta

SEQ ID NO: 272332 - DNA, 383 bp, Glycine max
  unsure (1)..(383): unsure at all n locations
ntaggtttatgagacttattttcacttatatgatattttatcttttcattctttaataatataggactttactttatatttgtattttaacaatctttctcataagtgagtctcttccatataataatctcctcttgagtggaagacattatcatccacaagtattccatgatggttattagaacccacatgctccggttacttgtagtgtcactccacccatgagacatatgatctgaatccactgacaggaagactttcaatacaagagatcccttggttaagaatccactattgtcatctaactcgttcaagttggtcatcaagtcgaatcattgatactaattgatgggacggaaaaactcactcatatccttattacg

SEQ ID NO: 272333 - DNA, 424 bp, Glycine max
agcttctacattcaaattcgagcctttttatatattacgggactcaatcggacatccgagtaaaaagttattgtagtttgaatttgctcaaggcttcggtattccatttcgagcgtctcgatatattacgggactcaatcggacatcagagtaaaaagttattgtcgtttgaatttgctcagagcttcggtattccatttcgagcatctcgatatattacgggactcaatcagacatcggagtaaaaagttattgtagtttgaatttgctcagggcttcggtattccatttcgagcgtctcgatgtattacgggactcaatcagacatccgagtaaaaagttattgtcgtttggaattgctcagagcttctacattaatttcgagcttttcgatatattacgggactcaatcagacatccgagt

SEQ ID NO: 272334 - DNA, 424 bp, Glycine max
gtgagcaaattcaaacgacaataactttgtactcggaattctgattgagtcccgtaatatatcgagacgctcgaaatggaataccgaagctctgagcaaattcaaacgacaataactttttactcggatgtcagattgagtcccgtaatatatcgagacgctcgaaatggaataccgaagctctgaacaaattcaaacgacaataaatttttactcggatgtctgattgagtcccgtaatatatcgagacgctcgaaattgaataccgaagctctgagcaaattcaaacgacaatcactttttactcggatgtctgattgaatcccgtaatatatcgagacgctcgaaattgaatatcgaagctctgagcaaattcaaacgacaatatacttttactccgatgtctgattgagtcccggaatat

SEQ ID NO: 272335 - DNA, 367 bp, Glycine max
gatctgcatggtgatctgcagaagaacatagaccacagactcttgaccaaggcatcaagttttccctcaagctttttattttcagcagatgaagatgaattcgtggccacctcatggactcctctaaggacaatagcatcgtttcttgaactgaattgttgggagttggaagttatctttttaatcaaattcctggcctcaacaggggtcatatcaccaaaggctccaccagtggcaacatcagtcatactcctctccatgttgctaagtccctcatagaaatactgcagtagagttgctcaaacatctggtggtgaggacatcttgcacacaatttcttgaatctttcccagtactcatacaagct

SEQ ID NO: 272336 - DNA, 330 bp, Glycine max
  unsure (1)..(330): unsure at all n locations
ntaacctcatcatctctcatagtctttagatttgggatccttccaatccttgcgtccagactctcagccacttatgatagccgccgatgctcccattactgcttcccctaagctctatgtcctttcttcacgccgcatcccatgccttgcgaactccttggagtaccctcgcgttgtggtcactgaaaccccgtgcgatgaaaggcgtgatgctttcgtctgatggcactcctctcatggggtagccaagctgtcttatggcgaggacgggattataattaatacaaccccttgttccatcaagggaacatttggacatccttcgcatga

SEQ ID NO: 272337 - DNA, 389 bp, Glycine max
tttatttgcagcgagttggtcgatttttttttttgcttctaagagtgaacttaattagttctttaaacatctaaaggtaaattatattctttgcaattatggttaaatctaatcttaatttttttaaaatagtctttgtcataatatgacatttaaacatggtaaaaggtggcaaaaggggttattcagcgggttctgaactataaccggttagatttaaaaaatctacatttcatttgtgctcttaaaatgaggttcaagtttgataaaagctcagtttttgtgtttttaacggactaagttcataccagattatattttatcgagcaggttggatcgcgattcattttgctatctatataacttcgtatgtcacacaaagtcacaaa

SEQ ID NO: 272338 - DNA, 300 bp, Glycine max
  unsure (1)..(300): unsure at all n locations
ataataagcagacgatagtggagcattgattgagaggaggctattaagtaatttaacatagagnggtaccaactgaagaaactcttccaactcagaaatatctcttctcatttacgcacgaagatgcacaatgcacaagagatataatagggactaagatgctacatttaaaattacggcaagtacgaatgccattcaagggagttgggcatgttaaagacaacacatatgccagcgcttctccgagctttaagcattagtcttcaaggtgttcattctactgcccttatatctaacatc

SEQ ID NO: 272339 - DNA, 218 bp, Glycine max
acctaaacagtctttgtatttgtatccgatgcatgataatagaccactaggagaacaattggagttgctaaacaaactgattctagatcctgaaaatatcgatgtcactatatgacgatgaggatcaacgctttgttatcgttgagctctttgcctaagggtcactctaatttaaaagagactttattgggtggaagagactctgtctctcttgatga

SEQ ID NO: 272340 - DNA, 241 bp, Glycine max
  unsure (1)..(241): unsure at all n locations
tcgtgaggtctctcttttgaatgaggggtgtggtattatattcgncaanccnaaagccatcctatagctgattaaatttgattagagaagccacttaccttcttgggaggaggaatgagaatgacggagccagacggagatgtcatctcggaggagtgcctcgagggagggagatgctctcgtgaacggaggctgccataggagatgccgtcgcacgggggtgttaaaattgatagaatga

SEQ ID NO: 272341 - DNA, 412 bp, Glycine max
  unsure (1)..(412): unsure at all n locations
nnttntaatccaacattgntctcacacataatggcggtatcaattcgatcatgacatccgcctcctatgacgagtgcatcagattcatactgtagctcaggagacatgtgaccaaacagctattgatcggttaattctgcttaaactctgatattccattttagcatattaatttataacggcactcaatcacacaacctacagaattgcgagtggtcttctatttgatgatggcttccgcatgacacaaccaccgtctctaggtctaccggaatcaatacactcgctgagacacattattgccgttgaacttggcgaaactttcaaatcaattccaactctcactatatgcggggcgcatcggacatccaggatatcactcggtcagctttgactccaccagctatgatcc

SEQ ID NO: 272342 - DNA, 400 bp, Glycine max
  unsure (1)..(400): unsure at all n locations
tttaaaanaatgaagataaaaataaaatagtgagtatattattaatttctaaattatttaatacaaaatattcaaaatataaaataaaagtttcttgcccgtacaacaattttatttaacatattaaaataattattaaaataaaagtttcactatttttctcatattaaaataattattttaacatattaaaataattactaatatactgaagaaagagtaatagagccacacttcaaatcatttatgtatgttcataatctatttaaggcaaaaatttataataaatcttttcttttgtgggactcaatcctaaattatttaaaatataaaaaaagataacatgttattcaattgacactactagaaaaagctgttttttcttttattaattaattaa

SEQ ID NO: 272343 - DNA, 433 bp, Glycine max
ggatcttcttcttttgataagttagttattttcgataaatgtccctttttcatcaatgtggctttgttgtcagatgtttgtgtcactcttcatgtaaaggaatagttccacttgtagttatttttctgaatgataaaaaaaaatacaaacatttctcttaacaaaaattcagaattactttattacattattatgaaagactattccttcttctaaacttaaatctcgtacctctaatattaataacaataatgttttttttttttggtttttggcatgcatattttttaagcaatcttcttaaacatagaatactaacatttctctaaacaaaaattctaagcttaactcaccgtattattatgaaagactaattctttcccctagacttaactctaggacctccaataaaattaatatgaccacattagag

SEQ ID NO: 272344 - DNA, 399 bp, Glycine max
  unsure (1)..(399): unsure at all n locations
agaaactcagcttcagaccaagcactataatctaggtatcctttttccttttttaatggattntcagggttgagaagtgaaattgagaatgaggtaaatttggagcaaactctcacctcacacaagtctataacatcaatttaaacttgctcaaactggatttacacctaaaattccaccgaatcaaaatttgactcctcaacacccaattttaccctagaaatggctctttgttcactttggtcatttgtttttctctctagcacagcccaaactttctcataagtcctaaatgacatttcaagctaggattaactcactttaacctccaaatgccactaaatccagaattggccttccaactctcaaaactcactctttntccactcataacaccat

SEQ ID NO: 272345 - DNA, 411 bp, Glycine max
  unsure (1)..(411): unsure at all n locations
agcttgttcttgattntttcattttcntgaacaagcttagaacaataaacttggccttctcttaattgtctttgggcttggcgaccacgatcaacaaagtactttcggcacctactatatgttgacttgaccaacgctgttattggaatgctgcgacaatctttcaacaccttattgacacattctgataggttggttgtcatgtgaccatatcgtcgtccagatgtatcgtaagccatgctccatttttcctttgaaatgcgatcaatccatcttgctatggctggactcagttgacgaaatttttctaagttttgatcaaacacatgcttgcaaggagtgtacgctgcatcaaatntgctatcatcataagttgtacgtagacatcanactcanattaaattaatgtat

SEQ ID NO: 272346 - DNA, 336 bp, Glycine max
taaagttattggagggagaataaaacaaatcattttcttttgtaccctccaagtaacgaagaattctttttgcggcttttatatgagtagaggtaggagccttcataaagcgacacacaactctcaccgcatatagaatatcgggccttgtattggttagatacctcaaactccccacaagactcttgaagatcgtggggtctaccttctctccttcatcaaactttgataacttcaagccaccttccataggtgtgttcacgggattgcaatcaagcatattaaatttcttcaacacttattttgtgtagctttcttgtgagacaaagattccat

SEQ ID NO: 272347 - DNA, 365 bp, Glycine max
agctataatagcaatctttctttttgttgacaagtttcagtagtccagctgtcttgatgaggtacatgatctccttgcaatccaaggcatttcttcccagttctctttctaaagcaagccttcgttgatatacaaatttccacctttcaacattgccaatggagtggaaagaaatgttgtccaatggagcatcagggacatttccaggcacctttttccctgatttcttggcccgcttgatgtcgagaacatctggctcgacattatcatcagaatcagatgaggaaatttctttcctcttcttggacgggattgcaactatgctccatctggatgcggtaagagtgagtggagtgctcttcttc

SEQ ID NO: 272348 - DNA, 409 bp, Glycine max
  unsure (1)..(409): unsure at all n locations
atggaaaggtcatttcggaaggttntaatgcntttcttattgtcattccgaaagctattttatagctgattaaatttgattagagaagccacttaccttcttgggaggaggaatgagaatgagggagcgagacggagatgtcatcgcgggggtggccgtcgagggagggagatgctgtcgtgaagggtggctgccaaaggagatgccgtcgcaggggggtgttaaaattgagagaatgaagaagggaggtgttaggattggtagatgggaagtgaaaatttcattaaggatataatggtcttttcactaaataatgggaggtccagggtttaagaaagaagttgcaggattcaagtcctcaacttttgtcacagttgaaactagtggagttagatagaaaccgggctag

SEQ ID NO: 272349 - DNA, 369 bp, Glycine max
  unsure (1)..(369): unsure at all n locations
agcttgttataaccttatatagaattgatagattaagntcttgagtggaatccctcatgtgaggtgaaaatctttagcatgtggccgaaaaccatagatattctttttatgtaaagtccaatagtgactagcaaaggtgaaatccagtggtgcagctggtctattacaagattgaagtctattaaggaattgacaaggctgtgaaacccaatggttgttggtccagttgtgaattggttgtgttactgaaataacatctttaagggtgaggattggacgtagcccaaggttggggtgaaccagtataaaaaccttggcgcactttcttctctttctctatatattggtcctgcacaaatctaaaactac

SEQ ID NO: 272350 - DNA, 385 bp, Glycine max
  unsure (1)..(385): unsure at all n locations
tgcgtctcatgaactnttttgtgggagaagaaataaatctttaaaaaacccatcaagctcactgatatgcatgcaccaaaatgcttttactgctgaaaaagattagaagattactggttggtgcagctgtcccgttttgtacagtcacggtgagttggaggctaaatcgatctgtatagcgaggaactgaggatattaattgcaataatgacaaatttcagtccttatcttccaatgaaatgtctaactctctctagcttccaaatatctaattcttttgtcatcttaaaagagaataatttgcatggatataatgctttcatttgaaatgaactattatatgcctttcccattggaatcatagaattgatggtgtacacattta

SEQ ID NO: 272351 - DNA, 426 bp, Glycine max
  unsure (1)..(426): unsure at all n locations
tgacacaatcttctagttccaatcataatctacttattcatatactaatatcaattaatgttatcgttcaaataataattgagttctatgtttcataacaaaaatgttttcactcggttactcaaaaactaactaaaaaagtaactaataaatcttctaaaatcctagtgaattattaaatgtagtatattttaacaaatgtaataaataaaatttaaattgactttaaatgattattctagcaaaccaaaatatatcatcaaaatcaaactacaattttttttaaaatattttataaattactatttaataattcataaataagtatttaattattttataaataactatttgaatatttttatatattaataaactaatgtagaaattcattntttttaaaaaattatacttcaaatcactatt

SEQ ID NO: 272352 - DNA, 293 bp, Glycine max
tacatgtgccctcttcctagtgagtttactcttattggctttcatgattcacacactatcataaagccattcctcgatcgtcaaagcaggtgcgtatagcagaccacgtcttttgaagaagaccgatactctgagatcctggacttcatttattcttcatacgatttcgacagatacccagagaatatatttacaccacggatctcagacatagaatattaaatgaacatccttaatgtcactcttaaatattggagaagatgatagcctaaactcgctcacatttgaacatt

SEQ ID NO: 272353 - DNA, 412 bp, Glycine max
tgcagcccatctatgtatccctgggaggggatttaatttgaatgcagacgggctacctttgaagatcttaaggaagaatctgactactttggcctagacctggagtgttctatctttttctaacttagccttgacatcccacactttagatattactttggatagggctatgttaatctacgggcttgtaatgcagagggatatgaacttggggcccctcatgtcaggtcagatctctcttatagctcagcacgactcctcgaggctatgttttccagccttgataactgccttatgcaaggctcgaggagtctcatctgattctctgacctttgaatctctgagcccagccattaatttggctttattaaaaagaatcactggaacttggatggccctttggtcacttttt

SEQ ID NO: 272354 - DNA, 357 bp, Glycine max
gaaaaattggtttcatgtgaaagtgtttattgtgtttggcgatcgtgagctcaatccatatataataattggagatagatttgaattaagtatttgacctaaaatatgggaaggtccaatgttaatcttacaaagtattataataattaataagaggatataacaaataatatcgtactatatattagtcgttgcgaaattatgtcgtgcacaacagaacaagttaatttttccaacaatctgaaaattaaaaagagaaaatgcgtcccccacgggtctggcctctccagtgtttagctataattaatcaattacgggactctatcctattaagatcgatgtatatatattctaata

SEQ ID NO: 272355 - DNA, 398 bp, Glycine max
gctttgatagatcgttttaactatttttttaaatattattttaagtgtaactctttgatagatgattgaattatgcatgtcatgctatttaattgcgtgcaaaagcattgctattattgacacatcataccagggatatttctcctgtagaatttcgatttgaacttaagttagatttcaaaaattagcttatagaatgaaaattatatatcttattttgtttattttactatttaacgtgagatcaccaacactttactccttctgaagtgatcatttcgtggcccaaattgttcctcttggataaatcgtgatcgctagctccaagtgatctagcaatatgatggagtttttgtatgacttacagcatcgttggacaagctgtgcgatctacgtca

SEQ ID NO: 272356 - DNA, 397 bp, Glycine max
agctttcatttatacaaattattagttgctttctagggatgaaattgtttgctagttcacaaatggtagtctgaacttgttaacaagttgacacttttggggactaacggtacatttttagggatcaaagcaacataaattatcactttcaggaatctgattttttattaactctttttgtttcaaaatttacacttcttttttattttgtattttttaaaatttcaaaactttgaccttgtatattggaattggaatgtttgaagtttattctgagtgatttgaatgtttggtttgggggagaacagggaggagtgtctgaacatatatatctttggcatttctacaagcttgtgtttatacagttttacaccggatagttctttttcatataagt

SEQ ID NO: 272357 - DNA, 399 bp, Glycine max
attaattgcgacaactaccacctgttccttcaaattcgagagaatatccaacctgctatgcaaaatatccaaagtattgaacaccaaaacaatcaaatctatccgagaatgtttgtgctccatgtggtccaattccataatttcttattgcttcattttgggaaaattgtccaagaaagtacactttctaacatagtttttctacgaactgttttagaatgcatctttttaaacaaaattaatgtggaagcaaagctaccatgatgattcaccaagatgttttgatgatgccaaagctcaaagagttgtttcaagattaaagaatcaagcattcaagattccactcaaagattcaagaatcaaatgaagaaatcaagaagcatcaagccaagtccaaat

SEQ ID NO: 272358 - DNA, 313 bp, Glycine max
  unsure (1)..(313): unsure at all n locations
agcttgaaggggcgcacttgatcttttctttagntaatcgacggtacctataacagcctctgtatctgcttaagacgcatgaagatagatcactatgagaacaaatggatttgtttaataaactgattcttgatctcgaaaatatctgatgtcgctatatgatgatgaggatcaagctttgtttttggtgcgctccttgcctaagggttactctaatttcatagagactttcttgtttggaagagaccttgcttctcttgatgaaattgcagctgctctgaattctaaggaattgtaagaaagaaatgaaaat

SEQ ID NO: 272359 - DNA, 347 bp, Glycine max
  unsure (1)..(347): unsure at all n locations
agttgaaattgccatgtttggatgagttattctttcttcttctgncttagggtttttgtgatgatgtttgtgatgttcatatgctgagatttcttatggaaaactgttagacgcgaagggtagagataacttacggttataaagtgagaatgtgatgttatgactggaaaaagagtgaagctttgagagttggaatgctaagtctgaattctgtggtaaatggaggttaaagtgagttaatactaccttgaaatgtcatttaggacttgtgctatagagaaaaacaaatgatcaaaatgaacaaagagccatttctagggcaaaattatgtgtggaagagtcaaatt

SEQ ID NO: 272360 - DNA, 391 bp, Glycine max
  unsure (1)..(391): unsure at all n locations
ggactccagtgacaatgaccgtggcatcgacgtttacaatacctacgatcaacgacatgagaggggacgacaaatttgccactttgagatgcccgatctacaacttctttggttagtgtgactgtgtgagagcgagagactgagagagcacgagcaaataagcataaatggaaaggaatttcaaagacggattttttaaaaccgtccttgaacacttgctttcaaagacgattttaatgaaactgtcattgactaacttcaattatttacaaaaatgtcaccatgtttactaagacaatggttntgattcaaccgtctttgaattagtgtcattgaaggtgattgttgtagtactgaccactcccaccatcatcaataccaccaccacaat

SEQ ID NO: 272361 - DNA, 297 bp, Glycine max
  unsure (1)..(297): unsure at all n locations
cattgagggagcgtgcacccacacacacgactgaatccnagacagganaggggcaacaccgnnctatgagcacatgctatttgcacactgcaaatatttcgtaagcgagaaaaatagaacccaccgcccttgtcctgactccagactctaactactacccaaccatgcttatatcacatagcgtactcgacacatttatacatcaaaaaatctattctgatatactcaataatgatcaccaccaactgtgtgaggattggttggtagaacgctaaatacatatggagggaccgttcc

SEQ ID NO: 272362 - DNA, 389 bp, Glycine max
agcttgagggaaccactgctggtctatatacataataaacttcaaggaatgatgttgcagccagccttatacctctgaagtatgacaatcattatccatatgcatttaccaaaaaaaaaaatcagcttccataaagtatattataatatatggaatatgcgtgtgtgtcagaacagaggtcacttcaattatctaataaggctttgcaatataatctgggtccactaattttttgtattaatacacgaatcatacgttaattctagtgccaatgttaagcatgaaaagctaatacatgagtgaataccttgatttattcaagaatatgtgggattgaacaatggttccctcaattatttaataaggctttacaatagaatagaatatgg

SEQ ID NO: 272363 - DNA, 287 bp, Glycine max
ggaacttaaaactcagcttgacttctttttcccctagaggaccactcactcttcacctatagagagccccatcaatgaattatatctcctcttccacttaagaatggagcgaaaaaacattttattaccatcctcctttcgtgaccacttgatccttgccttttaactatgcaaggagccattatggaatatagactcgtaaagtagagcgagcacaacctggggccctctacgtctggtccaattcctaccataccatagtctcactctcttaagatcattctaca

SEQ ID NO: 272364 - DNA, 336 bp, Glycine max
gctttggtaatcgacacatgtattggtaatcgaacaccagggatggtttctaaataagatcaaaagatgtaactcttcaaatagcttctgactctatcaaattggtttttaaggctttctaatagtcatgactcttcaaggcatagatatgcatttcaatattcttgaacacttattcaatcaatcttttacaagccttgaatctctatgaacttcttcttcttctttgtaccaaaagcattatgaagtattctggatttctaaaccttgaaaacttgtgctattcatcttttcattctcttctccttgtgccacaaagatttcgccaaagactaa

SEQ ID NO: 272365 - DNA, 347 bp, Glycine max
ggacactaagaaactcagctataaaacaaatgcctaatattaccaaattcttgtgaattatgaagcatcaacaagaatcaagccaaggctattgtgcaagcaatcaatggggcaaaacacaccaaaaaattatgatgatggatggctcatactctcacaaatgtaaacttatcactttcaaattgagctttcaaaactatcatgacatgtagaggaaaaacaaggatttcaaatcacaaaatgtcaagaaacttttattttcagaacaattacccatttcttgaacatatcctataattcaaagaaaaatatgcaaagttgtatatgcaaacagaaatgacctaaaa

SEQ ID NO: 272366 - DNA, 297 bp, Glycine max
  unsure (1)..(297): unsure at all n locations
agctnttcgtcnacagaatgcatangtttatacggataaccactcgggtattttcgcccgtcagcgagactcataagtcaatatgacagatcttgtgagcacggtagatgacgtaaatcaccgcgtgtaaacaggcttgttggccgagaatgacgaatggcgcataagacgacgttagtctctacgtgctatcaggcttttcgtcttacagacaacaaaaagtctattcggataaccactcgggttattacgcccgtcagcgtgacttataagtcagcatgacagatcttgtgagcg

SEQ ID NO: 272367 - DNA, 369 bp, Glycine max
  unsure (1)..(369): unsure at all n locations
tgataacacgcagagactaacgtcgtcttttgcggtttctgtaatcgcggccgacaagcccgttgacacgcagagatttatgtcatcttccgcgcttacaagatctgtcatactgagttttgagtcacgctgacgggcggaaatacccgagtggttatccgtataaactttttgctgtttgtaagacgaaaagcctggtagcacgcagagactaacgtcgtcttctgcgcccttcgtcaatcgcggccgacaagcccgtttacacgcggagatntacgtcatcttccgtgctcacaagatctgtcatactgacttttgagtcacgctgacgggcggaaatacccgagtggttatccgtataaacttttt

SEQ ID NO: 272368 - DNA, 425 bp, Glycine max
  unsure (1)..(425): unsure at all n locations
agcttccatcagttntgatgatgctatagctcaaagagttgttttaagattaaagaatcaagcattcaagattccactcaaagattcaagaatcaaataaagaaatcaagaagcatcaagccaagtcaaaataggtagtaaaaagtattttttcaaaaaacatcaaatagcacactttttgtttgaaaagtgattttctgaaatcttctaagttaccagagtttttactctctggtaatcgattaccattttatagtaatcgattaccagtaaccaggatggttttcaaactggtttcaatgctttgtaacgttccaaaatgattttcaaatagtgtaattgattacactatattaataatcgattacaagtgaatctgaacgttggaattcanatccaattgtgaagagtcatagcttttcata

SEQ ID NO: 272369 - DNA, 311 bp, Glycine max
  unsure (1)..(311): unsure at all n locations
acacttaaatctcagcttcttggcctacctgatatnncctctattatattatcatgttacatttngtatagatagctcacacggtcgatcttgtacagattaccttttcttttaacagtaaatagtgaagagccattattgttctagacggcacatccttctttgttgaaggaaacattgtgtccactatcacataattgacttatgctaagtaggctgtgtttcaatacttcaacaaggtaaagattttctataggaagataagagataaatgtttattttacccacaccaaatattctacttttcttat

SEQ ID NO: 272370 - DNA, 362 bp, Glycine max
agcttggtcgaagttttattaaataacctagctcatggtggacaaacataaccccagtcgaggtcaaccaaaaactacccttaccgcggtaggctgaaaatagtcatggtcaaagttggctgataacaactttgacaaatgtcagtgaaaaacatctttggtcaaggtggacctaaaatagtcccgactgaaggtgaccaaaaatagtcccaaccgacattgacccatcataaccaagcaaggtcaaccaaaaactatgttgacaaaggtcgatcagaaatgctctggctgaggtcaacaaaaaacaatctatcagatgtaggggaaaaaactctccattgagatcgtcctatatttataca

SEQ ID NO: 272371 - DNA, 428 bp, Glycine max
  unsure (1)..(428): unsure at all n locations
tattactctccgaagcaacaagtaaaaagcaacactcatancttataagtaaggcaagcaagaagaagcacgcgaagaaattagaagcacaaggacaaggcacacgaagaatgcgtatgaaaggattatgtttagggaaaaattaaaaaagtccgaatagtcattttacaatttagaactccatctagcaccatcctaaatctaggaggacaaaaacaagattaaataatgaaatggaatggattaagttttatcttcttcaatgtcatttttacaaattatataaacaacagaataacttttccattttcctccattccactctttaccgttaatctaaacataacctaaggtgattcctagttcttaacatttgtctcatggatttggttaattttttccataaactatatttctcctaaaatgtg

SEQ ID NO: 272372 - DNA, 393 bp, Glycine max
  unsure (1)..(393): unsure at all n locations
agctttttattggaancttgtatttatgacaacactctgatttctgaaatttttgggataaaaatggttattgactagtcccttttccatgacttaaccaaattacccagtgacggtgtaccatttgaaggtacagtgaatgacgactggaaatttgatttctctgcccatgatgcccgccagttggtttgcaccaacaatgcggatatgaccggacgtcttcttgccgggtcattggcttttgaaagccgcatccttcactatttaattgtacgtattttgcttccacggtcttccaaccttgcccaggtttctgaggaagatctaattatcatgtgggcctttcatacagggcgtcaacttgactgggcacacttagtcagatatcgcatg

SEQ ID NO: 272373 - DNA, 398 bp, Glycine max
gacacttgaaactcagcttgtgtcttaccttttcgctcctaccacttttagttgtaggcgtaggtgaccaagaaggtccatatgggagacatccatctgctgggagcaatccgacttgagcaaacctcaataacatcggtggtaggggaggttagggcatcttggataaatgtctggtgctaacttggtcttttaaagcacactacgtgggctaaagcatcagcttggtcgttttattccttatcaacatggaccagttctttctttttgaaatgctccaagagtttgacctagtggtagtacttctacatacgtgtctttctagcttggaagacctcgttaacctgctcaatgacaagcttagagtaactcatgtacctcaacttctttttgctgac

SEQ ID NO: 272374 - DNA, 443 bp, Glycine max
agctcgtgacctgaaattatattctgagaattcgactaaataatacatgaaatatagctaatcttacagtaatccggcgctttcttttattccgctggttaaacaatgcattcaccaatgctaataaaaaatgaacatacaaaatatgaataatcttcttcccatttatattggcggggaaaaaaattacacgatacgtaatcatggaacattatccttaagagttatgctacaacagattcatttgtctgtatgattcaaaatctagatagtttgctgatgctggtccatgaaacccgtacatatccattactttatcatctgaaggcaatacagagccttcacgtgccttgaagccctccagacgtgaaccccaaggagctggagtacaacggtttgagctagaagcgtcttggctgacgcctagcgcagttgtgttctgc

SEQ ID NO: 272375 - DNA, 454 bp, Glycine max
  unsure (1)..(454): unsure at all n locations
tcagtattntgtaagtactctaagagatgttaatttcatgctttgtattctagtcacaagaaagtagaacaactataatgggtggagcacacctacaaaggaatctaggtccctgtttgatatatctatcatagaatttgttcccccatgttctatggtgtaaacttattatgcagtaagttatttaactgatatgactcaaacccattagccactccttagagattgagagctcgtcttgtgtttattgccaaacttcgtcaccttaccacaaaaagtgtattgaaaatcacgttnttgcctcaaaaagatgcattcctatgtttgaccgcaaatacaaacagaccttattgagtggcagagagcctcattcatgagaattttatggcgtaagtactgcatctgaattttccacctttgttcaatgtggaacgtatcggtaacttagattttc

SEQ ID NO: 272376 - DNA, 448 bp, Glycine max
  unsure (1)..(448): unsure at all n locations
agcttgttaaattagatagattcgatggtaacatgctgcttattaaattagctcttctcattcagtgagttttcagtgttcatctaacatttaagaaaaagtgaggggcacaatttctttaacatatacttattcctacataaatagaattagaaaatcataagggatcaccatttattatttaacgtcaaaatttgaactaacacttatgtaattaacgaaatactcaaattcataaatccaaaaaaaaatagattattatgttaaattaaaaataaatataaaagaaaacccagtgtatacaaaaaatatattggttatgatgattaaaaaatatgctgctatattctttctaacagacaaaataagatttgtaataatcacaagaaattatgataaaagcgggacagtagagagtacagcatanagtggggtattcggacaatca

SEQ ID NO: 272377 - DNA, 443 bp, Glycine max
  unsure (1)..(443): unsure at all n locations
tctagaatatcccaaaatccctctccatttctgatttcaggcttaaataggtgaccttgttggtgctttcgcgcttagcagaactctggctcgcttagtgcgcattagtgaatttcggcttagcgctcgtctttntgctcagcggatggactcaagtggtgctcttagcaggattagccctcactcagcgaacatgcacaactcatccttcttctagattcttcctcacgctcggccaaagaagtgttgtgctcagcggatggctcgctaagccagaaaattggcttagcaagcggatgaaaatcagcacttcacaaacttgcctaattaacctaaaagtgtgaggaaatgattattaaacacacaaaatgggtgtactaagtatttattacctatctttaacaaaaagtaattacaaaactacaaaataaccataaattgga

SEQ ID NO: 272378 - DNA, 404 bp, Glycine max
  unsure (1)..(404): unsure at all n locations
agctntacaattgacacaatgttttgattcttttatattaaatcaaattgctatcgctttggatcattgaggtattgaggtgtcgggtgtaattaaggtaaaccttagaagcatcattgatatatactcttttttctatcaaatcacaagaagggaaattgcgtgtatggttcgaaacattatctttggataagtcaaacctcaacgtatgaagttaaatgctgcattaactagctacccaagctcattcgcttattgaggttcacgataagttcaaatgttcgatccatttgatccacactcttaaaacaatttaaaccccaatttactctgaggttcacagacagtgcaaatacactgtcctttttggatagctgccagcgagagagtgcaagctatgttta

SEQ ID NO: 272379 - DNA, 415 bp, Glycine max
  unsure (1)..(415): unsure at all n locations
aagatgttgttgtagattaataagggactctctatacagctactcgagatggttggattaaaagattgcgcacgaataatggaaaatgggagaatcggaagcatatagatagtcatactttgctaagaatcgcaacagcaaaagaaggtggtctcattgtttgtgatacttccaacgtaaaataaactcttgaacacaagaaaaagtaaaactgtttcaatagtagataatcaagatatattatggtttaggatattcaatagcaagaggagcatgcatgcatggttacatttttagtctctgtgattcggataataaatatgttgaaaggacaaaggctacaaaaggtaganatattgtagaatatatatatatatatatatatatatgctgaaagattaaagaacataattat

SEQ ID NO: 272380 - DNA, 449 bp, Glycine max
agctttaacatgagtcctcacagataattatcatgaatcagaaaactatctagactacccatcatatctcccaaagccccatacccacgaaaatcaagagggaaagaagtccacccaaacctgaaatttcgaagtcccactcgtagacacgcacttcacgaccccgaaaatgccctcctttcacgatttggggcagaaatgatggccaaaggttgaagctctgtgtggagcttcaatggtggatgaggaagagagaaagctacgtgagagagggagagaaaaggcttctgaatttttttggggctgagtgaggagagagaacatagctttttggtcttaaataagacggttttctctttatctattattttatttaagcagtgccacatgtctccattcgagtggatccaaaagggcccactttcccttttgattgtgacacatactca

SEQ ID NO: 272381 - DNA, 570 bp, Glycine max
  unsure (1)..(570): unsure at all n locations
cgcctactccttnatcccactcgaacataacaatatggacactcgcaatntgaattagttatatannnnccnagtagcgccggtgnctccattgatacactagaataccgacacatatatactaagcctacgganactaacaatgacccaacaccgatactcaaatgttcttgacgtcatctacgctacgggatgtaagacaaactcaaaggctgagagtactgaaattgggcaaccaaagcaaccccgcagcaacaaaagccacattggtccccaaaaggatgaagcctaaggtgccaatgggcccatattacaacctgaactcaagcccttataaatgaaacaacacaaatcatatattttggccagtcaactatacaaggattgagccattatttatacaaactaaacactttaaaattgaaacacaccggagtcatcctcgacttcaccatgtgcgccaataaacaactcacaaccttggacttctctactccgaaaccgtggccgaatacagaagtaaggacacacaccgtcgaaaagctaccttgctcaccttgacacacaccc

SEQ ID NO: 272382 - DNA, 390 bp, Glycine max
gatgcagcttcaaggatgatgccgatcgaacatttcctaactgacatcacgcatatttcggccaccaattgaattgactactcattagccgacattggtggttgtttaaccccgactgatatttttctggcgacattccacaaatctttctttagagacgctcgctggccgataatgtatttctacgggccaggaacatctctattatcgcgtcggttaaaaaatataccatgatccgcggctagattttttcgcgccagtgctaccgacgtcttgtttcggccgaaacagccatgtttacatttattcggccgaaaatatatatccatctgccaaaaaaatatatctgccgcattgatcaaaaaaatgacatccacagtggctgtgatg

SEQ ID NO: 272383 - DNA, 392 bp, Glycine max
  unsure (1)..(392): unsure at all n locations
gctggactcgttgtgcagtgatttccttggcaatntgatgctcagaaacatcaatatctattactccatcagagggtctgcccagacatttgttgatcacagccggtgagaatctaatacactttcctctgacaaacactctttgataatcatcactctttctgtttgatatgtcagagggaatgttgacaatgaattccctgactaagccttcatagcactctcccaacttgctgacagtcttcagcagtccagcagccttgatgagatccacgatctccttgcaatccatggcagctcttcccagatctctttccaaagcaagtctacgttgatacacatatttccacttttcaacattgccaatggagtggaaagagatgttgtccaat

SEQ ID NO: 272384 - DNA, 400 bp, Glycine max
  unsure (1)..(400): unsure at all n locations
cttgtaagcgcctgcagaggtgagatgctggcatatcacaacnataaaaaaccgaggggcataacccttgttaaagatcgcacttgacttcttgttgaaaaatcatcaaattccaacgaaatgaaactcaacaaaatcaataacacattcgttacgaaggacgaatcccagattttaatgactatggatagaccaaaatcaatcaaatacgtaaaccttaaaattcacccaaaatagtagctttaaaagcttactctttcatggtattagtaacgtgaataacaaaattaataagtggatgccaacatattaattggtcatttgacatcttcatgaaaattcactcttcagataattaatgacagtcctcaactaatacgaatatatatatatatatata

SEQ ID NO: 272385 - DNA, 401 bp, Glycine max
  unsure (1)..(401): unsure at all n locations
ctctctatcaagacaatattctctctctctcaagactcaaccatccttttgatcacacacccacaatggagaacagcaaatgcttatacgttatactgtttactctgctgttaggctcagatcaaattaagtatacagaggcagtgaccaatcccttcctatcaactccaaccatgtccattttcgtcgcttctatcacttgtcatggcctgacatgcatgacagacacgaacttgcaaggtccagtcataatattccacctgtcatgaatggttaagatgtgattgttggaacttgctaacatactatagtacataacgtttttatgctacttttntgaaaaaattaaagtcatgtcgactgataggataaaacaacttttatcctattctctaagcatg

SEQ ID NO: 272386 - DNA, 517 bp, Glycine max
  unsure (1)..(517): unsure at all n locations
cgggaagcgcgagtgggacgagtntttgaccaccnatcgtattgaccgccactctctanacncgacctgcctgcatgcaaacctggagcgctatcacctgactcttcatatgtatgtcgggacaagatatgatagtgagtgtacgatctacacccctgggatatagagaggagcataagcgttggcctaccctacggcttacctatataactatcgtgcaatatccgcccggaatccctgtctttgccagtttgatactaaggaagagtttcatgagcaatttaccgatgaagggcaagaaacagacccttggaagaggagatgcacttatctccatccagagaatgagactatgaaagggaagattgccacagagtcgtgagactcttattcagacacaaacgaggagtgacaatgacgacttgcttcttcgggaagactccttggtccatccagatgctacaacgaagaggaggtgcgctgacttgttctgacgtgcacatcagattccaacgcg

SEQ ID NO: 272387 - DNA, 362 bp, Glycine max
cactatctactactcatgctcgcaatagccaatgtgggaagacaagatgcaaagtatcatctcgtttagcatatctcaaatctgatgacttacaacatcgctcaatctctccgcatgatgctagatactgttgtcgtctagagtcattattctggaccttctggtttctgtagctgtgctcaggatacaatctgagttattacaatcactcgtttcttacttttctcaaactatatctgaagacactagacatatattatttgcacgggctgaaatggtcaagacagtaaatctcatcacatagcctgtgtggagtctccctcagcataactggatatttttcaatgttatgtctggaattt

SEQ ID NO: 272388 - DNA, 435 bp, Glycine max
agcttaatgattatatattaacaatgtaaaataatattatctaattataaattattattgatataatttttaagataattatttaaaatttaatgaacttgttatatatagattagatgattgtgtgaaactattttatattttcaatgtatactaatttttttctcttaaaagattgcatggatgattcatccattttattttctataaagaattcttttaaattaagtagaatatgtgtctatgaagtaaataaacaaatttatatatttttaattaaatttagctataataagttttttacgcattaaagttttttttacggatagtggtatttatacaagcaattattaataacatactactgtaattagttacaccacccaattgtttttcttaaacaaatcttcttatttatttaagaatatgaaaaat

SEQ ID NO: 272389 - DNA, 450 bp, Glycine max
  unsure (1)..(450): unsure at all n locations
ntcattaaaaaacacanaaagaaaacaagctntattcagatcagatgatgtgtgaaccaaaataatggctcccctccctcccccaagccaggtaggtaaagcttctccccacaaaatagtaataacattttttcgcacacacagttgactgtgcatggcagagaaaaagagtgtgtcatcagtcatcacacaccaatttccatgcaacaccccagtcacacgcaaatagttaaaaagaatctttcattgagtaagtatacaggcattttcctcaacaataatcactgcgtttcagctatagcaataaagtttggcacaaattactacattggacgaaaatgaatagtccattttgcacagacaaggtaaataaacaagagtgcgaaactgatggaaatcatttatttataacacccaacagttcagagttcagactctatctagagtgag

SEQ ID NO: 272390 - DNA, 437 bp, Glycine max
agcttcttcacatagtccgcctttgcttgaccttctttatgcttaaaaacagaaacattaggcataggcaaaagatcaagaggagttagtgggttaaaaccataaacaacttcaaaaggagaacaattagtggtgctatgaacagctctattgtaagcaaattcaacatggggtaaacaagcttcccaagtttttaagttcttcctcaaaactgtcctaagcaaagttcccaaagtcctattaacaacttccgtttgcccatcggtttgtgggtgacaagtggttgaaaataacaatttagtgcccaacttgctccacaaagtcctccaaaaatggcttacgaacttagagtccctatcactaacaatgctccttggcataccatggagtctcacaatctccttgaaaaacaaatcagccacatgggaagcatcatc

SEQ ID NO: 272391 - DNA, 418 bp, Glycine max
  unsure (1)..(418): unsure at all n locations
ctacagcagattntagtaatgacccactaacctagaattaaaatatcttaatgccattaacctagggaattaaaacaaacttaatggctgagtgtaactgaaattgtggcaaccaaaagtcacccccaacagccaacaagtcagccaccatttggtctcccaaaaggctgatgcctaggttgccaattgggcccttattacaacttgaactaaagcccttttagttgattaacccaaaacatatttttggccagccaactttacaaggattgggccattatttagacaaactaaacactctaaaattgaaataaagtggtgtcatttagtcctcctccatttgggccatgatacaactcacaaccttggacttttctccttgaaacttgggcttgtattcaaatagtatggacaacac

SEQ ID NO: 272392 - DNA, 416 bp, Glycine max
  unsure (1)..(416): unsure at all n locations
agcttctcgaatgcctccttcgccgacaacactgctactcctgcgcccgtcttctccatctccatctccaacggcttccttgtttttttgaatatcaaataccgctccccctactactacccctttaacggccaattggggatatatatatatatatataatatacaataaattcaggtataatcttatgaaccaaaacaaaacaaaaaatagttattataaatatttaaaaaattaaacaactcttttaagaatatatattctaatttaatatataacaaaataacttagtttttggtgattaaaaaaatataaccttgttaattaaaatataaatgtgaatatagtaatatagtaaaattatatcaagagtattttttatttttatttntattatgaacccattcttctcactc

SEQ ID NO: 272393 - DNA, 500 bp, Glycine max
  unsure (1)..(500): unsure at all n locations
tgccgtgtantttgaaccctttttgattacccttctattacccgccncctatnatactcancctcttctcttcatatccacagataggatgctgttttctggctttagaactctacttgatactccgattatatggagggagaatctcacccgcggatctgtatttaaattcggaggaaatattgttctacccacaaatggtgagatttctacacatgctcctgtagcttaagaaacaaatgttatggtcccgctctcgattgtatgaaatttcaagtgcaaatattctatatctttctcatccgaccaattcttttggagtttaggttatgatcaaactttatgattttttactctcactctaaaaaaacaattgcctgtaccattttttcctccacgattaagatttcatttttacccaagacctgactctatttaatggatcggtaagtctcaccacctattttgtccttcccttggtcttttgtatgaggttggcc

SEQ ID NO: 272394 - DNA, 414 bp, Glycine max
  unsure (1)..(414): unsure at all n locations
agcttacccattcagttntagggttattatgatgatgcttgtgatgtttatgtgctgaaattgcctatggaaaactgttagagatgaagggtagagttaacctagggttagaaagtgacaatatggtgttatgagtggaaaaagagtgagtctttgagagttggaagtccaaatctggatttagtggtatttggaggttagagtgagttaatcctagcttgaaatgtcttttacgacttatgagaaagcttgggctgtgctagagaggaaaacaaatgaccaaagtgaacaaagagccatttctagggtaaatttgggtgttgaagagtcaaattttgattcggtgaaattttaggtgtaaatccagtttgaacaagtttaaattgatgctatggacttgtgtgaggtgagagt

SEQ ID NO: 272395 - DNA, 459 bp, Glycine max
tatccttatggcctgcctccggacttcaccctccgtgccaccccgtaagatttaatccaagcccctactttcgaggggcaactcccaccttatgaagactatcccgggcaagatgatggggaaggagatacccatcttggccccctgctccacctcaaagatctgtccccacatgaactaccccaaccgaacatagtccgccataccccggcctcacccacacctttaaaagaatctgttcccttcgcggaagataacggaaagattgaggcgctcgaagagaggttaagagcagtcgagggccttggcaattacccattctcggatttagcggatttatgtctcgtgcccaatatcgtcattcctcccaacgtcaaagtaccggactctgataagtacaaagggacgacatgtcccgaagggcatcttctgatgtattgccgaaagatggcggcgtat

SEQ ID NO: 272396 - DNA, 423 bp, Glycine max
  unsure (1)..(423): unsure at all n locations
agctntacgttgtttgtcaataaccttaaacaacgttccaccagggatgcaaagaagtgaaaacccattactaaagtgactaatatttacagttttaaattaaaatagatttactcgttattatttgtagtaatatatggtttacttatatcttatttggataaatttctctataaatacttatatgagcaaaaaaaaaaagcaaaacgaattaaatttctcctataaattaaaatcacttatgcacttcagttttcgaagagaaaaaaaaaaataggtgcaaaaacttctataaaagttaagcattaaaaatactccatattattttcttctcttatactactttggttggtgtatacacttccactttaccgggtgttctgttaaaaaagtgcagaaaacacaatttttccatttgcatca

SEQ ID NO: 272397 - DNA, 322 bp, Glycine max
ctatgctcttgtgtggcggaacaatctacaaaatgttagagcaagaaatgaagagccaatggttgatacatggacggagatgaacaatatcatgaggaagcggtatgtgccggctagttactcaatggacttgaaattcaagtctcaaatactaacccaaagcaacaatggggttgaggagtatttcaaggaaatggatgtgctcatgattcatgcatatattgaagaagatgatgaggttactatggctcgatttcttaatggctcgactaatgatatccgtgatattgttgagcttgacgagtttgttgaaatggatgat

SEQ ID NO: 272398 - DNA, 451 bp, Glycine max
  unsure (1)..(451): unsure at all n locations
agcttcatgatgaatcaagttgattcaagtagttntgaagataacaaagatgatgacaaaaagcccaagagaatgatttcaagattgagtcaacaagattcaagaattaagagaatgatttcaagattgagccaacaagattcaagaatcaagagaagtttgatttcaagattcaagaaaaaaagaattcaagattcaagaaaataaatcaagaagacttcacaagggaagtattgaaaagatttttccaaaaacaaacatagcacaattttgtttttcaaaagagtttttctcaaacttttctaagttaccagagtttttactctctagtaatcgattacccgtttcttgtaatcaattaccagtagcaaagtttgatttcaaaaagctctttaactgaatttgcaacgttccaattgatttcaaaatggtgtaatcgattacaagatat

SEQ ID NO: 272399 - DNA, 437 bp, Glycine max
  unsure (1)..(437): unsure at all n locations
tatccttatggcctgcctccggacttcaccccccgtgccaccccggaagatttaagccaagcccctactttcgaggggcaactcccaccttatgaagactatcccgggcaagatgatggggaaggagatacccatcttggccccctgctccacctcaaagatctgtccccacatgaactaccccaaccgaacatagtccgccataccccggcctcacccacacctttaaaagaatctgttcccttcgcggaagataagggaaagattgaggcgctcgaagagaggttaagagcagtcgagggccttggcaattacccattctcggatttagcggatttatgtctcgtgcccaatatcgtcattcctcccaagttcaaagtaccggactttgataagtacaaagggacgacatgtccgaaggggcatcttcngatgta

SEQ ID NO: 272400 - DNA, 451 bp, Glycine max
  unsure (1)..(451): unsure at all n locations
agcttgaataggaattntagacattntacccataaattatacagcagctgacaccttacaatcaacaaagactggtgttgtgtcccatacaacaggagtctcacgagtgtaatgtgctctaaccttgggattagtgtaatttccctgaagtttttaatgcatccaagtcattgcattatccagtgagtaactagaaagaggttagatgcatatgaaatgttcaatttcacatgtatgatcagaatttagatattcttccgaggaagactcagcttaacataactgaaaataacatacaagataacacaactgcacatattagctgttttcagtaaaatgaatcataaatacattcacacataccagcatcaaaagcttgtttgcaccatcagatatagcagcatgcccttcatattgatctggatcgaaatcattcacggcagcagtcaga

SEQ ID NO: 272401 - DNA, 583 bp, Glycine max
  unsure (1)..(583): unsure at all n locations
acggaagcgcgaatgtacccattagattacccgatcctatagantactcaagctagcacttgagcgtgnttggccacctcgaggggccaatcttgctcgtttaatatnatctttaaaatgccatgcaagagtgaattcgcgaaatatgtgttaaacagagtcacttactctaattgttgcgatacattccataatatagcacacgaatttatattttgtatattaggtacagaatttgactaagtacacgattattgtatccattagcattctttcatattgtacctgattttcgttctaattgtgatgtcttttccttaattaatgacgctagcacgcttatataataagtcatgtgattcaactcttctgaataccagaacatataataactatctatgattattattctcttacaggtctcaatactttgcagggcgatagacatataactctacacattatttaaactccatcctgctaataagagaatgtgatgtctctatttccatgtgagattatcatagacttatacttaaaacagctaacttctcatatctcctaatacattaattccgtgacg

SEQ ID NO: 272402 - DNA, 446 bp, Glycine max
  unsure (1)..(446): unsure at all n locations
agctntaggaacacgaaatggaacttatgagactaatccaacatgaagaaaatgacatgaaaaagacaggaatttcacttaaagcttcatcttctattccagaagaaagtgagaaagaggactttgatgaaatagaagaagatgatgattttagtttcttcataaagagattcaataagtttctaaggaacaaaggaaatcaaagaagaaaaaacttcaatccaaagaaaaaaggagaagattcatcttctgttccaaagtgctatgaatgtaatcaacctagacatctaagagttgattgccctagtttcaagagaagaatggaaaaatctgacaggaaaaccttcaaagataagagagcaaagaaagctttcatcacttgcgaagataatgatatggattcatccagagattcagacaatgaagtcgtgaatctaagtctcatg

SEQ ID NO: 272403 - DNA, 454 bp, Glycine max
  unsure (1)..(454): unsure at all n locations
ngccgccacggagttntccgactatgctcttgtgtggtggaacaagctacaaaaggagagagcaagaaatgaagagccaatggttgatacatggacggagatgaaaaagatcatgaggaagcggtatgtgccggctagttactcaagggacttgaaattcaagctccaaaaactaacccaaggcaacaagggggttgaggagtatttcaaggaaatggatgtgctcatgattcaagcaaatattgaagaagatgaggaggtaactatggctcgatttcttaatggtttgactaatgatatccgtgatattgttgagctgcaggagtttgttgaaatggatgatttgcttcacaaagcaatccaagtggagcaacaattaaaaaggaagggagtggctaagaggagttntaccaactttggttcttctagttggaaagacaaaggtaagaaagat

SEQ ID NO: 272404 - DNA, 446 bp, Glycine max
  unsure (1)..(446): unsure at all n locations
agcttgcttctcctgaatatcaaattcattttaggaaaaagaattggacaaattangattatttagtagggcactaactgaaattaaattgaatttgattttaggaatgtaaccaacattatgcaagactaaggtgttggttaagcaaactgaaccaatggcaagaatgggtataatgtcactattaggaagagttacagttttatcaaaaacaagctgatgagatctaaaattatgaagagagcaagtaatatgaatgcttgcactagaatctaaaagtcaacaatcatgaagaaaattggaagtggaagtagaaagaatcataccacttgaggaagaaacactgtgaggaatgacaacattggtagcatgactttgtaaaagattcatcaattgactatattgttgagcagtaagttgaaactatgaacccaagtcaacagaag

SEQ ID NO: 272405 - DNA, 465 bp, Glycine max
  unsure (1)..(465): unsure at all n locations
cttcctacgaaaactgtctatgctccacatagttagggccactagacgcattctgcatctctcangcattgaacatatgttatcccctagtaaattctagggtagagtgtttagttttctactaaccctgattggaaaagaaaacaaaggataagcattatggtttcctaaaactaagtatatttataaaacactatattacgaaatggagcattccaaatgctttttttaaacacaatctgtttatccaatgctcaaatgctcaagattaggattaggggtgttcatactcggtttgattcggttattcattaaaaagtcatctaaaccaaacttataaacaatatgcgattcaatttggttcaattttcattaaaaatataatctgaatcaatccaaaccaatattgtacggtttgatttttgcaatgtttactaaaacattatttcattaaatgntatatac

SEQ ID NO: 272406 - DNA, 443 bp, Glycine max
agctccagcgatattgtcacagaatacacttgaggcaccttctccatttcatccaccccacttgaattctagtcgcgcattagttaaaaaggtgtatatttttacagcattgaggagaaataataatcaagggaataatcattctattttcaaaataataattgctacagctgtcatgaattactagtagttagttagagggggtaagaaaataaatacgaaagactgacagagggaggagaataataaatgtaagaagagttggcctctcaaagagctaagttaggattgatgcagctcttgctacttcatgtattctgataaacaactatccaaggaagaaaagtttgacttacgtgagctcaaattggatggactaatcactacagcaaggagtaaaagatttcaagaagagtttgtcaagagactaaattctctcatgg

SEQ ID NO: 272407 - DNA, 468 bp, Glycine max
  unsure (1)..(468): unsure at all n locations
tggacaatggcacggaaatcttgctaaaatcctagataaatctcttgtaaaacttggatgtcgcagaanagaacgtacttcccgcacagatgcgtcgtaaggaagagaagtaataacatcgatctttgccttatcgacctcaatacctctactagagactgaatgccctaagactatacctccatggaccataaaatgacatttttcaaagttaagaacaaggttagtctcagcatcggtcaagaactctacagaggttatccaaacatgcatcanaggaagaaccataaacaatgaaatcatccataaacaccttcatacaactctataataaatcagaaaagatactcaccatgcacctttggaaggtgccaggagcgttgcatatgccanagggcatcctggtgtaggcaaatgggataaatgatctcggcaactagtagcttcataacctctttcttcatcaca

SEQ ID NO: 272408 - DNA, 456 bp, Glycine max
atctcgtacccgggatgcttaagtcacctgcagcatgcaagcttcagataactatagaagattatgccacggtggccgcctccaatacagctagggaagcggaaccggtgctacagcccgcaataaacttgggctgagacagaaagacgacggttttcggtcggagatatagctctcaagcctacccttatggtttgcctgcggacatcactgcccgtaccgctctggacgatatgagccacgcccctaccttggaggggcaactccctccttatgccgactatcccctgcaagacgatgatgaaggagatgcccatctacgccctctacttcccctcagagatccggccctccatgaattgccccaaccaaacatagtacgccatgtcctgtctccacccgcacccattaaagaatccattccctttgcataagataccggagagatcgattcac

SEQ ID NO: 272409 - DNA, 440 bp, Glycine max
tcatgatgatgaactaagcaattatgatgatgcctaaagcccaagtgattgattcaatattgattcaagacttcaagatcaagcatcaagaatccaatccaagattcaagattcaggagaagaaatcaagaagcaacaagtcaagacttcatattggataagtattaaaagaatttttcaaaaaccaaatagcacagttttgttttacgaaagaattttctctaattctctaaagttacagagtgattactctctggtaatcgattaccagttaacagtaatcgattaccagtgaccagattggttttcaaaatgctttcaaatgatttgtgacgttccaaaatgattttcaaatagtgtaatcaattacactatattagtaatcgattacaagtgaatctgaacgttggaattcatatccaattgtgaagagtcacaac

SEQ ID NO: 272410 - DNA, 437 bp, Glycine max
agcttacacacacacacacacacacacacacacacacacacacacacattttgtttggtttcggacaaaacgtcgtagagtaagtacgacagagaaccaacaaacggtaaatcgcgacatgtaacaaaataacatgacaaacagtaacacctaaatgcaacgtcaaagcgactgaaagcagtaattatggggacaactgaaaagtaaagtcagcacataataacaatgaaagtagtaacatgcataacaataaatgaaaatagataataatggaaaagaaatcacgagtccggtgctcctgattgcatcaatccgcctcctccctagaagtcgaataggtcagccatgtcttcatcttcttgggcttcatcctcggctccgggggcccctgcaggtcctggccctgtctgagcatcggggcagtctccaagccatgc

SEQ ID NO: 272411 - DNA, 450 bp, Glycine max
tgcttgtccacctgagggttccaatcttgctcgtagaatataacctataaaatgccatgcaatagtaaattctcaaaatatgttttaaacagagtacacttactctaattgttgtgatacattccataattagcacagaatttattttgtaattagtacagatttgattagtacagattttgttccattgtattttgatttgtactgattttgtttcattgtatgtctttccttaattaagtcgctagcagcttataaataagtcatgtattcactctgtgaaatacagaattataataatatttatattattatctttcaagtataatacttgcaggtgataacataaacttacaataatttaacccacctgttaaagaaatggaagtgctattccagcggattttatgattaacttaataagctacttctcattctcccataattaat

SEQ ID NO: 272412 - DNA, 413 bp, Glycine max
catgcgagcttaaaaagtgacttcacgagttatcatgcgcttattcaatgataaatgaccaagtctctacctcttggtaactctgtggcagatgtaccgaatgtgttacacgttgttcagtactcgagagtttgagtgtcgaatgaatccacacgaactttgtgtgtacttagattattgcgcacccagtttacgagcaagagataagaatcttatgataactgataatgaaagatattccattagatagaaatcttggattaaaaattaaagatttacatttatatatttaatgatcaaagtagaagataagaatcgtacaagatgagagaaaatcactgataggattgagatcagatgggatcatgactacgtaaagatatattagatgatatattgatatcaatcagagt

SEQ ID NO: 272413 - DNA, 442 bp, Glycine max
  unsure (1)..(442): unsure at all n locations
nggtcgtgtattgagcactagatatgagggaaccccaactgcctacatactaattggcaattgacttttcttgtggctttgctgaaagcatattatataacttttatgtttcgtaatgcatgatgtatcaaactatatatgatgtatcaaactagtttataaagtacattatcatatgactgaaaagctgcttataatgaatatttttatgcatggccacttgtttataaatatacataataccaaagaaagaaacaccacgtgcatcatgcttcttcttgcttataatcaatattgatttgcagatattgggagaatgagaaggtgcggttagattacaggccagtgcacatgaatacgttggatgatgaggtggaatcattccctcctaaagctcgtgtttattagtattcttgtaaattattactatggatgatctata

SEQ ID NO: 272414 - DNA, 417 bp, Glycine max
  unsure (1)..(417): unsure at all n locations
agctntataaattcatcattgttaatattctctacacaaaaacttaaatgatgttaatttaacaagtatttgctcaaaaaggaaaaattataatagaaaaattacaaattcctctataattgaacccccaaaatatactcataattagcatttataaggtggattgtgattttagaagatgtaaagcctttttgttcaacaacaaagttatcatttgaagtataagcttaacaaaattgataatagatttttgtaagacaaattcatatgatagaaatagattttgcaaaacaaaataagtttttcaaaaattaaattaaattcaaaccctaagccaatttaaaacagaagattaaccagaagaatataagacacaaagatttatattggtttgtgcctaccactaagaatacattc

SEQ ID NO: 272415 - DNA, 454 bp, Glycine max
ctgtatgccatctcctctcggcggcgatctcttcttctgcaaaagcgagatagctgttggcagtgatattattgaccagccctccgaaaccttctaccgagatgtcttgggccacatgggcctcgttaaaaaccttcgctaacacgagcccgatgaggctcggagctcatgagtaactcccactgtgagaccctggccagcgttttgttgagctattcgataaccttgaattcgctctgctgaattataccgaggaactcactggcttgctctagtgacacctcctttttaccatcctttttctccggaagacctttcgccggaatatctctattcgaagtgaggggtgcttcgtcatcttgttcctccaccacttgtgctatccccttgacgtttgtggggtggactggtaggtctgctggtgcaaacacacgaccgctacgggtcacaccac

SEQ ID NO: 272416 - DNA, 444 bp, Glycine max
  unsure (1)..(444): unsure at all n locations
gcatgcaagactttggagtgactaatctgttaggaaaactattaatatgtggccattgacatatcagacctgacacatccatggngctgattaattatcttatgacatgtagttgagttttcaatttgccagatagagttcatatgactcgactacacaccccctgagaattggctagaaccatacaataatttctccatgacattttctcttgcactcgctcaataatattacaacaccaaacaaggttcaaaggacacacctcgccacctccacaattatgttctttttcattcttgacagcattattatatttctcttaattaattaattctagggtagcatccataagagcgagcatacacaaataaaataacacttaataaacataacattctattaataaacacttggtgaactgctagactagctaccccacacatg

SEQ ID NO: 272417 - DNA, 425 bp, Glycine max
  unsure (1)..(425): unsure at all n locations
agctntactgcctgagaattgcggtgtcctagcctattgtgcaaatgtatagagttaggcacagtgttattacaagcaacagaagaaacagtgtttatacaagctggagaagacagctgagaagaattgaagattgggaaactgatacgatccatcaggtccaacatctccttgtagaaggatcatattggaatcctgngatttaacaaagcaatgattagcatggaattcaaagaaaacatgattatctttggcaaatntacttacactaatcagattcttggtgatttgaggaacaagaagcatgcttttaagaataagtttgacattaggactgaaaggagaaacaaaattggagtgaccagacgctgagatattcagacctttgtcattaccatgaagatctgatcttcaaaacgagaagt

SEQ ID NO: 272418 - DNA, 448 bp, Glycine max
  unsure (1)..(448): unsure at all n locations
tgccgcagctgctaatggcgatatagcctgaaccgtcattgtcattggtgagggagctgcttacgtggacatgtcgtcattgttgttggcgagaccggctgagtctggtgacgtggagagagtcgccaatgcttctggtgatatacgttgcaagagtggttctcgtcactggaaatggcgagactggtgtcggcggattctcttttcctttaaataggcagcctttgccttgaaaatttgtagtagtcttgataaaagaaagcacagaggagcgtgtttaatcaagaatttacaagccttactttcattatctctagatagcccagcttttgccttgaagtttctcattccatccttatttatttgaagtaacaatatatattgttgttcagtcaataatntatcagacttgcattcattcttttcaagttaagatgttgaataattt

SEQ ID NO: 272419 - DNA, 422 bp, Glycine max
  unsure (1)..(422): unsure at all n locations
agctntacaagcccttcgaccttggcttggttagctttcacctcctcttcactaaatgtagcattgcctttggtgaaaaattggacatgtaccttcctaatggatcctccatttgagccttccaccaatttgctttcaaatgaaaccttctccaatgtgtcagacaaggcagtgcccccgattatgctgaagttatatacataggctgcctcatcaattgcatcaactctgtgcagcacatactttgttttgtcacctgcatatgcacccattaattcatctaattaaaatcatgactaatttcattaatttgtactatgtattataattaaggttttaaatattggtcgcaatagtattattgcgatttatcagtttgttgatattgcaataaagtacagacaaatatgactgatgcaatc

SEQ ID NO: 272420 - DNA, 447 bp, Glycine max
  unsure (1)..(447): unsure at all n locations
tatgacatgctngttgggaattggcttggtgtggacaataatggaatgacttgtttctttagttgtgcacttctacgggatgaaaacattcagtctttntcgtgggctctaaaggcaagaaccttatgatattgtaacttgataatcttgtatttgatttctcaattgtctgctatctaatgtaggctttaattactatgctgaacctactatttgctagctnttgataaagttttgcaaaaataaaatctgatctatttttttatatgtataaatatcaattagtgagaacatataataaatataagggttttattaacatgtgaacacaagttaaggtatcaaatgctgtttggattttcaaggtaaggaccttaacatgtgccctgataactgctgtaaacgaaaccttattattaaagcagcaaanaatgtagttttcttttc

SEQ ID NO: 272421 - DNA, 383 bp, Glycine max
  unsure (1)..(383): unsure at all n locations
agctntgagcaaattcaaacgacaataagtttttactcggatgtctgattgagtcccgaagtatatcgagacgctagaaattgaataccgaagctctgagaaaattcaaacgataataactttttactcagatgtctgattgagtcccgtaatatgtcgagacgctcgaaattgaataccgaagctctgagcaaattcaaacgacaataactntttactcggatgtctgactgactcccgtaacatattgagacgctcgaaattgattatcgaagctctgagcaaattcaaacgacaataactttttactcggatgtctgattgaatcccgtaatatatcgagatgctcgaaatggaataccgaagctctgagccaattccaa

SEQ ID NO: 272422 - DNA, 408 bp, Glycine max
tcaacattcaatttgagcggtttgatatattacgatactcaatcagacatccgagtaaagagttattgtcgtttgaatttgctcagagcttcgacattcaagtccgagcgtctcgatatattacgggactcaatcagacatctgagtaaaaagttattgtcgtttgaatttgctcagagctttggtattccatttcgagcgtctcgacatattacgggactcaatcagacatccgagtaaaaaagtgattgtcgtttgaatttgctcatagcttcaacattgaattctgagcgttttgatatattacgagactcaatcggacatccgagtaaaaagttattgtcgtttgaatttgctcagagcttcgacattcaagttcgagcgtctcgatatattacgggactcaat

SEQ ID NO: 272423 - DNA, 446 bp, Glycine max
agcttgtcgaaattgccatgtttgggtgagttagacatacccattctgttttagggtttttgtgatgatgtttgtaatgtttatatgctgaaattgctgatggaaatctgttagagatgaagggtagaactaacctagggttagaaagtgagaatgtgatgttatgagtggaaaaagagtgagactttgagagttggaaggctaagtctgaattctgtggtaaatggaggttaaagtgagttaatactagcttgaaatgtcatttacgacatgtgagaaaggttaggctgagctagagagaaaaacaaatgaccaaagtgaaccaagagccatttctagggcaaaattgggtgttgaagagtcaaattttgatttggtggaatttttggtgtaaattcagtttgagcaagtttagatggatgttatggacttgtgtgaggtgagag

SEQ ID NO: 272424 - DNA, 454 bp, Glycine max
tcttttggaccttgaacaagcaatcaactcctcttttagaaccatgctatgtgctcgcgactggtccctttcttcccttcgcaacttgagttcattattgctaccccatagagctccgcgaaatttgttccggccatactcttccttgcgagccctcttggtctcttgttcaagggctcttgcggtaattgcattctcttcccgtaacccggcgcactccttccgaacgtgtgtagcagccaacttaaacttctccttggcgagttttgcctttcctaactcgcttttgagagcttggacttcttcgtcctcttccggtgcttcaaaattctcttcgctgacgacttttaacttggcgagccaatctaaacctcgtatgcgaactttcagccattcgtggtacccaccaatgatgccattacgaatgcctctaagctcttgatctttccttaac

SEQ ID NO: 272425 - DNA, 367 bp, Glycine max
  unsure (1)..(367): unsure at all n locations
agcttcgcggngtcgtgcgcacatgcatgcgaaaacctaatcaaaaaagctttatattttttaaaaaatgaacaaaggcggttttctatttacacccgttgtacaaataagtcctacaaagacgggtctcgaagaccgccgtaattatcttaccactatttacaaaaatgtcactgagggacattctaagacggttcctgcaaactgccttagaatgtgcgtcctaaaaacagctccttttagtagtggccatgtcctatctggctgcatcatgcaaagcaagaatctgagtgtctcactagagagatctcaacacctttagggtaccacaagtcgacatgtaaggttcctctaagatacttcatag

SEQ ID NO: 272426 - DNA, 435 bp, Glycine max
  unsure (1)..(435): unsure at all n locations
tatacagcctangatgtggttntgtgactaaattcaatttagacacaagtcttgcacttgccacattggtacaactccctccatcaatgatcaccatgcaaactttgccattgatcaatcatctagtgtggaaaatgttttctctttgagtttcctccaaagacttcaattgatggccaagtaaccgcctaatcatcaacaattcttcctctagtgttttctccacttccttctcatcatcctcactctcttctcccttttcaacttcggactcactaatgtactctccatctctaagaaatcatggctttcttgttagggcattcatatgcataatgtcccaagccttggcactgaaaacacttcacatcccaactcttttttgaagactgttcttggaattttggaggagttttcgatggtataggtgttgca

SEQ ID NO: 272427 - DNA, 120 bp, Glycine max
ccctcatatcatttatcccgcgtcgcaccctccgctcctgcaccctactccctactagattatctccgcccgtcctatcccagcccgtcgtattcattatctctttgccccctgaacccg

SEQ ID NO: 272428 - DNA, 393 bp, Glycine max
  unsure (1)..(393): unsure at all n locations
agcttaaaaaaaggaagacacaaatcgaatgtgatttactagtctcaatcataggggatcctttctcataattagccacttctagggctttaccctctccaacaccgtgtcacctactttgccatccttgactcacaccatgtcaatagaacaagtagaatcatgaaaaccctccattttgtgacttagtcagaaaacctttttcatttgtcagataacccccttccgtattgacctgccttatttgacatctccaaaggatcttggtcttgatcttttatgaggagtcggatgtcacatgtctttgtgacgcaatgttagcattcttccacctatncacatctagatctgagaaaagacaactcacatctaacaaaaaaatgaaaccttaaa

SEQ ID NO: 272429 - DNA, 453 bp, Glycine max
  unsure (1)..(453): unsure at all n locations
ggtaatagtcatctacatatgggtcattactatgagtcacagcatgttgcattctgagaatgctttctattgcatcacttgtcatatacttggaacgaaactgaaatgaaccactgtcactctcttggctaccggcatcagaaccatgtaaggaaaaacgaagactatgtttacctttatgaagtgattttgatctatgatctctaccatcggcgattccatgcatatgttcatatttgctaattacagatgagccagaggaagggtggggattgaataaatgggactggaagccagataagtagcctgcagatcgctgaccaggatgatgcagtctatgctgctgctgttgtaatcgagccatcaagtgatgagataccgatccattatgaaggtgtaattgttgctgtaacatattattaacgagatntgaatgatctccatgatacaacc

SEQ ID NO: 272430 - DNA, 437 bp, Glycine max
  unsure (1)..(437): unsure at all n locations
agcttganattgatcaacagatgctctcgagaaattcaaatggtcataattggttacacggaagtccgattcatgcgcataatatgccgagacgctcaaaaatgagcaacggaagctctcgagaaattcaaatggtcataacatatcacacggaggtccgattccggcggatagtatatcgagaagctcggaattgcacgacgaaagctctcgagaaattcaaatggtcataacttttaaaacggaagtaagattcaggtgcataatatatccagaaagttgaaattgaacaacggaagctgtcgatatattcaaatggtcataacttatcacacggaagatcgattcaggcgcataatatatcgagacgctcgaaactgaacaacggaagctctcgagaaattcanatggtaataacttttcaaacggaagtctga

SEQ ID NO: 272431 - DNA, 452 bp, Glycine max
  unsure (1)..(452): unsure at all n locations
tgcctagcccctngatatattcgagggactcatggtcactatgaatgacaaaggccttgtgataaaggtagtgacgccatgtcatcaaagcccgcactaaggcatacaactccttatgataagttgaatagctaacggtaggaccacttaactcttcactaaaataagcaattggatggccttcttgcatcaacacagccccaatcccaacatttgaagcatcacactcaatttcaaaagatttttgaaagtttggcaacgcaagtatgggggcattagttagctcttgcttaagaacattgaaagcttgttcttgtttctctccccatttgaaaccaacattcttcttgagcacttcattgagaggtgctgtcaaatgtgctaaaatccttcacacatcgtctataacaacttgataagccatgagaactcctcacctcggtcacagactt

SEQ ID NO: 272432 - DNA, 71 bp, Glycine max
agcttataagaacaaaattgccttaatcatttcctaatatgcatgtgaatgatgacgcatcaacaagaatc

SEQ ID NO: 272433 - DNA, 56 bp, Glycine max
actatgaaactaagctatagtatgcgcgagtcattcatccctatgagatgttgttg

SEQ ID NO: 272434 - DNA, 106 bp, Glycine max
  unsure (1)..(106): unsure at all n locations
agctntcggcgagctggcactcggcctattggttgatttccaacactgtgggagctggctcgngcggcgactctactcaactcctccctcgaaacagacgtcgtca

SEQ ID NO: 272435 - DNA, 117 bp, Glycine max
agcttgtctcagcatttatgcgagacagagaccatctatgctagctatcatcgccaagtaccaagaagagttaggtctagccacagcccacgagcatagaatcgcggacgagtatgc

SEQ ID NO: 272436 - DNA, 131 bp, Glycine max
ctgcctcacagaggtccaggaaggacaaggcggccgatatgaactagttccgccccggagtacgacagtcaccgctttatgagcgttgtacaccagcaccgctttcatccatcaaaggacggtctgttttc

SEQ ID NO: 272437 - DNA, 431 bp, Glycine max
  unsure (1)..(431): unsure at all n locations
agcttggagaggatgctntaatggacgaaaagaaagatgcggagaaagagagaggggggagcacgaaattgaacgaagaaaaaaagggagagaagttgaactttgagttgtgtctcacaagactctcattcatcaaagttacaacaagtgttacacatgcttctatttatagactaggtagcttccttgagaagctttcttaagaaaacttccttgagaagcttctttgagaaaacttccttgaaaagctagagcttanctatacactcccatctaaaaactaagctcacctccttgagaagctttcttgagaagctagagcttatctacacacacccatctgaaaactaagctcacctccttgacaaaattcatgaaaatacaaaaaacagtccctactacaaagactacccacaatgccctcaaataca

SEQ ID NO: 272438 - DNA, 460 bp, Glycine max
  unsure (1)..(460): unsure at all n locations
tgtgagcatcgaacgaacgagcgaganaagcaatgaacgagagattttatcgtaaatcgtcattgtttgtgcagaatcgtagagtcgtaaatcgtaagtcgaggatgatgtagagcgaaagcactgatgtgtaaacctatcctcaatctttgtttgtgatgctcatttgggtgtaaagttaaatcgtcctatcgcatgtcttttttttctatttttacatcatatccctactccctatgcctttttgtttcaagcttaacgttgttatgtgaatgaaatagagaaaaacaaaagacagaaagaaaaaaaaatactatcatttaaatagataaataaataagaaaaaagaaactaaatttcaccttatttttaggtggaattgttaaaataaatacttattttaataaaataagtaattctctgtttttaagtgtgtttttttacaatggttcttcttaaa

SEQ ID NO: 272439 - DNA, 422 bp, Glycine max
agcttttcaaatgggtaaaaggctcacattcactttcttctacatcatattcaaacttgtccaaataaataataaagtcatctcgactcagagaaagtcatataagtctcatacaattaatatagaacctatatcctaatgtcacatcctatcagagccgggtgttcccgtgtcctctagcatgaggttcttcatagtcatccacctattcatctgctcccccgaacacaagttcaagatcatcacaggatccaaacacaacaacacacagggagtgagttatcacattcctagctaatagagaaacaagacaattaaatatatatattatataaatgagatccacttgcttaaacatagctcacgtaactctaccactgcgtcattcaaaattcgcttttcattatcaatcacattacaca

SEQ ID NO: 272440 - DNA, 450 bp, Glycine max
  unsure (1)..(450): unsure at all n locations
ggcgccaatctaacaacttcctttaggcttcatctagttaaatactaacacatattaggatagcagttattgtctcaataattctataaactacaactaagcaataagaagagtgtgcttgatatatataattaattttaacgtgtccaaccaaatataaagtagtccaagcttcggttggacatgtattcatagatcaacattttttcttcttctatgcagcaacctacaagctntacaagattagggtgccgaagtttgacaattagtgccacttcatttttgaactcatccaacccttgtccttgtaacatcccaatttttgtaatctatattaaaaaggagtgttatttataaataaatagagttttagaaaaatgatgagattctataaataaataaataaggcgatataattattaattaagataatgatttgagagagaataa

SEQ ID NO: 272441 - DNA, 403 bp, Glycine max
  unsure (1)..(403): unsure at all n locations
gatcttagatcacctgcagcatgcaagcttttgagatttntaaggtatggcttaatttttaatgattgttttaagtacacaaagtttataggttgtgattttttttagaattatttaatgtagaccgggtcatgtgggtcaactattgactcattgggtcgactgctaatccaatatcctgtctgagtctatgactgcgcaaagtttgataacattgggttagatacccagatccagtatctcaattgccatccctttacaaaattttcagcttttgcagggtcattgtgaaaggccacctccacctgaattcatcttgcaaagcaaacattcttggtcaatatttctcaagtatttccctttctctctctataagattacacttatgtctcttccatccctt

SEQ ID NO: 272442 - DNA, 435 bp, Glycine max
  unsure (1)..(435): unsure at all n locations
ntcatcattgttccncctatcactaacattagatcagttnttacatttatgatacgtttctacactctctctttctcctaaatttgttctcccttccttctctcccaaaaccttctcttttcccacatacactcaaacttgtcctagtaaaactacattctcaccgttgggatttaggaaatagtatcttttagagaaagacatgcccctcccacagagacagtgaaattgaagctcgaattccttcatcttctctctaacacttggaaactctagcagagcaaccagaggaaaagcttgaggaatcttangaaactactagagatgctactatcgctgctagactacacatgtgagccagtttataggttaagggatgagtttatcgaaattgnggttagaatgaacatgtgtacggatccttagaggatcaaa

SEQ ID NO: 272443 - DNA, 432 bp, Glycine max
agcttcttatccaaggctcatcttggtggtgaagctccttcttccatggcttattccctagtgaatggcgcctcctctcacctcttctcctttgtcttacgctacatctccatggtggaaaatcaccattaaaggaccccattgaagctcaaagatctagcctccatagaagccccacaagcaagcttccatcacctaagggcgcatagaataaattcaaagcttcaaaaataaaaactaaccgatcgatgaatgatgaacgatgaagaatggacgaagaacgatcacgaaaacgctacggaagtgttacggaagcgtctcaaccttgattattcttcttctttctccttcatctcactaatttctctcaaatcttgttgatttcaggttctggacttttcctgcagccgatcatgcctagttataagaaat

SEQ ID NO: 272444 - DNA, 463 bp, Glycine max
  unsure (1)..(463): unsure at all n locations
tctaaactntatacaagaatgaagctctgataccactttntagacaagtggcctcagaaatcttaagaaggggggttgaattaagatattgcaaactattcccccaattaaaattctatttcactttcaatgcaagttacaaattcccttaaaaataaactcttaaataatgattcaaatagaacaatctgaatataaatataaagcaataataaataaaagattttaagggaagagaaagtgcaaactcggatttatactggttcggccacacctttgtgcctacgtttagtccccaagcaacccgcttgagagttccactatcttgtaaaatccttttacaagttctgaacacacaaggacaatccttcctttgtgttcataattcttttacaacaagagaccctcggtctctcaatcccctttgagaatttagaaagaagagaagaatgaatctctcttg

SEQ ID NO: 272445 - DNA, 451 bp, Glycine max
agcttcacaacatccaagcaaaacaacattcaaacagcacaagctatcacagccaagcaaaacagagcaaaggcagaaaactctgctcaacacatcaaccaaaatcacagcttttctcacttaaagaccccagtaacaattccttcgatccaattcgttaaccgttggatcgactccaaaattttactggaagtctatagtgtataagcctacattgtgaccgttgggatctactagcaaacatccagaactcattctgcactagactttccacagccaaccacacacaagcatttttctgcacttgtgcaaaatcctgctgcacaatttcacagcaaaaatctgcacaaaatgcaaatttcgaaaaccacacttcccctcatccaatcttgcccaaatcaaatcctacaagtctcaaatcatgtatcaatcatgtctaaaccaaggtcaa

SEQ ID NO: 272446 - DNA, 460 bp, Glycine max
  unsure (1)..(460): unsure at all n locations
tccgttcccgagagcatctcttatttaagcatttcagcctttgctttcttgtagcttatgaaaaatgccatttcttcttctttctttcttccaaatccatttctaaagttccaagtactttctccatcacccacatccaccattagccaccacaaaccatcattgttctccattgaaaacccacaccgagaggaacccttcaaccgaagcagaatttccaacttggcttgcggtttcggtagagaacgaaaaccctaatctgatctttcgttttctttcgaggtaatcatggttctatgattgtttcttgttagtttcatcttgtctttgcatcttttctgactttggaactgccattgcttgtcttatgcttcctttgaaaaaccttagagaaagagactntgtaaacattatcctttcatgaaatgcatgttattttcgtaacctacactgaaccccg

SEQ ID NO: 272447 - DNA, 377 bp, Glycine max
  unsure (1)..(377): unsure at all n locations
gcatgcaagcttgaacaactagtcttctntgtcctactacaccactgctgactctgatacaacatagagatttggtgcttacctcgcacactaaccaaaactagatcatcttagagacacatatataatctcaatacttaggcttttctttcaagatgttcaaggtgtgaagggagcatcctacataatttcttttaatatgagcaacatagtttgatggaacatatctccaaatcatatgctatatatcggtcttcttcaacaagtatatgtagctttgtcgtgtccatgtaaaacaattggcaaacactataaccagtacaatgagaccctgtcggccatcatcgatcaaaaatttcttaattgctctttatgtg

SEQ ID NO: 272448 - DNA, 439 bp, Glycine max
  unsure (1)..(439): unsure at all n locations
tataaaactaagcttaaggcaatccttctcagttgatgtccacttctacatctattccatatgctgagtttcctacttcaaatgctactgtcaataatacttctaatattgcttcaaattctgatgttacctcttccagtagtgctaatctttggcatgctangttaggtcatcctaatgagcatgtaatgaaaattattctcgaatagtgtaatatttctcaactgaataaaaacatcacagagttttgttcctcttattgtatgggtaaagctcataggttaccctctcacggctcaacttctgtttattcacctttagaattcattttcactgacctatggngaccctcccatgttacctcttatgttggctatacatattatgtttccttcattgatgctttctctangtataaatggatatttcctataaagtc

SEQ ID NO: 272449 - DNA, 434 bp, Glycine max
agcttggttaatgggaaggccagatatgggtggagtgacaaaagttatagtttgcttcttaaagtagtgcacgatatgcttctagaggaaaacaagttgcctaaaagttactatcaggccgagaagatactgtatagacatgaatttcaagaaatgcccaagtgccctaggtgtggggtatcacgatacaaagtgaaggatgatgcggagtatattagtcatgaaaactcaaacaagggccccccagtgaaggtgttgttgtatcttcccataattccaaggtttaagcatatgtttgctaatagagacgatgtaaaagaccttacatggcatgcagatggaagaaactgcgatggaatgctccatcatccggctgattcctcccactggaagaagattgatcgtttgtatccagatttcggcatagacgcaag

SEQ ID NO: 272450 - DNA, 448 bp, Glycine max
  unsure (1)..(448): unsure at all n locations
gggtcttaattataaaaagatagatgcttgtccaaaacactgcatgtnngtattgggagatgatgaanaaagtttggatgcttgtaagcattgtggtacatctagatggaaacccaacaagaagaagaaaatagctgcaaaggttntacgttactttccattgaaaccaagattgcaaagattgttcacatgtcgtaagactgcaaaagatatgagatggcatgttttggaagacaataaagatgggttgtaaggcatccaagagatggagaggcatggaagacantttgattaatccatcctgagttttcttcagatcctcgaaatgttcgtttaggccttgctactgatggttntaatcctgctaggaccttgagttctacctatagcatctggtcnagtttcttaattccatataatcttccaccttggatatgtatgaaccaca

SEQ ID NO: 272451 - DNA, 446 bp, Glycine max
  unsure (1)..(446): unsure at all n locations
agcttactactcctaaagtgaaatattntgatattaccggtgagatattttaatttgatgagtatatttcattagcaagcttatacgactcaaccaaaaaaaaaatagctagcttagacgtatttaaatgaagtgaaaatgtctttaatttttttaaaaactttcgattaaacttgattttgatccctatatttttaaattgatgaatttagttcttcaagtttataaaatatatgactttaaccatttntttctgactaanagtttaggtgaattcaattttgagaaaattgaattcatccacattcttattaaccgagtttatttcttatcaactagactaatggactaactcttcttgatatgtgaatttaatcattcttttaactctgttgtgttaaaaaaaaatcatcactaaataataagtttaaatgagaagagaaagt

SEQ ID NO: 272452 - DNA, 435 bp, Glycine max
  unsure (1)..(435): unsure at all n locations
tttgtcaaataatcgattacaagcttctcttaattggttataaggcttgttctattagaaggaaatntctagttgtcaatttaattgattacagttgatcataatcaattatattgttctttaggtaaacccaagtcaaataagaatattttaatcgactacatgctcagtttaatcgattaaatattntatattacaagacttttataaatagttggcctttcattgagtctttaagcttccaaatcattttctattntcaagacttatcttcgttgagaagggttttaagctgaagtaatggagatcaacaagattcacatctttgtctaaaagatngaagactangctaagtcttgtgttcaatcatgtgctaagaagaattaaatcactatgaattggtgatctctttcatgaattgattctaaaaaaaat

SEQ ID NO: 272453 - DNA, 438 bp, Glycine max
  unsure (1)..(438): unsure at all n locations
agctntaggactcngcccccattccttatattcagaaataatatacaattcaagaatttctctttgtcccttaatcatttctaatttctcaaatgggcaatgcagaaaatgcttatttcaaacatatccaatatccatctcctcaaacaacctccaaatgttcttaatctccaaaagtttaggtaactaaaacaaaggatattttttaatatgaagatatgaagaaaaattgagattcctatcatctagaataaaatcgaaaatagggtgtgcgagcatgtttgcacgggtggacagacattacaaatatctcacgacttaacttccaatctgttaaaagattgtaagtcccatcataaatcacatgatagtcttttgataaaagaatctaatctttaaatgcttctatttgatgagaataataatacgtacagatag

SEQ ID NO: 272454 - DNA, 444 bp, Glycine max
tatgcacggaaatgtaattatgaaattgagatgctcgaagaaacaccatttcctagttaaccatgcattatgtaccatgttcaattattttgttttgttgttgtgtgttttttttttagaaatgggtttatgatcccaacatggttggctcatggtgcctaacacatgcaactaagaatgtagtgtgaagtttcacgcttccccttttttttgtttttgttttgtagaggaaaacaaatggtatgcaattttgcagattaaaaagtttgttgaacgcatatgcatgatgatgccatgactcatgcaaaatgtgaggctggaatatgataatggacaaatgcacgaacgatatgtttatgatgttatgaagagatgcttatgcgatgcatgatatgaacgcattctactgacacgagagcccagaaaattatctcttcttacttg

SEQ ID NO: 272455 - DNA, 436 bp, Glycine max
agcttagagatatgaattcctttctcttgaactaatacatgtttgaattttagttttgccttccaaaaaaaaagatgtttgaattttactataatattacatagcaatcttgtacaaatttgttgaataatatgaagatttcatatttaaaatgatgttcatgctatttgaaaccctgcaattgcataaattagaaacttataggcagaaaggtatgatatgaatagtgttgtaattaattttaaaaatattgagataaatttatgattgtagcgcacgtaagtaaagaaatagagaaatgaggttccgcgaagcaagaatgaaggcgtacgttgtcgcgaagcaggagaggaaggttccgcggaggaaaaaaaaatgatgaaccagtggtgaagtgtgtagagagcgttagagtgagagtgatagtgatagtgat

SEQ ID NO: 272456 - DNA, 454 bp, Glycine max
  unsure (1)..(454): unsure at all n locations
ggggagatnggtttctgatattcgatctttagagaaatacccacaagaaaaataatttagcaaggcttcaacaacaccactaccgataaattcaaaagtagatacactatctcctttgccaagttcctttagcatgtcagatatcaccccaatcaaatactcttctgtgttactagaattatcatccagaccaaatccagaagctttaactcttccctttgccttgcttctttggtcatcaacaccagtgatcaacttcgtgcatagatttttcagatgcaaaagatcatcactaacacccacttcaacagacccaggatcagaaggaaagtacttgtctttaaaagctctagcaactgagctaacagatgcacggatactagaattagttgttggagtttctacagaacttggtggcaaaccaacatttactggaactggactctttaaatca

SEQ ID NO: 272457 - DNA, 432 bp, Glycine max
  unsure (1)..(432): unsure at all n locations
agcttgccttccaagaatgatattgcggntatcatgtacacaagtggtagtacaggtctgccaaaggtttgtttcttcgtcaagttttgttaaaggtgtccctttctgtgtgtctgtgaatgtataatctcttattcatatttgcgatttgatgcaaagtgcttttgtccacagtcatgcttgtgaataatgattttgggtgataaaatatcaacaagaaccatatcaagacattgtattaatataatgaaaattttcttgtctgcaacattgagaaccaataggatctccctcagctcagttctatgattccctttgatttgacagggtgttatgattactcatggaaacattgtagcaacaacagcagcagttatgacaattattccaaatcttggtagcaaggatgtgtacatggcctacttgcccctt

SEQ ID NO: 272458 - DNA, 392 bp, Glycine max
  unsure (1)..(392): unsure at all n locations
tttatgaagctctagagaagctcatcagctgctcgtaaaacgctgcccacctttcgtaaccgttggatcttctcgaactttgtcttcaacttcacaagacacttgtccataatctgaccgttgagatcttcgagaagatgtatggagtgtggtagaagcctcttaatgaagcttctggaggaagcctcttaatgaagctnttagagaaaatacatgcagctccctacgtaaacacgctgcccagcctttgttaaccattggatcttctcgaaatttggtttgcgacttcacaagacacttgtccatgatctgaccgttgctatctctgagaagatgtctggagtgtgctagaagcttccgttcccgagagcatctctttattaagcatttca

SEQ ID NO: 272459 - DNA, 351 bp, Glycine max
aattcttaatgatttttttaagcacacaaagtttataggttgtgatcttttttacaattatttaatgtagaccgggtcatgtgggtcaactattgactcattgggtcgactcctaatccaatatcctgtgtgagtctatgactggccaaagtttgataacattgggttagatacccagatccagtctttcaattgcccatcctttacaaaattttcagcctttgcacggtaattgtgaaaggccacctccacctgaattcattttgcgaagcagacattcttgtcccatatttctcaagtatttacctttgtctctctagtaagttacacttatgtctcttccattccttt

SEQ ID NO: 272460 - DNA, 414 bp, Glycine max
  unsure (1)..(414): unsure at all n locations
ntcatcattgttccccctatcactaacattagatcagtttttacatttatgatacgtttctacactctctctttctcctaaatttgttctcccttccttctctcccaaaaccttctcttttcccacatacactcaaacttgtcctagtaaaactacattctcaccgttgggatttaggaaatagtatcttttagagaaagacatgcccctcccacagagacagtgaaattgaagctcgaattccttcatcttctctctaacacttggaaactctagcagagcaaccagagganaagcttgaggaatcttaagaaactactagagatgctactatcgctgctagactacacatgtgagccagtttataggttaagggatgaagttatcgaaattgcngttagaatgaacatgtgt

SEQ ID NO: 272461 - DNA, 641 bp, Glycine max
  unsure (1)..(641): unsure at all n locations
cccgtcatccgnctcangctccancacnanacnntactcctcgcacccngctcctttactttactgcttgnatccgtgtttttttatanccttcntacttcactcnntnnnnncctcgcccgacgacntttagagaacccttgctgttgctactcctgctccgtagcngccgatactctanagtctacatgctngcatgcaagctctctcggagccactttctgcgaaagcaaacattcgtaaagatatttttatcagtgggacactactcttacaacaaaaatgacatacaacctcctctcataaatacaaacatgaatgttaatttagagcaagcttatgcgcctattttcctacgaacgttcacttgcacaagacatcctattaactaagaaaaatgcacccctataccacaacaagcggcctccttacctagatcatttacatgtactttcaaggtgtatctgttatttacatcacacatgcctcctttggtgaagttacatacatgcctactccaagcatttgtgggtaccaaaaacagcacatgccgtcattttggttctttaatacctatacatatacacaccttatgatgaaactctccttccttcgccattaagtggtacatttattgctcn

SEQ ID NO: 272462 - DNA, 586 bp, Glycine max
  unsure (1)..(586): unsure at all n locations
tctctccatcaactgtcctcttgtcctaacttatatctcatntacttattacttaannttnaaatttctttcagccgcggnntttgaagcctntatattgtgaactctctaacaacacactttactaatatactttaactcctatcttatatcggaggcttctaactcttatatatataaaccactttttattcctaatcaattagtaaatggcctacatcaccttntcaaatcaatcaagagtggattacactcttagaaattttacacctttcaattacttcaataattcattttatcaaatatttactaaatcaatagatatcattattcaatttttaattataaacttttcaactaattctatcgaatataatcacattttctaccgggttagagagtaaattgtgacagtgttagaattctcttttgcacacctcaaattgattagccatagttaccttgtgtgtcactgaagttaaaccaaacacatactctggttgcttctggtgcatcttaaggtgatattttggtaaatataatcacctatgtaatccaagttgacttaattcggtacgcaaattcg

SEQ ID NO: 272463 - DNA, 424 bp, Glycine max
agcttggctccagccacgcttaagcttgaaaacctattgcccattttcacctgcagatcatctcacttaggcgcaagtaactcttcggttagatgccgcaacctctaaaagctttgaaaaagtagttattcactttcaatggcttacaaatcaacccacatggggtcctaaccatcttaaacatgtttccccacactaaatactcgaaacaacaacaatttacaagttctaaacaccttgacatgaaatctacaagaaaatgaccttaagtgttggtttatggagaactaacttcctacgcttctataacacttctaatgaaggatactccataaccaaacaagaataacaagagtaaggatggactaactcctacatacctcagttggtgcatgacaatggtgaagaatgaaaggtttgattg

SEQ ID NO: 272464 - DNA, 445 bp, Glycine max
tgttcttgattgtttctaagttctttaacaagctgtgaacaatatacttgcccttcatttaactgtctctgcgcttggcggtcacgctcaacaaagtactttcgacacctactgtacgttgatttgaccaatgctgttatggcaatgttgcgacaatccttcacaaccttattgatacattctgagaggttggttgtcatgtggccatatcgacatccttatgtatcataagccatcatccattgttccttcgaaattcgatcaatccatgtggctatggctggactcagctcacgacattattctaaattgtgatcaaaaatgtgcttgcaatgagtgtaggctgcataaaattagttatgaataacatggataagtatatatgaaaggtaaataaatgggaccatcaaatatgaaatcttacccaatttcttcaacatgtctt

SEQ ID NO: 272465 - DNA, 411 bp, Glycine max
  unsure (1)..(411): unsure at all n locations
agcttagtcctagaggggatggaccttttcaggttttggagaggatcaataacaatgcctataggttggacctcccacaatagtatggagtcagcaccacttttaacatttctgatttaactccttctgccggtggagctgatattgaggaggaggaactaacagatttgaggtcaaatcctcttcaaggggaaggggatgatgcaatccttcctaggaagggaccaatcactataaccatgagcaagaggctccaagaagattgcgctagagctgctgaagaaggccttacggttctcatgaaccttanggtagatttctgagcccatgggccaaggttgggtccaattatctctgtacatattagactacgatgtcattatatttggtccttgatatagggctcatatt

SEQ ID NO: 272466 - DNA, 416 bp, Glycine max
tccattgttcaatttcgagtgtctcgatatattatgcgcctgaatcggacctccgaatgaaaagttatgaaccattgaatttctcgagagctacctttgttcaatttcgtgcgtctcgatatattatgcgcctgaatcggacctccgagtgaaaagttatgaaccattgaatttctcgagagcttccgatgttcaatttcgagcgtcttgatatactatgcgactgaatctaacctccgagtgaaaagttatgaccatttgaatttctcaagagcttccgttgttcaattttgagcgtctctaactgtgatgcgcctaaatcagacattcgagttgaaaagtatgaccatttgatttctcgagagctttcgatgttcaattttgagcgtctcgatatattatgcgcctgaatctga

SEQ ID NO: 272467 - DNA, 448 bp, Glycine max
  unsure (1)..(448): unsure at all n locations
agcttcagtggcttagtgaagatgaagaggtaaaagtgactcaacaggttgaggtgtgtctcaccattgggagatataatgacaaggtgctgtgtgatgtggtcccaatggaagcgacccatgtgctgttaggaagatcgtggcagtatgataccaaggcagtgcatgatggcttcaccaacaacatctctttcaagcaagctgacaagaagattgttctcaaaccgttatctcctcaagaggtttgtgaggatcagataaaaatgagagaaaagaaaaagagtgagacacttgagaggaaaaagagtgagacacttgagaaggaaaagtgaggaaagaaaaagagtgaaacacttgagagggaaaagagagaaaacaaaaagagtgaaacacttgagggcaaacagctntatttagcaacaaaaagggaggtgaggagggtgctttg

SEQ ID NO: 272468 - DNA, 443 bp, Glycine max
  unsure (1)..(443): unsure at all n locations
attaaccttgactcggtagaacctcttgccggtttgatttgttcccatgcttgctaaagtgagacaaaagctggtgcaaatcaaaactccgatatctcatgggtggaatggatgaatgcatgaaggaatgcatataacacagatgtaatctaagaatgcgggggtccggggaattcgtccccttcttagacacaatgtctaggggtagcaaagtgccccaacgtacgtttttaagaaggcgacacggaccctccgttggtttgtatacagaatggatcaagacagaacccatatgcgatgcctatgcaaaagacacaatgcgggaatgtacacagtatgataatattcactgaacataagcaaaagggtatatgatacttatgcatggcagtgtaaaaatggcacgcagcgtgtttgctccgtgcccctatntaatggaccta

SEQ ID NO: 272469 - DNA, 319 bp, Glycine max
  unsure (1)..(319): unsure at all n locations
agcttccagatccatttcaggctgcgctagcatcagcactggcattatctgttggcgttttggcgccaccgatagctgctgtgtttataaggaatcacaagattagaatgggagttgttgctgctgcggttagcttggcattgttggtgtttggaggagtaggggcagttcttggaaaaactccggtgacaaggtcttgtcctatggttctggttggaggttgcatggctatggacataacattnggcctcaccaaattgatcggctctgttgatctatgaatgtgattgtttactagtcattcaagtacactcccata

SEQ ID NO: 272470 - DNA, 444 bp, Glycine max
  unsure (1)..(444): unsure at all n locations
tatataagtaattgagagtgttgtcagagaatgatatatcaggtaataatttataatatttgtcttgtgtaaagatataatacattattttctcgtcactggtaaaaaatattattttcttgcccccactaaacaaattntctagatttgttgttgacattcacgaccatgtcctccataatgggaagagtgagagacaagggcaaaggaatccttcgtataagtggaagaggaaccaaagttatgtggaatggagagacgcaatatctgctcctaaattaagtcttatgtaagaaccatgtgaatcgataaaaatatgactacagactgattcaaggtctagtgtgagtccaacaagagcgaccactatgaagaactatccgcgttatttgtaaaaggtcactgcatcggttgtagaaggcataagagtggaatattccgcac

SEQ ID NO: 272471 - DNA, 413 bp, Glycine max
tatgttggaaccattggccacatacactatgctcttgctttctcacggcactcacgacaccattacaacaatatcatcaattggttttgtcctcttcatttttataaacgatgtacagatggattttgggttgataactacgatgggaaagagggcatggaccattgccatatcgggattgctattacccatatcttgtgccttttcaatgattcgggtgttgcattggtctcccacaccgtaatttcatttgcggtcatttcttccctccttagtgaacttcaaatccaaaactccgaacttgggaaattggcattatcttcagcattgatcagtgacatattgtgcacaatcgctaccgccatcggcactgcagttatgattactgagaattctaatgtcaaagatgttat

SEQ ID NO: 272472 - DNA, 442 bp, Glycine max
  unsure (1)..(442): unsure at all n locations
tgttaaccatttcaagcaactgcatgagagtgagcacacganaatgatgaaccagatagagtctgctagggggagcaggagggtgaagttggtggccaagtattctatgaaaatggaaaagtataagaaggctgcaagtgatattctcactcccaaagtggggtacggtttggcggatgagctcaaacgggctggtttttgggttcgaacagtgtcggataagccacaagctgcagatcaagcactgcanagccacattgtggatatcatggatcatangcgggttgagtgtgtggtccttgtgtctgatgattcctgatttgttgatgtgataaacgaagcaaagatgcgatgtctgaagacgggtgtcattggggatattgatgaacgtttcttgaagaggactgctgatactgcattntcttgggaggaaattctgatg

SEQ ID NO: 272473 - DNA, 446 bp, Glycine max
  unsure (1)..(446): unsure at all n locations
agcttctcccataagttaaaattagctttcttaggagttaaataagagattttatatatattagtttatggataaactaattttaacttatgagggaagattaatccattttatctttctattttgttattttataagtgctcattgcgaagcttacccaaacagagccatatctaaaatctaatgcattctctttgacatgtntaatctcaacttctggctcacttgcgtttctcaatttttgcagtgtagctcatccatacctgcttgccgataatcgccattaccctttttatctttggaggaaagttatcatggctcactggccaattaaatatcttttagtcccagtttatatatgctcatggctctctatgatccacatgttgggttagtacatagacatactatgcattcgtgtttgattcaactgcttgtgggattat

SEQ ID NO: 272474 - DNA, 544 bp, Glycine max
  unsure (1)..(544): unsure at all n locations
acacccttgataacctgtattcatctacttccacangtcgtagttanactatattgatatgacttattcttttttntagcagaggcatgaacctattgttgcatctacccccccctttaaaactttattcttacaagcagggggagttttatttttccaatttaccctaatgattaatagggggacccacttccgagacaatacagagttgtagagatatatattttacacccttcaatagctttcaataactattctatctcaaattaaaaattactagattgatgattcaactgttaaatattaactttgcaccaatttatttgatataaatcaatctctaaccggtgagaaagaaggatctaaagcgtttgaattctcattcccacagactccaatatgacaaagcactatctacctctgcgtgtgtcttaagttaaaacaaacacatacttggctggctatggggcgtatatggggaaattctggagtagtatacacacccattgttatccatagctcanctatttggcacccaaaatgc

SEQ ID NO: 272475 - DNA, 614 bp, Glycine max
  unsure (1)..(614): unsure at all n locations
ccactactcgcncttcgatcctcaccntactctaccgctctctaagtactgcantcttaatatattatntnnnnnnnnnnnnnacggaagcggattggaacgatctcgtgcacacgatctctanancganatctctgcagcaaccttcagatccatatcatgctgcgctaccatgattactggcatagtctgatggaggactggtgccatcgataggtgctgagttaataccgaatctctatattataatggcacttcggtgctagaagcggttagcatagcaaaagttggagcttggaggataaagggcaccggctgtaataacacaccgtgaccaatgtactcgatcatagttggtcctaaaatgagaggtgtgcgccggcctagcggaccctttccaataataactttacttaattggacatncccagaaacacacaaagagcgatgcatttttgaatgtgccattgcacacaaaaccaaggaagtatacgaagcaactgcgagttgcatgaaacacaaccccaaaaacatggtacgaaatggttggcgaaagtatacataccgagacaaagccgctcacttctctatcccatatttcgtatctgcacccc

SEQ ID NO: 272476 - DNA, 478 bp, Glycine max
acactatctaatactcatgcttaagaatcactcactgagaattgtatacccaagtcttaattggaatatatatatatgtatatatataagtgccaacacatcatcatgcatgtgcacacatgcaagaggaagagatgtcatttcatatagtttgttaaaataagaagtcagataccatgaggcccggaaataccacctggattccacatactcacagttgccactcaccacaactcacggcttaaattatcatttttttaaagtgtgatctacaccttttctttttttcaattgagatgtccctcacatcattagcttgcgtcaaggaaattagttctcttatttctgcctccatacttttaggcatcttattcattattctcgaatatattttcaattaaatgacacgaggagcataaaaaataataaaatgcaccaaacataataattcgatggtatacacgtgtatgtgtacatt

SEQ ID NO: 272477 - DNA, 438 bp, Glycine max
agcttataaatttgttggttgttgatctgcatattatctacccagtaacaccctattttttgtaaaataaataaggatgcatagttttattaattaaaataatggttttaaggtaaataaaataaatatgtttttagaaaataaaaaggatgttttgtttatttatttcaatagggagtaaaatagagctctctttcaaaattgttctcccttcttcatctccaaaaactctctctttttaccgcatacacgcaaatctatcgcaataaaactatgatcctagacttgttaaccattgaatcatcctgaaatttggacaccaccttcaaaactcatttttgcacattcctattgttgggatttgcaaaataatgtctgtagagagagaaattcctctcgcacaaagatagtgaaattgagattataatcccttcacct

SEQ ID NO: 272478 - DNA, 439 bp, Glycine max
ttctttgagcaaagcaaaggcttgctcttgtttttcatcccaggtaaatgccacattcttcttcaccaactcattgagaggtgatgcaattgtagagaaagtatgaacgaaccttctatagaagcttgctaacccatggaagctcctaatatctcctacactatttggggtgggccattcttggatggccttgattttctcagggtccacttggatcccatttctaccaactacaaaacctaagaaaactatattatctacacaaaagttgcatttctctatatttgcatagagggtgtttttcctaaggattgaaagaacttgcctgagatgtcctaagtgatcatctaggctcctactgtacactaaaatatcatcaaaataaacaactacaaatctacctatgaaatcccttaaaacattatgcataagcctcata

SEQ ID NO: 272479 - DNA, 410 bp, Glycine max
  unsure (1)..(410): unsure at all n locations
tcttgtatttcttacggtgaatgaagacgttcgttacagcaataatatgagcgaggtgtgttgccctatatgattctctatacacgaagtccagatggacatatcgtttgctaaatacgatgggaaaataaggatggactcgtcgcatactagaatggctctagcccatattatgatcgattacaatgatgaacgagttacgttctctctccacacggngaattgtcttgcggccatttcttgactacttagtggccttacacacagaacttggaaataagaaagatgatctcctcctatatcatgatacgtgaaatagggagttaatatggtcagcttcggcactagtgaatgactagtgttaaactcaaggctgttatgttatataaagccccggcgatgatatttcg

SEQ ID NO: 272480 - DNA, 424 bp, Glycine max
tgcaagctcggacgggcctaaagacatatatatggccgttcttcattgtgatttgtgaatctgttacatttagtagagctctagttagaaaataatttctcggcttatattaaccacaaataaaccaaaatctgaagttgttaatgcacaatttcaataaagcttatagttcattttagcggagactcgcttttgtgtagataggtttgtggtcttaaggtcattgcaatacgcaaggcatggtgtatctttttgaattttgatatagcaattattcaaattagtttctctcttactttgtggctggctttttctttcccatttcatgcaaggggtacggcacaactgtgtaacaaattaagttccagcaaacttgcatgcatggatactgtcattgattataacatgcaacacgcaacacgca

SEQ ID NO: 272481 - DNA, 380 bp, Glycine max
  unsure (1)..(380): unsure at all n locations
ntacaagagattctaacaatgtcgtgaaatccctgtttatgcacctctngccagcatttttctccagatcccatattctcatgacctcattcttcaagtccagttgggcattaagagagatgagatgattggaacccttgccatctttggtgtccaacctctccttagattacttagggcacaaaccgcatcccttggaagtcctgcttttatgtacaaattggccgcaatagaataagtattccagtccatgacaatgtttggctgagtctccatctctttcaatactctttccactccaccaaaatcagacctcacaccataagaaattatacagatcctggtactgaagttgtctggcaagacttgtgtttgtttca

SEQ ID NO: 272482 - DNA, 421 bp, Glycine max
agcttaaatcaatcatcctatgatttcaacaaagttttgctacaaagttattcttgttcacttgtaataatttcatcgtcatgatttttgggtaggttctgccttttatagactttagtgaaggatccgttatgggattagtgttgagtccttgtgataaccattgtctcatagtgggagatgaggctacgcgacagtctttgattcgagaggaaatgagcatattacatacagcttcatgtgctccttgtactcgatgaaagcaacccatgaggaatattctacgtacaccttttattctcttatattctatcattttcttaaattcaaatgttaataattcaaataaagagagcccacctgaaattctatgagaaataatgtctatttcccttttcgactataacaaccttttcaaact

SEQ ID NO: 272483 - DNA, 238 bp, Glycine max
gaactctctaatttaaacaacctgcacttattttatacccagaagtttaacagcgagccttgtgataacccttaacagtagtccactcagaagaatagggccagggggcacataactgaacccaatgttcaaaattggccttttggatgctaggatttcaatgggatgaaatgattagtggacacccttaatacctcaagggagattgactacagtgagtggcatgtttcgtttctgt

SEQ ID NO: 272484 - DNA, 392 bp, Glycine max
  unsure (1)..(392): unsure at all n locations
agctttccaatgagccaaaagtaagtattatattttcattaagcttganagcttatctcagttcacacaccgtgtccttttctgttctcttgtcagtttttgcgcgtggaagtttgatttggatctttaaaaatcttacaccgtttgagtaaaactagctagttcgaagtttatttaaacttaaaattcaatccaatatttttcaaaaaggctggtttagatttttcataaatcggattgaaactggttttaattttaaacaagtttatggttcatggtttttatgctaacttggtctggtctctcctcttaatattcctcctccagtggacctctttcctgtcgtccgatggcaaacaaatatgcatgttctacaagtaagtataactaag

SEQ ID NO: 272485 - DNA, 446 bp, Glycine max
  unsure (1)..(446): unsure at all n locations
tgcaatgttccattccttctttaagggctgagttgagtggcaaatgtaattctgagtctcatgcattaatatccaggccataaattcgaagctgactagactttaaaattgaggagcataaagattcccatgtaagtatcactcaagctccaaggggagtatatttcataatggaaagaaagtcttgtggttcacagatagccagggcattttgctacttagtgcatctcatctcttatcctttatagtggatgagagattagttatatcccttttattaaagttaaaaacaggcccatcttgaacatgctattgtantttggtgctaatagctagctgtaaagaatgttcttgcaatggatatacatgaccaaatatgccagtcgcctaccaatcctgcaactgcctaatgaattggtaacttacataatacatacagattaaca

SEQ ID NO: 272486 - DNA, 417 bp, Glycine max
  unsure (1)..(417): unsure at all n locations
agctcttatgtatgaatttgttctttctattnnttttcggaaatntttttgaagcactgagatgaccatttttagaatgtgggaccaattttcaatttatgcttcttgattgattggttcataattattcttgatcactgcaaagaattatctgcaatgaatctactcttatttttgtttctttcttctgtagagacaagcttgatgttattaaaggctctgcacctacctctggcagtaacagtgacaaagatgatcataagtacgtttacaacttgacatgaaattttacttgagattttatagtttctgatacttggtttacttggacataacagtggggatcaattgatggaagatgaatctcacattgctctaacgagaacgaagaaacttgttcttgatggtgatttggaa

SEQ ID NO: 272487 - DNA, 438 bp, Glycine max
  unsure (1)..(438): unsure at all n locations
cttccctaattaanaattctaatttgattntaacccanaacccatgattcctttcaaaatgaattcctaaataattatgcaaattaaacttactgaatagaagcaataagcaataataaataaaagagtttaaggaaagagaaaacgcaaactcagatttatactagttcgaccacacccttgtccttacgtccagtccccaagcaacccacttgagagttccactatcttgcaaaagccctctacaagttctgaaccacacaaggacaacccttcctttgtgttcagattactttacaacaagagaccctcggtctcttaatcccttttcagaaataagatgaagagaagaagaaatctctcttgaaagagatagattgaacaatggaacactcaaaataattccttattgaattgaagtgtattggcaaggaattt

SEQ ID NO: 272488 - DNA, 451 bp, Glycine max
  unsure (1)..(451): unsure at all n locations
agcttgtaggattatggngtacccatcacatgtggtactaggtggcggtcgggcgatggtgcacaacaagttttccacatccacaatgcgcgcataaacccaccatcctctgttgcctacctccaactgagctcacgtactcccacgtagcccatatccttgtttctctcaacaccgggtccccatcaatcctcccaagcttccccaacatcaaagtaatacaacattcaaacagcacaaactatcacagccaagaaaacagagcaaaggcagaaaactctgccaaaacaccaaccaaaatcacagcttttctcacttaaagaccccagtaacaattccttcgttccaattcgttaaccgttggatcgactccaaatttttactggaagtctctagtacataagcctacattttgaccgttgggatctactagcaaacatccagaactcat

SEQ ID NO: 272489 - DNA, 422 bp, Glycine max
  unsure (1)..(422): unsure at all n locations
caatcactacgcatagctccaaactcgaaggtggaggacacatgaacgaaaacacaattcatggggctccgaaaaaggggttgagaatggagaattacactaagcaatcactactcatagctccaaacttgaatgtggaggacacatgaacgataacgcaattcatggggctccgacaagaatgagaatggagaattgcactacgcaatcactacgcatagctccaaacgcgaaggtggaggacacatgaatgaaaacgcaattcatggggctccgaaaagattgagaatggagaattgcactaagcaatcactacgcatagctncatactcgaaggtggaggacacatgaatgaaaacgcaattcatgcggcttcgaaaagattcgaatggagaattgactaagcaatcactacgcatagc

SEQ ID NO: 272490 - DNA, 610 bp, Glycine max
  unsure (1)..(610): unsure at all n locations
acctcacactcctccattcctatcgcacatctacatactgttgtngtttatacttcccttgtctactcattagccgcgcnatgactaccctggctcccgttatctatagagttacttgaacgcctgttatcttacctctgttcatcacaaccaactatactctggctcattagatatagtgtcattgtctctctctttctctcctccactagtctaatcgaacacacacctctgctctcagatatcaaccgctgctctcactgtatctcttcatatatagatcgtaaccactgtctcctgtacgtattgctggcaataggtgggggcaaatgattccttcgantctgataacgaccactatcacttaacaattatgtctttcacgggcgaatgttcaatgtgatcaagtctcttttggcctattgtttctcaattgatcaataacacctgcttttttttcgtctcttgattgattcttatgatctatggacgctagattacgacatgtgaacccacattcgttatgaaatcgccacacctaggttcaattcatctagtcataacacattacaaggtgacattctatgactaacattactcacaacctccg

SEQ ID NO: 272491 - DNA, 373 bp, Glycine max
  unsure (1)..(373): unsure at all n locations
tcccatgtgctacgctataaatagaaacatgtgtaacactcgtcataactncgatgaatgagaaacttgtgaaacacacttcaaagttcaatttatctccctaatctccttcaattaccatgcccctttctctctcattctcttcctccattgaagcttcctcctaagcttcttatccaaggcaccttcttggaggtgaagcttcttcttccatggcttattctccatcggatggcgcctcctatcacctcttctcctttatctttcactgcaactccatggctaaaaatcactattgaaagaccttattgaagctcaaagatccagcctccatagaagcttctcaagcaagcttccatcaagacaaatttac

SEQ ID NO: 272492 - DNA, 592 bp, Glycine max
  unsure (1)..(592): unsure at all n locations
ccacagtctctctacccttccactactatatacacacgacttcatagtattactcactgtaacattaattnattccntncccatcggcgagancttggagcacgtctcgttccgcgcacttgtatagtcccctgcacgcttgcaagcttgcaagattatggtgtacncatcacatgtggctctatgtggcggtttcccatagccttcacaagttctccgatncacaatgtgcgcattaacccaccatcgtctgcatctccacctccaactgagctcacgtactcgcatgtactatcatatcctagttctatcaacacccggttcccatcaatcccttccaagcttctccaacattcaagtcatgcaacatctcaacagcacacactatcacagtcacgataacagagcataggcccacaactctgccctaacaccaatcacaagtacagtttttctcacttaaagaccccagtatacacattcctccgttccaatttcgtcaaccgctggatcgacttccaatttttactggaacgttctaaacataagcctacgtttgaccgtcggatgtactgcagaatccaaactatcg

SEQ ID NO: 272493 - DNA, 286 bp, Glycine max
cgacaatcactcttttactctgacgtctgattgagtcctcgaatatgtctagacgctcgaacttgaataccgaagctctgagcacattcgaacgacaataactttttactcggatgtctgactgaatcccgtaatatatcaagacgctcgaaattgattatcaaagctttgagcaaattcaatcgacatataacttctactcggatgtccgattgaatcccgtatatattgagatgctcgaaatcgaatactcaacctctgatcaaattccaacgacaattacttt

SEQ ID NO: 272494 - DNA, 596 bp, Glycine max
  unsure (1)..(596): unsure at all n locations
tctccccgcatactctgactctnttcctctcgctcacgctagtgtacctntcactacatctgttntctantactataantncnnntccggacgcgccgttgatatctattcgtatacagcattctatgagtctacctgagcatgctatcatacctacacatcccctataatagcttagctcatcctctcaacacaaacatgataatacaaaacacaagtccctactacaatactactcaaatgcccgaatacaatgctaaaccctatactacctcgaatggccaaaatacacggcccacacgaacgaaatacctattccaatatttacaaagatcagcgggctcatacttacgccatgggctcgaactctacctaacgctcatgagaaccctagggccttcccttggattctctacgccacatctactctgcagttttctacccaatgcccttgcggttgaagattgcattcattcctccaccttggaaacgatatgacctcacacccctgacgctctctatactctcggctccttccctcaacatctcgtagaagacaacatactatgtatcactggtgcttcgtttgtcgaacc

SEQ ID NO: 272495 - DNA, 412 bp, Glycine max
tcagcttgatcttctcaatataggacatgcgtgatggccgttgacactataaccacttatagtgccatatgttggatagtcattaatggtacaaaaaaccattgcacgcaacctaaaggtatgctggagattcccatcccacacatctaccccatcttcccacaatgtggtcaagtcttcgatcaacggagtcagatacacgcctatattgatgacgacatgaccaagagcatgggcaatgatccacttgtaggacttggatgacctatgacaatggctagagcaaggaaagccaaggaagctcttcaaaaagtgttgtccatactatctgaatacaagcccaagtttcaaggagaaaagaccaaggttgtgagttgattatggcccatatggaggaggactaaatgactcc

SEQ ID NO: 272496 - DNA, 447 bp, Glycine max
  unsure (1)..(447): unsure at all n locations
agctccgtttaatctgacattctagtgtaaagaaagttaattnttttttagtttggtattaacataaaagttaaaaggagatatcaataaggatatacttttattactttttattatttttaatttaatatatatatatatatatattatgattttataattatttataaaagaaaagataaaaatattttcataactcaaatagagtcttatatattttccttttcgaaagctataaatattttttgaggaatattttttcattaatcaccttatttattttattgctttattcattaaatgttaacaaaaatatttcaacatttttatttagtttcgtattagattaagttaaataagatgattttttttaatatatttctttcttttcaaagaccaaagatgtaattaaaaaaatataagacaacgttgtaataatgttatata

SEQ ID NO: 272497 - DNA, 603 bp, Glycine max
  unsure (1)..(603): unsure at all n locations
ccctcactctacgctctcctcttnccctctctacactctctctactgtcattntcaantntgtgttcttannnnncatttttnnactcagtgcgcgtnatggcaccngttcatacacatcgatctggcaaccgagcacgctctaaactcgacctgcacgcattccatcttgcaacttgtacctatggataataaatgaatgtgataacctcataattcattatgaagtttcgctaactttcgaaattcagatacgggtcgtatctcatttcgaactggctgcattgaactaactactaataaagccctgttagcccttttagtatatgaactcatttgcaattaactccagccgaaacctaatttctgaaagaaggccacaagatatgtccaggcgactctgcctacaattacaacataaccaagaattgaaaccttcctgctacgacgtcagagcaaaatcttaattctgatctagaacagaataaccaacatagcatgcatcatctttgcttaccatagcaaactgaatactcttaagcttccttttgtaacgtaaaagtacacacactattactggcatactcacaacctaaactggacg

SEQ ID NO: 272498 - DNA, 378 bp, Glycine max
tttgctctacataatctggaccatgtatcattcatactggataacttttgacatgtgtatacacttattcttctttgatacgtgtatgaaattatgaactatatgaactatgtttcagtctgtcagaacattaaacaaactcgttctcctaaaatctctaatttcgtgtaggaggaaccaattccgtgtatgtggaaccaattccgaacctatttgcagctctctttctctcacgtattgcaatgatcatacatgtttacttccttgtatattggttgtacctctactattaaatgtgcggccataccagcaaaacttatgatacaaaatgatctgatcagacatgatattagtcacaatattatctattagtctata

SEQ ID NO: 272499 - DNA, 596 bp, Glycine max
ccccacacttcctctctcccatcacctcattgcactatcatttgtatcattacctatccctcctccgcacgcgcgcggatccctctgtgatctactatctttaccactatctctatagcgcacgctcgcctcccactctttgtcttatcacacatcgtctcgcttatcattaactgcatattagactggtcctgcaacttgcgcctagccgccaaatgctgcacttacttcatgaatgctacattataatgtctcagtgcgctcgtacttagcatgtccgctacgctcagcgcatatctaattctagcaattcccaaaggaggaatccgcgcctcgcgcaccatctcccgctatacctcatattcgcacataacttcacaatccactagagtgcgttttgagccttatgcgctcatacactgagcttatctggcaccactccatccctatgcatcaggggccaaggtagcctaccacccaacaacatcatcccttatctgcgtgaaggacaatggatctatcgcaatggttgcccttaatgcgtggaccacaaatacaatgctcagctactctctgctcctccatcaccaactacg

SEQ ID NO: 272500 - DNA, 430 bp, Glycine max
agctcacatacgggctgagtgatgcttggcatcccttcctttcttttgccccagtagctttgatccttctattgtttgagccgacggcggacacataatcaaacttctctctcttcaagcctacttcaatcctctcacctgtgaacactaaatccgcaaagctagagggcatctaacccaccaacttctcatggtagaacactggcagaggtgtctactatcatagtaatcatatccctttcaaccatgggatgtgccactcgagccgccaaatccctccacctttatgcgtactccttgaacgattcgtgttcctgtttgctcatgttctcgaattgagtcctatcgggagccatatcagtattatattgatattgcgtaatgaagtcagtaatcattaccagatgaccgctgctccaaccaaactatc

SEQ ID NO: 272501 - DNA, 429 bp, Glycine max
  unsure (1)..(429): unsure at all n locations
agcttcttatccaaggcccatcttggtggtgaagctccttcttccatggcttattccctagtggatggcgcctcctctcacctcttctcctttgtcttccgctacatctccatggtgtaaaatcaccattgaaggacctcattgaagctcaaagatccagccaccatagaagccccacaagcaagcttccatcaagtggtaatcagagcacaagagcttcaagtaggtactccttaaacctccattaattttttgctttaccttctcttccattgttgtttcttcatttttctccatgtatctcctcacatgtcttgtgataaatgttgttaacatgattctttagattttccaccgattaaacttgctatagaagctagattntattgtctatggttcaaatttcttggtcttgttcttgaaccatga

SEQ ID NO: 272502 - DNA, 221 bp, Glycine max
agctgctttgcatccggcagtctatctgcaagatcgatattctctgggggcaaagcggcttctaatgaatacatctctgtgcatgaactcaaacggtgtatccctgatgaatctacagcatacatgcaggaatataccctgagttctcttctgtactctacgcgcctagtcccaaagacgctgtttcacttgatatacttccgcatttgatgtgagaactt

SEQ ID NO: 272503 - DNA, 585 bp, Glycine max
  unsure (1)..(585): unsure at all n locations
ccacctcccaactcttcctccattggtctctccacaattactcacttatattcattntttntcnncncncccggcgccgcgnanttgagaccttgcgtgacgcgctctnctgacacctctctcgcaccccagcatctctanagaccacctgatggcatgcaagcctgtttttatcatgcaaataatgctcacaaataatggccgaagaaagcaacgatacagaccaacgctcctcatttgctcgaaatgccaaaagcctagacaccttaaatgtcaacgccccaaactggagaaaggtcaagacaagacgaactactacccgacccaagacgccaagggtcctatgcactcctgggaagacttggatggcaccctgtctaacgaagatgacgaagaagccatcatatgcctggcggcacatattacctctgaggaatncaaattagatcccgaagatgatgccgatctcccgatgccgaggctcttataacagctgatcatgaacttccatctacactatctattccattcacagcctacacgaacttgcgaacagacacacaagatctactccacgatcaaccg

SEQ ID NO: 272504 - DNA, 584 bp, Glycine max
  unsure (1)..(584): unsure at all n locations
actctctgctctctctccatcttattatggttcttctatttttctcatctganactctacttcttnatnnnnctagccgtaacctgaagcattgtaaagctgaaacctatccatnacgtgcacttatataccaacatcgccgcaaatctgactgacaaatttgttacaccattcttatatatcaatgtcggatttgcataatactcatacatcatgattgagcattcatattatgaacattgctagtgtgcgtgatacttattggacatatagggctttgcatgcaacactggtcgaattttatatcgtaattcttcattcacagatattatttccctggcaattctcttaactaaatcaaccttatcttaactaatggttcttgtgacaatgtcagcgcgttgatcatcactgaatacaactctgaaatctatagtcctgttcagagcatgacttttactaaatgatacttaatttctatatagttatccctataacagaacgttggatntttacacagactaaataccatctttactcgtcacaatagatcgtgatcttatgctcatagactttgctgcccg

SEQ ID NO: 272505 - DNA, 430 bp, Glycine max
  unsure (1)..(430): unsure at all n locations
ggtgatggcatttaattntctgtactatgggattggaccttgctcctgaatgatgcatgtataggaatacaactgaatcaattgaatttgaatgcaatcattagactaacttgtcaactgatctaaaatacttccataggtttcaggatttgaaatcagagatggatccaaaaagatcaatagaggatcaattctccaagctgcatccttccatgccagtaaacaccagaattggaatagtgggtgctggttcaagtggcttatcaattgcttatgcactggataggcttggttataataatatcactatcttggagaagcatcatacagttggtggcatgtgtgaattagtagaaattgaaggtatcctatatcttaatatgactctctagctgatcaagttgactgtaaattttaatcataatatatg

SEQ ID NO: 272506 - DNA, 463 bp, Glycine max
  unsure (1)..(463): unsure at all n locations
ttacgcacttccacattgcaatactatagaaatactcttactccctccctatcctcaaaataaatgatataactactatagtgaaagagagattaagtatatatatcctaccacattttctttatggttctggattcagattttttttcctgggtcatgttgatatagctttttaataattatgtgcttgtttagaatatagctttgtgtccctacagatcattaatttcaggcttacacttgcacttatgttttcttcattgctaatctaggattaggatacttttaattntgagcaaccacacaatcgtgttatacatatgactagctgtaataattttatttcaataacaaatttgcaggtgtaataattaggatacacataattatgcataacgatttcagttgtatcgcataattttttatagtatattaatttcattgcagaaattggaccggagta

SEQ ID NO: 272507 - DNA, 355 bp, Glycine max
  unsure (1)..(355): unsure at all n locations
aaaatannngagtggttatncgtataaactttttgttgtntataagaagaaaaggntgatagnangcagagactaacgtcgtnttntgcgcccttcgtcaatcgcggtcgacaagcccgctgacacgtggagatttacgttatcttccgcgctcacaagatctgtcatactgacttttgagtcacgctgacgggcgaaaatacccgagtggctatccgtataaactttttgctgtctgtaagacgaaaagcctgataccacgcagagactaacgtcgtgttttgcggccttcgtcaatcgcggccgacaagcccgttgacacgcagagatttacgtcatctttcgcgctcacaag

SEQ ID NO: 272508 - DNA, 436 bp, Glycine max
  unsure (1)..(436): unsure at all n locations
tttatacggataaccactcgggtatttccgctcgtcagcgtgactcanaagtcagtatgacagatcttgtgagcacggaagatgacgtaaatcaccacgtgtaaacgggcttgtcggccgcgattgacgaatggcgcagaagacgacgttagtctctacgtgctatcaggcttttcgtcttacagacagcaaaaagtttatacggataaccactcgggtattttcgcccgtcagcgtgactcanaagtcagtatgacagatcttgtgagcgcggaagatgacgtaaatctccacgtgtcaacgggcttgtcggccgcgattgacgaatggcgcagaagacgacgttagtctctgcgtgctatcaggctnttcggcttacagacagcaaaaagtttatacggataaccactcaggtatttccgcccgtcagcgtgac

SEQ ID NO: 272509 - DNA, 451 bp, Glycine max
agcttcatggtgaatcaaagatgattccaggcgttttgatgataataatgatgttaacaaaagatgatgacaaaggtgatgacaaaaagctcaaagatcaattgaataaaaactcacgtaaatcaaagatcaatcaagaacaattcaagagttcaagataagaatcaagaagaattccagactcaagaagaaagtctagagacaagaatcaagattcaaggttcaagatctcaagaatcaagactcaagattcaagaatgaagagaagactcaatcaagataagtattaaaaagtttttcaaaactttgaatatcacatgagttcttgacaaaaccctctaccaaagagtttctactctctggtaatcgattactagtagcaaaattgttctgaaaaagttttcaaattgaatttacagcattccaattatcttcacaaagctgtaatcga

SEQ ID NO: 272510 - DNA, 411 bp, Glycine max
ctcctctatcttcctataattaggaggagaagtgacgggaaagtactgttcagccctaatggtgatgcaagatcacttgtgattagtgaaaaacatggtgtccgtgaagatcatctaagccgaggcgctatcgtaacgtgtccgtgggtgatttcatgaacattttcaaccgttcttcgacggtcttcattcgtgctttgacaggatctgccgttctctggtctccaaccggtaagatcctgatatcgaacttatcaattcattctatgtgcgcttagtggtcctgatctgttatcacgcgctgttatcttcatttcatttactgtacgtaccaccttgtgacgtgcttgagtcatttacttaagtaattatctcgctgaatcaagactaaaataaatctccaccgatcat

SEQ ID NO: 272511 - DNA, 450 bp, Glycine max
  unsure (1)..(450): unsure at all n locations
caagctctatcctatcttgcaattncctttgaactatttccaccttcacttctccttgtatactctttaccatcattggaggctttctttcataaactacctcaaatggcgtaatgcctattgaatcttgataggtggtattgaaccaagattcagcccacggaagccaaatgacccatccctttggctaatccatgataaagcacctcaagtatgtttccaggcaccgattagtgacttcgatttgacaatcagtttgaggatgataggttgtgctcatcttgagtgttgtaccttgtagtttgaagaattctttccagaacagactcataaacaatggatcacaatcactcacaatagaattgggtaccccatgaagcctaatcacctctcttacaaatatttcagctatgtcttgtattgngtaagggtgtcttaatggaatgaaat

SEQ ID NO: 272512 - DNA, 382 bp, Glycine max
  unsure (1)..(382): unsure at all n locations
ctgttgaattacctttctagttggaaagtcagacgctatagaacctaagataaccagtttggttgacaccattactcttgtgtttaaaacatttgtattttgcacagatgaaaattgaaccttcttttctctaggtcaagtatctntaatgccatggttggaattgcactaagtgcttcctttgttaagctagtttcgtggtatgacaatgagtgaggatacactaatgtgtgcantttgtgtatgtagagtgcaaaaatntctgttcatgcaaacctttaattgataactttgaatggtttttgttgcagcaaccgagtattggaccttatagagcacatggcattggttggagctcanaatggaacaccattagtgtatg

SEQ ID NO: 272513 - DNA, 187 bp, Glycine max
cagcattgagacctattaccgaaatctctacataagctcccgcctctacatatttgaatagacaacacacactatacacctaacccaaaggggcgctacaactacaatgagtcttcacaccatgaatctcctgccgtacaagtcaacgatcttaatcccggtaactgtgtaggtaccttgccccgca

SEQ ID NO: 272514 - DNA, 111 bp, Glycine max
  unsure (1)..(111): unsure at all n locations
atgatgatanatagttagaaagtggaaagnttgggaaattataaatatagatggaaaatatattggtaagtacctgattnggtgaaanatagagtggattnttgtataaag

SEQ ID NO: 272515 - DNA, 295 bp, Glycine max
taaatgtgattactaatcaaacttaatatgaggatacatatgtacttagttatgatgatggtacaccttcatataaagtttgtcttatcatatgtgttaattaatgagtatagcttatctttaacttagtcttagctttcatcaattatgcacccaccaataccagcggctatatgtggataataattagacttgtgtatcttaatggataacatcaaacttgcaatagatgagttgttttgagcattgttaataaaggaaaaaaacagcaccatggaaaaaaagaaactggggg

SEQ ID NO: 272516 - DNA, 96 bp, Glycine max
gcatgcaagcttgtgctagataaaatatgagtcggttacattctttaatttacctattttggcctagtatgagttcactggtgttgattcgaacag

SEQ ID NO: 272517 - DNA, 119 bp, Glycine max
cctatataaactcagccgcgggctggtctgtagaataatcctgattctaagcttttacttgtgacctgcccgctctatttttaattaagatgcacccacaatcgaaaatttggatgtgt

SEQ ID NO: 272518 - DNA, 82 bp, Glycine max
  unsure (1)..(82): unsure at all n locations
tgcagcaagtnttagaaagtaatgcttataggcctgcacatatctataatcgataaaacaagaatgagtagcatgaagtatt

SEQ ID NO: 272519 - DNA, 419 bp, Glycine max
agcttgtgaaatcaatggaatctaagattccgtttgacccaagtcgttcaattctgttcttagaaatgtgacctaaacgcttatgccataatgctcatgagtttgtattatcaattctacgcttagtaccacgtaattgcgcattaaaggattcaacatacgaaactacagtattaagtaaatatagattatcataagccaagagtgaaccagttccaacaatacctgaattgaaagacaacctaaacacattgtttccaaatgaacacaaataacccaatttgtctgaataagaaactgaaaccaaattccgtctaaatgacagcacaacaaaagtgtctttcaaatccaaataaaaattagtacataataataatctaaagttccctatagcttccacttccaccgatttaccatct

SEQ ID NO: 272520 - DNA, 345 bp, Glycine max
tcatgatctgtatgaaagttgcaaactagtggttgaaaacaagagtttggattacccttttgttaagataatcagcatgaatcatatagtggcattggaacaacttggtagtccacagaatgaacttgaagcttcacatgtctctctcaaaagcatctcattaaggccaccttcaatttcaagccactttacaaaatctaaagagatatagctggcagcggaagccaaagaaagctaaacgagtgaagagagcattggtatagatttgtcaccaacccctactcttctttatggacactagagactaaaataagcatggtgtgggtggtgtttgaagatgaattt

SEQ ID NO: 272521 - DNA, 424 bp, Glycine max
  unsure (1)..(424): unsure at all n locations
agcttttacatcataacttccaatctgattcatggtcttgtcccaaccagaggtagttgtctgtcgagctgccattcacattaactctgtcatgtgtgctncccggatacttacttccaattaccatacaaatgcttgacacacaatctatgttctacgttatcgcccagctccttgattacctcaaccaacccctaaaaataacagtgaataaattaagttatagtaactattagatgcccaacaatggtcatctctcaatgtcactacctaccaataagttgcttgaatggacttattcactcgtaagtagaagggataacccttttgttacagattacaatgattctcttcttgtcatcttttttaaccttcagattcttcttagacattatagcaaaggttctaatagcctctatctgaa

SEQ ID NO: 272522 - DNA, 270 bp, Glycine max
agctcgatagacaacatatttacctactggcgtgatcaatcatcctatacattcttatatttctcaactactcacaccaataattacttctacgaataagaatggatgataatcatatactatcaagaaaaatattaactagaatacttgtaagcaatattctagacctacactcagtaacaaaaattcaagctcgatataaaaaaaatatcaactacttttatctcaaaataatcttactatatccttcacttaataaaattctattta

SEQ ID NO: 272523 - DNA, 429 bp, Glycine max
  unsure (1)..(429): unsure at all n locations
tgtcaagccttgtcaaccttacatgcgtgcaacatgtgtccttatgattttagactacgtgagacaaattttggcactcaaaagacggcagtattgagacaattgagtattgatggtgaacctaaggtcttcctaggaccttcaaatcattcaaaaggatgatggaattttcttccttcagaagaaattaaaaaggacctttattaaaaggggttggtatcggaccatttaggcctatttaagcctcagcctatgaagcccccattttagatggaccggataagtctggtccacaaaataaatggactttttttaagttctatatntggcccacaaaagttcacaaacaaaaaaatcgatcttcagacctaaatattaatttgaaaaaaaatatatctctctataatctctttacaaaagtgaaaaatg

SEQ ID NO: 272524 - DNA, 439 bp, Glycine max
agcttcaaccaaggggagatggaccatttcaagtgcttgaaagaatcaatgacaatgcttacaaagttgagctgcccgatgagtataatgttagttccaccttcaatgtctctgatttatctctttttgatgcagatggagaatccgatttgaggacaaatccttctcaagagggagagaatgatgaggacatgaccaagagcaagggcaaggatccacttgaaggacttggaggacctatgacaagggctagagcaaggaaagccaaggaagttcttcaacaagtgctgtccatactatttgaatacaagcccaagtttcaaggagaaaagtccaaggttgtgagttgtatcatggcccaaatggaggaggactaaatgacaccactttgtctcaattttagagtgcttagtttgtctaaataatggcccaatccttg

SEQ ID NO: 272525 - DNA, 294 bp, Glycine max
  unsure (1)..(294): unsure at all n locations
ccttgatattgtgtcttcttgatgctcggagcttggtgacctcttccttgattctgaccatctcttggactttttgttttatctctagttccaccctcatgntttcttcattnttttgttcctgataaaacaaccttcttgtcgacaactccccagcttcaacggggatcatggtgtttatgccataggtaagccgaanaggaagttcgttggttgttgtctggggtgagcaatgataagcccaaagtatgttggggagttcctccttccatagacccttggacttgtaagtct

SEQ ID NO: 272526 - DNA, 177 bp, Glycine max
  unsure (1)..(177): unsure at all n locations
gtgtcaacctttgaaaagaaccttattaagccggatggngtgcataatgctactgactctaccaaagcttttctccaaaggagtttggcaattgtggaggagaacaaactgtggaaccaagaggtggtgcaaaaggttgtgtccttagaggtggaggtcgccaagtaaaggcctact

SEQ ID NO: 272527 - DNA, 445 bp, Glycine max
agcttcaacaccgttaagggtaaagacttttccaatggccttcggatgtccagtttgaccattcaggcccccaccattctgcttcttcttggggtgtggacaatctctctaaatatgtcatttttgtccataattaaaacaggccatgcctctattaggacaattttaggagatgtgccctggcttactacatctttaacaagtgatgtgagtggggaaagtattggttttgctaccacttccacccgcaaatcccatagcaatagttgtggaagcaatgccttccaaggttattttgatgatgccaaagaatcaagaagttaagcaaattccaaagattcaagaatctattttcaagaatcaagattcaagaataatccagatccagattcaagaatcaagagaagactcaatccagataagtctaaaaaagtttttcaaaaca

SEQ ID NO: 272528 - DNA, 439 bp, Glycine max
  unsure (1)..(439): unsure at all n locations
tatccgacctcccataacagcgcctacatagaanagtattgcatgccaaggcaagcacaacagcagggtcaggcacaaccgcagatgcaccattggcacctctacgacaaccaccatctctagagtccatctctgctcacatgcggaggatggagctccagatgcacgcatatatgcagcatgtgatcgactagcaggcagccaatcataggggtcaggtgcagctaaataagagcttttaccgatacaccttgcatcaacagagccaagatatcatccctttcccgtggcctacccccaaccagttcagggccacagttgcatggcctggagataggcccgattntcaaacagggccaggactcgcagggacccccagagataaagatggagcacacgatgatgatggcatggccgatgtgatggacttctttctttg

SEQ ID NO: 272529 - DNA, 479 bp, Glycine max
  unsure (1)..(479): unsure at all n locations
ntttgagaccatctctnaccccgcgattctctatagatcacctgcacgcatgcaagctcgatatgaggaaatgtctaatggtgaaacctccttcttttatttcttgaccatagagcggtacctggagatatgttgcgggggtcaagaaacctctgggacgtcaagtggggtgctattgtcccnaaacaagcttgaccaatccccacccaacccgggcatattcagtcagtgagaacctgtgatgtacctaaacaggcgagctcctggcngtcacacataaaaccaacaaaaaccacaaagccacgacgcttgtgtggtggctggcccactgtgaactttgatttatatgtgagatatggcctctggtaatcgaataccaacggtgggttatccattacaatgcttaataatgaagacacgaggctaagatggtctctggtaatacaataccaaggggtgtaatccgataccacgcttcg

SEQ ID NO: 272530 - DNA, 447 bp, Glycine max
  unsure (1)..(447): unsure at all n locations
gacactatgaaactcagcttacacaggcaagtgtttcgtcttaattccaaatcacagatatgtcataaattgattntgcaagtcatttcccatcaaatcaaagataatgtgcataatcatcatgggtcaatgggactttccaaggtcgaactttgtaggaaattggttttggttgctctggtctttcccccttcttttttgtgtgagtaggagagcaggtacaaagatttggctagtaacttanacgggcgatcacttcctatcccctcatgtcttaaccaagttactattgttccccctccttcttaatgtttacaacaactctgtacatggttcagacattgtttgttctaaagaacttgtttttccttttctattttccttttgctcttttctattttgtttgatagattttntttggttcccttttctttctttctttctttc

SEQ ID NO: 272531 - DNA, 435 bp, Glycine max
agcttgtaagaagtatagcaatatgggagaatgtttttggttgattgataaggacttagtgatgcaatcctaccccgcaagggcattggctagaagactccaagtagattgggctagagatccaaggaaaggccctagggttctcatgagccttagggtagatttcgagcccatgggctaagtatgagcccgcttatctttgtaaatattagaataggtttttccttcgtctaggccttgtattttggccattctagtagtatagggttttagccttgtatttcggggcattttgagttgtctttgtaataaggacttttttttttattttcatgttttttgtcatgggggtgagcttagctattatagggggtgtgtagctaagctctagcttctcatctcaaggaggtgagcttagctattagagaggtatgc

SEQ ID NO: 272532 - DNA, 436 bp, Glycine max
  unsure (1)..(436): unsure at all n locations
gcttaaaggcttgngtttctaagcttgggattacatttgggcacctattntgactttcccatgctgtctctacatacataaaacagccccaccgtcccaattttgcaaaatcatattcatatatcattggggcatttcatcgagcacttggtgggcgcacgtttagacataaattgcaagagaacgggagcaatgtggcatgccccattgcttcagaatacaacctaggcctaaggccttttcattcaaaacctcaattcaagaaaacaagcaccaaagcaaaccaaaactgccttacaaatataagcatgttctcacaatttaaggcaccaaaggatgaagaaagcacatcaatggaaagcaaaaacaccaaggatggaatacttacttgttggagtgaattaaaatacccaaaaacgaaagcaaaatgcgatca

SEQ ID NO: 272533 - DNA, 403 bp, Glycine max
  unsure (1)..(403): unsure at all n locations
ttcaaatgacaataactgttgactcggatgtccgattgagtcattttataatttgagacgctcaaaagtgaatgcaagagctcttaccaaattcaaatgccaatatacttttactcggacgtgcgattgagtcccgtaatatatgtagatgctcaaaattgaaaacagaagctctgagcaaattcaaacgacaatagctntggactcggatatncgatagagtcatttaataattcgagacgctcaaaattgaatacagaagctgtaatcaaattcaaatgacaataactttagactcgaatgtccgattgagtcattttataatttgagacgctcaaaattgaatgcagacactctaaccatattcagatgacaataacttttgactcggatgtccgattga

SEQ ID NO: 272534 - DNA, 435 bp, Glycine max
  unsure (1)..(435): unsure at all n locations
tcagaccaaagcaactcanaatctaagtatctaaaacccctcaatttagtgggatttcaaggtttgagaagtgaaaatgagaatggggtaaatttggagcaaactctcacctcacacaagtctataaccttaatctaaacttgctcaaactggttttacgcctaaaattccaccaaatcaaaatttgactcctcaacacccaaattttaccctagaaatggctcttgccttcactttggtcttttgtttttctcctttgcacatcccaagctttcccacagtcctaaatgacatttcaaactaggattaactcactgtaacctccaatttctactgaatccagatttagcctttcaaaccctcaaagcatcacactnttccactcataacactacattctcactgtctaaccctaagttaactatacccttcatc

SEQ ID NO: 272535 - DNA, 415 bp, Glycine max
  unsure (1)..(415): unsure at all n locations
agcttgaagaanatactcttaaccagagcatccaactgttaaaagcaaattctcacagagagagtttcaataaaatcttatgcatccaaagataagatagaagcaactaaaaataaacaagttataatagaaattagagtaaaaacacaatgtttatactagttcactcaacttgagctacatctagttctcctttatgacaccatcaagtgttccactaatcaaattgattacaaatgagtttttactttgccactcttggttacaacaagtattttctatgccacttctagcttacccttaatctcttcccgagattaagaacacccaagtattctttgatcactaaggaacttctgacttttgttggtcttttggaaagcatagcaatttgaccgaagtagacagtgtatgt

SEQ ID NO: 272536 - DNA, 451 bp, Glycine max
  unsure (1)..(451): unsure at all n locations
tgagccanaatcctgactcaccatanaccttgacctcaggtgagaatgtcaatccttaccctcggaagcaaaaaagaaaagaaggaaaatttccaatcaaagagaaagcaaaaagaaaagaagggaaattcccaatcaaagaatgggagaaaaaagaaaaaaaaaagaagaagaagaaggaaagaaagctcctgatcaaggatcgaaagaaaacataagaaatgtgcagagaggtctttggaccagacgatatctgaacaatacagaattgtcaccaaatgaacaaaagaaagaaaaggaaaccatgacctanaagtggtcttctccctttcattatcaaccaaaatcctgtgcgctagcgactntntcgccccgcactaaacaaaaatagaanaggaaaaagccaaccaaaaatcataacccanaaacacaaaagccaaaaaaacccatc

SEQ ID NO: 272537 - DNA, 425 bp, Glycine max
  unsure (1)..(425): unsure at all n locations
agcttgcttcagtataataggaagcaccaatataaatatgttgatgcctactattgatatatagcattgaccatacatgaaactagcgagagagaatacaaactgttgataatagtacactccataggtagtgatgctgtgtaaaccactacaacaagaaagcactttaaattatagtattacgtagaaatttctatggttgtgttgatcatgctcgccctcactttanattggcaattggattgtgccacattgaagcttttcacagttctgccatcactggtggtgacttgaaaagagagggattgcccattgaggtatgagtttctctgtcaattttgcccccaatttcttgacatgggtttccaccctggtttggaccctttgatggacactgaattcatatcaccagcttcacccacatt

SEQ ID NO: 272538 - DNA, 452 bp, Glycine max
  unsure (1)..(452): unsure at all n locations
tgngtcatggttcggtgtatggattcctcgagccccaatccatacacaaagcaaaggatagatgtgttgaatgtcaacattacattcaaacatgggtgaaggattcccaacgagaggtctatctcggagcttacttgaatcagtaagcataatttatgaaatgactggaaaaaatgtttcacctactatatacctaattattgtcgaatttagggcccattggcaattgattattctgtgtctagggaacgatgttggcatctggttctgttcgttgcgtaaaaagcttgatattcatatcaaagctgcagttagcaagttatgttttctattataattgatttagtacaaaagaaactttgatacataaatagtgttgttgtggtatatgcgtcgatgttttattnttaaccagtgcaatgaagacattaaagactactgtggatggtaaa

SEQ ID NO: 272539 - DNA, 132 bp, Glycine max
agcttcttctaatctaccaaagtataatcaaaattattggttcacactgcgatattgctatcaacccacgtatacttaaaaacacagacaatgaattttgcataattaagctcctaaatttctttaatgaat

SEQ ID NO: 272540 - DNA, 247 bp, Glycine max
agcttgacgcaatgctagaaagtttccttctgtacttccagcttatacctgattttgctttatcgtcttcagaagccatattcctgttgtccattctagaattagacatcaactatataatgtgaagaaaactgtattaactaacaaaatgcttatgagcaccatgtttgtaaatgttatgcaacaaacttactttctgacaacaattacacgaacagcatcatgcattagttctcgagctcgagct

SEQ ID NO: 272541 - DNA, 430 bp, Glycine max
tattagtctaaatccaaacaatgacttctccacatttgtgtaacgcatgcattttgcatccaagacaaagtttagatttctatgcctatctcatgctcttggcattttaatctaacaatctaagctattcacaccttccaaatgacggctgtacatgcacaaactcattccacaattcaaatttcacaataacacatgcaatggtcattgaggcatttcatcgaacggttggtgggcgcatcttcaagcatgtaaaaatgaggaatggagaataatatgacatgccaatccatagtacgatcaaaggtaggcctagggccatcccttgcaacccccaatcaaacaatcaaagcatggattcataaaaaaaatgtctcacgaaatttgcaaagaatatgacaactaaagcacccaaataccacaacacaat

SEQ ID NO: 272542 - DNA, 327 bp, Glycine max
  unsure (1)..(327): unsure at all n locations
gatcagttcactcccgcagaatgttctatatgggcccaatgctagttacacccnctagtttgttaattgcaacccctccaaaatgttctatatgggcccaatgcttattacaccctcagtttgatgagtgcacctccctctataatgttctagatgggcccaatgctagttacacaccctaatttgatgactgcacccacctctagaatgttctagattggcccanatgggcccaatgctagttacacccttagtttgatgagtgcaaccccctccagaatgttctagatgggcccagtgctagttacacctactagtttgatgagt

SEQ ID NO: 272543 - DNA, 454 bp, Glycine max
  unsure (1)..(454): unsure at all n locations
agcttgtagaatggctagacatgatacatgtcatggtttggtttggttcaacgataaaagggatgccccacattatttccatggcacaaatgcaaaaatgatgatttggaaactntatgcaaaactggtcatgcatgcacctatgcggacactcaagtgtcaaatttttatggtcatgtgatgctagggctcangattcatttcctctattttaatcaacccaatgtttccaaaatatgttcttttatcaatttgggcattcatccgagtccatttcgggcgtgcggggaaatttcacagcattcacccttcaggtgtagacacattttccaaaaattagttatgatcagtgaattttttcaaagaaaagttggaaatcgtctcttttcacaagcatgtcagtttttagctagacaacttatgtgtttcttcttcttctttttatcactatcac

SEQ ID NO: 272544 - DNA, 414 bp, Glycine max
tgccatccagctcgcccaggcgagcaaggttgcttcctccataagctaccgtcttctggaggaagaatctggaaggcccaagtgggcctgattgctatttacaccccctttatttttactaaatgcacccccctttacttttttttggtgattctatttccgtaacgttacgaaactttacgaatctcgtaacgatacttattttctttccgtaaggttacaaatccttacggatcatgtatttactccttttttatctttcgaagaagttactgaaactcatggattgggcaacaatacttccttttggttgccgttgcattatggaatttcacggatcgcgtaaccctactttcttttgatttctggcgcgtctcgggacttacatattgtgcaagaaagggtgccgagtat

SEQ ID NO: 272545 - DNA, 312 bp, Glycine max
gacctgccgcatgcaagcttagagagatcctagagattctctaaggcttaatcttatgtccttccctctataagaaggttagaaccctacagacgataatttgggcaaggaaagctcttactatgtaagttattatttgcattgtgttttgatgttgattatgtgatgctcatttgatgaatatcgggcgttcaagttgcacttatcatttcatggcgttggtgtaaattgacggttggatttctttgtctttaagtcaaaacatgatcgggataattcttctatgtctcttagcgaacacatacctctgat

SEQ ID NO: 272546 - DNA, 461 bp, Glycine max
  unsure (1)..(461): unsure at all n locations
tgcttctacatggagttcatcatccattgccctaacccaacaaacatctttatcttgggaataacatgtagaatagttgttccagataaagtagtagtaagagaaacgtgtccaaaacaggcggcagatcatgagcgagaagggacaaagtaggattgttcctgacataaactttacctggttagcaaggaagatgcagacaagtcagttcaagcacgcagcananatgcacaaatgctcaaggttagaaaaggcagaggctaatgatttttaggtaatgatgcaatcctccctatgaagggaccaatcactagaaccatgagcaagaggctccaagaagatttgactagagctgctgaagaaggccctanggttctcatgaaccttannggtagattctgagcccatgggccaaggttgggtccatntatctttgtacatattagactangatgtcatta

SEQ ID NO: 272547 - DNA, 450 bp, Glycine max
  unsure (1)..(450): unsure at all n locations
agcttcttttggactntgaacaggcaactaactcctctntcaaaatcatgctatgtgctcgcgactggtccctttcttcccttcgcaacttgagttcactattgctaccccatagagctccgcgaaatttgttccggccatacttcttcttgcgagccctcttggtctctcgttcaagggctcttgcggtaattgcattctcttcccgtaacccggcacactccttccgaacgtgtgtagcagccaacttgaacttctccttggcgagttttgcctttcctaactcgctnttgagagcttggacttcctcgtcctcttccggtgcttcaaaattcccttcgctgacgacttttaacttggcgagccaatctaaacctcgtatgcgaactttcagccattcgtggtacccaccaatgatgccattacgaatgcctctaagctcttgatctt

SEQ ID NO: 272548 - DNA, 435 bp, Glycine max
  unsure (1)..(435): unsure at all n locations
tcgcacttgataatggagacacatgaacagcgctaggcaacgacattcatggcgctccgaacaaaggtggagtatggaggattgccttgagggtccgcacttangcaatcatgaaactaagctccaaactcgaaagtggaggacacatgaacaaccctaagcaataatattcatgtggctccgaaaaaggatgagaatggaggattgccttgagggtcctctcttaggcaatcatggaacacagctccaaactcgaaaacggaggacacatgaatganaccgcaattcattcacgtggctccggaacaggatgagaatggaggattgccttgagggtcctctcttatgcaatcatggaacacagctccaatcatggaacacagctccaaactcgagaacggaggacacatgaatgacaacgcaattcattcacgt

SEQ ID NO: 272549 - DNA, 119 bp, Glycine max
gatggggaccgaagcgagaggagacaagcacagaaatattaaagatcaacaacagatttcttgctgacaaaagaaataaagggataaaagaaacgagaagttgcactcaagaaaaacaa

SEQ ID NO: 272550 - DNA, 394 bp, Glycine max
  unsure (1)..(394): unsure at all n locations
cgtaagatggacttgaggaaggttactctacctgtcattgtcaacatataagcctaccacgagctctagttactattgactttatcgaggataaaatcaaatgtatgattagtaaatttcttgtcaagaattgaaatccgggtacttatctaagtcctcgatttacttaaatccacttggcaccactatatcctacttgacttgccagctagcattattatataaaaagatgcgggagttttcatcactctctttagctccagaactatcacaaaacaatntaagggtcaacttgatggcatctatctaatccgtcgaggcttctacaaatagcagaatatcattcgcagagacaaggtatgaaattatgagccccctttgtttaactggatgg

SEQ ID NO: 272551 - DNA, 328 bp, Glycine max
acaaaataagttaggtctcatgatgcacatttatgtgacactagaagaactatggtaattgaaaactagacttgtaatgatgcaaatctaattatgtatgcatgtacctataatatcatagatgtagcttccgaatggaaaaacattttggaggttgatatgatgttcattttcttggtgtaagttgcccctattataagaaaaagcggtacaaccactaaacagagaagcgtcacttcaaaatagcatatggcagaaatcacaactccaacaatgcaagttgcacagcttgaggtgaagtgacccaaccgtgagtaagaaattcact

SEQ ID NO: 272552 - DNA, 400 bp, Glycine max
  unsure (1)..(400): unsure at all n locations
tgtaggcctaggatcttcttcatcaatggattcctttgctttttagaagatgaatggcagtggaatggagaaggaagagagagaggagatgccacttcaaggagaagatgagtctagaagaagctcaccaccatagaaggccatggctaagagcttggaggaagaagaagatgaatgaagggagaggaagagaagagcacgaaattttatgctctaaaagagctctgaaatctgaagtttaattttcaaatgatcaaagttgcaaaaaatgcacacacatgacctctatttatagcctaagtgtcacacaaaattggaggaaaatttgaatttcaattcaaatttcacttgaatttgaaattgaatttgtggagccaaattntcactaattatgattagt

SEQ ID NO: 272553 - DNA, 377 bp, Glycine max
  unsure (1)..(377): unsure at all n locations
agctngacaaatggaacataatccaacaccttataggcctctttgatggtgaagaanatttgtagactgcatttaaaatgtcctgaattagattttgcatctttggctggcatttgatcttcctaatatccttccaacttccaagggaacactaacatgggtcattaatagatctgaccaaatataatcaatcttagttgtgaaattttcatctgaagtatacaccaaaataaatctcttaggcccaaattcaaatcggggaatgatcattgacaaagtttcatatataacctaattagggagaaaagataatagaaaatctagatcccaatttttgtgatctgaacagaantctttactaccttctgaccatgatc

SEQ ID NO: 272554 - DNA, 454 bp, Glycine max
tcctgaaccaaacgccgcaccatcagaatccgccttacaatccgaggcctcatccgccgccgccgcctcaccatcatcggcctcagttccgtccatatccgcctcagttccgtccgcctccgccgcagtttcgtccgcatccgatgcaatttcgtccgcctccgccgtctgatcaccggccggcgtttcgtccgccgcagcatcttcggccacgaccgccagattatcgagactgggagcttgcttggactccgccgccgcctcctcattgtggtaacctcactcttgtgctgcgtgattgtggcttccgtttcaatcctatggtttatgaagaagttgttttaggcgtattgtgaaggctaatgtttgtttcccaaaagttgctgtattgcatggttcagccagctagattatgatatgaaaacgtaatgttgagtggtttactatgaattct

SEQ ID NO: 272555 - DNA, 379 bp, Glycine max
  unsure (1)..(379): unsure at all n locations
agcttatatattgtacaatggcctgttaaactttcttaccctttntattgtaacagaatatcttatttgaaatacttttctattttattataggtattatatgtgggcctgttttgctcatctggacatttgttcgtggtgacttgatgacaacaatcaattttccacatctcttctcacctggttttatagtatgttctgcttttagcctttctccttcaataattcactaatcattgttggaccttctttggttacttgccaaaagaaatatagtatattttgaaaggaatcctgacccaactaatctagcagactaggattcatttaaacccagtgacaaaaggcccgagagggtgatttangggagatgagtttg

SEQ ID NO: 272556 - DNA, 450 bp, Glycine max
  unsure (1)..(450): unsure at all n locations
tctctcgggcacaacatggacccattgttgacgctgttggtgcctacatggtgctgctccttcattgtcccttcctccagccccaacttgttcctataaatattgtattttttattttattcctttaaagtttttttgttttactctttgtgaattctttttagtctttgttgtcaagtaaaaacattaactgatgtcataacaatgatatttgtagaccattgatttatcactttgtcaaggagtcttacatagtagataaatgtatttttttctagtaagctatgtttctaaatctgtcataaactaatttgacattattaattattttgaatatatgaggatttaaaaatcagtttataaaataaataanaaataatgtgattgtcttgtcaaactctttaatggcatcaatggattaccaacatcgcatttatgtcatcaatgaat

SEQ ID NO: 272557 - DNA, 385 bp, Glycine max
agcttcatttctttttcactcatgtgtccaagtctttgatgccacacggttgaattattgacaacctcagtaattgttatcatatcctcatctgcaattatgtaaagagatcattgcttctttccatgagccacaacgagattgccttttgttaccttccaagctccatctccaaaagcggtgtaatgccccccatcatccaactgccctatagatattaaatttctctttaaggcaagaatatgtctgacattatgcaatgtccatagggatccactggaagtcttgatgtcaatatcacctcttccgacaatgtcaagagaatttccatctacaagggaaacttctccaaatcttctagacatatagttagacaataaatctt

SEQ ID NO: 272558 - DNA, 415 bp, Glycine max
  unsure (1)..(415): unsure at all n locations
ntgtggctgaggacctatataacagcaccagtgttttagtttataaagagttttggagaggagactaattctaggattttagaattccagtttttactgttcatgtgcactgttcacgtagaataaaatttgtttctgctttaatctacaattttgttttctactaattaatggaaggctaagtctccagctttgttttatcttgaggatcaagcacaactctctttgaggttttgttattactattgaattctgatcaattgttcctcttcaccaattactttgtatttgttgctattaatccatacatgcttagtgcttgattaattgtcattgtgcttaatntacgttcatgcttaatgatcagtttcgttcatgactaattggtgtatgtgtngcttaatcacataatgac

SEQ ID NO: 272559 - DNA, 532 bp, Glycine max
  unsure (1)..(532): unsure at all n locations
cggactccgggcnattgaaaccatctagcanccgngattgtntacagtcganctgcacgcattgaagcttttctaataccggagacctatgatgatatttgcgatacatatcctagctgttacagctggcagcatctttctactacacgccaatgtgatgacgaggcatatacattaggactcagagtacatgatcgatgacaacagaacattgtattctatatgcgataaagctattgagatgcgtctatataccaagcgtaacactgctacacacaatatgagatctacttcctcttacccactcatgattaaaattccttcaacaattatgttgcagtgatcgtaaaaggacatataaatatccccacgccaatgctatctcacgtgtctacttcgtcatacatttttttcacgaacgctngagtctaacctggcttcatcctttatatagagccaacacgtcttccttttaccagctaacaatttcctcttagctattaaccaactaacggtgggcgtgcatataccn

SEQ ID NO: 272560 - DNA, 64 bp, Glycine max
taaaagagctctgaaatctgaagtttaattttcaaatgatcaaagttgcaaaaaatgccacaca

SEQ ID NO: 272561 - DNA, 312 bp, Glycine max
gatgaacactctgaatactcctacctcaggttgtgatggaaataacgacgctatgcaccatgatgtcttcaaatgttgcgtctacttatgagagaacacttcaatgatgctgatgtttgctttacacaagatgccgacgtctactcgtgaatttagcctatactccgacctattactgtgtaatagtgaaggtcttactatattaatatgatgactgatgactagataatggatcatgtgtctcagctgcatgatgagaaataataaaaagtctgacaatataaagatgcattaatcgctgcttctatgaaa

SEQ ID NO: 272562 - DNA, 410 bp, Glycine max
  unsure (1)..(410): unsure at all n locations
taatggatacagatgttgatatttgcaatacatgtcctacattgacaacttggagcatcttgctacaacacgttaatgtgatgacaagtcatatacattaggattaggagcacaggaggatcacaaaggaacattggatgctatatggtataaagatattgagatgtgtctatctagcaagctcaaaactttaacaaacaatatgagatctacttcttcttctccactcatgattaaaattgcttcaagaattatgttgaagtgatcgtcaatggacaaataaatatcctcacacaaatactttctcacgtgtttactctctcaataattttttttcactcgcgcttcactctttttggcttctctcctctaataggtacagcactctttncttttaccactcaccttct

SEQ ID NO: 272563 - DNA, 360 bp, Glycine max
  unsure (1)..(360): unsure at all n locations
acactatgaatctaagcttaatggagcttacatcatgtggtatcaagagcatcttcatctatgttatgttctttngcttcctctatcttcttgctcagtgaattctctttaattccttgatcttcatcttattctccatgtatatactccatcgtcttgtggtttggtgctgtttagagtagattcaaaaaaataaaccgattaaatctcaaatctacacttgttcttgcatttctatggatcanattttgaagatctactcttgaatcttgcttctgtgttgatcttaagctctatcattgttcattcataatattcttgtgctgaaccttagatataaatgttcttgcaaaatattga

SEQ ID NO: 272564 - DNA, 309 bp, Glycine max
  unsure (1)..(309): unsure at all n locations
atctccatggtggaaaatcaccattgaaggaccttactgaagctcaaagatccagcctccatagaagttccacaagcaagcttccatcaagtggtaatcagagcacaagagcttcaagtaggtgctccttaaacctccattaattntttctttaccttctcttccatttttgtttcttcattnttctccatgtatctcctcacatgtcttgtgctaaatgtntgtaacatgattctttagagtttccaccaattaaactcgctatagaagctagatttgattntctatgggtcaaaattcttggtcttg

SEQ ID NO: 272565 - DNA, 418 bp, Glycine max
  unsure (1)..(418): unsure at all n locations
aagcttgcacgattggtcttcgccagtgaaaggatcaatgtgggtccgatattatgcaaatntgatcatcctactacgacgactgagaaaactggggcaaataaagagggtgaggatgagggagaaacccatgctgtgactgccattcctgtacggccaaattatccaccaacccaacaatatctttactcagccaataacaaactttctgcttacccaccacccagttatccacaaaggccatccctaaatctaccacanagtctgtctaccgcacttccaatgacgaacaccacctttagcacaaaccanaaacaccaaccaagaagtgaattttgcagcgagaaagcctgtagaattcaccccaattccagtgtcctatgctgactngctcccatatctactttgatattcaatg

SEQ ID NO: 272566 - DNA, 424 bp, Glycine max
  unsure (1)..(424): unsure at all n locations
gattcttaagttacctgccgcatgcaagcttggcatccatacctaatgaggattttatgtgttcttaanactggtctctattatttgcttccaaagtttcatggccttgcaggtgaagacncgcacaaacatttgaaagaatttcacattgtctgctccaccatgaaacccccagatgtccaagaggatcacatatttctgaaggcttttcctcattcattacagggagtggcaaaggactggttgtattaccttgctccaggtccatcacgagctgggatgaccttaagagagtattcttagaaaaaattntccctgccttcaggaccacacccatcaggaaggatatcttacgtattacacaactcactggagagagcctgtatgagtactgggagagacttaagaaactatgtgccagctt

SEQ ID NO: 272567 - DNA, 246 bp, Glycine max
tgtaggattatggtgtacctatcccagtggtactaggtggttgtctggcgatggtgcacaacaagatctacacatacacaatgcgcgcataaacccaccatcccctgtggtctaccttgagcagaactcacatacttccatgcatcccatatgaccgaatctctcaacaccggaacccgatggatcctaccaagctggctcaacattcaagaataacaacattcatatagaacaagctatcacaga

SEQ ID NO: 272568 - DNA, 413 bp, Glycine max
agctatgatttcctttgttccggaaacctttcttttctcatgtgcacccaaactcaatctccgggttcgaagacaaccttctttcttcctttgttggcttgtttagcatagcttttatttttcctctcaatttgatctttgactctctcatgaagcttcttcacatagtcccgctttgcttgaccttctttatgcttaaaaacagaaacattaggcataggcaaaagatcaagaagagttagtgggttaaaaccataaacaacttcaaaaggagaacaattagtggtgctatgaacagctctatcgaagcaaattcaacatggggtaaacaagcttcccaagtttttaagttcttcctcaaaactgtcctaagcaaagttcccaaagtcctattaacacacttccgttgccat

SEQ ID NO: 272569 - DNA, 418 bp, Glycine max
tcaacattcaatttcgtgcgtctcgatatgttacgggactttatcttacatccgagtaaaaagttatggtcgtttgtattggctcagagcttcaactttcaatttcaagcgtctcgatatgttacgggactcaatcagacatccgagtaaaaagttatggtcgtttgaattggctgagagctgtaacattcaatttcgagcgtctcgatatgttacgggactcaatcagacatccgagtaaaaagttatggacgtttgaattggctcagagcttcaacattcaatttcgagcgtctcgatatgttacgggactcaatcagacatccgagtaaaaagttatggtcgattgaattaggtcagagattcaacattcaatttcgagcgtcttgatatgttacgggactcaatcatacatccg

SEQ ID NO: 272570 - DNA, 451 bp, Glycine max
  unsure (1)..(451): unsure at all n locations
gtcacctgcggcatgcaagcttctagacaatggttntgtaagttctccattaccttcttagtcatgggttccatcagtccaagcatgattacttcctattcaccattggttcaaggaattccttaatcattctactaatgtatgtagatgacatcatcctgtctggaccaaattctacctctgtgcaggctattcagacccaattgcaatctatgtttcaattgaagatccttggccctttgaaatatttccttggcttagaaatagctaaatccagcagaggtatctcactcgcctagaaaaaatacattggcatgcaaaccttccaatcttncaatggatcccaacttgaagctcaatcttcatgatggagacttacntcctgatccctcaatgtataagagggntaattggtagaaatggttatctgaccatttcacgtnctgatata

SEQ ID NO: 272571 - DNA, 464 bp, Glycine max
  unsure (1)..(464): unsure at all n locations
tgtctccttgcaaggaacttcctatggnggggtgttcaatggcatatattaatcccttgggtgaaatgggaagtagtgtctctctctaaggaggatgggggtctaggaatcaaagatatttctaaattcaatacagctctgatgggtagatggatatgggctttatcttctaatcataatcagctgtgggttagaatcttattgtctaaatatggtggatggtcagatcttagcagtgggagggataaatcttggcagtctcattggtggagggacctccgaaagttatatcatcagcctgaattcagtattatccagcagcagatggtttggaaggtgggaggaggggaaaanataaaattctggacagataattggttggnggaagaatataatcttgaacagcaattcactcagctattcctgataatgagcagcaaacaatacatattaacatgggaatc

SEQ ID NO: 272572 - DNA, 435 bp, Glycine max
  unsure (1)..(435): unsure at all n locations
agcgtagatatggacctgggtgttgcctatttttatcatatcttctgtaatactcatcacctctatcatatctaataatnttcacatttatgtctaattgcccttttacttcattgtagtaaatttctaaggcattcattgcctaagaaatctcaggcagtaagtagacataaccataacgtgaataatcatcaataatggtgataaagtatcattcctttctgaaagaactaacatcaaaaggtccacaaatatcagcatccacaatttcaagaagctgagtgcttcttgtagctcttttctttgtatgttnntgttagtntcccttaatacaacccacacaaatatttagatccataaaatctagataaggaagaatttcattctttattaatcttctcatcctttctctagaaatgtgacctaaacgtttat

SEQ ID NO: 272573 - DNA, 357 bp, Glycine max
  unsure (1)..(357): unsure at all n locations
tcatacgaataatggagattcaanaatattcaaacttgatttatagaaaataatggcagaaacgcacaaccaatgaagcatagaagtcaccaagaaaaacgttggaaaagtacagtgacagagaggcaacctgaaagtttttcgctggaaaatgatcggcgagctgaaggcatttgccagaaaaaggcagcaagcagaaaggtcaactggaatgcggaaaaggtagccaaaagaagggtgacaagtggagagctccactgaaatgcggaaacaggctgtcggaaaagtgacagcagccggaaaagtcactggaggagaaagggtcgttggaaagacaagaaaaagtgtttttcctta

SEQ ID NO: 272574 - DNA, 347 bp, Glycine max
  unsure (1)..(347): unsure at all n locations
agcttatccttcanannaagagaggctaactgtataaaagagtattcaactctattatgatagagaaccacttttgattttattttgaaaaaaaaaagttattacttacgtgtgacacgtattgataatccatctgtgctatacttcgggtgataaattgtgattccattttagctactgttaactataatggtcgacatgaattaattaatgatgcgagccactaatttggccatggaaaaagactctgccacgtagttctttagggatcttagtaacctcgagtttttttttacagggagaacctcgagtttaaaataacatcaacacatctcaatacaaacata

SEQ ID NO: 272575 - DNA, 351 bp, Glycine max
  unsure (1)..(351): unsure at all n locations
ttctttccntttcttttcctttaaataaatctctaattttctctccttctaattaagtttcagcatcgttttctaattcttatttgatcgatttttaccttctttcgttttttttaaaataatcttctacttgtttttctctctccctttgtgtctgtattgtttttattgttatacggtttcagtgatggctgattatggtttgctcgttcacctgccatgtttgagatttanggttttgagagaaaaaaggtttagataaataaaaatcatgttttttttttgtttattataaatcataaactattattattattattattatgattattattattattattattatta

SEQ ID NO: 272576 - DNA, 374 bp, Glycine max
accactagcataagctagcccataaatagatagtgcatagttattaaacacttttaagttttacaaaactatttttatgttaccataacattggtgagaagtatctatcgactttgtcaatgactaatttccaccaaagaatctatttggtcaacttaaatagagtctttcttgtcaaccatattttttcacccacaagtcgaacttgaaaccttggttatgacattcgaattcaatatcactcaaaccaacaacttgatgtgaaaatgttgtgaatcactgcacgtttgatgatgcccaaaagaaattacttgataatgggtgttatcatcacaaaaggagaatatgaatatatgaataccagaatttgatga

SEQ ID NO: 272577 - DNA, 342 bp, Glycine max
tctgtgaaccagtcccattcctcatcacatcttctgcgagtgaagttggaagttccacgatttgatggaacgaacccctctggctagattttcaagattactcaattttttgagtaccatgccacaccagaccacgagcgtctcactattgcctccttctatatggaggaccctgccttggcgtggttccaattgatgacccggaatggccaaatctcttcatggccaggattcctttatgcccttgaggcttgttttgccccgtcccactatgatgatcccatcggaaccctcttcaagctttctcagcgcggaacagttagtgagtatctttctcagttc

SEQ ID NO: 272578 - DNA, 391 bp, Glycine max
  unsure (1)..(391): unsure at all n locations
agctnttcattcctcgccttaatttcatccttgaaagaaagctaaatgatctttctattacctttttacccttaaccttcattttgtgatcacaacattaatttgtttgacatgcctcctaatatgatttaataagcttagatataaaatattgttctatacatcttatagtcctataataatttatattggtattgacatgcctcctaatatgttttttttttgtttttttagaaatcatgagtacatatttgatgaatattttttttcaaacaatttattttatatctaaaattaagaattaaatcctgaaatcactattatttatgtcaacaattattaaatattattttgaaagttatatgttgaatataatagatgaaaacttatt

SEQ ID NO: 272579 - DNA, 444 bp, Glycine max
  unsure (1)..(444): unsure at all n locations
tcaatgcaagaaaacacactcatgactaggaacccanaatttggttntagaattagaaaagcatganaatagggacttgtttgtaagaatttgggctgccccatgattggtactttgcacctaagtaatgtgggaaatgcttttcaatggtgggtagatacataggtaaatataaggagtatgaaattcctagcaaagtgtgaatgatgtatgatagtatggaatgcctttttgaatgcaagtgtgtgcataatgttaaatatcttgccaatatgcataagggtgagtgaaacaatgaacgtttgtatggtatatatattttgagtgtgtgtaagtagtttgtgatagcaagtgtttaagacatagttaagtggtaaatttgatgcaatgccttaagcgtgagaatgtgtgttcttttcanaatgcatatatatgtatgacaat

SEQ ID NO: 272580 - DNA, 158 bp, Glycine max
agcttctatttttgatataatagagagaatgttacacttgaaactctagagaagaataagagcaccatcacattcactgccatcttcactagaaaacaatgtgaagtgtttcttttcttttggccttgttcaagggagtagctctgtctatctttcct

SEQ ID NO: 272581 - DNA, 427 bp, Glycine max
  unsure (1)..(427): unsure at all n locations
tcttgaaatgaacaaggtatgagtattagttgataatattcttgaatagaatattaattcatttaaggaagatcccaaaacttgcattacttctacctaaaagtaataatgggttcccgccaaacacactacataagctgaaatagcacttttatgattctagcaatatatatggaggtagacaaaccatatatgtcccaactagagtgatgccttcaatttaccccagtttaattttaacttttaagtgccatacaatgtttccttgtgtgcctgttggagtctaagaataaaatttgcattgattacatctttaaaggtctgtgtactgattcttcttctcaacccatgtttnttatgcaatatggcatggaaatatatnntgaatnggtgtttttcaactggtttatgtaatttcttatgtctg

SEQ ID NO: 272582 - DNA, 356 bp, Glycine max
  unsure (1)..(356): unsure at all n locations
ggacgaatgagaaaattggagcgaatgaagagggtgagagtgaagganaaacccatgttgtgacttgcattccgatacggccaagcttcccactagcccaacaatgtcattacttagcccataacaaaccccctccttacccacaacccagttatccacaaaggccatccctaaatcaaccacaaagcctgtctaccgcacttncaatgacgaacaccacctttagcacaaaccanaacaccaaccaagaaatgaattgtgcagcacaaaagcctgtagaattcaccccaattccggtgtcctatgctgactttgctccatatctacttgatactgcaatggtagccataacccct

SEQ ID NO: 272583 - DNA, 355 bp, Glycine max
  unsure (1)..(355): unsure at all n locations
tgaagtgagaaagcgtggaagagtcagtcttcctacttttgtttcttgaccacaaagtggtacctggagatatatcgcggnggtcaggagaccttgnggacgtcaggtggggtgctattgcccaaaaccaagcttgaccaatcccaacccaacccgggcatagtcagtcagtgagaacctgtgacgtacctaaacaggtgagctcctggcagtcaaccaataaaagaacaaagaccacaaagcaaggaggcttgtgtggtggctggccagctatggatcttgagtgatatatggaatanggcctctggtaatcgattaccaagggtgtgtaatcgattacaaggcttaaaaatga

SEQ ID NO: 272584 - DNA, 281 bp, Glycine max
agcttctaaaccaccccggttctctcccgcggtggttacatcaaaaagccaaagtacgtggtgagccacacaagatggaagaataaaaatcaaatattactaaaggtcacataatcattcataagtgaaaaccaaatataatccaatcattcataagtcaaaaccaaatataatccaatcataaaatactaaatgcccaatacccaaagataacgaaagttcagaacatgataacttaaaaagcatagcccaatacacggcttacaataataatctaaaac

SEQ ID NO: 272585 - DNA, 374 bp, Glycine max
tgctcctattgctcttgagcctttgagtcatcttgcttattgtaatgagctccactcttcatcctagacttgattcctctttattctcttgctctagcttctctaataccttgaaactatcattttttttactcatgaagggaaaaattgaaagaattgagtattcttcatcctccttcaatatttcatgagtttatcaagaggtaatgggggtctctccaactatttaatcatatgcttgttgttgaacttccttgaacatgttgagctttgaaattgtcgagcttgctgtcatgtcctgaatctatctactgagctatttttctagaatttttgatgcaaaacaatagttttccgcatgttaaaacatagag

SEQ ID NO: 272586 - DNA, 329 bp, Glycine max
  unsure (1)..(329): unsure at all n locations
tgttcaaaattatatattttaagttatatcaagtactttaaatgcaagtcaaggtcttgcttttatagactcttcatgtctggtcaagaaaactattggaagagttataaccttgagaaaatcatgagaaaaccattcgaagagttacatctcttaatttttattcaaaacttgtcactggtaatcgattacacanaacattttatgaaaggatgtgactcttcacaattgaacttgttgactccatcttgaaatcattatattgggctttttgtcatcatctttgtcatcatcaaaactacttgaatcaacttgattcatcatcatga

SEQ ID NO: 272587 - DNA, 370 bp, Glycine max
  unsure (1)..(370): unsure at all n locations
tagataccaccagcatcaaggaattagggcggttgatggttcctctccttatgcaagctntccgcaagacttacggaanaatcttagagttgaccttagcagaggtatccatagaagccattgcatcactcacccaatactacgaccagcctttgagatgcttcacattcggagacttccaattagtaccaaccattgaagaatttgaggaaattctaggatgtcctctcgggggaagaaaaccatatctttcatccgggtgtctcccctctntgagcagaattgcaactgtggtcaaggattcaacaagagggttggaccgcataatatagactcggaacggcatagcgggcctaccacggaggtacct

SEQ ID NO: 272588 - DNA, 347 bp, Glycine max
tgtctaacgttatgcgagacggagatttacatgctagctatcatcgtttagtaccaagaagagttacgtctaaccgcggcccacgagcataagattgcgggcgaatatgcccaagtatacgccgaaaaagaggctaaaggaagggcgatcgactctttacaccaaaaggcaaccatgtggatggatcggtttgctcttaccttgaacgggagtcaagaacttccccgattgttagcccaggccaaggcgatggcagacacctactccgcccccgaagagattcatgggcttctcggctattgtcagcatatgataaacttaatggcccacataattagaacatcgta

SEQ ID NO: 272589 - DNA, 476 bp, Glycine max
  unsure (1)..(476): unsure at all n locations
gacactatgatactaagcttatcaagaggcttcctccataagcttcattaagaggcttcttccataagcttcctcgtggcttctttgagaagctntctcaagagacttatttgagaaactaaattctcataggctacacacattatgagtatttgactcataggctacattttctcttcgttgtagcaaacacaaaacatatttgtactatgagtatttgactcatagactacattatcttttcgttgtaacgtatttgactcataggctacattntctcttcgttgtagcaaacacaaaacatatttgtactatgagtatttgactcatagactacattatcttttcgttgtaacgaatganaattaatcataaactcacaataaataaaataaaaatataatccaatatccgcttttaaataccttatcanaaatcttaaagaataaatttcaatcaagcgaaaataaacattt

SEQ ID NO: 272590 - DNA, 366 bp, Glycine max
  unsure (1)..(366): unsure at all n locations
taatgccatactggatctgactcccgctccaaatccaacagtaatctcacagtattctcaagctacatgaagaacaagcgagtgttataatcaccctagcaaccagagaaacaagattgctgcaatccatctctaacttaatcaccatacaattaacatattaaatatcaccagtccatgatgctgttagtataggtaggttttactagtgtccatgcaaacaaaaaaattataacgattactatgctcgtaactgttttctcttctatgtgatttagaacactacaatgtcatgtaaaatattgacaacaacccatataacaggtgctcaagtgtgtgaaccaacanatatttttaaattggata

SEQ ID NO: 272591 - DNA, 456 bp, Glycine max
  unsure (1)..(456): unsure at all n locations
tatttcgtgccatgattgttttcatttatcaattcattactcggattcttataatgtggnggtagatatagaagaagcatgctaccccctcttatctaatcacctaatcactaaaaagaacttgttgctatttaaccttacccatagaatcaatcaaggaaattagaatcacaaatcaagcagcaatacctttcagttttgttgaatggaaaccgcctctggtccacaggagacagtttttaaattattgtaatttttaacccctcccctgaaagataaacatagtacataaattcaaagttgcatagcaatactcacataatacatagaaattaagagaacctaagacaagccacaatcaataaagcatcanatctaatgtccttctagtcaaacacaagatacatgttntctcggctatgctntagtatgctatcattctgagagtatatatgt

SEQ ID NO: 272592 - DNA, 450 bp, Glycine max
  unsure (1)..(450): unsure at all n locations
agcttgtcttcatatttgtccaaatgttgattttatctggttgaaggaacaatttttccttagccacaccatccagaaagaatggaaatgatttcatcttcacataatctttatgaatgtcatgtggtcacatggtggaacacactacatgaaaatccttaagatgcttgtgtggatcttcacctgcaagaccatgaaactttggcaggaaatagattagtctagactatagttcataactaatctcagtcttaggatgaatacaccaaggttgatacagaacatcaggtgtagttaattcctttagagtttgattgttatcaaccattatatcaatactaatgtntttagaatcataagcaataaagtaggttgagaaatataatcaacaatgaattcaatatgcattatactactatccaaaactacactatcatgaacaactacact

SEQ ID NO: 272593 - DNA, 451 bp, Glycine max
  unsure (1)..(451): unsure at all n locations
gcttgcatatttccacttttgacatgttcactnttgcatatgatagattttggataatgtcctttacttttttttaaaaaaaagtactaacactctctacggtcttgtacgattntttattttttatttttgcatttttcaaatttagttttttctttgtactaatcctcgaagagtaactctgcttttgatcagagactatgattatactgagagaaatcttgttcttcatcaaatgcttgaaattcaaatgctagatcatattcgaaaaacagagggaataacaaacaaatgagaatataatacaagtgtaaaccttagtattcagaaacatagaataaagagctcatcacatattcgcatgggtgaaaaatacgtgaatatataaatcagtgtatatttttcgttaagcatgggacaaaaacagtgcattggacgttggatattttat

SEQ ID NO: 272594 - DNA, 398 bp, Glycine max
  unsure (1)..(398): unsure at all n locations
caccgacgaaatgtataaagtaggtatgaaaagatgcaaatttaatcaccttgcttggacgaatgagaaaaactggggcaaataaagaggatgagaaggaaggagaaacccatgctgtgactgccattcctatacgaccaagtttcccaccagcccaacaatgtcattactcagccaataacaacccttctccttacccaccacccaaatatccacaaaggccatccctaaatcaaccacaaagcctgtctaccgcacttccaatgacgaacaccacctttagcacaaaccaaaacaccaaccaagaaatgaattttgcagcgaanaggcctgtagaattcaccccaattccggtgtcctatgctgacttgctcccatatctacttgaaaattcaatg

SEQ ID NO: 272595 - DNA, 384 bp, Glycine max
  unsure (1)..(384): unsure at all n locations
ctataaatagggggggaagtgaagtgaanaagggttcagccacttagacatttctctctctttcgaatatgcttggaaaaattgtttccgtgaagaaaatccaagccgaggcgcttccgaaacgtttccgtaacgttttcgtgaggaatttcgcgaaggtttcgaccgttcttcgatgttcttcattcgttcttcatcgttcttcgatcttcaacgggtaagtacctcgaaccaagcttttcgattcattctatgtacccgtggtggtccacattgtgtttcgtgtatttttattctcgtttcatttagttnttataccccttgtgacgtacttaagccattttatttaagtcatttctcgcttaacactaaaataaaataaat

SEQ ID NO: 272596 - DNA, 376 bp, Glycine max
agcttgccatctagctcgcccaggcgagctatgttgcttctcagaagcaccaccttctagaggaacatcctaaaaggcccaagtaggcctggttgctatttgcacccctctgtttactaaatacatccccctgcctttttttgcttattctttttccgtaacgttacggaactttacgaattccgtaacgatacttgttttccttccgtaatgttacggaaccttacggattacgtaatcaccccttttttggcttacggaatgttacggaacctcacgagactgtgtaacaatgcttctttttgatttccgcatgttacggaacttcacggatcgtgcaacaatgctctcttttaacttctggcataatatggaa

SEQ ID NO: 272597 - DNA, 350 bp, Glycine max
  unsure (1)..(350): unsure at all n locations
tcttaaagacaaggaaatatgttgggagcgtattgtgaattatgctaaggattatgccacgcttgcttggattgaggtggngaagctgaanaagtctttacttgagaagaaccatattatagatattgagaggtcggttgaggtgaaagtcgagggatttgcgtccttagctaaaggcgaagtcgtagagcagcatacgaaatggtttgaaaaggctaagagacatgtcatcttccttggttttactaatgtagttgatcttgatgtcattaaagatgtttatgactgtgaaattatgccccttgctgaggtatcacatggcttccatgatacgcctgcaactcacgtta

SEQ ID NO: 272598 - DNA, 368 bp, Glycine max
  unsure (1)..(368): unsure at all n locations
agctntgtgtattttcgtggagcttacagactatgtcgaggaataatacgactaccttgtatgctgtatggtgggcaaaaagagcaccaaaatgagcccccttggataatcggtctacgaccactaatatcaccgtgaaaccgtgggatgatggcagtcctatgatgaaatcgagggacaaatcttcccatatgcgggaaggtatgggaagaggttatagcagactgacaacctctttgtttcatatttaatctgttggcacatgggacattgcacgacgtaccagcggacatctttctgtatatgtggccaatcaaaattctgtcgtaaacgatgaagtgtctttgatacctctgtgtgaccgtcga

SEQ ID NO: 272599 - DNA, 449 bp, Glycine max
  unsure (1)..(449): unsure at all n locations
tccacttgtatattgcaaccataataaagagctttatgttttccctcctgtggatatagccttactcaaggtgaagcacgtaaatctgtttgtgttctttctctcttttcttctctttcaccttgctgcaaaactttgtgtgtatgacatagctntctgctgcatctgctgctgctgttcttgcttgttcttcatcacttccataacagctgccatgcataaattgccaagaaatagattcatacataccaattggaaagctctaacgacctatcaagacaaaatggactatctgcgggaatcaaggcttggaatcctctggccacatcttcttgtgctaaaatcattcagactatcgattacttgctggatcatatcanatcacgaccatgttattatntgagtctactccatagatgttnttgcacaagcaattccgaaagaacatg

SEQ ID NO: 272600 - DNA, 413 bp, Glycine max
  unsure (1)..(413): unsure at all n locations
agctntgcttatttggtcttcgccaatgaaatgttcaatgtgggtccgaacagaggcaaatttgatcatcatactaggacgactgagaaaactggggcaaataaagagggtgaggatgagggagaaacccatgctgtgactgccattcctatacggccaagtttcccaccaacccaacaatatcattactcagccaataacaaacctcctccttacccaccacccagttattcacaaaggccatccctaaatcaaccacaaagcctgtctaccgcacttccaatgacgaagaccacctttagcacaaaccaaaaaaaaaacaccaacaaaaaggaattttgcagcaaaaagcctgtagggttcaccccaaattccgttgtcatatgctaaacttgatcccatatctatttgat

SEQ ID NO: 272601 - DNA, 417 bp, Glycine max
ctcagcttttatttagctgatgaaataattcgggctcttttgcactcgtctaatgacaatagcatcatttctagcactaaattgttgggagttggaagtcatcttctcaattaaattcttggcttcagtaggggtcatgtctcctagggctccaccactggcagcatctatcatgcttctctccatgttaccaagtccttcataaaaatattggagaaaaagctgctccgaaatctggtggtgagggcaactggcacatagtttttttgaatctctcccagtattcatataggctctctccactgagtttcctaatgcttgaaatatcctttctgatggtcgtggtcctagaagcaggaaagaatttttctaagaatactctcttgaggtcatcccagctggtgatggaccgtggag

SEQ ID NO: 272602 - DNA, 365 bp, Glycine max
aaactctatatataggcctgctatttaatggagagggtcaccactattgtgaaacccgaatgcaaattttcattgaggcaataaacttaacattttggaagccatagaagttggaccttatgtacccaccatggtggctggtgatacaacaatagagaaacctatataagagtgatctgaagaagaaagaatattagtgcactacaatttaaaggctaaaaacatcattatttctgccctacgaatggatgaatattctagggtgtccaattgtaagagtgctaatgatatgtgggacactctacatgttacacatgaaggaacaactgatgtccaaagatctatgataaatactctaactcatg

SEQ ID NO: 272603 - DNA, 416 bp, Glycine max
tagggatggaacacttacttgttggtgatgaataaaagctcatatacggaatcaaaaaatgcgaaaaaggatgaccctagggctgcaaactcgtcaatcccgtgggtatggcttttgaaagggggggaaaagaagtttttgaatgcaaaaacgccccccctttcgtcattcttataatttggtgcaggggtggctctatctgatcctgacactggttaaggaatgatcaagatgaagaagaacataactcatggcttttacttggtaaaggggagatcaggtcatgccatggaagactatcttgttgctcaattcaagctagttgacgacaatgaattgggtttatttgcaatatttgatggccactcacgctacagtgtacctgattactcgatgtctcattagcttgataatat

SEQ ID NO: 272604 - DNA, 293 bp, Glycine max
gctatgcttaacaagccaacaaagggagaaagaaggttgtcttccaacccggagattgggtttgggtgcacatgagaaaagaaaggtttccggaacaaaggaaatcaaagcttccaccaaggggagatggaccatttcaagtgcttgaaagaatcaatgacaatgcttacaaagttgagctgtccggtgagtataatgttagctccaccctcaatgtctctgatttatctctttttgatgcagatggagaatccgatttgaggacaaatccttctaagagggagagaatgatg

SEQ ID NO: 272605 - DNA, 301 bp, Glycine max
tcggacatccgtgtgaaaagttatgacgatctgaatttctcaagatcttccgttgttcaatttcgagcttctcgacatattatgcacccgaatcggatatccttgtgaaaagttatgactatttgaattttccgagaatttccgatgtttaatttcgagcgtatcgatatattataagcttgaatcggacatccgtgtgaaaatttatgaccatttgaatttctcaagagcttccgctgttcaatttcgagcttctcgatatgtgatttgcctgaatctgacatccgcgtgaaaagtatac

SEQ ID NO: 272606 - DNA, 261 bp, Glycine max
agctttcatatgtgaaatcaggtgcagccatttctcttagagtcctctcacgaggtggagggtgtgccatgttctcagaatgtgcaaaatcataatgctcagaatcagaatgctcacaattataatgctcaagatcaggatgttcaaaatcaccaataacagaatgcacagattcaccagttatggaatgctcagaatgatcaaaagggataaaatgatgcctaactaatctatgaaatgtcctatctatctcaagatcaa

SEQ ID NO: 272607 - DNA, 384 bp, Glycine max
  unsure (1)..(384): unsure at all n locations
tgagatgaggaagtgttgaagggtgaaactttctgcttttattgttgaccacagagtggtacctggagatatgtcgcggnggtcaggagaccttgtggacgtcaggtggggtgctattgtccaaaaccaagcttgaccaatcccgacccaacccgggcatagtcggtcagtgagaacctgtgatgtacctaagcaggcgagctcctggcagtcaacagataaaaggaacaaagaccacaaagcaaggaggcttgcggtggctggccagctgtgaaacttgattgatatgtgagatatggtctctggtaatcgattaccaagggtgggtaatcgattacaaggcttaaaaatgaagacaggaggctaagatggtctctggtaatc

SEQ ID NO: 272608 - DNA, 532 bp, Glycine max
  unsure (1)..(532): unsure at all n locations
cgacctcccgcgcgtcgttgannncnttcgaganacccccgtttgaccccttcagccggcgnnattgatnccctgtagnacngcgatctctagaacgactgangcatgcaagctttacattttgggtttttcaagccttatgatggaccgaaaacaaaggggaaatactacctgttttctaaggttttttgtttgaactctttaagggaaatatttatgaaccactatgttaaatgaatatgttataacacttgttaatcatggactgggagaaaaaaaattagaaactaaatattaaagattattgtgattttctcaaaaccctacgtttgctcaaactggggattttgctaatcccttgttctattatttgaatgcttaggttctgtggaaaatatagccggtgaccctcctaacagcggtagaagtcagtgattgcgtttttttaggtaacgagctaatatacttagccgatttcttaaagatcatttatgaagaagcaagtatactttcgaatatatgtattttttgn

SEQ ID NO: 272609 - DNA, 415 bp, Glycine max
  unsure (1)..(415): unsure at all n locations
tcaagaaaatgaactntgttagataaattgtctatgtttctgttttgtggagtactcgtgttcaaaagttttcagtcagatatttctcagagacctgattctcattgtttcataactctcaattttctgggttttctattctgactgtcttttgatatgattgtgttgcttgcaggaaaaagttttgggctcatctgatcctgattctggtaaaggaaagagcaagatgaagaagaacataactcatggctttcacttggtaaaggggagatcaggtcatgccatggaagactatcttgttgctcaattcaagcaagttgacgacaatgaattgngtttatttgtcaatattgatggccactcangtcacagtgtacctgattacttgaagtctcatttgttngataatatcttg

SEQ ID NO: 272610 - DNA, 417 bp, Glycine max
  unsure (1)..(417): unsure at all n locations
tcggagcacaagatcttcaagtangtgctccttaattctncattaattnttttttgttttaccttctcttccattggtgnttcttcattcttatccatgtatctcttcacatgtcttgtgctaaatgttgttaacatgattctttataatttccactgattgatcttgctataaaagcttgatttcattttctatggttcaaatttcttgttcatgttcttgaaccatgagttgtgttgagtttaggttcctttgagttttgtcttgctattttttgttgctgaaccctaaaccataaaattcttacaaaatatagtagaagaaaacctacaaaatctagattgacttgttcacgtattgtagttntgtcatacaagtcatgtctagtcatgaaacttgtcacataagatttcttat

SEQ ID NO: 272611 - DNA, 450 bp, Glycine max
  unsure (1)..(450): unsure at all n locations
tcttgtccattgactntcatgaatgcaacattatcgttctgccttanagggaagtgtcagacaaagtgatgccattggtggcctagttgaaactgctttggcatagtattatcattgtggtagagagaccattcttctatcgtctcatgaggcaccttaacatggattntcgttccatgatgtttattaccaattacatcatcaaaatgtcgtggcacaaactgcagacgtattggccatttttaaaaatgcaaatgacatgatgcaaatattgaaatttatatacatttgctcattacataccatttgttcaacaactattgttattgcataagtaatcatggattcccatagtaattcatgcgtccatggttgtcaaactttagaatcaacttgtagactcttacaagtctaagagtttacttggtccttacgagtgaaatcggaagt

SEQ ID NO: 272612 - DNA, 358 bp, Glycine max
  unsure (1)..(358): unsure at all n locations
tgccgcatgcaagcttctctaaaaacccttaatctctctatgtatacattcataggntnttgtctgttaatcctatgagcaaatcgaggcttcagctgcttgatgtttcttccatgctcattgcttcgtaagcttttgcttttaactcttacaatggtttcctctccttaatctattgaagcatcacagattcacagctgcgttcttttctaatatgtaggaagtatgaggaagttaatccacccggtgttgacaaattctatagcatcactaataacacttatgaaaaggcagaggtaagtaaatatgtcggtccgttattcttctttttttgcttcgctattttccacttacttgg

SEQ ID NO: 272613 - DNA, 446 bp, Glycine max
  unsure (1)..(446): unsure at all n locations
taaatccaagaccataaggactgaaccaccttctcaatctattactgtcacaaggtgacctttggtatcttagtttgactatatgatcccatgcctatcctatagcttgattttttntattattttgtatcacttggtaattctagtctcttagtagtctgtgacacattttctcagttttttcaactgaatataagttttttcaagtcaatataagttgcaattaggaaatctttgaataatgaaagaaggtatcaactgtcaacatggttgagtggctgactaagtcagcttatattaaggaactataaagttatataaccatgccactgctacaagtgtacaagtgctattcataatgtccctgttgtgttgtatgtttgtctaggatctgtgggtaatgtngggtcttgcacaaagaataataggcccgtggacattatcac

SEQ ID NO: 272614 - DNA, 444 bp, Glycine max
  unsure (1)..(444): unsure at all n locations
tgccgcatgcaagcttgtccaaaatgcanacaataataattgttttaacggatatccaattgagtattgtaatatatcgagacgcttgtaatggaaaacagaagctcgtagaaaatgcaaatcgcaataacttttaactcggatgatcgattgagtccccgaatatatcgagacactcgaaattgaaagcagaagctctgagcaaattcaaacgacaataacttttgactcggatatccgattgagtcatttaataattcgagacgctcaaaattgaatacagaagctctatgcaaattcaaatgacaantaactttgactcggatgtccgattgagtcattttataatttgagacgctcanaattgaatgcaggagctcttaccaaattcaaatgacaataactntntactcggatgtccgcatgagtcccgtaatatatcta

SEQ ID NO: 272615 - DNA, 278 bp, Glycine max
  unsure (1)..(278): unsure at all n locations
gctntgtattcaatttgagcgtctcgaactattaaatgactcattcgtatatccgagtcanaagctattggtcgttgaatttgctcagaacctcttgttgaaattcgagtggctcgaattaatacgggactctatcgatcatcccaagtaaaaagtattggcttttggatttgcttaaaagtactggtttcaatttcgtgcatctcgatatactacaggactcactcaaactttccagaaaaagttattgtcatttgaattttgtgagagcttctata

SEQ ID NO: 272616 - DNA, 348 bp, Glycine max
  unsure (1)..(348): unsure at all n locations
agctttgattgattcggnctgatgagggattttggtttagtaatcnacgctattttcatagaacacatgagcatgattgatgagagaaatatatttatcagtattagcttgtttgttagaaagacacaccatttctacctactactgtcacttttacatactttgcattttatagttcttagcacaaaagctagtttaaatcttgcttgataatagcaatcatacatattntctcaacaatacttnatttttgaacttaattcaagctaacattagttccctgtgctccatactccgattcactcctttcaattcttaaatacttgacgatccggtgcattttcccgc

SEQ ID NO: 272617 - DNA, 478 bp, Glycine max
  unsure (1)..(478): unsure at all n locations
cgtgacactatgaaactaagctatcgaatcgatacatagttcttnttgagacaatgattgtattttttatgaatctctgctttaatcagttaccatgtgatataatcgattacttctcttataaaaagtgtttcagaagtaatcaagaacactttaatcgattacgttgaggatctaaccgattacattgttcttgaaagttttctagtttttgggaaaaatactttaatcgattgaaatgataatataattggttactctgttgaaataattgattacattgtatatttaattgattacaggtgattataattgttttctctataaatagccaccttgtgttctcacttcatagtacaagttcatgaagtgcgaaaatatgagctaaaataactgaaagaagagaagaaaagtgcttagaaatagtaactcacaacttctaatctttgattatgaagatcattttgtgaaaagtgag

SEQ ID NO: 272618 - DNA, 449 bp, Glycine max
  unsure (1)..(449): unsure at all n locations
atggcgggaatggaatggaatgtgttattggggtgtcgcaactgcattcatggacagaagggaaagatggaacagacctgaagtagaattagtggagatcatgcatttaatctgggtagctgaagctggatcaaaatctgcctgaacgtncgcgtggaggttgatggattcgcccaagtacgaaaaatgcatcgtgaaggaggcgtaattggtgataacaggccccaaagtccgaagccactctacgcccaagacgacctcggctccgctcaggggtagtacccttagcgtcactataaacgtatgtccttgtatacagagctgtgtattggcacatagctgattgcactccattactgaaccattacctaccatcactctaagaggcatggngtcttcaacggccaagttcatgaattatcaacgcgaggctgaatgataatatgagt

SEQ ID NO: 272619 - DNA, 418 bp, Glycine max
  unsure (1)..(418): unsure at all n locations
tacttgcggagattcctttatgggaaagaccgataccagctatgttgattcattgtgatagtactgcgactattgaataaattgagaatcgttattacaatggtaagaaatgacagatacgtcgtaagcacaacatttttagagaattactctcaacaggagctgttagagtggatcacgtacgcactgatgataatttagcagatcctttgaccaaaggattagctagagagaaattcaataacacttctaaaagaatgagactattgcccttactatgatgatcattcataatggtagcccgacctaaatgattggagatcccaagaactatggtcaatgggtaataaccaagtacaaagtgatatgagatgaacatngctgtataagtgaaagcagcatgattcctgaagtaaca

SEQ ID NO: 272620 - DNA, 355 bp, Glycine max
  unsure (1)..(355): unsure at all n locations
agcttattgtctctaacaccatcaggcttgtcttcttccatggtattttttttttttaacttaaccatccttttgtgtttgattaaaagagaaatgatagcaatcctctgatactatttttaatactctttacaattgcctgaaagttggtagaaatcactaatttaattnttgaagattttacttctcatttaataattctttctcgtgatttagatgtaggacacaataattttcagtcgatcatagaaagtatcataaagagtgttcctggcatttctctcgatcaaaatgttgggttttcttaaatttatctttatttaaattttattcccttttaattaaaaaaaaaaac

SEQ ID NO: 272621 - DNA, 381 bp, Glycine max
tagctgaattcagatcgaatcgaagttagcttattctattcttggccagcttagcggaccaaatcagccttagatgcaagggttggacgctaagcgcttaagactcacagcttatcgcatgaacagaattgcgcttatcgcgaggcttgtgcttagcgaaaggaccgttttttcagaaaatattttctaagatatttttcaatcttttttccatgaaattgaaacccttatgttaagcattcaaagattggctaatatactcctatgtacagattacatagcaagttccaaatgatcaaatgcatgaaaaaccaaaaataacacagattgaaactgggttgccttccagtgagcgcttctttaacgtcattagcttgacac

SEQ ID NO: 272622 - DNA, 331 bp, Glycine max
  unsure (1)..(331): unsure at all n locations
ttaatctctctatgttatacattcatacgnttttgtgtgttaatcctatgagcaattcgacgcttcagttgctcgatggttcttccatgctcattgcttcgtaagcttatgcttttaacttttacaacggcgtcctctacttaatctattgaagcatcacagattcacagctgcgttcttttctaatatgtacgaagtatgatgaagttaatccacccggtgttgacaacatctatagcatcactaataacacttatgaagaggcagaggtaagaaaatatgttgctncgttattcttctttttatgcttcgatattttccacttacttgg

SEQ ID NO: 272623 - DNA, 454 bp, Glycine max
taaacatgagagcttgcttgaggggtcagaattctatttgactaattgtcacctttgaggaacctgattagctacattaattaagtttttcttcttaatcacgttttttttcatttgaaaaactctaacataagaatttactcgaggagtccaaacctagttccacttgaaatagttggttcgaaagtttttcattcaaaaagtaaaaatgaatgtttccttgtactaaacaaacccttaatcttcccccaaaatttcaacatgaattcacatatcagtaaatataatacatgcataccagatagaggtcaagatagtcaagttgcaattcctgtaatggtttatccaatggctttggcacatcttctggtgcatgatctgaacaccctaaaatatagccaacaaatcataggatcctttcattcagcaccaaacttgtccaaacacatacaat

SEQ ID NO: 272624 - DNA, 355 bp, Glycine max
  unsure (1)..(355): unsure at all n locations
agctntanattttgaattanaacgttcaatatctgctggtaatcgattaccatatatgtgtgatcaattacacagtgcaaattttgaattcaaattttaatagctattgtaaatcagttttggccactggtaatcgattacatcctctggtaatcaattacgagagagtaaatttcttgaaaaagactttntaacttaaatttcttggccacaacctttgctacttcaattggaattcccttcctattaactatactcttcctaagactttagaggctgtcttgatcatccatcttgaatatcttngatttctttgtcttgaataaagctttgagaaacatgtaaccctttggca

SEQ ID NO: 272625 - DNA, 434 bp, Glycine max
  unsure (1)..(434): unsure at all n locations
ttannaattgaattaaaacgttcaaaaactgctgtgtaatttattaccatatatgtgtaatcgattacacagtgcanattntgaattcaaattttaatagctattgtaaatcagttttggccactggtaatcgattacatcctctggtaatcgattaccagagagtaaatttgttgaaaaagactttttaacttaaatttcttggccaaaccttttgctacttcaattggaattcccttcctattcaatataccctttctaagactagaggcttgtcttgatcatccatcttgaatatctttaatttctttgtcttgaataaagctttgagacgcatgtgaacctttggcatcatcaaaacattcagcttgatcctttgtctacagaaaggaagatgaacgagcaccactttgggcctcttcatcatgggctat

SEQ ID NO: 272626 - DNA, 266 bp, Glycine max
  unsure (1)..(266): unsure at all n locations
agcttggtcttattcgtgcatttgtgcgcaattcataattgccggnacaccacttcaaaacagtgtgtcacaaaggcggaatagaactttaatggatatggctaagagtatgttaatcaattaaactttatctgtatccttgcggatgtataccttgaaaactgccacgtagttgttgaacagggttcctagtaaggtagttccaaaaacaccttttgaactatggacaaataggatacctagtataccgcacctgcatgtttggg

SEQ ID NO: 272627 - DNA, 351 bp, Glycine max
tatagtgctaataagggaaattggctcccaaatttctattatatgtatatatgtagtataattggtgctttgattataattcacttgtaagcatcaatattttaaaaggtccctcatttcgttaaatttcttacatggggttgatggcgatgttattaatcattttacctatctaacataccaattttaagtatttttttatcacactggttgtctggctaagttctttgttttgctacacttatctcttgtgtattcatacatagataatatgtcattcgatagtatggctttggcgtggttggtgtagaaatacttgcagctgactaaagagtattggagttactatat

SEQ ID NO: 272628 - DNA, 394 bp, Glycine max
agcttcattgtctaacaagccaacttacaacttattccccaagagactcattataaggatgcacaggtcaaagttgagtatgagaaaagattgtatgaccaagtgaaggtgcaaattgcaaagaagaatgaaagctatgccaagcaagccaacaagaaaaggaaggaagtggtacttgaacccggtgatgatcctggacatttgaggacaaatgttttccaaaaacgagggaatgatgagaatcatgaaattggccaaatatatgctaaaggcccaagtggagaaggacgaacgcctaattggagaacgatgaacgccccagtggagaaagatgaatgcctatatggagaaggatgaatgcccacaggcagagacactatcaagacaattaatt

SEQ ID NO: 272629 - DNA, 331 bp, Glycine max
tcggtattctatttcgagcgtctcgacatattacgtgactctttccgacatccgagtaaaaagttattgtcgattgaatttgctcataactaccgcattcaattgcgagtgtctcgacatattacggtactcaatcgcacatccgagtaaaaagttattgtcgtctgaatttgctcagagcttccgtattcaatttcgagcgtctcgagatattacgtgactcaatccgacatccgagtcaaaaggtattgtcgttagaatttgctcagagcttcggtattctatttcaagcgcctcgagatattacgtgactcaatccgacatccgagtc

SEQ ID NO: 272630 - DNA, 397 bp, Glycine max
agcttatgcatggaaaatgtaattatgaaattgagatgcccgaagaaacatcctttcttagttaaacatgcattaggtaccatgttcaatcattttgtttttaagtgaaatgggtttatgatcccaacatggttggctcatggtaccgaatatatgcaactaagaatgcagcgtgaattttcgcacttcccttttttttgtttttgctttgtagaggaaaatacaaggatcatgtatgagcaaacaaaaagtatgttgaacgcatatgatgatgcaatgactcatgcaaaatgtgaggctggaatatgataacgaacaaatgccggaacgatatgttcattatgatgttatgaagagatgcttatgcgatgcatgatatgaatgcattttaccgaca

SEQ ID NO: 272631 - DNA, 447 bp, Glycine max
  unsure (1)..(447): unsure at all n locations
cgctttgagtgaaacaatgtgactcttcactnttaaatttgaatttcaacgttcaaggacactggtaatcgattaccaaaacattgtaatcaattacagccttttgaaaaatattggaacgttgtaaattcagtttgaaaacattntcaaactcattntgctactggtaatcgattacaacaatatggtaatcgattaccagagagtaaaaactctttggtaaaggttttgtcaaaaactcatgttctattcaaagttttgaaaaactttntaatacttatcttgattgagtcctttctttattcttgaatcttgatcttgattcttgagatcttgaatcttgaatcttgattcttgtttgtaggctttcttcttgagtcttgaattattcttgattcttgaactcttgacttgttctngattctcttgagatgttctttgattcac

SEQ ID NO: 272632 - DNA, 388 bp, Glycine max
tttgtgcaagaaccagtccatccaatggaatgatgactgtcaagtggcattcggaaggatcaagcaatgccttatgaatcctcctgtccttttgccgttggtgcccgggagacctcttatcctatacatgacggtgttggatgaatcgatggggtgtatgctggggcagcatgacgattccagaaagagggaacgagttgtctactacttgagcaaaaagttccccgcctgtgagatgaattactctctgcttgaaaagacgtgttatgtcttggtatgggtagcccattgtctaaggcagtacatcctaagccacaccacttggttggtatccaagatggacccagtcaagtacattttcgagaaacccactctcaccagatggact

SEQ ID NO: 272633 - DNA, 421 bp, Glycine max
  unsure (1)..(421): unsure at all n locations
tcaagcttatgcatgcgttggaggtaaaagcatgttatataatataaggaaactttttatggagttgttaatgttgttgaacctgngaacaagtacctaacacactgctcaatgaggggcttggtaagatgaatgcaccacctaagagtgatgtaccaggcaagcttgctagcctcttctacaatatcggttcacaaggtggtggacaagagactacaacataagcaccctctatcgtagttcttggtttcttattctattaccaagatacatcaaatattaacatgtggaatccttgataggctcaacaaatatatggtggtaacaacaatgaggatgataaagaaactcaagcaagctgcataatgttntcttgccttcatattagatcatactattactattaaatcataccacaata

SEQ ID NO: 272634 - DNA, 437 bp, Glycine max
  unsure (1)..(437): unsure at all n locations
ngactactntggactgaacatattctcggatgaaataatgatcaatgtctatatgctnggatcgttcatgatgagcagggtttgaagcaagacttatagcagatttattatcacaaaatagtatcacaaagggcacatcaacttcatagtaaagaagtaatttgcttaaccaaacaatttcactagtaacagaagacaaggcatgatattcagcttcaatggatgattttcaaacaatgggttgtttcttataatgccaagaaagaaggttgtttcccataaagacacaaaagccagaagtggatcttctggtatcaacacagttggcccaatcagcatcaacaaaggcagtgaggttgagagagttctgagcanggaaaaacaaaccttgtccaggagcaaatttgatatactgtagaagatgataaacaacatgt

SEQ ID NO: 272635 - DNA, 384 bp, Glycine max
  unsure (1)..(384): unsure at all n locations
agcttacaatannatgatacgctcgaattattatcggaaactctcgagaaatttaaatgggcataacttttcccacggatgtccgattcgggtgcataatatgtcgagagccttcaaattcaacaacagaagctcttgagaaattcaaatggtcataacttttcaaatgtatgtctgattcacgcttataatatatcgatacgctcgaaattaaacatcgaaaactctcgagaaattcaaatggtcataacttttcacacgaatgtccgattcgggcgcataatatgtcgagaggctcgaaattgaacaacagaagctcttgagaaattcaaatggtcataacttttaacacggatgttcgattcacgcttattatatatcgat

SEQ ID NO: 272636 - DNA, 402 bp, Glycine max
  unsure (1)..(402): unsure at all n locations
nntgatttccttgttccggagacctttcttttctcatgtgcacccaaacccaatctccgggttcgaagacaaccttctttctccctttgttggcttgtttagcatagcttttatttttcctctcaatttgatctttgactctctcatgaagcttcttcacatagtccgcctttgcttgaccttctttatgcttaaaaacagaaacattatgcataggcaaaagatcaagaggagttagtgggttaaaaccataaacaacttcaaaaggagaacaattagtggtgctatgaacagctctattgtaagcaaattcaacatggggtaaacaagcttcccaagtttttaagttcttcctcaaaactgtcctaagcaaagttcccaaagtcctattaacaacttccg

SEQ ID NO: 272637 - DNA, 385 bp, Glycine max
  unsure (1)..(385): unsure at all n locations
agcttcttgcgtagctgctcttggtgctcagattatcccanaaacaaatccctcttattactagctattntgaattctttagttcctgaatgtacaaccttcaaattgttgctcgttcccctctttcttttctgcaaaaaagaaaattaaatgctgtcaaaacatggatgaagtcctaagaaaatcaatatcaaagaaaacatggatgaaatcacaattaanaagctcaactacctatcttttagagtcctttggttaatttgtcttgtctccttatgtggtggggttttgtttaataatcttatacttttgccttccaaaaaaaacttatcactaatcctcttttcattaatccaattntgtatgttattgtataaaagatcat

SEQ ID NO: 272638 - DNA, 458 bp, Glycine max
  unsure (1)..(458): unsure at all n locations
tgtactagtcatatatatgttacaaaacaacaaaagcaaatattgaatcgattctatatacagaaatacttaaacaaacctgccaattaggagttttgcggctgtttgcaaattccgcccatgtttctggatcaaggccatacttgactgtaggattagatatttgctgaccttcattgtcagcaaagacaaattttgaagtcaatgaagacttaaattgcctccatcttgctgcaactgttgacatcaccttttttttttgcattttcaccttcagggatatcaaatttgtgttgcacaacaaaaggagttatgtaacattatgtaaatgaatcctttaaaagtaacataacaacaaaatcatgaatacaagtgtatntagaattacttaccaaaatatctttccatattaagctctntagatcatcggngacaacattccaattcgcgtgtacaat

SEQ ID NO: 272639 - DNA, 424 bp, Glycine max
  unsure (1)..(424): unsure at all n locations
agcttcatccgcagatccctcatgtaagactatgcctaaactaaacaacattattgtaacaacataattaanaccaaaacttaacctgtagatccctcatgttagattaagtttcgatcctgcttcaatcaagttctaaggcaacagtacattttccaatgctaaagtcacctaactgtgcacacaaatgggtgatcagaccaaaagcatacaaacattaagcattgaaggaagcattgaacacagaaaacacaatcaattagatattaggtatttacatcagttgttcattagaaatccccaactagggtgtttagccagccattacaaagaaaccctaacaacaaatgagattaaaagcaaagaatgatagtttcttacacaagggggattccttcttctcttctcagcatctcacactcac

SEQ ID NO: 272640 - DNA, 414 bp, Glycine max
  unsure (1)..(414): unsure at all n locations
tcctcgggccattcctgcgaaggcaaacattnggaaagttagtttacaagaaataccacaatcattacaaacaagggccaaacaacacttctcatggcacgagcgtcaacatgcactttataaaataatcatattggggtcgtgctattttatgacacatacgtatttgcacacataaaaattttgtgtgaagcattttacgacacctattcatgtacatattttttgacaaaccttttcatgctacatcctatatatatatacacattntttgaaaggcttctttcgttacctactcacaaatacacatattttgaaaaacacttttacgctacccatccaacactntgtaaggcacttcatgctatatatattcatattatgcaaggcattttcatgctatatatattcata

SEQ ID NO: 272641 - DNA, 358 bp, Glycine max
  unsure (1)..(358): unsure at all n locations
agcttctcccncaattntctataaatagggggagaagtgaagtgaaaaagggtttattcccttacgcacttctctctctttcgaatttgcttggaaaaattgtttccgtgaagaaaatccaagccgaggcacttccgaaacatttccgtgaggaatttcgcgaaggtttcgaccgttcttcgacgttcttccttcgntcttcatcgttcttcgatcttcaacgggtaagtacctcgaaccaagcttttcgattcattctatgtacccgcggcggtccacattgtgtntcgtgtatttttattctcgctccatttgctctttatacccccttttgacgtgcttaagccattttatttaa

SEQ ID NO: 272642 - DNA, 483 bp, Glycine max
  unsure (1)..(483): unsure at all n locations
tcagcttagggaaaggccaaactcctcttccanaatctgatttcatgcttaaataggtttctttgttcgtgcttgcacacttagcgcaactctaaaccgcttagcacgcattagtgaatttcggcttagcgcgtgccttctcgctcagtggatggactcaagcggtgcgcttagcagaatgaaccctcactcagcgaacatgcacaactcatccttcttccatgatagaagaatgaagcaaaatgccctcatcacttgtctttctcaaagcatgcaattattcaaggagaagaataaaatgtaacctatagaaataaatgaagttaggcataagacaaatatcaaggaaagtaacttanaccacagtctcacggcttctgtttcactcaagcacatgtgtttaagatattcattaataacaactagcaagaggtccagtctttgaacttcatctcatgtcatcaagtcaggaatgcataaaca

SEQ ID NO: 272643 - DNA, 317 bp, Glycine max
  unsure (1)..(317): unsure at all n locations
agctttttgtttcttttgcttanattttttttgctcatacacattaggtttctttctttgcatacaatgcatgccatataagttaagattttgaatataatagttattcattcacgtattattcattgcatatcttatagcatcatgttagtatgattcaacacattttgtgcatcttcctcacacatattgctcatgccttgtatgtccatgcattcttatgatcatgcaacattcatccatgcgacggaaacatgggcatctttttgcatgatggtgcacatcgggttagcgaatgttaggtcatcacctcataa

SEQ ID NO: 272644 - DNA, 266 bp, Glycine max
cacacccattttttcttttaaagccattcacaacatactctagaaaaagaattatactcaattcaagaaattgtggatgcctgatatcttatttctagaaaagaatattttttatctaaaaaattatttttttaacatatcaaaattacatagtgatatcatgtacaacaaatgtaattccaaatagaattaccttacttctcatactgttaaacaaaaaaagatttacacacacactgaatatttatcaagctaaaaagaaaaat

SEQ ID NO: 272645 - DNA, 271 bp, Glycine max
agagcggactacaaaatatgtctttagctaaggtatcttaaaggtgataaacttatatcatattaacatgctcagctaacacgtctaggtagacttttaaataggtcacatcagtcttaaaaataaagtctatggctagtaacatgctaagctcacgccttgaattatttaacaaactagacctatttaacaaaagccttgtttgacctaacctattctcacccctagctgtgataaagatctaactactacctaagcgtgtgccacttat

SEQ ID NO: 272646 - DNA, 419 bp, Glycine max
  unsure (1)..(419): unsure at all n locations
cctgcttatgtggcagggcgggctaccttcactttcttgtctcaactgcgagctttggccactgcttttccttcccgcggtgcttctcttcatatctgcctgagtgggcttatagcctaaaccatacttcccacgatttcctttggcatttatcaagctagttatgccgtcgttgtctttgcctaaacccattccgggttcgtaaccgttccccaacataactcgggccatcattactgctgcatcggacaggcaaggctgcccagagaaggagtccacagaggaaatgcttaccacctcaaaagactggaaagcggtttctaacgattcctctgcggcttccacataaggcatagaggatgggcagctcaccaagatgtcttcctcgcctgacacgatgaccatatgcncctccacta

SEQ ID NO: 272647 - DNA, 237 bp, Glycine max
agcttctagatgatttatgtctgcgaatcggtcatcctgcgagatgttatgaccatctgtagttctcgagtgctcacgctgtaaattgtcagcggctccacattttatgttctccaataaacatcagagcgagctgtcatgaccattctgatttgctgagagcttccgtatttcaatttccagcgtctagatgacttatgtcacccactcctacatctcattgaaatgccttgacca

SEQ ID NO: 272648 - DNA, 460 bp, Glycine max
  unsure (1)..(460): unsure at all n locations
tacggacactttaatctaagctataatgttcttaagaaatagctaactaatgccctcatacttgcgttgccaaactttcaaaaatcttttgaaattgagtgtgatgcttcaaatgttgggattggggctgtgttgatgcaagaaggccatccaattgcttattttattgaaaagttaagtggtcctacccttaactattcaacttatgataatgagttgtatgccttagtacgggctttgaaaacatggcaacactacctttatcccaaggaatntgtcattcatagtgaccatgagtccctcaaatatatcaaggggcaaggaaagcttaacaaaaggcatgctaagtgtgtggaattcctatagcaattcccttatgttatcaaacataaaaagggaacaggtaatattgtagccgatgctctttctcngcgtcatgcattactttctatgcttgaac

SEQ ID NO: 272649 - DNA, 321 bp, Glycine max
agcttgtatgtttatggggtatccatcacatgtggtactaggtggcggtcgggcgatggtgcacaacaagttttccacatccacaaagcgcgcataaacccaccatcccctgttgcccacctgcaactgagctcacgtactcccacgtagcccatattctcgtttctctcaacaccgggttcccatcaatcctcccaagcttccacaacatccaagcaaaacaacactcaaacagcacaagctatcacaaccaatcaaaacagagcaaaggcagaaaactctgccaaacaccaaccaaatcacaacttttctcacttaaag

SEQ ID NO: 272650 - DNA, 453 bp, Glycine max
  unsure (1)..(453): unsure at all n locations
tgacaaataattntcttaggtagtgtgcaataccccaattattagcttcctgtaaagcactaataaattcttgatcactacctaggaagccttttgcaaaacatgcttccctaaatgtatgatataccagaccgttgactgttctaatgtcactgtaagactgtgcacctttggcagtggatagcatcattctaaggtaaaacagttcaccagctgaaggtgggacccacatgagtctgcctattgtattcccttgttttcttggttgccaacatcttttgcgggcaacataaacaaatcttgagatatattgatgatatgtaagatcccatccataagaatatattntgttagaatgcatccaagctgtgaacatggattcttttattggtgtttttgatagaacttcacctacttgtngatcatctgtccagtaaacatgtntgttgattt

SEQ ID NO: 272651 - DNA, 488 bp, Glycine max
  unsure (1)..(488): unsure at all n locations
cgctccggcncttanacctcganncccnttgatacgttctagaccggatcttaatcacctgagctgaacttgatttttctgatacatattttgccaggtgaaattaatcttacctcgaacaaagaataaaggaaatttctatcaaaaaatgaaaaggaagatttcatcaagagaagcactaaatgaaagaaggagaattcctatccaagagtgggagatagctaaaagataagaaagacaattccaatcaaagaatgggagaaagttaanaatgaagaagaagaccgaaagacagctcctgattatggatcgaaagataacataaaaaatgtgcagaaatgtctctggaccggacaatatctgaataatacagaattgtcaccaaatgaacaaaacgatgganaggaaaccacgacctttactgttattcgcacccttttgttatccagaagcgcggggcccgatgataaccggagataccttatgcn

SEQ ID NO: 272652 - DNA, 344 bp, Glycine max
ttaaactgagcttgcctttcggacggggcgtatcacatttctttcagacttttatcacacagtctctcacagactttagatgtgggagccaagccaatccttgtgtgcggactctcgaccactcattatagccgccgatgatcccattactgcgtaccctaaaatatctgatctttcttcacgccgcattccatgccttgcgaactccgtggagtaccctaacatagtggtcactgaaacctcgtactatgaaatgcgataagccttcatctgatggtactcctatcatgggacatgcttctcatgaagatagaatccatgatcatactttcttctatcgaggg

SEQ ID NO: 272653 - DNA, 371 bp, Glycine max
gactaagtgctcaccaacactagatattaatcccttatttggtatcatgtaaacctgttcttctagatcaccattcatgaacgccattttttcatccatgtgatgcagctcaagatcaaaatgagctactaatgccaaaattactcgaagagagtctttcttagatacaggggaaaaggtctctctgtaatcgattccttctctttgagtgaatcctttagcaacaagtcttgccgtatgtctctcaatgtggccttctgagtctgtctttgtttagaagacccatctacatccgatggcgtggacaccagcatgcaactcaacgagatctcaaactcggttagatgccatagaatccatctcatccctca

SEQ ID NO: 272654 - DNA, 220 bp, Glycine max
ttactggcttattaaaatatatgaattagattaaattaaactatttggtattttttattatattttcaggattaattggttttattataatcctacccaatatgagattcttattaatggacctaaaatggtctttgtgtgtttggtaatgaaaaacccacatagaccaatttattagtattttgttacaaaaaattactttttattttatactacatat

SEQ ID NO: 272655 - DNA, 392 bp, Glycine max
  unsure (1)..(392): unsure at all n locations
tcaaaccacagcaacacanaatctaggtatccaaaacccctcaatttaatggattttcaaggtttgagaagtgaaattgagaatgagctaaatttgaagcaaactctcacctcacacaagtctataacatcaatttaaacttgttcaaactggatttacgcctaaaatttcaccgaatcaaaatttgactcctcaacacccaaatttaccctagaaatgactctttgttcactttggtcatttgtttttctctctagcacagcccanactttctcattgaaattctgataccaggggacagatgtcgtaccggatgtcacgacatcacgcttcagaacatgcagattatatgtgtccgtatgaccagattaaacaagttaataacacaagag

SEQ ID NO: 272656 - DNA, 427 bp, Glycine max
  unsure (1)..(427): unsure at all n locations
agcttacatggacaccgtttaatcactaagctcttctaactacaagaagcacctttgatctaatgccaattcctataattaggatgtctaaggaactaggtaaccctttaacttggaaaaattattagtagcagtttactttcttaatctctggtcaatgctacttttgtgttagattcaatctaaattccacagacataaaaaaccacatttgatttttagaatctatatctattattaattaaaatgtataacgattgtttttttgggcttaatgtacacgtacagctntaaaagcttacttggacaacgataaaagttacgtaaaaatacttgtttactgaacaactaacaagtttttttagctaataaaaaaattaaaaactaattgaaacaacttgtccaacatagccgaactaagcacaca

SEQ ID NO: 272657 - DNA, 435 bp, Glycine max
tatatataaatagtattgaattataaactatgtcgggaaattattatctaacgtgtgttactcataatttctaagaatactagtcattactttggagataagtcacttcgtattaatattatgttcaagaaaaaaaaatgtcaactataaaaaatacaaatgtgaaaaatatatagacattattttttgttaatatataaatatagaaattataacataaacaggtaagcgttttaatttttgaaaaaacataaaaaaattaattaatgtaatattattataatgaagacttgcaaattactattttatgatacatgttgcttcacatattaatttagtgaaacaaaagaaattcaatttggttgcataactacattgttattctcttagtaaacaaaaaacattgttactcctttcacactataaaaattatcg

SEQ ID NO: 272658 - DNA, 467 bp, Glycine max
ctgccgcatgcaagcttgtgatgtctctgttttataaagttctttacacaactcaatagacagttatctggaaatcattgcaaattggaatctagctcttagcttgatgtacttggctactgattcgtaattgattgtatccagttttcttgctagttctatatgcacttactattcaacaaccaattgtttggcatcttagctattgtctgtggtgccaagctgctgaccctaaaatctgttctgagatagtggatagtgggatggctgctatacaattttaaatacaaattaaaatactttgtactacccatataaatggttaaaactaaaaacaatcccaaatttaagatatattcatatttaatattaaattaaaaaatgataatctaaagctaaacaacaagttaataataacaaacatcaggaatcaaacaatatcttttgcaagtcaattacacttaaca

SEQ ID NO: 272659 - DNA, 417 bp, Glycine max
  unsure (1)..(417): unsure at all n locations
atacggacacttaaaactaagcttaagttgctnggatagcaacttgtttcgggccagcaaatcgtcctgtgatgaaagctccagcaggcttcttttggttgggatgtgtgctctatcacacaagattgcatggtcactagcagccatattctcaatcaattccatggcttcttcaggggtcttcaattttatttttccccctgtagaagcatctaaaagctgcttggattgtggccttaccccgtcaatgaaaatattgagctggatcggttctgaaaatccatgagtaggcgtctttcttagttacccacgaaatctttccaaagcctcactcaagggctcgtctggaaattgatgaaagaatgagatggcagcttttcctttagtagtcttggactctgggaagtatttcttcaa

SEQ ID NO: 272660 - DNA, 465 bp, Glycine max
  unsure (1)..(465): unsure at all n locations
agcttgagagggttatggaacgaacgatagattgtcttatccaaaatanactgtatgtagatagctgaagtcttctttttggctcaaaacgatcaattgctgtgataagtcccttaactcctgcctgacaaagatcttgaaacctcgggccacttgcaaaatcttgaaaatatttgttgatcacgaacaatacaagccggagattgtgctgcaaacgatatcaccatgatttcttaatctcagtataactattactcattccaaagaatagcaacaaacacagcaacaattaatccattcatatccaaagagacagagaaagagtagtaaaaggaatggagatgtaacatatcactgatcttcgaaggcttcttataagcaaatctaanataagagttgaacattccatgatacctttatgaagttgtttctcgcagctcgaccaacctctatagcttttcttac

SEQ ID NO: 272661 - DNA, 449 bp, Glycine max
  unsure (1)..(449): unsure at all n locations
atattgagtgtgaattgagttctgcactattaaactatttgaacaaaagtaaaatattcaaaactataaagtgtgacaactatcaagttaaaagcgttgggaagtgtcctactaaatttctcttgctatataaaatgtgtttttctctatttaacgttatcctagtgttcttacactaagaaattactcaaaccatgattcctcacatgaaggaacctaactctctttagcctttgttcttgattcctcaacaaacttgttctaaaagagttgcactaagtctatagtgtaaaatggactagatcactacactccatttttagacatacagatttctagcttgctctatcaagttctaaggttttaaagcattttccaatactaaaaagcctaactacacatacaaatgggtgatcaagctacaaacatgtganataagcatagataga

SEQ ID NO: 272662 - DNA, 339 bp, Glycine max
  unsure (1)..(339): unsure at all n locations
agcttagggatggaatacttacttgttggtgatgaacaaaagcgcanaacggttataaaaaatgcgaaaaatgatgaccctagggctgcaaactcgtaaatcccgtgggtatggcttttgaaaggggggaaaagaagtttttgaatgcaaaaacgtcccccctttcgtcattcttatattttggtgcaagggtggctcgcctangcgagctcagctcgcccaagcgagctcagctcgcccaggcgagctaacctgcatttnttttttttgagaggaacattaaccatgtncccctctttcttatggtttacccgtntgcctaacttgaacttacttaag

SEQ ID NO: 272663 - DNA, 448 bp, Glycine max
  unsure (1)..(448): unsure at all n locations
tgaacaggatgctntaatggaggagaagaaagagagaatgttggagcacgaaattgaaggaataaaagagggaaagaagtggaactntgaagtgtatctcataagactttcattcatcaaagttacaacaagtgttacacatgcttctatttatagactaggtagcttccttgagaagctttcttaagaaaacttccttgagaagctttcttaagaaaacttccttgagaagctttcttaagaaaacttccttgagaagcttctttgagaaaacttccttgagaagctagagtttagctacacacacccatctaaaaactaagctcacctccttgagaagcttccttgagaagctagagcttagctacacacccctataatagctaagctcacccncgtgacaaanaaacatgagaatacaaaaaanatcctactacaaagactactc

SEQ ID NO: 272664 - DNA, 417 bp, Glycine max
  unsure (1)..(417): unsure at all n locations
cctgccgcatcaagcttctaaactttatacaagaatgaagctcttataccacttgttggacaagtttcctcaaatatcttaagaagggggggggggttgaattaagatatcacaaactatttccccaattaaaattttatttcactttctattcaagttataaattcccttaataatgaacttcttaaatactgattctaatggaacaatttgaatatgaatataagacaatcataaataaacgagtttaaggcaagagaaaatgcaaactcatatttatactggttccggcacacccttgtgcctacctccagtcccaagcaacccgcttgagagttccactatcttgtaaacacctattacaagatctgaaccacacaacgacaaccctctcttttnttcacatttctttacaac

SEQ ID NO: 272665 - DNA, 378 bp, Glycine max
  unsure (1)..(378): unsure at all n locations
tgtgcattcaatatcctgataagggtgttccatatgttctcaagactgtactaatacatttgctgcccaagtttcatggtcttgcaggtgaagatccttataagcatcttaaggagttccgtattgtttgttccaccatgaagccccctgatgtccaagaagatcatatctttctaaaggcttttcctcattctctggagggagtggcaaaagattggctatactaccttgctcctaggtctattttcaactgngatgaccttaatagggtgttcttggagaaattcttccctgcatctaggaccactgccatcagaaaagacattntatgcatcangcaacttagtggagaaaacttgtatgagtactgngaaagat

SEQ ID NO: 272666 - DNA, 322 bp, Glycine max
actttcttgaatgagtaattttaacataacaaatacgtttaaataatgtatgcatcacaataacttaatgttcttcaatgcaatggacattggcaacttgtggttatatgtcctaaaaacaatgttgtcgccttatttcattccttgcacaataaacatgacaactacttgagaggaatggttaatagggttagtttaatttgtaacagatttactttatccttagtattatacataaatattctagtcttgaaatatacatgtatgtttctcttaacccatactttgaagggattcaatgataaacacagaagtaaatctg

SEQ ID NO: 272667 - DNA, 134 bp, Glycine max
cgaaagctcaaggatgagatacttacttgttggtgtgagtatgagtataaaaaatgaaagcaaaatgcaaccaaaggtggcttgtgggagcaaaaaccatgagtcccgtaagctttctttattgaatgaggggg

SEQ ID NO: 272668 - DNA, 199 bp, Glycine max
  unsure (1)..(199): unsure at all n locations
agcttgagattatgaagtgctgaagggngaaacttcctgcttttattggtgatcacagagcggaacctggagatatgtcggcgtggtcacgagatattggggacgttaggtggggtgctattgcccaaaaccaatcttgacccatccccacccaacccgggcatagcctgtcagcgagaacctgtgatgtacctaagca

SEQ ID NO: 272669 - DNA, 413 bp, Glycine max
  unsure (1)..(413): unsure at all n locations
nttcgattcattctatgtacccgtagtggtccacattgtgtttcgtgcatttttattctcattnttgtttactttatataccccctcttgacgtgcttaagccattttacttaagtcatttctcgcttaacttaaaaataaaataaatttccaccgaacgtttgaattgtgttatccgttaacttcggttaaaataaattccgaccgttcggtcgtgccgtaaccacgttggaaatcaaaaaaagaggtaaaaaaataatataataatcaaaaaacatcttttagtaaaataaagcggaaaatcaatcggacgttgtctctttgggatttttcattcttaatcgaattgattaataactaaagtgaaactaatgctaaaatcaactcgcctagtcaagctcgtccacaaaaat

SEQ ID NO: 272670 - DNA, 295 bp, Glycine max
  unsure (1)..(295): unsure at all n locations
cttaattcttcttgacatcatcaaaatcttcatgaattacattcttcctctttttgatgatgacaaccacctgtaggttaggagcaacaacaaagaaaatatctatttgcatatagtttactcccccttggttntacaatgattgcttatatgagacaattgaagatttcatatttttcatatataaaaagttgtctcataaaacaatagataattcttcttactattntatcttttatctttctctcccccttgtcaacatcaaaaacaaatcatgaatagaaaggagaaagat

SEQ ID NO: 272671 - DNA, 478 bp, Glycine max
  unsure (1)..(478): unsure at all n locations
cactatgaatactaaccttataccgatatgggctcaaaacggcagcaggtatcttcattttctgagtaagcggtctccatggtttgttcatcaattcagtgggctgaacaaaatcatcctctctttcattgacaaaaccaccttcctttggccatatagcattgccatagccataggtgccctttgttcaaagagccacctatcatgatcaaaatctccagtttggctcctcaccagtgctgacttcgttgacttcatcatggacaatctcctctacattctagacattccacttggtggaggaagtagaaggggatgcccactatctatagccacttcatctagctctgtgttctgatatgggtccgcgcatcctgggcatataccacctnctggtcttactgcatttatataacaatctctgcatatcttaaaatgacactcacatggaaaaatatcatcacacagttcatcgctc

SEQ ID NO: 272672 - DNA, 400 bp, Glycine max
  unsure (1)..(400): unsure at all n locations
agcttncaacttgtacagagaaagaaagtgtgttatagagaaagagaaaggagtcttttgccacgggagaaagagaaatggaaaaataaaaaggaaatcaaaaagacttgggatgaagattggaaaagaagacacctgaaacaatacgtagaacaaccaagggagtgggaaatgaaaaggttagaaaagaagacacttggaacaatatgtggagcaaccaagggagtgggaaatgaaaaggttaaaagaccaaaaaaccaaggaaatggacaggtgtcacaaccttaagtaagggcacaatatgcttttctagggggttctcttttatagatagtactagtctgtaacccgtgcgtacgcacgggtcactntggtagtaaaattgctatcacagtaatat

SEQ ID NO: 272673 - DNA, 393 bp, Glycine max
  unsure (1)..(393): unsure at all n locations
caaaatagtgatatttatattactcaattgtaagactatatttgagttctattcaactcgaccatcaacacattggtaaatattttacttaaatgggttcagtagatgtttagtcttctaatatttcaaaacttagattttaatccttgaataagagcttaactagtcaagtctcaacttcttttttgttaaaattntagtctttcaacaaaagcttgaccagatccttaaactttntaaaaattatattctaaatgattaaatagaagtttaaatctcattattttatttatttatctatctaataagaggttagaagttaaaaattaaaatcttaaaaaccttgatgaatactttgtgttcatagaatacagacctttaacaaaaaagaaa

SEQ ID NO: 272674 - DNA, 338 bp, Glycine max
  unsure (1)..(338): unsure at all n locations
agctntgagtcataatcttgactcaccatatttcttaccctcggaagcaaaaaaggaaggaaggaaaggaaattccccatcaaagagaaagaaaaaaaggaaggaaaggaaattccccatcaaagagaaagcaaaaaaggaaggaaaggaaattcccaatcaaagagtgtgagaaagagaaaaaaaagaaacgaaaggaaattcccaatcaaagaagtgggagaaagaanaaagaaaagaaagaaaattcccaaccaaagaatgggagaaagtaaaaaagaagganaccatgacctanaagtggtcttcttcctttgattaccaaccaaaaatctgtg

SEQ ID NO: 272675 - DNA, 359 bp, Glycine max
  unsure (1)..(359): unsure at all n locations
tgccacccagctcgcccaggcgagcagggttgcttcctctataagcaacagccttctggaggaatcttctggagggcccaagtgggcctggttgctatttgcacccccatttttactaaatacacccccctgctttttttttgtgattcttttttggtaaagttatggaaacatacgaattttgtaacgatacttgttttctttccgtaatgttacggaaccttgcggatcacataatcatcccctttttgacttacggaatgttacggaacctcactaattgtgcaacgatgcttccatttgatctccggtgtgtcacggaaccttacgaatngtgcatcaatattttcttttgtttt

SEQ ID NO: 272676 - DNA, 402 bp, Glycine max
  unsure (1)..(402): unsure at all n locations
ctggttatataaacgaggatatgagctacgtgggagtacgtgagctcaaatggaggtgggcaacaagggatggtgggtttatgcccgctttgtggatgtggaaaacttggtgtgcaccatcgcccgaacgccacctagtaccacatgtgatgggtactccataatcctacaagcttgagatgaggaagtgttgaagggtgaaacttcctgcttttattgttgaccacagagtggtacctggagatatgtcgcgggggtcaagagaccttggcgacgtcaggtggggtgctattgcccaaaaccaagcttgaccaatcctgacccaacccgggcatagtcggtcagtgagaacctgtgatgtacctaaacaggcgagctcctggcagtcaacagataanaagg

SEQ ID NO: 272677 - DNA, 433 bp, Glycine max
  unsure (1)..(433): unsure at all n locations
ngaagaaactngaaaatgttttgtcttttacatgtccaactctcttcaatggcattggtatttattcttgtattatgtgttgcatcttagtctctatcatttcatatgtgcatcatgcatcatcacatatgagtaagaagaaacgcttttaagttagaaatctttagtgtttaaaattctctattttaatcgattataagcatggtcataatcgaatacacaaatgtttgtagcttgcagagaagtttctcttatcggtttcgtcgattacaaggtaattgtaatcgattacacagttcanataagacaatgattggtttttcaagagtctntgctttaatcgaatactaggtgatcaattacttctctcttaaaaagtgtttcataagtgatcaagaacactttaatcgattaccaagttcttgaaagtttt

SEQ ID NO: 272678 - DNA, 378 bp, Glycine max
  unsure (1)..(378): unsure at all n locations
tgtgtttgcgatatgccaagatgatgttccgagtgctttggatttggtaccaccatgccctcctgatttccaactgggaaattggcgagtggaggaacgccccggtgtcgcaacctacccttcggcgggagggcgacgcgtgactcgcgggatgcgtgttccacgaaaggaaatacgcgcggagtcgccaccaacgtttatttgaggaaaacgtcggaaaacccgcaaagacgagatctacgaacttttaatgaaaggttcggagtgtttttaccacgggaaagattaacacccccaccccccgccanggacggcagccttaatcgatgtgcaacatgacttgattttatgtccctttatggcctataccctcacccg

SEQ ID NO: 272679 - DNA, 410 bp, Glycine max
  unsure (1)..(410): unsure at all n locations
agatgntctgatccctgaattccggcctatgatactacctgagtggatgcatgagaggtgtgttttgctgtgtcttatgccaaagttatggatattccccctttttatacaggcacaaataataattcctcaccttgggaattctaagtatgaccgaaatctatgacacagtttttaaaagaaaaaaaacacgtctatatattatatattcatataattattattattaatatgactantatgaaatattaaatatgactactggttctgttatatacagagaggcttcagtattaatccaagttatgggctgtgggtcacgccaagctgtgtatagagctatgtgttttatcaatcgaaataaaatattatattttcacagttttctatgatatgtgcccaatatataa

SEQ ID NO: 272680 - DNA, 375 bp, Glycine max
tgaggaagtgtataagggtgaatcttcctgcttttaatcgctgactacagagtggtacctggatatatgtcgcgggggtcaggagaccttggggacgtcaggtggggtgctattgcccaaaaccatgcttgaccaatcccgacccaacccgggcatagtcagtcagtgagaacttgtgatgtacctaagcaggcgagctcctggcagtcaacagataaaaggaacaaagaccacaaagcaaggaggcttgtgtggtggctggccaactgtgaatcttgtgtgatatatgggttatggtctttggtaatcgattaccaagggtgggtaatcgattacaaggcttaaaaatgaagacaggaggctaagatggtctct

SEQ ID NO: 272681 - DNA, 465 bp, Glycine max
  unsure (1)..(465): unsure at all n locations
cctcgagatgaggaagtatagaagggtgaaacttcctgctnttattcgttgaccacagagtggtacctagagatatgtcgcggnggtcaggagaccttgtggacgtcaggtggggtgctattgcccaaaaccaagcttgaccaatcccgacccaacccgggcatagtcggtcagtgagaacctgtgatgtacctaaacaggcgagctcctggcagtcaacagataaaaggaataaagaccacaaagcaaggaggcttgtggtggctggccagctgtgaaaactctagagtatggtattactgtcaaacccttttgagttaactcataatgacttaagagactcattttttctttcatttaattttcctggtcaggatatantttttattcatagagctcanactcattactaagagttgatggattccttcttgactaatcactaattntacaggtttttaatca

SEQ ID NO: 272682 - DNA, 441 bp, Glycine max
  unsure (1)..(441): unsure at all n locations
ggacacttaaatctaagcttgatacacgcagagactaacgtcgtctnttgtgaccttcttcaattgcggccgacaagcctgttgacacgtggagatttacgtcatcttccgcgcttacaagatctgtcatattgagttttgagtcacgctgacgggcggaaatactcgagtagttatccttataaactttttgttgtttgtaagacgaaaagcctgatagcacgcagagactaacgtcgtcttctgcgcccttcgtcaatcgcggccgacaagcccgttgacatgcggagatttacgtcatcttccgcgctcacaagatctgtcatactgacttttgagtcacgctgacgggcgaaaatacccgagtggttatacgtataaacttactgctgtctgtaagacgaaaagcttgatagcacgtagagactaacgtcgtctttt

SEQ ID NO: 272683 - DNA, 395 bp, Glycine max
  unsure (1)..(395): unsure at all n locations
taatgtggcacggtggaacctctttggcttgttgtcccgaccgctggccttggcctttgttctttctttncgaggtgtttttccttacgttagcccacgtaggtttatagcctaacccaaatttcccgtggtttcctttgacacttactaggccagccctgtcgccgttgtgcttgcccaaacccattctgggcttgtagcggtgcccgaacatcacctgngccaccatcattgccatgccagacaggcggngctgccttgggagggaatctatggaagcgatgcttactacctcaaatgattggaaagccgttttcaatgactcctccacggcttccatatacgacatagaggaagaacaacttaccaggacatcttccttacctgatactatg

SEQ ID NO: 272684 - DNA, 419 bp, Glycine max
actaagcttgaggtccactagatgccttagttaacctggtgacccatctggccatgaataaaaaatctgcacttgtcgccagactctgtggtttatgctcatttgtcgaccaccacacagacctttgcccttctatgcaacaatctgaagcaattgaacagcctgaagcttatgctgcaaacatctacaacagaccttctcaacctcagcagcaaaatcaaccacaatagaacaattatgacctctccagcaacaggtacaatcatgggtggaggaatcatcctaaccttatatggtcgaatccttcacaacagccgcaacaacaaccttattttcaaaatgttgctggcccaagcagaccatacgttcgtccaccaatccagcagcgacaacagcaacagccgcagaaacagcaaaca

SEQ ID NO: 272685 - DNA, 405 bp, Glycine max
  unsure (1)..(405): unsure at all n locations
agcttgtaatgataagaaaagagcaacacactctttcatctaataagcagcaagtattaaaaaaattgtaagtataaaataaaagtgtgtgtgctgctaattaaaaaaaagaaaagctaagtgcggaaaacccagtaatagagttagaataaaaagaaaaagggtgatctatggatgaatgctctcctagaacctaagcttttgcatcctangaaaaccatgaattgattgcagcccatcatcgttacaagcctaaaaaagtccttcggattcagtttgtgtgttcttgactgtatggcatgagatgaactgcaaaggttgagacttatgttggttgttgattgatggataacctaaacactcgtgcttgagtgaaacagtagttgtgaggctttggttaatgat

SEQ ID NO: 272686 - DNA, 440 bp, Glycine max
  unsure (1)..(440): unsure at all n locations
ntgaatggcaagggatttatccaaagtacagacactgccatgtgcttttttccacagtgaaagtgacctttaagggaatattccatgaaagcattctattctcttctatactatccttttcattagaattatcatgttcacccttatctcaagaagtggcctcatttgaagttttagactacttggacgcaggatcttgaatatgtgaatcaacttcatcagccatagttgcattggacgcttcaccagtctcgtccatgatgctagtggttgtaagatcaatgatgaccccatgcacaatggtgtcacccacagctttagcatattcttcatcttggatagtggcagtagcttatttctcanaaatagcagcaacatcatctttgtcaactnntttcttttgatgagcttcatggagctgagtcacatgagctaccatc

SEQ ID NO: 272687 - DNA, 120 bp, Glycine max
gcgaaccaacatgcgttgaatgcacctatatctgcctacaaaataccccccccctgccatcattcggaactgtcgtattatacacactctgcccgatgaagcctctcaacggctgatcac

SEQ ID NO: 272688 - DNA, 327 bp, Glycine max
  unsure (1)..(327): unsure at all n locations
agcttgcttctagtcatctcatcctcacagagtatctcaatgacctcatcaaccgtgttgtgaaccttgaaaccacagccacccacaacccttcaccctcctcttcctcagccacacctacaccacaaactcaaccagttattccacacagactcaaattggatgtccctcattntgatggtatggacccatcggggtgggtattcaaaattacccaattttttgaataccactcaacccccgaggccgagagactcaccatcgcatccttttacatggacggcccgactcttgcgtggttccagtggatggctcgtaccatcaact

SEQ ID NO: 272689 - DNA, 331 bp, Glycine max
cttcaacgtacgtgttatacttgttatatgaaccttatgattctcactatatatagctgtagtatggtgttttgccttaatctcatagatcatatgactgcttgtgatttcctgttcttactgatgctaatattctatacgtggaacactcatctcacgctatatttcataaggaatactctcttgatcgtaccttctgactctagtgcaatctattctgtgtgttgcacgcctaagtcaagcaattcgattacaccctgaagcttgggttaaatcatctcatgagatatgagcctacatcatacacttgaatactgatgcttctgtcaca

SEQ ID NO: 272690 - DNA, 395 bp, Glycine max
tatgtattcaatttcgagcgtctcgaaatattattcgactcaattggacatccgagtaaaaagctattgacgttagaattttctcacaccttctggattctatttcgagcgactcgatatattacgtgactttatcgaacatgcaagtaaaaagttattggcgctagaatttgctcagagcttctgtattcaatttcgagcgtctcaatatataacgcgaccctattggacatccaagtaaaaagttattgtcgatagaatttgctcacagcttctgtattctatttcgagtgtgtcagtacattatgggactcactcaaatatacgagttgaaaggtgtcatcatttgaatatcctcatagcttcctgactgcatttcgagtgtctcgatgatg

SEQ ID NO: 272691 - DNA, 167 bp, Glycine max
ctatatttatgtttccaccttacataccaattccgccttcatccgctttttatagttactacgcgcaccaccagcccttcaagccccactacttccttataaatatacccccccgctgctctcttcgaacactctcgtattcattaagcttttccagcactgacgcc

SEQ ID NO: 272692 - DNA, 316 bp, Glycine max
tttatcttagttaacatatttatattcagaaataaaatacttcatagaaattcaattatcgaaagtaatcgagttatattcgaggggaaaaaatattgcgaatctctgcactaattgattctcttaaaagtatggtgtaaatcaaagtctccgggccaacgcttaatctattcttttggttttatggcctaccaactcaatcgtgccaagtccaagttcgtttggcactaaagttgggtctaatttatgcgtaaactatctctcccagatttcacagggtaaccttcagttgaagttgaaacagatatatagagag

SEQ ID NO: 272693 - DNA, 410 bp, Glycine max
  unsure (1)..(410): unsure at all n locations
taagcgagctangcctgatgaggtattcgaatatttttaactatcttaagtgattcctaattatgcaagtttaagctatctcatcaaataggcccatgattgaaaagcctaattgatataaaaggcaacttttaaccacgttaaagggatactattattgcattttgagggcaccaatgccaataaaagagcttgtggcagcatccatgcttatggttccctcttaatcattagttcttgttatccccatggctatgagtatctaagttaatcatttgttgaggcttaatttaattgaatctatcttatgtaaatatgctttctataattcaacaaaggattgatattacttatcttctatgcttaatgctattatctggactgataaaccgattgtatgattctctata

SEQ ID NO: 272694 - DNA, 255 bp, Glycine max
gcatgcaagcttgaaccttttatcttgattcttgattctttaaatcaaatttcctcttgaaccttggagtgttcttgattcaatcttgaacatgtcataccctaatttcgttccgggaccatccgttgttgggatgcgaccctcgtttgaccacttcgaggtacttgacacccatcgcttagcaattcgtgaaatttcgtgacatgcccgaagtcaaagaaagcattgtacccaattcatgaagttccagacatg

SEQ ID NO: 272695 - DNA, 392 bp, Glycine max
  unsure (1)..(392): unsure at all n locations
ctgatgatagaggatgcacgaacagagtatggccatcattcttggggctgcggactcagtggaggaggatctatgtacgaagatgaattcatggggctgctaataaaatggtggaggatgcacacacaacattaggcgatcaatacgtgggtctctggactcaatggtggaggatgcatacacgacaatcaattcatggggctccgagtgatatttaatgatggaggatgcacgaacagtgctatgcaatcaatttgtggggctctggactcaatggtgtatgatgcataaacgacaatcaattcatggtgctacaaataatatgctggaggatgcacgagcagcactangcaatcagtttttggggctccggactcaatggtggaggatgc

SEQ ID NO: 272696 - DNA, 141 bp, Glycine max
aacacaccctttatatgtgtttgtatgcgtgggcggctgacataaaagttgaatattaattatgcctcccttaattcttctcttttcaaggtggtttggatgaattgaaccaaaaaactatttaacgccgggtccttaggg

SEQ ID NO: 272697 - DNA, 431 bp, Glycine max
  unsure (1)..(431): unsure at all n locations
tctatctatttcaggatcaaagggttgtaaatcgcatggattgcccctagtcatgtactatatgcagcaaataatgtgtttctcaacaagcacctaacaagggggtaaaactacagctatactcaaacgatatccaaatgagctgaaattttgtgaggaacaccctaaaatcatgaaaagatagcacaaaaaatttcaaacaaaaattcaaagtcaaaatatgaaaactacctaagcaaagtttagaaaaataagacaataatactaaaaaaataataaaaacctagtaaacggctgatttttcaagtttaaaacggaaatggacctctggttgattgccatggcatgggaaattttcttctaccccanatgcatatataataatagtcattctgatacccggagccaaagttatggccgttttaagtttt

SEQ ID NO: 272698 - DNA, 129 bp, Glycine max
gagcatgaaaatagttatatttcacattattgtatcttcttcgaaggggaatggaaagaatttttgtcgccacacgttcctgaaaaagatgttgaacattccactgaagagtttcatggtttatttaat

SEQ ID NO: 272699 - DNA, 391 bp, Glycine max
  unsure (1)..(391): unsure at all n locations
tgttcagctnttagagtcatcattgtaatgaactccattattaatgatagtgcaacatttatcaatgatgaaaaaggcaagttctaagaagaaagaaaacgcacctttaattaaagaaagagaaagcagaagtgaaaaaaaaaggttgaaaattttaacgatccgttaccacagagactaatgcaaagtgaaggacatttgtgtgtgttacttcaataccatgatgacagatgtgctgccatgcggcaccatatcctgtgtgtagaagaaaaggaggcgaaagatccaagactgtattaaaacaggtgctggtcgcaaatganaacatccaaatctagaacactctnttccttataaagctnttgtcatctcatcattgcaatccccatta

SEQ ID NO: 272700 - DNA, 532 bp, Glycine max
  unsure (1)..(532): unsure at all n locations
tagcctcggttatgaccctgagaccgcgattaaagttcctgagcattagctttaagaagcgtttcagaaagcttttcagaagctacactagnctactatcatagacagcatgnngtcacttctttgttgcaactcatcgatgaatgacaagtcttagtgcacacatcacnttcaacagctaacacattctccttccatcgttatattccctcaattcgcgcgctcccccccacatctactccgtctctcccttgtcatattcctcccattgaagcatcgcttccaagcttcttatccaatgctccatttcgcaggcgaagcctcctcttccatggcttattcnctaccggatggcgcctcctcttacgccttctactntgtcttccgctgcatctccatggtggaanatcaccattagaggacctcattgaagctcacagatccagccctcatagaagccccaccagcaagggttcatcattacttgctacgatagggcactntctctctccaataaataaaccaccatgcg

SEQ ID NO: 272701 - DNA, 208 bp, Glycine max
gacataacggtagtaaggcggtgtaggttgtacccttcatatgaaatactccacatactctggtgcttactcgaactcaactagggatgtcactgtaaactgaaggtacgtaatgaagtaatcaacaccctgtgccacatttgggaaccatctgctaactacatagtcaagtttgaaaagaagttttggctccatctgaccccaaaca

SEQ ID NO: 272702 - DNA, 462 bp, Glycine max
  unsure (1)..(462): unsure at all n locations
agctnttatgtgaaaggatgtgactcttcacttttgaatntgaatntcaacgttctaaggcactggtaatcgattaccaaaacattgtaatcgattacagctttttgaaatcaattggaacattgtaaattcatttgaaaaccttttcaaatacattntgctactggtaatcgattacaacaatctggtaatcgattaccagagagtaaaaactctctggtaaacatgttttgagaaaaatccatgtgctactcaatttttgagaaaaccttttcatacttatcttgattaagccttctcttgattcttgaatcttgagtcttgaatcttgatctcttgaatcttgattattgaaatcttgatctcttgaatcttgattcttgattcttgaaatcaactctcctcttgaatctcgaagtgttcttgattctatcttgaatatctngaactcattctttgatt

SEQ ID NO: 272703 - DNA, 467 bp, Glycine max
  unsure (1)..(467): unsure at all n locations
tctaagcttgatctaacaatggtttatgagtttattgtccaatgtatagagatgtcagactttataaaagctctaatatgaaataacctattcccacccataatgggtataggtaatccatgatctcaaaccaaccgaaattgacccaattagtttggttcaaatatttttagcttaggtcaaacccaacacaacccaatcctgcctgttcaatttacaagccaagtaagatgttttgtttttttaactcgtgacccaacccgtaacatataattaaattcattatatatataattaaattattaaacacaaaacactatatactttttctaacataatgtattaaattaaatcaattatactcttttctgtttcagttgttctttttattgttatcttgatnttgttttctcatgctaatacaatattttatttctatctaaaataaaaatattgtattagcattg

SEQ ID NO: 272704 - DNA, 431 bp, Glycine max
  unsure (1)..(431): unsure at all n locations
ggatccttgagtcacctgcggcatgcaagcctctacttatgtggcagggcgggcttcctttactttcttgtctncaacgcgagctctgaccactgtcctttctttccgcgatgcttctttttatgtccgcctgagtgggcttatagcctaaaccatacttnccacgatttccttgggtttttatcaggctagttatgccgccattgtctttgcctaaacccatcccgggttcataaccgttccccaacataactcgggccatcattaccgccgcatcggacagacaaggttgcccaaagagggagtccacggaggaaatgctgaccaccacaaaagactggaaagcggtttctagcgattcttcggcggcttccacataaggcatggaggatgggcagcttaccaagatatctttctcgcctgacacgatg

SEQ ID NO: 272705 - DNA, 451 bp, Glycine max
  unsure (1)..(451): unsure at all n locations
tgtgctgcaaacatttataatagacccnctcagcagcaattccaacaacatcagactaattatgatctttcaagcaacatatacaatccaggttgcaggaatcatccaaatctgagatgggcaagtcctccacaacaaaaacaacctgtccctcctttccagaatgctgctagtccaaacaagccatatgttcctcctccaatgcagcaacaacagcaacaacaacaaagacaactagaacctgaggctcctcctcaatcttccttagaagagttagtgaggcaaatgaccatccaaaatatgcaattttagcaagagacaagagcctccattcagattctgaanaatcagatggngcagatggctactcagttgaaccaagctcagtcccaaaattctgacaaatggccttcacaaactatgcagaatctgaaaaatgtgagtgtcatca

SEQ ID NO: 272706 - DNA, 366 bp, Glycine max
  unsure (1)..(366): unsure at all n locations
agctntgcctttagggcttgtacctcatcacttttcttcgaagctttaacctcattgtctctcacagtctttagaattgggagccaatccaatccttgtgtccggattctcagccacttatgatagcctccgatgatcccatcactgcttcccctaagctctctgtcctttcttcacgccgccctccatgccttgcgaactccttggagtaccctcgcgttgtggtcactgaaacctcgtgcgatgaaaggcgtgatgctttcgtctgatggcactcctctcattggacatccttcgcatgaagatagaatcctgattcttccttccttctagcgagggaaccatttaacagaacgcccctcatgc

SEQ ID NO: 272707 - DNA, 416 bp, Glycine max
  unsure (1)..(416): unsure at all n locations
tgaagatcctcatagtgacaccaaatgtcaatctagtgacgttaattaagcgcttactaggaggcaacccaactttctaactcttactttntacattatgtaacgcccaaaaattttgataactgaaaatgaatgtttgatgtatttctttgattgtttaattagttagattagttaaagttttgtgtgaattatccttgtgcaactgtttggtatgtatgttaggttatgtggagtttgattgatttgtgttggaaatgtgtgatttcaagtttgacccaaaaccttaaaacttggactataggttcataacccacttttgcatgttttaaccattgngatngcaaaataacaccttatgctaagcgtaattccccacanaggagataattcactcaacttgaaatgtcgtgctc

SEQ ID NO: 272708 - DNA, 243 bp, Glycine max
acgttctgtctgcatgcaagcttgctcttttatacatcgacgtatgtatttatgggaggagggtgtatgccctttctgctttaagagtagcgtccactgctgagactaactttccaaatgtttgtcttcccaagaaatggcgccgaggaatcttgcctcaaagaggctcacgaaggacaacgcagccaaaggaactacttccgctcccgagtatgacagccaccgctctatgagtgctgtaca

SEQ ID NO: 272709 - DNA, 337 bp, Glycine max
  unsure (1)..(337): unsure at all n locations
tagccctagaggggatggaccttttagggtttggttatgatcaataacaatgcctataggttggacctcccagaagagtatggagtcagcaccacttttaacatttctgatttaactccttttgcaggtggagctgatattgaggaggaggaactaacagatttgaggtcaaatcctcttcaacgggaaggggatgatgcaatcctcgctatgaagggaccaatcactacaaccatgagcaagatgctccaacaagattgngctagagctgctgaataagccctagggtctcatgaacctatggtagattctgaaccatgggccaaggtgggaccaa

SEQ ID NO: 272710 - DNA, 406 bp, Glycine max
  unsure (1)..(406): unsure at all n locations
agcttcctgtgtgccatttctgcgaaggcattcatttggaaagttagttctaccagtgggacactactcttaaaacaaaaatggcatacaacctccccccatcaatgtaaatttagagcaagcttatgcgcatatttccttacgaacgttcacttgcacaagacattctattaactaagaaaaaatgcacccatatacaatcaaggcagcttcgttatctagattatttacatgtacttccaaggtgtatttgttacttacatcacacacatctccttggctaaatttacatacatgcatactcaaagcatttcggggtaccaaaaattgcacatgtgcacatcttggtatttctaatacctataaatacacanacttcatgatgaatctngactatctacacaat

SEQ ID NO: 272711 - DNA, 433 bp, Glycine max
  unsure (1)..(433): unsure at all n locations
ngctctanattacattgatgtttgtatttatgggaggaggttatatgccatttttgctttaagagtaacgccagtcccactggtaaaactaactttccaaatgtttgccttcgcaggaatggccccgaggaagcttgcctcanagaggtccaggaaggacaaggcggccgaaggaactagttccgccccggagtacgacagtcaccgctttatgagcgttgtacaccagcagcgcttcgaagccatcaagggatggtcgtttctccgggagcgacgcgtccagctcagggacgacgagtatactgatttccaggaggaaatagggcgccgacggtgggcaccactggttactcccatggccaagtttgatccagaaatagtccttgagttttatgccaatgcttggccaacagaggagggcgtgcgtgacatg

SEQ ID NO: 272712 - DNA, 378 bp, Glycine max
  unsure (1)..(378): unsure at all n locations
agctntgatatattnttttaacaattttctaattatgcctaanaaactattttatctctgtgtttacgattttatgatgatctgaattctctttttcagcttaagaataggtacttcagtttgattattgcttgcattggatatcgtctcattttaatttaagaaatatagttgttcgctttttttatatagggaaaaagagttgatttattatttggattgcgttatttggattttggattaacatgtggagagtgactttggattttttcagactataccataatatcttttattnttcatacaatcaatcatgtttaaatcagataaaattattatggatgaaaaaaatttggttctacatgtttaacataatta

SEQ ID NO: 272713 - DNA, 370 bp, Glycine max
  unsure (1)..(370): unsure at all n locations
tggacagaatattgctggcagatctttcgagaatggtatttcttctgatctcanataaggcctatattggggactatgacttaatacatggaaaccatgagtatgccaaagaataaacgattgatctattatatgattcagaatatttcgtgccttgcgagagtgtgacttatacctctatgatcgtcaccgtcgttgattcgtacatgatgataatattactgagtctaatgtgaattagagctctaactttcgatctagctgtgattacgcccactcactttttggtgatcaataggagctatatatttgccaatcaagaaactatgattaaatttcacgcgggtaatacaggctacatgaggcctca

SEQ ID NO: 272714 - DNA, 210 bp, Glycine max
tctgagccaatataaacgacaatgaccttttactcggatgtttgattgagtcccgtaacatattgagacactcgaaattgaatgttgaccctctgagcatattcaaacgacaataaatctttactcagatgtctgattgagccccgcaacatatcgagacgctcgaaattgaacgttgcaactctgagccaatacaaaccaccataactt

SEQ ID NO: 272715 - DNA, 408 bp, Glycine max
tctacactctatacaagactgaagctctgatacttcttgttatacaagcggcctcagatatcttaagagggggggttgtattatgatatcacaaactattccctaattgaaaattctattgtgattataacccaaatcccatgattccttttagaatgagttgctagataattattcaaattatacttactgaatagaaccgataagcaatgataaataacagagtttaacggaagaagaagtgcatactgagttttatactggttcggacgcacccttatgcctacgtccagtctccaaacgacccggttgagagttccaccaactcgcaaaaaattctttacatgttgtgaaccacacaaggacaacccttcctttgtgtcagattgattacaacaggagaccctc

SEQ ID NO: 272716 - DNA, 445 bp, Glycine max
agcttatgctcatatttccttacaaacgttcttctgcacaagacattctattaaccgaaaaaatgcacccatatacaatcaaggcagcttcgtcacctagattatttacacgtacttccaaggtgtatttgttacttacatcacacacatctccttggctaaattcacatacatgcatactcaaagcattttggggtaccaaaaattgcacatgcgcacatcttggtatttctaatacctatacatacacaaacttcatgatgaatcttgactatctacacaataaggtgctacatttcatgctcttttcaagtttttgctacctaaggccgcatgcaaattcaagtacattcttcttcgttggctaaaattgtattcaaattaaaaggtatacacttttttggtaatgtatcttctttacatagcatgccacatatttatgtat

SEQ ID NO: 272717 - DNA, 400 bp, Glycine max
  unsure (1)..(400): unsure at all n locations
tctanactntatacaagaatgaagctctgatacttcttgttatacaagtggcctgagatatcttaagatggggggttgaattaagatatcacaaactattccctaattaaaaatactattttgattatagcccgaatcccaagattgcttgtacaatgaattactagataattattcaaattagacttactgaatagaaccagtacgcgataataaataaaagagtttaagggaagaagaagtgcaaactcattttatactggttcggtcgcacccttatgcttacgtccagtccccaagcaacccgcttgagagtgccaccaacttgcataagatactttacatgttctgaaccacacaaggacaacccttcctttgtgatcagattgatttacaacaa

SEQ ID NO: 272718 - DNA, 344 bp, Glycine max
  unsure (1)..(344): unsure at all n locations
agctntgaaaagtgttgtttttcaccttctctctaaccaatctgctggcttagcgagcatccgctaagcgcaacactcatgggctaagcgcgaggaagactctataagaagatgagctgtacaggtttgctaagcgcaccacttcaattcatccactaagcaagaaaggcacgcgctaagccaaaattcactaatgtgcgctaagtggtccataagtgcgctaagcgcacgagcacgaacaaagccacctatttaagcctgaaataagaatttagaagagagtttggactgagattcaaagctctgcttgtctagggtttctagagagagaaggtccaagttct

SEQ ID NO: 272719 - DNA, 448 bp, Glycine max
  unsure (1)..(448): unsure at all n locations
tcaagccaaggccagactcttgtgcatgcataggcttctctagataaaatgccaaactcccttaaaaaatcttatttcaagcttaaataggtgggttggtgcgtgctcacgcgcttagggcaaatctgaatcccttagcgcgcataagtggattttggcttagcacgcttctctcgcttagcggatgagctgaagtggtgcgcttgatgacctaaagcggtgcgctcagcgaacctgacagctcatcttcttctggattcttcctcgtgcttagccactgagtgtcacgcttagcgaatgcttgctaagccaacagattggcttagcgagaaggtgaaaacaacatttttcnccaattgcctaattaaccttgaaatgagagaaatngattattaaacacacaaaacanaagtataaatgatctattactttatattaacagaaaata

SEQ ID NO: 272720 - DNA, 403 bp, Glycine max
ggggtattgtctagcaaaccgtgcatttgtgcattcatcggatccactaacaaacgttgagcgccgcccaactgatgggactcgtcaccaccattggagacgccacttccagtgaaagaagaatagtctgggtagacgccactttcggctaaagaagataagtctgggtaaacgccactttcaatgaaggaaaataagtctgggtagacgccacaaggattaccttgataagtctgataattggttcaacaaggaacccagagagaaactcttaccaaattttatcaaaatgccaaaagttttttttattcaaaacacacaccaatacttatagtgtcactgaacaaaaagatataaatagacatgggccttctaaacagtgtccgccaaaattagaataaag

SEQ ID NO: 272721 - DNA, 435 bp, Glycine max
  unsure (1)..(435): unsure at all n locations
tctatataagctgaaccattntatcaataaacacaagttgttttntattcagaaaattagagttcttagtgagagtgattctcctaaattcttgagtgattcaagaacaccctggctgtatcaaaggactttcacaacctttgtgtgttgccctcgctggaaagagtgattctttccttcctatcatctccacccttgttctttcaaaccacaattccagaaaatccacctctgcccaaaattatctcgtgaccataactcccatttcacacactcaaattaagtgattcttgagcctaaattgaatttcaaaacgagacctttcacctcgttttggaatcacctcatttggagccctgtagccttcgttattgccatttctatatttctgtccagccaccacttaacctacgttntaccatcccattcatccat

SEQ ID NO: 272722 - DNA, 498 bp, Glycine max
  unsure (1)..(498): unsure at all n locations
cgactcgcgcatgaacatgagancncgtgacncctggcagccnattgatancctgtacnccggatcttaagagactgagctgcagcttgacttattcaacgacattaccttttattccgatgtctgaatggagtcctttctatatcgagacgctcgaaatttgatggtgaagctcctgacccattcaaacgacaataactttttactccgatgtctgagtgagtcccgcaatataatcagacccttcaaattgaatgctgaagctttgagccaatttaaacgacaataacgttttactcggatgtctgattgagtcccgaatatatcgagaccctcgaaattgaatgttgaatctctgagccaattcaaacgacaataactttttactcggatgtctgaatgagtcccgctatataaccagacgcttgacattgatgttgatccttgagccattaaacgacataacttttactcgatgttgatgatcccgaatatacc

SEQ ID NO: 272723 - DNA, 203 bp, Glycine max
gatatatgacgggactcaaacacacattcgagtaaaaagttattgatcgatgaattggctcaaaacgtcaacattcaatcaccagggtctcgatatattgcgggactcaatcagacatccgagtaaaaagttattgtcggttgaaatggctcggagctccaacattcaatttcgagcgtctcgatatatgacgggactcaatc

SEQ ID NO: 272724 - DNA, 436 bp, Glycine max
  unsure (1)..(436): unsure at all n locations
agcttgccgcccagctcgcccaggcgagcattgttgcttcctccagaagcaacagccttctggaggaatcttctggagggcccaagtgggccttgttgctatttacaccccctgtttactaaatgcacccccctttctatttttttgtaattctttttccgtaacgttacgaaactttacgaatttcgtaactatacctattttccttccgcaaggttacaaatccttacggattatgtatttactcttttttagctttcgaagaagttacggaaactcacggattgcgcaaaaacacctcttttcgatttccgccacattacggaatttcacgaatcacgcaagcctgcttcctttcgatttctgagacgtctcgggacttcatttattgcacatcatcaagtaataatccccggacgaaattanggtatgacag

SEQ ID NO: 272725 - DNA, 172 bp, Glycine max
cttacatgatgcacatgggtttgtagctatcttatgcactcctctaatgactatggcatcatttctggcgctaaactgctgggagttggaggccatcttattatatttaatttctggcatcagcaggagtcatgtctccaaaggctccaccgctggcggcacctatcatact

SEQ ID NO: 272726 - DNA, 438 bp, Glycine max
agcttctatagtcctgctattgaatcaggtattacctgtttcaaccgcatggaaacatccaaaattatattatatgccaacaataaccaaagccataatcttttttcaaataatcaacaaaaatgatccactacagattcattcaatccttcttatttcatacatgcatctgtatcaaagaatgacgaaaaaaatgcatttatttcacttggatctaacttggacaagtgacatttactaatacacaatcaactaattcagtttgctgtattcagtgtattgtattttacattttacacaagttatttcacttcacagtaacatgtggattttattttattttttgtttagtttaagatcctaagtattgcacatgaagcaatcctattatagtcaaatatatctgagtatttaacacaactatttcttgcaaagctc

SEQ ID NO: 272727 - DNA, 200 bp, Glycine max
ggaaattctttgcctcttaagacatggcatcgtggaagagcttaactgctgagacttggacgcctcacttctgaatttattccgaggctttctctggagttatgtcttcaatggctccatcacaaccagggttagagaactagaaatccatttgcagatgaacaaattatcatatcattcaataaaaactgcttatatct

SEQ ID NO: 272728 - DNA, 395 bp, Glycine max
agcttgcatttggaattgcgaaagccccacttcatcattaggattagtacctgacatctcaaacaaacaaatcaaacgtaacaagacaattatagttgctgtttgaatacctcacccactcaagtgtatcacacaattatggcttttctctaatgaaacactcttgccttttaccactctaattccccttgagttcttacgcaattcaagagattatggccacaacaaagaacaattcaccaatatgtgtaaggtaaggctagacaaggaaaaggttaaccaagaaaaaggctaacaatgtttttaggcacaaatgaaggaaataaaattcagaatttaggaattcaagtaacaatccttcatgcaaccaatatattaccttaaagagttttttt

SEQ ID NO: 272729 - DNA, 517 bp, Glycine max
  unsure (1)..(517): unsure at all n locations
atatcacacgattaatcaactnaaactcttattattctcttctagcccggcgcctgaatgactctgcatcccncaataactgggggctcaaaaaacgatcaacagacaaaacaacttatatattgtttcacatcagcaatcctcaaacaatacagacgagtcagatctctaggtcaacatgccccgcacaaatataatagatcgcctactccatcgcacttgattggactcgacccgtagaacgccataacatagcaagggcaacaatgtgatggcagcaaccaagacatacaaaatcgcagcccttgaaaaaatcactgcacaaaaaagtacacataaggcctcataacacattgggttcaagtcttattacccatcaacagcaatgcttgaataaaactacggtcaccatcgagccactcagaaggaagtcacacaacctcgcgacttggcatgtaacgataacactgtgctcgcaagcaaatttacagcacaacgtctctgccaagaaaatccg

SEQ ID NO: 272730 - DNA, 416 bp, Glycine max
acattgtttgaatgacaactattgtagttggacagctatcacatagtttgtccaccttggtatgctttatgttcctattgggtataggtttggtatgctttatgttcctattggctatagctttggtgctagaatattcaatttggaggtcacaagaggaggatcttcatatggtgttggagtttttgctggagaaggtacaagacaagccagtgaaatggagctggagcttgcagagtatcatggccagtatacatgaaattagcgcataaaagctagattggattctgtgactacaaattcatttagcgcttctagctaggtcagcattctagtctggttcaagcttttgacctctagatcaaacttcttaatgcactcaaacaaaccattggtgacctcacaatcaaactcca

SEQ ID NO: 272731 - DNA, 397 bp, Glycine max
  unsure (1)..(397): unsure at all n locations
tcggaagaaagtgatgaggtacaagccctaaaggcagagattgaaagatccctggtagtcgaagagaagttcaagtccatagccatcaaagtctgaaaagagtatgatgaactaatggacgtcaatatggccaccgctgaagccttggaacgagaaaccaagaaggcccgaaaggaagaacacgaccaaagcaaagttttgaggggctttatatggcaccaatantgagctcaanctccaaagaggtgaaaggaatcatcaccggtcaaaggcatgatcttgaacgatgagctaaacgcttgccttatgtcgaaaagaaatatgtcccaacagttaagcaagactgaagggaatatgtgggccatcatcgatgagtgccaagagaagttaaatctag

SEQ ID NO: 272732 - DNA, 178 bp, Glycine max
agcttgtctagtaccgtctgcaggccagctttgttgcttcctccacacacgtcagcattcattatgatattataggcgggcccaattggtcctcgtagctatttacaccacatgaacactaaatgcacccgcctcactatctatcaggtattctcttttcgtaacgtaactaaacttt

SEQ ID NO: 272733 - DNA, 240 bp, Glycine max
tcttagtttcacatgatgcacatgggttcgcagctaccttatgcactcctctaatgaccatggcatcatttctggcgctcaactgctgggagttggaggccatcttattaattaaatatctggcatcagccggagtcatgtctccaaaggctccacccctggcagcatctattatacttctctccatattactgagtccctcataaaaatattggacaagaagttgttctgaaatctgat

SEQ ID NO: 272734 - DNA, 397 bp, Glycine max
agcttgagatatcaatacatggcacagaattttttctacctcctaattctaacactaatgtgggaaaccttgtcctattctttatataactttatgactattcaattcgattatgagcctagtgcgacccagtctaattaagtggtatcattgagtattatataaaaatctttctgatcaatatcaataagcaaaatatggaggttgtcgtcagctaactatacaacaacatatttaaatcaaatatatggtatgacaacaattcgggcatacactaagtcatttcatgattaaaagccagatatccttacacatcgttataaaaccatgcataataacccacattgattgtctagggatccctacacatgttcattctgattcaccagcatgagta

SEQ ID NO: 272735 - DNA, 303 bp, Glycine max
  unsure (1)..(303): unsure at all n locations
tgtgattcgctgaggcgatacatgtccaccagttctagtccaattctttctcggaccacaccatatcataataaaagtatgctctgatatcatctgtagcattcttgattatggacttctcgacagctcacacaccacgacacttcacactgtggcacttcactaaactcttcattgatcataaccctncatccgtcaaaattcttcctaagtaaccctttttgaaatctcgaaaatctatgtcgactaatttgcaggattaataacagtcccccaaaccaatacaaacttttttaccgtgtt

SEQ ID NO: 272736 - DNA, 435 bp, Glycine max
agcttaagctctttcaactgcacaaggctcttaatatttgaagagtatccttgtggaaccttcacccgatgaagacactgacaaaaacttatcttctcctttttggacaaagtatggtaggctaggggcaagtaaattttcttcccatcagaccttggatgcaactgtgatcgtatgcccatatcagctagatcttgacgggtattcaagccatccttcgtcttgccttgaatgttaagaagcgtcccaattacactgccacaaacatttttctgcagatgcataacatcaatacaatgtgtaacgtcaagataagaccagtacggaagatcaaagaaaatggacctcttcttccatatgcaactcttacttttatccttcctttgggtcatcccaaatacagtattcaggtgttgaacccgctcatatacctgc

SEQ ID NO: 272737 - DNA, 349 bp, Glycine max
  unsure (1)..(349): unsure at all n locations
ntacagcagatnttagtaatgacccactaacctataattattataacttaatgccattaacctagggaattaaaacaaacttaatggctgagtgtaactgaaattgtggcaaccaaaagtcacccccaacagccaacaagtcagtcaccatttggtctcccaaaaggctgatgcctaagttgccaattgggcccttattaccacttgaactaaagcccttttagttgattaacccaaaacataattttggccagccaactttacaaggattgggccattatttagacacactaaacactttaaaatcgaaataaagtggtgtcatttagtcctcctccatttggccatg

SEQ ID NO: 272738 - DNA, 241 bp, Glycine max
ctctccttcggattctaatactacctcaacccatcctcaatctatggatcctgctccttatcatgcctctgactcagactggctcattgacatccgcaaaagcactatattctctcctaatcctcactctatctataactttctaaactatcatcgattgaccccttcatattcttcctatgctatctctctatcattccatactattccttctaatattcataaagcactaactcatcct

SEQ ID NO: 272739 - DNA, 388 bp, Glycine max
catggactagagggtgccgactctaatagcaagcctcggaagaaacacgatgcctatgtcgctgaggatgactacaacatatctagcagcgtcttctgtctcatagagagatcagatctccattcgaattctttcaaacgtacctggacatctatacgctctctaattacaacaagactcgtcgtcatcacaaaccatcgcgagtgacctgagcacacatctttgaaatcagtacaattactgactactgcgcttctgaaggccaaatgatgatcttatgtgtcttacaccctcgcattcgctagattaacgataacgcgactggtacgagttgcttggtctgctcatgcaaaagacttcctacatccaggctgggccagaccctatg

SEQ ID NO: 272740 - DNA, 75 bp, Glycine max
tcttagtttcagatgatgcagatgggtgtgtagctaccttatgcactcctctaatgactattacatcatttctgg

SEQ ID NO: 272741 - DNA, 323 bp, Glycine max
agcttgaagagaggacgtatggaggggagttatttcctacttctattcgttgaccacagagtggtacctgtagatatgtcgcgggggtcaggagaccttggggacgtcatgtggggtgctattgcccaaaaccaagcttgaccaatcctgacccaactctggcatagtcagtcagtgagaacctgttatgtatctaaacaggggagctcctggcattcaaccgatttatgaacacagaccacaaatcaatgaggcttgtgtggtggctggccaactatggatcttgaataatatgtggaatatatcctctggtaatcgattac

SEQ ID NO: 272742 - DNA, 290 bp, Glycine max
  unsure (1)..(290): unsure at all n locations
atacaatactaattatttggtgcttaaataatgaaactcgttttctaatttattgaaggctaaaataacatatgattgttgtccctataaaattggtaaagttggcttttgtatctctatatatgtttttggcaattttttattcttgtaaaattaaaatgtactactttttggtgtgaaactaaatttggatgactcccaacctacctggtattnttttttataaaattaagttttaaaatatcatctttagagttaaaaatccgcacacattacataaaaaataaaaa

SEQ ID NO: 272743 - DNA, 428 bp, Glycine max
  unsure (1)..(428): unsure at all n locations
agcttctttgagaaaacttccttganaaggtttagcttagctacacatacccttctcataactaagctcacctccttaagaagcttccttaagaagattcttaaagaagctagagcttagctacacacacacctctctaatagctaagttcacctccttgagatgagaagttagagcttagctacacaccccctataatagctaagctcacccatatgccaaaaaacatgaaaatacaaaaaatgtccttactacaaagactactcaaaatgccccgaaatacatggctaaaaccctatactactagaatgactaaaaccatatactactagaatggccaaaatacaaggcccaaacgaaggaaaaatctattctaatatttacaaagataagcgggctcatacttagcccatgggctcgaaatctac

SEQ ID NO: 272744 - DNA, 417 bp, Glycine max
tcatgatgatgaattcagttgattcaagttgttttgatgatgaaaaagatgatgaccaaaagcccaagaaaatgatttcaagattgagtccacaagttcaagatcaagattaatttcaaatttcatgagaagaaatcaagaagattcaagaatcaagagaagtttgatttcaagattcaagagaagatgaattcaagattccagagaagaaattaagaagacttcacgctgattagaaaaaaaagaagaagacttcacaagggaagtattgaaaagatttttcaaaaaacaaacatagcacagttttgtttttcaaaagagtttttctcaaaattttctaagttaccagagtttttactctctggtaatcgattaccagtttcctataatcgattaccagtggcaaagtttgatatc

SEQ ID NO: 272745 - DNA, 438 bp, Glycine max
agcttgcagatagaacaatgtgagtcaactttgatctttgatcaaattataaatgtttgaattgtttttaaaattataataaaatcaaatatgataaaataaaaataaattctatttctgaaaaaaaaagtcaattctactttaacctattgaataaaattattttaattcaaaattaattttttcactactgctaattcaaacacacacttaccataaacacgcgcgttgcactcgaaaatcaattttctcccgctccagcaaaatcaaattagtaaagcgattgccacataaatttatagtaacaaaaaacaatcatcaatgcctcagagctaaaccccaaaccatcttcttcaccttttctctctgcacacgaatatggcatcaatttgcgacaaagatatccctcttcgactacacaacatcgacgctttcatc

SEQ ID NO: 272746 - DNA, 428 bp, Glycine max
  unsure (1)..(428): unsure at all n locations
tgttaccgatcaacttgattcgtaagtcacttgcatatcaacttgattcgcaacaggcatatggatcaacttgatccgtaacaagcttgcggatcatctatgtcaactacggatcaaatatagcttctgcagatcaacaaaaccctatgcggatcacgttatagcatacaccgatcaagctgaatgagatgggtgcaccagcaataatgctaggtgcacctagcaacacccatttaaatttcntgatctattcacaantttccgtgtttcccatcgtcaccgcttancttangggttttttaacccagattttcaaaatctatctataataatttatctatcccaaaatatatccgaagcccacatcacgaaataggaattgttttaagcttcngataacacatattatcatttgatgtttcataaat

SEQ ID NO: 272747 - DNA, 344 bp, Glycine max
agcttcaacattcaatttcgagcatctcgatgtattacgggactcagtcagacatccgagtaaaaagttattgtcgtttgaattagctcagagcttcaaaattcaatttcgatcgtcttgatatattacgggactcaatcagacatctgagtaaaaagttattgtcgtttgaatttgctgagagcttcaacattccatttcgatcgtcttaatatattacgggactcaatcagacatccgagtaaaaagttattgtcgtttgaattagctctgaggttcagaattcaatttcgagcgtctcaatatattacgggactcaatcagacatccgagaaaaaaatatt

SEQ ID NO: 272748 - DNA, 193 bp, Glycine max
tactaagcttgatgcacatttggaaggttaatgaaacaacaagatgattcgcttcatgagaggttggatcaaatggagaatagagatcctcatgaagaagaaacgatgagaagaaggaatgatggtgtttctagacaaaaccgaattgatggtattaaactcaacattccttccattaaaggaaagaatgatc

SEQ ID NO: 272749 - DNA, 436 bp, Glycine max
agcttggagtgattcactctaactagggattatggtttagtaatttaggctacaacatagaacacacacgcatgatcgattagagaaacatctttatatacatcagctggcttgttagaaagacccaacatctttacctattgttgtcaatcttacttatttgcattatattgtttttagcctacacttactataattttgttctaaatcatcaattatcaatgttgctttcaacaatgccttattttttaatttaaccttgtcttagttttaattttaaatttaaatacttgatgatcagatgcactttccggcaaactggatttcccttgaacatatttgtacaaagaaaaagtggaccaaaaagtatactgcatgggaaaaccaatagtggggcattgataagtcatgtgtcctctatcaagacatttaaagc

SEQ ID NO: 272750 - DNA, 292 bp, Glycine max
gaaacttcctgctcttattcattgaccacagagaggtacctggagatatgtcccgggggttacgaaacccttgggacgccaagtggggagctatagcccaaaccaagctcgaccaaaaccgacccaaccctggcataatcggacagtgagaacctgtgatgtacctaaacatgcgagctcctggcactcacagattaaaggaacatacaccacaatcaatgaggcttgtggtggcttgccagctgtgaaacttgattgatatgtgagatatagtctctggtcatcgattacc

SEQ ID NO: 272751 - DNA, 435 bp, Glycine max
agcttgaagagaattctttatggaggaaattatagagagatggggggaacacgaaattgaaggaataaaagagggagagaagtggaactttgaagtgtgtctcataagactttcattcatcaaagttacaacaagtgttacacatgcttctatttatagactaggtagcttccttgagaagctttcctgagaaaacttccttgagaagcttctttgagaaaacttccttgagaagctagagcttagctacacacacccctctcataactaagctcacctccttgagaagcttccttaagaagattcctaaagaagctagagcttagttacacatacctctctaatagctaagctcacctccttgagatgagaagctagagcttagctacacacccgctataatagctaagctcacccccatgacaaaatacatga

SEQ ID NO: 272752 - DNA, 186 bp, Glycine max
  unsure (1)..(186): unsure at all n locations
ntgcctttagggcttgtacctcatcactttcttccgaagctttaacctcattgtctctcacagtctttagatttgggagccaatccaatccttgtgtcccgactcttagccacttatgatagccgccgatgatcccattactgcttcccctaagctctctgtccttccttaacgccgcatcccatg

SEQ ID NO: 272753 - DNA, 412 bp, Glycine max
agcttcatgatgaatcaagagtgattcaaatatgttttgttgataacaaagatgatgacaaaggcgatgacaaaaagctcaaaggttaatcaaagaatgagttcaagatattcaagatagaatcaagaacacttcaagattcaagaggaaagttgatttcaagaatcaagaatcaagattcaagacatcaagatttcaagagatcaagattcaagactcaagactcaagaatcaagagaaggcttaatcaagataagtatgaaaaggttttctcaaaaattgagtagcacatggatttttctcaaaacatgtttaccaaagagtttttactctctggtaatcgattaccagattattgtaatcgattaccagtagtaaaatggatttgaaacgtctctaatgaattataacg

SEQ ID NO: 272754 - DNA, 206 bp, Glycine max
  unsure (1)..(206): unsure at all n locations
gtatgtggcctacatgacacaatatctacctacctactaaatcacaatgcacatgttaataacttaataacacatcataatattctacatgatatgcacatgaatgactagcaatggtgtcgntattatcacttagatcccgattgaactatcatgtgtacatcgtcatttgccatatgtatatatatatatatatatatctatat

SEQ ID NO: 272755 - DNA, 198 bp, Glycine max
agcttgaacattcaataacgagcgtcacttttattacgggactcattcagacatccgggtaagtagttattgttgtttgaatttgctctcagcttcagtaatcaatatctatctttctgatatattacgggactccatcatacatctaacgaataagatattgtcgtttgaaattgctcagagcttctacagtcaatt

SEQ ID NO: 272756 - DNA, 437 bp, Glycine max
agcttcccagatccgatcacggaaggacttgttaactgccttcattaggtagtaccagtacaatacggacatggctcccgatcggaaccagcttcagagtatgactaagcgagagcatgagtccattaaggaatatgcccaaagatggagagatctcgcagcccaagtcgtaccgcctatgatggagagggagatgatcacaattatggtagatacgttacccatattctactatgaaaagctgataggctacatgccagctaactttgcggatctcgtcttcgccggagaaaggattgaatccggactacgaaaaggcaagttcgaatatgctgccaacatggtccccaacaacaacagaagagccccagtagtgggtgcgaggaaaaaggaaggagacgcccacgcggtcaccaccgccgcgacgtggatgaaag

SEQ ID NO: 272757 - DNA, 262 bp, Glycine max
ttcggaacatgaaactcgcttgagctattcaacgacataccttattgtgttgatgggccgaaatatgggagctgaattgatgtgaactcggctattaacatataacttctgccacgcgatgggcccggaattttgaccttgaattgaagtgactttggatttcaacaacataccttttctaaattttatggaccgtatttgtggagacgaatgatgtgcccctagctttaacccatactttgcggtgttggtacccccatta

SEQ ID NO: 272758 - DNA, 437 bp, Glycine max
agcttgaggttacgcactaagcttggagtgtgtgctaagcctggaatgtgcactatgcctagagtgcacgctaagcgagcagttcacttcttccaacttttcttcaaggcttttctcccaatttttgcatcaatttcccttcaaatcacttgaattcttcttcttttgacttatgctattcaaaaatcgcaaagatgttaatttcttcattatttcattaaaaacaatagtaaagtgaagaaattgcaatcattattagccaaaattgactatcaaattagctcaaatttcgcagttatcatttacataattaatggaagataggaatgaagaatatggggaagatgaacatgaagaatctaccttgctttccattttacaagatgatatacaagaggctgaagatgcaagtgcaataatcaatgagtatgcaatga

SEQ ID NO: 272759 - DNA, 379 bp, Glycine max
cttcgtggggtcacgcgcagtgtggaggttcccttgtcctctaatgctacgtatcattggtgctgtcattgagcacaaagttgtgacgcatggcggcaggcacgagatcaaaagctttatcatcgaacaaaatggatgaattattcgagaaattcgcggcgacggtggaggcgaaaatggagactttatcggagagactagcacatcttgaagctagtagattcaatccttcgcaagcatagccagaggtatcttcgtttcccggatcgggacctcttgcagcgccgcatcggatgaagctggatgtgccaacgtttgacggctctgatgctaccgctggatctttacaattacgcaatcttttgagtatcacacaact

SEQ ID NO: 272760 - DNA, 341 bp, Glycine max
agcttcatgatgaatcaagagtgattcatatatgttacgatgatagccaagatgatgacaaaggcgatgacaaaaagctcatcggtcaatcaaagaatgagttcaagatattcaacatataatcacgatcacttttatattcaataggaaagttgttttctcaactccagaacttgcattcgagacatcaatatttcaagagatctagattcaatactccagactctagaatcatgagaacgttttatctttatatgtatgactaggtgttttcaaaatttgaggattacatggatctttctctttacatgattaccaaagaggtgctactctctggtaat

SEQ ID NO: 272761 - DNA, 415 bp, Glycine max
  unsure (1)..(415): unsure at all n locations
tgactctgtgagttgatattagccttagtntcactttagttattagtcaatgcgattaagaaagagaaatcccaaagaacaacatccgattgatttttttgctttattttactaaaagatattttttgattattatattattattttacctctttttggtttccaacgtggttacggcatgaccaaacggtcgaatttcattttaacagaaattaacngatattgccattcaaattatcgatgaaaatttattttattttttgattacgcgagaaaatgacttaagttaatgactaaagcaccttaaaaggggggtcagacaagtaatgaacatggaaataaaagtacgccaaacacatggtgaccaccaatggtacatataatgaatttgaaagctcggtttcggaacttatcg

SEQ ID NO: 272762 - DNA, 402 bp, Glycine max
  unsure (1)..(402): unsure at all n locations
gcattgacatgtggatgcagctaaacttgacatgccccctttgtcgaacctcaccactcctaactctgctaactggagttgctccaatggcgacaaggagagcctaaggtaattccaattatatatatatatatatatatatatatatatatatatatatgtatgcatgtatgtatgtatgtatggtcatatgtatatattatgggcaaacatactcgtccgagaaatatcgagctctgatctcactactacaaaaagatgatttaacatcgccgaatctacatcggttattaacaaaccgacgtagtaaatatcacagtggcatttttgaaaattacatgaactctttcacatgttaacaaccgctattcttnatacactctctgttactaaaaatactac

SEQ ID NO: 272763 - DNA, 448 bp, Glycine max
agcttaacgacggagaatcgacaacgactctactaatatcattgttgttacaaatcctgtctcattcttgtaaatatcacgtaaattacaactatgctttttaaaaatgaagtcaaagcctgatattgaagacaattctttggagaactgttattgaaatcgctaattcaaagacgatttttgaaaatcatctttgaagttcaagtgttatggctcttatactcgtgccctttctttgcatctcacttcgtctcaatagcttgcaccctctcagagtctctttatgccctctctcactcacgtctctgtcaaaggtgcccagcactaccgttgaagcttccttctgccgaagcttgtgtgtggcctggttgtggtttgcttttccctcattccccatatgaagtagtggggtggctctaaagattcgatggcttaagtatggttattc

SEQ ID NO: 272764 - DNA, 266 bp, Glycine max
tgcgtctaaacaaccaattacatctgctctttgcctcttcttcttttctggttctaactcaaacactgctgaagttactaacatatatgtactctcacgatttattcctacatgaaaagggatacactatatattgaagattagttttttcttttgctgagaagcatactttgacacgaatatcctacacagctgggagaagactaattaaatgggtactactaccgtcatccttaacttgtctcacttatcactacagctactac

SEQ ID NO: 272765 - DNA, 194 bp, Glycine max
atcatacaacgtgtgggtaagtaccctatccgtcgtaactctctgatggggctcgtatccatcccgtctttaactgtctccttttgaagccattccacggagaccctcattcttgatttacccaattcactgtcgacactctttattaaccggtaaccgatgcttacacccgttcgccttcttgattatctgcc

SEQ ID NO: 272766 - DNA, 316 bp, Glycine max
tatcctgacgacggtttttcatatgcactcaagactggactaatacatttgctgtccacgtatcatggtctctcatgcgaagaccctcataataatcttaaggagtttcatactgtgtgtttcaccatgaagccccctgatgcccaggaagatcatatctctctaaaggctcttcctcattctcttgagggagtggcaaaagattggttgcactaccttgcttccaggtccattcttcgctgggatgaccttaatagggtgtttttggagaaattcttccctacatctacgtaccactgttcttataaaagacttt

SEQ ID NO: 272767 - DNA, 397 bp, Glycine max
agcttgagggaaaacttgatgccttggtcatcttactaactcagctcgccatgaatcagaaatctgcacctgttgcaagagtctgtggtctatgttcttctacagatcaccatacagatctttatccttctttgcagcaatctgtagtccatgagcaacctgaagcttatgttgcaaacatttataatagaccccctcagcagcaaaatcaacaacagcagaataattatgacctttcgagcaacaaatacaatccaggttggaggacaatcatccaaatctgagatgggcaagtcctccacaacaacaacagcctgtccatcctttttataatgctgctggtccaagcaagccatatgttcctccttcatgtagcagtagcagcaacaacaacaat

SEQ ID NO: 272768 - DNA, 439 bp, Glycine max
agcttggaatccaaaccaagaatgcgagctgttcgttgaaagttgcggttggtggctgcaagagcgttcatagttgacaacaagaagcaatgaaacagagaagagagaggagtgagtgaatgactcagagagagtaatagtaatgcgtcaatgaaacaaaaataatagaacgcaaatgaaaacgcaccatttgatgatgtatataggaggaagagagaaagtaggcattcattgctgtgcgtactacactgaagcaattgtaaccctcgtagtatattttatttcttaattatttcataattattttttaattacttcattaatcagggatagttacatcgcctttaacctttgttctcatttatatttttcttatctttttggggggaaatgatatctcttatctatgaattgactgttctttgtttactcatatgcg

SEQ ID NO: 272769 - DNA, 489 bp, Glycine max
cgctcgggtatgacacgtcgagaccgggacctctgagacacccgcggctgcaagcttaccttcttaacatcgatagcttttaactccgacgatgatgagcaccaaacggaacaacacgaagaataagaagaccaagcattctacttaacaccattcctctataatgcatacaatacactggatcgcactaacataaacgaaatcacggacgagcagaactgcactctctcactatacacggttccgccacttcttatgcctccgcttagtcctcaatcaacccacctgagactttcactcactatcgtgaaacaccttgtaatcaacttctgaacacccgaggaatccctctcctctgcgataacgataaacataattcaagagacatccactttcttgtacacacttactttttgagatgaacatctaatctcttctccatatagcacatattacaactgatgctcctagcagagcttcctctgcacg

SEQ ID NO: 272770 - DNA, 302 bp, Glycine max
gagaaatttgatttcaagattcaagattcaagtttcaagaatcaagaataaaaaataatcaagttgaagattcaagaatcatgaaaagactcaatcaagataagtactaaaaagcttttcaaaatattgagtagcacatgaatttttcacaaaaccttttactaaagagtttttactctctggtaatcgattaccagtttattgtaatcgattaccagtagcaaagatcgttttcaaaaagctctcaactgaattcacaacgttccaattgatttcaaaatggtgtaatccattacaatgat

SEQ ID NO: 272771 - DNA, 426 bp, Glycine max
  unsure (1)..(426): unsure at all n locations
tatgcacggaaaatgtaattatgaaattgacatgcccgaataaacaccattttctagttaaccatgcattaggtaccatgttcaaatatcttgtttttaagtgaaacgggtttatgatcccaacatggttggcttgtggtgcctaacacatgaaactaagaaagtagtgtgaagtttgacgctccccctttttttgtttttgttttgtaaaagaaaacncaaggatgagcaaacatgaaaacaaatggtatgcaattttgcagaccaaaaagtttgttgaacgcatatgcatgatgatgccatgaccatgcaaaatgtgaggctggaatatgataaccgacaaatgcaggatatgtccattatgatgttatgaagagatgcttatgcgatgcatgacatgaatngcatttaccgacacgagagccc

SEQ ID NO: 272772 - DNA, 59 bp, Glycine max
agcttcaacattcaatgtcgagcgtctcgatttatcacgcggactcaatcctacatcct

SEQ ID NO: 272773 - DNA, 58 bp, Glycine max
ccaagcctgaccgattccgacccacgccgggcctatcccgtcagcgagaacctgtgat

SEQ ID NO: 272774 - DNA, 440 bp, Glycine max
agcttcaatccaaatcccaaccctgtatctttattggatatagcaaagtgcttacctctattttcatccactctcacaaaagacctacaccttacgtcatgtttatttcgtagaaaacacatttccttactccacaacaacaaccatgtcactcttcccccaatcttaattcccatccatcaatctcctcatctagttttcctaatcttccgtagccaataaccatcgttcacactatgccaaccaatcctcaatttccgcacataattgatacagataaattttctcaaacaattgatgcgaatcaaatctcgcaacaatccaccaatcctattcctttattccaatgttccatcgaccaaccttcaccatccaatgcagatcatcatttaaatcccacaattgaagttaatgtcccaaattcccactgacaatctcca

SEQ ID NO: 272775 - DNA, 417 bp, Glycine max
  unsure (1)..(417): unsure at all n locations
tgatagganaaacacacttgggaaattcactagtatcttggaattacaagacacaagcttgtgtagcactatccactacaacagcaaaatacattgtagttggaagttgttgtgctaaaagtctctagatgaaacaacaacttgaagactttggggtaacccttgatcccattcctctaaaatgtgacaacataagtgctattaatctgtctaacaatccggtcatgcattctagaactaaacatatagagattagacatcattttctaagagatcatgtatcaaaaggtgattggtgcattgagtttgttgatagtgaacatcaactagctgacatctttattaaacctctttctggagataggttcttctctattagaaatgagctacgtatcctacatggatcgagtatcgaaa

SEQ ID NO: 272776 - DNA, 436 bp, Glycine max
  unsure (1)..(436): unsure at all n locations
agctttgattagtgaaaccattcactagattgtgaaagagaactagacgtagctctatttgagtgaaccaatataaactaagtgtttttacttttatcttaagttatttgattagtattctctttagcttatattgacacactttgtcacacaggtgttattttgaaaaacctttgcgaaaatagttttataaatcactacacgatagtgttattgctttcttcaaaactgcttttattctttggacgacattgccagcaacttggtttttacatatctttttgtgaaaaaaaacttcttgcgaaaaaatatttatttcttttatctaacaccatattcaacctctcttctagtatgatatctgttattaaaaaatgtggcagttgcaaagtaactgtaacaatagataacgctatncataatcataacattttat

SEQ ID NO: 272777 - DNA, 566 bp, Glycine max
  unsure (1)..(566): unsure at all n locations
aacttactcgtctagagtgttaattctattactacatttctncttttctctatactactcctnatattcgccacncccggcggcgtgatttgatacccatgccattccgcaccctatacaacactcacacctctaaccaattatctacttttctaacatggactctcaatatactattaatacacccgactctctgtaccgtaaaaactcaatttaccaaattttgccttcctcattcattcttaccctgctctgtcccaatcacatagctatattttgctctgataactttagatatgcaattgaaaattcatataataaagtctattgcatttaaatgaaataaaatacgttctaattgacatattagaatcttactgggtctcaacagttttgtattcggctttcctcaaaattgatcaatccttcctcaactaaaatgttgacaccatttggctatactcttgccacctctttaattcatctacttaacgcaattgngacctacgcccgcttgtccccactttgaagcatgctatctgtatcgatcttaacgaactccacac

SEQ ID NO: 272778 - DNA, 126 bp, Glycine max
  unsure (1)..(126): unsure at all n locations
agcnttgagcaatttctaacaacaataactttttactcggatgttgatgtgatccttacggggcggatcgcttgatacaggctgcaaagttttggatgacgccactcccattgacggaagacaact

SEQ ID NO: 272779 - DNA, 229 bp, Glycine max
tctatatattaatggctcacattatcgatgcatgttccatgttatttttgccctctcagccgcagacctgaagcatcttacggatctgactaacgggccctcctgtcttcttttcaaattcctataccacatgggtgcccattgtgtgttcaaagttctgttcaccttaagagagtgtctccgacaacaacactgcccatgtgaaacatgaaaatgttttgctctacaa

SEQ ID NO: 272780 - DNA, 502 bp, Glycine max
  unsure (1)..(502): unsure at all n locations
cggggccgcggcgggtgatactcttgctcctacgccatacgcgagaccanntnaagacttctagcgcctgttaaacgcggtgactcgcgagacagaaaggcaaatgtattgctatattctcaaaagaagatccctgttgcctcgggttagcacgaccatgccctcccgcgattccgatttatatatatgtttggagaacacgctgccttttcccacaagcatgatgttaacctctaccgctgtaaaacccctatatttggggccatgctgtataggtaatcttttgtataagctcatggtcctttggtttctgattcataatacaaagaccacatcttattggcccctacatctctatccattctcacccatttgcatggtacgtatttttttgaaacggccaaccacgatatgtcccccctaggctttaaacaggccccctctcacttctgctgaatttatgacaccgagaccaggactacgtttggcctcccctcacccc

SEQ ID NO: 272781 - DNA, 427 bp, Glycine max
  unsure (1)..(427): unsure at all n locations
ttacagcagactttagtaatgacccacttacctataatttaaataacttaatgccattaacctagggaattaaaaaaacttaatggctgggtgtaactgaaattgtggcaaccaaaagtcacccccaacagccaacaagtcagccaccatttggtctcccaaaaggatgatgcctacgttgccaattgggcccttattacaacttgaactaaacctaactaaagcccttttagttgattaacccaaaacatatttttggtcagccaactttacaaggattgggccattatttagacaaactaaacactctaaaattgaaacaaagtggtgtcatttagtcctcctccatttgggccatgatacaactcacaaccttggactnttttctccttgaaacttgcgcttgtattcaaaccgtatggacagc

SEQ ID NO: 272782 - DNA, 434 bp, Glycine max
agcttgcctcaaagaggtccaggaaggacattgctgccgaaggaactagttccactccggagtacgacagttaccgttttaggagcgctgtacaccagcagcgcttctaggccatcaagggatggtcgtttctccgggagcgacgcgtccagctcagggacgacgagtatactgatttccatgaggaaatagggcgccggcggtgggcatcactggttactcccatggccaagttcgacccagaaatagtccttgagttttatgccaatgctttgccaacagaggagggcgtgcgtgacatgagatcctgggtaaggggtcagtggatcccgtttgatgccgacgctatctgccaactcctgggatatccgttggtgttggaagagggccagtaatgtgagtatggtcagaggaggaaccggtctgatgggttc

SEQ ID NO: 272783 - DNA, 420 bp, Glycine max
agcttagtgacatccatgactcgatcttattcaaagatgtttgcaagagagattcgggtgaatcttttagtcatgtttccaattcagcattgaatactgaaggcggaggaaggagtacccacaagggtcagaatggtcgatgcaaatcaaagtcaagaggtaaaggtcagacaaaatttcaaagtgacattatctactggaattgtgacaagagaggtcactttaccaattagtgcaaggcaccaaagaagaacaagaccaaaaataagaagcgcgatggtgatgaatccgcaaatgcggcaactgatgaatttgatgatgcattaatttgcagcttggatagtcctgttgattcatgggttatggactcaggtgcatcattccacaccactccctctaaatatttatcgtctaactata

SEQ ID NO: 272784 - DNA, 425 bp, Glycine max
  unsure (1)..(425): unsure at all n locations
catgcaagctttacattaattttgtatgggnttatttctgttaattattttatcaatttgagcttataaattaacttttaaatattaattggtattagtttccattttgttctttaagtaacgctaatgcttgagacatatactttgacgcttgagtcttgatcagtctcactattctctcataatctcatgacttttacctaacgcggttagcccctatgccaaaagcgcagtcagatacttttcaatttatatattttttatattaccttatgtctttctttatatgtatggaataatttggagaattcttctttcggtgtcctntttcaatagaagatacataaaatataccatttgcttctccatctcattccgatctattactctctgtctttttcatacattactaactatagtcactg

SEQ ID NO: 272785 - DNA, 329 bp, Glycine max
agcttgcttgtggggcttctatggaggcttttatcttcgactccactgaggtcacttcggggtgcatttgcaccatggatatgcaccctggtcacacacgataacatgtgagaggacgcgccatccattatggaataagccctgtgcgaaggagcttcgccatcaagatgatccttggttcacaagcaaggataggatcgcttcctcggcggaaatgactgatggagggaaacgagagaggggggagcacaatacttaaggaataatacaaggactacaacggaacttggggctatgtctaacaagactctctatcttctggtgttaca

SEQ ID NO: 272786 - DNA, 410 bp, Glycine max
catgcaagcttgcaacagacttcatcaaatgctaatctatatcctcgcatataaatcgctaagcggtttggcaatcacttgaaatgtctattatgaatcgcctattaaaaccatcatgttactagacaagctatctcacgtcctaatgacactttacgtggcaggaggtgagttatttcaacgacattaatctaagatttgcctacctgaatctcccttacaataattttatgccccaacacagtgccttcatgaaccataaaatgacatattttctagttaagcaccaagttggactctacacatctctgcaacaccctttgcaaattccatggatcgcactctatagaagagccatagagatacaaatcatccataaaacattcaatacacttcttcaccatatctaa

SEQ ID NO: 272787 - DNA, 478 bp, Glycine max
  unsure (1)..(478): unsure at all n locations
cggtnccaccggcgttgtatcgtggactacncacctattgacactaagccctnctgcngcctcctntctttgtgttgcttgaagtcactttttgttattggtcacgggacncggtctcgtgaataattgaaacaatgtgtgattcgatgttcgtcgcctcttctcatgttctacaatcttggggcggacttgaaccatattcaggattaagacaaatggtcaatgctgatatccagccaaggggtgacaagaatcataaagacatattcttaacttgaacacgttattacaaatgtgttgctttcaatcacctctaaagcaaaacaatggaaatgatttgaattatacagacactctcttaaaactattggtggcgccaaacatcgatgctatgtattcaacgtttaggaaaattcgctggagttataaacctttattacaacatccttacggatgtccaacctgagatagaccttcc

SEQ ID NO: 272788 - DNA, 425 bp, Glycine max
  unsure (1)..(425): unsure at all n locations
agcttctttnggaccttgaacaagcaattatctcctctttcagaaccatgctatgtgctcgcgactggtccctttcttcccttcgcaacttgagttcattattgctaccccatagagctccgcgaaatttgttccggccatactcttacttgcgagccctcttggtctcttgttcaagggctcttgcggtaattgcattctcttcccgtaacccggcgcactccttccgaacgtgtgtagcagccaacttgaacttctccttggcgagttttgcctttcctaactcgcttttgagagcttggacttccttgtcctcttgcggcgcttcaaaattctcttcgctgacgacttttaacttggcgagccaatctaaacctcgtatgcgaactttcagtcattcgtggtacccaccaatgatgccatta

SEQ ID NO: 272789 - DNA, 232 bp, Glycine max
cacagccatgcctaaacatgtgaggtcattgggcattaatgaaagtccctcatcatttttatttctttaattcacgtttgtttcaacaaaacactctgtcgggagtccacactaccaatgtcacaggagacttggtgggagaacatttatcatccaattaccatctaaaaaacggcaacaatcccggacaagagcgtcacccatgacgtacccgaccacatcgaagcggcgt

SEQ ID NO: 272790 - DNA, 436 bp, Glycine max
  unsure (1)..(436): unsure at all n locations
agcttcatatcatactccatatttaattagtataattntttattaaatgattttttttataaattatattaataataaaaaaatatttttgacagtaatataaaatatatatatttaaaagaataaaaactaactttttcacccatataaagagatttcatattaggatttttttggcgctaaatttttccttatatctcttcttttttggtattcaataataggattattaaatctaatacaataatttatttttgaaattacgttaataccctactagaaaataggccattaacatcgattctagagaacatttaacatcaactttgaattgatgttgagacgggcatcattaaaagtgagttattntttacattggttataaaatcgatgttggaaaccataatctacatctgatttgactaaaatcgagatg

SEQ ID NO: 272791 - DNA, 163 bp, Glycine max
tgctggctttgctggccacatgtaagcaatcctgtcttcacccccaatcctacatgatcacttatcacctacataattaacacaagagtagtcaattgagcttacatgagtgatgagtgctgatttcttacatcaatttctactagaccctctacacccatca

SEQ ID NO: 272792 - DNA, 107 bp, Glycine max
agcttcaacatcagaccacgaccagcgtgctggatctacttcacatggacttgatggggcctatgctagttgaaagccttggaggaaagaggtatgcttatgtgtgt

SEQ ID NO: 272793 - DNA, 433 bp, Glycine max
agcttgcttgtggagcttctatggaggctttatctttgagcttcaatgaggtccttcaattgtgatttttcaccatggagatgcagcggaaggcaaaggagaagaggataggggaggcaccatccactagggaataagccaaggaagaaggagcttcaccaccaagaatttccttggataagaagcttgaagaggatgctttaatggaggaaaagaaagagagaaggggggagcacgaaattgaaggaataaaagagggaaagaagtggaactttgaagtgtatctcataagactttcattcatcaaagttagaaaaagtgttacacatgcttctatttatagactaggtagcttccttgagaagctttcttgagaaaacttccttgagaagcttctttgagaaagctttcttcagaagctagagcttagcta

SEQ ID NO: 272794 - DNA, 317 bp, Glycine max
ctttagatcatcacttactccaagcaatacacactgtttgtttttgtcatccacccttgtccctttctgatcacgtacatggacatgacttccgcacccaaatactttaatgatatctactttaggtttgattccactccacatctcttctggagtttcatctttcactgtcaatgtcagacctcttgtgagaacatgaactgcccattttcgcatcttctggccacaaaacctctggcacttgtttgtcacaaagcatgcacccgaccatatttataatggttcgatctttacactccgctacgccgttttgctgt

SEQ ID NO: 272795 - DNA, 338 bp, Glycine max
accatgctatgtgctcgcgaatggtccctttttttcctttccaacttgaggtcaataatggtatcccataaaagctcgccaaaattggttcgggcataattttccttgtgaagcctcttggtctcttggttaagggctcttgccgtgaatgcattctttttccgtaacccggcgcactgcttccgaacgggtgtagcagacaactagaacatctacttggcgagtgttggctttcctaactcgcttatgaaaagctggacttgcttgttctctttcggtgcttcaaaaatcccttcgctgacgacttttaacttggcgagccaatctaaacctcgtat

SEQ ID NO: 272796 - DNA, 399 bp, Glycine max
  unsure (1)..(399): unsure at all n locations
ntcttaagaaaactntcttgagaagcttctttgagaaaactttcttgagaagctagagcttagctacacacacccatctaaaaaataagctcacctccttgagaagcttccttgagaagctagagcttagctacccacacccatctaaaaactaagctcacctccttgacaaaatacatgaaaatacaaaaaaagtccctactacaaagactactgaaaatgcnccgaaatacaaggctaacaaccctatactaatagaatgaccaaaatacaaggcccaaaagaaggaaaaacctattctaatatctacaaagaagagtggatcccaccttgacccatgggctcaaaaatctaccctaaggttcatgagaaccctagggccttctttagtagctctag

SEQ ID NO: 272797 - DNA, 66 bp, Glycine max
agtcttgagcatatccagacgacgacatctttttactccgacgtcagagagattccgagggggatt

SEQ ID NO: 272798 - DNA, 370 bp, Glycine max
  unsure (1)..(370): unsure at all n locations
ntgaattcattctatgcacctttaggggtccatccttgctttgcatgtcttcatcttcattcttctaccattggtgatctttttctttatttaaaaccaacttcaaccgattaatcgtgtcgtaatctcacttaatcattgttaaaataaattctaaccaatcttttgtattgtaatctcacttaatcacttttaaaatgaatttcaaccaatcatgtgtgttgtaatctcgtttaatcactgtcataccctaatttggtccggggatgatcatttgtaaacacttggattcttgctagcccaattgagttgcttaacaccaattgtcgggcattccataaggtctttcgatcttttggcacgaaatgtg

SEQ ID NO: 272799 - DNA, 400 bp, Glycine max
  unsure (1)..(400): unsure at all n locations
agctcgngttcctaagcttataattgcatttttgcactcatctcaaatcctatatgctgctcctatatatataaaacagccccactatcccaatcttacaaaaccatgttcatatgttattgatgcattctaccgagcacttgctgggcgcatgtttatgcatgaatagcaagagagtgggggcaatgtggcatgccctattgcttcaggatgcaacataggcctaaggccattccctacaacaacgcaatataaacaaatcaagcatgaaaacaacccaaaattgccccacaaatttgagctcattctcacaatttagagcaccattagatgaacaagatgctcccatggaaagcttgaaaactcaacgattaaatacttacttgttggagtgagttgg

SEQ ID NO: 272800 - DNA, 158 bp, Glycine max
ctaacattcaactccgagcgtctcgttatatcatacgacttatttaaacactccagccaaaagttattgccgcttgaatctgctcacacattcaacatctccatttatatagtgttcgacatatgacgggactcaatcacacatctgagtcacaagac

SEQ ID NO: 272801 - DNA, 439 bp, Glycine max
  unsure (1)..(439): unsure at all n locations
agctntgtggagtagaaacatgggaccaactcattntatttcagaaagtcgtatctagtcaaggtctgagagaccatacaagttttctagcgatttctaattatgtgggccattaagtctatcatatgctgacaatagccgagaagcccatgaatttcttcgagggcggagtaggtgtccgccattgccttggccttggctaacaatcggagaagttcttgactcccgttcaaggtaagagcaaaccgatccatccacatggttgcctcttggtgtaaagagtcgatcacccttcctctagcctctttttccgcgtatacttgggcatactcgtccgcgaccctatgctcgtgggccgtggctagacctaactcttcttggtacttggcgatgatagctagcatgttggtctccgtctcgcataaacgctaagacaagc

SEQ ID NO: 272802 - DNA, 449 bp, Glycine max
  unsure (1)..(449): unsure at all n locations
gtaacctcatcgtccctcacagactatagatttgggagccaatccaatccttgtgatcggactctcagccgcttatgatagccgccgatgatcccattactgcttcccctaagctttctgtcctttcttcacgccgcatgccatgccttgcgaactacttggagtaccctagcgttgtggtcactgacacctcgtgcgatgaaaggcgtgatgctttcntctaatngcactcctctcatgggacatccttcgcatgaagatagaatcctgattgttccttccttctatcgagggaaccatttaacaaacgcccctccatgctagccaagagttggtcccaattcatctttctttctcgacgcacgagcagngaccttgtagcaaatagactggcctaccttcttagagaataaggtgtgaaaccagccccacatacagagctggagtac

SEQ ID NO: 272803 - DNA, 499 bp, Glycine max
  unsure (1)..(499): unsure at all n locations
cgtacgggcatgacacgtctcgacccgcgatatttatagacacccgccgcatgcaagcttgagcttgatctgtggaacgaggatgttttacttcatcacaaaaaatatcattgcctggatccgaccttcacaaggtaaaacaacccacacaggtaaagtggcctattcttatcacctatggtcatccctaacattgntttcagccactattgatataataaaaggcgggaggaataccttggatgtgtctcatcaggggaaaatattttgtgtgaatatggcgagaaaaggcaaggattgtggggttttggaaaatcacacaaatcattgtggcggctttgctctgtaatgggggtaaaggaaaacaaaccctcgcgttttttttatttttgccccatttcgagaatccgaagaaactaataggggtgggtcttgatagaatcaaagatgacgattacccctctctggttgccaccattggatgaacaatagagaagtn

SEQ ID NO: 272804 - DNA, 367 bp, Glycine max
tgatgacgaaggtgatgaacaaaaagctcacagatcaaagaacaactcaagtgaatcaagaacaagtcaagagttcaagaatcaagaagaattcaagactcaagacaaaagtctacaatcaagaatcaagaatcaagattcaagatctcaagaatcaagatcaacattcaagactcaagattcaagaatgaagaacagactcaatcaagataagtattaaaaagtcttttcaaaactctgaatagcacatgaagttttgacaaaacctttaccaaagagttcttactctctggtaatcgattaccatattgttgaatcgataccagtcgaaaatgagtttaaaaagtttcaactgaattacacgtcc

SEQ ID NO: 272805 - DNA, 557 bp, Glycine max
  unsure (1)..(557): unsure at all n locations
ctcaatctcatnatcagttcccacatacacatactggatctactctcaaaatcccacacacagcccggcgttgacaccgtgcagtaccccgcgactctataaagactacctgcacgcatgcaaactattcacatccaaccgagcccacgggtttgtatctaccacacgcacacctctacggtgaagggcatcatagaaggcgcctaaacgatgggagagggaggccacctacgcaataaagtactcggcataaacaagacacatgataacaacggctccactaccggcagcaacatacagacttatcacaaattaacgagtccttcataacacaaccggataagaagccgctttgaaacccgatggtgggggcaaccggtacataccatctaccatccctaataagactcagacaagctcactccactgagaagcggaaaacctgagagagaccaccagacggaagcggcgccgaaggacaggaatacatttacaaaagacactccttaaagtcatcccagaacgtgcaggaccctggagacaggtagaagcgtccg

SEQ ID NO: 272806 - DNA, 287 bp, Glycine max
ttgaaagagcatcaatataaacacacccgtacttataaaaatcgaagctttaagcatccaaaaatcacaacagatcaaaataatagaaaacgccgaagacggtgatgggaaacaaagcgcatcaacgtcagagcaacaaagaaaatgcacccgtactcatcaaatcgcagctttagtgtgttcttcgaccttctctgcgaaacacagaacatgcaacataagttaaagcataacaacatcataaagctttgaaagagcatcaatataaacacacccgtacttataaa

SEQ ID NO: 272807 - DNA, 578 bp, Glycine max
  unsure (1)..(578): unsure at all n locations
ctacttcggtctccntcactcatttccgtccntactttctctttantatatcttatactaattatacacacacaatcacatctcgacncggcacttgacaccttcgcatacccgccgatcctctatagaacatctcgtcgcatgcaatcttttctatatattctatgcacccgacgtgttccaaaacgcgaaaagtgtattatgattcccgttctatatacgtttacataccctccattgacgcgcatatgccatcatacttaaaacatatctcgtttatcttacaaataaaacataattacagcgcacgttagaattgtctgatccgtaatcctaggataaaaagaatttcgaccgtccagtcgtgtcgtaaccacgttggaaaacactaatagatacaaatttctctattgatcaaagaacctttttttcttatataataaagcagacaatcaatctgacgatttcntttgggatccctattcttaaccgaattgactaatgactaacgcgaaactaaggttaaaacgaatagtatagccaagcttgtttactaaaatagttattgagactgcccc

SEQ ID NO: 272808 - DNA, 383 bp, Glycine max
catgcaagctctaaggtatatcggtgactataatttttatcttaattgtgtccatgatccatgcggtatatgataatgacttgtttatgaaagatgaatatctttcttcaagctttcgatatccaccaagaacaactcatattcatttgtagaactccaaatatgatgttcataatgaactcatcttgctaatgaagctccattatgagtgtgttgtagctatgttcttcctattatcatattcatcatgcatatcttcatatcattccttcttaggatgtcactatgaattgaagatgacttttaaatcttgtttattgtttcacatgttgctctctcacaaaagctcataatcgttctattgagagcaatgttgttcttgt

SEQ ID NO: 272809 - DNA, 429 bp, Glycine max
agcttcttcctcaccacccacagccaccagtagccaccacgaaccaccatagttctccattgaaaacccacaccgaaaggaacctttccatcagagcggaatcttccaacttggctcgcggttttggttgagaatgaagccccgatttgaccttcgtggttttccttgaggtaaccatgattctatgattgttccttgttagttttagtttgtcgttgcatcttttttgactttggaaccaccattgtatgttttacgcttcctatgaaaaaccctagagaaagagactttgtaaacattatcttttcatgaaatggatgttatttttgtgaccttcactaaaccccagtcacattggcgtgatcagaatttcaaaatgatgttccttttcctaaaatctgaaatgccctttagccctttacgttttga

SEQ ID NO: 272810 - DNA, 332 bp, Glycine max
  unsure (1)..(332): unsure at all n locations
tgaacgtgcgtatcccaacatctttttatagcagaatactggtaatgtgtttactatcattgtnatcatgtttctctccccattgacgtgccacttgagctgccacgtattttctactttgggcctattcttttgaaagattcctgccccccttttgcacatgttttgcaattgcatcctaaccgaagacattatactgacattgcctaaccaaggaaaccactaagtccttccaagaatggacttggcaaggctccaagttagtgcaccacgcaacagctatcgcactaagactttcttggaaggaatgtataatcaattcctcactcttt

SEQ ID NO: 272811 - DNA, 437 bp, Glycine max
tcgaccggatccttaagcacctgcggctgcagcttgtgtatcgaaatatggtcttggttatcgattaccagcgacaagttttgaataaaaatcaagagatataactcttccaacggttttcaggttgttctaaaagttataactcttctaacggttttcttgactagacatgaagagtatataaaagcaagaccttgacttgcatttgaaaaataattattacaactttttcatatattcttttacaacctttgaatttctttgaacatcttcttcttcttcctttgccaaaagctttctaagttttctggttatcgaaaccttgctctttcacagaaaacaaaagtgtgctattcatcttttcattctcttctccctttgccaaaaagaattcgccaacgactaaccgcctgaattctttatgtgtctctcttctc

SEQ ID NO: 272812 - DNA, 317 bp, Glycine max
tggagtactcttaatcactccttgtagggcaacttaattattataatggttcttgtccaatagtgcacccccatcgtgcattggttgctaagcttcgtaggatgattacaagttttcaacaattcaaccttgctcatgttcttttaggaggataatcaagtggcagatgtgtttactaagtcttggttttcgctacaatgtagctttcggatttttatgcatatgcatgttccttatttctttttttgattctgattgtggatgatgttatataaggggtgattatgggtctaaatccaatccatcaattgggttgg

SEQ ID NO: 272813 - DNA, 526 bp, Glycine max
  unsure (1)..(526): unsure at all n locations
taatccacttcatatcatttnttatatataatcttttctcttccgcccagcgcgtgattctacctacattagtaccttnaaactcactcttaaacatctctttacataaaaacgcgaagccttaaccatataaaaggctgctcagctcgacacctgacttgtctcactcaccataaccatcctaataacaactttattttatcacatcttgtcttatctagattctattccccatagatcctattccattcacatcttattctatacagatcttatttagtccacactttatttcactccatcttatcctactccagaaactattttaatcccttcatggtgctcaacttaacatacatctgtaaaccttgcttcacctacaataaacattattttttgcaaacactcctcaatcaaatatttcccaaaacatggtcattctattcccctttgacataatccggactctcaccaccttgaatcaaaatgactctctccattcaactattcttggactccgacaccg

SEQ ID NO: 272814 - DNA, 427 bp, Glycine max
agcttgtgcagattgatatgtaagcttattattattgaccagcactctctagctaggccaaaattgactgatgtaagcaatgataaatcatcaattatcaactgagcatggagattaaaagttgaaggccccataatttgaaggccccacacgttgcatgataacaaccactttaattgaataaaaatacaaccccctttaattttgacttagaatagaccaaaataatccagtaaattcaatgattatgtgcgttatttcacgccaatttgatccctcttttgcttttccatatgaattattattgtagaagtgagctgatgattattattgcttggcgtgcctaaaagtatatagtgtactgccaagataaatgtaaagtatgaatcaatttgcagctatgttgattatagaaaagcatagcata

SEQ ID NO: 272815 - DNA, 417 bp, Glycine max
cttaaaagtctgcatataacgataatggtatgtgtcacattagtgattggatgttaaaaattcggattttcatggaaatatgatggcaacagttacctaacaagctgtactacttttttttattataatatctcaagataagtgactgtgtgctgccttgtcgcatataaatttggatgatcctttgtggggcatcacctacatacaagtggagcgttgtaaatcacatactataattaacaattcgttagaatacacaaaataaataaaaattagagtatgcaataacatatcctctaacatactcttttgattagaacacatatttctacaacatgcaactcttccttcgatgatccattgaccataaatgtattcatatatctatatcaaaatctacaacatgcaaactaatat

SEQ ID NO: 272816 - DNA, 420 bp, Glycine max
agcttctgtaagtatgatactgtcatttgttttctgctcttgattatttctaattttacaaaggtgacggtcattcagattttgatgcttatgctccaaaggatttgcttattgtgacaacgggatctcaagtaagtacttttaatgccctctaaagactgtctatttccattgacttacaaaagtttatggcatttcaccaatatgtgctattgtgtcaggcagagccacgtgctgccttaaattttgtatattctagaagtagtcattctttcaagttgacaaaagaagatattgtattgtattcaagtaaggtatgataactgcattgggtatttgccttgttgatttatctaaagcacatctagtatatctgaatgcttgtttatgaacactcaaattctttgaaataatcgtatt

SEQ ID NO: 272817 - DNA, 388 bp, Glycine max
agtcttgatgcaacatatggagaggttaatgttacaacgagatgatgcgctccatgagaggttggatcaaatggagaatagagatcataatgaagaagaaaggaggagaagagggaatgatggtgttcctagacaaaaccgaattgatggtattaaactcaacattcctccatttaaaggaaagaatgatccggaggcctacttggagtgggagatgaaaatagagcatgttttctcatgccacaactatgaggaggaccagaaggtgaagcttgccgccacggagttttccgactatgctcttgtgtggtggaacaagctacaaaaggagagagcaagaaatgaagagccaatggttgatacatggacggagatgaaaaagatcatg

SEQ ID NO: 272818 - DNA, 346 bp, Glycine max
tgctggggtacaactcccacaaaaagataatcaacatcgtcatcaccaatcatgacaatggtgcttaggaccaacattgtgttgacccaatgaactcgaaagcaaaatttgaaacttgaattagctgccaaaagaccatggtcatgctcaaacccgcaaggttgtgctgatgctacagagatagttccatttaagccattataaatagaaaataggaaccctcaattatatgatatttattcaattttttaatttgagagttgtgtgggagggcttctgatggaagcttgcttgtggggcttctatggaggcacgatctttgatcctcaatgaggtcctttaatgg

SEQ ID NO: 272819 - DNA, 165 bp, Glycine max
agcttgtgtctaaagatatagaagacaatgtttactgaccgggacttattaacttggcggaagtgtctgatgtcatgtatgataaaaaccacatactgaccattgtaaagacaacatgaccggattttgcttaattttatgcgacagtaaatgattgcacataaa

SEQ ID NO: 272820 - DNA, 347 bp, Glycine max
  unsure (1)..(347): unsure at all n locations
atcttttcatagcatagtattgataatgccgtcaatcgctccctttccatcattgggggtaccacctgagccgtcacatcccttcatcttttgggcgtgttctttgaaagacccgttccactttttgcacatgttctgcacttgcatcctatccgaaaccatatcaaaattgtactgatactgnctaaccaaggcaaccattacgtccttccaagtatggactcgggaaggttccaagttagtgtgccaggcaacaactaccccagtcagactttcttggaagaaatgtattaccagctcctcatctctgcgtatgcccttatcttccgataatacatctctggatg

SEQ ID NO: 272821 - DNA, 434 bp, Glycine max
agcttgcttctacagaaaagaaatctcattgttctcacgtcgctagtggactggatgtaggcacggtttgatgccgaaccaatataaaactcttgtgtttgttttcttcttccatacactctttaatttccgctgtgcattttaattatcgctattacttttggttaagttttgtttttctattctttattttctcaactttgtagtaaaagcctaattgaatttagtaacattaacaacgatatatttttaattagtaaaggtctattaataattaattcaacctccccccccccctccttcttaattattctgaggccacttgttgcaacaagtggtatcatagcatgtatcttgtatacagttaaaccacttcaagaatcatggcctcttcaaattctttgtttcctgacagaaattccatccatacgcca

SEQ ID NO: 272822 - DNA, 495 bp, Glycine max
  unsure (1)..(495): unsure at all n locations
cgggccccgacggcngttgntttgatactnatcgcatcnacgtgacactatagaatcactaagctgganatgaagaagcgtacaccggagagactcctgctattattcctgacccagaccggtacctggagatatgtcgtgggggtcacgataccttggggacgtcatgtgttgtgctattcccaaaaccaagcttgaccaatctccgatccaacccgggcatagtcagctcgcgagaacctgtgatgctcctaaacacgcgagctcctggcagtcaacagataaaacgaacaaagaccaccacgatggaggcttgtgtcgtggctggcacactgtgaactttgattgatatatggcatactgcctctggtattcatcaccaacgggggttatccattacactgctctaaacgaacacaggaagctgacatggtctctgtaactgattacccagcgaggtactgattaccagcttgacaacaggtacgaagctcg

SEQ ID NO: 272823 - DNA, 337 bp, Glycine max
tgcaagcttcctttacaacatagagaagacaaggtttaatgattgcacaaatacaagtcgtaggggtgtctcctccacctctaggacttcacaatcactcacaaactcatctcaagctctcaggacggcttcctcttccagctctggtctctgcagatcttcacacaacaaaatctctcaaactctctggatctcggacctttctctctctagaactctccaattatgtagaagcttcaagaaaaggccatactcccttccaaaataagatttcacgcttaaataggtggctatgatcgagtttcatgctctgcgcttagtgcgacttttctcgctc

SEQ ID NO: 272824 - DNA, 322 bp, Glycine max
agcttgagaattgaggcttagcgtaccatctttcttcaacttacagagagtagttcaggcttagcgccacaggtggtaagcgtacttccaagagttcaaaaaccgtaagagattggtgcttagtgcctcctggccagctaagcccagcttaaaagctcaagttacagaatggatatggggcttagtgcaggatagcacgcttagcgctgctacaatgaaatgtatacagagaagaagtggcgcttagcgcatcatccacgctaagcccacaggttaaagttcaattaccacaaagatatggggcttagcgcagtgatgtgca

SEQ ID NO: 272825 - DNA, 278 bp, Glycine max
gcttcttcccaattttctatacatagagggagaagtgaagtttaaagtgtgtcagctccctacgcacttctctctctgtcgaatttgcttacgaaaattgcttcccggaagaaaatacatgccgaggcgcttctgtaacgtttcctgtacatttccgtgagtgacttcgcgaagggtttcaaccgttcttcgacgttctttattcgttcttcatcgttcttcagtcttcaaccggtaactacctcacactatacttctcaattcattctatgtacccc

SEQ ID NO: 272826 - DNA, 432 bp, Glycine max
agcttcttggcagttgtggttggaattctgttctttcttttgaccagcttttctgatccagggacaataaacactgagaatgttgctcactatatttctgcttatccctatgataatattatttattcagagaaagaatgctccacttgcaaaattccaaagtgagtttgctactgttgctgaattttgttgaaatattggttaaatctatctataaaactgtcttaatttttttatgcagacctgctaggtcaaaacactgcagcatttgtgatcgctgtgttgctcgatttgatcatcactgtggatggatggttagcaatctttgaaattctccctctttataagattgcttgcattgttctcatttaatatacatcatgtgtttttttggagttgtgctgaaagttgttttactcacagaacaattgc

SEQ ID NO: 272827 - DNA, 504 bp, Glycine max
  unsure (1)..(504): unsure at all n locations
aatctgccctcttactctatctcgcgtntatatatgaatnattcactttctcattttncngcgccnccgcgcggtgagttgatctacttacacacacctctcacctcactccttcatactccagattnagccaacggatacacacctacgctctttttgtttatttcataaccgcttaaacttcaaccatatattacggtttggatcttatcctgcactcctgtaaaatataccgtcacaaactctgaccgctagggctcgacgcatataagtccatattccctcgttaagacatatacctgctcaaattatatggcccactgcctatctctccaacaattgtgcagaaacaatcaccgcctgcccgacattattaacaccgtatatcatccttgaagaaagatctattaaatggctgtctgaacacttgcgcaaaagtgactatcaacttgatacaaaaaacagagttgccccatacaatgttcagaccgcctagtccccccc

SEQ ID NO: 272828 - DNA, 423 bp, Glycine max
gcttatcgcacggataagaccacttagcgaggtttgcatatccgaaacgtgaactcttgctaaggcaggctctggccagcttaacctaaatgatgcatcctaattacagagaagcatgcgcttcactgataaggactcgcttaacgctcacattgccggaaggaatttagcttggcgggaacgactcgagctttagcaaaagggatgatgggcttaccaattaagcttgaccttaaccgaattcaaaccaattaaaagtgggataacttaaccttggccaagttaatggaaccaatcaagcccagatgccaaggtgggcgcgtaacccttagacactcggttatccccgagccatacccattaccaaaggggtgtttcaaaaaatattctaacatttttacccccttttccaagaaaggaacc

SEQ ID NO: 272829 - DNA, 401 bp, Glycine max
tgtagggttacagtctcatgactgtcacgtgcttatgcaacaattgttagtcgtggctatacgagacatcttgccaaacaaagtcaggttagcgataactcgcctgtgcttttttttacatgctatatgtagcaaagacattgatcctgccaagtttgatgagttggaaaatgaggccgcaattatattgtgccacttggagatgtatttatcccctgctttctttgacatcatgattcacttgattgtgcatctggtcacagaaatcaaatgttgtggtcctgtttatctactgtggatgtacccgattgaccgatacatgaagatcttaacagggaatacaaagaatctatattgtccagaagcatctattgttgagaggtacattgtagaagaagcca

SEQ ID NO: 272830 - DNA, 314 bp, Glycine max
agcttatgtttttcttaaggactgattagtgttcatgattgattagtaagcccccaacggaggcatacttcagaaaccagcaaaaccagttcagtttccaaaactataatccaccctattgaatctcacatacccttttagttcctttctgtttttcgaatcttgaacaccccaaaaatagaaactttacatataaatgttaacaaaaacgatagcgaataaaataagaaaataaaagggtgaaattgtggatataaaatgtaccttgaacgggtcaagtaaaaggggagaagttaagaatggtaaggaaggga

SEQ ID NO: 272831 - DNA, 421 bp, Glycine max
  unsure (1)..(421): unsure at all n locations
tgtattctgatatggtttgattcacgaaagaagaaatatatgtagtttaaaattgcttctaaatttggtgctaatggtgcaatgttattttggtcaccagatgaacacctatctctcaatggatggtgtcctctatcgcaagccacactttgaacagcttttcaaggaatctggcaatttcagcaagaactttcaaacaagtaagatgtaaccatcctttgttcatcactttgtttactaattttattcaaccgcaatctcattgagtacaaattcatatgcacctgtcactttctattgacttggctaacatgttatgttgttttcatgaccataattgcggcacagcaaagtcttctgataaacaaaatgagacggtatgnttacgatccagnctaaacacatatgttgcattttgagt

SEQ ID NO: 272832 - DNA, 375 bp, Glycine max
agcttatgcttttacgaaaaacgttcattatttcatgttgaagtatggaagtaaccatctttccaatattgggccaaaagatggatcgtgttacatcgttgcttcatctactgccaaacacatttaggactgttgatgtccttgtttccagtttcgccttgaccaagatgtcatggaccatgttgaaaatctaaattgattcaaccccatgtcctgcgtaaaaattcgcaatacttcaattgtgtattattcacatacatccatgcttttcattggttgcattgctcattgcattctttccttgaaaaaaataaaataatcatactaaaataaaataaaataaaatgaaaatgaactttattattgttatcaaaa

SEQ ID NO: 272833 - DNA, 282 bp, Glycine max
  unsure (1)..(282): unsure at all n locations
gacactatgaaactaagctntggggtgcgcgcccacatgttctatagtggagtacctataatgtgtctaccatcacgattatcgcctncctttgcattattgggggtaccacccgggccgacagattcctccaccttttgggcgtgttctttgaaagataccgtccccttttgcacatgttgcatcctattcagaaccatatcaaaattgtattgatactgcctaacaccgcaaccatcacgtcctctcaacaatggactctggaaaattccaantaatgta

SEQ ID NO: 272834 - DNA, 194 bp, Glycine max
agcttggagtggtgaaccactctgattatttatgattaacggtgctcggatcatcggtctgtgctcgtgtaaaacaaggaaagcttgatgcaagggctgtgcatagtgcgttcaatgaatatcctgaatgagataaagggtgctagctgtggaaataggaaccgggtgagacaagatgcatcataaacagggat

SEQ ID NO: 272835 - DNA, 107 bp, Glycine max
  unsure (1)..(107): unsure at all n locations
tataatatattattacgctcgaaataaacatcagaagctctcgagatattcaaatggtcataacttttcacccggatgtncgattatggcgaatcacatatcgagac

SEQ ID NO: 272836 - DNA, 410 bp, Glycine max
tatttgttatgctgagagcagagagcatgtcgtgagcgttgataatgtattcaaatgtaccgcaaatactggattgccgacgattgattatcctataatagagcgcacctagtcaatcgcaaggtgagttgattacgttaagggcaaacggaatttcgcaatgtcattatgtcatgaaattgcgattcgagacgtaacgattcacatctcttcctcgcggctctcaagatcaagaccaaatggtgctagcgcgaagtggaccagtcatggaacgtactatactgattagtctccgagagatctacttacacgtaaatagtgccccagcgtcagggttatggcccttgtgtacagacaacaccacttctctaatgattattttctccccctccttacaaaggtgagaattg

SEQ ID NO: 272837 - DNA, 339 bp, Glycine max
  unsure (1)..(339): unsure at all n locations
tagtcataaagccctcttctagtaatagacttaagctgaggagattacttttcatacctggtacaaagagtacatcactgatgcaagaatgacctctatcctttgttttgataaggaccttcccaattcctttagcactcaaagttctatcatcagcaaatttgacttgactcttcacagattgatcaaggttgagaaaccactctcttcttcctgtcatatgagttgagcaacctgtgtctatgtacgaacatttatcacttgccccttcaatntgantanntaccattaacagtacctgttcagtgtcatcatcttcttcctgagccaattatgcat

SEQ ID NO: 272838 - DNA, 56 bp, Glycine max
agcttgtgctttttagagtaaggaacgactttgtataccaacgaactaatgccgcc

SEQ ID NO: 272839 - DNA, 421 bp, Glycine max
tgcttctacattataggtcatgaaaatgatggttatgctacaattgaaattcttgcccacctactcattaatgaatatgatgatccaatcaatgctatagtcaaatcaacattcccagacttagaccagcaccacaataatcctcaattcttcaaatctagggcaatactagcttcaacaaatgaaacagtagaacagatcaatgattatgtactatccttcattccacgtaattatctcattagttatttaattgacatttctttagtcaaaaatatgcccactgaaattggaattctgcaaaccatatgtgaccacatggaatatctacgctctgattccgttgaccacatccagttggccaacttattgtatcaagcttaaaattagaagtactataatgctcttaacgaacctcgac

SEQ ID NO: 272840 - DNA, 338 bp, Glycine max
attcttgcccagctactcactaatgaatatgatgatccaatccatgctatagtttatataacatttccagacttagactagcaccacaataatccctcattcttcccatctagggcaatactacctcctacaaatgaaacagctcaacacatcaatgattatgtactatccttcattccaggtaactatctcattagttatctaattgacatctctttagtcaaaaatatgcccactgaaattggaattttgcaaaccatacgtgaccacatggaatatctaccctctgattccgttgaccacaatcaccttggccaacctattctatcaagcttaac

SEQ ID NO: 272841 - DNA, 441 bp, Glycine max
agcttgtaggattatggggtatccatcacatgtggtactaggtggcggtcgggcgatggtgcacaacaagttttccacatccacaatgcgcgcataaacccaccatcccctattgcccacctccaactgagctcacgtactcccacgtagcccatatcctcgtttctctcaacaccgggtccccatcaatcctcccaagcttccacaacatccaagcaaaacaatattcaaacagtacaagctatcacaaccaagcaaaacagagcaaaggcagaaaactctgccaaaacaccaaccaaatcacagcttttctcacttaaagaccccagtaacaattccttcgatccaattcgttaaccgttggatcgactccaaaattatactggaagtctgtagtacataatcctacattgtgaaccgtgggatctactagcaaacatc

SEQ ID NO: 272842 - DNA, 172 bp, Glycine max
agcatgcaagcttgacgacaatggggaactgatcctatttcaacctccaggaggttgaacacggcgataatgctgttaggacatcacaaatgcccatatacagtatacatactttttttgtccaccctatctgctgcaccaaccatttacttaacacatatccaagttttct

SEQ ID NO: 272843 - DNA, 391 bp, Glycine max
ctgcagctttgagatagagtgaggtaccgctttttggcagagcttgaaagagcctaggtagtggaagagaagttcatgtccatatccatccgagtctgaatagagtatgacgaactaagggatgtctatatggccaccgctgaaaccttgtaatgagaaaccaagaaggcccgaaaggaagaacacgaccaaagcaaagttttgaggggctttatatggcagcaatagtgagctcaagctccgaagaagtgaaatgaatcatcatgggtcttaggcatgatcgtgaaagaccagctctatgttcgccttatgtcgaaaagaaatttgttccaacagttaaacgatactgaagggaatatgtgggccatcatcgattagtgcgaagagaagc

SEQ ID NO: 272844 - DNA, 433 bp, Glycine max
agcttcaacaacaacctggaactgatcctttatcagcccacagcagcttagaacccaaccaataatgctgcaaggtcgacacaaattccccttttcagtgaaccagtttttttgcccagtcctccctgcagcagcaacaattagcaaaccaaaacaccaaataaccaaccattgacgaataaacatttcactgcttcaaatttctatctaacaaattcaaaagcccgagctgcaatttctatactctaaacaaaactgtaacctcaatttaaaatcaaatgcactctcaaccgtaaatgcaacaatcagcaaacctaaacgccaaatcaccaacgaacaaacatttcaccgtttcaaatttcaatctgcaacagcaaatagcaattgcagccacaacactacaatttcaaaagcctcactgtaattgctataa

SEQ ID NO: 272845 - DNA, 155 bp, Glycine max
agctttcaacatatgtgttcacaaataatcattacacattataaacctagcatgactacccatcatatgtccccataccccatacccacgaagatctaaggagaatgaacgtcccccaacctgaaagtttcgaagtccactcgtagccatgcact

SEQ ID NO: 272846 - DNA, 257 bp, Glycine max
gctaaaccccctgatgtgagagcgaactcacgtgactctatgtatgcacacgcatacatgtggaatattcaaccattgatatcaacatagaggctagttcacacattctaattgtcacacagatatacacatttgaaaacaacatacattctcacgcccaaagcattgcgtcatagttcacacttaattatatcctaaacatctactattacaaactacttacacacattccgaatatatatgatacaaaattattg

SEQ ID NO: 272847 - DNA, 530 bp, Glycine max
  unsure (1)..(530): unsure at all n locations
cgactttgatcgatacgatccgnacccgggatactctagagtcacctgacgcatgcaagcttgaagacacacatattcaatgttcatttatataaaatatcattaagctgcggattagagacacataattatcgattccaagcgccgactttactatccctaaccatctcagactatattaacatccgcaaacgatgactaacttcaatgcatatgactctctcatggataacacacaatcatgtaagggcaatctaacaatggatatggataagtacataacactgagtagtaaaataggtcaactgtatgtatcattaagctgcacatccatgatgctctgtatttccacacaagaaccttataactattccaaagagacattgcttgttttaccgctaatactatgcttagtagagagatcatgacgcaccctttcaccagtcataaaggagacatcgtgaaatatcatccatgaaagtctagcggtgcataagaactggatacatggctacccatatttctggttg

SEQ ID NO: 272848 - DNA, 150 bp, Glycine max
taatcttatcctatcttgtcagctcaccatacaactcattaaaaactcaggatatgatggcacattcatcctatgcttcgtcatcctgaccactaaacgactctctcaaaatgtgggtttgggtctaactcatccccaacaaccacctcc

SEQ ID NO: 272849 - DNA, 465 bp, Glycine max
  unsure (1)..(465): unsure at all n locations
agcttgtaggattatggngtacccatcacatgtggtactaggtggcggtcgggcgatggtgcacaacaagttttccacatccacaatgcgcgcataaatccaccatcccctgttgcccacctccaactgagctcacgtactcccacgtagcccatatcctcgtttctctcaacaccgggtccccatcaatcctcccaagcttccacaacatccaagcaaaacaacattcaaacagcacaagctatcacagccaagcaaaacagagcaaaggcagaaaactctgctcaacacaccaaccaaaatcacagcttttctcacttaaagaccccagtaacaattcctttgttccggttcatcaaccgttggattaactcgaaacttttactggaagtctatagtacataagcctacattgtgaccgttgggatctactagcaaacatctagaactcattctacattactc

SEQ ID NO: 272850 - DNA, 256 bp, Glycine max
  unsure (1)..(256): unsure at all n locations
tgtgcaaatcaagtcactcccgcattntatctctagcatgcattgtatgttggtctcgtcctttgtcacgggaagccggaaggtccatatcaccttcttaattgtacacatggggcactgcgcccncaaatgcgcaagtaagaagagataattttccaggctctcgtgtgcgtaaaatgcattcatatcatgcattgcataagcatatcttcattacatcataatggacatatnctgcatttgtccgttatcatat

SEQ ID NO: 272851 - DNA, 465 bp, Glycine max
  unsure (1)..(465): unsure at all n locations
agcttaannattttggaatagatgtcatgtgatgtcataatagaatcataatatttttttatcttagtttcagatgataggtattaaaagaccaaaccctttctctttggctacttctcctgtgtcctcttccaattttaaacctctcacttttgctactactatgaaagcaagtgaaacaattccatgcgggagtggaagaggattcaacttggattttggcaattcaactttaaggttggttcaaatttgatctagtgactattaattggtaattgcttacaaaatttgcatgttcttctgtagggaaattccttctctttcagcatccaactcanatatgaactcaaagaanaataaaaaagggaagaagaatattggtggagattntcttagacttgctcctcctactcaatgctcatgttccaagttaaagtcttcttcagctttcgtatcatctaacct

SEQ ID NO: 272852 - DNA, 451 bp, Glycine max
  unsure (1)..(451): unsure at all n locations
tgtaatcgattacacatatactgtaatcgattaccagagcagattttcagaanatattctcaacagtcacatctttttatgtggttcttgaatggctatcaaaggcctatatatatgtgacttgagacacgaatttgcgaagagtttttcagaacaaaaaggtcttatcctcttaaaaagcaaaatcgttttatcctcttacaaattccttggccaaattacttgtgattcaataaggaattatttgagtgctcaaattgttcaatctatctctttcaagagagatttcttcttctcttcttcttcattctgaaaagggattaagagaccgagggtctccttgtaaagaattctaaacacaaaggaaggattgtccttgtgtgtctagaacttgtcaaaggagtntacaagatagtggaactctcaagccggttgcttggggactggacgt

SEQ ID NO: 272853 - DNA, 471 bp, Glycine max
  unsure (1)..(471): unsure at all n locations
agcttgcatgattntacattctcccctttctcaagcaaattcttaattcttcttgacatcatcataatcttcatgatttacacaaaacaccaaaggcaattgcatctacaatctccccctttttgatgatgacaatacaatacctgaaatcaagattcaagcaagcaacaaacaattgtatatagataaaatgtgcgtttactccccctagatttcggaatttatgatcacttgatttctaaggttgttaagctttttctacaaccttttgtccccctttggcaacatcaaaaaaccaaagaactcgggaatcaacatagatataacaatggagtagaaagatataacaatggagtataaggcataaacatccaaattcacaaacaagaaataatcaaccagaatccagataactcanaacgtcaacaaccacataatgtcaaagcagaaaaggctgaaatctaaataact

SEQ ID NO: 272854 - DNA, 443 bp, Glycine max
taagcttctatatagctgaaccattttatcaataaacacaagttgagttttattcagaaaattagagtttatctcttttttcttagtgagagtgattctcctaaattcttgagtaattcaagaacaccctggctgtatcaaaggactttcacaacctttgtgtgttgcccttgccagaaagagtgattctttccttcctttcatcttcaaccttgttctttcaaaccacaattccagaaaatctacttctgcccaaaattatctcgtggccataactcccattttacgcactcaaattaagtgattcttgagcctaaattgaatttcaaaacgagacctttcacctcgttttggaatcacctcatttagagccatgtagcttgagttatttccatttctatatttctgtccagccaccacttaacctatgttttaccatccca

SEQ ID NO: 272855 - DNA, 372 bp, Glycine max
agcttgtcggccgcgattgacgaatgtcgcttattacgacgttcgtctctgcgtgttataaggctctacgtcttacagacagcgaaaagtgtatgcggataaccactcgggtatttccgccccgcagcgtgactcataaggcaatatgacagatcttgtgagcgcggaagatgacgtgaatctccacaagtcaactggcttgatcgccgcgattgacgaagggcgcacaatacgacgttattctctgcgtgctattaggctattcgacttacagacagcataaagttatactgataaccactctggtatttcctaccgttagcgtgactctaaaattagtatgacagatcttgtgagcgcagaagatgacat

SEQ ID NO: 272856 - DNA, 351 bp, Glycine max
  unsure (1)..(351): unsure at all n locations
tgtgacacgtggagacttacgttatcttccacgctcacattatctgtnctactgacttttgcttacgctgacggacggaaatacccgagtggtgatccgtataaactatttgcattctgtaagacgaaaagcctgataacacgcagagactaacatcggcttctgcgaccttcgtcaatcgcggccgacaagcccgttgatacgtggagatttacgtcatatttcgccctcacaaaatctgtcatactgactcttgagtcacgctgacgggcggaaatacccgagtggttactcgtatagaacttttgctgtctgtaagaccaaaagcctgatagcacgcagagactaacg

SEQ ID NO: 272857 - DNA, 462 bp, Glycine max
  unsure (1)..(462): unsure at all n locations
agcttgaaaacacacattnntcaatttatgattaacanaatatatttaagctntagtttaatatccaaaattacgattctagtgtcgacaaattatccataacgttttaatttttaaaattacaaaaaaaaagaactcaaataatagacgtctaatgaattaaaaaaatatataatttcataaaataattttatgtataattacataacataaaatagtaaaatagtaaaatagtaaaatagatgaaactcaacttcttataatgctttttatttccagcaatgaagctaataattattcgaaagatacattgcttgttttgcagctctacttatgcttaataataaatagacgacgtacctcttagcaagttatctacgtgtacttcttgaaatatcatcccatgaatatcgttgcagttgcatctaatcttggttaagaataactaccttaatattccat

SEQ ID NO: 272858 - DNA, 367 bp, Glycine max
  unsure (1)..(367): unsure at all n locations
ttacgtgacactatgaatctaagcttaatttttgaaagttttagctttcgcaattaaagtaatatttgagaacaaaaaanaacaatcaaaaataaaaattgttaccttaacttcctcttnctctatttctaattatccaagttttttacttatccatgcataggttttttactgaagggtattattataagtatttatataactatttttttaattaaaattagagttttactctggtgaagtgtgtaatatttattgtctttattgtgcgagttactaaatgaaactctaattttagtttataaacattataaaaaacatttaaggtgctactcttacgttntataaaaagataaatagaatagat

SEQ ID NO: 272859 - DNA, 555 bp, Glycine max
  unsure (1)..(555): unsure at all n locations
tgcccccacggtatattgactctatctcgtacccgagatcctgtagagtcgaactgcacgcgtgcgagctcanacgttgttgcggtactctccggatgtgttgactatgggaccgtaagagcgatgcgtgcacttacgacgtctgatcaggaggcgcacatgaagcagcataatctccttgcactctggtgtatgtacgcctgccgacctgctctcacataatcatacactcttactccatggatctcgctgtggaacaaatgcgggtctgtatcatgccgccgaaggatacgaatctgcctaggatccggcaattcgacatgtaagccggtcaatccgcgctaatgaggcatagtgggatagcgtctactaacgctgcatgctcatatgcaggagacctcatttatggtcccgatttacctaacgtttgctccgtggctacatcagaagcatgactactaacgttgtctgacatgctattatacgtaggcctaccacgcgacgctcatgatccaatggaagactatttaacctctcctaatgactactatgaga

SEQ ID NO: 272860 - DNA, 245 bp, Glycine max
taaggtgtctatttgaagaatacacatataaattactgatttattaagacaaagttaaaattaaaggcgtctatttaaacaaaatataaagtttaaggagacttaatacttctttccctattccttttattaatatgacctgttttctttctgtaaagctgctgtgaggtattgggaacattagacgattatgtataaaactacattaaaattaaacaaaacaacacggatttgtggatcaacca

SEQ ID NO: 272861 - DNA, 380 bp, Glycine max
agcttgcaagcactaacaagactgagtctctctcgaccatcatcttggagatactccaagctccaaccatagacgccaggaaggtcatggtgggagaaatggaagaaccagactagatgaccccctataagaatttcttaatttgaggggtgtttccaccaaacaagaatgaaacctgacgccttaaaaggaaggctagcttctatgtcatcattgactgtgaactattgaaaagaggattaacaacacccttgctcaaatgccagatagccaacaagtagactacatcatgcgagagctacacgaaggaatttacagcctccatatctggtgaggctccttggcaaccaaagtgccaagggcgtgaaggtgaggatgtg

SEQ ID NO: 272862 - DNA, 372 bp, Glycine max
ctagtagtcttatacttgatcatggtggacaactctgagtataagagggaagatcggtaataatgtctcagcaacaatggtttagccaactatataaggattgtggtaagaatgtatcctaagataataatgagaattaaccctataataatggtgagaatgagatatgagtctacgtgaagtaatgattgagaggtgaagatcggaccaaatgcataaaggattcactagaaacatggtgagggtaaaacatacaaagcatagatatcataaaaataattttgactgggtttttggttttcatacaaaatcaccgaattaatctcaccatataacaattgcgattctcaccaacaaaatcatcagctgagc

SEQ ID NO: 272863 - DNA, 468 bp, Glycine max
  unsure (1)..(468): unsure at all n locations
agcttccnctaccncanatggccttttcctataaatagccatgcaggggaagggtttcaggggctggattctctaaggaacaaaaggaaaaatgcaggaagaggaagaaaagaagaaaaaagcgaagccgaggtgctacggaatcgtgatcgtggattgtttcctacattgtttctcttactagccttgtaccctgtgcaacagtcggttagtttttttcttacgattttgatgtaatctatgtatccttatttggtccttcgtgagattatgtgtgcatttatcttctttgtggcgtccctaaataatgactggtttaatagtaatgatttaaataacaaacaaaccatgggaaaattttttgtttcttttttttggtttcgtttctttctctctttcacagtaattaagttcagaaggaaaatcatcactatagagtcctgaatggccagttcacaactctattcg

SEQ ID NO: 272864 - DNA, 298 bp, Glycine max
  unsure (1)..(298): unsure at all n locations
tcagcttatgatgctattgaaattgaaagactaagagatgtgagaaacacttgatgtgtttaaaataaatggcggttcttctattatttctagaaagaaaatgaactatctgttacattgtatgcgatcgggtatgagattttatggattcattnttctagacccataatcacccgagagtatccatatttatccactttctctatattttgtttaatccaacacccgatccgaatctattcgaatagaattttttaaatcatttttatcgggtatcaaacgtgttggttatttctac

SEQ ID NO: 272865 - DNA, 395 bp, Glycine max
  unsure (1)..(395): unsure at all n locations
agctgtaacttttaattattgataacaagataatgatcagtttttattgtgacaagtctaaatcccaccgccaaagttaatgtactataaacagaatataatatcatactattattatctagcgccataattcaatagcgcctgtgtaaacccatgattctactgcaaaagggagcgtatgttcgggttcattctattgattcttgtgtaaaagcaaacccaaatgccaaaaaaatttgattacaaaggagcgtatgtttgagatcatttttcattacaatgattctactgcaaaagcaaggagcgtatgttaaagctcattttattgattctagtgcataagttaggtcaacacattatagttntatacctgaacgtccaagagagatggaaca

SEQ ID NO: 272866 - DNA, 368 bp, Glycine max
  unsure (1)..(368): unsure at all n locations
tcattattccagatataaagaagtccctctgctgcattattagaaggaacaaactnccatgatgcattatcatccncncatagatattggcataattttttatcaatggactcctttctggtttcctgaatacagagaatatcgacattgtgagccaaggttaacttcctaatagctgaccttttgaccccactgcccaagcctctagagttgaatgacagaatattcatggctccatggacttcatacccatcactcctgctgatgtagaggttattctactgttaatatctgcagaggcattgttgtctttagtagtggttatctcagcaaatgaaactcccaggtccctgatgatctctctatgc

SEQ ID NO: 272867 - DNA, 456 bp, Glycine max
agcttcaacatcataccacttccagggtgctggaactacttcacatggacttgatggggcctatgcaagttgaaagccttggaggaaagaggtatgcctatgttgctgtggatgatttctccacatttacctgcgtctactttatcacacaaaaatcacacaccttcgaagtattcaaggagttgagtctaagacttccaagagaaaaagactgcgtcatcaagagaatcaggagtgaccatggcagagagtttgaaaacagcaagtttactgaatactgcacatctgaaggcatcattcatgagttctctgcagccattacaccacaacataatggcatagttgaaaggaagaacatgactttgcaagaggctgctatggtcatgcttcatgccaaagaacttccctataatctctgggctgaagccatgaacacagcatgctacatccacaaca

SEQ ID NO: 272868 - DNA, 374 bp, Glycine max
tcaaagtccaccccaagaaggacattagaggattctatgttgccatggattaaggatgaaacttgatggatgtaagcaagtccttgtgctacatgttctgctattttcaagcatgatgtccaatgcaatggttttgccctcgctgatcttgaacctgggcataataatcatcatcaaacatcaattgggcaataactgatagcatgtttgacgtggccgtgaggtgagtcaaaattaattttaatttcatggtagatgtgaaacacattattttggaaaaatcatggtgacaacgattcttttttatcagatgatgctgattatgaggtaactaccatgattttaatggtatacaaacatgctatggaactgat

SEQ ID NO: 272869 - DNA, 450 bp, Glycine max
  unsure (1)..(450): unsure at all n locations
tatccttacggctggcctccggacttcactccccgtgccgtcccaaaagatttaagccaagcccctactttcgacgggcaactccccccttatgacgactatcccgggcaagacgatgaggaaggagatacccatcttggccccctgctccacctcaaagatccgtccccccatgaactaccccaaccgaacatagccttctagatccgatcatggaaggacttggcaactgccttcattaggcagtaccagtacaatacggacatggctcccgatcggaaccagcttcagagtatgactaagcgagagcatgagtccattaaggaatatgcccaaagatggagagatctcacagcccaagtcgtactgcccatgacgganagggagatgatcacaattatggtagatacgttacccacgttctactatgagaagctgataggctacatg

SEQ ID NO: 272870 - DNA, 233 bp, Glycine max
gccatatcatttctttctatatcataaaccttccctttcctatcacaggacttaatcgggtactccctgttcgtgtttctatttatgtccctaccccttctagttacacatccagtactccaaaacgaaatgcaccattatgacttatattatgtacttgatggagaatggacgagtacttattattgatcaagctgatgaatccctctaacacgtgctatgcagagcgtgtg

SEQ ID NO: 272871 - DNA, 386 bp, Glycine max
  unsure (1)..(386): unsure at all n locations
tggttgacattatttataattaagttttgaataaattagattaactttaaaatagttcaaatgtttaatttttcatctaattttagtttatttttgtgtagaaataaatgaaaaaagaagatagattgcgttgggacccaattcaagacccttttaacggaaattttataggctagaggggtcagacacgtagcatgcactttagactaagtgtaaaactctatctttcataagatactcaaaagaantttattttaaaaaataaatagtctttagaaattccatacatgagagaaaaaagtttctgactattaagataaagggtttgtagtattagaaaatcaatagagtaaaatgatattgtacaaaataaagggatggtttaa

SEQ ID NO: 272872 - DNA, 454 bp, Glycine max
  unsure (1)..(454): unsure at all n locations
agcttctggcagtaggacaaagaagaanattcttcatactgtcggcgagaggcggcaacagtttaaattggacttgactaggaaatgggcccttgcagctgatcaggatggtgtggatgacactgtctgtgaaaaatacggcattagcaaggagaagtgggcccagttttgtcagacatgcagatacccttcttgggaggtatgttctttgccattatagttgttttccacaaaagattcaattgttataattcattgtagtaatttgtaccattaatgtttgattctttcagaatgggcggaagaaggcacaggccattcagaagcaaaacactgccccccacgtgttgtctcgtggaggatatgaatatttataacaaaagctaatggctgagaataccatatagaaactggatgaagcttgctagtctggcaccactgatggcatcattga

SEQ ID NO: 272873 - DNA, 445 bp, Glycine max
  unsure (1)..(445): unsure at all n locations
tgcagagttatgtctcatatcggtttaatcgattacaaccttcttgtaatcgattacataattgtttatgagacaatgactgacttattcaaaagtctttactttaatttattaccatgtgatataatcaattacttctctttctataagtggttcagaagtgaggaagaacactttaatcgattatattgagcatataatccattacattactcttgagttatgtccaggtgtttggaagaacactttaatcgattaaaaagataatctaattgattacttcattgaattaatcgattaccttgtagatttaatcgattataggcaattataattgttttctctataaataaccagcttgtgttatcttcaaatagatataaaaaataacacaataagcctctgaataagccaagatncacgtgtngtattagctaacgaaaga

SEQ ID NO: 272874 - DNA, 412 bp, Glycine max
  unsure (1)..(412): unsure at all n locations
agcttcttattaaggctcatcttggtggtgaagctcattcttccatggcttattccctagtggatggcgcctcctctcacctcttctcctttgtcttccgctgcatctccatggtggaaaatcaccattaaaggacctcattgaagctcacagatccagcctccatagaagccccacaagcaagcttccatcaataatcttaccttttctcgtgaagggcttgtgagcagatgcacaagaagtgagtatgcttttagagagagtgcagagaaggaataagaatgcgcagagaagagganaaagagaaaaaatgatgacgctaganatttaaagtactctgaagggagctgaggggtcaggcagtttcaaaaactacccagtaatttatgacttacgcgcttagcgcgcacgt

SEQ ID NO: 272875 - DNA, 435 bp, Glycine max
tattggagatgtgctacaggaaatatgtccaaacagtggacaaatcatttagcaatggtagaactatggtataataccaagtttcatacaaccacccaaatgacactttttgaggcctcatatgggtatggacctacaagtcctaatttaatagacaagggagaaactctaattgaggcagtagattacactgtgaagacaagagagcagattggaagaatgttgcaagacaaactcagtaaagctcaagagagaatgaagatgtatgcagacaagaagaggatagacaaagagtttaattctggagatcttgtgtacttgaagattcaaccatgcaagcaacactccttggcaaatacatactttcacaagctattggtgaggtattatggtccctacaaggttattgacaggatatggaaggtagcatacaaa

SEQ ID NO: 272876 - DNA, 452 bp, Glycine max
  unsure (1)..(452): unsure at all n locations
agcttaaggattcttagggaactactagagacatcactatcactgccaaactacacacatcagcctgcttagaggtaagggatgagtttatcgcaattgaggttaaaatgaacatatgtagtgatgtagatccatgtgcagcttgtaggccttggatcttcttcatcaatgaagttttttgcttcttgaagatcaataaaaggggaatagagaaggaagaaagacgattagagatgtcacttcaaggagaagatgagtcaagaacaagctcaccatcaaaagaagccatggataagagcttgaaggtaggatgagatgagtggagggagaaggagagaacgagcatgaaattntatacctcanatgaggtctgaactttgaagtgtaaatctaaaatgatcaaagttgaaaaaagtgcacacacaaggcctctanttatagcctaagtgaca

SEQ ID NO: 272877 - DNA, 383 bp, Glycine max
tgtatcttaaaatgttataataatactcttaattaatatttgaatctttattcctctatcaatatatatgtgaggggtagagggtgtcacaattgctgatggtttgaaatggaatccgggtggaaatgccttggctatagctttaaagggattcttgtcccaatatttcgggtatattcgcaaaacagttgaaaaactattcttgcaaatataactgttactgggtttcgtggctggtgttgtcattgaggttattatttgtttttcttttggagaattgcaaataacttttgtgcctttggcttcttggatcaaggtctttagatcaatctcagattgatcatctgattcaaaggctctgtcacaccatgtgttctttggga

SEQ ID NO: 272878 - DNA, 225 bp, Glycine max
agcttggattcctttagtcaggaatctttcctttctacaatggagccaagcccagttcccctcattacaaactaggctctttgtttctctatagaccttagtcgaatacagcctggatcaggtgtatatttgtgccttaaccctctcatgcgacattctttgccaactctgacctacatgcctcttctttatgcataaaacaagtgtccagtggtacgggaatga

SEQ ID NO: 272879 - DNA, 447 bp, Glycine max
  unsure (1)..(447): unsure at all n locations
agacttaacatcagaccactttcagggtgctttaactacttcacatggacttgatggggcctatgcaagttgaaagccttggaggaaagaggtatgcctatgttgttgtggatgatttcttcagatttacctgggtctactttatcagagaaaaatcacacacctttgaagtgttcaaggagttgagtctaagacttcaaagagagaaagactgtgtcatctaaagaatcatgagtgaccatggcacagagtctgaaaacagcgagtttactgaatactgcacatctgaaggcatcattcatgagttctctgcagccattacaccacaacataatggcataagtgaaaggaaaaacatgactctgcaagaggctgctagggtcatgcttcatgccanagaactttcctataatctctgggctgaagccatgaacacagcatgctaca

SEQ ID NO: 272880 - DNA, 448 bp, Glycine max
  unsure (1)..(448): unsure at all n locations
taanaccccttgttcattactaaacaagctgattattaattacaatcacaagcaaggtgtcctaacatgtacaagaaaacaaattcaaatgaaattcaataaaaaagagagaagggaaagaaacgttgggttgcctcccagtaagcgctcttttaacgtcattagcttgatgcatcttcctgttatccaggatccaacaaggttcctacttcaaggaccttcttctcagggtctcctttctccatcacatgcactttttgacaaacattttggctaggtggatctttgtcctcatggaacaaatcaaagatgatcttctgatcttctatgcncatctacaacatcttctttcccatgtctaccacacagctcgcggtagacatgaatgggcggccaagaatgacagggatgtcaacatcctcttctatatctactgacacgaaatcag

SEQ ID NO: 272881 - DNA, 63 bp, Glycine max
  unsure (1)..(63): unsure at all n locations
agctntactgaatcaatgagcacacacacacactctacacacacacacacacacgcacacgcc

SEQ ID NO: 272882 - DNA, 424 bp, Glycine max
  unsure (1)..(424): unsure at all n locations
ntatggtcaaaaggcttatgtatgtacaatcatggtcttcatcatgttctcgttaatacatttcattctaaaattcagagattcatgcaaagattattagtcacagctagtcgttcactcacaatttaaggtcacaccctcaccgattttggttcaagtttttctttctcaatcaatctgtctactgactaacaattctaaatgcaagttcacattcttgttctttctttgtctaacatacacatttgctcaaactcatgataagaaacacaaactccatcacaatcatgcattcaattcaaaatgaaagcatacaaccattttcacaaaaagataaaagtgttttactgccatgtcatcgaaaacaagtcaaactgttcaaaatgcttcacgagaagcaaactaactacccatacataaaact

SEQ ID NO: 272883 - DNA, 443 bp, Glycine max
agcttccttgggaagctaggcttagctacacacacccatctaaaaactaagctcacctccttgacaaaatacatgaaaatacaaaaaaaaagtccctactacaaagactactcaaaatgccctgaaatacaaggctaaaaccctatactaattgaatggccaaaatacaaggcccaaaagaaggaaaaatctattctaatatttacaaagaagagaggacccaaccttggtccatggctcagaaatctaccctggtattcatgagaaccccaaggccttctttagcagctctagcccaatcctcttggagtcttctatccaatacccttgcgaggtaggggtgcatcaaaatatgtataagaagtagataggtagccaaaataccttgccaatatgtatatgtttgataggaagcaaaaataccttgcaaatatgtgtgtatg

SEQ ID NO: 272884 - DNA, 376 bp, Glycine max
atgagggtgcgtagcccaccatcttttcatagtagagtatctataatgtgtctaccatcacgatcatcgtctccctttccatcattgggggtaccacctgtgccggcagatccctacaccttttgggcgtgttctttgaaagatccgtccccctttttgcaaacgttctgtagttgcatactatccgaaaccatatcaaaatcgtactgatactgtctaacaaaggcaaccattaggtccttccaagaatggactcgtgaagactccaagttagtgtaccaagtaacagctaccccacgaagactttcttggaaggaatgtattagcaatccctcatctttcgcgtattccaccatcttctgacaacacatcttta

SEQ ID NO: 272885 - DNA, 446 bp, Glycine max
agctttgatgcaacatttggagaggttaatgatacaacgagatgatgcgctccatgagaggttggatcaaatggagaatagagatcataatgaagaagaaaggaggagaagagggaatgatggtgttcctagacaaaaccgaattgatggtattaaactcaacattcctccatttaaaggaaagaatgatccggaggcctacttggagtgggagatgaaaatagagcatgttttctcatgcaacaactatgaggaggaccacaaggtgaagcttgccgccacagagttttccgactatgctcttgtgtggtggaacaagctacaaaaggagagagcaagaaatgaagagccaatggttgatacatggacggagatgaataagatcatgaggaagcggtatgtgccggctagttactcaacggacttgaaattcaagctccaaaaac

SEQ ID NO: 272886 - DNA, 459 bp, Glycine max
  unsure (1)..(459): unsure at all n locations
agcttcaacatcagaccacttccagggtgctggaactacttcacatggacttgatggggcctatgcaagttgaaagccttggaggaaagaggtatgcctatgttgttgtggatgatttctccagatttacctgngtctactttatcagagaaaaatcagacacctttgaagtattcaaggagttgagtctaagacttcaaagagaaaaagactgtgtcatcaagagaatcaggagtgaccatggcagagagtttgaaaacagcaagtttactgaatactgcacatctgaaggcatcattcatgagttctctgcagccattacaccacaacaaaatggcatagttgaaaggaaaaacaggactntgcaagaggctgctagggtcatgcttcatgccaaagaacttccctataatctctgggctgaagccatgaacacagcatgctacatccacaacagag

SEQ ID NO: 272887 - DNA, 440 bp, Glycine max
  unsure (1)..(440): unsure at all n locations
tcacagtccaccccaagaaggacattagaggattttaggttgccatggattaaggatgaaacttgacggatgtaagcaagtccttgtgctacatcttctgctattttcaagcatgatgtccaatgcaatggttttgccctcgctgatcttgaacctgtgcataataatcatcatcaaacatcaattgggcaataactgatagcatgtttgaggtggccgtgaggtgagtcaaaattaattttgatttcatggtagatgtgaaacacattattttggaaaaatcatggtgacaatgattcttttttatcagatgatgctgatattgaggtaatcaccatgatttttaatggtatncaaacatgctatggaactgattggtcccccacacaccaagaagttaggtcttttgcatagaatactatagaattgaaattttgaat

SEQ ID NO: 272888 - DNA, 439 bp, Glycine max
  unsure (1)..(439): unsure at all n locations
agcttcaatgtacacatacaactaaataacaattctcaaccaagatgagatacatctacctacttcagnttgtaaagcatcacgaactgctgcaagtaagctatcacgagacgtgcttgcataaacctacaattcatgccacatgcgtgagaaaatttaaaacataataaattataactaaatagcacaacaaaatcttacatggatggggcatccatcactaaattcaattgcaaacatctgtggctcttcagcaaaccgaacaagagcagttactgaagataacggacgaacagtaacagcctgcaaacatctagtaaaaattctcaacacttgacataacacttctcattatgagtaagactcagctttcatagacatatanatgcattaataagagagtggttgcattaacaacacgtaaagccaacataaaact

SEQ ID NO: 272889 - DNA, 183 bp, Glycine max
cgtgcagtaatgtgtttcctactcttcttatttactattgaattagatatacaatcctttatcccttttcaggtggcagttcttgagacgttggaaaagcaaatgggtcctgaatcttttcgtagagtaagagtcctcgacatttgcattatttgtgctgctgaccattttcatatactggac

SEQ ID NO: 272890 - DNA, 611 bp, Glycine max
  unsure (1)..(611): unsure at all n locations
actcgaactctcccntaccntctattatattgngtanatatntananctanttttcttctcatttttnanntnaaaggccccaccgtggcntttganatccatccngtattcggngaccctgtagagaccaccggctcgtctgcaggctacngcagcatgcaatactccacattatactgctttcgatgtgctgttacgactctacatggacttgatggggactatgcaacatgaaagcctcagacgaaagaggcttgcctatgttgtctgggatgagatcatcagatctacctgcgtcgactttattagcataaaacatccgacaccttggaaatattcacgagagttgagtctaatacttctaagagaagcaaactgagtcatcaagaggaatgaagagcgcccatggcgaagatatcgatcacagcgtgattactgaatactagacatctgaacgcatcatatctgagctgtatagactcttacacctccactgatcggataattgaaatgagaccacgactctgtagaggctgatacggcatgctaatgccgactacgtccctatgcctctgtctgaaccatgaaccggcggctcatacgcactacg

SEQ ID NO: 272891 - DNA, 345 bp, Glycine max
  unsure (1)..(345): unsure at all n locations
ngtctactcctcctatttgacgtattatgcagtgatttactcactttaacctcgtattacggctaacgctatctctagatcatcataccctcattacctgacaatatccactcatatnaatgcgatactgacgctaaaccctgcgtttactctacccatcatcgtgaccagctcactaccagcgctaagcgcacacacgcctctcagcgcatctttatcatgccctatgctanagagaatctatttgactctcatcatacatgccgcgcgcagcacgcttgaaccacgtgccttcacaaataagtgccataaggcattctcctagcgagactgcccatcatatct

SEQ ID NO: 272892 - DNA, 410 bp, Glycine max
  unsure (1)..(410): unsure at all n locations
agctctaatggaggaagagaatgagagagatatagtattgtggaatgtatgagaataaggagagagactgaactttgaagtgtgtctcacaagtatctcattcatcaaagatgtgacaagtgttgcacatgtttctatttatagcctacgtcactaactaaatggaattgcccttttgaatatcattatcatttcatgtgaatctaaaaggaatattccaagaatattccaaaggcatcttagcatattccctttagatgccacaagcatggaaggtgtgactctagctcttgggaagcaaggaagaaagcttccttgagaagctagaagagaaggagaggtgggactcacacctcgtcatagctaagctcactcccatgccaaantgtgtttgacttcttgggtaacga

SEQ ID NO: 272893 - DNA, 332 bp, Glycine max
cttgaggatctgagtaccaatggagggtttttcattttcggtatactattgtcctacaacaattatcccacgaactactttcttacaagccataaactaatgacacaaacacaattttgaactctaaattcaagcaaaaggaaatcaacaaaagaattgttgagtaaaatggatccaaggaatttgagactaacaaatttttttatgtttaatagatatctcttctcgccgtgttgaaggcaataggctagacaaaattgtctggaatgtagaatctatctaaatttaatgcatatgttagctaccattgtaaggtaacatcaatattatta

SEQ ID NO: 272894 - DNA, 141 bp, Glycine max
aatttgctacatctggggctcttcagcaaacccgacaagagcagttactgaagataacggacgaacagtaacagcctgcatacatttagtaaaaattctcaccacttgacataacgacttctcattatgaattaaactcat

SEQ ID NO: 272895 - DNA, 431 bp, Glycine max
tcttagtaaaaataaatatagagaaaataataggttgagttccctatgtataaatagctatgttaactcaagcgtctcctcttcgcctcattttcgtttttctctcttctcttctccgaacctttttctcgcagcccaccaaacctgtctcagaaaaacgatgatctcggactgattcaccgttggatcgtcgcgaaatttgtgcaccacgttcgtaacccaattccgagcattctcactgttgggaattgctaaaagatgtcaaagctaagagaaatatccttcgcattgtagctttttttttcctgcagaaacccaatatattctcagtaaaactatgatcccggtttcgttaaccgttagattctcatgaaatttggatattgtcttcaaaattaattgcgcacagcttcccgttgacattgtgagat

SEQ ID NO: 272896 - DNA, 459 bp, Glycine max
  unsure (1)..(459): unsure at all n locations
agctntgagggtgcgcagcccaccatcttttcatagtatagtaccgataatgtgtctaccatcacgattatcgtctccctttccattattgggggtaccacctgagccgccagatccctccaccttttgggcgtgttctttgaatgatccgtcccccttgttgcacatgttccgtagttgcatcctatccagaaccatatcaaaattgtattgatactgcctaacaacggcaaccattaggtccttccaagaatggacccgggaagattccaagttagtgtaccaggtaacagctaccccagtaagactttcttggaaggaatgtatcagcaattcctcatcttttgcgtattcccgcatcttctgacaatacatctttagatggttcttgagacaagtagtcctcttgtacttgtcaaagtccagcaccttgaacttgggaatgaaccatgttgggta

SEQ ID NO: 272897 - DNA, 435 bp, Glycine max
  unsure (1)..(435): unsure at all n locations
tatccttatggcttgcctccggaattcactccccgtgccgttgcagaagatgtgagccaagcccctaccttcgaggggcaacttcctccttatgccgattaccccccgcaagaagacggcgaaggagatacccatctaggccctctgcttgccctcaaggatccatccccccatgaattacctcaaccaaagatagtccgncatctcccatcttcacccgcacccgtaaaagaatccgttcccttcacagaagataagggaaagattgatgcgcttgaagagatgctaanagcagtatagggcctcggcaattacccgttcttggatttagcagactatgtctcgtgcctaacatcgtcatccctcccaagttcaaagtaccggatttcgatagtacaaagggacgacatgtccaacagggcatctttggatgta

SEQ ID NO: 272898 - DNA, 415 bp, Glycine max
  unsure (1)..(415): unsure at all n locations
atgcttaaaacagaaacattatgcataggcaaaagatcaagaggagttagtgggttaaaaccataaacaactttcaaaggagaacaattagtggtgctatgaacagctctattgtaagcaaattcaacatggggtaaacaagcttcccaagtttttaagttattcctcaaaactgtcctaagcaaagttccaaaagtcctattaacaacttctcgttgcccattcggttgtgggtgacaagtggttgaaaataacaatttagtgcccaacttgctccacatagtcctccaaaaatgcaaatcatcaagcctaggtataggatgcctatatttaatggtgatgttattaagggctctacaatcagaacacatgcgccatgtcccatcctttttanggaccanaatcactgggacag

SEQ ID NO: 272899 - DNA, 555 bp, Glycine max
  unsure (1)..(555): unsure at all n locations
atccactcgtctanattctattatccatattatcatatattttaanntttttatgcgcccgcgcgcgctgactagatcatagtataacgtnaagtgagcaatatcatacttaatcatatcaccaattcaaacaacaataactntctactcttgtatgattgaacgagtgcagtcatatatggagacgctagaaactcaatgttgaacctatgagccaatccangcgacaatacctttctactccgatgtctgatcgagccctttaatacaaagagaagctcgaaattcactgtcgaacctctgagcacactcaaactacaataactctttactcggatgtctcaccgagtcatgcaatatattgagacgctagaaatcgaatgctgaaccctctaaccaatctaaacacaatcactcctaccccgatgtcgaacgagtcccgcctaatccagacccctaaatcgatgtcaactttgaagacataaaagaccttaactctaccagacgtctacttacgcgctataattccacctctaaaccatctccaaattaccc

SEQ ID NO: 272900 - DNA, 521 bp, Glycine max
  unsure (1)..(521): unsure at all n locations
cggcccttaattgatacgtctcgnacccgtgatcctcccagtcacctgaggcatgcaagcttgctctacaccatatggcctctttctatttatagccattcttgggaagggttcaagtgctgtattctctgaagaacaacacgaacaatgcacgataaggatgaatagaacacaaatgcgaagccgaggtgctactgtttcttgaaagctgtttgttccctacagtgcttatcttactagcgttgtaccctgtgcgagagctggntaattttgttgttacgataatgatgtaaactatgattccatatttggacctgtttgagagtatgtgagcatttatcttgtttgtggcgtaccctaaaaatgactgagacaatatcaatgattgaggtatcgaatcaatcatggtaagaatttctgtttctgttttgtgggttcgtgctttctcttttcacagtcattaatgctcaatgaaaatcgtcacttttgagtcctgaatgcggcattcacaactctatttn

SEQ ID NO: 272901 - DNA, 421 bp, Glycine max
  unsure (1)..(421): unsure at all n locations
agcttcgatattcaatttcgagcgtctcgatatattacgggactcaatccgacatccgagttaaaagttattatcgtttaaatttgctcagagcatcaacattcaatttcgagcgtctcgatatattatgggacctaatcagaaatctgagttaaaagttaatctcgttttaatatgctcaaagcatcaacattcaagttcgtgtgtgtcgatatattacgagactcaatccgacattcgagttaaaagttattgtcgcttgaattggctgagagcttaaaattcaatttcgagtgtttcgatatattctgggactcaatcggacatccgagtaaaaaggtattctcgcttgaatntgctcagaacttcggtattcaaattcgagtgtgtcgatatattacgcgactcaatcagacattcg

SEQ ID NO: 272902 - DNA, 442 bp, Glycine max
agcttggttcgagatacttacccgttgaagattgaagaacgatgaagaacgaatgaggaacgtcgaagaacggttgaaatctttgcgaaattcctcacggaaaacgttacggaaacgtttcggaagcgcctcggcttagattttcttcacggaaacaatttttccaagcaaattcgaaagagagaaaagttcctcaggggctgaccccttccttcttgcattcctcccctatttatagcaaaatacgggaggtggttgccgcccagctcgcccaggcgagctcagctcgcccaggcgagcagggttgcttcctccagaatcaaccgccttgtggaggaatattccagatggccgcagtgggcctgggtgctatctgcaccaccatttttactaagtacacggccctctgctgtctttggtgagacttgttcgtaaagtacag

SEQ ID NO: 272903 - DNA, 436 bp, Glycine max
cgaagtgagaaagtgtggaagagtcagtcttcctacttttatttgttgaccacagagtggtacctggagatatgtcgcggtggtcaggagaccttggggacgttaggtggggtgctattgcctaaaaccaagcttgaccaatgccgacccaacccgggcatagtcagtcagtgagaacctgtgatgtacctaaacaggcgagctcctggcagtcaaccaataaaagaacaaagaccacaaagtaaggaggcttgtgtggtggctggccagctatggatcttgagtgatatctggaatatggcttctggtaattgattaccaagggtgtgtaatcgattacacggcttaaaaatgaagacaataagttgagatggcctctggtaatcgattaccaaggagtgtaaccgattatcaagcttataaatggaaatgggat

SEQ ID NO: 272904 - DNA, 426 bp, Glycine max
  unsure (1)..(426): unsure at all n locations
agctnggttgagtaaggccattaaatggatcttcagttggcatcgtatcaacatttcctctagtgccatcttctatttcaaacctggtactagaagatgattccaaatctcttgtttccacatgagcagtaaagccttgccaatctaaattcttgcaaatggttccttgtgaacaaatctaatcacctgatatctcaagtccgttgcttacccagctattaagttcaaattgttgagaatgtacagtggggactacttgtcagcagctagctccaatttctacaatagtattaacatcaataataatattctatgacgctccaaccacgtcggtctcaataagctgtcgttgaacaaaacgcgatggcaatattgtaatcaataattaatttattctattcaacaacgttnttaaacaaacctatc

SEQ ID NO: 272905 - DNA, 585 bp, Glycine max
  unsure (1)..(585): unsure at all n locations
aaagaaagatagagngcggcggctgctgacgctcgactgctactngacgtganacgtgtagaatatntaaatgacttaagactctagtgagctttgtcgtcacacgatacttnatacacacatagtatcacctctaatctatgatgggttgacatcatcnggacaaacaaatactgtcaacaaaacagagtacatctacgataaaatctgtgagctttcgcgcaaacttattcatacgaaataaggacactggtaatcaatgaccattaatgtgtaatcgagtacacatcaacagatgtgactcttgattctaaattttgaaaatcaaaacttttagaagttctggtgataaaatacaagtattgtgtaatctattacacaagtttaaaatgatcttaaaatgtattatagacaagttgtaactgttgaaatctgacatactaacatattaaaacactggtaaacgatgactaccttctgtgaatcgattaccataaagtaaagctctttggatatgatatgtgacaaccccttgtgcactcaacgttatgataacacgttacacaaccttgattagcttactcg

SEQ ID NO: 272906 - DNA, 449 bp, Glycine max
agcgaagcaagcgctctaagccaaaatccacttatgcgcgctaagcgatccagatctgcgctaagcacacgagcacaaacaaggccacctatttaagcttgaaatcagatttgaaaaggtagtttggcacttttcttgagaagctctacatgcacgaaggttctagagagagaaaggtccaagttccagagagttctgagagattttgctgtgtgaagatttgcagagacgcgagttcgaagcggaagctgttttgagagcttgagatgagtttgtgagtgattgtgagatcctagaggtgaaggagacatcctcaccacttgtgtttgtggagtctttcatcttgctcttctctttgtcgaaaggaggtttcctgactatggaaaactaaatcctctgttggatcttccgtgtaggtacctgatgaaatatatttctatctatgtaat

SEQ ID NO: 272907 - DNA, 220 bp, Glycine max
gtgctttctctacgccgtataccatgccttgcaacactcttggagtacacatcgtgctgtggtcaataaaaccccgtgcgatgaaacgcgtgacgccctcgtctaatggcgctcctctcacggggtagcccagctgtctcatggcgacaacgggattataattaatacaaccccttgttcccaccaacggaacatctggacctcctctccacgaagacag

SEQ ID NO: 272908 - DNA, 440 bp, Glycine max
  unsure (1)..(440): unsure at all n locations
accccaccccatcttgccatgagtccaaagtgtgtcattcgatcaattttattttattagtttggcaaggaaagttgtttgtaactgtatcattcaaattttattgcatatatcaattatgatatatatatatatatatatatatatatatatatatatatatattatatatatatattatgatcaattttattttattagtttggcgaggaaggtacaaacagaattattatcaattacttttttgggaagcaaaattgaagttcacgcaaatgttctcttcccagtacttcattagaatactattgtttgccatctaatctttcttgcactgaggagaggagaacacgtgattaggtttcttcattntacttgcttctcaccacctcctgcatgtgatctggtctcttatattatatactttggaagtaccttaagtn

SEQ ID NO: 272909 - DNA, 429 bp, Glycine max
tttctttgagcaaagcaaaggcttgctctagtttttcaccccaggtaaatgccacattcttcttcaccaaatcattgagaggtgatgcaattgtagagaaattaggaacgaaccttctatagaagcttgctaacccatggaagctcctaatatctcccacactttttggggtgggctattcttggatggccttgattttctcagggtccacttggaccccatttctaccaactacaaaacctaagaaaactatattatctacacaaaaggtacacttctctatatttgcatagagggtgtttttcctaaggattgaaagaacttgcctgagatgtcctaagtgatcatctaggctcctactgtacactaaaatatcatcaaaataaacaactacaaatatacctatgaaatcccttaagacatgatgca

SEQ ID NO: 272910 - DNA, 461 bp, Glycine max
  unsure (1)..(461): unsure at all n locations
agcttcaaccaaggggagatggaccatntatttgcttgaaagaatcaatgacaatgcttacaaagttgagcttcccggtgagtataatgttagttccaccttcaatgtctctgacttatctctttttgatacagatagagaatccgatttgaggacaaatccttctcaagagggagagaatgatgaggacatgaccaagagcaagggcaaggatccacttgaaggacttggaggacctatgacaagggctagagcaaggaaagccaaggaagctcttcaacaagtgttgtccatactatttgaatacaagcccaagtttcaaggagaaaagtccaaggttgtgagttgtatcatggcccacatggaggaggactaaagggcgccacttcgtctcaattatagagtgtttagttggtctaaataatggcccaatccatgtaaagttggctgaccaaaaatat

SEQ ID NO: 272911 - DNA, 426 bp, Glycine max
tgtgtggggcctagtctcaaacataaatgaaagatacactacgcattcatgatgatgcttcccccactaataccttgggatattcttcttctattaggacctatggttgggtcacccttgtgtgcatgttggccccttgcccatttctatgtcatttgtaacatcaaccttgatgagattgttctgactctctcctttggatttgttatgaaacacaaacaaacatttcactttctcatccttgtcactgtattgcttcattttggatgtgtttttgtcatattttttcaatcacagtgattagaattgaagttttattgtgattactaaaataaaacttcaattgtcatttctgatagctttaactgatctctattgtatgaattattttgataaaacttgaattttgattggaacataatacta

SEQ ID NO: 272912 - DNA, 435 bp, Glycine max
  unsure (1)..(435): unsure at all n locations
agctngccttgccccttggatatattgaggttttcatggtcactatgaatgacaaattccttgngataaaggtagtgttgccatgttttcaaagcccgtactaaggcatacaactccttatcataagttgaatagttaagggtaggaccacttaacttttcactaaaataagcagttggatggccttcttgcatcaacacagccccaatcccaacatttgaagcatcacactcaatttcaaaagatttttgaaagtttggcaacgcaagtataggggcattagttagcttttgcttaagaacattgaaagcttcttcttgtttctctccccatttgaaaccagcattnttcttgagcacttcattgagaggtgctgccaatgtgctaaaaatcttcacaaatcgtctataaaaactngctaagccatgaaaactc

SEQ ID NO: 272913 - DNA, 430 bp, Glycine max
  unsure (1)..(430): unsure at all n locations
tgatggngacacanaattataatatgtttgatgcaccttacaaatatatggtgcctgaagatgtcagtaatgatgctatagccatcttaaccaattttctttttctgcaatctgcttatcgctgatattctagtttattttgattctttttgtttctagaaggattttcttaacaaatctttgccattactttggactccttctatacaagtgaaaaacatattctggtttgaacttcgatctaatttgtgttggtatcttgatcatgcatacttgtgtttctcattcataaaaaaagttgactctgcatatctcttttaaataggtatataacaattatgagtatgctccaacttcctctttaaatcaacaagtagctggttcttacatgcctctctacatgtggctaaatcaggtactaatatacata

SEQ ID NO: 272914 - DNA, 472 bp, Glycine max
  unsure (1)..(472): unsure at all n locations
agcttgtaggagtatggngtacccatcacatgtggtactaggtggaggtctggcgacggagcacaacaaattatccacatccacaaatcgtgcataaacccaccatgccctgttgcccaccttcaattgagctcacgtactcccacgtagcccatattctcgattctctcaacaccgggtccccatcaatcctcccaagctatcccaacatccaagtaattcaacattcaaacaacacagactatcacagccaagaaaatatggcaaaggcagataactctgcccaaaacaccaaccagaatcacagctgttctcacttaaagaccccagtaacagttccttcgatccagatcgttaaccggcggatcgactcgaaaatttcactggaagtctctagtacataatcctacattatgaccgttgggatctactagaaaacacccagaactcattctgcatcactctctccaca

SEQ ID NO: 272915 - DNA, 427 bp, Glycine max
  unsure (1)..(427): unsure at all n locations
ngatcttntagttttntatctttaatctttaatccgcgaatgaactattcaagtttgtaattcgaactttaattatcttttaattcgttcctaaagatagatcgccaaatctgttgctaactgcacaataatctgttaaagatataacagatttatgtgtccagtatttcgggcaggatgtcctggacattgtatccgacatcgtggatcctgcacaatctattaaagatataacaaatttatgtgtccagtattttcgggcaggatgtcctggacattgtatccgacatcgtggatcctgcagcttcaattcttcatttgacattttatcttgccttgtgcattgtgcagcccgatctgattcttgacataatgttagacatcatgtgcagcaactccagcttntcttcaatgtctaagtgcttat

SEQ ID NO: 272916 - DNA, 448 bp, Glycine max
agctcgtgcaatcagtatcctgataaggatgttccatatgttctcaagactggactaatacatttgttgcccaagtttcatggtcttgcacgtgaagatcctcataagcatattaaggagttccatattgtctgttccaccatgaagccccctgatgtccacgaagatcatatctttctaaaggcttttcctcattctctggaaaaagattggttgtactaccttgctcccaggtccattaccagctgggatgaccttaagtgggtgttcttggagaaattcttccctgcatcaaggaccactgccatcagaaaagacatttcaggcatcatgcaacttagcggagagagcttgtatgagtactgagatagattcaagacattgtgtgctagctgtcctcaccactatatatctgagcaactgcttctgcaatatttctatgatggac

SEQ ID NO: 272917 - DNA, 432 bp, Glycine max
  unsure (1)..(432): unsure at all n locations
ntgaacaaagganatggcatcatgcgacagaatgtgaaacaccacttaatgcctgcattacctttcacttacccttgtctgatttttggtgtggtattgacaatcactcaaaatgactttttattcatcctccgatccacaggatgacaagatgtaaatgcatgcatgcttatgattcgaatgtttatctgcaacaattaaacatatgttattgtgttcaattttactgaaacgcttacgacaccccgttgattgagccaaatggctccagattcaagatcgagagtgaattatctaaagaaataaaagacacaacacaataagtttaagatgcaaatcattaatccaatatttattaatctcgcgatcatggtttacaaaggattttaaaactttggagatcccaatgagtccttggagaacaatcatgta

SEQ ID NO: 272918 - DNA, 317 bp, Glycine max
agctcgcctgtccgatgcaccagtaacgatggctcgagtgatgttgttgagtggttacgagcccggaatgggtttaggctaggacaactacggcataactagcctgataaacgccaaaggaaatcgtgggaagtatgggttatgctataaacccactcaggcagatataaagagaagtattgcggaaaggaaaagcggaagtcaaggttcgcggttgagacaagaaggcgaaggaagcccaccctgccacataagtatgagctctataagcgcgggtctaggggacgaagagtcagtcattgcaatatacgaagatg

SEQ ID NO: 272919 - DNA, 331 bp, Glycine max
  unsure (1)..(331): unsure at all n locations
ttcgcgtgtatgatatacacttgacacggtgtgaagcataggagaccttcaatcctatgaccccacgaggcggacaaaaatgggcagttaacttgaatggccattattgtcaatgccgaaggtattctgcgcttcactatacatgttcacacattattgcagnttgtggttacgtgagcatgaactactaccaatatatagatgttgtttacaccaatgagcacatcttacaagcatactccgcacagtggtggcctcttgtgaatgacagcggaattgctacttatgatgaggcatggacactaatctctgacccacctacaattcgtgc

SEQ ID NO: 272920 - DNA, 413 bp, Glycine max
  unsure (1)..(413): unsure at all n locations
agcttgngattgcatttgggcatctattttgactntcctatgctgactctacatacataaaacagccccaccatcccaagtttgcaaaatcatattcatatatcattggggcatttcaccgagcacttggtgggcgcacgtttggacataaattgcacgagaatgggggcaatgtggcatgccccattgcttcagaatacaacataggcctaaggccttctcattcaagttctcaactccataaaacaagcatggattcagatgcaaattgcttcacgaattttgcaaaaaatgagcaactaatgcaccataacaacatcaatggagagccaaataaccaatggaaattgcacttacttgtggagagtgaattaaagcgtgaaaaaggaagcaaaaagtcaacaatggaagct

SEQ ID NO: 272921 - DNA, 443 bp, Glycine max
tgcttgtggagcttttatggaagttggatcttttatcttcaatgaggtccttcaatggtggttttccaccatggagatgcagcggaaggaaaaggagaagaggagaaaggaggcaccatccactagggaataagccatggaagaaggagcttcaccagcaagaatgtgccttggataagaagcttggagaggatgattcaatggaggaaaagagagagagaaagagagaggggggagcacaaaattgaagaaggaaaagggggagagaagttgaactctgagttgtgtctcacaagactctcattcatcaaagttacaacaagtgttacacatgcttctatttatagactacgtagcttccttgagaagctttcttgagaaaacttccttgagaagcttctttgagaaaacttccttgagaagctagagcttagctacacaca

SEQ ID NO: 272922 - DNA, 476 bp, Glycine max
  unsure (1)..(476): unsure at all n locations
cgcctggttttgatgctcagtttganacnctgaagnccaccgcngcatcaanctccccaggccttaagataacggcagtttttttgttcctatttttgacacacctcctcttattaaggataagaaggcatgttttctcagcccctacgcttgctatacgaacatcttatgatgcgctgattaattgaagggtggaccaccctactcttgagattaataatgaagttggatgggcttcatgcatcatcgcaaactccatcccaacttttgaacgttccactgaatttcacagattgctgacagcattcgacgcaacatacgggcatagttactttgattaaggcattgaagctcctcctgctaatatctataggacccctgtttttgatcctcattgaaaggcccccacgtgtgaatcttgctatttttattaacatgtggcctttcaatcccctatcgcgcattggtagcctttc

SEQ ID NO: 272923 - DNA, 446 bp, Glycine max
  unsure (1)..(446): unsure at all n locations
agctntgatatgggtataataaattttctttctgactctgtcatcattaattctcatgagagtctttctaaattcataagataaaccgatacatttcattagacatctacaacgtatgacttgatgttgtgttgaacaggaggttggcggagtggcatgcctacactgtcgtatgacaggtatcacaaactatcatttgctcttttgattggttctctgtgtgcatgaatcttattattcctttctttcctttcttcaacagtcagttcttatcccaagttgaagagaagctccccaaagatgctgaatttattgntgtatgccagaagggactgaggtgagatctatgcattcaggtggttgattgcacactcaacggagttgcttcagagactaattttctgtagcgtaaaatgcatccgatacttgctatgccttttatacaa

SEQ ID NO: 272924 - DNA, 432 bp, Glycine max
attgtccacgcgcctaccctcgaatgcatatattcattttcggagaacaatgtgacgaacgtggtacgcgctattaatgatgactcgtcatatcctccaccgcgcccgagctgacagttgactgacagtgtcccaacgcaacacacatgagtgtgcaaaacaacacgaccgcacccatcgtaacccatgaacgtctgagtgatcactgcactgactggaaaagatgctctgtactgcgctcttcctctccttcgagtggagagccctctctgatgactcagtcactccgtaaatccatgtcttggttcccttcgacatcatggacccggacttcatagggcttcaactatgattcaccactatgcttggcttctctcacttctaacctactctgctgttatatatctggtctactagccctccggttcggcc

SEQ ID NO: 272925 - DNA, 454 bp, Glycine max
  unsure (1)..(454): unsure at all n locations
agcttaagctaaattagtctaaactttcattatctatttaagctaagtctagtccaacacgagggatatgaggatgaagctcagttcaagatagtctaaacctatgagggctttctaaattttgcctagtccaacaagagggatctgaggacgaagcttggattgattcagtctaactatggatcgaggtttagtaatttatgctatatcatagaacaaaaaaacatgattgattagagaaacatctttatatgcatcagctggcttgttagaaagacccaacatatctacctactgctgtcaatcttacttacttgcatgtttattgttcttagcctagacttangttaattatgttctaaatcatcaattatcaatgcttctctcaacaatgccttatttatgaatttaaccctgtctaagactatttccctgagttcaatactcggattca

SEQ ID NO: 272926 - DNA, 430 bp, Glycine max
tatgatattcaatgatgatcaaggtagtgtttgtatcaatgatttcataattgcaagctctgatgcctatagtgctcttactcaactagaacaagattggtctataccgaacaagtcattttgatgtatgatattttgaattcacttgcaaatttaattactgtctcacaactccccatacaaattcactattgtgctactttggatactctgtgcagtgctttagaaaattaaggaaaatagtatccttgtgccaggagaatggccgagtattggtggggtacctgtattcacatgattcacctggatatgtatcttgggtgaatcttttaattatgtttatgctcttatagtattttattgaccaataagttttgtacgcaacctttatacttggaataagattaccactacaactatatctcttact

SEQ ID NO: 272927 - DNA, 439 bp, Glycine max
  unsure (1)..(439): unsure at all n locations
agctnggagttattcaaaaacatggaaccatctcgtgatcaaagggcagctcctatagttaatggtagtaaggtttggagccgacaacctaaaccaganactaatggggtggttttaaaagccaaactgcagaaagaaccagacaaaggtaagagtcatgaagttttgataggatctgtatcagttagtctggattattgcagcagccattcacaagggaatttggtggcagcccagcgggactgcgtggtatagaatctagccaagcagaatactgctcatgagaagccagtgaaacatgattcctttcacggaagtaatggtcggttaacagttaagctttggaggccggttagccagcttggaactaaagatccattgccacttcanaatggtgagacagaagctgatgtaattaatggataatatgaccaaaatt

SEQ ID NO: 272928 - DNA, 267 bp, Glycine max
aacgctaacacggcgccgttcgtggctctagtaaccgagttgtgcgcgtattacggcgcgctgttcgacttgatcgagtcgatcatcgcacgggagaactcgaagcgaggcatgatcgaggagggactgacctcgaacgcggtgaaccccgcggcgtgccaatgaagggaccgcctggcaccgtgcgacgtgcttgggaactggcgcgcgcatatgagcatcgctggcatcacgttgacccccccgagtcaccgaggcgctcgatcc

SEQ ID NO: 272929 - DNA, 347 bp, Glycine max
  unsure (1)..(347): unsure at all n locations
agcttagtgcaaaatttgttggatccttagtctcagcccccttcccctatttataggagagaaacggaggtggttgccgcccaaaggcttcctaaagaagatttctgagcgcaccctttcattgataaattcacgtccctctccaaaggattcctgaagaagttttctgagcgcagcccacaatctataagtacaccccaccttctataatgatctggatgaagattcctaatcgcgcccgccaatatgatgagtacacccccttctaggttgcttagtgatgatgantcctgagtgcacccaccctccaaaatatcctacatggtcccaatgctacgtacactccc

SEQ ID NO: 272930 - DNA, 331 bp, Glycine max
  unsure (1)..(331): unsure at all n locations
cagcttgcttatacactattaactntctgtcttattaatgtatggagtgtgagcactattaagatgggacacaacggaatgataactattgtggcagctttgcagtgcgtgacatgggtaactctcctgttcgtagttacatgcaagggtttcatccagtgcattgggaggagtggaataataggaattgctcaagggggtgtgggaggaagactccactaaagattgagactgagagagctgttaatagtagttcttctggagctgatgttagtgttggagaagatggtttcttggagcaaaggtgtaccaagttgccgtattttacatg

SEQ ID NO: 272931 - DNA, 530 bp, Glycine max
  unsure (1)..(530): unsure at all n locations
ccccgganattgaattcgtgtcgttttgnngacgatctcgnaccagccgatcctctagagatcacctgcgcgcatgcaagctctatgtccgtgtttgttagcacgatctagtaatgagatcggtgggaaagtgattaagagattgatctactatatcaacgggattcatttatgtcatatctaccattaatgaaattcatagtgtgactctatggcgatttgacttatgagttggagaggaattgtgtgattcttgagcaacctctcacttatttgcgagagttactcttaagcgagtgaggagagttatgttggaccattgtgcctattactaacttgatatattaaaaaacacataatgatgatgtttagtaattattattgagagataatgatatcaaaatttaacaattgatcgcaccctcctatttgttaagagatgaacagaatagaacttttaagatctaatgtgttacattcagcacagtcataatggatcaaaagtaataaattctatctatcctatccct

SEQ ID NO: 272932 - DNA, 345 bp, Glycine max
tgttcgcacatcgttcgcgtgtatgatatccactcgacaaggtttgaagtagaggagaccttcaatcctataacacaacgtggcggacaaaaatgggcagttaacttgaatggacattattgtcaatgctgaaggtattctgcgcttcactatccatgttcacacattattgcagcttgtggttacgtgagcatgaactactaccaatatatagatgttgtttacaccaatgagcacatcttataagcatactccgcacagtggtggcctcttgggaatgaagcggcaatttctactcttgatgaggcatggacactaatacctgatccaactactattcatgcg

SEQ ID NO: 272933 - DNA, 437 bp, Glycine max
  unsure (1)..(437): unsure at all n locations
agctngtccttcagaatagagagatggaagtatagggaactagagtgtgaagtacctgagcctgattccacagagggtgacacaaaatcttccgcgtcagggaacatctgaagcccttgatgatgaacactttgaaagctagatgtggcccttgaaatcattgcttctttaaattatcttcttccaatagctgttttctaaagattggttctgatgagtttcttgattgaaagaaagatactacatattgagagcatatatatatatatatatatatatatgcttgatttgtttccttaatatgaagttgcagaagcaaattaagcaccataacatatatgtatatatcatggtattatgatagggtgaaanataagagaaagagagagagaagtcaactgggagatatagcatgaagttctttctttcccacttac

SEQ ID NO: 272934 - DNA, 445 bp, Glycine max
  unsure (1)..(445): unsure at all n locations
ntaggtaattaattaggtgtatcaggtatggtttaatgtatgtatggacgagtcaaaaaagtgcacaacacagcctttatccaaactcacttttgatactggactagagacaattcgttaattcttttctacagtacgtcactgttttctcttgcagaacattgcagttaacttttgggatcactttgatgtgtagcctgcgaaatgattcttcgactactaaacatcgttgttaagtatcatcttttcctttcttttgttatcaatacaggttattaaagcgattccctttgaatccttaacttaagcatggacgaaaatatgttcttaatcacaagacacaaactagtattataaaagtcaatatagttgatagtctgtgattagatgatataggacctttacactattaatatatatattatttattaaagaaacgaaaatt

SEQ ID NO: 272935 - DNA, 467 bp, Glycine max
  unsure (1)..(467): unsure at all n locations
agctnttcactcggagatctgattcaggcgcataatatatcgagacgcttgaaaatgaacaacggaagctctcgagaaattccaatgctcattacctttaactcggaggtctgatttaggcgcctaatatatcaagacgctcgaaattgaacaacggaagctctctagaaattcaaatggtcataacttttcactccgaggttcgattcaagtgcatgatatatccagacgctcgaaattgaacaatagaagctctcgagaaattcaaatggtcataaccttaaactcggaggtccgatttaggcgcataatatatcgagacgctcgaaatttaacaatggaagctcttgggcaattacaatggtcataactttcatctcggaggtccgattcgagttactaatatatcgagacaatcgaaattgaacaatggatgctctcgagatatcaaatggcataactttaac

SEQ ID NO: 272936 - DNA, 375 bp, Glycine max
tgaacttggtttagatatgattgatacataatttgggacttgtatgaattgatttgggcaagattggatgagaggaagtgtgattttcgaaatctgcacttatgcagaatttttgctgtgaaattgtgcagcagaattttgcacaagtgcagaaaaatgcttgtgtgtggttggctgtggaaagagcagtgcagaatgagttctggatgtttgctagtagatcccaacggtcaaaatgtaggcttatgtactagagacttccagtaaaaatttggagtcgatccaacggttaacgaattggaacgaaggaattgttactgtggtctttaagtgagaaaagctgtgattttggttgatgtgttgagcagagttttc

SEQ ID NO: 272937 - DNA, 446 bp, Glycine max
  unsure (1)..(446): unsure at all n locations
agcttcaagcaaagcttcaacctttggccaccatttctgccccagatcgtgaaaggagagcatttttggagtcgtgaagtgcgtggctacgagtgggactttgaaatttcaggtttgggtggacttctttccctcttgattttcgtgggtatggggttttgggagatatgaggggtagttttgttagttttctgctgtgtgatgattatttgtgaagacatttgttgaaagcttgtcgaaattgccatgtttgggtgagttagacatacccattctgttntatggttattgtgatgatgtttgtgatgtttatatgctgaaattgctgatggaaatctgttagagatgaagggtagaactcacccaatgttataaagtgagaatgtgactgtatgagtggaaaaagagtgagactttgagagtttgaacgctaagtctgaattctg

SEQ ID NO: 272938 - DNA, 451 bp, Glycine max
tcaagaataatggcctcagcaaacttcttattcccagaaggaaattcgataaataggctctctatttttaatggagagggttaccactactggaaaacccgaatgcaaattttcattgaagcaatagacttaaacatttgggaagccatagaagttggaccttatgtacccaccatggtggctagaaatacaacaatagagaaacctagagaagagtggtttgaagaagaaagaagattagtgcagtacaatttaaaggctaaaaacattattatttctgccctaggaatggatgaatattttagggtttcaaattgtaagagtgctacggatatgtgggacactctacaagttacacatgagggaacaactgatgtcaatgcaattttcccaacaggggcctcatcattcacagtcgggcccgccttctccttctcgcctatattcgcct

SEQ ID NO: 272939 - DNA, 431 bp, Glycine max
ttaagtcacctgcggcatgcaagcttcaagaataatggccttagcaaactaattatactcaaaaggaaattcaataaataggcctcatatttttaatggagagggttaccactactggaaaacccgaatgcaaatcttcattgaggcaatagacttgaacttttggtactagtacctattgtcataccctaatttcattcggggaccattgtttatcggcatgcgaccttcgtttgaccacctcaagaagtctctgggcagaaaccacctccattttgttaaaaaatggcatccggagcttctgtaatgcttccgtaaaatttctgaaaaccttgtgttagcatatttcacttaatattggtgaaaatgaagagaaaaaagatgataatcaagtctgaaacactcccgtaaggcttctgttacttttccgt

SEQ ID NO: 272940 - DNA, 453 bp, Glycine max
tgccacccagctcgcccaggtgagctaggttgcttcctccagaagcaaccgccttctggaggaattttctggaaggcacaagtgggcctggttgctatttgcacccccatttttactaaatacacccccttgctcttttttggtgattctttttccgtaatgttacgaaactttacgaatttcgtaacgatgcatgttttctttccgtaatgttacgacaccttacggactatgtaatcaacccctttttggtttccaggatgtcacggaactttacggattgcgcactaacatttccttttaatttccggcatgtcacggaacttcacatattgtgctacaatgctctcttttgacttccggcatgtcacggaacttcacgacatgcctaacgatgggtgccaagtacctcgaagtggtcatacgacggtcgcatccaacaacggatggtcc

SEQ ID NO: 272941 - DNA, 468 bp, Glycine max
gagctctacgaatcacaacaaattaatgctatggaaagattccaaacgttacatatcgagcttaagactatcaagaatcaatttgtaacacaaccaatccaaatccctttttctttcaagtactaattgcatactccttttctttcaacaagttaagcactcgtttgtactgcgatcaatcaagttggatttagatggggtagggctctattgatacgtcattacctacaattcgaattgcctaaacacctttgatatgtgggtttgtgtgtgtgagaattcattatggaatctcattggaagtaaattatatcaacataggaaaatgtgacgtgattcttcataaaataatgatttcatcaattggtcaaaactatgttgagcaatatctttgaagttttcacaataggtgtagagtggaataaagtgctgtacagtgtattaaactttacagaattactcaactaa

SEQ ID NO: 272942 - DNA, 404 bp, Glycine max
acgatgctgttgatatacaatgatagagagacgtgagatgcactagatgtgccaagaaacacggcgtgacgtatcttattactataaagaaaaggaactaggcgtaacgttgtgtgccatagggtatgatatattatggactttattttttgagacccataatcacccgaacgtatccatagtatctactcatgcatatgggttccatcaacacccgtgcgaatgattccaatgaattgttaggggttttatcgggataaactgtggttcatgtctttggctattggatcctggtacacataatacacaaatctttggtaacctacccctatctatgaataacctgataaccgacaaatggcgaacaaggtagtatcgtgaatacggttttggagaccacgacg

SEQ ID NO: 272943 - DNA, 469 bp, Glycine max
atactctagagtgcacgctgccgcatgcaagcttctgatatgcccaaagcgcattatgatatgggttgtccaaaacacgataccaataggcccaagtggcataaaacatttaagttttattctgtcaagttttaagtgtatcattgggaaccttctagaagaagcgcgatcctttattctagggtttaccttgaactctatttattatcttttcaagaatgatataagtattgaagaatttatccattatcttagctgctattagtctagcttatagtacataggttcctaagagaacctatagttggtgctttctgcttcgtggacgtgcctcagcgtacaacgaacgagttggatgagctcctctatgttggtatgttatagacctggcaagccccgcatgatgacttccatgtttaactatagcacaactttgatagttgttatgattccatcacacgtgtccttt

SEQ ID NO: 272944 - DNA, 421 bp, Glycine max
tagcacttggaacccagacccttcattgactagcttgtttatgctgggcagagggaatgcgtctttggggcacgccctattcaaatcaatgtagttggtgcacatttgtcatttgtcgttggcctttattaccatgatgacattggcgagccaagtagaatacctaacttctgttatgaagctatcattaaggagtttgtcgacttcttctttgatggctttacgtcgatattctctcatattccttttcttctgtgatattggattggcctggagacaaatagcaagtttgtggtagattatgctgggataaattctcggcatgtcagctgactaccaagcaaaacaatccgtattcctgtgtaacacgtcgatgatgcaccagtgctcatggcttgtgacgttcttattgagccgcgtg

SEQ ID NO: 272945 - DNA, 362 bp, Glycine max
  unsure (1)..(362): unsure at all n locations
agcttgtcgtgccatcaccattctggtctaatcccattccgggctcatacctatgcctcaacataactcgggccaccatcaatgatgcactagataaacgtggttgcactgtaggagcttcaacataagcattgctcacaatttctagcgcttgaatagatgtttccaacaactgttctacagcttccacataaggagtagaggatggacaactcactagtatatcttcttaccgtgacactataaccagttgtccttccaccacatacttcaatttcttctgcaacattgacgggaccaccccaacagaatggatccaangccgacctagtatgacactataggcgaggtttatgttcatt

SEQ ID NO: 272946 - DNA, 423 bp, Glycine max
  unsure (1)..(423): unsure at all n locations
tcaagataaggccaaactcccatcaaaaatctaatttcatgcttaaataggtggctctgatcgtgctcatgcgcttagcgcaattctgaaccgcttagcacgcattagtgaattttggcttagcgcggcttttctccctcagcggtgcgcttagtaggatgacccttcgctcagtgaacaccacagctcatncttcttgcagattcttcctcgcgcttagccgaggaatgttgcgctcagtggatggctggctaagccaacagattggcttagcgagagggtgaaaatcaacacttcaaaacttgcctaattaacctgaaattgagagaaaatgattattaaacacacaaaatggaagtactaagtatttattacctatctttaaccaaaagtaattacaacactacaaaataaccataaatt

SEQ ID NO: 272947 - DNA, 220 bp, Glycine max
  unsure (1)..(220): unsure at all n locations
agcttggcatcgagaatatcttcctcccatctcgagagggggggggggngattcgccctcttttnttaatggagagggttaccactactggaaaacccaaatgcaaatctttattgacgcaatttactcgaacatctggtactaatacctattgtcataccctaattgcattctgtgaccattgtttattggtatgcgatcttttttaaccacctcaata

SEQ ID NO: 272948 - DNA, 393 bp, Glycine max
tgcaagtttgactatttaagtgggttaacatgattgataatgtaaatatatgagttttacaatataaaaaaattaatataataattatgctaataaaaaaaataaatgttattcatatttacttaaataagtcaaccgtgttaggcataaaagacttaccaagtggactaggcttgacttttttttttaaccatatactctctaataaaaatatgggtatagtttatttgctaaaaagaaaatcaagcctgacttgagcatgatataggttaagccataagcctgttggatggacagacttattttcatccttaattgtgagatagtgtgttaattaacctccaaaagataaataaaaagacaatattaaaaatatctaattgaaagaatatg

SEQ ID NO: 272949 - DNA, 459 bp, Glycine max
  unsure (1)..(459): unsure at all n locations
agcttatacatttagcattcatccataaaataaatactatcaacagatcagaatcttttagtatgttgctctcttaatatttccttcttatttgtgttatatgtattaaccaaagggactaggtatgattgaccaacaacaatgtagaaccaaagcaagtatctaaagcattagagttctgctttttcaggggaatgaaagtaggaagcaaataaaatgaggaagaaaaggggggaggaaaaaaaaataatatgtctgacaatctttgtgacaacactacatgccaaatttccattgatttgttagaggatgttgcatttttttggttgtttaagatttttctctccatccatttttttcttttccaggaaaaggtaaagtctactggcttggatactcatcaatatagttgacatctctgctgccatngtggtcaatcttgtatagttcagctacatg

SEQ ID NO: 272950 - DNA, 370 bp, Glycine max
cgcttcacaatctccacctttgtgatgatgacaaccttgaaatcaagaaacacatacacattctttttcctagtcgatcactcacttaattctccatattctccccccttgtgtttgtgtttaagcttctcgtgaaattaagttatttaattatatgagttcttgatttaatccccattttctctccccctttagcataaaaaaagccaaagtgcgtaaaacatacatgaataaaaaaataatacacatagtatgcattgtaaatcaatcataaaagattctaaactaatcatgaagcaagacatgaataaactaaattaaaatgtaaaccacctagtcatataacataattcataaatgttcagtcata

SEQ ID NO: 272951 - DNA, 452 bp, Glycine max
  unsure (1)..(452): unsure at all n locations
agctngtaagaaaatagcaactcgaaagcaagagtcanaattgaagagaagggagtaacgagttggtgatcttgtatagagaatgagacaagaagcaaggaaagataatgctgaacgaaaacttgctatgaattgtgaagttacctttagaatcactacaacattagaaaatgaagcatactgacttgaataacttgctggaaaggccattccgaggacttgtaatgcaacacatttgaggccacactntggctagaaaactaggtgtcatactctntttcctacttcagtcttttttcccaagtaaaaatataatgagttttggctaaagatattttagcaaggcatacctaggtcacattgtaaaaggaatgtacaatcattacaatcactntaataaaatcctttacacaaaacatcttattctttntatcttctattacttggtaata

SEQ ID NO: 272952 - DNA, 339 bp, Glycine max
taatcatccttcataaacaaaagagatccatgcatgttattcttacaactatctagccttaatttatactcattctatataatcttgatcaaaagtgcattggcgataacacaaggtctcgacaattgactgataaggaaaacaactatatcgatgagtgcttgcatgaacgaacgattgtggtttgcattggtgccattagagggaggggaagaaagatcaacgaagcccgacggcagatgactttacccatgacaaaaccctagaaccttatcaaagccaaaccttggcagagctaatcatctacctatcaaagatcatttagactccaaacacact

SEQ ID NO: 272953 - DNA, 411 bp, Glycine max
  unsure (1)..(411): unsure at all n locations
agctngccatcctagccatcctaaaggtacaacacattaagaaggaaaataattagcatgcaggagcaacaattataaattatacatgcaatctccctcacctactctcatccatgacttgtgaacactcagaaacttggaagttatctaacaataactaacaggtgcactatccaacaaccaaaagaaactcattagaaatttcacaaatagtttaatatagattgttggacttgtagcaatatttcatcatgtatataagtagtttgaaaaaaaacatgatgaagacaatgctaacagcctgtacacattatgcaccagcttcttccaagagagatgagnaacatcatcaatgacagcaaaaagaacatcttatttatggtatacattagggcaattgacatctggata

SEQ ID NO: 272954 - DNA, 345 bp, Glycine max
tgtctcagcgtttatgcgagacggagaccaacatgctagctatcatcgccaagtaccaagaagagttaggtctagccgcggcccacgagcataggattgcggacgaatatgcccaagtatacgcggaaaaagaggctagaggaagggtgatcgactctttacaccaagaggcaaccatgtggatggatcggtttgctcttaccttgaacgggagtcaagaacttccccgattgttagccaaggccaaggcgatggcagacacctactccgcccccgaagagattcatgggcttctcggctattgtcagcatatgatagacttaatggcccacataattagaaatc

SEQ ID NO: 272955 - DNA, 185 bp, Glycine max
  unsure (1)..(185): unsure at all n locations
agcttgcaatagacttctcgtttatgatgttgaatgcancgctcttggctaatgtaaatctgatcacaccacgagcatgtctatctaacaagatgattcttcttgcttcatgatgtcaggcttaaccccagataaaggttgatccaactccttctgatatatataatactctatctgcatattac

SEQ ID NO: 272956 - DNA, 383 bp, Glycine max
ctaagccttgatctaacaccgccaccaccaccatcatcttagatttctattattttaatattattagtactttaatctccagccgtgtatttggctatattatgatgatatttgaacaatttaatatttctttatttgcatggtatgtttgaacaaatattaattacgttatttgactatgtggattttatatttgatctattcatggttcttgcttcatggttcttgctttatgatttggtttatatttttcatgaatgttgtgtgaatgcttagttgatatctgtatgttacgcactctggctttttgttgatgccaaagggggagagaaatatggatgaaatcaacaagaaataaggattatatcaagaactcacatgag

SEQ ID NO: 272957 - DNA, 401 bp, Glycine max
atccttaagtcacctgcggcatgcaagcttctacattcaatttcgagcttttcgatatattactggactcaatcggacatccgaggaaaaagttatcgtagtttgaattcgctcaaggcttcggcattccatttcgagcgtttcgatatattacgggactcaatccgacatcacagtgaaaagttattgctgtttgaatctggtcagagcttcggcattccattacgagcatctcgatatattacgggactcaatcagacatccgagtaaaaagttattgtagtcttaatgtgctcagggcttctgtattccatttcgagcgtctcgatgtattacgggactcaatcagacatccgagttaaaagctattgtcgtgtgaatctgctcagagctcctacatt

SEQ ID NO: 272958 - DNA, 413 bp, Glycine max
  unsure (1)..(413): unsure at all n locations
ntgagaaaattcaaacgacaataactttttactcggatgtctgattgagtcccgaaatatatcgagacgctcgaaattgaataccgaagcgctgagcaaacttaaacgacaaaaactttttactcggatgtctgattgagtcccgtaatatatcgaaacgctcgaatgtgaatgtagaagctctgagcaaattcaaacaacaataactttttactcggatgtctgattgagtcccgtaatatatcgagacgctcgaaatggaataccgaagctctgagcaaattcaaacaataataactttttactcggatgtccgattgagctcccgaatatatcggaacgctcgaaattgaatgtagaagctctgagcaaattcaaacgacaataactttctacctcgatgtctgattgag

SEQ ID NO: 272959 - DNA, 467 bp, Glycine max
agcttgaagatgttcatgttaaaagagttgaatcacattagaatattctgagacaaaacttacaagtgttgtaacactgtcagtctattgaacgaaagacacttgagcgaattgagtgaatcataactttgctaagttagcgagtttcattgtatttgagcttactgtgtaaacattcttttgagtgattagaatacattttctttcaaacatatattgtttgtgaaagcctgtagagacttagtgacaaagaatacttgggtcttaatcttagggggagattaagtatagtgtcaagtgtggcctagagagtactcgttgtagccaaaagtgacatagataatacttggttgtaataaaagatttgattagtggaacccttcaaggtttgaaggagaactggacataacccaagaattgaggtgagccaatataaaatcgttgtgttttcattattacttctatat

SEQ ID NO: 272960 - DNA, 443 bp, Glycine max
  unsure (1)..(443): unsure at all n locations
cgcctatccgatgcagcagtaatgatggcctgagttatgttggggaacggttacgaacccggaatgggtttaggcaaagacaacggtggcataactagcctgataaatgccaaaggaaatcgtgggaagtatgggttaggctataagcccactcaggcagatgtaaagagaagcatcgcgggaaggaagagcagtagtcaaagctcgcggttgagacaagaaggtgaaggaagcccgccctgccacataagtagaagctttataagcgcgggtctgggggacgaaggtcaagtggtcgcgatatacgaagatgatgttccgagtacattggatttggtacgaccatgccctcctgattncagctgggaaattggcgagtggaggaacgccccgacatctacgcaccgagcataatgtatacctttacgggtttaaaagctcta

SEQ ID NO: 272961 - DNA, 427 bp, Glycine max
  unsure (1)..(427): unsure at all n locations
agctnttgngcgcccaatgaatataagagatctaagatacatgaaaggaagatttaccaatgacataccaagaaaactattaatgtcccttatccctcatctaacaaaaggatttcaccccttcaaaaatcttacactttgcaagactgagaatttggcctaatgcttcacagtatattgaaaataagtccataagatgacatagactacactacatacctcctcaaaacaccataaggtcatcaacataaaaaaaatggctaatacgattgaagccccttggagaagccattggaagaactactctatcttctaaaagcaaagtgatggaacaactcaacacctctttagccaagcaaaaaagaagaggtgcgagtgggttcccttggcacacccctcgcttacaactgaagtaaccaacaatctg

SEQ ID NO: 272962 - DNA, 318 bp, Glycine max
  unsure (1)..(318): unsure at all n locations
tcaaacaaagccattaatctcttcacaagcacagaacatgtcaaagtctttntaccagcacggatcaacaccgttgtctttgcaactagctagcctacgagtgacataagaaaaatcatctttcttcaccctcctagtgagaaagggaaggcccatacatataccatgttcgttgcatgagcaaactcaataacaaaagagactctacctaacttccttcgaacgatgttctcggaagccataaaaacatatttatgaatattcgcctttagaccagatgctttacaaaaactatcaagaacctcttgactaacccta

SEQ ID NO: 272963 - DNA, 397 bp, Glycine max
  unsure (1)..(397): unsure at all n locations
agcttcttatccaaggctcatcttagtggtgatatctcattcttccatggcttattccctagtggatggcgcctcctctcacctcttctcctttgtcttccgctgcatctccatggtggaaaatcaccattaaaggacctcattgaagctcaaagatctagcctccatagaagccccacaagcaagtttctatcaagtggtaatcagagcacaagagcttcaagtaagtgctccttaaacctccattaattttttttctttaccctctcttccattgttgtttcttcatttttctccatgtatctcctcacatgtctggttctaaatgtntgtaacatgattctttagagtntccaccgattaaacttgctatagaaactagaattgattttctatg

SEQ ID NO: 272964 - DNA, 240 bp, Glycine max
ttgattggtattatgggtggcgttcggtcttggacatgcatcgggtggattttgtggccgatttctgggtggcctttgcgggtgattggacgtcctcggctggtacggtggtgggtcatgagaatgactgatatcgcccgactattgatattgatgagctactggcaaattcggccatgtacgaactaaagccacagcatgggatactacgtccttcttattctatacacttgactaaag

SEQ ID NO: 272965 - DNA, 373 bp, Glycine max
ggctcgcatcagcgttacacttcatgaacctttgatgttgacgactccatgtttctgtatcactggaggtgtgcacagcgttgtagagccactgcacctctttagcacgataccaatcttggtaaacaattgtctgcaacgtaaatcactgttcaatcttatacgtccttgttactccataatacgtgactacgccgatgcgcaggactctacagcatgatgagaacacactatctttgacactgactgactttttcgatcaaactgaatagtaaacctgtgcatgaatttacctctaccaatacgttttgaatagtatgccgtatctgaatctgatatcagcaacccgtgttctcaatttgcgaagcacaga

SEQ ID NO: 272966 - DNA, 463 bp, Glycine max
  unsure (1)..(463): unsure at all n locations
tactaagcttttaataanaatatgagataaattacatttttatttcgataaatagatatgaaattatttttaattnttttttttttgaaaaaggtcagtatccatatctctctaacattataaatagaagcatcaacttgaggcaacatgcattagacacatactaaaaaagtttaagtctaattttagacatgaagactagaaggagaatttatcctttagagtttcattcatcaaataattgatatagattggtttgtgaatatacttagagtcttcacactatatttgaagaaaaattttactacttaaagaatatatatccgggtatacaaatctatttttttctatgtattatcattggatatcttgaatacaaaataaatcctaattcttttatgtaaatattaggaacacttttatgtaactactaactatcatgcatgtataaatcaacactata

SEQ ID NO: 272967 - DNA, 243 bp, Glycine max
  unsure (1)..(243): unsure at all n locations
agcttctagccaaatggacttacctttaattatttcctttgatagcacctttgagccttgtttccctttccttgttatgaagctcactacaagccttaagtgaaaaaccatgatatcaccatatccttaaggaattatggagctttggaattgttttgggaataagtgtgtggggggggggattnaaaacattttcatttcaacatatattgcttgagcatacctgtacatgacttatagaca

SEQ ID NO: 272968 - DNA, 340 bp, Glycine max
  unsure (1)..(340): unsure at all n locations
cgatgtgaganagcgtggaagagtcagtctttctacttttgtttgttgaccacagagtggtacctggagatatgtcacggcgatcaggagaccttggggacgtcaggcggggtgctattgcccaaaaccaagcttgaccaatcccgacccaacccgggcatagtcagtcagtgagaacctgtgatgtacctaaacaggcgatctcctggcagtcaaccaataaaagaacaaagtccacaaagcatggaggcttgtgtggcggttggcgagctatgaatcttgagtgatatctggaaattggcctctggtatttgattaccaagggtgtgtaatcgattac

SEQ ID NO: 272969 - DNA, 350 bp, Glycine max
aatggacatacctttaattaattactatgatagcccctttgagcctattttcccctttctttgatgtgaagctcattacaagccttaagcgaaaaaccatgatatcaccttacccttaatgaatattggagctgtggaatagctttatgaataaacttggaataagtgtggaggggtatgtttcattggaagacatgaattttggccatgctcgatgtatatatatatggcctagttctttctttaatctacaattgtatactgttcaatctaaaaataagagatagctcaaaatgaataattatcagctgctgcaaattctgcaatttcttacccttcaaaaaaaaaga

SEQ ID NO: 272970 - DNA, 268 bp, Glycine max
atgaatgatgctctgctacaacctaagtcaaggtacaaggagataaagggtatatgctcaaggttcaatccaacaatgatacctttagctcaaaatgggtgcaagggataaatcaatcatgcacaacgtaagccttttagctaagcggctatctctaatcaaaacatggaattcatcatcttcaattctatgcattcattccacactcggagattcatgccaaaaccattactcaacgttcgtcattctctcacaattaaagatcaca

SEQ ID NO: 272971 - DNA, 425 bp, Glycine max
atgccagcagtgatccaaagaggtaagcaccataccactacctgaacaacttaactattcaaaacatctacatgggggcatatcatgaatattcgccacccaagaatctgaatatatacacctgcttataaacatcctcaaactgtaatcctgacaaggtttacaaagcgctaaatcgattaacaaatgatcaaaaagcctgaaccgattattacatttaacgctcgatgaaacacgcgaagtcttgattaacataacgaacgacaccaataaactagatttgagtgaagcagcacggcacttaggaagatacaacagctagatcaagtgtaagaactcatactagatatctccagacgaaccataaataattgacattatacaaaatacccttagataagaatatataatctctgtcctagtcg

SEQ ID NO: 272972 - DNA, 398 bp, Glycine max
tcctgttgttgttgttgctgaaggaactcaagttaagacttttgaagagattcgatacaccgttcactatgtccaatgcgttgttgctgagctccaaagaagtgttgagaaccctagccatggtcttgccagcctcgttggtcgtgttctcgaacccatccaaacatgtctgttggtgagcgagagtaccggcgatccagaccttgagatcataggcgtaatcgttcaacttgtttagttcaaactcttccaacttgcgaacggattggtgcatgtcatcgacagcgtaacctagaactctcttgcagatgtccatgcgctgtttgttcatgtcgtcggtggcaagatcgtggtagagcgtacagtattttatatgctctgcgatctcttcggccgtg

SEQ ID NO: 272973 - DNA, 447 bp, Glycine max
  unsure (1)..(447): unsure at all n locations
actccttgttcagcttctaatttctcttcttatcaacctataataagacctagtcattattgatatatagacagtgttactagatcgcttcaatcatcgacttggtaaaaatattaggttaataactggactataaatcactaattgaactacgtgaatgaatattatatatatatatatatatatatatatatatatatatatatatatatatatatatatatatatatatatatatatatatatatatatatatatatatatactgagatatatgtaaatacacacgcgtgtatatgactcaggngtgagacacacttctgttatatatggagagagccagggagtgatattttatatgttcgctagggagagagggtctcatctatctaaacatataacactactcagatgtggtacagatcatacacactctcataactctcn

SEQ ID NO: 272974 - DNA, 413 bp, Glycine max
ctaatcgagtgtgcaacgtgactccaaaattatttacttttcccttttatatatctttttatttttggggtcgacaagggtattgcccttgcttctacgtatcctcaggtgcgatgaggaattcagacctacgtagttctttaagttcaaatgtttgtgtgttaaattgactttatgtttttgaaagattccttttaattgcaaacaaaaagtcatttaaggcgttataccttgaaaccatgttttaaatcttgaaaagcggagagaatcgttaaagtgttggaccttgaaacgatctttttaatttgaaaagcggacagaatcattaaggcattggatcttgagacaatctcaagtgatatctgataaaaagaagctagttatgagctggccttatctcggttctgcttatt

SEQ ID NO: 272975 - DNA, 458 bp, Glycine max
  unsure (1)..(458): unsure at all n locations
agcntttttgtacgacaccttgtaggcaaattcactgtttatcctttcttgaatcaaataaacttttattgatgaatcttctctgatcatgcctgttaacaaaataaccaaatttaaataacaaataacggaaaagtagcataatatgaacataaaaaacgtacctactacacaagtggcaattaaatctgaatcaagcttctcgtgatcttgtgtcatagtcatattcagacatgtgtgtggtccaccccattgtgtgactntccatgaatcgattnttttagataaaattgccctcatataaaaagggaaaggacactttgcacttttattcggacaacaaacgatacttgtttgatttgctttcaacaactntaaaactttgatgtaccttcataacatattgtttcaatacattntntaccgcatctatactatcanaatccatgccaacatat

SEQ ID NO: 272976 - DNA, 410 bp, Glycine max
  unsure (1)..(410): unsure at all n locations
caatgcctataaaatcaagccatacaactatcaaggatctcaatattaattcagattgctcactccttaattgggatcgacaagcttccttcaaatgaatctatgaatgttgatgttactctttcttgcaggaacccattaacaagcataacttttggcaaacttgggttataatagaaatgtgcatgaatctgatatatgccactcagtacacataagcaaataaaaataaacccaaacaaacctttgttagtctttaatttctagttataggaaagaggagttgttaaagaatggaggaaaatttgtagcagcttcnaacaaatcattcatattctcaagcaatcatgcacgttaagaaattcaaacaaatttgcttctctatttctctttgatgcatattcacaaac

SEQ ID NO: 272977 - DNA, 313 bp, Glycine max
agcttgatactatggtattgcatgtgtgcgttttcattggaaagggtatcttataacccctacatgtgagccaattaattcctataactgatgaaggagtaagcattactgcacctctcaaaagggtgagctgttccggtaactcgcatagactcagccattctaatagctgtgaaaggagctatcttatcctacaactcattaagagtctttcgtacctgaaactcatgagtacgctaattgtgttgccatcaaagtcattcactcttgaaatgcagccacgctagctagtcatatagttacttaatgcatt

SEQ ID NO: 272978 - DNA, 355 bp, Glycine max
  unsure (1)..(355): unsure at all n locations
ctgtggacatatntcctaccgggctaagagtctggtgggtctgagcagaggaaaacttagttatcctgctatgatgaatgggcagcctagcggacaacatggagagaccgataaggagggaggaacccatgctgtgagtgcgaccctagacgggcacacactaccactatctcagcaatatcaataagtagccaacattgacccttctcattacccacgacctatcaaccattaatgctgtatgatgcacaacggctacccctatatcagtcacaaagtccagctgccacacattctatatctagcaccacccttagcatagaccccaacaccaagtcgggaaggaatattccac

SEQ ID NO: 272979 - DNA, 370 bp, Glycine max
acggacaccaacatgctatctattatcggcaagcgccaataagagataagtctagacggagcccacgagcataggagtgcggacgaatatgcccaatcatacgcggaaaaagaggcttgaggaagggagatctactctttacaccaagaggcaaccatgaggatggatcggattgctcttaccttgaacgggagtcaagaactttcccgattgatagccaaggccaaagctgatggcagacacctactctgcccccgaagagattcacgggcttctcggctattgtcagcatatgatagacttaatggcccacataattagaaatcgttacgaaacttggatggtctctcagaccttgactagatatgac

SEQ ID NO: 272980 - DNA, 305 bp, Glycine max
gactcggatatgaacctacaatttaagagaaggcttttgacttgatcccatgttttactcaagtgaaacaaaacccagtgcgatataaaacttcgacatatattataggttgaaatggatgaatgcatgaagaagtgtatatgaaacatatgcagtatatgaatactggaacccgggaaactgtgtactttctatatacaacgtcttgaggtagcaaagtgcccaacatatgtatttaagaatgtgacactgacccttcgatggtttgttaaagagacgggatctatacagaatccgtgtgtgac

SEQ ID NO: 272981 - DNA, 393 bp, Glycine max
  unsure (1)..(393): unsure at all n locations
agcttgatccttgaatcttgaagtgttcttgtatttatcttgaacatcttgaactcattctttcttaattctatcttgaacatcttgaactcattctttgattgacctttgagctttttgtcatcacctttgttatcatcaaaacatctttgaatcattcttaattcatcatgaagctntgcttctacaagaagataattgtaccttgtagataatgtggcgttatagataattaaatacctaccactagataagatattcaaatacatttaaatattagttaggttagagataacctatttgttggggagtccgactgctaagggccaagcatccgcactcatatagcaagactgatgtggagggttgatacatatctctaagagtcaagta

SEQ ID NO: 272982 - DNA, 452 bp, Glycine max
taagcggtgtttcttgaagaagaggatcatcggcgtgatgtatgaatcgcgagttcgagaacaggatttcgggaactttctggtgaaagagaagatgaacgttctaaatgtgaatgttttggaagattcttctatcaagaagagaatttcaatttctcaccttttagaacgaaattgaaattccacatttttagctgtttaaaattttgttttaaacactactaaaaaatttctttcttatgatgtgcattctaagacagttatacacaaccgccttagaatgtcatgcggtggaagttctgtcattaagaagaatttatgacacacattctaagacggttttacaaaaccaccttagaatgtactaggggaacctaaacaacagtgggtttatatctagaaacgtcgttgtctttcttccatgccaagcgtgtactttaatttaaaatccc

SEQ ID NO: 272983 - DNA, 432 bp, Glycine max
  unsure (1)..(432): unsure at all n locations
agctnttagcacaacacttcaatgccacatgtcagcttcctgttgaattgcgctcctgcctctggggcaatgcaaataaaaacagacccccttctgataaataatttgaaaaaggaccccaaacgggtgtttttgcctttcttgatgtatagcaacttccgacttttattagccagttgtttttttggattctttagggattatctttcataggatagtcttaatgtaattttttgggcttccactatgttaatattaaaaaagaaattgaattctgatattatccaaatcaaactagactggttcaaatatgatgacctccaatttgagtggagattgtttatgtttaaacctatgaatccaatgatgcatagctgtgacatgacnatttttaagtattatatatatatatatatattaaaaantattcta

SEQ ID NO: 272984 - DNA, 443 bp, Glycine max
  unsure (1)..(443): unsure at all n locations
tagcccttaagccagtgacatgttgaagccaagtaacagaatgaatcaaatcttcaatgccaaaacctgcagcaagttttgatggttttttaaccactgatactaaattttcttggtctttgcaattctcgccaaaggcagcccttgaagcaattgtgtaaattgatgtaagtactgcttcagtgaggttgatggnggatcctttctttgaatcaatccatttgacaagattgaagagctcatcttctctaattggctggaatgagttgacgcgttttaggcttaaaagctccaatgtgcatatttttcttagctggctccaataatttccatagccagcaaaagctatacttgtggaattgtaagacattatctcaatagctagaactctaggccttgtggcaaagttaatgtcatgggttctcatcactctcctagcacac

SEQ ID NO: 272985 - DNA, 444 bp, Glycine max
acggacaccaacgtgctagctatcataaccaagcgccaataagaggaaagtctagacggagcccacgagcataggagtgctgacgaatatgcccaagcatacgcggaaaaagaggctataggaagggtgatcgactctttacaccaagaggcaaccatgaggatggatcggattgctcttaccttgaacgggagtcaagaacttccccgattgatagccaaggccaaagcgatggcagacacctactctgccccctaagagattcacgggcttctcgtctattgtcagcatatgatagacttaatggcccacataattagaaatcgttacgaaacttgtatggtctctcagaccttgactagatatgacttgccttttgaagtaaaatgagttcggcccatgtgtctactccagaaaacttgtgcaaatcaaatcactcctacg

SEQ ID NO: 272986 - DNA, 439 bp, Glycine max
  unsure (1)..(439): unsure at all n locations
ttataagtgcgggtctgngagacgaaggtcaagtggtcgctatatgtgaagatgatgttccaagtactttggatttggtccgaccatgcccttctgatttccggctgggaaattggcgggtggaggaacgccccggcatttacgcaacaagcataatgtaaacctttacggttttaaaagctctatagttgggcctaggctttagagttttcattctgttaaggctttgtgtcttttgtttttgaatttataatacaaggatctttcttcatctgttcctggtctctacccattctcattcatttgcatgtttacttctttttctgaaacggcagattcgatgacgagtcccccgaaggtactaatacctgggacccgtctatcaacttcgagcaagaaatgaatcacaccgaagatgaaggagatgaggatgtgggac

SEQ ID NO: 272987 - DNA, 468 bp, Glycine max
  unsure (1)..(468): unsure at all n locations
gagcttcccctttatcacattgttttcgttatacaatattgtaagctacaccaactatatgtccgccgtgtaacgaanaaatgagagaaaccgagtcccgaacttttgttgggtaactcttgtacttgaccaaattcacctgttccaatttagcaagcttgaattgaataaatacaacaccttttactctttttttttttttttacaagaccttttactagaacatatgataattnttttatgaaagctcgtcatgtaattaaaaatagccaaccaattattttcccttctcatgtgacacattccctatttttttttataacgttgctggctcatattttataatcactgtgtcagctttgagttaatgacatatatttaagagaaattcattatccttctctgtgatttagcttttttctgtaaataattccatgagtttacttaattacactctatgcctctttt

SEQ ID NO: 272988 - DNA, 303 bp, Glycine max
  unsure (1)..(303): unsure at all n locations
taagcgtnctgggttgtgaaaagtgtgaggaaagctcaacttacctctttcttaactgggactttgtttcaaggctcgaacagaagttgtactgccctgtagatttctcctcttgattttcggtccttaatgttctaaacagaaagtggagaggccaagcccaccatgtcattcttgctctcattatcaatacctttggaggtaaactttcataacaagcatattaattngcatagtgctactctctctatttctgcaactacctctcttgttggaacgctctctaanggccacttgggacac

SEQ ID NO: 272989 - DNA, 439 bp, Glycine max
  unsure (1)..(439): unsure at all n locations
agcttgagtacactatgaacgcacaccctatcctgatacctcaagactccatcagttcccactctaaaactactctctctccctgcgactatggactctaactgggctgacaagaatgggtcaaacttctgaccctcacggatctcgctcaaaagttcgctggtgactctcaacatacccaacttaatgctactagaggtgatctcacatgccaaactcatgtctctaaactgctctaagaggcccaactctctaaccatcaaagcagacatttgaagggattttctacttaaggcgtcagctactacattggctntacctggatgatagctaagctcanaatcgtaatccttaaggaactctaaccatctcctctgcctcatgttaagctctttctgatcaaacacatatctaaggctcttatggtcactaaacacct

SEQ ID NO: 272990 - DNA, 470 bp, Glycine max
  unsure (1)..(470): unsure at all n locations
tcagaccacaacaacacanaatctaagtatccaaaacccctcaattaatggatttccaaggtttgagaagtgaaattgagaatgaggtaaatttggagcaaactctcacctcacacaagtctataacatcaatttaaacttgctcaaactggatttacacctaaaattccaccgaatcaaaatttgactcctcaacacccaaatttaccctagaaatggctctctgttcactttggtcatttgtttttctctctagcacagcccaaactttctcataagtcctaaatggcatttcaagctaggattaactcactctaaccttcaaataccactaaatncagatttggccttccaactctcaaagtctcacttctttttcactcacaacaccatactcttaccttctaaccctaggttaactctacccttcatctctaacagctttncataagcaatttcagcacataaac

SEQ ID NO: 272991 - DNA, 388 bp, Glycine max
atgttattgagtggttcacttattggatcatgcgatccgttaagaacttcccatccactctaaacatcttgttgatccattggacgcaaaactgagtcttcttatatgtgaaaactctactctaagcgtttcatcttctcctactctatctaaggattgtatatcgagtcatcatgtataagataattgagtggattttaattgtcttggcactatttatagacatgcatatagctaatgaatgtcattcaagcaacaattgcaaaggtggtgtctaattagtatacctcttgatgtagttctacagaattatgccatctcaagaagtctattgatgctatctgctatagtaacattgttcgaaatcaataattaccccatacactat

SEQ ID NO: 272992 - DNA, 451 bp, Glycine max
  unsure (1)..(451): unsure at all n locations
tgtgacatcaatggaatccaagattcagcttgactcaagtctttcaattatgttctaagaaatgtgacctaagcgcttatgccataatgctcttgagtttgtattatcaattctacgcttagtaccacgcaattaaaggattcaccataggaagctacagtatcatgtaaatatagattatcgttaaccaagagtgaaccagttccaacaatatctgaattaaaagacaacatgaacatattgttttcaaatgaacacaaataacccaatttgtccaaataagaaactgaaaccaaatttcgtctaaatgacagtacaacaaaagtgtctttcaaatccaaataaaaactagtacgtaataataatctaaagtgccctatagcttncacttncaccgatttaccatctncaacgtagatccatctttcagaatcaattggccttcagtagc

SEQ ID NO: 272993 - DNA, 436 bp, Glycine max
  unsure (1)..(436): unsure at all n locations
agcttgtcgaaattgccatgtttgggtgagttagacatacccattctgttttagggttgttgtgatgatgtttgtgatgtttatatgctgaaattgctgatggaaatctgttagagatgaagggtagaactaacccaaggttataaagtgagaatgtgacgttatgagtggaaaaagagtgagactttgagagttggaatgctaagtctgaattctgtggtaaatggaggttagagtgagttaatactagcttgaaatgtcatttagaacatgtgatacaggttaggctgagctatagagaaaaacagatgacctaagtgaacaaagagccattgctatggcaaatctgggtgttgaagagatacattttgattcggtgagaatntaggtgtaaatccagtttgaacaagtctaaatggatgttatagactggtgt

SEQ ID NO: 272994 - DNA, 405 bp, Glycine max
  unsure (1)..(405): unsure at all n locations
tgatgattgcctatgggcatataaaacaaccttcataacacccattggcctctccccgtttcaaatggtgtacggaaaagcatgccacctacaagggtagttagaaataaaagcttattgggccatgaagttcctcaactttgactctacaacatgtagagagaggaggaaggtaaagctacaggaacttaaagagatgcgcctcaacgcatatgaatcatccaagctctacaaagaaagaaccaattggtaccatgaaaaatgtagaagcaagcttcatgatgatgaatcaaatttgattcaagttgttttgatgataacaaagatgatgaaaaaaagcccaagagaatgatttcaagattgagtcaagaacaattcangagtcaagagaaatttgatatcaag

SEQ ID NO: 272995 - DNA, 455 bp, Glycine max
agcttcataccacagcaacacaatatctatgtatgcaaaacccctcaatttaatggattttcaaggtttgagaagtgaaattgagaatggggtaaatctggagtaaaacctcacctcacacaagtttataacatcaatttaaacttgctcaactggatttacacctaaaatttcaccgaatcaaaatttgactcctcaacacccaattttaccctaagaatggctctttgttcactttggccatttgtttttctctcttgcacagcccagactttctcataagtcctaaacgacatttcaaactaggattaactccctttaacctccaaataccactaaatccagatttggccttccaactctcaaacactcactctatttcaactcataacaccatattctcactttctaaccccaggttaactctacccttcatctctatcagttttccataa

SEQ ID NO: 272996 - DNA, 359 bp, Glycine max
tactaagctaaaggaggctcttgaagtggacatggacgctatcaacatattgaaatagaaaaggctggccaaggccatcgctgatgaagactaaggtctaaaaaactttggcatttcaagaaaaaatttgaaagatgatggatgagcagtagaagaggaaaaagactagaaaacaatcacaaaaagatgaagaagaagaagaacttctagcctaggagcactggactaaaagaatacatgaatttgttgcattcactcttacgcgtccatcggtagtgacctcaatcacacaggggttgaaagacctatgtgagattgatgaatatgatgaaggtttggtgtaagtggccctaccaaaa

SEQ ID NO: 272997 - DNA, 423 bp, Glycine max
  unsure (1)..(423): unsure at all n locations
agctnttatatataggaggtgagttcctactatctctacactatcctcacctctcaatgcgctgttgaagaagaacgtggcattcacttggggtgacagacaagagcaagcctttgcttcgctcaaagaaaagctcacccatgcacctgttctagctcttcctgacttttctaaaactttagagctagaatgtggtgcctctggagtgggtgtgggagctatattgatgcaaggagggaacactattgctttatatagagaataccttcatggtgccaccctcaactaccccacctatgatatagagctgtatcccttaataagagccctgcatacttgagaacattaccttggtttcaaggaatctgacattcatagagatcatgaatcacttgattacattagatggcacagcaagttaaa

SEQ ID NO: 272998 - DNA, 410 bp, Glycine max
tctgctccaattatctatcaacggggggagacgtgtagtgttaaagggttcagccacttaggcacttctctctctttcgaatttgctaggaaaaattgtttccgtgaagaaaatctaagccgaggcgcttccgaaacgtttccgtaacgtttccgtgaggaatttcgcgaaggtttcgaccgttcttcgacgttcttcattcgttcttcatcggccttcgatcttcaacgggtaagtacctcgaaccaagcctctcgattcattcaatgtacccgtggtggtacacattgtgtttcgtgtatctttattctcgcctcatttactttttataccccgttttgacgtgcttaagccatattatctaagtcatgtctcgcttaacctaacaataaaacaaatttccaccgatc

SEQ ID NO: 272999 - DNA, 284 bp, Glycine max
atgaataacacaaccactcctacagtacataggtgacgcgaataaaacaatgcacatgatgaataattggtcatcatttttgattcctgacaatgatcgacacagctacccctaaatccaccaaatacaggctcctaaaaatcaaccttttagcaaggctaaatgcatgaaataggaacttcctcgttatttttgttcacttcaatagcgattacattgtcatatctgtttagggattcattatatcccaagattcccaatcttaagttggtatctacatatta

SEQ ID NO: 273000 - DNA, 410 bp, Glycine max
tgcacgatgttaacttacaagaaaacaagtttaatcaaagcattttaaaatatttattcaacttagaaaaaataaggacaaatgggaaaagttaacttatagtttattacaataaaacctacgtatccaacatcaatcatcatctaacacgaaattcaattactgatatgcatagaattggatgatcccacaccataatacatataatccaatacattctgatttcatgaattcagtccaaggaaaaccagataacacgacattaacatcaataaaatatcttttatttatctgcaaggcctagactccaaggagtccatcatgacctctctctcctaatttaggcccaacccagaacatatcttaatatacagactctatctatgaactatgcaatacacacaactact

SEQ ID NO: 273001 - DNA, 436 bp, Glycine max
  unsure (1)..(436): unsure at all n locations
agcttgctcaatgtatattgttggggttaaaatcatgtgtgtatggagggtgaaatttatgtcctatatggatgttagttcaaagtggtgaattgttggactgtgacctaaatccatatggaagtttattctgttattttttctggtttgtcctctgcctatataaggcaaggatgccctgtatttttctatataggataagcttccacttgtatactgcaaccataataaaaagctttctgtttttccctcccgtggatgtagccttactcaaggtgaaccacgtaaatcntgttgtggaggctttctctctcttctctctctttcaattctgcttcaatctgtgtgtatgatatatctgttctggggcatctatagggtgtggtcttggttattcttcatcacttgcataacacaatgtataaaaaaatatatt

SEQ ID NO: 273002 - DNA, 349 bp, Glycine max
atgtggccatataaacactaacgcttatggtttgtttcctccgttcaaatcaacccaatgtgtctaaacaatgctcttttatcaagttacacacacatctgagtccattcaaggcttgacgaacaatatctattgtattgacccttccggcgcacacacattatttttgtagaaatctttgtatgttccgacccatgaattttccaaagaaaactggcggatatcttctttcaaaagcgcgttggctctcatgtagattgttatagctttttctttaagcagatttcttttctcttttttgtattagaaaaggtctgtaacccgagcaaagttggtaaccgagattaca

SEQ ID NO: 273003 - DNA, 586 bp, Glycine max
  unsure (1)..(586): unsure at all n locations
acatcgtccatccctttanctactaatttgttanttatnacttccccatatactntccccgcccccaccgtnatgatttcctctcgtagcagngacnctgatagtcgacctgcgagcatgcaggctgcaccaatgatagatacgaaggaagtttcttaattataagctctatgcccaacacgtgaagagctggccgaacaggaagacgtactcgctcgtggtgaaagacccgagcacacctatgctttgctactaagcagctcgacacaagcccaagtcaaactattacgcgacttattagagacctagacctagggagtgatgccgccccagtgcgtgtgggagccatatacatactttgtgggaacacaattcgccagtatgaggcagactctttagagagtcctgatgacaccgccacctcaaagaccagaatgagacggcaccaacgatcacgctacactcgactggataacggacttcataccaccgacagccaagaccgcagaaccactaagaggattcaatggcgaacaccatgaacaaaatgctggccccaaggctatgagccaatagaggtgccacg

SEQ ID NO: 273004 - DNA, 449 bp, Glycine max
  unsure (1)..(449): unsure at all n locations
tggagggcgacaatctccaatcatacggaacagcaattattgcattagcttctatgccaaattcaatacaccacttaatccattctttccaaactgatgaaagaggtcctgccatttaaacatgtacatgatacatcagcaaaccataaagtacaaaaactacagcaaatacaggacaaaatcatatttgacaaattgacacggcataaagaaacacacctgttatataacctggatcaagttctgtaatgccagacagaccactatccggacgggacttgcaatcaggatgatctgtctggttgtaaggatccaacaccatgcacttaagccagcaattgacagcagaaagaagctgcaaaacattaattctcagtttctcacataccacactnttaactntntaaatcgcagctcattagagctaatttatacacagcaggagatat

SEQ ID NO: 273005 - DNA, 439 bp, Glycine max
  unsure (1)..(439): unsure at all n locations
taattttacacggataatgagagcgctatggagggngaaatatatttctacttcggtggaagtgccacgtgatcagtcttggactgcacctttgggcatattcgaggaaatatctgtgttccttctggcgcgtgcgctgtagatatatcctatcgtgggcctgtatcgtcctatatctgataatgcctcacgaaggcacccgttccatctttacaagcatgcactcattcacgttccgggatgtagctctacgtaacgtgtaccacagtaatactgtttgggagaacgtgattccttactttcccatattaatgcggctgcccacatgtgcgtacgacacatctgtacatgggcatcttccgttgttgaccctgagtattcgtaaacacctaccctacatactgtgtgaagaccatttttgttgactatgactaatatg

SEQ ID NO: 273006 - DNA, 354 bp, Glycine max
  unsure (1)..(354): unsure at all n locations
tactaagcttgaatcgatacacatatactgtaatcgattaccagagcttatctttagaaaatattctcaacaatcacatctttttatgtggttcttgaatggctatcaaaggcctatatatatgtgacttgagacacgaatttgcgaagagtctttcagaacaaaaaggccttatcctcttaaaaagcaaaatcgttttattctcttacaaattccttgcccaaaacacttgtgattcaataaggaattatttgagtgctcaaattgnttaatctatctatttcaaaatagattncttcttttcttcttcttcattctgaaaagggatcaagagaccgccggtctcttgttgtg

SEQ ID NO: 273007 - DNA, 383 bp, Glycine max
  unsure (1)..(383): unsure at all n locations
agcttgaatggtgttcacgttctactgaacttaagatatttggnttgccaagcaatgttgctatcctagatatgatatcatctctctagactatttatagagatgacattgtgtagtatacaggtatgagcttatcaagatgaatcattttatgggattatcacttggtattgtacagctattctctaagcaggtatgtcaattctgtgtatgacctttctacttggtcctttcgttggctttgttttcatatcgtaatctattttcttaaatttgttgcaagaattcatatggactggctctactaaaagaggctggcattattcattgtgatctgaagccagacaacattctattatgtacgaggctgggttcttacatga

SEQ ID NO: 273008 - DNA, 431 bp, Glycine max
  unsure (1)..(431): unsure at all n locations
gcttgcggactataccttcgaccgaacacggccgtgtttctgtctatgttctgattcaaggcgggctgcagcaccggctccgcttccctaactgtactggaggcggctgtcgtggctttatcctctatggttttctggagttttaacatgacctccgagatggaagccatttgatcttttaaggccgatagatcggccttcatctgttcctgcacgccctctctattatccattcttctggatcgagtgttatacgggagccttggtgttttcttaactataataaaattnctaaaaaaataaacaacggtgagtatgccaccaaaacctgagtatagcaatggatgatctgagcacttggatccatcccaacggttttacataacgtaatgagttcagaacttctcatttcataaaaagaacaaagcttt

SEQ ID NO: 273009 - DNA, 369 bp, Glycine max
  unsure (1)..(369): unsure at all n locations
agcttanccaatgagagatactaatgtagtctcttctaagatcagttctatgtaagataagttgagatttgaccaaacaggtaaacatagtcgttcctggccaaattcccagttcaatctaattttgacaactaagcagcttgttagaatcccaagttagaaaataatgttacaaataatgtacctatacaaagggaattatctgccacctattcatataaaatcctgaaacaaatttaaattgagtaaaatacaacagtttgagttagatactttagaagttcatgatgtaactgctcatatcaaagaccttaatgtgagggcaccaaggatgaaactctntacaactggatcaagggacttttatac

SEQ ID NO: 273010 - DNA, 423 bp, Glycine max
  unsure (1)..(423): unsure at all n locations
tgtcaaagaatccaacctctcatggtagaagcaaacacatataaactaggtttcactatcttanggatcaagtgaacaaagagaaactaaaagtggagtactgctgcacatttgatcaacttgctaatattttaaccaaacccctcaaaggggagaagtttaaaatgttaagggatagaattggcttgatgaacttacgagatcagaattaagggagggtgtgaaagcttaattctgtttttgagtggtgtatatataattgtacattggatataagagagtaacagaattttaaaattctgttataagtgcctaccctaantgtgaaaggttgttactctgttttgcttgtataaaaagacatacatgcatcttaataatgaggattattcattctatcatgttctcagtctttagcgttat

SEQ ID NO: 273011 - DNA, 386 bp, Glycine max
  unsure (1)..(386): unsure at all n locations
agcttgtaggccttggatcttcttcatcanaggagtcctttgcttcttgaatatcaatggcagcggaatggagaagaagaggagttgagaggagatgccacttcaaggagaagatgagtcaagaagaagctcaccaccatggcctctatttatagcctaagtgtcacacaaaattggaggggaaattgaatttctattcaaatttcacttgaatttgaaattgaatttgtggagccaaaatttcactaattatgattagtgaattntagctatggttcagcccactaatccaagatcaagtccaagattctccactaagtgtgcttaggtgtcatgaggcatgtaaagcatgaaggatgtgcacaaagtgtgactatatgatgtgg

SEQ ID NO: 273012 - DNA, 381 bp, Glycine max
ttcaattcttttggaagttcatcagttgatttggcttcttctggatgatcttcattgcttcctttccctttccctttggaatcttgtccatgaatatgcattatttctaaagattctgcaacatcatctaaaatatcctttctcggagaaatagcattagactcatcaaaggaaacatgaatagattcttcaatagtcatagctcttttattatgtattctataagctttactatgcaaggaatatccaaggaaaattccttcattagacttagcatcaaattttcctatgttttctttaccattgtttaatacaaagcatttgccaccaaaaacatgaagatgtgaaatgttgggttatctagcactaaacaattcatat

SEQ ID NO: 273013 - DNA, 254 bp, Glycine max
agcttgtgcagtaatcttttgtatgggtcattggctccttgaccagcaagtattgggggtgtctaaccgttctatgactatgactgtcaacagaagagacgaagatagaatgtgagaacatgtgtggcaagggtggccagcacacctccccctgtgaatttgaccctgtttgggcctatctactcatacaagcaacttagtatatgtggtatttagataaacacactttgtagtgataatgacaaatgatgcac

SEQ ID NO: 273014 - DNA, 268 bp, Glycine max
  unsure (1)..(268): unsure at all n locations
tgtgctcattctggtatgtgtacattaactactgtattggcgctagngctcatactggatacggtgatgaagcttggaatatcttcaattcgatgcccctacgatatggcattcaacctttggtggatcattatgcttgcatggtgggcgtgcttaactgagctggtactctattataaacagcaaaattcgtgtctgagataccactcgaaccaagtgctcaagtttggggtgctctgctacaccgagcctttgtttatggtggtgt

SEQ ID NO: 273015 - DNA, 457 bp, Glycine max
  unsure (1)..(457): unsure at all n locations
agcttngtgcccttaccacttgtagtaatttttaccctgaccaagagcttttgtggatgtgggaatggaaacaaccatgggagaagcagaaagaaataattaatttgaaaaattaattntgaaaaacttgaggtacttactcttttaacccttgggagaaggggaaagaaatccccacatatgtgcatttattgacaaatgcctctttatgccctttaaatacaactactgatacttgatttagaagtctccaaacacaagttgtacaatcattatgggatacaagtaaaacaataataatgataagtatagtgaaaacactaattttccaaaagtaaaacgaanagtaaaggaagacaggccactgaagtatctagttacttttctttcttcactcggaagtcaaaagaanaaagaaacatacatatgaggtggcagtccttctttctgcaaataa

SEQ ID NO: 273016 - DNA, 439 bp, Glycine max
  unsure (1)..(439): unsure at all n locations
tncaacactctagtgaaattttgaagagttggtgccgctaatcgcaatcctttaaggagcttagcacatatccttgcggcagatgttcagcttagtgggtgctgtccagctaagccaattctgcagaagctaaatttctgcaacttccgctaagcggctccagatgtcactaagcggtagtgattttgttttttgcaaaggccagctaagcggaccatgtctcgctaagaggccagtgtctttttcagttttatttttcaatttttgaaatttgaataacttgtgtcctgattaattgtttggttcctttgtttgcagatggcttccagaaagagaaagagtattggtactaggcccacatcttagtatgatacaaggaggttccactcttttgaggcctggacccgatacacatataatgttctaggaagacatatac

SEQ ID NO: 273017 - DNA, 472 bp, Glycine max
ctcgaccctgatccttaagtcacctgcagctgcaagctgtggttctttctcgtctaaccattgtgaaagaagagagtgagagaagttgctcctcatctcaccgctcttagttcttcttccttccttcaaaactcgaatgacccatttctttgattttcgctctcttgcacctcctgaggtaaagatacaagcttttctcttctgttcactggatcgggttccacgaattgaagggtaagctcagtacgggttgcgttgatctgcaccaagatgcttaatttgcgttgaaaaattcattcatttgcgagactcggcatcggaaatgaaccaattagttgaaagttcaacgactactcacagggtatctagagctcaagctccactggtaataagtcctttccctccaattattctatctgcatattagttttcttcttttgaatagtataatgtttctccattcttcagttgc

SEQ ID NO: 273018 - DNA, 450 bp, Glycine max
  unsure (1)..(450): unsure at all n locations
tgcaacttgttcttcttcttctgctgaaagctgagctgttctttctaattgagaatgggaatttgtaagtgaaactgtggtctttgcaactccaccacaattttgatttgtaacatagaactcttattttacgagaatatgtatgatagagaaggggaaaaagaagtaatcggattcatttattcagtttcctgtaaattttattggtcattgaatcattttgctttagtgttaatgattattgaatggaattatatcatangagataatataacaagatggtcaagctttttctctccaagttactattttaatatatatatatatatatatatatatatatatatatatatatatatatatatatatatatatatatatatatatataaagaaatgatggttttcaatcgagtagaagggggcgcatggtctggatcttttcataccg

SEQ ID NO: 273019 - DNA, 309 bp, Glycine max
tgcttgtacgccctggatcttcttcatcaattgattctttgcttcttgaatatcaatggcagcggtatggagaagaagaggagttgagaggagatgccacttcaaggagaatatgattcatgatagaatctaccacccttgcctctatttatagctctaatgtcacacaaaattggatggaaatttgaatttctattcaaatttcacttgatattgaaatcggatctgtggagccaaaatttcactaattatgattagtgaagtttagctatggttcagtccactaatccaagatcaagttcaagaatc

SEQ ID NO: 273020 - DNA, 364 bp, Glycine max
ggcattactctctctacttatcttttaaaaacttttggattatttctgttccactcaaagtgcttccgctcaacaaattgttttatataaattaaaaaaatagcacattataattttatgagaatgaaaaatatattaaaatttttatgaatgttatgataagaatagatatatttaagtatgaaatttataattatgccacctttatttgttttttatatcacccatgtttgtttgttgatgtcttgttgaggcttgcatcttgtatagagacagtggaagcagtttccttacttaacgagatccactcaaaacgttattgtattctccctacccaaatgtgccagtataaaacttgaacatg

SEQ ID NO: 273021 - DNA, 449 bp, Glycine max
  unsure (1)..(449): unsure at all n locations
agctngttcttgattntttctaagttctttaacaagcttagaataatatacttggccttcatttaattgtcgttgggcttgtcgaccttgatcaacaaagtactttcgacacctactatatgttgatttggccaacgttgttatcggtatgttgcgacaatccttcaaaaccttatttatacattctgacaggttggttgtcatgtggtcatatcgacgtccttctctgtcataagccatcatccatttgtcctttgaaatgcgatcaatccatgttgctatggctggactcagttgacagaatttttctaaattttgataaaaaatgtgcttgcaaggagtgtaccctgcatganattagttagcaacaacaattntaactatatatgaaacttanattaatgtgaccatgataaatgaaatgttacccaatttcttcaacatttctt

SEQ ID NO: 273022 - DNA, 404 bp, Glycine max
aaaccattatcatcattaataaataggctctccattttcgtttctccagggactacctttgttttcgcttctaataattagttgctagagaaagcaagatgcacacatgttttagttggtgccacaggttatattttagtaatttgattgattcatcttttagtctttcacatgataaattactaaattttgtcaggtttcggcttctcgttaaaaacagattgaaaattgaatgaccaaaatgaaattaacccttttaccataaccactaaagcctcatgatttacaaaacagtgggctttcttttagagttcagaatgatcatatcatcatttcatgtatgtacacaaaagaaaaggaagcctttagctcgtagaaaggatccgacaacctatacaaaattg

SEQ ID NO: 273023 - DNA, 537 bp, Glycine max
  unsure (1)..(537): unsure at all n locations
aagaatgacgcgccggcgccctgagtcgactgcataccntangcattacgtgacaatatataatactcaagctttatgatgaagtnaagacatgatgcactagagtctctgatgactttcttagacgatgacacagatctcaggagtcaatatcactctcatgatctaccccacgatgatcccaagactctacgaatgagttcaagattgcatcacgaacaccttcaggtctccaggaccgtttgtttccggaatcaccaatctagtttcaagttccaataaacgagatcatgattgcagactcatgattcatgacctcaagagatgactcactccacataagtctgaaaaagtttgatcagaaactcgcgtggatatgaatttttcttacaaccttatccctcgagtatctactgtctggtaatcgattaccacatcattgtcatccattacccgtatcaatagggttctcgaacgcttttaacttgatgtcaacttggcaattgtgtcaaatcgtctaatccttacactgtttgg

SEQ ID NO: 273024 - DNA, 432 bp, Glycine max
agctcgtaggatgatggagtacccatcacatgtgcgtctatgtggcgagtaagcgatggagcgcaactatttttccacatccacaatgcgcgcataaatcctccatgccctgttgcccacctcccactgagctcacgtgctcccacgtagcccatattctcgtttctctcaacaccgggtccccatcaatcctcccaagctgcctcaacattcaagcaaaacaacattcatacagcacaggctatcgcagccaagctgaacgtagcaaaggcagaaaactctgctaacacaccaaccaaaatcacagcttttctcacttttagaccacagcaacaattgctttgtttcggctcatcaaccgttggattaactctgaactcttactggaagactataggacattagcctacattgtgagcgatgggatctact

SEQ ID NO: 273025 - DNA, 262 bp, Glycine max
agcttgacctaacctgtgagaggtgatcttaattgtgtgtgaacgactagcattgagtatattctgtgattagtctctgaattctagaatgaaatgcataaatttgaaagtgatgaaggccattgctataattagaaactacttgaccagaaagcttacctgcaattacaactgtctcctttgcaccttttgtgagctgaattaaattttcaaattgaaccctaaacttaaaatgaatatctccaactaccctgtataaatt

SEQ ID NO: 273026 - DNA, 541 bp, Glycine max
  unsure (1)..(541): unsure at all n locations
atgcacgcggcnnatgatttcgatgcgtctcagagccgctgatactcacagnngacgcnnnagcacgcccgcgagctacagaatntttctatattcttctactaactatattgatatacatggccttaattgtttctggcgtgagagatgtgtatacccttgacacaatgcaaacaactatactacaccctaatatgatggatgatgttgaccactcggcgtgtatctagaatggtgccacacttcttaaaaaccttatttatacatgccgacatgtaggccggcaagatgtcataacgaccgccttctttgatataaccgatcgaacacttgttcttcgacatgcgagcaatccatgttgatatggctggacccaataaatcgagattttccatacatcgacaatgaagtgctagcaaagagcgtacgcctgttaggcattaggcagccacaaccactttaatatatttgaaccttaattaagtgactctgatgatgaaatgctatccgtttaacagcaatggtgtaagctacaaattgg

SEQ ID NO: 273027 - DNA, 330 bp, Glycine max
  unsure (1)..(330): unsure at all n locations
ctgcagctgtctgttaactatgtctattggatgagatcattggcattggtgaggaaagggtttcaaatctgcacttatgcagaatttgctgttgaaatgtgcagcagaattttgcatacgtgcacaaaaatgctatgtaattgctggttgcggaaagagtactacagaatgagttctggatgttttctantagatcccaacggtaaaaatgtatacttatgtactagagacttccaataaaattttcaagtccatccaacggttaacggattggaacgaacgancatgtactggggtctttaagtgagaaaaagctgtgattttggtttg

SEQ ID NO: 273028 - DNA, 447 bp, Glycine max
  unsure (1)..(447): unsure at all n locations
ggagcatactagctttcatctaaggatggtccattcatgcttctacctataatcacgccaagtaggttataaaactaacactgaatagttaacactgacttgagtttcagaggaagtactaagcaaagtttaagttgtaccgtacactatggcagtgaaggtttcagaaccaaaagatatgaactatgggccagtatgaaagcagttattggttcatagaaatgaagcatttaaggctgagcctctgaccaccatatatactcattcaacaagacatcaattaacttatcactcttctaaatagatcaaaagtgcagttagaaagaatatctgttagttttgattcttaatatcccaaatgtagatatattacttggcacagaccacacgagactttntgccccatagtaacatcagcaaagtaattcccagcatcaaggtagaaag

SEQ ID NO: 273029 - DNA, 327 bp, Glycine max
ctctctccctcacgatgcctttcttgctcccttattctccattaaagctccatacatagcttcaacctttagtgcccgtttcagccccaaatcgtgaaaggagagcatttttggagtcgtgaagtgcgtggctacgagtgggacttcaaaatgtcaggtttgggtggacttctctctctcttaaatttcgggggtatggggttttgggagatatgatgggtgcgtttgccaaatatctgctgtgtcatgattatttgtgaacgaactcgattaaagcttgttgaaatcgccatgtttggatgagttacacatactcattctgtttag

SEQ ID NO: 273030 - DNA, 286 bp, Glycine max
tttgaatcctagaaaaaaccaatggaatttggtttgggaaagtccttctgattctgttaatacatttttgagtttatggcatgagatgaagtgcaaagattggacctcttgctagttgttattaatgaataacttaaacacttgtgcatgagtgaaacagtggctgtgagactgtggtgtaagctactttccttgatatttgtcttatgcctaacttcatctaattgttcaggttgcatcttattcttttctttggataactgcatgccttgtaaaagacaagtga

SEQ ID NO: 273031 - DNA, 337 bp, Glycine max
ataaatgagtttgacaaaattgtgggtgtatcaattagtatgactacctctcgacccaaaacatggcctactaagtgcaaggtttctagcgctaaatggccagataacgtgtgaagactaatttgggccataggggaacccaattcttctggtggtttgggtaaaaggtctagagatggagcttcttctattggatcatcgtcttccttcacaataaggtgaaacactttggaagcgtgttggatcaagtggcctcagaacaattaagaacgcgggttgaatgaattattcccacacctttactaattaaaaaatttactcttctaaggcttttact

SEQ ID NO: 273032 - DNA, 447 bp, Glycine max
tctaagcttgctacccaaggaaccatcaagaaattacttgtgaatgagagccatgagggtgggctcatgggccactttgggatagacaagagccttgtcttactcaaagaaaagttctattggccccatatgaagaaagatgtgcataggctagtctagggtgatgcctcatgggctatacacacccttacccattccatctgcaccttgggtagacattagtatggactctgtccttgggctccttagaacccaaagaggtgtagactctaactctgtggtggtagataggtttagcaagatggcacactttataccatgccacaaggtggatgatgcttgctacatctcaaaactctatcttactggaagtgtgagactccaatggttgcctaagaccatcgtgtcaaatagagatgattagttccttgccccttctataaaaca

SEQ ID NO: 273033 - DNA, 433 bp, Glycine max
agctcgtatagtgcgtcacgctaagcaagtcagtctcactaagcgcaattagctctctgtctgagaataatgcttagcgagccatgctcgcttagccgttgtgctatttcagctaagcgagtgtgtctcgcttagccagagtctatgtttttgtgttgtcgtgctaagcgcaccttgcacgctaagcaagtactattatttttataaggcgtgctaagcgagccagtctcgctaagcgcccaatctgtattatagttctatttttctgctttcaaatgaaataaaaacttgtctaatatgattcttgtgcttatttttctcctatttcttacacctttttgcaccattttaattactgattagtcttaattgtcaaattaattacgcagttttattatttgggctcattaagctaacttgatatttctcatct

SEQ ID NO: 273034 - DNA, 412 bp, Glycine max
agcttatgttgcacacatctacaatagacctcctcaacctcagcatcaaaatcagccacaacaaaacaattaagacctctccagcaacaggtacaatcccgggtggaggaatcatcccaaccttagatggtcgaatccttcacaacaacaacaacaacaacaacagccttattttcaaaatgttgctggcccaagcagaccatacgttcctccaccaatacagcagcgacaacaacaacagcaatagccctataaacagcaaacagttgaggctcctgcgcaaccttaccttgaagaacttgcgaggcaaatgactatgcaaaacatgcagttttaacaagagaccagagcctccattgatagcttaactaatcaaatgggacaattggctacacagttgaatcaacaacag

SEQ ID NO: 273035 - DNA, 441 bp, Glycine max
atgctaaaacttatgacataagctatgacgtaaaaaaactttattgattcaaaattgcttcacatgggacttacgagatgctatacgacaagcagaaacttgtaaagcaccatttgttagtgaaattagttggtcaaccagtaaaagtgtaaaacaaatgcctccaaattttcactagatatgattttaaaaatatagaagaggtcaagaaactatcacaagatcatttttttttttggagaaatgttacttgttaattattgttagaatattagtgagaggagatttgaacccaagatttattcattccccttgttcctctaaccactaaatcaatcttataattcttcacaatgtcaatttaattcgttagattcacaagattagtaactgatggagaaaaacaattggtagatgactaaggttatgtattgaagtttt

SEQ ID NO: 273036 - DNA, 444 bp, Glycine max
  unsure (1)..(444): unsure at all n locations
tatatgtcgttctttattcggagagaattgtctgctaatattaaaatattactacaaactcgtatataatatcttaattaataatttaatttggttaaaaaaagatatcaacataaattaatttataacatcaaacctttaatttaagtatatatatcttttctccctagtgaagctcaactgtcaacgtcaatttggtgataaggtttttatttattcatttatttacaataggttaatagcagtgttcctacactctttctgataatggaatttgtaaagtattaactcatcgtgccaagttgcatgcctagatgcttagacaaggggggacacgaatcttgttattaaaaaaaaaaaccatcatttggcataagaaactataacatgttatcttagtctctaaaattaagaaaatttcaaacaatttcttgaaattnttag

SEQ ID NO: 273037 - DNA, 491 bp, Glycine max
  unsure (1)..(491): unsure at all n locations
cggcggtgaatcagttgacncngatcttaagtgactcggctgaccggattcttagagtcgccgtagtagctttatacagctgacctctccctcacgaagacaagtcgagctctcttcaaaanaatagagagtatcttttttatcttagtgagagtgatgctcctaaaatcctgaaagaatcaaaagacactgtgtgtgtcaaggatttgcaagctttgagtgttgccctcgctggaaagagtgagggttgtcttcctatcatctccacccttggtttttcagaccacaattacaaaaaaatcacctctgcccaaaattatctcgtgacatgactcncatgtacacactcagaataagtgattcttgaccctaaattgagttcanaacgagacctttcacctcgtttggatcacctcatttgagccctgagctnncgtattgccatttatattttgtcagcaccactaactacgtttacatcccatcatcat

SEQ ID NO: 273038 - DNA, 420 bp, Glycine max
  unsure (1)..(420): unsure at all n locations
cgggtcagttganacgttctgtaccgcatctctaaccgactgcggctgcaactggttgacaacttgtcaacaaaatcttgagatgaatatatgcctctatagtcactttgatataagctgattgctgctcttttgccttctaataccttcgttgaatgagaaactatgtataagtgtctttcttaataaagcagatgggtttcgtgacaataaaagcatcacctcttattctgttgccacaattaacaaaatttatacatgcttcaatctggaaatggtctatgcattcaaattgggatagccactggtataaactataaggtgtgtacaccctcggaaacacatgacctaaattattagagcgaacatataatttgatactgcaaactgttgtgaaatgaaatcnacatcggcccgact

SEQ ID NO: 273039 - DNA, 262 bp, Glycine max
  unsure (1)..(262): unsure at all n locations
ctcaactcttattaatgggagagaaatgttcatctagagcatacaagtccctaatattatcaaatcctaaaattagagctcctacggagcaaaacaatgtgtgtctcctagagagggcatcagctaccacatttgactttaccttgttgtatttgataacatatggaaattgctctaggtactctaccccactatgcatgccttttgcttaacttgctntgacctctaatgtacttaagtgattgatgatcactatgaatga

SEQ ID NO: 273040 - DNA, 432 bp, Glycine max
  unsure (1)..(432): unsure at all n locations
ntctggagtagatacatgggaccaactcattntatctcaaaaaggaagtcatatctagtcaacgtctgagagaccatgcacgtttcctaacgacctctaattatgtgggccattaaggatatcatatgctgacaatagccgagaagcccatgaatctcttctggggcggagtaggtgtctgccatcgccttggccttggctaacaatcggggaagttcttgactcccgttcaaggtaagagcaaaccgatccatccacatggttgcctcttggtgtaaagagtcgatcacccttcctctagcctctttttccgcgtatacttgggcatactcatccgcgattctatgctcgggggccgtggctagacctaactcttcttggtacttggcgatgatagctaacatgttggtctctgtctcgcataaacgctga

SEQ ID NO: 273041 - DNA, 340 bp, Glycine max
agcttcaagaaaaagatggcctcagcaaatctcttatttccagaacggaattctatcaatagacctccaatctttaatggagagggttaccactactggaaaacccgaatgcaaatttttatcgaggcaatagatctaaatatctgggaagccatagaaatagggccttatatacccaccacagtagaaagagtttcaatagatggtagttcatcaagtgaaagcataaccatataaaaacctacaaatacatggtctgaagaggatagaaaacgagtacaatacaacctaaaagccaaaaacataataacatctgccctaggaatggatgaatatttca

SEQ ID NO: 273042 - DNA, 443 bp, Glycine max
tgatgatatggttgttagacaagtggcctcagatatcttaagaagggggggttgaattaagatattccaaactacttccccaattaaaaatctatttgacttttttttaattgagttataaattcccttaacaatgaacttcttaaatattaattcaaataaaaaaatttgaatatgattataaagcaataataaataaaggagtttaagggaagagaaagtgcaaactcatatttatactggttcgaccacacccttgtgcctacgtccagtccccaaataacccgcttgagagttcgactatcttgtaaattccttttacaagttctaaacacacaaggacaatccttcctttgtggtttagaattctttacaacaagagaccctcggtctcttaatcccttagagaattagaaagagaagaagaatgaatctctcttgaa

SEQ ID NO: 273043 - DNA, 422 bp, Glycine max
  unsure (1)..(422): unsure at all n locations
agctttanatgttcangaaattgtatacatagcaactcaccatgatatgtagttttataataataaatacataaatattcagggttacaactaatattgataatcttttggatcaatgtaatgtttaagtagacactaaactgatggtgttaggcttgtaaatcaacattcaaaattactatttttttctagttttgtattcatatccaattgatggaaacgtggaaaaataataatttaacataaaattcttgggatcttttctttgaaaatcgttatggtagtatcttgtattcctgtatggttattgcaatccactgatctaataagaatgacacaatcaatcattagtcaacaataatatataactagctccatatggaccttatcaaatgtgagtttaccaacctaaatctataatc

SEQ ID NO: 273044 - DNA, 252 bp, Glycine max
taattttaaaaaattattaggatattgaaattaattattaatttggtatagaatacatgaactttttttaattttaagtataatggagtctttgttgctgaagtacttcaacttcaattgaatataattgtaattgtttatttctatcaaaggataaagtttttaataagaaaaaaatgtacttttagaatatgacaagaaatgtactctattatttatcaattgatttgttaaatgatagttgatgaaagt

SEQ ID NO: 273045 - DNA, 334 bp, Glycine max
  unsure (1)..(334): unsure at all n locations
cacaaaccacaaacccttgcgacaggtacagatttctgattcaaggccagctgggttaccaagttaaccaatgcatgcaagtttccttcaagcttcttagtttcagatgatgcagatgggtttgtagctacctcatgcactcctctaatgactatggcatcatttctggcgctaaactgctgggagttggaggccatcttctcaattaaatttctggcttcagcacgagtcatgtctccaaggtctcccacactggcagcatctatcatacttnctctcatattactgagtccttcataaaaatgttggagacgacgctgttctgaaatctgat

SEQ ID NO: 273046 - DNA, 396 bp, Glycine max
  unsure (1)..(396): unsure at all n locations
tatccttattgttgtatgtgtggttcatgtctgtgctaatagacaaataattcatttctagaatagtgcatttttctttaaaacgtggtttataaagatcaaaacattttcaaatcttggttgtggttcaaaacagaattttttttccctttcatttgttcaccaaaaaatgcacacgtttttaacttcatttaattattattgattaaaacattttcatgttttgatttgattcaacacacgtttgattntatttcttctttcatttactcaccanaatttggaacatatataatcgtattatataagaagggagacacatttaaatctttgcattaatttttattaacatatttttattagaaatcaaatanaagtattaattaatatgaaata

SEQ ID NO: 273047 - DNA, 345 bp, Glycine max
  unsure (1)..(345): unsure at all n locations
ttgcatgcaagcttgtactataactntgatcgttctttacttctctcacacagaataacgtatggacaatcaacaacaacttccatatagtaaaccaaataccatgtgattaacgggtagtacatgtttgatttgtcgtttgcacagctccaaatgtccgttcatgcgtttcaaaatgataacaaaataaataaataactacactgcttgattgaaaaaaacatgcattacgttgaacctaacattttttcaaatacaccttatatatgtcaccgaacgattgctcatgatgatccaaatttaacattaaaagaaataactttcgttatagtaccggaaaaattg

SEQ ID NO: 273048 - DNA, 442 bp, Glycine max
  unsure (1)..(442): unsure at all n locations
tattgctattcagaagatctagttttcatggcttaatttgattatgagaagttctatatatagatcagcaaactgaataaacattcggggaaattaatccttctaattattggcttgttttaagcgtgtcaaattaatctccaaaataacatggataatatcattttcaacaaagacaaattgattacttctacactttattttattttttaccagctatatacttcacatgttaatcatgttttttgatagtgacggaccaatcaaaagatgaatggatttatgggagacgaatttaatattcaaacgattcatcgtagggcagatcaaacacgaaaaacacagtactatcttttggttctccgccacagcttgcttgaataattaatacatatacagtaacctcttatgttgccttgtatntaaaatacaaattatatat

SEQ ID NO: 273049 - DNA, 304 bp, Glycine max
  unsure (1)..(304): unsure at all n locations
tatcccatatctatatacacacatgtacacttctactctatacaatattatcatgcttattcattgcctaaaattaataaacattaggcttctggcatgtangctcagagttgtaaatgcatcgtggtatatactaattgaatataacactaacttctcttangtacaattttttaaaaggttttgttccaaatatattaaaanaaatatagccacangtatttaatggtctcaattttatccgatatctttaaggaactantagatggaggagtagggagaaaaaaaaanggtatatataaac

SEQ ID NO: 273050 - DNA, 450 bp, Glycine max
  unsure (1)..(450): unsure at all n locations
tctgttttttaaaaactgtaagggtacttgatgcattgaatacatgatgaactgctccaaatagcaaatagaactattttttgcctgttgttcaagtcaattttctggtagggcacttgatttgcttgagctcttgtttcataaagtatgattcttcagcttttgtcatcctacgtacctttttcttggtgttgaactaagctattcttattcaggtattttaatggaaagtgctcattactagacgagttcctatctttatttgacaaaacaggatctaaacttctgatttgggaacttcttctatacttgatggatcagcaagagtatataattagatttgctagctgatgtacatgtacaagtggagaaaagcatntacatatgttactctatgctactatatagagatgcttgctcttactactattttcacgtgacgtggtcatg

SEQ ID NO: 273051 - DNA, 452 bp, Glycine max
  unsure (1)..(452): unsure at all n locations
gatgctagactttttttaagcatcttaatctcggcttcttgtttctactataaaaaaggtgaaaggttggtgtgattaaatgccaatatctgcaagttacatttcatactagatatcaaatattatcaccttggtttttgcttgcaagttactctcctccacttcctttgcgtgaatctttttctcaagcttagtgtagaactggccaccaaaataactttttttaaactatgagttgatcaaaatgacaccctcgtgcaacatataaggcagaagcacataataattatttacctctcttcttctctcagctcgctcatcacactcganactgaatccatattttgggagcgcccnncacctgngaggttnggcatcttctgcagtaggacttacaactggataacnggataaacataaatacactgtgccactctcagtaacaaactaac

SEQ ID NO: 273052 - DNA, 426 bp, Glycine max
  unsure (1)..(426): unsure at all n locations
ttaaacctaagcttcgattgttgtataagtaacacaataaaaagagtgggttataaaccaaaccatgtatggggaagtgagggacgactctgatggcttgggaaatggcttggagtctatggtctcccttgagtccattctcttcggcgaacattttttgaataactgaaagaaaaaaaggtgatttgctttggggggagggggctttttgtgttgtgtttccctccgaaactgaaactgttactttttggtgtggaatggatgaagagcataagaaaggtttgggtctgagcgttggtcaagtcaacaaagtgtggcatattgattgagcttatgtatgtacagcgtaacccccaacccancacatactaacgtaactcttctcaccacgcgaattttccccactctacctcacacgctctcttt

SEQ ID NO: 273053 - DNA, 457 bp, Glycine max
  unsure (1)..(457): unsure at all n locations
agcttaaggttgagcactntggcgcaatttttggttttccataagtcttctccttcacaggaattctattcaaggcacgactggacaccaaatgtgagcacctctcccaacagggatttgaaccttcgctcaccacattgtaggagactagcaccttctgcaagacccaacccctgtttttatgaacaaaataactcgtttaagtgtgaaattaattgaagtatggaaaaaattatatttttttcccttgatgtgtcattattttctcctatttcttaaccctttttgtcaccattttaattactgattagccttaattgtcaaattaattatgcagttttatcattcgggcctattggactacatttgtgtttctaatctaatttcacgagaattataaacaattgggcttgaatctagaattgggctcggacttgaagagagcagactattttat

SEQ ID NO: 273054 - DNA, 435 bp, Glycine max
  unsure (1)..(435): unsure at all n locations
tgtatnntgtggattcactttgatctcaactntaccatatggaaaaacattagtctgcacaaaaggaccaatccactttgacctcaacttaccactcatgagtccgagcctagagttatacaataaaactttntgtccaaccacaaagtccttcttagccatcaagctgtcatggaacttcttggtcttctccttgtagaatttggaattctcataggcttctaaacggatctcatttagctcacttagttgcaacttcctttcttctccagcctggtccatagagaagttgcaagtctttacagcccaatagactttgtgctctatctctacaagaagatggcatgccttgccaaaggcaacccgataaggagacattcctatgggtgctntgtaagcagtcctatgcgcccaaagagcatcatctagcctagt

SEQ ID NO: 273055 - DNA, 440 bp, Glycine max
  unsure (1)..(440): unsure at all n locations
agctcgnctcagcgtttatgcgagacagagaccaacatgttagccatcatcagcaagtaccaagatgaattaaatctagtcacggcccacgagcacaaagtggcggacgagtatgcccgagtgtatgtggaaaaggaggctagaggaagggtgatcgacttgttacatcaagaggaaaaaatgtggatggacctatttgctcttactttgaacaggagtcaagaacttccccgattgctagccaaggccaaagcaatggcgaacaccaactccngccccaaggagatccacggacttcttagctattgtcagcatatgatagaattaatggcccatataattagaaaccgctaggaagttttgtattgtcactcagatcttgacangctatgacttcctgaataacatgagtctatcccgcgtctttactccaacgatca

SEQ ID NO: 273056 - DNA, 391 bp, Glycine max
tgagatgaggaagtgtagaagggtgaacttcctgcttttattcgttgaccacttagtggtacctggagatatgtcgcggtggtcaggagaccttgaggacgtcaagcggcgtgctattgcccaaaaccaagcttgaccaatcccgacccaaaccgggcataatcagtcagtgagaacctgtgatgtacctagacaggcgagctcctgacagtctacagataaaagaaacaaagaccacaaagcacggaggcttgtggtggctggccaactgtgaatattgtgtgatatatggttgtggcctctggtaatcgattaccaatggtgggtaatcgattacaaggcttaaaaatgaagacagaaggctaagatggtctctggtaatcgattacca

SEQ ID NO: 273057 - DNA, 405 bp, Glycine max
  unsure (1)..(405): unsure at all n locations
agcttcttcncaattntgctataaatagggggagatgtgaagaagataagggttcacccncttatgcacttgtatctttctctcgaaatagctgaggaaaattagttctgcgaagaaaattcaagccgaggcgcttccgtaacgtttncgtgagtaattacgtgaagattctcgatcgttcttcaaaattcgtcgatcgttgttcgttttctctanttttaacgggtaagtacctcacaccaagcttttcaattcattctatgtacccgtggtgggccacattttgtttcatgtatttttattctcgttttcattttctttttataccccctttgtgacgtgcttaaggcatttatntaagtcatttctcgcttaatctaaaaataaaacaaatttccaccgacc

SEQ ID NO: 273058 - DNA, 445 bp, Glycine max
  unsure (1)..(445): unsure at all n locations
tcttgattcttgattcttgaaatcaaattttctcttgcaccttgaagtgttcttgattcaatcttgaacatctggaacatcttaaactcattctttgattatcatgaattgacctttgatctttttagcatgacctttgttatcatcacaacatctttgaatcaatcttgattcatcatgaagctttgcttctacatgttctacaataggaaaactagaagatgcctcagaagattgaggttcttcctctggaattgctgctgcctctaagtcttgcaaaaatttgctaattctcccttgattatgccttctacaagtggcgttaatatccaaatcaatgggaatcaaatcacctgcggaagatctgctntgcatacaagaacagtacaacagctattcagttcataagaacaataaatatactaaactactatgtgatgtaagc

SEQ ID NO: 273059 - DNA, 376 bp, Glycine max
gacacgtggagatttagggtatctttcacgctcactatatctggcatactgacttttgcttcacgctgactggcggaaatacccgagtggttatccgtataaactttttgcattctgtaagacgaagagcctgataacacgcagagactaacatcggcttctgcgaccttcgtcaatcgcgggcgacaagcccgttgacacgtggagatttacgtcatcttccgcgctcacaagatctgtcatactgacttttgagtcacgctgacgggcggaaatacccgagtggttatccgtataaactttttgttgtctgtaagacgaaaagcctgatagcacgcagagactaacgtcgtcttctgcgccctttgtcaatcgc

SEQ ID NO: 273060 - DNA, 401 bp, Glycine max
  unsure (1)..(401): unsure at all n locations
ggaacacgcctacaaaggagagagccagaaatgaagagcccatggttgatacatggacggagatgaaaaagatcatgaggaagcggtatgtgccggctagttactcaagggactttgaaattcaagctccaaaactaacccaaagcaacaagggggttgaggagtatttcaggaaatggatgtgctcatgattcaagcanatatttgaaaaaatgangaggtaactatggctcgatttcttaatggtttgactaatgatatccgcgatattgntgagctgcacgagtttgttgaaatggatgaattgctttacaaagcaatccaagtggagcaccaattaaaaaggacggagtggctagaagagtttaccaactttgttcttctattggaagacaaggtan

SEQ ID NO: 273061 - DNA, 214 bp, Glycine max
  unsure (1)..(214): unsure at all n locations
ggaatcggacatccgtgtgagaatntatgaccatttgaatttctcaagagcttccgttgttcaatttcgagcttctcgatatgtgatttgcctgaatcggacatccgcgtgaaaagttataccacgcgaatttctccagagctttcgctggtcagttttgagcggctcgatatgtgatttgcctgaattggacatccgtgtgaaaagttatgac

SEQ ID NO: 273062 - DNA, 336 bp, Glycine max
gacactgatcgaatcaccaacacacgacgtcacaagcgctctacgacgcttgctttgcacgctttcttccttaacttttcttgcactgtggtcgttggctctctttactctcgtgttactctctcttctctacctcctgagatgcttaattgttttttttttttaatcggccaaatgttatttttattacgtgaggatattaaactcgccacatttctcatgttccattttcttttaaccatccaactcactttatatctttatatctcttccggctaggtgtttggttttctttacgatggaaacgcggatttcttgaccctgaccagtaactac

SEQ ID NO: 273063 - DNA, 447 bp, Glycine max
  unsure (1)..(447): unsure at all n locations
gtgatcatcttggattgactatagaactaatctctaattttagactctgacatactgaacttgttnttacctccttcaagaatgcgtttcttaaaaatgaaatttgtgttatcctctaaaaacttaattagtatgtgttgttgattgagtcactttttttaaaaaaaaatactttcggctaaaactacttaaccagttatttttactttcaaattactctccttgttaatttttaaccgttgcattttagggaaaaaaaacttggttatgtttatctatcattcataaagaataatatcacattaattatttatttattaattatatattcttgcttatctcttaatcttaattaatttatatatgtatttatcgtgggataaaaagaaaaaagttaaataataagaaattctataactattttagtgaaatcaaaaaaattaatta

SEQ ID NO: 273064 - DNA, 423 bp, Glycine max
  unsure (1)..(423): unsure at all n locations
agcttgtgcaattagagcaagagcttcaacgagctcttcagcaggtattataagttcaagatttccggntgatattcaaagataatttgattttgttatctaaatgggtttctatttcaatgcacggtatatttattgcgactccaggggatcaaggtcatttggctgttggaaatggtacttaacttttctagagcattatttcctttagtagcaagaaacatgatgcatatataactaaacagttgtttgttaactagacaaatatacgaacctaacttcaatccaaatgcaaaaatcatagaaataatgtatctgtaacttcaatgggaattcatgtgaacttggtgaaattcatacatgaaaccttgtgacagcttcaaatatcaaccgccttgtgttaattgttatttcaaacggttg

SEQ ID NO: 273065 - DNA, 441 bp, Glycine max
cagaatggcgatgagcatgccatcacgcgctggaatagtgtagtgcaaaaatggtgtttaatgagtcatagagtggagtgtgagagagcattggagctccaatgaggtctttgtcaccaccattgtgtagatcgatggacgacaatgccgaacggtggtgaccgtcgaaaaagggaaaaaggtcgtcggaaagcaaaagcagctcgccgaaataagtacaacgacggtaaaggtccattggggatagtaggtccccgattggggacgattttcattattccctcaatctcaatcgagctctgataccatataaattaagagaaacagaggaaatttgagtgaaaaacatgtgttagagtacataaaattagaaattaagtttctcttaattcagatcctatcaaatcaatttataataaatgtcatatttattcctgattc

SEQ ID NO: 273066 - DNA, 321 bp, Glycine max
  unsure (1)..(321): unsure at all n locations
agcttatgcatggaaaatgtaattatgaaattgagatgcccgaagaaacaccatttcctagttaaccatgcattaggtaccatgttcaattattttgtttntaagtgaaacgggtttatgatcccaacatggttggctcgtggtgcctaacacatgaaactaagaatgtagtgtgaagtttcacgcttcnccctctcttggttttgttttgtgaggaaaacccaggatgagcacacatgaaaacacatggtatgccaatttgcagatcanaaagtttggtgaacgcatatgcatgatgatgccatgactcatgcaaaatgt

SEQ ID NO: 273067 - DNA, 397 bp, Glycine max
tcttatccaaggctcatcttggtggtgatagctccttctttcatggctgattccttaatggatggcgcctcctctcacctcttttcctttgtcttctgttgcatctccatggtggaaaatcaccattaaaggaccccattgaagctcaaagatccagcctccatagaagccccacaagcaagcttccatcataaggtctaacaatgttaggggattgaacccatagacaacctcaaaagtggattgcttggtggttctatgaaccccccctgtgtaggcgaattctacatgaggaagatactcatcccaagacttatggttgcctttcaaaagagcccttaaaagggcggattaagacctattcactacctctatttgcccatcaaattgtggatga

SEQ ID NO: 273068 - DNA, 287 bp, Glycine max
  unsure (1)..(287): unsure at all n locations
gcaagcttgtcaacctgaaatctttttctttattacataataacctaagattaggagtaccaatgagatatctaaattttttcttaaaatcagctaagtgtaaacaagtgccaaagctagaggtttgttgagtcttttttttatagttttttttactctactctagagtcattctaagtttctctttgagtcctagcttgtttctatgtccttttcattgctttaattgttgagtaatccttgaaaaattgtcttgttaaaactccattggtttagctntcatttca

SEQ ID NO: 273069 - DNA, 275 bp, Glycine max
  unsure (1)..(275): unsure at all n locations
taggttctaggagagcattcatccatagaataaccttcacctttctattgattccttccccatacttgcccttgtttatttacgcacttagcttttatacctgaaattttagcatacacacttattaactttatttatacttacanttttttaagcacagaaaacataatcagggcgtatatactattttctttacgcatttcaagtcctacccaatgcctcccccatattgtgacaaattaccttgataatacctccccaaattggacaaattt

SEQ ID NO: 273070 - DNA, 421 bp, Glycine max
  unsure (1)..(421): unsure at all n locations
agcttcccatatccgtacttggaaggatctgattattgtctttctaaggcaatatcagtacaattccgatatggctcccgactgcactcaactgcagaatatgttcaagaaagagggtgaaacctttaaagaatacgcgcaacggtggagagatttggcggcacaagtagctcctcccatggttgagagagagatgatcaccatgatggtagacactctgccagtgttctactatgagaagctagtaggttacatgccgtccagctttgtggatctagtattcgccggggaaagaatcgaggtaggattgaaaagaggaaagtttgattacgtttcctccacgagtgcgaatgccaaaagaatcggngcaacaggggcaaaaaggaaggaaggagatgcccatgccatctcttcaacaacc

SEQ ID NO: 273071 - DNA, 443 bp, Glycine max
  unsure (1)..(443): unsure at all n locations
tcttccatggacgcacctcgtgaacaacaggtagctactcactctctcttcttacctttaaacaatgaatcaattaatctcgttccttaatttcgcatgaatgcaactccatatttgcctccgcaatcaattattcaagtgattatgattttgatcatcactcgccggctctgattatggaaggttgttgttaattatcattgttcaggtatcgttgagaggagcaagtgcgaaggagataacgagagacgcgcttcttcagaaggtctcctgggaaagagaatttcgcaattacgcaaaaaaagctgcttctcctgcgctctttattcaggttctttgtctttgcttccgatttctctgattntaaaaaattaccataccgcatgggtgtcaaaataggataacatttacaaattacattacatgacaaagttataacatat

SEQ ID NO: 273072 - DNA, 388 bp, Glycine max
atatccaaacttttaagtctattgtttctattgtgtatagtacacttgcccttgtatgagtctaacatattttacgcatcaataggtttggtcgtagtggtcattgtaataccctaaaaattacaacttagagatcattgcttgtgtaattctaattttgatttaattgggatttattttttatagataagacaatatgtgttttgtttaattaactatcattagtgattaataaggtaattaagaaaaatagtagaaagttattaatataagtattacttcaaaaatagcacagtaaagatattgaaaatcttggagagaagttcataattaaacaaaaacaaagtcaagatagactcacttggtcaactagtccaacggaatgaat

SEQ ID NO: 273073 - DNA, 460 bp, Glycine max
  unsure (1)..(460): unsure at all n locations
gcttccattgttgagttnttgcttcccttttcacgctttatttcactccccacaagtaagtgcactttcccctggttatttggctctcccttgatgtgttttagtgctttagttgctcttttttgcgaaattcgtgaagcaattcacatgtgaatccatgcttgttttcgctaaattaaggggttgtaagggatggccttangcctatgttgcattatggagtaatggggcattccacattgcccccattctcttgctattcatgccaaaacatgcgcccaccaagtgctcggtgaaatgcctcaatgacatatgggcatggttntgtaagcttgggattgtgggactgttttatatgtatagggacaacatgaaggatttaaaatgagtgcctgaatgtgattctaggcctangaacccaagcttttaatttcaatacaaggaaacatgacttacacct

SEQ ID NO: 273074 - DNA, 426 bp, Glycine max
  unsure (1)..(426): unsure at all n locations
gtgcaacttaagcatggaaagaagatagtctacactaggcatcaaatatttctcaaagaatatcacccatatcgattgtaaaaagctcttaatggaagtccaaagtctggattttccctgatacccttatcgagaaatgaactttatgagcaggtgaaggacatacatactatctttggaaagacccaaaataaagatgcaaataagacaaacatatgaaagaagatgtcgatattttcaatcttccatactantctgtcctagatgttagacattgtattgatgtgatgcatgtggagaaaattttttgcgatagtttaatcaacacacttcttaacattaaaggcaagacaaaggataacttgaatgctcgtcaagaattcggtgacatgggtagtgagacatttaagatacttatttggagac

SEQ ID NO: 273075 - DNA, 420 bp, Glycine max
tcaagcaccccataacatgaggggatcgcttgaactacagtttttatcaaaatctcccttccagcttgtaataaaaacctccttttccatactttaattagcttcttacagaccttttctcgaacagattggaaaacttgagttttggacctaccaatagtaataggaagtccctggtatgccatggaactctccattccttaactccaagcggctgttgtagttcatgttgacctgtactaggcacgtttcggctacaagaaagctcctatttgttgaggttgacatgttgtctagaagctagttcatattccctgaggatagaagaaagatggtaagcttcttccagattgcaccttgtattattaagaattatattatttttatacacacaaggtacagagcatatcagaatctaca

SEQ ID NO: 273076 - DNA, 462 bp, Glycine max
  unsure (1)..(462): unsure at all n locations
tattcttattaatgatatgagtcgaactcatttgctatattcaatttctaattataattattatccatactttatttatttatttattctataaaaaacatttaatgtgaatttaattaattaaaacacatcacttaataaatcattaaaatttataccttaattatatttttgtattaaattaaataatataataatgaaggaaaaatcactcgagaaaaacataatttgtagaaatgaaccactcctctcacattaaagttctaccaacacatgtatggggcgtgtacagatattgtttttatcacgcgtatgagaatggttctatactaccctattgagatcctatccattgntatccatattgatgatccatctttgtgttcaagagctactcatattttctatactagtaatacgtataacttttatttgtaatanaatactcatacaatgtaaaac

SEQ ID NO: 273077 - DNA, 462 bp, Glycine max
cttgatgacctgaaactcactcaaagaggatctcatacagcttgaagtaagataaccggcccccaagcaaaatatgagcaaacataaggatcattgcttgctactatgagacaaaaatattatgaaagcaggcttgattgtggcaacttaagatcgcccaaaccacaaagataaaactagcaagaacaacatctttagcttgcgggcgaacaactaatttgccaacaaccaagataagatccataggagaagcaagattaaaaccatgaccagttaagttatagatgataaccaagaccaaatctaatctccaacccaacttcttctaaaagagagcatactttgtgcaaagcaagaatggccaaaattctttgtaacatttcgtagaaatggaaagacattaaaaaaatatatagaaaattctggttgtatactttgtaggagggttatccatctttagtc

SEQ ID NO: 273078 - DNA, 353 bp, Glycine max
tgagcatcaccaaactaatctttgttcccttcatgtagtcttagggcatactccccccccccccccccaactaattacaaacttctccaaccagaacctgtgctttctccaacattaggtccagccctacctcactcccgtgtgaggatatttcttcaaaggactctacatagctccctatgttacaatcgcatataagagagtggtaacacaactcttctacaatcataaccacataatctaccccattaatggacgcggttatagtgtggctgattgtacgaggccatgatgttttgattaaaactcgtgccctatccaacctttggagatcttctacgtaactaaccatt

SEQ ID NO: 273079 - DNA, 444 bp, Glycine max
  unsure (1)..(444): unsure at all n locations
gctcgccaccacggagttgtccaactatgctcttgtgtggtggaacaagctacaaaatgagagagcaagaaatgaagagccaatggttgatacatggacagagatgaaaaagatcatgaggaagcgatatgtgccggctagttactcaagggacttgaaattcaagctccaaaaactaacccaaggcaacaagggggttgaggagtatttcaaggaaatggatgtggtcatgattcaagcaaagattgaagaagatgaggaggtaactatggctcgatttcttaatggtttgactaatgatatccgtgatattgttgagctacaggagtttattgaaatggatgatttgcttcacaaagcaatccaaggagagcaacaattaaaaaggaaaggagtggctaagaggagttntaccaactttggttcttctaattggaaagacaa

SEQ ID NO: 273080 - DNA, 187 bp, Glycine max
  unsure (1)..(187): unsure at all n locations
tcattctgcattgatgaatacgaaaattggtgcatatgaacaggatgagaatgagggagaaacctttgctatgactgtcattcctacacggtcgaaattcctgtcagcccaacaatgtcattactcanccaataacagatcctctcacccaataatccacaaaggccatccccaatcatacacaaag

SEQ ID NO: 273081 - DNA, 241 bp, Glycine max
  unsure (1)..(241): unsure at all n locations
cgaagcttaaggaaaagnttgaagaagttntggcttttacatgcctaactcctttgagtggcatttgtattggttgttaacttcattgtgttggacaagtggcctcataaatcttaagaacgggggggggggttgaacctaccttatcctcctcagaacttcctcgcttcttcataaacctatgcattccttaacacaaactctcttgtgtaattaacgttgaactgttcttaggacacat

SEQ ID NO: 273082 - DNA, 259 bp, Glycine max
  unsure (1)..(259): unsure at all n locations
gaaccatgtaaatctgtttgtgcgctatttctcttttttttcatctctttcattttgctgcaacactggcgtatgacatttctgctctgctgcatctactactgctgatcttgcttgttattatcacttccataacaatactcttctgcatgggtcctcactgaccttgcaccttcaaaaatctctatgtgttgtgtgtacgtggtgttaccgtgttctatctcttacacattantcatgtcgaagtgtatatattcat

SEQ ID NO: 273083 - DNA, 428 bp, Glycine max
  unsure (1)..(428): unsure at all n locations
ngtaggattatggggtgcccgtcacatgtggtactaggtggcgatcggtcgatggtgcaagttgactctccacatccacaaatcacacataaatccaccatccccagttgcccaccttcaactgagctcacgtactcccacgtagcccttatcctcattcctctcagcaccgggtccccatcaacccctccaagcttcctcaatatccaagcaattcaatatccaaacatcatgaactaccctaaaccaagaaaacagggtagaggcagaaaactctgcccaaaaacacattccaataccacagctttccttactcanataccccagtaacattctctgtgttccgattcgttaaccgttggaccgacttgaaaattatactggaggtccctagtatataactctacattttgaccgttagatctgct

SEQ ID NO: 273084 - DNA, 325 bp, Glycine max
gcgacactataaaactcagctttgcgtcgacgctatgtagtcttctcaggacttttctgaactcggaagaatatgattctaaattcatagatacatgccaagattattaatcaccctaatctgtcactgacaatttatggtcacaccctcaccgttgttggttcaagacgatatttcctaatcaatctgtgctactgactatccgtcttcgatgcaagatcacattcttgatgatgttttgtctaacatacacatatgctagtactcgtgataataaccacacacaacatcgcaatcaagcattcaattcaaactgacatcctac

SEQ ID NO: 273085 - DNA, 425 bp, Glycine max
  unsure (1)..(425): unsure at all n locations
agcttnccaagttttaagttattcctcacaactgttttaagcaaagtttccaaagtcctattaacaacttccgtttgcccatcggtttgtgggtgacaagtggttgaaaataacaatttagtgcccaacttgctccacaaagtcctccaaaaatgcaaatcatcaagcctaggtataggatgcctatatttaatggtgatgttattaagggctctacaatcagaacacatgcgccatgtcccatcctttttanggaccaaaatcactgggacagcacaaggactcgtactatctcttacccaaccttngctaatgagttcatccacttgtctttgaatctctttggnttctcgtgaattacttctataggctggcctattggcaaagacgctccggaatgagatcaattgatgctcaattccctc

SEQ ID NO: 273086 - DNA, 391 bp, Glycine max
  unsure (1)..(391): unsure at all n locations
agagatgaggaagtgttgaagggtgaaacttcctgctgttattgttgaccacagagtggtacctggagatatgtcgcaggggtcacgagaccttggggacgtcaggtggggtgctattgcccaaaaccaagcttgaccaatcccgacccaacccgggcatagtcggtcagtgagaacctgngatgtacctaagcaggcgagctcctggcagtcaacagataaaaggaaaacaagaccacaaagcaaggaggcttgtggtggctggccagctgtgaattttgtgtaatatgtggattgtggcctctggtaatcaattactaacggtgggtaatcgattacaacgcttaaagatgaagacaggaggctaagatggtctctggtacatcgatac

SEQ ID NO: 273087 - DNA, 316 bp, Glycine max
tacggacctataaaactcagcttgctgactatttgttagatctattcattatttggtgttttacttctcatctataacaaacaagagcctcgtgacatgacattaccctgttgctgtgcagatcatactatctctctcaaggggtgatgagtgtatcgcttatctctacagactacacaatgtggcctatagcactctatattccgatagcgcccatacgccattgactacattatggactcaactgagatcaattctccattaatacttttgtatcgtgtgatagtcaatgttatctgtattcattaaaaaagct

SEQ ID NO: 273088 - DNA, 432 bp, Glycine max
  unsure (1)..(432): unsure at all n locations
agctntcaatgttgagggtttgttcacctactctcacagttcctttntccaaaatttgtaattactcgttttatgcggaagtggtttaaccggcaagtgcaccgggtcgtcaagtatttaattaaaatggaatgatccgagtatcgaacacatggaacttgtttatttagccacgttttgttcaataatcatgcactttgtaaacagaaattaataaatgtgaattgaagtaaaagtgtaatatatcctaattagaaaaatagtaaacatgagcaaataagtgttaaaacagttatctaaaagcgttgggtcttcctactgaacaagttgatgcaattaaatatgtttctctaattaagaatgtttctgtgttctatgctgaacgctccagtactaaacaccgatgtctcatgaagttagcctaattctaat

SEQ ID NO: 273089 - DNA, 221 bp, Glycine max
tataatttatgtttctttaagaaactttcaattaattgtaattataaagtgatattcttgtataggcacaaataattaaaaatatatacttgtaaaataaagaacaaatatgaagcaaaataaataataggacatgataatatgtaattaaaaaagacattattctcaactagtattttaggtcgtgcatgccatgtaataaatgtttattttatacaaat

SEQ ID NO: 273090 - DNA, 414 bp, Glycine max
  unsure (1)..(414): unsure at all n locations
agcttggaaggatgcttcaatgtatgaaaagaagttggagagaaagagagaggggggagcacgaaattgaaggaataaaggagggagagaagtggaactttgaaagatgtctcacaagactctcattcatcaaagttacaacaagtgttacacatgcttctatttatagactaggtagcttccttgagaagctttcttgagaaaacttccttgagaagcttctttgagaaaacttccttgagaagctagagcttagctacacacacccctctcataactaagctcacctccttgagaagcttccttaagaagattcgtaaagaagctagagcttagctacacatacctctctaatagctaagctcaccttcttgagatgagaagctagagcttagctacacacnccctataata

SEQ ID NO: 273091 - DNA, 363 bp, Glycine max
  unsure (1)..(363): unsure at all n locations
ntagtgacggggtgcaactacaaatgttacattgagtgttctcattgatatgttctacatttgattgttcatgaatttctaattgtcataacataagattcatggatatgatttaggcattatttctttttgtacattttaagccattggccaaaaagctatgccaatgtatattattttaccatttaaaagccctttgagccaaacactagatattttgttggaacactaacctacgataaaagtgtccaaccataccttatgttaagagagtgaaagtgttttgttggggattgctatcatttggtggataatgtgatgcaaatactctgtttctaaatgtgggtattaaggtgaattaaa

SEQ ID NO: 273092 - DNA, 459 bp, Glycine max
  unsure (1)..(459): unsure at all n locations
gatcttagagtgcctcatgctgtcactgtgatgatattgctactcatttctgcgttttattgcangggtccagctgtagctcttaacattcctcacattagtcttattgaagtgggatgatatattatgtgtagctcttggtgaaaattacaacttgatcctagttgcataggttctatacttcttgtttctttaggtagttaattgtagccccactcatggaaagttacaactcgatcctagtgtcttttacgctacgtgtctatctttgctttcgcatctctcccaatgtagttacatagttgcaataaggtattacaattatatttangcatcagaatattctccttacttccgcgtacacctggtttatttcgttttcgtcttttgtgcgtatagtgcatgtttagcgcacacgcaaatctgtttgaaaatatgctagcactaatactacctacc

SEQ ID NO: 273093 - DNA, 425 bp, Glycine max
  unsure (1)..(425): unsure at all n locations
caactcttattgcaccacatgaccttngcaactcccatcacagaatcacatccacaccccaccagatacccctacccccaaagtctgcttctacgagtattcagtaattatttgattacacgtgtgcagaactctttgttgccaaactttattatttggaacatttttaggaacatcacatatgattgaacatgcagaaagagaatttttaagattctagagtttagtcatgttgaaatgaaattgaatattgagattttaaacacatccaaaaatgtggaattttttctttataatactaatggtctagtgttaaattatcttttattattatattttttatattaaaagtaggactatcataattttagtaatataaaaaattgatactggtgtaatggttcaaatttataacatatacttac

SEQ ID NO: 273094 - DNA, 394 bp, Glycine max
  unsure (1)..(394): unsure at all n locations
gcttcatgagaaacttaaactctcgtttgacattttatcaaacaattgttntgttcccttgacccttctggagcagtgttacatggtttattaatatctctaacagaaaagaacagacagaataaaatcaaatgattggaataaatttttgtgtattcagcanatcaatgattacaacttatatatgaaagaatacaaggaatgacctanaaggataagatggaataactaanagagagagggagagcatattcctgtactatttacagctcattggttctagaatgtatatcctgtacaattgataaaacagaaaatagaattatgattagctactgcattatgttgtggttagctaagaatcatgatcttcttctgttagccccacacaagc

SEQ ID NO: 273095 - DNA, 445 bp, Glycine max
  unsure (1)..(445): unsure at all n locations
aaattcgtctgaacttatgagggatcgaggtttagtactttaggctacaacatagaaaacaagaacatgattaattacaaaaatatcctcatatgcatcaacttgtttgttagaaagacctaacgctttttacctattgctgtcaacttatacttacttgcatttactgtttttaccatagaagtagtttatttttgttttttttactatcgattattaatgatgttccaacaatgccttacttctaaataaaactctgtctaataagcaagttccctgagttcgatactcggatcactccattttaattntaaatacttgacgacccgatgcactttctggtgtttcatttcccttgaatatatttgttgaaaattggagaaaaagaaccatatgggaaaatgaacaatgtatttatggcgctgttgatggcgaactgaattca

SEQ ID NO: 273096 - DNA, 409 bp, Glycine max
  unsure (1)..(409): unsure at all n locations
agcttcaccatgtcttgggcaactctaagaggctctctaatcaatttgaaggatgaaccactgggcttgtccacttcagttttttgtgaaagaaaaggttctaatgacagtggatttttgttccatcaccatattatcttatttttggtaggaaatagctgttgaaaatgataagaatcttgttgaaatcctagaaaacttgaatccaatagatgttgttaaatacatgaatttttcagtgcccccaagctggtgctatagctacattttcangcacaacacatgacaacttntgtggaaaatcaatcttagagttaagatatgaagcttatgttatgatggcaatatgttgtatcaaatcaatctgcacatctgctagcctatcttggaaaaattgatgccacaaata

SEQ ID NO: 273097 - DNA, 419 bp, Glycine max
  unsure (1)..(419): unsure at all n locations
tgccaagtgtttntatggttcatttcanatattggagcatattggcaaagtggcttacaaactccaattaccggaagggtctcgaattcattctgtttttcacagctccgttctcaaaccattccacaaattgtctgaagattcgatttcccctgtggcattacttgaaacagaagttgacaaccaacctgtgatcacacctcttgctattattaatactcgttgagatcactctactgctgaaccccgcttgatggtactggttcaatggacaggcctgtcccctgatgatacctcatgggaagattgggctagtttgaaagctgattatcaccttgaggacaaggtgtttttagatggcataggggatgataggaaaggaaccatggcctaacatgatattactgtggatgttaatg

SEQ ID NO: 273098 - DNA, 441 bp, Glycine max
atctctaagcgcgaagtagaaggaattctagaatctgctatcgggcttgcagctcccctggtccttatactaagtcactgaggtacttgggcctgtgtgtgttgcgttttggtctgttattgcctctgctatttgtagtcatgatttcctcttggttggaattattgtctgatgctgttatctgtgtgatatctggtactgctgttagtgtgttgctatcatctgcatggttttttttttatcggcaaaaatatataaatatttcattatgtaaatagtgatgaagtaccagatgtactttgtacatagataggatcccatagatatggctccttagaaaaaactaatacaatttaattaggaaccatattatggctgatacatctgctaaagccccaataaaaatctaccctcttgtgatacaaaaagcctttgtcgtgt

SEQ ID NO: 273099 - DNA, 448 bp, Glycine max
tgtagtcattaaaagagaaagaacatgtgattagaattattaatgaaaatgctagtcagtttgtcagattgattgtgaagaaatgcattaattgtaacccggtgagagtgtgatccttatttttgagagaaaacggctatcattaagtactgacttttgcatgaatctcttaattatggactgaatgcatgaatttgaggatgatgaaggccatgttttgattgtgatagccacttagccaaaaagctgaccatgtgcatgaatgatttatcccttgcacccagttttgagctgaatgaatgtttgattgattgaaccttgagcctatacagttttatctcctgctactttgtcttaggttgtaggagagcatcatccacagaaaagcttagttcaaggcagatttgtcccaaatttgggggagttatatgtcaaaataaaattgtcc

SEQ ID NO: 273100 - DNA, 189 bp, Glycine max
agcttctatccaaatggacttaccttgaattaatttctttgatagcccctttgagcctatgttcccctttctttgttttgaagctcattacaagccttaagtgaaaaaccatgatatcaccttacccttaaggaattttggagctttggaattgttttgggaataagttgggaataagtgtgggggggg

SEQ ID NO: 273101 - DNA, 439 bp, Glycine max
  unsure (1)..(439): unsure at all n locations
ttagaagcaccttttaggctagagctgtaggacatctttgcacctctagcttgtgaggggtattaaaatatcaacaagagcagcatatacctcagctcaaggaccacacatgatcagatacttgtcctattagaaggatcatgtaattctagaatcttctttctagattattccattattattttgttgtcattagctgtgtattgtccttgcacatgttttctgtttttacctttttatcctatgactagattccttcttattctaccgttatagggaaaaacaagtctatataaaactctcttgtattcacatatttaatcaatgagttaagaagtatttctaatattttatgcttatcggtntatcctncctcaatattcaaaatgtttgaaagacttaattaaatatttagatggagatcattgtttttgctttg

SEQ ID NO: 273102 - DNA, 161 bp, Glycine max
  unsure (1)..(161): unsure at all n locations
atcccttacacttgtttgttataaagacctaacgcttttgacatgttgatgncaccttatacttacctgcatttattgttgtgactatagaagctccttattctcgatcgctttactatcgattattaatgatgttccaacaatggcttacttctataata

SEQ ID NO: 273103 - DNA, 345 bp, Glycine max
ctatataatatattgtgaagataaataataaaacaagcatattttgaataggttcaaataaaacatacaatactaaaaatgaataatatactaaattacataaaacatgatccccttctttgaactgaaagagctttcttggcttgtcataataacttttatgtctgtcttgtgacattttgatctatccactaatcatcttaatcttatttgaagctttgttggctatctttggacctaagatcaaagggtttctagtaccataccatcataatgaggttcttcatcttcttccatatatacaaagccttgtatggagtcatttctattctagaatgaaaatta

SEQ ID NO: 273104 - DNA, 387 bp, Glycine max
  unsure (1)..(387): unsure at all n locations
ngggaggattgatggngacccggtgtttagagaaacgaggatatgggctacgtgggagtacgtgagctcagttggaggtgggcaacaggggatggtgggtttatgcgcgctttgtggatgtggaaaacttgttgtgcaccatcgcccgaccgccacctaataccacatgtgatgggtaccccataatcctacaagcttgagatgaggaagtgtagaagggtgaacttcctgcttttattcgttgaccacagagtggtatctggagatatgtcgcgggggtcacgagaccttgggaacgtcatgtggcgtgctattgtcctaaaccaagcttgaccaattccgacccaacccgggcatagtctgtcagagagaacctgtgatgtacct

SEQ ID NO: 273105 - DNA, 369 bp, Glycine max
  unsure (1)..(369): unsure at all n locations
agctttccgctcggatgtccgattcangtgtatcttatattgagacactcgaaattgatcaatggaagctctcgagatattcaaatggtcataactcttaacaacgtggtctgattcaggcgcataaaataacaagacgtttgtaattgaacaacggaagctcgagagaaactcaaatggtcataacttttcacaccgaggtccgactcaggcgcgtcatatatcgtgatgttacgtattgaacaccggaagctctcgagaaattcaaatggtcataacttttcactcggatgtccaattcacgcacatcacatatctatacgttcgcaatggaacaaccgaagctcttgagaaattcaaatggtcata

SEQ ID NO: 273106 - DNA, 358 bp, Glycine max
tccgttggttcaatttgagagtctcgatatgtgatgcgcctgaatcggacatccgagtgaaaagttatgactatttgaatctcccgagagcttccgttgtccaatttctattgtctcgatatattatgcgcgctgaatcggacctcagtgtgaaaagttatgaccatttgaatatcacgagagctttcattgttcaatttcgagcgtctcgatatgtgatgctcctaaatcggacattcgagtgcaaagttatgacccatttgacttcttgagcgcttgcgttattctatgttgagcagcttgatatatgaagcacctgaatccggcatccgactgaaaagttatgaccatttgaatt

SEQ ID NO: 273107 - DNA, 192 bp, Glycine max
  unsure (1)..(192): unsure at all n locations
agcttactaaggcatccgttatanctattactgacgtatataaaactttctacctataatgggaagcccccagagcggcatgtggatatgtattggtgctcacgagacaccctaacgcttagtggagtgatatacttcataacgccaccctaaactaccccacctatgatgaagatctttatgccttaataa

SEQ ID NO: 273108 - DNA, 406 bp, Glycine max
  unsure (1)..(406): unsure at all n locations
tgcaatatgggataatgttttgtatgtncttgataagtacatncaagaataggggaaanaagtaaggagttaaagntgaggcttgatgtaattnaatnanaattggaaagttnttatattaaatgaaggagttntnanattagtagtnancccatcatacatgtcttgtatagcttggatataagccatgtgtacgtcttttttcttcaaagtcttccacaacgtatctcttgggacacgatcataagctttttccaagtcaagagaaaccatgcgttatgatataagtagaagggaaagtcaattagcatacgtagactattaataagttagttactacagttaggatattgattagttggttaagtggttagctagttagatggagggggttgtagatataaat

SEQ ID NO: 273109 - DNA, 421 bp, Glycine max
  unsure (1)..(421): unsure at all n locations
tcttttggaccttgaacaggcaactaactcctctntcaaaaccatgctatgtgctcgcgactggtccctctcttcccttcgcaacttgagttcactattgctaccccacagagctccgcgaagattattccggccatactcttccttgcgagccctcttggtctcttgttcaagggcccttgtggtagttgcattctcttcccgtaacccggcacactccttccgaatgtgtgtagcggccaacttgaacttctccttggcaagtttcgcctttcctaactcgctcttgagagtttggacttcttcgtcctcttccggtgcctcaaaactatcttcgctgacgactnntattttggcgagccaatctaaacctcgtatatgaaactttagccattcatggtagccaccaatgatgccatta

SEQ ID NO: 273110 - DNA, 417 bp, Glycine max
  unsure (1)..(417): unsure at all n locations
agcttgactttgcgagtngattttatccttagctttactttagttattagtcaattcaattaagaaagagaaatcccaaagataaacgtccgattgatttttggtttattttactaaaagatattttttttattattatatttttattttacctctttttggtttccaacgtggttacggcatgaccgaacggtcggatttcattttaacagaaattaacagatattacaattccaatgatcggtggaaatttattttattttttgattaggcgagaaaatgacttaagtaaatgactaaagcacgtcaaacggcggtacggaaaataaatgaaacgaaaataaaagtacgcgaaacaaatggggaccaccaagggaacatagaatgaattgaacagttcgatttcgggaacttacc

SEQ ID NO: 273111 - DNA, 438 bp, Glycine max
  unsure (1)..(438): unsure at all n locations
tcaccaccaagagagtgttttggataagaagcttagagaggaagcttcaatggaggaagagaatgagagagagagaaagaaagtggcgtgggaatgaaggaaagagagggagagaagtttaactttgaagtgtgtctcacaggactctaactcatcaaagttatcacaagtattacacatgcttctatttatagcctaagcagcttccttgagaagctagtgttacacccttccaatagctaagctcaccctcatgccaaaatacatcaaggaagaaagcttgcatgagaggcttccttggtgaggaagtgttacacccctccaatagcaaagctcaccccatgggaacacacnacccctccatagctaagctcaccgccccccaaaatacaaaanaaaagaccctactacacagactactcaaaatgcccttgaata

SEQ ID NO: 273112 - DNA, 388 bp, Glycine max
tgtcttgtgcagaattagggtagagaatagcctgacacatatttttccaacattccagagcacaccatagtgccaattttgggaaaagggctctagaggcagcaagaggagcaatttttgtagagatacctacgttttgtaatctcattattgttagggtttcttctataatggttggttaaacactcttgttggggatttctaaagaacaactgatgtaattattttaatatctaattgattgtgtttcttgtgttcaatgcttctttcagtgcttaaattatgtatgctcttggtctgatcacccatttgtgtgcatagttaggtgactttagcattgtgaaatgtattgttgccttagaacttgaatgaagcagaattgaaactt

SEQ ID NO: 273113 - DNA, 357 bp, Glycine max
gattcaaaggtgacaatatcatcattgtactcgcattctggtataatgatggagactattctaacaacactgtggttattactttacattgtaagaaagcatggaagcctaataatcacttacaataaagtcttaagatgatacttcacatcgactatacttttagtctttagtctcaagatgatacccaataaccacttccaacagcatatgataacgtttaggatttcttcttttatttgtcggtaatgtcatagaactatgtacttattcttggatatatatcattgatggtgcttgccccatcgtattattggcaagaatcaatggttattcatcttctttatatgaatggac

SEQ ID NO: 273114 - DNA, 432 bp, Glycine max
agagtatcatagtgggtattgttattatttaacagtcaaaacaagtgacttctcgtaatgcgattctagctgaaaaaaaatattacttgggaaacctattagtggatgaacatggattcatttagttacttagggggtgattttagaatgaaaagcaataattttccttgatgaagtcgaaatgcgattttacctgaaaaaaaggattacctgatcgagaaacctattattagttgatgaacatgaattcatttggttacttacgagatgattttagaataaaaagatgacaattttccttgatgtgaccatttggaatgtaagatgtctcaaccattggctagcttattgcagaacattaagtatttaaccaagtatattgatgatcaacaattgcacacgtgacctctacattatgaaaacataatcaaa

SEQ ID NO: 273115 - DNA, 451 bp, Glycine max
  unsure (1)..(451): unsure at all n locations
ngccatnntgacgtaaatcattgttcacaatttattcctgatcaaaagttcataagtcctacattccttttggcaaatggaagtataaatatttcccactctacacatcttgtacattattcaaattctcatcactaactccacataaaaacaaatttatcactacataacagcaaattatctccaagttccattcttcaatgaatcattttgcaagatctttacctgattcctcatcaactttcttctgcattttcctctccttgcaatcagaaaagtaaatcatgcacgacagccatttcagggtatttaacacagcgaggagcccaatntgtacaaatatcccataccctcctttatagcatccaagggagacacatgacaaccttaaacaaagtcccaaagcaaagaatacaagcatcacaagtagtcctctcttctgattacctct

SEQ ID NO: 273116 - DNA, 365 bp, Glycine max
  unsure (1)..(365): unsure at all n locations
agctngagatgaggaagtgttgaacggtgaaactttctgctcttattgttgaccacagagcggtatctgtagatatgtcgcgcgggtcaagagaccttgtggacgtcaggtggggtgctattgcccaaaaccaagcttgaccaatcccgacccaacccgggcatagtcggtcagtgagaacctgtgatgtacctaagcaggcgagctcctggcagtcatccgataaaaggaaaacacgaccaccancaacgacgcttgtggtggctggccacctgccaattttgtgtaatatgtggattgcggcctctggtaatcgattaccaaacgtgagtaatcgaatacaatgcttaaaattgaggacagga

SEQ ID NO: 273117 - DNA, 407 bp, Glycine max
  unsure (1)..(407): unsure at all n locations
attggtcttcgccagtgaaaggatcgatgtgggtccgaaaagaggcaaatttgatcatcctactaggacgactgagaaaactggggcaaatgaagagggtgagaaagagggagaaacccatgctgtgactgtcattcctatacggccaagtttcccaccaaacccaacaatgtcattactcagtcaataacaaacctcttccttacccaccacctagttatccacaaaggccatccctaaatcaaccacaaagcctgtctatcgcacttccaatgacgaagaccacctttagcacaaaccaaaaaacaccaacaaaaaggaattntgcagcaaaaagcctgtagggttcaccccaaattccgttgtcatatgctaaacttgatcccatgtccactcaataaatcaat

SEQ ID NO: 273118 - DNA, 395 bp, Glycine max
ctcttgccaacaagtttctcaaagttacaaccacgactacacctacaatgaaatctatagttccttacttcacgaattctctgcaccacaagttatagattcatcatcctataacacccttgatagtactccacataatacccctccttttcttgctcaagaagattatccattgtccatgatggaagaagaagatccgggttttctcggggaagagcttcaatgcttggaccttcaaaccacatgcaaaatggagtcaagccattcccctgaaatgcctattttcaacacaacttcatcatgtgtggagagaaagaatagagcaaagaagcttcaggggcagccttcaaagaacctaatggcagagaggagaagaagaaagagattaaatgaca

SEQ ID NO: 273119 - DNA, 443 bp, Glycine max
tgtagccattataagagaatgagcatgttattcgaatcattactgaaaatgttagtcaggctgtcagattgattgtgaatgaatgcattaaccgtatgccagagagagggtgatccttaaattttgagagaaatgactatcatttagtactgatttatgcgtgaatctttgacatatggactgaatgcatgaaattgacgatgatgaacgccatgtttgattgtgatagccacttatcccaaaagctgaccacgtgcttgaatgatttaccctttgcacctattttgagctaaatgaattattgattgattgaaccctgagcctatacagtagtatcttcttgctaccttgacttacgctctaggagagcatcaatcacagaaagcgtggttcatagcaaatttgtcccaaatttggaggaggcactacgtaagaattgaaat

SEQ ID NO: 273120 - DNA, 443 bp, Glycine max
  unsure (1)..(443): unsure at all n locations
tattcacagatgtgtgttttctgaaattcagttaggatgctattactactaattcccagcttgctacaatgattcaagatagattttaaaaggaggttttcccatttcttactacattttcttttctatataccctaggatcaaggattgtcttcatattattcaataaaactcttcatggtagtcaaggatgggagataatataaatttatgggtggacaaatgtttatcagatttcaatgtgaatcttcacaatattccatatcatttacatagcttgtngaaagctaaggtaacatattttatctcacgtaattcttcgtctcttctggcctctatggaagtttggtttccttatatggctttggagattcagaatacaatcatacatgttcatcctcgtaatgataagctagtatggagatcctcaacctcaagtgtat

SEQ ID NO: 273121 - DNA, 194 bp, Glycine max
atattatgggatttattcggacatccgagtaacaagatatcgtcgtctgattctggtcagagcttctgctctgaattttgagcgtgttgatatactatggatcacaatcggacattcgaataaaaagttatcatcgtcttacattgcttaaagcttctgtgatgtgaacctgaggagaagcagatcgtttgata

SEQ ID NO: 273122 - DNA, 394 bp, Glycine max
tttactcggatgtccgattgagtcctgttatatatcgagatgctccaaattgaaaatagtagctcctagcaaattcaaaccataataactttttactcggatgtccgattgtgtcccgtagtatatggtgagtgctcgaaattgaaaacataaggtctgagcaaattcaaacgacattaactttttactcagatgtccgattgagtcccgtaatatatcgagatgctccaaattgaaaatagaagctcctagcacattcaaaacataataactttctactcggatgtccgattgagtcccgtaatatatctagacgctcgatattgaaaatagaagctctgagcaaatccaaacgacattaactttttttctcgatgtacgattgtgtcactta

SEQ ID NO: 273123 - DNA, 590 bp, Glycine max
  unsure (1)..(590): unsure at all n locations
ttctacttgtcgcttacgccctctcgcatactgcatctggtnttgtactctttgatccttannngaccccaaacccccaagccgagattgattncctcggacanncgcgcgagcgccntttgatnccctgtcgttcttcgatctctanaaacacctgtngcatgaaagccatccatgacgaagtgttgaaaggtgaaactttctgcctctactgttgaccacagagaggcacctgcagatatgtcgtggtggttaagagaccttggggacgcaggtggggtgtattgccaaaaccaagcttgatcaatctcgtaccaacccgggcatagtaggtcagtgagaacctgtgatgtacctaagcaggcgagctcctgccagtcaacagataaaaggaaaacaatatcacaaancaacgaagcttgcggtggctggccacctgcgaattttgcgtaacatgtgggttatgggctctggtaatcgactaccaaaggtgggtaatcgattacaacgctctaaaatgaaaactggggctaagatggcctctgtaatccattacccccggatgtatacaatacaagcttgaaacggcg

SEQ ID NO: 273124 - DNA, 438 bp, Glycine max
  unsure (1)..(438): unsure at all n locations
tgngattgtgggactgttttatatatatagggacagcatttaggatntaaaatgagtgcccgaatgcaattctaggcctaggaacccaagcttttaatttcaatgcaaggaagcatgacttatgcctaagaatcaaaatgttggttttgaatgttaaaaggcatgaatattatgacatgtttgagaggtttttattagaatttaaatttggctgccccatgaggaataccttgcacctaggtagcatggaaaatacctttcaacggtatgtatatatgtgaatatatatggcataaaaatacgctgcaaagtgtgtgaatatatggcataaaaataccttgcaaagtgtgaatgtatagcaaataatgcatttcaaaaatctgtatatgtatgataggtagcgttaaaatgcctttcaaaatatgtatattcgtggat

SEQ ID NO: 273125 - DNA, 430 bp, Glycine max
  unsure (1)..(430): unsure at all n locations
agctngactaggtcttcatgttgctccccatatctctaactatccnccatttaaacatgacttgttctcctcctttctttttcatttttcatagaaaatttgatagatttatagatataatatatttgctcttatatctatatcttacataatattttgattaaatataattaaattctaattatatgaatttatactcacaagttaaaacatcacactcacactaacaatttattaaaaaattcaaaaacaacaaattaaaaattatgaaaaacagaaaataattgatattaataattttatccaaatttaattctgaattaacataaacaataaaaatttgacagatttatacatatatatctgctcgtataggtatatcttaaaactaaaacacattacagatcttaatccaaataatcaatacact

SEQ ID NO: 273126 - DNA, 455 bp, Glycine max
  unsure (1)..(455): unsure at all n locations
tgcttgagttgtgtttagctatcatatatatcaactaaaatatgttttgctacatgtatgtgttttattccatagttaattattaattgacttataagaagctataatttagagtatgactttgtgagttgttagtatgtatagaattagagtatttggtagttatctggaatgatgttttgtaattatgtgtgaattggtcatcctcttctggtaagtggtggcagtgtatgttttattttgaaaattaaatatgcatgagatacctccatttgggatgggaaaaagatatatacctccacctgggatgggaatgagataatagatatcttcatctacgatgggaagagattntggatacctccatccatgatagggaagacaatgagatgtcattgcatggatatgagctcatagatccttnntaaaaatccganatccacaccgggttttgg

SEQ ID NO: 273127 - DNA, 419 bp, Glycine max
agcttattaatgcttaggaatttaccaacctttctttcaagtagttctttgggtctttgtatatattcattaatcaacttgttagaatcaaaatgattgaaatcaggtgcgtgtcaggtgcataaaggttgattagagatatgggggaacgaataaacttgttatatttaaagctcgacattgattgatttaagcatcaaataaggactaaggaggaccatttctaaaaaataaagtaaaataaaatcttaatatcagatgttaagctacatactaattatggctaataccaataataacgatttgtgtccctgattatcgatgattcaacttctaattgatttttagatataaaatagaacaattacgtatcaatatcatcataaaaaaaaagaagaaattaagttacatataggact

SEQ ID NO: 273128 - DNA, 430 bp, Glycine max
  unsure (1)..(430): unsure at all n locations
tgcggtgttntaagattgcattggctttctctgcttggatgttggtgaaactgaacgagtccatttatgaagggttaatagagagagaaacaacgtgggttgtctgactcactcgaaagggaaatgtaacttgtctatagcaacagaacatgatggtataaaaaatagtgcagaggtttctacacttggaagcatggatttggagaggaagtttgaaaaacgaaagagagtgagtgaatattatgtgaactctgtttgaacagagtggctctgtttgttgcgttgctaagaagttgtgctattcctcttggtcttgngcccctcttctcttatagacccgaatcaacctatttagaaatacttaaataaaatctctaaatctcatatccattattactttctttatcctgccctgatatgatcaaatatc

SEQ ID NO: 273129 - DNA, 372 bp, Glycine max
  unsure (1)..(372): unsure at all n locations
gagaggctaatgaaatatctagatgacgcgctccatgagaggttgtattatatggagaatagagatcatcatgaagaagactggaggagaagagggaatgatggtgctcctacacaaaaccgaatcgatggtattaaactcaacattcctccatttcaaggaaagaatgatccggacgcctactcggagtgggagatgaaaatccagcatgtttctcatgcacaactatgacgatgaccatacagtgaagcttgctgccccggagttctccgactatgctcttgtgtggtggaacaagctacaaaaggagagagcaatatatgatgagcccatggttgatacactggacagagatgaanaagatcatgagga

SEQ ID NO: 273130 - DNA, 430 bp, Glycine max
ctcaagcttctcgatatgttatgcgtctgaatcggacatgcgagtgatatatcatgaccattttaatttcccgagagcttccgttgttcaatttctagcatctcgatacgctatgtgcctgaatcggacatgcgagtgaaaagatatgaccatttgaatttctcgagagcttgcgtagttaaatttctagcgtctcgatacgctatgcgcctacatcgaacatgcgagtgaaaagttatgaccattttaatttctcgagagattccgttggtcaatgtcgagcgtctcgatatgttatgtgcctgaatcggacatgcgcatgaaaagttatgaccattttaattgctcgagagcatctgctgttcagattgtagcgtctcgatactctatgcgcctgaatctgacatgcgagtgaaaagctattaccatt

SEQ ID NO: 273131 - DNA, 172 bp, Glycine max
tgactaggcgagtcgattatagccttatgttcacctcagttatgagcccattctcttaagaatgagaggatacctagagaaaaatgtacgattcgactctcgctttattttactaagagagggtgcctctctattatattagactttacctgtgtatgaggatcaatgcgaa

SEQ ID NO: 273132 - DNA, 437 bp, Glycine max
tcttatccgaggcaattcttggtggtgaagctccttctttcttggcttattccctagtggatggtgcctcccctctcctcttctcctttgccttccgctgcatctccatggtgaaaaatcaccattgaaggacctcattgaagctcaaagatccatcctccatagaagctccacaagcaagcttccatcaactggtaatcagagcacaagagcttcaagtaggtgctccttaaacctccatgaattttttgctttaccttctcttccattgttgtttcttcattttttctccatgtatctcctcacatgtcttgtgctaaatgttgctaacctgattctctagagtttccaccgattaaacttgctatagaagctagatttgattttctatggttcaaatatcttggtcttgttcttgaaccatgaattgtgttgag

SEQ ID NO: 273133 - DNA, 556 bp, Glycine max
  unsure (1)..(556): unsure at all n locations
cctcctatcacttacgcctttgcctcaatttcactccctcttnnncaccacnnccccccggcggatgantcctgtgtaccgcgacctctaattttctgcactctgtttcctgcacaaaatgatcgtcacacctacattctatttgctgattggcttgtcagtgtctcacttccattccaactttaacctgccanaagacccacactctgtgtcggtacttatgacatatcgacaaaatttaaccacgaactccaaaaataaaccgctcgcgcaacctaccttaaaaataaatggaagaatctatctaccgtcctctgatcgacgctgacacgctccactgtagattagaaggcatatcggttttatagccaaacagaacacgcattcgcgatttccgaacgcatttcttgcgatcatgcttccctgctactgaccagacgagttttgcttcttacaacgatcgtgtgcgatgacgctgtgaatatcccctcccctcctcctatttaagaaacttattgttacgactgcacaatcgatctcgcttgcggaccggccg

SEQ ID NO: 273134 - DNA, 458 bp, Glycine max
  unsure (1)..(458): unsure at all n locations
tacttattcacttggataagatggtcggccattagtacatataaacaatgtttctacacaagatactatataaagactcatccacatataatttactataagtccaagaaaactgcctgcatgacttgtacctaagtatccagagaagctcaaatcaagcatataacctttcagttttcaagaggtttaattgaggacatctatcagtggcaacatagaaagataaaaaaaaaaaaaaattatctcaataaaaagatcataaagcaatactgttttacctcattcagttgttcccagaccagatcaggttgatttatgtaaccttggtccgtggctagaagatagagctcaccctcaaactgtgaataagagaaaataactttagtatgaaggctctgcaagacaaacaacattntttcttgatgacaaaaatgtgctactggctgcacttgatatca

SEQ ID NO: 273135 - DNA, 433 bp, Glycine max
  unsure (1)..(433): unsure at all n locations
ctcacaatgtacgcatctataacccctcaatttaggggactcttcatggttcgagaagcgaaaatgagaatggngtaagattggagcaaactatcacctcaaacaagtctatatcatcaatctaaacttgctcaaactggttttatgcctaaaattccaccgaatcaaaatttggctcctcaacactcaatttttactctagaaatggttcttgccttcactctggtcatttgttttcctctcttgcacagcccaaggcttctcataagtcctaaatgacattataaactaggattaactcactttaacctccattcaccactgaatccagatttggccttccacaccctcaaagcatcacactgnttcactcacaggactacattctcactttctaatcctaagttaactctacccttcatcctagcagttt

SEQ ID NO: 273136 - DNA, 304 bp, Glycine max
tatcccttatattcttaatcactgagaggcttgtcttcttatgaaccacttgtactagactcacccattggctgtcagaaatggggtagatgattccagcttgtaagagcttggtcacttccttttcaccacatctagaatgacagggttgagtcaccgatggggctggctcactgtcttaactgcatcctctaaaagtatcctatgcatgccagtctaatgactgtcatgcccgctttcttcggtaccacctgaactatgcttactcctgacactatcgcagatggggtggataagcccaacc

SEQ ID NO: 273137 - DNA, 441 bp, Glycine max
  unsure (1)..(441): unsure at all n locations
nntaaaaaatgtcaaaacaacaaanattatacatgttacatcaaaagataataataattaaaataacaaaaaaaaaatcatttgcctctacctttgccacccttggcaaccttggtttccctcttcctttgcccctttaggctacacccagcttcgaagccatcttgcaacaattgtagagcttgttgtatggtttaatgatgactcatgccctctggatagctctaaggtcatgcaagctctgcatagaacttgacgccatctaaaatcgatcttgcaagagcaatttcacttagtaactatttttgaagtgaaaatttaggggggaaattaacaaaatcaaatttgatttacctagcaagagtagtctcaacctggtaggacccctaggtggcacgacatcgtcgagaggaatgacatgctactatcctctcattcata

SEQ ID NO: 273138 - DNA, 445 bp, Glycine max
  unsure (1)..(445): unsure at all n locations
cttggtactccaatgtatctccactagatntttttaactctaccagatggaagactggggtgatctcaaaaatctctgcatcgatacccaatggcccttttcttccttccttggaaccttccaacttgaacgaacccccatctttctttttcactttcagacgaagacggcctgcaaatttttccaacttggagatgatgattgaggctggcttgtcggatgtaaaccgctcttctttctttcgatcggtctcctcgaacaaaccagacaagtcaaaacctgaggaataggagatgatgtctaaagcatttaaattattacaaggctctgtagtttttgccggttcaataggatcttcattctcacaagctccaaatactccatcagcatcgagaggagccaggtcttcatcttcattctgagtaatggtaggcttctctaaccc

SEQ ID NO: 273139 - DNA, 446 bp, Glycine max
  unsure (1)..(446): unsure at all n locations
ntntattccatctcgcatntgttccttatgctcaaatgttagctgctggtgtttttcatttgttgagttattattatatttatatatttatccctgtacattttaaaaggttcattnttttaaacaataaaaggactatagcataaacaataaaatagacttattagatagtcttgtttctgttatcacattttccttacgaaagctacttcagagttcagacacagaaaattgaccctcttttactcaattgggaatttatcttcatatgttcattgatactgataaaacactggaaggtgatttcaagtcaaataaatggaatgatatacaaaatgcttcagcanataattgatcaatcatcttggaaatttgtatattttttcttggctttacatacgttncttgtgaacaaatagaaacgggattgttaatgtttaaatatg

SEQ ID NO: 273140 - DNA, 271 bp, Glycine max
tgttatctatggctcatgatgacgctgaatcggctatttatatggataagtccctatcggatggcacagtttctcgacaattaaaccttgaaaagggattgagttacatagtgcacatacctcgttaaaggagaccattgaaccattaatatgcggcatccatacacacactgataatagattacctcacgcatacacggtatccacaaccacattttgaatcctcattatgcatgacacccccttaacatgcattaccatatgatgtact

SEQ ID NO: 273141 - DNA, 349 bp, Glycine max
  unsure (1)..(349): unsure at all n locations
agaaggtgtgtagcccaccatcttttcatagtagaaaattggtaatgtgtctactaccattgctatcatttttttcttcgtcattgaggtgccacttgagctgccaggtctctccacctttgggtgtattctttgaaggattcatgctcctttttgcatcctatctagagccatataagaattatactgacactgcctaaccaaggcaaccattaagtccttccatgaatggactcgagaaggttctgagttagtgtactaggtaacaactaccctagtaagactttcttggaagaaatgtatcagcaattcctcatctgttgcgtatgcccncatcttttgacaatac

SEQ ID NO: 273142 - DNA, 322 bp, Glycine max
  unsure (1)..(322): unsure at all n locations
cggtacttaactcctcaacatggcagaaagtgaaatgaaataaaacaatgaacaaaccttttaatgtggctccatgtagagcttgtacgccttggaccttcttcattaatggtgtcctttgcttcatgaagatcaatggtcacggaatggagaaaaaggaaaggtgattggagatgcaacttcaaggagaatataagtcaagaacaagctcaccaccataagaagccatgaataagagcttgaatgttngagaagatgagtggaatgagagggagagaaatgaatgatattttgggagataagagggagaaatataaccact

SEQ ID NO: 273143 - DNA, 238 bp, Glycine max
  unsure (1)..(238): unsure at all n locations
cattggagagtctgagctgaaaatctgattcttcacgcagtatcactgtgtagtttggtaattcaatagcgtgcacaatgttggcacagcacccaaacaatattgccgtggacaaatagtaaagaaagcgcacgagtgtntgttccatctctgcttgattgtctcctcttctgaactatgagattccactttaaataggcagaaccaaccagcactacacagacacaataagtggggg

SEQ ID NO: 273144 - DNA, 437 bp, Glycine max
  unsure (1)..(437): unsure at all n locations
tcttttggaccttgaacaagcaatcaactcctctttcagaaccatgctatgtgctcgcgactggtccctttcttcccttcgcaacttgagttcattattgctaccccatagagctccgggaaatttgttccggccatactcttccttgcgagccctcttggtctcttgttcaagggctcttgcggtaattgcattctcttcccgtaacccggcacactccttccgaacgtgtgtagcagccaacttgaactntctccttggcgagtttgcctttcctaactcgcttttgagagcttggacttcttcgtcctcttccggtgcttcaaaattctcttcgctgacgacttttaacttggcgagccaatctaaacctcgtatgcgaactttcaaccattcgtggtacccaccaatgatgccattacgaatgcctctaagct

SEQ ID NO: 273145 - DNA, 461 bp, Glycine max
caagcttacaacatctagatctaagtggaaattctcttcgcggagttatcccttctgatgtacggaatcttacaagcttacgacacttagagatctaatcttcaattcttttcgtggagaaatccattctaacgtagggatgcttacgaggcttgcaacatctagatctgagtggaaattctcttcttggagaaattccttctgaatgagggaagcttactgccttacgatatctagatctaagttataatgtggctattcatggagagatcccttatcactttaaagacctctcacaactgcaatatctttgtcttggagaacataatcgtttcggaccaatcaccttgcggcgtgggaatcttgctatctttcatactcttacacttgaaggcaattctgatcttacaattaacgatgcacagtggctatcttctctctcttttctaacactctgacct

SEQ ID NO: 273146 - DNA, 419 bp, Glycine max
cgagttaaccatattagattgcccccagtttaagtctctccatcttagaacttctaagtttaaaagtttcagacttgatggacctcttccaacgatttggccagaatcccatttcaaccttagccatgccatgcttaatttcagacttggaccaagctgtgctgacttcaaggctcaatatttcaaccaaacactgttgacaataaagaattgtgaagctctcactttatgtgagtggacttttcaggtatgttcttaatttctatcatttctcgtctactattgctcatttaatgcaattatatatctggccaatttacaacttgagcttaattttacgcgctaatagaaagacattacaataacttatcatacatgacacaacataatggaaatgggaatgcttgcacctctctata

SEQ ID NO: 273147 - DNA, 352 bp, Glycine max
tgctgtgttctaatctatttccatgataatgatggtttcttcattatttggtcttgtgatatcatggcgcttttcttttcccttgatgcatcaaatggtacttatttctttaatgattctgtatgtgacgagatggagagcgccttgatgtcatgagtgttttatactgcgtttgcctcactgttttatatgctatccagtgctaactactgaatttacagtatatcatgatgaaatttcatcttttatcttacctggcattaaattttcaatcgagtatttcctaaattagatttgatttgatggatgtgcccagggatagattgtaaatgcaatcttggatgtctctcaa

SEQ ID NO: 273148 - DNA, 454 bp, Glycine max
cgacccttacaagtcagtttagtcaatggtaaagctaacttggagaaaacttctatgaatctccggtagtatcctgctaagcccagaaaactcttaatctcaacaacggatttaggactctcccactaaagaacgacttctatcttagagggatctacagctatacccccttgagatatcacatgccctaggaaactaactgtctctaaccaaaactcacacttggacaacttagcatagagttgtcggtccctaaaggtatgcaacacaattcttaaatgttcttcatgttcctctctagtcttggagtataccaaaatatcatctatgaatactaccacaaaactattaaggtaagggtgaaagactctattcatgtagtccataaacatacctggagcattagtcacaccaaagggcatgactagatactcatagtgaccataacgggtcc

SEQ ID NO: 273149 - DNA, 426 bp, Glycine max
cttgaagaaagaatgggaacgggtgaaatagatggaggatgttgttcctttctttctatcattaagggtacctcaatcagcatctacagcagaggattgcgtggtctaaatggccaaaacagtgaaggagcaactggggaaagatgatcctatgttttcggcggctgctgaagccatggaagagtgggtcaagctctggaagtcagttagatctgcttgaagctcccgaacttgaagactctcgtatgactggaggttattgccttattggcttctatatttctctattttatttaactaatttatatctgccttttcttcagactgtaagaactaagcttacattttacctgacacatttagactactggctgaataaaatgagtacttatcggccttgtgacaattgaataaatgctttgtctt

SEQ ID NO: 273150 - DNA, 394 bp, Glycine max
ttatctatacacgatcatacaaaagtgttacaacagaacttaacgatttctaattatatgggccattaaatctatcatgtgttgacagtaattgattagcccgcgaatttcctctggggttgaacacacttcagcgatggcctttgctttggctagtagtcgcgagaggtcttgacttccataagtggagcttccctgaaccgctataagattagaatggttgagcatttttcagtaacagctattgcatccatagtaatggcttttcacatgttgtagcagcgctatgattatatcggctgtaaaaaacaatttttgcctctgaaacattgttgtttgggtctttttggggggtaaaatattccacaaaaaagttaactcttgtttgacctct

SEQ ID NO: 273151 - DNA, 335 bp, Glycine max
acatgggaccaactcattttatttcacaaagttgtatctagtccaggcctgagagaccatacacgtttcctaccgatctctaattatgtgggccattaagtctatcatatgctgacaatagccgagaagcccatgaatttcttcgggggcggagtacgtgtccgccatcgctttggccttggctaacaatcggggaagctcctgactcccattcaaggtaagagcaaaccgatccatccacatggttgccttcttggtgtaaagagtcgatcaccctgtcctctagcctcctttttccgcgtatacttgggcatactcgtccgagatcctatgct

SEQ ID NO: 273152 - DNA, 452 bp, Glycine max
  unsure (1)..(452): unsure at all n locations
ttcttgaganaacttccttgagaagcttctttgaganaacttccttgagaagctagagcttagctacacacacccctctcataactaagctcacctccttgagaagcttccttaagaagattcctgaagaagctagagcttagctacacacacatctctaatagctaagctcacctccttgagatgagaagctagagcttagctacacaccccctataatagctaagctcacccccatgacaaaaaaagatgaaaatacaaaaaaaaaaagtccttactacaaagactactcaaaatgccccgaaatacaaggctaaaaccctatactactagaatggccaaaatacaaggcccaaacgaaggaaatacctattctaatatttacaaagatnagcgggctcatacttagcccatgggctcanaatataccctaaggctcatgagaaccctag

SEQ ID NO: 273153 - DNA, 334 bp, Glycine max
  unsure (1)..(334): unsure at all n locations
agcttactataacctgcggatgttatagccattatcacaaattccacaacaaaagcatatatttttcctttgcaacaaaatatgaaagtaaatataatttatcatatataagataaaataaccgatggcaaagtagaaagcgcattatcatggttgtgcatttaaagatactaaatgcaacccacccacattgactatttgttatataatacaactccaagtcatgtaaaacaacctatattgacccttgagacttataatttaaaatccttggtttcccaattcagttatatgctggatgtcaggntcccccacccccaacctaaccacaccc

SEQ ID NO: 273154 - DNA, 379 bp, Glycine max
  unsure (1)..(379): unsure at all n locations
tcgnttcaanaaccatgtcaagtnttctcgtggcagctcttagtactgcttcattatgatcattcatgagcatgttgaaggctctaacatttttttttatatatatataatggtcataccgatgttgaaacgtatgacttcaggcatattactttaaagatccaagcccttcaccactaagccgacaccctagtgattctataggctctaaaaccaaggcgctcaatcttcttctgtttggtcagttttccctaacttaaccaatagaattttcttctttctgtgccatcaccttctctcggagattaatgtgctgctcaaaatttttaatagccctgccacattatagaggaatatatatgacatatctatattaaat

SEQ ID NO: 273155 - DNA, 441 bp, Glycine max
  unsure (1)..(441): unsure at all n locations
tattgagtgacaaatttatgatttaattagagagcttattacaaaataggtttttagctaagttatcttaaaggtgataaacttatatcatattaacatgctaggctaacaggtcaagttagacttttaaataggtcagatcagtcttaaaaataaagtctatggcaagtaacatgttaagctcaggccttgaattttttaacaaactagacctatttaacaaaagccttgtttgacctaacctattttcacccctagttgtgataaagatctaactactacctagttgtgtgccatttatgttgttaaaaaatttgaaaattttaaggtagatgcaataggttggtatggggctcctttatttaatcttattnttttataaaaaacattttntagtacaataaataatttctatcntttaatgtgtttatctaaaatttt

SEQ ID NO: 273156 - DNA, 425 bp, Glycine max
  unsure (1)..(425): unsure at all n locations
agcttgagattgcaaaaggaataaagaccatcatctctaacaactccttgaagaaggactctattggtcccctgagatttaacaagacacatgtgacgatgaaactcacagaaaactgaattatctttagcanattggctaacactcattaaatcttgttatggaaggaacatgcaataatttctgaagtttaatgcgaatttgagagtcattaggagacacaaaggaagatgaaccagcagcagaaatgcttaaaccttcaccatttcctatcaaaatctgagacacaaaggaagaggaaccagcagcagaaatacttaaaccttcacaatttcctatcaaaatctgatccagtccatcaaagtgactaaactggttgatattctgaggtcaccagtgacatggaaactggcaccagaatctgg

SEQ ID NO: 273157 - DNA, 446 bp, Glycine max
  unsure (1)..(446): unsure at all n locations
tgatatttagtgagttgaaaagtaacctcccttnttttattaactttaacacacatacatatatacacaatacaaggcttagagataagacagcttgatgggacattacaatgctgtcttctgaaacaagttaaacataaagctagaagcaagcatgtacacacataatttaacagattgaaatgggatgcataataattaattaggccaaacattgacatctatttttttatactatttatgttgtgtattggattagtgtagtactactagcacaaactcaaaccaataaggctattgtctactgttaagaactttgggagaactgcaccacaaaagctggccattttagttggagggctcaaggcctgattagaatcccatacttncaacctgggactctcaagtttcgtaccttccaagtggatcctaatatcccacaacgc

SEQ ID NO: 273158 - DNA, 200 bp, Glycine max
  unsure (1)..(200): unsure at all n locations
agcttgaagtgagaaagcgtggaagagtcagtctttctacttttgtttgttgaccacagagtggtacctggagatatgtcgtgggggtcaggagaccttggggacgtcaggtggggtgctatatcccaaaaccaagcttgatcaatcccgacccaacctgngcatagtcagtcagtgagaacctgtgacgtacctaaaca

SEQ ID NO: 273159 - DNA, 502 bp, Glycine max
  unsure (1)..(502): unsure at all n locations
agcnnnccggcncttgaacctttgatgacggctttgatgactataaaacctgccaacttctcagatncngaggaggagataaatttcattttgcaccttgacgcgttcttgagggaaacttgaacatcaggaacattttacacgcattcttagatgacacatgaactgaccattgatctttttgtgagagctttgttatcataacaacacccttgtatgaatatggattcatgatgaatctttgcttataccagatctacaatgggatgacttgactatgccttggaacattgaggttcttcctatgaaattgctgctgacgctaacacttgcaaaaattagctaaatctaccttgattatgacttctcggagaggcgttaatatacaaatctaagtgtaatgaatctcctcgcagagatctgctttcatactagacgagtcttaaggatacagtcacatgactatgaatatctaagctctatgcatgtaactacatggacn

SEQ ID NO: 273160 - DNA, 290 bp, Glycine max
tctcaaggaagctacatgaagctgtctcggtaaaaacgttgcccagccttcgataaccgatggatcttctcgaaatttggtctgcagcttcacagaacaagtgtgcacaatatgaccattgggatctttgagaaattgtcggaagtgtgcgcaaagattccgtttccgagagcattgctcacttgtgcagtttgagccttgtagtccaagtcgctttggaaaaatgccatttcttctccttctttcttccaaaaccatttccaacgttcaagatctttctccatcaccca

SEQ ID NO: 273161 - DNA, 421 bp, Glycine max
  unsure (1)..(421): unsure at all n locations
agcttctagccaaatggacttatcttgaattaatttctttgatagcccttttgagccttgtttccctttccttgttttgaagctcactacaagccttaagtgaaaaaccaggatatcaccatatccttaaggaattttggagctttggaattgttttgggaataagtgtggggggtttttgtttcattggacaacttgttttgttggctatgcttcatgatgtattntgggccatacttgatgtacattgtatattggttaaatggtggacatgctgaatgaaatgttgtttctcacaggctatagaataaaaaaaaaaagaataaaaaaaatattcacaaaacaaatattcgaaaaaagaaaaagaaaagcaatagagttgagtgaataagatcttaaatggcacaagaatgatgaaact

SEQ ID NO: 273162 - DNA, 430 bp, Glycine max
  unsure (1)..(430): unsure at all n locations
ctgcagatctggtatttgcgggcgaaaggattgaagtgggcctaagaaggggcaaatttgattacgttgcttcaacaagtgctagcaataggaagaccaaaataagtggagctaagaaaaaggagggagatgcccatgtcgtaaccgcaactcttacatggccaaagtcccaacaaacccctcacaaccccacttaccaaaatctcccgcaccagtacaattactcagtcaatatcggatctcctccctgtctgacacccatccaatagagaattcccactanaccacanaggcctcccccacaaaatccatttcctgcatagccttgaccaattgggaaatcccacccncacacanacacanacccaaggaggaacttcccaaaagaaacctgcggagttaccccataccgatgcttataccgacctgt

SEQ ID NO: 273163 - DNA, 365 bp, Glycine max
actcagcttatatatatcgatatgctcgaaattaaacatcggataacttttctcacggatgttcgattctggcgcataagatgtcgagaggctcgacattgaacaacggaagctcttgagaaatctaaacggtcataaacttacacacggaattccgatttagacaaatcacataacgacacgctcagaattgaacaacggaagctcttgagaaattcaaatggtcataacatttaactcgaatgtccaattatggcgcatcacatatagtgacactcgaaattgaacaatggaagctctcgtgaaattcataatggcataactttctacactgaagtccgattcatgctcataatatatcgata

SEQ ID NO: 273164 - DNA, 404 bp, Glycine max
agcttgatatattgtgaaatgacgagggccctcgtggttgaccatgaccattgtcggaagttgtgacgttttgggactttgcaaactgatcacgaccctcttggagttgaccagagttgtggtcaatgtaccacggccgttatcaagtgagaataacattagattttcatgaaattgtgtatttttcaactttctcgcttgattgagtggttgtatttctacaaggtaaaaactaatgttcaaacgtgagttctgccaagaaaatacatgaaataacacgaaaactcataaaatatcactcacattatggtttatccactgccattattttttctattttctgtatttttggttgcatacaaacttgagtataggctgattgccttttgatgatataatcatgc

SEQ ID NO: 273165 - DNA, 200 bp, Glycine max
  unsure (1)..(200): unsure at all n locations
tgngcttctgtaatgaaggttagtcaataaccagatgttattttttagaccttgtctcggaacattaaaatctgtgttctcttgtggcaggagtctattttcattgattctgctactcaattaaaggtattctttcttttgcttctttttttacgaaagtgttttgtgtgtgtgtaggggcgcctcccaactctcctttc

SEQ ID NO: 273166 - DNA, 375 bp, Glycine max
  unsure (1)..(375): unsure at all n locations
ctcctccaactgcgcaaggctcgatacatanggagagtacacttgtggatccttcacccgagcaagactctgacaaagacttatcttgtcctttttggaaaaagcatggctagctggcggcaaggaaatatactctccatctgacctcggatgcacactatgatcgaatctcccatatcagcttgattatgacgggtgttcaagccatccttcgccttgccatgaatgttaaagagcatcccaatcacactgccacatacagttttatcctaacgcattacattcatacaatgtctaacgtctagatcataccatgcctgctgattaataacagaggacctcttcttccatatgccaccataactgttatactta

SEQ ID NO: 273167 - DNA, 131 bp, Glycine max
atcccccgaccattttccttcagacttaaacccggggaagacacctcataaagcctccccggaaaaaacaggcatcttttccaaagcggggcccaaaagatttttgtcaaactagaacccccccgaaaaca

SEQ ID NO: 273168 - DNA, 422 bp, Glycine max
tgtatgagtactgggaaagattcaagaaattgtgtgcaagctgccctcaccaccagatttctgagcaactccttcttcaatatttctatgagggacttagtaacatggagaggagtatgattgatgctgccagtggtggagcccttggagacatgacccctgctgaagccagaaatttaattgagaagatggcttccaactcccaacaatttagtgccagaagtgatgctattgtcattagaggagttcatgaagtagccacgaattcatcttcatcaggtgagactaagaagcttgaaggtaaactagatgccttggtaacctggtacccaactggcctgaataaaaatctgcacctgtcgcaaactctgggttatgctgctttccgacaccaacagaccttgctctctgtgcaacaattg

SEQ ID NO: 273169 - DNA, 298 bp, Glycine max
  unsure (1)..(298): unsure at all n locations
agcttctagattagtgtaccaaatgattgtggctctctccaagctatcttagaanaagtgcatcaacagcttttcatccctagaatgcgcccccatcttgcgacaatacatcttgagatggttcttaggacaagtcgtccctttgtacctgtcgaaatcaggtaccttgaattttggggggatgacgacgtccggtactaagcaaagatccgccatgtctgtgaacggatagtcgccaaagccttcaacaactctcaatctctcttcgaagagatcaagtttcctttnttctatcgct

SEQ ID NO: 273170 - DNA, 438 bp, Glycine max
  unsure (1)..(438): unsure at all n locations
ggtgtatcactntccactgcagaaggcaagtatattgtagcaggaagttgttgtgctcaaagtctttggacgaagcaacaacttgaagactctggagtagaccttgatcacattcctctaacatgtgacaacacaagtgcgatcaatctaactaaaaatccggcatgcattcttggactaagcatagaaataaggcatcattttcatagagatcatgttttaaaaggtgattgttgaattgagttcatagatagtgagcatcaactagcatacatattcactaaactactttctagagataggttctttttcaatagaaatgaactaggcatcttacgtgcttctagaatagaatgacattttgtctagtgtatattatctattgcatattgcaatccatatctattgatatctctggataagtcttagtttggtgat

SEQ ID NO: 273171 - DNA, 256 bp, Glycine max
ccgatcgggcaatggtgcgagtccactcttcacatccacaaatcacacataaattcaccatccctagctgcccaccttcaactgagctcacgtactcccacgtagcccttatcctctgtcctctcaacaccgggtccgcatcaatccattcaagctttcacaacatccaagccattcaacatccaaacatcatgaactatccaaacccaaaaaatacgcgcgaggcagaaaacctttgccaaaacacattccaata

SEQ ID NO: 273172 - DNA, 356 bp, Glycine max
ctaattctcacgctaatctagaacacctgccctactcttatatatctgtatgactatccaactgattgaagagcaaagcgcaaccctacacattccagtgatatcatggagtattatataacaaatctttccgaccatcattaataagccaaatacgaaggttattggcattcaattgaacaatattatattaaaatcaactagatatttcgtgacccgaatatactaaaagcacacttaattcacgataatgaagtaatcaaacatacaatttatacgttcgagacacacgagacagacacccattctaataatagatcaattttaaagcacgaacacggaaaataacacataat

SEQ ID NO: 273173 - DNA, 447 bp, Glycine max
  unsure (1)..(447): unsure at all n locations
tgtacctttgaaacacatcaaatattcacttattagctacattggattgggcttctaccaattcaattaaatttattttcaaccacacacatcaaatattcacttagtgcatgtgaaattacaaaactacccctaatacaaaaaactagtctaggtgccctaaaatacaagggctgaaaaatcctatatttctaaggtactctacctacattatggagccctaaatacaaggcccaaaaataatgaaaccttaatctaatatttacaaagataagtgggctcatacttagcccatgggcccaaaatctatcctaagactcataagaaccctagggccttctcttgcatctctggcccaatctacttggagtcttctatccaatacccttgcggngtaggattgcatcaaaaggttacagagaacttacattgagaaatccttggtaa

SEQ ID NO: 273174 - DNA, 425 bp, Glycine max
ctgtagcctgtaattttgtgtaattatgtagctccgccaattatataatgacagcattgtatgtagaacacgtcctatggactggaagttgattgtacttatcagcttcttaattgatcacatgtgaacagtgacctctaatgctgatgtaacaacagagatgttgctcgactgatctgtcagaatacgtattcatctaatgtatcggatgatactatctctatcgaccggtgagaggacaattccatgtattagatcgagcgaaaaatgactgacataaatggtgatgacacgtgagatggtggtgtatatgtgtatgaaaactaaatgattgacatgagcccaccgtggccacacgggtgcttaaatgggttaacgctggatgaagactaccggtgagagtgagaacattaaatcgttattac

SEQ ID NO: 273175 - DNA, 451 bp, Glycine max
  unsure (1)..(451): unsure at all n locations
tggcnttgaggacttgctccaatggctcatcatgtcttctattgaacctttcttcataggcttgaagagaatccatcaattggtctacggtcattgagtctaaatccttagactcttcaatagcacaagccacataatcaaatttagcgattaaggagcgaaggatcttttccaccacacgaacatcgttccatattttctccataacgcttcatttggttcacaatagctaataccttgttgtcaaaatctgagatagattcagattccttcatatgcaatgattcaaactctctatgtagagtttgtaggcacacctttnttaccttatcaacaccttcaagggaggttttcaaaatctcccatgcttctttggatgtggttgcatttgacaccaactcaaacatagcttcatccaaaccttgatgaatgaaagtaagtgcttgttgat

SEQ ID NO: 273176 - DNA, 564 bp, Glycine max
  unsure (1)..(564): unsure at all n locations
ccgtctctccctccctctctacctattactctttatcccanncttcnncnncccgccgcgtganccgtcccccccgcccnaccttgaccncttcttgacaccctctcctaccgggcatctctagagtcganctgtttgcatgcaagcttctagtgaaaggacgngactcttcacatccgaatctgaagaccaacagccaaacgcactggcaatcgattaccataacattgccatcgaatacagctttattgaatacaactggaacgttgcacatccattcgaaaactcttctcaacatccatgtttgctactaggtaatcgattacaacaatctggcaaccgattaccagagagtagcacccctctggcaccctgtttgaaaacaaacatgtccactcagttcttgcaaaagcctatcatacctatcttgataacgcttcccttgattcttgaactttgagtctccgacnctcgtctcgaatattcttcgatcctgaaacctcgcaactccgaaattgtgatgaatcatcacctgatccttgaatccatcgcaccaccaaaccg

SEQ ID NO: 273177 - DNA, 352 bp, Glycine max
tctactgatgtggcagggtggggcctcttctgcttgttgccccaaccgcgagccttggcctgtgttcttcctttctgagatacttttccttatgtcagcttgcgtatgtttatagcttagcccatacttaccacggatttctctggtgcttaccaagctggatgtgccgccggtgttcttgcccaaacccattccgggctcgtagccgtaccccaacatcacttaggccaccatcattgccgtattggataggcaatgctacccagagagggagtctactgaggcaatgcttactacctccaaagattgtaaggctgtttcaatgactcctccgcggctccacatatggcat

SEQ ID NO: 273178 - DNA, 514 bp, Glycine max
  unsure (1)..(514): unsure at all n locations
tgctccacggctgttggaccttgatttgcnccctttgttaccgtagcatctacgagacactatagaatacttcagcttgtaccggccgccgctctaacatctaatccatgaaaggaatgtgaaagtgtaccctccttgttggcttgataagaacattatgatcgatggacattctccctcccgtccttggtggtgcacgaaagaatacatttttctcattcttaacacatgtgatgccacccctttttagaccccattgccctcaactaacaccatgcctttctaaattggcgccgtgcttttatctttcacaagtgtaaaacctcctatcttaccccttccttgatcacaagaatcaattctttctttctaattgagtcacttgttctaaagtcttctacctagaaaatctatgcatgcaagagaaagaataagacctccctttgagactggtgccttggaactcttgttgatggattctttgttcttgagatctatgagtcacaatggtgag

SEQ ID NO: 273179 - DNA, 217 bp, Glycine max
agctcgtgaaacaatatgaattaacttgtagaaattgttactctacaacaatcgtccacaatgaactgaatagcacttataacatgtcttagaaatagcaatccactatttgtacctctagataactggctatgaataaattttcataacagcaattagaaggaaagaccaacttcaaaatacattaacgcatgggatcctattaaaagaaaaaaaa

SEQ ID NO: 273180 - DNA, 133 bp, Glycine max
tgtagctccgcaaagtttctgagcttctccttcagagagctctcctctcctttgttcctcaacattcgtgtgtgctttctctcctccataatccctggtaagtatttttttaacagcgaagcatgtatgtatt

SEQ ID NO: 273181 - DNA, 412 bp, Glycine max
  unsure (1)..(412): unsure at all n locations
agcttgtacatgcctcttatcccttctatttgttggcaattnttcacactcctatgtctcaacaatagaatttcatatctaccatcatcatccaccctcttttcttagaaaaaacaacaaccttattgattgaaaacacatttattgagactcttattaggcatgtaatcatcaaccaacaaaagctcgttcctttttctacaatactattggatttggaccaagtttttttgttgtaacctctccatgatcgatatctccaccatgaattgttgtaacacttgcttctaatcgtggttcgcacatttcacagtaatttgagtgttattcagtaatgtgcttctacactctcacaaaccctccagaacctgacaacatctctttcctaaattccccngtcacttaacttaaa

SEQ ID NO: 273182 - DNA, 474 bp, Glycine max
  unsure (1)..(474): unsure at all n locations
attcttgattctcgaaatcaaatctcctcttgaaccttgaagtgttcttgattcaatcttgaactcattcttgatctttgagctttttgtcatcatcaaaacttctttgaattaatcttgattcatcatgaagcttgcttctacatatacttccataagaatataattnttttgttattagataagaaaaataaaaatgaacatactatttcataatactggaatgtgtagaacacgtcaatatttgttgtgaattctcatacaatcttaatgttcttttttactacttttgtaaggcaagaggagaaatttaacaattataaattaaacttgactaatatgacaatttaaatgacatgtttatgctaagatgacccattcaatgaaacataatattataatcatcattaaaagagtaaaacttcttaagtgctatgtgtgccanatatgtttgaaaaaaaagaacatttatga

SEQ ID NO: 273183 - DNA, 434 bp, Glycine max
  unsure (1)..(434): unsure at all n locations
agctntaacctcatcgtctctcacagtctttagatttgggagctaatccaatccttgtgttcggactctcaaccacttatgatagccaccgatgatcccattactgcttcccctaagctctctgtcctttcttcatgccgcatcccatgccttgcgaactccttggagtacctttgcattggggtcactgaaaccccgtgtaatgaaaggcatgatgctttcgtctaatggcgctcctctcatggggtagccaagctgtcttatggcgaggacgggattataattaatacaaccccatgttcccatccagggaacatttggacatccttcgcatgaagatacaatcctgaatcttccttccttctagcgagggaaccaattaacagacgcccctccatgctagccaagagttggncccaattcgcctttctttt

SEQ ID NO: 273184 - DNA, 380 bp, Glycine max
  unsure (1)..(380): unsure at all n locations
ttcagccccttagacacttctctctctctcgaaatagctgaggaaaattagttccgtgaagaaaatccaagccgaggcacttccgtaacgtttccgtaacgtttctgtgagtaattacgcgaagattctcgaccgttcttcaagattcatcgttcgttcttcgttttcttcagtcttcaacgggtaagtacctcaaaccaagcttttcaattcattctatgtacccgtggtggtccacatattgtgtcatgtatatttattctcgttttcatctgctatttatacccctctctgacgtgcttaagccatntatctatgtcatttctcgactaatctaaaaataaaataaagttccaccaatcgtctgaattgtatcatct

SEQ ID NO: 273185 - DNA, 373 bp, Glycine max
  unsure (1)..(373): unsure at all n locations
agcttaacacccatcgtcgcgagttctgtgatgtttcggaaagaaaacaacgaaaaacacaaaagcggaaaaaggggtgaacttatcaaaaggggggatgcatcaggaaacttcctgaggaggccaccagcttgccgaggcaagctgagctcgcccgggtgagctgggcggcaagcacctcgccccaatttgttgaaaacgggtatccggggcttccgtaaaattttcgtaaccttgggaaagcatatttcacttaagatttgtgaagaggaagagaaagaagaagaaaatcaagactgatgcgcttccgtaatgattccataactnttccataagatacgaaaaggagggggtgaacttatcaatctggggg

SEQ ID NO: 273186 - DNA, 504 bp, Glycine max
  unsure (1)..(504): unsure at all n locations
gagatctaggaaggataaagcggctgaaggaaccagttccgctcncgaatatgacagccaccgctttaggagtgctgagcaccagcagcgcttcaaggccatcaagggatggtcatttctccgggagcaacgcgtccagctcagggacaacgagtataccgacttccaggaggagatagttcgccggcgttgggcatcactggttacccccatggccaagttcgacccaaatatantcctcgaattttatgctaatgcttggcctacagaggagggcgtgcgagatatgcgatcctgngtgaggggtcagtagatcccgttcgatgcagatgctctcagccagttcctgggataccctctagtgctggaggagggccaggaatgcgagtatggccagagaaggaaccggtctgatgggttcgatgaggaggccatcgcccagttgctatgtantgccgnngcacgatttgcccggattactgctgggagatgggtacngatcat

SEQ ID NO: 273187 - DNA, 411 bp, Glycine max
agcttgcaagtgcatttgctagacatgaggagcgatttatggataggccaaacaaggtgcaaaaatggaaggatgctctccgagaagcaaccaatctctctgggtgggattgctccgttgataggtaactttattctatggcacggatttttttcagtccagtcttctctatcaattgaggtttaactagctaaataaccgtatgggtctctatttgtacaagctaaaattggttctttgtagaaattctcttgtataatttctaaaaaaaaaataagatgagatctataaatttattaataattagttaattgagagctagttattttaacttatgaaaaaacttactttattctattttttcttagttctttctcctacaagtatgtatagagaaatttatcataatag

SEQ ID NO: 273188 - DNA, 477 bp, Glycine max
ccttacagtatagtacaagccttccatcatgataacgacaaacaacagactgacgcttccttgtactattaatggaacaaagattacaatgttcaaaagaaaatgttaaaaccataaaatttaaagtgtaccagttggggggatggttacctattaaactcgagcacatttaaaatctcataagacacatcttgaactctgcccattttctcaacatgagattcacgaacatataccattgtaggtgtgcgtctgacaaagaatcataactatttgcattaactcaaactgaaataattttaactctagcagttatattgacaaaccagtagcagaagcaacaatagaaaggcatacttggcattgtaaaaggattcatgcactcatgtagcaacttcgcttatcaaatgacacgttaactcagattccagagtctaagatagacgaataactaaacaggaagaataataaacacac

SEQ ID NO: 273189 - DNA, 412 bp, Glycine max
agcttgtaggattatggggtacccatcacatgtggtactaggtggcggtcgggcgatggtgcacaacaagttttccacatccacaatgcgcgcataaacccaccatcccctgttgcccacctccaactgagctcacgtactcccacgtagcccatatcctcgtttctctcaacaccgggtccccatcaatcctctcaagcttccacaacatccaagcaaaacaacattcaaacagcacaagctatcacagccaagcaaaacagagcaaaggcagaaaactctgctcaacacatcaaccaaaatcacagcttttctcacttaaagaccacagtaacaattccttcgatccaattcgttaaccgttggatcgactccaacaatttactggaagtctatagtgcataagcctaca

SEQ ID NO: 273190 - DNA, 501 bp, Glycine max
  unsure (1)..(501): unsure at all n locations
aagacatagaagtcaagattacctcagagaaactacaaaatttaggattgaaagcttgttctccaccgaatccttgaggtgaattctgaggattccactctaatcaaaacgttcctttctgtatggtggttcgatcgcaagcaatagcggctcgtggtcgccaccggtggtcgtgggtggtagaggaagagtttctacggtggtttggtggagttttgacaaacggaggcgtgtgaatcgtgtttttcacgctgaataacgtatntataatttgcagatctcacttagacaactgggaatccacttttggtgttaagcgcgacttttgacactaaacacaaatccntctcgggttaggatttgcactgagcatgacaattcgcactgagcataattcctattgcgctaagtgcaatatttcgcgctcagncgcaattcctctcgggttggaattgcgcttaacaagcttctcgtgctaaacgagatgtcatattattatgt

SEQ ID NO: 273191 - DNA, 372 bp, Glycine max
  unsure (1)..(372): unsure at all n locations
agctntagtacaccaaatgtctggaaggtatatcatggcctgctgactcctagcaagttcctttgtggggacatatggaatcccggtttctgaacaccagcatgcatgaatatttcaaccgtgaatttgtaaatagaagttatatatctagcaatttcttttttgaaaaaagaaatatgtttagtcacagtgtttgataaaaatagaggttaatttaaatcaaaactgcatttttatctttctatttagttcctgtcatctctaanattataggaattaaaacagaataaaaaatatatgctcaagatgtaaaacaagtaaaacaatatatgtataaagataatataaaaagttattgacacaagtgaacat

SEQ ID NO: 273192 - DNA, 421 bp, Glycine max
  unsure (1)..(421): unsure at all n locations
ctgatggtgtcgagaagacatcacatgtgtgtcatcatcaacaatgcggagaatgtgaatgtatgtatacatgagtntgatgatgtcaaagaagaatctaacaaggctgcttcaaatgataagcatttgcttcaagaataattcaagattgcttcaacacacaaagccttgtttcaagattcactaaagaccaagccttgccttaaaacaaagtgctttcaatacatgcaaggctctggtaatcgattaccaggaagtgtaatcgattacccgaagacagggttgagaaatattctgtgaaaaaggttctgaatatgaattctcaacatgtaatcgattaccacatgtctgtaatcgattaccagcaacgaaactttggaaattcaaattcaaaagttataacccttcaaattataactgt

SEQ ID NO: 273193 - DNA, 317 bp, Glycine max
agctctcacagtctttatatttggagctaaccaaccatgtgttggactctcaagcaataataacagccaacgatgatcccattactgcttaccctaagctctctgtcctttcttcatgaccgatgccatgccttgcgaactctttggagtacctacgcattggtgtcactgaaaccccgtgtaatgaaatgcatgatgctttcgcctaacggcgctcctcttatggagtagtccaaactgaatatggcgaggacgggattataattaatacaaccccatgtttccatccagagaacattcggacatactttgcatga

SEQ ID NO: 273194 - DNA, 439 bp, Glycine max
  unsure (1)..(439): unsure at all n locations
ttcccaagcgatccctcaaccgtcttgagtttatatntctgatgacgagcatacagaccccattatcgtcgttaagcgaatgaacagagtaaaagattaacgcctgcacacattcggcttctacttgaatataaacaagaggtgtgactctgctccttttagttatataacatggtgagctaaacactgaagaaatgaaattgacaatattcccttgttaattgacctggctcataaaatggcacacttaattacatcatacttatactatagcgcgaaaatatataaatagtacacgccaccacactgtttgaccacaatccactaatatcatccctcatagtgttaaggagctacaatttatctattctgcagatcacatcaaaggaacttagtacatggtcgagggataataacaacgccacatctgtaagtattt

SEQ ID NO: 273195 - DNA, 406 bp, Glycine max
  unsure (1)..(406): unsure at all n locations
agcttatacgaatcaagttgacccgtatgttgatattacacatatggatcaacttgatccgtataagctttacggatcaacttgatccatatggtttactcatgctcatccagctttatggatcaacatgatccgtatgactcatagggatcaacttgatccatatgactcattcggatcaactcgagtgaatggtatttctgcccatttagttaaaatgttgcgcgcaccaacaataatgctaggtgcacctagaatcacccttagaataatgggttatataataggtacccatttagctcttggtttgtgagaaatgggctatgggcttgtacagtacataanaaaatggggggaaactttaaacagctagtgaattattattaataaatcaattttattcata

SEQ ID NO: 273196 - DNA, 396 bp, Glycine max
  unsure (1)..(396): unsure at all n locations
ccagtacaaaagatcaaatgatatcgaccttntcttctatatgtaagttttacttttttccttcttttgggtttttccaaatatagtatccatgtgttcaaccctctaaaaaaccagctgatcagttaacattatcggcacattttcatgctcttgactttcattaaaagctttcttcaattgctgataacggtgataaggtttcataaaacattgatgcatgttgttcttncatgtttaagttgtacgcagcttatgccttcttcacagatagggcatgcatgatggcccttaacactgtatccgctcaaattcccatatgatggaaagttattaatggtacaaaatagcattgtgcgcaaatcgaaagtctcatttcaaaaaccatcaaacact

SEQ ID NO: 273197 - DNA, 287 bp, Glycine max
agctttagacaacttgtgtaataaattactattatgttgtaatcgtgtcaaatagagagtgagcctttcgaagaaacttttctatattagaaattttttttctcatctactcatgacgatgtatgatgcataaaagacatgatatagactaatatgaaacattgaatataacaaccaatacaaatgccacttaatggagttgcgatgtataagacaaaacatcttcaagcatttctttaagcttcgtgctttattctacatgctggtctaggcgctccccctatctc

SEQ ID NO: 273198 - DNA, 360 bp, Glycine max
ctaagctcacctgctagagaagcttacttgaaaagattcctaaagaagctagagcttagctacacacacctctccaatagctaagctcacctcctcgagatgagaagctagaactgagctacaccccccctattatatctaacctcacccccatgacaaaatacatgaaaatacaaaggaagtgcctactacaaacactactcaaaatgcctctaaatacaaggctaaaaccctatactactagaatggccaaaatacaacgcctaaacgaatgataaaacctattctaatatttacacagatgagcgggctcatacttagctcataggctcaaaatctaccctaacgctcatgagaacc

SEQ ID NO: 273199 - DNA, 390 bp, Glycine max
agcttgtcctctggttgctctactagggtttcaaagaattagagagaatgagatgggattagaacctcaatttaattgtctccgtgaaaagggcatttctctctctacaaacatttctttgcaaattccaacggtgaagttgttggagaatgggttctaaaggtggtgtcctaattttaggatgatccaacaattaacgagtctgagattgtagttttaccgggataggtttgggtgtatgcgaggaaaagaaagtgttttgagagaggaagaagggagaacgaatttgggaggaaaaaagaacgtagagacgtatcggaattgtaaaaactgacctagtaagtctctatttataactagggtactctgagcctattaattactctatta

SEQ ID NO: 273200 - DNA, 483 bp, Glycine max
  unsure (1)..(483): unsure at all n locations
actaagcttctcgcctattgtgctatanatagggggagaagtgaagaagaattgtgttagcctcttaggcacttctctctctctcgaaattactgaggaaaattatttccgtgaagaaaatccaagccgaggcgcttccgtaacgtttccgtgagaaattacgcgaagattctcgaccgttcttcaagattcatcgttcgttcttcattttcttcagtcttcaacgggtaagtacctcanaccaagcttttcaattcattctatgtacccatggtggtccacattttgtttcatgtatttttattctcgttttcatttactttttatacccncttttgacgtgcttaagccatttttttaagtcatttctcgcttaaactaaaaataaaataaatttccaccgatcgtttggattgatcatccgtaactttggtaanatgaattccgaccgtcggtcggccgaaccacgttggaaataaaaag

SEQ ID NO: 273201 - DNA, 293 bp, Glycine max
  unsure (1)..(293): unsure at all n locations
agcttgaacatgaatcaagattaacatgcatgcacttgctttataggatgccaaatatactctatgttcgattcgatatttttcttttaaaaacaatcataatcacttgattcaagaattaatcacatttaagaatttcattcttctcaaaagtatattttatgaaaattaaattcagctcatttcttacaaactcaatccaaaccgtaaaaataaaataaacattagaaattgggaatgtaaagatttcctggcttaagcagcccaagtgacanatcatgtgcttagaactc

SEQ ID NO: 273202 - DNA, 489 bp, Glycine max
  unsure (1)..(489): unsure at all n locations
tgtagaatggctagacatgatacatgtcanggcttggtttggttcaaggataaaagggatgccccacattatttccatgacacaaatgcaaaaaatgatgatttggaaattntatgcacaactggtcatgcatgcgcctatgcggacgctcaagtgtcaaatttttatggtcatgtgatgctagggctcangattcatttcctctattntaaatcaacccaatggtttcaaaatatgttcttttatcaatttgtgcattcctccaagtccatttcaaggatggccttcactttttcggggtctacctctatccctttctggcttacaatgaaaccaagcaatttccctgatttgaccccaaaggtacacttagcggggttcaaccttaattgatatttcttaagcctttcgaacaactntcgcaggttgacaaggtggttcttctcggatntagaattagcaattatgtncgtcacgtagacctcgatc

SEQ ID NO: 273203 - DNA, 438 bp, Glycine max
  unsure (1)..(438): unsure at all n locations
agcttgtgcaaatcaagtcactcccgcattttatctctggcatgcattgtatgttggtctcgtcctttgtcacgggaagccggaaggtccatatcaccttcttaatcgtacacatggggcactgcgcccccaaatgcgcaagtaagaatagataattttccgggctctcgtgtccgtaaaatgcattcatatcatgcatcgcataagcatctcttcataacatcataatggacatatcctgcatttgtccgttatcatattccggcctcacattttgcatgagtcatggcatcatcatgcatatgcgttcaacaaactttntgatctgcaaaattgcataccatntgttttcatgtttgctcatccttgtgttttcctctacaaaacaaaaacaaanagggggaagcgtgaaacttcacactacattcttaagttcat

SEQ ID NO: 273204 - DNA, 183 bp, Glycine max
cgagcgtcacgatatgtgatgtgcctgaattggacatccgagtgaaaagttattagcatttaatatttttcagagcttccgttgttcaatttcgagcgtctcgatatgtgatgtgcctgaatttgacctccctgtgaaaatttctgaccatttgaatttctcgagagctcccgttgtcaattt

SEQ ID NO: 273205 - DNA, 408 bp, Glycine max
gacctgtccttaatatttattattacccttttgccatttctaagttagtttcctctcattatagtgacttcagaaataacaatttgctaatagctaccctcaagttaattactttatagaagctggtattgtgataagataatttaataatagaagatttatactggctcttatacattttttaagctccacctgtagatgtaaacgttagaagagtttctatctgacatgctttttcttcatcttcttgtagatacttggaacctctggcaattgctctggaccatgagaattggtcattagttcaattccttatgtcatcttgatacagtggatatggcacctccagcttgcaacaagtaatcaattaagatttaattccccgcgatgctgtgcgggtacaggttg

SEQ ID NO: 273206 - DNA, 468 bp, Glycine max
  unsure (1)..(468): unsure at all n locations
tagtcatcaccatcatatgtgtgtgtgatagagatcacgatcaaaggtgagaacttgtacactattatatgatggttcgtggggggtggaataaaactgcctacctaaacgaaaagaaaattcataaaagtaaatgaaagaatgtctgaacaaaaatggaaagaaaactgattcgttattcagtctaattaagaatttgagtatacatgcatgattaaggttcttctgacttatcaattaaataataatcagtcattgctccaagtttttgaaacttgattattagcttaaatagtaactagctggcaagctgggcatgtatctattcagctnttatttataaatattcgcccatctctatactggccaggccatgtnctccatccaaatggtatggtatgttcttcttgacgattgctcgctcaatngcacagaattcattatatggacgacttcatgtctaataat

SEQ ID NO: 273207 - DNA, 392 bp, Glycine max
  unsure (1)..(392): unsure at all n locations
agcttcataaaattccccaacctgagcaaaaatttaaaaataaataaataaatgataccgagaaagaaagaaaaatttacttcatgaaaggtagaaatagaatgctagtgaaccagctaacaaagaaaccaaattttattggcaatgcgtaaccatgctctcttctgttattttacaagagcaccagtgacaaagctctcaatgaatgatataactattacttactctgcaaagcaatacttgacgtggaaattttggcttgaattgcaacatttcccagataagtgtgccttccttcagactacacacataaaaattgattcctccatcaactntctcacaataataccatccctagaaatagagaataatggaattcaagtatttatgtg

SEQ ID NO: 273208 - DNA, 438 bp, Glycine max
  unsure (1)..(438): unsure at all n locations
ttgtttaattttttttatttcttttatgcaagtgaaatgatgggtgctgctggtgtcactaatttggaggaatgactaacatttatttgttgaacaatttaagttgtttctttttctttattatgtaatttgaaagaatgaaacatgtttaagttgctaaacaaaatgaaacatgttgaaggacaatcaacatagtatattaatatctccttttttgctaaatagaatcatatgctacttattgttgggacaacatatatttagatggtaatgtttttttttgggggaaataaatatgcatgtcttaattcctcatgcaatacccaaattttatgattttaattgaatagattgatttgctttagtaattctttaaattatgataatgatcctatattntgaatntggctctgttattggtcttctattataaaacta

SEQ ID NO: 273209 - DNA, 345 bp, Glycine max
agcttgagattgaacaacggaagctctcgatattaaaaaatggtcataacttatcacacggacgtgcgattcatgcgcataaaatatctagacgctcgaaattgaacaacgaatgctcttgagaaaatcttatgtgcataacttgtcacacggatgtccgattcagctgcataatatatccagacggtcgaaattgaacatctgaagctctcgacaaagtccaatggtcataacttatgtcacggaagcccaactctggcccatcatgtttggacatgctctgaattgaacaccggaagctctcgagagattcaaatggtcctaactttgtacacggaagtacga

SEQ ID NO: 273210 - DNA, 176 bp, Glycine max
  unsure (1)..(176): unsure at all n locations
gctctcgagatattcagatggtcacatcttatcacatggtatgtcgattacagcgcataatataccgagacgctcgaaagtgcacaacggaatcccnttataagaaagatggtcataagttatcatacagaagtccgagtcaggcgcatactacattgagaatcttgtaactgaac

SEQ ID NO: 273211 - DNA, 424 bp, Glycine max
  unsure (1)..(424): unsure at all n locations
gagctcgatcggtcatctatcctggccgacgccgactgtcatttatttcgatcaatatcggtgaataatatttttttgccgaggtgggctaatgttttcctggccgaataaatgggaacacgccagtttcggccgaaacaaaacataggttgagctcgcacgaaaaaacctagccgacctacattgtaagttttttatgcaacaccgacaaaaacaaaacttcccctgccataagaaaaaacattatcggccagcgagcgttnttttaaaaaaaaaattgggcaatgtcggctgaaaaatatcagtcggggccatttcacgaccgatgtcggctattgagttttctattcaatccctgaatgagatttgcatgatgtcgattacgaaatgtttgatcggcgtcatccggtgatacttctttttt

SEQ ID NO: 273212 - DNA, 350 bp, Glycine max
  unsure (1)..(350): unsure at all n locations
gtgtgaagtatgcaatcctgcataggattggcactgccaactgggtacccaccaatcatacttccactgttgccacaggtttgggtaaatttctgtatgctgttggaaccaagtccaaatttaattntggaaactatatttttgatcaaactattaagcattcagaatcttttgctgtcaaattacccattgccttcccaactgtattgtgtagcattatgttgagtcaacatcccaatatcttaaacaacattgactctgtgaagaagagagaatctcctctatccctgcattacaaactgtttgaggggacacatgtnccagacattgtctcgacatcanggaaagct

SEQ ID NO: 273213 - DNA, 281 bp, Glycine max
  unsure (1)..(281): unsure at all n locations
agcttatcaagcaagcttccatcagatcattattcanatctcatgagaaaggcgttgcacttagtaaaaataattctaaccctactcctacttcttcananaaaagttctattaaatgttttaagcgtttaagaaagggtcacattgcctcccaatgtgctaactangactatggttgtgttgggtaatggggatatcactagtgcatcttcttctagctcttatagttcttctagtgagagtgaaagtgaatgtgatgtacagcccctggaatgtgatct

SEQ ID NO: 273214 - DNA, 329 bp, Glycine max
gttgagattgaaacaaggcttgaagttcatgaagcacggacagaggattcaaatccacaaccaaacaatgtcggagttgtctcatgactcctatcaaatcttataagctctgaatattttggaaagcaattgaatgttgatgaaagaacgaatgatttaccagagagagagaaaaaaaagatggcgaatggaactctggtaagtacatgagtctattcaattcaaatctaattatttatgaactctcgtttgtcttttgagacctatcaaacccaattatatatgctttttttctttctggaatctcacttgaacttgatcagacatcg

SEQ ID NO: 273215 - DNA, 337 bp, Glycine max
agcttctatataagttgaaccattttatcaataaacacaagttgagttttattcagaaaattagagtttatctcttttatcttagtgagattgattctcgtaaattcttgagtgattcaagaacaccttggctgtatcaaaggactttcacaatctttgtgtgttgccctcgctggaaagagtgattctttcattcctttcatcttcacctgatgaggacatgaccaagagcaagggcaaggatccacttgaaggacttggagggcctacgacaagggctagagcaaggaaagccaaagaagctcttcaacaagtgctgtccatactatttgaatac

SEQ ID NO: 273216 - DNA, 379 bp, Glycine max
  unsure (1)..(379): unsure at all n locations
ctacaataatatatcaagacgatcgancatgaacaacataagctctcgagaaattcgaatggtcatgacttttcacacgaatgttcaattcggggacataactcatgtagacgctccaaattgaacagcggaagcattcgagaaatttgaatggtcataacttttcacacgaaagtccgattgggggacataactcatgtagacgctcgaaattgaaaaacgtaagctctcgaaaaattccaatggtcataacttttcactcggatgtccgattcgtggacataactcatctagacgcttgaaattgaacaatagaagctctcgagaaattcgaatgctcataaatttcactcggatgtccgattcggggcatagtata

SEQ ID NO: 273217 - DNA, 397 bp, Glycine max
agcttgagctcgttgctgctgcccgatagagcctctcggaacttgttcctgcttcattcttccttttgggccctctttgtttccccctctaatgcttcaaccgtagtcatgttgacatctcttagctcgtcacactctttcctgaccctaatgactgttgtctttagcttttccttgaccactcttgttctttcaagctctactttcaaggcttgcacttctttgctttcctcagggacttcaacttctttcccacttggaccttttagctttgggagccaagttatcccttgcgtccttgccttcaaccacttatgatagtcgtcgatgacaccattgctgcttcccctaagctccttatctttcctttctactatgtcccatgctttacggattc

SEQ ID NO: 273218 - DNA, 455 bp, Glycine max
  unsure (1)..(455): unsure at all n locations
aacacgtcaacgtaccaacgcactcacaaactaagttcgagtgattccaagtataagtcgtcatggaaggtggagaggttcaagaaattatggccatcataggaagggtaataaagtgttggtctttcaatatgaaaggttcttttacgatgacattgtggagcgtgtagaggcatttgagtgctacgatggcgatgcatgtggtgtggaagcagtccatgagtgcattgatggcggcggtgggagccatgcccgaccgcgacgatgatggagattgtttcctcagagggcgacatggcgagggcatgcatggatcttgccctgagccaagaaaacccctacatagaanaaagagtttccattagcgtaatcttgggtggtgtngactgttagaacataaaataaaattaaataaataaatgagaagaacatgcaagtcttaactaataacaaac

SEQ ID NO: 273219 - DNA, 388 bp, Glycine max
  unsure (1)..(388): unsure at all n locations
agcttctcccncaattntctataaatagggggagaagtgaagtgaaaaagggttcagccccttaggcacttctctctctttcgaatttgcttggaaaaattgtttccttgaagaaaatctaagccgagacgcttccgaaacgtttccgtaaggaatgtcgcaaaggtttcgaccgttcttcgacgttcttcatttgttcttcatcgttcttcgatcttcaacgggtaagtacctcgaaccaagcttttcgattcattctatgtacccgtggtggtccacattgtgtttcgtgtatttttattctcgtttcatttactttttatacccccttttgacgtgcttaagccattntatttaagtcatttctcgcttaacctaaaaataaaat

SEQ ID NO: 273220 - DNA, 472 bp, Glycine max
tgagactaggtactattgagttgaagatttttatcatctatggaggactccagttgattttgatcggcagtggtcaaatatttctattgaggctctcgtttatttattaatttactgtatttggaaaatgaaccaacttttgagttatttttgtttttcaaaatcaactcaagctttatgaaggtggatagagaaatcttctctcatcggtttgtcgatctggttaaaactaactttcatttgagagatgcttctatacataaaaatttctaatcagaaaacttgcaatttatctctgattctgctgtaaattagactctagactttacggtagggaatgattatgtctcttttcaattacgaaattagttctttaataattgatcttctttcgccagatcacacaacacaagtgggcttggccttttatgcagcctgtggacatagaaaggcctggttacatgattattat

SEQ ID NO: 273221 - DNA, 283 bp, Glycine max
agcttataaaactggttctggttctgctggtgaacctttggctacaacttctgataagagtaactgctgtaactcttctgctgctgctgctgcagctgatgtgtctgtatctgagaagttttctactacttctgatgacatagaagagagtgtgttgccacacaattcaccaccgtctgtcattgagaagggtaatgtttctactgacgaagctattgaggctaattatttggtggatgatcttgcccggctagagataccagatttgagtctgttgaacttg

SEQ ID NO: 273222 - DNA, 352 bp, Glycine max
  unsure (1)..(352): unsure at all n locations
tatccaatgagatggtaacagcttgctcttgtattctctgctcctctacaagctctttgttctgagctccactttgttgtagcagagctacaagctcatttagttgttctttcaaaccctgaagttccatattcttttcccacaatttgcacctgttgaagatgatgcaagctaccattactttnattattacgaaacaaaaagcgtaaataaattgtcaaaaaactggcatttaatatatccaagaacgaaaaaaaaaacagaagaaaaaatagctaatgcccggttccgaaagtgaagcatctcaaaataaaggaaatcatcatatctagtatcaatagtctgacatact

SEQ ID NO: 273223 - DNA, 367 bp, Glycine max
  unsure (1)..(367): unsure at all n locations
agctttgaaaattntgggagttgtgagtgtaactgacgttacactctcttaagcagtttttatgcttctcgctaagcgagcaagtacgctaagccgacattatgaaatacaaactcaggctgatatatatatatatatattattttgaaacaaaaaaaggcttggcttggcgctcggataagaccgcttatcgagttatgcagatcaaaaaacctgcaactctcgctaagctgggctctagcagacttagctaaaatgatgcatcttgagtatagaggagcatgcgctatgcggataaggactcgcttagcgctcacattgccgcaaggaattcagcttagccgccatgactggcgcttagctttat

SEQ ID NO: 273224 - DNA, 567 bp, Glycine max
  unsure (1)..(567): unsure at all n locations
atgcnnnnnnncgaacggagggagaggggagagggtgagnntttganccctttannnnnnggagatttacagtccgccgggagagtcaaggcgatctatatgacgacttaatgcacttttagcgataatcgcaacgagtgttggacataatgccagtgcgccgagactcaccattgcactgttgcccacgtttgactgagataacgtactcggacgtagactagatcctcgtttgtctcagcaccgggtgcggagaagtctactaagcgttcactgcatccaagtgaaacacaattctaacatcacactctatcacagccaagcacaacagagcacaggcagataactctgttcaaacaccaaccataatcacagctgatctcacttaaagaccgcagtaacaattgcttcgatccaattcgttaaccgttggatcgactgccaaagtttactggaagttatagtacatatgcctacattgtgaccgttgggatctactagcanacttncacaactcattctgtactactatnntcacagcctaccacacacaagcatttctctgcc

SEQ ID NO: 273225 - DNA, 248 bp, Glycine max
agcttaataaggtaaggcagttaatgatttctttgctacagttgccaatttaagtatgtggaacttggttatcttgatttcaagtttcaacaacttattgcttatgctcttctgctttcaaatgtatgcaacatctaaaattattaatatgaagttaacgtatcgtgaatttttctattatcttgggaagttatgtattgaaatgaaaacccttccattgaaatgtctactttcgttctgttcttgta

SEQ ID NO: 273226 - DNA, 491 bp, Glycine max
  unsure (1)..(491): unsure at all n locations
ntaatatacatgagttattattgatcccatgcaaatcactcttatctcctatcaaaaggttgagaatctttttttttttagaattatccttctcacggaattatgattctattgaataaaatacacaatgaaatcatgattccgtcgttatacaattttttacccgctttattacaccaaaatcatgttttcgtttttatattctttagcacttctcttaacacaatgaaatcacatttcttataataattaatttaattacctttataaatggtaacttgtatccaattaatttaattttaattaaaaaatattgagtgctattaaaaatgataaatatatcataattaatttaattattttaaaaaaaataacttgcatttataattaataaaaaaatcataaaacaataaaaatacaataaaaatataattttgttgtgtatgtcaataaacaatactataaaatcgtgtctcgctatatacttaaca

SEQ ID NO: 273227 - DNA, 415 bp, Glycine max
  unsure (1)..(415): unsure at all n locations
agcttgaaccaaaactggtgagagtgtgaacttaaactgtgagtgaacgactagctgtgagtaataatctttgcatcaatctttgaattttagaatgaaatgtataaatgaggacatgatgaaggccatgattatgcatacacaagccttttgaccaaaaagcttaccttgaatgataactgtaccctttgcaccctttttgagctgaatgattttgtcaataattgaaccctgatcctgaatgattatctccagataccttgtttagattctacgagagcaaatggttcaaggaaaatttaccccaaatttgggggagtggaactgattgtgatgcaaagaanaagataaagcatcagcacacacaaaaaataagttgagtgttaaaaaaaaaaagcaatcaaagaatatgtgt

SEQ ID NO: 273228 - DNA, 415 bp, Glycine max
  unsure (1)..(415): unsure at all n locations
ttccgttgtcatatgctaaacttgatcccatatctacttgataattcaatggtagccataaccctagccaaggttcatcaacctccatttctccgagaatacgactcgaacgcaacgtgtgcttgtcacggagaagccccggggcgttccattgagcattgtanggctctgaagtgtanggtgcgaggtctaattgatgttggctgaaacttgacgagaattgtgtgtaaatcctgacattgacaagagatgccacacatggggcaattntgaaagctgttgttagatgtctctaatgactcaccaggattntcaactntcaccggaatgtgggtgtaagccattggtctgtttgctcaagcaacctgcgctcttngagtgttgacttcaagaccgttcaatcagagattactca

SEQ ID NO: 273229 - DNA, 421 bp, Glycine max
agcttgaaccttgaatcttgattcttgattcttgaagtgttttttattcaatcttgatcatcttgatcatcttaaacatctttgaacatcttgaactcattctttgattatcatgaattgacctttgagctttttttcatcccctttgttatcatcaaaacatctttgaatcaatcttgattcatcatgaagctttgcttctacacaaaatccattgaaatattgtcccacttccactggggtatctccaagggttgtaacttccctgaaggtctctgatgttctatcttagccttctggcaaagtaaacatgcatacacaaactcactaacctctctcttcatgttgggccaccaaaacatcaccttcaaatcctgatacatcttggtagcaccagaatgtatgcttaagttattcctat

SEQ ID NO: 273230 - DNA, 432 bp, Glycine max
  unsure (1)..(432): unsure at all n locations
tggacttgaagagggcaaacttatttattctacaaaattttatcttatctagactttatcttatctagatattatttagatttgatctcatctagatattatttcatctagatcttatcttatcttatcttatctagatttgattttattttatttatgggcttggatttaaaacagatttgtcagctttggggctggaaaactatataacaacaccaaggttctagtttaggccctttctctcttctcttttctctccctcttctgtctctcctattttcgtttttagttttaggcttttcttagacactctttcattntgcaattccacgtttgaattttcgttntagcaataaaatttcgttcttcaatctataatttccgtctctattgattaatggaaggctaagtctctagcgtngttttctcttg

SEQ ID NO: 273231 - DNA, 421 bp, Glycine max
agcttcaacatcagaccacttccagggtgctggaactacttcacatggacttgatggggcctatgcaagttgaaagccttggaggaaagaggtatgcctatgttgttgtggatgatttctccagattcacctgggtcaactttatcagagaaaaatcagacacctttgaagtattcaaggagttgagtctaagacttcaaagagaaaaagactgtgtgatcaagagaatcaggagtgaccatggcagagagtttgaaaacagcaagtttactgaatactgcacatctgaaggcatcactcatgagttctctgcagccattacaccacagcaaaatggcatagttgaaaggaaaaacaggactttgcaagaggctgctagggtcatgcttcatgccaaagaacttccctataatctctgggc

SEQ ID NO: 273232 - DNA, 445 bp, Glycine max
  unsure (1)..(445): unsure at all n locations
taagaactttaccagcaaagcccgatgaggctcagagctcatgagtaattccaaanaagataccctggccggngttctgttgagctgttcaatgaccttgaactcgctctgctgaataatgcggagaaactcacttgcttcctctagcgacacttccttcatgccacaaccatcccttttctctggaagacccttcactggaatatcctcgttcggagtgagggtcgccttgtcattttgttcttccaccatcttggcctttcctttaacgtttgcaggttgtgatggcaggttggagggtgaaaacacgcgaccgctgcgggtcacaccgctccgccccgtgatgttggttaccttggccgacaacgagctgatgttggtggcttcttcttccttttcactcggaggtgtatacctncacgggactgcgtggctgttttggtat

SEQ ID NO: 273233 - DNA, 432 bp, Glycine max
agcttcatcctcagatccctcttgttggactagacttagcttaaatagcttacgaaagtttagcctaatttaacctaagctttgttgttagatccctcttgttggactagacttcgaccaaacaacattattgtaacagcatacttaaaaccaaaacttaatctgcagatccctcttgtaagactaagtttcaattctacttcattcatgttctaaggcaacaatacattgcccaatgttaaaatctcctaactaggcacacaaatggttgatcagaccaagagcataaaaaatttaagcactggaagaagcattgaacacaagaaacaaaatcaattagatatgaaattaattacatcatctattcattagaaatccccaacaagggtgtttagccagccattacagacaaaaccctaacaataataagct

SEQ ID NO: 273234 - DNA, 517 bp, Glycine max
  unsure (1)..(517): unsure at all n locations
ctcaagttggtgcacaacatgtgaataaattgngttaacaaaagaagcaccgctattgtgtaaaaggggtgtctttaagggaatcccacaaattaggaaaggtttatgcagggtgtaattcactcttaaaataattcattttaaggacattatagtaatttacttaatttaaaaaaacataaaatcctattttctctcttgtcttttatgacaacttttgttggtggatgacaatgacgtgttatgtgagagagacaagagaaattaatgtagaaaataaatgtggagtgagaaaaaataggagtaatattatgttgctgcataagagagagaaatggtttattaatattttttaattaaatattaaattattaaaatactttataataaatgatcaaaatgaacagatgtgaaggatattattatctaaataatctgaatgtgatggtaatacacctcaagtagaatgaacattangattntcctactgcatacatacagtattagatacaacata

SEQ ID NO: 273235 - DNA, 372 bp, Glycine max
gcttctcaaggaagcttcttaaagaagcttttcaggaagcttctcaagaaagcttctcaaagaagctacctatgctataaatagaagcatgtgttacacttgttggaaattcgatgaatgagagtcttgtcgcgacaaactcttgagctcaacttctctacctcttttcttccttcaatttcatgctcccccctctctcttactctctatctttcttttcctacattgaagcatcctctccaagcttcttatcaaaggcactctcttagtggcgacgcttgctcttccatggcttatatcctagtggatggatccccctccctcatcttctctttgacttccactgcatctcaatggtggaaaatcaccatg

SEQ ID NO: 273236 - DNA, 476 bp, Glycine max
  unsure (1)..(476): unsure at all n locations
atagagttcacttataataacagttttcactctaccattggcatgactccctatgaagctttgtatggtagaaggtgtaggacacccctatgttggttagagcccggagaaggcctcaccttatgaccagaagtggtacagcaaaccactaagaaagttaagttaatttatgaaaggatgagaactgctcagagtaggcagaccagttatcatgataagaggaagaaagatctggaattcgaggttggtgatcatgtattcttgagagtcactccatggactggggttggtcgagcattgaaatcccgaaaactcacacctcgcttaattggtcctttccaaattcttaagaaagttggccctgtggcataccanattgcactacncccgtctctttctaatcttcacaatgcctttcatgtgtctcaactccgtaagtatatccatgatccatcccatgtgattgaatggatgat

SEQ ID NO: 273237 - DNA, 410 bp, Glycine max
  unsure (1)..(410): unsure at all n locations
agctntatattctgccacattattggtataatcaaaacccagcctaccacgaacgatgtgaattgattcatcagagaaattaacattgccctaatttcttaccccagttcattggaattccatcaaataacataatccatttttctccatccccaggttctccgtattcaaataatgccattatgtcttcttctgggaactcaaattgcatctattcgtagtcttctataggatgatgagccaagtattctgctaggttgctaccttttacaactttntgggtgacgtaaacaataccatactctaatagtaacatntggcagcaatcaatttgaccggtgaaagtaggcttctcgaatatatactngattgaatccattttggagaccaagtggtgtgagacaacatat

SEQ ID NO: 273238 - DNA, 414 bp, Glycine max
  unsure (1)..(414): unsure at all n locations
gatgtacttaaccgggtccatcttggatatcaaccacgtagtatggctcagcatgtactgccttangcgatgggatgcccatactaaagcacaacacgttctttcgagcaaggagtaattcatctcacaggtggtgaacttcttacttangtagtaaacagcgcgctctttcttnccggattcgtcgtgttgccccagcatacancccattgactcgtccaagaatgtcatgtataaaatgagaggccttctangtactggtggcataagcacgggaggattcataaggcacttcttgattcnttcaaaagcttcttggcaatcctcattccagctatcagtttggcttttgcgtaagagcttgaacaaccgctcacaaatggcggtgagctgcgatatgaatcttgcaatata

SEQ ID NO: 273239 - DNA, 386 bp, Glycine max
agcttacaataactttcatcgacttagcagcttttattttcatgctcgcattagagctgacaaccatttcccatagtatattaaatatcataccatggttctcttcatatatgctgcattacaaagaattctcattatgaatattggagaaaaatacaatatattttaagaatgtttatgatgctaaatgctaatcataccaaatgaagcggatagcattaataatctcaggagtgtgcttgggtgattgattctgcatcgagatttcttctagtaacagcttcctcacatattctgctaattgttcatgttttccaggagcactcaaaaccccagccaatagaagcggaatgacacacattgtatagagcctatcagcaacagca

SEQ ID NO: 273240 - DNA, 372 bp, Glycine max
taattgatagttgtcctgttcaagttgatcaaactattgagagttgaatgaaatgttagtttcatcttaatgctccgactcttgagtaggaccttgtgggagagggaataagtcttccttatttagttaggaatgaaagattactttgaccaaacacaaactaaaagcaagtccttctacagagggaacaacaaaactataaaatgagttatttggtatattaggcaagagcaaaatactattaacattcttaattattaataatgtaaagaacagagcctaatatgtttcaagaaccaaataaatgctagctttcaaggaaaagctaaaagatctgactggtttctttctattgtttcattagtgtatcgt

SEQ ID NO: 273241 - DNA, 406 bp, Glycine max
agcttggttcgaggtacttacccgttgaagatcgaagaacgatgaagaacgaatgaagaacgtcgaagaacggttgaaacctttgcgagattcctcacggaaaacgttacggaaacgtttcggaagcgcctcggcttagattttcttcacggaaacaatttttccaagcaaattcgaaagagagagaagtgcctaaggggctggaccccttccttcttcatttcctcccctatttatagcaaaataggggaggtggttgccgcccagctcgcccaggcgagctcagctcgcccaggcgagcagggttgcttcctccagaagcaaccgccttctggaggaatcttctggagggcccaaatgggcctgggtgctatttgcacccccatttttactaagtacacccccc

SEQ ID NO: 273242 - DNA, 418 bp, Glycine max
  unsure (1)..(418): unsure at all n locations
agcttgcatcactcaccatcaaaacttgttggtattcatggtactcatatggccaagtatctacaagttntatttatttttgatacaatgtcaaaatagaatgtttaacattatcaatcaattagagatcctcacgtaaaccaacaatnttaaactatataacaattcatgattagataacaatttaaaagcattttaccatggtatattctaatcaaattcagcacaaatatccaaagcctttttacaaggattccatgttttgggtttatgtaagatggacagaggcgtatgatggactaatatttgcaacagtgagaggagttgggcatgtgatgacgatgttaaatcatttcacaacaaactacgattccaataattctatagtatatgaataacctangtcgactcgagacac

SEQ ID NO: 273243 - DNA, 300 bp, Glycine max
agcttctggaggaagcctcttaatgaagcttctagagaaaactacatgcagctgcctcggtaaaaacgctgcccagccttctttaactgttggatcttctcgaaattttctttgcgacttcaaaagacacttgtccatgatctgaccgttgggatctttgagaagatgtctggagtgtgctcgaagcttccgttcccgagagcatctcgtatatgagcatttcagcctttgcattcgtgtagcttagaacaatgtcatttcttattctttctttcttccaaattctaaagtgtcaagaac

SEQ ID NO: 273244 - DNA, 219 bp, Glycine max
aagatactaaattccaatatcagtaacccttcagaatggcaatcacgccctacaagaaaactactatttacaagatagcgctatactaccatggctaaactactaagtcataaaccagccttctggatcttagcaatctataaaggtcttcaatgctttgggagaagctaatgaccttttgtttagacacaccatcatgacttattaaagattattaaa

SEQ ID NO: 273245 - DNA, 473 bp, Glycine max
  unsure (1)..(473): unsure at all n locations
tgggaagcggggntttgaaaccttgatgaccgcgttcttgtacccgggatcgtatagagtcacgcttatgcatgcangcctctcatcanagtggtattcagagcgcaatagcctcaaggtgggtgctaccctagaccctccatgaatatttttgctttacccttcctctctattggtggaacttcaatgatctacatgtatctnctcacatgtcttgtgctaaatgttgttacatgattcttagagtttcaccgataaacttgctatagagctaaattgatttctatgatcaaattcttgtcttgttcttgaccatgaatgtgttgagttacgtcctttaagtttgtctgtatttttgggctgaaacctaccataaattctaaaaatattaagtgaagaaactcanaattagaggaactgtctcctatgagtttgcataaaatatgttaacataaaatggccataaatttttn

SEQ ID NO: 273246 - DNA, 578 bp, Glycine max
  unsure (1)..(578): unsure at all n locations
tgccnaaggnnnnnngannaagagggagagaggatggttggnccnttngaannccccannnnnttaanananaagctccgcctgctcggggtcctcgtactcaccactgtcttcaccgctctttggctaggtcttgagccttgaggccacagtcgcgtccttgttggacgccggactatggtcaccatcatccagcacgacccanatctcctcgcataggtntcgacatcgtcttcctacacatcctgcttcatgtattctatcattagctccttgaaattgctatacatctttttcttcttccaccgatggcatgtacgaaaatcaaaattntgaactagggaaaggggagaaaccttcgaggtgcatcacaatcgtgtgtgtgggggaaaaggaaggacaaggtgtggtcaatctcaaaatcttagttgttatggaaatcgaaaattcaaggagagacggcgaacatnnactccaaaagaaagaacagagaacacccaatgttctggctttggtgcccananatatgcattcttcatttctttcaagacgagtttctaaaccgacagtgtatctcc

SEQ ID NO: 273247 - DNA, 304 bp, Glycine max
agcttctgtttcttgctctcttgtcaatgactaggaaaaagaaatagaacaagaattgattaaaaatgtttatattgttcttcaaatatttggccaaaaaggaataccatactccatgggggtgaagtatttcacgaagaagagccaagtggagcgtgaggcgttcttgctgctattgtcaaggcttattttcccttctagatcacactaatctattttgagaagtttttttctttattgctatacataaacctatcatgaataaagcagctcttgcacttgctatcttaacatgtatttactc

SEQ ID NO: 273248 - DNA, 573 bp, Glycine max
  unsure (1)..(573): unsure at all n locations
atacccccnnnnnnnagggaaataaaagatatnaaaggtgagnnnntgannnncttttancccccccaaattcctaaccangcgcgcgngtaggtagtaaacaatggctcagaganacatttataanagatcataaatgncgccagctagcgggcgatcgtgcgtaaccataaagaataattgaccccatagctggctgattattctactatacatcataatcccatgaaactcagcgtaaaaacatacaatatgtactcaatctgacgctctaatctcgactctctagccataacacgacacgctaacaataccggctcctctatgtgacctaaattgttctctaaaagccaaacacgcatgacatcttttcttatttaatctgacagataattaacttacttcatcactcttccacccttttgtgatgaacacaattaagcctcatcacctctcaattatgcgacgcgtctggagcggagactggtcctgtatatgtgcatgcactacatatatcaatgcctataggttgagtgtacatatgcaatacatatatcttaagcatacatatac

SEQ ID NO: 273249 - DNA, 295 bp, Glycine max
  unsure (1)..(295): unsure at all n locations
agctntgagccaaaatcctgactcaccatataccttgacccagggtgagaatgccaatccttaccctcagaagcaaaaaatgaagagaaggaaaatttcctatcaaaggaaaaaggagaaggaaaatttccaatcaaagaggaagcacaaaaaggagagaaggaaanattccaatcaaaggaaaggaaattcccaatcaaagagtgggagaaagcaaaaagaaaagaaagaaaattcccaatcaaagaatgggagatagaaaaaaaggagaagtataaaagaagaaagctcctgg

SEQ ID NO: 273250 - DNA, 434 bp, Glycine max
  unsure (1)..(434): unsure at all n locations
tcttggtggtgaagctccgtcttttatggttattcgctagtggatggcgcctcctctcacctcttctcctttatcttncgctgcatctgcatggtggaaagtcaccattaaaggacctcattgaagctcaaagatccagcctccatagaagccccacaagcaagcttccatcagatacctcacaagtttttaaattgcgtatataacggtggtccttgtgagacaatgttatgagtcttagttcatttcttgtatataacacacgtagattaagttttaatattatgatgtaacattctcttgtatgagactcacatgtactttagtggcttatcggaaatcaagtattttataaattaagttcttcattaagaatgatatttcgttaatggatgttcttgtaaaaaggaatgatatgtntataaagaatgggt

SEQ ID NO: 273251 - DNA, 317 bp, Glycine max
agcttctttgggaccttgaacaagcaattaactcctctttcagaaccatgctatgtgctcgcgactggtctctttcttcccttcgcaacttgagttcactattgctaccccatagagctccgcgaaatttgttccggccatactcttccttgcgagccctcttggtctcttgttcaagggctcttgcagtaattgcattctcttcccgtaacccggcacactccttccgaacgtgtgtagcggccaacttgaacttctccttggcaagttttgcctttcctaactcgcttttgagagtttggacttcttcgtcctct

SEQ ID NO: 273252 - DNA, 382 bp, Glycine max
  unsure (1)..(382): unsure at all n locations
cgagccagaggctaggttgngcgagccaatggcctgaanaagtccctaaatgaccattttgcccttccttttgggtattttccgcattcttttctaaaatgtcagaaaaccttacggattacgcagaaattggtgttaagcagctcaattcggctagcaagaatccaaatgtttacaaatgatcatccccaaacgaaattagggtatgacaccaaggaagacaaacctgtaaacaaaaggaaattgaagtcctataaaacataaaaagggaggacatcgaagtcctatagagcataagacatttgaagttttttttccaaagcatagaaatagaggacgttgagtcctaagaagcacaaagacaaagacattgagtcctatg

SEQ ID NO: 273253 - DNA, 394 bp, Glycine max
  unsure (1)..(394): unsure at all n locations
agctntgatggtgttaagaagaaaccacatgtttgtcatcatcaaaaagggggagaatgggaatgtatgtatacatgattttgatgatgtcaaatgaagaatcaaacaaggctcattttgattcaagattaatacaatattgtttcaacaaacaaagccttgattcaagatttcttcaagatcaagccttgcctcacaatgaaaggtttcaagtcattcaaggcacatgtaatcgattaccaatacatgtaatcgattaccaaaggtttgaaagtgtgtaatcaatcacacatcatatgtaatcgattaccagagactctgaacgttgggaattcaaattttaaatgaacggtcacaaatgttcaagaaaaacaactgtgtaatcgattacact

SEQ ID NO: 273254 - DNA, 499 bp, Glycine max
  unsure (1)..(499): unsure at all n locations
gcgtntatgcgagacggagaccaacatgctagctatcatcgccaggtaccaagaagagttaggtctagccacggcccacgagcatagaatcgcggatgagtatgctcaagtatatgcggaaaaagaggctagaggaagggtgatcgactctttacaccaagaggcaaccatgtggatggaccggtttgctcttaccttgaacgagagtcaagaacttccncgcttattagccaaggccaaggcgatggcagacacctactccacccccgaagagattcatgggcttctcggctattgtcagcatatgatagacttaatggcccacataattagaaatcgttaggaaacttgtatggtctctcagaccttgactggatacgacttcctttntgaaataaaatgagttggtcccatgtttctactncanaaagcttgtgcaaatcanatcanctctacatttcatctctagcatgcattntctttctttacccactctcat

SEQ ID NO: 273255 - DNA, 433 bp, Glycine max
agcttgtgaaatcaatgaaattcaagattccgtttgacacaagtcgttcaattctgttcttagaaatgtgacctaagcgcttatgccataatgttcttgagttagtattatcaattctacgcttagtaccacacagttctgcattaaaggattcaccataagaagctacagtatcaagtagatatagattatcattaaccaagagtgaaccagttccaacaatatctgaattaaaagtcaacctgaacacattgtttccaaatgaacataaataacccaatttgtccaaataagaaaccgaaaccaaattccatctatatgacggtacaacaaaagtgtctttcatatccaaataaaaactagtacataataataatctaaaatgccctatagcttccacctccaccgatttaccatctccaacaaagatcca

SEQ ID NO: 273256 - DNA, 487 bp, Glycine max
  unsure (1)..(487): unsure at all n locations
gttttacgctctggaatgccntccttgcccacacnaacctttttagtccataccaagttttccacattaacttcctcctattacatactcgtgatataaggttaattggatcgttaagaaagaaccgaaaggagaaaaggtcacgaattcaatcctctttaacaaaaataacaattaacatttaccgattaaaaaaaatactntgatgctaaataacctcttgaacaaacgatgcatcaacaatttcgtttataaagactaattgattaattacacacttaagtaaacagtaaaagagaagcatgacattaagatagtgagtaaatagtcatatataacatctcacaagagattatgaatgttttctgttaacacataaatagtttagctgtgttgtctaatttaaagattccncataagtgttaatcttgtaatanagtgatagcactaatcaaccaatgaacaccactcttaanatagtatcagt

SEQ ID NO: 273257 - DNA, 422 bp, Glycine max
  unsure (1)..(422): unsure at all n locations
agctntgtcgatttagttttcaccggcgaaatgatcaaagtgggtctgagaagaggcaaatttaattatgctgtgactatcgttcctacatggccaaatttcccaccagctcaacaatatcaatactcagccaatatcaacccttctcattatccaccaccctatcagccaagaacacccaatcatccacaaaggccacccctaaatcagccacaaaactcgcctgtcgcacatctgataccaaacaccacccttaacacgaaccaaaacatgaatcagggaagaaattttccagaaaataagccttagaactcaccccaattccattgtcgtatgctaacttactcctatatttactcaataatgcaatggtagccataattccagccaaggttcctcgaatgcaacatgtgtttatcatg

SEQ ID NO: 273258 - DNA, 494 bp, Glycine max
  unsure (1)..(494): unsure at all n locations
tcatcgtctctcacagtctntagaattgggagccaatccagtccttgtgttctgactctcagccacttatgatagccgccgatgatcccattactgcttcccctaagctctctgtcctttcttcacgccgcatcccatgccttgcgaactccttggagtaccctcgcgttgtggtcactaaaacctcatgcgatgaaaggcatgatgctttcgtctgatggcactcctctcatgggacatccttcgcatgaagatagaatcctgattcttccttccttctagcgagggaaccatttaacagacgcccctccatgctagccaagagttggtgcacaacanacaattcttgcgccgctcttttcacatccccggtcgaacgtgtcatacatggccaaaatggcgacgaccgggctttccttgccatgatgaaaggcgaggaaagcgtcaatcgctgctaggtccactaaccctctcatattcggaaagaggacaac

SEQ ID NO: 273259 - DNA, 412 bp, Glycine max
  unsure (1)..(412): unsure at all n locations
agcttggccagagcggtggtcacctggtataccaacttggaagcttcccggatccgctcttggaaatatttgatggatgccttcatcaagcagtatcaatacaacaccggcatggctcatgacagaacccagctgtaaaatatgagcaagagggagcatgagtcctttaaggagtatgcccagagatggagggacctggcagcacaagtggcacccccatgatggaaagagaaatgataaccatgatagtggacacactgcctgtgttctactataagaagatggcgggttacatgccctctagtttcacagatttggtatttgcaagcgagaggatngaggtaggcttgagaaggaggaagttcaattatgtcgctcctgccaacacaagcaatangagaattggagcaag

SEQ ID NO: 273260 - DNA, 238 bp, Glycine max
  unsure (1)..(238): unsure at all n locations
agaattctgggactgctgttgattcaattgngtagccaattgtcccatctgattggttaagctctgaatggaggctctggtctcttgctgaaactgcatgttctgcatagtcatttgcctcacaagttcttcgagggaaggttgtggaggggcctcaactgttggctgtttctggggttgttgctcgtgctggattggcggaggaatgtatggtctgcttgcgccagtaccattttgg

SEQ ID NO: 273261 - DNA, 305 bp, Glycine max
agctatgcggatttggtcttcgccagtgaatggatcgaagtggatctgaaaagatgcaaatttaatcatcgtgcttagacgaatgagaatactgcggcgcatattgagggtgaggatgagggagatacccatgctgcgactgccattcctgtacggccaagtttcccaccaacccaactgtatctttactcagggaataacaaactttctcgttactcaccacccagttatccacataggccatccctacatctgccacaaagtctgtctaccgcactctctatgacgaacaccacctctagcac

SEQ ID NO: 273262 - DNA, 490 bp, Glycine max
  unsure (1)..(490): unsure at all n locations
tctagtatttataggtcttcttcttcaagtgttctttgtctctaaatgaatataattcttctcttgagctaatgtctaatgtttatggtcgttggagcatttaatgcttacattaaatgcatgtattttttcatgttgaaacaccattctggttggcttttgcgttgagcactatagtagaaaccactttctttgactaaaggaaaatatcacaagaaggggtattgaattgcgatcttatatttttgtttttctaaatccttttcacaatcaaaccaagttttcctccgaaagaaaaactttgtaaaatagataacacattctcaaaaacacaatcaaatgatgaaagatgattctgccaagccaaagatattttcaaatgtataaatganaattcaaaccctacgtcaattaaagcaaacaaaaataaaaaagatcatacacaaggagttatactagttcgtctctaccactagactatgtccagttc

SEQ ID NO: 273263 - DNA, 340 bp, Glycine max
agctatgagccaaaatcctgactcaccataaaccttgacccagggtgagaatgtcaatccttaccctcggaagcaaaaaaagaatagaggggaaatttgctatcaaagaaaaagagaaggaaaatttcctatgaaagcaaaaaaagaaaagaaggaaaattccccaatcaaagagtgggagaaagcaaaaagaaaagaaaggaaaattcccaatcaaagaatgggagaaagtaaaacaaggaagaagaagaaggaaagaaagctcctgatcaaggatcgaaagaaaacagaagaaatgtgcagagaggtctttggaccggacaatatctgaacaatacag

SEQ ID NO: 273264 - DNA, 463 bp, Glycine max
  unsure (1)..(463): unsure at all n locations
gacatcttgactggctntccaatctgacattcaccacagattctgccttcttctattttcagattgggaatgcctctaacagcacctttgtcaatgattntcttcatgcctcttaagtgcagatgtccaaatctttgatgccatattctgacttcatcttctttggaggatagacatgtggaggagtaactggtttcttgaggtgtccataagtaacagttgtcctttgatctgctgcccttcattagaacttcactcttctcatttgtcaccaagcattctgactctgtgaagtttacattgaatccttcatcacacaactgactgatgctgatcangtttgcagtcagtcccttcaccagcagtactttgttcagactangaagtncatcatgaactagctttcccattccaatgatctctcctttagagccatctccaaatgtcacatagctagtggagc

SEQ ID NO: 273265 - DNA, 379 bp, Glycine max
  unsure (1)..(379): unsure at all n locations
agctntccacgaagaggtccagaaaggacgctactggagaaagctccagcgctaccccgggttttgaccggcaccgatttcggagtgccaagcatcagcagcgcttcgaggccatcaggggatggtcattccacaaagagaggtgggtccagcttatggaggacgagtgccctgatttctatgaagaggtaactcgcaggtgttgggcaccacttatgacccccatggctaaatttgacccggagatagtcatggaattctatgccaatgcctggcccaccgaggagggggtttgggatatgcgctcgtgggtgaggggtcaaggaatccccttcgatgcagacgccctcagccaattctcggaccacccgctgatctt

SEQ ID NO: 273266 - DNA, 443 bp, Glycine max
  unsure (1)..(443): unsure at all n locations
atagatcctctaatctacaaagtccatttncagtttctttcttcccatgtcaactacgcagcttgcagttaacataaatggtcttcccaagattaagggaatgtcattatcttcacagatatccattacaacaaagcctgctgggaagataaaatgttttactctgaccaaaacatcttcaattactccatatggtctggtgatagagcggtcagccaactgtaaagtcattctagtgggcatgatttccaactctcctagtcttctgcacatggagtgtggcataagattgatcttggctcccaagtcaatgagagcttttccactgtgacttacctattgncaaggaatggcacactccacggtctttgtgcttcgtggaatgattttgaataccacactgcaattaccctcacaactatattttcctagtgaatgtactt

SEQ ID NO: 273267 - DNA, 413 bp, Glycine max
  unsure (1)..(413): unsure at all n locations
agcttctcaaggaagttntcttaagaaaacttctcaaggaagctacctagtctataaatagaagcatgtgtaacacttgttggaactttgatgaatgaaagtcttatgagatacacttcaaagttccacttctttccttcttttattccttcaatttcgcgctccccccttctctctttcttttcctccattaaagcatcctcttcaagcttcttatccaaggcaattcttggtggtgaagctccttcttccttggcttattccctagtggatggtgcctcccctatcctcttctcctttgccttccgctgcatctccatggtgaaaaatcaccattgaaggacctcattgaagctcanagatccagcctccatagaagctccacaagcaagcttccatcacttttcacacag

SEQ ID NO: 273268 - DNA, 364 bp, Glycine max
  unsure (1)..(364): unsure at all n locations
aatcggacctcagtgtgaaaagttatgaccattcgaatntctctagagctttcgtggtggaattccgagcgtctagacatattatgtgcccgaatctgacctccgtgtgaaaagttatgaccataagaatatctcgagagcttccgctgttgaacttccagcgtctcaatatattgtgcgcctgaatcggagctccgtgcgaaaagctctgaccatttggatntctcgacagctatcttggtagaattccgagcgtctcgacatattatgtgcgcgaatttgacctccgtgtgaaaagttctgaccatatgaatatctcgagagcttccgctgatcagtttcgagcgtctcttcatattatgcg

SEQ ID NO: 273269 - DNA, 435 bp, Glycine max
  unsure (1)..(435): unsure at all n locations
agctttgagaaacatgtgatcctttggcatcatcaaaacattcagcttgatcctttgtctacaatctccccctttttggtgatgacaatccctgaaatcaagacaagctatatacaagatgatagcacgttcacacagcccttactccccctatcttttggcatgtatgcctaactttaatgattttaattgatttctaacccaagttctaggttctctccccctttggcagcatcaaaaaagaattaagcaaaacaatcaatatctaaacagagcctaacataaaaccaaaataaatccatacattgtcataaccaaccaaaggaaagtcgagaaatataatagaagtgcangattacgataactagagcaacaaaaaaccaaatacacggccgataaacatagtacctaatatacttaatcataataataaca

SEQ ID NO: 273270 - DNA, 423 bp, Glycine max
  unsure (1)..(423): unsure at all n locations
tcacttaggctataaatagaggccatgtgtatgcattnttttaactntgatcacttgagaattacactgtanagttcatacctcttttgaggcacaaaattntgtgccccttctctccctctccctccactcatcttctcctaccttcaagctcttatccaaggcttcctatggtggtgagcttcttcttgactcatcttttccttgaagtggcatctccaatcatctntcttccttctttattctgctgtcattaaacttcatgcaccaaaggactccattgatgaagaagatccaaggcctacaagctgcaatggagctacatcatgtggtatcaagagcatcttcatctaggtgatgtgctcttgcttcctttatctttntgtttggtcaactcactttacattcttgttcttcatctta

SEQ ID NO: 273271 - DNA, 311 bp, Glycine max
  unsure (1)..(311): unsure at all n locations
agcttgaagtgagaaagtgtggaagagtcagtcttcctacttttattcgttgaccacagagtggtacctggagatatgtcgcgggggtcacgagaccttggggacgtcaggtggggtgctattgcccaaaaccaagcttgaccaatcccgacccaacccgggcatagtcagtcagtgagaacctgtgacctacctaaacaggcgagctcttggcagtcaaccgataaaagaacaaagaccacanagcaaggaggcttgtgtggtggctggccagctatgaatcttgagtggtatttggaatatggcctctg

SEQ ID NO: 273272 - DNA, 417 bp, Glycine max
  unsure (1)..(417): unsure at all n locations
tgcccccnnccacggataaaagtatataagggggnnttannnctttaccccccanatcggagggccccacgcacccctttataaagagcatggaattttgtgaccttgacgaggacagggtggaaaagctaaggcaaatcctccttcttttctaagttgcggaccccctattctcttatcctctttctttctcatgaacatctgttactttatccagtgatctgggggaactcttttcatggtatcctatggagggctctctacttttcctgttcgtgattcaggggaatacataaagactttgactcaaatcgctctaaaccccacacagttcatcagtgtatcaacacaagctcagtagggtcttaactcctaatttttgttaccttttcatgtgatcttattttctcatcattg

SEQ ID NO: 273273 - DNA, 351 bp, Glycine max
  unsure (1)..(351): unsure at all n locations
agctngtaatcaattaaaccgatatgagacataactttgcaagcttaaaacaacgtgtgtaatcgattaatataagattgtaatcatttaaaatagagagttttgccttctaaagaaactttctaacttttgaaattttctccttactcacacatgatgatgcatgatgcacatatgatatgatagagactaagatgcaacatacaatacaacaatcaatacaaatgccactcaagagagttgggcgtgtaaatgagagaacttcttcaagctcttcttcaagcttcaaggctaagtcttcatgttgctccccctatctctgacaatctccccctttntggctttgatgat

SEQ ID NO: 273274 - DNA, 427 bp, Glycine max
  unsure (1)..(427): unsure at all n locations
tgatgaaagctncaataaactcttcttattatgaatgtgaactctatcatgcaaaattgtgtggtcactagcagtcatattttcaattaagttcatggcttcttcaggtgtcttcaacttaatttttcctcctacagaagtgtcgagtaactgctttgactgcggccataacccatcaatgaagatgttcagttgtataggctctgaaaaactatgagtgggagtttttctcagcaagctatggaatctttctaatacctcactcaaagattcatcgggaaattggtggaatgaagaaattacagctcttccctctgcagttntagactntgggaaatatttntttagaaacttctcaacaacttcatcccaggtctttaaattgtcgcccttgaatgaatgcaaccatctcttggccctcccaaat

SEQ ID NO: 273275 - DNA, 420 bp, Glycine max
agcttagataacccacaaccaattgttaatgtgaatcctgctactagtagaggctcagggccccataaagagaaatttcacagttatctaggggttgttgcaagagaaaaaattcctattgtccacgcgaattggagtgttgtcccagacgatcttaaaaccctaatatgggaagatattttggtaagtcattttaaatacacgtatgtttatcattgtatttttaagtttgatttaaatgaatcaattacttactgttacataacaccattattatgtgcaacacaaatttgacatccctgaacgtgaggatgagaagaagaaggtgatgtcaacaatcgcaactagatggaggcaatttaagtcttcgtttgaatttaaaattgtctattgtaacaatgacagtcaacaaatatctta

SEQ ID NO: 273276 - DNA, 419 bp, Glycine max
  unsure (1)..(419): unsure at all n locations
cctgtaagttagggctcgatntagcgctaagcctgacatctcaggctaagtgcaaattgtagaacaattttgagttgcagacagcgctaagcgcaggcctgctgcgctaaacccatgttgtctttttgagatgttagggtaagcgtgcctatcgcgctaagctcaaatctctctatgtttatgaaaaatgtggatttaggctaagtgcgctacactaagcctaatatgcagaaaatattttctgagtactcaggctaagcgcgtggctatcacgcttagcccatgaacaaattttcataaggcgcgctaagcccagctntctgtgctaagcgcccagtcctattttcagttntttttctgttttccaattatgaataactcctatctaatcctcgtttatcgtctatntcttttcagat

SEQ ID NO: 273277 - DNA, 337 bp, Glycine max
  unsure (1)..(337): unsure at all n locations
agcttgtagggttaaagtctcacgattgtctcgtgctcatgcaacaattgttagccgtggctatacgagacatcttgccaaacaaagtcaggttcacgataactcgcctgtgcattttcttccatgctatatgtagcaaagtgattgatccagtaatgtttgatgagttggaaaatgaggccgcaattatactgtgccagttggagatgtattttccccctgctttctttgacatcatgattcacttgattgtgcatctggtcagagacatcaaatgctgtggtcctgtttatctacngtggatgtacccgggtgagcgatacatgaagatcttaaa

SEQ ID NO: 273278 - DNA, 465 bp, Glycine max
  unsure (1)..(465): unsure at all n locations
agtatgtatggcanaacttcattactggtgttcaagacatacaagtgagcttgtaacacatgttctacacttggagtgatcacatgcagtcctcttgaacccttaccacccactcggtcatcatgccgagactcaggaagccaataggtttagccttctctaagtattctgaacaaaattcaatggcttcttctgtaatgtacctctcaacaatagatgcttctggatgatataaattctttgtatacccttttaagatcttcatgtatcgctcaaccgggtacatccaccgtagataaataggaccacaacatttgatttatctgaccagatgcacaatcaagtgaatcatgatgtcaaagaaagcacggggaaaatacatctncaactggcacagtataattgcagcctcattttcaactcatcacacttgacaggatcaatgactttgctacatatagcatg

SEQ ID NO: 273279 - DNA, 313 bp, Glycine max
agcttatgaaattgggcctggagttggagctgtgatgatttttctgtgtgtcgcggcggcggtggaagttacggtggcatccgcacgcggcgcacgttagcgagcgcggttcattggggttggatgaagaagagggcatgaattcaccgcacccatcaagcgcgtgaccacctatgctggctgcatggtttttgaggcactctttgtagaaaaccgtcctggagggtggctgttgcggcggcgacacggtggttgggtggtggtggtggtgcttgagggaaccgtttgtggtggtgttgggttgtggaggggt

SEQ ID NO: 273280 - DNA, 462 bp, Glycine max
cattcgttctaagagtagtcttgtcctacaaatacccattgggacaatatggatggtttgccttcattctatgaagacccattagtgcttttttgaagaaaaaaaacactattttttaggtgtgtttgtgatccattgtgtctcattagcttattgaccagaaagtgattttgaatgctcataacttagccaacaactaatgggacctataaccaatataagcactattcacattgggattagttgttgtactaaactgttagtctaaaaaatcaccatttgtttcaatttaatattcttataattgatcatgagtgttagtgactcattcatctcactaactcatattgacatgaaattatctttgataggttcatgttgaaaaaaatacatctagtagagtcttgtcctataaagacttgtttgacccatataatcttactctagatacgaccacatgag

SEQ ID NO: 273281 - DNA, 430 bp, Glycine max
agcttggttcgaggtacatacccgttgaagatcgaagaacgatgaagaacgaatgaagaacgtcgaagaacggttgaaacctttgcgaaattcctcacggaaaacgttacggaaacatttcggaagcgcctcggcttagattttcttcacggaaacaattttttcaagcaaattcgaaagagagagaagtgccaaaggggctgaacccttttcttcttcacttcctcccctatttatagcaaaataggggaggtggttgccgtctagctcgcccaggcgagctcagctcgcccaggcgagccaggttgcttcctccagaagcaacagccttttggaggaatattctggagggcccaagtgggcctgggtgctatttgcaaccccatttttactaagtacacccctctgctttttttgtgattcttttttc

SEQ ID NO: 273282 - DNA, 492 bp, Glycine max
  unsure (1)..(492): unsure at all n locations
aagcaaccagctcgcctgngcgagctgtgttgcaacctccttcccccattttgctataaataggcatggngggctgaagggaaaggttcaacatccttagtaagcatatttcactaaaattagtgagaaaaaggagaaaaaagaagaaaaattgaggcgcttccgtaacgctttcgtgacatttccatgaacgttcttcgccgttcttcatcgttcttcgatcttcgaccggttattnttcaacatcaaagctctgaattcattctatgcacccttagggatccattcttgctttgtatgtcttcatcttcattcttctaccgtcggtattctttntctttgttttaagcgagtttcgaccgatcgcttaagccgtaatctcacttaatcaatgatcaaatgaatntcaactcgatcattgcgttgtaatctcgtttaatcagctctaaaataaaatgcaaccgatcattcatgctgtaacctcgtcatcaa

SEQ ID NO: 273283 - DNA, 431 bp, Glycine max
agcttatgacatgcttggattagcgaaagagagtttattggatgctattttatttataaatgagtgctctcagtcaaatgatcctgatctctcactgaggcaaaataaagttccagattatgctgagcgtttggttaagaagcagatgcgttctgcttggttatttcgagaggcagctattaagcatggtggggtccatagtcagggtgatggtggtgatatgtatggcccagagactgatgattcggaatgggagacagctagtgaaagtgatataggaaatgatggacgggatgacatgggtgatgacgacgatggtgattggaataatgatgatcagaggaaagattatgacaaaccttcaatgaaagggattttcactataaatttcctattcatatgctgtattaataatttccattattatgtga

SEQ ID NO: 273284 - DNA, 469 bp, Glycine max
  unsure (1)..(469): unsure at all n locations
tgctgagttgcgagaggttgcgaatggaaacatggatgtactcgatgctgttgatgtttgagaattgttcagtggcgtttggcatgtggttgggttggttaattgccaagggttactaattaatctgtattctctatgtagctcgttcttgttaattgttaatctgttgatgtgagactgagtgatttgatgagtcagatgatccagcaaacactttcattcttctatatatatggtatgatatgatgatgattgttgtacacacttgaaaatataattatggcacgatgcttttgtcgatacatgcaccacgtgttgattacgttatatcaattgacacacaacagcaatggtcttgcaacttttttgactattctaattactagcatcttattattattatcagntgttaacaatgttctaagatntctaagagtcaatcattcacatcagttntaataaaatatat

SEQ ID NO: 273285 - DNA, 315 bp, Glycine max
agcttgagatgaggaagtgttgaagggtgaaacttcctgcttttattgttgaccacagagtggtacctggagatatgtcgcgggggtcaggagaccttggggacgtcaggtggggtgctattgcccaaaaccaagcttgaccaatcccgacccaacccgggcatagtcggtcagtgagaacatgtgacgtacctaagcaggcgagctcctggcagtcaacagataaaaggaaaacaagaccacagagcaaggaggcttgtggtggctggccagctgtgaattttgtgtaatatgtggattgtggcctctggtaat

SEQ ID NO: 273286 - DNA, 336 bp, Glycine max
  unsure (1)..(336): unsure at all n locations
tctacttatgtggcagggcgggcttncttcaccttcttgtctccaacgtgaactttgaccattgttcttccttcccgcgatgcttcttttcatgtccgcctgagtgggcttatagcctaaaccatacttcccacgatttccttgggtatttatcaggctagttatgccgccgttgttttttcctaaacccatcccgggttcataaccgttccccaacataactcgggccatcattaccgctgcatcggacagacaaggctgtccaaagagggagtccacggaggaaatgctgaccacctcacaagactggaaagcagtttctgacgattcttctgc

SEQ ID NO: 273287 - DNA, 249 bp, Glycine max
  unsure (1)..(249): unsure at all n locations
agcttcatggagaagccttggtgattcgcatgtgttgtgatgataacgatagatgatgacaaaggtgatgacaaanagatcatatctcaatctcagaacagctcttgtgaatcatgaacaattcaagagttcgagagaagaatcaagaagaattcaagactcaagaagagagtgtagagtcaagaatccaggttcaagatctctagaatcaagatccagattccagactcangattcaagaatcaagag

SEQ ID NO: 273288 - DNA, 408 bp, Glycine max
cagaaccatgctatgtgctcgcgactgagccctctctgcccttcgcagcttgagttcactattgctaccccatagagctccgcgaaatttattccggccatactcttgcttgcgagccctcttggtctcttgttcaagggcccttggggtagttgcattctcttcctgtaacccggcacacttcttgcgaatgtgtgtagcggccaactcgaacttctccttggcaagtttcgcctttcctaactcgctcttgagagcttggacttcttcgtcctctatcggtgcctcaaaactctcttcgctgatgactattaacttggcgagccaatctaaacctcgtatatgaactttcagccattcatggtagccaccaatgatgccattacgaatgcctctgagttcttgatc

SEQ ID NO: 273289 - DNA, 396 bp, Glycine max
agcttcatctgatgtattagtagataatatttaattcgcttattaatcattatagaataaaatatggtatatgtttttgcgggacaattttagatttattatcttttttttctaagcagatgtgatcgactacactagacattagcattggtgacaaatatattgttcaaccttcgtaccatattattattattattattattattattattattattattattattattattattattattattactctctcttttcgttaatcttttctttctccaactatcatacatctgttggttttgttattatgataatttaattttggttttgtaaatacagaatcacgggtattgttcccaacaagtgtgttgcatctttggcgggcacaataaacaa

SEQ ID NO: 273290 - DNA, 383 bp, Glycine max
ctcatcgactccagattgctgtatagaacgacagatatctgtatggtgatctacagaagaacatagaccatagactcttgcaacaggtgcagatgcagatctttgattcatggcaagctgagttactacgtagaccaaggcatcaagttttccctcaagcttttttattttcagtagatgaagatgaatctatggccacctcatggactcctctaaggacaatagcatcatttcttgcggcctcagttgcttgttgtctctgttgttgctgctgctgtattggaggaggaacatatggcttgcttggaccagtagcattctggaagggagggacaagctgatgttgttgtggaggacttgtccatctcagatttggatgattc

SEQ ID NO: 273291 - DNA, 390 bp, Glycine max
agcttaatgatagccgcaatagatatgagctaagctcagcagggctacgcttagcgggaccataaatttcagaaatttcactatgtttgtgggcttagcgagctatgctcacttagcccaatggctgctgtaacgaaatgagcttagcccagataggctaggcttagtgtgcgtctttcaacaaaataattgactaagttacttaggcttagcaaattagccctgcttagccacaggcaactcatcagggagatgaatgttcttccccaaaagatgaactcgcttagcgcagtaggtgcgcttagcgagttcatctgataatgcatatattcaagcaatattgatgaactcgcttagcacagcatgcacgctgtcataccctaatttcgt

SEQ ID NO: 273292 - DNA, 470 bp, Glycine max
  unsure (1)..(470): unsure at all n locations
acgttcagaaacttctggtaatcgattatacagtgcatatgttgaattcaaatgttaatagctgttgtaaatcagttctggccactggtcattgattacatcctctggtaatcgattaccagagagtaaatgtgttgaaaaagactttttaacttaaatttcttggccaaaccttttgctactttaattggaatctcctttctatttaatataccctttctaagactctagagactgtcttgatcatccatcttgaatatctttaatttctttgtcttgaataaagctttgagacacatgtgaaactttggcatcatcaaaacattcagcttgatcctttgtctactatctccccctttttgatgatgaccatccctgaaatcaagacaagttatatacaagatgatagcacattcacacaacccttactccngctatcttttggcatgtatgcctaactttacttaatg

SEQ ID NO: 273293 - DNA, 357 bp, Glycine max
  unsure (1)..(357): unsure at all n locations
agctngagatgaggaagtgtagaagggtgatacttcctgcttttattcgttgaccacagagtggtacctggagatatgtcgcgggggtcaggagaccttggggacgtcaggtggggtgctattgcccaaaaccaagcttgaccaatcccgacccaacctgngcatagtcggtgagtgagaacctgtgatgtacctaaacaggcgagctcctggcagtcaacagataaaaggaacaaagaccacaaagcaaggaggcttgtggtggctggccagctgtgaaacttgattgatatgtgagatatggcctctggtaatcgattaccaagggtgggtaatcaattacaaggcttaaaaatg

SEQ ID NO: 273294 - DNA, 433 bp, Glycine max
  unsure (1)..(433): unsure at all n locations
gcgcatatntncttacatacgttctcttgcacaagacatttatttcgaanaagtgcacccatatacaatgaaggcagcttcgttacctagattatttacacgtactgccaaggtgtatttgttacttacatcacacacatctccttggctgaatttacatacatgcatactcaaagcattttggggtaccaaaaattgcacatgtgcacatcttagtatttctaatacctatatatacacaaacttcatgatgaatcttgactatcttcacaaaaaggtgctacacttcatcccttttttcaagtntttgctacctaaagccgcatgcaaattcaagcatattttcctttgcggactaaaagtgtattcaaattaaaaggtatattttntgtaatatgttttcttcacataacatgcaacatatntatatata

SEQ ID NO: 273295 - DNA, 407 bp, Glycine max
  unsure (1)..(407): unsure at all n locations
agctntgagattgatttgatcaacccaccattcattttctccacctgtgtgctgtaccagagctaagccaatcagcttgctggtgcaaagttatgggcaaaactacaaaaatgttttttttgggggggtggggggtgtactattaaaagctctattttaacttataaaataagtaatactaaatgttgcctgccaactatatcagtaaattacttgttgactacattngtatttaagttaaaatcgaatcaatgtgtttggcaagtagtttatgatcactgcatctaacattgattagtagcttcatttctcatgaaaatatgttacattgctttatcatatgtgaataatgtggagaacttttgattaaaatcataaataacacaacttacatggataaccataat

SEQ ID NO: 273296 - DNA, 231 bp, Glycine max
atctcatcagagagcgtgttctgagagagatcaagatgtgtgagttccacgagctgcgagaaattcttaaatatcttaccagtgatgttactattataaaggtgtatgccaaccaccctcttcgtagcactggatgaaattcctctccattcacaaggattggagctatcggtgttccaatatatgtaccttcctctgcctgcagaatgttgctgtcacgtcaatttcagc

SEQ ID NO: 273297 - DNA, 366 bp, Glycine max
agcttgacaacaggacatgatggtgtaggtcttgcttctcccatccctgccccaaacttattaaaaaaaaacccttgacctcaactttgatccttcttgaaggtaacccttttttacatttgatgggcactgggtttgcccgccccacccttgcccctgtcttaacacattaaaaattcagcacatttacattggttaataatctggaagttgtgcaaggatttgcacattaaaattccagcacatctgcatcacttaatcatgcacatcgaagcacctcatgcgcaagacccaattgggaaagtctacaagttagcagaccaacctcacaaacaataaacaacaaattataaaaacaaaaataat

SEQ ID NO: 273298 - DNA, 372 bp, Glycine max
  unsure (1)..(372): unsure at all n locations
tatgcatcaagcacacaaaagtaagaaaatagccactgaccctcttgcagccaagtcaacaatgtaacactggttggttacaatgaacttgttcattaccagcgccttgcctgcaacgaccattaccatacatcagcactaaaccaagcttagatggtacccgcgacatgtcttcaacactacaccaagcttaacctaagtaagtaagtaagtgatcaacgtaccgtgggcaaagccctgatcttcacgaagtgccactccttgattacaataactgcgacgcagaaaagcgtcgagtcgtcnggtgaatggaaaacaatgactaaggttgagtgatgcgncacatcaatgactttctctctttttgtctca

SEQ ID NO: 273299 - DNA, 398 bp, Glycine max
agcttatgcagcaaatatatacaatagaccttctcaacctcagcagcaaaatcaaccacagcagagcaattatgacctttccagcaacagatacaaccctggatggaggaatcaccctaacctcagatggtccagctttcagcaacaacaacagcagcctgttccttccttccaaaatgctgctggcccaagcagaccatacattcctccaccaatccaacaacagcaacaaccccagaaacaaccaacagttgaggcccctccacaaccttcccttgaagaacttgtgaggcaaatgactatgcagaacatgcagtttcagcaagagaccagagcctccattcagagcttaactaatcagatgggacaattggcaactcaattgaatcaacaacagt

SEQ ID NO: 273300 - DNA, 444 bp, Glycine max
  unsure (1)..(444): unsure at all n locations
ctagagcgcgaaaggtccaagttccagagaattttgagagcttctgctgtgcgaagactggcagagaattgagcttgaagaggaagccatcctgagagcatgagatgagtctgtgagtgattgcgaggttctataggtggaggagacatncccactacttgtatttcttcaatccttcattnttctcttctctttgttgtaaaggaagctttccanatatggagagctaaatcttctgttggttcttccttgtaggtacttgatgtaaatacctttatatctatttaatgatgttttatgtgttctctgtgctatcagtatgtcattntagtatgctttttccttgatcacgtagatgcatgctttgttaggatcattcaatagtgggaactggtctaattcttagaacttgataggacagagctagtttatcgtattatcatg

SEQ ID NO: 273301 - DNA, 432 bp, Glycine max
  unsure (1)..(432): unsure at all n locations
agcttttgtgtgaagggatgtgactcttcacatttgaatttgaatttcaacattcaaaggcactggtaatcgattaccaaaacattgtaatcgattacagctttttgaaattaattggaacgttgtaaattcaatttgaaaactttttcaaaaaaattttgctactggtaatcgattacaacaatctggtaatcgattaccagagagtaaaaactctttggtaaaaggttttgtcaaaaactcatgtgctattcaaagttttgaaaaactttttaatacttatcttgactaagtcttctcttcattcttgaatcttgagtcttgaatcttgatcttgattcttgagatcttgaaccttgaatcgngattcttgtatctaaactttcttcttgagtcttgaattcttcttgatcttatcttgaactctgattg

SEQ ID NO: 273302 - DNA, 463 bp, Glycine max
  unsure (1)..(463): unsure at all n locations
agcacatcttatttagcgtgtntaattattcttgcgctggcgcatgtttaagtattgtcacagatttggaaagcctttttactctacacttgatattgatatagaatttcatttttaataacactgctattctatcaccctagctaatttatttctttgtttactgagtgatttggctattcatttagcatgatacatctattctttcttgtgtcaaaattaaaaaatttgtaaaggctatctgtgtagatgctgcatctttccaattcagcacatcatggattttttagatgtgcagaggaaaggaaggaagacagaagggattactatagctacagtttttctcttcatttcttggtacctgttcggtgaaagacanttttggcccttttcatgcctctatntaagttcttttgggaacaatggttgcaacttgctactcaagaataccctgtcacttcat

SEQ ID NO: 273303 - DNA, 250 bp, Glycine max
  unsure (1)..(250): unsure at all n locations
agcttgcttaggtgagctccagctcgcttggtcgagctaccattgcccctagtgcccattntcctataaataggcatgctagggaagctgagaaaggttccaaggttaaaaagttgagggaattgggagaagatagaaagaattagaagaaagaagaggagagccagtcgaggcacttccgaattaccaacattataattggtcggcttctgggatgtgcacccgatcgcacacgtagtataaaatgata

SEQ ID NO: 273304 - DNA, 452 bp, Glycine max
  unsure (1)..(452): unsure at all n locations
agatgaggaagtgttgaagggtgaagcttcctgctcttattgttgaccacagagtggtacctggagatatgtgcgcggggtcaggagaccttgnggacgtcaggtggggtgctattgcccaaaaccaagcttgaccaatcccgacccaacccgggcatagtcggtcagtgagaacctgtgatgtacctaagcaggcgagctcctggcagtcaacagatcaaaggaaaacaagaccacaaagcaaggaggcttgtggtggctggccagctgtgaattntgtgtaatatgtgagatatggcctctggtaatcgattaccaagggtgggtaatcgattacaaggcttaaaaatgaagacagggggctaagatggtctctggtaatcgattaccacgggatgtaatcgattaccaggcttgaaaacgaggtcaggaagcctctggtaatcgattac

SEQ ID NO: 273305 - DNA, 350 bp, Glycine max
agcttggaagctgattcgtgagctgagctttatccggagagatgttctaaatgtcttatatcgccaagcttgagctaggtgtagtgtcagttctaaccttagcagctactatgttacaaataagacctgagagaggggatgacaaaacagctatttgtacaaccataatatactgacatccctctttatgaacgggatagagtgcgactgcgacgataatcctacacccagatgatattttacgatgtacacctagatttctcgctaagatgtggttcatgatatctccgtgcgcttagatgctgaaccacatcgaacacagacattctaaggatcctctagcttatgtg

SEQ ID NO: 273306 - DNA, 584 bp, Glycine max
  unsure (1)..(584): unsure at all n locations
atggcccnnnnnnnnnngagnagaattatagtatacntgagtacgganntnttantctcannntgtatntagaatgcgctaggctgtctggatcattcagaatgagtgtgtgatagattatactaattattacacgaaacaagacacaggttgtgactgaatgattacctcgtccgctctagtgtattaatcatctatggttcatatataatgactcgctcttgatctttaccgctgatattcaaagagtgttatctagctttaagtgcatattacaggagacaatctaacaacaaaacggcgatattatatacgttaagttccaaccgcttggctctagctattttggacaatttngaccaatgttattttaggctaccgattgtctaattaaagaccactgttgagttcatctctcagtaattaaagcttctataatctttctaggacaagatttggtgattatataacgcttacatcatgataaacacactgccggactactagtactatacggcccgacaagtcatgagtggtgatcagcctatgttgagtgtgcgagagagacactctcacatgaagcc

SEQ ID NO: 273307 - DNA, 422 bp, Glycine max
ccgatctagcttttgctgttgaatggatcgaagtgggtctgagaagaggcatatttgattatcctactttgatgaatatgaagcttggggaaaatggagacaataagaaggagggaggaacccatgttgcgattgtcgttcctacatggccaaatttcccaccaactctacaatatcaatactcagccaatatcagcctttctcattacccaccaccctatcagccaagaacaaccaaccatccataagggccacccctaaattagccacaagactcgcctgctacatatccgataccaaacaccacccttaacataaaccaaaacaccaaccaggaaaggaattttccagaatagaagcctatagaattcaccccaattgcagtgtcatatgctaacttactcccatatctactcaataat

SEQ ID NO: 273308 - DNA, 470 bp, Glycine max
  unsure (1)..(470): unsure at all n locations
attttactttgatatcttgaaccacttacttatatgtatgaaaatctcaactatataaccatacatcaccccagccccaatcagttccaacttcttttactttgatatgaaaggttaaaatgaacatctatctcagtaaagtgtcatagaaggaaggagaagagacaaaagtcacagtcaacaagaacaaaacacgacaaaaaatgaaaggtggttgagaataaattaaagaaaaaaataacacataaatgaagctggagttntatttgaatcattctgcaagataataattaataccctataaaaggtggcttaaattacaaacatgacaaactaagtttattctcttatggtttaaccccaatcataggtgcataatcaaaacttctaatgactgtangggcaaagatgcaagagaggtgaaatattcaacttacatgcaaggtcgaagaacagtgtcttcatgaata

SEQ ID NO: 273309 - DNA, 325 bp, Glycine max
  unsure (1)..(325): unsure at all n locations
agctattaaccttctnttatatgatagacttttaatgaagaagaagaagcatcaatcaatttaataatgttctttaaacgtgcaacacaaaattgattgctataaaataaataaataatggaagagagaatctcaaactcgatttatactggttctgccacttcccatgcctacgttcagtcctcaaacaatccacttgagattttccactatctttgtaaatcctttacatactgtgaacacaccttgggatccatcaccctttgttggacaagtggcttcaataacttaagatgggggggggggtgaattaaatcttcaaaat

SEQ ID NO: 273310 - DNA, 396 bp, Glycine max
agatcaagaatcaagaattatgagaagacttaatctaaataagtaggagatgcttttttcaaaaactgagtagcacatggatttttctcataacatgtttaccaaagagtttttactctctggtaatcgattaccagattgttgtaatcgattaccagtagcacaacgaatttgaaaaagctttcagatgaatttacaacgttccaattgatttcaaaaaagttgtaatcgattaccatgtcttggtaatcgattaccagtgcctatgaacgttgaaattcacattcaaatgtgaagagtcacatgctttcacataaaagccttgtgtcatcgattacactgatttggtaatcgattactagtgattggttctgaataaatcaaaagatgtaactc

SEQ ID NO: 273311 - DNA, 378 bp, Glycine max
  unsure (1)..(378): unsure at all n locations
agcttacaaaacctaggtatctctgcaaaagctgctcatcttgatgcctccagagctctttccccaaaataagcactatggtgtctgtggaattttgtgccctgngcattgtaccctaattctgcacaaaacaggctttacataggctctgaattcgtgacgttgcccttagcgccaccctcgcgcttagcgtggataagtggatttgggcttagcgccagtcgtgcgctgagcctggctgaagacacctgccgcgcttagcgcacagaactcgcgcttagcgcatggccttgatgctgagcgaatccaattgatgtgccattactttctcctatttcttaaccctttttgcaccattntaattactgattagtctta

SEQ ID NO: 273312 - DNA, 486 bp, Glycine max
  unsure (1)..(486): unsure at all n locations
ctgtatggtagaaggtgtaggacacccctatgttggtcaaagcccggagaaggcctcaccttangaccagaagtggtacaacaaaccactgagaaagttaagttaattcaggaaaggatgagaacggctcagagtaggcaggaaagttatcatgataagaggaggaaagatttggaattcgaggttggtgatcatgtattcttaagagtcactccgtggactgccgttggtcgagcattgaaatcctgaaaactcacacctcgctttattggtcctttccaaattcttaagacagttggccctgtggcataccaaattgcactaccccgtctctttctaatcttcaaaatgtctttcatgtgtctcaactccgtaagtatatccgtgatccatcccatgtgattgaattggatgatgtacaagtgaaagagaaattgacatatgaaacattgcctttgaggatcgaggataggcgaacaaaacacc

SEQ ID NO: 273313 - DNA, 396 bp, Glycine max
  unsure (1)..(396): unsure at all n locations
agcttctcaaggttttcaaatgcaaggaactcaattntgaactcaaaattccctaattccactcccatttgaccttaataccaaactgccttgcacttaattctcgaagttcgcaaaacttattttctaattttcaagagttgtacaaattcaatttatgcaaattttatatcaaaactatgttttcaaacatatggaactcattgcaatggtgaaaatctacagaaacaaactccataggtgcaattcatgcaaaacaaagtagaacttatcaaaaaagagcaaaaattgaaattgtgattccaagagatatagtaactgaaatggggtgtattttatatctaatcctagttntctggaccctagtgagttcaatttgagggccataattataga

SEQ ID NO: 273314 - DNA, 478 bp, Glycine max
  unsure (1)..(478): unsure at all n locations
tgagttggatttagccttagtttcgctttggttattattcaattgatccaaggaaacttccaaagaaaagcgtccgattgattnttttttattattttattcaaagatattttaattattttattattattttttcaagatattttgattattttattattattttgccctattttggtttaaccgtggttacaatgtgaacgatcagttagaatttggtttaatagtgattaaacgagattacaatgcaaatgatcggttgaaattcattttatcatttattacgcgagataacggcttaaatgatcgggtaaagctcgctaaaaacggaagaaaagacaaccgaaaatgaacgaaatgaagatgaaagctaaaaaaacaagacatgaatcgaaagtctcggattcgaaaacttactcgttgaagaacgaagaacaaacgaagaacgaatgaagaacggtgaagaacgacggaaaac

SEQ ID NO: 273315 - DNA, 415 bp, Glycine max
agctgtgaaaatggaatttatggcagttcatcttaaattgctgcaggtactcttccttcttcaaatactcttccttcatcttagatcgagacattgaccttgctgtcctcattgctttagcaatcaggttactcaacacagatcttattgacatattgttctttgattttccatagatgaaatgtgtaaacatacattacattcttatccaaacgttggtttttagtttttggtcggagcaaggtaattgaaattgcttaaaatagactcaaagatgcagtgccttcaataatttaacacaaattaaatgcatctgtaaataagctacacgatgcaaagaaggaaaatgcagatatgagaatcacacatgcatctctaatctactaagttcttgctaaccaggtagtcttcttat

SEQ ID NO: 273316 - DNA, 453 bp, Glycine max
  unsure (1)..(453): unsure at all n locations
ctgtgtggtggttggcagaggagcataaaccacagagtctggcgacaggtgcagatttctgattcatggcaagctgagttactacgttgaccaaggcatcaaattttcctttaagctttttatttttagtagatgaagatgaatctgtggccacctaatggacttctctaacaaaaatagcatcatttcttgcactgaattgttgggagttggaagccatcttctcaatcaaattcctagtctcagcaggagtcatatcaccaagggctccaccactggcagcatcaatcatacctctctccatgttgctaagtccctcatagaaatactgcagaaggagttgctgagaaatctggtggtaacgacagctngcacacaatttcttgaacctttccagtactcatacaagctctcttcactaagtcgcctgatgcatgaaatgtctgttctgat

SEQ ID NO: 273317 - DNA, 249 bp, Glycine max
agctatcttgagaaaactttcttgagaagctagagcttaactacacacacccctctcataactaagctcacctacttgagaagcgtccttatgaagacatttagagaagctagagcgtagctacacatacctctctaatagctaagctcacctccttgagatgagaagctagagcttatctacacaccccctataatagctaagctcacccccctgacacaaaaacatggaaagaacattacaaaggcg

SEQ ID NO: 273318 - DNA, 376 bp, Glycine max
agcttttggaatcaacgggaatattaggatttgattcatatttagccttgattaatattaattagtctctctgaggaagatatgaagcacttacaaatatgctgaagtaattcactttgaattagcagctcaaaagctatagtttgtagatccatgccttttgatcttagaaatgcaacctatgttctaaaaaataaaagtttatctttagataatcgcgacgatctaatttatagaggcatcacaagaatttcatttgtcacgtcgatttttcaaaattacagtttgataatgatcgagttccctcaaaattcttgcaggaaattgataaatcaatttggaaaggtggtaattaaatttaataaaaactcttata

SEQ ID NO: 273319 - DNA, 335 bp, Glycine max
acagcccttactcatcctatctgttggcatgtatgcatagatgtacttaacgatcaatgctaatagagaatcgattttcacgcaagcttgtcttttagttctgtcctcctctggcaacatcaccacgatctaagtcacatactcaatatccaaacagagccaaacaataaagcaaaataaatccatacattgtcataaccaaccaaatcagagcctagaattataatataagtgccagattacgataactaagcaataagaagcgaaatacacggcgataaaccaaagtactaataatacttaattactaataatacttagtcataatacttaag

SEQ ID NO: 273320 - DNA, 329 bp, Glycine max
catgcaagcttaagaaagctatctatggacttaaatatgcaccaaggcaatggtatgtgagacttagcaacttccttcttgaacaaaattttgagagaggaaaagttgataaaacacttttcattaaagagtcttctcatgacattttacttgttcaagtttatgtggatgacatcatttttggttccactaacaaatctctttgtgagagatttatacattaaatgcagggggagtttgaaatgtcaatgatgggggaagtaaattactttcttggtctacaagtaaagcaaatggaccatggaatatttcttcattaaacaaaaaaa

SEQ ID NO: 273321 - DNA, 425 bp, Glycine max
  unsure (1)..(425): unsure at all n locations
tgaagactagaatgtgtgagtcttanaatctcattctatatcattgcttttgaatgcttgaaagtaaaaatacaaggtggctatttatagataaaacaattataactacctataatcgattaaattgccaatgtaatcgattgtcttgaagaagtaatcgattagattctcatttcaattgattaaagcattctctccaaaacctagaaagctttcaagaacaatgtaattgattagattattgatttaatcgattaaagtgttcttgatcacttctgggaacactctcaagaacaatgtaattgattactatacccacataatcaattaaagcagagaccctangaaaatagacatggtctcaacaaaactatgtaatcgattatggatatgcttgtaatctattaaaccagaatgaagatctc

SEQ ID NO: 273322 - DNA, 319 bp, Glycine max
tcttcttgacatcatcaaaatcttcatgatatacattctcgccctttttgatgatgacaaccacctgtaagttatgatcaaccactaaaaaaaaatatctagttgcatatagtttactcccccttggattttcaatgattgcttatatgacacaggcgaagatttcatatttttcatatggtaacaaattgtctcataaagaatagattattattcttactattttatcatttatgtgtttctcccccttgacaaggtctaagacagatcatgactaaagaggagagagatgttaccacttgttgattacatacatata

SEQ ID NO: 273323 - DNA, 468 bp, Glycine max
  unsure (1)..(468): unsure at all n locations
tgtcttcacanataatcatcacacagcagaaccctatcaagattacccatcatatctccccaaaaccccatacccacgaaatttaagagagaaagaagtccacccaaacctgaattttcgaagtcccactcgtagccacgcacttcacgatcccgaaaatgctctcctttcacgatttggggcagaaacgggcactaaaggttgaagctttgtatggagctctaatggacaatgagggaggaagaaaggcaacgtgaaggagagagaaagctgtctgaaaaaaaagtgagggctgagtgaagagagagaaaagctttttggttttaaataaaaggttttcctctctttctattattttattcaagctctgccacatgtccctatttgattggagcaaacagggcccactntctctctttgactgtgacccatactcagtcacaaaagtggggaaaatctgacctctga

SEQ ID NO: 273324 - DNA, 417 bp, Glycine max
agctttcttgagaggcttctgtgagaagctatattcttatctacccacacccctctattaactaaactcacctctttgaaaataattacggataaaatagcacaacaaagcaccttgtcaaggagacaacaactaactatctaacccaaaatagttacaacaagaaacaattacaattacaacacaacttatgttaatgaaccaccaacttgacactcccttctacgttattggacggtccaccagattctataagattggaagatcaatatagaagaaaaaagtattggggtagatgaccaatgtttctgtcaaccctatctttattgtccatcgtccaacaatcaacaatcttcaccttggttcaataacatttttaaattacaagtgattcaattcgtttccaacaatcgacgt

SEQ ID NO: 273325 - DNA, 468 bp, Glycine max
gactagacaccttaagaccatcattcaagtgacactccaagcactaacgatataaaccaaggaggtcatgatgggagataaagaggaatcagactagatgaccccctttaagaatttcttaactcaggatgtgttaccaccaaacaaaaatgaagcccaacacctgaaaaggaaggccaattactacatcatccttgaccgagaactatacaaaagagggttgactgcacccttgcttaagttcctgaatagccagcaaacagactacgtcatgcaaaagttacatgaaggaatcttcaaccttcatacaggggggcgctccctggcaaccaaggtagtacgtgctagctactattggctaacactcaagactaacaccctcaacttcatgaggagatgcagaagatgccaggaattcacaaatgttctgcgcacactccccgtcaaccttcacaacttgagctcttc

SEQ ID NO: 273326 - DNA, 387 bp, Glycine max
gaccaaacactattgcgtttctatctctgcccagatttaaggcgggatgcagcaccggctccgctttcctaactgtactggaggcggttgccgtggctttatcctctatagttttctggagttctaacatgacctcccgagatggaagccatttgatcttttaaagctgatagatcggccttcatctgttcctgcacgccctcttcattatccatttttctggatcgagtgttataggggtgccttggtgttttcttagttatgatgaaattcctaaagaaataaacaacggtgagtaccccaccacaacatgaatatgcaaatggatgatccgagcactcggatccaccccaaggtttttagattacatgatgagttcagaacttc

SEQ ID NO: 273327 - DNA, 491 bp, Glycine max
  unsure (1)..(491): unsure at all n locations
aaggcaactcaaaatctaggtatctaacaccccctaatttagtggattntcaaggtttgagaagtgaaaatgagaatggngtaaatttggagcaaactctcacctcacacaagtctataaccttaatctaaacttgctcaaactggttttacgtctaaaattccaccaaatcaaaatttgagtcctcaacacccaattttaccctagaaatggctcttgccttcactttggtcttttgttnttctctcttgcacagcccaagctttctcataagtcctaaatgacacttcaaactagcactaactcactntaacctccaatttctactgaatccatatttagcctttcaaaccctcaaagcatcatacttttccacacataacactacattctcactttctaaccctaggttaactctacccttcatccctagcagttnntcatcagaaatntcagcacataaacatcacaagcatcatcatannaaacct

SEQ ID NO: 273328 - DNA, 415 bp, Glycine max
catgcaagcttctcaaagtataaacctttgcaatatagttagcaagtttttcacctagatgataagaaactacctagatgaaactctctttacataaccagctaactgagatcacaaatagatcaagaagaatgagatagaagaatgaagatgatgagagagatctacaaatctagattgagggataaactttctttggaagagagtggttgaagaggaagatgtgaatgatttcctttgaccaataaagaatattccaaaggtgtggttttggtagattttatgatcatgctcttggatttgaggtgaacaagtggttcaagttgcttgctgcttttttgttgagagtgatgctggaccgatttgagacgcgtacctccgtagggtgccatcacatgaaaagtaaataaaatga

SEQ ID NO: 273329 - DNA, 440 bp, Glycine max
  unsure (1)..(440): unsure at all n locations
taatcatttccaaatatgtatgtgaattacgacgcatcatcaagaatcaagccaaggctattgtgcaagcaatcaatggngcaaaacacaccaaatgattataatgatggatggctcaaattctcacaaaggtaaaatcatcactttcaaattgagctttcaaaactatcatgacatgtagagaagactcaaggcatttaagtcacacaatgtcaagaacttcttatttcaaaacaattacccatttcttgaacatatcctataattcagagaaaaacatgcaaagtcgtacgtgcacacgaaattgacccacaatattaaactgataatccgacgaaactaacaacattaacaaattaacacacctaacaaattaacaaaaccaacataactagcaaaaccaaagaacactcctccaccatacttaaacaacacattgt

SEQ ID NO: 273330 - DNA, 398 bp, Glycine max
  unsure (1)..(398): unsure at all n locations
agcttcaatcttcgcttggaggctgattagagacatgctgccgactaatatcaacttaagaaggagacacgtacaaataagtgatgcattctgccccttctgcagaaatgaggaggaggatgcatcccacttatttttcgattgcaccaaaacacaacctctatggtgggaatccctatcgtggattaaaaccctaacggcatatcctgttaatccaagacaacatttcttgtggcacacaaacaggaggcatggaaagaaaaactataacaaatggaaatgctggtgggtagccttaacctggaccatttggcggcatagaaacataatcatnttttcaaacgaatcattcaatggaagcaagatgttggaagatgcagtgttcctagtttggtcat

SEQ ID NO: 273331 - DNA, 362 bp, Glycine max
  unsure (1)..(362): unsure at all n locations
agcttaggcaaattgccctctccctacatatgtcgcactcccaaagatgtactacttgcttggaagccatagtaggatagtaggaaagaagttataaaaggaaacaaccttttagttacataagtgatgcttttaatgtgagttaaaaaatatgtgaagtaaaactgtaaaagtaaaatagtgagtcttgttaaaattcatcctaattattaattntaatccaacgattattatttgtttaaattgaaattctttagtttttataaattgaggagatccattcccatgagcggggttatggtaaacgacgacgaaatagaagccattgaataagaggatgatgattatggtgatgtcaaaac

SEQ ID NO: 273332 - DNA, 371 bp, Glycine max
ctttggaaacacattctatttctttcttcttttctgacgcacatgaaccctaacagagcaaccagaggaggagctctagagagcatcagagacgccaccattgctaacagagaatatttaagcgactacatcgaggtaagggatgagttactcacgcttggggattagaatgaatatgtgtagggatccctacaggatcaatttttgggttattttggggtggttatgcaattaattatgttttcatgtttaatcgcggattgagtgtgtttgatgaaccaattggtgttctgttgcgagtttgttgtacaattgatgtgttcccgtgttaggtgcataccttacaaattagaattctctataattagcat

SEQ ID NO: 273333 - DNA, 494 bp, Glycine max
  unsure (1)..(494): unsure at all n locations
aagggacttganaccttagtacccgcgtatttgtacccgggatcctctagagtcacctgcggcatgctagcttagctcctctactcttctgggatgtctctcccaaagcttcgcaggaagtgtctcaggaagcttccctagaagctacctaggctatagatagaagcatgcgttacacttgttgtatgctttgatgaaagagagccttgtgatacacaccttanaatccaactacgctgacttattgttccttatattgtcgcgcgcccgccctctttattatccatcccttcttgatcgactgcataaaagcagcctctgcaagctctttattctgagctcatctcgtgggagaagctctttcttgcatggcttattcccttgtgccaaagctagaggattgtcggatcattcccttccaccctcatgtcatattattacttgatgaatatacatctcctcgtggtagggataatgcaaatcttacatccacg

SEQ ID NO: 273334 - DNA, 503 bp, Glycine max
  unsure (1)..(503): unsure at all n locations
aagcttggactctgggaatttctctgcactagtcactntaaaagttgtgactnttgaaaaaatcttcagaaacaagtcacttgaagaattgtgacttttggaaatgtatttttcgaaatcagtcactggtaatcgattaccattaaggtataattgattgcacatcaacagatgtgactcttcattctaaattttgaaaatcaaaacatttacaagctttggtaatcgactacaggtattgtgtaatcgattacacaagtttaaaatgatttacaactgtttaaacataagttgtaactcttgaaatatgaaatctaacgttttaaaacactggcaatcgattactaccttctggtaatcgattaccacagtaaaactctctggtaatgatcttgtgacaacttcttgtgctactcaatgttttgaaacactctctttttagtacttatcttgattgagtcttctcttgattcttgaatcttgagtcttgaatcttgatcttg

SEQ ID NO: 273335 - DNA, 346 bp, Glycine max
agcttggagaggatgcttcaatggaggatatgaaagagggagagatagagagaggggggagcacgaaattgaaggaagaaaaagggagagaagctgaactctgtgttgtgtctcacaagactctcattcatcaaagtcaccacaagtgttacacatgcttctatttatagactaagtagcttccttgagaagctttcgtgagaaaacttccttgagaagcttctttgagaaaacttccttgagaagctagagcttagctacacacacccctctcataactaagctcacctacttgagaagcttgtttacgaagattcctacatgagctagagcttagctacacata

SEQ ID NO: 273336 - DNA, 404 bp, Glycine max
cacatactgtcatcgattaccagacgagtttttcagacatcattctcaacagtcacatgttttacttggttcttgaatggtcattaaacgcttatatatatgtgacttgagacacgaatttgccaagagtttttgaagaacaacaaggtcttatcctcttaacaagcaaaattgttttatcctcttacaaatgtcttggcccaaacacttgtgattcataaggaattattgagtgctcaaattgtcaatctatcttctcaagagagatacttctcttcttctttattctgacaggattaaagacttgtgtatcgattacaggctctaaaattgaatacaacgtctatacactggtatcgataccatcatggtatcatacacatgtaaattgattcaattctatg

SEQ ID NO: 273337 - DNA, 318 bp, Glycine max
  unsure (1)..(318): unsure at all n locations
agcttcttagtctcacctgatgaatatgttgctacttcatgcactcctctaatgacaatagcatcattcttggcactgaattgctgagagttggaagtcatcttctcaattaaatntctagcttcagcaggggtcatgttctcaagggctccaccattggcagcatctatcatacttctctccatgttgctgagtccttcataaaaatattggagggggagctgctttgaaatctagtggtgagggcaactagcacataatattttaaatctctaccagtattcatatangctctctccactgagttgtctaatgcct

SEQ ID NO: 273338 - DNA, 353 bp, Glycine max
agctttgaaagacgacttatcataccagcataacactccaaacccatttgccaactatgcattaaagaaatgtactataaaatttagtagctctttggagtgcgaatctgggacaaaaactttgggttctatgcctcaagattattttaatccatagacagcgcatgctccttaattttataaaagaaatttatttgcaagaatatctgtagccggagttgtttaaaactatcttagacttagtcttaaatttatccgttattatatatttctttaaaattattcttagataattaatatatggagaaagaataatatagtagtagagtttttatgattaaagttaaactctc

SEQ ID NO: 273339 - DNA, 282 bp, Glycine max
agcttcttgcttgaaaataagaagacttatatgagtaattttcttcccatacaagtacttggatggaagtatattttcaagtaaatccaccatgtaatattcttgtttactactacttcataacctactcataaaaaactattgaatctattgactaacaatttttatttttcacttttcttttgcaagagtatgttgctaggtctggatgatcattcatacctatattaggatttgatgattaacaaaaatataaagttgtgatatattaatgatgagtta

SEQ ID NO: 273340 - DNA, 363 bp, Glycine max
agcttgtcaagctatctctctccttattgtatatatatatgttatttgaatgaaataaagccaagctagtgagtgaacagttttcttcctcacaaaatcaaagcttcaagtgtatcatcaataacctcaataagaaataagcaaataaattcccaaattgagtagaaaaaaaaaaaagaagaaagaaaaattgatacaagtaacaacaaataaaccaaaaataagtcattcagataagcaaccagcaggaattttacaagaatttacttagaatacagtgcattaagacttaaagagattttttgggaaatgctagaaaaacactttgagacattcttttaaggataaatactcattctgatc

SEQ ID NO: 273341 - DNA, 420 bp, Glycine max
  unsure (1)..(420): unsure at all n locations
gacacaatcgacataatcacaattaataagattcatgagttcgtggttcagggaagaggcttagttgttaagctntgaatagagcctaccgaaagggaaaaaagtttgaagcttcaaaatgtagtatatgaaatcaaaatccaacgagaggaaaaatgtgggattgaaccatagcacgtggatctaagaaagatggcttgaaccaaactcaacaacaataaacaccacacccattgttcatactccatcccacaaaacatgaaacccttgactctccctgagtctacggatgagttagatgcaaacaagattggtgggctagatgtctctgcaggagctgtgagaatgagagagtacgatgtacactgcaaccaaaatctgaagcaactgctagagctctaatttctacacgatgacaac

SEQ ID NO: 273342 - DNA, 436 bp, Glycine max
agcttaaacattcaatttcgagcgtctcgatatattacgggactcaatcagacatccgagtaaaaatttattgtcgtttgaattggctcacaggttcaacattcaattttgagcgtctcgatatattacgggactcaatcagacatccgagtaaaaagctattgtcgtttgaattagctcagagctttaacattcaatttcgagcgtctcgatatattacgggactcaatcagacatccgagtaaaaagatattgtcttttgaattggctcagaggttcaacattcaatttcgagcgtctcgatatattacgggactcagtcagacattcgagtaaaaagttattgccgtttgaattggctcagacgttcaacattcaaattcgagcgtctcgatatattacgggactcaatcagacatccgagtaaaaagtattg

SEQ ID NO: 273343 - DNA, 445 bp, Glycine max
  unsure (1)..(445): unsure at all n locations
gagcaaattcgaacgacaataactctctactcgcatgtctggttgagtcccgtaatatatcaggacgcactcatttgaatgttgaagctgagagcaaattcaaacgacaataactttttactcggatgtctgattgagtcccgtaatatatcgagacgctcgaaattgaatgttcaacctatgagccaattcaaacgacaataactttttactcggatgtctgagtgagtcccgtattatatcgagacgctcgaaattgaatgttgaacctatgagccaattcaaacgacaataactttttactcggatgtctgattgagtcccgtaatatatcgagacgctcgaaattgaatgttgaacctctgagccaattcaaacgacaataactnnttactcggatgtctgattgagtcacgtaatatatcgagacgctcgaaattgaatg

SEQ ID NO: 273344 - DNA, 432 bp, Glycine max
  unsure (1)..(432): unsure at all n locations
agcttcacgaccaatcggtttttgcttccttcaccatctgctcccctggagctgccgactgcaacaagttccccaccattaccaacacttcccaagtttttggtcaaatgcctactagtcgaagaattggcaaaccacagggataggggtctgtgttaccactgcgatgagaagtgggttactggccaccaatgtaagccccgattacacctgtttatcgcatatgactagtcagagttgtcattgtctccctcaacaacagactcctcgatcagtttgccggaacctttggcctttgaatcccctcacctgagcctcaatgtaatgtcgggcatgcctccccaactactntttgcatttatgggaccctaaaccatcaccaagttatgatactggtggatggtgggagtatccacaatttcatactagctc

SEQ ID NO: 273345 - DNA, 318 bp, Glycine max
  unsure (1)..(318): unsure at all n locations
tacttgtgaaagagagccataaaggtgggctcatgggctactttgggatagacaagacccttgtcttactcaaagaaaagttttattggccccatatgaagaaatatgttcataagcattacactaggtgtgtggcttgtttacaagccaagtctacggtgatgcctcatgggctatacacacgcttacccattccctctgaaccttggtaaacattantatggactttgtccttgggcttcctagaactcaaagaggtgtagacgctatccttgtggtggtggataggtttagcaagatnggcacatttataccatg

SEQ ID NO: 273346 - DNA, 440 bp, Glycine max
  unsure (1)..(440): unsure at all n locations
agcttcaaaccacagcaacacanaatctaggtgtccaaaacccttcaatttaatggattctctaggcttgagaagtgaaatttagaatgaggtaaatttgaagcaaactctcacctcacacaagtccataacctcaatctaaacttgctcaaactgaatttacacctaaaattccaccgaatcaaaatttgactcttcaacacccaattttgccctagaaatggctctttattcactttgatcatttgtttttctctctagcacagtccaaactttctcccaagtcctaaatgacatttcaagctaatattaactcactttaacctccatttaccacagaattcagacttatccttccaaccctcagagcctcactctttntccactcataacatcacattctcactgtctaaccctaggttaactctaccattcatctc

SEQ ID NO: 273347 - DNA, 192 bp, Glycine max
aacttcgagcgtctcgttatattataggactcaattatacatccgagttaaaagttatcgtcgcgtgaatttgctcggagctttaacatataatttcgagcgtctccatatattacaggactcaatcagacatacgagtaaaacgttattgtcgtttgaatttgctcaaagctctaacattcactttcgagc

SEQ ID NO: 273348 - DNA, 399 bp, Glycine max
acttcgtctgcagtaaaattgatggagggagagccatacactctgttagatctgatccccttctcattgtttggattaaaaaagtattcatctaatacgatatgacctcactcgttcattatctactttatcgaataagccctagattgatggacctggcatgtcttatgtaccctcccacatagtaacatagaggtattcaatgatctcagactcacggcctggagtttatcctataaaaatgccctgttaaatgtacactatgccctatgaggttaaattgcgaaccaccctgtaccaactgtggtttgaaacagcgtatttagttgtgactaacatgcctttaataataaaagcgatcacattactcgtcgaaatgaaaaccttatccaatgctcg

SEQ ID NO: 273349 - DNA, 551 bp, Glycine max
  unsure (1)..(551): unsure at all n locations
attcnnagaggnnnnnnngnnnaatatgtaaaagtatgagagnggnannnnnnttttannncnnttncnancacctcacactatatgatactcaagcttctgatgagaacgcgtgctcatgatagcgtgtatgctacatattttctaccacatgaactcggaaatgtgtgaaacgtgcacaacgtgtatggtgctatcaatgtaaacaagatgcattaggatcaccttcttaagcatcattaatttattggcacgatgactgtcgttatataccttccctaatcatgcttgaaatagatgagtactccacatgtacgtatagactacgcaccttttggttgtgaatattgactaatagacactcatcggacgtgatgaactcatatcctaagaatgatacacatctgcagcatatcactacataagaggtacattatgacacaaacctacaaccacgagctcatagaatcgatggtatgtagaactcctccattatacaaacaaaatacgtgggatgctataatccgaatgtggcaacaaacagcagtttt

SEQ ID NO: 273350 - DNA, 303 bp, Glycine max
agcttgtttaccccatgttgagtttgcttactatagagttgttcatagcaccactaattgttctccttttgaagttgtttacggttttaacccactaactcctcttgatcttttgcctatgcataatgtttcggtttttaagcataaagaaggtcaagcaaaggcggactatgtgaagaagcttcatgagagagtcaaaaatcaaattgaaaggagaaataaaagctatgctaaacaagtcaacaaagggagaaagaaggttgtcttcgaacccggagattggagttgggtgcacatgaaaaa

SEQ ID NO: 273351 - DNA, 439 bp, Glycine max
  unsure (1)..(439): unsure at all n locations
gcttcatgatgttgaatcaagactgattcaagttgttctgatgatatctaagatgatgacacacagcccaagagaatgatttcaagactgagtcaagaacaattcacgaatcaagagaagtttgatttcaagattcaagagaagatgaattcaagattcaagagaagaaatcaagaagacttcacaagggaagtattgaaaagatttttcaaaaaacaaatgtcataccctaatttcgtccggggactatcgcttgatggcatgcaacctttgattgaccacttcgaagtacttagcaccctttgttgcacaatatgtgaagtcccgagacacgccggaaatcaaaagaaagcatggttatgcgatccgtgaaattccgtaatgtggcacaaaccaaaaggaagtattgctacgcaatctatgagtntccgtaacttct

SEQ ID NO: 273352 - DNA, 381 bp, Glycine max
agcttagaacaataaacttggccttctcttaattgtctttgggcttggcgaccacgatcaacaaagtactttcggcacctactatatgttgacttgaccaacgctgttattggaatgctgcgacaatctttcaacaccttattcacacattctgataggttggttgtcatgtgaccatatcgtcgtccagatgtatcgtaagccatgctccatttttcctttgaaatgcgatcaatccatcttgctatggctggactcagttgacgaaatttttctaagttttgatcaaacacatgcttgcaaggagtgtacgctgcatcaaatttgttatcatcaaaagttgtacgtagacatcaaactcaaattaaataatgtataaaa

SEQ ID NO: 273353 - DNA, 404 bp, Glycine max
tacaaccaatattatttatcctatcaagccacgactggcttttacacaaattagaagatctattggtttgattgcacaatgactaacattttatcatcttacatacggatgaatagtttcaacacttagttctttctctcaagataaacaaagtatttcgagagcatttatcactttacaagaatttacacataaaattctatacaaaaagacttctgaataatgagtgctccaattctaacttcatatcttcaaactttctagtctctaaaggtctccttcaatcaagtattcgttgtctctaaatgaacatatatcctctcttaagcttgcatatgaacaatgtgatcattggcgcacctatgttccgtcttcttcatgctcacaaaatactttgtgtcact

SEQ ID NO: 273354 - DNA, 375 bp, Glycine max
  unsure (1)..(375): unsure at all n locations
agcttattctttcctctgcactcctaatgttgttaaagtccccaagaacacaccacagaccccctgngttagaggccttcaactgccttaattcatcccataacactttcttcccagcaaggtcacaaggggcatacacatttacaatcagcaacctctgattgttgatgatgcatctcccttcaagcattaaaaagctcctacctttctccctcctacttacttcaaaagtggaattattccacatacatagtagaccacccgcaacttgcacagaagggatataatcccactgaacagtcgaatccccccatatggcatgacaaatgtttttattaacattctcccttttagtctcttgaatgcacacaatgt

SEQ ID NO: 273355 - DNA, 345 bp, Glycine max
  unsure (1)..(345): unsure at all n locations
attattctaaactgttgtcagctatctaagctgagtctagtccaacaagagggatctaacgatgaagcttattttaagttagtataaacctacgagggctgtctaaattgagcctagtccaacaagaaggatctgagaacgaaacttggatcgattcagtccaactagggatcgaggtgtagtaatttaagctacaacatataacacataatcttgantgatcacagaaacatccttatatgcatcagttgctctgtcagaaagacccaacactcctacctactgctgtcaattctacttacttgcatctttatcgcttttatgctacactcaattatcaatgtt

SEQ ID NO: 273356 - DNA, 400 bp, Glycine max
agcttccctttctttggccaatgctggacctgtttggcagtgatttccttggcaatttgatgctcagaaacagcaatgtccaccactccatctgttggtctgcccaggtatttgttgattacaacaggggagaatctaacacattttcctctaacaaatactttttgatactcatcactctttctgtttgttatgtcagagggaatgttgacaataaattccctgactagactttcatagcaatctcccaacttggtgacagttttcagcagtccagcagccttgatgaggtccatgatctccttgcaatccaaggcatctcttcccagttctctttctacagcaagtctgcgttgatatacaaatttccacctttcaacattgccaatggagtggaatg

SEQ ID NO: 273357 - DNA, 443 bp, Glycine max
  unsure (1)..(443): unsure at all n locations
atcttgtacagaattagggtataaggtgtacagacactatctttgagaattccagagcacaccacagtgcctattttgagaagagagctctggaagcaacaagacgagcagcttttgtagagagacctacgttttataattagagagggattagtgagttgtagagtgattgtgaaatgctgagaagaggaggagggatcccccttcttgtgtaaggaacacatattctctactcttaatctcaattgtgctanggtttttctgtatggctggctaaacactcttgttgggaatttctaaggaacaactgatgtaattactttaatatctaattgattgtgttttctgtgttcaatgcttctttcaatgcttaatttctacatgctcttgatctgatcacccatntgtatgtntagttaggtgacgttagcattgagaaatgt

SEQ ID NO: 273358 - DNA, 271 bp, Glycine max
gacccgagctccttaagaaacctgcagcgagcctcttaatgaagctgtttaacaaatctctttacgaaatcaaccgttgctagatctaaatacactatgtctctatatgttacactggtactagttaaatagcgaacacatgctcactctcttcatttgccaaacacatcctaatcatattatcagtggctttgtacgacggcatgatgatcgatttacagcccttcatatctttgcccacattaaagtgaacccgcacaatatgcaagga

SEQ ID NO: 273359 - DNA, 331 bp, Glycine max
agctttctgatcaaagttttgaataaatgcttaattatatgggtcatctaatcgcactttcataattcatagggtgaaatgatgtggcagtttacacagtataagaggaacagagaaaaaaagttgccacataacataattctcggatgagaaagaaaagtgatgagaaggggagatacaacatcaactgcaagaactggttatgcattttgcataaatgatttttcgttttccaagcatgtgttttgtttttcaaaccttttgggaattacattgaagttgaaagtcctcaagacaagacgaaaataaagagggaaagaactgggaaaaa

SEQ ID NO: 273360 - DNA, 395 bp, Glycine max
gcgggatgaactcaggcgagggactagcattcaccaatactgaggtagaggcggattttaagcatccctcaatccacctaatacatttggacccgaaacccattcttctcagcatatataacaggaaatcccatgacactgagtcgtaagccttctcgtagtcaactttgaatacgatgcatggtttctggcctttcctcgcttcatcaaccacctcatttgctatgaccgtgctgtgtagtaaatgccttcattgaaggcagattacctttcgtcatgattaaaggcatgaccttcttcaggcggttggccagtagctctgccactatcttgtaaatccatcctatgagtgaaataggtctgtaatcgctcagaatctgtggctctgacacctt

SEQ ID NO: 273361 - DNA, 200 bp, Glycine max
  unsure (1)..(200): unsure at all n locations
agctntgtgaatatcaaatntgaaagataagggatatatttttcgtatagtaccctctgaaaactaaggatcacattataaataaaggatctacatttgataaagtcactgtctaccagactaatcaaatcagaagagcctctcatagtatagtagaaaggaatttagtgatgattttgtagattacaaactattggtct

SEQ ID NO: 273362 - DNA, 589 bp, Glycine max
  unsure (1)..(589): unsure at all n locations
attccccaagnnnagagagaataaaaatagataaaatgagngnnnnttttannnnttttcnacccccccccccttaagtaaagagacagcgaagagatgcncctgnatttatcttgaaactctttgtattattatcttcaacgcataaaggtcaattgatgcacatattgtttgtaactttatttactttaagatcaaatctaacatggtggtttaactcaatatgatattttcgtgtatagaaatatgtctatattatgttagtaaaaacataaatacgaataaaaattaaagtttactatcgtaaaactctacttataaaagtcttgttattgtaatcntgcacataacttttttctatctaatatctacgacatagagttgatatcagctgtgcaaaacacatacaaatctaattgatcaagatacttaaatctaaatgtaatatcttttaatcatatatataacttgatatattaaaacattattanataatgtgtagctgcgttggaaagaaatgataanttacaatgaacatcatatttacattaattnacaacatatctctgtattcaatatattcgtgaac

SEQ ID NO: 273363 - DNA, 309 bp, Glycine max
  unsure (1)..(309): unsure at all n locations
agctttgatgatatggtcttcaccgacgaatggatcaaagtgggtctgaaaagaggccaatctgatcatcttgctttgataaatgcaaaanaaaaaaaaaagctggggcaaataaagagggtgaggatgaaggagaagcccatgctgtgactgccattcctatacagccaagtttcccaccaacccaacaatgtcgntacttagccaataaccaaccttcttcttacccaccgcccagttattcacgaaggccatccctaaaacaaccacaaagtctgtctaccgcactcccaatgacgaacaccacct

SEQ ID NO: 273364 - DNA, 364 bp, Glycine max
actccgcgcgtattcctttcttggaacacgcacccgtgagtcacgtgtcgccttcccgctgacaggtacgttgcgacagttggcgactccactggggactgtttttagagagttaggccatgtaatcttgtgcaatgatgtatcttgactgtctcctttgttggattacgcttatttctcttatgttcttggatatataacgctatgatgctcttagtgcgttttaaaatgtatgcatgaggtaaatatttattcatttgatgcacacaaacaccaacactatctgcacacacggtgagttgaaaagggccctatacccgggttcatgggaacatatggagtagaggtgaatctgtgatcatgc

SEQ ID NO: 273365 - DNA, 391 bp, Glycine max
  unsure (1)..(391): unsure at all n locations
ctagatgcctaggttaacctgataacccaactgactatgaataaaaaatatgcacctgtcaccagactatctggtttatgctcctctgccgaccaccacacagaccttntcccttctatgcaacaatctgaagcaattgaacagcctgaagcttatgctacaaacatctacaacatacctcctcaacctcagcaacaaaatcagccacaacagtgcaattatgacctctccagcaacaggtacaatcctgggtggaggaatcatcccaaccttagatggtcgaatccttcacaacagcagcaacaacaaccttattttaaaatgctgctggccaagcagaccatacgttcctccaccaattcagagaacaacagcaacagccccaaaatag

SEQ ID NO: 273366 - DNA, 442 bp, Glycine max
  unsure (1)..(442): unsure at all n locations
agcttcagctgcttctgtatggcagcatataataattaaataaaagctatctgaatatcatggtaatcaaatgatgtttgattttctgaagcaaattggaacacttagccaggttaatgaattttgtctgatctgcctcctacctttggtcaccactggcatgtaattaaaaggacaacaatactgaaatatatgcacaggtactaagtcaaataattatgatttaggactaagcttgtgctttntgttttttacttaaattgaataacaggttcatgcctatgagaggtcaaaccgagtttacaattacaatttagatccatgtggtcctgtatatattacagttggggatggtggcaacagagagaagatggcaatcaaattcgcagacgagcctggtcattgtcccgatccattaagtactcctgatccttatatgggt

SEQ ID NO: 273367 - DNA, 295 bp, Glycine max
tatggcaactctgaatggcactgcaactgtctagatattgcttccacggaaagacaatgatcatggtcatcataatgataatgatcttgtgtacgagcctcaggctttctgggttttggggctctggccatttattttacttcactcttgggtgtggctcataaatgacacaatggccgagccttatgaccaatgagttcctatagtacacgatgaatgccttgggatttcgaccaccgttccatgaccaaagttggattcatatctatctatatatgtatatatatatgtatat

SEQ ID NO: 273368 - DNA, 424 bp, Glycine max
  unsure (1)..(424): unsure at all n locations
agctntaatcaaacaaaagttatccagaaatgtcaaagatctggctcttgacaaagcataacacgactgtctttgattggtttaaagatacaatctttgctgatgaaaatgtttttgaaactttaagatagctagcagatgggcctaaaagaaatattataacttggcaagtatacgacataaacaagtattccttttacacaaaagcacaagacgacaaatgtacaatgcaaaacagcgaggtcaccctaagggctaaatctcaacacttcgcaagtgtgcatgatgacaatccctgtgtagcttccatcccttactttgggttcattgatgaagattgcgagcttaactatgtcacacttattgtatgtgttctcaaatgtaaatgggatgatagcaacaccggtgtgtggaccgatgatgt

SEQ ID NO: 273369 - DNA, 168 bp, Glycine max
  unsure (1)..(168): unsure at all n locations
tccttgctatcgcatggtctntgcttttatgagcattagtatgtctatgctcctcattcgcatcttccttttcttctttggcaaattcctatgcatgatctttctttgtcgttttcaactaaaccttatatcggagtattcatctgtcaggatttacgtatgatattg

SEQ ID NO: 273370 - DNA, 351 bp, Glycine max
aactctatcttcacagccataggtagtttaagatctcttatgaatgtcagaagaagaaataatctcttaatgagctcatttcatactgtatgtgcaagaacaggaaaggtcgaatcaagaaacgactgaaagtgctcatgttgtgagtacctctcaagacaacggcaaaagaaaaagaactgtggagcccaagaatgaatctgctaacggtccaggacaaaagatacaaaatcagggtgacaactgtttcgtgtgtagtaagcttggacatgtagagaagacatgtaccaaatatcatgcttatcgtgcaaagaagggtatgtttcttactctggtctgttctgagaggtc

SEQ ID NO: 273371 - DNA, 304 bp, Glycine max
gactattgaagaatctattcatgtctcctttgatgagactaatgctatttctccaagaaaggatattttatatgatgttgcagaatctttagaacaaatgcatattcatggacaagattctaaaggaaaagggaaaggaagcactgaatatcctccagaagaagccaaatcaaatgatgaacttccaaaagaatggaaagcttaaaagatcatccctttgacaatattattggtgatatctcacaacgggtaacaactagacattctcttatagatttatgcaataatatggctcttgcgtcta

SEQ ID NO: 273372 - DNA, 332 bp, Glycine max
atactaattactaagtattttctgacttgatgattgaaatgatacatgtctatgtgtgtatccctacaatgccataatcaagaatcaccaatcttacttactaaaccactaaggtcatgaaatgatgcatgtttaatgttttaacatatagatatcacctatccttttgctaatatggacaattgccacaaagttgactaatgctcaagaggttatgctctagtccatcaacatataaaacattctttatttgagtcttgtactggatttcaatgtttacttctcccataatattacctttattggtgacttcacaagtgatgtatcctctt

SEQ ID NO: 273373 - DNA, 532 bp, Glycine max
  unsure (1)..(532): unsure at all n locations
ncgcgactggatggaccctgannccncncctttttgngaaacatccactccgcagcctggcggcggagcggacccataactggcctatctctnttatactggtgatccctacgctcctgaccctatttgatataacctccttttaagggaaggcatttgacttgatcccatgtnttactcaagtggacacaaatcggtgcgaatcaaaactccgacattgatcatgggtggaatggatgaatgcctgaagaaatgaatatgacctacatgccatcttatgaataccggagcccgggagattgtcttcttcttaggatacaacctcttcgggtagcanagtgccccaccgtatgtattctagaaagtgacaccgacccttcgttggtgtgtcaacagaggggatcaagacagaacccattcctgaagcatttgcgaaagcccaacacggaattgacattttatgtcatatccacaaatataatcaaaagtcatgaccttttgcatgccgngtgaaaaatgcgacccacgtgct

SEQ ID NO: 273374 - DNA, 374 bp, Glycine max
  unsure (1)..(374): unsure at all n locations
agcttgcctgtgaagcttctatggaagctggatctttgagcttcaatgaggtccttcaatggtgattttccaccatggagatgcagcggaaggcaaaggagaagaggagaggggagacaccatccactagggaataagccatggaagaaggagcttcaccaccaagaatgtgtcttggataagaaacttgaagagggtgctttaatggtggaaaagaaagagagaaggggggagcacgaaattgaaggaataaaagagggagagaagtggaactttgaagtgtgtctcataagactttcattcatcaaagttacaacaagtgttacacatgcttctatttatagactangtagcttccttgagaagcttctttg

SEQ ID NO: 273375 - DNA, 369 bp, Glycine max
  unsure (1)..(369): unsure at all n locations
tactaagcttgaaggtctgtancccaccatcttttcatagtagaatactggtaatgtgtctactatcattggtatcatttttttcctccgtcattgaggtgccacttgagctgctatgcctctccacctttaggcgtattatttgaaagatctgtgcccctttttgcacatgttctgtagttgcatcctatccggaaccatatcaaaattgtactgatactgcctaacgaaggcaaccattacgtccttccaagaatacacttgggaaggtgcccgaccacgtaacagctaccccagttagactctcttggaagaaatgtatcaacagttncttaacttttgcgtatgcccccatctttcgacaacata

SEQ ID NO: 273376 - DNA, 354 bp, Glycine max
agcttcaggttgctcattgactccatatttctgcaaagaagaacagagatctgtatggtgatctgcagaagaacatagaccacagactcttgcaacaggtgcaaatttctgattcatggcaagctgggttactaggttgaccaaggcatcaagttttccttcaagctttttattttcaatagataaggatgaatctgtagccacctcatggactcctctaagaacaatagcatcatttcttgcactgaattgttgggagttggaagccatcttctcaatcaaattcctagcttcagcaggggtcatatcaccaagagctccaccactggcaaaatcaatgatactcctatcatg

SEQ ID NO: 273377 - DNA, 459 bp, Glycine max
  unsure (1)..(459): unsure at all n locations
tgaacttagctacacacccnctataatagctaagctcaccctcatgacaaaatacatgaaaatacaaaaaaaaaagtccctactacaaagactactcaaaatgcctcgaaatacaaggctaaaaccctatactactggaatggccaaaatacaagacctaaacgaaggaaaaaacatattctaatatttacaaagataagcgggctcatacttagcccatgggctcaaaatctaccctaaggctcatgagaaccctagggccttcccttggatctctggcccaatctacttggagtcttctatccaatgcccttgcggcgtaggattgcatcattgcctctagtcatacactacattcaacatgcacaactagttgccttgtcatgtaaataaaggtgtacgtttgaactacagctaccctcacatgatatccaaatgaattgaaattntgtgatcaac

SEQ ID NO: 273378 - DNA, 231 bp, Glycine max
agcttaatccatgatgtgataattaaatcggtatagatatataattttttctattctgtaggttttgttttattccgaaaaaccgtgaaatttcagggtctaaggggttggagtgacatgggtaaattccctatccaagggaatgcttttcataggaattgagtaaaaaatcttcttatgaaatattcttatatatactctcaagccttgtgaacctaatgcgcttccatt

SEQ ID NO: 273379 - DNA, 430 bp, Glycine max
agcttgtgggatttgtgatagtgatttttttggagatgttgatgatagaaaaagtactaccggatttgtattttttatgggtgattgtgtttttacatggagttctaagaagcaaggcattgtgacactttctacttgtgaagccgagtatgtagctgcaacttcttgcacatgtcatgccatttggctaagaagattgttggaggaacttcagttgttgcaaaaggaaagcacaaagatctatgttgataatatatctgcacaagagcttgctaagaatccggtgttccatgaacaaagtaagcatatagatacaaggtatcatttcattatagagtgcattaccaagaaagaagtaaaattgactcatgtgaataatcaagatcaagttgcggatattctcaccaagcctctcaagttaaagattttc

SEQ ID NO: 273380 - DNA, 114 bp, Glycine max
atagggacaattttggcatttcaaaagtttgttgggtgcacctagcaagacttccgacccaaacaaaccgtgttacattattcctatacatgaacgcgcggatccgacccaaat

SEQ ID NO: 273381 - DNA, 296 bp, Glycine max
taagtatgacattgattaacccgttcatatcaatttcctcttatgataagtcacctatgaaccttcttagtcctagctctaactataattctatgatgtatctttgtcgaatttgggtcaggtgctggttgagatatcttcaatccttctcccttcataatgtcaatgtatctgaaaaaaacaacaggtgcccatgtttactcattctctttgacgagagcacaagtctgtccttatgtgattgactgctcttacgagaagaacaagataatgactaagtatgtgtttggatcaac

SEQ ID NO: 273382 - DNA, 344 bp, Glycine max
agcttcctctctaagtttcttattcaaggcactctcttgtgtggtgaagcttctcctttcatggcttatgctctagtggatgacgcctcctctcacctcttctcttatatcttccgctgcaactccaaggctgaaaatcaccattgaaggaccttattgaagctcaaatatccagcctccatagaagcttctcaagcaagcttccatcttctaaacacttaatcaatccaaggatccattccaagcaaggttgaatgtgagttctaatctaatatttctaatccttgtgaatgtttatctatttcttcaatcctagttttgattttcatgaatatattatgcct

SEQ ID NO: 273383 - DNA, 242 bp, Glycine max
  unsure (1)..(242): unsure at all n locations
gtgattaagtaatcatcaattttcaaacatatggggagtatgaaatgagtgaacgccatatatcttgcatatacatttcttgtatcttgatttcacgaattaaattgtcattatcaaaacagggagatggttgaagccaagactttgcctttgatgttttcatgatgccatatgatcatgatattctgatgccttatgaanatgagcctctcaagtttaaattcagacacaaatccagaatc

SEQ ID NO: 273384 - DNA, 396 bp, Glycine max
  unsure (1)..(396): unsure at all n locations
cttctcgtctagttaggcgaaattttatattatttatgatagccctattcaattcaagctgaattgtgtgtcatacaaaatacctgngataactagcaaaacgataccaataaaagtattgtcctgtaaacaaatttactttcttaagtctttcaaaaaccacattcctaacattacaaaaataaattacattctaaacataaaactaaagaactattaatcatatgagtacttgtagtaaaactagctaaccggcgagataaaattctgtgtgctggtcattgtggtcacgtgagcccaacctctgttatcgcaaaattataatgcaatccacatgtcatcacgtggataaaggcacaagaacaagataccactatatttcggtgatcaatcgat

SEQ ID NO: 273385 - DNA, 524 bp, Glycine max
  unsure (1)..(524): unsure at all n locations
ccacggccgctngtgaatcgatgatnaccttgtaannccnccnnnntctntnanagaccgcgcnnattaggacattacgcccgtcttttattatattatatatgtctcacgcatatcaacgcagatattcacttaaaatggttattttcacctgacagccaccctaataaagagttccttgtcagtggtgaatgccgacatcgagaattagacttatcctattcggtcttgcccttcttccaccgcgtgttcgcaatataaaatatacacgctctaacaacatgaaataagtactcatgtagttctgtcaacaacagagtgctcatgctatattgctaacttacaagatttatcttatggtacctttggaagatatgaaagcgactgacagtcacaataacataaacttttttattggttgcgacaagtgaaagaaatctctcaaaaaacactctcttttacataccaattaacgctaagtactttgtttcttaatccacacaaaacgcttactcatcaccccg

SEQ ID NO: 273386 - DNA, 453 bp, Glycine max
  unsure (1)..(453): unsure at all n locations
gatccttaagcacctgcggctgcagctttgacgtngacnagaaaaagtacttatactgtcggngagcggtagagacagtttaaatctcatttgatgaggaaatgggcgcttgcaactgtcaaggatagtgtggacgacattttttgtcaaaaatacggcattagcaaggagaaattggcccagttttgtcagaaccgcatagacccctcctgggaggtatgtactttgtcattttaattattttccgctaaaattcagtttttataatacattgtagtaatgattttcattactgttcgatttttgcaggatgtgcggaaaaaggcacaggccatcctgaagcaaaacaccgccccccacgtgttgtctcgtgagggttgtgaatatttagaacaaaagctgatggctgagaagacaagataaactggaggaagcttcccatcccgaagtact

SEQ ID NO: 273387 - DNA, 469 bp, Glycine max
  unsure (1)..(469): unsure at all n locations
tgtcattgtatataactatccaaaagatattgaagcattctatatgcggctcaatgatgacttaaagacagtggttgttatggatgtgcttgtacccaaggtatatgttctgtatattttgttttcatcatgattgtaatgcatggcataatagaagcatgcaaatgtaatttcaggttggaaaactaattggtggaagccaaagggaagaacattatgatgtcatctagacaaggttcatatatctgtttactctgtcttttcttaatttctttccttgtattgntttccatgttaatattgtatttaaattgcataataaacgaaatgggtttgcctgttaagctatatgagtggtaccttgatctaacgcggtatggaatagtgaaaatgccaaatcttgccttggatctaaacgatgattctctttgccactggcttggaaatattagacatatgatcctctcat

SEQ ID NO: 273388 - DNA, 421 bp, Glycine max
  unsure (1)..(421): unsure at all n locations
taaagaagctatagcttatctacacaccccctataatagctaagctcacccccatgacaaaatacatgaaaatacaaaaaaaaatccctactacaaagactactcaaaatgcctcgaaatacaaggctaaaaccctatacgactagaatggccaaaatacaaggcccaaaagaaggaaaaacctattctaatatttacaaagataagcgggctcatacttagcccatgggctcgaaatctacccaaaggctcatgagaaccctaggtccttcccttggatctctggctcaatctacttggattcttctatccaatgcccttgcggngtagaattgcatcattccctccaccttggaaaatatttgacctcanatcgtgaggttcttcatactctgggctccttccctcaacacctgtaaaa

SEQ ID NO: 273389 - DNA, 445 bp, Glycine max
  unsure (1)..(445): unsure at all n locations
actcaagctagaagtgagacagtgtggaanagtcagacattctacttttattcgttgaccttatagtggtacctgaagatatgtcgcgagggtcaggagaccttagcgatgtcaagtggggtgctattgccaaaaaccaagcttgaccaatcccaacccaacccgggcatagtcagtcagtgagaacctgagacgtacctgaacatgcgagctcctggtagtcaaccaataagagaacaaagaccacacagcaccgatgcttgtgtggaggctggccacctatggattntgagtgatatgtataatatggcctatggtaatcgactaccaacggtgtgtaatcgattaccaacggtggtgaatcgaatacaacgcttactaatgaagacatgacattaatatggcctttggtaatcgagtaccaacggtgtgtaatcattacaag

SEQ ID NO: 273390 - DNA, 388 bp, Glycine max
  unsure (1)..(388): unsure at all n locations
agcttctacttganaacccattgtccaatatgttgtttntggntcatccatcttgattaaggaaatttacactattattttttactttacaataactctatgatataaagctgaaaagtcattggacgaaacgttatgataaaaagatgaagtcttttccttgcaaagtttttttatttgtgttggattttcttatcctttattgtgagtagattacttgtaatttttttaaatcttattggctntgaaaggcaaaaataactctgtgaagaaagaatatttgggtgtatcaatcttacggttgattgatcgatattctgttaggagtaattttaagaatacttgttgtaacataaaatgatagtgaaaaataggtgttataattaat

SEQ ID NO: 273391 - DNA, 425 bp, Glycine max
  unsure (1)..(425): unsure at all n locations
agcttgtactctntcatctgatggattgcttaccatttaacttgccacacactatctacctcaacattatgtgcatcacaaactctatggatagccttgaagacatctattatgttgctctactcaacagaatcttctagagtaaaggaagttatcaagtcttctgttgatttttggacgatggatgatagagatatggtggacaataacattgggcatttggtctactattcttatcttctatattgatcgtccaatcttctataatctagtggtgcatccagtcatgtagaagggagcatccagtctcatggttcattaacatagattgtgttgaactggaaatgttttctatttgtctattgcaactatgtttggtttgatagctagttggtatctcctttataaggaactntctactctgg

SEQ ID NO: 273392 - DNA, 382 bp, Glycine max
tatttgaatctcctatgctgtctctacatatataaaacagtcccaccatcctaattttacaaaatcgaattcatacgtcattggggcatttcaccgagcactaggtgggcgcatgtatagacataaatcgcaagagaatgggggcaatgtggcatgccccattgcttcagaatacaccataggcctaaagccttctcacacaaatccttaactcaacaaatcaagcataaaaagcaaaccaaaactgccccacaagcatgagcatgttctcacaatttagagcaccaaaatgaacaaaatgcaccaacggaaagcaaaaaactcaaggattgaatacttacttgttggagtgagtagacacaacgaaaatgaaagcaaaatg

SEQ ID NO: 273393 - DNA, 230 bp, Glycine max
gactctctacacacagccagtggtcaggccgacctgtctagtgatttgagcctaaagttcaaatgggacagaagtggctagcatgcactgactgcaaaaggctgaaacctgtgagggacatacgctgttactttactatgttacgcgccagacaaaaaccaaataatcgaggtcttttatattgtagagtatccactgatgattaattgattttcataaaatcgaactaa

SEQ ID NO: 273394 - DNA, 142 bp, Glycine max
atgacaacgcaactaggaataatatctatgcctttaccaacaaacgtcgaacctttattaatattgctttgacaaatgatcttgagtcttcgatatgtgcttcttccggagacactaccagcctatcatagatatacagtat

SEQ ID NO: 273395 - DNA, 488 bp, Glycine max
  unsure (1)..(488): unsure at all n locations
ntggnaatcgatcccatgcagcacccgggatcctctacagtcagctgccgcatgctgcttgaagacatagatgaatattttgcattttcatggagctcttaanacagttaaaggctaattcgttgatgacatgggcgctcgcgactggcattgacatgacgggcgacttgtttctgccaaaaaactgccgtagcaaagatagagtggcccaatgtagttacaatcgcataaaccccccctgcgacgcttgcactttggcattgacattatttgccggaacacctatgatgtatagaacacttgggtaatgaatatccttactgatcgaattatcctggatgcgcggaaagaagcagacgcctatctgaatcttacaccagcctccacaagttgctcggatggtgtgaagatgtaaacaagactgtggctgaacaacacaataaagtgttgcccgtcataacagattctgagggtcctacctgctcccg

SEQ ID NO: 273396 - DNA, 482 bp, Glycine max
agccggcgacctgccgctatgatacatgcatcacggaacacacaaactcagctttagtcttgatttcagggactcgagtattcttcgagttatgatatcttctagattttcatggattctctcatggcggtgaccctagctattatacggggcgtgtagctaaactctaacttctcatctcaaggaggcgaccctatctatcagacacgtacatgtagctaacctctagcttgttatgcaactattaagaagcttctacggagctgacctcactatgagagggatgtgcgacctaaactctacctctcatctaacgacgtgagctacctcttaaaacgtgcgcgtactaactctacctctttacgatcctctacagaacctccaagaagtgactatgattaacccctttacatccaccctccctccaacactctcttctcacctctcaatacccttcccataactcacctccccacctctcc

SEQ ID NO: 273397 - DNA, 291 bp, Glycine max
  unsure (1)..(291): unsure at all n locations
ctaagctgttaattcgaaattggacctgctgatggataacaatatttatcagctttatcaaatgacatatatgttgttccttgatgagcttactatnttatttcatacatgatctgcgccacaaactggagaatgccacgaaggcaataatgtcaagacgaaccatggctattgatcttaggcttagcgaatgcattcaatgttccttcttaattatcctgctctatccatttgctttcgcctcgactcactggactatttcttggatatcatacaactctatcttgatgt

SEQ ID NO: 273398 - DNA, 281 bp, Glycine max
tagcttgacacattatccggttcaagagcttgatatactggtgtcgagtgattctgctatcctagaagtgaaagacacatcctcaccactcgtatatttgcaatcttacatgctgtacttctcttcgctcatatacaagcttactgaaattgaactgaggctactccctatacgtacttgatgcctatatactaccctacatataaagaagtatagcgcgtgctatatgctagctgccttaccttccagaatgcctttaccttgatcacagtcatgcatgc

SEQ ID NO: 273399 - DNA, 303 bp, Glycine max
tactcggggccatttcctgcgaatgcaaacatttggaaagttatttttaccagtgggacactactcttaaaacaaaaatggcatacaacttccccccatcaatgtaaatatagagtaagcttatgcgcatatttccttacgaacgttcacttgcacaagacattctattaactaagaagaaatgcacccatatacaatcaaggcagcttcgttatctagattatgtacatgtacttgcaacgtgtatttgttacttacatcacacacatctccttggctaaatttacatacatgcatactcaa

SEQ ID NO: 273400 - DNA, 229 bp, Glycine max
  unsure (1)..(229): unsure at all n locations
agtgattgcttagtgcaattctccattctcttctctttatcggagccccgtgaattgcgtattcgctcatgtgtcctccaccttcgagtttggagccatgcgtactgattgcttaatgcaattctccattctgaaacttttcggagccccatgaattgcgtttattgtcatatgtactccagcttatagtttggagccatgcgtatagattgcttanagcaattatcca

SEQ ID NO: 273401 - DNA, 370 bp, Glycine max
  unsure (1)..(370): unsure at all n locations
tgtagaatggctagacatgatacatgtcacggtttggtttgtttcaaggataaaaagggatgccccacattatttccatgacacaaaatgcaaaacaatgatgatttggaaactctatgcaaaactggtcatgcatgcacctatgcggacactcaagtgtcaaatttttatggtcatgtgatgctagggctcacgattcatttcctctatcttaatcaacccaatgtttccaaaatatgttcttttatcaatttgtgcattcatccgagtccatntcgggcgtncggcgaaatttcacagcattcacccttcacgtgtagacacattntccacaaatcggttatgatcaatgaactctcttttggaaatc

SEQ ID NO: 273402 - DNA, 438 bp, Glycine max
  unsure (1)..(438): unsure at all n locations
agctntataaataaaaacatcaagtaactcatattaaaaactaaatttcaatttctggtgacataaaaacaactatcaaaacacatgaatcaatttattctagatcatttcagtttagttagatgtgctggattcaagtaccggatatacaattatattaaatatttggagaaaaaacttgtcattcatagtagtagcctaattcctatccaacttaaataggattatatctcgtgtaagataaatgtgatcggaacaaaaaaaaaaactaaaaatataattaaatcaaaaataattctttatatataaaaattagcttcacctagttagttaggacacaatgattaaaccacatacataaatatggtgggtcgggttttcacaaaataaggaatcaaattaaacatatggtatgtgtgatgtgggaaaacttctatg

SEQ ID NO: 273403 - DNA, 482 bp, Glycine max
  unsure (1)..(482): unsure at all n locations
tataaaagacccactttcgaatcatgtcaaggccaaacatttagagcgtgcatattattataatttttgtttctttccctaaattaaatatcttattctttttagtttgtgcacaaaatgaattataattagttgttgttagtaaatatgtttttattttttctttgttccattctttttttattattaaatttatgtttttatatgttgctagtaatttcttttatatgtttccctgataatggtttgtagtgactgaatttttaataaagaattactattttttataatctatttggaggcaaccaacatggttagatcatttgcatcaattattgattagtttatattagacaaacttgttcattaggcaatttgttctttggaggcaaacttgaccaacatggttaaaccatcacccaactagttcattaggcanacttgttaatcttatctaatcttaaaagaagtgtactaaacac

SEQ ID NO: 273404 - DNA, 357 bp, Glycine max
agcttgagatgaggaagtgttgaagggtgatatctcctgcttttattggtgaccacagagtggtacctggagatatgtcgcgggggtcaggagaccttgtggacgtcaggtggtgtgctattgcccaaaaccaagcttgaccaatcccgacccaacccgggcatattcggtcagtgagaacatgtgacgtacctaagcaggcgagctcctggcagtcaacagataaaaggaaaacaagaccacagagcaaggaggcttgtggtggctggccagctgtgaatcttgtgtaatatgtggattgtggcctctggtaatcgattaccaagggtgggtaatcgattacaatgcttaaaattg

SEQ ID NO: 273405 - DNA, 403 bp, Glycine max
  unsure (1)..(403): unsure at all n locations
tctacttatgcggcagggcgggcttccttcaccttcttgtctccaacgtgaactttgaccattgctcttgcttcccgcgatgcttcttttcatgtccgcctgagtgggcttatagcctaaaccatacttaccacgatttccttgggtatttatcacgctagttatgccgccgctgcttattcctaaacccatcccgggtacataaccgttccgcaacataactcgggccatcattaccgctgcatcggacagacaaggctgcccaaagagggagtccacggaggaaatgctgaccacctcaaaagactggacagcagtttctgacgattcttctgcggcttccacataacgcatggacgatgggcagctcaccaagatatcnttctcgcctgacacgatgacc

SEQ ID NO: 273406 - DNA, 394 bp, Glycine max
  unsure (1)..(394): unsure at all n locations
gaattggctttgaagattgtgaggaataaacacttgtttncaaactaggtcatggtcacttgatgattttcagtgattccatagaaatctctgagttctgtccatccaaccaatagatttgggctcaccagatcttggttgtatgtaacacaatgcatgttgacattccagtctaatagacgtcaagtattctctagttcatcctttcatctttcaacaaatgacctactaacttcaccataagactacatttaacaagcaaacaaatataagcaaatgcattatatcatgtcatgtttatttgagaatagtcttgaaatttctagcctaatccataatatgaactgtgttgaacattctctctggtttttttctgttaatttcatcaatgctt

SEQ ID NO: 273407 - DNA, 449 bp, Glycine max
  unsure (1)..(449): unsure at all n locations
tactaagcttctagccaaatggacttaccttgaattaattccttcgatagctcctttgagccttgtttctctttccttgttatgaagctcactacaagccttaagtgaaaaaccatgatattaccatatccttaaggaattttggagctttggaattgctttgggaataagtgtggggggtttttgcttcattggacaacttgctttgttggctatgcttcatgatgtantttgcgccatactcgatgtacattgtatattggttaaatgttggacatgctgaatgaaatgttgtttctcacaggctaaagagtaaaataaaaaaaaaaattctcaaaatagaacagacgatcagacaaagttgaacgatcaaaaacaacgaaatgaatggcgcaagaatgatgaaactctcggctctactctccatgtcctaactttatctttacttc

SEQ ID NO: 273408 - DNA, 316 bp, Glycine max
gctacgggctgaagagtacttgccctacatgttacgaacctagaaacgagttgagggcttcagtataacagagatgagaaaaaaagagaaaagaaaggaagagagaatactttcgctgtgttaaattacaaaggtttcccttcacaaagggttttccctttttccaagaaagctaatgctcatatccctaatggtaatgtccgaatgcccactcctctataccttctactgtatgagctcattccctaactctacatcttcaactgcctaactgttcctactaactacatctactcgctgtgccaatcactacact

SEQ ID NO: 273409 - DNA, 459 bp, Glycine max
  unsure (1)..(459): unsure at all n locations
tgataagaatatcacacacttaaaataaataagaattaagttctaaaagttaaatgccaatgtataaaatgatacctacaaataataattatacagctgactataataatcaattatatgagaaaaaaattaatactgaattatgaaatcacaccgcctagctttaataaggaggaccgggtagcagccacctaattagaccccgcttgtcaccgcgtttacattgcgaaacattttgtaaattaaatcttaaaaaatatactttanagtattttaaaatggttatcctttcgattatatttttacgatcacaaaacttaaatccaaaagtgaaaattntcagtttcgctcacactaacttattcagctggtgtcatgtgtcaacaacacgataatttacattctttacattcttaccactttatttaactcactctcttatctctttcttcttctttt

SEQ ID NO: 273410 - DNA, 397 bp, Glycine max
  unsure (1)..(397): unsure at all n locations
cagcttctccctatnttgtataataggggtttatgtgaagaataaattgtgttagccccttaggcacttctctctctctcgaaattgctgaggaaaattagttccgtgaagaaaatccaagccgaggcgcttccgtaacgtttccgtgagtaattacgcgaagattctcgaccgttcttcaagagtcatcgttcgttcttcgttttcttcagtcttcaacgggtgagtacctcagactgagctattcaattcattctatgtacccgtggtggtccacatttatgttcatgtatttttattctcattttcatttgctttctataccaccttctgacgtgcttaagccatttatttaagtcatttctcgcttaatctacaaataaaataaatttccacc

SEQ ID NO: 273411 - DNA, 199 bp, Glycine max
tgatggagctttacccgtgtcactattgcagctgcgctgctttatcattgaatacacttaaatttgctcggagagcagaacttattcaaaacaatgcgagtgtcattctatgagccgtctgaattattatcagcggaatgaatctcatcaacctatcactatacattccatatattgatcttgtccgctgtggtgaaca

SEQ ID NO: 273412 - DNA, 233 bp, Glycine max
tggggacatatgggtaccttgccccagaatatatcaaccatggtagggctagcaaggaattagacatttacagtctcggggttgtagctctcgaaatcgcatgtgggacgaggactcaacaaaacggggagtttcatgtacctctcgtgaactgggcgacggcaaaatatgtggaagggaatgctcaggatgtcgaagatgagagactaaacaaggagtatgatgcggatgaa

SEQ ID NO: 273413 - DNA, 582 bp, Glycine max
  unsure (1)..(582): unsure at all n locations
tgacgctctcatccccgtatttaattcantcttaatagaatntgaacctactccttaccgacacccnnnnnattttgtgttgtacattcttgnacccntgaccatatagcgcacctgaagcatgcnagcttcacacaagtttggtatggctttgatactatctccgcaggcttagtaccagaagcttaatgaggttattagccactcacgatttaaagatgtgacacggaccattggtgctatggaaaaaacatcctaataggatagtatccttggcgcgattggtgatgaccgtctattggcagaactatctatgcataaattaacatgctgtagccacagttgggagaaaactctcaaatggaagattctggcccagctaaacaagatccttggtatgagaattcttacaaacagatccaaatggatttttgaagctggcacaggagaataatttacccaagttgcttggcagggtttaccttggtgactctaagaccacgaatatccctttgggaactcttgtgaagtttcaagataccatcttgtcgacatatgaagaaaatgttcatgtcaagaccg

SEQ ID NO: 273414 - DNA, 650 bp, Glycine max
  unsure (1)..(650): unsure at all n locations
cctcatctctcnctcncatcatgntnttacatctgcttatttctatnnantnatnnnnnnnnnnnnccgccgcggnggctgcacgcnttttgataccttagcattcatgtgacaccatagaaacactcacagcttcgtaagagctctctgtcgtgacgaccgacatacacagctctccaatggaatatgtgtgcgcactgtctcacacaccnagtgtgtgtgctttagcgacactccacccatacactaacataacgcgcaaacggcacctcgtataacaccctgatccaaaagtcacatggataatgaagagggagcgcaagaatagatgaaggctgacatgtccgctttaaaagatctaatccattccatgaccgacgcgctgctcaacattcaacaatctatcacaagaaaatgcctctaccgccgttttcaatacacctatggaagcggaactggcgctacagcccacaatgaacttgcgccgggacagatgcgtgacaagtctcgattggaggtatagtcctcaagcctacccttatggattgcctccacacttgactccttgtaccgctccagacgattcgaagcaagcccctatcttcgaggggaactctcctcttatgccaactatcctctgcacgaagacn

SEQ ID NO: 273415 - DNA, 358 bp, Glycine max
  unsure (1)..(358): unsure at all n locations
tgataggagagacaaaaatgtgttgaccttgaattctattatttctctggtgcttttgttcaattgctttctaacattaatactagttgttggaaatttctagtttggtatacaaattactactcttactagttatggatactttggattgtgtggttgactataaatttttcgattaaagtccttgtttgttaaaattatgaaatagtcaagaaaacgttcatggtgttgagaaatttgctaactctataataaatgctaaacttatactttctcacactattttatcaacaaatcttttactattagatggacctcacatactggtagtnctactaaacaataaatgagaacaaat

SEQ ID NO: 273416 - DNA, 429 bp, Glycine max
  unsure (1)..(429): unsure at all n locations
ntnggataaacaacaaccctggtgaatgctacattgtaattataaaaacgatagcgtagtcattttgcataatgagaactttccatccacttgggaaacttgggatcctgacccctccttcacgaatattcttgagagaaagtggactaaaattgattcataggaatcacagtttcctgagaatcttttttcttattaattaattatccaacatgagaattatagttattcaatgtaagattcctgagaaagaaaaactttctagctatcaaacaccctcttagagtcactccttatcctcaccactcattttcttgagaattactggttaatactaggtacttattacaaccactagatcataagaaaataaatgtcactgatgaaaagagctacttttggagtacgtggatctctcatatatgagtg

SEQ ID NO: 273417 - DNA, 428 bp, Glycine max
acgcttatatctcatcacggcatgagctgtgaactatttactatcggtggaaggagaggatatacatacgtatgtttggctattttaaacgaatctacacaaacataggtgtgtaggttgaccttttggttactttgatcatattaacaaaattttgagaaaattgtctacgaaatgaacaccacgcgtaacaacatttagatgtttgaagaatcttgccccattttccttgaagaacttattgaaatcttaatgtgaatgaaaaaaaacttcaacggatacaggattctcaaaggacaatccttccgttttataggtcatcctcaaagcctgcatttaaaagcttgctttgagttgtaagccccgaaactctcttgttaaggaaattaataatgattctcaccaaaatagaaaatatttctctatcc

SEQ ID NO: 273418 - DNA, 372 bp, Glycine max
  unsure (1)..(372): unsure at all n locations
ngccaaagagcatgtttgcagctatatacaagttgctgaagctttgaatctctgacgtagaagttacttggaatgctacctgtcagagcattatcagactattaagcctagaacgaatttctccatgtaccttgtttccaaccaaattcacgtatgtcaagttagaaagatgactcaaagctgttgggattgatccagataaactgttattggccaaattcagaattctcaaagattcaagacatcacttagaggaacgtaagtctntttcaagcatgttgtttgatgctgcaaagtcttggagctcttcacaaccttcaatctcttcaagtatgtggccattaatgctatccattcgtacatcaagagata

SEQ ID NO: 273419 - DNA, 385 bp, Glycine max
  unsure (1)..(385): unsure at all n locations
agctngctccagaacacaatgtttgcttgtgtgtaatgttagaaggtcaagaggttctgaaggtgagaaacaaaacgtaagatcgcccagtgaggtaaaagcattaagctaatgacgttaaagaagggctccctgngaggcaacccagtttcaatttgtgttatttttggtttttcatgcatttgatcattggaaacttgttgtataatctaaacattggagcatatcaacctccctttgaatggtaaaattaaagggttcaatttcttgggaaaggactaagtttaaaacttagaaaatctttttgaaaattagtccttttgctaagcacctgcttctcgctaagcgcataatngttcgtgcgttaagccacgagtttcaagcg

SEQ ID NO: 273420 - DNA, 485 bp, Glycine max
  unsure (1)..(485): unsure at all n locations
tggcattctcaatggtggaaggacctccgaaggtacggggatgggaaaaaattaaattctggacagataaatgcgttgggggatgattgctaacttgaacaacaatataatcagctgttcttgattagtggtcagcagaatagtaccatctcgaacatgggaagcttctctcaaggaaattggtgttggggcttaaagtggagaaggaatctatttgattatgagcaacatatagctgtggcatttatggaagcaattactgatatacaaatccagcctcatatgcacgatattatggtctagaaagcagatcccagtggtgtatattccactaagtcagcctacagattattgatgaccaacaatcaaattcccaggccaacatcttacagacaattngctaatgataaaaataagaaaaaccacanaaaaatctagcaactcttaccaccgcaactaaatgtagaccttactcattaaacatt

SEQ ID NO: 273421 - DNA, 506 bp, Glycine max
  unsure (1)..(506): unsure at all n locations
ntgacaccatctcgccgagacctttagaacccgagcttcagtctcctcagtggcatcaagctaagatcttaagtaggggctccttaatacctcacttatactttgggttaccttgtcttccatatgtcgtgcttcatttattctccatgtatcttctcacatgacttgtgataaatgtacttaacatggttctttagaggttccaccgacttaacatccgagtaaaaaggtattgtcgtttgaatttgctcagaacttctattttcactttagagctcttcgatatattacgggactgaatcagacatcccgcgtaaatgttattgtcgcttcatttcatacgagcttctattctatatttcgagcgtctcgatatattacaggtctttaatcggacgacccaacgataatagttattggcgcttgaggttgatacgaacttccgtatacattccgacgtctcgtgtattacaggactcactccgacatcaacttaaaacctattg

SEQ ID NO: 273422 - DNA, 336 bp, Glycine max
  unsure (1)..(336): unsure at all n locations
ntgagccanaatcctgactcaccataaaccttgacccacggtgagaatgccaatccttaccctcggaagcaaaaaaaaagaagagaaggaaaatttccaatcaaaggaaaaaggagaacgaaaatttccaatcaaaggaaaggaaattcccaatcaaagagtgggagaaagcaaaaagaaaagaaagaaaattcccaatcaaagaatgggagaaagaaaaaaagagaagtaaaatagaagatagctcctggtcaaagaaaccacaagacatgtgccgagaggtccttggactagacgatatctgaacaatacagaatcgtcaccacatgaacaaaa

SEQ ID NO: 273423 - DNA, 517 bp, Glycine max
  unsure (1)..(517): unsure at all n locations
gccaatgaaatcgatgcgtgcagnaccccgtgatacttgactcagctgccgcatgcaagcttatcacaatgatcgcttgttattttattttctaaggtcatgaggtcctgaccgtgactaccacatcgtgcgatcgctcactgccgctgaatcgttcaactaatgacaatcaagaagggcttcctgggaagcaacaccaggtcaattagtgagattttcggatgctcatgccttggaacatcgtaaactcgttgtgtaatctgaacattggagcaatgtgacctacctctgaatggtcaaattaaaggggtcaattatctgggaaaagactaagtttataacttaaaaatgcttnttgaagatttggccttgtgctgaacacctgcttctcgctaagcgcataattgtgcgagcgttgagccaagaagtgcccgcgcttattgaacagtcctggcatgtgtagcttataaattccgtaagctacccaaataatttgtgtagattacaatatgaaaag

SEQ ID NO: 273424 - DNA, 215 bp, Glycine max
taatgacgcctaataatggctccctgggaggcaacccagcttcaatttgtgttatttttggattctcatgcatttgatcattggaaacttgttgtataatctaaacattggagcatatcaacctccctttgaatggtaaaattaaatggttcaatttcttgggaaaggactaacgttaaaacttataacatcttgttgaaaattagtccttttgc

SEQ ID NO: 273425 - DNA, 429 bp, Glycine max
  unsure (1)..(429): unsure at all n locations
agcttataaatgtaagatccaatcctttgacactgagtccagcaagtagccagtaaaagtatcactgaaattagaaagctgaaagctccccaccactatgatagagagcaagacccatgcttctgagctcattcgggacttaatcatagaataattcctggagaccaaccatagtaaaaacattcgaaattccgaaaaagaaatattggggaaccaaccaccacacactcattggaatggttgcatttggtttatcaactagaccatactcttgcgctgtcttcaatctttgcctcaacaattgcagctgacttaatcatagaaagagatcagtttaaatctctcanacattaacactctaacaaaactaaccattaatatttgctaaaaanacaatatgctcacatgacaccaagtcgtctacttaat

SEQ ID NO: 273426 - DNA, 449 bp, Glycine max
  unsure (1)..(449): unsure at all n locations
tatagcccacagaagaagaagaagcatcatcagcaactntcacaatactgaaccaaccagacactctattgtggtaaccaacaagcttaacagcgagtcctctttctggtagaccctcaacgatagtccacttggaaggtgggtcccacttagaaggaattggacttgggggacaccctggtctgagtgtggatggaaacacaccgaactgaatgctcttgaaaagctggccttgggtgatgaaagcgactcctgctgatcgagatgcaatctttatcggtaacccctcagagagctcgttgccagaatgcaccacagtcagagggcaagtttcgtttcctgcttttgctacttgtattccaccccgcatttctcttatcactggcaacacgaaataattgacaccgtattgaagcttatcgccgtcagtgtcgtacacatgatcatca

SEQ ID NO: 273427 - DNA, 311 bp, Glycine max
agcttgaagaattggtggtcccgtgaagtattctgttccgtatttgaagattaggtggtcctgtgaagcagttgttccgtatttgaagttgtgttagtcgttgttgttcctattttgtcggaggtacgcatttatcggtttgttttttttttttttttttttttgcattttctgggtagttgtttagagaagatgaacagtaaaaagctatttccgaaagaacttttaactacaggaggaagttgttccggaatgagaatgttgaatttcttgaagtacttcttccgaaaggtactatgctcaattccaga

SEQ ID NO: 273428 - DNA, 479 bp, Glycine max
  unsure (1)..(479): unsure at all n locations
tgagaattgtgttgaataaaggtaaattcaagagagtttagattattcatttataaaatgggtatagtattacatcagatgaaaccaggtccctaaatgtcttaagtataacaactacaatggtttatcatatgcagtattggaatcatgaaatgggagtttatgcgtctttccaaaataacaagcttctaaaaagaataatacattntactaacattggcattacacttttttagtacatggcaacaacttttgagggaagcatgccttaattggcatgccaagtaggaaagaatacatctatattaaaattacctgtatgtgacacctaattacatgtctagtattgacaattatgaattatgataggaagatgaagttgaactacaacggaaattatcacacacaatttgtacaaatggagaatttgcaatgtgaatatataaattggtaacgagaaagaagaacaatagtgggat

SEQ ID NO: 273429 - DNA, 458 bp, Glycine max
  unsure (1)..(458): unsure at all n locations
catgcaagctttntcctcccagtcttgacaatgaaatttatgctcagatttgttaccaaagcattgaggccagatatgatgagtgaaagaagcactgctgctctgttagatgccaaacctgccaactgagcaatggtgggactataatacatcacagtgttgattgccacaaactgctggaagactaagagtccaacgccggcatataaacctcttctcacagctgaagttctcaagagtttgactatgtcgatcttctctgaagagtctgcttccttaattggcatgtcaactgattccatcagagcctggatttcaccttaaacttcgtgtggcggctttatcttctttacattcgatttcgcttactctctcttaccctgtgggaacagaagtggaccacagttattatatacaatttcacctgcaaatgacaattgactaatgatgatgaacta

SEQ ID NO: 273430 - DNA, 511 bp, Glycine max
  unsure (1)..(511): unsure at all n locations
cgaccgcgcggcttgacagattgtacatgatacatcgacnncncaaanttaggcntgataactgctnaataatcattctaaggatttatggcctttcttcattatcttacacaactcatatctggcctatagtacctcgatcctatttgatcctcattgacaaaactttaccaggcttattttgcatttaatatcagttggcagctacgtcgttaacctgcttgcatctctgtttttgctctttacaattatagctggctgatgtctataaatctgttcgcatgtactcacttacattttgcatccactggataagattgatattttcattatacttatcactcttcactactatataatgtcgatgtaacatacgttggatattataaatcttgataaaccgacgctcaatagaccgatgactacttgaaccattgcggattgtaccacacttctcttacatcactgtattgaatgaattacatgtgtattgaactattcacctcagttc

SEQ ID NO: 273431 - DNA, 138 bp, Glycine max
  unsure (1)..(138): unsure at all n locations
tttctttataagagaacctgtgaagtacgggactaacgagcatcntggcttcaacagacaaatggaacaatgcccacagaacatggaagctagaggaggctggcccctgccatactattgaatatggatattgcttgt

SEQ ID NO: 273432 - DNA, 513 bp, Glycine max
  unsure (1)..(513): unsure at all n locations
ncggcgccgccgatgaagcgttgannactttganaacnctgctattacgtgagactataaagatactaagcttatactccatggctatgagcaccttactctgctcttatgctataacttaagatgaccagctattcttccatgtaatcgttgcatatctattcaatacaacattgctacattattgatcttctatacctaatgtgcgttattggcttgatcacctgcttgcatgagcctaattaactatgtatcgtaatcggaaaatcctcttgatctgtgaatcggacagaggggatactaattcctatgcctgggatatcacttttacgcattgccggccctgaatgatgcttctttgcacagtaatcctatctttttgatattacaaaagctctatcttacatacgttggagatagatttggcgctaattaaacgcacgtcgtagctggcgctgttgacaccttatgcccattactatcacgtggaaatgtcacattggaagtacatcn

SEQ ID NO: 273433 - DNA, 94 bp, Glycine max
agcttcaacctttgctcaccatttctgcccttaatcgcgaaaggaagccatgttttgagttgcgaagcgcacctctacattgcgggacttccaa

SEQ ID NO: 273434 - DNA, 286 bp, Glycine max
  unsure (1)..(286): unsure at all n locations
tcttctatatataactntcatctccaagcatatgttgtctcttcatagtaggagtcttcactctacttttcgtttaaggacttgagtccattggggcatttaatgcaaacattaaatacacgttccttcttcatgcaaactccatgttgataggatagcatgtcttgcactttaacaatgaagttacttctttcatcatagcacgtcaacaacaatagagcgcacctgttgatgtggatcagcgtcttcgaaaatgtacgcttcatttattcttcattggactttg

SEQ ID NO: 273435 - DNA, 489 bp, Glycine max
  unsure (1)..(489): unsure at all n locations
gatccttaagtcacctgcggcatgcaagcttaagaaaccaattcgcctgggtgagctttcnctacaccaaatggctttctttataaatagccatgtagaggaggggtttaagggggatggaactaaagaaaacaaaggaaaaaatgcagaaggaaaatgagaagaagaaaagtaaagtcgaggcgctgcaaaattgtgatcgtggatcatttcctttgtcatttctcttgttagtcttgcgcgctgcgcaacgataagttattttttttaggaccgggtgtaatctttgtacccttgtgtatccctcttgatattatatatgtaatcttttctactcaaatatcactttgagatcgtttcaaggtccaacgccttaacaactccctctgcttttcagaatctaaaacgtcatttaaaggtccaacgccctaacgactcttcgtttgcaataaatctttcaaaaaacataaaataaattgacacacacac

SEQ ID NO: 273436 - DNA, 369 bp, Glycine max
  unsure (1)..(369): unsure at all n locations
tggttaaaatggaagaaaacgaaaccttcacgggattgctcacggaaatgtctaanaacttacccgttgaagaacgaagaacgaacgaagaacgaatgaagaacggtgaagaacgacgaagaacattcacggatttgctcacggaaatgtctcggaagcgttatggaagcacctcggcttggattttcttcacggaaacagattttttccatccaaaacagctaaaatgcatagctagggggatcctggatccttagaacaagcccatttttcctatttataggaaaaaaggggaggaggttgccgcccagcttgcccaggcgagctgagttcgcttctcgagaagcaatcctgcttcgaaaatacttg

SEQ ID NO: 273437 - DNA, 394 bp, Glycine max
  unsure (1)..(394): unsure at all n locations
agctgggtttgaggtacttacccgttgaagactgaagaacgatgaagaacgaatgaagaacgtcgaagaacggtcgaaaaccttcgcaaaatcactcacggaaacgttacggaagcgcctcggcttggattttcttcacggaaacaattttcctaagcaaattcgaaagagagagaagtgcctaagggactgaacccttttctactacacttctccccctatttatagaaaattgggggagaagcttgccacccagctcgcccaggcgagctcagctagcccaggcgagcagggttgcttcctccagaagtaacagccttctggagggcccaagtgggcctggttgctatttgcacccncatttttactaagtacaccccattgccgttttttt

SEQ ID NO: 273438 - DNA, 410 bp, Glycine max
  unsure (1)..(410): unsure at all n locations
tcttccccagttntctataaatagggggagaagtgaagtgaataagggttcatccncttaggcacttctctctctttcgaatttgcttggaaaaatcttttccgtgaagaaaatctaagccgaggcgcttccgaaacgtttccgtaacgtttccgtgaggaattttgcgaaggtttccaccgttcttcgacgttcttcattcgttcttcatcgttcttcgatcttcaacgggtaagtacctcgaaccaagcttttcgattcattctatgtacccgtggtggtccacattgtgtttcgtgtatctttattcacgtttcatttactttntatacccccctttgacgtgctgtaagccatttatttaagtcatttctggcttaacctacaaataaaatacatgtccaccgatc

SEQ ID NO: 273439 - DNA, 285 bp, Glycine max
catgccagtactccatttctcttatttccttttaccaagattcgtgtacattagtatatgtgggactattatttatatctgtattgacctctatgagattgtcctctatatgtcgggtcattctttcatcttcacatacgattaactggccttttctatcttatcacattgccccattatttgccgtctttaagctggactttatgctccagattctcatgcatgttccaccatatttattacttaattaagagtatggaatcgcgactagaatgtcacctcata

SEQ ID NO: 273440 - DNA, 387 bp, Glycine max
attttcaatatatttatccaatttcttaattatgattgttaaatgaattataatcttattattttttatgttatttacacttttgaggtactttatttttattaaacgtttacaatttaataagttatttatttttattttcagggaatgctgcccaacataattttagaataatagaaacattttaaaagattaaaatgactcttctaaacttaaatatctaaattgaaatgaaaaagtaaaacgacatattaaaagtatatctatttttctaatatgatctttgtataatagtagcaataagaattcaacctcatgcgtgtacttcaattataccattatctagactttgttaaatctggattgaacagcgtttttcacttttta

SEQ ID NO: 273441 - DNA, 476 bp, Glycine max
  unsure (1)..(476): unsure at all n locations
agcttgtangattatggggtacccatcacatgtggtactatgtggcggtcgggcgatagggcacaacaagttntccacatncacaatgcgcgcataaacccaccatcccctgttgcccacctccaactgagctcacgtactcccacgtaacccatatacttgtttctctcaacaccgggtccccatcaatcctctcaagcttccacaacatccaagcataacaacattcaagcagcacaagctatcacagtcaagcaaaacagagcaaaggcagaaaactctgctcaaacaccaaccaaaatcacagcttttctcacttaaagacaccagtaacaattccttcgatccaattcgttaaccgatggatcaactncaaaattctactggaggtctatagtgcataagcctacattgtgaccgttgggatctgctagcaaacatccagaactcattctgcactactctttccacaacca

SEQ ID NO: 273442 - DNA, 461 bp, Glycine max
  unsure (1)..(461): unsure at all n locations
nttagctcggccttcaagatcatgcctttgacccatgatgattcctttcacctcttcggagcttgagctcactattgctgccctataaagcccctcacaactctgctttggtcgtgttattcctttcgggccttcttggtttatcattccaaggcttcagcggtggccatattgacgtcccttagttcattatactctcttcagactttgatggctatggacttgaacttctcttcgactacccgggctctttcaagctctgcctttagggcttgtacctcatcactttcttccgaagctntaaccctcatcatctctcacagtctttagatntgggagccaatccaatccttgtgttcggactctcaaccacttatgatagccgccgatgatccactactgcttccctaagctctctgtcttttcttcacgcgcatccatgccttgaaactcttggagac

SEQ ID NO: 273443 - DNA, 377 bp, Glycine max
agctagtgagagatgttactgactattcttactattagaacaagtttaagaatatcaacccaacacaagacctctattgtcggttaccacccttgacaagcaaagatttcttagcaacctagtgtatgcttaacagacctaataaggattaacgataatacaatcttataatgcatggtagaaaatgcaaagtcaattttcattctgctatcccattttaaaatggaaaaaaataacatagtcctcatgtaataaataaaagcggagtcttttttcatagaattaacaccaatattgcatgttcccggtagcctatatcaaggcagactacacacttgtatcataatagtagtactatgaaatgcaagaggcatact

SEQ ID NO: 273444 - DNA, 373 bp, Glycine max
  unsure (1)..(373): unsure at all n locations
tcttatccaggcacattcttggcggcaaagctccttcttccatcgcttattccctagtggatggtgccttctctcacctcttctcctttatcttccattgcatctccatggtggaaaatcaccattgaaggacctcattgaagctcanagatccagcctccatagaagcttcacaagcaagctttcatcattcggtaggaaaaaaacgggtgtgcaccattttagtttggttgaccttgtcgcaacctaccctttggctggagggcgacgggtgactcgcgggagggcgtgttcatganaggaatacgcgcggagtcgccaccaacgttttattggggaaaacgtcagaaaaacccggaaaagacgtgatcta

SEQ ID NO: 273445 - DNA, 422 bp, Glycine max
agcttgcatagatataaacacaaatgatagctatgatggaggctatgatagagaacgtaaccaaaagcatagtaaaacaacttcagctgttgataccgtcaaaacaaccaattctctcatgtgaagaatatggaggcaaccaccatgcctgttactatatggaggaagtagccaaggaaaccaaattcatgagagaatgcactacaaagttagaagaaattgtaatcaaccttagcatcacatcttactccaacctcgagaacaccgtgaaggtaataaattctttaaaagatcaagtaaaagagttagcagtgcaaaaaaagaaattgccaacaagggtgactgtgatatcgtaacaacaagaagcatgttatcaactaaagagccagtaagacaagacatggaggtaaatgatggagtga

SEQ ID NO: 273446 - DNA, 538 bp, Glycine max
  unsure (1)..(538): unsure at all n locations
ncgccggcgccatgaagctttgatacntatattacggcctatgaatctcagctttacagattggtcttcgccagagaaaagtattaagtgggtcttaaaagaggcaaatttaatcatcctgcttgggccaatgagaaaactggngccaatgaagaaagtgaggatgaaggagaaacccatgctgtgactgccattcctataccgccaagtttccaaccaacccaacaatgtcattacttagcccataacaaaacctcttcttaaccaccacccaagtattccacaaggccattcctaaatcaaccacaaagcctgtctaccgcacttccaatgacgaataccacttttatcacagaaccaaacacccaccaagaaatgaattttgcagcgaaaaaatctgtacgttcaccccaaattccgatgtcatatgcctaacttacttccatatctacttaatactgccatggtagccatatacccttgctaggttttctccaccttcatttttncgacggtacgactcgacaccatgtgtgcn

SEQ ID NO: 273447 - DNA, 388 bp, Glycine max
agcttgctatagtcatgcagtgctttgcaagcccttcacccatgttgggaatttgaagtgtgtgatcgactacctcatattttgggaatttaagaaagtaatttttgaccatttttaacctctaaaaagttatcaaaaacattataatgattttttcaagcaaactgccacaaagattattttgaaataactaatattaattgtcacattattatttaatagagaaatataatgatagggatcaaaatcaaattaaaaaataaattaaagataaaaaacaatccaataataatttaaaaataaaaacataatttatccataaaataatatatattttccgtcttgattgcatgtatcttttaagttaaaataatcatataccaatcga

SEQ ID NO: 273448 - DNA, 241 bp, Glycine max
tggtctaaagtcaaattatttggcagcggaaagaagaatatatatttggtggtagttttgggagctactatgggctgatgacaactactacaatgttcaaagatggatgagtgtttggtgtgaggcaatggcaaagctctttgtacggatgtgcaaaattcactcgtttatttatttaaaaataaactgaacagaactgaattggttaaatagttgtttcttaattacataagcaaattgg

SEQ ID NO: 273449 - DNA, 421 bp, Glycine max
agccttcatctagtggtaatcagagctctatatcttcaatacttgcttcttaaacctccattaattgtttttctttaccttctcttccattgatgttgcttcatttttatccatgtatctcctcacatgtcttgttctaaatgctgttaacatgattctgtagagcttccaccaattaaacttgctataaaaactagatttgattttctatggttcaaatttcttgttcttgttcttgaaccatgaattgtgttgagtttacgttcctttgagttttgtcttgttattattggtggctgaaacctataccataaaattcttactaagatattaaagtagaagacaacctcaaacatctagagtgacttgttcacctattgtagttttgtcatagaagtcatgtctagtcatgaaacttgtc

SEQ ID NO: 273450 - DNA, 437 bp, Glycine max
  unsure (1)..(437): unsure at all n locations
atgcgcatatnttcttacgaacgttcacttttacaagacattctattatctaagaaaaatgcacccatatacaatcaacgtagcttcattacctagattattcacatgtacttccaaggtgtatttgttatttacatcacacacgcctccttggctgaatttacacacatgcatactcaaagcatcttgnggtaccaaaaattgcacatgcgctcatcttggtatttctaatacctatacatatacaaactctaccatgaatcttgactacctacacaataaggtgctacatttcatgcctttctcaagtttttgctacctaaagacgcatgccaatgcaagcatattttcctttgtgactaacatcgcattcaactaacagcgatatattttcttgaatatggcttcttacataacatgcaacatatntatatata

SEQ ID NO: 273451 - DNA, 357 bp, Glycine max
  unsure (1)..(357): unsure at all n locations
agcttngtgtcgatctttattgtgttaatcttttattagcttttaattaagatcaaatctaattaaattaaaaatatttacatctactgtaagtcttaaaaaataatatattaatgtatcacttaaaaaaaattgtattaaatattgatgttaaaagaacagtgaatctaaaattattctaaatttttttctatatgccaaatgcaatcgaaagtgttcatctntgatgactttatatgtataagaacaatttcaatgggtaaaattcaaggaatatatcttgagatattttatcttatgttaattagtttctacaatgtcatgcataacgtgttaatctttgattagctattaact

SEQ ID NO: 273452 - DNA, 356 bp, Glycine max
  unsure (1)..(356): unsure at all n locations
nttacaataattatgaatatacttaaaactctgtatcatcatttacaatttataatatataatttaaataacaaaaaatcatatcatcatcaaaattttatgaatcataattctacgaaatattattataacaaatacatctaataatttttagttaaagagccagattagagtttttatgttagatttaatcaaaattaattataatatatatatatatattggtaactcattggcaagtgtaccaaatcgtcacaagtagtaaagttctcgaaagtccgagtgtcgaattcacagggactttgcttgtatntagactaatgcanacccaatntacaagcaagagatnaataatt

SEQ ID NO: 273453 - DNA, 291 bp, Glycine max
agcttattatatttctaatatttagcagagcttgacagaatataatgatgcgtatcataatatacaaaataattgcccagatactttagatcaatttcccgaaacaaaatacaagaacaaatggtagtttatctgagcagtaggcatatagagctaaaagagaaatatcagccgatattaattatcataatatgttgggattaattttttcataatttaaccaaatattatggattatagatatttcatgaaactgttaaataaaatacactctacatatttatttattat

SEQ ID NO: 273454 - DNA, 541 bp, Glycine max
  unsure (1)..(541): unsure at all n locations
cccccaggcgcttgcggcgtgtgatacttgatacnatgcatnacgngaactctagacacttaagcttgtggattatgaattacaagtctgaagaacactgtatcatgtgttagacanggtgagtatggaaaataagaanaagtgctgtgtacacaagaaaaatgaatgtgtgctcaaagcaatttccctcttaccatatcattctgagcttattatggatatgggcctcaagaaatcgaacgcaatgcaatgggttgaacaaatacattattctaaagattcactatcttctattgcatagtatagttaatagtatgactgttcctacatgcttatcggagccaccctcactctccgattcattctcaccgttaaacccaaccgtatccatggatagtgtcctagccattaccaagacgaagaagatgatgacgaagacgatccacaggctgaaacaccatcaaccagcgacgccgatttactggaagctcctcctcgcaccactagcattctattctaatctcaaacgaaacctggaacg

SEQ ID NO: 273455 - DNA, 425 bp, Glycine max
  unsure (1)..(425): unsure at all n locations
agcttgaagaggatgctntaatggaggaaaatatagagagaaggggggagcacgaaattgaaggaataaaagagggaaagaagtggaactttaaagtgtatctcataagactttcattcatcaaagttacaacaagtgttacacatgcttctatttatagactaggtagcttccttgagaagctttcttgagaaaacttccttgaaaagcttctttgagaagacttccttgagaagctagagcttagctacacacacccctctcataactaagctcacctccttgagaagcttccttaagaagattcctaaagaagctagagcttagctacacatacctctctaatagctaagctcacctgcttgagatgagaagctagaacttagctacacaccccctataatagctaagctcaccctcatgac

SEQ ID NO: 273456 - DNA, 435 bp, Glycine max
  unsure (1)..(435): unsure at all n locations
ctaagcttccagatccgatcatggaaagacttggcaactgccttcattatgcagtaccagtacaatacggacatggctcccgatcggaaccaacttcagagtatgactaagcgagagcatgagtccattaaggaatatgcccaaagatggagagatctcgcagcccaagtcataccgcccatgacggagagggagatgatcacaattatggtagatatgttacccacgttctactatgaaaagctgataggctacatgccaactaactntgcggatctcgtcttcgccggagaaaggattgaatccggactacgaaaaggcaagttcgaatatgcttccaatgtggcccccaacaacaacagaagagccccaatagtgggcgtgaggaanaacgaacgagatgcccacgcagtcaccacccgcccgacgtggatg

SEQ ID NO: 273457 - DNA, 196 bp, Glycine max
atttatacaaagtttgaagactcctttacgtataatgtatacatacaactaacattgatactatctagattacgaaatgactaatgtttatggatatgctagacggattaagaataataaccgacaggtgacttattaaaacaagtttactctcatatttatacgtcgcataaatgcattactggtaaatattaga

SEQ ID NO: 273458 - DNA, 320 bp, Glycine max
  unsure (1)..(320): unsure at all n locations
tatcaactagtctntaaaagtaaacagaggcataagctccacttacagtataaggtataactttgaactaaaataaaataaagtataaggagtaaatgacaaaaacatttatttagcacattacctcaatttttcttacattcaatgttatttgaccaaggtattctattttacaaattaatgtgacttcattatgaagttgccctattgatatgagtatttgtatagagagaagagaaatagctctaagatttgcttacaatggatgacacatcacaacagtatattctgtacaaagctgcatgctgttgttagattta

SEQ ID NO: 273459 - DNA, 441 bp, Glycine max
  unsure (1)..(441): unsure at all n locations
tgtatggtagaaggtgtacgacacccctatgttggtcaaagcccggagaaggcctcaccttatgaccagaagtggtacaacaaaccactgagaaagttaagttaattcacgaaaggatgagaacggctcacagtacgcacgaaagttatcatgataagaggaggaaagatttggaattcgaggttggtgatcatgtattcttaagagtcactccctggactgtagttggtcgagcattgaaatcctgaaaactcacacctcgctttattggtcctttccaaattcttaagacagctggccctgtggcataccaaattgcactaccnccgctctttctaatcttcaaaatgtctttcatgtgtctcaactccgtaagtatatccgtgatccatcccatgtgantgaattggatgatgtacaagcgacagagaatttgacata

SEQ ID NO: 273460 - DNA, 353 bp, Glycine max
  unsure (1)..(353): unsure at all n locations
gtacttcatttgtgcactaaccatctatgcactatgaccaggctactcgaagaaacagaggatgaggtgatttttatgttctgatttttcagcatttaatgtatacatgttcatctgcattatatggcaatgattttttttcttttttcaaatgattcaaatcttgcagtttgctgaatcgatcaaaaaaggatctgctaaagtgggaggtgtgagcaaagttctttgtcaagatttgagcaccattgcagtcaaatgaggtaacttcgaanatattgtacgaatttaatcttaacgtattggtctgcttgataagccaagacatatttgttgagttcatgttctaacatcat

SEQ ID NO: 273461 - DNA, 419 bp, Glycine max
  unsure (1)..(419): unsure at all n locations
ggacctgctgatgaaaaagaatgtcacagctggagcaaatgaaaaatatgtttttccttgatcagcttactcttttatttcataaatcatctgcaccaaaaactggagaatgccaagaaggcaataatgtaaagacgaaccatggctattgatcttaggcttagcgaatgtattcaattttccttttcaattatcctgctctctccatttgctntggcctcgagtcactggactatttcttcaatatcatacaactctatcttgatgtagagtatctctctattcttctaaccaatcgtacatgcattgctagagtaacgcgttgtctggatgtgtagataaaatgtaggaaatgaagtgacaagaataaataaagcgataaatagaagagataaaatgatcattttcccctctcattt

SEQ ID NO: 273462 - DNA, 378 bp, Glycine max
agcttgagctcattgttgctaccctacaaagttcctcggaatttccctcggccatgttcctccttgcgggcccttttggtttcttgttcaagggctcttgcagaggtcgcgttttcctctcgtaactcggtgcactccctccggatatgtgtagcaactgacttgaatttttctttggcgagtcttgccttccctagctctagttttagagcttggacttcttcatcttcctccggagcttcgaagttctcctcatcgataactttccatttagagagccaatctaaccctcgcatgtgaactcttagccatccatgataaccaccaatgacgccattacggatgcctctaagctctttgtctttctcaacggacttc

SEQ ID NO: 273463 - DNA, 486 bp, Glycine max
  unsure (1)..(486): unsure at all n locations
cgctttcatgtcttacttggcacacactacacattacaggaccctcttacgcttattggcacagggctcaaatttgtacccactggaagagatgacacttcttagataacgacaatntctcaataatgcattgattatgtggcataaacatgtctccctccaacacaattgactgtttcataggtagagaacaagtgccacgtattcttgatccctcctcaaatggacacaatttgagggacaatcaatacctttgtgtttagcctcagacgtgtgggaatgatatgataacaaaccctccacagacatgattgtaccatcagaggaacttttgagctccagataaacgaccattcctcattaagatgcaattgtctatcatcaagagtttctccttaacaattctatttgcactctaataaatacaaccccgtgatttctgagcccaaatccttgtatacagacgcatttgcattactatgcccg

SEQ ID NO: 273464 - DNA, 579 bp, Glycine max
  unsure (1)..(579): unsure at all n locations
agattatcggctcagtatctcttaanctntccttctactnatctnnnnnntngcgcgcgcgcgttgacgctttgacaccttgaatnacgcgaaccatccaaactcaaggttatgacagtgtccatgatcacaccgcaactatcacatgattctgtgctatctaagccaacgactggagagagaacgtcgctctctaagttcgagattgtgcttggctcacatgatcaagaaaggttccgcaccaacgatatacaactttaccaccgggagacggaccatttctagtgcttgaaagaataatgacatatgttaccacttgagctacgcggtgactatgacgtcagatccaccttcatcgcattagacttatctctttttgatgcagatggacaactccatctgacgatcgatccttctcacgagggacagactactgacgacatcaccatcagccccggcaaggattcactcgcatgactcggaagaactaccactacgggtatcacaatgaaagcaaacgagctttttcacatctgtgttctaccacttgattcaacaccagcttcatgacacaccccc

SEQ ID NO: 273465 - DNA, 326 bp, Glycine max
agctttcagtaaaatctgggacctagccatgttagaggtctccacagaggccattgcctccctcgcccaatattatgatcagccattgagatgcttcacttttggggacttctagctgtcacccatggtggaagaatttgaagagatcctaagatgtcctctagggggaaggagaccatacctcttctcagggttctatccctcattagctagaaattctaagatagtccaaatctcggcgcatgaattagaccacagaaagcaagtcgaaaatggggtggttggaatactgagaaaatggttggaggcaaaagcaagaatcttgg

SEQ ID NO: 273466 - DNA, 318 bp, Glycine max
  unsure (1)..(318): unsure at all n locations
aagagagcacaagtcctagacttatcccaatgatcttttcttgtatcatacaagtagccttctcactatttttcttctcttaagtcgcttttgaccttattgaaacaggacacttattcttttcttcttctttnttcttttttacatataacttatttcgtgtgtgtgctgatgattaacctttctcttttcattctaattgactttcctccccaaatttagagtanattgccttgaaccatatngctctctagaatctaaacaacgtatcacgagataatcatttaagtttacgcttcaattcatgacaaaaatcat

SEQ ID NO: 273467 - DNA, 413 bp, Glycine max
  unsure (1)..(413): unsure at all n locations
ctagctagtattttccacatgaaggaatgcatagggtatcaaatcatgccataatggagtgacgagtgaaaccaatgtatattttcatatgcttataatgtgtgatctcctagactatacaactacgataagaccacctaggttactacagatatattatttggtagtttatggagcacttaatattatattacatctgttgcgaggacagtttangaagctaaaccttgtcactattttatgtgtatagtgtcgcttgatatataaaatttgaaagattgctccacttcttccgctaatatatatgtagaggatattatggcatatgatagagatggtcgtaaaataactgcataatatgaatcatataatacatatttatgaatgccatattgaaaaatatactatgtcct

SEQ ID NO: 273468 - DNA, 411 bp, Glycine max
  unsure (1)..(411): unsure at all n locations
tgcaagcttggatgatatatatatttcaagtgtgtgtatgtaggttgtgatatcaaatgtttaagacatagttaagtgtaaattttgacgcactgccttgagcgtgagaatgtgtgttcttttcaaaatgcatatatatgtatgacaattagaatgtgttggatgtccttgtatgttgatataaatagtaagatattctacacatacgtgtgtgcgtaaatagattacatgagttcgttctaaaatcagagggattaacatgtcatttttgtgttaagataagcattatcttgtaaaactaacttccaaatgtttggtctcgcatgagatggccccaagaaagcttgcttcatagagatccangaaagataaagtggctgaaggaaccagttccgctcccaaatatgatag

SEQ ID NO: 273469 - DNA, 402 bp, Glycine max
  unsure (1)..(402): unsure at all n locations
tctanactntatacaagaatgaagctctgataccacttgttagacaagtcgcctcagatatcttaagaaggggggttgaattaagatattccaaactacttccccaattaaaaatctatttcactttttattcaagttataaattcccttaacaatgaagttcttaaatattgattcaaataaaacaacttgaatatgaatatgaagcaataataaacaaaggagattaagggaagagacagtgcaaactcagatttatactggttcggccacacccttgtgcctacgtccagtccccaagcaacccgcttgagagtntcactatcttgtaaattccttttacaagttctaaacacacaacgataatccttcctttgtgtttagaattcctttacaacaaga

SEQ ID NO: 273470 - DNA, 400 bp, Glycine max
agcttgtgatgtatgcatatgatcaaacacactctgctttactaaaagcttggcaggtacctccaatgacacataaaaatgaaaataacattatcatatatactcaatgacatggattttcctagtgcaccttctcactgtcaagtatactcttgaccattatcatattattgtaaatttaaatcttataaataggaatgtacgaacggagggaattatagaaaaacaacaacgattacttttatatatatatataaattaatgatttatgtaaccacgctatataatcatctcttttatcttttgtgcttattattacgttcagctatgacttacgaatggtcaattcttcaagtctgttcataccctgcagcagcgcctagcatcatttacaaacaac

SEQ ID NO: 273471 - DNA, 220 bp, Glycine max
ctcaagattcacgaatcaagagaagagttaatcaagataagtatgataagggtttttcacaaactgagtagcacatggtatttttctcaacacatgtttaccaaagagttcttactctctagtaatcgcttaccagattattgcaatcgattaccagtagcccaatggatttgaaaaagatttcaaatgcaattacaacattgccaattgattcaaaaaa

SEQ ID NO: 273472 - DNA, 458 bp, Glycine max
agcttgctagaagccgtatgtgaaattcattttagaccataccattgaatacattaatgaggcggagaagtctacatccaaggaagacaatggtgagactgtttttcaaccagttcaaccgcctattcagaatctaaatattgatgttggtgtggaagcaatgctttccaagattattttgatgatgccaaagactcaagtctagaatcaagagtcaagcatgttccaagaatcaaagagtcgttcaatcaaagcaagtttcaagaatcaaagagtcattcaattaagattcacgattcaagtaaagaatcaagagaagactcaattaagataagtattaagagagtttcttataatattgaatagcacaattttgttcacaagaatgtcttcaaagaaaaatattctaccaagaagtttactctctgataatcgattaccagtagccaacattcttt

SEQ ID NO: 273473 - DNA, 413 bp, Glycine max
  unsure (1)..(413): unsure at all n locations
tagctgattgttaacttaaaatagtgttcaatgatatatcttttatttttagctatagaaaaacacagacatcttttaagtcgttatagatatagacacgacaattntgttaaaattatacgacacacgatgacactgataaatattgataatgatataaaacaaacattaaagcttagacataaatcttaaatcaacagagttgatgttctaaaaattgagtntagacataataaaatgctactacattttatctataattattgtggtattttccgcctctatcttggtatcaaaggctaaaaatagagtataaaaattataaaatgcaactagagcatnttaagtgtctgactctctttgcaactatataccgatgtatgtagaagaaagctccattgattcatgatgat

SEQ ID NO: 273474 - DNA, 432 bp, Glycine max
  unsure (1)..(432): unsure at all n locations
cgcaagcttgagcaacagcattattaatttgggagccccagtgtgattgagatcttccctcttcagataaatgtgaggtccttcaccattaggcctcttgtaatgctccgtcaacctttcagcaaaataaagaggactctcccggccaacataatcttttagaatcccagccagttctgtctgcaactcaaaatctaagaaaatttccattgtttttccttccaggaaactacatttcatggtttctgaatgtagttaacatacaaatatgagagatgtgctattatgtatgagagacagaaagttattctgaatctaattgagtgaagaataacatggagttccanattgtttagttctgtatgacactctgaaaataaaagactaaagacattctgaagaatgaaatgatacacatttctacagtcacaa

SEQ ID NO: 273475 - DNA, 449 bp, Glycine max
  unsure (1)..(449): unsure at all n locations
gctatgctgagacattataatagactccctcagcagcaaatctaacaacaatagaataattatgacctttcaagcaatagatacaatccaggttggaggaatcatccaaatccgagatggacaagtcctgcacaacaacaacagcctgtccctccttttgagaatgttgctggtccaagcaagccatatgtttctnccccaatgcagcagcagcaacaacaacaaagacaacaagcaactaaggcttctcctcaaccttccttagaagagttagtgacgcaaatgaccatccagaatatgcaatttcagtaagagacaatagccttcattcagagtctgacaaatcagatggggcagatggctactcagatgaaccaagctcagtcccagaattctgacagattaccttctcaatctgtccagaatcccaaaaatctgagtgtcattac

SEQ ID NO: 273476 - DNA, 343 bp, Glycine max
  unsure (1)..(343): unsure at all n locations
agctatgatttatatatacttataatggatatctnttttccttgtctaataattagaaaaatatcttgtgatttttctgacgaaaataataaaaaccacaaatgatctagcgtatgatttattaaattcaaggaaataaggaagaaaattataacaatacacttctttttatatacattctcaaaggtgaaacttataagtctcaagtcacacctcattcctaaattagtaacaaccatatatataaacctatttccaaaaatgttaataatgaacatgtatcgacatatttttgtggaacaataatatatatgaaccaataaaaatattagtaacaaccata

SEQ ID NO: 273477 - DNA, 249 bp, Glycine max
tgcctatatcctatcactaccgcactagtctaattaacttccacatatagttagtaagtaacagtgagccatatacctaaacaaatgttcacaatcatgaattgcgatgcagaaacctaattggatacacattacttagaacgaacataccgaaggcgctatagaataacgttcattgggtatacaagcacaaggctaatgattataactaaatgtctagatgaaattagatatatgtgggatgaaaaa

SEQ ID NO: 273478 - DNA, 415 bp, Glycine max
  unsure (1)..(415): unsure at all n locations
atccttaagtcacctgcggctgcagcttgcattttctcgatatacacaacaattgatcattgcctatgtangngagtgatgaccnaatacattttctaacacaaggtgatcctgagaaggaagatgttgtgatgtccctgtggcacgacaagttgaagatgcttcttgtgactgatggagagaagggttgcacatatttcaccaaggtactatccacccatgttttgaaaatagagcttgtttgactaaattgatttaatgaagatcttatgaaggaaactgagataatacctttgatcattaactggttggtaacgtttatgtaataactaatgatctttggcttgaggtttgctttaccattcaaggtggtttttattatcttatacacatatgagctgggatgtcttttatg

SEQ ID NO: 273479 - DNA, 408 bp, Glycine max
tctacaacgagctagaaatataaaacattatcaaacaacaacttcaatagttatagcttgttgatgcactcatactaaaaaaataggaatgtgtacgttagcaaaccccactagcatttgctaacgtatacactcctattttttagtgtgcgttagcaagttacaccattggtgcattttaagacaatctttagttatagcttgttaacgcactcatgctaaaaaatatgtgtataagttagtcaatccttatatatatacataactactgatatttagtttcttctttgacacagtcttaacatgaataaaactgcacgacgtacaatgcttgtgatagtcaaaagctgcatatgtaccaaattcactagtcaatttggggatttagttgctgtgagtatcctctac

SEQ ID NO: 273480 - DNA, 469 bp, Glycine max
  unsure (1)..(469): unsure at all n locations
cggatatattntntgtagtaatgctgataaagactctgcatctcgcgagcatcacttttctttacccttcccttcagagttggatcgttntcctaacaataatggaacaaattgaaaaggagagagagagagagagaacaagcataaaataacttaaattaacacacaggactatacttgagttctcattcataaaataagttaatttttgtgaatgagaagacaagtatagtgtaaagtaagacatgcatttgaagtgatgaatgtataaagtcggtttgagaatggtggttagttactctttcaaggcgttgaagaagcgcagttctgaattggcgaacaccacgaccacttgaattgggatccaacctatgagctttctcaaggcataaaaacggtctgcaatgcagagatcagcacacatacacactcataaaaaagaaagaaacttagacgaaagtgaagagag

SEQ ID NO: 273481 - DNA, 389 bp, Glycine max
  unsure (1)..(389): unsure at all n locations
agctnntatgtatgtttgtatctgtttaacatatatatttataatgtgtttggttccgcgataaaccaactcaatgcgcgtattttggatgaaaacttgaagtagaatttggtagcttttctttcactatcaaaataaaaatattttttaaaaacaacacattcacctattaattaccaaacacacatttacaagttgatcatagaataaaattatatggctggatggagttaattggttttatccgtagaaattaaatacataaccaagaagtttacgcaccaactgagttaaacttctttcatggcttgagggaagtaattaagttatatatgatgcggttgctttgcccgacacaaatgaaaaaataagttatgatgcggaatata

SEQ ID NO: 273482 - DNA, 347 bp, Glycine max
  unsure (1)..(347): unsure at all n locations
cgagctcattgttgctgccccacacagctcctcggaatntgtctcggccatgctcttccatgcgagccctcttggtttcttgttcaacggctcttgcggtagctgcatttccttctcataactcggcacactctttccggatgtctgttgcgaataacttgaatttttctttggcaagtcttgcctttcctagttctgcttttagagctcggacttcttcatcctcttctggagcttcgaagttctcctcgttgataattntcaacttggagagccaatctaacacccgtgtacgaactttcagccattcgtgataaccaccgatgatgccattacagatgccccta

SEQ ID NO: 273483 - DNA, 411 bp, Glycine max
agcttggtcttgattatttctaagttctttatcaagcttagaataatatacttggccttcatttaattgtcgttgggcttgtcgaccttgatcaacaaagtactttcgacacctactatatgttgatttggccaacgttgctatcggtatgttgcgacaatccttcaaaaccttatttatacattctgacaggttggttgtcgtgtggtcatatcgacgaccttctctgtcataagccatcatccatttgtcctttgaaatgcgatcaatccatgttgctatggctggacgtcagtgacagagattttctaaatttagaaaaaaatgtgcttgaaggagtgaccctgcatgaaattactagcacaacaatttactatattgaacttaataatgtgacctgataatgaatgt

SEQ ID NO: 273484 - DNA, 462 bp, Glycine max
  unsure (1)..(462): unsure at all n locations
aaaccattatcatcattaataaataggctntccattttcgtttcttcagggactacctttgttttcgcttctaataattagttgctagagaaagcaagatgcacacatgttttagttggtgccacaggttatattttagtaatttgattgattcatcttttagtctttcacatgataaattactaaattctgtcaggtttcggcttctcgttaaaaacagattgaaaattgaatgaccaaaatgaaattaacccttttaccataaccactaaagcctcatgaattacaaaacagtgggctttcttttagagttcagaatgatcatatcatcatttcatgtatgtacacacaagaaaacgaagcctttagctcgtagaaaggatccgacaacctatacacaaatggcttccaggtctaagatctagagaataaatagctctaataataaatatctatatctat

SEQ ID NO: 273485 - DNA, 421 bp, Glycine max
  unsure (1)..(421): unsure at all n locations
tgtagaattcaccccaattccagtgtcctatgctgacttgatcccatatctacttgataattcaatggtagccataaccctagccaaggttcatcaacctccatttcttcgagaatacgactcgaacgcaacgtgtgcttgtcacggagaagccccggcgcgttccattgagcattgtacggctctgaagcgtaaggtgcaaggtctanttgatgcgggctggctgacaattgaggagaattgcgtgtaaatcctgacattgacaagagatgccacacatggcgcacatttgaaagctgttgttaggtgtccctaatgactcatcanggtttccaagtttatgccattattgtaaaccacaactacaatggtaaatgaaatgcgataaagtgatatctttgtccctcatcctctcacaaac

SEQ ID NO: 273486 - DNA, 454 bp, Glycine max
  unsure (1)..(454): unsure at all n locations
cgttcttggattttccttagttctttaacaagctntgaacattatacttggccttcatttaactgtctttgcgctcggcggccacgctcaacaaagtattttcgacacctactgtacgttgatttgaccaatgctgttatgggaatgtttcgacaatccttcaaaaccttattgatacattctgaaaggttggttgtcatgtggccatatcgacgtccttctctatcataagccatcgtccatttttcctttgaaattcgatcaacccatgtggctatggctggactcagttcacgaaaattttgtaaattctgatcaaaaatgtgcttgcaaggagtgtangctgcataaaaatagttatgaataacaattctaagtatataggaaacttanataaacgtcaccatcaaatangaaatcttacccaattttttcacatttctttctgttggca

SEQ ID NO: 273487 - DNA, 172 bp, Glycine max
gtgcttgcacgcttatcgcaactctatctcgcttagcgtgcattagtgaatttcggcttagcgcgcgtcttctcgctcagcggaatgactcaagcggtgcgctcagcgggatgacacctcgctcatcgaacatgcacagctcatccttctttcagattcttcctcgcgctca

SEQ ID NO: 273488 - DNA, 426 bp, Glycine max
  unsure (1)..(426): unsure at all n locations
tgtagaataaactntgtaaggcctaagggatgctatcagtgtgtcatatcattctcagctgctggcatatggtacacagtctgaaatgtaatatccaggaacaaacttaccattacttttcaatggacatgtgaacttcacgcaaaacaaaataagacaaacagttctaacctttctgaaataaggaatatggtacaaggtttgaagtagagaattcatataacaggtagctccttggttcttaagcccaacatagccagtctccttcttggaatcataagctcagtaatcaacaatcctacgaacaagaacctcagcttcgactataagagtatcattcacaagataccctctactaggatcatacaattcatcaagaggcatgaaagatgtgaaacccccctcactttcgcgtgcattaaactg

SEQ ID NO: 273489 - DNA, 374 bp, Glycine max
  unsure (1)..(374): unsure at all n locations
agctntgagccattatcctgactcaccataaatcttgacccagggtgagaatgccaatccttaccctcggaagcaaaaaaaaggagaagagaaggaaaatttccaatcaaagaggaagcatataaaggagagaaggaaaattttcaatccaagagaaagaaaagaagaggaaaggaaattcccaatcaaagagtgggagaaagaaaaaagaaaagaatagatagaatactcccaatcaaagaatgggagaaggaaaaaaagaagtaaaaaagaagatagctcctggtcaaagaaactagaagaaatgtgcagaaaggtcttttgaccggacgatatctgaacaatacagagatgtcaccacatgaacacaaaaa

SEQ ID NO: 273490 - DNA, 344 bp, Glycine max
  unsure (1)..(344): unsure at all n locations
ntataagtgcgggtctgggagactaatgtcaagtggtcgcgatatgtgaagatgatgttccaagaactctggatttggtccgaccatgcnctcctgatatccagctgggaaattggcgggtggaggaacgtcccggcatttacacaacaagcataatgtaaacctttacggttttaaaagctctataggtgggcctatgctttagagttttcaatttggtaaggctttgcgtctttagtctctgaatttataatacaaagatctttcttcatctggttctggtctctacgcattctcattcatatgcatagttacttctttttctaaaacggcagatccgatga

SEQ ID NO: 273491 - DNA, 132 bp, Glycine max
ccaggagctgcagctacagcattgggcgcaaattaccccatgactgcattttgacccgaaatgatgaaaatcctccttcccctttgtggtattcgctagcatcatcaccagagtggtttaatgccaaaaatg

SEQ ID NO: 273492 - DNA, 424 bp, Glycine max
  unsure (1)..(424): unsure at all n locations
agctngcaatcaataatcttaactaaaaatatatntattatagtgaaccaagtaaaataagttttaatcacctttgctttccagtttgagttaaatttactacataagaaacaatttcatttaacagttagaagatagtgaggcttccttgtcacaaacagatgatctcatgcaatgacaagggccagattgggcgggagaaagaattatagaactaaaatcaagttgaaaaatggcagacagaaaaagtgacatttgcaataaagatacaaagcctagaagaacattagaagatcatcagcctctccaagcccatctactaatatcttgcactcggaaagacacacgttttcagacactgtcagatcaattcatcggattaccatatgctgaagaaccccctaataacccttcaccagaagct

SEQ ID NO: 273493 - DNA, 54 bp, Glycine max
tacacactcaagctagtcatactcgacaagctccctgtctaatcgcatgaaacc

SEQ ID NO: 273494 - DNA, 445 bp, Glycine max
  unsure (1)..(445): unsure at all n locations
agctntattacaattgttgccaaattaccaaatgaccccttcaaacaaaaaattctcaaaatcctcatccattntttccctatttgctaccatcatcaccaatgaattttatgcaaaataatcaattctatttcactgaaaatcctcaaaatcttcatccatttcccccttctcaaaatagtatcaatagtatgttagaattgtcgaatgcactgcaattcaatgcttagaaacttttgtaaatgctatgaaaaagatatttagggatgagtacttgagaatgctaaacaataatggcatcaattgcctactacacaatggagagacacatagattntcaagtatgttgagttttactgattgcatgcattgngaatgaannaatgtcaaattacacggcangaccaatattgtaaaggtgagcatcacaaaccgacagtaatac

SEQ ID NO: 273495 - DNA, 492 bp, Glycine max
  unsure (1)..(492): unsure at all n locations
agtgggattntgtgatagtgaatttgccggagatgttgatgatagacaaagtactaccggatttgtattttttatgggtgattgtgtttttacatggagttctaagaagcaaggcattgtgacactttctacttgtgaagccgagtatgtagctgcaacttcttgcacatgtcatgccatttggctaagaagattgttggaggaacttcagttgctgcaaaaggaaagcacaaagatttatgttgataataaatctgcacaagagcttgcaaagaatccggtgttccatgaacgaagtaagcataaagatacaaggtatcatttcattagagagtgcattacaaagaaagaagtagaattgactcatgtgaaaactcaagatcaagttgcggatattttcaccaagcctctcaaatttgaagattttcgaagattgcgagcaagacttggtgtgcagaagaattttccaattaacggaggatgntagatacc

SEQ ID NO: 273496 - DNA, 585 bp, Glycine max
  unsure (1)..(585): unsure at all n locations
aacagtgctacgtacaccnacntnntnnnaactacatccnaactactnataaacatctacactccacaagccnnnnccnnnnaagatttgaagtgaagacctggcgagacncgcgagagncnaacagaaagcacgcaagctngaaaagtangaacaagaaatcaaggattacatgatttagcacgcgtgagaagaaaagaaaaatagccctggcacgaagcaagaagaaaaagcgcacgaactgtgaactcggagaatcctcaggagggtgaggatgaccacctctgaggctcccaaacaaaataatcactaccctaagggataattgcctaaaaatattacacacaaacggaagtctggtaacctattggaggataccaacacactttcaatgaaagacccttgtgttccaaactcgaaagaaagaatgggagaaatcgtccatacacaacataaaaaaatcggaaaaaggtgctttttttcttggtgattactcaaacgcaggcctcaaagccatatgtctagggggggagtcatcgtggtgactcaaaacgcaagggagcccaagcttctttcaaacctaaa

SEQ ID NO: 273497 - DNA, 523 bp, Glycine max
  unsure (1)..(523): unsure at all n locations
nnacgcacgcgcgccttagcgcagtgatacctgaattacagaaccatcnnntnatatgccaggaagctgctgtattggcaactaccacatgcactcctttttgattatagcatcagacatcgcgctggactgctcccacctggaacccatcctctcaacaagtccctggcttccgcacgagtcatgtacccaacggcgtgagcactgctcttatctatcatacatgtctcctcacactgagttcaccataaaattatcggagaagaagctcctccaacatctgatggtgagaggaacaagaacatacggggntaaatctttgccaattcttgttcatgctgtctccgctgagttgactgatacctcagatagccttccttatggatgttgtgctataaggggagagcgtgatttataagactactctctcgcgtcattcctgctcttatggaccgaggagaaggaactaaaccagtcctctctcttcctttaaaatgangaaagccttcatctcttgatcacg

SEQ ID NO: 273498 - DNA, 280 bp, Glycine max
agcttcaacatcataccacgaccagggtgctggtactacttcacatggacttgatggggcctatgcaagttgaaagccttggaggaaagaggtatgcttatgtttgtgtggatgatttcttcatatttacctgcgtcaactttatcagagagaaattagacacctctgtagtattcaaggagttgatgtcctaagcttctaagagaaaaagactgtgtgatctctagaatcaagagtgacgcatggccgagagtttgaaaacagcaaaattactgtatac

SEQ ID NO: 273499 - DNA, 310 bp, Glycine max
cttaagacgacttttagctaaaaatcatcttagataattattttttctaagacaattattaatgaaatcgtcgtagaaagtcttagcaacaacgacggttaacaaccatcgtagaaagagtcttttaatcgacatagagcagtgcttttctagtagtggtccctagaaacattaaaatcttaaaagactttcattagagttatgtttgtggctacatgacacaatatctacctacgtactaattgacaatgcacatgttaataagctaataacacatgataatttcgtacatgatatacacatgaatgac

SEQ ID NO: 273500 - DNA, 345 bp, Glycine max
  unsure (1)..(345): unsure at all n locations
atttggaaaaagtagaattgttaaaatggtaaaaacgtgtttaaagagattaagatatgaaagtcaggttaccaaaggtttaggatcattcagcattgtctgagtaagctgaacagatcaaatgtgctttctggatgaatgcctctgcctaccgcaagtttgccgctccagtggttggatgaaatgtatgtcanaaacagagtgatggtcacatgcaaaacagttgatgttggttgactcgtagattatcaaatctttcctgaagttctggagtccatatgctaaacacactctgactttgtgttgtctgactcgtatttcatagatggctccattcgatctgag

SEQ ID NO: 273501 - DNA, 396 bp, Glycine max
  unsure (1)..(396): unsure at all n locations
tcagagtttcttccttcacaggttagtttcgtctcttaatttataagatgaanaatactagcgacacattctattcttaacacactctagttagctaaaatctattagaaatcactaattntggtggatcgaatttaccaaaatagataatttttaatacattttaatcaattacaaagaaaattataagatctatttttctcttctttctcttttactatggnngttggtaactttgtaaactatgatgttttgttttgtagggatggagaagagtgaagaagaacctttgagacctacttcgccttggatggccattccaactctgatttctgcgctcttcaacgctttgcctccatgtgatattgccctccatctcaagttctacaaagataa

SEQ ID NO: 273502 - DNA, 605 bp, Glycine max
  unsure (1)..(605): unsure at all n locations
tcgaacttttctcntacnntctnccactatgaatgtctncncaccttccttaaaaacagggaccnnnnnnngtatgatttgtgtcnatccgngaccgnngaccncnanaggcgagctgcaagcattcanacatcctcgggccattcctgctattgcctattttaagaaagatagttcttaccaagaaatgctacccttaaaacaaaaatggcgtacaaccccctccaatatatatcgaacataatatgtataatatttgaagcgagcatatcgcgcataacttcacctaacttttcactctgtctcaagacattggttataatctaatgaaaagaagcacgccatatacacatgcgaaggcaccttccgttnactacattatttacacgtactaccaaagtgtatatgttacctatatcacacacactttcctatgctggagtcacatacctgcatactctaagcactttggctatcatatattggatacgtgcacatcctcggatttctaattcgagacatacacagactcatgatgatcttgactatttcacatgacgcgctcatccatgctttcttttgaagtgtcttctacacaagccccn

SEQ ID NO: 273503 - DNA, 474 bp, Glycine max
  unsure (1)..(474): unsure at all n locations
tgaaggtaaactanatgccttagtaacctttaacccatcttccttgaatcagaaatctgtacctgtcacaagagtctgtggtttatgctcctctgccgaccaccacatagacctttgtccttccatgcagcaacctggagcaattgagcagcctgaagcttatgctgcaaacaattacaatagacctcttcaacctcaacagcaaaatcaaccacagcacaataattatgacctctncagcaacagatacaatcccggatggaagaatcaccttaatctcagatggtctagcccttaacaacaacaacagcagcctgctccttncttccaaaatgttgctggcccaagcagaccatacattcctccacccaatcaacaacatcaacagccccagaaacagcanatagttgaggctcctctgcaaccttccctcanagaacttgtgggcanatgactatgcaaaacatgcagttt

SEQ ID NO: 273504 - DNA, 466 bp, Glycine max
  unsure (1)..(466): unsure at all n locations
agctttgagccaaaatcccaactcaccatgttctttgacccgagatgagaatattcgtcctcgcccttggaagagaacaaaagagacaaaaaacgatcggaagacaacaaaaaaagagcgagagaggaaaacccccgatcaagatcagaagataatgaaagaattatacagaagggtctttagaccaaacaaatattcaaaatagtcacaacctaataaggaaaataaaggaaaccatgacttgaagtggtcctttccctttgattgccaaccaaaatcctgggtgctggcaactntctcacctcacactaaacaaaaatagaaagggaaaaggccagaacattcagagccaaatttctcaccacaacaccattcccgaaaagtcctattgaccatgatcgcacatgtaatctttggtttataggagatgagttgcaaatcaaatatgacatattatagttcgaaa

SEQ ID NO: 273505 - DNA, 394 bp, Glycine max
  unsure (1)..(394): unsure at all n locations
tgtganatcctctacaagcaaagatccacaagggatgtacctttccttgttctctntgaacaaccaagtggatgtacnctccacttgaactgatgcacaagagatgtaccctctcttgttctcagtattacaacccaagtagatgtaccctctacttgtatcacaaagaatgtaccctccaatgtgttaagacaaagaattcttatgcggttagtcccttgaatctttgtaaggggaaacaaaagatatctcacgcggttagtcctttgaaatcttttgtttaaagggaagaggaagaatcaaaagaattctcacgtggttagtccttngaatcttttggcaagagggagaacgaagaatcanacgagttatcacgcgggtagtcctctgaatc

SEQ ID NO: 273506 - DNA, 504 bp, Glycine max
  unsure (1)..(504): unsure at all n locations
gcgggtttganncccttgacgaacttggattcctttgaganaccgcgcgagctntagagactacctgcatgcatgcgagcttatagcagatttatngaaggaaacaatatgtgtttacaacattatgcagatcgacacttactcaggctaagacattatgagtagggtaggacatgcactacatatcttggggcaagtaatggcaaaaagctgatgccttactcaaagatgcccataccgcctaagagaggcgataaactttaaaagctacctacatgggtatcaggtgctacctctgaagaactcttctataaccctttattcattgacggcaggtaaggaactagtctaggccgcgacccatttaacattttgtcccggtcagacatgacatgcaataaagaaagcttggcttttgctcatcctgtagatatatgtcccgtcgtatagaagtgtctcgaaatttgctaaatggaaacatcgtcggcggccttccacgttccg

SEQ ID NO: 273507 - DNA, 120 bp, Glycine max
gtgagatccccatttggatctcaaagatccatggatatgaacactaaacttgtctcgtctttcagctgtcaaaatatctcaactcttatatttgctgctttgatgttctctactgatgac

SEQ ID NO: 273508 - DNA, 204 bp, Glycine max
  unsure (1)..(204): unsure at all n locations
agcttgtggacccatgccaagtgagtttcattacaanatggcaaagtggtgacaacatcatcataacaaaaaaaatctttcattcaatgataaacaagagaggtcaaaagggttggatgaccataaaagtttgtcttgaacagtcttatgaccaccttaagtgggagcttttgcaggaaacctctactgacattggttgcccta

SEQ ID NO: 273509 - DNA, 319 bp, Glycine max
tgaacttccttctcttgatgaaatcgaaactgtgcttcttgttcatgagtctcgaattgagaaatttagcaagacaaatgttatctctattaatgttgcatcaacttcctctgcttctcaaatctccaattctaacactgctcaatctaattttgtgcaacacaacctcaatcggagtcagtatttgacttattcccaaactgattaaaatcaatatcagcagttcagtggtggtcatggaggtcatctttgtggctgtggtggttgctatggtggccgtggtggtaggagctctattcaatgcctcatttatttcaag

SEQ ID NO: 273510 - DNA, 205 bp, Glycine max
  unsure (1)..(205): unsure at all n locations
cctttcgctntgatcgcaaccagatacatgggtgctggtagtttttcatctccccttacaccacaatcgaagggcgatagtgcctactcttgaagcaaagtttgctctcacatcactcccaaaagatcaattatcccttgccgcctgtaactcttggttgatagaaatgagtcgccatacccacctggtcatctttgtcttcacg

SEQ ID NO: 273511 - DNA, 196 bp, Glycine max
  unsure (1)..(196): unsure at all n locations
agctntgaagatcttggaagcaagatacgcacaatgagataatgaacgatgcggctttcaaaagccaatgaaccggcaagaagccttccggtcatattcgcttggttattttataccaaccggcgggcatcatgcacagagaagtccaatttccaatcatcattcagtgcccctctccatggtacaccttcactac

SEQ ID NO: 273512 - DNA, 311 bp, Glycine max
cacacttccaatgaaaggcctttctgttacaaaatttgaaatcaatgaaggtaagtaaattgccaattacaaagttacaaaaaagtcctcaatttttggaggttgttctctctttggtgtttcactcaatttggagtgcttcttagtccaatagctcttaaggtggttggccccttgcttcttgactcaaattctccaattgatggcaccaatcctcatttccaattccctatatggcaactcacaaacagggaaacaaagagacaagcaataaccaaagaccagaaaatgaaatgaaagctaaaccaata

SEQ ID NO: 273513 - DNA, 193 bp, Glycine max
  unsure (1)..(193): unsure at all n locations
agctntatctccaaggcatagaatgattgcacttctggctcaatcaattatctctaatactgccacacatatcctaatcaccaagccatagaagctaagctatatgtatgtggaagaggctctctcttgaatgctaacggcaccccctggaagccactaaggaagaatctgaccactctggctcatacttgga

SEQ ID NO: 273514 - DNA, 76 bp, Glycine max
agcttattatgtcaactcccatctctgacgctgcctgtattaacatcatactatttattctcacttgaggaggtcc

SEQ ID NO: 273515 - DNA, 94 bp, Glycine max
taataatcttatatataagtgaaagatttagttcctgagaggattcgctcttgtgaggagaaaactcatcagttatgaagttgaataacatacc

SEQ ID NO: 273516 - DNA, 430 bp, Glycine max
  unsure (1)..(430): unsure at all n locations
agcttatgctccanattagtcttgcagttgttcttcaatatatttatcatggatgcatttcaatatgttagtcgttttagatatttactccatagtttagtcttttgtaaataatatactaacaacatatcaaacaacaataacctcaataaaattaaatatgtatttcattgttcataaaattttaaaacatgaataaccatgaatatcatcgaagctaaatagacagtgttattttataaagtatattatatatttcaatcatattagttttggctctcatttagtaagttctatacaattacaattatactatgtaagtatctatgataactattattgctattaatattcattttctctcttctatatatgtttatcgtcatcatcgagaattagggacaggatggagacgatgttattgaacaag

SEQ ID NO: 273517 - DNA, 455 bp, Glycine max
  unsure (1)..(455): unsure at all n locations
gctccaagaatcaagattcaagaataatcaagtntacagattcaatcaagttttaagaatcaagattcaagaataatcaagatcaagattcaagaataatcaagatcaagattcgagactcaagattcaagaaacaagagaagactcaatcaagataagtactaaaaaaagttgttcaaaacattgagtagcacaggaatntttcacaagatcttttaccaaagagttctactctctgataatcgattaccttctggtaatcgattaccagtagccagcattgttttcaaaactgatttacaaagttgtgattgattaccataatcaggtaatggattaccaatatcttaaaacgttagatttcaaatttcaagagtcacaactagtgataaaacattttcaaatcattttaaacttgtgtaatcgattaaacaatactcgaaatcgattccagt

SEQ ID NO: 273518 - DNA, 390 bp, Glycine max
gagttgtgatgatcacaaatatgatgtctaatagttcataagtcaagaacacttcatgataacggagatgatcgatctcaagaatcgaagaatgacttcaagattgaatgatgatcacttcaaggtgcataaggaaatttgatttcaagaatcatattacagtttcaagattcaagttccatgaatcaagatcaagattcaagactcaagattcaagaatcacgacaagactcactcaggataggtcttaaaacgtttgttcaggactaagtagcacatgaatatctctcataaccttttaccagagagtttgtactctctggtgatcgattaccagattattgtaattgattaccactagcataatggcttccaaaaagctctctactg

SEQ ID NO: 273519 - DNA, 386 bp, Glycine max
tgagagggacggaggggcggtctcctccacgccgcactctcgtcgcccaacactccatatatataatagggacgccgccgaacgacccgcgagcccaccaggcccatctaacaggtgacaatcaccccaccactcacaacgtcgacacgaaagacatccaacgctgcacgcccagtatttactttcaccgcaccaagcacaccggcaccgcaaacacaccttccacttccgagagactccccaccacaacgaaatcacaccctccatgccctatcactcacgacacgcaccctacacacacaccccaacaacatccgagatggggaccttaaaatacggacagacacacctccccacaacacaatctgcactcaccgggaaggccg

SEQ ID NO: 273520 - DNA, 445 bp, Glycine max
  unsure (1)..(445): unsure at all n locations
tgacgactcaagttgattcgagtaggcttgatgataacgttagatgatgacaaaaagcccaagagaatgatatcaagattgattcaacaagttcaagatcaagattaatttgcagttttatgattagaaatcaagaagattcaagaatctagagaagtttgagttcaagattcaagagaagatgagttctagattcaagagaagagatcaggaagacttcacaagggaagtattgaaaaatataggttaaaagtgttggtagggtatttaaaataatgtggtttaatataaagtgctacgaaaacactcaatatgctactctacatgagaaacaaaaatgaggggaaaatataggtttaatagggtttatgatgtgataggaagaacgagataggatataaattagaagtgttggtaggggatttaanataatgtggtttttgta

SEQ ID NO: 273521 - DNA, 423 bp, Glycine max
cagcttcaggttgctcattgactccaaattgctgcatagaaggacagagatctgtatggtgatctgtagaagaacatagaccacagactcttgcaacaggtgtagatttctgattcatggcaagctgggttactaggttgaccaaggcatcaagttttccttcaagctttttattttcagtaggtgaagaagaatccgtggccacctcatggattcctctaaggacaataacatcatttcttgcactgaattgttgggagttggaagccatcttctcaatcaaattcctagcctcagcaggggtcatatcaccaagagctccaccactagcagcatcaatcatactcctctccatgttgctaagtccctcatagaaatattgaagaacgagttgctcagaaatctggtggtgtcttgaatctt

SEQ ID NO: 273522 - DNA, 451 bp, Glycine max
  unsure (1)..(451): unsure at all n locations
ctcttaggtccttccaccagtatgaatgcccnccttgaacacgatctgactgaaaatcagacttggctccatacttggaattgataatcctggcccaaggttgttgcagatgagaagttaaggcccatatccactttcccagcaaagctatattaaatttagagatatctttaatccctagacccccctcagacttgggcaggcatacagtctcccattntacccaagaaattttcctatggtcttagtcccccccccccccataggaagttcctttgaaggctaccagtttatttactaccctttgtggaatcttgaagaaggataataaataaattggtacaacattgagaacaaaattgattagagttatctttcctccctttgatatgnttttctgggcccacttagatagtttagactcatttcttttattaaaggctcccacaca

SEQ ID NO: 273523 - DNA, 358 bp, Glycine max
agcttgtgaagtgcactgtttaaggaagcatgatcttgctgggtcgaattgtttcttcacttaagatatacacaatacttaatgctcgctctgtggtaatcagctctcttccatgctgcccaaaactatggaagacaaggaatcatatgtctaacattccacattaacctatttgagatgactatccactgacatgccaaagtataactttctcttatgagaatgcctatacataattatattatcataatatatcaccttttgttacatacaatttatcccctttccttagcattaacacaaatgaatgaagaatacttacaataagagttctaagcttcgacctctcatcattgac

SEQ ID NO: 273524 - DNA, 421 bp, Glycine max
aggttgtcactttattttttaaagcttatagtgttattcatttattaaaatacataatgatgatgtcttaattgaaaagatcaacttttccaatagagtcccaatacctcaagagactaaagcttgtgccctcctccatgctcttcgatggacaaatggagcttggctaccatgaccttatttttgagagtgactgttaaatgatagtaaataacatcacttcatctgaatttcatattttcatgttatcatggttaaatgtaaagctatcctcccttgtattccaaactctagggtaaattttattacgagacaagctaataatgttgtccattctcttgcaaaggcatcaatatttttttcttgtaactatgctcatgaaaaagttcccacttgtactgagtcctccattcttaatgaa

SEQ ID NO: 273525 - DNA, 432 bp, Glycine max
agcttataagaacaaaattgcctcaatcatttccaaatatgcatgtgaattaggacgcatcaacaagaatcaagccaaggctattgtgcaagcaatcaatggggcaaaacacaccaaatgattatgatgatggacagctcaaattctcacaaaggtaaaatcatcactttcaaattgagctttcaaaattatcatgacatgtagagaagaatcaaggatttcaagtcacaaaatgtcaagaacttttattttcaaaacaattacccatttcttgaacatatcctataattcaaagaaaaacatgcaaattcgtacgtgaacacaaaattgacccaaaatattaaactaaaaatccgacgaaactaacaacattaacaaattaacacaactaacagattaacaaaaccaacataactagcaaaaccgaagaac

SEQ ID NO: 273526 - DNA, 436 bp, Glycine max
tttgcaagctggaatcatttatcctatctctgacagccaatgggtgagtcccgtccaggtagtcccgaagaagaccggcctcacagtgataaaaaatgagaaggaggagctaattcctactcgggtgcagaacagttggagagtctgcattgactataggaggctgaaccaggttaccaaaaaggaccattttcccctgccattcattgaccagatgcttgaacgcctggcaggtaaatcccactactgtttccttgatggtttttctggttatatgcaaattactattgctcctgaggatcaagaaaagaccacattcacctgccccttcggcacttttgcttataagaggatgcctttcggcctgtgcaatgcccctggtacctttcagcggtgcatgattagtattttcagtgaatttttagaaaattgcata

SEQ ID NO: 273527 - DNA, 416 bp, Glycine max
  unsure (1)..(416): unsure at all n locations
agcttattgtgtcttataattctaatgttgctaatgttgttcttgaaaatgtagaagcaaagcttcatggtgaattaaaggtgattcaaagggtgtttgatgataacaatgatgataacaaaagatgatgacaaaggtgatgacaaanagctcaaagatcaatcaaagaacaactcaagtgaatcaaagatcaatcaaagaacaactcaagtgaatcaagaacaattcaagagttcacgataagaatcaaggagaattcaagactcaagaagaaagtttagagttaagaatcaagattcaaggttcaagatctcaagaatcaagatcaagattcacgactcaagattcatgaatcaagagaacgcttaatcaagataagtatganaagtttttctcanaaaatgagtagcacatga

SEQ ID NO: 273528 - DNA, 409 bp, Glycine max
  unsure (1)..(409): unsure at all n locations
tataacttactctgtcttttgtgtaattctcttcaacacattttttcttcaaccctcatatatgttcaatatacttaatatgttaattacttaaaatattgtgatgtttttttaagcgtttaaatgatcatatattaaatctacttaatatcgtattacttagaatagtaatgatgttttttaaacaattaaaattattattcattcaaaaaaagctataaaaaactgttccatggtccaacataaatgttgagtataagagcaacttttgatagtttttatttacagtttttttttattttttcacttttcataactcatgaaaactaatttccgtaacataaaacttaaaattatgaaaatctatagtacnaatttttatacattacaaaaaaattatatatattac

SEQ ID NO: 273529 - DNA, 413 bp, Glycine max
  unsure (1)..(413): unsure at all n locations
agcttggtcaatttgtgttgagatcaaatggnttacaataagaaaatgtatttggctttatataccaagtctttattgcgatgagactatatacatactcctatcatattcatagtgtaagcaagtgcttttgttacttacctgtaggtctgtgcaacgaagaagaaaacatttgttctagataattatggctcagcttatggctttggctccatgggatttggcagtcttggattcttggatagaagggtatctgattaactattgaaacctataatcttagataccttgagagctcaccatgtctctcaaattagcactggcttgtaccacactgtggtgatcactagcacgggacaaatatttggctttggagacaatgaaagagcacaactcggtcatgacacattaag

SEQ ID NO: 273530 - DNA, 416 bp, Glycine max
ttctgcatgtggaaattctgtagaaaacaaaagtgtgctgtcttttcataccttctccctcttgccaaaagattcaaaggactaaccgcctgagaatgtttttgattcttccttctccctcttgccaaaagatttcaaaggactaaccgcttgagaattctttggaattttccttttccctttaaacaaaagatttcaaaggactaaccacctgagatatcttttgtttccccttacaaatattcaagggactaaccacctaagaattctttgtcttaacacattggagggtacatcctttatggtacaagtagagcgtacatctacttgggttgtaatactgagaacaagagagggtacatctcttatggatcaattcaagtggagggtacatccacttggttgttcaaagagaa

SEQ ID NO: 273531 - DNA, 423 bp, Glycine max
  unsure (1)..(423): unsure at all n locations
agcttattagtgttttagtatggccttgtctgtttgacaaatgccatgtttacatctagaaggattaaaatattgtggtgcggatacatttgtgattgtgctattgtcattagagcatattacactatctcacaatcttcaaccttgaatatgatgtgttttccattctatagtcttgcatctatgtcatgctcgtatgtcatatctggacacattgaaattattctatgcattgacacctgtgtatcaagctttgggaaaacactgattgtaactagaagtaaagacaacagtgtaagttttctcccctctgatcttaagattgttgtacaggctctaaatattcttgtatgggacaacgtgctcaagggtatttgttcaatnttacgtaattaacaacgggtgctctattgagttcataat

SEQ ID NO: 273532 - DNA, 93 bp, Glycine max
tcctccagaacgctgttgcttctggaggatgcaactcggctcggctgcgcgacccgggcggcaagcatctcccctatttcgctataaataggg

SEQ ID NO: 273533 - DNA, 439 bp, Glycine max
  unsure (1)..(439): unsure at all n locations
agctngtccttggtttagacatgattggtacatgatttgngacttgtaggattcaatttgggcaaaattggatgaaggcaagagtggttttcgaaatctgcaccttatgcataattttgctgtggaaatgtgcagcagaattttgcataagtgcagaaaaatgcttgtgtatggctggctgtggaaagggtagtgcacatgggttctgaacatttgctagtagatcccaacagtcaaaatgtagacttatgtactagagacttcctgtaaaattttcgggtcgatccaacggttaatgaactggaacgaagagaatgttactggggtaattaaatgtgaaaagctgtgatattggtgtgtgttttacgcacagttttctgcctttgccctgttttcttgactgtgctacgttgtgatgatcgaatcgggaattactcgc

SEQ ID NO: 273534 - DNA, 274 bp, Glycine max
  unsure (1)..(274): unsure at all n locations
ggaaatntctgctgagccttgatgtaaatactctntactatctatttaacgttgttttgatgtgttcattacttttatctgcatttaattattgcatgcttgtggactgatcacccatgtgtgtgtaaagttaggatttttagcattggaaaatgttctgaatccttagaactggatagagtaaggctagataactatatgtcgggacacgaactgcatggatgtagtgtttaatatgctagaatcgtaatgcagtttgtttgggataagttca

SEQ ID NO: 273535 - DNA, 446 bp, Glycine max
  unsure (1)..(446): unsure at all n locations
agctggcatgtggacttgcgaaatccccactccattattaggattattacctgtcatctcaaacaaacaaatcaaacgtaacaagacaattatagttgttgtttgaatacctcacccactcaagtgtatcacacaattatggcttttctctaatgaaaacactattgccttttaccactctaatttcccttgagttcttaggcaattcaagagattatggccacaacaaagaacaattcaccaatatgtgtaaggtaaggctagagagacaaggaaaaggttaaccaagaaaaaggctaacaatgtttttaggcacaattgaaggaaataaaattcagaatttaggaattcaagtaacaatccttcatacaaccaatatattaccttaaagagattnttttttttaaaaaaagttcttcaatcatgaaccatttagcccaattttt

SEQ ID NO: 273536 - DNA, 459 bp, Glycine max
  unsure (1)..(459): unsure at all n locations
ctgagaagcatgtgatcctttggcatcatcaaaacattcagcttgatcctttgtctacaatcatcaaagtacaccatcacaaatttaccaatgaattctctcaaaacatggttcattaatctcataaaattgcttggtgcataagtcaaaccgaaaggcataaccaaccattcatataatccatgtttaagtttgaaagcggttttccattcatctccttctttaatccttatttgatagtaaccactnttcaaatcacatttggaaaagaacaagcaccatgcaattcatcaagcaaatcattaagtctaggtattggatacctatatttaatggtaatattgtgtgaagctctacaatcggagcacattcntcaagaaccatctgtttttggaaccaacaataccaggacagcacatggactcatgatatctcttacccatcccttaccaatgagtt

SEQ ID NO: 273537 - DNA, 452 bp, Glycine max
  unsure (1)..(452): unsure at all n locations
taagtcacctgcggcatgcaagctntacccaataactccccaaattgnggcttattgctttgaaccaaaattttcctttcatgaataatgctctcctacaacctaagacaaggtagaaggagataaactgtacaggttcaaggttcaatcaaacaatcatactttcagctcaaactgggtgcaagggataaatcattcatacacaagataagctctttggctaagtggctactttcaattaaaacatggccttcatcatcttcaaactcatgcattcgttccatattcagagattcatgcaaaaaccattacttactgctagtgttatctcacaattaaagatcacactctcactgcgttgtggctaacatgttccttcacaatcaacctgacaaaccaactaacattttcagtcatgatcctaattccatgttctttctcttctaatgact

SEQ ID NO: 273538 - DNA, 450 bp, Glycine max
  unsure (1)..(450): unsure at all n locations
cggccttcattacaccaacattgatgcnttgtcgtatgattgcatgttatactttagggaagacaaagacatagacatttgtaagaaatgcaatacatccagatggaagctagaaaaaaaatggagcacctaatggatgaaaaaaggtgcctacaaaagttntatggtattttcctttgaactcgtgtttacaaaggatgtttatgccttctaaaatagctaagaaacttgttgggacttttggcaagcgtgctagttgtcgttgtaagtttcacatttataaaagagttcgtctccacatgaacttgagtttacttaattcattcggataaaggatatcagtttaatagttatgtacaaatttaatcgaatgtcattggttttggtttaactaactaaagataactgaaagtaaaagaatagtgaanataatagaattacgaaaataat

SEQ ID NO: 273539 - DNA, 444 bp, Glycine max
  unsure (1)..(444): unsure at all n locations
agctntgtgtaatcgattacatggttntggtaatctattaccagcgacaagttttaaataaaaatcaaaacatttaactcttccaatggttttcaggtttttctaaaggttataactcttcaatggttttcttgaccagacatgaagagtctataaaagcaagaccttgacttgcatttcaggtactttttaatatattcttttacaacctttgaatctctttgaacatcttcttgaacttcttcttcctttgccaaaagctttatgagttttctggtttccaaactttgttctttcacagaaaacaaaagtgtgctattcatctttttcattctcttctcactttgccaaaaagaattcgccaaggactaattgcttgaattctttttgtgtctcttttcttccttttccaaaagaatgaaggactaaccgcctgaattcttt

SEQ ID NO: 273540 - DNA, 443 bp, Glycine max
  unsure (1)..(443): unsure at all n locations
cagacaactnntattttcgtacgaggctttacaaattatactatgacatcagtttaagtcttccatttcttatttatagtttatgaacttatgaagaatatacaagtggtatgctaatcatatgtatgccattgattagatgaaactcaaaggaatttggtagattggcctaagcgattcaacattatttgtggcattgctcgaggacttctttatcttcatcaagactcaagattgaggattgtacatagagatttgaaaaccagcaatattttactggatgcaaatttagatcctaaaatatcagattttggcttagctcgaacattatggggagatcaagtcgaggcaaacacgaatagggtggctggaacatagtaagtctttatctacattaatgtggtttgttcgattattctcacttaattntctttaaaattgat

SEQ ID NO: 273541 - DNA, 406 bp, Glycine max
  unsure (1)..(406): unsure at all n locations
agcttgtgggaatttgtgatagtgattntgccggatatgttgatgatagaaaaagtactatcggatttgtattttttatgggtgattgtgtttttacatggagttctaagaagcaaggcattgtgacactttctacttgtgaagccgagtatgtagctgcaacttcttgcacatgtcatgccatttggctaagaagattgttggacgaacttcagttgttgcaaaaggaaagcacaaagatctatgttgataatagatctgcacaagagcttgccaagaatccggtgttccatgaacgaagtaagcatatagatgcaaggtatcatttcattagagagtgcattaccaagacagaagtagaattgactcatgtgaaaacttaagatcaagttgcggatattttacc

SEQ ID NO: 273542 - DNA, 379 bp, Glycine max
  unsure (1)..(379): unsure at all n locations
ctgggagttttcatttaagattgaccccaccgcgcaagttagaatttaagattgaggagacagcagaactgtcccctaaaccattattagcatctccagtgatcttaacttaaagaaatctactttaggtatcttatgctatattaatataatttaagtggtacctatactactaaaaaaaccatttactaggacgtgtaaactaccacggntgataaaaaccgntttaaaaaaaatctgaggataatattgtaataattttattaataacaaaaatggtttttaaaaaccgtcttanaattatgaatttaaaaacgattatttaaaaaaccgtcataatcccttatatctttgcactntttttgctttctctctctca

SEQ ID NO: 273543 - DNA, 432 bp, Glycine max
agcttctatataagctgaactattttatcaataaacacaagttgagttttattcagaaaattagagtttatctcttttatcttagtgagagtgattctcctaaattcttgagtgattcacgaacaccttggctgtatcaaaggactttcacaacctttgtgtgttgccctcgctggaaagagcgattctttccttcctatcatcatcacccttgttctttcaaaccacaattccagaaaatccacctctgcccagaattatctcgtggccataactcccattttacgcactcaaattaagtgattcttgagcctaaattgaatttcaaaacgagacctttcacctctgtcataccctaatttcgtccggcgacctttgcttgatgacatgcgacctttctttggtccttgtgaggtgcttggcacccatcat

SEQ ID NO: 273544 - DNA, 441 bp, Glycine max
  unsure (1)..(441): unsure at all n locations
ctgagccanaatcccaactcaccatanaccttgacacgtgatgagaatttctatcgtcacccttggaaganaacaaanaaagaaaaataaagttcccaatcaaagatcggaagaaaacaaaaaagaaaaaagttctcgatcaaagatcggaaggaaacaaaagaaaaaaaaagttcccagtcaaagatcggaagaaaacaaaggaaaaaagaaaatccccgatcaaagatcggaagaaaatgaaagaattatacagaagggtctttggaccagacaaatatccaaacaatacagaatagtcacaacccaataaggaaagaaaggaaaccatgacttgaagtggtcctctccctttgattgccaaccaaaatcttgtgcgctgatgactntctcgccccgcactaaacaaaaacagaanagggaaaggtcaaaacactcaga

SEQ ID NO: 273545 - DNA, 283 bp, Glycine max
  unsure (1)..(283): unsure at all n locations
agcttgtgcatcanacacctttgtgaggatgtactctgtgatcttaagagtggactggtccatctgctttcaaagattcatggccgtgctggttaatacctccacaagcgtctgacacaactccatattgtcttcttcaccataaaaccaccacatgctcacgaggatcacatatgtctgaacgtctttactctttctttagagggagtggctgaggactgtctatattatcttgctcttaggaccattacgagctgcgatgacctcactagaatattcttag

SEQ ID NO: 273546 - DNA, 361 bp, Glycine max
tgagactaggccgcgaagcatgatgtcaactagtgctttatcttgtgtcaacctatgatccctgtcggattgaatactggaaggaattacatgcaaccttaccacttgctgtgatgtcaactgtactagcttatgcattctatacttcatattcaccgtaattaaatgagcgagattcggtgaatcgatctactatagcccactcaacatcatgcccatgactagtgctacgtgaactaaatacaaaatccatagatgtgctctgccatctgcattccgaagtttacaatggcttcgttgcctctgatggtcgatggcgcatagccttaaccttttgacatggctaacatcttgctacata

SEQ ID NO: 273547 - DNA, 308 bp, Glycine max
atgcatatgaaggaggaaccttcaactctaatcacgcccaggatgttgtgctagccgtcattgctgcaaaacacaccaaaataatctgacgatggatggctctaattctcacagcggtgaactgtatactttgaaattgagcttatatcactatcctgacatggaatggaaaaacacaggttccagtacacaatatgccattagactcctatttaagaacaattacccattacctgtacgttatccacatacaacgaagaactcccaatgatgttcacaatcatcttaccactatgacaaaattaacc

SEQ ID NO: 273548 - DNA, 423 bp, Glycine max
tgtaggattatggcgtacccatcacatgtggtactatgtggcggtcgggcgatggtgcaagtcaactctccacatccacaaatcacacataaacccaccatccccagttgcccaccttcattgagctcacgtactcccacgtagcccttatcctcgttcctctcaatgttgggtccccatcaatcctctcaagcttccacaacatccaagtaattcaacatccaagcatcatgaactaacacagccaagataacagagcagaggcagaaaactgtgcccaaaacacaaatcaatatcacagcttttcacactcaaataccccaataacattctcttcgttccaattcgttaaccgttggatcgactcgaaaattttactggaagtctctattacataagtctacattttgaccgttgggatct

SEQ ID NO: 273549 - DNA, 219 bp, Glycine max
agcttctacattcaatttcgttcttttcgatatattaccggactcaatcggacatccgagtacaatgctattggacttcgaatttgctcaaggcgttcttattctcatttgagcgtctcgatataatacgggactcaattggacattcgagttaaaagttattgttgtgtgaatttgctcacagcttctgtcctccattgcgagcatctccatatatta

SEQ ID NO: 273550 - DNA, 443 bp, Glycine max
  unsure (1)..(443): unsure at all n locations
ntgagaaaattcaaacgacaataactntntactcggatgtctgattgagtcccgtaatatatcgagtcgctcgaaattgaataccgaagcgctgagcaaattcaaacgacaataactttttactcggatgtctgattgagtcccgtaatatatcgaaaagctcgaaattgaatgttgaagctctaagcaaattcaaacgacaaaaactttttactcggatgtctgattgagtcccgtaatatatcgaaaagctcgaatgtgaatgtagaagctctgagcaaattcaaacaacaataactttttactcggatgtctgattgagtcccgtaatatatcgagatgctcgacatggaataccgaagctctgagcaaattcaaacgacaataactttttactcggatgtctgattgagtcccgtaatatatcgagaagctcgaaattg

SEQ ID NO: 273551 - DNA, 277 bp, Glycine max
agcttattgtgtcttataattctaatgttgctaatgttgttcttgaaaatgtagaagcaaagcttcatggtgaattaaaggtgattcaaaggtgttttgatgataacaatgatgataacaaaagatgatgaccaacgtgatgacaaatagctcaaagatcaatcaaagaacaactcaagtgaatcaaagatcaatcaaagaacaactcacgtgaatcaagaacaattcaagagttcatgataagaatcaatgagaattcacgactcacgaagaaagt

SEQ ID NO: 273552 - DNA, 410 bp, Glycine max
  unsure (1)..(410): unsure at all n locations
cttactctgtctttttttgtgattctcttcattcnattttttttcaaccctcatatatgttcaatattcttaatatgttaattacttaaaatattgtgatgtttttttaagcgtgtaaatgatcatatattaaatctacttaatatcgtattacttagaatagtaatgatgttttttaaacaattaaaattattattcattcaaaaaaagctataaaaaactgttccatggtccaacataaatgttgagtataagagcaactcttgatagtttttatttacagtttttttttattttttcacttttcataactcatgaaaactaatttccgtaacataaaacttaaaattatgaaaatctatagtacaattttttatacattacaaaaaaattatatatattaccaaaac

SEQ ID NO: 273553 - DNA, 439 bp, Glycine max
cagtgtacgacacttgcgcgaatgagttcctgttctgccaatgtctcaacaggagcagtacatgccaccatgacattctcacatagatcctgcctaatcttaatacctacatcagttgttcaagcctatatcgtctggtgctcttcagaaaactgtcgttgatcattgagcacccaatagccatattgtcgatccagctggtaccgctgaggatgtcttagtttcactatgttaactgatgcatcctagtcataatcgattgtatctactagaggagggacatgatggatgccctcttcccagcttgataagtacagctgccatcaatactgttaagacttattgcgatctactaccaagctcgctgtgcactgtacatggtactatgactgcacatttcaataaaatctctgcgatgaatcaaccagctcagactctg

SEQ ID NO: 273554 - DNA, 306 bp, Glycine max
agcttaagaatatggaattgaacaaagttaacaaatttggtagcatgcagcaagcttcatgtgcttacgatacagtagaacatgaaagtttgtattacagtcaagttgcgaactcaactcatttctagactttcttttttttttctgaattctcatttcgcgtcaactatccctactctaattttatttattatgtcttaatatttaatgttctatacttttgtagatttaatttattgttttaaatatactatagcaatgtgtgtgcgcgccccgaattatgcattcttaggcttggtgtatatt

SEQ ID NO: 273555 - DNA, 360 bp, Glycine max
gtgcaggggagggatgaataaaatctttgtgatactatatataatgaagctcgtgaaggagatgctagctcttgcagaacgaatgctgtgagttatatatcttgccagatataaacacttattgtagatactgcgtagactggtagaactatctctaatctagcacaggtaataggctctcactcttgctataggaagaacgctggagagatgaataatcatcattgcatacactgattagaccgactgtttgggttggctaacccatgtgagtgattagtaaaaactaattccgtgcgccaagcgtgaatgccacatgttactatgcccacccatccctgattgcgtgctcaaacactc

SEQ ID NO: 273556 - DNA, 445 bp, Glycine max
  unsure (1)..(445): unsure at all n locations
agcntttcatcaatttaaagctgtccccccacatgttcacttgatggaatggatcatatatacccatccttttcgtgaggactagttgagttgatgaagagttcatatactataaatcatgcaaaaaggaaattcatatctcaaattggagattcaatgcaatgtacgcaaggtaaaatgggaaattttagacttggtctcgtttaatataactggcaattgattggaaaactgtaatctgggtttgctggaaattgaatgaaacctcaacctcagaaacagcaagattgagaagttttcacatggtttatgttctgttatttcaaggattgtccaaaggatataactatttaaatactaatgaaaataaaccatgtttgatgcatgccacttataagacaaatttaacatgataaacgaacttcaatcaaaaggaaggagctga

SEQ ID NO: 273557 - DNA, 296 bp, Glycine max
gaggtgagcttagttattagaggggtgtgtgtagctaatctctatcttctcaatgaagttttctcaaagaagctggtcaagatagttctctcaagaaagcttctcaaggaagctacctagtctataaatagaagcatgtgtaacacttgttgtcactttgatgaatgagagtcttgtgagacatacttcaaaggttcacttctctccctctattatctcctagattgcgtgctccaccctctctatttctctctctctatcgttaccatcattggagcatccttccaagcttctta

SEQ ID NO: 273558 - DNA, 446 bp, Glycine max
  unsure (1)..(446): unsure at all n locations
agctntcacaagaaccaagaattactctttcaagtttttctgtatttgatatttctaggatctcaaattaagtcttggaagcaataaagatcaattgccattcaacatggaaggttttgtaacagaaaaaatacatcagaatactaaaaaatcattaaattcttactcgttactttttttgaaaagagaaacctaagcatacaaaaagcacatcatcctagccactaggtgtggcttttgtgaatgagctaccggttaccacttagaactctctgtcgtactttagacaccaaaataaaaatgtattatgtatagcccctttatacttaacaaaaataccacaccacgactaaggttagtgtctggtcttagttgaaaattgtaaagaaacacactattaaattgtcaagggtgggaaacattcatattaaacaaaaataatcaat

SEQ ID NO: 273559 - DNA, 432 bp, Glycine max
  unsure (1)..(432): unsure at all n locations
tgtatgataattttcttgtaacaagctaaattntagtggatatttctaataaaatagttgcaactcaaggcaaattgtagacatagctaaaaagtgaaaatgatcatgtaggctgagaatgatggctctgaacttaatagtaggatttattagcttatagatggaggaaaagactaggtagatgctgagaactatttccctttggatgatctcctttctaaacttactcttttttcctctattatgaatgttgtttttcctctattcatttagttcattctttgctttcataattaaatagtttgtcctttgtggatttttctaatatatatgaccgagaatngaatttttgcattgacctattaaaaaatcatactaccattttcagctaccactattacgccttgatttattaatgtcatgtgaagtata

SEQ ID NO: 273560 - DNA, 356 bp, Glycine max
  unsure (1)..(356): unsure at all n locations
tgcaagctttaactcggatgtccgattcangcgcataatatatcgagacacttgatattgaattatagaggctctcgagaaattctaatggtcataacttttcacacggatgtccgattctggcgcatactatgtcgagacgctctaaattgaacaaccgtagctcttcagaaattctaatggtcataacttttcactctgaggaccgatttacgcgcataatatatcgagacgctcgaaattgactaacggaagcttcctgagaaattcaaatggtcataacttttaactcagacgtcccatttaggcgcataatctatcgagacgctctaaattgaacaccgaaagctctctac

SEQ ID NO: 273561 - DNA, 346 bp, Glycine max
attaaaacaaacttaatgagctgagtgtaactgaaattgctggcaaccaaaagtcacccccaacatccaacaagtcagccaccatttggtctcccaaaaggctgatgcctaggttgccaattgggcccttattccaacttgaactaaagcccttttatttgattaacccaaaacatatttatggtcagccaactttacaaggattgggccattatttatacaaactaaacactctaaaattgaaataaagtggtgtcatttagtcctccaattgggccatgatacaactcacaaccttggacttatattcttgaaacataggctagtattcaaataatatggacag

SEQ ID NO: 273562 - DNA, 438 bp, Glycine max
agcttcttgaacgagatcaatatatttcattgacatatattaaaggatcaatatattcttgaatgtgatatcttttggtgtcaccctgatacagtgaagttatgcaatgcttataatttggtgttttggatagatagtacctacaaaacaaataggtacagactcccagtacttgactttgttggtgtgataccaatgtggatgacattctctgctagttttgcatatctggagggtgaacatgttaataatgtggtatgagctttagaacgatttcgaggtatatttctacgacgtgatgccctccctagggttattgtgactaatagagacctagcattgatgaatgccatgaaaattgtattccctgagtgtacaaacttattgtgcaagtttcacatcgacaagaatgtcaaggcaaaatgtaaattcctaatt

SEQ ID NO: 273563 - DNA, 357 bp, Glycine max
ataaagcggccgaaagaactatttcctctctcgagtatgacagtcaccgctttatgagcgcggtacaccatcatcgcttcgaggccatcaagggatggtcatttctccaggagcgacgcgtccagctcagggatgacgagtatactgatttccacgaggagataggtcgccggcggtgggcatcactagttacccccatggccaagtttgatccagacatagtcctcgaattttatgctaatgcttggccaacagaggagggcatgcgtgatataaggtcctgtgtgaggggtcagtggatcccgtttgatgcagatgctattggccaactcctatgatattcagtagtgctggaag

SEQ ID NO: 273564 - DNA, 367 bp, Glycine max
agcttaatacaaacgtctcacacctatgttattattattgaattgttgtttattttcattatttgcaaaaatgatctgaacttattatcaaataacccttaaaacgtaacgaaaattgtttctttctgcctttaaaatattattactcttgacttcaatacggaatcatcattataaacttatcatccattttaaagtaccctttgtgaaataaatctcttaatgaatgagatataacttacttaaacatgactcacgcaattctatcatattgccatttaaaattcactcttcaatcataatcacattacgcatgaatcatacactccgatcaagacataataacacatcaatttcataataaaca

SEQ ID NO: 273565 - DNA, 437 bp, Glycine max
aaaagacacgtgtgtgtgagtgtgtggcttggatgttatgtctatctgagttttcactcacattgtagaagttatcactcaatatcagatacaaccgcagcattgaaaaacccaaagacaataccatacatggaaatatgatgatggttgtgtgacaatacactgttaaagtgcaaaaaaatgcaccttattgtgatggctactatcgtggactgttagactatataacactcaagaagtgtcgctctcttgatatattgagatattgccgaactatataaatgaattactccggcttctctgcgaaaagataatgcccatgttgcttggaccacaccattatatcatgtgatgatttacccaaatgacctatggggctgctcgtgcaacatacaacctaatgatctatgctatgtgttacacttcaacaagacaat

SEQ ID NO: 273566 - DNA, 408 bp, Glycine max
agcttggtttgtgagttgatattatccttagttttactttggttattagtcaattcattcaacgaaactttcaaagaaaaatgtgtgactgatttttttgattatttcattattatttttttcaagatattttgattattttattattattttgctttttgtcatttaaccgaggttacagcttgaacaatcggttagatttttctttaacagtgattaaacaagattacaacacacatgattggttggaattcattttatgatttattaggcgagataacggcttaaacgattggttaaagctcgttaaaaatggaaaaacggggtacgaaaagtaagcgaaatgaaaatgaaagcatactcaacaagaatggaccattgagggtgcataaaatgaattgacagatt

SEQ ID NO: 273567 - DNA, 448 bp, Glycine max
  unsure (1)..(448): unsure at all n locations
cgccacccaactcgcccaggcgagcaaggttgcttcctccagaagcaacagccttctggaggaatcttctggagggcccaagtgggcctggttgctatttgcacccccatttttctaaatacaccccctgcctttatttggtgattcttttttcgtaaagttacggaaacttatgaatttcgtaacgatacttgttttcttcctgtaatgtcacggaaccttgcggattacataatcatcccttttttgacttacggaatgttacgaaacctcactaattgtgcaacgatgcttactcttgatttccggtgtgtcacggaaccttacgaattgtgcatcaatattntcttttgatttccggcacgtcacgaaatttcacaaattgcctaatgatgggtgtcaagcacctcanaatgacgaaacacaagttgcataccaccaagcacag

SEQ ID NO: 273568 - DNA, 270 bp, Glycine max
agcttatagctgaaatacccttgattccctctgttacccgcatctctcccatgctcccctttatcattgatccattccctagtaacagattcctcaatgtgcataactgtatgctctgctgaatggctgccacatgcccccttcccttttctacatataccctccaaactcttggacgaccacagcgactctggtcctgcatttgcttattggccgcatcagtggagtaggatgaatcgacattacaccaagattcatcttcattgtgat

SEQ ID NO: 273569 - DNA, 433 bp, Glycine max
gcaacattccaattgttttttaaatggtgtaattgattacaatatattggtaatcgattaccagtgtatctgaacgttgaaattcaaattcaatcgtgaagagtcacatcttttcataaaatgctttgtgtaatcgattacatggttttggtgatcgattacccttgacaagttctgaataaaaatcaagagatgcagctcttccaatggaactctcaagattttccaatgttataactgctgcaatgcttctctcgtccagaccattcgattgcttcatagtaaatacttgtgttctttgtggagtactctaatatatatgaccgacaatgattctcttgcattgacctatctagaaactcatctaccattttcagctaccactattactgccttgatgtattaatgcaatgtgaaccatcactttcggatg

SEQ ID NO: 273570 - DNA, 168 bp, Glycine max
agcttgaccaatcccgacctatcccgggcatagtcagtcagtgagaacctgtgatgtacctaaacaggcgagctcctgacagtcaacaaataaaagaacaaagaccacaaagcaaggaggcttgtgtggcggctggccagctgtgaactttgactgttatatgggata

SEQ ID NO: 273571 - DNA, 239 bp, Glycine max
cttaatggaagtcaagagcatgatattgcgccgataccgttgactggtgagcaggtatatcagcgggttcaacacctgaacactgtatttgggaagacccaaaagaaggataaaagtcagagttgcatatggaagaagaggtccattttctttgatctttcgtactagtgtgatcttgacggtagacattgtattgatgttattcattacgacataaatgattgtgacctagtcattgt

SEQ ID NO: 273572 - DNA, 115 bp, Glycine max
  unsure (1)..(115): unsure at all n locations
agcttaccattntgacacttttccacctttaacaacatcaaacactttctataatatagcttgcgaatttatcgttgaaaagtaactctcccttctcaccatccctagcttgact

SEQ ID NO: 273573 - DNA, 229 bp, Glycine max
tatgattgcaagtccaaggaggcaaattgatagatttgcattacattaatgcctacagcaagactcaatttcatgcatgtgagccaatgtctcttactaaccactttaaaaacctttcaatgatatatataaaatagaaacaattaatgttaattaaactaagcaatgttagacatgtgtcttttgaaatataaaaaaaaaatacaacaaatgacaagtctatatgaag

SEQ ID NO: 273574 - DNA, 430 bp, Glycine max
agcttcaacatcagaccactttcaggtgctggaactacttcacatggacttgatggggcctatgcaagttgaaagccttggaggaaagaggtatgcctatgttgttgtggatgatttctccacatttacctgcgtcaactctatcagagagaaatcagacacctttgaagtattcaaagagttgagtctaagacttcaaagagaataagactgtgtcatcaacataactacgagtgaccatggcagagagtttgaaaacagcaagtttactgaattctgcacatctgaacgcatcacttatgagttctctgcagccatcacaccacaacaaaatggcatagctgaaaggaaaaacatgactctgcaagaagctgctacggtcatgcttcatgccaaagaactttcctataatctctgggctgaagccatg

SEQ ID NO: 273575 - DNA, 418 bp, Glycine max
cgaaggaaaacttgatgcctcggtcaacctagtaacttatcttgtcatgaatcacaaatctacacctgtcgcaagagtctatggtctatgttcttctgcagatcaccatatagatctttgtccttctttgcagcaatctagagtcaatgagcaacctgaagcttatgctgcagacatttataatagacctcctcagcagcaaaaccaacaatagcagaataattatgacccttcaagcaatagatacaatccaggttggaggaatcatccaaatctgagatggacaagtcctccacaacaacaacaacctgtccctcctttccagaatgatgctggtccaagcaagccatatgttgctcctccaatacagcagtagcgacaatagcaacaacaaagacaacaagcaactgaggcccct

SEQ ID NO: 273576 - DNA, 414 bp, Glycine max
  unsure (1)..(414): unsure at all n locations
agcttgacatataaattatctaattattccaattctctcacatcatacaattgcttaatcaaagcaatctcaaacattcattttatgctaaacaatgcactgcatatcatctttaatcaattcactattcaaacacgctttacgcacaacgcaaacaactcaaagtgctgaaatttaaataactgaaataaaataactgaaatatgacaactaaactagctggaaatataaggtgtttaaccttcaccaaaacatcttcaatgactctatatggtcttgtgatggagnggtcaactaactggagggtcatgcgtgtgggcattatctctatctctccaagcccgcggcacatggaaagaagcattatatctatactaactcccaagactatgagagctttgcctaccacaacct

SEQ ID NO: 273577 - DNA, 439 bp, Glycine max
tcaatggagcttacaccatgtggtatcaagagcatcttcatctatgtgatgttcttttgcttcctctatctttttgttcggtgaattctctttaattccttgttcttcatcttattctccatgtatatcctccattttcttgtggtttggtgctgtttagagtagattcaaaaaaaaaataaaccgattaaatcttagatctatacttgttcttgcatttctatggttcaaattttgtagatctactcttgaatcatgtttttgtgttgattttagttctatcatttttcattcataatattcttgtgctgaaccttagatctaaattttcttccaaaatattgattagaaaaaaaacacaaatctaagtgtaaatcacttaatccatgttgtcttagagtcatgtttagtcatagtaattgtcacattatgttctaag

SEQ ID NO: 273578 - DNA, 418 bp, Glycine max
agcttcctcggtgtcatttcctgcgaaggcaaacatttggaaagttagttctaccagtgggacactactcttaaaacaaaaatgacatacaacctccttccataaatacaaacatcaatgtaaatttagagcaagcttatgcgcatatttccctacgaacgttcacttgcacaagacatcctattaactaagaaaaatgcacccatatacaatcaaggtagcttcattacctagattatttacatgtacttccaacgtgtatttgttatttacatcacacacgcctccttggctaaatttacatacatgcatactcaaagcatttcggggtaccaaaaattgcacatgcgctcatcttggtatttctaatacctatacatatacaaacttcatgatcaatcttgactacctacgcaat

SEQ ID NO: 273579 - DNA, 403 bp, Glycine max
  unsure (1)..(403): unsure at all n locations
tcaaaccacagcaacacaaactctaggtgtccaaaacccctcaattcaatgggttttctaggtttgaaaagtgaaattgagaatgaggtaaatttgaagcaaactctcacctcacacaagtccataacatcaatctaaacttgctccaactgaatttacacctaaaatttcaccgaatcaaaatttgactcctcaacacccaattttgccctagaaatggctcttggttcactttgtcatttgtttntctctctagctcagcctaacctttctcacatgtcctaaatgacatgtcaagctaggattacctcattttaacctccatttaccacagaatccagatttaccctttaactctcaagcctacttctttcactataacacacatctcacttctaaccta

SEQ ID NO: 273580 - DNA, 441 bp, Glycine max
agcttatgaaaatgtttaattgaacattaaaaagataactataataataaaggcagaagttaccataatgcatcttatcagaaaacaggtgaaacagatggttgtgaccgatccaacctgcaatacccagcccttgttacataaatacaagtaatattgatataagcaattctttttcaatttcatcttgttatacttttggaatataacagaagaaagcaagaagggcttcttctcagttcacaaaatgatgaaaattaactctaattcaaaggatacacacagaacttgaccttattgtttaaaataggtactattatagaccaacgactatagaaatgtaacatataaataaaaatgcccacgcctaaaatggaaagtatattgattttttgtgattaaaaaatagaaaaagcaatctagttaaaactgattacatct

SEQ ID NO: 273581 - DNA, 446 bp, Glycine max
caacagttattaacagttttcatgtaaacgagttgtctaaataaatggcttctattctctttcctactctttctctcttcgttctcttctctctcttccttttcttttcctaccctatctcatgctatatatgttaagctaaaagaaataaatgagaatttataattatttttaaaattcttatttgaagctttagttttaaaataaattttaaactaaagaaaaatttagatcaagcaaaactgtatagtattctttttttaaaaaaaaactatagcttaaaatctactttatatgtaaagttaaaaaatattttttaaatgattactgtgaatttaaactattctacaatttttaagcttaaaagttatttaatgttatgatttcttgattaatgtgttcttagagtttaaaaattgaaaaaaagagagaaataacagtgaaaa

SEQ ID NO: 273582 - DNA, 352 bp, Glycine max
  unsure (1)..(352): unsure at all n locations
atataaccttctcccataaatacaaacatcaatggtaaattagagcaagcttatgcgcatatttccttacaaacgttctccgaaaaaaatgcacccatatacaatcaaggcagcttcgttacctagattatttacacgtacnttcaaggtgtatttgttacttacatcacacacatctccttggctaaattcacatacatgcatacccaaagcattttggggtaccaaaaattgcacatgtgcacatcttggtatctctaatacctatacatacacaaacttcatgatgaatcttgactatctacacaataaggtgctacatttcatgctcttttcaagtttttgctaccta

SEQ ID NO: 273583 - DNA, 470 bp, Glycine max
  unsure (1)..(470): unsure at all n locations
aggcgcggatgaacctagcacnatgcgacactctataagactcaagctcgaatcgcacatccgtgtgacaacttatgaccatgtgaatatcactagagcttctgttggtcagtatcgagtgtgactattgttgattctcctaatgtggacatcccaaaacaaagattagtcccgatcaatgattccactagcaatccgttattaattccgagcgtctctggcgagacttgtctgattttactctctgttactagtctccagatatgataggcccctcttacctggaggggctcttgtttgtcgtaaccacactctgcgactatagtctcggtgaccattctaccaaatctaacacgatcggcctctcacttttgtcaattttttagacatatccctcttcataagcgacctttatgatcctgcctctcatgttccttggttgctagatatgacccatatatatattgccg

SEQ ID NO: 273584 - DNA, 437 bp, Glycine max
agcttcttttatacatgagctaattcgctaacttgtataagttcttttgtattatggaataaacttatttcatttttccttattcctataaatgcttatggagaagtttatccaaacaaaaccttacattgcattggtggatgggactgttagggcatcaagacccatgactgcagttaatttgaattatgtaattggtatgctattagctgcttctcaacttcaggttactgtctatactgtaacaaactttgtttataggggcatgtttggattagtaaagcatcaagaaatcgaaattcagtttggaaagtgtgcggtaaacggccaggtaagctctaccttttgtttgactaaagaattgcggctctatgtgtcctgattgatctctattgtgtgacattcacgatacagagcaagcgactctgattcatgaa

SEQ ID NO: 273585 - DNA, 450 bp, Glycine max
caagtcccaatgaagaattaccatcagatttcacctgcattacttatgaaaaagagggttcagatagggatggaacatacataatcatttcagtgaatttgacagaatgtatatcattccattgatcaagataacacatccaaacacagatggaatttttcatgccatatggaagctaaaaataccaaacgaggtagcattttttgtctggagattaatgagagacagactgcccactaaattgaacttgactcgaagaaatatcgacatcaatgatacactctgcccattctgtacagaaaaggaggaggatgcagggcatttgtttttcagctgtcacaaaattaagcagatatggtgggaatccttgtcttggatcaacatggtgggacctttttcacaacatccaaggcagaattacatgcagcactcgttctgcaatacacatct

SEQ ID NO: 273586 - DNA, 438 bp, Glycine max
  unsure (1)..(438): unsure at all n locations
agcttcaatggatcttacatcatgtggtatcagagtcttaattaaataaaattaaattgaatttctagaagcccaatccaattaaattttagagggggaggtgagcatttggttactacacctcattgccacattatatggtcacacgttgtgcatgtccttcatgctttacatgcctcatgccacctaagcacacttagtggagaatcttggaattgatcttggattagtgggctgaaccataactaaaattcactaatcataattagtgaaattttgtctccaaagtttgggtccacaaattcaatttcaaattcaagtgaaatttgaattgaaattcaaatttccctccaattttgtgtgacacttacgctataaatagaggtcatgtgtgtgcattntttcaactctgatcatttgaaaattaaactttagatt

SEQ ID NO: 273587 - DNA, 435 bp, Glycine max
  unsure (1)..(435): unsure at all n locations
cgcctcanagaggtccaggaaggacaaggcggccgaaggaactagttccgccccggagtacgacagtcaccgctttaggagcgttttacaccagcagcgcttcgaagccatcaagagatggtcgtttctccgggagcgacgcgtccagctcagggacgacgagtatactgattttcaggaggaaatagggcgccggcggtgggcaccactggttactcctatggccaagtttgatccagaaatagtccttgaattttatgccaatgcttggccaacagaggagggcgtgcgtgacatgagatcctgtgttaggggtcagtggatcccgttcgatgccgacgctatcagccagctcctgggatatccgatggtgttggaagagggccaggaatgcgagtatggccagaggaggaaccggtctgatggattcgatga

SEQ ID NO: 273588 - DNA, 455 bp, Glycine max
agctttaatcaaaatcactagctagtagttctggcagttggagctttatgtctcaacctcctttctagaaatgcactattaaaaaaagattacccctctcaaagataaattaaaaatggataggatgactgatgaagagagagagagaggagagtggaaaatgaaattagttttgtaaaatggcagcagcctctctttgcttaattttttttttcttttctatcatcatatatataaaatgtgaaggtaaaaggtacatgtgttgcttcatataagcaataaattaaaggtgtgcatgtgtcacgcaccgtaaatgctttggggatactcaagaggaatcattaaatttcatgctggaaaagggaaatatgttttagaaacaaaattagttttctggaccagctgtagttgtctctcgtgtatgaccagcttagacgtggtttgttaatatatga

SEQ ID NO: 273589 - DNA, 439 bp, Glycine max
  unsure (1)..(439): unsure at all n locations
cgcacatgtttatgtatgaatgcacattcatgtggaagaacacaataatcaattacatttgcttcttagggctgcaaacttttctcgtagtcaaattgatgtcattcctagaggttagtctaatgactattgcttttccttgttatttataagataaactagcttagtttgctttaaacttgagaaagtaatatctaaatataatattgactatgaaattgcactttctgtttttcataatgctgctcatttgcccatttcttttgcttttgcagtaaaagtatttgtacatgcacatgttttattggctctgatttctttcctctntattattatttacttcataattaagttttaaaatccaatttgaataccatttaaaaaaataaattaaaaaccaactcaaaaccaattcggtttttggaaacaattntaaatt

SEQ ID NO: 273590 - DNA, 582 bp, Glycine max
  unsure (1)..(582): unsure at all n locations
cgtacacgcggtcatttgacgtcgttgcgattgcgcgcttttgtagaaccccgccgatcctgctagagatcgacctcgcaggggcatgcatagctttgctcaagtgtaagtattcatcttgtgatagctatcttctatgtgtaactntgtcgagcacgtacactgtcataagtatcaaacatctctcatcgcctattatattactccgttcaatattccatgccacacccccgtttcatctctactcattcgtcttcactccattcgaagctatcctcgtcttaagtttacttaatccaacgacacctctatctgtgcgtagaacactcctcctctccatcggcttaattctctagaaggagcggcgcctccatctctccatcttcatcattatctatcctcggtaactccatggctgacaatcaccattgaaggacctcattgtagcttatagatcaacctccatataagcttcacaagcaagctatcatcacacggcatgcaatcctaatttaatcctccattgttcgagtttaacaagacgagcattcattatcaaggagactgtgaaggatggnccat

SEQ ID NO: 273591 - DNA, 455 bp, Glycine max
tgccctcaaaagaaaacaaagcaaaaggagaaaattcccgatcaataaaaatggaagaaagaaaaaggagaaaattcccaattaaagagtgggagaaagcaaaaaagaaagaaaattcccgatcaaggatcggaagaaaacaaaagaaatatgcagaaaattctctggaccagacaatatctgaacaatacagaattgtcaccaagtaaacaagaaaagaaaggaaaccacgaactaaagtggtcctctccctttgattgccaaccaaaatcctgtgcgtcagtgacttgttcgcctcacactaaacaaaaacagaaaaggaaaaggccaaaaacactcaaagccaaatttcccaacaaaaaaaacccattccgaagaagaagtcctattgatccatgatcacgcatgtaatctttgatttgataggaaatgatttgcaaaatcaagtcatgaca

SEQ ID NO: 273592 - DNA, 374 bp, Glycine max
agctttaacgccaaattaactaatttcttctatatttgcaccattggagatgctctagaggcatttagactacaacatatgccccggcatgccatttatactacggagttaatgagcgcgatgctatgctaatatacggttgcacgggattcccatatgctgctaatctaacctagttttacaacaatcgcgacacacaggataaacacagagtttcaatatgtattatttgcatactatttccttatctatatgtcaaaatgaacatacatgtctatccaaagatatgagaacttctcacttaaagcttattgtcgcatctaattaatgtcataactttatattcacaatgtatctacttttatttatataac

SEQ ID NO: 273593 - DNA, 429 bp, Glycine max
tcagccggatcggtgagcgacagcttatccttggttaagcgctatgcattaccttcaagctcaattctttacggccataactgaggttcatgaagctcagcgccagtcatggcaactaagttgaattacttgcggcaatgtgagcactaagtgagtccttatcagctaagcgcatgctcctctatacttacgatgcatcattgtagctaagtcggcctatatcccagcttatcgagaattgtagctactctgatctgtggacctcgctaagcggacttgtacttactctaagcctagcctatgtttaaaaaataactgagtttgaatttgaaacgtcggctaagcgcgtgggtccgctaagcgagcctagttgagaaaccaaacatctctctagctcgcttaatgtagcgatccgctgagcgagaatgt

SEQ ID NO: 273594 - DNA, 432 bp, Glycine max
agctatgacatataacctttgttcctgctattaccaactccttccctccacatggctagagggtatgttgcccacaacacctggacctgttaaacacaacaatctctttcaaacttaccttataaatctatttacaatatatttaaaacaatgatccgaaaatgaacacatgttagttcctcatcactcttgtttcccgtgcatttctcctcactccagcagcaggaattcatgtaaccactatgtgcatattagaatatcggttggacgacctcaaaaattcctttacttctaaagcaaggaattcttctttttccattttttggttcaaaattgattttaaattaaaatagtttcaaatagctcttgccttacgtataaaggtaactcacttcactaccaaatctatctacttgttatatattaaaacaa

SEQ ID NO: 273595 - DNA, 444 bp, Glycine max
  unsure (1)..(444): unsure at all n locations
ctcagctntttcactgcgctttctgtctcagtccaaaagtcatgctgcttgcaccaaacataaaaatgagtcaaagaagaatcacttgaagccggtttagaagaagtgtatcattattagatggtgtgaaaagcgttacttatcaaacagtggggaggtctaccaaataactatttgacaacacttagatacagatccttagattctgttagtgttgttctcttatcaaaattgaagtttcacctcagtaatatgcgtatgcgtaataaagatatgcattttgcggattattatgctgaaacttcaattctgatcgaagacaaggccaacatggcaacatctaaagaagtgtatctcaattntgtccattacaattttcatgagaatgggaccaaacacgaaattatatatgaaatatgaaagtaaccttacctgttgcaagat

SEQ ID NO: 273596 - DNA, 428 bp, Glycine max
agctatagacaacttgtgtattcaattacgataatgttgtaattgattaaaacagagagtttctccttctaaagaaactgtctaacttagaaacttttcgtctcacttactcatgatgatacatgatgcacaaaagatactaagatgaaacactcaatataacaaccaatacaaatgccactcaagggagttagtgatggaagcttgcttgtggagcttctatggaggctggatctttgagcttcaatgaggtcctttaatggtgattttccaccatggagatgcagcggaagacaaaggagaagaggtaagaggcagcgccatccactatggaataagccatggaagagggagcttcatcaccaagatgagccttggataagaagcttggagaggatgcttcaatggaggaaaagaaagagggagag

SEQ ID NO: 273597 - DNA, 438 bp, Glycine max
  unsure (1)..(438): unsure at all n locations
tccattgtgcacttttgctttcattnttttgcatttctttcatctcacacaagtaagtaccatcttcattcaaattttacctttccattgtggtatcttggtgctttatttgttatgttcttggaaatgtttgtgagatgaattgtttatgaatccatgacttgaatgcttgattaggggttgcaatggatagctttaggcttatccttgatcctactgtagatgggcatgtcatattgttctccattcctcatttttacatgcttgaacatgcacccaccaaccgttcgataaaatgcctcaatggccattggatgtgttgttgtgaaatttgaattgtgaaatgatgtttatgcatgaacaaccattgtttagaatgtgtgagcaacttagtggttaaataaaaatgccaagagcatgagctaggcatagaaatct

SEQ ID NO: 273598 - DNA, 337 bp, Glycine max
  unsure (1)..(337): unsure at all n locations
agcttcctcaattgattnttgtttacgaactaccatatatatatatatatatatatataaagagataaagataaagttattgaaggaaaatgctaattggtacaaaatttctttcaataaattaaacaaaaccaaactgtgattttctgtcaaatttattggctaaattaatattttagtgctcccaattattatttaggtttatttaattacttaatcgtttttacatttcgtcctctaatttttaaaattgattccaattgatccctaatttntttaattcactttaacttttctaatttttaacaatggattactttttttgaaatattcattt

SEQ ID NO: 273599 - DNA, 431 bp, Glycine max
tacataagtgccattagaatttcaatacaaacaaactttatccattttaatttttggtatttgatcacgtattctgcaattgattaagaaagcacaaaatgaccagtaggcattggttgtaggcaataaatttgtcgaagacaaaatttaactgaatgtttgtcttaatatggtccaagcaatacagattccttctgtctgtctgtggataccatgaatgcgtgtcttaatgtggtccaagcaatacagattccttttgcacttatcccccttcttattttggtgtccaaagaggaggtcatggggaccttcagaatagggcctacggtaaaggtaagcaaggtctccatcatttgatcatatggctggtagaaaatgatacaaggttattcttgtatggctattatagcaaaaggatagatgcatgcaca

SEQ ID NO: 273600 - DNA, 421 bp, Glycine max
agcttgtttaccccatgttgaatttgcttacaatatagttgttcatagcaccactaattgttctgcttttgaagttgtttatggttttaatccactaactcctcttgatcttttgcctaagcctaatgtttctgtttttaagcataaagaaggtcaagcaaaggcggactatgtgatgaagcttcatgagagagtcaaagatcaaattgagaggaaaaataaaagttatgctaaacaagccaacaaagggagaaagaaggttgtcttccaacccggagattggctttgggtgcacatgagaaaagaaaggtttccggaacaaacgaaatcacagcttcaaccaaggggagatggaccatttcaagtgcttgaaagaatcaatgataatgcttacaaagttgagcttcccggtgagtataat

SEQ ID NO: 273601 - DNA, 435 bp, Glycine max
  unsure (1)..(435): unsure at all n locations
ctaggctgttcaattgcttcagattgttgcacagaatggcaaatgtctgtgtggtggtcggcagaggagcataaaccatagagtctggcgacaggtgtagattnttgattcatggccagttgggttaccaggtttaccaaggcatctagtttaccttcaagcttcttagtctcagctgatgaagatgaattcttggctacttcatgcactcctctaatgacaatagcatcacttctggcactaaattgttgggagtttgaacccatcttctcaattaaatttctggcttcagcaagggtcatgtctccaagggctccaccactggtagcatctatcatacttctctccatgttactgagtccttcataaaaatattcgaggagaagctgctcataaatcttgttgtaaggggcacttgcacataatttgtaaata

SEQ ID NO: 273602 - DNA, 171 bp, Glycine max
agcttgagctattatgaagaatgatagcatgtgattgaggccgcacccgtatcaaataaacattaaaaatgcaatatctaggaagtgatcctaggtcgtcttccaacgagtaatggtcaaccaaatgttcataacagattgtaataaaacaataacgaattgggggggggg

SEQ ID NO: 273603 - DNA, 402 bp, Glycine max
ctcaagaacaatataatcaattagattcttgatttaatcgattaaagtgttcttgtcacttctaggaacactttcaagaatgatgtaatcgattactataccctcgtaaatgattaaagcagagaccctaagaaaacatacatggtctcaaaagaatagagtaatcaattacagatacatgataattgattaaaattgagttatgcactgaagatgtttctttccttagaaacaatcttcctacttctacatgataatgcatgatgtacacatagatagattaagactaaaaagaaacaatcaatacaaatgccactcaataaggagttgggaatgtaaaaagacaaaactcttcaatgcttcatttatgttgctccccctatctttaacaatctacccctt

SEQ ID NO: 273604 - DNA, 169 bp, Glycine max
  unsure (1)..(169): unsure at all n locations
agctntaattgtaaatccatttactgtcgaggccgtgtttggattatcatcttctgcggtggtgatattaagcattcagcacatgcatatataaccaaaacaatttaattaaaccaactgtcagaagtaaaacttaaatctcggatctgccttcaatatatttcatttc

SEQ ID NO: 273605 - DNA, 166 bp, Glycine max
agcttgcaaccccatcaccccacaaacctcacatatacaacacgacaaaggagggggaaaacccatacacgtgtaaaaaaatattttttgtgtgcatatagcaagcatctttcaaggaaataattcgggttgaatcacactgctatgcatatcacaatccttatta

SEQ ID NO: 273606 - DNA, 150 bp, Glycine max
actcaagctcgtggatgctgatatataatttcctctgacctaatattacatagaaggaatttaatagagatggatattcaatatatagatagaagaaaagagaacacactcattttctactttctagcttttctaccaagctagtaaaat

SEQ ID NO: 273607 - DNA, 56 bp, Glycine max
ctcagctcggtaacttagtcaaattcttgatggcactaagccgagcatacttgagc

SEQ ID NO: 273608 - DNA, 444 bp, Glycine max
agcttataaagaaaaatgatggcatggttctaactcaatcacactatgttgataagctattgaagaagcttaattattttgatgtgaaacctgtttctactccttatgactcatcaatcaagttaaagaaaattttgagtaaagaaatttcttcacataaatattctcaaagtatcggttctttgttgcatttgacaaacttctctacgcccgtctgatattgcacatgcagttgatagattggaaagtaattaagggatttagtgatacaaaattgaagttttgactttgatgaaataaaattgacaagtggttatgtctttgctttagctggttgtgtagtatcatgaacatctactagacaaattattatttcacatgacagctaaaattattgctttaaatatcgctacaagtgacgctgaatatcttaagaatgtatta

SEQ ID NO: 273609 - DNA, 451 bp, Glycine max
  unsure (1)..(451): unsure at all n locations
gaaganagtgatgaggtacaagccctaaaggcagagcttgaaagagcctgtgtagtcgaagagaagttcaagtccatagccatcaaagtctgaaaagagtatgatgaactaagggatgtcaatatggccaccgatgaagccttggaatgagaaaccaagaaggcccgaaaggaagaacacgaccaaagcaaagttttgaggggctttatagggcagcaatagtgagctcaagctccgaagaggtgaaaggaatcatcacgggtcaaaggcatgatcttgaaggacgagctaaaggtttgccttangtcgaaaagaaatttgtcccaacagttaagcgagactgaagggaatatgtgggccatcatcgataagtgcaaagagaagctaaatctagcggcgactcacgagcaaaggctagaggatgagtacgccaagatatcaacagaaaggg

SEQ ID NO: 273610 - DNA, 507 bp, Glycine max
  unsure (1)..(507): unsure at all n locations
cgaaccgcgccatttgaccngtgggacttgagatctttgagtccacctgacgcatgcaagcttcatgatgctttgcattccaacatgggaaacagtgggacggacccaggttttccactttaagtggaggacctggggggattgttgagattgggaagcctaaactggccctcttaattcaaccgagagtaacttttataatgaacaaggggatgcctaattgcaatattattggttaataaacagtattacaaatagacattgttttaatgaaccttatgttcatcatgggggagggaaaaagcgctgcgtatatatagggaaactacacacttttttaaaaggtgtctaagataaaaaaacctttcatgtatagattttaaagtgtataatatcctatatcaaactattatattattaatataaaaacgacgatatttatcatatttgaggatctaatattaataatagagaacacccgcagtatatatatattcgtttataccn

SEQ ID NO: 273611 - DNA, 451 bp, Glycine max
cggcatagcacaaatgtgacgagagattgttgccttcaatcattaattatgcttatttttctgaaggaatagagtgaattgctcggtatctagaaatcgatgggcacagctacaacgtcagattctttagcatatatatgagactttttatatatagttgagcgaatacaaaaaatagcatagcatattattattagcataatcaatattgtcctttaaaagatgcaactctcaccaatgttcaatgataacttggcaaagtagtttctatattctcccggccattgatttcttcaataactttctcttttttacaaaaaaaaaaaacccatgaaggcgcaggaattatcttggcatgtggataacacatctctgacactttccttccttcatgagattgaaagctttgttaatgtcatcaaatggcaaattgtgtgttatgtagtcatca

SEQ ID NO: 273612 - DNA, 430 bp, Glycine max
  unsure (1)..(430): unsure at all n locations
agctttanaatntgaattattatgttcaataactgttggtaatcaattaccatatatgtgtaatcgattacacagtgcaaattttgaattcaaattttaatagctgttgtaaatcatttttggccattggtaatcgattaccagagagtaaatctcttgaaaaagactttttaatttaaatttcttggccaaaccttttgctacttcaattggaattcccttcctatttaatatacccttcctaagactctagagactgtcttgatcatccatcttgaatatctttaatttctttgtcttgcataaatctttgagaagcatgtgatccatgtgatcctttggcatcatcaaaacattcagcttgatcctttgtctacaatctccccctttttgatgatgacaatctctgaaatcaagacaagctatatac

SEQ ID NO: 273613 - DNA, 447 bp, Glycine max
cggttcgaggtacttacccgttgaagatcgaagaacgatgaagaacgaatgaagaacgtcgaagaacggttgaaacctttgcgagattcctcacggaaaacgttacggaaacgtttcggaagcgcctcggcttagattttcttcacggaaacaatttttccaagcaaatttgaaagagagagaagtgcctaaagggctgagatccctttcttcttcattttctcccctatttatagcaaaataggggagatgcttgccgcccagctcgcccaggcgagctcagctcgcccaggcgagcagggttgcttcctccagaagcaaccgccttctggaggaaccttctggagggcccaaatgggcctgggtgctatttgcacccccatttttactaagttcaccccctctgctggttttttggtgattcttttttcgtaaagttacggaaac

SEQ ID NO: 273614 - DNA, 433 bp, Glycine max
  unsure (1)..(433): unsure at all n locations
agcttgttaggctaaagatcatttaaattggtattaatattctgtccttagaacaaagcactcaaaaagacacacatctccggttctctcttgtttctgtagcatctgccaaataataatacataaaataaaaaattcccctgtaactcaagctatatcgtgcgatgtcctggttgtgttgtgcttaatgtgcatgaaatgcaccctcgttttattaattntgaagactaatataatttcaaggaccattaagatgaggatttaggcgttaagaaagtgattcagtcctcacattaaaaattaattggagacatatataatacaatagcagccatctccgcacttcattaatatggaataaaacaaacgagttaaagacagagcgttggttctgttttgtggaataattaatggatgcaaaaacataactatc

SEQ ID NO: 273615 - DNA, 446 bp, Glycine max
  unsure (1)..(446): unsure at all n locations
acacttaaaactcaagctgtgcttaacttccccatagactctctcataagcttttaattttacccaaaaagacctaccttcattgaagacacaaaggaaggtggtaaccccaaagcttggtcatagcaaaccactttgcatgccaaacatgagttctcagcctcttggttacatccctagaagtgcaaaaaccattctctaggtttttctttagttcatatctccgatgaacacatcgaggaagcttcttttggtgattctcctccaaacctgatttggcaagggctttatcaattattcccagtttctgcctctttcttctgcacccttttcttgcaattcggttatcaaacacaattgtccttcttctcttgttcttttgagacctataatcattgnttactctattttctatgatagattgaagactatggagttcgagagca

SEQ ID NO: 273616 - DNA, 419 bp, Glycine max
agcttgagctatcaaaagactttattcgtttagtgttaatttctctacattcacagtttagtcagtttaagatctctcttatatttcatagtgtgtgcaagaaaaggaaaggctgaagcaagataggattgaaagtgttcatgttacgagtacctctaaagacaagggcaaacaaacaaggactgaggagcccaagaatgaaactgctaagggtccagcacaaaagaaatctaggtgacaactgtttcttttgcagtaagcctggacatgtaaacatgtaaagaagaaatgtaccaaatatcatgcttggggtgcactatctttcttacttggtctattcttacgtcaatttagttttagtacctagaaacacttgggagttagattctggtgccactactgacatcagtgtcttaatg

SEQ ID NO: 273617 - DNA, 442 bp, Glycine max
ctggaatgcagctactagttccagtgttggttttcacctgcaatgacacatctgaacaagactccaattttgatgaagatgaaggttgtgagataaggctttgactcactactccttcttcctttcccttgatcatgcgaaatgattttccaacctctgaatgccaaagttgaagaaagtgatcagggcatgttttactcgttggccatgaattgagcattgtggattccaatgacaaccttgcctctgtctcaactctcacactctcccactgtaccatgtgccgcgtcgaaggagattcggacttgacaatggattgatcaggaatcacacatagctgttttgctctttgggaatgacatgatcgaaggagacgcttctttagatgggtgttccagaagttcttaatctcattgtctgttcttccaggtagttgagatgc

SEQ ID NO: 273618 - DNA, 415 bp, Glycine max
agcttaagtgaggttcggatatgacctttggagacttgcttgattaagcttaagtggtagaaatagacaaatgttactacaaatcaacaggaaaattggaagtgatgtttttattgctgcaaacacaggaaaagcgcacaacgactttgttactaacccccacacaatttggtactccacactactaaataactttcatgtcatttaacaagtctcttatatagccaacgttttagattgtgggggcagatgtgttacaaccattgccatttgacatgggtaaattgtggttgatacaattgtcaatcacaatctcattttaatgccaccaaaatttgcacagataactgcatattgatatcaaatgaaaataaaacttacatctctatatggctctcttatgaatctcatgatt

SEQ ID NO: 273619 - DNA, 440 bp, Glycine max
cgtgactcttggcaatttctataaaactagtcacttataaaagttgtgacttttgaaaaaatcttcagaaacaagtcacttaaagaattgtgacttttggaaatgtatttttcgaaatcagtcactggtaatcaattacactaatcgattacacatcaacagatgtgactcttcattttgaattttgaaaattaaaacgtttagaagctctggtaatcgattacaagtattgtgtaatcgattacacaagtttaaaatactttaaaactgtttaaacataagttgtaactcttgaaatttgaaatcttaacattttaaaatactggtaatcgattactaccttctggtaatcgattaccacagagtaaaactctttggtcatgattttgtgagaacttcttgtgctactcaatggtttgaaaaactctttttataactta

SEQ ID NO: 273620 - DNA, 197 bp, Glycine max
agcttgggaggattgatggtgacccagtgttgagatgaacaaggatatgggctacgtgggagtacgtgagctcagttggaggtgggcaacaggggatggtgggtttatgcgcgcattgtggatgtggaaaacttgttgtgcaccatcgctcgaccgccacctagtaccacatgtgatgggtaccccataatcctaca

SEQ ID NO: 273621 - DNA, 197 bp, Glycine max
tgtaggattatggggtacccatcacatgtggtactatgtggcggtctagcgatggtgcacaacaagttttccacatccacaatgcgcgcataaacccaccatcccctgttgcccacctccaactgagctcacgtactcccacgtagcccatatccttgttcctctcaacactgggtccccatcaatcctcccaagct

SEQ ID NO: 273622 - DNA, 410 bp, Glycine max
agcttcttcttgtttctctgcccatttgaaaccaacatttttcttgagcactcattgagaggtgctgccaatgtgctcaaatccgtctataagaacttgctaagccatgaaaactcctcacctcggtcacagacttaggtgtaggccattcttgaatagcactaaccttgtcctcatcaacttgcactccttgtgaactcacaacacaacctagaaacacagcatggttagcacaaacaatgcatttatcaagattggcatacaattgttcttgtctagacacagtcaagacagattttaaatgatcaatatgcaaatcaagtgcagtgctatagataagaatatcatcagagtacaccacatcgaactttcctatgaactctctcaagatatggttcattactctcatg

SEQ ID NO: 273623 - DNA, 427 bp, Glycine max
  unsure (1)..(427): unsure at all n locations
tatgcgcacacttctgtacgaacgttcacttgcacaagacattcttataactaagaaaaatgcacccatatacaatcaatgcaccttcgttacctagattattcacatgtacttccaaggtgtatttgttacctacatcacacacatttcctttgctaaattcacatacatgcatactctaagcactntggctatcaaaaattgcatacgtgcacatcttggtatttctcatacctatacatacacaaacttcatgatgaatcttgactatctacacaataaggtgctacatttcatgcttttttcaagtgtttttactacctaaagccgcatgcaaattgaagtatatnttcttttgcttactaaaattgtattcaaattaaaaggtatttttgtaatgtatattctttacataacatgcaacata

SEQ ID NO: 273624 - DNA, 277 bp, Glycine max
gcctattagttaaaatattctaaaaaccctgatttatttcatgttgtaattatgttagttctgatgacgacactgcttgcataaggattctggagaaggttggactctaaggctatcaggtaactattaccatgtgatcagacctttaattctatgagagacttactcttcaatttgagtatgatcaatggagattatgatatatttgcatttgaaatggcgaataactattttttaatctatctactttgaattacttggataacacaattgctat

SEQ ID NO: 273625 - DNA, 422 bp, Glycine max
ctttcgaaaagtaatagtatgatttaaattcagccccattaaaaggtgatctatgaaattaatgtatggcattgttaaaaaatagtatcaagcatcaagcatattttgattggagaagggatcggttgagaagcatcaagcatattttggggatcaaatcccataactttccttacatctgcgacagtataccatgtaagttattgagaagggactgttaggaggacacatgtaacaaggggaaatttttaaattctcataaatccatgcttaaaaaagttattatgttgatatataattctttaaaaaggacaaaaatgcgtattgttatttcaagcatgaagttggtacactgatgtaaaatcttattcttagaaaatttataaatcactttctctaattaaatgatatataatataata

SEQ ID NO: 273626 - DNA, 437 bp, Glycine max
agcttgtaccccatacctcacagggaatcgacattattggaggtgtagacatggtccaagcaaacataggggtgataagaggtggaagtcaacgttgatgccaacacagtagggggaggaaccaatggagttgaagaaagagaaggcgacattacaggagcactcatggtcaccacaccgacactcaacaagggtgcaacgatggtggacaaaggagccacaacaggaccagctaaagcatctggtgcactaacttcaacagtagcaagagtgacctcttgaacaagcatagtatgaagagatggaagagcaggggcaacaacaacaacaacatcaagagcaagagccacaacagccgatgaagccagaggcagatcttacaaacttgaagggcgacttgaagcgggcgtcaaccctgcagcttgccacagagcacg

SEQ ID NO: 273627 - DNA, 434 bp, Glycine max
  unsure (1)..(434): unsure at all n locations
cgtggactataccttcgacctaacacggccgtgtttctgtctaggcccggattcaaggcgggctgcagcaccggctccgcttccctaactgtactggaggcggttgcggtggctntatcctctatggttttctggagttttaacatgacctccgagatggaagccatttgatcttttaaggccgatagatcggccttcatctgttcctgcatgccctcttcattatccatttntctggatcgagtgttataggggtgccttggtgttttcttagttatgatgaaattcctaaagaaataaacaacggtgagtatgccaccaaaacatgagtatgcaaatggatgatcggagcacttggatccaccccaaggtttttagataacataatgagtccagaacttctcattttataaaaagaacaaagctttcatcta

SEQ ID NO: 273628 - DNA, 437 bp, Glycine max
agcttgtggatcaagttgatccgcaagttacttactaatcaacttgatccgtaacaagcttgtggatcaacttgatccgcaagatgcttgcgtatgttgtttatagaaggggatcttattttatttctgaatatgaataacataagatttgcacgaattcaaacatagaatcattcctaacatagaaatagcattacattaacttcagcagagtcgaaagatatagaatttgcatccaatacgacaactaagtgatgcttattttgtgacaaggacatattatcttccatttcgatgacatgcttactaaaaacaggtaaaagttctattggcccatattttttccagtagatagaatacacttacaccttcaacacatcattgttggttctcagttcaatcatgtcgaatttgataattttttctaaatactcata

SEQ ID NO: 273629 - DNA, 431 bp, Glycine max
ttcgccggcgaaaggatcaaaatgggtctggaaaaatgttaatctaatcatcctgctttgatgaatgcgaaaactggggcaaatgaagaggatgagaataagggagaaacccttgctatgactgccattcctacacagtcaaatttcccattagcccaacaatgttattactcagccaataacagttcctctcacccaattatccacaaaagccatccccaaatcagccacaaggcctgcctgcttaccacacgcccaatgcccaaacaccacctttagtgcaaaccaaaaaggaattttgcagcaaaaagcctgtaggattcaccccaaattccggtgtcatatgctaacttgctcccatatctacttgataatgcaatggtagccataacccctgccagggttcctcaacctccattttttcgaggata

SEQ ID NO: 273630 - DNA, 449 bp, Glycine max
  unsure (1)..(449): unsure at all n locations
gcaagcttcggaagaaagtgatgaggtacaagccctaaaggcagagcttgaaagagcctgtgtagtcgaagagaagttcaagtccatagccatcaaagtctgaaaagagtatgatgaactaagggatgtcaatatggccaccgctgaagccttggaatgagaaaccaagaaggcccgaaaggaagaacacgaccaaaacaagttttgaggggctntatagggcagcaatagtgagctcaaactctgaagaggtgaaaggaatcatcatgggtcaaaggcatgatctggaaggacaagctaaaggctngccttaggtcgaaaagaaatttgtcccaacagttaaagtgagactgaagggaatatgtgggccatcatcgatgagtgcaaagagaagctaaatctagcggcaactcacgagcaaaggctagaagatgagtacgccaagatat

SEQ ID NO: 273631 - DNA, 445 bp, Glycine max
  unsure (1)..(445): unsure at all n locations
cgagctcacagttgctgccccataaagctccacgaaattnttcatggccatgcttttccttgcgagccctcttggtttcttgttccaaggccttggtggtagctatatttatatctcttagttcggcattctcctttcggatcttaagagctgctgatttgaacctttctttgactgtttgggcttgctcgagttctgccctaagggcctgcacctcttcgtcttcttctgatgcctcaacttcctcccttttagcggttctcaaactcgggagccaatccaaaccttgcacgtgggctttcaaccacttacggtagccaccgatgggcccattgttacttccccttagttctttgtccttcctttgcaacacctcccatgccttgcggaccttctgaagcgtctccacgttggtcttattgaagcctcgtgaaatgacaggtgc

SEQ ID NO: 273632 - DNA, 436 bp, Glycine max
agcttcaaccgtatcccataactcggcaagggacgttaaatgttattcccactcagatccaacagtgtcaaagatttcaaactagtccaattactcggtatcgtaccactaatatcattacctcccaaccttatctcaacaagagaatctaacttggcaacagaaggactcacagtcccactaagattaaacttttccaaaataatcatgtccacctttccgtccccattgcaccttatccccaaccatggcccgtgacaagggtcatttccactccaagaatcaaccaaaatccaaggataccccaaccctccaagaaactccaacaacaccatcacttcaaaagcacacataaccccggcctttgcctcacaaaattcattgttctcataactcactttactcgctgcaaattccgggatcggacccatgaagt

SEQ ID NO: 273633 - DNA, 448 bp, Glycine max
ctacaaacgaataacacttggacccttacagacttaccagctaataagaaagctattaggtgtcgttgggtttataagattaagtatcatgctaatggctccgttgaacgatataaggctcaacttgtagccaaggggtatactcaaatggaaggattggatttccttgatactttttctccagttgcgaagctcacaacagtctgattattgttagcattggttgctattcatggttggcaccttcgtcaactcgatgttagcaatgcattccttcatggagaattaaatgaagaagtctatatgtagctgcctccaggaatgcaagtctcacaccctaatcaagtttgtcgattacaacgatcactttatggtttgaaatagactagtcgacagtggtttcatcgattgtcctcatttcttcttactcatggtttcaatcaagctt

SEQ ID NO: 273634 - DNA, 314 bp, Glycine max
  unsure (1)..(314): unsure at all n locations
agcttccaactaagttgtctatgggtcaacctacacactcttctgttttgcatgttacatgttgtaccatctgtggtgaggctcatgaaataggccaatgtattcccactgaagaaaacactcaagagattcattatatgggaaatcaacaacgacaagggtatactcaaggagaattntcaggctttcagcagggtccctataatcaacaacgatagtggaggacacacccntgcaatcagttcaacaaagaccagagtgggtcttcatacaggccaatccaaacaggacctaacatattttagaggactact

SEQ ID NO: 273635 - DNA, 402 bp, Glycine max
ctcttgaggaaacctcttaatgaagcttcttgaggaagctacatgatctgtctctgtaaaaacgcttcccagcctttgttaaccgttggagcttctcgaaatttggtctgcagcttcacaagacacttgtccacgatctgaccgttgggatctttgagaagatgtctggagtgtgcgcaacgtttccgtgtccgagaccattcctcacttgagcattttcagcctttgctttcgtgtagcttaggaaaaacaccatttcttctcctttctttcttccaaagccattttaacgtcccaagaactttctccatcacccacagccatcattagccaccacaaaccgtcgttgttctccgttgcaaccccacaccgagagaaacccttcaaccgaagcggaatctt

SEQ ID NO: 273636 - DNA, 343 bp, Glycine max
agcttgaagtgagaaagtgtttaagagtcagtctttctacttttattcgctgaccacagagtggtacctgtagatatgtcgcgggggtcacgaaaccttggggacgtcaggtggggtgctattgcccaaaaccaagcttgaccaatcccgacccaaccggggcatagtcagtcagtgagaacctgtgacatacctaaacaggagagctcctggcactcaaccgatataagaacaaagaccacaaagcatggaggcttgtgtggtggctggccaactatggatcttgaatgatatttggaatatggcctctggtaatcgattaccaacggtgtgtaatcgatta

SEQ ID NO: 273637 - DNA, 374 bp, Glycine max
  unsure (1)..(374): unsure at all n locations
agtagaaacatgggaccaactcattntatnttataaaggttgtcatatctagtcaaggtctgagagaccatacaagtttcctaacgatctctaattatgtgggccattaaagctatcatatgctgacaatagccgagaagcccatgaatctcttcgggggcggagtaggtgtctggcatcgccttggtcttggctaacaatcggggaagttcttgactcccgttcaaggtaatggcaaaccgatccatccacatggttgcctcttggtgtaaagagtcgatcacccttcctctagcctctttatccgcgtatacttgggcatactcatccgcgattctatgctcgtgggccgtggctagacctaactcttcttg

SEQ ID NO: 273638 - DNA, 414 bp, Glycine max
agcttttgattcttccaccactttcccaaacaacataaccctacattttctttttccaatcacttaattctctgagttcttcacccaataggcaaaaaatactcaaaatcccccctttttatttttcctttcaatcacttccccttctaaattctctgattacctgatttattcaactgcttctgccgtttccccttcgcataaacaaaccccaatttcttcacgtgggtctctgaaattttttcaccttatcctctctgatcacgaatgggtatggcctacttatactcaacatttttttatcaaataaaaggaaccgttttttttttttgccctgaatgagtcgatttttttttttgggtagtttttgttgctagtgtatgttgggttgaaatttgacaagcatttttcttt

SEQ ID NO: 273639 - DNA, 340 bp, Glycine max
agcttcataacaattatctctttcaacgctttgatgtgttttatgttgcgctttggggatcgggtggtgtggatgatctataactgttgtacaaatgaagcaaaatttgcatcttggatctaaagtcttttacctccaacttacttttgcatacgcgcgtggatataaacctcagcccccaacttttttcatctcgtcttctatacattcatataaacatctgattctttattaatccaccctatcgaattaccttatctcctctcttcatctcaaagaaagctccctgagttcgatctgctacagaagctctaacctaactttacttctatgtttcatg

SEQ ID NO: 273640 - DNA, 421 bp, Glycine max
cttcatttgcaacaacgtttatggaaaccatcttttcttgatcaatatattctgttgaagaccatcaatgacctcaattttcttgatcattaacgagtttttctcattgagagctttgactaagttcctcctttcttctaaactagccttgaactttatctccaacttagtataccttggtctccaatggcgaatagtagcagcaggcccatagagttaaacctcatgagaatccaaactattgttggacccaacatagtccatcatctcttagtcaaccttcgtaagcaagttatctatggtaataaactcaaaccccttgatatcaacattcagtagcgaggaagatcatgagtaacaatcacatgatccacctgacatagaggacttggatgatattggatcaccataccttcacttc

SEQ ID NO: 273641 - DNA, 395 bp, Glycine max
  unsure (1)..(395): unsure at all n locations
agcttgtagaatggctagacatgatacatgtcacggtttggtttgtctcaaggataaaagggatgtcccacattatttccatgacacagatgcaaaaatgatgatttggaaattatatgccaaactggtcatgcatgcacctatgtggacactcaagtgtcaaatttttatggtcatgtgatgctagggctcangattcatttcctctattttaaatcaacccaatgttttcaaaatatgtttttttatcaatctgtgcattcatccgagtccatatcgggcgtcccgcgaaaacttcacaacattcacgccttaggtgtatacccatttttttcaaaactatttatgatcagcgaattttttctttttttacagaaagttgaaatatctctttt

SEQ ID NO: 273642 - DNA, 451 bp, Glycine max
ctattaaactaagctaaggtaatccttacttctgatatagtttttattagatttttagtgtattcaatttatagtaacagctaacaaggtttcatgctagccaatccaaaacaaaaagggataaaatggactgatataaacaaaaaccattgatttatcacttgattaattgttgctacattgaaactagcatcttcttgtaatcttcagtatctatctatccatccaatgtggtggaatcaaagtctttgcaactggcagaaacacacataatcttgtaacacttagtagcagtcacaaaacaaatttcagcaaagacagcccatgtggcgacatcttgcaattctcagtatctatctatccatccagagactctgcagaaaatcaaagaaagaacaaggctcttaatgtagaatcataagatgatgtcatgtaagaatattcttatgtc

SEQ ID NO: 273643 - DNA, 370 bp, Glycine max
  unsure (1)..(370): unsure at all n locations
agcntttaaatatatgaatgttcatagttattctatatcatcacttcaacaacttttttttttctttcaaaaaagcgcaaattaaagttcttataacttttaagagctactggctgcatcgccaagttatattttgatactactattaggaggcagtgtatcagcaaggtactaatgctatgccagagttaaaaatgttaaaatttcaattactgacaaagctacttaaatggaaatattcttgatcaattaacccctctctaggacctattgnatcattcttccctatcaacttagttggtaaaagatacaacatgagaccaaaatgtggtacatgatggacatataaccttatttttaaccatatata

SEQ ID NO: 273644 - DNA, 446 bp, Glycine max
taaccactaagcaaagacaacaacaagaccatatagcagaagctcaaatcatcaaagcttaaccactcaagataaaagcaaccaaggcttaaccattaatggaaaaagctaaaagagtacttaatcaccatgaacaaaagcaaacaaaggagtagtgtttaatcatcacacatggtagaagctacaatcatcaaaataagcctaaaaggctaaaaacaataagtcaggtcaaatatcaatgaaacaatgaaaagaaaaatcactaaacaattggtgtgaatctttcttaaataatgcaagactttaaacaatagtcaatatatcttcaaaatattcagaaacattttatcaaacaccttgtaggcaaaaccgagcaatgctagacatggagagaaccttgagatctaccaaactcaagggcatcaaatctgacatcaagcctgaga

SEQ ID NO: 273645 - DNA, 315 bp, Glycine max
  unsure (1)..(315): unsure at all n locations
agctnggatgttcacgagattagaagataaattataatttgaggtgaagatggcggtccctttggctattatggaatttcttaaacgagaaaattgtggaacgcctataaggaggcaacatagtgatcaaaacccatggtgatggatcctctagccgtaagaatggaaaatttcaaaagataccttattctataccctaagaaccacaacgaagttcaactatgccctgcacagaactaaaggcattacatgctttaagtatggtgggcaacacataatgacttatttccctcagaaggagatcgtgtgctatag

SEQ ID NO: 273646 - DNA, 392 bp, Glycine max
  unsure (1)..(392): unsure at all n locations
gcttgaaatatatttcctaatctctattgacttaagcctttatcttattntagacaaaattgaatagctgtaggtttgctatccttagcaaacgttgcatactcaaatgatataatgccaaattatcaaaatgttctagaagaccatcaacccacaaatgaactacgctttaagatgatattagtattaccaataaatacttttaaaatctcaggtacaaagagacagccataatcaaagaatattcaatagttaaagaaggttaataaattgtaataatcaagaatgcgttaatacgcttcaaactctcaaacagaggaactacgcttttgttgtaataaattgtatnttctttcagtttgcatcgtccactcaaacccccatcaccaaag

SEQ ID NO: 273647 - DNA, 419 bp, Glycine max
  unsure (1)..(419): unsure at all n locations
agctntaattctgaattggctcacaatggagtaacctttcagcaaatgtagatggctaaatgtactttactttaattgggatgccattcagcataacttcttaagatgtagtataacagtcaatgaaaatgataattgcatcgagaaatttgcagattcctttcactcaacaaatttagaaaatttaaactatactattgcacaaatcaagttgtactttgtctttcttttagttgcccctccttctgttggtactgacacctacagaacgaacgtagcactgcattgtgcataccatctgaaatataacccatgaggtcaatattgagcctctatcgttgagtaaaggatttaagtttgatcaactagcaatgaccaatatgatggcacctactgaaaagagtgttcatattattact

SEQ ID NO: 273648 - DNA, 357 bp, Glycine max
  unsure (1)..(357): unsure at all n locations
tatccttgttgctacgtgtcggcatgttatatatagagagataaacaaacaaaaaggcacaattcctttttctgaggagtgttcactttgtctccattactgatacgaaaacaattttgtagagaatatcctaattgtgcgtttgttcgtgtcttataagcataaacttgaaattcaaatgataagatatttttgaaaatgcgagagaacaaaaaaggacataaacgttttggttagtatcaacctcgacataaaantttggctagtatcaacctcaattagtggtgtgttggatgttaatgtgtgtgtccacttccccaagatggtgcatgtatcgattcaaacaagagtggtggc

SEQ ID NO: 273649 - DNA, 442 bp, Glycine max
agcttaactagtctctgaaccacgagcgtctgtcattccctctgctattccaagtgcataaagacaagggcaaccaaggcaacccaaaaattggtgataagaataggcattttccttaactggaaacaaggaatatccagccttttcctcatcagatagtaagtccacgaatgatacttttatcatacccttctacaagtatgcaccgtttgcttaaccacatccacctccatctccgttgcatctgaacagatttagaacggttgctacaagggaaacattaattgattctcagaggtttgcattggcattctttaagattaatcttccatttgagacccccttctctaaattgttattctctaaacttgtggctagggaaacaatatctatccaggcacccatttggatgcaatatgtctattttcatactctgcttgag

SEQ ID NO: 273650 - DNA, 450 bp, Glycine max
ccctcggcgccatttcctgcgaaggcaaacatttggaaagttagtcttaccagtgggacactactcttaaaacaaaaatggcatacaacctcctcccataaatacaaacatcaatgtaaatttagagcaagcttatgcgcatatttccttacgaacgttcacttgcacaagacatcctattaactaagaaaaatgcacccatatacaatcaaggtagcttcattacctagattatttacatgtacttccaaggtgtatttgttatttacatcacacacgcctccttggctgaatttacacacatgcatactcaaagcattttggggtaccaaaaattgcacatgcgctcaccttggtatttctaatacctatacatatacaaacttcacgatgaatcttgactacctacacaataaggtgctacatttcatggccttttttcaagttttt

SEQ ID NO: 273651 - DNA, 391 bp, Glycine max
cgacacaaagcgaaggatgaatatgaagaaaagtaatattactcatttgcatatgaccgttccgaggaatacttgtactacaattcttcaaagctcaagctagttcgagataccaattgtcgtccgttgtctacaccaaatcatctatttccgcatcatctagcatatatgaagacgctgtccactacaccttattcacaggacctcgtccatttatcggttatgtcttgtcaagactacactgcattatcaccatcttatgaaactaatcaacttcatacatttaaagataatacaaattaaacaccctattggaaccaatcaactcataacatttaaatgttgacttgctgagcatatgcaatgtaacattcaatgtatctgaaagatt

SEQ ID NO: 273652 - DNA, 358 bp, Glycine max
agctcggaactagattggcgcacttattgtgaatattctacgcatgtcctatatataacaatcaggcccactctcacgggtttacacaataatatttatacattattggtcgattgagcgaacaattggtgagcgcatgaacggacatatatcgcattaggaggaggacaatgcggcatgctttattgcttcacaatacaacatattcctaaggccttctgattcaaatcctcatctcatgagtactagcataaaaaccatccacaattgccgcacaaatataatcatattctaactatttggagcaccgacagatgaagatgatataccaatgggaagctcataatatcaccgattg

SEQ ID NO: 273653 - DNA, 307 bp, Glycine max
ttaatgcaatataccttgatggcgctgcccttatagtggactgcatataacatgtatggctcgacaaggaggggcacatgtctgaatctcgtagtgtcctaccagctctccatgcaatgcctctttgaactcctgagtatccacaataactagtgttagaaaaccctagcgagtgatgatgactgatgatggtgataggatgatgatgaattagacacctattgggattgggcaattggctttatgcgagtaggttgactgagctccacatgactcccctcttgagcgtgtctaatagttcttggac

SEQ ID NO: 273654 - DNA, 432 bp, Glycine max
  unsure (1)..(432): unsure at all n locations
ctgcacgtatgcaagcttgttgagtgctcgaaggatttaattgctttgtttatttggattctgtattgtaaaggggccaagctacttactgggcctctattttttacacctttaatgcttgttagtcctgttattatgtattcatatatgcacggccgtttaaactgtcatcgcaactgactttttaatagttgctgtaatgatggttattatttgcttattggcacagcatgttactctagctagcttagaaaggtgtagggtttggaatttagcgtctgggtacgatttattgattgtagtgtggtcatgtcattatgcagtgtttacagaggtttanttttagttgaactctataaacgtaaggaaacaagagtccagaggtttatnnttttgaatgatgagcaacttgattaactggtttcatatcac

SEQ ID NO: 273655 - DNA, 447 bp, Glycine max
  unsure (1)..(447): unsure at all n locations
taagagaatnntttaatttgtttgttaagttcaaatttgtgtttataaaaataatgtttcatctattggagcagacattaggctgtggtgccaacgcttagtcaatgattccctttatctttacttattgcatttatatgggtcacggctatgattctcatgatgcaaggaacattcatgtttcagtgaatgtggtgtttgccaaaacattctcttgccgtcttgcacatgaaaaacatttcactttccccaattcaaccccacaatcatagaattgagaagtcgaacatgataaaccttttttcttcttttaattcgggcttcctttataaataattcagaaacttcatgtaatatttttcggcaggttcaaaaagcaacaatagagggagaaaaaggtaaccaagacaacaaggcacacacatttgccgtggaaaaatcatttga

SEQ ID NO: 273656 - DNA, 289 bp, Glycine max
gtgaaacttgctgctattattgttgtctacacactggtacctggatatatgtcgcggcggtcacgacaccttgaggacgtaaagcggtgtgctattgctgaaaaccaagcttgaccatatttgacccatacctgtcataggcagtgaatgagaacctgtgatgtgcctagacaggcgagctactgtcagacaacatataactggaacaaatactacaaagcaacgatgcttgtggaggctgcccacctgtgaatcctgtgtgatatgtggattatggcctctggtaatc

SEQ ID NO: 273657 - DNA, 311 bp, Glycine max
aacttcctgctcttattgttgaccacttagtggtacctgtagatatgtcgcgagggtcacgagaccttgtggacgtcaagtggggtgctattgcccaaaaccaatcttgaccaatcccgacccaacccgggcatagtcggacagtgagaacctgtgatgtacctaaacatgcgagctcctgtcagtcgacagataaaaggaacaaagaccacatagcaaggaggcttgtggtggctggccagctgcgaattgtgtgtgatatatggagtgtggcctctagtaatcgattaccaagggtgggttatcgatta

SEQ ID NO: 273658 - DNA, 395 bp, Glycine max
  unsure (1)..(395): unsure at all n locations
agcttcctgctatcgcgtctgttnacctcttgcgcttaacgctcgacacgtggcggagaagattcaagctgcacagattaatcggaagattacgaactagtatagataaggcttatgtgttagcgaataataatctttggagattgtaaagaaagtgaagagaagaatagaatatacattgaaaaagcgcaagtgccataaacgcgctgcgagcttcctggcggaaaggtgagtcttcggggagctgcggcggaaattgacgggagaggtgttggcggaagggaagttgcgcggtgaacgaattgagtgtttgcgagtgttcatttcgtaactcacgagaatgtgtgacggtgttgcccatcaacattcaacaattaacaacaaacaaagcagct

SEQ ID NO: 273659 - DNA, 433 bp, Glycine max
  unsure (1)..(433): unsure at all n locations
tgtagatnggatggataacgacatttttctttnttaaatttgtataaatatatcaagtttttaagttcaatttcttaagctcacatatctaacaaattttatttataaacttatgattgtttatttaattcacttaagttaaatttgtaaggattgttaatttattatgttaagattttgatatttaattttatgtaattattgttaatttgttatgtttaaaatattgatatattttagtgtaataagttttggcttaaaaattgaagttaatttttttttcttttaattctatactttattcacttttttaaaaaatattcttttatattttttttcaaattaatattttgatttatggaccgatctgtttatctactacaaatttttatagactaaatatgaaccttacaaaaaagtctatttatttcat

SEQ ID NO: 273660 - DNA, 313 bp, Glycine max
agcttataaaaaaaattaaaacaaatgaagccattatatgacctcataaataaatcacatatctttccaaaatcacaatgttacacatttatacttatgaatgagggaggaaaaagtagagacaataaattcttattatcagcttagtcacaagtacaatacgaacttacatttatgataagtgggcaaatatctaacccaaaacacaatgttacacctaattagagggcattattgaagataaaatttggggtatgaaattatgaactactagctgcttcatcttattaagcgacgaaaacaatcttattta

SEQ ID NO: 273661 - DNA, 214 bp, Glycine max
tataaagagtacagaaaggcgaatgtaattgtctggatatatttttaaaataaaattgaaaagggaggacattatataggaagagtggaaataataattgcctttccgaaaagcagatgaaaatcttgaaattgagccattatcaacatatggtttgttctttgtcatcatattattggtaccgaatatttgttaattttgttgatgactcatc

SEQ ID NO: 273662 - DNA, 378 bp, Glycine max
agcttcaagtcaatgaagccatactaggaactaatattaaagattcttatcactagtaagtaatgagccacactttcagtattgtactgacatttaaatagctagattagcaaatgaaaggtgccaggccacatgctaatgaggccaagacaatggacttgagcataactgaagatggtatgcaacctttatcactacgaatgaaaagtgcctcatacactggtaaactgatcataaccaccaatgaacttagtgtaatctgcatcatcaattggctagagctgaattcaaatttatatccatcataatcctcttgattcccccaacaagaccaacaaggtttagcaatgccactgtcgctaacatggttaacatgat

SEQ ID NO: 273663 - DNA, 425 bp, Glycine max
  unsure (1)..(425): unsure at all n locations
tgtccaagttatatagctaatggctaattntcttgtagaatctatgatgttagccattccaaaatcacatttcaggaagaaaacaacatgccaggataatgaaggcacaaaaatagatgcccctcaaagttctgtcacctttgtttatcaaaccaaagtagcagaattattacgaagtataacaatttcatggtgcaaggatcctacagatcatttcctttccatgagcgtcgacaacactttggaagagaacaagtacacctgcaagattgatttggaatctggacagtcttggggtaaaaagggtctcaaatcatttgaaataacgggtgcaagagtagacattttttgggattttcgacgtgcaaaattctctgccacgggtccacagccttactcatgctattatgttgccttggtttaca

SEQ ID NO: 273664 - DNA, 328 bp, Glycine max
agcttccactgtttttaagcccacaatcacaacatttgcaaagcagcaacaccctaatattggacttcacttttcaaacaacactcctttctggaatgcttccgccgaggcacttcacgacataagagtaggtacctttgcttcaacacaatcacaatatcaaaggccaacctttgatgatgaagagaaacccaatttcccaattactctattaaacagggtacgtgtttaattatttgggtttaattatttcaagtgatatctatatatatatatatatatatatatatatatatatatattcatgtctacgcagggactttttctt

SEQ ID NO: 273665 - DNA, 199 bp, Glycine max
aaaaaaggagggtttcatcgtcctattaacctcgcccatgatgaaaaccgatgttatgtaatacacggtggcatctttgaaaataaaatatctctattaacatcggttatttgaaaaccaatgatgtaagtgctcagacgacatccagcttcacacaactgagggtgacaacacgatttaacaccattcaaacattggg

SEQ ID NO: 273666 - DNA, 419 bp, Glycine max
  unsure (1)..(419): unsure at all n locations
agctnttctttctcaatcaatctgtctactgactattaatgctaatcgcaagtccactttattgttctttctttgtctaacatgcacatttgctcaaacttatgaaaagaaacacaaactccatcacaatcatgcatttaattcaaaatcaaatcatactccaattttcacaaaaggataaaagtgtttcactgcataatcatcaaaatcaactcaaactattctaaatgctttagaatgagcagaccaattaatcataaacaaaactagcagtgtatataaacataaaagaaatactgcactgaaactatatttataataataataataatccaaaaagcaaaagcatcctaaggaatcaacagtgtcaacagtgtctaaactgtggaatcagtgaaagtaaaaacttctctagatga

SEQ ID NO: 273667 - DNA, 357 bp, Glycine max
tgtgtcggcttgtggggccatactggaatcctcttcaatggtgcccttcctaaaccgcttcgcggagagcttcttcgtagccaattctaggttgcctcctagtagcgcttctttaacgttttgagccagacgcgtgatgacttgtcggtcacgggcctagtattttgcttacctttggctttggacttggtcgcctgctggttgttggatcaagtggcctcagaataattaagaggggggttgaattaattattgatgaacctttactaattaaaaaacttatccttcttaattactagattcaattaggcttttactataatgataagaaagtcaagaacaaaaatataaacttaa

SEQ ID NO: 273668 - DNA, 422 bp, Glycine max
  unsure (1)..(422): unsure at all n locations
agctntgacatgagtcatcaaaagattataaatatgtgaccatggaatgaattttaagatgatatcaatcatctatctttcaatcttctctcaaacatcattcaatatctttcaactctttctacaaaattttctgattctttttctttccatctttctaaaagtttttgttcaaaactttctcttccaataaattttgttcaaaaacttgtgctattcatctttttcattctcttctccctttgccaaaagaacaaaggactaatcgcctgagaatttttttggttcttccctttcccttaagcaaaagatttcaaaggactagccatctgagatatcttttgtttcctcttacaaagattcacaggactaaccgcctgagaattctttgtcccaacacattggacggtatatcctttgtg

SEQ ID NO: 273669 - DNA, 313 bp, Glycine max
  unsure (1)..(313): unsure at all n locations
tctcctattgttatctaatctttcgttgattttatgaaattatacagtaatatatttttcatattggtgttttcaggattcctagtgaggatgcagagtctcaactcttaaaaggcagaaaaaagtgcagtggaagcttntgagacagcccaggctatgggtgttattatgtttgacttgccaaattgccctaagaaacattgtcaactagagacatccactgttaatggagaaggaacatctacccatactgttactgcatcttttgaaactaccttgaagtgggcagagaagtagttgttgcagtccaaac

SEQ ID NO: 273670 - DNA, 330 bp, Glycine max
  unsure (1)..(330): unsure at all n locations
gaganaatttntaaagaagntagagtttatttagcatacctttataatagttaagcgcacccccattccaataatacatgaaaataaaaaagaaaaagtatctactacaaagattactcaaaatgccctaaaatacaaggctaaaaccctatactactagaacggcccaaacgacggaaaaacctattctaatatttacaaagaagagtggatccaaacttgacccatgggctaaaaaatctaccctaaggttcatgacaaccctaaggccttctttactatctctacctcaatcctcttggagcctcttgctcatggctgtggtccctg

SEQ ID NO: 273671 - DNA, 438 bp, Glycine max
agatggtggaaaaattcaagaatagttcaataccatttcatctcttgaaaatctacacccttgtggagtggatcccacctcaagagttccaatcttacatacggagagaagatcagtggaagactcaatgacatataagcatctttataggttgatgagtactctcttttccattcttccattctacttttgaccaaggatagttgaccatattcctcagaagcatcactgaaaatctcatcagcagcctgcagcaccaaatcactttgtgactgatatgcttggctctcactatcactctcatcagtgcttgattcaccttctattttatgatcatcccattccatggatgtgaccttattataaccaaatgctagtgacctcttgcgttgacaagcctcggccctcactttcatattcattcgtttctcaagattt

SEQ ID NO: 273672 - DNA, 449 bp, Glycine max
  unsure (1)..(449): unsure at all n locations
tgcaagctnttacatgcatgtgcacaccatatntactatactctgatcaactgatataatctattcgattgaaaagataatttatactactctattaatgtagcggacaactaaaattaaaataatataatagaaaatactgcttaagccattcaaatcaagtcattttgaatctcaccattagtatcatgcatgtcaaagataaggagaatcaggcatcgtaatgcataacacaaccaaacattaaaagaaaacatgcttcctaaagccaaccaaggtaaaaatgtattcatatttcatgaactttttcaaaattataagacacatataaccatatataaaaacatggcagaacagtctcaccacatgaacaacatagaccacacatttcagaaaatgagtggtaacgaaaaataataaagcactgttaataaaaccgtagatacact

SEQ ID NO: 273673 - DNA, 449 bp, Glycine max
catcttacctatctatctcccagatgtctttgcaaagattcaatatataaaaaacatgaagttctaattcaagatgttttctttgttgcatgggcataatgcaatcactctatgtctagcaatgattttattaagatgtccctacctttgagttctactaaaaattatcctctctcaagcgactaatccctaaaactgatgcatataaaaccttcaatgtatttctaccaaggattaccctctttcaagcgccaaacccctaaagatgatgcaaggatgaagcatataatacatttgttggcattttaggcctgccaagccctaactaaaggggtttagcctttcattgtcatgagagacttttacactttagggggttgatatggatggaagaagatggatggatagaggaagaaaagaggataatggacatatatagaaagagggtt

SEQ ID NO: 273674 - DNA, 445 bp, Glycine max
agcttctatcacaacctttctctttgcttcctgttccagcccgattatccatgttgcttcacacttggcccggtcagcttgttgcaatccatgaaggtgttgaacttgggcttttagtttctccatactcatattcctattgtggaagacaggatgacagaagataatggacaactttctcaaacgctccaggatgtcatcctcatgattgttcgcaaagcaagcatttgcataatcaaagttgtatactttggttggatgcaaaatttgaatgcgaatccctttgatttgaaggaggcacttgtttagagtttaaggagattgcaccatttgtgtcatatcacacagtttgattccacaagatcctagaattatgaacatcaagctccctaatgagctttcgccctagtgcagagtcttccagattacatgtatggctgactag

SEQ ID NO: 273675 - DNA, 449 bp, Glycine max
ctatgtgtcttctttaaataaagaattggtggtaaagaccccaactagtggttttgtgttaacttctaatgtgtgtttgaattgtcctatggaaatttccagtagagcattcttgattgatctgatttgttttcctttgagccaaattgatgttattctaggtatggactagttatcttccaaccatgtcttgttaaactattttgatataactgtggtgtttgatggttcttgagtaagtaaggatatgatgtttatctttgccaaccaagttatgacatctttaaaagaagatgctcaagtgcacattatcttgtctaacctggaaatagagagagaggtttccatgtgtgacctccctgttgtcagagagtttcctgaagtgttccctaaggatatatctggtttacgacccgagagagagatagagctctccatagacctagtac

SEQ ID NO: 273676 - DNA, 461 bp, Glycine max
  unsure (1)..(461): unsure at all n locations
aagtcacctgcggcatgcaagcttccttntcaggtactttgatgttgtggtagtgaacctgtacccattttacgataaagtcacatcagctggaggcgttgaatttgaggatggaattgaaaatattgacatcggtggtcccgccatgattagagctgctgcaaaggttggtttatttgactaaaaatggaaattccctaacgttaaataaatttgaaatgatgacaaaaacttcccccctcccaatcgtcattacttaaaaagttttgtaaaatggctcagaaaataatcttttggccaaataccaccaagggcctaaactactgtggaaagtaacaggacctttgttcattgcataccttctttgagctaactataaggtgataaattcttatttgagtacaaccacaaggatgttttggtagtggttgatacagaagactaccctgcccttctggaat

SEQ ID NO: 273677 - DNA, 449 bp, Glycine max
tcttagtctcacctgatgaagatgaattcgtggctacttcatgcactcctctaatgaaaatagcatcatttctggcactaaattgttgggacttggaagccatcttctcaattaaatttctggcttcagcaggggtcatgtctccaagggcttcaccactggcagcatctatcatacttttctccatgttactgagtccttcataaaaataatggaggagaagctgctcagaaatctggtggtgagggtaactagcacatagtttcttaaatctctcccagtattcatataagctctctccactgagttgtttaatgtctgaaatatcctttctgatggtcgtggtcctggaagcagggaaaaaaatttctaagaatactctcttgaggtcatcccagctcgtgatggaccgtggagcaaggtaataaagccagtcctttgccactccc

SEQ ID NO: 273678 - DNA, 421 bp, Glycine max
  unsure (1)..(421): unsure at all n locations
agcttcaaccttttcccaaaactcggtaagggacgctaaatgttattcccactcagatccaacaatgtcaaagatttcaaactagtccaattactcggtatcgtaccactaatatcattacctcccaaccttatctcaacaagagaatctaacttggcaacagaaggactcaaagtcccactaagattaaacttttccaaaataatcatgtccacctttccgtcgccattgcaccttatcctcaaccatggcccgtgacaagggtcatttccactccaagaatcaaccataatccaaggatactccaaccctccaagaaactgcaacaacaccatcacttganaagcacacataacccctggctttgcctacaaaattcatgctcttataactcactatactcgctgcaaattccgggatc

SEQ ID NO: 273679 - DNA, 406 bp, Glycine max
ctacaaacgaataacacttggacccttacagacttaccagctaataagaaagctattaggtgtcgttgggtttataagattaagtatcatgctaatggctccgttgaacgatataaggctcaacttgtagccaaggggtatactcaaatggaaggattggatttccttgatactctttctccagttgcgaagctcacaacagactgattattggtagcattggttgctattcatggttggcaccttcgtcaactcgacgttagcaatgcattccttcatggagaattaaatgaagaagactatatgtagctgcctccaggaatgcaagactcacaccctaatcaagtttgtcgattacaacgatcactttatggtttgaaatacactagtcaacagcggtctcatc

SEQ ID NO: 273680 - DNA, 430 bp, Glycine max
agcttctggtgggacatcttgacttgctttccaatctgacattcaccacagattctgccttcttctattttcagattggggatgcctctaacagcacctttgtcaatgattttcttcatgcctcttaagtgcagatgtccaaatctttgatgccatattctgacttcatcttctttggaggatagacatgtggaggagtagctggtttcttgaggtgtccataggtaacagatgtcctttgatctgctgcccttcattagaacttcactcttctcatttgtcaccaagcattctgactttgtgaagtttacattgaatccttcatcacacagctgactgatgctgatcaagtttgcagtcagtcccttcaccagtagtactttgttcagactacgaagtccatcatgagctagctttcccattccaatga

SEQ ID NO: 273681 - DNA, 423 bp, Glycine max
  unsure (1)..(423): unsure at all n locations
nttcgtcttacagatagcaaaaagtttatacggataaccactcgggtatttccgcccgtcagcgtgactcaaaagtcagtatgacagatcttgtgagcgcggaagatgacgtacatctccgcatgtcaacgggcttgtcggacgcgattgacgaaggtcgcagaagacgatgttagtctctgagtgctatcaggcttttcatcttacggacagcaaaaagtttatacggataaccactcgggtatttccgcccgtcagcgtgactcaaaagtcagtatgacagatcttgtgagcgcggaagatgacgtaaatctccgcgtgtcaacgggtttgtcagccgcgattgacgaatggcgcagaagacgacattagtctttgcgtgcgatcaggcttttcgtcttacagacaactaacagtttatac

SEQ ID NO: 273682 - DNA, 512 bp, Glycine max
  unsure (1)..(512): unsure at all n locations
cgacccggcgcaattgacgccgtggctttgagtcctttgtagncccgccgatcctttagagacgatctccatgcatgcaagctatcttttaatgacgtttaacacattaatattatgtctctgtgagtgcatttgataatggagacacaattgcccacgaccatgcataccactgtcacacacctttataaacaagccattcggatgtcgatagaaactcagtaaaagagccctctactaactatctggacacggaactatatgcaagaagagtaagattccctggatgacgttgcttaacattaaatgaaatgctcaagttagacttggtccaacgtcggtgactatggagcaggagcattgccctcagtgtagggctcatgcataatgatgtcctcgatgcactgctagaaatgacaggttatgaccaagaagtatataatgtgcaccacatacaattcgtggtggaggagagagcataatcactactctattccgcaatagcatcccgg

SEQ ID NO: 273683 - DNA, 443 bp, Glycine max
cactttagtactaagctttaaattctctactaacaagtgaaaacaaaatatttcacacaatcttattaatattaaaaaatgcctgtctttaattaattgttagaacaatacgaagtgtccaaaatagtggatagcatttgtcaacatatacatatatcaacttgtacgcatcctaattaatgtatcaatgaacattaactatcattaattaattatgtcaacggagatgacggacataagatggcttggcaaggacattctagggcttccatggttcactgcgtgagactgaggactgtcgtatgtctcatccttatccccaccacattaactaactaactcaagtcttatgtcgcgagtagctatagataacccgcattgatatcatatgcacattacttgcttaacgtgcgctgatctataattaaaataatcacacactt

SEQ ID NO: 273684 - DNA, 425 bp, Glycine max
agcttgtagagttgagtcttgtatcactttaatcttttacaatagactcataatcgattacactgttgtttgagacaatgactaatttattcacgagtttctgctttaatcgattaccaagtggactaatcaattacttctctcttgcttagttgttctgaagtaaacaagaacattttaatcgattacttatagcatgtaatcgatcacattgttcttgagttgtttccagatgttgggaagaacactctaattgaatacttagataatctaatcgattacttcattgaattaatcaattaccttgtagctctaattgattataagtgcgtgtaattgttttctatataaataatcagcttgtgttcacatctatacatcaagagatcaatagacgatactcaacacatcttgaacataacatt

SEQ ID NO: 273685 - DNA, 420 bp, Glycine max
  unsure (1)..(420): unsure at all n locations
tcttgaggaagctacatgagctgcctcggtaaaaatgcttcctagtcttcgttaaccgttggagcttctcgaaatttggtctgcagcttcacaagacacttttccacgatctgaccgttgggatcttctagaagatgtctggagtgtgtgcgacgtttccgtgtccgagaccatttctcacttgagcgttttcagcctttgctttcgtgtagcttaggaaaaacaccatttcttcttctttctttcttccatagccatttctaacgtcccaagcactttctccatcacccacagccaccattagccaccacataccgccgttgttcttcgttgcgaccccacactgagaggaacccttcgaccgaagcggaatcttccaacttggcttgcggtntcggtagagaacgaaaccctaatctg

SEQ ID NO: 273686 - DNA, 348 bp, Glycine max
  unsure (1)..(348): unsure at all n locations
acgctttggcanaggaagaataagaaagatgactagtctcggttttaagatttctcacaagttgttctaaaaagttgtaaaagatattgaaatgcaagtcaaggtcttgcttttatagactcttcatgtctagtcaagaaaaccattggaagagttataaccttgagaaaaaccctgacaaccattggaagagttacatctcttgactttttattcaaaacttgtcactggtaatcgattaccaaaaccatgtaatcgattacacaaagcattttatgaaacgatgtgactcttcacaattgaacttgaatttaatgttcatatacactggtaattgataccaatata

SEQ ID NO: 273687 - DNA, 445 bp, Glycine max
  unsure (1)..(445): unsure at all n locations
tgtcactggagctgacccatcaactgccctaactcttttagactggtgatccctatgctctggaccttgacttgatagaacctttntttaagcgaaggcatttgacttgatcccatgttttactaaagtgaacaaaaattggtgcgaatcaaaactccaacatctatcatgggtggaatggatgaatgcatgaagaaatgcatatgacacagatgcaatttatgaatatgggagcccgggaaattgtctccttcttagatacaacgtcttgggttagcaaagtgcccaacgtatgtatttaagaaagtgacacggacccgccgttggtttgtttaaagagaggggatcaagacagaatccgtgcgtgacgcatatgcgaaaggcgcaacatagtatgacaatgttcacaaaatataaaaagggtacatgaaacttatgcatggca

SEQ ID NO: 273688 - DNA, 391 bp, Glycine max
  unsure (1)..(391): unsure at all n locations
agcttcaacccatgttttcgaatttgatccattatattttaaaaaatagcaattaataatgcataagaacttagacactcacaagctgatataaggatctggttgaagttgctttccattaaaatgaaagagctttccaagaaaagaaattgacaagaacattgattcacaacaaaccaaaattaaagatgtacgtacgtaacaggaatattagccaaaactaaagtagagaaacaaacaaatcacactattacaagttacaacaacaacaacaaacaaaaacaagcacgccacgatccattacattagcaacaagcacgttggaaaataagaaacataaacagcaggggcacaagctataancataacaatggcaatcaacgagagtaca

SEQ ID NO: 273689 - DNA, 439 bp, Glycine max
  unsure (1)..(439): unsure at all n locations
taccatgacaaagacagccatggcatggggtttgagcttgnggttttcctccaaaggaacagatgaatccttcaagaatgagaacaattgctgagctgctggagcaatctccaatattctaaatgtttaattgaattagtcatatatcactcattacttcaattgttcaaaaacatgcattaagttgtgttactaactaacattagctgatagaatataaaaaaaacaaaatgtgtcactaactacctagttggagataaggttgaaagatatgaacaaattaaacggcttacttcttgaaaaaatatagaccgagttcttgagaattcttcttcatttcgttccatgatttcaccaccagagcttcgtgctcttgcgtgagacctttgccctccatgttctctactctctagctactagctaagatcggtatatatga

SEQ ID NO: 273690 - DNA, 238 bp, Glycine max
aaccagctccgctgccgaatatgacagccaccgttttatgagcactgagcaccagtagcgcttcgaggccattaagggatggtcatttcttcgggagcgacgcctccaactcacggacgacgagtatacccgacttcacgaggagataatttgccggcggtgggcattattggttacccctatggtcaagttcgacccacacatagttcttgaattatatgcctatgcttggcctaca

SEQ ID NO: 273691 - DNA, 367 bp, Glycine max
taggaacccaaacttgtagcttcaatgcatggaaacatgcttatggctaggaatccaaaatttggttttagaattagaaaaacatgaaaattatgacttgcttgtgagagtttttgctcgaatttgggctgccccatgtttgatactttacatagaagtagcgtggaaaacaccttgcaatagtgtgtatacataggtaaatataaggagcatgaaattcctagcaaagagtgaatgattgtcttcctaaatgaatgtatgatagcacggaattcccttttgaatgcaagtgtgtgcataatgtaaatagcttgccaatatgtgtaagtgtgagtgaaacaatgaaagtttgtatggtatatatatt

SEQ ID NO: 273692 - DNA, 362 bp, Glycine max
agcttggaatcttaaaaagccttaattctctcaattatgaggtgtattatgtgatataacaccaaggtaaacaaattaagcacttattgcttaggcattcttagcagttcaattagtgaatgaagcacgatggcttcaccaataggtacttgtttgtgttcaaccaacataacatcactctttcttgttccattaacaccaaaacatttttatgaaaactaggtgagtttatagagaaaaagtaagaagaagggataagtgaagaacaatcaaaagtgttatcccaaataagggggttgaaactttgagagatcttcaccaatggattacacgcaaatcacacatgaacttgataccacact

SEQ ID NO: 273693 - DNA, 287 bp, Glycine max
  unsure (1)..(287): unsure at all n locations
tgcanttggaattgcgaaagccccactccatcattaggatttatttcatccatctcaaacaaacaaatcaaacgtaacaagacaattatagttgttgtttgaatacctcacccactcaagtgtatcacacaattatggcttttctctaatgaaacactcttgccttttaccactctaattccccttgagttcttaggcaattcaagagattatggccacaacaaagaacaattcaccaatatgtctaaggtaaggctagagatacaaggaaaaggttaaacaagaaa

SEQ ID NO: 273694 - DNA, 443 bp, Glycine max
  unsure (1)..(443): unsure at all n locations
agcttgtagaagcaaaaggccagctatggttntcatggtggattntgaaaaggcctatgactcagtctcatgggcttttttggattatatgctgcaaagaatgggtttttgtcccaaatggagacactggatttctgcctgtcttaattcagcaagcatttctaaaagatgtccaggtttaattctctgatttgacgctagtcaacaaattgtttctgacaagtcatcaagctaacaagcttgtaaggattctaccgaaatcattgtgattgaaaggaaaagataatagaaagtaaatatgatgctaggacaacaaatggttgtcattttgagatgattaatacactggcttagtacttcaatttattctttagaaccaataaggagactgagtattttaaagtaaaaatacagaggacttctatattttggaaacatgaatg

SEQ ID NO: 273695 - DNA, 304 bp, Glycine max
  unsure (1)..(304): unsure at all n locations
cctcttagacactatcctaagagggtccccagtggccaatcttcacaaacacacagccacccttttgctcacaggaatagcattcctcaaagtggtgtcttccttcacaattgcagaattcaattcgtcacaaatcatatcaaaagtttctctttccatcctaaaagcctttctaaactcttcttcaggaaaatcctctttgttgcatccatcccaccatgcccctgaacgatccttcacccacagccttctctgtgagcctnccacaccagatttcaccccttcagcactaccaccaccaccc

SEQ ID NO: 273696 - DNA, 427 bp, Glycine max
tgaggcctgtaagctcgcgggattctgtgatagtgactgtgccggatatgttgatgatataaaaagcactaccggatttgtatgtagtatgggagagatcacccgcatggaggaatacacaccaggcgttgaacgctttctaaacgggaagccgatcttgaaacatgcaacgttcgttgcacaccgtcagagcctcttagtcgtgaaaaagaatggcagtagtgaacattcatcttgttagcgcaaggaaagaccgagccatctatagatgataatagacctgcacaatatcttgacaagaatacggtgttacatgaacgaagtaagcatatagatgcaaggtatcatttcattagagagtgcattaccaagaaagaagtagaattgactcatgtgaaaactcaagatcaagttgcggatattttca

SEQ ID NO: 273697 - DNA, 305 bp, Glycine max
cactcttgatgctacacgttatgattcaaccatcaccgagttaaattatctgctaaagagttagcatttaagattgaggagacagtgcaagttagaatttaagattgaggagacagcctaactgtcccctaaaccattattagcatctccagtgatcttaacttaaagaaatctactttaggtatcttatgctatattaatataatttaagtggtacctatactactaaaaaaaccatttactaggacgtgtaaactaccacggttgataaaaaccgttctaaaaaaaatctgaggataatattg

SEQ ID NO: 273698 - DNA, 452 bp, Glycine max
  unsure (1)..(452): unsure at all n locations
taagcacgttagcttcacaccaaagcaacacanaatctaggtatccaaaacccctcaatttaatggattttcaaggcttgttaagtgaaattgagaatgaggtaaatttggagcaaactctcccctcatctgaatgttgatgaagccccctataagctattgaggaagcatctgacgacgctcgcacagacctggagcgtatctcttattttaaccttgcccttacttctcacacatctgatattaatgttgacagggcacgaataatatatgttgatcactgcactatgtgatgctcagggggtcgtctttgacaccctgacatttgagtcactaagtcctatgattaacttggcttacattaagaagaactgctggaaccccgcagatccatccatcacatntccaggggcccattgtacccgtgccagagctcgcgcgccagacacccc

SEQ ID NO: 273699 - DNA, 488 bp, Glycine max
acgtgacactatgaaactaagcttataattcccacaaagacaatggagaattcaaacacagtttgataagttataagcaatgactttcaatcccataggttacaagatacagtagcacacaaataatacatgaggtacatgcctagctcacgcgtagttgtggctggcacaatttatttaaacttttaagatatacaattgatggcattaaggggtaagtaagccccataagtcatcaatttttatttttcgcatagaaatagcctaggacatagcatttttatattgccattaatttagttacggtttttgactaaggtaagtatcaatttgtttgttcatctcagctaacaattccaataaggtatgagggtcaggagtgttgtcattttgtttctcatattccaggacccaattcacaacagcttaatgtaaattagtagcatagttagtttaagacttgcataccttatgagctcaatggtttc

SEQ ID NO: 273700 - DNA, 457 bp, Glycine max
  unsure (1)..(457): unsure at all n locations
ttgngcatcgtagcttacgcttattaaaaagccttataagcctgataggtcggcctatatatatgtatatatacttatattatttttttgggtaccaatatatacttatattattttttaggtacaattaatatttttttttgaaactagaagactttgattacacattactgctccacaacttccattcctataatcaagtaagactttaattacaatttaggtgtgattcatgtgcccctttatattcctcattatttttattggctttcctattcctgttaacgtttccttttcctattaggtttacttttccttttaacttttctattacgttcctattctagagcaaaggaatattaaagagatttaatgtgaagaaggcttttaaaaaggctatcagaccaggctaggcttttaaaaaggtcacgccgagccaaaataaaagcctttgata

SEQ ID NO: 273701 - DNA, 452 bp, Glycine max
  unsure (1)..(452): unsure at all n locations
ccttaangtgcgtagcccaccatcttttcatagtagagtatcgataatgtgtctaccatcacgatcatcgtctccctttccatcattgggggtaccacctgngccaccagatccctccaccttttgggcgtgttctttgaaagatccgtccccctttttgcaaatgttctgtagttgcatcctatccggaaccatatcaaaattgtactgatactgcctaacaaaggcaaccattangtccttccaagaatggactcgggaagattccaagttagtgtaccacgtaacagctaccccagtaagactttcttggaaggaatgtatcagtaattcctcatcttttgcgtattcccccatcttctgacaatacatctttagatggttcttgggacaagtagtccccttgtacttgtcaaagtccagcaccttgaacttgggaggggtgatgatat

SEQ ID NO: 273702 - DNA, 449 bp, Glycine max
  unsure (1)..(449): unsure at all n locations
agcttctactgatgtggcagggcagggccccttctgcttgttgtcccacccgcgagccttggcctctgttcttcctttcggagatacttttccttatgtcagtttgcgtaggtttatagcctaacccaaacttcccgtggtttcctctggtgcttaccaagttggttctgctgccgttgttcttgcccaaacccattatgggctcgtagccgtaccccaacatcacccgcgcgaccatcattgccgtattggataggcaaggctgcccagagagggaatctatagaggcaatgcttactacctcaaaagattggaaagctgtttccaatgactcctccgcagcttccacatatggcatagaggaagggcaacttaccaagacgtcttcgtcctccgatacaatgaccaaatgcccctccactacnaacttcagtttttggtggagtgta

SEQ ID NO: 273703 - DNA, 447 bp, Glycine max
  unsure (1)..(447): unsure at all n locations
cgtattgtgacactttngagtgacaacaatgttgaacccatcccaagaatgagttggattccaagattcccaccattggaaccaacccaaagcttgccctccatcgcgatcatcaccgctttcagcttgtcctcttccctaactgctcgtaaccaaaaatattgctcaatcttggtcaaccagtccattggatcctcaccgctgaatatgggcaattctaaattcctccaccggttgccgatgtgccctgcccgaccttcatcccctccgatcgttaattgtgcccggccaacctttggatcatcccttcgatcgagctcagctgcaattccaccgcttcgcgattctcctgcatcgctttctccatagcttccatgcgtgtctacattcttgcgtgtgcctttgtcaccattaatgattctacgctccaagatcggagctctgatt

SEQ ID NO: 273704 - DNA, 346 bp, Glycine max
tatgttgatgatacaaccagtactaccggatttgtattatttatggagagaatgtgtccctacatggaggtctaatacacaacgcattgtgacactctgtacttgtgaacccgagtatgtacctgcaacttcttgcacatgtcatgccatttggcttagaagagaggcggaggaacctcacttgtggcaaaaggaaagcacaaagatctatgttgataatagatctgcacaacagcttgccacgaatcccgtgctccatgaacgaacgaagcatatagatacgaggtatcatttcattagagagtgccttaccaagaaagacgtagaattgactcatgtgaacact

SEQ ID NO: 273705 - DNA, 278 bp, Glycine max
  unsure (1)..(278): unsure at all n locations
tcaacaggatgctnggagganggcacttgaagagcaacacaaacccagtttggacttgatgaagcaagagttcatgggagcagtttaagttgagttatctcatattgcatcacatcaatcagcccccattgagccccctgaagtacaacttttaggtgcgcgtgtgtcaacctagggtagtggcattgcaccagagccaaaagaagtacctcaagagtcgtcagatgttggtgacaatttgatggggttgtatgtggttgatgaagatcaaaatactc

SEQ ID NO: 273706 - DNA, 80 bp, Glycine max
agcttcaagccaaagatgctgtaagttatcctgtttttcttgcatcactattaagaaaagcttgatgtgctgagtccccc

SEQ ID NO: 273707 - DNA, 225 bp, Glycine max
tgaaccttctcatgccaagaaagttcttagaggactgtcttattgctacgtgatacaaaggtcagtttgagtaaaaatggtatatcattcctctgtgacaaacgttgggtatattgtgagtcgggcttgttttcccttcattggtgtattttctctgtctatctatagatgaaaaaccttgtccaatgtgcaatgttcatcctgtgatgattctagcagattatc

SEQ ID NO: 273708 - DNA, 408 bp, Glycine max
  unsure (1)..(408): unsure at all n locations
agcttgttgtaaaggatcctgaatctaaacttctctgattacaagtttatgactgggacaaggttttccaacgactttntttctagttacttgttgattttgacagaaaaaattaacataaaaatcttagctatagtagttatcattgactaagctcttaaggtagtcatgtttgaaagcaagttcatcatttttcctttgaaaattttacgtacggtcaacctatgtggtctaaatgcccatttcttttaaagtttcatcaacaaatctaacataacaggtatgttgcaagcaatgactatgaaaatcatttgaaaaaattaattatgcatacattaaagggaagcagtgaacgacagggtacacagaanattaaagaaactcatagccttcaactgggattcttct

SEQ ID NO: 273709 - DNA, 175 bp, Glycine max
ctggatcttgagcttaatgggatcctttaatggtgagtttccaccatggagatgcagtggaagacaaatgaaaagaggtgagaagaggcgccatccattatgtaataagccatggaggaaggagcttcaccatcaagatgagccttggataagaagcttggaaggatgcttcaat

SEQ ID NO: 273710 - DNA, 423 bp, Glycine max
  unsure (1)..(423): unsure at all n locations
tctagcttaagaaaaatggcctcagcaaattccttatttccagaaggaaattctatcaataaacctccaatctttaatggagagggttaccactactggaaaacccgaatgcaaatttttattgaggcaatagacttaagtatttgggaagccatagaaatagggccatatatacccaccacagtagaaagaattacaacagatggtagcacatcaagtgaaagcataacaatagaaaaacctacagatagatggtctggagaggatagaagacgagttcaatacaatcaaaaagccaaaaacataataacatctgccctgngaatggatgaatatttcagggtttcaaattgtaagagtgctaaggaaatgtgggacactctacaattaacacatgaaggaactacagatgttaaaagatct

SEQ ID NO: 273711 - DNA, 443 bp, Glycine max
tggtgcactagatatctcgagatgggatatacatatgttggccatatcatacaccctcatggaatggtcaacaatatgttatatcatttatagacgattactccacatatgcatacttgtttgttatacatgaaaagtcacaatctctggatgtgttcaaaacatctaaagttgaagttgaaaatcaactcatcaaaagaatcaacagtgtcagatttgacagtagtggtgaatactatggcagatatgacggttcaagtgaacaacttccgaggcctttcgccaggtacctagaggaatgtgaaattgtcccatagtacaccatgttggagtcacctaacatgagtgatgtatctgaaagatgaaatagaactcttaatgatatggtgagaagcatgatttgtccttctaacttaccagagtcactctggggagaggcactg

SEQ ID NO: 273712 - DNA, 381 bp, Glycine max
  unsure (1)..(381): unsure at all n locations
gtgatcgattaccagtcgtcaatcgagttgaacaagaaatctaatagatgtcttctcttacaacgcttctggagtattctaaagtgtgatgctataacaatggtgaatcatgacgagacttgaagagccccatgaagcaatgccttgatttgcatataaagacaacttacaactcttacaatctttacaaatagcaatgccacttagtattatacaacccttgaatcgatgtgaacatgtgtttgaactactatctcgtcttcctcttacttagcaaaagctttctatagttctctgggttgtgccaacttgaaaacagaggtggcgatatctttattccttcttctttgcaaaatgagatcggcaagactaccggctgan

SEQ ID NO: 273713 - DNA, 132 bp, Glycine max
cctttgagcctatgttgccctttctttgttttgaagctcatttctagccttaagtgaaacaccatgatatcaccttacccttaaggaattctggagttttggaattgctttgggaataaatgtggggggggg

SEQ ID NO: 273714 - DNA, 410 bp, Glycine max
  unsure (1)..(410): unsure at all n locations
agcttataagaacaaaattgccttaattatttncaaatatgcatgtgaattacgacgcatcaacaagaatcaagccaaggctattgtgcaagcaatcaatggggcaaaacacaccaaatgattataatgatggatggctcaaattctcacaaaggtaaaatcatcactttcaaattgagctttcaaaactatcatgacatgtagagaagaatcaaggatttcaagtcacaaaatgtcaagaacttttattttcaaaacaattacccatttcttgaacatatcctataattcaaagaaaaacatgcaaagtcgtacgtgcacacgaaattgacccaaaatattaaactgaaaatccgacgaaactaacaacattattaaattaacacaactaacaaattaacaaaaccaac

SEQ ID NO: 273715 - DNA, 435 bp, Glycine max
ttcttgtgcatccaataccctgatgaggatgttccatatgttcttaatactggactgattcatttgcttccaaagtttcatggccttgcaggtgaagacccgcacaaacattcgaacgaatttcatattgtctgctccaccatgaaacccccatatgtacaggaggattgtggcgtccctaaattaatgactggtttgatagtaatgatttaaataacaaaaaccatggtgaatgctcttttcttctttatctttttcatttctttctcttttcaccataactaggtttacaaggaaaatccccactatagagtcctgaatggccagctcacaactctattctgagtcatttctttcttaccgctcataatctctaaactattctgctgattcaaaagggaaaatgtaccagccattactttaggtcgtcacgtg

SEQ ID NO: 273716 - DNA, 426 bp, Glycine max
  unsure (1)..(426): unsure at all n locations
taagctcttctcctaatactacatatgaanaaccaactataagctggagaggagacttcagaagcaacgtgttgtgtgtagaaaaagtcatcatcagttaagtgtcactatttaaccctctctagtagccttctgagtcattccaattgggatgctataacactgtgaaccatgacgataattgttctcaccttgacttaaggccatcaattgagtagcccataccccaaaagtgttcaatcaggcctcgaagggaatgcttacttggagaagctagaacttcgtaagatgatattatgtgttctaactcatatacatgtattactattacctcaagttttcaatgacttaagtgtgaaatgaggtaaagaaaaaaaagacnaaggagggtagataatacatgagagttaaagatatatatgaaaa

SEQ ID NO: 273717 - DNA, 434 bp, Glycine max
  unsure (1)..(434): unsure at all n locations
ccgttcgtagctccctcatgtaagactaggctcgatntagtcagccgtcttaggtttagactaacttaaactgagtttcatccgcagatcccttatgtaagactagactcagctcaagtagcttacgaaagtttagcctaatctagcctaagcttcgcccgtagatccctcatgtaagagtaggcataaaagaaatagcattattgtgacaacataattaacaccaaaacttaacctgcatatccctcctgtaagactaagtttcgatcctgcttcaatcaagttctaaggcaacaatacatttcccaatgctaaagtcacctaactgtgcatacaaatgggtgatcagaccaaaagcatacaaacatcaagcattgaatgaagcatttgacacagaaaacacaatcaattagatattatgtatttacataagt

SEQ ID NO: 273718 - DNA, 437 bp, Glycine max
  unsure (1)..(437): unsure at all n locations
ctgtaagctntcgaagtaaatgagagacaccaccgagacttttcctatgactacaacagcacatgctgactaattattattactctcagttgagatgatccagagctaacctacggctacgatagcaaatacgaatctaataacgggaatgctagctattcaatcccataagccactctcaatacttatattcataaatgcatgaacttttcgaattcagaaacaacttaatcttagatccaaaccatgtgcattgaccttatataatatattaggatcccgttcgcacaatcaacgaataaattcatttaattgaattttatggaggtatgtatgtatataagcatgaatgcatttagatccatatcaagacaagcgtagtataagagtacattacgattgaagtggtcataagattgcaattacaaaagattcac

SEQ ID NO: 273719 - DNA, 375 bp, Glycine max
  unsure (1)..(375): unsure at all n locations
aacataatttatagatggttctttttcttttaacatactgacctctagtctgataaaataaataaattgacctatcgttatgcatataaaatataaacgaatacagtatcccactatttatataaaaaaaaaattatagccataaaagtaaatgtaacgactaacctcattattgtgaaatatatatttttctttgtcttttctttttctgttagtgatacatgacattcgtggcatcactcatcattcattttatgcatttcaacacttaacacgatctatgatggtattntataatttgacagcgacccgatatcaaattaaatccactaaatgccttttataattgataattattaactggtttctttggaa

SEQ ID NO: 273720 - DNA, 448 bp, Glycine max
  unsure (1)..(448): unsure at all n locations
tgagcacgctagctntacaacagaatttagtaatgacccactaacctagaattaaaataacttaatgccattaacctatgtaattaaaaaaaacttaatggctgagtgtaactgaaattgtggcaaccaaaagtcacccccaatagccaacaagtcagccaccatttggtctcccaaaaggctgatgcctaggttgccaattgggcccttattacaacttgaactaaacctaactaaagcccttttagttgattaacccaaaacatatttttggtcagccaactttacaaggattgggccattatttagacagactaaacactctaaaattgaaacaaagtggtgtcatttagtcctcctccatttgggccatgatacaactcacaaccttggacttttctccttgaaacttgggcttgtattcaaatagtatggacagcacttgttg

SEQ ID NO: 273721 - DNA, 426 bp, Glycine max
  unsure (1)..(426): unsure at all n locations
ctattacgtgacactatgaaactaagcttaatcattcaatttgagcatctcgatatattacgggacttaatcagacatccgagtaaaaagttattgtcgtttgaatttgctcagagcttcggtattccatttcgagcgtttcgatatattacgggactcaatcgaacatacgagtaaaaacttgttgtcgtttgaatgtgctcagagcttcaacattcaatttcgagcgtttcgatatgttacgggactcaatcggacatccgagtaaaaagtaattgtcgtttgaatttgctcagagcttcggtattccatttcgagcgtctcgatatattacgggactcaatccgacatctgagtaaaaaggttattgtcgttagaatttgctcagagcttcaacattcaattntgagcgttcggatatattac

SEQ ID NO: 273722 - DNA, 457 bp, Glycine max
  unsure (1)..(457): unsure at all n locations
tgagcacgtaagcttctgtcanaaatccttgttaatatattaaggtccttccttcatgatttgattagggccttgcaatttagtttcataccgaggcggnggaccaaagataatgctaatattctttatgaagtggtgcaccatatgaggatgtccaaaaggaaacaaagagatgtggtcctctagttgtatcttgagaaggcctatgatagggtggattaaggcttcctcaagcagactcttcagctttttggttttcttgaagttattgtctccctaatcatgcacgatatttcttccactagcatctccatttgttggaacgacaataagcttgagggatctaccctagtaaggggactcagaccagggatcccttatctctatatctttntgtcttgggtatgaagtgctttggagccaagaacaacaaggaggtccatgagggtaactggga

SEQ ID NO: 273723 - DNA, 434 bp, Glycine max
  unsure (1)..(434): unsure at all n locations
acttgagctctttgtccaacgctgcatcttggggtgaagctccttcttccatggcttattccttaatggatggcgccttttctcacctcctttcctttgtcttccactgcatctccatggtggaaaatcaccattaaaggaccccattgaagctcaaagatccagcctccatagaagccccacaagcaagcttccatcaagtggtaatcagagcacaagagcttcaagtaggtgcaccttaaacctccattaattttttttctttaccttctcttccattgttgtttcttcatttttctccatgtatctcctcacatgtcttgttctaaatgttattaacatgattctttagagtttccaccgattaaacttgctatagaagttagatttgattntttatggctcaaatntcttgttcttgttcttgaaccatg

SEQ ID NO: 273724 - DNA, 465 bp, Glycine max
  unsure (1)..(465): unsure at all n locations
tgangcacgtaagcttgctaagatacatggcccaataatgagcctattgctgggacaaataaccactgttgttatgtcttcagcacaaatgcccaaataggtgcttctaaccaatggccaattcttgtcaaaccgaaccattccccaatctgtgccagttctaaactatgaacaatacaaccttgctttcatgcccatttcacctctttggagggaactcagaaaaatatgcaacacttagttatttgcccataagtctcttatgctagccaagacgttaggcgtaagatagtgcaataactagtctccgatatacatcaaagcagacatattggtgaagcagtggatattggcacaacaacattcaagactaccataaatcttctatcaaacactattttctctgtggatttgattcactctacaggtaaagcagaagagttgaaggacttggtgaccaatatc

SEQ ID NO: 273725 - DNA, 452 bp, Glycine max
  unsure (1)..(452): unsure at all n locations
gtgtcagagaaagaagtgacaatgaacaatagttataacttatgtgaagttaattagttgaatttgacagtttaccaagaattaaacgacataatttcagttgaagagatagaccaatataaaacttcttgtgcctaatctttttgtcttccttaaagttttaaacttgggcaaaagatgtgaatttgtttagatatcttgtgtttctaaaaacatttacttcatctaatagatttttcagaaaaatcatttatttgtttttaacaaagaaccatcggatgagggctttgtttttaaaaggaaaaaagttttaaattttctaaaatcataattcaactctctttcttataatattagtctttacatacatacagatcaataatagtcacaatgcgatcccacaaagctaatggagaaagtgtccataggtnaatggtctattatgttttact

SEQ ID NO: 273726 - DNA, 390 bp, Glycine max
  unsure (1)..(390): unsure at all n locations
aatgaccgagacatcntttgactacaacagcccatgcaggcgtgattatatgtgtctaggctgacatgatccatagctaacccactgttacgccttgcaagacgatattaataccgggaatgcgagatattcaatccccttggccccttccgatacttatattgatcaatgcgagaacctttcgatggcagcctctcctcattcttaaaagcgaatgatgacgactggcttattaccatggtatagagcccatcccacctgggagacccaagagataatgtataaaagatgttctgtgtcagacccgaccgtttaaagacattcaagaatacacactagagacaagctattaatgctggagaattatacaaagtcctttgcctacccaaa

SEQ ID NO: 273727 - DNA, 183 bp, Glycine max
gaagtgaacctcggatccctgtcggatacaatcctggaaggagattcatgcaaccttaccacttccttgatgtaccactctactatcttctacattctatacttcatattcaccggaataaaacgaaccgatttggtgagtcgatctactataacccacacaacatcatgcccatgactagtc

SEQ ID NO: 273728 - DNA, 231 bp, Glycine max
tttgtaagtttaatgggcagcatgccgatatactagaaagattcaatggtccaaatgaataataatgaagtggtctagtgcatccgaagtttagataatcaaatcgatgcatgagccctttaagcatgttttgatgtcctataagacagagaattttgacatgtgagcaagaaaagtcaaccatacagtcatcactcctgttgctgcactgataccagcttcaccaaacat

SEQ ID NO: 273729 - DNA, 415 bp, Glycine max
  unsure (1)..(415): unsure at all n locations
tagctntcactcgcatgtccgattcangcgcatagtgtatcgagacgctagaaatctaacaaaggaagctctcgagaaattcaaatggtcataacttttcactcgcatgtccgattcaggcgcataacatatcgagacgctcgaaattgaacaacttgatttctcgagaaattcaaatggtcataacttttaactcgcatgtccgattcaggcgcataacatatcgagacgctcgaaattgaacaacggatgttctcgagacattcaaatggtcataacttttcactctcatgtgcgattcaggcgcataacttatcgagacgctcgaaattgaacaacggaagctctcgagatattcaaatagtcataacttttcactcgcatgtccaattcaggcgcatagcgtatcgagacg

SEQ ID NO: 273730 - DNA, 444 bp, Glycine max
  unsure (1)..(444): unsure at all n locations
nggcattggaattgcgaaagccncactccatcattaggattattacctgacatctcaaacaaacaaatcaaacgtaacaagacaattatagttgctgtttgaatacctcacccactcaagtgtatcacacaattatggcttttctctaatgaaacactcttgccttttaccactctaattccccttgagttcttaggtaattcaagagattatggccacaacaaagaacaattcaccaatatgtgtaaggtaaggctagaaagacaaggaaaaggttaaccaagaaaaaggctaacaatgtttttaggcacaaatgaaggaaataaaattcagaatttaggaattcaagtaacaatccttcatgcaaccagtatattaccttaaagagatttttttttttaaaaagttcttcaagcatgaaccattcagcccaattnttttttt

SEQ ID NO: 273731 - DNA, 419 bp, Glycine max
  unsure (1)..(419): unsure at all n locations
agctnttctttctcaatcaatttgtctactgactatcaattctatatgcaagttcacattcttgttctttgtttgtctaacatacacacttgctcaaactcatganaagaaacacanattccatcaaaatcatgcactcaattcaaaataaaagcatacaaccattttcataagtcaataccatatcattaaaaaccaagttaaactgttcaaaatgctccagaataagcaaaccaactatccataaataaaactagtagtgtatataaatataaaataaattttgtactaaaaccatagttaaaataataataaaccaaaaagcacaaagtgtcatcaggaatcaaaattcctatgactggtcctgngtgacctacgcctgaacatcctcctcatctgtcagatgcaatactggagta

SEQ ID NO: 273732 - DNA, 449 bp, Glycine max
  unsure (1)..(449): unsure at all n locations
gacactataaaactcaagctgtggacggctggacatgatatatgtcagggtgatggttttgccagcggttcanggataaaggaatgtctcgcattatttccatgacacacatgcaacaatgatgatttggaaattttatgcaaaactggtcatgcatgcacccatgtggacactcaaacatcaagtttttatggtcatgtgacactagggctcaggattcattttccctatttaagtcaacccagtgtttccaaaacatgttcttttatcaattcatgcattcatccgagaccattttgggcgttcgggaaaattttcacagcattcacccttcaggtgcatacacattttttttcaaaaaccttgtgttctgaatggtaagttcatttcctttcaaaagcatgttggctntttagctaaccaaatttatttntcttttactttttttg

SEQ ID NO: 273733 - DNA, 406 bp, Glycine max
  unsure (1)..(406): unsure at all n locations
tctgctntcagcanattctaacgataatagctttntattggatgtccgaattaatcccgtaatatatcgagacactcaaaagtgaaaccaaaagctctgagccaaatcaaatgacaataactttttactcaaatgtctgagtgggggccgtggtatatcgagacgttggaaattcaaaatagaagctctgagcaaaatcaaacgacaataaattnttactgggatgtccgactgtgtcccatagtatatcaagacgctcaaaattcaaaacagaagctctgagcatattcaaacgacaataactttttactcggatgtccgaattaatcccgtaatatatcgagacactcgtaattgaaaatggaagctctaagcacattctaacgataataactcattactcgga

SEQ ID NO: 273734 - DNA, 449 bp, Glycine max
  unsure (1)..(449): unsure at all n locations
tcattgcctaacaagccaacttacaacagcaagccccaatatactcagcattatgatgcacaggtcaaagttgagtatgtgaaaagattgtatgaccaagtgaaggtgcaaattgccaagaagaatgaaagttatactcagcaagccaacaagaaaaggaaggaagtggtacttgaacccggtgatgatcctggacatttgaagacaaatgttttccaagaaggagggaatgatgagaatcatgaaacaggccaaatacagtctaaaggcccaagtggagaatgacgaaggcccaagtggagaaggacaaagcccccgagtggagaaagatgaatgcccaagtggagaaggatgaaggcccanangcagagacactatcaagactattaattgttgctgaaggcccaagttaaatatatnntttagttataatatttatttattgtaat

SEQ ID NO: 273735 - DNA, 435 bp, Glycine max
  unsure (1)..(435): unsure at all n locations
tctagaggcgatctttggcatgcaagcttgctaagcaggatctgcagattattaatactttcttcagcgngaaaaacacaagttttcagtcttactctctctaaacgcccacccaaaccctaacaccttgttattcaccacccacgaccactagtgcccaccacgagccaccattgcttgccgctcaaccaccatacaaaaaggaacattgtaatcggagcggaatccttataatccacctcaaggatttgatggaaaacaagccctcaatcctttcggtcatagcttgtctgagggaacttgacttctaatcctttcttctagttagcttgagtatctcttagtgtctcttgtgttctacgtacaaatagggtgtttctacacttcctttgaaaaaccttgaaaatgagatgttggtaaagtatctttttataa

SEQ ID NO: 273736 - DNA, 421 bp, Glycine max
  unsure (1)..(421): unsure at all n locations
ttctttggngatgggttgcgctttgtggaaattctcttttgattgtgtattcaccacaaaaaatgacttttgacctgttgaataagtctcgtgagggggggggggggtgcctctnaactacttctataaaccccaattcttcttcccttattctctccattatattctataaccctacactcttttccttttcccctttaaattataccctaccaaaatacaactctaattctccccgcccacctactcaatcttaatcataactccctccatttcccatctcctcccccctatttacactccttctctccacacccccttctacaaacacccatacagttatcacagctaattttcccactttctcctccctaccatcccttcccccctcattttctttcccgcaccccttcccttccct

SEQ ID NO: 273737 - DNA, 415 bp, Glycine max
  unsure (1)..(415): unsure at all n locations
tgtagctgcaacttagccctgagaaactgggtttataagatttagggagtgaagattgctgaaaaccctagctctgcaacaagtcctatggaagtagacccggagatggacaagaaaatccgcagtattgtgagtagcattctgaaagatgcttctgtgcctgatgctgagaaagatgttccaacatcttccaccccaagtgtttccgtgcctgatgctgagaaagatgttccaacatcctccgctccaaatgctgaagccctcccgtcacccagtgaagaggaatcaacagaagaagaggatcaagcctcagaggagactcctgcaccacgggcaccaganactgctccaggtgacctcattgacctggaagaagtcgaatctgatgaagaacccattgccaacaggttggcac

SEQ ID NO: 273738 - DNA, 434 bp, Glycine max
  unsure (1)..(434): unsure at all n locations
ttgcagaattggtcttcgccagtgaaaggatcgatgtgtgtctgagaaaaaaaaaaaaaaagggcaaatttgatcatcctactaggacgactgagaaaactggggcaaatgaagagggtgagaaagagggagaaacccatgctgtgactgccattcctatacggccaagtttcccaccaacccaacaatgtcattactcagccaataacaaacctcctccttacccaccacccagttatccacaaaggccatccccaaatcaaccacaaagtctgtctaccgcacttccaatgacgaacaccacctttagcacaaaccaaaaacaccaaccaagaagtgaattntgcagcgagaaagcctgtagaattcaccccaattccagtgtcctatgctgacttgctcccatatctacttgataattcaatggtagccat

SEQ ID NO: 273739 - DNA, 273 bp, Glycine max
  unsure (1)..(273): unsure at all n locations
acacagagaagctatgatatggatggatacgcttgctttaactgtgaatgggagttaagagcttccaaggttgttagccaaagacaaggctatggcggacatgtactcagctcccaaggaagttcatgggctcctcgattattgtcagcatatgatcgatttgatggcccacataattaggaactgctaagacgtttgcattttcgctntaattttgacaagatgaaaaattttgttccttaatgaaaatgagtttggctcaatcctatatac

SEQ ID NO: 273740 - DNA, 517 bp, Glycine max
  unsure (1)..(517): unsure at all n locations
ggccccggtatgatacgtgcattacggacacatgaaactgagccgtatgagntcattacgcctatatgacggctngagtaatcactttgtgcttacttgtctcatttggaatacattctatttatgataatactcaacagaaacctatttaaatttaagtcattacgatcggctggaagtggtgggactaaatagtttgtataaactcatatgttcttacttaattgttgaaattatatatatatatatatatatatatatatatatatatatatatatatatatatatatatataaaagtttaaatttgtaccgctcacctaatcaatgtttaatatagattttagcaatgtttacgcgctggccattaatattctaaaatactttatgaccaacatcaaatgattaataacaacttctgaatcctatgatgtgtgtattattagcattttctttagcttataccgaatttctatctccccgagtttctataattgagaatttatttttctatttt

SEQ ID NO: 273741 - DNA, 449 bp, Glycine max
  unsure (1)..(449): unsure at all n locations
tangcctgtatgcttctacttgaatacccattgtccaatatgttgtttntggttcatccatcttgagtaaggagatttatactattattttttactttacaataactctatgatataaagctgaaaagtcattggacgaaacgttatgataaaaagatgaagtcttttccttgcaaagtttttttatttgtgttggattttcttatcctttattgtgagtagatcactcgtaatttttttaaatcttattgtctttgaaaggcaaaaataactttgtgaagaaagaatatttgggtgtatcaatcttagggttgattgatcgatattctgctaggagtaattataagaatactcgttgtaacaaaaaatgatagtgaaaaatacgcgttataattaattttgttagtgaatttttttttaaattaaaaagcctagacgtattagattga

SEQ ID NO: 273742 - DNA, 382 bp, Glycine max
  unsure (1)..(382): unsure at all n locations
tctgagacatgagccacatactccatatccataataacattcttgcttgatatatctcgatgaaacaatnggaggtgaacagtcatgatgcatataacataaagcatttgctacacccttaatggcattaatcctgggatcccaatcaaatgctattgcttgttcatcatctgttaagtggaaggaaataatataccagactatcctctntacatttataattatgcataaatggtcggttcatttttccaatattttttatagatttttgttgaaaaatacaaacatcacccattacttgctaattactactaaacgtttccctacaaaatattggtgatcatattttctatattagtttaactatataaaatttcatttt

SEQ ID NO: 273743 - DNA, 431 bp, Glycine max
  unsure (1)..(431): unsure at all n locations
tgangccgtaagctcgatctatcacaagactttattcgtttagtgttaatttctctacattcacagtttagtcagctttttatctctcttatatttcatagtgtgtgcaagaaaaggaaaggctgaagcaagaaaggatcgaaagtgttcatgttacgagtacctctaaagacaagggcaaacaaacaaggactgaggagcccaagaatgaaactgctaagggtccagcacaaaagaaatctaggtgacaactgtttcttttgcagtaagcctggacatgtaaacatgtaaagaagaaatgtaccaaatatcatgcttggggtgcatatctttcttactttggtctattcttacgtcaatttagttctagcacctagaaacacttgggagttagattctggtgccactactgacatcagtgtttcaatgaa

SEQ ID NO: 273744 - DNA, 467 bp, Glycine max
  unsure (1)..(467): unsure at all n locations
ctgttatgcacctactagttccagtgttggttntcacctgcaatgacacatctgaacaagactccaattttgatgaagatgaaggttgtgagataaggctttgactcactactccttcttcctttcccttgatcatgcgaaatgattttccaacctctgaatgccaaagttgaagaaagtgatcagggcatgttttactcgttggccatgaattgagcattgtggattccaatgacaaccttgcctctgtctcaactctcacactctcccactgtaccatgtgccgcgtcgaaggagattcggacttgacaatggattgatcaggaatcacacatagctgttttgctctttgggaatgacatgatcgaaggagacgcttctttagatgggtgttccagaagttcttaatctcattgtctgttcttccaggtagttgagatgctatagaagcccacctaagtgaatac

SEQ ID NO: 273745 - DNA, 421 bp, Glycine max
  unsure (1)..(421): unsure at all n locations
cttgcatacaacaatggagcttatccaatggacttatcaatgctaagaaaattcaggatctaaagatttagctgaatgctttggaggttggtatttctggcagaatcctgactcaacctgaagtggagctcaagaagtcttttcaggagcaactntgacatgcaactaatgcctatgaatccatgttgaggcaaaaggctagagtgaaatggttaaaggaaggggacagaaattcagcttacttccataaactgataaatcacagaagaagacaaaatgctatacaaggtttgatcattgaaggggggtgggttcaggaccctagtagggttaaaaatgacgctcttaatcattttaaagatagattctctgagcagaatcttaacagaccaaccntagatggtgtgcaactaccttccct

SEQ ID NO: 273746 - DNA, 447 bp, Glycine max
  unsure (1)..(447): unsure at all n locations
ctcatcttggaggagaagctccttctttcatggcttattccttaatggatggcgccttctctcacctcttttactttggtttccgtgcatctacatggtggaaaatcaccattaaaggaccccattgaagctaaaaaattcagccttcatagaagccccataagcaagcttccatcacaaaggacttcactgatgaagaagatctaaggcctacaagctccacatggagctatttcagaggttgacaaagctaacgtggaagtcattgaaaaattaccaccaccagcaaatgtcaaaggcatcagaagttctttaggacatgttggattctacaagcanttcatcaaagattattctaaaatttccaaacctttgagcagatctttgaatcaagaagtgtcatttcattttgataattatgtcttaaagctcttgatactttgaaac

SEQ ID NO: 273747 - DNA, 377 bp, Glycine max
  unsure (1)..(377): unsure at all n locations
gagccgaatgaagatatttaggagagagggacttgagtgtgttatagactttattcatcaaagntacaacaagtgttacacatgcttctatttatagactangtagcttncttgagaaagctttttgagaaaactttattgagaagcttctttgagaaaacttncttgagaagctagagcttagctacacacacccctctaataaataagctcacctncttgagaagcttccttgagaagattcctagagaagctagagcttagctaaacacacctctctaatagctaagctcacctccttgagatgagaagctagagcttagctacacacacctctctaatagctaagctcacctccttgagatagaagctagagc

SEQ ID NO: 273748 - DNA, 452 bp, Glycine max
  unsure (1)..(452): unsure at all n locations
atgtctctaatgactcatcgggattntcaagtttatgccattattataaaccacagttagaatgctaaataaaatggagtaaattgacatctttgtccctcatcctcttgtaattacatctttgcttctactagaatgtgggtgcaagccattggtttgtttgatcaagcgacctgcgctcttgagtttggacttccaaaatcattcaatcagaaattactcatgctacacatttggtgaggatgccgtaaacaacgagtaaagcagaaaagttcaaaaagaaaaaagcatttgattgactgtgttttcaagtaaaatatagacgttcatgtgacctcattttatcattctggaaagtttgtcttttttagagagaagtgagttatcaagaataggagtcatttgacttaatccgtcacttgaaaaaatcttcactatttctcgtcttgaaa

SEQ ID NO: 273749 - DNA, 307 bp, Glycine max
tcaattacgagcgtctggatatattactggactcaatcggacattcgagtaaaaagttattgttatttgaatctgctcacagcttctgtattcaattatgagcgtattgatatattttgggactcaatccgacatacgtggtaaaagttattgacgcttgcatttgctacgagcttccgttttcaattacgagcgtctcgatatattacgaaactcaatccaaccgtcgagttagaagttattgtcgtatgcatttgctacgagcttccgttttcaattacgagcgtctctatatattaccggactt

SEQ ID NO: 273750 - DNA, 264 bp, Glycine max
tcattgcctatcaagccaacttacaacagcaagccccatgagactcagcataaggatgcacagaccaaagttgcgtatgtaaaacaattgtatgaccaagtgaaggtgcaaattgcaaagaagaatgaaagctatgccaagcaagcccaaaagaaaaggaaggaagtggtacttgaacccggtgatgatcttggacatttgaggacaaatagtttcccagaaggagggaatgatgagaatcatgaaacaggccaaatacaggct

SEQ ID NO: 273751 - DNA, 398 bp, Glycine max
  unsure (1)..(398): unsure at all n locations
gacaaagagnacactttatcataatttaccatgtttggcgaggaagcacgcattgagcatcaattaacaactccttacacccctcaacaaaatggggttagtgaaagaaaaaattgaaagataatggaaatggtcagatgtatgcttcatgagaaagggttacctaaagaatattaggcagaagctgcgaacactgcagtattcttgctaaatcgacttcccaccaaagcagtaaatatgaagactccttttaagacttggaatggttataaacccttcttgaaaaattttaaagtatttggatgcttgtgttntacttatgtgccacagattaagagagacagcttgacaaaaagctgaacatggaatctatgcggatataggttacgatcaaaacn

SEQ ID NO: 273752 - DNA, 402 bp, Glycine max
  unsure (1)..(402): unsure at all n locations
ntacaaganagaatcaaagaataactcacgtagatnggttgttgtgtcttgtttcttcaaagtttcttctatatatagcatttatctccaagtatcccgtgtctcacaatggttggattcttcagtctgttcttcatttgaggtcttgagttcattggagcatttaatgcttgcattaaatgcatgtccctttttcgtacaaagttcatgctgataggttattgtgccttgtacttcagcagagaagtcacttttttcatcataacaagtttgtaacaacagagtgtgtgtcttttgatgaggatcaacatcttccaaactgcgagcttcatttattcttcataggactttgatagatcctangataattttntatgcatgaaagaatctcatacatagagt

SEQ ID NO: 273753 - DNA, 392 bp, Glycine max
  unsure (1)..(392): unsure at all n locations
tttgctagtgttgaccggaaaacggcatctaggctctggacaagactatccctgagtgaaccccatatgcccattctctcaccccattctccctcagttctctcttctcccttagcgccccctccccaatgaggatctatccggtccccgcctcccgcgcacccccatgcgttctcttttctttcttctgaaaatgatcttctgtcatcttagctacacgaagcgtcgccgattgcctgcaacaatatgattcacagggccggctggaagaataaaggcgtcactcccatctattctctccccaccccttggcctaattcttatcccttctttttgccgccgagcctcctccgctncctgcctctcctctacaccttcccgactcctcgacg

SEQ ID NO: 273754 - DNA, 434 bp, Glycine max
  unsure (1)..(434): unsure at all n locations
cttgtcacttcatgccaattggaccttcacattaaccatacttaacaccatcgacaacagcgtcaatgaattcttacaccctaaatacaaaggcttctttgaatcactttgcaatgtatcatacataggggcatgtgcttgctgaaaagactcttgtccaaggtcacaaatcatatcctccaagcgatctctcatttctacatcaaacggttcaaattaggacccactgtgcatgtctgtcaattcaccatgccatatccacgtcgtataattcctcttaattccgtcacacaacaaatgcttttgtatgtcatcgactctntgtcgtctcccgttcaaacaatttatgcacagacaaaaaaaacttgtcgttttcatctggtcgacttctttctgaagtaaattgtaggaactgttcgacgccttcctcatac

SEQ ID NO: 273755 - DNA, 386 bp, Glycine max
actgagttgaatggcatattcacacgcatttgatgagactccagtgtatgagaaatagcatatgagacagtgggttaactgaggagcaaactttataccctcgaacgcgatgtattacactttaacgaaaacgaagctgatactggtatgacgcctaagattcacccgaggagaattgggcgtctactgagagcactataacccagaaagggctcgtgtattcacactggtcagctatattccccatatgcacaggcgaagagtttcattagccgagaagagatccaaactaggaatactaccttaaacccccaataccgggaatgcagactagaactacacccttatagctcatacttttccatcataccacaatgctactatcg

SEQ ID NO: 273756 - DNA, 417 bp, Glycine max
gacactataaaactaagcttaggattgtgtgtagaagaaaatatcccgtgaactccattcacaatctgaggtgacaaaagctcaatgaaaatgaaagatagctgtagtcatggtttcacaagtgcatagatgatgaaaaggaaaagctagaacaaacttacatatttttttaacactgaaaaatcagggactacgacgggaatgtcaaatgtcattgctctgattaataatggaggaatatcctgcactctctatgagcagaaccatataggatgatatcagccattagtaacacactattcacatcaccattcaagccatagtgccttatggaaccctgacgaagtgccatacgtgaagcaactccctacatagacagctaataaatcagtagacacttgaaacacaatatattcc

SEQ ID NO: 273757 - DNA, 243 bp, Glycine max
ttatcttagacattcaatttcgagcgtctcgatgtattatgggactcaatcagaaatctgagtagagcgttattgtcgattgatatggcacagaagttacacatatgagttcgagcgcttcgatatatacgagacgcaatcacacatgcgagttaaaggtgatagacgttcgaataggctcgtatgtgcaacattccatttcgagcgccccgatatattacgagactcaatcagacatccgag

SEQ ID NO: 273758 - DNA, 273 bp, Glycine max
  unsure (1)..(273): unsure at all n locations
ntgagccaatatcctgactcaccatataccttgacccattgtgagaatgccaatccttaccctcggaagcgaaaaaaaagaagagaatgaaaatttccaatcaaaggaaaaaggagaaggaaaatttccaatcaaaggaaaggaaattcccaatcaaagagtgggagaaagcaaaaagaatagaaagaaaattcccaatcaaagaatgggagaaagataaaaagagaagttaaaaagaagaaagctcctggtcaaagaaaccagaagaaatgt

SEQ ID NO: 273759 - DNA, 337 bp, Glycine max
  unsure (1)..(337): unsure at all n locations
agcttcgcggaacgaatgagcagcagtataacattttttccggagagggtgggctttttataattttttattaaagggcaaaactgtccattcataatagctgttgggcccccagcaatattgttgggtgcacctagcatctaccctttttctcccccagtggcccagatgatttgaacacaaatgttaatcgcttctcttataacanaatataaaatatttataaaacataactatntatttatatgcttaaattgcattttataccttcaactttttcattttttgataaattaattcagcatattttacccctaacttataaaaaacacaaatt

SEQ ID NO: 273760 - DNA, 337 bp, Glycine max
ctccatgtagcaactaacaaatccaatcgcataaagaatatcaggccttgtgcatgttaagtactgcaaatttccaactaagctcttaaagagtgtcggatctatcctttcttcctactcatgctgtgatagcttgattccacattacattggtgtgttgacaggatcagagacatccatcttgaactccttaatcacttccgtagcatgaccttctcgagtgatgaaaatgtatctatcctatcactctagttcaatgccaaggtagtaagacatgagaccaaggtcaatcattgcaaactctgccataattccttgtttaaattcatcgaacatg

SEQ ID NO: 273761 - DNA, 431 bp, Glycine max
gaccttagagtgacttctgcatgcaagctctagatcaaagcaactcaaaatctatgtatttatttacccctcaatttactggattctcaagggttgagaagtgaaaatgagaatggggttaatttggagcaaactcttacctcacacaagtctataaccttaatctaaacttgctcaaactgggtctacgcctaaaattccaacgaatcaaaatttgacttctcaacattcaattttaccctagaaatggctcttgctttcactttggtcactcatattcctcatttgcacaggctaagctttctcataagtcctagacgacatttcaaactaggattaactctctttaaccccgcaataccactaaaatcagatttggccttgcaactcttaaaggcttactctttttccactcataacaccacattctc

SEQ ID NO: 273762 - DNA, 430 bp, Glycine max
  unsure (1)..(430): unsure at all n locations
atagcttgaccaatcccgaaccaacccgggcatagtcggtcagtgataacctgtgatgtacctaaacaggcgagctcctggcagtcaacagataaaaggaacaaagaccacacagcaaagaggcttgtggtggctggccagctgtgaactttgattgatatgtgagatatggtctctggtaatcgattaccaagggtgggtaatcgattacaaggcttaaaaatgaacacaggaggctaagatggtctctgttaatcgattaccacggngtgtaatcgattaccatgcttgaaaacgacgtcaagaagccataacggcttctggtaatcgattaccaagggggtgtaatcaattaccaggcttaaaaaggggactggaacattgtggaggcctctggtaatcgattaccagcctgtgtaatcgattacac

SEQ ID NO: 273763 - DNA, 451 bp, Glycine max
  unsure (1)..(451): unsure at all n locations
tagngctttgagctctttatccaacgctcatcttggtggngaagctctntnttccatggcttattccttaatggatagctcctcctctcacctcttctcctttggcttccgctgcatctccatggnggaaaatcaccattaaaggatcccattgaagctcaaagatccagcctccatagaaaccccacaagaaagcttccatcaagtggtaatcagagcacaagagcttcaagtaggtgctccttaaacctccattaatttttttatttaccttctcttccattgttgtttcttcatttttctccatgtatctcctcacatgtcttgttctaaatgttgttaacatgattctttagagtttccaccgattaaacgtgctatagaaactagatttgattttctatggctcaaatttcttgttcttgttcttgaaccatgaattgtgttgagt

SEQ ID NO: 273764 - DNA, 206 bp, Glycine max
  unsure (1)..(206): unsure at all n locations
tttcctcatctgaaagtggttctttactcttttctcttgctttntaactcttactcttttcttcctctttatttntttcttctttttctttttggcttttcctcctctatttctttttcattggcttttatttcttcccttccaacaattattggtttttctctccactgactcctctaatctcttacctcattcttctttttatc

SEQ ID NO: 273765 - DNA, 448 bp, Glycine max
agcttatgctgcaaacatttacaatagacctccttttcctcagcagcaaaatcaaccacaacagaacaattacgacctctccagcaacagatacaaccctggatggaggaatcaccctaatctcatatggtctagccctcagcaacaacaacaacagcctgttccttccttccaaaatgttgttggcctaagcagaccatacattcctccaccaatccaacaacagcaatagccccagaaacagccaacagttgaggctcctccacaaccttccctcgaagaacttgtgaggcaaatgactatgcagaacatgcagtttcaacaagagaccagagcctctattcagagcttaactaatcaaatgggacaattggctacacaattgaatcaacaacagtcccagaattctgacaagctgccttcccaagctgtccaaaatccccaaaat

SEQ ID NO: 273766 - DNA, 466 bp, Glycine max
  unsure (1)..(466): unsure at all n locations
tcatgatgaatcaagaatgatttaaagagtnttgatgatatcaaagatgatgacaaaaagctcaaaagtcaagaacacttcatgataacaaagatgatgatctcaagaatcaaagaatgagttcaagattgaatcaagaacacttcaaggttcaaaaggaaatttgatttcaagaataagaataaagtttcaagattcaagttccaagaatcaagatcaagattcaagactcaagattcaagaatcaagagaagactcaatcaagataagtattaaaaagttttttcaaaaactaagtagcacatgaatttttctcaaaaccttttaccaaagagtttttactctctggtaatcgattaccagattattgtaattgattaccagtagcaaaatggttttcaaaaagctttcaactgaatttacaacgttccaattgatttcaaaatgttgtaatcgattacaatga

SEQ ID NO: 273767 - DNA, 436 bp, Glycine max
taagcttgtagaattatggcgtacccatcacatgtggtattaggtggcggtcgggcgatggtgcacaacattttttccacatccacaatgcgcgcataaacccaccatcccctgttgcccacctccaactgagctcacgtactcccacgtagcccatatcctcgtttctctcaacaccgggtccccatcaatcctcccaagcttccacaacatccaagcaaaacaacattcacacagcacaagctatcacagccaagcaaaacaaagcaaaggcagaaaactctgccaaaacaccaaccaaaaatcacagcttttcccactcaaagaccccagtaacaattccttcgatccaatttggtaaccggtggatcgactccaaaatttttctggaagtctatagtgcataagcctacattttgaccgttgggatctacta

SEQ ID NO: 273768 - DNA, 387 bp, Glycine max
  unsure (1)..(387): unsure at all n locations
gagctcatatatatcgagatgctcgaaattaaacatcggaagctctcgangaaatcaattggtcataatttatcacactgatgtccgattcgggtgcataatatgtcgagacgctcgaaattgaacaacggaagctctcgagaaattcaaatggctataactcttcacacagatgttcgattcaggagcatcacatatagagacgctcgaacaacagatgcactcgagaaattaaatggtcatagcttttacacccagttccgagtcacgcttatgatatattgatacgctcgagatcaacatcggaagctcacgagatattcaaatggtcattacttttcacactgatgctcgagtatggagaatgccattattagatgctcaaaa

SEQ ID NO: 273769 - DNA, 457 bp, Glycine max
aagtcacctcaggcatgcaagcttgccgcccagctcgcccaggcgagcaaggtttcttcctccaggagcaacagccttctggaggaatcttctggagggcccaagtgggcctggttgctattagcatccccctttttactaaatgcacccccctttctattgtttttgtaattttttttccgtaacgttacgaaactttacgaatttcgtaacgatacttattttcctttcgtaaggctacgaatccttacggattatgtatttactcttttttagctttcgaagaagttacagaaactcacggattgcgcaaaaacactcttttttcgattccgccacattacgaaactttacggatcgcgcaagcctgcttccttttgatttctgagacgtctcgagacctcatttattgcatgtcatctagtaataatcgcccgacgaaattagggtatgacag

SEQ ID NO: 273770 - DNA, 472 bp, Glycine max
  unsure (1)..(472): unsure at all n locations
tagatagacaatacttcattcataacatcaaataaactattttagtcatccacaatattcaaataaaacatatatgaataattaaaaaaaaataaaacaaaataccaaaagtaagtacataccactagtcatatatcattaaagtaattaagtttaaaacacataatcataaacaaccaagagcaagtcaatataatcatcatgttcagtcatactaagcaagtattaaaagaaatactaagtattcaaatttcataaaaacatagccaaatacaaggcttaaaaacaaaatataattataatctaaatctattatcagagaatcaaaacttaattctaagtaacaaaaattagttatgaacacatacatggtaactcattacttatctcaattattttagcatatcaatataattctgacaaaaatccaatcatgtcanatcatanataaatgggataacatacaataaat

SEQ ID NO: 273771 - DNA, 410 bp, Glycine max
tatagcttcatcaagatgagcggagggacagggagatatagatcatgccattatatgcctcacacgaggtctgaacattgaagcataattcctaaatgatcgaagttgataaaaatacacacatatgatctctatttatagcctacgtgtcacacaaaattagagggaaattcgaatttctattcaaattctacttgaattggaaatcgaatttgtggagccaaaatttcactaattatgattattaaatgctagctatgattcagcccacaaattcaagatcaagctcaagattctccactaagtgtgcttaagtgtcatgaggcatgtatagcatgaatgacatgcacaaagtgtgactatatgatgtggcaatggtgtgcagcaagcaaatgctcacctccttctct

SEQ ID NO: 273772 - DNA, 422 bp, Glycine max
tcatttgcaaatatgcatgtgaattatgacgcgtccacaagaatcaagccactgtctattgtgccagcaatcaatggggcaaaacacaccaaatgatgataatgatcgatggctcaaattctaacaaaggtaaaatcatcactttcaaattgagctttcaaaactatcatgacatgtagagaagaatcaatgatttcaagtcacaaaatgtcaagaacttttattttcaaaacaattacccatttcttgaacatatcctataattcacagaaaaacatgcaaaagcgtacgtgcacactaaattgacccaatatatttaactaaaaacccgacgaaacttacaacattgaccaacttacacaacttacaaattgacaaaaccctcggaactagcataaccaaagaacacttgcccccatact

SEQ ID NO: 273773 - DNA, 373 bp, Glycine max
taagcttagcagtaatttaggaatagatgaggctagttgtattatttgcttgacaaatcctctgctgatgacaattagatcttttcatttatacgcccaccggtgctttttgttataggtatatctatcttaaaagataccaccccagtgttctttttctttttttttcacaaaaaaaagcccgttatattagtgataacaagagaataaacctcaataattattcattcacaacgtacctgttagcatataatcacgacactcttgctaatgaacgagcggcgcgatttacttttctatttcttacaaaattcacttctaatttggcaaaatttaaaaggagagggtacatgacattcacattgaccaacag

SEQ ID NO: 273774 - DNA, 573 bp, Glycine max
  unsure (1)..(573): unsure at all n locations
cccgccgacataaacggtctttccactntataaattanataattannnnnnnnnnnaagcccacggctgtganacnctgagannacnncccngnnnnnanatagatacgtcgtgaatccgntacactatacagagcacacacttctggctcatctgatccaaatgctccacataacaggccaattactcacacctgattcgtataaccctgggctccaattcacgtctactcaccgacctggctagatgcatactgagctatagtatcgggcacatgcacatgtaaagtaggaatcacaggtctccaaatcacgtctactcataatcgtggctagatgcatactcattaattgggggcccatacgatgtcactcgtacaatttctacaccgtcagcaaacgctgaatggggcaaatagctataaacaacctcacgacctcaagtagtatttcagccttattctctctccgttctcgaggaagaatcaactttttctgcctataatgggaaaatatgcgtgccataaatcatcatacataatatccctaatagcgtaacagtaaccaggcaccg

SEQ ID NO: 273775 - DNA, 418 bp, Glycine max
  unsure (1)..(418): unsure at all n locations
tctgctntgagcaaattcaaccgacaataactcttatcttggacgtcagattgagtccggtaatatattgagacactcgaaattgaaaacagatgctttgagcaaattcaaacgacaataactttttactaggatgtccggttgtgtcccgtagtatatcggcacgctcgtaattgaaagcggaagcttgtagcaaattcaaacgacaataacttttaactcggatgtgcgactgagtcacgtaatatatcgagacgctcgtaattgaaaatgttagcttgtagctaattcaaacaagaataactttctactcggatgtccgaatgagtctcgtactatatcgagacgctcgaaattagagcagatgctttgagcaaattcataagacaataactgtttactcggatcgccgattgag

SEQ ID NO: 273776 - DNA, 435 bp, Glycine max
tctgttttctattgcgagcgtctagatatactacaggacacaatcgtacattcgagataaaagttaatgtcgtttgaatatgctcagagcttcggttttcaatttcgagcgtctcgatatactacgggactcaatcggacatccgagtaaaacgttattatggtttgaatttgctaggacctactattttcaatttggagcatctcgatatattacgggactcaatcggacatctgagtaaaaagttattgtcgtttgaatatgctcagaccatatgttatcaatttcgagcatcacgatatactatgggacacaatcggacattcgagtaaaaagttattgtggtttgaattcgctaggagctactattttcaatatcgagcatctagatatattacgggactcaatcggacatccgagctaaagcttattgtc

SEQ ID NO: 273777 - DNA, 418 bp, Glycine max
  unsure (1)..(418): unsure at all n locations
tctgctnggatatnntttaaaatatatattacatctttcccataacattatcgcccgaataattagtaactttctttcaaattatttatttacagaatattaataattaataatatctataagcttaaagtaagggattagattccttgagttggccccatgagttgggctagttaaaaattcttgataaactcaattcaaccttggtgtgtctttattgaacctgagtttgatcaaattcatttaggtctagttaattaaaaattttggacaaactcaatttaacccaacttaattaaacctatcaacaaagaaaataatataaacactaattaggcttaatttatttatatttttcaaacacaatccaactcaaactatgatcatcctatcaaagaagaagatttacaaataatca

SEQ ID NO: 273778 - DNA, 560 bp, Glycine max
  unsure (1)..(560): unsure at all n locations
cgcctcacactgcacagcggttctctgtcgacatcatcatatttcnantaccaacaagacacgttatttgacacnttgaaanaccnnacgggannnacgttganccgcagttgatacggtcgctattacgacgccagctggaaactctactttggagcgtagagaggtaacacgggagatcatagaatgttgctcatttgagaatcaaccaattcatgttttggcattttctctaacataggctttccaagagccgatctatcatttatgaaccttgttgccctctgtaatgtattacctttataattatctacgtggaatctgaacaaaactcttgggggtgacctatttttactttttgatccccagttaaaactaattctgacgaagtggattcaaacgttctgccatgggaataattagaaattgatgttcatatacgtaaaaacagaattgtaaaggtacaaattgtcttcgtacaatgtcattagatgaagtgcaatcgcgtttttaaggaaacaaaagggttatttcccacattaatattccaaacatgcctt

SEQ ID NO: 273779 - DNA, 166 bp, Glycine max
  unsure (1)..(166): unsure at all n locations
ttgacagagagctngagatggcagattgtttccataatgatgtngctggcagctgtattcacattcacaaaaaagatgactggagaactttgacaaggacttttgccttcacctacagctattggtcgtctaacatagcatcgggatttgtcttggctgataaaaa

SEQ ID NO: 273780 - DNA, 252 bp, Glycine max
  unsure (1)..(252): unsure at all n locations
ntgcttgaggaagcatgatgcattctggcctctggcacttcttcacttgtatatgcaactggtgacaaatcagcgaggattggttattcagtatccgtgattaattcctcaccctcaacctctaatggtagaggaacaatctgatattgggatgccaacaccaatatcatttcttttggtttagtcgcatcaaccaaaggactagcatgattatcacttgaacttgatataattacaccggacaatttatca

SEQ ID NO: 273781 - DNA, 285 bp, Glycine max
atcatttaatatttgcatcgcgcatcatcgcgtaggaagaacaagacacgctctatagttagcaaatctcttcaggagttcaaactctctattataatcgattacaggattggcataatcaattacacaagtggctgaagctcgcattgaagtgtcccatattggtttaatccattacatgctcatagcaactgattacactagttcgtctgagataacgattatatttctcagaagcctctgctttaattgattaccacgtgatatagtccactacctctcttg

SEQ ID NO: 273782 - DNA, 435 bp, Glycine max
tcttcgtgtgtgcactttgtgaactgtgtaaaatgtaaattattgttgtctatttcgcattctttacactgcattctaagcacccacgggtttgagttaaaaaggggccctacacccgggttcatgggaatttaaagagtagaggtgaatctatcatcatgctatgtctccgacttgcttgataatagtgaaacctcgtctagagctttctctctatataatgtgttgtcgctggtattccataccgccacaatattattatcttgagtgatgatacctctagaaaacagtcatgtgagttatgaattgttgggagtggttgttagagacccctagatattatcctataggtccctaaaataggggcacgaagcgaacacgctgcgtgccattttaaacactgtcatgcgtgtagccctaaatgacatgtatgcc

SEQ ID NO: 273783 - DNA, 403 bp, Glycine max
agctttgtgtaatcaattacactaatttgtttattctattccagcgaccgcttctgaaaaaatcaaaagatgtaactcttcaaaaaggctttaactttatcaaatgggttttaagtttttctaacagttaaaactcttctgaatggtcttcttgaccacacatggagagtctataaaagcaaggctttgctttacatttcgaaaaacttgaatactttttgcttttccaatcaatcctttacaagccttgaaatctctttgaacttcttcttcttcttctttgtaccaaaagctttctaaagttttctagttttctaaaccctgaaaacttgcgctattcatcttttaattctcttctcccttttccaaaaagaattcgcccaggactaaccgcctaaattct

SEQ ID NO: 273784 - DNA, 455 bp, Glycine max
ctgtaagctctcataagtgaaatcaggtgcaaccatctccctacgagtcctctcacgaggtggaggttgagccatgttctcagtataaaaattagtagtggaatgctcaaaatcagaatattcagaatcactagcaatagaatactcagaatgctcaaaatgcacagaatgatcaggatgcacactatgcctaactaatctatgaaaggttctatctatttcaggatcaaagggttgtaaattgcctggattgcccctagtcatgcactatatgcagcaaataatgtgtttctcaacaaacaccaaacaagcgggtaaaactacaactatactcaaattatatcaaaatgagctgagatttttttaggaacaccctaaaatcatgaaaaaatagcacaaaaattttcagacaaaaattcaaagtctaactatgaaaaatacctaagcaaagttta

SEQ ID NO: 273785 - DNA, 460 bp, Glycine max
tctttgcatgaagcaccacctcattagagacacaagttaatagcaacaacaacaataatgcagaggaagattaaccttgaaatggaagaatgccccattttggttcctactaaatagagtgaacgtacaatgtcatgtttcatcattggggactttgaaaatgcgcatgattcggtttcttggggctttctaaattacatgttgatgaggatgggattttgtgaaagatggaggaaatggataaatgtttgtatgtctactgcaactatatccattttaattaatggaagtcccactagggagggtgatcccctaagagaggcttaaggcagggtgattccctaccacctttgcttttcaatatagtagtggaaggccttacaggtctgatgaacacagccatatctaagatccttttcagcagcttccaagtgggaagtcacatgaggaagttacatac

SEQ ID NO: 273786 - DNA, 297 bp, Glycine max
  unsure (1)..(297): unsure at all n locations
gctttcaatgaaggtaaatctccttattcggattgtgttgcctttctctcagtatcattcagatcctaatcacctcatctctttcattccctcaatccctagtgtccttaacctatttcttctntttcccgctctataaattattatgctagccctacttctgataagcccacagcttattcaaattcagccctagtccttctgtccatgctgagtctagtcctattgtggcatctgaggctactagtcctactatcgatgctagatccactattgagcaagacaattctccttagt

SEQ ID NO: 273787 - DNA, 466 bp, Glycine max
  unsure (1)..(466): unsure at all n locations
tctacaagacgctgatcatggggtgttgtcccttgaagcttgcttgtggtctcggatccgtggccaagcacaaagatctctttggagtagaatatcatcaaagctccacaagtaagagctattgtggaatgaagaacacacataagggtatatatagaagaaaccatttatccgaattcacttcaaaggcctttaattgctttcttacttttaactcgatggagcctctgccctctaaaccaacaatggtagttgaaattccaatcacttcgttctagtttctagtagtgtataagaaccaagaacgtaaaaaacaaacacccatgaccaattctaatgctagtttgatacacatggtaactcttctatcagttctaaactcaatctttgtagtttcaacaaattagaaactggcaattgcctttggcatatctatcaaacaaagctcanagcctcagactaaaac

SEQ ID NO: 273788 - DNA, 461 bp, Glycine max
  unsure (1)..(461): unsure at all n locations
tgagcacgttagcttaagcaagtctagagagttcanaattctcagatagacaactagcataagctagcccataaatagatagtgcatagttattaaacacttttaagttttacaaaactatttttatgttaccataacattggtgagaagtatctatcgactttgtcaatgactaatttccaccaaagaatctatttggtcaacttaaatagagtctttcttgtcaaccatattttttcacccacaagtcgaacttgaaaccttggttatgacattcgaattcaatatcactcaaaccaacaacttgatgtgaaaatgttgtgaatcatgcaaggtttgatgatgccaaaaagaatttacttgataatggttgttatcataaaaaagggagaatatgaatatatgaatacaagattntgatgatgccaaagtataatcaaacaagaatgtttcaacaaaca

SEQ ID NO: 273789 - DNA, 466 bp, Glycine max
tgagctcgcctctaatcacctccaaatgggacgagctactccagcgaatgaccaccctggaaaccactcaacaacaacagcaatcctcaccacactcttctccaccttcttcttcatctgtgaaccagtcccattcctcatcacatcttctgcgagtgaagttggaagttccacgatttgatggaacgaacccctctggctagattttcaagattactcaattttttgagtaccatgccacaccagaccacgagcgtctcactattgcctccttctatatggaggaccctgccttggcgtggttccaattgatgacccggaatggccaaatctcttcatggccaggattcctttaggcccttgaggcttgttttgccccgtcccactatgatgatcccatcggaaccctcttcaagctttctcagcgcggaacagttagtgagtatctttctcagttcgagacact

SEQ ID NO: 273790 - DNA, 314 bp, Glycine max
  unsure (1)..(314): unsure at all n locations
acatccgagaganaatctatgactatttgaatttctcaagagcttccgctgctcaatttctagcttctcgatatgcgacccgcctgaatcggacatccgcgtgacaagtcataccacccgacattctcaagagcttcccgggttcagttttcgacgcctcgatatgtgatctgtctgaatccgacatcccggtgaaaagatatgaccatttgcatctctcaagaccctccgctgttaactcccagccctccgcatattatgcgaccgaatcggacatccgcgtgaaaagttatggccatctgaatctcctcaga

SEQ ID NO: 273791 - DNA, 466 bp, Glycine max
  unsure (1)..(466): unsure at all n locations
cataatatatcgatatgctcgaaactaaacatcggaagctctcgagaaattcaaatggtcataacttttcacacggatgtccgattcgggtgcataatatgtcgagatgctcaaagttgaacaacggaagctctcgtgaaattcaaatggtcataacttttcacactgaggtttgattcaggcttataatataacgatacgctcgtaagtaaacatcggaaactcttgagaaattcaaatggtcataacttttcacacggatgtccgattcgggcgcataatatgtcgagaggctcgaaattgaacaacagaagctcttgagaaattcaaatggtcataactnttcacacggatgtccgattcaggcgcataatatgtcgagacgctcgaaattgaacaacggaagctctcgagaaattcaaatggtcataacttttcacacggatgtccgattaggcgcatcaca

SEQ ID NO: 273792 - DNA, 452 bp, Glycine max
  unsure (1)..(452): unsure at all n locations
cgtaagcttgcctgtatgcatgggtcattacattgcctattaaaagtatatatgagaccctatattatgtcatttttcttatagtatcttccttaaagaaagggtaattttttctttcttaaatatacttccatattaatatcacacatgtatttataattacttatccaattatcctcttatgacacaaatccaatgtttaatgtaaaatactaaagaacacaaagggaaggcgatgagttgaggctgaggtcccctctcacttgtcgatcaccagtcctaattcttttgaatatttggaaaaatggtagggtcatgggattattattattattattattattattattattattattattattattattattattattattattattattattattattattattattattattattaataataatnaatatgacgcgttgctcttctat

SEQ ID NO: 273793 - DNA, 423 bp, Glycine max
tccatcaagtggtatcagagcacaagagcttcaagtaggtgctccttaaacctccattaattttttttgctttaccttctcttccattgttgtttctttatttttctctatgtatctcctcacatgtcttgtgctaaattttgttaacatgattctttatagtttccaccgattaaacttgttatagaagctagatttgattttttatggttcaaatttcttgttcttgttcttgaaccatgaattatgttgagtttaggttcctttgagttttgtcttgttattttttgtggctgaaacctaaaccataaaattcttacaaaaatattaaagtagaagaaaacctcacaaatctagagtgacttgttcacctatttgtagtttgtcatagaagtcatgtctagtcatgaaactcgtcacata

SEQ ID NO: 273794 - DNA, 381 bp, Glycine max
  unsure (1)..(381): unsure at all n locations
agctngagatgaggaagtgttgaagggtggaactttctgcttttattgttgaccacatagtggtacctggagatatgtcgcggnggtcaggagaccttggggatatcaggtggggtgctattgcccaaaaccaagcttgaccaatcccgacccaacccgggcatagtcggtcagtgagaacctgtgatgtacctaaacaggcgagctcctagcaatcaacagataaaaggaacaaagaccacacagcaaggagggttgtggtggctggccagctgtgaattttgtgtgatatatgggttgtggccaatagtaatcgattaccaagggtgggtaatcgcatacaaggcttaaaaatgaagacaggaggctaagatggtctct

SEQ ID NO: 273795 - DNA, 365 bp, Glycine max
  unsure (1)..(365): unsure at all n locations
tgaaggtgtgtagcccatcatcttttcatagtagaatactggtaatgtgtctactatcattggtatcattnttttcttcgtcattgaggtgccacttgagctgccaagtctctccacctttgggcgtattcttttgaaagattcatgccccctttttgcacatgttctgtagttgcatcctatccgaagacattatactgacactgcctaacaaaggaaaccactaggtccttccaagaatggactcgggaagggtccaagtttgtgtaccaagtaacagctaccccagtaagactttcttggaaggaatgtatcagcaattcctcatcttttgtgtatgcccccatcttcccgatatacatctt

SEQ ID NO: 273796 - DNA, 396 bp, Glycine max
agcttaagcataggttgagccatacttaagagattgttggactatgcttaagtgagatgacatgcaaagaaaaaatgagctagtgcatggatttcaagcttaagcgtgaagtgagccaagcttgagcatgaccacacttaagtgtaggtcgaggcaagtttaagcgtgaccaagcttaagggtaggttgagccaggctagcttaagtgtgaatccttgcaaaatatgtatgaatgacttctaaatggatttctattggaactttcttaggttataagaattatgaaatgcataaataggtttttaaggttatgttaagagaatatacttttactaagtatctatgagttgagagttgaatggatttaagtatgaattccttgcactttaattaata

SEQ ID NO: 273797 - DNA, 444 bp, Glycine max
  unsure (1)..(444): unsure at all n locations
tcttgcggatcaagttgatccgtaagtaacttgcggatcaacttgatccacgattggcttacggatcaacttcatccgtaaccaacttgtggatcatctatgtcaactacggatcaaatatagcttctacggatcaataaaaacctatgtggatcacgtcatagcatactcggatcaagctgaataagctgggtgcacctaacaacaaccatttaataattattggattgaagacttagtaatctataatctataatactaacatttgataactcacaaattgtattttatggcananaanaatacacatgtccatacctggtgcatcagactaaaaattgcttttcaaaaaattggctatttgaggaaaaataaaaatgctatatacgaaccacccatatcanttcaagtcttttggttgcgtaatacatggacaacaatggc

SEQ ID NO: 273798 - DNA, 415 bp, Glycine max
  unsure (1)..(415): unsure at all n locations
agcttgaaccanaactggtgagagtgtgaacttattctgtgagtgaacgactagctgtgagtaataatctttgcatcaatctttgaattttagaatgaaatgtataaatgaggacatgatgaaggccatgattatgcatacacaagccttttgaccaaaaagcttaccttgaatgataactgtaccctttgcaccctttttgagctgaatgattttgtcaataattgaaccctgatcctgaatgattatctccagataccttgtttagattctaggagagcaaatggttcaaggaaaatttaccccaaatttgggggagtggaactgattgcgatgcaaagaanaagataaagcatcagcacacacaaaaaataagttgagtgttaaaaaaaaaaagcaatcaaagaatatgtgt

SEQ ID NO: 273799 - DNA, 189 bp, Glycine max
  unsure (1)..(189): unsure at all n locations
cccgggcgtccatgacattgaaggctctgaagtgtagggtgcgaggcctaattgatgttggctgaaatttgaggagacttgtgtgtaaatcctgacattgacaaggagatgccacacatggggcaatnttgaaagctgttgttagatgtctctaatgactcaccaaggattttcaactttcaccggaat

SEQ ID NO: 273800 - DNA, 418 bp, Glycine max
  unsure (1)..(418): unsure at all n locations
agctntgcttatatacatatgaatattntctacatttcttttccattgggatttcttgatcttattaagatgctcttaaattacgcattcttgacaaaggtcagttctggtcttcaggaattgcatctctgattcctcaataaagtattttcaaacttattatcctgtgaaaaagagtatgtgaagctgctctatgaaacacattactttatatcaattagttccaagatcatataatcaatttctttccttttaaaggtctcttgactctttcaagttatatacctctgtgtagatggaacttggaaatcctatggtttttccccccacttctaaattaaactctgggagaagatcagaaaaccaagaagcaatatagtgtctttctgagtcacttcagactgtgttaactggaaca

SEQ ID NO: 273801 - DNA, 425 bp, Glycine max
  unsure (1)..(425): unsure at all n locations
ngcatacattacaataatataataaaccaagttgaaggtggtcgcacatgcacgtgtggagaatcacacagtctaatctaagacagctaatgagtgatgggggcaaagactgagggaaaagcctgttcattaccattctaagaaaacacaaaggtataatcataatcatcattactgggaaagtcaggtttgaccgtggaccacatcaagcaaacaataaaatgctcttgtttcaataattttttaatcaaaaatgttaaataaattaagttttttttttagtttcaaattagtcatattatacaaactctttcatttaacgtttataaaaactaatatacataatttacgagagaaacttatttttttcttaaaaatacttcttttaaaacatattatctcaaaaattatgaaaaaatattaat

SEQ ID NO: 273802 - DNA, 230 bp, Glycine max
ccaaactgaattaatcaaataacgcacatgttgaattctgtactagaaaatctatttgaacctaaacaaaatatctaaagttgtaaaaagtgaaaactatcaagttaaaagcattggggaagagtctattgaatctatcttgatgtacgaaaggtatttttctctatataacgttatcctagtgttcttatgctgagaaactactcagaccatgattcctcacatgaatg

SEQ ID NO: 273803 - DNA, 419 bp, Glycine max
  unsure (1)..(419): unsure at all n locations
taacaaaccggatctgtgctngaataccaacaacaatttgaatccctctccaaccgagtcaccggtctctcacccacctcccttctcaactgttttctttcgggccttcgaaaggatatccaccatgaactcagcatactcaaaccatcctccctgacccaagcaatcgatttagctaaactgattgaaaccaaaaacctagccacaaaatacccagcctcacggtcaaccaaaccaccattccctccaaacaacccacaaccctctctgttaggaccgcctccgaccgttccgattcgtcgcctcacgccggcggaacaaaacgagcgccgctctaaagggctctgtttcaactgtgatgagaagtttcatgttggacatcgctgtacaaagaaacaatttctgattatgctcatgga

SEQ ID NO: 273804 - DNA, 312 bp, Glycine max
agcttcaagaaaaatggcctcagcatactccttatttccagaaggaaattctatcgatagacctccaatctttaatggagagggttaccactactggaaaacccgaatgcaaatttttattgaggcaatagacttaagtatttgggaagccataaaaatagggccatatatacccaccacagtagaaagaattacaatagatggtagcacatcaagtgaaagcataacaatacaaaaacctaaagatagatggtctgaagaggatagaagacgagtacaatacaatctaaaaagccaaaacataataacatc

SEQ ID NO: 273805 - DNA, 409 bp, Glycine max
agcttacttctacagtaaaaaggaactagctaaatcttatcacgcataagtatgaactatttactatggtggaaggtgaggatatacaacgtatgtttggtcgcttaaatgatactaaacaaacttaggtctctaggtagaccttttggtaactatgaccatattaacaaaattttgagaagtttgtctagaaaatgaagaccacacgtaacaacattgagagttctgaagaatcttgacaccatattccttgaagagctcattgaaaatcttaaggtgcatgaacaaaaacttcaacaggataaaggactcaagaaggacaaatctcccgttcttaaggtcatcctcaaagtctgcatctagatgcttgtcttgagttgtaagcgtggaaaactcctttgatgatgaa

SEQ ID NO: 273806 - DNA, 379 bp, Glycine max
  unsure (1)..(379): unsure at all n locations
cgccaaagagcatgtntgcagccaagaaaagttgctgaagctctgaatctctgaggtagaagttacttggaatgctacctgtcagagcattatcagactattaagctcagaaggaatttctccatgtagtttgtttccaaccaaattcaggtatgtcaagttagaaagatgactcaaagctgttgggattgatccagataaactgttattggccaaattcagaattttcaaagatttaagagatcacttagaggaaggtaagtctttttcaagcatgttgtttgatgctgcaaagttttggagctcttcacaaccttcaatctcttcaggtatgtggccattaatgctattcatttgtacatcaagagatattagatgc

SEQ ID NO: 273807 - DNA, 384 bp, Glycine max
  unsure (1)..(384): unsure at all n locations
taagctcgttagtgtgtctctaaatgtctaaaataaatgatnaattatgtaataacgcttatttgaagaattttttatcagtgaaaataaaatattttgaatatgaattttgtagtatttttttaattacattacgttggtgttaatgatttattagtgtgttaataattgatgaacgtttcaactttcatttaaaaaaaaattagatcatatttatttgaagaaagtattttgagtacgaaatttattttaatatgaaggtgtagtattttttaattagattacgttcatttttttgtgtgttaaaaattgataagcgttcaagttgaaagtgttaattgatgatgcttttttgcttcttggatcatatctaatttaatatat

SEQ ID NO: 273808 - DNA, 403 bp, Glycine max
  unsure (1)..(403): unsure at all n locations
tggtgtttggcattggttgtgcgacatgcangctttgtggttgatttaaggatggcctttgtggatgattgggtggtggataatgaaaacggtttttttttgctgagtaatgacattgatgggctggtgggaaagcaggatgatcaaacttgcctattttttgacccacttcaatcctttcgcaagtgaaaactaaatcagcaaaaacttgaaggtgtgtagcccaccatcttttcatagtagaacactggtaatgtgtctactatcattgttatcatcttcctttccatcattgggggtgccacttgggcaggcagatcactccatctntgggcatatttnttgaggattcatgcccctttttacccatgttctgtagctggatcctatttggagccatatc

SEQ ID NO: 273809 - DNA, 401 bp, Glycine max
  unsure (1)..(401): unsure at all n locations
tttagcctagctctggggacatttgactgcttcatctgacttacaagatctgcttctttattttagagggggatgccttaacagcacttgcaatgattttttcatgcctctttaagtgccagatgtccaacatcttttgatgccatattctgacttcatcttctttggaggatagacatgtggaggagtagctggtttcttgaggtgtccataggtaacagctgtcctttgatctgctgcccttcattagaacttcactcttctcatttgtcaccaagcattctgactttgtgaagtttacattgaatccttcatcacacagctgactgatgctgatcaagtttgcagtcagtcccttcaccagtagtactttggtcagacntatgaagtcatcatgagct

SEQ ID NO: 273810 - DNA, 303 bp, Glycine max
ggtattttcgcccgtcagcgtgacttattagtcagtatgacagatcttgtgagcgcggaagatgacgtacatctccgcatgtcaaccggcttgtctgacgcgattgacgaacggcgcagaagacgatgttagtctctgagtgctatcaggctttttatcttacagacagcataaagtttatacggataaccactcgggtatttccgcccgtcagcgtgactcaaaagtcagcatgacagatcttgtgagcgcggaagatgacgtagatctccgcgtgtcaacgggcttgtctgccgcgattga

SEQ ID NO: 273811 - DNA, 418 bp, Glycine max
tttgcttattatgtattcacaaaagctaataatcagtttgcatgatagaaaatttaacccacaaaccattttttggtaataacttatcaaaacgccaaaatcaaagatgtgctaaggctgtatttcaccttgtggctatgaagcttatttcccaaccaactcagcattcttgttttcataactgcaatggtctcacttacgctttgttaggagattggtttattttttaacatttgcagcgatcttattttatttctactgatgatattttcccccattgccattagcctggccataacccagaacatcagagacaaatgatggttccagaacttcagatgcaggtcacccaagggaacagtcaaggtattcctgctcttgtggggccgagttctgcctttagcaatcagacaacacc

SEQ ID NO: 273812 - DNA, 352 bp, Glycine max
tgaagcctatttgcgcgggtctgggagacaaacgtcaagtggtctctatatgcgaagatgatgttccgagtacattggatttggtactactatgctctcctgattaccagctgggaagttggctagtggacgaactgcccgacatttacgcaacgagcataatgcaaacctttacggtttataaaagctctatatgtgggcctaagctatagagttaatccttttgaaaggctttgagtctcttgttttggcatatataatacaatgatctatcttcatctgttcctacatctctacccattctcattcatttgcatgtttacttctgtttatgaaacggcagatccgatga

SEQ ID NO: 273813 - DNA, 418 bp, Glycine max
  unsure (1)..(418): unsure at all n locations
ttcgccggcgaaatgatttatatgggcctaaaaagaggcaaatctgatcattttgctgtgataaatgcaaaaaaaactggcgcaaatgaagagggtgaggatgaacgagaaggctgtgctgcgactgccattcctatacaaccatgttctccaccaacccagcaatgtcattactcagtcaataacaaaccttctccttacccaccgtccagctatccacacaggccattcctaaaatcaaccacaaagcctacctaccgtacttccaatgacaaacaccacttttagcataaaccacaacaccaaccaagaaataaattttgcagcgagaaagcctatagaattcaccccaattctagtgcnctatgtcgacttgctcccatatctacttgataattcaatggtagccataacccta

SEQ ID NO: 273814 - DNA, 447 bp, Glycine max
cgtctgtccgatgcagccgtaatgatggcccgagttatgttggggaacggttacgaacccggaatgggtttatgcaaagacagcggcggcataactagcctgataaatgccaaaggaaatcgtgggaagtatgggttaggctataagcccactcaggcagatataaagagaagcatcgcgggaaggaagaacggtagtcaaagctcgcagttgagacaagaaggtgaaggaagcccgccctgccacataagtagaagctttataagcacgggtctgggggacgaaggtcaagtggtcgcgatatacgaagatgatgttccaagtacattggatttggtacgaccatgccctcctgatttccagctgggaaattggcgagtggaggaacgccccgacatttacgcaacgagcataatgtaaacctttacggttttaaaagctctatag

SEQ ID NO: 273815 - DNA, 399 bp, Glycine max
  unsure (1)..(399): unsure at all n locations
ttctttactctaaccatgattatgaatgatgtaatacaaatatcatatgtattagtagacacaacacaagataacaaccagtacaaatttcacttaagggagttaggcatgtaaaagtctaaaaatcttcaaaacttctttaacatttgccttgagaggttgttcaccatattgctgatctcatgttactccccctatctctaacaatctccctttttttggctttgatgatgccaaacttaaatatgacattgagtgcatttggagggtttgggtcttgagattggagctttgatccttagacttatcctgaaaaattcttaacacttaagaagagattaattcatcatcatctcatatatattaattcatcatcatatatcatagntntatatatta

SEQ ID NO: 273816 - DNA, 345 bp, Glycine max
agaagcatcaatataaatgcacccgtgcttattaatatcaaaaaatcgatgtttattgtgttctgcgagcttctctgcgaaaccaaaagcatgcaagaaaactttaagcataaaaaactacaacagatcggaatggaaaataatgcccccgtactcatcaaaatcgtagctgtagtgtgttcgtccaccttgtgtgccaaacaaagaacacacgaagcgaaatggaaaaaaacggaaagaaaaaacgcataagacgggtgggcaaatgaagaaatgtggtgttaaaaatcgcatctttagatgtaacaaaaacgcacaagacggcgaaggaaatgagaacttatg

SEQ ID NO: 273817 - DNA, 415 bp, Glycine max
  unsure (1)..(415): unsure at all n locations
tctgtcttttattcaaggcactctcttggtggngatatcttttcttgcatggcttattccctagaggatggcgtctcttctcacctcttctcttttatctttcgctgcaactccatggtagaaaatcaccattgaaggaccttattgaagctcaaagattcagcctccatagaagcttctcaagcaagcttccatcagtatggaagatcaaagaatatcaaccacttcttccatatgcaagttttacttgtcaacttcttttaagtctttccaaatatggtattgatgtcctcaacaaactcaaaaacatgctgaccagctaagggtatcgacataatttcatgccctaacttccattaaaaacttttttcaatcaccggtaggggtgataacggttgagaaaatgttgatgcct

SEQ ID NO: 273818 - DNA, 330 bp, Glycine max
  unsure (1)..(330): unsure at all n locations
ctntggagtataaacatgggaccaactcattntatttcatttaggaagtcgtatctagtcaaggtctgagagaccatacaagtttcctaacgatttctaattatgtgggccattaagtctatcatatgctgacaatagccgagaagcccatgaatctcttccggggcggagtangtgtctgccatcgccttggccttggctaacaatcggagaagttcttgactcccgttcaaggtaagagcaaaccgatccatccacatggttgcctcttggtgtaaagagtcgatcacccttcctctagcctctttttccgcgtatacttgggcatat

SEQ ID NO: 273819 - DNA, 419 bp, Glycine max
  unsure (1)..(419): unsure at all n locations
tctgctntgtcctatcgagttctaagaattagaccagtttccactgttgaatgatcctaacaacacatacatctacttgatcaaggcaaaagcatggtagaatgaagttttgatagcacagcgaacacacaaaacatcattaaatagataaaaggatatttacatcaagtacctacaaggaagatccaacagaggatttanctttccataactgggaagcttcctttataacgaagagaagagagagatgaaagattgcagaaatacaagtagtggggatgtctcctccaactctaggacctcgcaatcactcacaaactcatctcaagctctcaggatggcttcctcttcaagctccggtctctgtagatcttcacacaacaaaatctctcaaactctttgtgaagtggacctttctc

SEQ ID NO: 273820 - DNA, 443 bp, Glycine max
tagtaaagctaagcactaacaatctccccctgtggcaaattttgtctaaaacatacttaaacacttcctgagcatgtacgagcagttatgcaagtgggatcagcaacttccattatcagagtaatcaagcacagcggaaattctgtaagttgcaagtcgtttccaggatgtcaagacatctcacatgacatcagctttctgcttctgcatcccctgtctccatgcttactgcaacatcttttaacagctactagtcttctccaggatgtcaagacatctactgtgacatcagctatctgctccccctgtctccatgctcttactgcagcatcttctagtagctttcatcagtcatcatcagcagcagcagtctccccctcaaaatcgtatacatacaactccccctcaaaatcatgaatcatgcatacatcgtattctactac

SEQ ID NO: 273821 - DNA, 401 bp, Glycine max
tctccattctcaactctttttcggagccccgtgaatagcgctatagttcatgaggcccccaccgttgagtctggagccatgcgtactgattgcttatcgcaattctccattctgaaacttttccgagcccgatgaattgcgcatttcgtcatgtgtactacaccttcgagtttggagccatgcgtagtgatcgcttagtgcaattcttcattatcaatcttcccagagccacatgaattgccttttcgtccatgtgccctccacacttcaggttgcagccatgcgtatggatcgcttacagcaaaactccattctcaatccttttttggacgcccgagaatcgcgttttccatcatgtgacctccacctcttgagtctggacccatgcgttgcgaatgccg

SEQ ID NO: 273822 - DNA, 373 bp, Glycine max
  unsure (1)..(373): unsure at all n locations
atgatacatgtcacggcttggttttgttcaatgataaaaagggatgccccacattatttccatgacacaaaatgcaaaaaaatgatgatttggaaactttatgcaaaactggtcatgcatgcacctatgcggacactcaagtggtcaatttttatggtcatgtgatgcttaggctcacgattcatttcctctattttaatcaacccaatggtttcaaaatatgttcttttattaatttgtgcattcatccgagtccatttcgggcgtccggggaagattcacagcattcacccttcaggtgtagacacactttccaaaaattggttatgatcaatgaacttttttttggaaatcgtctcttttcanaagcatg

SEQ ID NO: 273823 - DNA, 515 bp, Glycine max
  unsure (1)..(515): unsure at all n locations
attgaccacctttgctannnancgnnacacgaganaanaaattgatcaccctcgtatattccgtgacactatagagaactcaagctgggttgttgtggaagtctccttcaactatagctcgggctcatcgccaccacttagagatcctaactcgccttatctaagccttatgtctaatctgtaactacggtttaggataaattacagtgtgaagaatcataaatggtatatcatggctaagtgaggagacctagtgataagtacgactaattgacggatgggaactcataagcgaggactgacgttactaagccttctaattgaccgtccattctgtgattaaccgcactgttcattataacgaatatggtgttatagtacaaaggatgtggatataccaagcacctcagatagcaattctgctactagtgggactcgtaaatacttcctgcacctctatcgaattggaccgcttacttcaaaacctccctttttggtattgcacccatcacttn

SEQ ID NO: 273824 - DNA, 231 bp, Glycine max
tctgctttcaaaccggctatcgcttagagctctggtgtgtgcagatcttcacacaacaaaatctgtcgaaactctctggaactaggacctttctctctctagaaaccctagacatacaaagctctgaatcccagacgatactctcttcgcataatctgatttcatgtttaaataggtggccttgatcatgctcgagtgcttagcgcacaataatgatttttggcttaacgc

SEQ ID NO: 273825 - DNA, 327 bp, Glycine max
tatgcaggatcaatacgaaatgtgtatgataggagagcttatgttcgtcttacgactgctgatcatgtcgacctacatcggaatctatctccatccaacctatgtctaggaacttatcgagatgttcaagtggtgagacgcggaagacatatagactcctatgcatgctacatcatgttttggattagacgatgaatccatcaaagcggacatctctctatatatagcaatgagtggatccttgcatatgtaactgcgtccaaacctgacatattgatcatcgttggactatgtgccagatcctacaggactcacggaaagtgcact

SEQ ID NO: 273826 - DNA, 155 bp, Glycine max
cctttgaacctatggttcccttttcttggtttgaagcccattaccagccctaagggaaaaaccatgaaatcaccttacccttaaaggaatttggagctttggaattgtttttggaataaagggggggggggggggatatttatctctcctacctg

SEQ ID NO: 273827 - DNA, 367 bp, Glycine max
  unsure (1)..(367): unsure at all n locations
ctaagcttntgaatcctagaaaaccatgatgtgttggcagcctaaccccattacaagcctagaaagtgcttcggattcattttgtgtgttcattggtgtatgatatgagatgaaatgcaaaggttgggacttgagttagttgtttatgatggaatgagcctaaacacttgagcttgagtgaaacaatgactgtgaggttttggttgatgatcctttcatgatttctaccattcttactagcttatttaagttgtgactctaatgcgtatgtcctatctttgaaaagctgcatgtgtgtgaaaatcaattgattgaagcattgcatgatattcagtttatatggttgaatatttctgtgaagaaaaca

SEQ ID NO: 273828 - DNA, 408 bp, Glycine max
  unsure (1)..(408): unsure at all n locations
agcttatagaaatatgaacattggtatgtctctattattaaaaacnatctatacggcaattggcttcaacaaaattttctacaatgttctaaaattgaaccttccggttatgttttagtttttcatgcaatcctttcttttatttacaatttttttttcaacttttgctatgatttggcaaaaatatgaatatttccttaaatttgtcaaaaattactgaaacttttaatattttttgcatactataaaataacttaatttgtcttgcaattcattcacaatattagttcttttttatttactacgtattgaggtcgttcaaagaactgaagagtattattaataaagtgaaaaaatatcttctaatataattaaatggttaaccatactcatacaatatgatgatat

SEQ ID NO: 273829 - DNA, 435 bp, Glycine max
  unsure (1)..(435): unsure at all n locations
nttcaattcattctatgaacccgaggagtgtcacattntgtttcatggatncanaattctcgtgttcattgacttntgatacccacttttgacgtgcttaagccatatatttaagtcattgctcgcttaatctagaaataagagaaattgccaccgatcgtatgaattgtatcatccgttaattgtggtgaaaacgaattccgaccgttcggtcgtgccgtaaccacgttggaaataaaaaaagagggtaacacataatctaatataataagaataccgtttagtaaaataaaagcgggagatcaatcagacggtttctctttgggatttctcattcttaatggaattgactaataactaaagtgaacttaggctaaaatcaactggcctagttaacctacgccacaaaaataggatttgggacgttatcattct

SEQ ID NO: 273830 - DNA, 443 bp, Glycine max
  unsure (1)..(443): unsure at all n locations
tagcttgctaacccatggaagctcctaatatctccttactntntggggtgggccattcttggatggcctttattttctcatggtccacttggaccccatttctaccaactacaaaacctaaaaaaactatattatctacacaaaaggtacacttctctatatttgcatagagggtgtttttcctaaggattgaaagaacttgcctgagatgtcctaagtgatcatctaagctcctactgtacactaaaatatcatcaaaataaacaactacaaatctacctatgaaatcccttaagacatgatgcataagcctcataaaggtgcttggtgcattagtgagcccaaaaggcatcactgaccattcatacaaaccaaacttggtcttgaaagccgttttccactcatcaccctttntcatcctgaattggtgataaccactttta

SEQ ID NO: 273831 - DNA, 487 bp, Glycine max
  unsure (1)..(487): unsure at all n locations
ttacggacacttaaaactaagctaacaagcttntttatagtttgagccttgaccttttatctaaagagactntaaaaagcttgagcttggcctttatgataaacaagtcaagccgagctgagccttacataggccgagccaaaggctctcgacaagctgctcggctcatttccacccctaaccctatagcaaaagttggcatcttcagtgatgaatgtcgttttctcctcgtttggagcatgcatcctgatttggttgtatttggagtaagagtccaagaagtttagcacctggaatccagacaatccatcgactagcttgtcaatgcttgatagagggtatgcatatttagggcacgccttgttcagatcagtatagtcagtgcacatttgtcatttgtcgttggcctttttgaccatgacaatgttggcgagccangtggagtatctaacttctcttatgaagttggcattgagcagttatctac

SEQ ID NO: 273832 - DNA, 456 bp, Glycine max
  unsure (1)..(456): unsure at all n locations
ttaagcctgtaagcttaatctagttntaaaggattattaatgatatttgttgcanagcatccaacacctttttgaaacctttaaacaagttttgatgtgaaccaagatatctctcaaccgaaagctaatccctcaaggtactgagatcgatttaaaggattgatctgtcccaataaatatttttccatatgcaagagtcaaggatcgaactgataaccacatgcttaaataacaagattatctatcaattatgacacactatgttggtaaagccatcaagcaagttaaccccgagaaaaattatctctgaatcagaaatagaattgcctggcatggaaggtagataccataagactaacatgaatcaacaacattgtccagaaaatcctctgatatggcttagtttggtggaataatgatgaagcactaccgttgtagacttcagtgtgaaacacg

SEQ ID NO: 273833 - DNA, 470 bp, Glycine max
  unsure (1)..(470): unsure at all n locations
cgatgcacaatttcattgaagagacaaatattacaatatgtatttaacatgtatataaaatgttgagataaattataaagactaagagaagaattatgacaaaaaaaatgagatgaaaagtattggagttatgattatgatcatgtcgagctttgcacaagttaacaatgtacctattaaatttggttgtgattccaaatgttgagaaaaatgtctagattcaatttccatttttccatatcaagtgtgtttttgcatgtgtatgaaaaaatgtcataaaaagtcgaataagaatggtattcattctcttaccactttntaaggttttgtaattattattttataattgaattaattattattttacatgttgtttatcattgactntatttccttagatgctgatcattacattagattcttgcttgcaagagtactaaaacaagtaaaaatatgttacaagaatattg

SEQ ID NO: 273834 - DNA, 435 bp, Glycine max
  unsure (1)..(435): unsure at all n locations
tctgcttccttcaatnggacaacagtggtgtgcctcttaatatcaccacctaagtagtgtttggttctactgccacgctgtccatgtccttttggnggttgggtcctccaatatcaccactccaagtggcataacttcattgatgaagaatggtctagaccacttggatttcagcttacctagaaacaatctcaatctagaattaaataacaaaacctgttgaccaggctgaaaattcctttctgaaagctttttatcatggtaaattttaactctttgcttataaatcttggaattctcataagcttgaaacctcagttcctcccattcatgaagttggagcttcttattttcactagttgcatttgagtcaaaattcagaaacttcaatgcccaataagctttgtgctccaactcaacaagtacgtgacaaga

SEQ ID NO: 273835 - DNA, 403 bp, Glycine max
  unsure (1)..(403): unsure at all n locations
cgactatggatcttaaattntaattgcgattgcagtcattgttgcattgtggttgttgaaggccaactatgatcaattcaattttgcaatcacagcctaatgcagttagcaatggccgccagcatcatgtgatgccttccacagctttaaaccttgagctcaactataacaaattgttatcatgttaagtgagtgagttttgaaaagtgtggaaaaagtcgcctgtcttgtatatatatttactttgtaattcttgtactacacagtactatatagtatcttcaccaatataactaagcatctatacttctttttttttaccttcaaaagtcacataaactacattaaatccccccccctcacccccctcccaagaaatgaaaataaagaaaacctaccacct

SEQ ID NO: 273836 - DNA, 460 bp, Glycine max
  unsure (1)..(460): unsure at all n locations
ngagtgaaacaatgactctgaggttntggttgatgatccttccttgaattctgccatcctaactagcttattttagttgtgactctaatacgtgtgttcctatctttgaaaagctgcatgtttgtgaaaagcaatttattgaagctttccatgatattcagttcatatggttgaatttctctatgaagcaaacaccatttttgggtgaccactgtaggttgccacttgaggacaactgaactgttctttctttacttgaggacaagcaaaactgtaaatttgggggagtttgttagtcgtcttatacgactaaattntgtattgaaaacattttccaaaacttgtataattccccaattgatggttatttttgtaagtaatttgtaaataaatctgtgcaatttcaggttaaaaagaggctaagtcatgaagtgctaaaagtgacagttgagctcagctc

SEQ ID NO: 273837 - DNA, 382 bp, Glycine max
cattggagagctgtaatggctagagttgcttgtatcgaaaaaagcgaaaatagcgaagcaactgtgaagaagtgctccattgtagatgttcctagaacatcttcaatagaatttctcaaaggatttcctacgtgaataatcttttttttttttctacaatttgtattctattggaaccaatctatgtggtaggaagaatttcttaaaaataagatttatatattcgcgaagaaattattttgtagtaataatttttttttatctaatacacaacactatcataattaagtcaaaattaaaaaatatatataaaaatatgagctttttcacattactagaatctcttattattaaacaaaaattatatataaaatgtcttata

SEQ ID NO: 273838 - DNA, 333 bp, Glycine max
acccgcattcctctgatacccagatttctaaatcagctcagaacccacaaaggttgaagctggcggtgggtgctgctgacacaacaggatcaagtggctgacccttatgtgcaaaagctaagattcgagcgtaattgcacctgctgagtggcgggtttggaaatgaggttgaaagagtctcccaacgttgagattgcattctgcattgtggcgaaggaggtagctcttgtcactgtaacctcgcttacacgcatcttatagatgaattcatgcttcgtttattttgttccctttttctttttgtttcccagaaaaatagcagaaaaagaaatt

SEQ ID NO: 273839 - DNA, 420 bp, Glycine max
  unsure (1)..(420): unsure at all n locations
cagaatttgtagaggctcttaatgactctaatggaaacactctgcgtgcgctgatcactaccaacctaacgaacacctaggacaatctctcttggacaagaagcttactgctacaatgaagatgacatatgaaccctctatgtggcttagcccatagcatggaaagaatcttggtcgaagcaagtacgaagaacaacacctatgatcacactgcacactcatttgcaactcattacagaacctacatacttgcctatgatgttaatccagaagaatgcacaagccaccatagccagcgagcgacattacagatctgcaatgcactgatcgacaaccatacgcttcttgctttgtcaagagagaagatntcctctcatgaagacacatcaactggatggangactcctatcatgagacaan

SEQ ID NO: 273840 - DNA, 301 bp, Glycine max
  unsure (1)..(301): unsure at all n locations
tgtaagctgttctgngcatgcaatcacaccggaatgggttgactgctaccccaccgctaccacagcgaacagaagaatgtcgattttacccagcggtgcatcacccaaccccgccacgaccacccctgaccatccagtggacaataaccactgtgcgaagacccatgacatagagaatccgacgagggtgccaaatatggaagcttctgatggaactgcagcagtatcgcatcctcgaaagaagacaggggcaatttgcatgaatgaggaaaatcttggagcagagcctatatgcagtatc

SEQ ID NO: 273841 - DNA, 500 bp, Glycine max
  unsure (1)..(500): unsure at all n locations
cggcccgctgacncctcaaagncccnccccggggcggccattggcctttctagacccgagacctctaagtcgactgcagcatttttcttnacggagtaccctcggagttaagcgcctgattcgtaaccgttattcggcacgcccattgtggagcgcgaactcttcgaaattaagtggcacctcaccttcgtatgaagctctgcctatccacccgcagagcgatggccaaaccgaggtccttaatcgtgttattgagcagtacctccgcgtgttcgtcaatatcggcccaatcatggggaagctgcttccggggcagagtggtccaccatacttcgtggttgcagccactggcccacttcttatgagctgacctttggaagaagaccttccaatttactaattacctggcgggttcatcttccattgctgccgtagatggagtgcttactgaccgggacgaaactttcttgctattcgaagaaaatactaaaggcaccgcc

SEQ ID NO: 273842 - DNA, 350 bp, Glycine max
  unsure (1)..(350): unsure at all n locations
tgcttgtctatacttaccctctctctatatatgagacattctaaagtctatagaattagtaaactttatacaatttaccaatagttatatattgaccaaggggcttataagcatggaccaatagcttggaatctgtttccagccaaatccataaccagtttacagagatggtcttttccacagcaataatggctgccataatcttaaccatgaaagcacaattaatgccaatatttgcacaaaagctcccaagaattgcatattgagctcataaataaaccgtcacaacatgctctcccaggattccncttggctgactcatatgtattgattttatccaaggagatggt

SEQ ID NO: 273843 - DNA, 144 bp, Glycine max
cttagaagaatcgttaagaagctagagcttaactacactacctctctaatagcttagctcaccttcttgagataagaagctagagcttagcttcacaccccctataataggtaagctcacccccatgacacaaaacatgaaaat

SEQ ID NO: 273844 - DNA, 440 bp, Glycine max
  unsure (1)..(440): unsure at all n locations
gagagctcttgntcatccctataatccaacgaatggcacttctgatcgccagtgcattaacaacatctcgtacggatgaatgactaaggcacaccttaagcatatgcacggaaaatgcaactatgaaatcgagacgccccaagaaacaccaatttctagttgaccatgccttaggtaccatgttgaatcatgtaggttgccagtgaagcaggactatgatcctaacatggttgactcggggagcctaacatatgaaactaagagagtagggtgaacgttcacactccccccttctttcgtttaagacttgtataagaaaacgcaaagatgaccaaacatgaaaacaaatggtatgcaattttgcagatcacagagcctgttgaacgcatatgcatgatgatgccatgactcatgcagaatgtgaggcccaaatattgata

SEQ ID NO: 273845 - DNA, 460 bp, Glycine max
  unsure (1)..(460): unsure at all n locations
cgcacccaatgaccccttattcccggatcttaagacacgcggctgcatcttgtgcaccatccacacaangtcaattttttcataacancaanngagccatgagctggcatttagctctcacactcttcaaacgacagttccctcaaaattgggagatcaaatacatcacgtatctgggctaaaaaattcgagttgttcaacttcacaactgttagatgcccgcacttctgcaaaggattaaaaaaaataaactcataacaaccccctgaatcaacttaaagtgactttcttaattcacgggattcacgaaacagtctctttgcctatgcaagggcaaaggctgcgtacaacatctctcccccatacctctccatagcgaagagcctgtggcctagaagtttatactttcacggatgaggaaaatatactctctaaacttgccttccatgggccatggacn

SEQ ID NO: 273846 - DNA, 422 bp, Glycine max
acaaacatattttgtgtttgacataaataagcaatgataattgaattgttttatagatggaatctattagcttgcgaatttacacaataagagttcaacttatttttttagtcggataaatcacgaatttactcaacaatgagtgaatttgagctatgagacttggctttggttgtcataaggcatatttaattgacaatttcatccttcagggcagtacactctaattgctaaagtgatgaacttatttaatctataaatatgacgaaaatattaaatatgaaatgaaatcgatgtgataattgagttcatgcatacaaattgatggttaatgaaaagctaatccatatttaataactctcaacatacaatggatcaacatgtatatgaactatcaactgaatcacgttatcacttctgag

SEQ ID NO: 273847 - DNA, 375 bp, Glycine max
agcttgtaaaaataccatgggatcttatcgaagagtctaaaatcctaattacgatgattacaattgtgtttattaagatttgactaatacaatcttaccgcgatttccaatatatttctaatataagttccattgagacctttatattatgaattcttttactattggcctaagagcaattagattgaatcttaccatatgaatagaatttggactcgacatataaagactaacggatcagaccttaatttaacagttttgtgaggaatacgggaataaggatggtagtttgatcctaatctaatggatacctacaaatttttcataatgtataagctgtttttttatctattaatacctttgcctactaaaata

SEQ ID NO: 273848 - DNA, 407 bp, Glycine max
  unsure (1)..(407): unsure at all n locations
tcatgatgatgaatcaagttgattcaagtagttntgattatatcaaagatgatgacaaaaagcccaagaaaatgatttcaagattgagtcaacaagttcaagatcaagtttaatttcaagtttaatgagcagaaatcaagaagattcaagaattaagagaagtttgatttcgagattcaagagaagaaatcgagaagacttcacaagggaagtattgagaagatttttcaaaaaacaaacatagcacaatgttttttttcaaaagagtctttctcaaaattttctaagttactagagttcttactctctggtgatcgattaccacgtttctgtgatcgattaccagtagcacagtttgatctcaaaagcttttaactaaatttgaacgttccaattgatttcaaaat

SEQ ID NO: 273849 - DNA, 180 bp, Glycine max
atgagttgttgacatttatctatctatctggtgattcacacatgtgcctaaacaaaatatttatctatcaccatcggtgtaatgtacttgtctaacaacttcacagcaaatggctgagaatggctctggtggtgggggacaagaacaaagtgaccctacactctggctatctggcgtctg

SEQ ID NO: 273850 - DNA, 370 bp, Glycine max
tgagaacacaacgcgggtgtatatggagaaaatacttataaccgtctataatcgattaaattgtcaatataatcgattatcttgagagagtaatcgattagactctctttctaatcaattaacgtgttcttccccaaacatggaaaacattcacgaacaatgtaatcgattacaatcttgatttaatcgactaaagtgttcttgatcacttctaggaacactttcaaggatgatgtaattgattacaacatccttgtaattgattaaactaaagtcccaggaaaacaaacatggtctgaaaaagaactgggcaatccattatggatatatggtaatccgataaactgtagaagcaagctttatgatgatg

SEQ ID NO: 273851 - DNA, 442 bp, Glycine max
  unsure (1)..(442): unsure at all n locations
tatcttctntnggaccttgaacaggcaactaactcctctatcattaccatgctatgtgctcgcgactggtccctttcttcctttcgcaacttgagttcactattgctaccccatagagctccgcgaaatttgttccggccatactcttccttgcgagccctcttggtctcttgttcaaaggctcttgcggtaattgcattctcttctcgtaacccggcacactccttccgaacgtgtgtagcggccaacttgaacttctccttggcaagttttgcctttcctaactcgcttttgagagcttggacttcttcgtcctcttacggtgcttcaaaactctctttgctgacgactcttaacttggcgagccaatctaaacctcgtatatgaactttcagccattcgtggtacccaccaatgatgccattacgaatgcctctaagct

SEQ ID NO: 273852 - DNA, 428 bp, Glycine max
  unsure (1)..(428): unsure at all n locations
tagctnggtttgtgagttgatattacccttagtttctctttggttattagtcaattcattcaacgaaacttttagagataaatgtgtgactgatttgtttgattatcttattattatttttttcaagatatcttgattattctattattattttgctttttgtcatttaaccgaggttacagcttgaacaatcggttagattcttctttaacagtgattaaacaagattacaacacacatgattggttggaattcattttatgatttattaggcgagataacggcttacacgattggttaaagctcgctaaaaatggaaaaaggcggtacgaatagtaagcgatatgaaaatgacagcatacaaaacaagaatggaccattgagggtgcataaaatgaattgaaagattcgatctccagaacttaccg

SEQ ID NO: 273853 - DNA, 447 bp, Glycine max
tgccatcccaactcgcccaggcgagcaaggttgcttcctccagaagcaacagccttctggaggaatcttctggagggcccaagtgggcctggttgctatttgcacccccatttttctaaatacaccccctgcctttttttggtgattcttttttcgtaaagttacggaaacttatgaatttcgtaacgatacttgttttcttcctgtaatgtcacggaaccttgcggattacataatcatcccttttttgacttacggaatgttacgaaacctcactaattgtgcaacgatgcttcctcttgatttccggtgtgtcacggaaccttacgaattgtgcatcaatattttcttttgatttccggcacgtcacgaaatttcacaaattgcctaatgatgggtgtcaagcacctcaaaatgacgaaacacaagttgcataccaccaagcac

SEQ ID NO: 273854 - DNA, 437 bp, Glycine max
aagactatacgaggtatattccttatgtatagcactatctctaagggctactgtgtctatctcttgcaaactaagaaactcgtcatcattctagatgttaaagttgatgagtacgcttcttggaattgggatgaagaaaaagtggagaagaacgttcttatacccgctcaactacctcaagaagaagctaaggaagaagacccaggtgaaccaccttcacctccaccacaacaacaagaccaagatttgaagaattacgagctatgctcggagtcacagaaatttgcatcaaggaggagtgttgaaattgctacaaatttctagaatattcttaaatataatatatatgaaaatagtagaatatcctataactatagtgtgtatgaatatggtagaacaatctagaactataagtgtatgtataagatagatgaatc

SEQ ID NO: 273855 - DNA, 465 bp, Glycine max
  unsure (1)..(465): unsure at all n locations
ttatagaacgtttgttcctaatttctctacaattgcatctcctctcaatgagctggtgaagaagaatgtggcatttacctgnggtgaaaaacaagagcaagcctttgctttgctcaaagaanagcttactaaggcacctgttctagctcttcctgacttttctaaaacttttgagctagaatgtgatgcctctggagtgggagttggaactgtattgttacaaggtgggcaccctattgcttattttagtgaaaaacttcatagtgtcaccctcaactaccccacctatgataaagagctttatgccttaataagagccctctaaacttgggaacattaccttgtttccaaggaatttgtcattcatagtgatcatcaatcacttaattacattagagggcaaaacaaattaaacaaaaagcatgcaaaatgggtagagtacctatagcaatttccatatgttat

SEQ ID NO: 273856 - DNA, 470 bp, Glycine max
tatggacttgggtgttgcccaatttcatcgtatcttttgtaatactcaccacctctattagatctaataattttcacttttttgtctaattgtctttctactttattcaagtaaatttctaaggcatccattgcccgagatttctcatgcagtaagtaaacataaccataacgtgaatagtcatcaataaaggtgataaagtatctttcctttccgaaagaactaacatcaaaaggtccacaaatatcagtatgcacaatttcaagaagctgagtgcttcttgtagctcctttctttgtatgttttgttgttttcccttgatacaatccacacaaatatttagatccgtaaaatctagatcatgaagaatttcattctttattaatcattccatcctttctctagaaatgtgacctaaacgtttatgccacaagaaagcagatcgttcattcactaaacctacgttagtg

SEQ ID NO: 273857 - DNA, 373 bp, Glycine max
acgtagataatgaccacactaggtgtgcatcatccttgaaccctaccacatcactaaccatagaatagaatattataataataatagtatcattaatcgataattttccaccatgcatcataacacacgaatgatcacaatcgattaaacccaccacactgggacgatgatgatgagaaatacgaaaccccatcagatgtagaagccgttccattcgaatcacacaaaatttgctgctgatgaacaaagccaccaccataccctgaagaataattcaccatcacctcatcatgatgatcatgtacactatgttgtggcttatttctgcgcttcttgttatcataaactatgcctgtcgccttggactgcgcgt

SEQ ID NO: 273858 - DNA, 383 bp, Glycine max
ttataaaccaaaatgcacttgagaataccacattgtatcattagaacttgaagaagcccacaccatattcacatcttgaagaatccaaactcccttttccactcctttactttactgacctataattctcatccgtaaaaccctacaccatatgatctacaattgaagaaaccaagtaagcattccaatattgatcaatttttaatgtctcacaaaactcctgaccttacagagaagaagaagagcgactacctatcattatccactccaatacaattgtttcagtacctaagacgcaaaacaaaaaagactctcagtaatctttacctcaccttcattcaatatatgttgcactcatttttttccattcgttcttgttcttt

SEQ ID NO: 273859 - DNA, 475 bp, Glycine max
  unsure (1)..(475): unsure at all n locations
gcactgcnatgnactgaatttgaacgttccgttganctttgaacctgctattacggacctatgaaactaagctgccacccactcgtcagcgacaacgtatctttctttaagagcaccacctattggtggaacttactggaatgcccatacaggccatggattctatttgcaccccctatttactaaatgcacccacattgccttgaaagctgatcctctttgcgtaccactacgtgaccttgcatattacgtgacgacattcgagttgtcttcgtgatgtaacgaaaccttatggaatacgttgtcatgcttctgcgtacaacgcacgtattgatcttacggaatgcgcgtaacactcctttggacttcggatgtactaactgtcggaagncaacatgcttttatgagtctgcatgtccggacttccatacgcgaagatggtgcaagtcctaagggtaaacaggttgctccacat

SEQ ID NO: 273860 - DNA, 392 bp, Glycine max
  unsure (1)..(392): unsure at all n locations
ncaagctttatagaaggttcgctcctaatttgtctattattgcatcacctctcaatgagctagtgaagaagaatgtggcatttacctggggtgaaaaacaagagcaagcctttgctttgctcaaagaaaagcttactaaggcacctgttctagctcttcctaacttttctaaaacttttgagctagaatatgatgcctctggaatgggagttgaagctgtattgctacaaggtgggcaccctattgcttattttagtcatagtgccaccctcaactaccccacctatgataaagagctttatgccttaataagagccctgcaaacttgggaacattaccttggttccaaggaatgttgcattcatagtgatcatcaatcacttaagtacatt

SEQ ID NO: 273861 - DNA, 341 bp, Glycine max
aatactctacaagtgcattatctatcaaagagctggtgaagaataagtgtcatacacctgaggtgagaaacacgagcaagcctccgctttgatcaataaaaagcttactaaagcaccggttctacctctaccagactgttataaaacattttacctggaatgtgaagactctggaacgggagatggaactgaattgtttcaacgtgggcaccctgatgatatattaagaaaaactttataattcatcttccctacccccctattataaagagcttatgcctttaaagatcccactaaacagtgaacattcctagtatcaagaattggacacatagtgaaat

SEQ ID NO: 273862 - DNA, 455 bp, Glycine max
  unsure (1)..(455): unsure at all n locations
tttgagctcttgtagtactcgcgatnctntagagtagagcccgangcatgcaagcttccgttgtcaatttcgagcgactcgatatattatattcgccaatcaggactctgcgtgaaaagtctgaaccattcgaatttccggaccggctccgttgtatcatttccgagcgcctagatgtattatgtccgccatatgcgccgttcgtgtgacaagttatgaccattcaaatttcttgccagcttgccttgcttaatctcagcgaatatatgagtcctgtacttgaataagacctacttatgctagttatgacacatcgtatcttttcggaagcctgtttgattacctcccaccgctaaatgatttatattcgccaattgggaatttgtgaaagctcttcctatgagttgttgaaaggtccgcactcaatactatagcgcttatccatagataactcg

SEQ ID NO: 273863 - DNA, 226 bp, Glycine max
tctggtgggacatcttgacttgctgtgcgatctgacatttatcacaaattctgcctgtttctattatcagattgggaatgcctttaacagcactttagtcaacgattgtcttcatgcctcttaagtgcagatgttcaaacctttgatgccatattctgactatatcttttttggaggatttacatgtggatgagtagctggtttcttggggtgtgcatatgtaaca

SEQ ID NO: 273864 - DNA, 444 bp, Glycine max
tcaccaactcatcttcaatgactccatatggccttgtgatgtgagcggtcagctaactggagggtcatgcgtgtggacattatttccagctctccaagttgccggcacatggagagaggcattaaattgatactggctcccaagtctatgagatctttgcctacaacaacctcgctgatagaacacggtatcgtgataactccaggatctttgtgcttgggtggaagaatgcgttgaataacaacactacaattaccttccacaacaattctgtcactatggatgtaccggttcttcttggttagcatatccttaaaaattttggcatagaggggcatttgatgaagtgcttctccaaaaggccaagtaatttccagtttcttgaagatatcaagaaatctggccaaatgttgctctctatctattcgggaggtaccaatggat

SEQ ID NO: 273865 - DNA, 397 bp, Glycine max
  unsure (1)..(397): unsure at all n locations
agctnngtcttaaattcagttaagagcaacgcacagcttacattatctgcttcaactcctaaacaatncaaaatttttggcttctggttttatgtcaatacatcaaaatcttatgttttacttgtgtcatcatgtaatgcttcctctactattgattccataaaacacaaaaaaaaacactaaaaaatgaaacctaatatcatcaacaacataaaccaaaatttttggctgctggttttgcgcccattccccacatttgatcttcgatgatccaatctacaaatctcccccccgcccccataaaaatgaataatagaaagaaaataaaagaaactttcgaaaccagttcagaaagaaaacagcgctaaatctaaaatccaattgacaaactaaatat

SEQ ID NO: 273866 - DNA, 443 bp, Glycine max
  unsure (1)..(443): unsure at all n locations
actaagctngnatgaggaagtgtggaaaggtgagacttcctacttttattcgttgaccacagagtgatacctggagatatgtcgcgggggtcaggagaccttggtgacgtcaggtggggtgctattgcccaaaaccaagcttgaccaatcccgacccaacccgggcatagtcagtcagtgagaacctgtgatgtacctaaacaggcgagctcttggcagtcaaccgataaaagaacaaagaccacaaagcaaggaggcttatgtggtggctggccagctgtgaatcttgagtgatatatgggatatggcctctggtaatcgattaccaagggtgggtaatcgattacaaggcttaanaacgagatcaggaagctaagagggcttatggtaatcgattacaaaggggcgtaatcgattaccangcttagaaatangactggaat

SEQ ID NO: 273867 - DNA, 334 bp, Glycine max
  unsure (1)..(334): unsure at all n locations
acttggtaacccagctggccttgaatcataaatctgtacctgtcggaaggctttgtggtttgtgctcctctgctgaccaccatacagacctttgtccttccatgcaacaacctggagcaattgagcagnctgaagcttatgctgcaaatatttacaatagacctcctcaacctcaacagcaaaatcaaccacagcagaacaattatgacctttccagcaatagatacaaccctggatggaggaatcaccctaacctcagatggtccagccctcagcaacaacagcagtctgctccttcctttccaaatgctggtggcccaagcagaccatacat

SEQ ID NO: 273868 - DNA, 435 bp, Glycine max
  unsure (1)..(435): unsure at all n locations
nttaaaaccgtaaaggtgtacattatgctcgttgcgtaattgccggggcgttcctccactcgccaatttctcagttgggaatcaggagggcatggtcgtaccaaatccaatgtactcggaacatcatcttcgcatattgcgacctcttgcctttgtctcccagacccgcgcttataaagcttctacttatgtggcagggcgggcttccttcactttcttgtctccaacgcgagctttgaccactgctcttccttcccgcgatgcttcttttcatgtccgcctgagtgggcttatagcctaaaccatacttcccacgatttccttgggtatttatcaggctagttatgccgccgttgtctntgcctaaacccatcccgggttcataaccgntccccaacataactcgggccatcattactgctgcatcggacagac

SEQ ID NO: 273869 - DNA, 406 bp, Glycine max
  unsure (1)..(406): unsure at all n locations
agctntagtgtgttcttcgagcttctctgtgaaaccaaaagcaaagcaacatcataaagctttgaaagagcatcaacataaacgcacccgtacttataaaaatcgaaaaatcgaagctttagtgtgttcttcgagcttctctgcgaaaccaaaagtatgtgatgcaatcctaccccgcaagggcattggatagaaaactccaagtagattgggccagagatgcaagagaaggccctagggttcttatgagccttagggtagatttcgggcccatgggctaagtacgagcccacttatctttgtaaatattagattaaggtttcattatttttgggccttgtatttagggctccataatgtaggtagggtaccctacaaatataagatttttcagcccttgtatttt

SEQ ID NO: 273870 - DNA, 224 bp, Glycine max
  unsure (1)..(224): unsure at all n locations
tctagagtaagtaggcgcgctctacacatgcccttaatgtccacaagccgtaccactctgggggaccttcnttatgagccattccgagaaccactcgaatattcattctcatgctaactgagaatgaatccatacataacgaattcttttgatgaaggtcaaattgatatctcatactggtgtagttagctttgtcactcttaacacttattcatcacttcaaa

SEQ ID NO: 273871 - DNA, 156 bp, Glycine max
cctcgggttcccttgctggcctacttcctctctgatcgacagccctccgcgactcattccctttctcgtttccctccagatgaagcctcctaccaccttctacggccccttcttgctctatgacttcccctctccccaccccccacatcggggccg

SEQ ID NO: 273872 - DNA, 517 bp, Glycine max
  unsure (1)..(517): unsure at all n locations
cgcacgaggannnttttganagcgtcgtagattcaggccctcgtaaaccgggagcctctatgataacctgctagaatgccagcctattcaacatcttctgatcagatttttgttctgactgcatgcatgagtcgaagcgccaagattgcgacatatgttggatgctgattgatggaaagactgaacacttgtgcttgaatgaaaaagtgaccgtcacgctctgggtgaagacccttcctatatacatgtcattcttgctagcttatttcactggagatgcttaataatcctgctcatatatttctaaacgtgcatgtcatgcgagaggctgttgaaagaacattgtatgcccttcatgtcatgtgactgcacactgtgcaacagataccgttgtgaagaaccactgtcgacgttgcacttgaggacgcgcgaaatgctctttctttgctagtgcgacaagctaaactgccattttgatggagtttgatagtcatcttgaacaacctcctctcatccg

SEQ ID NO: 273873 - DNA, 425 bp, Glycine max
agctcttactcggatgtccgattgagtcccgtaatatatcgagatgctccaaattgaaaatagtagctcctagcaaattcaaaccataataactttttactcggatgtccgattgtgtcccgtagtatatcgtgatgctcgaaattgaaaacataaggtctgagcaaattcaaacgacaataactttttactcagatgtccgattgagtcccgtaatatatcgagacgctccaaattgaaaatagaagctcctagcaaattcaaaacataataactttttactcggatgtccgattgagtcccgtagtatatctagacgctcgaaattgaaaatagaagctctgagcaaattcaaacgacattaacttttttctcggatgtacgattgtgtcacttagtatatctaaacgctcgcaacttaaaac

SEQ ID NO: 273874 - DNA, 450 bp, Glycine max
agcttgattgaacagtgcatttatattaaccaatggttgatacttgattttggattttagtgtttgtgattggtttgaattgatcaattgtatgatgtaagtgaattgaaatgcgtagatcatatgccttgaatgagcatgcagtcattagaaagaaagaacatggaattaggatcatgactgaaaatgttagttggtttgtcaggttgattgtgaaggtactcattagccgcaacccggtgagagtgtgatctttaattgtgagagaacaagtaacattgagtaatgatttttgcatgaatctctgagtatgaaatgaatgcgtgaaattgaagatgatgaaggccatgttttgattgaagatagccacttagctaaaaagcttaccttgtgcatgattgatttatcccttgcacccacttatctaaaacaaaactgtaagtataaaat

SEQ ID NO: 273875 - DNA, 480 bp, Glycine max
  unsure (1)..(480): unsure at all n locations
tgaacgaatctaagatacatcttcttcaactctggtgattcttgactccatctcattgaagcgcatatccacttgtaattccaaagtgtcaaacctttcaccaacaaaggtttgaagaccatcaaacctgtccaaaatctttgaagtgttgaaggaaaacggtaacaagatgaggctaacgcaatggagcattcaatcgcaatgccttatgcatgcgatatctaacacgatgtgcccaatcaatttgtagacctttatgaaaggcccacataacaatgagatcttcttcagaaacctgagcaaggtatgaagatctcggaagcaagatgcgaacaattagttaatgaaggatgcgactttcacaagccaatgaacccgcaagaagcctttcggtcatatccgcttggctggtgcanaccaaccggtgggcatcatgtacagagaaatcaaacttccaatcgtcaattagtgcaccttcaa

SEQ ID NO: 273876 - DNA, 437 bp, Glycine max
  unsure (1)..(437): unsure at all n locations
agctntatacaaatgtatgcttctacaatgattgtcattcctacggtgccaagtttcccactagcccctttaaatttcatgtaccaatatgatccccaacaatatcaatactcagccaatatcagtcatttccatcactcaccaccctaccaaccaaaaacatctaatcatacacaaaggccacccctaaatcggccacacaatccacctgctgcacatccaagaccaaacactaccccctaatactaatcaaaacaccaactaggaaaggaaccttctagaaaagaagcttatagaattcaccctaattccaatcatgtatcctgacttactcccatatctgcttgatattgcaatggtagtcataagcctaacaaagattcctcaacctctattttcccgaggatacaactcanatgcgacatgtgattatcatg

SEQ ID NO: 273877 - DNA, 381 bp, Glycine max
ctcaagctcgaaggtgcataccccacccattttcatagtaaaacactggtgatgtgtctactattattgtgataatctctttctccgtcattggaggtgccacttgagctgccaggtctgttcacctttgggcgtattctttgaaagatttgtgcccttttttgcacacgttctgtagttgcatcctatccggagccatatcagaattgtactaacactgcctaacgaaggcaaccattaggtccttccaagaatggactcaggaaggttccaagttagtgtaccaagtatcagctactccaataagactttcttgggaaaaatgtaccaatagtttctcatcttttgtgtatgcgcccaatcttctgacaatacatcttt

SEQ ID NO: 273878 - DNA, 437 bp, Glycine max
  unsure (1)..(437): unsure at all n locations
agcttattgaagtccttcggattcagattgtgtgtttttgactgtatggcatgagttgaagtgcgaagattgagacttatgttggttgttgattgatggaaagactaaacacttgtgcttgagtgaaaaagtgactgtgaggctntggttgatgatccttcctttatacatgtcattcttgctagcttatttcagttgtgatgcttaataatcatgttcatatctttgaaaagttgcatgtcttgtgagaagctgttgattgaaacattgtatgccattcatgtcatgtgattgaattctttggaacaaataccttgtgaataaccactgtgagtttgtcacttgaggacaagtgaattgttctttctttgcttgaggacaagcaaaactgtaaatttgagggaagttgttagtcatcttttacaactaacttttat

SEQ ID NO: 273879 - DNA, 55 bp, Glycine max
tagattgagcctcttctccttttcgtttcctgtcgagagctgctattctttgcct

SEQ ID NO: 273880 - DNA, 383 bp, Glycine max
agcttgaaaactattgtgactaaatgggtaattaaacctatgtttaatttgatggtgcataatcaattattctttgatagataaggtgcacatgttaagtttgctttcctctacaaattttatagtaattattttgagaagtgacaactaataataataatcaaagaattggatcatgtgaaggggtttagaagtagtatgggtttgattccatagagggaggatgaacttgtggtaaaagagaagggttactagtgaataatatttgattcttaaacattaaagtagcatgctagcataggcattctataattcctaatggcttaattaagtttttcatatccggaatatacgtcattttcaaataactacctaacatccat

SEQ ID NO: 273881 - DNA, 205 bp, Glycine max
cctcccgcttaaattctttgcacggcgccccataatgttcttctgaaacccctaatcccgggttctattcgcgcgtacctttccccttctttttcccatcaaaaaaaattttgggttgccttcaattctttttcccccccaaaaattttgggggcaccccgcggtggcccttctctaatttttcaattccccctcaccccctttt

SEQ ID NO: 273882 - DNA, 330 bp, Glycine max
agcttatgaattaatgtattgtatgaagcatgttaacgcggctatattttaatcgcgcatttttcgagtccatggaataaaatatatattaaaatcgcttatgcatgtgtaattatttgcacgcctgcgaatgatccatctaatcgtgatattgcagagcctaacaatctcttgtggatattattctattccacattttacggcttagtattgcctggctgactccgttggagttttttgcggctgggctcttaaccctgcgtttcacttcgagacaattacctagagatttgctatcctctaattcacgatctatatggaactatcaca

SEQ ID NO: 273883 - DNA, 464 bp, Glycine max
  unsure (1)..(464): unsure at all n locations
ctgcatgtgtgcaccagtaacgcccgacggatctgattcttctgttgcctagtacacgcaacattgtgagacttgatcgcacctctaatctcctccattctgggcacctatgagtcgagccctagaaactgttgtggtgtgcaacagacacagactttgcttgcatattcggcatgctcctgccactataccgatcccagtgcctagttgaagaaactcttagagcgcatccaagtctctaatcgttacggatgacaaataacatttaaacactggaacactccctttgcaccttatcaataataattatcctatacatcctcatcatatgaggagacacaagcgctctgcatatgacatttatttgactcttgaacaaggtgcacatcgatgcatggatggcaccgactgtcaatccacaggaagcacactccaggtgcatggatcattctccgcatgactcn

SEQ ID NO: 273884 - DNA, 430 bp, Glycine max
  unsure (1)..(430): unsure at all n locations
agctntattcttccattgtatcaaggtctgctgaacctcattaccctcctgtattatgactcttgaacccaacaccttgtctgggtacacatcagtctcctcagtcacttccaaatctttatgtaactctccctgtacctgtaagctacttcgcccatcttctccggcacctggaaaggtccatagaatcttgcagcgagtttctgatgaattctttttaccgctgattgttgtctatggggtctaagtttcaaaaagacccattctccaacttcaaaacacaagtccctcctcttcttgttagcataccttgtcatttgttcctgaggtttgagcaagtggagtttgagtagattcaaacctcatctctttcactcaactccaatgtcacagcagccaccttagtctcatagacaaaaatctcacaatg

SEQ ID NO: 273885 - DNA, 380 bp, Glycine max
  unsure (1)..(380): unsure at all n locations
actattaccacaaccacccaccggacctatcaatgttaagaaaatgacatcggcagatatgcagctgagaagagaaacgggcctatgctctacttgtgatgacaagttttcccctagccatcgatatcctaataagcaatatttttttccacagtgggaagaagaggatgaacctgcattacaaccagatccaccatacgaggttgagacagctggtgaccccagtttgcaagatcatcatttgtcttataatgctctaaaaggctcatcacgtcttacgacaatgaantctcaaggatcaataaatggattgggagtggagattctactagatagtgggagttcagataactctctccagcctagactagctcaatgcc

SEQ ID NO: 273886 - DNA, 428 bp, Glycine max
  unsure (1)..(428): unsure at all n locations
agcttctccaaanagtcatgccatttggcatacagggggcaacctcccttcttctcgtctcttaactgaatgactgttgcgacaacccccccttaaccacccttcatacttagtctctttgtgcttgcacactcgagattgtggggttgtgtacccctttggccccatcggtcaactccacaacgaccaatctccccacttagtctcttaatgcttttgcactcaagatagcggggttgtgtaccttttcgcccctcccttagtcaactgggaccctttttcgcagcaccttcaatctccaaccaagtcacttacaccactttggcactcactatgcacatgatataatccttagtctgtaatcaatcctaaccgcctacacgaggtgcgctcggngatttcggagtaaatggtaagatcatgataag

SEQ ID NO: 273887 - DNA, 330 bp, Glycine max
  unsure (1)..(330): unsure at all n locations
tgcagtcattacaagagacagaacatgtgattataattattgatganaatgttggtcagttagccagattgattgtgaaggaatgcattaaccgtaacccggcgagagtgtgatccttatttttgagagaaaacgactatcatttagtactgatgtttgcatgaatctctgaagtattgaatgaatgcatgaaattgaggatgatgaaggccatgtctgattgtgatagccacttagccaaaaagctgaccatgtgcatgaatcgattataccttgcacccacttttgagctgaatgaatgtttgattgatagaaccttgagcctataca

SEQ ID NO: 273888 - DNA, 205 bp, Glycine max
cacattctcatcttacagcgttgcttactcaaataccaccagaacactctctttgttccgattcgataaccgtcgggtcgacgggaaaaaattactggagagtcctagtacataaatctacattttgaccgctgggagatgctagaaaatgtccagaatacaatatgttctacctttaccataaccagcagtgcacaaacatttt

SEQ ID NO: 273889 - DNA, 355 bp, Glycine max
  unsure (1)..(355): unsure at all n locations
agcttgagatgaggaagtgttgaagggtgaatcttcctgcttttattgttgaccacagagtggtacctggagatatgtcgtgggggtcaggagaccttggggacgtcaggtggggtgctattgcccaaaaccaagcttgaccaatcccgacccaacccgggcatagtcggtaagtgagaacctgtgatgtacctaaacaggcgagctcctggcagtcaacagataaaaggaacaaagaccacaaagcaaggaggcttgtggtggctggccagctgtgaattntgtgtgatatatgggttgtggcctctggtaatcgattaccaagggtgggtaatcgattacaaggcttaaaaat

SEQ ID NO: 273890 - DNA, 403 bp, Glycine max
  unsure (1)..(403): unsure at all n locations
ntgagccaaaatcctgactcaccatataccttgacccggtgtgagaatgtcgatccttaccctcggaagcgaaaaaaaagagaaggaaaatttccaatcaaaggaaaaaaggaaagaacgaagatttccaatcaaagagaaaggaaaaaaaggaacgaacgaagatttccaatcccagagaaagcccaaaaagaaaagaacgaaaattcccaatccaagagtgggagaaagcacacagaanagaaagaaaattcccaatcaaagaatgggagacagctaaaaaggaagaagaagaaggaaagaaagctcctgatcacggatcnaaggacaacacaagatatgtgcacaaaggtctttggaccggacaatatctgaacaatacagaattgtcaccacatgaaca

SEQ ID NO: 273891 - DNA, 393 bp, Glycine max
  unsure (1)..(393): unsure at all n locations
ctcagctgaagtggattcccaacaatgaacccataccagcctatttccagtacgtaagcttgggctccacttctccattgaatagaacatcggtgagcttctatcttgtcccccatgcataatttgttcttcatcctcttcactaaggccaagaagcagaaccaaatcatctcctatgtatttaggggctattttcaatcctatctcccaccagagatcatcctccaatctgtcaaaagtagctgggtttctgaggcgtnctacccacgcacccttcagccatttagtgtcttcaggttcgatgtcgatgtggatcgaagaaggtgggttatggcggctatggctctcgatattgcgattcgttcactgtctcggagccctgttatttctcat

SEQ ID NO: 273892 - DNA, 440 bp, Glycine max
  unsure (1)..(440): unsure at all n locations
agcttctactgcgaggaataaaatttagttacggcagtgatgtagctctttcttgtttactgatagcaaatttcaaacaaatattgaatctaaactcataagaagcatactaaaacactggtatttatttcttcccatgcttaccccttgcatagaagagatttgcgttcttgcaaactgggaattaagttggtcatggcgattaacctgactagcatcctgctgtctattaccaaactctcggttatctctgaggttttcccaagatctctcatctgtactagcaggaggttgtccagaacgaccacgccaatcacggttatctggctcagaataccgattttgtaattgatgaggaagctgcagaagataaagtaaacattattatataacatctgagttgtgaaaatgattacagagagaattaanaacagataata

SEQ ID NO: 273893 - DNA, 339 bp, Glycine max
  unsure (1)..(339): unsure at all n locations
acatcttgactcgctttccaatctgacattcttcacagattctgccttcttctattttcagactgggaatgcctctaacagcaccttcgtcaatgattttcttcatgcctcttaagtgcagatgtccaaatctttgatgccatattttgacttcatcttctttggagaatacacatgtgcgaggagtcactggtttattgaggtgtccatatgtaacagntgtcctttgatctgctgtccttcattaggacttcactcttctcatttgtcaccaagcattctgactctgcgaagtttacattgaatccttcatcacacaactgactgatgctgatcaag

SEQ ID NO: 273894 - DNA, 55 bp, Glycine max
agcttcctcggagccattcctgcgaaggcaattatttgaagagtttctctacaag

SEQ ID NO: 273895 - DNA, 471 bp, Glycine max
  unsure (1)..(471): unsure at all n locations
cgcatctacgtgatcaaggtaaaggcatactggagtgaaaagcagatagcacaaagaacacacaaaacatcattaaatagataaaaatatatttacatcaggtacctatagggaaaatccaacaaaggatttagctttccatatcaggaagccttctttacaacaaagagaagaacaagatgaaagattgcaaaaatacaagtagtgaggatgtctccttcacctctaggatctcacaatcactcccaaactcatctcaagctcttaaaccagctcctgcttcaagctctggtctctgcatatcttcacacagtaaaatctctcanaactctctggaacctggacctttctctctctagaaactctagacatgcaaagctctgaatcccaatccacactatccctctaaaatctgatttcaggcttaaataggtggccttgttcgtgctcgtgcgctagcgcaattatgga

SEQ ID NO: 273896 - DNA, 454 bp, Glycine max
agcttataagaacaaaattacctaaatcatttctcaaatatgcatattatttaggaagcatcaacaagaatcaagccaaggctattgtgtaagcaatcaatggggcaaaacacaccaaaagattatgatgatggatggctcgaattctcacaaaggtaaacttatcactttcaaattgagctttcaaaactatcatgacatgtaaaggaaaaacaagggtttcaattcacaaaatgccaagaaactcctatttcaaaaacaattacccattacctgtacataacccaaaattcaaagaggaacacgcaatgttgtacacaaacataaaaccaaaataacaaaattaacctagaacctaacaaacttaaactagaaaacctaataaaattaaactagaatacccaacaaaattatagaacaatcttccgcccgcgccccctcacacttaaacaac

SEQ ID NO: 273897 - DNA, 454 bp, Glycine max
tgtaggattatggggtacccatcacatgtggtactaggtggtcggcgggctatggtgcaagtcaactctgcacatccacaaatcacacataaacccaccatccccagttgcccaccttcattgagctcacgtactcccacgtagcccttatcctcgctcctctcaatgtcgggaccccatcaatcctctcaacgcttcacaacatccaagtaattcacacatcaagcatcatgaactaacacagccaagaaaacagagcacaggcagaacactctgcccaaaacacaaatcaatatcacagcttttcacactcaaatactccaataacattctcttcgttccaactcggtaaccgttggatcactcgaaaattttactgcaagtctctattacataagtctacattctgaccgctgggatctgctagcagatatccacaaccccatatgtacta

SEQ ID NO: 273898 - DNA, 413 bp, Glycine max
  unsure (1)..(413): unsure at all n locations
agcttntagagaaagctacatgaagctgcctctgtaaaaaggctgcccagccttcattaaccgctggatcttcacgaaatttggtctgcaacttcacaaaaaacttttccatgatctgacagttgggatctttgagaagatgtctggactgtgctagaagcctcttaatgaagcttctggaggaagcctcttaatgaagcttctagagaaaactacatgaagctgcctcggtagaaacgcttcccagccttcgttaacagttggatcttctcgaactttggtttgcaacttcacaagacactttaccatggtttaaccgttgggatctttgagaaaatatctggagtgtgctagaagcttccgttctcgagagcatctcttatttaagcatttcagcctctgctatcttgtag

SEQ ID NO: 273899 - DNA, 258 bp, Glycine max
  unsure (1)..(258): unsure at all n locations
ttcgattatcttgctctgatgaatgacacagctgtggccaatgaatagaatgatatggacggaggaactcatgctgcgattgccgttcctacatgggcaaatttcccatcagctccacaatatcaatacttccccaatattagcctttatcattatccgccaccctatcaaccacaaaccctaaatnagccacaaaggccacccctaaatcatccacttcgagacgccacccttaacagataccaaaacaccaaccta

SEQ ID NO: 273900 - DNA, 437 bp, Glycine max
  unsure (1)..(437): unsure at all n locations
agctgggagaagatgcttcaatggaggaaattataagagggagagaaagagagaggggggagcacgaaattgaaggaataaaagaggtatagaagtggaactttgaagtatgtctcacaagactctcattcatcaaagttacaacaagtgttacacatgcttctatttatagactaggtagcttccttgagaagctttcttgagaaaacttccttgagaagcttctttgagaaaacttccttgagaagctagagcttagctacacacacccctctcataactaagctcacctccttgagaagcttccttaagaagattcctaaagaagctagagcttagctacacatacctctctaatagctaagctcacctncttgagatgagaagctagagcttagctacacaccccctataatagctaagctcacccncatgac

SEQ ID NO: 273901 - DNA, 259 bp, Glycine max
  unsure (1)..(259): unsure at all n locations
cgagatgaggaagtgttgaagggtgaaactttctgctcttattgttgaccacagagtggtacctgcagatatgtcgcggnggtcaggagaccttgcggacgtcaggtggngtgctattgcccaaaaccaagcttgaccaatcccgacccaacccgggcatagtcggtcagtgagaacctgtgatgtacctaagcaggcgaagctctcgcagtcaacagataaaaggaacacaagaccacaaagcaaggaggcttgtggt

SEQ ID NO: 273902 - DNA, 365 bp, Glycine max
agcttctagctaagagttcaaggaaggatgcctttagagaaggttccagtgcggccccacaagtggatgtggagtttgacggacatcggttccgaagcgaggaacaccagcaccgttttgaggcaattaagggttgatcattcctctaggagagtcgggtccagttgaaggaaggagagtatgctaaattctaggagaaaattgccaggaggcagtggactcaacttgcagcacccatggctaagtatgatccagaactagtcatggagttctacgccaatgcatggcccatggaggagggagtcagagacaagcactcctgggtgaggggccaatgatcccctttgataaggatgccattaatc

SEQ ID NO: 273903 - DNA, 440 bp, Glycine max
  unsure (1)..(440): unsure at all n locations
tggatntcctcttagtagggaatctatctttcctaagatatatccaaactcagtccccctcattaagaactagctcatttcttcctctattgcctttagtggtatacacctttgtttggttctctatttggttcctaaccctctcatgcaacctctttacaaaatcttacctagattccccttctttatgtataaaagaagtgtcaagtgggaagggaatttggtgtaagggtgttagaggattgaacccatagacaacctcaaaaggggattgcttagtggttctatgaatccctctgttgtatgaaaattatacaagaggaagatactcatcccaagacttatggttgcctttcataattgcccttanaagggtggatagagacctattcactacctctatntgcccatcaatttatggatggcaactggtagagaaa

SEQ ID NO: 273904 - DNA, 434 bp, Glycine max
agctttgtccctctatacaaattggccaatgtggtatttagaaagtcaatttcctcatgaagttttacaacatcttgaggataaccttctaaagctccattctttgaaacctttttattcaaaaacttcactgactttttatgattctcacattccactctaagattatgtttactcttttcaagatcttcatatctttgtgtgaatgtgcacattctttccaaatcacaccttttagttttcacatgatcaagaagttcaattacttcttttagatccttttgtaaagctttcaatttgttttccaactcctgaaagttttccaatcgaacaattttttctttggaaactgtctcattctcaaggcaaaggttggtctcttttatcttaagagtttcacaagcatcacatacttgagtggacttatccacata

SEQ ID NO: 273905 - DNA, 430 bp, Glycine max
ctgagaaacatgtgatcctttggcatcatcaaaacattcatcttgatcctttgtctacaaaagcgataaataaacataaagacaagttcatgagtttttgaagatcatggctaaggcgctgagtctcctccaatgaaatcatcaaccaaattcgccatgtcttcatcttccttagctcttcctccatctttgcgggtagctccttgagcatctgcaggtcttgcttccttctgaaaaataggcttgtctccaggccaggcaacagtggctctaaactgttcgggagtaagctaagggtaagggctacgttcctggcgatgctggtgcagtatataatggtagaagttatcattcaactgcatctggcccttatgaattgttgcttgctggtcagccaaatgacacatgtatgtgtgcatttggagcttca

SEQ ID NO: 273906 - DNA, 395 bp, Glycine max
  unsure (1)..(395): unsure at all n locations
agctnttaagggtcatgcctttgctaagaatgaatctcacaaatggtctctgattggtgatttcttctacaagaaaccatctagatggaagcctcatcgctttcatatgactcctggtagcccacttaccatctcttctaacttcaaagactctggtgatgagttcttgaggaagtttgatgaagaagctgccaaacaaaagggaagaaaaatgtaaaagctgaatatgtatcacagtctaaagaaagaagaatctgaggggcagctgagttattatgactgaaggatgcacaatccaagggggagctcctatagagaatttgataatttggcctttttgtctttaacactccaaacacatatcttgatgtgaatattttacctgaataaagaaa

SEQ ID NO: 273907 - DNA, 464 bp, Glycine max
  unsure (1)..(464): unsure at all n locations
tctcaaggaagtttcataaggaagctacctaggctataaatcatgtgtaacactctttgtaactntgattaatgagagtcttgtgagacataactcaatgttcaacttctctcccccttttcctccttcaatttcatgcttccccctctctctttctccctctctttcttttcctccatttaagcattctctccaagcttcgtatccaaggcacattcttggtggtgaagctccttcttccatggcttattccctagtggatggtgtctcctctcacctcttatcctttatcttccgctgtatctccatggtggaaaatcaccattgaagagcctcattgaagttcacagatctatcctccatgaaagcttcacaagcaaggcttcatcaataccactncctctcaacccttctaatntaattgcaacatgataaactaaaacatatgtgaatagacatgttat

SEQ ID NO: 273908 - DNA, 414 bp, Glycine max
  unsure (1)..(414): unsure at all n locations
agcttggttggtagatgatcagggcttggattggagacccttcgtccacgctcatgacttaagtaccttcagcagctacggngtgaggcttggcaggctccctagtataaggatatggtgctacctttatgctctctacatagcactatcgtgtttgcttttgatttgccttgacaattacaatctccttgatcaaggtggggaatttcattttcaaatgcggcatggagactatggctccaagctcgttaagtgtcttcctgccaatcaaagcaaaatatgatctatttgcatcaacaagtaagtatcttattatgaaacttctggagagctggccttgatcganagcggtcattacgtccacgtaatatatggtctatactctctcgcctgcacagccaagaagtggaccga

SEQ ID NO: 273909 - DNA, 331 bp, Glycine max
  unsure (1)..(331): unsure at all n locations
agcttgtactttcttggtttgacaactatcactgtggcaggaaagccactangagtttctgcctcaagctacaatgttcctaccataattgactctggcacagtaatcacaaggcttcctgtggctatttacaatgcattgaacaaatctnttgtgatgatcatgtccaaaaagtatgcacaggcaccaggattctccatattggatacttgcttcaaggggagtgttaaggaaatgtcaacagtgcctgagattcgaatcatatttcgtgggggtgctggcctagaacttaaggttcataacttccttgtggaaaatgagaaggtactac

SEQ ID NO: 273910 - DNA, 458 bp, Glycine max
  unsure (1)..(458): unsure at all n locations
tgtttgtggcgattctatagaggctggatctttgagattcaatgaggtcctttaatgttgattctccaccatggagatgcagcggaagacaaaggataagaggtgagaggaggcgccatccactacggaataagccatggaagaaggagcttcaccaccaagatgagccttagataagaagcttggagaggatgcttcaatggaggataagaaagagggagagaaagagagaggggggagcacgaaattggaggaagacaaaaggagagaattgaactttgagttgtgtctcacaagactctcattcatcaaagttacaacaagtgttacacatgcttctatctatagactaggtaactctcttgagaagctttcttgagaaaacttccttgagaagcttctttgagaaaactctcttgagaagctagagcttagctacacacacncctctaataact

SEQ ID NO: 273911 - DNA, 404 bp, Glycine max
agcttatgagcttcgagtgggttgccaatgtaataatgatttatatagtacaattaatatactcttaattgagagagattaaaatagcacatatttattgaaataacacactcgacaaatagtacatagaatttattaatgaaaaaataattattttattcacatataaaatttcaaaaaaatgcatttgactattttatcaaaataagaaattttgaaaataaagaaattcaatttctttatccagatacaaaattctgaaaataatgaaatttaatttgcttatccaaacatagacatttgaaaatgaaagaatttcacatgaagcatttgaaatttttagaattctaaaattagaattttaaattgcctcatccaaacaaactctaaatgtaatgttgatc

SEQ ID NO: 273912 - DNA, 458 bp, Glycine max
  unsure (1)..(458): unsure at all n locations
tgaactaccctacaatacaatttcaaagaaatggaataagatataaacataacatagaacaaaatacaacgtctaaatgtaaggaaatggagaaactacgataaaaaaggagtgaggaaggagaaacaaactcaatgtttggaggcacagttagtagtgaatggattcacagagtttatgatcaatttaaaggagaaaataatgagagaagtgaataaaaaaaagtgacaaggagagtgaatntaactaanatattaaataagaataacactttttaattaaaattgagttgacctttcaccaaaacggtttaattgatgttatttcatatgagttattgatcctttcttnctaagtagtgcgtggggaccattactctcaacgaacatatttttttataataatatttgagaataatctttatttacaatatgtatgtaagaatttatacaatgatg

SEQ ID NO: 273913 - DNA, 444 bp, Glycine max
caagttgaaattgtaatctttttcatcaacatttagtatatatacaaaacttggttcgcttgcattccccgtcttgtttttttaacgactcttggctcgttcatttcagggtacatagaacttttggtgccttttttttaaaattttttttttcttgacatcagggattctatgttgacaccgccatttctgattattgttccatttttagattcacttgcaaggtgaccttagagatagaagaggcccagaatttgattttagagtttgttggggaacctctttcaaagaagaaagatgcagcagagagtgcggcagagggtgcattttggtatctacaacatgaaggttacttgcctagtagtggtaattgacatattgtagaacaattatcatgccacataaatcccaaggcaatttggtgtaggcaatgtcttgattatt

SEQ ID NO: 273914 - DNA, 468 bp, Glycine max
tcagagggaaggcctcgaaggagaaaaagaattcaaggctgaaatggaggttctgagtggtcatggatttggctggcctcatccaaacctggtcacgctctacggttggtgcctaaatggttcagagaagatactgatttatgagtacatagaaggtggaagcttggaggatttagtcactgatagaacacgtttgacatggaggaggaggctagaagtggcaattgatgtggcacgtgcactagtctatttgcaccacgagtgctacccttctgttgtgcacagagatgtgaaggctagcaatgtattactagacaaagatgggaaggccaaggtcactgattttgggcttgcaagagtggttgatgttggggacagtcatgtgagtactatggtggctgggacagtacgctatgttgaccagaatatgacacacatggcaagctactacaaaggggatgtgtacag

SEQ ID NO: 273915 - DNA, 461 bp, Glycine max
gatccttaagtcacctgcggcatgcaagcttgtacggaagaagtgaacagtaaactggtgtacacaacttttaaattttaagtgaagggcattttcgctcattcacttaaaatgttgggtgcacttatgttagtcgatggaaacgactaacttttgtgtctacaacttgtgtaaattgtatcaaactttcccaatttatggttgttttgtagtattacaagtactttttgttaagtattgactatagatacttaatgcatctgttttgtatgtttaataatcaaattctctcaatttcatgttaattaggcaatttggcaaagctcgaacagcatccactaagcgcaacactcctaggctaagcgcgaggaagactctggaagaagatgagttgtataggttcgctaagcgcaccacttcatctcactaagcgtactactttagttcatccgctaagcaag

SEQ ID NO: 273916 - DNA, 467 bp, Glycine max
  unsure (1)..(467): unsure at all n locations
taggttaaactagtctaaactttcgtaagcctattaagctgagtctagtccaacaagagggatctgaggatgaagcttggtttaagttagtctaaacctacgagggctgtctaaattgagcctagtccaacaaaagggatttgaggacgaagcttggattgattcagtctaactagggatcgaggtttagtaatttaggctacaacatagaacgcaaagcatgattgattagagaaacatctctatatacatcagcttgtttgttagaaaaacctaacactnttacctactgctgtcaatcttacttgcattttactgcttttagcctagacttagtttaatcttgttcgaaatcatccattttcaatgtttctttcaacaatgacttatttcttaattcaaccctatctaatactagttccctgagttcgatactcggactcatccgtttaatttaaatacttgac

SEQ ID NO: 273917 - DNA, 341 bp, Glycine max
  unsure (1)..(341): unsure at all n locations
agcttgatagtttcatggattaatganttgagcttctgccaaatggccttgttattgatttcgcttgatggttaaactttgatgcttgctttagactcttggaagaagattgagaaagccgaagttgggcgaagatttctagaagctatagttttgaccgatgtattcccggtaggggtgggtaagcgggccggcccgtcccgcgtaaggctcgtccatattggcagctgaccgggccagtttgccccgcttcttacacggaccanataaattggttcgcccccgccccgcggaccctgtgggtcatacgggccggttcgcgggcataaatttcaaataat

SEQ ID NO: 273918 - DNA, 476 bp, Glycine max
  unsure (1)..(476): unsure at all n locations
ntaatagtagggaaagagcacacaagatgcaattgtgaaatgaganaaagttatagaagacttgaggagaagaaaagaaaatgagatagttgtatgtttagacaactcgtacaattttcaaatgtttgaaaactccctccaacagccataaacaactaacttccaagcttatttaatgagatcaatttgaaggagcttgttgcaaggaaggagtgccacacagagatggtttggtcataagagttgagtagctcaaaaagatacctcatatatataaaaaaaacttcttagtcaaaacactctaggttagagctaaaccttgtcgatccaaaaacaagtgtaaacacgttcatcagaggagtcacaatgaagaacgcttccaaaaaggtgtattctatccgtatcccttacgaatagaggaaagactcagagaagcaatatacggatattatctattaccgacatcctatataaac

SEQ ID NO: 273919 - DNA, 454 bp, Glycine max
agcttgttgtggcagaaagggcatagatcattattaattagaatttgcctcttggccaggttgtccttagtaggaagtctatcccataacaacctccagacaaaggatcccatatcagccactatatgatttctttgagaggaaattgagtacaaatctggaaattgatctttgagtggaattccatcctcagcccaggcatcttcccagaacaaaatttgatcacccctacccatcttccagcagaattgtttagagacggcagtcatattgtgatcttgattgagtgcctttaggtcagcccaccaggtggagaaatgttgtttgtgaggcccctgatccaatcctctccagccctgatatttagaaatcaggatcctattccacagctgttccggttggtgaaacatgtaccatttccacttgattagtagagaaatatttaaaattctaa

SEQ ID NO: 273920 - DNA, 467 bp, Glycine max
  unsure (1)..(467): unsure at all n locations
agcttgtggcgcttctatggaggctggatcattgagcttcaacgaggtccattaatggtgattttccaccatggagatgcagcggaagacaaacgagaagaggtgagaggaggctccatccactatggaataagccatggaagaaggagcttcaccaccaagatgagccttggataagaatcttggagaggatgcttcaatggaggaaaagaaagagggagagaaagagagagggggagcacgaaattgaacgaagaaaaagggagagaagttgaactttgagttgtgtctcacaagactctcattcatcaaagttacaacaagtgttacacaaaaaaaaagtccttactacaaagactactcaatagaatggccaaaatacaaggcccagacgaagganaaacctattctaatatttacaaagataatcaggctcatacttagcccatgggcttgaaatctaccct

SEQ ID NO: 273921 - DNA, 436 bp, Glycine max
agcttggaacatgtgttaactcaacaacatatttgaaataagtagccactatgtttgttgaatgaaatacaatgacttaagatatttttctttatataaaatatgttggtactaaaaaactatattatttagcgacaagaatgagatttagcataaggatttatttagttaatatttttcaatgcatttctcttttttatttaatggctatgtgttctcctatactttatattgacctttcctttttatccatttagaaaaagaatctccatcttttcatacttcaattttctttttctattattttttttaccctttcattctttttattacttggacgttaacggaaatatttttttgtcgctataaaatccataagtatcatttacggaagacaattatgttcgagctaagaatgctcactattgctgacaaa

SEQ ID NO: 273922 - DNA, 460 bp, Glycine max
acttcgagaactatgaaactaagcttgccactcaaaggacatctcacctatatctttatgaatttctatcatgtacatgggtgcgtctcacctaattcacaccatgtaaacctctatagtgaggcatactaggttcatacttcatacataccaatgagtacttctcactgagaatcaaagtaagacttctaaactgatgaccttttatttacatggattattatatttatttctcctaatgatatagagatttctccatttccatctccacaatcaatttaccttcctgcagtcacctaatcctgacacccttgctcttatggctactacaaagctgcataatctactagtactctctaaatgtgacaataaagcactttcacccaaaggtcttgagaaaataaaagtattctctacccccccaaccctcaccaccttctactaactaaatgccaaatct

SEQ ID NO: 273923 - DNA, 382 bp, Glycine max
  unsure (1)..(382): unsure at all n locations
agctntaactcggatgtccgattcangcgctttatatatcgagacacttgatattgaataacagaagctctcgagaaattcgaatggtcataacttttcacacggatgtccgattccggcgcataatatgtcgagacgctcgaaattgaacaacggaagctctcgagaaattctaatggacataacttttcactcggaagaccgattcacgcgcataatatatcgagacgctcgaaattgaacaacggaagctcccgagaaattcaaatggtcataacttttaactcagaggtccgattcaggcgcataatatatcgagacgctcgaaattggacagcgcaagctctctagaaattcaaatggtcataacttttcacttgga

SEQ ID NO: 273924 - DNA, 418 bp, Glycine max
  unsure (1)..(418): unsure at all n locations
ntacaacagagtntagtaatgatccactaacctagaattattataacttaatgccattaacctagggaattaaaacaaacttaatggctgagtgtaactgaaattgttggcaaccaaaagtcacccccaacagccaacaagtcagccaccatttggtcttccaaaaggctgatgcctangttgccaattgggcccttattccaacttgaactaaagcccttttagttgattaacccacaacatatttttggtcagccaactttacaaggattgggccattatttagacaaactaaacactctaaaattgaaataaagtggtgtcatttagtcctccattgggccatgatacaactcacaaccttggacttttcttcttgaaactngcgctctgtatcaaatagtatggacagcacttg

SEQ ID NO: 273925 - DNA, 51 bp, Glycine max
  unsure (1)..(51): unsure at all n locations
agcttaagacagccagtttctcaatagaanagtatcaagcctatcctgggt

SEQ ID NO: 273926 - DNA, 550 bp, Glycine max
  unsure (1)..(550): unsure at all n locations
ccactcccgccccgggcgcactgactatctacgctttccnnananaagcncccgcgggcgtgaccctgaatcctgcatacggaactatgaaagtagctttgcacgaacgcagcgcagcagacattttattctctattgcacactgatccatggaagagtatttgtctaactgcccacgtggatgacctagttcgtacacggaatgacgctgccaccactcgtctgctgacgaagcactcatgtatccactgtcataccaaagacctcgagtgcgcagagcctgtcgcgggactgacgtgactcactcaaacgaacgcactgttatactccacaaaccgcaatgcattccataggtttttctccagcaatacactacatctcgcctatttggtcgaaatacacctctgtggactccaatactcaacataccacgttctctcactttgaaagttgacactggcacacacagtggtgtctaaccgctccctatggatgagagttatctatctcaaaacgacgtgcaatctccatactacactctcttacaccg

SEQ ID NO: 273927 - DNA, 141 bp, Glycine max
agctttgatgtatcatttgtagaggtcaatgttacaacgatatgatgcgctccatgagaggtcggattcaatcgagatttagaaccttgtgagtagatcgagaactccgatgttcatcttcgagtcgctgaatctatagtg

SEQ ID NO: 273928 - DNA, 401 bp, Glycine max
tctaaggaggtgagcttagctattagaggtgtgtgtgtatctaagctctagcttctcaaggaagttttctcacagaagcttctcaagaaagttttctcaagagagcttctcaatgaagctacctagtctataaatagaagcatgtgtaacactcgttgtaactttgatgaatgagagtcttgtgagacatactctaaagttccacttctctgcgtcttttattccttcaatttcgtgctcccccctctctctttctctctctctttcttttcctccattgaagcatccttccaagcttcttatccaacgctcatcttggtggtgaagctacttcttccatggcttattccctagtggatggcgtctcctctcacctcttctcctttgtcttccgctgcatc

SEQ ID NO: 273929 - DNA, 397 bp, Glycine max
agcttgtgcatccaataccctgatgaggatgtcccatatgttcttaacactggactgattcattcgcttccaaagtttcatggccttgcacgtgaagacccgcacaaacatttgaaagaatttcacattgtctgctccaccatgaaacccccagatgtccaagaggatcacatatttctgaaggcttttcctcattcattagagggagtggcaaaggactggctgtattaccttgctccaaggtccatcacgagctgggatgaccttaagagagtattcttagaaaaaaatttccctgcttccaagaccacagccatcaggaaggatatctcatgtattagacaactcagtggagagagcctgtatgagtactgggagagaattaagacactatgtg

SEQ ID NO: 273930 - DNA, 392 bp, Glycine max
cgttggattatggggcacccgccatatgtggtactacgtggcgatagggcgatggcacacatcaactctaccacttctgtgaatgtatgtatacatgattatgatgatgtccaagaagaatcacacaaggctgcttcacatgataaagcatttgcttcaagaataattcaagagtgcttcaacaagcacagccatgtttcaagattcattaaagaccaagccttgccttaaaacaaagtgttttcaagacattcaaggctctagtaatcgattaccaggaagtgtaatccattaccagaagacacggtcgagaaatagctgttgaaaaatgttgtgaatctgaattttcaacatgtaatcgattaccatatgtctgtactcgataccaacaa

SEQ ID NO: 273931 - DNA, 421 bp, Glycine max
  unsure (1)..(421): unsure at all n locations
agcttttcaaagaataattgaactaaagtggtaaacacctanacggtgacacaaagagccaaaaagtcaaaagaaaaacttcatacaaaataacaatatactcttatttattaaaatacagtccataattgggttttttttttctctaagatgtacataataggttaacctttgaatcaatttctcctaaaataataacacctttcatttttatttccatttttaattcttttaatttattaattgcaaatttaatctttttaaatcttacatgtatatttttatcattttaatttattaatttttatatgaatttttaaaaaatggggtagttagatgtagaggatcattgtttacgataaccaggacataatgcttgcataggatgattaaagaagtctaattcaattggtgaaacatg

SEQ ID NO: 273932 - DNA, 452 bp, Glycine max
  unsure (1)..(452): unsure at all n locations
ntgcttctacaggagcatgagtcctttanagagtatgcncataggtggagggacctggcaacataagtggcacttcccatgatggaaaaagaaatgataaccatgataatggacacattgccagtgttctactatgagaagatggtgggttacatgccctctagtttcgtagatttggtatttgcgggcgagaggattgaggtacgcttgagaacgggaaaaatcggttatgccgctcccgcagcacaagaaatacgaggttcgaagcgagtggggccaagaagaatgatggagacacccatgttgtaactctagctcctacatggcctanatcccacacaaaccctcacaaccgcacttaccaatattcccacaccaaccgagcttttcggccaacgtcgaanaccctcccaatctggtgcccgtccagcaaacgttgcccactcaaccac

SEQ ID NO: 273933 - DNA, 430 bp, Glycine max
  unsure (1)..(430): unsure at all n locations
agctcttggagtagaaacatgggaccaactcattntatttcaaaaataaagtcgtatctagtcaaggtctgagagaccatacaagtttcctaacgatttctaattatgtgggccattaagtctatcatatgctgacaataaccgagaagcccatgaatctcttctggggcggagtacgtgtctgccatcgccttggccttggctaacaagcggggaagttcttgactcccgttcaaggtaagagcaaatcgatccatccacatggttgcctcttggtgtaaagagtcgatcacccttcctctagcctctttctccgcgtatacttgagcatactcgtgcgcgatcctatgctctggggccgcagctagacctaactcttcttggtacttggcgatgatagctagcatgttggtctccgtctcgcattaac

SEQ ID NO: 273934 - DNA, 436 bp, Glycine max
tctacaccctatatttaaacctctacaaattccactcaatattctttgcttgcctctggaagcaacatccaaaccagcattctaaaccttcaaaacttctacttagtattctctaagcttctataggttcttccaagtattgtttcgaaaagccttcaggcttcatccaactattctttcaaaaagcctctccaaacttcactcacccaacacttgtgttcactttgaactttagaagcaataatcccctactcactcttccgagcttttcctactaacccaaggggacggatgatcattgcaactttttgggattcctcctgttaaggctctttgtatgaaagtcgttatagatattcctacaaatttggctctgtatgggctcacctagagtgtcttctataagaattttctaatatgggtattctggatagac

SEQ ID NO: 273935 - DNA, 451 bp, Glycine max
  unsure (1)..(451): unsure at all n locations
agcttcaggttgctcattgactccagattgctgcaaagaaggacagagatctgtatggtgatctgtagaagaacatagaccacagactcttgcaacaggtgtagatttctgattcatggcaagctgagttaccaggttgaccaaggcatcaagttttccttcaagctttttattttcagtagatgaagatgaatctgtggccacctcatgggctcctctaagaacaatagcatcatttcttgcactgaattgttgggagttggaagccatcttctcaatcaaattcctagcttctgcggnggtcatatcaccatgagctccaccactggtagcatcaatcatacttctctccatgttgctaagtccctcatagaaatattgaagaaggagttgcttagaaatctagtggtgaggatagctngcacacaatttcttgaatctttcccagtac

SEQ ID NO: 273936 - DNA, 475 bp, Glycine max
  unsure (1)..(475): unsure at all n locations
ttagactcaactatcttcactttcagggatttagacgagatcttcttctcttcctatttggagctcgtctctccaaattaagaccaacagagtccctccgtgggagctgatcacaagtttgaagatgaaccttgaaataaatggaacacactagaaaaaggaaagactagtttgtatgagtaatttcaaagctttttcaacaacagtttgcaaatataagtttaaaagcaagtttgaaattgttttgtccaaagatgaaaattcgaggaaagggatatacatgttagaacaagaatacttgtttnttaactaattcattcaacttgaattatgtctaattcttcttcaacctanaaagagttccattaatcaataattgactacaaacaagttttttttcccacccatgcttgcttacaataagaatttttttgtcgctttgacacatcacctatctccccatgtgatcgataac

SEQ ID NO: 273937 - DNA, 454 bp, Glycine max
agctctcaagtgtaatcaaattacttgacttaagcacgcaacataagaataggttgcactagaattagaaggtatgatcaaaagagtattccctattaaatatatcttgatatgagtcactcaactatagagtatcagcatcactaagaataagaaatcacaaacaacagtactatctatgcaattaaggccaaatgccatactaaaagcatacacggaattatatggttcctataaccagtatataacatacatatatgaataaagaattgaatagtcgctaaggatgtatttaacaaatcacaagtttcaacaatcccgtttatgataacgcactaaggaaaaaaaggattagccaacacgtgttaacacatcgattaaacacacttattcacaacacacctgcaagttcaaggtttttgacaacattaccacacacatcaagttttcaaga

SEQ ID NO: 273938 - DNA, 458 bp, Glycine max
  unsure (1)..(458): unsure at all n locations
aactgaattagacctttcaattaacaaactccctggaaccatttcgggagacatagccactcgtataccatttgcaacatctgttattctagcttcaaatgaattttctggggagattcctgtgagtcttgcaaactgtaaatttcttaatacccttaaactcgatcagaatcgactcactggtcaaattcctccacaatttggtgttctctcacgaatcaagacattttatgtatccgacaatcttttgatgaggccagttccaatctttagcgctggagtttcaaaaaattatgcaaataaccaaggcctatgtggaggaaaatcattcgcgccttgcaaggcgaagtcttccaagagtaactnggttgttattgctggagctgctgttggcggcgtgactcttgcgacattacgattgtgtattggatcngtcttctttgtgcgacgtgtttctt

SEQ ID NO: 273939 - DNA, 440 bp, Glycine max
  unsure (1)..(440): unsure at all n locations
agctntgattatccttctgatacaatgctgtcttgaatgaagattgtatgagacctcaaaagaaatcttagtattcaccttacagcttggaagaatgctgattatccatttttgttttttttttttttcttgaagcagtagttctaggtcgtctcacttttttcaaaatgtttttcattattaagaaaaggtaacgaagatcaaattcgagcttgttttatagtccaggagacttcacttggggtattattctgcacccttatcctgagatctatataatgaagggaaccaaaaagtaccacagagttggaccatggaatggtttgtgtttcagtggcggcaggccaaaaactaacaatcccatttaccattacgagtttgtctccaacaaggaagaggtttattacaaatggccctcaagaatgctagtttattatcga

SEQ ID NO: 273940 - DNA, 471 bp, Glycine max
tggtgcctttcacgtctggaatatgaatgtagcatatagattcaaagacccttaggtgctttgttgatggcttcttcccgatccaagcttcaattggagtcttgtcttttacagacttagttggacatctgttgagtatgtaaacagcagtgtagactgcttcagcccagaatgtgttatgtagtcccttctccttgagcatcgatctagccatctccataactgtgcgattctttctctcggacactccattttgttgagaagaatatgcgactgtaagttgtcgctcaatgccttcatcctcacaaaatctttcaaactcgcgagaggtgtactctctgctgcgataacttcttagtacttttatccgttctcactttgattttagcaagggccttgaactccttgaatactccaaagacttctgacttttctcttacaaaatatacccatgtcattctagagaagtca

SEQ ID NO: 273941 - DNA, 450 bp, Glycine max
  unsure (1)..(450): unsure at all n locations
agcttgtagaatggctagacatgatacatgtcatggcttggtttggttcaaggataaaagggatgccccacattatttccatgacacaaatgcaaaaaatgatgatttggaaattttatgcaaaactggtcatgcgtgcgcctatggggacgctcaagtgtcaaatttttatggtcatgtgatgctagggctcaggattcatttcctccattttaaatcaacccaatgtttccaaaatatgtccttttatcaatttgtgcattcctccaagtccatttcgggcgtccggngaaatttcatagcattcacccttcaggtgtacacatttttttttcaaaaactagctatgatcagcgaatttttcttttaaagaanagttggaaaccatctcttttcaaaagcatgtcaatttttagctagacaacttattttctctttttccaccttttt

SEQ ID NO: 273942 - DNA, 217 bp, Glycine max
atgatccctaatctccaattgatccaacctctcatggagcgcattatctcgttgttcattaacctctccaatgttgataaagcttgatttgaattgcaaagcccactcatattagataatactgactctaaacaacaatcaacgaacagacatatagtgtgttgatacctaccatcagtgatcaaaatatgttttttatgaaactctgcttacactt

SEQ ID NO: 273943 - DNA, 439 bp, Glycine max
  unsure (1)..(439): unsure at all n locations
agcttcctcggngccatttcctgcgaaggcaaacatttggaaagttagttttaccaagaaatgctactctttaaacgaaaatggcatacaacctcctccaataaagacaaacatcaatgtaaatttagagcaaactcatgcacatacttccttacgaacattcactcgcacaagatattcttctaactaagaaaaatgaacccacgcacaatcaaagcaccttcgttacctagatcacttttatgtacttccaaggtgtatttgctacctacatcacatgcatttcctttgctaaatttacatacatgcatactcaaagcactttggctaccaaaaattgtatatgttcacattctggtatttctaatacctatacatacacaaacttcatgatgaatcttggccacctacataataaggtgctacatttcatgcttta

SEQ ID NO: 273944 - DNA, 388 bp, Glycine max
  unsure (1)..(388): unsure at all n locations
tgacgtaacactttgagcatgaaagtatgttttctttcntttagaatgtatatacgcgtatggcaattagaatatattacatgttcttgtatgttaacatgggtaataggatactttctacacattcgcgttaatataagcattatcttgtaaactaacttctaaatgtttgttctcgcaggaaatggccccgaggaaacttgcctcaaagagatccaggaaggataaagcggccgaaggaaccagttccgctcccgagtatgacagtcaccgctttacgagcgctgaacaccagcagcgcttcgaggccatcaagggatggtcatttctccgggagtgacgcgtncagctcanggacgacgagtataccgatttcaggaggagatag

SEQ ID NO: 273945 - DNA, 387 bp, Glycine max
agcttatctagcctgtttcacaatgcttctgttgcatgaaatttgtcatccgaattaattcattttttttttgtaacagaattaattaatgtattacattagattatatcttcttttaatatttaatattgattcttaactattcacaagaatatctaaaatccaaaatatttaaatttatacgtgcagttatatattttaactttctttccgcacttcctgttcatcgtatgatcaacactattgacgatatcttatgaatccattcgtcctgtacggaatatataggttttgccaaagcgtaatataaaaaaatatattagaaagtcaatctgaataaggcaatgttatcgaaccagatcgatcactcagcacctgaagacactc

SEQ ID NO: 273946 - DNA, 341 bp, Glycine max
  unsure (1)..(341): unsure at all n locations
tcacagctatacctcatttcgtccccatgtataacaacgcctcttaatgttcaatgccacgcaatgacaagacactgcattcacaccaacgataacacacttcaaaacacataacccataacacaacagaataactaaaaaaaagaagtgaatataaaaaacaaataaacaattatttttttaaaaaagttaccgcagccggaggcgacgtagcgaatatcgacgccgacgagaggacgtacgcgcgacggaaagacnangttaccgtcaacggcgcctttgcgacgaccaatgatatcccaacacgtggcaccgcagaacaagagttctccccctttgac

SEQ ID NO: 273947 - DNA, 411 bp, Glycine max
  unsure (1)..(411): unsure at all n locations
agcttgcagaattggtcttcgctagcgaaatgatcaatgtgggtctgaaaagaggcaaatctgatcatcatgctttggtaaatgcaaaaataaaaataaaaatggggcaaatgaagagggtgagaatgagggagaaacccatgttgtgactgtcattcctatacgaccaagtttcccaccaacccaacaatgtcattattcagccaataacaacccttctccttacccaccacccaattatccataaaggtcatccctaaatcaaccacaaaacccacctaccacacaaccaatgctaaacaccacctttagcacgaaccaaaacaccaaccaaggaaggaattntgcagtaaaaagcctgtagaattcaccccaattctggtgtcctatgctatacttactccctaacta

SEQ ID NO: 273948 - DNA, 383 bp, Glycine max
  unsure (1)..(383): unsure at all n locations
cgagatgaggaagtgtagaagggtgaaactgtctgcttttattcgttgaccacagagtggtacctggagatatgtcgcggnggccaggagaccttggggacgtcaggtggggtgctattgcccaaaaccaagcttgaccaatcccgacccaacccgggcatagtcagtcaatgagaacctgtgatgtacctaaacaggcgagctcctggtggtcaacagataaaaggaacaaagaccacaaagcaaggaggcttgtgtggtggctggccagctgtgaatcttgcgtgatatatgggttatggcctctggtaatcgattaccaatggtgggtaatcgattacaacgcttaaacatgaagacaggaggctaagatagtctctggt

SEQ ID NO: 273949 - DNA, 440 bp, Glycine max
  unsure (1)..(440): unsure at all n locations
agcttcctcggngccatttcctgcgagaacatacatttaaaagttagttntacaagataatgcttatcttaacgcanaaaatgtcatgctaacctctctgattttagaacgaactgacccctcacccagaaacagctgaaacacgtatgtgtggaatatcctactatttatatcaacatagaggccatccaacacattctaattgtcatacatatatgcatttgaaaagaacatacattctcacgcccaaggcattgcgtcaaaactcacacttaatttatatcctaaacatttgctatttagaaactacctacatatgtttgaaatatatatcatacaaatttttattgtttcactcgcatttattcatattggcaagctatttacattatgcacacacttgcattcaaaagggaatttcgtgctatcatacattcatt

SEQ ID NO: 273950 - DNA, 393 bp, Glycine max
  unsure (1)..(393): unsure at all n locations
tgttgcgcgtcatgggaccatacaaactgctccttcatcataagatgtgttaaaggtatcacaatagtggcataacctttgaagaaatgtcaatagaaacccatcaatcccaagaaaccccatagagctttaagggaactaggagcatgccactgttggatcgcttggactttggcttgaaccagttccaccccatgttcagagacaagatgtcttaagtattcaacctaacgttgagcaaaggaacattgggacaatttaaggaagaatttgccttccaataacacctgaaatgctttttccaaatggaacaagtgctactcaaatgttttcctataagtcaagatttgcggtctcgctcacgtcctcatncttcactaaaatttgatggta

SEQ ID NO: 273951 - DNA, 251 bp, Glycine max
  unsure (1)..(251): unsure at all n locations
agcttgaaggtgtgtaacccaccatctnttctattagaatactggtaatgcgtctactatcattgtcatcatttttctcatcattgaggtgccacttgagctgtcaggtctctccacccttgggcgtattcttttgaaagattcgtgccccctttatgcacatgttctgtagttgcatcctatccgaaaacattatactgacactgtctaacgaaggcaaccactgggtccttccaagaatggacccggga

SEQ ID NO: 273952 - DNA, 431 bp, Glycine max
  unsure (1)..(431): unsure at all n locations
ntagtagacactgattgttcctttacttccatatgcagaagtgttgtatctcaacataattgctttagaagtgatataataaccaagactacaactagtgtaaggagacataataaccagtgatacaaaaatcggaaattgcactatacaattatgtacaaattgcgacatgattggcacaaagatgtttataaataagactgacatcatagattcgcaacttgctaaataacaaatgatcctacgacttgattctatcacacatgataatagatcaattactattgcacaagataatttattaatctctacaaactcacagatatcaccgataataaatgaactcacattagagatatgaacaaagcgcggtgatatccctaccaaccatacacctaccctcaattncaatgtcttgtgactacctggag

SEQ ID NO: 273953 - DNA, 58 bp, Glycine max
agcttgtaggccttggatcttcttcatcaatgtgagtctctgcttcttgaagcttaat

SEQ ID NO: 273954 - DNA, 404 bp, Glycine max
  unsure (1)..(404): unsure at all n locations
tgagctcactgttgctgccncacagtgctccacggaatntgtcacggccatgctcttccttgcgagccctcttggtttcttgttcaagggcttttgcggtagctgcattntcttctagtaacccggcacactcttntcggacgtctgtagcgaccaacttgaatttttctttggcaagtctcgcttttcctagttcggttttcagagctcgaacttcttcatcctcttccgaagcttccaagttctcttcgttgataatctttaacttggcgagccaatgtaaacctcgtgtacaaactttcagccattcatgataaccaccaatgatgccattacgaatgcccctaagttcttcatctttccttaacgggctttcccacgccttatggactcgttgtataacc

SEQ ID NO: 273955 - DNA, 350 bp, Glycine max
agcttgtttgaccacttaatcttttaatattttcatgttagtcctaaggtcctatttgcaatattttaaatcttataattgattactatgttttatactttttttttgtttgtaagtgttattttatgattttttattgaaatcaattaaacacgaatgtgactagggttttcattgtgcctttatcaccttctgttgttcatattatgatggcgaatgtgactagggttttcattgtataacttgtgcaagaggtcatgattgtgttcgtggtgcatgatgcataacttgtgctagaggtcgtgaaggttgtttggtctgagaaacatgttggcggtggataaagtagt

SEQ ID NO: 273956 - DNA, 460 bp, Glycine max
  unsure (1)..(460): unsure at all n locations
tgaatctctntcaacttcttcttcttcttctatgtaccaaaagttntctgaagttttctggttttccaaaccttgaaaacttgtgctattcatcttttcattctcttctccctttgccaaaaagaattcgccaaggactaaccgcctgaattcttggtgtgtctctcttctcctttttccaaaagaacaaaggactaaccgcctgaattcttttgtgtctcccttatcccttgtcaaagaattcaaaacgacacagtctgagaattcttttgattcttcccattccctaatacaaaagtgttcaaaggactagccgcttgagaattcttttgtatccccattcacaaagtatcaaaggtttaaccgcctgagacctgtgtcttaacacattggaggcgtacatctctgtggtacaagtagagggtacatctagttgggttcgactgagaacaagagaggg

SEQ ID NO: 273957 - DNA, 432 bp, Glycine max
  unsure (1)..(432): unsure at all n locations
gcttgaatggagaagacaccttcttgacaattaggtgcaagcggtttccagctacttggatgatatctcgcggngtcatattgatcgntggacatcaaactgctgggtttggaaaccagaacctaatggcaagttttctactaggagtgcatactgtatgctactagaaggagcagcatatcagactatggatgaggctttagaggacctatggcagctcagaatccctttaaaaccaacaacatttgcttggtgattgatcaaagatagaatcccaactaaagggaatttgtggagaatacagctggagaaaggctatgcccagccctacaactattggtttagtaatttatcaacatcattccttgattaaggtagcagtgtaaggatattgtattctatataaattggcaccagattcgtacgacctat

SEQ ID NO: 273958 - DNA, 406 bp, Glycine max
  unsure (1)..(406): unsure at all n locations
cgggtgatgggcggccgaatcaccttgctaggtgcgacggtgactccgaacgactggcagagtcctgtgatcaaggcgggaaatcccatggccctgttggacttatctgggtccagagggtgcctggtaggcgccatacctgcaaatagatagatggcatcagcgattaactgagccacgtgaatgctcatccgtgtcaggatggcgtacaccagctgacacttctgcagggggaggtcagaattatgatcactgngctggatgttgctgaccaacaaagtcatccagatttggtcacggtggtcatgttggtgcgcatgatccacacgcgtctcccaccagcagtcccggcaaaatcctgccccgtatacatagcaactgggcgatggcctcctcatcgaaccca

SEQ ID NO: 273959 - DNA, 449 bp, Glycine max
  unsure (1)..(449): unsure at all n locations
agcttaatagtcttctagtaaagaaatcactggtagcagtaaaattattaatcagctatatatcacgggtgatattaaataaactgcctagttataaattatttcatgcattgggctgataatagcttgtcattaagatctctatacacaaaacagaggccttcaagttcaatgaagttaactacttcagtacttcatatatgggacgcagtatatataaaatggatacttctttgccaaaaagattaattagtataaatattttaaacattttatatttaaaatggatactttttaattaacaatatatatatactcatttcttcttttaaatgaatactttttaattntatttgattacatttaattaacttgttgtacagattttgaaaccagcttttacaataatagctgatcacgagatgaaatgcctttngttattgattcgt

SEQ ID NO: 273960 - DNA, 453 bp, Glycine max
taatcaattgacaattgatggtgtcagattatccctgcactctactaggggcatctttccttggctcccttaatcatgttcaatttgttggtaagtttaggtcttttaatccaaaaaaggaaacttggttaccatctgagagtaatttggataaatgaaaatagttttggctgttatatgcatgagtatttcgatgcttgtttgcaacaatgtattatacaaaagtacctaccacatagagagtggctatgccatttggaatgcatcaagaagtttcaaattgtgtgattgcattctctggctctaaagctattgcattgaaaaattactgcatacccaacattacttagaaaaattgcaaacaatattacttggcaacaagcagtctaaagctactctgtcatcatggacctcatgtatcacaagcaaatacaaatggtaatgatgctgatg

SEQ ID NO: 273961 - DNA, 453 bp, Glycine max
agcttcatccgcagatccctcatgtaagactaggcttaaactaaacagcattattgtaatagcataattaaaaccaaaacataacccgcagatccctcatgtaaggctaagtttcaatcttgcttcaatcaagttctaaggaaacagtacattttccaatgcccaagtcacctaactgtacacacaaatgggtgatcagaccaaaggcatacaaacattaagcatttaaggaagcattaacacaaaaaaacataatcaattagatattaggtatttacatcagttgttcattagaaatccccaactaggttgtttagccagccattacaaagaaaccctaacaataaatgagattaaaagcagagaatgatagttccttacacaagaagggggattcctcctcctcttctcagcatctcacacttactctctactcaataatctctctcaaat

SEQ ID NO: 273962 - DNA, 471 bp, Glycine max
  unsure (1)..(471): unsure at all n locations
attaatatatgattaatataattaanaatatttaataaaactagctgataaattagttgataaatgtaagcataaaaagacatatttaattatttaattatatatctatgtatttaatttgtttctaataacatgtcatcacaaaaaccagggcagtatttttttttaaagtttgtattataaaactagaaaatgtttgaattgtataaagcatgatctctactaactnttctcttttttgaacccataatttttttgatatttttgtaaaagttagggaaaaagttagggagctacatacttttaattgtatttccttcttaacatgatattccttcgtaacgtgaattatctttatatgcatggctctttcttcattgactccgattataattctaaagatgtgtgcacaaatgacatatatgatagctaagtactgagctttgttacatttatacctgaattcatact

SEQ ID NO: 273963 - DNA, 441 bp, Glycine max
agcttctggtgggacatcttgacttgctttccaatctgacattcactacagattctgccttcttctattttcagattgggaatgcctctaacagcacctttgtcaatgattttcttcatgcctcttaagtgcagatgtccaaatctttgatgccatattctgacttcatcttctctggagaatagacatgtggaggagtaactggtttcttgaggtgtccataggtaacagttgtcctttgatctgctgcccttcattaggacttcactcttctcatttgtcaccaagcattctgactttgtgaagtttacattgaatccttcatcacacagctgactgatgctgatcaagtttgcagtcagtcccttcaccagcagtactttgtccagactaggaagtccatcatggactagctttcccattccagtgatctttccttta

SEQ ID NO: 273964 - DNA, 399 bp, Glycine max
  unsure (1)..(399): unsure at all n locations
caatataatcgtctataatcgattaaatgtataaagtaatcgattagattatctaagtaattgattaaagtgttcatctaacatctggaaaacaactcaagaataatgtaaacgatttgatgacctaagtaatcgattaaagtgttcttgttcacctctgaacaactaaacgagagagaagtaatcaattaaagcaaagacttctgaataaatcaatcattgtctgaaacaacagtgtaatcgattaaaatactatcatacttaattaaaccaatacaagacttaactctttaagcttcaaacaacttgttgtaattgattacgacaaatctgtaattaattaaaacaaagatgatgcacacattatgatgatgcacaatgcaaaacanatatcaaatg

SEQ ID NO: 273965 - DNA, 438 bp, Glycine max
agcttcaacctctacacattcttcttctcttctacccatgacttgagtcacttcttctaccagtttaccaacctgaatttctgcacttttaaatgttcgttgaatagatccaattgtatccttgaattgcattaacaaagtatccagattggaacctctttctgcttcattttgatagtagagttgtaactctggttccccttgataattttctaaagaatagctcttgtgaaattgaatctcctgattttgtattgaattatgattagctttagagctagcatgatatgccatgaattctacaaacgcactttcaagatcaggggctctttccttttcatattgattgtaaggatctaactcctgactccacccagaattattcgtggaatacagataaaaattgtccttgtaatgctcccttcgacaaaagtcaca

SEQ ID NO: 273966 - DNA, 375 bp, Glycine max
actcagcttctctgttggtacctctctttacgatttgcactgaggagagaagtcaactcttgagtgtactctttgaactccaagtaccgcattcaacttcatttattctatttggggcagacaatatcttgtcgaagagcataaatctgattcacattatctgatttcctatacataaatcctagaaaatcccacaattctttccttgttctacaagtagtaataatggactgacgttgtctaccaacaaaattgatgcgcacggtcagaatacgcttgtctctgtattccatacctctgcattcaacagatcctaactgctacatgatattcctttcccttcctgccacgctaactttagtgagttcggaagat

SEQ ID NO: 273967 - DNA, 428 bp, Glycine max
  unsure (1)..(428): unsure at all n locations
agcttcttatccaaggtaattcttggtggtgaagctccttcttccttgtcttattccatagtggatggtgcctcccctctcctcttctcctttgccttccgctgcatctccagggtgtaaaatcaccattaaaggacctcattgaagctcaaagatccagcctccatagaagctctacaagcaagcttccatcacaatatatataaattatcatccgggaaatcatcccgaatgggtaagtcctcatcagacacatgttcgatccgactcaaatgatcagcaactaaattntatgctctgctcctatcacggatctccaagtcaaattcttggagccaaagcatccatcagatcaacctaggctntgaatcagccttctgcaacaagtactttaaagctgcatgatcagtataaacaataatgcgagt

SEQ ID NO: 273968 - DNA, 446 bp, Glycine max
  unsure (1)..(446): unsure at all n locations
tctggctcatttggaacttcaagctcctctgatcagtcctaattaanaatatgtttcctagcagataatgcctncatttcttcactgctaacaccactaccatcagttccctctcatatattgacttgacttgagccctgtctgacagagccttgctccaaaaagctaaaggtttctcttcctacaataaaactggccctagcccagttcctaatgcatcagtttccatgataaaattnttagagaaatctggtagtgccagaataagaagcctnctcattgctgccttaagctcttcaaaggcatgagtagcttctacgaggtatntataaaccaagttagagatagttacaatccacgtatttataaacctctatacagcagaactaacctatactaactctaacanaaagctaactaactctaacagctagctacctaactct

SEQ ID NO: 273969 - DNA, 397 bp, Glycine max
  unsure (1)..(397): unsure at all n locations
agctttgagtagaanagaagtaacagatatgattgataagtggtttgctgcatgtgaagaggagaattggcttgacaaatataatcaagtaagccagaaattntatttaatcaagtaagccagaaattatattttatcatttgtatagcttcataaacacgctggtaggacacaggcctgccagggttttgccttctttctttgtttatagatctcttttttttttttcttgcccaaactcttgtacttttattgaaagtttcaaatgatattgaatacattgtatttttcattaaaaaaagagattcttgcatggattaatcaagatcacttgcatcactacaccataaaaaattgcatgtcagatgaactgaagtgaaagttgatgaatatttag

SEQ ID NO: 273970 - DNA, 433 bp, Glycine max
tgcatgcatattgacggacactgttgatgcgacatagaatgtgtactagaaggacttatcagctgcattgactaaggacaatgccgaaatgagaaccattagaagaattgcaggaccaatgcaatcgagtgggaatattgtgttgatttgacgaccctctgcaaaggctaagattattagagggagggatataagacctgagggcagaaggaatctttttgattgacccaaaaagattctgcctctttctgaactcatgtgcattaccaatatgacaagagtcaccaagttagaagctgctgttaagagaacgaccaagatatcaaccacaagagggtagtttgaacggtatgttttgtcacacaaataatggtcacggcaattgattgtatccaaggtttccttcactcgccaactgatgcatttgaagaat

SEQ ID NO: 273971 - DNA, 402 bp, Glycine max
agcttgtgtcacaattcactgtgacagtcatagtgtcattcacttagcaaatcaccaaatgtaccatgagaggacaaagcacatagatgtgaaactacacttcatcagagatgtgattgaatctgagaaggtgaaggtggagaaagtttcaacagaagaaaatccggctgatatgttcacaaagtccctctctagtgtcaagttcaagcactgcctggacttgatcaatttcgaagatgcctaaagcagtttggtagaagtgcagccctaaatcacaaggaagacacttgctgatttggagtcaaggtggagatttgtggtgtgtgactcacaatcacaatttgcacaagtgagaatgctttaaagtggcgctgtcataaatgttgtcagttattataactg

SEQ ID NO: 273972 - DNA, 466 bp, Glycine max
  unsure (1)..(466): unsure at all n locations
cgacaaactagcttgtttaaataataataataataataagaataattattattatctataccatttttatggcattatgaatgacagtatgaagtagcataatgtgcttagagagttcacttgcattggaaaattttcaaaaagaaaaaaacttaagttaaaaggataatgcaaccagattaatacttccaaagaaaaaaatgttttgtaaaaacattttcagacaatttaaatattcttatttgactatattagtataaatcatctctaatccatatatttttaatattatgttctttttttttcattttcttttgatatactctgtgttttaataactcgaattcaatatgattctgtttatcaattatttttggatttgtgcattacttatacgaaattttataagtttcttcttttcgttagtatcgtagtatttcacgacgttntaacataattaattgat

SEQ ID NO: 273973 - DNA, 357 bp, Glycine max
  unsure (1)..(357): unsure at all n locations
agcttccggcggagtccgactccaggctctgcttctctcaggatcgctacatcttccacatactccgatcggatggcatcacctacgtctgtatggccaacgacaccttcggaagtgagttcttcttcttcttcttctcctcctccttcgtaatcgtaatcttaatttcatatttatacaatccgatttacttttagttaagacgtagatgctagtatgaacctctagtgagtgacatgcgtagcttggaggaaaatttctgcatgacctctttttttcgtttaacgaanacataaccgatattgagaacgtgtgttctgtaaattcaaaagtgaggaggagaaaaataaaaaccct

SEQ ID NO: 273974 - DNA, 371 bp, Glycine max
  unsure (1)..(371): unsure at all n locations
ttcggatctgcaaccaagaatgctatattctcattacttatgttactgatctatcatctgtggcctgtggctacacatagcangaagattgatacaccatacaccttagttgtttctcttgtgatgactgcataatgtttgcccttcaaagttgcttaacggtgcaaatcctacttggagatccaccataatgccaacccaaccatagtttaaccttgcagcattttcttatangcaaaattgcaaaattggtcccccactttatctccaattatggatttgatccccctataatttaattcacaaatntggtcccccagttttataaatccctacaaaattggtcctgaaagtccaatttggacgttgac

SEQ ID NO: 273975 - DNA, 176 bp, Glycine max
agcttctccctctgttccctataaatagggggaggagggaagaacaaaaaccgtcaaccctcctggtatctgacgatcacttgaaattagtgaaaaaaaatcgctttcgtgaagaaaattcaagccgaggcgctttcgtaacgcgttcgaaacattttcgagggtgaattcgcgaa

SEQ ID NO: 273976 - DNA, 349 bp, Glycine max
tctaaactctatacaagaatgaatctctaataccacttgttatacaagcggcctcatatatattaagaaggggggggggggatacacaaaaagatgtaacacctatggaagtgcgtattttaccagctaacagtgacgctacctaaaccaacaaatatttgtgttgctcaaccactaatgtagctcattaatattgtcttacaacgcaacgaaaaatttctgtgtcaatcgattaaaatttaaaacacataattatgcaaaatatattgattattgattacacaaaatgtgtatgcaaatggtacatggtacttcacttataataccacctgcctacagcctttcatga

SEQ ID NO: 273977 - DNA, 355 bp, Glycine max
agcttgaagcacttcgattttactattcaaagcttaatgcttctacttgtgatgaaaagattaataacataaaagagaagatgtacaagctctttgatgaatatgtgagtgtaaagtcaagttcatctactgcatcaagttctcaacaacctaccgttgaagaagatttcagtatagaagaaaatcaagagatggatgatccatataatgttagtcttttgtttaatcatttaattgttttattattcaatttattttatttaatttttctcttatattggcataggaatatatcaattatgtgagccaaaatgttaacgtcaatgcaagtctgaattagatctatatttggctg

SEQ ID NO: 273978 - DNA, 400 bp, Glycine max
  unsure (1)..(400): unsure at all n locations
nttaacatcaatattcatgcacctaaggctagtaaaatcatttcatggttcccttctctatggtaggttatttcatgattactctggtgctttcttaggaggatatattctatatgtgggtatctntctttcttttcagctgaactagagggagtttttttggttatttctatagctcattccaaaggttggggcaagctttggctggaggtggattaattctcttttagtcctcaaggcttttaatgttatcaatgtggcttcttangatttaagaaatgtttggatgaatactctattctattgtggcccaaatggagtttcgtgtctcccatattttccgagatagtaatgtatgcgctaatcatttggtaactatggtgtagaatactctatatgt

SEQ ID NO: 273979 - DNA, 448 bp, Glycine max
  unsure (1)..(448): unsure at all n locations
agcttgtctctgggccctctctntntggatttgtttgggggaaaaataataatagtctttgtctctcatgagtcgcagtctttccttcttattattcccatctatctattaattacttgtctcttccacagttccacatgttgtccttttggcctggtgtttttccttcttaacttatggtctttgtttttccgctttcctacatcttcttttcagaatagttgaaaataatgcaagttgtatatagactaataatacaattatattagactttataattgttataattaagaaacaatttttatttcttaactaatttttgagattgaattagacccaagtcacattcaaagaaatatatatatatatatatatatatatatatatatatatatatatttaaatgtgaaaaatcagattaactaaaatgtatctaattgtttatata

SEQ ID NO: 273980 - DNA, 469 bp, Glycine max
  unsure (1)..(469): unsure at all n locations
tcttgaagctagaagaattccctctctctctataatgtgctatgttagtgcattacataaagcgcaagatacttaagagttagggaacttagaataaatagaaaaaaagatgtaacacctatggaagtgcgtattttaccagctaacagtgacgttacctaaaccaacaaatatttgtgttgcttaaccactaatgtagcttattaatattgtctcacaaggcaaggaaaaatttctgtgtaaatggattaaaatttaaaacacataattntgcagatatatttgattattgattacagaaaatgtgtatgcaaatggtacatggtactttatttataatacacgtgcctacagccttcgatgagtagattatatatactgaagttaaaaacaagactaataagatccttattttgacacctcgtccttgatattctcaaanatattatattttctgggtatgcgtgta

SEQ ID NO: 273981 - DNA, 449 bp, Glycine max
  unsure (1)..(449): unsure at all n locations
agctttcttttcaaggaagtgaaaacaaatttaattaaagtatctctaagtccatttgttcatttaaaaacaattttccaagaccatgcatagcactgccagaaacccttagaaacaatccataaggatgtagaaagaaactaaataaaagagccatataataactatntggacagggaactagaggtaaaaatagtaaaatttctgtatcacttgcatcacattaaatgaaatgctcaagtaagaattggtttagcgttgatgactaaggagttggaacattgccctcagtattcggctcatgcattntgatgtgttgtttgcactgcgagaaatgagagggtctgagcaagaagtatttaatgtgtaacacctacaaaccttattggaagtgagagtataattattactccattctgaattngcttcctgggtaagcagcacattca

SEQ ID NO: 273982 - DNA, 498 bp, Glycine max
  unsure (1)..(498): unsure at all n locations
cgctcntccggccggcgtggacttgtatacgtaacattganactaagctctcatattcttactaacaagtgcatacaccaatccacttttcacattaaaactaaaccacggtcgggtcaattaatgcttcacacactcacatgtgctcaaaatactgcatagcctctgccaacatacacttatataaacttgacggcatactacttaatctcactaatgataatgaacgatcattaatctaatcacgccaatggcgatgacggatataagaccggcttggtgggactctcttgggcttcacgtttcccttgcgtgagactgacgtctgccgtagctcttatcttatcgccacccacttaactaagtaaacgcgagctcatgtcgcgacatgtctacactacccgcattgaatccacggcccaccttcctccacggcgccgttcaaattaaaaatccacactcgacgctcttttttcctaagaacacgccgggaccccg

SEQ ID NO: 273983 - DNA, 451 bp, Glycine max
  unsure (1)..(451): unsure at all n locations
agcttgtttagtcaaaaaggtaggtcgtgtgtcttaagaaaagtttattatgcttgatggcccggctcatttagcaacaatgtttttttaataaaaatagtattaataataagatatataatattataattattttatttaaattataaaattattatagtggtttgatgatttaaattattttaattaatttttaaaatatgttaattcctataaacctagatgagtagcataaatattgactattttttttttggtggatttaaaagactntgctatcatgttacatgtaatatttgtatgtaagttttgtccatatcttatgatttaaaattgttttattattttaatgaanatctttgattntgttaaaaaaattatacaactattaatataaaatatgccttaaaataaactaacagatcaaacttatacaaacattagagttaga

SEQ ID NO: 273984 - DNA, 440 bp, Glycine max
  unsure (1)..(440): unsure at all n locations
tccatcaaggcggctagtctganaactgacctagcattnttctatttatagctaggggtattcaccacctattatttactctatttgtttatttttattattttataaaaaaagaaactatgttttattctccatcaaatgaataataaaataccctttttattttctctcaaaccattattttaattaataaatttatttccccttatttctttaattataaaacctcatcattnttttttctaaaactctatttatttacaaataacaatcctttttaaattagtttatgaaaattgggatgttacacaggacacaaattgttggacttatcctaatggtgaaagatttatgattagaggaaagaactatctaaaagataattctaaggtgagttaaccatttaaatcctctaagtatatgttggaatcacaggacac

SEQ ID NO: 273985 - DNA, 435 bp, Glycine max
  unsure (1)..(435): unsure at all n locations
caccgccgctgcagctctgagagttcactagacccaaattttttcggaattcgtttctgattggcaagcgtatcaatttgtctaagtagtaaaagctcgaatgtctgagtgtcgattttcacagggatctcgagttgaacttattttaaatactttttcaatctacaagcgtaatgaatttataaagatttaacggttggaaaacatgaatccaaaattgtcaattaacaattaaagagaaagcatagtgatacaaagtacaattcaaatggatgggaatgtcaagacctagcatgcctttatcgcgctaggatgtatgaattaatgattntctttaccaatgcaattgattttattctacccgcatctgttaaaatacttacccttgatgtctcatgatgacaagtctatgttacttacctatctcccaatgtc

SEQ ID NO: 273986 - DNA, 506 bp, Glycine max
  unsure (1)..(506): unsure at all n locations
ngcgcgctgatgccttgattcgtgaantatcgaacatcaagcttctcataagttacatttaactcactgataagtcaacaatcttcttttacatacactataggagagagcggctactaattgtaacttatggagaagctcatttcacttcacagatcgctttcggagacacctcgccccttatagttctcacgtcgtcctcatcctctcgctgaactccatctatccgtcgctccgctcttgggtccacgtcgactgcatcggcctcttcgtcttttgtccctcctctctgattcccgcaaccaccctccataccttctttcgtcttcccctctcttcccatttctttctcgcccgcactcgcctctgccgtcctttgccccccggccatactcctgctaatccatcctccatcactacttatcccgtcctgctcctctctctctccatctctcccacttctctcaccttcgtccacgacctctccctcctctttctttcccccc

SEQ ID NO: 273987 - DNA, 187 bp, Glycine max
tgacgctgcagctctgcagactgattacaggtattcctttgcgaattttcttgagctgggcatggcccaagttccctacggagtggattttctagtgctctcgcataatcccccgaaactggggctgcttactatttcttgcgccccctcgaggactctgatctaagggctccggaagtaattgaag

SEQ ID NO: 273988 - DNA, 431 bp, Glycine max
agctttctctctcattattaattaattaaccttattaattaattgacattggttttcaagggattgaaggatccgtggagaagcttggatagaacagattataaggaggacacaaagttaaaccttagaaccagaggtatgtgtttagctcctatttcatgtactcctctagtttacagagaaagcagcggaccagattacaggacaccaacatatagaggatgtttgtataggtgaaattaaaatgtgtcatgtctaagatactatatatatcatatgtttatgtatgtatatatgtatttatgtacgttgctcgaaaggaaaaattataaattaaggtctagtgaaaaaaggtatatcatggtaaaagtaactcttctagctgaactactatttggttctttagaataaaatgcatacatatagtattc

SEQ ID NO: 273989 - DNA, 433 bp, Glycine max
  unsure (1)..(433): unsure at all n locations
agcttgtagaattatggtgtacccatcacatgtggtactaggtggcggtcgggcgatggtgcacaacaagctttccacatccacaatgcgcgcataaacccaccatcccctgttgcccacctccaactgagctcacgtactcccacgtagcccatatcctcgtttctctcaacaccgggtccccatcaatcctctcaagcttccacaacatccaagcaaaacaacattcaaacagcacaagctatcacagccaagcaaaacagagccaaggcagaaaactctgctcaacacatcaaccaaaatcacagcttttctcacgtaaagaccacagtaacaattccttcgatccaattcgttaaccggtggatcgactccaaaattntactggaagtctatagtgtataagcctgcattntgaaccgtgggatatact

SEQ ID NO: 273990 - DNA, 344 bp, Glycine max
cgtcacagttctgccatcattggtggtgacttgaaaagagatggattgtccattgaggtatgagtttttatgatttactggtgtgtttataaattactgcattttgttgtttttatgatttttcacttcctactacttttgggtttgacgttgtgataactatcttaaggattacattacagctaagagtgcatttgattgctgatcaaacacaaaaggtatttgataggatcctaacaaagctaggttgtactgtcccaccacttcctaaattttgcatgcctaaaggagcgaagaagctgcattttttataccatgcactctcataccttacgtgtgtatgg

SEQ ID NO: 273991 - DNA, 435 bp, Glycine max
  unsure (1)..(435): unsure at all n locations
agcttgaagatgttcatgttaaggttgtcgaatcacaagagaataatctgagacaaaatgaacaaagtgttgtaacactgtcagtttactggacaaaggaaacttgagcggattgagtaaatcttagttttgctaagctaacaagtttcattgtattcaatcttttgtgtaaacactctttgagtgatcaaaatacattttctatcaagcatatattgtttgtgaaagtcaggagtgacttagtgataaaggatacttggtgctaggaatggcctagagagtactcattatagccagaagtggcatagagaatacttggttgtaatcagagaatngatcagaaaaactcttcaaggtttgaaggagaattggacgtagcccaagagttggngtgaaccagtataaaacctttatgtttctttattgcttctacat

SEQ ID NO: 273992 - DNA, 446 bp, Glycine max
  unsure (1)..(446): unsure at all n locations
ntgaaggtgcgtagcccaccatcttttcatagtagaatagcaataatgtgtttaccatcacgattatcgtctccctttccatcattgggggtaccacttgggctgccagatccctcctcctttgggcgtattctttgaaagattcatgcccctttctgcacatgttctgtagttgcatcctatccggagccatatcagaattgtttgacactgcctaatgaaggcaaccattaggtctttccaagaatggactcaggaaggttcctaagttagtataccaggtgacagttgtcctagtaagactttcttggaagaaatgtatcagtagttcctcatcttttgcgtatgcccccatcttncgacaatacnatcttagatggttcttgggacaagtagtccccttgtacttgtcanagtccggcaccttgaactcgcgaataaccatg

SEQ ID NO: 273993 - DNA, 429 bp, Glycine max
  unsure (1)..(429): unsure at all n locations
agctntacaacaaatatatttaaatcgttatttttattattatacaataattagagagaaaagaatataacgagtaaattattattttagcttctaaaagtgtaatgccctatcacattagtttcttaaactgttttttaaaaacaaaatcatgaaattttcaattattcatctaagtctttaaatttaacaaacagcaacagtaataatgcgaaaacccatccaatcaaatacagaaagctatatccatgtatttccttaaatcaacccaaccatctttaattcaaaaaaataggtcttgaacagaattgttaaaaaagtaagttctttaagtcgatttacgtcgacttggtcggcatccaacaactcctcaaacgaaaggccgccataattctggngagtgctcgatcgaccaaaactggngaatat

SEQ ID NO: 273994 - DNA, 585 bp, Glycine max
  unsure (1)..(585): unsure at all n locations
tccctactctcggtcacttctctacctactcctctctaantaatctttttttnnnnagagcggcngaggccgcgtcgggcttganncttgactacctcgaganacatccaanactnaagctatagcccacggctgactatatataacaatatacagatccgttttaaccttctacctagcgaaatataccaatcaaatttaaataaggcatcaactacgcaagtacaacatggacacataacatgatctcgatgaccaatcaatggaattcattgaattaccgcgcataatatccaacgagagagtctaaggatactatcagaaactagacttacgtccgtccgctatattaaccatatcaaaatacgatacgataagatgaattatctgcttatatactctgctcgaaaaaaaccaggagataacatctcacttcaaagaaagaaaaatatncaagctaacaacatatcatcaacaaacttatatctatctcatcatacagaaacgagtcaaattccaacctataattaccaaatacacctgagcaactgcctcacgttatctcatcgtaatatccaatgctcg

SEQ ID NO: 273995 - DNA, 385 bp, Glycine max
caattattctacccaccatgaaactacctacacactcaaaaacgacaatcatatgtataccaactcgttccatgggttatattccccaaaatcatgcgccaatgccattgaggcatttcaccgaacacttggtgggcgcatgtctaggcatgaataacaagggaatgaggacaatgtgacatgcccaatagttttagaacataacttaggcctaaggccatcccctacaaccccccaattcaacaaaacaagcacaaatccaaggatatagcttctcgaatttttgcaagaatgaacaaataaagcataaaatacgcaacaatcaaagacatggtgcatgatatgaacgtataagacgaagccatgcactaaatgcattcgagac

SEQ ID NO: 273996 - DNA, 470 bp, Glycine max
  unsure (1)..(470): unsure at all n locations
actcaagcttntaaggaggtgagcttagttattagaggtgtgtgtgtatctaagctctagcttctcaaggaagttttctcaaagaagcttctcaaggaagttttctcaagaaagcttcttaatgaagctacatagtctataaatagaaacatgtgtaacacttgtcgtaactttgatgaatgagagtcttgtgagacacaactcanagttcaacttctctccctttttcttccttcaatttcgtgctcacccctctctctttctctccttctttcttttccctcattgaagcatccnttttaagcttcttatccaaggctcatcttggtgatgaagctccttcttccatggcttattccctagtggatggtgcctcctctcacctattctcctttgtcttccgctgcatctccatggtggaaaatcaccattgaaagacctcattgaagctcacagatccagcctccata

SEQ ID NO: 273997 - DNA, 387 bp, Glycine max
  unsure (1)..(387): unsure at all n locations
agcttgttcgcattnttagtgaaggaatacttagacttgtgggccgntgcacccatttagtctcacattttttctatccaacaacccaagagtccgatggcatgcggagccaccttacgcttatccgcacctgctcattcggagaccccaagttcgatgacacgcagagaccaatgtggtaatctgcaccctttctcgagatgtcagcgtcttccggtcgagacaattntagtctcacattattgctatctggcgacctaagagtttggtggcttgcagagaaaccttacggttattagcacctcgtcattcggagaccccgagtctaatgacacgtagagaccaatgtggtcatctgcactctttccggagctggcagcatctttc

SEQ ID NO: 273998 - DNA, 396 bp, Glycine max
  unsure (1)..(396): unsure at all n locations
tcggaagaaagtgatgaggtacaagctctanaggcaaagcttgaaagagcccgggtagtcaaagagaagttcaagtccatagccatcatagtctgaagagagtatgatgaactaagggacgtcaatatggccacagctgaagccttggaacgagaaaccaagaaggcccgaaaggaagaacacgaccaaagcaaagttttgacgggctttatagggcagcaatagtgagctcaagctctgaatacgtgaaaggaatcatcaccggtcaaacgcatgatcttgaaggacgagctacaggtttgccttatgtcgaacagaaatttgtcccaacagttaagcgagactgaagggaatatgtgggccatcatcgataagtgcacagagaagctaaatcta

SEQ ID NO: 273999 - DNA, 274 bp, Glycine max
  unsure (1)..(274): unsure at all n locations
agcttgtaactcttggcaatttatttaaaatctaatcacttataaagttatgacttttgaaaaaatcttcagaaacaagtcacttgaagaattgtgactcttggaaatgtattttttgaaaatagtcagtggtaatcgattacaattaaggtgcaatcaattacacatcagcagatgtgactcttcattttaaattttgaaaatcttaacgttctanaacaatggtaatcgattactacattttggtcatcgattaccacagagcaaaactctc

SEQ ID NO: 274000 - DNA, 420 bp, Glycine max
cgtgttacgaacgataagaattctaagattcttcatcttctcaaatacagtatcaatacaattaatttcttttctatgaggggggtcgagcattattccttcaatttcgctacttccctttaaatcaattataactggcattaattaagtattcataatttcaacaaaaactaaaatgcttaaggatgataaaaatcaagaaacaaagttgacaacaatattcttacattatcatcttctaatacttgaagaacatcttcatggtgccataatctgctgcgttcgccaattctatcgcatgctttctccttaactatctctctacccatgtcctgtattagatcatgcatccacaggcaatcatagtcaacagttcaaagtgattaataactacatgtgaataccatcctctgagctgaa

SEQ ID NO: 274001 - DNA, 448 bp, Glycine max
  unsure (1)..(448): unsure at all n locations
gcttaaagtatgcctgagtaattcatccctatgagatgttgntgatttattggcgtatagaattgccattccttggattatagggttgaaccaagctcacgcttttacaaaaaggttcatcaagtcaagttgaaatatggaagtaaccgtcttgcaaaattggggcaaaagatgaatcgagtcacatcactgcttcgtctactgccaaacatatttaggattattgatgtccttgttacttccagtttcaccttgacaaagatgtcatggaccatgttgaaaatctaaattgattcaaccccatatcttgcgtaaaaattcgcaatacttcaactgtacatcattcgcatgcatccatgcttttcattggttgcattgctcgttgcattctttccttgaaaaataaaataaaatgaacttaatcattgttataaaaaagaaagggaca

SEQ ID NO: 274002 - DNA, 302 bp, Glycine max
aacatagagaagagtaaaatgaaggattgaagttatacaactcgcggcgatgtctcctccacgtctagaacctcacaatcactcacaaactcatctcaagctctcaggatggcttcctcttctcgctcagctctctgccagtcttctcacagcagaagctctcaacactctctagaacttggacctctttctctctagaaatctctaaacatgaaaaaacttcgagaattgccccaactccctcttcatttctgatttcaggcctaaatacgtggccttgctggtgctcgcacgcctaccgc

SEQ ID NO: 274003 - DNA, 447 bp, Glycine max
  unsure (1)..(447): unsure at all n locations
ttaagtcacctgaggcatgcaagcttcctcggngccattcctgcgaaggcaaacatttggaaagttatttttaccagtgggacgttactcttaaagcaaaaatggcatataacctcctcccataaatacaaacatcaatgtaaatttaaagcaagcttatgcccatatttccttacaaacgttctccgaaaaaaatgcacccatatacaatcaaggcagcttcgttacctagattatttacacgtacttccaaggtgtatttgttacttacatcacacacatctccttggctaaattcacatacatgcatacccaaagcattntggggtaccaaaaattgcacatgtgcacatcttggtatctctaatacctatacatacacaaacttcatgatgaatcttgactatctacacaataaggtgctacatttcatgctcttttcaagtt

SEQ ID NO: 274004 - DNA, 454 bp, Glycine max
agaatcggacatccgtgtgacaacttatgaccatttgaatatcacgagagcttccgctgttcaatttcgagtgtcactatatatgatgcgcctaaattggacattcgagttaaatgttaagagcatttgaatatctcaagagctttcgcttttcaattctgagcgtctcgttatgtgattcgcctgaatcggatatccgtgtgaaaagatatgtccatttgaatctctcaagagctttcgctgatagtttcgagcgtcttgacataatatgcgcccgaatcgaacatccgagttgaaagttatgaccattcgaatatctcgagagacttcgatgttgaatttcgagcgtatccatatattatatgcctgaatcagacatctgtgtgaaaacgtatgaccatatagatttcacaagagctctctgtgtgagattcgagtgtcactatatgtgatg

SEQ ID NO: 274005 - DNA, 431 bp, Glycine max
agcttctagtgaaaggatgtgactcttcacatttgaatttgaatttcaacgttcaaaggcactggtaatcgattaccaaaacattgtaatcgattacagcttttttgaaatcaattggaacgttgtaaattcatttgaaaactttttcaaatccagtttgctactggtaatcgattacaacaatctggtaatcgattaccagagagtaaaaactctttggtaaacatgttttgagaaaaatccatgtgctactcagtttttgaaaaaaccttttcatacttatcttgattaagtcttctcttgattcttgaatcttgagtcttgaatcttgttcttgattattcttgattcttgaaaacttgaaacttgaaaattctcttgaatctttctcttgattcttgaattctttggcatcatcaaaataacctttg

SEQ ID NO: 274006 - DNA, 399 bp, Glycine max
tctactgatgtggcagggtggggcctcttcggcttgttgccccaaccgcgagccttggcctctgttcttcctttctgagatacttttccttatgtcagcttgcgtaggtttatagcttaacccaaacttcccacggtttcctctggtgcttaccaggctggttctgccgccgttgttcttgcccaaacccattccgggctcgtagccgtaccccaacatcacttaggccaccatcattgccgtattggataggcaaggctacccagagagggagtctacggaggcaatgcttactacctcgaaagattggaaggctgtttccaatgactcctccgcggcttccacatatggcatagaggaagggcaacttaccaagaacgtcttcttcctcgatacaat

SEQ ID NO: 274007 - DNA, 338 bp, Glycine max
  unsure (1)..(338): unsure at all n locations
agctnntaatttgtccttcaatctcaacttgttacccagcgccaatgatcagtaggaaccctagtacatccataaaccctagttgtcccgttggttgtccagacccaacggcccaaggggtcccaatcgcatgtttgcccatgcaccgccatgcgcatttgtttgttcacaggtttgccagcgcatgaagcccacacaccaccgtcttacaacttcgtttgtcatgaaaccagcacagaacaggtcgtcagtgtcttctgcctctgtttcagaggtcaattagctaaatcaatcaaatgttgatggcgcatacggcgcgtgaaagccaagtgccacct

SEQ ID NO: 274008 - DNA, 411 bp, Glycine max
  unsure (1)..(411): unsure at all n locations
actaagctntaaagcgcgggtctgggaaatnggtacgaccatgcccttctgatttccagcttggatttggtacgaccatgccctcctgatttccagctgggaaattggcgagtggaggaacgctccggcatttacgcgacgagcataatgtaaacctttacggttttaaaagctctatagttgggcctaggctctagagtttttccttttgttaaggctctgtgtcttttgtttttgaatttataatacaaggatctttcttcatctgttcctggtctctacccattctcattcatttgcatgtttacttctttttctgaaacggcagattcgatgacgagtcccccgaaggtactaatacctgcgacccgcttatcgacttcgagcacgaaatgaatcacacggaagatg

SEQ ID NO: 274009 - DNA, 503 bp, Glycine max
  unsure (1)..(503): unsure at all n locations
agccatgggatgaacctctgattgngacctgtgagccagctgaggcatcaagcttacagatatatagtaatgacccactaacctagaattaanataacttaatgccattaacctagggaattaaaacaaacttaatgactgagtgtaactgaaatttgtggccaccaaaagtcacccccaacagccaacaaatcaaccaccatttggtcttcccaaaggcttatgcctanggttgccattgggcccttattacaacttgaactaaagcccttttagttgattaacccaaaacatattntttgtcagccaactttacaaggattgggccattatttagacaaactaaacacttctaaaatgaaataaagtggtgtcatttagtccttcatttgggccatgatacaactcacaaccctggacttttctcctttgaacttgggctcgtattccaatagtatggacagcactttgtgaagagcttncttggctttccttgctctaaa

SEQ ID NO: 274010 - DNA, 413 bp, Glycine max
cattcaattcgtgcgtgtcgatatgttacgggactctattagacattcgagtacaaagttatggtgcgattgtattggctcagagcttcaacattcaatttcaagcgtctcgatatgttattggactcaatcagacatccgagtaaaaagttatggtcgtttgaattggctgagagcttcaacattcaattacaagcgtctcgatatagtacgggactcaatcagacatccgagtaaaaagttatggtcgtttgaattggctcaaagcttcaacatttaatttcaagcgtctcgatatgttacgggactcaatgagacatccgagtaaaaagctatggtcgttgaattggctacagcttcacattcaatctaagcgtcttatatgtacgggcccaatcaaactccgagaaaaa

SEQ ID NO: 274011 - DNA, 435 bp, Glycine max
  unsure (1)..(435): unsure at all n locations
agcttgtaagagatacttaacataattggattgtgctacctcattgccattctttagttcaccttaaaaaaatattagatagtgcataatgacatttgttaaataacaagtcaaatgtacaccaatgcaacttgaaaaaatttaaataataattatacacaaaaaagcattgtctaggtacgtaccattccgaagcattatttttcttcaaatcttttaattggattaatatattttgccttttatgtattaattgaagattagctgagctgaagactaaaatctatatattacgaaatagcataacatanaaggtgaaaatattgataattaatcttgtcaactatcatatatcaatcatgcatgctatgatccatggattcatcactaaaccagccttgtccaagttgtcaaattgatcaaaagggtcaactc

SEQ ID NO: 274012 - DNA, 354 bp, Glycine max
atccacaaacttatggccagactgaggtcgcgaacttggtgcgggagcagtacttacgagccttagttcaccgcaagccaacgtcgtgcgggcaattcctgttatgggttgagtggtcatacaactcttcatgccactcaggcacaacgatcagcccgttcaagatcatctacggtcggaaaccacctgctattccggaatatttgggggggacatcgtctatcaacaccgcggatgatgtgctcaaccaacgcgaccaggttctgaagctgctcagtccgaaactgctcatggcacagcatacgatgaagtatactagatacgcacacagacgacctcaagagtctaacatcc

SEQ ID NO: 274013 - DNA, 438 bp, Glycine max
agcttcaatttacatactaattaaaattacttatcttgaatgtaattctggagttattggttcacttgtactagtaggtactttttttatttctgtcttattcttatgtcttcttgtctttagaaatttgattttcattacttgatttctaatgaaataggaatggatatcataagtcaaaacaaggacgagatttttagcatatttggtgagaactatcttaaggcattattgagttatccttgacattttaattactaatttaacttctgattatggaattttgttgttatttaatctgaatatcacccatttttcagttgctatcaatttttaatttcaagttaacaattcagggtatttgacaactccttgagtggacaatactattgcatatgttatcttcaaatttgactcatcggtttcattaacaggggg

SEQ ID NO: 274014 - DNA, 442 bp, Glycine max
  unsure (1)..(442): unsure at all n locations
ctcacaagttntctagttctctanaccttgataaaaaacaagtgtgttattcatctttttcattcccttctccctttgccaaaaagaattcgtcaaggactaactgcctgaattctttttgtgtctctcttctcccttttccaaaagaatgaaggactacccacctgaattcttttgtgtctcccttctcccttgtcaaagaattcaaaacgacacagtctgagaattcttttaattcttccctttcccataaacaaaagatttcaaaggactaaccgcctgagaattcttttgtttcccccttcacaaagtttcaaaggactaaccacctgagaactctgtcttaacacattggagggtacatcctttgtggtacaagtagaggttacatctacttgggttgttgtgactgagaacaagagagggtacatctcttgtggat

SEQ ID NO: 274015 - DNA, 381 bp, Glycine max
  unsure (1)..(381): unsure at all n locations
agcgcgtgtacaaagctagaggataaaaagacctcgagtgttctccatacatacctgggtaatggcaacagctagatggtccgcccatgtgacgccatgatcgcttgcatcactgaagatgagaatgcgtatgactaccacagcccttcgattagaaaactccctgtgccgataccagggataacaggcggggcgtcttgacctctgtggaaaagttgaatattatgttgatgacatgttggtggagcatcagcgcgtgaaaacatccgacaacttggaaacttatttgtgaacttaaaagcacccatgctagtaacctataagagttgtttcgacctagaggaggctaagatttggcgtattgagacctataacggtgtn

SEQ ID NO: 274016 - DNA, 287 bp, Glycine max
  unsure (1)..(287): unsure at all n locations
ccataaaccataggtgagccgataggatgccaaacccaacggtccacggggtcccaatctcaagtttgaccatgcaccgccatgcgcatttgtttgttcacaggtttgccagcgcatgaagcccacacaccaccgtgttacaacttacgttgttacgaaaccagcacagaacaagttgacagtgtcttctgcctctgtttcagaggtcaattacctaaatcaatcaaatgttgatggcgcatacggcgcgggaaagccaagtgccaccttctgaacctncattcatc

SEQ ID NO: 274017 - DNA, 310 bp, Glycine max
gaatccggacctaagccacgcagcgcagcttgaccacccaattttcctaacccacgcaaaaaggacaacgctgaaatcccgacaattcagaaaccacgtaagaagcaggcaggtttcacagactacagcacccccaaaagccaagcaagccctcaaaactccccgggcctaaaagtcccagagctcttgaaacagagctattatccaccctcataacaaatcacctctaaatactcgaaaaatcccaccagatcaacttaaccaataccaaaacataataatgacaaaaagccattccggggcacaccac

SEQ ID NO: 274018 - DNA, 414 bp, Glycine max
  unsure (1)..(414): unsure at all n locations
tctcacctactttgctataaataggtggagaagtgaagattataagggttcagccncttaggcatttctctctctctcgaaatagctgaggaaaattagttccgtgaagaaaatccaagccgaggcgcttccgtaacgtttccgtgagtaattacgcgaagattctcgaccgctcttcaagattcatcgttcgttcttcgttntcttcagtcttcaacgggtaagtaccttaaaccaagctcttcaattcattctatgtacccgtggtggtccacattntatttcatgtatgtttgttctcgtcttcattcactctttatatccccttttgacgcgcttaagccatctatttaagtcatttctcgcttaatctanaaataaaataaatttccaccgatcgtttgaattgtatca

SEQ ID NO: 274019 - DNA, 373 bp, Glycine max
agctttctcaatcacctcattaagaactagttcgccatgcaggatgtgtctgacttttatgaaagatgaccgcctctcatcaatgagaccagatatcacttgtctcaatctatatgctaataacttaactatcacctttgtcatacattcagtcaaggagattggtctgtagtcatcaaatgactgggggtgtttggttttgggaattaaagctatgaaagaagcattactgcctctagggaagctgccatgcacatggtaatcatctacaaatcttctgatgtcagatttcatcatttcccaaaattctttaatgaatttgaagttgaagccatcctgtccaggacagttgtccgcatcacaactccacact

SEQ ID NO: 274020 - DNA, 244 bp, Glycine max
caattttttttatccatctgaaatctgaaatgattattcttgatctatgtaagacgagctaaatctagctggaatggattttaacaaatacctcactgctctctttcattctaatttttattatattcttaccctgagttagaaaccttaccacaagtgtctacttggtcattaatctcactcactttctactacctggagcttaggtcgcttctacacatgtcatcgtagtgaagccttatac

SEQ ID NO: 274021 - DNA, 419 bp, Glycine max
  unsure (1)..(419): unsure at all n locations
agcttgccacacatttaaccgagaccagtctattntagaggctcccaaactgattggttgggatgagattgactcttaaaccaaccatgaggattaataactctaaaagaaaaattataatcatccatccgacatatcaacttaggtgggaaaaatcaatgacaagtcaacaagtacaatgtatgacctctaaagagattgcccattcattctcatccaagtatacctacctctaatacctaacaagataggttggcaataaatcacaaagacatggagatatgtcaagaggcatacccttcttgaaatgtcaaagaggctcaacgatgttatcatcatatgttgtcatactcaaacacggactcgacaaacaccatgccaagatgtttggcaaggaagacatattacacaataatgtg

SEQ ID NO: 274022 - DNA, 327 bp, Glycine max
aagctcggcttttgttttactaaattgttaacaggttcatgcctatgagaggtcagaccgagtttacaattacaatttagatccatgtggtcctgtatatattacagttggggatgggggcaacagagagaagatggcattcaaattcgcagacgagcctggtcattgtcccgatccattaagtactcctgatccttatatgggtggcttttgtgcaacaaattttacgtttggtacaatagtgagtaacgtttgatgggatcgccagccacattacagtgctttcacgagaaagtagctttggatatgggactctagacgtactca

SEQ ID NO: 274023 - DNA, 417 bp, Glycine max
  unsure (1)..(417): unsure at all n locations
acgtgaatatcanaaatcaatttcaaattatattctatcttcaaaatttaaatatgctcaaacatgtatatgatatattatcagatactcgtaatatcaactaaacaaattgacctaacttcttatctctttttgatttatcattttcaatatcttcttattttaacttgaatttgaatagtttaaaaaaatattttttcaatatataaaaattatctatcataaatataaaatataatttatttgttcaaaaatatttatttattatatattttaattataatataatttatatatttagaagtatatctttatcataaattataaattctcatttataaaataaacatttactctatataatacatagactaaaatactagtatatctaaattaaatgcactatttaagttaaat

SEQ ID NO: 274024 - DNA, 443 bp, Glycine max
agcttgatagtttacttagagtcatccccgttactccctaaccttttaaaggaacatcaaaaatggtaacaagaagtacctccaaattaattaatgttattaatgaagatagtgaccaaaactcagaaaacacaactgagataggatcagtatcagagaaggacatcaatccaataaattctaaacactgaaaaacaccctccaaattatattatcaacaactaactacccctgaccttctattagaagaaagaggtgaaagtaatttcaaaagttttagtgcaaataacatttatgagtggaatatagatgcccaaacggagtacaatatcatgaatacactccaacacatgaccatagtagccacagcctaccaaacattccatgagtgttcagaagaaaccattattgacatcctaatagcaggattttccggacaattg

SEQ ID NO: 274025 - DNA, 347 bp, Glycine max
agccttacgttgttccatgttgctgcttcccttatctctatcaatctccccttttttagctctgatgatgccaaacatgaatgcgacattgagtgcatttggagagtcttgagattggattggaaacatgatcctttgccttatcctgaaaaattcttaacacttaataaaggattaattcatcatcatcgtcatagatgtccaaatataacttatacacacacacacacacacacttacatatatacatatataaccatctttatatacaacaatgctcaacatatatgaccatctttatataatacaatgctcaacatgctatgcaatgcaattgatatgcaatg

SEQ ID NO: 274026 - DNA, 450 bp, Glycine max
  unsure (1)..(450): unsure at all n locations
agctntntatccaaggaatattcttggtggctaagctccttctttcatggcttattctctagtggatggcgcctcctctcaccacttctcctttntgttctgctgcatctccatggtggaaaatcaccattgaaggaactcattgaagctcanagatccagcctccattgaagcttcacaagcaagcttctatcaagccccttcaaaaaactaagttttataacctcataacagaaatagtttattgtcccctagagatagtcaactaaattgttcttcacatcatctaggttttctgaagaacatagtcaattatattaccatataaaattgattttttgagacaagggaaaactctccaaacccaaataatcgattataaactaatgatagttgactaaatgccaggcaatctcaatactggaatataaggcattggtttaatcaatt

SEQ ID NO: 274027 - DNA, 472 bp, Glycine max
  unsure (1)..(472): unsure at all n locations
tgtgactcttggcaatttctttganactagtcactctaaatgttgtgactnttgaaagaatcttnaaaaacaagtcacttgaagaatgtgactcttgaaattattcttcgaaatcagtcactggtaatcgattacaattaaggtattaatcgatacacatcaacagatgtgactcttcattttgaattttgaaaataacaacatttaaaagctctggtaatcaactacaggtattgtgtaattgattacacaagtttaaaatactctaaaactgtttaaacataaatcgtaactctcgaaatttgaaatcttaatgttctaaaacactggtaatcgattaccagagagaaaaactctttggtaatgatcttgtgaaaacttcttgtgctactcaatgttttgaacaacttctttagtacttatattcgatgagtcttctctcgattcttgaatcttgagtcttgaatcttga

SEQ ID NO: 274028 - DNA, 448 bp, Glycine max
  unsure (1)..(448): unsure at all n locations
agcttgttcagaaacgtgcatttgtgtgcaatacacaattcccggtacaccacaacaaaatggtgtatcagaaaggcgaaatagaactttaatggatatggttaagagcatgttaatcaattagactttatccgtatccttgtggatatataccttgaaaactgccatgtagttgttgaacagggttcctagtaaggtaattccaaagacaccttttgaactgtggacaaataggatacctagtataaggaacctgcatgtttggggttgccaggcagaaataaggatttataatccgcaagaaagaaaattggatgcaagaacaatcaatggatatttcattggttatccagaanagttaaaagggtatatatcttattgttataatcatagtatgagaattgtcaaaactggaaatgcaaggttcattggaaatgatgaaatcagt

SEQ ID NO: 274029 - DNA, 385 bp, Glycine max
  unsure (1)..(385): unsure at all n locations
actaagctngatgaagctaagggaaactgagtaccatatcgctgtaactatgtttcttatatctacctnttggacatgtcttacgttgatgctcttttatttaccagaaatctgctttcaatttcacctctgaataattgcaattacatcttttgaatttagaaatgaattacttattatctatttccatatgttggatggagagcttagaaatggaaaactcatttgagtgtaacattctgtctttttaaataaataaaaaagagtcttattaaaaatcaataattttacgaaaaaatagtgttttcgtaattaaataaatgactgacaacatgatcttattaactaaaataataacgtttgaaataaataaaatacacatatg

SEQ ID NO: 274030 - DNA, 383 bp, Glycine max
  unsure (1)..(383): unsure at all n locations
agcttcaagtgtattcaattctttatcttttattcttttagattgaggtctttggtttgggttactagggatgttagataattgattacgtttcaattctagatctttccttataggattcaagagaatgatttgatttctattagagaattgagtgtgcatagtgtttggacttatgttctctatataatggaagctctaagaggacttataataacaagatgtaggtccagattagactgaaccagcataaactcttgtgtatgtctcttattcattataactctcaattntgtaatcatcttggttgtggaaatgatatcaagggccatcataatagtttatgatttctaaagatcttttgaagaacatttaattgattt

SEQ ID NO: 274031 - DNA, 505 bp, Glycine max
  unsure (1)..(505): unsure at all n locations
caagagaccataccatctacaactacacatatatggatcatactatatcgcacctcatcagatggatagtgcgactcagccatgcttcttaatgcatatcgtttcaagactcttatagcgtttatacaacaccgcacgctttcatgtgtgatgagcatgtcaacaagactatgcttcatagtccattcaacatttgtgctgtctttccacccacgctctccactgtgatacgtgcaggagaagcgtcacaatcaactacgaggtcccttcatactcagtgacatagacgctctgagttcctaactaaaatctgagagatgattcttaacatttggaacagaaatgcgaataaagatataactgtatctgaaaatacgcctgaccacaagagtggatggcgtcaaacaaaacgattatatatctcttgattatgtgcgatgtcacatcaatagggtaggaccatacgcaagactgttttattagtatagtgtcttgaacccaatcn

SEQ ID NO: 274032 - DNA, 421 bp, Glycine max
  unsure (1)..(421): unsure at all n locations
agcttgctaaccaatgtaaactcctaatatctcccacactntntggggtgggccattcttggatggccttgattttcttagggtccacttggaccccatttctaccaactacacaccctaagaaaactatattatctacacaaaaagtacacttctctatatttgcatagagggtgtttttcctaaggactgaaataacttgcctgagatgtcctaagtgatcatctaggctcctactgtacactaaaatatcatcaaaataaacaactacaaatctacctatgaaatcccttaagacatgatgcataagcctcataaaggtgcttggtgcattagtgagcccaaaaggcatcactagccattcatacaaaccanacttggtcttgaaagcagttttccattcatcaccctttttcatcat

SEQ ID NO: 274033 - DNA, 362 bp, Glycine max
  unsure (1)..(362): unsure at all n locations
tgtagaatggctagacatgatacatgtcacgtgtttggtttggttcaaggataaaagggatgcgccacattatttccatgacacacatgcaaaaatgatgatttggagacttcatgcaaaactggtcatgcatgcacctatgtggacgctcaagtgtcaaatttttatggtcatgtgatgctaaggctcacgattcatttcctctattttaaatcaacccaatgtttccaaaatatgttcttttatcaatttgtgcattcatccgagtccatttctggcgtccggngaaatttcacagcattcacccttcacgtgtagacacattnttcaaaaatttgttatgatcaatgaattttttcaaa

SEQ ID NO: 274034 - DNA, 133 bp, Glycine max
aaaccgcaggatcttgccggagtctcttagtctgcaagacccttgactgcgaaacaggtccttatacgaccgacaatgcggagcaggcaaactacgtctgttacgccgacaactggacccacaccatgatttt

SEQ ID NO: 274035 - DNA, 398 bp, Glycine max
  unsure (1)..(398): unsure at all n locations
agctntctcataagtcctaaatgacatttcatgctaggattatctcactgtaacctccattgaccacagagaccagatttaaccttgcaactctcagagcctcactctttttccactcataacaccacattctcactttctaaacctaggttaactctacccttcatctctaacagtttccataagcaatttcagcatataaacatcacaagcatcatcacaaaaaccctaaaacagaatgggtatgtctaactcatccaaacatggcaagttcaacatgctttcaacaagagtcttcacaaataactatcacgaagcagaaaactaacagaactacccatcatatctnccagaaccccatacccacgaaaatcaaaggagaaagaagtcacccaaac

SEQ ID NO: 274036 - DNA, 423 bp, Glycine max
  unsure (1)..(423): unsure at all n locations
tctcaaagatgtacttaaccaggtccatcttggatatcaactaggtggtatggctcagcatgtattgtcttagacggtgggacgcccagactaaagcacaacacgttctttcgagcagggagtagttcatttcataggccgtgaactttttactcaagtagtagacagcgcgttctcttcttccggactcgtcatgttgccccaacatacatncaatcgactcatccaaaatcatcatatacaagatgagaggccttcctggtaccaacgacataagcacgagagggttcatgagacactgtttgatccttccaaacgcctcttgacaatcctcattccaacggacggattggtttctgcgtaagagttggaataacgggtcacaattagccgtgagtcgtgatatgaatctggccatataat

SEQ ID NO: 274037 - DNA, 430 bp, Glycine max
  unsure (1)..(430): unsure at all n locations
agcttttagaatntaacataactatgattattgaagaacctattcatgttgttttttgcgagactaaccctataaggtcaagaaaggaaacacttgatgatattacagattctttagaagatatgcatattcatgaggaagggcacaaagacaaaggaaatggaaatgatgaagactctcaaactaatgaaactaaaacaagtacaaatcttccaagagagtgaagaacttcaagatatcatcctcttgataatatcatcggtgacatatcaaaaggggtaacaacttgacactctctcaaagatgcatgtagtaatatggcttttggttctttaattgaacctaaaaacttaaatgaagtcatagntgatgaacattgggtcattcgtatgcaagaaaagttgaattaatttgaaagacatcaagtctg

SEQ ID NO: 274038 - DNA, 452 bp, Glycine max
  unsure (1)..(452): unsure at all n locations
ntgtagggtatcagctcgcgatctctagtttcccattcctctctcagctgatggattaccaatgttgagtcgccgtataccttgagtagtttgacattggagtcaatcgctgcctagacggctagggcacatgcttcatattcggccatgttgttggtgcagtcgaatcctagcctggctgtgaagggtacacattgattgtccggagagaccaatactgccccaacgccatggcctagaatgtttgacgctccgtcaaaccatacgatccatctgtcccgatcttcgtccaattnttcctcaaacaaggccatgatgtcctcatccgggaattcacgatgcatgggctgatagtcgctaagaggctgttgagccaaataatacgctcaggcgctcccttttatcgccttntgagcgacgtagactatatnaaactccgatagcacgacttg

SEQ ID NO: 274039 - DNA, 372 bp, Glycine max
  unsure (1)..(372): unsure at all n locations
agcttgngtgaagntaagaatcttctctttctttcatctctcaaacacgtgccactcttccaccaccaccaaaggagagtttcaaactttggtctctctagctttttctctacttacactcaaacttctctactatgacaattttggtatgaagaactaacgaataaagatgtgtattgtaggctatgttggaacacaaggtgataaatagaacaaatgatggatgagaacttgtaagtcccatggttactgagcctttaatagtccattgctcactctttctcacctctttcatttctaacttattnntgtttattttaataattntcttgcatttatttactaattaccattccataaattctatctaca

SEQ ID NO: 274040 - DNA, 436 bp, Glycine max
ggactccatctcattgaagcgcatatccacttgtaattccaaagtgtctaacctttcaccaacaaaggtttgaagaccatcaaacctgtccaaaatctatgaagtgttgaaggaaaagggtcacgagatgacgctaaggcaatggagcattcaatcgcagatgccttatgcatgcgatatctaacaagatgtgcccaatcaatttgtatacctttatgaaaggccgacataacaatgagatcttcttcagaaacctgatcagcgtttgaagatctcggaagcaatatgcgaacaattagttaatgaaggatgcgactttcacaagccaatgaaccggcatgaagcctttcggtcatatccgcttggatggtgcaaaccaaccggtgggcatcatgtacagagaaatcaatcttccaatcgtcaattagtgcacctt

SEQ ID NO: 274041 - DNA, 427 bp, Glycine max
  unsure (1)..(427): unsure at all n locations
agcttggagaggatgcttcaatggaggaaatgatagagggagagaaagagagaggggagagcacgaaattgaaggaagaaaaagggagagaagttgaactttgagttgtgtctcacaagactctcattcatcanagttacaacaagtgttacacatgcttctatttatagactaggtagcttccttgagaagctttcttaagaaaacttccttgagaagcttctttgagaaaacttccttgagaagctagagcttagctacacacacncatctaaaaactaagctcacctccttgagaangcttcttgagaagctagagcctagctacacacacccatctaaaaactaagctcaccttcttgacaaaatacatgaaaatacaaaaaanatccctactacaaagactacccanaatgccctcaaatag

SEQ ID NO: 274042 - DNA, 451 bp, Glycine max
  unsure (1)..(451): unsure at all n locations
tggttccttcatcaaaaagacattaaatgaatcataccaatataagcaaatcatattaaaataattgtactttggaaatttatgtaacctaaaatgatgagggtttgtctaccctacaaggtagcatattacagggaccacaacgagatggaagcaaactaaagagctgacaggatttccaggtagcccaaaagctagaattttgctttctatagattgaaagccaatctctgtaaatgtaaatggcttgcttggttaaatacacacctganagatataaattaaaaataaataaaataattattaattatgataacatgatttacaaaatcatactcaccaaaacactatacaaaagggaaaaatatctataacatgctacttctacaactacaacacattgcatccatggtctagattacaggacaccataatttaattaataaatagt

SEQ ID NO: 274043 - DNA, 400 bp, Glycine max
  unsure (1)..(400): unsure at all n locations
agcttccaaccagataattcttcattcatctgtgcttgagcctccttatcaagctcctcataacgggtcagatccctcctaacagtccttaggaagatcacaagaacaatgccagcaagaaaagtgatcaccataagcgaattaaggatagaaaaccaatgcactttagctccctccatcttcaagtaagcatcccatctagatggccacttgatgtcactctcctcaaaggtgacctcataagtgaaaacaacaggctgaccctccttgataggcattgccacagtggctggatcgcatctgatagacgatggatacttctcatacatcttcaaggttttcgcagaatcagcattatgcataatactacaaggaatcacctcanacccaacaaccatgt

SEQ ID NO: 274044 - DNA, 320 bp, Glycine max
  unsure (1)..(320): unsure at all n locations
ntgatactgtntcgagttgttgggatgcaaaactgggatcaaaatgttgataagagccaagcatattagatacatgccttaatatctttatggttccaaagtctatatgtcagacaaaatatatgtctttcccttttttatacttaactagctaaaattctcctagaaaatgcattatatatatatatatatatatatatatatatatatataatgatttgagctgcataagtgaagaataatttcataaataaatttgacattnttctttgaattaatccgagagttataaaaaatcaaataaaaatggtgtgaatgac

SEQ ID NO: 274045 - DNA, 447 bp, Glycine max
  unsure (1)..(447): unsure at all n locations
agctntgaacccaaagtaacaactatgacttgtttcaacaacacttgttgcgcttactctcaaccttcaaaagcaataactccctaattgatcttttaagattccctatcctaaatgagttttgtttggggacaaatacctaatacaaaaaaactcaccaataagtctctattgagaatatgtttacatacattctatggttaagtgaatttggctctaaaggcctatagagttatatatctacaaaatgacttctcctttccccaacatagtcatgagttttgctactttagaaaagtaagccttctttcttcacgtaagtcgcagttttttttcttgttttctagttgtattgcttgtataagacttatgatgacaaattaatctctcatttccagaatgattcatgtctttgggagagcttgtcacttcatatgcanatatatt

SEQ ID NO: 274046 - DNA, 377 bp, Glycine max
  unsure (1)..(377): unsure at all n locations
ntgaatgagctccttgagtctgatgacaagtntggatttattgtcatggatggcaacggtactttgtttgggacattgagtggtaatacaagagaggtgcttcataaattcagtgtggatctcccaaagaaacatggaagaggagggcaatctgctctgccgtttgcccgtcttcgcatggagaagcgtcataactatgtgcggaagacggcccagctcgctacccaattctatatcaatcctgctaccagccaacccaatgtttctggattaatactggctggttcagcttgattcaagactgaacttagtcagtcagatatgtttgatccttgacttcaggcaaaaatacttaactgttgtgatgtctcctaccg

SEQ ID NO: 274047 - DNA, 426 bp, Glycine max
  unsure (1)..(426): unsure at all n locations
agcttattaagttgtcacatatttctgtccgttccaaggcattacccgacgtggctgcacgagcagcatcaccccctcttagacaaatcgctttatcagctccacgaggacggcggcgacgacgtccgcgaccgcgagattgcgaaaggagatggccaggccgtgatataaatccggtgccattttcttgtcaaactgctggcagggggttgttagcccgcttgcaatctctctcgtccagcgcgtaaatcctctccaattaagcggaatctagagatgctgcactactggagggcagctctgcgcactcgccctcctgcctgcgcgggctgcgggtgctttccgctgcgacgctgttgcgcctgctgctgctctgcgttacggaaacgggacgtngattgaggtttggtccactgtccgcgtgcg

SEQ ID NO: 274048 - DNA, 342 bp, Glycine max
  unsure (1)..(342): unsure at all n locations
ntaagggaggtgaggtacgtttgaggaaagaattggaagaggggagggaggagtataggagacaaaaagtacacgcaggctagacagcaggcagcctatccggcagacaggtgggtcgaggccattggaggaaagttcgtcctttcatgtactttttttcgtgagccacaccagcgtgaggcgttttaaaaaagccgaccatttttacattaaatattaataattattaaaaagacacaatgtaagaaaaatactcgatgtcgcaatgcaaacaagatacctttttgcgcgtactttgagcaaacactacatacatgtatctgacattaacttctttaaatc

SEQ ID NO: 274049 - DNA, 420 bp, Glycine max
  unsure (1)..(420): unsure at all n locations
agcttgaggataggatggcaggggcaaggaggagtataatgcatttttttattcccttgtttcaattgatacccaggtatacatttattctatgccaagtcatatgttcattcatcggatcatgcattctttgaaaaataaaactatcatatatttatcctgtattgtgcactttgtcataattgtatttgcaggagatgtattactcaactaagagacatncaattttaattgatcagggttacaactttaaggttaggttcactctatgttgcatttctttcgatttgctctactttgtatgaagttatttttccttgaggatcaattggcacttcttggaaaggtatgcatcctcattccctgttgactatatagtgatatttataaacagtaagtatcttttctaatcttatataa

SEQ ID NO: 274050 - DNA, 314 bp, Glycine max
  unsure (1)..(314): unsure at all n locations
ntacagcagattttagtaatgacccactaacctagaattaaaataacttaatgccattaacctacggaattaaaacagactaaatggttgagtgtaactgaaattgttggcaaccaaaagtcacccccaacagccaacaagtcagccaccatttggtctcccaaaaggctgatgcctangttgccaattgggcccttattacaacttgaactaaagcccttctagttgatttacccacaacatatttttggtcagccaactttacaaggattgggccattatttatacaaactaaacactcttaaaattgaaat

SEQ ID NO: 274051 - DNA, 441 bp, Glycine max
agcttgattattaaggattagataaaatacatggatccatagttggttcttgatctaagcgttatttgatatttgttgtaagatctttgtagctattcatcatgatcacgaacaatgatattatggttgttcctcaaccgaacctctttattcctcaatagatcttttataattcttcagatggagagaagagaaattatgtgtgacggctcggtatattagtgacgaaagtcttcttatagcgtgttaatctaataggattctcattatcctctcatgggtcaacattgacatttgttcatttaagtccatattatcttatttagttgtctaacatgtttacttaatttgaccacataaaataaaactcactaatgataaataattaatataattgtcttataatattaacccacattaattattggaataaaaaaattc

SEQ ID NO: 274052 - DNA, 387 bp, Glycine max
  unsure (1)..(387): unsure at all n locations
tggtgaagtactgaggggtctagttatgtttgtgaagtattgatgggtatcatagctaaagtaatcatctagcgtcatcctctgtggagaatcttctaccatgatgtgttcttctaggtcgggatatggattgatcacaagagagtgagaggatcatttagatgagggtcctctctctccttgattaatctacacctcttgttgttctctccttcttcttgcagtgttgttccttctgcaagttgctttgatctttggattcaaaggaaaaaggttntcccctgcaaatgtacctcgcatacaagaaagagaaacactaccgtgtaggttatcaagggtaacagattaaacaaaaattaaactaagaattaaagaattaagaaatat

SEQ ID NO: 274053 - DNA, 368 bp, Glycine max
agcttgcagcacatgcctcgtattattgtttattctttttcagtgggaatgctatcgctaatgcttgctcaagcataatcctatgtgggaatactagcaagattcctactccgtgtcgtatttcactagatgatccattgatgaatagagtctaaggtagctcttgttgccttttttcacctttgctcagcgacatttaaaccatgaagttgcccatacactggaccttgagcgctagtctaggatgatattgcgaaccatattgtgacgatttgcttgcccgggttgccatccttcccactaaaatggagccgtggaatacttgcctgagtggttgatcaatccatactatgcatggatgtgcttgg

SEQ ID NO: 274054 - DNA, 167 bp, Glycine max
  unsure (1)..(167): unsure at all n locations
tcttttggactttgaacaagccatcaactcctctttcagaaccatgctatgtgctcgcgactggtccctttcttnccttcgcaacttgagttcattattgctaccccatagagctccgcgaaatttgttccggccgtactcttccttgcgagccctcttggtctctt

SEQ ID NO: 274055 - DNA, 436 bp, Glycine max
agcttctgaaatttgggctgagtgaggagagagaacgtggcttttggtttaaaaggcttttcttttcttttttcttttttttttttaaaaaaaaggatgtgccacatgtcttcttttgagtggagcaaaagggtccattttttttcttgatgtgacttatactcagtcacaagaagagaaaaatctgacctttttgaaacactaaaatcctgcctcagtttgcgtgtcatttcactggttccaatccctcgcgtttctctgcacccgtcggggccagttttcgaaagtaggcaatatatatatcaaaacactcagaatgaaaccccgagcgtggttcagaggttggtttcgttaaattttaagttgtacgtaaaacgataatttttttagactaattaattgagaataacctataactatccagttatggatttct

SEQ ID NO: 274056 - DNA, 364 bp, Glycine max
ttccctctttgaacaaatacccctcagccaaatagtatccatcttgggcctttttcccacaactcttgtaaatgggagagaaatgttcatctaaagcatacaagtccctaatgttatcaaatcctaaaatttgagctcctagggagcaaaacaatgtgtgtctcctagagagggcatcagctaccacatttgtttttccctttttgtattcgataacatatggaaattgctctaggtactctacccattttgcatgacaaattccttggaaacaaggtaatgttcccaagttcggagtactcttattaacgcataaagctctttatcatacgtggggtagttaacggtggcaccatgaagcttt

SEQ ID NO: 274057 - DNA, 430 bp, Glycine max
  unsure (1)..(430): unsure at all n locations
agcttgtggtttctttctcattctctcaaccaaaggtgaaagaaagaagagagtgagagaagagaaggtgctcctcatctcaccgctctttagttcttcttccttcaaaactcgaatgacccatttccttgtttttcgttctcttgcaggtcctgaggtaaagatacaagctttgctcttctgctcactggatcgggttccaggaattcaagggtaggttcaaaaggggttgtgttgatctgcaccaagatgcttaatttgcgttgaaaaatccattcatttgcgagacttagcttcggagatgaaccagttagttgaaagctcaatgaatactcaaagggtctctagagttcaagctccactggtaagtccaattcactccaattttnttatcagcataatagttntttttctctcttttgaatcgtat

SEQ ID NO: 274058 - DNA, 300 bp, Glycine max
ctgtgagcctgccctggtggccactgattcaccaacatatataatattgggtccaaagcaggaggtatgagcctaggctgaaatagatatttcataaaaatttcaagcattatggcttattacatttaatattttattggtagttacagtcagagacctactctcctaaagcttaagctattaggtaatatgtcaccaatggcttatatctctactactaagtcttttgatgcaagtacctttgggtttgaagtgtatacaatgcataggccactttaccttctgctaaattcaacttat

SEQ ID NO: 274059 - DNA, 439 bp, Glycine max
  unsure (1)..(439): unsure at all n locations
agctttccaaagttttctggttttctaaaccttgaaaacttgtgctattcattcttttcatctcttcttcctttgccaaggactaaccacctgaattctttttgtgtctctcttctcccttttccaaaagaccaaaagactaaccacctgaattcttttgtgtctcccttctcccttgtcaaagaattcaaaacaacacagtctgagaattcttttgattcttccctttcccttatacaaaagtgctccaaggactaaccgcttgagaattcttttgtatccccattcacaaagtatcaaagatttaaccgcctaagaatttaagattacgtgcatgtgtatgtttagtttatctagttttgatatcaacaatttttaatatattatcacatgattcanatggaaaattattaaatgtattaagtgtccaagacttact

SEQ ID NO: 274060 - DNA, 293 bp, Glycine max
tagcttcatatttgttgatgagaggttgccatacattccagcttctagagctcgaccccacaggaattccaaggtaagaaaaagggaactgcagctgaccacaattcagaaaccgagctgcctccctacaccaagtttcagatttgcccatacaaccaaattggcttttagcatagttgatcttgaaaccagatgccatctcaaagattctcaagatagatttcataactctaacattagcagtagttgcagaaccaaagaacaaggtatcatctgcatattgcataatatta

SEQ ID NO: 274061 - DNA, 325 bp, Glycine max
tgcttattgttgaagataattaggactttactttgaaatagtatctacagtaattaacatacatataatcgctctttcatattagaagtctgagcatatgaatcaacagctaagttataatgtatgagtaaatcatactctcaactaatcttgaacaacattatttattttaacataaaggatagaacctcatttatgagtaacgaatgagaagctgaaaggcgagtggaaactagcaggatcgtatgatgaaatgaatatatgacatggcttctggatcatcaatgaccaccttacagttagatcactaccatgagtgggatct

SEQ ID NO: 274062 - DNA, 310 bp, Glycine max
  unsure (1)..(310): unsure at all n locations
ttaagctccttctgctctttattagtgagacaatcaatgttattgtctagagcttcctcaagaaaggagtgcatagtgaattgttgcacaacattatcaacttcatgttcaatagcctacaccctaaagtaagcattgtaataacttggatgcttcattgcctcaaaaatattaaaggtcatcttttggtcctccatgcttagctcaaggttntcatgtcccgtgtcaatggcacatctagctgtgagcataaatggttgccccaagatcaaagacacctcaggatcctcttttatatccattacaacaa

SEQ ID NO: 274063 - DNA, 437 bp, Glycine max
  unsure (1)..(437): unsure at all n locations
agcttctggtgggacatcttgacttgctttccaatctgacattcaccacaaattctgccttcttctattttcagactgggaatgcctctaacagcacctttgtcaatgattttcttcatgcctcttaagtgcagatgtccaaatctttgatgccatattctgacttcatcttctttggaggatagacatgtggaggagtaactggtttcttgaggtgtccataggtagcagttgtcctttgatctgctgcccttcattagaacttcactcttctcatttgtcaccaagcattctgactntgtgaagtttacattgaatccttcatcacacagctgactgatgctgatcaagtttgcagtcagtcccttcaccagcagtactttgtccagactangaagtccatcatggactagctttcccattccagtgantctttc

SEQ ID NO: 274064 - DNA, 137 bp, Glycine max
  unsure (1)..(137): unsure at all n locations
actcagcttgcctanagagtccggaagacaagcggtcgaagaacttttccgcccggatacgacagtcaccgttttgagcgttgacaccagcagcgcttcaagccatcaaggatggtcgtttcttcgggagcgacgcg

SEQ ID NO: 274065 - DNA, 273 bp, Glycine max
ctgtagcatgcaagctattgaacaatctttcattggggtggtgattaatatctatattaacccatacaaaagaaataaaatgggaacaatggctttcttatcgaagggtttgagcatatgatgaatgaaatgggcaaagggtttagtttttatagctcgggctccttagctgcttatttcggagcacgttacaatataagggtttattacacattgaggatggaactactatatggatacttggtgcgctggaacgccaatgatcgctcggcc

SEQ ID NO: 274066 - DNA, 356 bp, Glycine max
  unsure (1)..(356): unsure at all n locations
taattagctaatgtcaataaaataaatagtcatgatcgatgtctacccaaaattctagccaacaacggccaagaaatgacattggtagacattgatcaaaataaaacactaacaaacatcgatcaaaaatagcttcaattgatatggccgaaaaacatcatcagtcgatgttgggcgataaaactctcgaagacactagccaaaaagtgggccccatgaagttggccaaaaaaaatatagccgaaatcatgcaaaaatngcatcagtcaacattagcttgaaaacatcatccactaacatccggcataaaaaatatggatgatgtgacaccctataccccgatatgcatatttata

SEQ ID NO: 274067 - DNA, 385 bp, Glycine max
agcttatcaaccaaatacccacgttttcaaactcattgtatattacaattacaaaacataaataagaaagatcttcacatctataaaaagacttaatgaacattaacagaaataaaacctaccagaacctgtaagtgaaagaaaatatacagacccatgtaaactatagaacatagatctaaccttttaagtggaaaataacataaacgtagaagtatgcaaatgaagatttaccaaatgaattcagtaatagcaactttacctgaaagtgtaaactgttaatgcagcacccaatccgccaaaacaatgggaccatgatcctctggaactctaccatgttaataacttccataatttcttccagttcacccagaaacatcacctc

SEQ ID NO: 274068 - DNA, 398 bp, Glycine max
  unsure (1)..(398): unsure at all n locations
tctcaagatcaccttaatggctntcacattntccatggatactttcccaaggaaaagtgtgtcgtctgcatactgcaatatgctgactctgacttcatttctgcccacattgaaaccttgaaacaggtttttatccattgcttctttcaccagcgcgtntggtccttccacaagaatgttaaacaggaacggggatagagggtctccttgtcttaggcctctttggggaataaactcangtgtaggacttccgttaaccaatatggatatggaagcagactttaggcagccttcaatccaagttacccacctgtcacaaaaacccatcctcttcaacaaatatagtacacacctccaagatactgaatcataggccattttataatctactttgaata

SEQ ID NO: 274069 - DNA, 428 bp, Glycine max
agcttctgaacaatctttcatttgggtggtgatgaatatccataacaacccataaaaaagaaataaaatgggaacaaaggctttctttcggaagggtttgagcagaggatgaaggaaatgggtaaagggtttagttcttagagcttgggctccttagctgtttattttggagcatgttacaataaaagggtttatgacacattgtggatggaactcctatttggaaagtttgtgtgctggaatgccaatgattgcatggcctatctcagtcgagcaatttttgaatgagaagttgataactgaggttttaaagattggtgtccaagtggggagtagagaatggttgtcatggaactcaaaataaaaagagttggtgggaagagagaatgtgaatcattagtgacgaagttgatggtacagagtgaata

SEQ ID NO: 274070 - DNA, 412 bp, Glycine max
tctaactttgcccactgcccatttcaatttcagcgtccttgttctgtacattgcatatttccgcaagttaattgcttaagagaaccaacttcctcaatcaaatgcttaattcaaaagtttctccttattgcagtgtctgaatttggggggaaacccagccttttattgcaatgcaattggatgaaatggacgttcaattgttgttatcatggatgaaactatttcttttctctgattgatatacttaactactaatgtgtgaatgaatgaattactggctggcatcatgattaaagaaatgaaatttgtgacgtttgatgagacccgaactacgtgctcatatactgaaaaatttagtattctatcaattgcgcaacttattggtggtattaataatatcatctcatttata

SEQ ID NO: 274071 - DNA, 394 bp, Glycine max
agccttggagggtgcaataatactggaaacattccttattacaactgtggacgtttttgcattggtgctggaatctagcggcagtaagcataatttttcatattgattttctatttaatttgtgattagtatagttcaggtattctttgatcaaggtttccaattacacagcagtcaaacacaagggacgtatttatattaatggatgtcatgtacatatgatgcctgcctcaattttctataatttagaagttttttatggacaccttaaatgtagatatcacgatgtggtcatttatggtagtctggttcgtagtggattttgttgagaggctgaaatattcctttgaattttataatggaagatgatgaatgatcctatgtaattgaaacc

SEQ ID NO: 274072 - DNA, 332 bp, Glycine max
gacactatgaaactaagcttttagaaaatgtgtttgactcgactccttttaagttttaatgtatataaaaatccaaaaaagctaagctaaacactatctaaatttgcatcaagtaatagcatcccagccatacaaccacatcatacgcctacaggcatggcattgagtcatcatccaactcttttcattccatcctatgacaatatacaacaaatactattccaataattaatgtttttcatagaaattattaatatgatattatatataggaattgggaaagggaaaccatttctttttcacaaaaacaaatccactctactgatttgtgt

SEQ ID NO: 274073 - DNA, 350 bp, Glycine max
agcttatcgagtgtggaaatatagtactaccactctctcactgtgacaactgtgtaagttttatcttgctctacttggagactaccttgaacattttattgcaatttgagctgtaatttctgatggctaagatgttgtcatattgaatactaaatttctatccaacaacaggttagtaccgtttgtcatcctgcagaaaaaggtctacatgtcaatattgaggaaggaacttcataagctacttgcactatcttttggaacttcatatcatgagtcactacataatattgtcagtcaagcccttgatctctctctatctctgttgaagtgattcattacaatgtgtgttt

SEQ ID NO: 274074 - DNA, 330 bp, Glycine max
taattttttaatagatgaggtatttatatgaaagataatcttatttaaactggataaataagataattataagtgataaaactctgtctccaaatatttaacgtaattatatatgtaagactaattaatctagaataactttgcatgattaacatactcactgctataacactaatagtttggtcataactaattcattgatcaatattataaaatcatcaatatttgagagtattagaataaatcttacttccgattacaatgaaattaattagatgcagacctattaacgaaatgctttaacttcaccaaatatgtgattatgaaagc

SEQ ID NO: 274075 - DNA, 189 bp, Glycine max
agctaattactttgcggcaggcattgggttaatttatccccgctcgctaagctctcatacttaatgaactttctgaaatattgagaccgatagagccgtattgcagagcttactacataaattctgcggcgaagaaaagctacagagcccggtgaactattaaacctatatgttacattttagagggca

SEQ ID NO: 274076 - DNA, 374 bp, Glycine max
tcagcaaactccttatttgcagatataaattctatcaatagacctccaatctttaatggagagggttaccactactggaaaacccgaatgcaaatttttattgaggcaatagacttaagtatgttggaagccatagaaatatggccatatatacccaccacagtagagagaattacaatagatggtagcacatcaagtgaaagcataacaatagaaaaacctacagatagatggtctgaagacgatagaagacgagtacaatacaatctaaaagccaaaaacataataacatctggcctgggaatggatgaatatttcacggtttcaaaatgtaagaacgtaaagaaatgtgggacactcttcaattaacacat

SEQ ID NO: 274077 - DNA, 387 bp, Glycine max
agcttctcacctaaccactacccgtgcgatctctacctaagacccaatcttagatatgagaacctccgctcactccctctcactcacactctcgtgtttacaattaagtcaaagacacaccagagatcaactgtgaacaaaagagatcaactctacacactagagatcaactctacacactagagatcaactctacacacataggtccaacacttgatgttagggtagcatcaaggtggctcacaaaagactcaagtcccaaaaactcactaactaactgttcaatcccggacttggtacagaactcgtgcagactccatgattatatagcaatgtgcgtttctgggctgcaacttcttgatgctggaggagatctatcttcttctg

SEQ ID NO: 274078 - DNA, 274 bp, Glycine max
tgaaggtgtgcaacccaaccattttccatagaagggttgtggttgggggctaaattaaggcccctccaaagtgttttgcaggggtataccaccaactgcttgccctttagtggcatatccgaggcaaggctcgaagtcggctagattgtggtggggaatttcatgtgtctccccaatggtttgagagacatgtgcatgatcaagttgaggttgtcagctttcaatgagtatgggttcagagttattaacatcctcactgggagtgtatgccaca

SEQ ID NO: 274079 - DNA, 364 bp, Glycine max
agcttaactcaggggagatggaccattttattctcttgaacgaatcaatgactatgcttacaaaatggacaatccgatttgaggacaaatccttctcaagagggagagaatgatgaggacatgacctagagcatgggcatggatccacttgaaggacttgtaggacctatgacaagggctagagcaaggagagccattgaagctctttaacaattgctgtccatactatttgaatacatgcccaagattgaaggagaaaactccaagattgtgagttgtgtaatggaccaaatggaggatgactaaatgactccactttattttaattatatagtgttgtatttgtctaaataatggcccaatc

SEQ ID NO: 274080 - DNA, 239 bp, Glycine max
  unsure (1)..(239): unsure at all n locations
cgaaagagcccgggtcgtcaaagagaagttcaagcncatattctatatagtctgaagagagcatgatgaactacaggacgtcaatatggncaccgatgaagccctggaatgagaaaccaagaatgacccaatggaagaacacgacccaaacacgttctcgagggccttatacggcagcaatagtgagctccaccgccgagacgtgaaagaatatcacggtcataggcatgatcttgaac

SEQ ID NO: 274081 - DNA, 278 bp, Glycine max
  unsure (1)..(278): unsure at all n locations
nttatccactaggtggagtcagctacatgaactaatgaaaacattatgttatgtcatgaaccaaattctcagaaagtaaatttatatctaagtccttttcaatggcttcagctagagttttactcggcccactccactatagggactatactccatctgatacactcttgtcttagtggatcttcttctcacatataccaaccaactaaagcaagattctattgtcttttcctattatcaaaccctactttctctctaaagctaatatgcattcatgc

SEQ ID NO: 274082 - DNA, 409 bp, Glycine max
ttttttacacgcgtcagctcctgctaaggaaatgggttcacatgtcaacatcctgcagagcgatcgatggcccacttatgtaagagattggagcctcctttttgctccttacactattctatcatcgtagattgcaacgtatgcggatcgagacaagttgctggaatacggctgcgcagctcttttataaaagcgcgcctgctaatcgaaactccatacgcactaaattcctccgcgctaaacaccctactagtgagagtatcaacggaacacagtggcgtcatctcacgaacctatggcacatccgaccatcgcctgaagtgggctcgccccacactcgtggctggtattactctctcctctgcacaaaataacatgtgcctcgaaacgcaggacgcggcaccgcgac

SEQ ID NO: 274083 - DNA, 317 bp, Glycine max
  unsure (1)..(317): unsure at all n locations
ctgttgctctctaggcgccagagctggggagagagtacgcctctatttgatactcncactacgagagatgggctttcggatgatgcagaacacagaacgtcgcacgtgccttattatacacaatattgcgtgagggacacatcgagctgcttcatataggactaatgacctgtccactagcaataggtaagcacaccttaacgactctttttaaatatatggtggacttatccctaagacatgcctgcttttgtgtactgttgagaccaactgatgggatataaaaaacacccctagtaaatgagaaatctactcat

SEQ ID NO: 274084 - DNA, 393 bp, Glycine max
agcttcaccacttagacctgactggtgtggtcattttggacgcccgaaagctctccgcactccgccaccttccgccacgcgttctcagcagaacaaacaccaacaccaatttgatttacacgaaccggttatcgggcccaccgaggcccaattccgtttcctcaacgggcctgtccatgataaccgtctaggacgatatcgagtctcttttctgcgagacgaactctgaggaggagcggcgcgtgaggaagcaacctaacattggggcgtcggtgatttcctccggggtgaagctcgaaaacgtggggaaagcactacaatggcgtgacggtgctgaaggacgtgagctgggacgtgaataacggggagaaggtgggcctggtctgtgtgaac

SEQ ID NO: 274085 - DNA, 286 bp, Glycine max
  unsure (1)..(286): unsure at all n locations
tgataagtgcttatatagntgggtaaattatcccttatgaacttagttttaagaaatctctgggatatatttgggtgccaatagcaattctaaaccaccatcttcagcccacgtcagacttcaatcaatccaaataggtgcacttttacccacaaaaaaatgcttaaatattttcttttaattttgtcctccgggctgacggtcaattttggctctttgatgtgatacactttcattttcagaaatgtttttaaaaaatgataaatgtattttttatccttatatt

SEQ ID NO: 274086 - DNA, 477 bp, Glycine max
  unsure (1)..(477): unsure at all n locations
ctgtacttgntcactcgcacctcatgtcacacgtcgccgcggcgtatcaatttaatggaagagcctccttgattaattatatatcataggtcggaaaccgcgtcgtaattccactccaacttatatttatcactcatgatattaaattccgtggcgccgtttgcaattgccactttaatcaggaactgtgcgtggaacttgggctgcctctatgcgagcgagattaactgacagttgtcctgaaccgctatttcgcatactgttaaagtatttgatcgtgtgccaagtgctgtatcgctccttgtcgctacgggaaaccgagtgagtgctttctttgctatctagaatcctgaataacatggatgaacggaatataatacgcttctccacaagatagcttatcaaatctgtgcaaatatagagttgatctgtgatagaaatatgtgttacagatacctactctcgtaagaaaattct

SEQ ID NO: 274087 - DNA, 317 bp, Glycine max
  unsure (1)..(317): unsure at all n locations
ntacgnaattggtcttcgctggcgaaatgatcgaagtgggtcttttaagaggcaaatctgatcatcatgctttgatacatgcaaaaaaaaactggggcaaatgaagaggatgagaatgagggggaaacccatgctgtgactgccattcctatatggccaagttttccaccaacccaacaatgtcattactcagccaataacaacccatctccttacctatcacccagctatccacaacggccattcctaaatcaaaccacaaaagccacctaccacacaaccaatgcttaacaccacctttagcacaaaccaaaaca

SEQ ID NO: 274088 - DNA, 395 bp, Glycine max
agcttgcagcaaatgctaacgacaataacattttactcggaagtccgattgagtcccgtaatatatcgagacactcaaaatttaaaaccgaagctcgctgcaaacgctatcgacaataacatttcactcggaagtccgattgagtcccgtaatatatcgtgacgctcgaaatttaaaatcgaagctcgtagcaaatttgaacgaccataacatttcactcggaagtccgattgagtcccgtaatatatcgagacgctcaaaatttaaaaccgaagctcgcagctaatgctaacgacaataacatttcactcggaagtccgattgagtcctgtattatatcgagacgctctgaatttaataccgatgctctgtgcaaattcgaacgacattaacat

SEQ ID NO: 274089 - DNA, 186 bp, Glycine max
  unsure (1)..(186): unsure at all n locations
tctanactctctacaagaatgaagctctgatcggtcttccgagtgatatgttatttttgttcgaatttgctacgagcttcggttgtaaaattcgagtgtcacgatatattaacggactcaatcggacttccgagggaaatgttattgtcgttccaatttgctaccagcttcggttttaaattatga

SEQ ID NO: 274090 - DNA, 429 bp, Glycine max
agcttctcacttgaaagcacaattgagacatacattttgagcttgttctaaactcctcaaaatgcttactcttgatatgctctttgtatatcttccattgaaacattagcatatatgatggctcgcatagtttcctgcatattgataattgctatacatacataatttatgtatttaaaatcacatagaaatgatctatttttcctctcttttattgcttcttttgtgttaaaacattaggaatttagcttcttttgagtttttatctagtaggtgctaaagttagtcaatttatagtgattttggttgtattttttatagagatagcatgaggcttggaaaaggattgaagaactggaatgtcacgcttagtgcgatagtctcgcttagcgcatcatgactgcttagcccaagaagcccgcttagtgc

SEQ ID NO: 274091 - DNA, 317 bp, Glycine max
tgccacccaactcgcccaggcgagctaggttgcttcctccatattcaaccgccttctggaggaatattctggaaggcccaagtgggcctggttgctatttgcacccccatttttactaaatatacccccttgctcttttttggtgattttttttccgtaacgttacgaaattttacgaatttcgtaacgatgcttgttttcttttcgtaatgttacaaaaccttacggattacgtaatcatcccttttttccttctggaacgttacggaactttacggattgcgcactaacacttccttttaatttccggcatgtca

SEQ ID NO: 274092 - DNA, 374 bp, Glycine max
  unsure (1)..(374): unsure at all n locations
tcaactntntcanaactagggctctctgttttggtttggtntgaaaaactntgacaaaactgcgtggtaaagggaggatgcggttcaaaacttcctttcacctaataagaataagaaagggaggacaccaaaaccaggaataaaagctatacttttatccttatgtaatgtgattgactgtttcttcactcgcacgctgttatctaatataccatgtacaccaaactgtggcgaccaagtaaagagacttgaaagaatgctttctctctaggtcaacgaagctaatccaattcattcattttaagccctcaactattcatgttctgttggcagattgatgagtagtagaacataagcacaaactgtttagtttt

SEQ ID NO: 274093 - DNA, 439 bp, Glycine max
tccttatagtcacctgtcgcatgcaagcttgtacgcacatcgttcgcgtgtatgatattcactccacaaggtttgaagtataagagagcttcaaccttataacgtaatgtggcggacaaaagtgggcagtaaacttgaatgatcgtcattgtcaatgcggaaggtattctgcgcttcactatccatgttcacacattattgcagtttgtggttacgtgagcatgaactactaccaatatatagatgttgtctatacaaatgagtacatcttaaaagcttactccacacaatagtggcctcttgggaatgaagcggctattcctccttctaatgacgcatggacacttatctctgacccaactacaactcttgcgataggttccgcaaaatcaacaaggatatcaaatgacatacattgtgtctaaccatctgagcacct

SEQ ID NO: 274094 - DNA, 442 bp, Glycine max
  unsure (1)..(442): unsure at all n locations
tgtattgggataaacccaagtcccacatcagctaaaaataaagccatgttagagtatataagtgagggacaaccctcaccccttaagctagctcttgaggttgagttaggtttaaactcattctaagaatctaagatggtattagagtatatctaagcttaatccaaagggccacccacaatagttatccacgcaccacgcctaagaagtgctgggcgtgacggagtgtattgggaaaaatctaagtcacacatccactaaaaataaagtcaagttagagtatataagtgaggggcaaccctcatccttgagctaacttttggagtccagttaagcgtaaattcacattctaagaatctaagagcttgtccttacgatcacatgaacaagcattatccctcaatanttatcatactgtgtccttccctttctgtgccatctc

SEQ ID NO: 274095 - DNA, 387 bp, Glycine max
agcgtgcaatagtgaaagtagctttagggcaagtgttaaatttacaattctctttttccgtaaaatgcatgcctaaatatgcattccatacttcaaattagcctgcgtttttatatgaacgcaataaaggctcccttctaaactatggatacggggaccctctcagcgttaataagattgaagcatatgacattgccataaactaatctgatgaattatctagttatgcttggggtgcgtatgcctctgcagctacattaccctttcattatatgctctagctactcatgtactatatgctaatctttacctgggatatagtgtttgatcagagccaatcttgaatgactaagtgtcaatatttacttgctatctgaaaactgagag

SEQ ID NO: 274096 - DNA, 448 bp, Glycine max
  unsure (1)..(448): unsure at all n locations
ntgtagtggatggtggattgtggtatgactcatgtcttgtttgatatggactgcaaagccattgtggatacacttaatagttcccaataggatactacaaaccttggtgtaattattcttcaatgtaaaatacatccttgcacaataccaaaactgatataaaccttcattgcacaagggctgacttaagatcgtctaggattaaaccttgaaggaaaatttggaaattgattaagaaacgaataggaaattggcaagatttaagggttgggcagtggctaatttcctaggtcttcataaggtggatcctggcataaaatggatgaatgggacggtaaaaacgtaggttaagtggtggctgaacagaaatatagaaatggttataactcaagctacaaggctccaaatgaggtgattccaaaacgaagtgaaaagtatcgttttaaat

SEQ ID NO: 274097 - DNA, 161 bp, Glycine max
gaatttagcgtcttctgagtatttatctaccaggcgctatagatagtcactctatagtgactttggttgtatcacttatagagatagcatgaggctaggacaccgatggaagatctggcctgtcacgcttattgcgatatactcgcttacctcatcatgac

SEQ ID NO: 274098 - DNA, 463 bp, Glycine max
gatccttaagtcacctgcggcatgcaagcttccatcaagtggtattatagcacatgatcttcaagtatgtgctccttaaacctccatatattttttgctttaccttctcttctattgttgtttcttcatttttctccatgtatctcctcacatgtcttgtgataaatgtttttaacatgattatttagagtttccactgattaaatttgctatagaagctagatttgattttctatggttcaaatttcttgttcttgttcttgaaccatgaattttgttgagtttaggttcctttgagttttgtcttgttattttttgtggctgaaaccgaaaccataaaattcttacaaaaatattaaagtataagacaacctcacaaatctagagtgacttgttcacctattgtagttttgtcatagaagacatgtctagtcatgaaactcgtcacataagatatcttatg

SEQ ID NO: 274099 - DNA, 266 bp, Glycine max
tctaaactttgtacaagaatgaagctctgataccacttgttgtaccttgtggcctcaataatcttaagagggataagcttagaatgcagaagaagcaacaataggttcccagctacaatgtcatgacgaaagataacaattggtacctcaaagccttacactggggcaatgaggggcatcgtgcatgagccttaagtgaacataagggcagatcaaaagttcacacccatcgatgtttttaaacaagaaaaaaaagggggagacat

SEQ ID NO: 274100 - DNA, 264 bp, Glycine max
tgatgtaacattcggagaggttaatgattcaacgagatgatgcgctccatgagaggttggatttaatggagaatagagaccatatgaattgctcaagagcttccattgttcaatttcgagcgtctagatgtataatgcgcctcaatcggaccttcgagttaaaagttatgaccatttgaaatgctgcagagctttcattgttcaatttcgagcgtctcgatatattatgcacctgaatcggacctgctagtgacaacttttgac

SEQ ID NO: 274101 - DNA, 311 bp, Glycine max
  unsure (1)..(311): unsure at all n locations
ctcactcggaggcccgattcacgcgcataatatatcgagactctctaaattgaacaacggaagctatcgagaaattcaaatggtcaatacttcgaactccgaggtcctattaaggcgcataatatatctagacgctcaaaattctacaatggaagctctttggctatacaaatggtcataacttttcactcgaaggtccgattaaggcgcataatatatcgagaccctccanattgaacaatggaagctcttgagcaattcaaatggtcataacttgtcactcggacgtccgatttagctgcataatatat

SEQ ID NO: 274102 - DNA, 380 bp, Glycine max
agcttgaaggtaaactagatgccttggttaacctggtaacccagttggccttgaattagaaatctgtacctatcgcaagggtctgtggtttatgctcctctgttgacccccatacagacctttgcccttcaatgcaataacctggagcaattaagcagcttgaagcttatgctgcaaacatttacaatatacctccttaacctcaatagcaaaatcaaccacaatagaacaattatgacctctccagcaatagatacaatcccggatggaggaatcaccctaatcacagatggtctacccctcaacacaacaatagcagcctgctccttccatccaaaatgttgctggcccaagcagaccatacattcctccacctatcc

SEQ ID NO: 274103 - DNA, 334 bp, Glycine max
  unsure (1)..(334): unsure at all n locations
tgtgactcttggcaanttttttaaaactagtcacttaaaaaagttgtgacttttgaaaaaaaatcttcaaaaacaagtcacttgaagaattttgacttttggaaatgtatttttcgaaatcagtcactggtaatcgattaccattaaggtgtaatcgattacacatcaatagatgtgactcttcattttgaattttgaaaattaaaacgtttagaagctctggtaatcgattacaagtattgtgtcatcgattacaccagtttaaaatgatttaaaactgtttaaacgcaagttgtaactctttgaatttgaaatcttaatggtttacaacact

SEQ ID NO: 274104 - DNA, 419 bp, Glycine max
  unsure (1)..(419): unsure at all n locations
taagcagcaccttttgataaaanaataacaccagaagcattctatctatttattcacctagcaagaatcctcttttttgcccctaattttcctgcttgttgctggatctttcctttccccgcatcattcactgtacacactctttaccttcatgatcatggactcacgatatgctttccatatatgtgctacaaaatacataattaaaagcgagatggagaaaaaagaaagtagcgtataataatgatgattaatattactaattttttatatttctctatctcctcctttgaaacgaatgatccccgcataacataagcaagaagcgttatgtgtatttgaacctatgagaaaacaagctagctacagctaacaattgagagaaagggaacaagaacaatggacaatatcttactatt

SEQ ID NO: 274105 - DNA, 470 bp, Glycine max
  unsure (1)..(470): unsure at all n locations
tgtgctgcttcaccgacancngtgatcttacagcgacgcggctgcagctgatgaatatggctcattttcttttgttatatacttggaccaataacacagtattatcgtgaccttgcttgatcttcattagcctatgctataatcgacctctacgtgggcgtaaacagacaccacatatctcggagtgagacgcctgaccgatggaatcacattacctaatcctatcttcagtatactcgctctcattcgtctcgaatgtattccaagtgggcagaacaacactccgatggacgattatgacaaagcacatgcttactttatatggattatcgattcttccgcaacctactgactacgggcggtataaattttgtctatatgacagncaccttgcgccctactttcaaggacgagaatgactgttacgacagttgatttactccttctactcagatgactctgcgcagtct

SEQ ID NO: 274106 - DNA, 366 bp, Glycine max
agcttgtgttgatgtggaactcatgttgtacatgacagtttgataatgtaacattgataatgtgttgatatgatattgatagtgttgtggtttgttaatatgtttgttggactgacatgttatctatatatcaatgtcccattaataatttttattaaagattaacgacacactatcaataaatcaaaataattaaattttaaaaatataacgattaaatgtgtaataaaaaattctaatagattaaaattgtgcaataaaaaattatagaaactagaagtagatttaagccaattaattaattggataatacaacaaagcgctcaaatcttattagatatttatacaaaagcatctgatgctaat

SEQ ID NO: 274107 - DNA, 240 bp, Glycine max
ctggacataatggatgagtatgatagaagttcatatatgcttattgaacagattcaccgttgtgtatatttaccacttcatctaacgatgatccttctaatgtctcgtctgcgaatacacagaagacggctttatcttcctgtgttgcttcttccacggacaatgtgtgacaccctctagccctctcatatatactaacaaaggaataagaactccgatattaatttaagagattttgtt

SEQ ID NO: 274108 - DNA, 447 bp, Glycine max
agcttgtagggagattctcattctagtttaatttattactagttatccataatcgattacacagttccattgagaccatgtttgattttcattagtctatgctttaatcgattactaggtgattgtaatctgttacttcattcctgaaagtgttcccaagagtgatcaagaacactttaatcgattaaatcaagagtctaatcgattacattgttcttgaatgttttccaagtgttgggaagaacactttgattgattaaaatgagaatctaattgattacttcttcgagataatcgattacataggcaatttaatcgactacaggctgttataaatttttttctctataaatagtcaccttgtgttctcacttttcaaggaaggagaatgagtgtttagaataattttttgcgactcacatattctactaatcatttttgagcatt

SEQ ID NO: 274109 - DNA, 299 bp, Glycine max
  unsure (1)..(299): unsure at all n locations
tagtgagtaaaattaagccacanaagtaggaataaataaggaaatgagagctaattaagaaaaacaaactaattgaggatataagggctaattaaggaaaaaagactaactgagaaaaacatggttaattaaggaaaccagaataattaagaaaagcaaaataattaaggaaagaaggctaatcaaggaaagaaggactaattaaggaaatcagactaattcagaagtctggtaatctgtacctattaaagaataagagagaagaaggagaagacacatggaaattccaagagaataca

SEQ ID NO: 274110 - DNA, 449 bp, Glycine max
  unsure (1)..(449): unsure at all n locations
agcttaccttgaatgataattatatcctttgcaccctttntgagctgaatgatattgtcaaaaatttgaaccctgaacttaattaattatctctagataccttgtttagattctcagagagcatacggttcaaggcaaatttacctcaaatttgggggagtggaactaattggggtgcaaagaaagagataaaacatcagtacacacaacacataagatgtgtgttaaaaaaagaagaagagaaaagtgtgctaatgtaacaaggtcaaaagaaaatgaaagtgaaaagctagtgagcaagccaattgtattaaaaagaccattgggataagtctaggatttgtgctctcttagaatctaagcttttgaatcctagaaaaaccaatgaanttttgtagccaagcctcatgacaagcctgcgaaagtccttctgattctgtttatacatt

SEQ ID NO: 274111 - DNA, 345 bp, Glycine max
tgatcaaaacaattatctaatcattccaatccactcaaatcatacaattgctcattcaaataattatcaaacactcatttcataccaaacaatccattgcatatcattttcaatcaattcattgttcaaacacgcttttggtacaagcaaacaactcatagtgctgaaatttaaaatgactaaaatataaagcaaactaaatactaataaactaaaatgttcatgctttgcagaaattaaactaaacacaatttaaacatcctgctcatcttgtggctgatcttcattatgatctagtgttggagctgctgatgaatcctggataggctgctctggctccgtgac

SEQ ID NO: 274112 - DNA, 437 bp, Glycine max
agcttagcttcgaaccaaaaaaacaacacatttctattttgtgaggatgaaaaacatactgaaaattttgcaaggataaattccaaacattttgatatttataagaacaaaaaatatattttagccttgtttttattgttaaaaaaaaaaaagagaaatgctactaacatactctttaacacactccttcatacacagtttctcttatgtgttaaaatgtatttagttgaagaacaagttccacaaaatcttgaacctaccaagtgtgatggttgggattggtatgagtgggatcatttgccacaccctttggttgggcctcttgagaaaatggtcaaaggagctttcgacccatttccaatttgattctggtaattggtaatgatttttttgtgaagattcttggataatctgacgtttgggttacgttaatatgt

SEQ ID NO: 274113 - DNA, 396 bp, Glycine max
  unsure (1)..(396): unsure at all n locations
ntctagaagcctactccggatacaactagattagaatgcatcttccatgcgaggagaaaacaatattcatcattgaagatgccaaattttactaaagggtcatgcctttcagcctaaaaaacataggcgcgacataccaacgactgatggactgagtcttcaaacaacaaatcatatgaaaatgtcgaggtatatgtggacgacatagttttcaagtctcaaagcatatcccaacatgtggcggacaaggaagaagtcttcggggaactacgaaaatatgaatgcgccttaaccctaaaatatgtactttcggagtaggcggcgacaagttccttggttntatgatcacccaccacgggattgaagctaaccccgacacatgcactgtcataccgg

SEQ ID NO: 274114 - DNA, 442 bp, Glycine max
  unsure (1)..(442): unsure at all n locations
agcttgatgtgaacaaagacaagtaagtttttctttttttacctaaaaatatgtttttccaaataattcaatattaatggttaagtgtttaggaattgttgcttttgcttatttactattactatatattttgcagatttttgtcaccagaagaattgataccgatactttcttatctgtatccgggagaggaagcttatgctaaatatttcacatgttacttaatgaatgaggttagttaactacctatgaattgacatggtgttgttaattgtattaatacatattgaagtgaaataagaatcactagaaatagggatggaacatataacatgcttacatattaccaattatttgctgagaatgtatgtatacatgattntgatgatgccaaagaagaatcanataagactgttacatttgcttcaagattaatacaaga

SEQ ID NO: 274115 - DNA, 185 bp, Glycine max
agcgacctatgaatctaagcttattgtaaaaattagtttgtaggacatagttgtgattcggacttgtcttatacctacccttccgcgggagggcgacccgagattcgcgggtgcatctatcgacattagcaaatgccacctttcttacccttctctcttccaagaacacttcccttataacccat

SEQ ID NO: 274116 - DNA, 433 bp, Glycine max
  unsure (1)..(433): unsure at all n locations
agcttcatgatgatgaaccaaganaatttgatgatgccaaatgcccaagtgattgattcaagacttcaagatcaagcatcaagaatctaatccaagattcaagattcaagagaagaaatcaagaagcaacaagtcaagacttcatataggataagtattaaaagaatttttcaaaaaccaaatagcacagttttgttttacaaaagaattttctcaaattttttaagttaccagagtgatcactctttggtaatcgattaccagttatcagtaatcaattaccagtgaccagtttggttttcaaaatgtcttcaaatgatatataacgttccaaaatgattttcaaatagtgtaatcgattacactatattagtaatcgattagaagtgaatctgaacgttgaaattcaaatccaattgtgaagagtcacaac

SEQ ID NO: 274117 - DNA, 396 bp, Glycine max
  unsure (1)..(396): unsure at all n locations
tgcacacaagttggttgttgttgttattggtttgattacatgataacctctcatttgtgtttagcttgtattattggttttgatgaaatccctttgctacaagtcaaacaattatacttgttgatagtgccattagggtttttcttcaccctanacacctatttacaaccaattggatccctagatggaggcagttcagtaagagtccatgtaccatttttcatcaaagcatcatgctcagtcctccttggtgcaaaccaagtaggattggaaagagcaatttatgttaacttgtgctcagaataagctagaagaagagtacgatgaagtctaggattgacaacaccagttntagctcttttgcacattgtaacaagatcaatttgagaagtagta

SEQ ID NO: 274118 - DNA, 318 bp, Glycine max
tgcttctacagactcataccacatgtgctttatatgagagagacatgattaaggctaagacttgtgccttgaacgcaatcaaaaacccttagagaccatgaaaacactcctttagagcatacgagcaagggaacagtaacattcaatttactggataggtatgcatgggcgagcaaaaacagagataaaacgtcaccacaccctccacctaatgtgtgtgttaaaacaagatcaagacacaagtgcgctaatgtaggaaggtcaaaagaaaagggtactgaaacgctagtgcgccagccaagtgtgttgaatagacca

SEQ ID NO: 274119 - DNA, 271 bp, Glycine max
  unsure (1)..(271): unsure at all n locations
tgtcctctgccaaccaatattccaacagattcttcttgttctggttcacaaccaaccgtgataattctaatgattcaaaggcattcagctttccccttgttaaaagtgttccaaaatactgcaacagacgaggagtttgcccagcttgcacacgaacactctgccacgtaaagcagataatggcattntaaacattataactaattgaccaaacaaaaggacaccacctaaacgcaaacagtacacaaccagaacatgaatctctgtgaat

SEQ ID NO: 274120 - DNA, 444 bp, Glycine max
agcttaaataggtggtcttgttcgtgctcgtgcgcttagcgcagatctggatcgcttagcacgcataagtggattttggcttatcagatgagctgaagcggtgcgcttgatgacctgcagcggtgcgcttagcgaacttgacatctcacttttggatgcttcctcgcgcttagccactgaaggttgcgcttatcaaattctcgctaagccaacaacttggcttagcgaaagagtgaaaaacaacactttgctaaagttgcctatttaacctgaaattgagagaaattgattattaaacgcacaaaacaaaagcataagttatctattacctatatttaacaaaaagtacttatagtattacaaaacaaccataaattgggaaagtgtgatacattatacacaggttttatacacaaaagttagtcgtattcatcgactaacacc

SEQ ID NO: 274121 - DNA, 370 bp, Glycine max
  unsure (1)..(370): unsure at all n locations
tgcatagaatagagatagtatacctgtaaattcgtacatagatttgtagttttatgtaaaaaatcaagttttacttttgaagtcaaaaagtaatttccaaacatgcaattcttcatctttctagagttggatttacatttgtactgagttttattgtagttgaaaaatccactgccgatttaattatccttttgcataacaggctgagtttgtgaattccttggcttttgcaaaattaggagaagtcttagttgctggagtangacaggtgaaaattttctcaaactgtgtcctgcttgtatgctttttttttttttggatactatntactggaaattcacttgaaacatttgcatggacagaaaagcta

SEQ ID NO: 274122 - DNA, 405 bp, Glycine max
agcttgaggatcaaaatggggtgaagctttatttatagctgatggtgtctgtttggatgggaactcatgcaaatgaagcttttcctgaggcttggcattcatatgcatcaaaaactactggtgaaaacattgctcacactcgctccaaggaatatattcctcccaggctttgtgaccttacagttaatgagattcatgcccaatatttgtcgctaaaaaataggaatgatgtgatgctactaaatattaatatccgtaatgactcgggaattgttaactcgtaggcaagtgtaccaaaacttcacaagtagtaaagttttccgatatccgaacgtccaatccaccacgactttgcttgtacttatagtattcctgatcccattgatgcgcatgacataccaattt

SEQ ID NO: 274123 - DNA, 293 bp, Glycine max
tgtcagtaaaaaacatgatacataagaacattaaaataattgtatttgtcaaatgaaaacaatataaaacacagtatcaatttgggtataaatcttgacattctcactgtgaaacttatcttgcagcttctccaaagaaaaacactcacttcataattaatagggaaagaaacacattcttaagaaaatcatactcacgtagtaagggtataggccatgggtacccaattcataccccaatatggcacaaaatcatcacctaagaacatgtatccaccgccagctccatcatt

SEQ ID NO: 274124 - DNA, 439 bp, Glycine max
agcttatcaacggtgacccactatccaacaccatagtcttcttcatattttaaatattcctcagcatcctcttcatcctcataagaatacactagaacatcgtcaaacatgtcaacattgtctacatcatctaccactatgtcatccagttcctgataccaaaatcattaaaatgcttctcataaaatttaaacaaacaaaacaacaataccatatatcattcattagtcttaccacaaaaaatgtttccgatgcatcaccaccattctcaccatgtatattttcaccccttccactcatatttgtcacaaattacacaacaaaattcctaagtcaataaggacaaaccagaacattaaacgacatagttttttcatcattaaagacaaaattaatgaatcaacaaataaataaataaaaacaattaactaacatatca

SEQ ID NO: 274125 - DNA, 417 bp, Glycine max
  unsure (1)..(417): unsure at all n locations
gtatgcaacccaataaatgagcatgtctatacctcacctgtgtatataatgaccatttgtgctgatatcaatacatttcgaagtacaaaattgattgatttataaagaaagaactcacacatatactataattttcatacattcatgctacttcgagccatgtttttttctataaccatttgaaataaattttaacttttctttttaaatatcaaagtcttcaattaaacagctttccaaataaatcggaagttatgtaaaagtgccatattaatgtnccgcattgacccaaacttacctacaaatttaatctcaaaaaataattctttacacactcaaataatgcacaatctatacaaaatcgctatcgacccataccaactgccaatgtataacgactttatggattcataatat

SEQ ID NO: 274126 - DNA, 384 bp, Glycine max
agcttatgatcttcttcaggtgtccaatgacctttcttcaatccaatttcatcacagcatggagatcttcccatatctattattttatggtatcctagatattctgtcttttcttctttatcgtctctttctcttactaccaaggaagctgagtcactacacttccttcaatttaaatgtggcgaaattggggaaggacgcttcctaattcctacacttgcaacctaaatggcagctttctatttataaagcgaatatatggtgtctatcggatcacaactatgtttaattaatatacattatgaaactcatcatcacgtgttatctaaaacaagcgtacattgtcttatgcaaaacgacataaaacctttgacaacccatata

SEQ ID NO: 274127 - DNA, 78 bp, Glycine max
agaatgtacattttcaagaactcgtacagatatgcctaaccgcatattcatcatacaagatttacggagacataacct

SEQ ID NO: 274128 - DNA, 436 bp, Glycine max
agcttatgcacggaaaatgtaattatgaaattgagatgcccgaagaaacaccatttcctagttaaccatgcattaggtaccatgttcaattattttgtttttaagtgaaacgggtttatgatcccaacatggttggctcgtggtgcctaacacatgaaactaagaatgtagtgtgaagtttcacgcttcccccttctttgtttttgtttttgttttgtagaggaaaacgcaaggatgagcaaacatgaaaacaaatggtatgcaattttgcagatcaaaaagtttgttgaacgcatatgcatgatgatgccatgactcatgcaaaatgtgaggctggaatatgataacggacaaatgcaggatatgttcattatgatgttatgaagagatgcttatgtgatgcatgatatgaatggcatttacggacacgagagcc

SEQ ID NO: 274129 - DNA, 258 bp, Glycine max
gcttagaagaaattcaaatggtcataactcttcactcggatgtatgtattacgtgtatcacatatcgagacgctcgaaatcgaacaacacgagctctccagaaattcgaatagtcacaacctttcacaccgaggtccaattcagccgcatcacatatcgagacgctcgaaatctaacaacggaagctctgattacatacaaatgctaataacttttcactcggatgttcgattcaggcgcttcacatatcgagacgct

SEQ ID NO: 274130 - DNA, 395 bp, Glycine max
tagcttgacgcaattacaactcattaatatatttaacacacatttatataaacatactatacactcgaataaaagtggaacagaaacaccatctatctgctgtatctaatacattcatggcgaaaacaattttgaactaggacggtctccgactatattactccgtgaacaggaagttattatatttatacaatatatttttatacctactacttacatttaccctatactttgatctctctattgtacgatactaatctaatatctgcacttatattccttcttatatttcactcttagtcatagaaaatgtcttaaagaatatgagaatactactgctctaactagaatgacatttctttaagggttgggtctaatatgctctttgccattag

SEQ ID NO: 274131 - DNA, 432 bp, Glycine max
  unsure (1)..(432): unsure at all n locations
ntaattatcttatttatcttttagcttcgctattctatagatttaattatagggcacgctcagtagtatagaagtagcatcctaacgggatgacaacgaggcaagcttgacttttttgcccctatatctctatccctgctaagcattgagcaagtgtatgggatgcatgaaaaattgaaatccgattccatctttgttagagtgctatgggtcaaggaacctgcccaccttttatcaagaaacttaatttatttatatatatatatatattaatccacataatatatattaaatgcaatttgaacttacattttcgaacccaacccngattctacaaagtgaggaacacttcatctcgacctcggttaaagcaagtgctccattcataccagaaacacataaattagcgtcactatttgatatgctaatatg

SEQ ID NO: 274132 - DNA, 446 bp, Glycine max
  unsure (1)..(446): unsure at all n locations
agcttaagctccttcaactgcacaaggctcttaatattagaagagtatccttgtggaacctttacccgacaaagacactgacaaaaacttatcttctccttcttggacaaagtatggcaggctgggggcaagtaaattttcttcccatcagaccttggatgcaactgtgatcgtatacccatatcagctagatcttgatgggtattcaagccatccttcgtcttgccttgaatgttaaggagcgtcccaatcacactatcacaaacatttttctccacatgcataacatcaatacaatgtctaacgtcaagatcacaccagtacggaagatcaaagaaaatggacctcttcttccatatgcaactctgacttttatccttctttntggtcttcccaaatacagtattcaggtgttgaacccgctgatatacctgttcatcagtcaa

SEQ ID NO: 274133 - DNA, 260 bp, Glycine max
tcttatccaacgctcatcttggtggtgaagctccttcttacatggtttattccttaatggatggcgcctactctcacctcttttactttgtctttcgctgcatatccatggtggaaaatcaccattaaaggaccccattgaagctcaaagatccagccttcatagaagccccacaagcaagcttgcatcaagtgacttaacaattaatgatgtctttcagccagatgcagtcgcagatgcaatcatatggactcgcacta

SEQ ID NO: 274134 - DNA, 442 bp, Glycine max
agcttgtaacgccataagcaatggcgagaaagacgatgccgccattgacaacagcgagacatgctgtgactcactgcccatgccgccattcatactggcgggacatgctgactaggaaagatgagcatctcgccagtccttcctgcgagacacgagcccatgccgccattggtactggcgggacatgccaacgtggacagtcccgccattggctcctacgagacacgttcacgccatgcttaagtctgaagatgccactgttgatgatgagactgaagcattgtgatgcaggctagggctcaaaggctagggctgtggttcacatgcattatatgcagaggctgaagcattattttcgtgatgcaggctagggctagagttgtagttcacatgcattctgtgcaagtatcacatgcatacagtgtagcttgtagaggcatgc

SEQ ID NO: 274135 - DNA, 429 bp, Glycine max
  unsure (1)..(429): unsure at all n locations
tgtaggttacagtgataatgattgggctggagatgaacatgattatataaagtaccaatggatttgtgtttttcatggggaatacaaccttcactttgtagaagcaagcttcatgatgatgaatcaagttgattcaagtagttttgatgatgacaaagatgatgacaaaaatcccaaagaatgatttcaagattgagtcaacaagttcaagatcaagattaatttcaagtttcatgagaagaaatcaagaagattcaagaatcaagagaagtttgatttcaagattcaagagaagaaatcaagaagacttcacaagggaagtattgganagattcttcaaaaaacaaacatagcacaattttgtttttcaaaagagtttttctcaccaatttctaagttaccagaagttttactctctggtaatcgata

SEQ ID NO: 274136 - DNA, 433 bp, Glycine max
  unsure (1)..(433): unsure at all n locations
agcttccttaagaagattcctaaagaagctagagcttatctacacacacatctctaatagctaagctcacctccttgagatgagaagctagagcttagctacacaccccctataatagctaagctcacccccatgacaaaatacatgaaaatacaaaaaattccctactacaaagactactcaaaatacctcgaaatacaaggcaaaaatcctatactactagaatggccaaaatacaaggcccaaacgaaggataaaacctattctaatatttacaaagataagcgggctcatacttagcccatgggctcgaaatctaccctaaggctcatgagaaccctagggccttcccttggatcgctggcccaatctgcttggtgtcttctatccaatgcccttgcggngtaggattgcatcattccctccaccttgg

SEQ ID NO: 274137 - DNA, 376 bp, Glycine max
  unsure (1)..(376): unsure at all n locations
cgggattggcattgngcgtctatttcgactttcctatgctgtctctacatacataaaacagccccaccatcccaattttgcaaaatcatattcatatatcattggggcatttcaccgagcacttgatgggcgcatgtttggacataaattgcaagagaatgggggcaatgtggcatgccccatggcttcagaatacaacatatgcctaaggccttctcattcaaattctcaactccaaaaaaatcaagcataaaaacaacccaaaactgccccacaaatataagcacattctcacaatttggagcaccaaaagatgaagaatatataccaatgggaagctaaaaacatccacgatngaatacttacttgctggagt

SEQ ID NO: 274138 - DNA, 441 bp, Glycine max
  unsure (1)..(441): unsure at all n locations
agcttctgaactttntggctgtgtgagtgaatatagagagagaacgtggctttgtgttttaaaaaggctttcttttttttttaaagctgtgccacatgtctccttttgagtggagcaaaaaggggcccactttttctcttgatgtgactcatactcagtcacaagaagagaaaaatctgaccttttgaaatgctaaaatcctgcctcggtttgcgtatcatttctctggttccagtccctcgcgtttctctacacccgtcggggcccgttttcgaaagtaagcaatatatatatcaaaacgcttagaatgaaaccccgagtgtggttcagaggttggttttgttaaatcttaagttgcccgcacaatgataatttttagacttaaaagaaaagggacatgtgtccagttatggatttctcttcgttaattagcctaacccg

SEQ ID NO: 274139 - DNA, 341 bp, Glycine max
ctgagccaaaatcctaactcaccatataccttgacccaggatgagattgttaatccttaccctcggaagcaaaacagaagagaaggaaaatttccaatcacagaaaacagaagagaaggaaaatttccaatcacaaaaaaaagagaaggaaaattcccaatcaacgaaaatatagagagacggacaattcccaatcaaagagtgggagaccgcgaaaagaaaagatagataattctcatcctaagagtgtgagaaagtaaaacgaaggaaagacagctcctgatcatggatccaaagaaatcagaagacatgtgcacatatgtcttttgaccggacaatat

SEQ ID NO: 274140 - DNA, 430 bp, Glycine max
agctttcataggtgaaatcaggtgcagccattttccttagagtcctctcacgaggtggaggttgtgccatgttctcagaatgtgcaaaatcagaatgctcagaatcagaatgctcaaaattataatgctcaagatcaggatgttcaaaatcaccaataacagaatgcacagattcaccagttatggaatgctcagaatgatcaaaaggtataaaatgatgcctaactaatctatgaaatgtcctatctatctcaggatcaaagggttgtaagtcagatggattgcctctagtcatacactacattcagcatgcacacaactagttgccttgtcatgtaaataaaggtgtaggtttgaactacagctaccctcaaatgatatccaaatgacttgaaattttgtgagcaaccttataaaatgatgagaagtt

SEQ ID NO: 274141 - DNA, 413 bp, Glycine max
  unsure (1)..(413): unsure at all n locations
tgctcggagccattcctgcgaaggcaaacatttggaaagttaattntaccagtgggacactactcttaaagcaaaaatggcatataacctcctcccataaatacaaacatcaatgtaaatttagagcaagcttatgcgcatattttcttacgaacgttctcttgcacaagacattctattaactaagaaaaatgcacccatatacaatcaaggcagcttcgttacctagattatttacacgtactctcaaggtgtatttgttacttacatcacacacatctccttggctaaatntacatacatgcatactcaaagcattatggggtaccaaaaattgcacatgtgcacatgttggtatttctaatacctatacatacacaaacttcatgatgaatcttgactatctacacaat

SEQ ID NO: 274142 - DNA, 321 bp, Glycine max
agcttgcttcaagccttcctcagagatgtttattgaagggctgtccatgaagcaaacaccaacagtggaatagccacttgggtgaagcatactgacttccctttccatctaggaaactataatcgtatgatatgaattgccgacagacacattgtaggatttgatctacgtgtgacctgaccaacagagctatattagatatgcaatgtatgatacataatacactgaatgacatcttacttgataaaatgctttactttatatattcctccgatgccattcaccaataattttatcctagccgaaacgatatcataaatt

SEQ ID NO: 274143 - DNA, 148 bp, Glycine max
tgcatcagaatctaccttatgtaataacaaagagatcttgttttatctgctcttgcgattccaccttttctcatatcattctgcctgtactttgtttctgccttcgaatggataaaggagagggtcgattctctgaggatcctgacga

SEQ ID NO: 274144 - DNA, 444 bp, Glycine max
agcttctatataagctgaaccattttatcaatatacacaagttgagttttattcaaaaaattagagtttatctcttttatcttagtgagagtgattctcctaaattcttgagtgattcaagacacaccctggctgtatcaaaggactttcacaacctttgcgtgttgccctcactggaaagagtgattctttccttcctatcatctccacccttgttctttcaaaccacaattccagaaaatccacctctgcccaaaattatctcgtgaccaaaactcccatttcacacactcaaattaagtgattcttgagcctaaattgaatttcaaaacgagacctttcacctcgttttggaatcacctcatttggagccctgtagcttccgatattgtcatttctatatttctgaccagccaccacttaacctacgttataccatcccat

SEQ ID NO: 274145 - DNA, 339 bp, Glycine max
tgtagtcgtgcatagacctcctctgtggtacgggctagcttacgttgcatctgtgcattcatcgcatccactaacagacgttgagcgccgtccaactgatggtactcgtcaccaccaccacctgctccagccataattcaacaggaaaaaaaaatgtgcaataaaaattattaaggtttcatgacctcacaacactctactcacgtctcttagatggtagtacactcgtgtttaatgctctcaataggcttttgtgaaatgtattccctcttgccttttaccactcgcgattcctcttaaagtcctggatggaccaaattagacacacaacgcaatata

SEQ ID NO: 274146 - DNA, 439 bp, Glycine max
agcttaagctccttcaactgcacaagactcttattatttgaagagtatccttatggaaccttcacccgacaaagacactgacaaaaagttatcttctcctttttggacaaagtatggcaagctgggggtaagtaaattttcttcccatcacaccttggatgcaattgtgatcgtatccccatttcagcttgatcttgatgggtattcaagccatcttttgtcttgccttgaatgttaaggagcgtcccaatcacactgtcataaacatttttctccacatgcataacatcaatacaatgtctaacgtctagatcagaccaatacggaagatcaaagaaaatggacctcttcttccatatgcaactcttacttttatccttcatttgggtctttccaaatacagtattcaggtgttgaacccgctgatatacctgctcac

SEQ ID NO: 274147 - DNA, 343 bp, Glycine max
tagtacttggaacccagacactccatcaactagcatgtcgatgttgggtagagggtatgcatctttgggacacaccctagtcaaatcagtttagtctgtgcatatttgttgatggattggcaagtgcaccaatttgtcccaagtagtaaagttaaaatggaagttcgagtatcgtatccatatggactttgtttgtacttaggtagatgaatatttaattaagaaaaagatttggaaaaggtagtagaaaatagtaaattaaattgctgaaaattaaatcacacaagaaaaagaattaaacatgaatctaaattaattaattaaagacagaaaagatgagaaa

SEQ ID NO: 274148 - DNA, 441 bp, Glycine max
agcttaataacaaactgagttctgcgagtttggtatgtgatcatgcatgcagaacctgcactaaatgttgctcttttaatagggctgtactccattaactgaaccaaatggtccaggaagaaaaatagaaagaaagaaagaagaaaaagaatcaattaaagagcaaatataattacaatctttaatttattcaagcaactaccatgcaacatatggtgggtaaaaagagtccctcgggaggaagcaccatatacccacaaatggtctaacggtaaccttctgataaaaaatgaaaagaaatgttcatgtggtcctaagagagggtgaaataatattggtgtgcttgataatcataaaagaatcaaataaatagtataatatatataaatgcaacgatccttttcttgttgaaaattaatgtggaagctacgagagattaaa

SEQ ID NO: 274149 - DNA, 312 bp, Glycine max
  unsure (1)..(312): unsure at all n locations
taatcaagataagtatganaaggttntttcaaaaactgagtagtatatggtatttttctcaaaacatgtttaccaaagagtttttactctctggtaatcgattactagattattgtaatcgattaccagtagcaaaatggatttgaaaaagttttcaaactgaatttataacgttccaattaatttcaaaaagttgtaaccgattacaatgttttggtaattgattactagtgcctcttaacgttgaaattcaaattcaaatgtgaagagtcacatcctttcacataaaagtcttgtgtaatcgattacact

SEQ ID NO: 274150 - DNA, 434 bp, Glycine max
  unsure (1)..(434): unsure at all n locations
agctnggactttctgtgttctgggaacctctctctttctcaggtgtacccaaacccaatcacttggttcacgcacgactttctttctgcttttgatggcttgccttgcatagctcgcattattcttttcaatttgaaccttcacttgctcatgcaacttcttcatatactcagctttagcctgtgcatccttatgcttaaacatagcaatgttaggcataggcatcacatcaagaggagtcaaaggactaaatccatacactatctcaaatggtgaacaattagttgtgctatggacagcccgattataagcaaactcaacatgaggcaaacaggcttcccaagatttaagatttttctttaaaacagtcctaagcagtgtgcctaaagtcctattgactacctcacgttgaccatcagattgtgggtgacaag

SEQ ID NO: 274151 - DNA, 283 bp, Glycine max
tcattgcctaacaagccaacttacaacagctagccgcaatatactcatcataaggatgcacaggtcaaagttgagtatgtgaaaacattgtatgaccaagtgaaggcgcaaattgcatagaagaatgaaagttatgctaagcaagccaacaggaaaaggaacgaagtgcgacttgaacctggtgatgatcctggacatttgagggcaaatgttttccaagaacgagggaatgatgagaatcctgcgattggccaaatacaagctaaaagtccacatggagaag

SEQ ID NO: 274152 - DNA, 434 bp, Glycine max
  unsure (1)..(434): unsure at all n locations
agcttgtctcagcgtttatgcgagacggagaccaacatgctagctatcatcgccaagtaccaagaagagttaggtctagccgcggcccacgagcataggattgcggacgaatatgcccaagtatacgcggaaaaagaggctagaggaagggtgatcgactctttacaccaagaggcaaccatgtggatggatcggtttgctcttactttgaacgggagtcaagaacttccccgattgttagccaaggccaaggcgatggcagacacctactccgcccccgaagagattcatgggcttctcggctattgtcagcatatgatagacttaatggcccacataattagaaatcgttaggaaacttgtatggtctctcagaccttgactagatacgacttcctttntgaaataaaatgagttggtcccatgtttctact

SEQ ID NO: 274153 - DNA, 331 bp, Glycine max
  unsure (1)..(331): unsure at all n locations
tgcaattaaataaatcaattagtgaataagcttgcatatntttttctacttttctgtttgctaatttatttttccttgtttttccaacattaaaataattaaaaaatatattttttgttatgaataattttttggtgaatgttcatatcttcgcttatctttntttgtttatctttatttgcattaatttttttaactctctcattaccttttgtatctataaatatattactcatctctaaatgaacatacacaattctcattctttctaaactctccttttctctatnntttttttctctattattctcctccaattacattatattta

SEQ ID NO: 274154 - DNA, 401 bp, Glycine max
agcttaagataatattaaaaacacttttaaatttatttgtctaatggacatgtgtttatatgtgtaaaaataactctaacatgatttttactctagcaataattctttcaaaatcaattctactaaaattttgaaataagcatatctaaaattattttttcttaactatcctttaaaatattatttcgaaaaataaattgattttttagcttcacaatttttaaaacactaatttttcacagtcaattctacagaaacatgaaataaataaagcaatataaagagtgaattgcatggagcagtggtcctatatattcagggaatctgattgtctttatcctaaacaaaggagacgttaaataaagtccctccttacatcgtcttgtaacacgtatcgtgct

SEQ ID NO: 274155 - DNA, 197 bp, Glycine max
ctacatgctaaacggtgtgttatgcatgcacgtgaagctggatcattcctccgcggaatcgatgtgaaccgtttaccttctgtggttgattgcgaaaaggaagcacgtgtctcatctccaaacagcacggtttctagcgtctgtggaaagcgcaccgagagggaaaccaatggagaagacaacgacacagacagagc

SEQ ID NO: 274156 - DNA, 443 bp, Glycine max
  unsure (1)..(443): unsure at all n locations
agtcttgaagacatgaagcatgactttgaagcactcattatttcattctttgtgtaaaaagctctttaagttaattcttgtaaagtttagaaaaactcaaaatactttgttcatcttgagagaaaagactaagtgttgaaattatttatccgtctgtaagacaatagattgttagtcattgtgtaatcaaaccaacaaatcttttgatttgtgttagagccaacaatgacttggtaaattaagcaataccggttgtaacaagcttaatgtaaagcttgagttaaggagttagaagtgacagtgataaatacttgttgaaattaatgaatctggtggtttgccaagaactaaacatagtctcgtagttgagaggaaccaatataaatcgtttgtggcttattctatntattctttatatgttatttgaactaacttatggtttg

SEQ ID NO: 274157 - DNA, 330 bp, Glycine max
  unsure (1)..(330): unsure at all n locations
tgttgtatgtattattgattatgtggctaattttgcacaatcctagttgacatatttgatctatattttacattcctttaatgttttcagttacttttataatttaattttataggttgcaagacgacagattaaaagtgtgtttgctacaagctatttttctgtcaataagcttggagatcgtgcaggtataaattccttcgtnctgcaccatgcattattcttatagnttacttaatgctatgtgcttatataagaaactgactttttttctcttctgaatgtagctttatttattcataattatgctgtttttggagctaacattct

SEQ ID NO: 274158 - DNA, 403 bp, Glycine max
  unsure (1)..(403): unsure at all n locations
agcttgttatcgattacacacatactgtaattgattaccagaggagttnttcagataacattctcaacagtcacatatttttatctgattctcaagtggccatcaaaggcttatatatatgtgactagagacacgaattttataatagttttgaagaacaaaaaggtcttatcctcttaacaagcaaaattgttttatcctcttacaaattccttggccaaaacacttgtgattcaataaggaattatttgagtgctcaaattttacaatctatctctttcaagagagatgtctttttctcttcttctttattctaaaaagggattaagagaccgagggtctcttgttgagaaaggattctaaacactaaggaaggattgttcttgtgtgatgagaacttgta

SEQ ID NO: 274159 - DNA, 310 bp, Glycine max
  unsure (1)..(310): unsure at all n locations
ntctgctatctgtaagacgaacagcctgatagcacgaagagactattatcgtatacagcgcccttcgtcaatcgcggccgacaagcccgttaacacgcggagatttacgtcatcttccgcgctcgcaagatctgtcatactgactattgagtcacgctgacaggcggagatacccgagtggttatccgtataagaactttcgctatctgtatgacgaaaagcctgactgcacgcagagactaacgtcgactactgcgcccttcgtcaatcgcagccgacaagcccgttgacacgcggagatttaggtcat

SEQ ID NO: 274160 - DNA, 438 bp, Glycine max
  unsure (1)..(438): unsure at all n locations
agcttaatcaattgaaaattgacggtgtgagattntccctgtactctactaggggcaattttccttggcacccttaatcatgttcaatttgttggtaagtttaggtcttttaatccaaaaaaggaaacttggttaccatgtgagagtaatttggataaatgaaaatagttttggttgttatatgcatgagtatttcgatgcttgtttgcaacaatgtattatgcaaaagtacctaccacatagagagtggctacgcaatttggaatcaagaagtttcagattgtgtgatttcattctctggcaccaaagctattgcattgaaaaattactgcatacccaaaattactttaaaaaattgcaaacaatattatttggcaaaaaagcagtctaaagctactatgtcatcatggacctcatgtatcaaaagaaaatacaaat

SEQ ID NO: 274161 - DNA, 361 bp, Glycine max
  unsure (1)..(361): unsure at all n locations
ntgatggtgtcaagaagaaatcacatgtttgtcatcatcaaaaatgggaagaatgtgaatgtatgtatacatgattntgatgatgtcaaagaagaatctaacaaggctgcttcaaaggataagcatttgcttcaagaataattcaagattgcttcaacaaacaaagccttgtttcaagattcactaaagaccaagccttgccttaaaacaaagtgctttcaagacatgcaaggctctggtaatcgattaccaggaagtgtaatcgattaccagaggacagggttgagaaatagttgttgaaaaaggttttgaatttgaattttcaacatgtaatcgattaccatatgtctgtaatcgatta

SEQ ID NO: 274162 - DNA, 438 bp, Glycine max
agcttgtgcaggaacggtacatgtatcatttcatctagttgtgcgtagcattaactctcgagacatcaaagtcttccactgcaactggctcactatacaaagtgatgatcatcgtggatatgattttatctcggactacttggaaactcatcgttggccaaacattgtgagagtcaaggcttatatgacactgtattttgaagtgaaacagattctttccgccattcttcaagggctacgtaacgtcgaatttctgtctttgaattatattagggatgagatggacgctgcttgcactcctgatctttcactgtttaagaatttagttcacctaaggattattcttaaaagggatgattccttactttttgaacttccttcaaagtgtcccaagtttgaggttcttcaagttaatatcatgcataacctatcaattct

SEQ ID NO: 274163 - DNA, 379 bp, Glycine max
  unsure (1)..(379): unsure at all n locations
tgcataatctataattntaattgctttcaaagttttcctctgttatatgcatcaagtttcggtaaaaaaaaataatttaactcattctttgccccctcccctagctcttttactttttgtcattgatctcaaagaccaggttttcaatgaggttatataaatttttacatgggacaatgtcatgacagtgagtaagaaagaattgcaaattcatttccttattatatttaattttctaatttcatgattttatcctacttataacaccaatatcaaatactctgggattcttgctcttccatgctctatggnggaatataacataaccatgttttgataatttaacattagtctgtacgactttatggcgacaataaca

SEQ ID NO: 274164 - DNA, 402 bp, Glycine max
  unsure (1)..(402): unsure at all n locations
agctnttgaggaattcaaatggtcataacttttcatacggatgtccgattcaggcttataatatatcgatacgctcaaaatttaacatcggaaactctcgcgaaattcaaattgtcataacttttcacacggatatccgattcgggcacataatatgtcgagaagctcgatattgaacaacgaaagttctttagaaattcaaatggtcttaacttttcacacggatgtccgattcaggaaaatcacatatcgagacgctcaaattgaacaacggaggctcttgagaaattcaaatggtcataacttttcaccaggatgttaaattatggcgcattacgtttagagacgctcgaaaatgaacaacggaagctctcaggaaattaaaatggtcataacttttca

SEQ ID NO: 274165 - DNA, 223 bp, Glycine max
  unsure (1)..(223): unsure at all n locations
tgaatcggatatccgtgtganaagttatgaccatttgaatttctctttattttccgtagntcaatttcgagcttctcgacatattatgcgcccgaatcggacatccgtgtgaaaagttatgaccatttgaatatctcgagagcttcctatgtttaatttcgagcgtatcgatatattataagcctgaatcggacattcgtgtgaaaagttctgaccatttgaa

SEQ ID NO: 274166 - DNA, 413 bp, Glycine max
agcttgcttctacactatggtctggacatgattaatgtataatgtatattgttccctttctaatcaatgctaagtatttattctatgtacattcgaacgtggtgcatgatgtggctgtgcatcatctgcctgtaatagtaactcatcatttattaagaaatgtatgccatggtgatcaacatttattaaagtgtcaagttacgataacagcattactttgtcaagtaatgaatgaggatatgattgatgtgactgtgtaactacccgtctcgtctctacgatatcaccattctaaaccgggactatattcaactttagatgaaacactcgttagttcgcttataaagaaaatgatagtaatctttgtctacgatacatttaccatgcaacacacattatttaagtggatacat

SEQ ID NO: 274167 - DNA, 323 bp, Glycine max
  unsure (1)..(323): unsure at all n locations
tgtcgggttcagcttcaattaagcgcttgnggcatcctatggtctgagtgaaaaggccgggtcattaaagactacacatcttttaaggcacaaagcgaggatcgaaaccccaatcctacgttcttttaaaagactgtgatgagaaaattacagaggacaggaatccctgcaggaaaccacagaaaaataaaacatgcagcgacttccttaattgccccagaacttaagcgtagtatcgctcgacaacgtctgagttcaccggcgaaggtagttccttgtcatccatgttggcaagcacaaaggcccctctggagaaagccctt

SEQ ID NO: 274168 - DNA, 440 bp, Glycine max
  unsure (1)..(440): unsure at all n locations
agctttctagcttttcattggtgtattttgatctcctttntgtgctctaaattgtgggagtgtgctcaaatatatggggcaattttggtttgttttcttgcttgattaggttgaattaggggtttgtatgagatggccctaggcctataatgcattttgaagtaatggggcatgccacattgtccccgttctcttgctattgacgcctaaacgcgcgcccaccaagtgttcggtgaaatgcctcaatggcattagcgcgtgatttttgtatggaaacaacccatggggcaatttggtttgcacatatttttgggacatgcattcattttcgaaagagctagagtaattgccccgcatatgttctaggcctaggaaccaaagtttttatgcaatagtacacaaaaggaggtgcatattgggtaaagttaccctcttttggg

SEQ ID NO: 274169 - DNA, 330 bp, Glycine max
  unsure (1)..(330): unsure at all n locations
tgttgcatatatataagctatccctgngcctctaagtgacttgtttaaactatctgctcattagagttcacaagatgtaacaatcttcctggagtgttgttatgaatatcaatgtttgttgtagttttaacatccttgagaatttggtctttaactgagcacaatggcattgtgcaatttgtgtaatcgatctcacctagtgcccagtgggataagtttttgctgttgtttgttattgtaacatagtagtgttgtctagtaatttcaaatctggtgtatcttcacatccatgccatttgtgctcataggtagatcttaaattttgatata

SEQ ID NO: 274170 - DNA, 425 bp, Glycine max
  unsure (1)..(425): unsure at all n locations
agctntaggtttgatggccccaatgacgtctatcctccacatggaaaaaggccaaggggcggacataacattcagaggatgtggcagaacattgacattgtccgcgtacgcttgacatttatgacatttccttacatgggtgcagcaatcgcttttcatagtgagccagtaataaccggccctaaggatcttcctggccatagcatgcccattggcatatgtcccaaataaacactcgtggatttccttaatcatgtagttcgcctctttggcatctacgcatcgtaaaagggtcatgtcatggttttgtatgtactggatagtaccactcacaaagaaaccagtagccaatctccttaacgttcttttgtcattgtcggaaatccctggtggatattctttgttctcaacatatttgttgatgt

SEQ ID NO: 274171 - DNA, 340 bp, Glycine max
  unsure (1)..(340): unsure at all n locations
ntcaacaaatgtcttcacaaataatcatcacacagcagattatttacaaaactacccctcatatctcccaaaaccccatacccacgaaaatcaagagggaaagaagtccacccaaacctgaaatttcgaagtcccactcgtagccacgcactttacgactccaaaaatgctctcctttcacgaattggggcagaaatggtggccaaaggttgaagctttggttgaagcttcaatggagaatgaagaagaagaaagctacgtgagagagggagagaaaaggcttctgaatttctgctttggctgagtgacgagagagaanagctttttggttttaaaaaaa

SEQ ID NO: 274172 - DNA, 358 bp, Glycine max
agctcgtgcatccaataccctgatgaggatgttttatatgttcttaaaactggactgaatcatttgctttcaaagtgccatggccttgctagtgaagaccctcacaaacatttgaaagaatttctcattgtctgcttcaccatgaaacccccatatgtccaagaggaacacatatgtttgaaggcttctgctcattcattagagggagaggcttaggaccggctgtattaccttgcttcaaggtccatcacgagctgtgatgactcttagagagtattctgatactgatttctccctggttccagcaccatatacaacatgaaggatatctcaggtattatacaacttggtggataca

SEQ ID NO: 274173 - DNA, 382 bp, Glycine max
  unsure (1)..(382): unsure at all n locations
ntataagcgcgggtctgggagacgaaggtcaagtggccgctatatactaatatgatgccncgagtacattggatttggtacgaccttgccctcctgatttccaactggggaattggcgagtggaggaacgccccgacatttacgcagcgagcataatgtcaacctttacggttttaaaagctctatagttgggcctaagctatagggcttttcttttggttaacgctctgtgtattttgttttttaaatttataatacaacgatctttcttcatttgttgctacgtctctacccattgttatccatttgcatgtttacttcttctttgaaacggcagatccgatgacgagctccccgaaggtactaatacttgggacccgcc

SEQ ID NO: 274174 - DNA, 411 bp, Glycine max
agtctgaagaggatgctttaatggaggaaaatattgatagaaagggggagcacgaaattgaaggaataaaagagggagagaagtggaactttgaagtgtgtctcataagactttcattcatcaaagttacaacaagtgttacacatgcttctatttatagactaggtagctttcttgagaagctttcttgagaaaacattcttgagaagcttctttgagaaaacttccttgagaagctaaagcttagctacacacacccctctaataactaatctcaccttcttgagaagctcccttgagaagaattctaaagaagctacagcttagctacacaccctccctataatagataagctcacccccatgccaaaatacatgaaaatataaaatatgttcctactacaaagacta

SEQ ID NO: 274175 - DNA, 338 bp, Glycine max
  unsure (1)..(338): unsure at all n locations
ctgatgaggaggctattagccaattgttgtgcatgtcggtgtatgactctgcccggaccgcaacagggagaaaggtgcggatcatgcgcaccagcatgaccactctcacataaatctggatgacgttgctgcttaccaaaanttctccctaccgaccataactcggacctcaccctactaaagtgtcagctggtctacaccatactgacacatgtgagtgtacatgtggctcaactgatctttgatgctatctaccagtttgcacggaatgtgcgtaccagacacccggtggacccggagaagtccaacacggccttgagatttcatgctctgattat

SEQ ID NO: 274176 - DNA, 429 bp, Glycine max
agcttattctactagggactttatacaacatgcatttcatatttttcttttcagaatcatacagattgttcacattcatggtagcaacacgcctagagggtaccttcacatcaggatgcaaatattgtaataactctttaaaccttctatgttcaacaaaagagaatggaagatcatgctcaataatcgttatagatatcatctcatataccacactttgatctatttttttatttataaatctcccatcatgattgagaataatatttccaacatcactattagaatgcgtcttcaaatatacatcacatttcccatatgacgttgtaaggttgaagtcccattcttattgtcactgcccacataatctttcaaacaatatttgcatttactcctcacttttccatcactatgtataacagatttctc

SEQ ID NO: 274177 - DNA, 148 bp, Glycine max
  unsure (1)..(148): unsure at all n locations
tctcgcaactctaaatcatattactccaactgcctcccccacttgaagatccaggatcgctatacctcacttcctcacgatatcccctattgcttataaaattttctctacaaacacatccttntctaccgaaaatccacgtgtacgc

SEQ ID NO: 274178 - DNA, 446 bp, Glycine max
agcttcggaagaaagtgatgaggtacaagccctaaaggcagagcttgaaagagcccgggtagtcgaagagaagttcaagtccatagccatcaaagtatgaaaagagtatgatgaactaagggacgtcaatatggccacagctgaagccttggaatgagaaaccaagaaggcctgaaaggaagaacacgaccaaaacaaagttttgaggggctttatagggcagcaatagtgaactcaagctccgaagaggtgaaaggaatcatcacgggtcaaaggcatgatcttgaaggacgagctaaaggcttgccttacgtcgaaaagaaatttgtcccaacagttaagcgagactgaagggaatatgtgggccatcatcgatgagtgcaaagagaagctaaatctatcagcgactcacgagcaaaggctagaggatgagtactgccagatat

SEQ ID NO: 274179 - DNA, 444 bp, Glycine max
  unsure (1)..(444): unsure at all n locations
tgtagaatggctagacatgatacatgtcagggtttggtttggttcaatgataaaagggatgccccacattatttccatgacacaaatgcaaaaatgatgatttggaaactntatgcaaaactggtcatgcatgcacctatgtggacactcaagtgtcaaatttttatggtcatgtgatgctacggctcaggattcatttcctctattttagtcaacccaacgtttccaaaatatgttcttttatcaatttgtgcattcatccgagtccattttgggcgtctgggaaaatcttcacagcattcacccttcacgtgtatacacnatttttcaaaaactagttatgatcagtgaatttttttcacagaaaagttggagtcatctcttttcacaagcatgttgggttttcagcttgacaacttattttccttttttcttccttttttt

SEQ ID NO: 274180 - DNA, 433 bp, Glycine max
agcttgtctgtccgatgcagcagtaatgatggtccgagttatgttggggagcggttacgaacccggaatgggtttaggcaaagacaatggcggcataactagcctgataaatgccaaaggaaatcgtgggaagtatgggttaggctataagcccactcaggcagatataaagaggagcgttgccggaaggaagagcggaagtcaaggctcgcggttgagacaagaaggtgaaggaaacccaccctgccacataagtaagagctttataagcgcgggttagggggacgaaggtcaagtcgtcgctatatacgaagatgacgttccgagtatgctggatttggtatgaccatgccctcctgatttccaactgggaaattggcgagtggaggaacgccccgacatttacgcgatgagcataatgtaaacctttacg

SEQ ID NO: 274181 - DNA, 327 bp, Glycine max
ttgtataggcaagaaaacccctctgttaattaagggagttgacattccttcaacgatggaagagataaatcagttgagtagagaaggggatgaattattgtacgagttgaggagtaacctacttaaggctcacgatcagatgagaaaatatgcaaataaccatagaagagaactgatatttcaggagggagattgggtttttttgaaattgcaaccttatagaatgaggtccttagcaaggaagccaaatgagaaactgagtccaagattttatggaccctacaaggtgatacagaaaatacgggaggttgcttataagttggaact

SEQ ID NO: 274182 - DNA, 442 bp, Glycine max
  unsure (1)..(442): unsure at all n locations
agctntagaaaccctaatttgaggaagaagatgcatgtgaagaagaaaatatttgacaactttttaaattttgcatcaaagtccaatctaaagtgtcacaatctgggacaatttgccacgttgaatagtctatgtgtcactaaaattaccaacaatgcacctcactaatggtgttactttcaaatttaacggtgaggactattttgcaaaacttaatgcaaagataaggactatttttaacatttcaaaaagataaggactaatttgcaaaagggatcaaaagttagggaccaaaatgcatatttactcgaattacgcatttcatgttgattagcttgcaattgaataatctggaattctctaatcctatncagctatgctataaatcatttttgtttttaaaaatgtacctttttgccaacataataattaacttttatag

SEQ ID NO: 274183 - DNA, 335 bp, Glycine max
  unsure (1)..(335): unsure at all n locations
tttcgattcattctatgtacccgtggtggtccacattgcgttttgtgtatttttatcctcgtttcatttactttttataccccctcttgacgtgcttaagccattttatttaagtcatttctcgcttaacctanaaataaaataaatttccaccgatcgtttgaattgtattatccgttaacttcggttaaaatgaattccgaccgttcggtcgtgccgtaaccacgttggaaatcaaaaaagaggtaaaaatactataataatcaaaaaaaatcttttttagtaaaataaagcggataatcaatcggaccgtttctctttgggatttgccattc

SEQ ID NO: 274184 - DNA, 434 bp, Glycine max
  unsure (1)..(434): unsure at all n locations
agcttgaagaagtnttttcttttacatgcccatctctcttgagtgacatttgcattgattgttgtattttatgttgcatcttagtctctatcatatcctatgtgcatcatgcatcatcatgtgtgagtaaggagaaaatttctaatgctataaaatttcttcagaaggcaaaactttttgttttaatccattacaaccttacagtaatcaattacacaagttgtactaagcttgcatagttatgtcttgtatcgatttacttagataccgccttatcctaatcgattacaccattggttataagacaatggtctattcatttagtagtctatgctttaatcaattaccatgtgatataatcaattacttctctttctataagcgtattagaactgatcaagagcactttaatcgattacatcgacgatctaatc

SEQ ID NO: 274185 - DNA, 338 bp, Glycine max
  unsure (1)..(338): unsure at all n locations
ntaagccaaaatcctaactcaccataaaccttgaccctgagtgttaatgcccatccttgctctcagaagaagacaaacaaaagagagttcccgatcaagggtcggaagaaagcccaagaagataactcccactccaagattgggagaaagccaaaaaagaaagaaaattcccgatcaaagatcggaagaaaacaaacgaaatatgcagaaaggtctttgggccagacaatatctgaacaatacagaattgtcaccacccaataacgaaagaaaggaaaccacgacctgaagtggtcctctccctttgattgccaaccaaaatcctgtgcgtcagtgac

SEQ ID NO: 274186 - DNA, 429 bp, Glycine max
agcttcttatccaggcaattcttggtggtgaagcttcttcttccttggcttattccctagtggatggtgtctcctctctcctcttctcctttgccttccactacatctccatggtgtaaaatcaccattgaatgacctcattgaagctcaatgatccagcctccatagaagccccacaagcaacttccatcaagtggtaatcagagcacaagagcttcaagtaggtgctccttaaacctccattaattgttttgctttaccttctcttccattgatgtttcttcatttttctacatgtatctcctcacatgtctcgtgctaaatgttgttcacatgattctttagagtatccaccaattaaacttgctatataagctagatttgattttctatggttcacaatttctgttcttgttcttgaaccatgaa

SEQ ID NO: 274187 - DNA, 437 bp, Glycine max
tggacttcctggtgtttgggaacctctccttcctcaggtgtactcaaacccaatcacctggttcaagcacgactttctttctgcttttgttggcttgccttgcatagctcgcatttttcttttcaatttgaaccttcacttgctcatgcaacttcttcacatactcagctatagcctgtgcatccttatgcttaaacatagcaatgttaggcataggcaacaaatcaagaggagtcaaaggattaaatccatacactatctcaaatggtgaacaattagttgtgctatggacagccccattataagcaaactcaacatgaggcaaacaggctttccaagaattaagatttttctttataacagtcctaagcagtgtgcctaaagtcctattgactacctcagtttgaccatcagcttgtgggtgacaagcagtacaa

SEQ ID NO: 274188 - DNA, 210 bp, Glycine max
tgcttgctctatattgacgttgatgcttgtatttattggaggaggatgactcccatttttgtataaatagtaacgtccctctgcttaaactatctatacaaatattagcctctacgggaattggccctcgccgaagcttgcctcattgacgtgctaaaccgacaatgcatgcgagggagaccactaccctctcgaatattacaggctctc

SEQ ID NO: 274189 - DNA, 500 bp, Glycine max
  unsure (1)..(500): unsure at all n locations
ccgggcncccccgcgggnnggttgacntcttttatgaagngacaccatagaatactcaagcctgtagcattatgggggacccgtcacatgtggtactaagttgctattctgcgatggtgccaaacaactcttcacattcacaaagtacgcattaacccaccatccccagttggccacctttaactgagctcacgtacttccacgtaacccctattctcatttcttctaacaccgggttcccatcaatctatccaagcttccacaacacccaagccatacaaaatgcaaacattatgaactattacaacccagaaaacacggcaaagggagaaaactctgcccaaaacacaaccaataccacagcttttcttactcaaatacccaataacaatctcttcgttccaatcggtaacccgtgaacgactcgacaatttactggaggtcctaatactacatctacattgcggcattgggatctggtatatacggtcacacccccc

SEQ ID NO: 274190 - DNA, 232 bp, Glycine max
ctgctgcatgcatgctgcatgattacattctcactttctatcattttcgagaatctcaaccctttggattacgctcgtacgatgctggcttatctagcatgattagtgcctttggaattcgtgggaagtatgggataggtatttagccctctcgtgcgtacctaaaggtgatcgtcgtctgaatgattagaggtaaacatggctcttggaagctacaggaacgagaaggaaa

SEQ ID NO: 274191 - DNA, 434 bp, Glycine max
agcttgcttcttcaatctccccctttatgatgatgacaaacctgaaatcaagaaacgcatacaagctctatcttctaattgatcatttacttaattctccctctttgtttttgagtttaagctttacttgaaattaagttatttaattatataagttcttgatttaatcccaactttctctccccctttggcatcatgaaaaagccaaagtgcgtatagagacataaaatcatacattcactcataatcattcaagcaaggaagacaatgatgcatacataaactaagcaaggatgataataattcattcataaactataatataatgtcatataatttagagaatcatccatgataaccaaattaaaacaactaaattagaaattaacatactaataagtggttcaaaaacatagtcataagacatcacaata

SEQ ID NO: 274192 - DNA, 411 bp, Glycine max
tggaagggcatgcagtaatggacatgcatgatcacattactacactctcatcgagacgagactctcagcagcgcatcagggttatccagtcttacaagggtactccaacccataggattaacatgagccacacagagattccaaattggataagcgccaaggacatagtgatactttgactcattcatgtcctgcctagttaagctcaaccacatcctcaacttagaaacaatgcacatttatgatgcatcactcaaacattcaagcacaagtggttctattgaacctcacatcatacatagtgagcccattcttgtcccatataggctaggtaactcatggtcaaaatagcaccccgaccattctcgctcacataaacaggtcaccatctcatgtattaacctaactcat

SEQ ID NO: 274193 - DNA, 429 bp, Glycine max
cgggatctataagtcacctgctgcatgcaagctatacgattcattttatgcacccgtagtggtccacattgtgttttgcgcattctgattctcatatggctcactttatataccccctgttgacatgcttaagccattttacttaagccatttctcgcttaacttaaaaataaaataaatttcctccgaacggtagaattgtattatccgttaactttcgttaaaataaatatcgaccgctcggtcgtgccgtaaccacgttggatatcataaaagaggtaaaaataatataatactctaaaataaaacaaaaccatcttgtattaaaataaaccgtgaaatcaatcggactgtttttctttgggattcttcattcgttattcaatggagcattatactttagtgaaactaatgttaacatcaactccc

SEQ ID NO: 274194 - DNA, 277 bp, Glycine max
cgtcagattatggcgtacccatcacatgtggtactaggtttctgtcgggcgacggcgcacaacaagtttttcacatccacaaattgcgcataaacccaacattcgctgttgcccacctccaactgagctcacgtactcgcacgtagcccatatcctcgtttctctcaacaccgggtccccatcaatcctcccaagccttgcccaacattcaggtaattcaacattcaaatcatcacatactaatataccacgcacaacagggcaaaggccgaaaact

SEQ ID NO: 274195 - DNA, 434 bp, Glycine max
  unsure (1)..(434): unsure at all n locations
agctntgtcctcagatccctcttgttggactatacttagaccaaacaacattattgtaacaacatacttaaaaccaaaacttaatccgcagatccctcatttaagactaagttccaatcctgcttcaatcaagttctaaggcaacaatacatttcccaatgctaaagtcacctaacaacacacacacacaagtgggtgatcagaccaaaagcatgcaatctttaagcattgaaagaagcattgaacacaataaacacaatcaattagatattaaagtaattacatcaattgttctttagaaatccccaacaagagtgcttagccagccattaaagaaaaaccctaacaataatgagattaagagtagagaataactgcaccatacacaagaaatgggatccctcctcctcttctcagcatctcataatcactct

SEQ ID NO: 274196 - DNA, 437 bp, Glycine max
ctgagccaaaatcctgactcaccataaaccttgacccatggtgagaatgtcaattcttaccctcggaagcaaaaaaaagggggagagggaaaatttccaatcaaagaggaagcaaaaaggagagaaggaaaatttccaatcaaaggaaaaaaagagaggaaagggaattcccaatcaaagagtgggagaaagcaaaaagaaaagaaagaaaattcccaatcaaagaatgggagacagaataaagagaacgagaagaaggaaagaaagctcctgatcaaggatcgaaagaaaacagaagaaatgtgcagagaggtctctggaccaaacaatatctgaacaaatacagaattgtcgccaaatgaacacaagaaagaaaaggaaaccataacctaaaagtggtcttcttcctttgattaccaacccaaaatctgtgcgtc

SEQ ID NO: 274197 - DNA, 435 bp, Glycine max
agctataacagaatagctggcacggtgccttgtgcgatataggttgtatatcctgtcatttattttccatgttaaacagtctgtaagtaccaaatatatcctgtcaataatctaggttcaagacacatattcatggtacctcaactacttaatgtattattaggttcatgcatgcaaaggtgtccatatctaactgataaatcaaaatgtgaaccaaatttggcactctaataatggttcagaaagtttattggatctaagggatctaaggaaaggttatgcattctgtttatttccaacacttgaggcttgtgaaataatatatgttcacttttgctttactttttcaatcgtgacatgtactatgcattcgcttacttatttagctacttattgtattgccacctgaattcacatatactgattaatgattat

SEQ ID NO: 274198 - DNA, 439 bp, Glycine max
agcttggaccctaccaataccatctccttgttatattttgacaatcaatagggtcagggaatctatttgcgaggaactttgccatgacgagtttgatgattacaaggagatttttattttggtaaaacaaaattacagtaaaatttacatattaacgagccaagaaaaaaaaattgaaaatcaaacctgcatattatttactaacaagataatacaaggagaatttgaaaagggacaattttaccctcaactagaaatttatatggctgtaatcacttatataaaataatttgttagttattacggaaaattacattttctttgaatttacgtcgaattgttctattcttcttcttctttttatattatacttgattcagttttattcttacaaaatgtatataagaacgtaacattacgtatctattttgcaacacag

SEQ ID NO: 274199 - DNA, 425 bp, Glycine max
agcttgcttgtggagcttctatggaggctggatctttgagcttcaatggggtcctttaatggtgattttccaccatggagatgcagcggaagacaaaggaaaataggtgagaggaggcgccatccattaaggaataagccatggaagaaggagcttcaccaccaagatgagccttggataagaagcttggagaagatgcttcaatggaggaaaagaaagagggagagaaagagagaggggggagcacgaaattgaaggaataaaagaggtatagaagtggaactttgaagtatgtctcacaagactctcattcatcaaagttacaacaagtgttacacatgcttctatttatagactaggtagcttccttgagaagctttcttgagaaaacttccttgagaagcttctttgagaaaactttcttg

SEQ ID NO: 274200 - DNA, 291 bp, Glycine max
tgagatgaggaagtgttgaacggtgaaacttcctgcttttattgttgaccacagagtggtacctggagatatgtcgcgggggtcaggagaccttggggacgtcaagtggggtgctattgcccaaaaccaagcttgaccaatcccgacccaacccgggcatagtccgtcagtgagaacctgtgatgtacctaagcacgcgagctcctggcagtccacagactaaaggaaaacaagaccacaaagcaacgaggcttgtggtggctggccaactgtgaattttgtgtaatatgt

SEQ ID NO: 274201 - DNA, 442 bp, Glycine max
  unsure (1)..(442): unsure at all n locations
agctnttcatttggttgctctgctagagtttctaagcattagagagaaagcgaaggaattgaagcctcaatttcattgtctccatgtaaggggtatttctctctctacaggcattcattagcaaatcccaatggtatgaacctacgaaattgagtaccataaacgatttctgagtttcaaaataatccaacggttaacgagtttaagattgtagttttactaggatggatttgggtatatgcgggaaaaagataggatttttggagaggaagagagaacaaatttaggaggaagagagcataaaaacatatcataagtgtaaaaattgatcgaatatttatttatttatagttagggtactttgagcttattatatagtctatttttctttattgtattattttatataaaagaactctattttactacttcattaaataaa

SEQ ID NO: 274202 - DNA, 395 bp, Glycine max
  unsure (1)..(395): unsure at all n locations
tgtgctattccaagttcattaatcatacctttaagccagattgattccttcactccttcagctagggccatgtattctgctttagttgttgaaagagcaacaactaattgttgatttgctttcaaactgattgttgtaccaaacaaagtaaacacatatcctgttaaggacttccttgtgtctacatttcctacaaaatctgcatctacatagcctgtgactgctgcctcgtgtgctgtcttcttgtaccttaaaccagctttcaaggatccatttagataccttagtgttcacttcacagcttcctagtgtgcgctgccaggatcntccatgaatctacttataatacttacagcatgaactaagtcaggtctgctgcaaaccattcatacatt

SEQ ID NO: 274203 - DNA, 435 bp, Glycine max
agctcggctgaaaagtacccaaaagtggtttttgtgaatgttgacatagatgaggccagggacgttgctgcacgctggaatattagcagtgttccgacattcttctttgttaagaatggcaaagaggttgacagtgtgatgggggcagacaaaagtacccttgaaagcaagattgcacaacatgctggctctttttaagtgaataccttataaagatactgatacaattaacattttcttgtttcttgtgttaacatgtccattgtgtcatacaaaaggcaaagattaattgagtttcaatgtattatggcttgacgtttcgtctgtctgattgcatgtagaaaatgttaatgctgatttgtaataagtttcatattttcaagctgattttaagtttgtgatgactgttatggggagacaccccactagcttcat

SEQ ID NO: 274204 - DNA, 197 bp, Glycine max
gatgtctacttcacctctagaaccttacaatcactcacagacatatcttatgctctcacgatggcttcctgttcacgctccattctctgcggaccgtttacaacaaatgctctcagaatctctagaactggcatctgtctttctctagaaatctctaaacatgccaaagcttcgagaatagcccaactacctcttca

SEQ ID NO: 274205 - DNA, 416 bp, Glycine max
agctttaaagttgaaatgaattccaagttaattggaggcaccgatcgccaaatctgaataagttcaagacaactcagattattattattattattatttaacccacaattccaaattttgatggtcattcacatattgcaacatgcgctcaaggattaaaatcggatccaacgaacttcaccaatatgagatattgaaattggtctcaataccaaatgatgagacccctttgtggatccctaattcagcatctcaatagatcaaaattaaaaaaaaaaaattgtaggaaaaaaagggaaaatggattgagatgagaaatggaaagaacaatatcactattcctaagaattgataaattgaggagaatttgtcagaaagaatagaaattctttaataagaatttatgattcctaaag

SEQ ID NO: 274206 - DNA, 412 bp, Glycine max
tgtcaagcgccctagcctgggcaggtgttgttttggatgcatttgctaagttgtccaaggtggatgcacattttgttttgtacgcaaagtcagacgtgttaggtgaggggagtctctgtatttgacaattctacctttttctgactattggagaatgcattgaagataggcgtttcattttgtcttttgttgtgggcaagtgcagcgcacacgcgttactcttgcatacgtgtcactcatggagtacgtatgtataggagacgcgatatgtgaatgagtggggctgcattatggtgcaaaattttagggtgccatttaagcctccgccagttatcgaagagttgtgcctccatttaaatagagcgtacatctgatcttttttatcaccgtcactttcaaaatttttctttct

SEQ ID NO: 274207 - DNA, 425 bp, Glycine max
  unsure (1)..(425): unsure at all n locations
agcttctntgagaaaacttccttgagaagttattagcttanctacacacacccatctaaaaactaagctcacctccttgagaagagaagctagagcttagctacacacccctataatagctaagctcacccctatgaaaaaatacatgaaaatacaaaaaaaatccctactacaaagactacttaaaatgccctgaaatacaaggctaaaaccctatactactagaatggccaaaatacagggccccaaagaagaaaaaaaacctattctaatatttacaaagaagagtggacccaaccttggcccatgggctcaaaaatctaccctaaggttcatgagaaccctaaggccttctttatcagctctagcccaatcctcttggagcctcttgctcatggctactggaactggtcctttcctaggga

SEQ ID NO: 274208 - DNA, 392 bp, Glycine max
agcttattacgagattataactaaaatgtttatgcaaaaaaaaaaattaaaaaaaggaggtttaactcgcttgggcgagtgtacgtctaaagtaaaaataaaaaggggggatgaaattagatttcacccccaccttcatatcatacttcttcttccttctttacgtaaacctgaccccccccccccccccaaagccatctaagtgatcctttcttcaaaattttccgcattccattcgtttcatccaagtaagaatcatcttcagcctaaaattttgaacttccctttttgtgtttcgatgatttgcgctttccttttgaacgaaaatgcaacttaaatcttggctaactagttagatttaattgtgtaaaagtgtgttggtatgaatcata

SEQ ID NO: 274209 - DNA, 429 bp, Glycine max
  unsure (1)..(429): unsure at all n locations
ctgaccttntatcttctcaatcatccatgcatccttcatagttcattatatatataaccttactcgatgaatattaacgtttagcaatcaatatagaaagaaagaactacctcctcattctcttctatgtattttccttatcatggtggtccaaggcacttcggtggtgaaacttcgtgagccatgcatcaaactttatagcaataattttttgctaaggaatgcacaggttgaagttggcctcatcaaccatagatcgngttatttcattgaacaagatcctctcattcttgtcgaatacacaagcgaaagtgattgctcttgcgctcgcacaatgaaggagtacaagtgatggttgcctcaagatcaagagatcttcttttgctagtaccgctctatttgaagtccactactacaaaagcgacattc

SEQ ID NO: 274210 - DNA, 440 bp, Glycine max
  unsure (1)..(440): unsure at all n locations
agcttctaggaccatgacacggcagattgtggggtaccttactttattacaggtaaattttgtgttcgtaatatgttacattggattatgatgtagacatatttttatgttatgttaacctcattttttttgtagtgtcggatctaggagcactttccgagtgtgcatcagtgcgtcatcgatgatgcatatgaggagacgtccccacgtccctcccggtggctgacgacaaaggcatatatgaagggaattgcaggagtgccatactaggcatgttgtgatgctttgatagtcacaaacgtgtgctggttgccttacagtgaccatcgaggggttagcgggtttgagctaatntcatagttcgaccggagagggtgctattcagagcatccctccgccacctgttagtgcttcattgtcatatgatgatatagatgaca

SEQ ID NO: 274211 - DNA, 442 bp, Glycine max
  unsure (1)..(442): unsure at all n locations
tgttcttgattnttncttagttctttaacaagctntaaacaatatacttgtccttcatataactgcctttgggcttggcggccacgctcaacanagtactttcgacacctactgtacgttgatttgaccaatgttgttatgggaatgttgcgacaatcctttaaaaccttattgatacattctgagaagttggttgtcatgtggccatatcgacgtctgttagctctttggcaagtgtaccacattgctcgtagtaataatctcttcgtaagccgagtgttgtaccacagggaatttgctgcacttatgtgaagtacctttcagtttgcaaattgctaaattagtgtatacaaataaacgcacattaaatctatgtagctacttctaaattaaagaaaactaaagccataaataaagaataaagtctataaatattactaaa

SEQ ID NO: 274212 - DNA, 436 bp, Glycine max
agcttcagattgctcattgactccagaatgctgtaaagaaggacagagatctgtatggtgatctctagaagaacatagaccacagactcttgcaacaggtgcatattcctaattcatggcaagctgagttacaaggttaaccaaggcatcaagttttccctcaagctttatattttcagcagatgaagatgaatctgtggccacctcatggactcctctaaggacaatagcatcatttcttgcactgaattgttgggagttggaagccatcttctcaatcaaattcctagcctcaacaggagtcatatcaccaagagctccaccactggcagcatcaatcatactcctctccatgctgttaagtccctcatagaaatattgcataagaagttgctcaaaaatctagtggtgaggacagctcgcacacaatttcttg

SEQ ID NO: 274213 - DNA, 303 bp, Glycine max
tgtagaatggctagacataatacatggcggcgtttggtttggttcatagatataaaggatgccccacattatttccatgacacaaatgcaaagatgatgatttggaaattttatgcaaaactggtcatgcatgcacctatgcggacacttcagtgtcaaatttttatggtcatgtgatgctagggctcaggattcatttcctctattttaaatcaacccaatgtttccaaaatatgttcttttatcaatttgtgcattcatactagtccattctgggtactcgggaaaattccacagcattca

SEQ ID NO: 274214 - DNA, 483 bp, Glycine max
  unsure (1)..(483): unsure at all n locations
atgacacttgangacattggcaaccccggagtacatctgcatgcatgcgtgcgcgtgctagctaaggacctacgggacattattttatttaacagtctcgaactccgttaaatgcgtgcgaaaatatgcctccgatacttaatgacacctcagcatcataaactaacgctaatcagcatgccttctattctatgtatacgaataccttatctgcagaaatttgatcgcatcattagacttaatcttacaccaatcttattaattttctaaaacgcacagatgagcgaaacctatgcagccactccttccatatacttattagctttaccaataaatggccacctgcctaaccttacaaaggatagaatgtctgtaccaaccactttctactattattgtgcttaattaactcctaccttgcaattgacttaaacatatttgtcaacttaccatgaccgaaaaaatcatgtaacagagtctaaa

SEQ ID NO: 274215 - DNA, 443 bp, Glycine max
tcataacatcagcattaggatgtcataatctataatgccaagtggcaaaagaagtggcactactagagacagtatttacaacataagtatttttttaccatggaaaaatatataatcagctatgttatggaacactcttacagacttttatttcaactacccctagacttatggtccttattaattatgcatggtgcaaggcccgcaccctaaaagtatatattattggcgtaaacttgaactcaaaatcatggactaaattggaactcaaatcgcataaaataaaataatagaagtacgaatatatgtgaatatatatttgtgctggattgaatagtatcaaatgatgacagaacatcaacaaaattgtgtcatgatggagaatatcaaccacgagtgcctaatcaatggtacttggtaatcaacccagcgagagtaataac

SEQ ID NO: 274216 - DNA, 434 bp, Glycine max
agcttacttgtagagattcctttatgggaaagaccgataccagctgtgttgatccattgcgatagtaccgcggatattgcaaaaattgagaaccgttattacaatggtaagaaatgacagatacgtcgtaagcacgacactgttagagaattactctcaacaggagctgttagagtggatcacgtacgcactgatgataatttagcagatcctttgatgaaaggattagctagagagaaagtccataacacttccaaaagaatgggactagtgcccttactgcgatgatcattcatgatggtaacccgacctaaatgactggagatcccaagaactaggttcaatgggtaataacaagttatgaagtgatatgagatgaacatgcagttataagtgaaagcagcatgatctctgaagtaacaagaggatgagtt

SEQ ID NO: 274217 - DNA, 505 bp, Glycine max
cgggaccgcccgcggcgcggttgtgacttgaatcaccttcgtttacgcgacactatacaatacttcagcttgtaaataatatcacggcacaccggagaccggtttatctaatccaagtcttcataaacaaagaaacccaagatgcggcacaccttctcacgaaccgtaaagagagagaagacggatgaaaaatatatatttattgaaacttgccagaggcccttacaaaaatattgttctagagcacctctcttcacacaccctcaaaaatggccaacgaaagggtgccttacaacatacttgacgacttcttatatagcccaaaatctaacacctggacctgcccgtagttctgaccgggaatatctgactattttgcttcagacgagttgcttcgaccgggccttcatgggtacccgacccgtcgaactgcccaccctttattacccattactcctcacacaatggcgttgcgatcgacaatacacctcttcttaaccgaccg

SEQ ID NO: 274218 - DNA, 351 bp, Glycine max
agcttcttatccaaggcaattcttggtggtgaagctccttcttccttggcttattccctagtggatggtgcctcccctctcctcttctcctttgccttccgctgcatctccatggtgtaaaatcaccattgaaggacctcattgaagctcaaagatccagcctccattgaagccctacaagcaagcttccatcaccagttgtgcgctgagcctagctgaagacaattgttgcgcttagcatactgatctcgtgcttagcgcgcggccttgatattgatgctctgccaaattcttctgtcgcgctaaccacgctgtaactgctctaactggtgtactcctgtttcccctcct

SEQ ID NO: 274219 - DNA, 391 bp, Glycine max
  unsure (1)..(391): unsure at all n locations
tcttatccaaggctcatcttggtggtgaagctccttcttccatggcttattccctagtggatggcgcctcctctcacctcttctcctttgtcttccgctgcatcttcatggtggaaaaccaccattaaaggacctcattgaagctcaaagatccaacctncatagaagctccacaagcaagcttccatgaagtggtaatcagagcacaagagcttcaagtaggtgctccttaaacctccattaattttttgctttaccttctcttgcattggtttttattcatttcttctccatgtatctcctcaaatgtcttgtgctaaatgcttgtaacatgaattcttacagttttcaccgataaactngctatagaagctagattntattttctatg

SEQ ID NO: 274220 - DNA, 426 bp, Glycine max
  unsure (1)..(426): unsure at all n locations
atacttctgggagngagcatggtcagagctcgctagctgtgacacacagccatttcgctaacaatgactcactgcagaaacattcgtgatgatagaaatgtcagacggagcctgcaacggagcgagatctacttgagtattggcagcgacctcactcggccgggattcttcaagagagcagactggtccaatgcatcatgcatgagatgacaacatgcgataacctggaggctgattcaaaccagacagcggatgttcttatatctgatgttnctggaattaagcccaacgagatcacaatacgattggaccttattgttcgaactggaacttcttgctctccgatgacgtacacccatcgcactactcttcaatcactttaaacatcgtattctctctctctcctactcttcctccccttctccc

SEQ ID NO: 274221 - DNA, 139 bp, Glycine max
acatagatactaagctggatgcatgcggtggtctctgtaggatcacgcgatgactttcttaaattctccgcagggcgagtcagggaagcgaattatgggcgcaagcctagcacccagtaattgtgaaatatcttgcagt

SEQ ID NO: 274222 - DNA, 300 bp, Glycine max
  unsure (1)..(300): unsure at all n locations
agcttatagtttaaatcagaagagacattnttatgactgttgacatttcgtctagagatctaagttcttctttttcaacttttcgagctcattattagcaagggtgcattctttttgcagtaaaacattttgtttaagcgtttccttgaacttttcttctaaatctttagaagaatcttccatccaccggataccttttcgtccaataatgcctttacctcctcataatcaaaggtgtgttgtacatcactaagtgaagcggttcccatgacaaaatcaaccacaccatcttaacgagcc

SEQ ID NO: 274223 - DNA, 139 bp, Glycine max
  unsure (1)..(139): unsure at all n locations
taagcttgaatctgtgtcctggacatggtccatactaaacaanatctttctgaggaggagagagactacctgcaaatgactgctaaacgtgtctcttgttacttggtccatgcctcgagaggtccgcatattgcaaacc

SEQ ID NO: 274224 - DNA, 423 bp, Glycine max
agcttgtaggtgaacatacagaaatcattgttctgacttcgatttgtacgccacatacctaaatgaccggtgttattctctggtagcgcactgttaacaccgatgcactctcagttgcagatatattgtgtgtacgcgtacacttgtactataagtttacctcatactaagattatttcattatgcgaagacctgagcaggcgatgatgcagttacgttactcacactaaacgtagtactgtcacttataacccgacttctattggaagacctattcattataatatgcttatctgatgtttggatgagcctcatgctctacaataagaagctgataccggtctcaactgcattgcaactctaaagaattagccttctttgatgaatgtcaactacgtacatcattctgtctatgggaaacac

SEQ ID NO: 274225 - DNA, 446 bp, Glycine max
cgctctgattgacggactgcagtgcaccaactgttttaatctctggttttggcaggatgaatccttccgcgcgatagatagcttaaacgtcgatgatgtgcacttggtctcctgcatcacacgtcatgcatattgttaggtatacatcaagcaagcggtgcatggctgttgtgctaagtaaacttacacacgtttgatatcaagtcatcaacattgctctaaccatatgtacctactgacctgttacagagtgaatggcgatacagatagtacatcaccgagatgtttagtccatctaatagagaagacatgttctacgattatggcagctatatgctttagattggacatctcgttgtactacatacattatgccggacctagagttatgcactcctgattatgtactgtccgttcgcaaaaagctcttgaggtctcagttcacg

SEQ ID NO: 274226 - DNA, 322 bp, Glycine max
agcttctcaagcaagcttccatcaccttggtcaataacaattccacaccttgtttgcttatcttcactccttgttacgtcaattacctttttccatggctctaaccccatgattttcattgtttttttttgttttagtaagcatatgcatgatatgaggtttgtggataggttttcttttatttcttttagtggaaggatttgtgtatgagtttaaagttcattcatcttaaataattttttaaatattatcaaaaaattcttaacaaagtttgttttaaatgatttttatattctttcttggcaaccctttatttgactct

SEQ ID NO: 274227 - DNA, 417 bp, Glycine max
  unsure (1)..(417): unsure at all n locations
tatccccacaagagtgcagaacaactggtgagtctgcattgattatatgatgctgaaccaggtaacccgaaaagatcatttccccctgccattcattgaccaaatgcttgagcgcttggcagggtaatctcattattttcttcttgatggtttttctagttatctacaaatncatattgctcttgaggatcaagaaaagaccacattcacctgttcctttggcactttttcctataggaggaatgcccttggcctatgcaacgcccctggtaccttctgtcgcaacctacccttttgcgggcaagcgaggcgaggctcacgaggtgccttttcaaaggaggaaaatgcgcggagtcgtcaccaacgtttatttgtggaaaacgtcgaataaatcgaaggataccggtcaaaagaata

SEQ ID NO: 274228 - DNA, 449 bp, Glycine max
agcttgcctgcattgtgttgttagcaaggttcagcatccagatcccaatagtaaatacaagaacaacccttgttcatgtccctttaaatgctctacaattttagacatatgaatttcattaatgtatgactaaggtcatcatatctgtgaaatttaaaagtcaaagaaataaaatgagtaagaaaagaactagaggatgagaacagaaacctgcaatgctcatgtgtatcacctaatacatatccagtgtctgtagaaaatccaattaatatcacctaaattataagacttgacatagcacatatgtaatgtagtataaaaaaacaaaatcaaagtaagcaattaatgtcacaaatgcttacagctagacatatcataagagatccgccataatgaacagtgtcttctgccaccttgaagtacatttatcactccaaataccaacacat

SEQ ID NO: 274229 - DNA, 142 bp, Glycine max
tatgtttcacatcttagatagatcttgccttgcgacttatgctagaaattctgactgtgagtgcagctaaatgttgctgccctctactatcatgtggactctcagagtctatttaccttatgacggatctgatgactacaca

SEQ ID NO: 274230 - DNA, 261 bp, Glycine max
tatgaaatgaatctatcatttatttaatctctcacactaccctttagacaagtctaaatgacattttgtttgatatattctatgtggtggatcttattctatgtctataccgctaggcctaatttaaccaaattcaatttgacaggggcaattgctttcttcattcacatatttgctttctgcaccttatagaggacaataatacttgttactctaatgtgcacccaattgctgcagcaacaaccctctttcctcatggca

SEQ ID NO: 274231 - DNA, 436 bp, Glycine max
  unsure (1)..(436): unsure at all n locations
aagctgtttatttgcttaaattttgatatttataaatnccaagncccattaattaatttgctttcatgttaatcctatttaaaactattatatttgatctttaggagaacattacactttagcctattaaaaaaatacgtcaacaaatcacaaacaacatttatattttacctcattcagaatataagtaaaaacatacctaatttcacattgattaagtaaggatgttaattaaattcatttaattttcttgaattaatatagagaaggaactatattctctaaaatattattaattgtatttataaattattaattaattaacttaatgacattttctttaataataacattaaatatggctaaattaattattattcttataatncaatctaccaaacataaacatttnttttatagctgaatttgtatctac

SEQ ID NO: 274232 - DNA, 417 bp, Glycine max
tgtcatatgaagatatcgacaacaagtggatgcattactctgaccatttagtagcagggggacagatttgtcttgtgcctagacagtgtgcaccagattacatggactggttctttgggatctcgcattcgttcatcacacccacacaaacagttgatccgcccagacatccatctgtcccacaacatgacacatacgaggagccagatattcctgaggtcctagtggcactagaagttggaccttcacatgcaccttctgatgcggagtagcctagacatgttgtggtaagatgactcgctttaatggtttattaaatgttatttatctcagttactgtaattgtatatgggtcttttgaatgtcataggatgtgtgctcagcgatcgcagaaaggttggagcgtctgcttaacct

SEQ ID NO: 274233 - DNA, 513 bp, Glycine max
  unsure (1)..(513): unsure at all n locations
acgacgccnnccncccgcgcatgattgctgcatacagtcccgtgatacttanactgagctgccgcattcaagcttgacgatgacggaacgcacctcacttttaatgatgtganaatcacgatcagcgtgttctcggtcgccctggcgacccggattgcatgctacatctctgacggatctgctatgccacattaacatgacacaaggaatagtagtactaaagggcagtagacgcgttcttatccaaatcacttcactcgatgctgaggagagtgcccgatattctgcctcaccagaagaattagacagaccgggttgncacttttctttccatgatatgacggtatcctctaataacacaccagaaccagatgctgatctgcgtgtgtccacgcacttccccaatctgcatctgtacatgcagacatcttgaaggacacgtttgctgcaaaagaacaccctgccctgcacacctttcatgcctcgacgacacgctgcacactactacacacg

SEQ ID NO: 274234 - DNA, 354 bp, Glycine max
  unsure (1)..(354): unsure at all n locations
nggagaaggaggatccgggagtgngtataaagtatcncattgtcaacttgatgggcaacgcgatccaattacaattgctatcaaaaggctcaacactcgcggcttccaagtatatactccggccgtccctatttataataagacagacatacccaacaaattatttcgtccctgttataagactccactatattcctcttctattaattctttttgcttttactgaaacctcataaatggccttttcctccgccttatgatgatcgaccaagatgagaacgttgccaaaaagttcaagataaatttataaaatattactcttggaaattaaagaatggagcataattatcgaca

SEQ ID NO: 274235 - DNA, 202 bp, Glycine max
agcttgagacgaggaagcgctgaatggtgaaacttcctgcttctattgttgaccacagagcggtacctggagatatgtcccgggggtcaggagaccttggagacgataggtggggtgctattgtccaacaccaagcttgaccaataccgaccgaaccggggcatagttggccagtagagaacctgtgatgtacctaatcagg

SEQ ID NO: 274236 - DNA, 457 bp, Glycine max
  unsure (1)..(457): unsure at all n locations
nggatttcctttagtagggaatctatccttcctaagatggtagccaaccaagtcaccctcattaagaactagctcttttcttcctctattgcctttagttgaatacacctttgtttggttctctatttggttcttaaccctctcatgcatcttctttacaaattctgacctagattccccttctttatgtataaaaaaagtgtccagtgggaggggaatgaggtctaacggtgttaggggattgaacccatagacaacctcaaaaggggactgcttggtggttctatgaacccccctggtgtaggcaaattctacatgagaaagatactcatcccaagacttatggttgcctttcagaagagcccttaatagggtggataaagacctattcactacctctgttttgcccatcagttgtggatgaccagtggtagagaaaagaagtctagttcctaac

SEQ ID NO: 274237 - DNA, 190 bp, Glycine max
acaatcgttggtcatgtgcctttacacgctctacacttcgaaacatatgaagtccattaccgagtgactaaggcctactgtatctgtgaactcaacagtccatgatctttactgccgtagaaacgaactagacgatgagaacttgaacatcgaatgatcatgtgtatcaactaatccatattctgtgtcc

SEQ ID NO: 274238 - DNA, 500 bp, Glycine max
  unsure (1)..(500): unsure at all n locations
cggccgcggngatgtctggacctgaanacgcgcacttagagactcaccttatcanaaggcatagaatgactgcacttcttgtttatttatcatcgttaattgcaactctgagcttggagatgcatacatacttgcgtcgcctataagagcttgtgcaccgccatggagaatcacgagtgcgaccatgatgatgctacataaccaaaagtgatgtaccgctgagatcctttcaaaaacgtactttcgtgatcccatgctggtcgaggttgagctgtactccactgacaacgtctcttgttggtactctgctagacttggtggtctctcgaacccgcgcctgatgaaaagaaagcctgaatatgtagcccgcacacacatgtagaaaagaaccgcttattacgtggttcgaaattgtgctgcattcctggcagtgcacttcactgcaaacatgatcatatatgcgtgtcatataacaaaacgtactgtggcgatcttggtcg

SEQ ID NO: 274239 - DNA, 333 bp, Glycine max
tatcccatgcctacgaagcagatgttgcattctataacttttctaatgcaagatcatctaatgcttgatagatgatgaagaagccttcctgtgtctctctcttgaattcctaaaagtctcattttgtgcttaagacagcgaagtcttatcttgcagcatcttatagcctttctcaaccatgtcccaaacatcatgtgctacagaaatgcgtccattttggtgctcaaattatcatggtgctcccctttagaagtggaacttggaaggatgccactccattgcttcccatgactatatagggatttcttatcagaacccaatctctaataccac

SEQ ID NO: 274240 - DNA, 240 bp, Glycine max
  unsure (1)..(240): unsure at all n locations
agctntatactggtttggtcacaatttgtgcctacatccactccccaagcaaccaatggttgttgagatttctttcatccttgtaaaatcctttacaagccgaagatccacaagggatgtaccctcccttgttctctttgaacaaccaagtgggtgtaccctccacttgaactgatccacaagagatgtaccctctacttgtgcacaaaggatgtaccctccaatgtgttaggacaaata

SEQ ID NO: 274241 - DNA, 404 bp, Glycine max
  unsure (1)..(404): unsure at all n locations
tgtagaattcaccccaatcctggtgttctatgtatgacctctaagcgtaaggtgcaaagtctaattgatgtgggctagctaaaatttgaggagaatcgcgtatgagtcctgacattgacaagcgacaccacacatggggcaattttgaaagctggtgttagatgtctctaatgactcatcacgattttcaagtgtatgccattattataaaccacagttacaatgctaaataaaatggataaatttggcatctttgtccctcatcctctcacaaacacgtctttgcttattcaacttccatcgaaatgtgagtgcaagccattggtctatttgctcaagcgacctgcgctcctgagtgtngacttccaagaccgtccaatcagggattactcgtcttacacgtt

SEQ ID NO: 274242 - DNA, 435 bp, Glycine max
  unsure (1)..(435): unsure at all n locations
tgtaggattatggngtacccatcacatgtggtactaggtgtgtggtcgggcgatggtgcacaacaagttttccacatccacaatgcgcgcataaacccaccatcccctgttgcccaccttcaactgagctcacgtactcccacgtagcccatatcctcgtttctctcaacaccgggtccccatcaatcctcccaagcttgcacaacatccaagcaaaacagcattcaaaccgcacaagctatcgcagccaagcaaaacagagcaaaggcagaaaactctgccaaaacaccaaccaaatcacagttttgctcacttaaagaccccagtaacaatcccttcaatccaattcgttaaccggtggatcgactcgaaaattttactggaagtctctagtacatatgcctacattgggaccggtaggatctactatcaaac

SEQ ID NO: 274243 - DNA, 399 bp, Glycine max
agcttcaacatctcagtcgtataggccatctcgtttctcatatgtccacaagaaaatctaccatttcctataagtataggtataagaatatcatcagatcattattctttacaaaaaaaaaataaaaatgcctgcatgacagttgtttagaaatagatgcttacagcaagagggataggctgatggaatggcttgttgctcccaagtaaactttcatatgttgcattccaactgcaaagccaaaaaaatttggcaacgcacagacaataagttctgacaagatggtggggggagaacaaattcataattactgacagaaagaaattcatcggccacatatggaacatttatcgccccaattgaatacgtttgctatgcaccatacccacatgaaagaac

SEQ ID NO: 274244 - DNA, 302 bp, Glycine max
actcaagcttattacctggctggaagtcatcatgcgtgtcagaatcatttgcacagtattcgagtatctcgtgcaatagaacaacccattttactgccaccatgtcaagggaagactgttagaataggagattacaaattgctgttggaagaattacaaaatttaaaactaaccaatattaatagctggcactaattatatgagtaatgcaagggtatatgtaaagcaccttttacaatatcaatttggggtgactcaaaaaccacaggatgaagctggcacacaatacgcctattcatgag

SEQ ID NO: 274245 - DNA, 449 bp, Glycine max
  unsure (1)..(449): unsure at all n locations
agcttggcacaagaatntttttttttgccgttattgtgcaatttttttcttatttttcaccaacgccgggcaataattgcattagtacgatcaagcaaattttccttgttgatttcactcaataataggtttaccatcgaggtcgcctgtggtatttcgtgggaactcaaccgacgttgtgtttcgggcgacattggcctgcgctggtagaagaggcaaagaaaaatatagccgaccttggcagcaaaaaaaaatcccgcgacaaacttggataaaaaacaattctagccgatatcggccaagaaagattaccggtcgctgtaccccataaagaatcaccagatgaagccaatcgaatattctcttatcgacatcatccgaaaattattctgggattgaacagaaaagcaatagcccaaaaccggtcgaaactacacccgactgatatt

SEQ ID NO: 274246 - DNA, 422 bp, Glycine max
  unsure (1)..(422): unsure at all n locations
gaagctcctggtttagctttacccgattntactcattctattgtagttgaatgtgatgctagtggagttggcattggggctgttttgatacaaaacaaaaggcctatagcttatttctcggagaaattgggaggagccagattgaactattgcacctatgacaaagagttctatgccattgtgagagctcttgatcattggaatcattatttgcgttctaatcactttatattgcattcagatcatgagtcattgaagtatatcaatgggcagcagaagttgagtccaaggcatgctaaatgggttgaatttcttcaatcttttaatttctcttcaaaatacaaggatggtaagagtaatgtggtggctgatgcactntcaaggaggtatgctttaatttcaattcttgaaactcgtttact

SEQ ID NO: 274247 - DNA, 417 bp, Glycine max
agcttgctaacccatggaagctcctaatcattctcacactttttggggtgggccattcttggatagccttgattttctcacggtccacttggaccccatttttaccaactacaaaccctaagaaaactatattatctacacaaaaggtacacttctctatatttgcgtagagggtgtttttcctaaggactaaaagaactagcctgagatgtcctaagtgatcatctacgctcctactgtacactaaaatatcatcaaaataaacaactacaaatctacctatgaaatcccttaagacatgatgcataaccctcataaacgtgcttggtgtattaatgagcccaaaaggcatcactaaccattcatagaaactaaacttggtcttgaaaggggtcttccactcatcaccttctttca

SEQ ID NO: 274248 - DNA, 261 bp, Glycine max
  unsure (1)..(261): unsure at all n locations
tatccttacggcctgcctccggacttcacccnccgtgccctctcgattatntaagccaagcccctactgntgaggggcaactcccaccttatgaagactatcccgggcaagacgatggggaaggagatacccatcttggccccctgctgcacctcaaagatcaatccccgtttgaactaccccagccgaacatagtctgccatatcccggcctcacccacgcccgtataagaatcttgtcccttcgcggaaatatgggaaa

SEQ ID NO: 274249 - DNA, 341 bp, Glycine max
tgcaagcatgcaggctggtgtagtacaggagaagagatgacctttgcgctttgtcgaataaacagatacatctgaaggcatagtagagaattactctctatcatgcagtagaaactatatacaggataaagggagatacgacaccataccaaaagttacatttgaaatgtagtctatgtcactggatgaaatattaaagaaactgcacttgaacgaacttactctacgggattcgacatcaataaactattttaatttacgtttagttacacattcagttgttatagttgctaagctgataacttttagccctcattaagcgtataccttttaggccttat

SEQ ID NO: 274250 - DNA, 339 bp, Glycine max
aaaaaaaggaaatagtctaaagatttaatatttgttaacttcttggagtaataaaaagtataaactgcaatgtgattctacagaacatctacatatttctgatgtcaaatgataggattgattattcggaaatatttctcaagaacaacaggtaatgaatagagaaagaaaaagtatcaaaattcacaaagatgtgctacctcactttcaagtgctgtatatacatcactgaattcaagaccattatatccacgtcctacaattgctatccaatcatgaacagattccagtttgagtgcctgatcacttgggatcacagtcttccctgaagatgatttt

SEQ ID NO: 274251 - DNA, 358 bp, Glycine max
cctgcacgcatgcaagcttgaagtgaggaagtggggatgtgtgatatctcctacttttattcgttgaccacagagtggtacctggagatatgtcgcgggggtcaagagaccttggggacgtcaggtggggtgctattgcccaaaaccaagcttgaccaatcccgacccaacccgggcatagtcagtcagtgagaacctgtgacgtacctaaacaggcgagctcctggcagtcaaccgataaaagaacaaagaccacaaagcaaggaggcttgtgtggtggttggccagcaatggatcttgagtaatatatggaatatggcccctggtaatcgatcacaaagggcgggtaattaattac

SEQ ID NO: 274252 - DNA, 419 bp, Glycine max
cgttttgatctgatactccatacggacttgatctaactgtggagaaaaaaaaccaccctctttggtgttctggcaaaggggaagaaaactccaattgtttttaaaagacagatgataggttaaggctaaatgccaacctaattgcacagaatgatataccgccctggtacggccagcctgcatttaggcttatgcttcaaatttaccacatggctagtggttaacccaaaaggaaatttgtttgctaaacataaccctatctatccctaatggacggttaccttcttgataaacgtataaagtgacgtgcacaagtccactttcacgaactaaatacattgtcactattgcccatgtaatttttccaaatgaaattttagtctacagtttcattttttgccaaacatgcaaatatattt

SEQ ID NO: 274253 - DNA, 399 bp, Glycine max
  unsure (1)..(399): unsure at all n locations
agctntanaagtgtgtagatactatttatcttattcttagcgaaatgaattcgctgtggatacgatactcagtcttaccgtattatatactacttgtgcgaatcggcacacttgtcgagggacgaacaggtacgcggaatgggtcaccaatatcatgccagtacctaaaaaggatgggaaggtgcgaatatgcatagactatcgggatttaactgagccacgccagaggatacactttctttactgtacatcgatgttctcgtagataacacgaccaattttggcctgttttctttcatggatgggttttcaggctataatcagataaagatggcaccagaggatatggaaaagacaaccttcatcactctatatggaactttctgctacaaggtgatg

SEQ ID NO: 274254 - DNA, 467 bp, Glycine max
  unsure (1)..(467): unsure at all n locations
ccttgggctgagaactatataacaacaccaaggttctagttttagtctctctctctntttcgttttagtctttttagttttagtcacttttcgttttagggagaaagaataattttaggtcttgcaattccagtttttactattcacgtagcaataaaatttcattttcagcttcaatatacaatttcgtttctactgattaatggaaggctaagtctccaacattgttttctcttgaggatcaaacacaactctctttgaggttttattatttctattgaattctgatcagtttttcctcttcaccaattactctatatttgttgctattaatccatgcatgcttagtgctcgattaattgtctctgtgcttaatttatgttcatgcttaatgatcagcttcattcatgattaattggtgtatgtgttgcttaatcacataatgaatgccttatgttaaatttcgc

SEQ ID NO: 274255 - DNA, 430 bp, Glycine max
  unsure (1)..(430): unsure at all n locations
agcttagccgaattcagattgaattgtgttatcttanctcaaccttggccagcttagcggaccaaattagcctcaaatgcaagggttgggcgctaagcgcttgagacttgcagcttagcacttgaacagagatgcacttagcgcgaggcttgcgcttagtgaaaggactgtttttcataaaaaaaagttttcttagtcagttttcagtcctttttccaataaatcgaaacccttatgttaaacattcaaagataggctgatatactcctatgtacagatcatacagcaagttccaaatgattaaatgcatgaaaaacacactaagataatagaaattaaaactgggttgccctccacaagcgctactttaacgtcattagcttgacgctcttacctcactaggtgatcttatgtttgggttcttactctc

SEQ ID NO: 274256 - DNA, 442 bp, Glycine max
  unsure (1)..(442): unsure at all n locations
tgtagaatggccagacatgatacatgtcagggtttggttttgttcaagggtaaaagggatgccccacattatttccatgacacaaatgcaaaaatgatgatttggaaactctatgcaaaactggtcatgcatgcacctatgtggacactcaagtgtcaaatttttatggtcatgtgatgctagggctcaggattcattccatctattntagtcaacccaatatttccaaaatatgttcttttatccatttgtgcattcatccgagtccattttgggcgtccgggaaaattttcacagcattcacccctcaggtgtatacacattttttcaaaaactagctatgatcaatgaattntctttcaaagaaaagttggaagtcatctcttttcaaaagcatgtcggtttttcagctaaacaacttaattttcttttctctcctctc

SEQ ID NO: 274257 - DNA, 423 bp, Glycine max
  unsure (1)..(423): unsure at all n locations
agcttgngatcgcgtttgggcatatatctattatttttctatgccgcctctacatacataaaacagccccaccatcccaatcttgcaaaaatcatattcatatatcattggggcatttcacccagcacttggtgggcgcacgtttggacacaaattgcaagagaatggggacaatgtggcatgccctattgcttcagaatacagcatacgcctaaggccttctcattcaaatcctcaactcaagaaaacaagcataaaaacaaaccacaactgccccacaaatataagtgcattctcacaatttggagcaccaaaagatgaagaaaatataccaatgggaagctaaaaacatcaaggattgaatacttacttgttggagtgaattataacaccaaacatgatagcataacgcaaccaaaagtg

SEQ ID NO: 274258 - DNA, 459 bp, Glycine max
  unsure (1)..(459): unsure at all n locations
cgaagganaactcgatgccttggtcaacctggtttctcatctttccatgaataaaaaatctacacctgttgcaagtgtctgtggtctatgttcttttgcagatcaccatacagatctctgtccttctttacagcaatctggagtcaatgagcaacctgaagcttatgctgcaaacatttataatagacctcctcagcagggaaaccaacaacagcagaataattatgacttttcgagcaatagatacaatccaggttggaggaatcatcaaaatctgagatggacaagtcctccacaacaacaacagcctgtccctcctttccagaatgctgctggtccaagcaagccatatgttcctcctccgatgcagcagcagtcacaacaaagacaacaagaaactgaggctcctcctcagccttccttagaagagttagtgaggcaaatgaccatccagaatat

SEQ ID NO: 274259 - DNA, 348 bp, Glycine max
  unsure (1)..(348): unsure at all n locations
agctttntatgaaaggatatgactcttcacttttgagnttgaatttcaaccttaagatgtactggtaatcgattaccaatatcctgtaatcgattacatcattttgaaatcaattggaacgttgcaaattcagttgaaaacttttgaaatcaaactttgccactggtaatcgattacaggaaactggtaattgattaccagagagtaaaaactctgataacttaaaatattttgagaaaaactcttgaaaaacaaaactatgctatgtttgcttttgaaaaatcttttcaatacttcccttgtgaattcttattgatttcttctctagaatcttgaattcatcttttc

SEQ ID NO: 274260 - DNA, 195 bp, Glycine max
  unsure (1)..(195): unsure at all n locations
gcttgcataatgagaatctatccttcnacaggctttgcaacttgtcatctgtagncagggagccttgggcagataggtctgctaaagctggaggtggggctgaagtaaaagatgatgggatgccagctattggcgcacaggaagatggaacattaactggtctgatcgtggtcttcttgcctctggagaataatt

SEQ ID NO: 274261 - DNA, 506 bp, Glycine max
  unsure (1)..(506): unsure at all n locations
acgcgttacgcccttgtgannccnctgctacgatccacgggatcctctggacgtgacctgtatgcatgtatgctgtgatatcaagattatccgattgaatatcgacgaacgatgaagaacagacactgaacgacttactacatgttacgggatgtggtaacatgaaacagttaccggagagtgcctcacgggcatgatctctctgccatcgttcttgttattctaactaattttaagcgaaatccgaataccaaaggcgttgatcctttcccctcattctcccatgtcaatgtatagaaaaaatggaggaggaggttgaatgtacccctatgccagctagctggccgcttcttacacacgctaccttatccccaagcgagttccttgcaccaggcatttgcagtgcgacccctgtaacttcacccacntcactctctttgacagacttcttcccacagtcacctcctatggcctaattccctgggcacgatctaacacttccgtct

SEQ ID NO: 274262 - DNA, 443 bp, Glycine max
tcaacttacagagagtagttcaggcttagcgcattaggtgctctaagcgcacttccaagcatttaaaaaatagtaagggattggagcttagcgcatcctgccactaagcccaactcgtgaaagttcaattccagaatggatctggcgcttagctcaggacagcgtgcttagcgctgctacaatagatttttcccgagaaggagtggcacttagcacatcatctccgctaagcccactgcttgaagtttacttctagtgaagatgttggcgtagcgtagtgatgtgtgcttagctgaactatttagccaactagccaggggtctaagcgcttagcgcatgaagacattgcacttagtgcaagggttgcgcttagcggatggacaactgaaactttttttcaagtcttatctgtgatgtgtcattatcttctcttatatcttaac

SEQ ID NO: 274263 - DNA, 54 bp, Glycine max
agcttttgttctaaatattcataatccccatgagacaacacgtggggggggggg

SEQ ID NO: 274264 - DNA, 361 bp, Glycine max
  unsure (1)..(361): unsure at all n locations
tcntttacttgttattgattgtcactttttggatggaacgatggactgatacaaattcgcattgatataagaaggggtaacagattgttggatctaaatatgagaaatgccatgcgtcataccttaatttcgtccgaggattattattcgatgatatacaacctttgattggccgcttcgagatacttggcaccctctggtgcacaatatgtgaagtcccgagacgtgccgaatatcaaaaggaagcgggcttacgtgatccgtgaaaattttgtaatgtgacggaaatcgaaaggaggtgttgttcgcaatccgtgagttctcgtaacttcttcgaaagctaaaaaagagtaaatacata

SEQ ID NO: 274265 - DNA, 455 bp, Glycine max
agcttcgtccatattgtgctatacatagggttagacgtggtgaatacgaaggttcgcccccttaagcactcttctctgtctagagatagaagtggagcattatttgcgggaagagattacaggctgacgcgctcttgtaacgtttttgctagtcaatacacgatgattctcgaccgttcttatctattcttcgttcgttcttcagtttcttcttactctcccggctaagatcctcaaacgccatctcctaaatctatcactatgtactgcgtagcggacttacaatgactaacaccacctttatcacgaaccacaaacactatcaaaaaggaattttgcagcgagaaagcctgtagaattcaccccaattccagtgttctatgctaacttgctcccacatctacttgataattcaatggtagccataaccctggccaaggttcatcaacctgcac

SEQ ID NO: 274266 - DNA, 348 bp, Glycine max
actgcatttcattggagcgcatatgcacttgcggtgacaaagaatcaaacctctgacacactaaggtgcgaagaccatcaaagctatccattattctagtaagaagatgtgaagcttcccccttatgtactcttgtaacgacatttatagcgcccttcattatccaagatccatcacgctctatgacatatccaacggatgctatcactgaagcgcctatgagggattatccctagcttacaacatgaggttcataatctatctggatgatgaagtgtaggacgaaacgggtctcaagatgatgagttagcactggggcattcaatcgcaatgccttatgcatgcgat

SEQ ID NO: 274267 - DNA, 309 bp, Glycine max
agcttaaactaatggaacagatggtgtgattatttatgtgaaaggggcttctaatttgattgcgatacggaggacatgattgacacaagcagaaagtgtggcctatggaaatatatgacttacaatcattgcaggtgttgttttcaaatgaattatttgtatcattatgtatagcagattggtattaactaattttcgtcatatttttcaaagtaatatgtgtctaagttgttcataaatattcagaccaaatctcaatatctataagcaatagtagtgcgaattgaaacagatattagttacacttct

SEQ ID NO: 274268 - DNA, 416 bp, Glycine max
  unsure (1)..(416): unsure at all n locations
ctaagcttatatactntcaagcagtcctccagtccaagggttntattcgctcgaattgcatgtttcgagtctgcattagtaaaaatctgaagagggaagccaagaatagacatatcatcatacatacatcaaggagtgaagagtggcttctctaaagtactaatttcaccattaaaagataataacaagaaacttacaagtttcctaacaggcaggctttgcaaaatgcccctgagaacagggtctggtttcagcagcacatcatatggcaatctcccatgaacaaaactgctcaaaacaaaatgcctcatttaacatggattgatatgaatggccaaaatagaaaaatggaaagagaaaaaaaaaaatgtgtacagacaatttacctgttaaagtcatcatagccaaagtcatag

SEQ ID NO: 274269 - DNA, 441 bp, Glycine max
agcttgtagggttaaagtctcacgattgtctcgtgctcatgcaacaattgttagccgtggctatacgagacatcttgccaaacaaagtcaggttagccataactcgcctgtgctttttcttccatgctatatgtagcaaagtcattgatcctatcaagtttgatgagctggaaaatgaggctgcaattatactgtgccagttggagatgtattttccccctgttttctttgacatcatgattcacttgattgtgcatctggtcaaagaaatcaaatattgtggtcctgtttatctacggtggatgtacccggttgagcaatacatgaagatcttaaaagggtatacaaagaatttatatcgtccagaagcatctattgttgagaggtacattgcagaagaagccattgaattttgttcacaatacattgagaaggctaaac

SEQ ID NO: 274270 - DNA, 441 bp, Glycine max
  unsure (1)..(441): unsure at all n locations
ngngaggattgatggngacccggtgttgagagaaacgatgatatgggctacgtgggagtacgtgagctcagttggaggtgggcaacaggggatggtgggtttatgtgcgctctgtggatgtggaaaacttgttgtgcaccatcgcccgaccgccacctagtaccacatgtgatgggtaccccataatcctacaagcttgagatgaggaagtgttgaagggtgaaacttcctgcttttattgttgaccacagagtggtacctggagatatgtcgtggggatcagaagaccttgnggacgtcaggtggggtactattgcccaaaaccaagcttgaccaatcccgacccaacccgggcatagtcggtcagtgagaacctgtgatgtacctaaacaggcgagctcctggcagtcaatagataaaaggaacaaagaccacatagca

SEQ ID NO: 274271 - DNA, 398 bp, Glycine max
  unsure (1)..(398): unsure at all n locations
agcttganacatgtgtaaataattgacatgattagatatgctttattatatcaaaacgaaacaatatacgcatctagggagcaaaactagaaaaaggtcattctacgttggttaaaagacacattcgatatcggttattaaccgtcgttgtaggaaacatcgtagaaagtctccactttctatgatggttccataaaaaaactgtcttagaattatcttaaaatcgatacctttctaagatagttttttagaacgtatgcttttttaaacatgtatatatatatatcgacgattctaagatagcttttttgacaacaaatcgcttatagtgtagacattctaagacgatttcttagagaatcatcttagaatgtatttataaaaattacatattttga

SEQ ID NO: 274272 - DNA, 462 bp, Glycine max
aaactaagctgtctcagtatccataaacctattttgacatcaatattgttaaccctttatatcgtcaagaatattcattatgaggtaataaaaaaaaccttgtaattcaatttactcacacaatccacagttgtagtatagatatgttcaaacacttgtcacctgatattatttcagttagatctgcatgtgtcatgaaaaaggatgcttgtacattaggaattccaaatttcatcccatcccacgacaattgaactggcttctagtaaacatcatacaagatcttcatcaattctcccaatggatcgtctccagcaactgtattgcacctttcaacaggtccaactggtttcaacacattattgtgtgaatcctatatagttaatgaaaataaccaatacagtaatattatgaaacaaatattaacaatgttctgtggtgattggtgctgatgaagtgttg

SEQ ID NO: 274273 - DNA, 434 bp, Glycine max
  unsure (1)..(434): unsure at all n locations
ttgtatttanacgaccataaangatggcttatttcatcacgtatcgagtcactcactatagtattcgactcataactttccgctgaatagacatggtgtaaaagcaccattgaacgagcctattgaggctaacagattcaactctcatccgaagctcagatgcagcgtccatcatgtgcgtttcacaagcccaccactctaagtacctgctccctaaccattcaatatatcctatgctctcccttccgttccatctgtgattattcatatttctaactgcatctcctcacactgtctgtgctcacatgtgttagcatgaatcctctaaaactntccccttattaccactcgctatagcaacctagattccgactctctactggacaaatccctgngctccttgacctgagccatgaatcgtcgtcccctattgc

SEQ ID NO: 274274 - DNA, 392 bp, Glycine max
agctttccgcagttgaacaccctatctagctaacttccaccaatttgaatctctaacgtcaacgttctctctgcttttgtcgccgacagattctccaacactctcacctgataccacaatcgtttctcatctcaatttttatgaaaaaactgcttgtagttttagcacgttcagtacattttcgcccgagggggttatttctttctctctttacaaaaaggggggattcttgttctaacgggttattaaaaatttcaataatgaagtgagggattaataatcgatatatacttcctctatctctggtcctctattaagtaggtttgatattgtccttgttctcttggatacaaaacattctgatcgggatccaatagttttatctcatattc

SEQ ID NO: 274275 - DNA, 269 bp, Glycine max
cggaatgggtttaggcaaagacaacgaccgcataactagcctgattaatgccaaacgaaatcgcgagaagtatgggttaggctataagcccactcaagcagatataaagagaagcatctcgggaaggaagaacggtagtcaaagctctcggttgagacaagaaagtgaacgatgcccgtcctgccacataagtagaagccttataagcgcgggtcagggggaccaatgtcaagtggtcgcgatgtacgaatatgatgttccgagcacat

SEQ ID NO: 274276 - DNA, 585 bp, Glycine max
  unsure (1)..(585): unsure at all n locations
cactcctactctctctcggttacccntcctctctntcnntccactcaannanatctcctnaccccccacggcgcgcctcgaggnnattgacttcattgaactncacnnnacctccanancttacagtcaagcttcacgcctggcagcttaaactatgtgcgngcgctctatactctatgcatcaattgacgaccgtggctatacaagtatggatagctcgtcaaattaaccgaagtcacaacttcttcaggacaaccacgcgccactcaatactagagaggctcttatggcatctacaattacactaatcattataatggccaactgtggttatgttcccagattacatcttatcacgccaccatcattattattatcaaaaacatctgttattgctaaagaaaaatatgcgacataaatgttgacttgtcgaattactgacgacacctcactataagactagacatatcttcttgaactgtacacactcccgtttacatacaacatgaactctcgcaccgagtccaccatcgccattggctctataccactcacaccgaatgtccaccacaccatcccccttcc

SEQ ID NO: 274277 - DNA, 432 bp, Glycine max
  unsure (1)..(432): unsure at all n locations
ttcttgcgaaagtggaagggtttgtggagcttgttagtgattgtgtgggaaaaggagaaatgacgtcatttttacctttnttttaaaaaaaaaaatcctaagtgtaatcccaatctgacaaatattatatatgacaccacacgtcgcgtgcctacgtgtccggttaacaatcatgtaagttgataatggataaaaagttttcaaatattagggatccatctcgaaacaaaaatttactagggatcaaatgttaaaaacaaatatatattagagacaaaaaacatatttaaactttactttttatagggctatatcttgtcacgctcattgttgttaacttgttatcgtaacttttaaggacatnttctaaaggaacattgactntcttctttacaaaaacttaagtctcaaatcgaagaaaatatctcatga

SEQ ID NO: 274278 - DNA, 303 bp, Glycine max
agctttacaacttttggaagacacctatcatatcattttttgcagccatcacttgcctaaggaagagggttcttttggtttcaaccattttctgcttttagcttcaaaaggatcatcatagatgatagccagctccttctgcaatgctgattctatgttttcagtaagttttttaaactaaaatttactaccatttgtctattatggtctttcaagcgttatcttgtgctcacacttttcatgaaggctattagtgaatggactttctcaatgttgctcttgtgcttggatggcgtcatggga

SEQ ID NO: 274279 - DNA, 96 bp, Glycine max
  unsure (1)..(96): unsure at all n locations
ctataggtttgccagcattggagagacagagatttttcattttctagagctgncacgaatgggcatcttgacggaatgcactataccctgcagttc

SEQ ID NO: 274280 - DNA, 334 bp, Glycine max
  unsure (1)..(334): unsure at all n locations
gcatgcaagcttgcccagagaagatttcaccgatgatatgcttaccacctccaaagactggaaagcggnttctaatgactgctctgtggcttccacatgaggcatagaggatgggcagctcaccaagatgtgttcctcgcctgatacgatgaccagatgcacttccactacgaatttcaacttttggtggagcgtagagggaacaactcccactgagtggatccacgggcgccccaacagacagctgtagggggggttcacatccattatttggaaacgaacttgacaggtgtgacggcctatatgtactgggagatcgatctgtcccctaacc

SEQ ID NO: 274281 - DNA, 389 bp, Glycine max
tgctctatattacattgatgtttgtatttatgggaggatgttatatgccatttttgctataagagtagtgtcccactggtaaaattaactttccaaatgtttgcctctccaggaatggtcccgaggaagcttgcctcatagaggtccaggaaggacaaggcggccgaaggaactagttccgccccggagtacgacagtcatcgctttatgagcgttgtacaccagctgcgtttcgaagccatcaagggatggtcgtttcttcgagagcgacgcgttcagctcatggaggacgagtatactgatttccaggaggaaatatggcgccggcggtgggcaccactggttacttccatggccaaggttgatccagaaatagtccttgagtttta

SEQ ID NO: 274282 - DNA, 429 bp, Glycine max
  unsure (1)..(429): unsure at all n locations
agcttcagaccaaagcaacacataatctacgtatccaaaacccctcaatttaatggattctcaaggttcgagaagtgaaattgagaatggggtgaatntggagcacactctcacctcacacaagtctataacatcaatttaaacttgttcaaactggatttacacctaaaatttcaccgaaccaaaatttgactcctcaacccccaattctaccctagaaatggctctttattcactttggtcatttgtttttctctctagcacagcccaaactttctactatgtcctaaatgacatttcaagctaggattaactcactttaacctccaaataccactaaatccagatttggccttccaactctcaaaatctcactctgtttcctctcataacaccatattctcactttcaaaccctacgttaactcta

SEQ ID NO: 274283 - DNA, 446 bp, Glycine max
  unsure (1)..(446): unsure at all n locations
ngagtataattcattgtttgtgttatgagcctacatcaaataattggattattgatgtttctgtcatgatcaagtgatagttgatatctccatatgtgcgtacactgtgattatgttttcgtttctagaattcatttggagtatctactgttgattctagatgagtgatccttcttgatttaaaattattgtctcctaatcaatcgagtgttcatcttattattggctgctcatcttccaatcatgtctagttaaactgcttgataatctntcttattgttacttctaatacgaataaagagagacttcgcctttgacaatcatgttaagatngtttgagaggaaatacttgagtagacatgatcattgttacctatagatgaaagtcaaacttagtaagacgtgtacctatgttctttgaggatatgcttagntaccacctaagt

SEQ ID NO: 274284 - DNA, 456 bp, Glycine max
  unsure (1)..(456): unsure at all n locations
agcttataagaacaaaattgccttactcatttccaaatatgcatgtgaattaggacgcatcaacaagaatcaagccaaggctattgtgcaagcaatcaatggggcaaaacacaccaaatgattataatgatggatggctcaaattctcacaaaggtaaaatcatcactttcaaattgagctttcaaaactatcatgacatgtagagaagaatcaaggatttcaagtcacaaaatgtcaagaacttttattttcaaaacaattacccatttcttgaacatatcctataattcaaagaaaaacatgcaaagtcgtacgtgcacatgaaattgacccaaaatattaaactgaaaatccgacgaaactaataaccttaacaaattaacacaactaacaaattaacaaaaccaacaaaactagcaaaaccaaagaacactcnncccccccccncccatact

SEQ ID NO: 274285 - DNA, 331 bp, Glycine max
  unsure (1)..(331): unsure at all n locations
tagtcctaaatgacatttcaagctaggattaacttactttaacctccatttaccacagaattcagacttaaccttctaactctcaaagcctcactctttttccactcataacaccacattctcactttccaaccctagggtaactcttcctttcatctctaacagtnttccatgagcaatttcagtatataaacatcacaaatatcatcacaaaaaccctaaaacagaatgggtatgtttaactcatccaaacatggcaatttcaacaagctttcaacaaatgtcttcacaaataatcatcacacagcagaaacctagcaagactacccat

SEQ ID NO: 274286 - DNA, 340 bp, Glycine max
  unsure (1)..(340): unsure at all n locations
agcttcaaggtcaatggacaccaactgaaactcattcctcacaaatccctccttagtggatgtagtggtggaggagacctccttacttcaccctacttctttctcaccatgactcagggagttttctttcttctgtctccttctttacttttattgcacttgtccaaatttaattgattgctttgattgttcttgatcttatgattgtgctacattgaggacaatgtgttgtttaagtgtgagggggtgggggggcatccattnctccctcctctccttcttcttccccctcttcaccctcttctctcttcctccctcccctctctcctccctcccctct

SEQ ID NO: 274287 - DNA, 280 bp, Glycine max
tcaagaattatggcctcatcaaactacttgtttcccgagggatattctataaatagacctcccatctttaatggagtgggttaccactactggaaaacccgcatgcaaatctttatagaggcaatagatttaaatatttgggaagccatagaacaaggaccttatgttccctctataatagctggaagtgcaacaatagaaaaacctagagcagattggactgaggaagaaagaagattagtacaatataatttaaaggccaaaaatattattacatctg

SEQ ID NO: 274288 - DNA, 438 bp, Glycine max
agcttgtaggattatggggtacccatcagatgtggtactaggtggcggtcgggcgatggtgcaaaacaattctccacatccacaaatcacgtataaacccaccatcccctgttgcccacctcaactgagctcatgtactcccacgtagcccttatcctcgttcctctcaacgccgggtccccatcaatcctcccaagcttccacaacatccaagtaattcaacatccaagcctcatgaactaacacagccaagaaaatagggcagaggcagaaaactctgcccaaaacacaaaccgacatcacagcttttcacactcaaatactccagtaatattctcttcgttccaattcgttaaccggtggatcgactctaaaattctactggaagtctctagcacataaaactacattatgaccgctgggatctgctataaaacg

SEQ ID NO: 274289 - DNA, 452 bp, Glycine max
atccatcacatgtggtactaggtgtgtggtcgggcgatggtgcacaaatagttgtttttttccacatgcacaatgcgcgcataaacccaccatcccctgttgcccacctccaactgagctcacgtactcccacgtagcccatatcctcgtttctctcaacaccgggtccccatcaatcctcccaagcttccacaacatccaagcaaaacaacattcacacagcacaagctatcacagccaagcaaaacagagtaaaggcagaaaactctgccaaaacaccaaccaaaaatcacagctttttcccactcaaagaccccagtaacaattccttcgatccaattcgttaaccgctggatcagactccaaaatttactggaagtctatagagcataagcctacattttgaccggtgggatctactaagagacatccagaactcattctacattact

SEQ ID NO: 274290 - DNA, 275 bp, Glycine max
  unsure (1)..(275): unsure at all n locations
agcttataagaacacacacgccatactcatttacttttctgcatgtgcaccatgacgcatgaacatgagataagccaaggctattgtgcaagcaatcaatggggcaaaacacaccaaaagattatcatgtttggaggcgccanacttatcacaaaggcaaaatgatcaattttaaattgagctttcgaaactatcatgacatgtccagaagaatcatggatcacaagtcacaaaatgtcaagaacttttattttaaaacaattacccatttcttg

SEQ ID NO: 274291 - DNA, 508 bp, Glycine max
  unsure (1)..(508): unsure at all n locations
agacctgccncnncgccgacgcgtgatgaatcccttgctacgtcccgcgggtctntataatcgaaccgcacgcatgtaagctttaacataagaccacttacagtgtgttttaactatttcacatggacttgatggggcctatgccagtcgaaagccctgtaggaaaaacgtatgcttatcgtgttgtggatgatttcttcagacttacctgcgtcgactttatcagagagaaatcagacacctttgaagtattccaggaggtgagtctaatacttcatagagaacaagactgtgtcttctatagaatcacgagtgaccatggcagagagtttgaaaacaacacgcttactgaatttctgccatccgaaggcatcctcatgacttctttgcgtcctcccccccaacaaatggcctattgcaatgaaacccgcactctcttaccctgctcggtttgcttctcccaagaactaccttctttttgtctgggcgacaacacttctcctctccg

SEQ ID NO: 274292 - DNA, 267 bp, Glycine max
atggtgtcgagaagaaatcacatgtctgttatcatcatataggcggagaatgcgaatgtatgtatacatgatttcgatgatgtcaaagcaaaatctaacatagctgcttcaaatgataagcatttgctttaagaataattcaagattgctccaacaaacaacgccttgtttcaagagtcactaaagaccaagccttgccttaaaacaaagtgctttcaagacatgcaaggctctggtaatcgattaccaggaagtgttatcgattac

SEQ ID NO: 274293 - DNA, 434 bp, Glycine max
  unsure (1)..(434): unsure at all n locations
agctttatcttcttcataagggcttcaagctcatgcttgaacagccttccaggtcaagttttatgatatatggctagaggaacatcttcatctttgtcaagcagtaactccttgcctttgtgtaacatttagccttttggaacaaaacaagcttatctattgctattcacaactaagtgtttggagtggctaagcaagaaaattgtgatccaagcatgaaaggcagacaagtgttgatcctttctattcttgtcaaaaattctgtcttgatatggtttcttatcttctgtgtaggtagataacttcattcttagcttaagttcatagtttgactgctcatagtctttgaaactttttctctctctaggtgcnttcagattgatgtctttagtctggaacgcctctccacacaaagtttcgatcccacgaagaac

SEQ ID NO: 274294 - DNA, 347 bp, Glycine max
  unsure (1)..(347): unsure at all n locations
ttttcggagccccgtgaattacgttntcgntcatgtgtccttcatcttcgagtttgttgccatgcgtagtgattgcttagggcaattctccattctcaaccctttttcggagccccatgaattgcgttctcgttcatgtgtcttccaccttcgagtttggagccatgcgcagtgattgcttagtgcaattctccattctcaacccttttatcggagccccaagaatggcgttttcgttcatgtgtgctccatcttcgagtttggagacatgcgtagagattgcttagtgcaattctccattctcaacccctctttcggagccccaagaatggtgctttgttcatgtg

SEQ ID NO: 274295 - DNA, 380 bp, Glycine max
  unsure (1)..(380): unsure at all n locations
agcttgaagcaagagtcggnttgagagctttatatgtttttgcgagtgattgtgagatcctagaggtgaaggagacatgctcaccacttgtatttttgcaatctttcatcttgctcttctctttgttgtaaagaaggcttcctggtatggaaagctaaatcctttgttggatcttctctgtaggtacctgacgtaaatatatttttatctatttaataattttttgtgtgttctctgtgctatctgcttttcactccagtatgcctttaccttgatcacgtacatgcatgctttgttagggtcattcaacagtggaaactggtctaactctaaacgtcttgatagtgcagggctaagttgtctcactttcacgaggaatt

SEQ ID NO: 274296 - DNA, 453 bp, Glycine max
tattgaaatcaaacaagatgataaattatcctcacattatattataaataaatcatgagtcatcaaaacataaatcatttgtctaagtcacttgcatctagaagtcctaattttcttctaatggtgtagaaagaatctttggttagtggttttgtgaagatgtctgcaagttggtttttagtatctacaagttttaaaaatacagtcacctttttcctaagactaagtgctaattgactaccaacacttaccaagatgaggttttgttaacatagaaggttctatcatataaaaataattttattaggaatacaatataataattctgaaaagcataaaatttttctgatcaatcaatcaagtaattcaaacatatcaaacaagatatatacaacgattgaaggatatagatcacagacattatcaaacattcagatctgttaagataattta

SEQ ID NO: 274297 - DNA, 234 bp, Glycine max
cctgaggcatgcaactggaaacactaaagcctactttatattattgatataaaccgaccatctcaaaagcaccataaaagaggacaagagcgatcaccttcccttaccagacaatcatctccaagctatgtgtcgcacacgataacaggagaagatcttgggctcactctgagattttcctcatctattagctctacgccctcaaagtcatggaagacattctcgacgcaacac

SEQ ID NO: 274298 - DNA, 162 bp, Glycine max
gactttccttgtgtgaacacgagaatgaagctatcacactttttgcagcaagacagcgaggaggaatgaatgtattgctaccacgagatgcacacatggagtgatcaacacaaatgattccttcgacaaagaggaaaaatgatttattgtcacggaaggatt

SEQ ID NO: 274299 - DNA, 523 bp, Glycine max
  unsure (1)..(523): unsure at all n locations
tgtccgctnnnnnnnnagcggattggtcctgctgatcacctagcagnnacacgggatcctctagcgtccaactgtacgcatgcaagcttcacgataaggccttattactagtccattgtacgaccacgcgcataaaagagtggtttcgtccgtgaccatgcacaaaccgaagtcatgaaccgctgaacacgcatcaataacttactacgtagtgcgcaactttctcgatcatgaactggaccgccacagaggacaccacgggatgactcttccgtcactaacatgcgacaaactctctttcgatcaaattattgatcgtgctcatctgacgaccgatgcgatcaccggaaagattctacaccatgacgtgatgaggctccgctatgtccctctcgccactcgagaggttatcctttctattgtctatgagcctgacccactacccggccaacaccccgcgcccttccctgcaccctcatgcgtgctacttcccccctttccaaactcccactccttgtccacg

SEQ ID NO: 274300 - DNA, 304 bp, Glycine max
gcttctgagggcctatatgggcccttgctgaatgcacctcttaagttggcaggcaccctattttgagtttttgctcatttcctgttgaacgtccaaaatcttacgattggtgacaattggcttaagcaattcaatgtgaccagcaaacatccacatgtcgacaaacaattgtccccgaacgaaattatggtatgacacatggtatgaagtgtgccatcttagagaacctgtccaccaccacaaagatggaatccttgtcattccttgtctgaggaaatcctacaacaaagtccaaagacaagtc

SEQ ID NO: 274301 - DNA, 203 bp, Glycine max
agctttacaatttgaattaaaacgtttaactattgctggtaatcgattaccatatatgtgtaatcgattacacagtgcaaattttaaattcaaatttcaatagctgctgtaaatcagctttggccactgccaattgattacctactctggtaatcgattaccagaaagtcaacctcttgaaaaacatcttctaactcaaattt

SEQ ID NO: 274302 - DNA, 457 bp, Glycine max
  unsure (1)..(457): unsure at all n locations
tgtcgctggagctgacccatcaactgccctaactctttttattggtgatncctaggctcttgacctagacttgatagaacctctttctaagtgaaggcgcctaactcgaccccatgttctactaaagtgaaacaaaacccagtgcgaatcaaaactccgacatctatcatgggtggaatggatgaatgcatgaagaaatacatatgacacagatgcaatntatgaatacgagagcccgggaaattgtccacttcttagatacaatgtttgggcagcatggcacccgacgtatgtatntaaaaaggcgacacggaccctccatcggtttgacaaagtgaggggatcaagacggaacccatgcatgatgcatatgcgacaggcacaacacggggatgtatataggacgggcatatccacatacaaatataagccaaggggtacatgacatttatgacta

SEQ ID NO: 274303 - DNA, 360 bp, Glycine max
  unsure (1)..(360): unsure at all n locations
agcttagagattcaggcatcctttcttcttctttaagagcttctgcacaaccatgttgaatcaagattgcttccatcttgattctccataacccgaagtcattttcccctgaaaacttctcaatatcgtactttgttgttcccatctttcttgatcttgatcttgccccccacagacgacaccagttgttggttcttttggctctttaagctgtagaacctacacaagatcaaagaaaagaaaaaaaaaacaagaaaacacaactagcaacaagcaagaatctacaccatgagtttatgtggttcggcaatgtgcctacatncacgggaaatgcaactcatcatcatcacattgatcatg

SEQ ID NO: 274304 - DNA, 432 bp, Glycine max
  unsure (1)..(432): unsure at all n locations
agctntgcttattgttgaactttntttatatttcttctggattctgtataatttgatttcttttgggagggtatatggtcatttttgctagcatttctttcttgctcatctttgataaagcttttcttctatgtaaaaacaaaaatcatatattcttcttaacttatattctctacattttcttttgggagtgtggtcgtaatggagggctgggaatcttattttttctagaattttctcacccgttctgaaaaagggaaacaatcatagaaatttttgtttctttccatttatgaattgtagtatggtacttgtctgaaatgttggatatctgtgcattctattataggtgtaaataatattttgataagctatgtgttggtggttgcctcggtggcatatcanatattgcaagtctattttcaatgatat

SEQ ID NO: 274305 - DNA, 391 bp, Glycine max
  unsure (1)..(391): unsure at all n locations
atgttcccagaaacgtatcctataaacaaagtaaagttctcttcctgtgtgatagatgttctcgtttattttcaactgttttgatctctcctccttnttttttgttctatgtctctccttttctccctcgattttcttgatctttatttatagtaattcctaacaacttatctaatcatttcactgcacatttcttatcttattttatcatatatatacatataagataaatctaataatctatcttctttcatttatcttatatttatataagataaactaatatgctcaaaaatagcaaataaactaaatatattattttatcttatctaaattatatatatatattctatcctaccaaatatattattttatttgtataaaaagtgct

SEQ ID NO: 274306 - DNA, 417 bp, Glycine max
agcttgattgttaccatgcatggagagataatttgagcccttaaagaatattaacattataattttacatatttgcgaatactaaaaaaaattacttaataatttaaaagttagttatgcaattaataatatttatgattacttaatcaatagtagattctttaattgataattgaaactgaaaataataaattacttagcgagattatattttgttttattttttaatatgaatatattacttaatataaatttcttatagtaatattatttattcactacctattctatcatatgtcgaccaccattaaaccatcaaaacttaaatcataatagttgctatgtctgatgcacctcaaatacaaaataggataacgtgtatattatctaaagaatcatctactacacgatcaaata

SEQ ID NO: 274307 - DNA, 390 bp, Glycine max
  unsure (1)..(390): unsure at all n locations
ngagattcatggagcagccggcgtgattaaccacgccatattcctcgttgaggatattacatcgaatcgccctccaagggacactgatcatataatcgagtacgttttctaactgctaagtcttgcattgctgctactatgtgcatgcgtgctaacaaagtttcgatgttattttatgttatagtatctacttgtcaatcttttaattactttgttgtctgctattattatcagtttctgcagtaaatacacagaagaaataaggaatttcctaaatgtgtactgtacagagaggactgaagcagggttcattcccatagaagatccgccgatgtctgcctgttatgatgcactctgcactggaatggattggactgaagtttccaatga

SEQ ID NO: 274308 - DNA, 450 bp, Glycine max
  unsure (1)..(450): unsure at all n locations
agcttgagggtgtgtatcccaccatcttttcatagtagagtatcgataatgtgtctaccatcacgattatcatctccctttccatcattgggggtaccacctgngtcgccagatccctccaccctttgggcgtgttctttgaaagatctgtccccctttttgcacatgttctgtagttgcatcctatccggaaccatatcaaaattatactgatactgcctaacgaaggcaaccattangtccttccaagtatggactcgggaaggttccaagttagtgtaccaggtaacagctaccccagtaagactttcttggaagaaatgtattagcagttcctcatctttgcgtatgcccttatcttccgacaatacatctttggatggttcttggcgcaagtagtccccttgtacttgtcacagtccagcaccttgaacttgcgaggcgtgatga

SEQ ID NO: 274309 - DNA, 441 bp, Glycine max
tcaagaataatggcatcaacaaacttcttattcccagaatgttattcaatcaataggcctccattggatgagaaggaggattacatcttgtcttttatgcctcgatgccaaattacaggtacatttgatatcatgacaagtatgttgatgttgtataattatgttttacatttatatctctcattttatatagcaaattatgttttaacaaatatgatttgttcagtagcatttaacattatgttttcttctgcaaaaaagatgtgaaggaattcctgtgctaaggcaaatgcaattagaaaatttagaattattttggaagttggacttattttgtgactagaatttgcttcagcccaagtttttttttgtgtaattgcattactggccaatgacttctacagaaaacaagtgtttatctatagacttctaaataacata

SEQ ID NO: 274310 - DNA, 423 bp, Glycine max
agcttgcatttggaattgcgaaagccccactctattattatgattagtacctgacatctcaaacaaacaaatcaaacgtaacaagacaattatagttgctgtttgaatacctcacccactcaagtgtatcacacaattatggcttttctctaatgaaacactcttgccttttaccactctaattccccttgagttcttaggcaattcaagagattatggccacaacaaagaacaattcaccaatatgtgtaaggtaacgctagagagacaaggaaaaggttaaccaagaaaaaggctaacaatgtttttaggcacaaatgaacgaaataaaattcagaatttaggaattcaagtaacaatccttcatgcaaccaatatattaccttaaagaggttttctttttaagttcttaagcatgaacca

SEQ ID NO: 274311 - DNA, 316 bp, Glycine max
  unsure (1)..(316): unsure at all n locations
tgtctgctgaaaaacatcagntggggctggttaactaccgatgctggctactagttcttctattccacccctgaataatacttggacgatgtcgatttggaaatgttcgatcggagtcatccggtcatgcttctttttaagacctcgatctgtcatcttttcctggccgacgtcggctagcatttttttcgatcaatatcggtgaatcatgctttttgccaaggtgggctaacgtcttcgtggctgatgaaatgagagcatgccagtgtcggccgaaacacaatgttgcacgagataccctagccgacctacattg

SEQ ID NO: 274312 - DNA, 275 bp, Glycine max
  unsure (1)..(275): unsure at all n locations
gacgtgaagttaactgcagccgcagcttnacatcaggcactctcctttttttagccctgaaaccggggggtaagaggctgctcggatataataacagagtcttcgcctagaactttcgattcttccggggaacaattcttgatatgatctgaccccacagacgacatcagtgcgtagttggactttagtggaacgtaccatgattgcgattgactctatgaaggccggcccccaacacccacatctacacaaaaatgtgtgcagtatccgtccct

SEQ ID NO: 274313 - DNA, 213 bp, Glycine max
ttcaaaagatgcgacatggaccattgcagctatgttaagaaatatactaatagttatgttatccttgtcgtgtatgttgatgacatgttgattgcatgatctagtatggcagaaattaacacgttgaagcagtagatggcagacaactttgaaatgaatgatcttggtccagctaaacaaatctttggtataagaattcttagaaatagatca

SEQ ID NO: 274314 - DNA, 483 bp, Glycine max
  unsure (1)..(483): unsure at all n locations
agaacccccaaccagggtgatgctctgtnccgtgcgggaacttaacgcaccgcacgctgcaacttcaatcgttcgtcgattcttttgatgtatggacccaaaaccattcgggggtcgaggacacactatatcccccttcgcatggcgtcggaaccgagacaaatcatttttcctatgcataagatcttcgactctctcatgaaccgttctttacataccacgactctgcttgaccttgtggatgcttaagagcagcaggataacgcatacgtaaacgactgacatgagcggccggagaaaaccattgagcattcaatacgcggctgatcatggtgcatgaacaacccggtagcaggcggaccagaagggggtaaacacttccgctaagagtatacgtcctattctaaactgtcctaagcacggggccccagtcctataacgactctcggcggccatgtgacggggcacgccggatcatttacc

SEQ ID NO: 274315 - DNA, 465 bp, Glycine max
  unsure (1)..(465): unsure at all n locations
ntgagcaaattctaacgacaataactatttacttggatgttcgataaagtcacgtaatatatcgagtcgctcgaaatagaatacagaagctgtgagaaaattctaacgtcaataactttntactcggatgtccgattgagtcacgtaatatatcgagacgcccgaaattcaatacagaaactctgagcaaattctaacgacaataattttttacttggatgtccaattgagtcgcgtaatatttcgagacactcgaaattgagtacagaagctctgaggaaattcaaataaaaataccttttgactcggatattcgattgagtcccgtaatgtatcgagacattcgaaattgaatacagaagctgtgagcaaattctaatgtcaataactttgtactcggatgtccgattgagtcactttatatatcgagacgctcganattcaatacagaagctctaacaaatt

SEQ ID NO: 274316 - DNA, 327 bp, Glycine max
agcttcacacacctgcaattctcttatctgttgaggttatcactctcgacactggacaacacttgtccatgcttacgggctcaactgactcgtcacctctttacttgtcgaggctactacccaccacttcaaacaatctacctcgacctgggacaatctcctttgacaatcgacaacctctttcgcccaccagccggatcagagcttacggtcttatgtactcgccaaaatacacactaaacatgcgtcatgctctgcgacaatacaagacacactgccaccctacatgtgaaccctcgcacaggagcacaaaccatgcgccctcaa

SEQ ID NO: 274317 - DNA, 352 bp, Glycine max
cccgctgactacactacaggggtcttcaacaatgtgtccaaggtatcctcattaaactatactgacagacctgtcaccctcacctgcttacgtgatttatcttcaggttcatagaggtaggcataaaactgcttcacaatggcagagtctatactgttgccagaaaaatcagtcagcttctcatcccaatggcgtgtctcgagttcctgcttgagctcgtcgaactcagtataattgactaccacattgctctctggttgtagctgtccctacactacaatgtcagtgaatctctcccaagcctattgcgatgcgaagctagatctatcacatctggcttgggtatgtgtag

SEQ ID NO: 274318 - DNA, 404 bp, Glycine max
agcttgtaggattatggggtacccgtcatatgtggtactaggtgcaagtcgactctccacatccacaaatcccacgtaaatccaccatccccagttgcccaccttcaactgagctcacgtactcccacgtagcccatatcctcattcctctcaacaccgggtccccatcaatccctccaagcttccacaacattcaagaaattcaacatccaacatcatgaactatcaaaaaccaagaaaacagggcagaggcagaaaactctgcccaaaacacaaaccaataccacaactttccttactcaaataccccaataacattctcttcgttccaatctattcaccgttggatcgactcagaaattttactggaggctcctaatacataaatctacattttgaccatc

SEQ ID NO: 274319 - DNA, 417 bp, Glycine max
  unsure (1)..(417): unsure at all n locations
tgttacataatggaaacaatttttgtagtaaatttacaaatacaataatctcattntctttcgatcatcaataatattaattgtataaaataaaattaaataatgtttgtcaataacatagatatttgtagtaattataataacaatcatatcaaacaaaaaaacatgtccaacaattgttgcaaatcttttttatatatctattttcttatatatgagttaactcttgtcacattaaatatatatatatatatatatatatatatatataaagctccaggatatggctgaaagtatataaaaaattatgaatgtctaacacagatacaagggattatataagacaaaaaacaaacatgtcaattgagaggaacagaatgagataaagaaagtcccanaatctcaagggtttgactg

SEQ ID NO: 274320 - DNA, 394 bp, Glycine max
agcttaccactgtccggttactccttgcccttgctgttcttcataactggcaccttcgacaactggatgtaaacaatgctttccttcatggggatcttaatgaagaggtttatatgaagctccctccaggacttgttgtggataatcccaaccttgtttgtcgccttcagcgttccttatatgggctcaaacaagccagtcgccaatggttcacacggctttcgtcatttcttctctcccagggatttcgtcaatcctcagttgatcactcgcttttattatattctgataatgataatgatataacagctattcttgtttatgttgacgacatcatcttgacaggaaataatctcgagactatagcacatgttaccaagcttctcgatcaaac

SEQ ID NO: 274321 - DNA, 395 bp, Glycine max
  unsure (1)..(395): unsure at all n locations
agctggtcatcctaagtaacatgtttaggttttagtttatcttattgcatgaaacatatnctaaaatgttttttcgctgttgcattgttaaattgagtaaaaatatgacatgaaatctaatcgttaaataatctaacactaaatatttcatagagatgattgccaaagtagtacatcttgataaaggacaattaaaatttagatgtcacttcgtgaatcttacatgataaaaatcacttataatagataattgttttataaaacacccactctgataattaaatttgcaaaataacctattttgatatctaaaaaagtctgtaaactaggtaaatgggttaaaataattcttgttatttactctaatctaataaaaaaacatcttattataatct

SEQ ID NO: 274322 - DNA, 415 bp, Glycine max
  unsure (1)..(415): unsure at all n locations
agcttgagtcagttgaacatttcccagcaagtacataacccagcagcttatcaagtgcttcgggtgaagcatttaaatcaatatcaccatccttgtgaaaagagaataattgtatcacacaaacaaaaaataacatatcaaagataaaaagttacttttgaatccaaaaacgtacttcaattttaagcttattaactgcatcagctgattgaccaattaattcactgcattcacggtcccaaagcaggaattttgtgctttcatctccgtggttgatcatcacctcaagcctatacctgctaccatatgtaccaatagtgtaaaaaatataaaggtatgaagaatacacaacattntaaaagatcgcaatgacctaagcacaacttccttatcgtattttccgcatgcacatgtg

SEQ ID NO: 274323 - DNA, 453 bp, Glycine max
  unsure (1)..(453): unsure at all n locations
taataacatgattaatatagactgcaagtgtctttccttctgctgtctatagatggatcctatctgtctagtacagggtctgcttatataagaatttggggatttgtaatgttgttgtgacaaaagtttgggacttatctttaggggtctaagtggctaagcaatttcagcttacaagggtgcttttcaagttgtcccatatttatagggaagctaatacatgtgttgaattccttgtgaattatggtcaacactctctctntgagcttcagttccttgcgaattatgtgttgaatacctcatagttacatttaattataattaaatgtttaacggaaaaaggcattngcaatattgagtataagattatttgtaatgctttgatatatttgtgtagattcttacacttctacnaattggaggatatacactagtgcaaaattcagctgatct

SEQ ID NO: 274324 - DNA, 439 bp, Glycine max
  unsure (1)..(439): unsure at all n locations
agcttcccaagtaagtttctcaagatagcttctcaagaaagcttcttaaggaattntctcaaggaagcttctcagagaagcttctcaaggaagtttctcaagaaagcttctcaagaaagcttcttaacgaagtttgtcaaggaagctacctagtctataaatagaagcatgtgtaacacttatggcaactttgatgaatgagagtcttgtgagacacaactcanagttccacttctctccctcttttactccttcaatttcgtgctctcccctttctctttctctctctctctctcttttcctccattgaagcatcctctccaagcttcttatctaaggcacattcttggtggcgtagctcctctcttcatggcttattccctagaggatggtgccttncctctcctcttctcctttgtcttcngctgcatctccatgg

SEQ ID NO: 274325 - DNA, 425 bp, Glycine max
  unsure (1)..(425): unsure at all n locations
tgctaaaacaaagtaagttaggtcttatgatgcacatttatgtgacactagaagaactatggtaattgaaaactagacttgtattgatgcaaatctaattatgtatgcatgcacctataatatcatagatgtagcttcggaatggaaaaacactttggaggttgatatgatgttcattttcttggtgtaagttgcccctattataagaaaaagcggtacaaccactaaacagagaagcgtcacttccaaaacagcatatgacagaaatcacaactccaacaatgcaagttgcacaacttgaggtgaagtgatccaaccgtgagttagatattcacttgtgcttcagccatagaacgttgtgaatgatgaaaggctaaactngtagccaaaaaagaagttgcattattggacaatgacttctgtag

SEQ ID NO: 274326 - DNA, 64 bp, Glycine max
agcttcaaattagagagtgacttctactcctaattgtattaggaagccatcttcggagtggtga

SEQ ID NO: 274327 - DNA, 261 bp, Glycine max
agcttgaatcggacatccgtgtgacaacttatgattttttgaatttcacgagagcttccgtggttcaattccgagcgccactatatgtgatgcgccaaaattggacattcgagtcaaatgtcatgaccatttaaattcctcaagagcttccgttgttcaattctaagcgtctcgttatgcgattttcctgaatcggacattcgtgtgaaaagatatgaccatttgaatttctcaagagctaccgttgttcaatttcgagcc

SEQ ID NO: 274328 - DNA, 177 bp, Glycine max
  unsure (1)..(177): unsure at all n locations
gtgcgcggctacgagtgggacttcgaaaattcaggttgggtggacttctttctcctttgattaacgtgggtatggagtcttaggagatatgatgggtagtcttgttagttctctgcttcatgatggttatttgcgaagactcttgntgaaagcttcgtgaaattgccatgtttggat

SEQ ID NO: 274329 - DNA, 453 bp, Glycine max
agcttcagaccaaagcaacataaaatctatgtatccaaaatccctcaatttaatggattttcaaggtttgagaagtgaaattgagaatgaggtaaatttggagcaaactctcacctcacacaagtctataacatcaatttaaacttgctcaaactggatttacacctaaaattccaccgaatcaaaatttgactcctcaacacccaattttaccctaaaaatggctctttgttcactttggtcatttgtttttctctctagcacagcccaagcttcctcataagtcctaaatgacacttcaaactaggattaactcactttaacctccaaataccactaaatccagatttggccttccaactctcagaaactcactctttttccactcataacaccatattctcactttttaaccctaggttaactctacccttcactcctagcagctttcca

SEQ ID NO: 274330 - DNA, 479 bp, Glycine max
  unsure (1)..(479): unsure at all n locations
ctaagctntgttcctttttatganaagagaagttntgaaacttattacgttgtctaaaaaagccttgaggtggatccaagtgctctgatcattcattagcatattcatgttttggtggcatactcaccactgtatgtttctctagggaactcaccataactaaaaaagcgcaaaggcacccctataacacccgatccagaagtaagatggataacgaagagggagtgcaataacagatgaaggtcgacctatcgaccttaaaagatcagatggcttttatcacggaggccatgctaaagcttcaaaaaactatagaagataatgctacggcggccgcttccaataaagctagggaagcggaaccggtgctacagcccacaataaacttggaccgagacagaagcgcgacgggttntaatcagaggtatagtcctcaagcctaccctctatgagttgcctcagacttcactccccgtacc

SEQ ID NO: 274331 - DNA, 314 bp, Glycine max
aaactaagctatctttttactggtaggaaaatgttcacgagtcgttgttgttcttaaaggaggatgtttcagctctcactgctgcgctctttaaccgatatgagttatgcctccctccttgaatcctcagcagcacacgcatgctagctatagtatggccgtcctaagagtgagctcctccaacattggctgatgagcaaagactattagaggacgtatcacaaccatactcgcaaaacgaggctccaagcatgatgatagattcactgactctggaagctaccgtgcagctcgataggttccgcttgtgctta

SEQ ID NO: 274332 - DNA, 336 bp, Glycine max
agcttgtgaccttcctcatctcaaactttttcatctattcccacatgaataggagtattatattcaagtataaaaatttatcctgtgagaacaagcttatatgtgcattcacctctgtctacctccaaccattttcattaagcgttcagatgaacttgctttctttaatttcgaatgcaagcaaaaaaatatatgtgtcttgacttcaaatacaaattaatttcaattaatcttattttatttgatagcgttagtgagaaatattcgaactttgttacttgcaattatgtcacatgattctaatcatatgactgatactttagctaattaggatat

SEQ ID NO: 274333 - DNA, 429 bp, Glycine max
  unsure (1)..(429): unsure at all n locations
atatttattgaagtgctctggctagacatgagtatttgttgtggaccttgaggctgatgccacatgctgaatttgaaagaaaaccgttacgctgtaaagcataatcgattatacttaagaggaaggcaacttgngaaaagcatctcaacagtgtacatcttttcttgtttctacttaatttagattggaaataaaaacatgtgggtgtcatctgaaagtttaaaaacatccctccctttttcactcaaccaaacctccttttttctctgctttccttatcttttccattgtaccaaacagagtgtaggagttacatgcaggaatattttcatgaaaatgaaagataatggtttctgtaacctatttgtgaagttattgttccgccagatgccacagatcatccaatgttttgttgagtcatggactaca

SEQ ID NO: 274334 - DNA, 439 bp, Glycine max
agcttgtgtttgagtgaggtgatatctcttttatcatctttgaagccattaacctctcttctcaacccgccatagtaatgagaaacaggagcatgtctcagagtaacaacatacacatcaccaaaataatatcctatagtagataaataatcatattcggatgtgcctaggtaaataacaaatgtataatgattacacctcacagaacaacatgcataaatataccagatctaaacattatgcaagttattctgacctacgtttttgtcaagagtcttggtgaactggtccaaagctggagaaaccttcaacctttgcttcagaatcctcttctctctctgaatttgaacattctttggccacttcatgaaccgagtcaagtctctcttcggaggcaacgcccctccgactctgaacttctttggacgcttctcaaaca

SEQ ID NO: 274335 - DNA, 447 bp, Glycine max
  unsure (1)..(447): unsure at all n locations
taacctaaaagcacgaattccaaggtcattgatatttgttcttaagcttgggtcaatgataaatcagattntgatcacctttttatgtgtagttctaggcctattacatgcatttatgatataaattgttggaagaactcgtgatttgtggttagtttggttaaacaagtgatcaaggagcgtttggagaaaaagggatcaaaacatgccaaaaacttatgaagatagactctgactattcatcaaggtcgtgatcagtcaataaggctttgatcaaccatcatggtcatgatcacttgcatcgtcaaggctatgttaatttcactagggcttagcgtaaaaaattcatcaagaccttgatcatttcattaaggtcgtgatcattcatcaaggcattgatgtattgatcacgactcattgtagattngcatccaaaaaaccatcaca

SEQ ID NO: 274336 - DNA, 404 bp, Glycine max
agcttcttcaaggtggtctttggtatcacatttaaacttgaaccatcgccgataagtaccttcgcggcgacatggtccatacatctgactgacacatgtagagccttgttgtgccctcttccctcaatgggaatttctttttccgcaaacgcgatataattattggcggttatatgattaacaacgccttcaaaaccctcaactgagatgtcgtgtgctacgtgggcttcgctgaggacttttatcaccagtgcacgatgaggctcagagtctatgagcaattccagtaaagagattctcaccggagttttattcagttgctcaactactctaaactcgctttgctggatgagacgaacgaactcatgagcctcttccaaagtactgtctctccttgaagacct

SEQ ID NO: 274337 - DNA, 272 bp, Glycine max
  unsure (1)..(272): unsure at all n locations
ttgtccacaaaaatcattaaaaaaggatctgaaagtttattatctcaatttntcttaccaagtaaatggatcatttctaaggtccaacgccttaaaatgatcaccttccaagtaaaaagaatcgcttgattcacccttaaagaagaactacgtaggtctgatttcctcttcgatggagggcacgtaggagcaagagccccacttttgtcgacctcaaaaaataaaaagagataaaagttaaggtaacacaatttccacaattctaaaaaata

SEQ ID NO: 274338 - DNA, 93 bp, Glycine max
accttgctgagcacgtacataaagttttatatagtcaacgattgacacgaaagttttttttttatgtgtgtgtcgggcgggtgctctcctcac

SEQ ID NO: 274339 - DNA, 292 bp, Glycine max
  unsure (1)..(292): unsure at all n locations
agcttacttctttcaattntattctctatatatcctgtttcctctccatcccttacatcgatgtagtcgctcaagcgttctccatttgtaatggtggcatttatagtgctctctacagctcttccttcggttgctctgttaatgttcttgtgcgtcagacaaaaaatacaggaatgtgttttataacaactgtcctgggttaaaagttcctttatatagtgagggaattgatgacctaattaatcctatttctattcttctctctttatttacctattcatctgcacagccc

SEQ ID NO: 274340 - DNA, 460 bp, Glycine max
  unsure (1)..(460): unsure at all n locations
tgtaagattatggagtacccatcacatgtggtactaggtgttggtcgggcgatggtgcacaacaagttttccaccttcacaaatcgcgcataaacccaccatcccctattgcccacctccatctgagctcacgtactcccacgtagcccatatcctcgtttctctcaacacagggtccccatcaatcctgccaagcttccccaacatccaagtaactcaacattcaaacaacacaaaccatcacagccaagaaaatagggcaaaggcagaaaactctgcccaaaacaccaaccaaaatcacagcttttctcacttaaagaccccagtaacaattccttcgttccaattcggtaaccgttggatcgactccaaaattntactggaagtctccagtacataagcctacatcttgaccgttgggatctattagaaaacatccagaactcattctacattactc

SEQ ID NO: 274341 - DNA, 93 bp, Glycine max
tgtgatgttagcattagccaaatatgtgaatatgtgtgtcattcatatcacaaaggcaccctatatatttattactccatcgccagatgtgaa

SEQ ID NO: 274342 - DNA, 460 bp, Glycine max
  unsure (1)..(460): unsure at all n locations
tagctgtttgagaggcatgcgcagctaaactctttctnttttatgaatcttcttaacgaagcttctcagagaggtgagcttagttctgataggggtgtccgtagctatgctctagcttctcaatgaagatctctcaaaaaagcttctcaaggatagtttctcaagagatcctctcaaggaagctacctactctatcaatagaagcatgtgtgacacttattgtaactctgatgaatgagagtcttgtgagacacaactactagttgaactgctctcccttcttcttcctccattgaagcatcctctccaagcttcttattcaaggctcatcttcggggcgaagctccttcttccatggcttatttcctagtggatggcgccttctatcattgcatttcctttgtcttacgctgcattctcatggtggaacatcaccatctaaagacctcattgaagccca

SEQ ID NO: 274343 - DNA, 428 bp, Glycine max
  unsure (1)..(428): unsure at all n locations
tgccagatttatgggacaaacaaagactatgttatgtcaatgcataatgattaaactttatctatctatcctaattgaaactattgaatgtagactagaagcatgttttagataaacatgaatcccctgcttatacaagcctttgaatgtgcagtgatgtatctgcagacaaatgctggaggaatcagtatatttggatggacagttgatcggtctctagtgagcacaatatttgtctttgaattgactctggttacctttgttcttagtaagacaatactttattgataaaattggcaggtcaacaccaatcaagggcctttgggccttccaggttactacgataaatngagctgttgccttctgcatttccattattggtgcttacactntccattacatcatagacaattcattccgaaatggac

SEQ ID NO: 274344 - DNA, 141 bp, Glycine max
gcctcatatcgcgaaaggagagcattttccgagccgtgaagtgcgtggctacaagtgggacttccaaaatccaggtttgggtggacttctttctctcttaaatttcgtgggtatggggttctgggagatatgacgggtggc

SEQ ID NO: 274345 - DNA, 193 bp, Glycine max
agcttaaggcccggccatatttctaattaatttttgttgtcgaaaatggttcacgattaaaaaagaaaacattttttacataaaagatatgctaagaaggttatgatttattcgtaaataacgaaatcatagcttttttctatcaccattaacctctacaaatcgtctctgtaccttaatttcattactaact

SEQ ID NO: 274346 - DNA, 450 bp, Glycine max
agcttgacattgaaaatagaagctatgagcaaattcatacgacaataactttttactccgatgtccgattgtgtcccgtagtatatcgagactcccgtaattgaaaacagaagctcgtagcaaattcaaacgacaataatattttactcagatgtccgattatgtcccgtagtatatccatacgctcgtaattgaaaacagaagctcgtagaaaattcaaacgacaacaactttcaactcagatgtccgattgagtgctctaatatatcgagacgctcgaaattgaaaacagaagctcttagcaaattcaaaggactataacttatatctcggatgtccgattaagtcccataatatatcgagactctcgtaattgaaaacagaagctcgtagcatattctaacgacaataactctttactcagatgtccgatcgtgacccgtagtatat

SEQ ID NO: 274347 - DNA, 405 bp, Glycine max
  unsure (1)..(405): unsure at all n locations
gaaactaagcttccatttaatacaagtgtctcgatatattacgagacacaatcggatatccgagtgaaaagatattgtcattagaatatgctcagagcatctattttcaatttcaagcgagatatggatgaatcaagaactcacatgagtaaataatttaattttaagataagcacaatattaaaaacaaagggggagcatttatnagagtgatcgactatgaaaaagtgtgtgtcgcaacctacccttcagcgggagggtgacacgtgactctcaggatgcgtgtttcacgaacagaatacgcgcggagtcggcaccaacgtatatttgaggaaaacgtctgataaaccggaatagacgcgatctacgaactattaagtgacatgttcgggagttgtatttacg

SEQ ID NO: 274348 - DNA, 366 bp, Glycine max
agctcggagctcggagtctttttgaagttcctcatctgacttgtagtagaatgagacatattgtttcacccaagacttgatagcatctcatatctctagcccatcagaagcataaggatagtcctcaatcaaaagtcgaactccatggggagcagatggatccttaacagcaactcctctgaattaaaagcacccaaataacattgattagcacaagagttatatcaagcctgaagccttttttcttcttatgccattgatgactttttatatcatgcattcatgtgttcccccaatgtatgcactttgcgatttcttttctttcttaatctattgcccaacacaaaactcgagctgaatccgaac

SEQ ID NO: 274349 - DNA, 462 bp, Glycine max
  unsure (1)..(462): unsure at all n locations
tagctattatagggggtgtgtagctaagctctagcttcttatctcaaggaggtgagcttagctattagagaggtatgtgtagctaagctctagcttctttacgaatcttcttaatgaagcttctcaaggaggtgagcttagttatgagaggggtgtgtgtagctaagctctagcttctcaaggaagttttctcaaagaagcttctcaaggaagttttctcaagaaagcttctcaaggaagctacctagtctataaatagaagcatgtgtaacacttgttgtaactttgatgaatgagagtcttgtgagacacaactcanagttcaacttctctccctttttcttccttcaatttcgtgctcccccctctctctttctcttcctctttcttttcctccattgaagcatcctctccaagcttcttatccaacgctcatcttggaggtgaagctccttcttccat

SEQ ID NO: 274350 - DNA, 451 bp, Glycine max
  unsure (1)..(451): unsure at all n locations
agcttgagaaagtcctttcgattctttntatacatttctgatttgatggcatgagatgaaatgcaaagattggaccttctgttagttgttatcaatgaatagattaaacacttgtgcttgagtgaaatagtagccatgagactgtggtttgagcaactttccttgatatctgtcttatgattaacttcatctaactgtgtagttcacattttgttctcctctttgtctagctgcatattctgtgtaaacaagtgataggtacactttgcttcatctttctcatcatgcaatcaattaattntgatgcatacacctttgtacataaacactgcatgttttaccacttgaggacaagtgagttgttctcttttgcttgaggacaagcaaaactttatatttgggcgagttgttagtcggtgaaaacgactaactcttgtgtatacaacttctg

SEQ ID NO: 274351 - DNA, 508 bp, Glycine max
  unsure (1)..(508): unsure at all n locations
ngggatgtactatgcaccatgcgcactgtgacaactcagctcggctcagcataaatgtgcatacatacactcagtttctgtgtctgtgggcgacagcgctctacgtggaagaattcttcatatgagactagtacatgtccaccttgtggaatgcgactccaactgacttgagacctaactgcgtaaccattaacctttgaaaagaaagatcaggtatccacacctctgaagccttaactctttcaccaagtcggatagaagtgctacgagtgaatcatatctatcttggaatacatgtacttgtgtgacgcctcacattgatccttagacaataaaagatttgccttacgagtagaacgcggtgaaggagaatgtgaactcattttgctatgctggaaagaccattctttagtggatgcgtagtcttcttcatccttggcgcaattggatcgtccggatgcatttcatactctcgaaattgatcttggtctctgacattgatgaacgg

SEQ ID NO: 274352 - DNA, 436 bp, Glycine max
agcttagcattctctctccgataatgtaacatgaattgtattaaatcaatcccaagaaccaaaaatatgtttaattaataactatattaatcctcttccatattattccacgatgtcatttacctttgccagctcgtgtatttgctttccatttattccacgatgtcaccctttttatttatttttcaatcgcaagatgtgattggaacctaaaaaaactgtctagccataagtaaataaaatatgtatcttgacagtcctaacattaatgttagctatactatgaaagcagcgaggaaatttgtaaagacgtgacgaacggaaaattttcatttcttgcatgtataaaggagataatctctttctgcttaaaaaaaacgagacaatttctttacggtaattatattcgaacttgatcattctttcttttctacta

SEQ ID NO: 274353 - DNA, 413 bp, Glycine max
  unsure (1)..(413): unsure at all n locations
tattgcgcaagagctattccaaacaaaacanatagcagtgtttggcagttagcttagctataatgaagcaaaacttagcaaactgggctatacaagtttgtctgcatatagaaaaactagtgaaatgaaatgatactacaggaggagataatgaaaggttaagataactttagtttcagaatgaaactgattgttacttttcatcagtagcatgtataatcaaatcaggatccaagacggttataaaaccaaaaatctgaatgaaagagatggttagatctggtaactgccaaaaataattatttatctaccaaaaggattcatgattaacagttgcgccatagaaatatcaaatgtaagaaaattatattacctgatggtttagagtagctaagcttctagtatgcattgga

SEQ ID NO: 274354 - DNA, 417 bp, Glycine max
agcttgaataacagatccagtgctttcagcttaatcatgttcaaccacaatgttgcctataatttctgtgggattgagtaactaaaaagtaatgaccaaattgattagctcattaattaatggatgcctttttttatcggttaatgaatatgtacttgttgcatgcattactctaagcaagttggcataggaaaaaataaataaaaaagaagcacaatcattactctaagtaataattatgtccacttcaagatggagttggatagaattacggaaaacaaagtaagaaaagatcaagagaaaataaagtgatggatataatattgtaatgaacaaattaaaaccagaaaataatgcaaataatatgaaagtgcaaatagaagtatcatggctctaaagatattaccgcccacgact

SEQ ID NO: 274355 - DNA, 430 bp, Glycine max
  unsure (1)..(430): unsure at all n locations
ntaggagaaaccattaaaactaaggtagttcctaaacaaatatcaattgaggaagcttcgccgagtgtccccattgaaaaacctttattcaaacctttcaaagttagtgataaggctaaacgaaaaattagggaacttagaaaaactaaatccttaattgaaggcgtaggtgacaatcatagcgaattactaaacaagattagtagtttgcttaaggtcattccagatactccccaagcttcggaaaatacttccaaaatggtaacaagaagtacctccaaattaattaatgttattaatgaagatagtgaccaaaacttagataacacaactgagataggatcagtgtcagaaaagaatataaatccattaaactccaaacactggaaaacccnctccaaattatattatcaacgtccaactgcccctg

SEQ ID NO: 274356 - DNA, 420 bp, Glycine max
  unsure (1)..(420): unsure at all n locations
agcttgtgtttggtggctctggcgaatatttcttcattntctcattatatgatagagatgggaaaacgctttctatttatattttctgttttactttctgaaaataatttttattttcagattttaaaacttataaaatatctttacttttttacttcttattctctattttaatatgaagaaacaaaaatattaaaaatgtgtttggtttaaccaatttttgatgaaaaaactttaaaaagtaatattaagtataattatctttagtatatattaattacgtaacaaagatattaagtaatattacgtaacaaattggtatatattaattgtaaccatcacaaaaagaaaaataataagtataaactaactaatatcttaaagatttctttaaacatttagttacgtanagcatgaata

SEQ ID NO: 274357 - DNA, 466 bp, Glycine max
  unsure (1)..(466): unsure at all n locations
ntntacgtcggttaaaatatgcattctacgtcagttattatctcgtcattgtaggagatgttgtaaaaaatttatattttctatgacggttcttagctaaaaactgtcttagaagggtacactttctaagacggttttttagagaaccgtcttagaatgtatttttttaaaaaaagttaaaaatatatagaagattctaatatggttttttgagaaaacaatcttaaacattctaagacagttttttaagatttgtcttataatgtgttttttttaaagaaaaatattttgatttgttgtaactatccccatcattcgcagtataatttcttgaatttatgccaacagtgccccattacgaaatgtaccttactcactattntaagtttggtttatcatttcaaagctcattcacaaatgcatagtatattgccaattactttgaaggaatgaactcaagacactc

SEQ ID NO: 274358 - DNA, 435 bp, Glycine max
  unsure (1)..(435): unsure at all n locations
agcttataagaacaaaattgccttaatcatttccaaatatgcatgtgaattacgacgcatcaacaagaatcaagccaaggctattgtgcaagcaatcaatggggcaaaacacaccaaatgattataatgatggatggctcaaattctcacaaaggtaaaatcatcactttcaaattgagctttcaaaactatcatgacatgtagagaagaatcaaggatttcgggtcacaaaatgtcaagaacttttattttcaaaacaattacccatttcttgaacatatcctataattcaaagaaaaacatgcaaagtcgtacgtgcacacgaaattgacccaaaatattaaactgaaaatncgacgaaactaacaacattaacaaattaacacaactaacacattaacaaaaccaacaaaactagcaaaaccaaagaacact

SEQ ID NO: 274359 - DNA, 396 bp, Glycine max
  unsure (1)..(396): unsure at all n locations
agcttctcccctatattgctataaatagggtaagaagtgaagaagacaagggttcagccccttaggcccttctctctcttttgaatttgctgacgaaaattatttccgtgaagaaaatccaagccgaggcgctatcgtaacgtttgcgtaacatttccgtgagtaattacgcgaagattctcgaccgttccttaacattcatcgttcgttcttcgttttcttcaggcttcaacgggtaactacctcaaaccaagcttttcaattcattctatgtacccgcggtggtccacattacgcctcatgtattcctattctcattctcatttgccttttataccncctcttgacgtgcttaagccatttatctaagtcattactcgctcaacctaaaaataa

SEQ ID NO: 274360 - DNA, 427 bp, Glycine max
  unsure (1)..(427): unsure at all n locations
tgtacggaganaatataaaaactaaacaagagatatttactatcctaccaaaaagaactataaattgggagaaatatatacatttttgaaaacttttctatacaaaagttagtcgtaaaatatgactaatagatagattcttgaaatgttttctcatgtgtttgtaagcctttaagagaataggtgaattagatagaagttcatgataagtttttctaagagactcaaggtcatcgatgtttacctcatcttcctaatctgattcaaattcatcaaaagttgtatttgccatcaagcatatgttggctcgtttgtcatcttcatcagacgaggtgtcatccatattttcctaagtactcataagaccctgcttttgcttggtcttgaagtatttcttcttttcctgacctttctgcagntctagaca

SEQ ID NO: 274361 - DNA, 300 bp, Glycine max
  unsure (1)..(300): unsure at all n locations
cagcttctttcggaccttgtacaggtantctatactcctctttcaaaaccatgccgtatgctcgcgactggtccctttcttcccttcgcaacttgagttcactattgctaccccatatagctccgcgacatttgttccgggcatactcttccttgcgagccctccttgtctcttgttcaacggctcttgcagcaattgcattctcttcgcgtaacccggcacactcctttcgaacgtgtgtagcggccaacttgaacttcctcttggcaagatgtgcctctcctaactcgctcttgagag

SEQ ID NO: 274362 - DNA, 400 bp, Glycine max
  unsure (1)..(400): unsure at all n locations
ctttcgattcgttctatgtacccgtagtggtccacattgtgtttcgtgcatttttattctcgttttgtttactttttataccccctgttgacgtgcttaagccattttacttaagtcatttctcgcttaacttaaaaataaaataaatttccaccgaacgtttgaattgcattatccattaacttcggttaaaatcaattccgaccgttcggtcgtgccgtaaccacgttggaaatcaaaaagaggtaaaaaataatataataatcaaaaaatatctttntagtaaaataaagcggaaaatcaagtggacattttctctttgggatttctcattcttaatcgaattgattaataactaaagtgaaactaaaggctaaaatcaattcgtctagtcaagctc

SEQ ID NO: 274363 - DNA, 436 bp, Glycine max
agcttcggaagaaagtgatgaggtacaagccctaaaggcagtgcttgaaagagcccgggtagtcgaagagaagttcaagtccatagccatcaaagtctgaaaagagtatgatgaactaagggacgtcaatatggccacagttgaagccttggaacgaagaggtgaaaggaatcatcacgggtcaaaggcatgatcttgaaggacgagctaagtcgaaaagaaatttgtcccaacagttaagcgagactgaagggaatatgtaggccatcatcgataagtgcaaagagaagctaaatctagcggcgactcacgagcaaaggctagaggatgagtacgccaagatatcagcagaaagggaagtaacggaaagggtaatcgatttatcgcaccaagaggcaacactgtggacggaccgatttgctcttacttttaacag

SEQ ID NO: 274364 - DNA, 412 bp, Glycine max
  unsure (1)..(412): unsure at all n locations
tcgatcggaaacccncataattgaatccacacatgcccgattaataggtctacagcccggtctccatttttcgagggagtagaagagggagctaccaccttcagtctccgatttgataagctgattagctttgtcctctgtgaggccaatgagaagaaccatgtcatcaccaaggagtctggtacatatgttgtaccctaactcccacgatacgcacttctccgtcatctccaaagtcatatgcttcttcagtctgccagcccatgccccgttgcaccagaagtcgtgaccttcgtggggtgtgatggtaatacggngaatgtctcctacaccactcatggttcctcccgaacctcctctctttgtcaccacctctgcatatgatctcacccgagcagctctagtgggttct

SEQ ID NO: 274365 - DNA, 309 bp, Glycine max
  unsure (1)..(309): unsure at all n locations
agcttnttgagaaagcttctcatagtaacttcggngaagcttcttgaggaagcctcttaatgaagcttcttgaggaagctacatggagttgcctcggtaaaaacgcttcctagccttcggtaaccgttggatcttctcgaaatttggtatgcggcttcacaagacacttgtccaccatctgaccgttgcaatttttgaaaagatgtctggagtgtgctcgaagcttccgttcccgagatcatttcttatttaagcatttcagcctttgctttcgtgtagcttaggaagaacatcatttcttctcttttc

SEQ ID NO: 274366 - DNA, 384 bp, Glycine max
  unsure (1)..(384): unsure at all n locations
ntgtcgcataaaatcactaanaacctttttaatgtccaatgctcttaaacggtcttctttgcttttatcggttaacatggaccgttcaaaagcataaaattaagacataactttaccgcttttgcaagaactacgtaggtctgatttcctcatcgcaattgacgatacgtaagagcaaaagccccacttttgtcgactaccccaagagattgttaaatggtccaacgccttaacgtttctctcctttcaccccaagagatccttaatggtccaacgccttaatgtttctctcctttcaaaaaccaagagatcgttaatggtccaacgccttaacgtttctctcctttcaaaaccaagagatcattaatggtccaatgccttaat

SEQ ID NO: 274367 - DNA, 192 bp, Glycine max
  unsure (1)..(192): unsure at all n locations
agcttgtcatagttntcatcaagttcagttttggatttggaagaatttacaatgctttcaacttcaccatccaccataagatagaaatttgtgtcttcttcattgcttgagtcacttgaagtgttgaaagatggagcattcagattttatgtggcccggcttgccacacttgaaacacttaaagttagggga

SEQ ID NO: 274368 - DNA, 399 bp, Glycine max
  unsure (1)..(399): unsure at all n locations
ntttaataaatgtatatattcattntagatctcttaaattatatacaagtaactcatccaatttcacttgttcataacatgaatgatctgatccaacatcattctcaagacaaacaacaaatcatcgatacaatttttgaggcctgactcggaaatagcccggatatataacactagaaacaaatacgattcaacatgaacatgcaaatatggaaaatctcaaagagaaccctatatgtggtatgttgaattcagtacatgatatgtgaggtactgagacaattctgtttctataccaagtataaaggctatagattcaataccttcatagagcagcaaacacagagttgcaatgggctctctcagcatttctggccgattataaaaatagcattcaaa

SEQ ID NO: 274369 - DNA, 442 bp, Glycine max
agcttaaacgtttcttttgatccatcaatagacctaatcttgtcaggaatccttgccataaaattacatagacctgtcaattctaaatcaaaaatgtaataaatccaaaaccatgcaaatgctatgtaaagaatgattgtcaattcagaatagaaaataatgctgacaaaaaatagaacagcaacacagactcaaatgccacatgcaataacatttcaatcaatgacaaaataccataaaaactattatactatttgttgaactactaagccaatacatgcaacaacctgaacaaaaaaaaaaacaaatcagcaaatagcagagaagcagaaaaaaaaattatatctctgaacaaataatattgcaaccatcaacaaacaaatagaaaggctgaaaacaaacacaacaaagttcaacttttggaaaacagaataccaaccca

SEQ ID NO: 274370 - DNA, 462 bp, Glycine max
cttggattagtcgatcaggctcagaccatagtataacgcccttagttgttagtgtgaatgatacaacccaccaaattatattgactcattctctattttgatttatttgactcacattctttgtttgatttacacatcacgaagatatatcatttaataatgaataacatgtcgaaatcatatgtcaaaaaaatgtatctatatattgataatttttgccagaaaattattgaataaaatgaaacaaattctttatataatatggagggattctcgttgcaatatgtgcaaagggaaacaactagctagaattcggatacataaaattaaacatgcactacgtgcctatctcttttatttctatgaggatcaaacacagccagatatggattagttgtatgccaattgtcataccgactacggatgtcgatcactacgtgactgcctattaccatattatat

SEQ ID NO: 274371 - DNA, 448 bp, Glycine max
tcttaagtcacctgaggcatgcaagcttcaagaataacggtctcatcaaattatttatttcccgaatggaattctataaataggccttctatttttaatggcgtgggttaccattattggaaaacccgcatgcaaatttttatagaggcaaaagatcttaatatctacgaagcaataaaaattgggccctacattcccattatggtagcaggaaatacaaccatataaaaacctacggaagaatggagtgaggaagaaaagagattagttcaatacaatttaaaagccaaaaatataattgcatctgctttaggaatggatgagtacgttacggtatcaaattgtaaaagtgcaaaagatatgtgggataccctacaagtaacacatgaaggtacaatagatgtaaaaagatccaggataaatacattgactcgtgaatatgaattat

SEQ ID NO: 274372 - DNA, 409 bp, Glycine max
  unsure (1)..(409): unsure at all n locations
actcagcttagtggctcatgagcaggggaaatgataatcaatcaattatgtaagatagtcttttctataggagattactgtgaggaagttttatgtgatataatccctatggaagcagggcacattntgttaggtagaccatggcaatttgacaagaaagcaatccacaatggtctcaccaatgaaataaccctcacccatggaagcaaaaagctcaaacttgttcccttgacaccttcacaagtgattggggatcaagtacaaataaaactcaaatggaatgaggaaaagaatagaaaaagaaaagaagaacaacctttaatggttaacgaggagtgtaaggaggtaagtgatgtgaacctgagtaagagcggatcgtttgatacaggctacggagatttggatgaca

SEQ ID NO: 274373 - DNA, 331 bp, Glycine max
agctttaaagataagatcaaccatagtgtgtatgttatggcatatcatattctgaaacagaggacaaaggcttgaagaagaaaatgagaggaatggttctctcactattcaattcaatgatgagtacagattatatacaacagctagctgataactaactcatcacacacttacaactgattctaactgaaaatggttacaatagaaaatgagagaggctaatatcccccatcaagctacagaatgaatgtcattcatacccagattggaacaaatcaaacgaaaagcaccatcagctaaagcctttgtgtaatgataactgataaataat

SEQ ID NO: 274374 - DNA, 296 bp, Glycine max
agcttcatacaagattatatggcttgaaactatcaccgaggcggtggtacacgaagcttaatgaggttatgaccacctcaagattcaacagatgtgacatgcaccattgttgctacattaagaaatatactaatagctatgttatccttatcatatatgctgacgacatgttgattacacgatctagtatggcagatattaacaggtagaagcagtctttggcaaagaacttagaaatgaaggatgttgttccagctaaacaagtgcttggtataagatttcttacaaatagatca

SEQ ID NO: 274375 - DNA, 389 bp, Glycine max
ctcttctgatccatcaatttatctatttttgtcccgaatccctgcgctgcaactacatagacctgtcaattctaaatcaaaaatgcaataaacccaaaaccatgcaaatgctatgttaagaatgatcgcctcttcagaacacaccattatgctgacaaacaatacaacagcaccacagactccaatcgcacacgcaataacattctaactcacgacaaaataccactacaaactattatactatctgttgaactactaagtcaatacatgccacaacctgaaccaaacaaaaaacacactactcaataccagagaagcagaaaaaaaaattatatctctgaacaacaaatattgccaccatcaccaaacaaatagaaaggcttgaaaca

SEQ ID NO: 274376 - DNA, 418 bp, Glycine max
agcttgtcttgcactcgtgtcttgtgtgccttatacatacttcgaccatcggacattgcaatttacgcttgatacttccctccctcctgaggccccacccacacacaaaaaaacctttttttgttgattgattgtgttcacttttatcttctatttcactttgccttgtcgcacaatcttttgttccccttcgcttctgtatctctgtggatttaatcttgagctaactcataacacgattatctactataaaattaatgaaaaatgattgaagtatggaaggcactgtgtcgcaagagtattcgaaattcctgatttcttactttatctgtgttgtaatattcctatgggcctaccttaccttccaacaccttgaacttaggtgaagaaataacataaatacatgtagagattttgt

SEQ ID NO: 274377 - DNA, 460 bp, Glycine max
  unsure (1)..(460): unsure at all n locations
ggcatgaagaaacgttaaataaaaaagcacagganaagttattagggaaaggtacaatgggaatntaaaanaattgttgagttatatcaaaactaaaagaggaaaggaagcccattatacgattacaaatagtggggactagagagtttcttttctatttttttataaattacattcttttatttaaaaaattattaaattataactttttgttttgaaatcatactttattttgaatagattaatatacattacattgaatttaattaaaaatttaatctatctatattttgtttgataaaaaaaaattatccaatccatttattaactatttttaaaaataaacattaatatttatatantaatttatacccagatactcttgaatatngattcaaggattccttaatgaacggtgtagtatctaattcaatagaatacatattatattaaataattc

SEQ ID NO: 274378 - DNA, 365 bp, Glycine max
agcttccatcagacgggttggtggatcctattcacaattgatgctcttccttgcatatcaccatagcaaggagagcccggtggtagctatcttggcggacttatttgatacatttgactgaacgtgcgagaagaacagcgcacggattgtctgctgtttacccgctctttgtgtgtgattggcttcgcacctattacaacaagacataaggcacccatgtccactccaaagttatcgctcgtgcatggaaaagagaggagtagattgggaccaatacttggctgggataggaggcagcacaatcaactggtttcctcgatggaaggaacgaaaggacggagttctcttctcatgtggggattacc

SEQ ID NO: 274379 - DNA, 392 bp, Glycine max
  unsure (1)..(392): unsure at all n locations
agctcttaattgaatctgcaacgttccaattgttntttaaatggtgtaatcgattacaatatattggtaatcgattaccagtgtatctgaacgttgaaattcaaattaaattgtgaagagtcatatcttttcgtaaaatgctttgtgtaatcgattacatggttttggtaatcgattaccagtgacaagttttgaataaaaagtcaagagatataactcttccaatggttttcaggtttttctcaaggttataactcttacaatggttttcttgaccagacatgaagagtctataaaagcaagaccttgacttgcatttcaataactcttacaatctttttgaacatctttttgaacttcttcttcttcttcctttgcccaaacagctttct

SEQ ID NO: 274380 - DNA, 437 bp, Glycine max
  unsure (1)..(437): unsure at all n locations
ntagtgaaactatataaaanaataaattaaactcactcttttttctctttaaatcctctaatatagaagagaagcccaaattgagtaagcagagattttgctttttctattttcctctcctcttaaaaattgaacttgttaacaaaaaaaatattaaatcactcatccccttttcttctcaagggatgccaagctttagtgaaactatataaaacaataaattaaactcacttttccacccttccaaatcttctaatatagaagagaagcccaaattgagtaagcagagattttgctttttctattttcctctcctcttagaaattgaacttgttaacaaaaaaaatatttaatcactcatccccttttcttgtcttacttccatttgtctcaaaccacacactctaatataaagtagtagaagagcatggtagtcg

SEQ ID NO: 274381 - DNA, 397 bp, Glycine max
  unsure (1)..(397): unsure at all n locations
cgcacancgcaacncgcgcgttataagtggctccactcccgaagccccaaccacacacaaaacaaacctaccttgttgatagattctgttcactcttatcttctattaaactttgccttgtcgcaaaatcttttgtttcccttcgtttctgcatatttgctgatattattctgacctatattattacaggattatttactacaaaattcttgaaacatgattgaactatgttatgctctgtgtctcacgagtattctaaattccttatttcttaatttatatgtgttgcaatattcctatggccctccccttacatttcaacaccttgtacttaagtttcgaattaaactcaatacctttttcactttgtcagtcggctcattatatcttaagatcc

SEQ ID NO: 274382 - DNA, 388 bp, Glycine max
  unsure (1)..(388): unsure at all n locations
attaacaccaccaacagcgaagcctcgggcatgtactantaccggacctacgagataggatataaaacatgccagctatgactcacttttatgccctataataggtgttctatacacccagacacgaccgatgtacgggcaacacagaacaggattagaccacaagtctcgacagatacccgtcccnccctctcatgctcgctcgatggccaaacctctacaccggtctcctccccttagacctgacgtcctcaatgcgtgtcttccctccattcactaccattcacccttttggacatctgtcgcacctaccttctcttactcgccggaaactccacgcgtttctgactccaaccatgtccttctcgcacccatcggacgccccccc

SEQ ID NO: 274383 - DNA, 446 bp, Glycine max
  unsure (1)..(446): unsure at all n locations
agcttgaaggtgtgtaaccaaccatttttccatataagggttgtggttgggggcaaaattgaggcctctccaaagtgttttgcaggggtataccaccaactgcttgcccttcagtggcatatccgaggcaaggcttgaagtcagctagattgtggtggggaatttcatgcatctcccctgtggtttaagagacatgtgcatgatcagattgaggttgttggctctcaatgagtatggcagtggagttattgacattctcactgggagtgtacgccacattgngtggtgtatatttgggaggcaagccatatggcgggaaggcatgcttgttttgaatttgcacataatgggggtttgcccgtactttccaaatctttgcctaccatatctgaggttggatgattcatttggttgacgccaagtgagggaatccggttcaccttaac

SEQ ID NO: 274384 - DNA, 791 bp, Glycine max
  unsure (1)..(791): unsure at all n locations
cgcccggnnncatgaatcgtggctctggagacaccttaaatattnaagccttccctcgttaaaaggttagtcgcattagagtgtgaatggtgaattttatctttccaccagcatccaacactcagggggggtgtttaaaggataatttcccaccctcatcatacgtctcgattctattttttctctttatctattcaattttattacattgaatgtacgaacgtgatgatgaatcgattggtcaattattttatgtgtttccgacgcgtgatttttgtttataagaaagtaatctcgtaacaactttagcagctctatgctttttggttaacatttagacattatcgttcattttcattgctcctccagttgtacccttatttttttatgattatttcttctacaccttccggatggagaacttatttccattgctctctcaaacttgatcaatctgctgaaagaatttgccctttctaagaatggtagttgaatactacattgtgtgacgcatggatttttttttttttgttttacaaaagccacgtttcttccgtactccctcaaccatagtaccatcggtgaggagtctctgtactataatgagcgatttatctatccaatctccccctgagactttttgaccagttgtacgaatagggggtctgattccttcactattaaactcatcatatagccttcgtttgtattataatgtaccctaactaccccttgtggtggggtattcttctcttatcgctcgcccgctatatgcaacggctccccatgcg

SEQ ID NO: 274385 - DNA, 580 bp, Glycine max
agcttaagggggagtgctcgtctcgaaaatgggatatttttttgtacatgctttcagatagttgtcatcatcaaaagagggagaatgtgaatgaatatgtatgaagattttgatgatgccaaagacagaagcaatacaagtttacttcaagtccaaatcaagatcatgtaaacaaaatatcaagagaaaaaacccgccttagtctatttttgttaaaagaatctcttaatgattgaaaaggtttggcctcaaaacataatttttaaattaattataaaaagttttaaaatattttaacatttctgaaaaaaggaatttttcctctggtaatcgattactagaagttgtaatcgattaccagaagcaaaattgttttaaaagcttttcaggaagttgaaatttgaattttgaaaactgtagtcgattatcatttgtatgtaatcgatcaccaataacggaactcctgaaatttcaaattgaaaaggcatgatccctcattgcataactatgtaatcgattaccagtgaggaaaattgaaaaattgctttgaaaagtcacatcctttcatgagtttttgaaa

SEQ ID NO: 274386 - DNA, 742 bp, Glycine max
  unsure (1)..(742): unsure at all n locations
cgcggnnatgatgatacctgcattacgcgacatattaaaccccacctttaaagaaactttgccaatggtgatcggagacttgattcttgtaccaggtaacgagcccagccaccacggcccggttctttagataattatggcgcagaacactcgttggggtataagcgaaactggtgctattgctatgttgtttgaaaagacctttaccatactttcccccgtgagcgccttcttgttttattccctcgatcgtggatccttctttcttgatcttaaaacaaacttctttgattcttgaaactagttgactcaatcttgaatattggtcgaccgggctaagcgtcctcatattgggtatgaggaaaacttcttgaatcaactcgcatcatccctagtatactagcttataccggtgggcctgacccaaatgcacccgcttgaaagggtcttctttaaccaggtttttaacccggatccccacaaggttttcctttccatcggttaagaaagcttcttttttttttatgccacaaacactttaggcgccggggggcgtttttttaataaaatacaagtgggttgtggttcggggaattttttattccctccccctttggggtcaaagaggcttttttttcttttttcaacccccaattttttcaccccaaagggaaggtgttttgggtctcctactgcatttgagcccccccttgtttattttttctccaggctgggggtggaa

SEQ ID NO: 274387 - DNA, 564 bp, Glycine max
agctcacaaatgttcatagacaaaatcaggttgaagcattcgattctccaccacttgcttcaaggaactcttttccccacaggagccaaacttcagaggcagaagatcactcagttccaagctctcctgcaattcctacatacatggctgcaacaaaatcaacacaagcaaaagcaagatcaacaagctccccaagagcaaggataggagggagttttgacatcaactctgatagctattcactatgcaagaaaaagttgcctattgtgacttctattaatggtgaagtgtttagtaatggtaggatgggcaaactcagtagtaatcagcaaagatctcctagcttaaagggccttccaagtcctgtaaaattgagtcagacattgaaggatctcagcattaattcagattgctcagtgccaatttgagatcaacaaagttccttcaaatgatagatactatgcttcttgcgttactaccattattcctaatcgccccttgaaaatggttgtttgttgtggatatgggaataaaacttatattctttttgcttgagaattggac

SEQ ID NO: 274388 - DNA, 402 bp, Glycine max
tctacttatatggcagggcgggcttccttcaccttcttgtctccaacgcgaactttgaccattgttcttccttcccgcgatgcttcttttcatgtccgcctgagtgggcttgtagcctaaaccatacttcccacgatttccttgggtatttatcaggctagttatgccgccgttgttttttcctaaacccatcccgggttcataaccgttccccaacataactcgggccatcattaccgctgcatcggatagacaaggctgcccaaagagggagtccacgaaggaaatgctgaccacctcaaaagattggaaagcagtttctaacgattcttctgcggcttccacataaggcatggaggatgggcagcttaccaagatatctttctcgcctgacacgatgac

SEQ ID NO: 274389 - DNA, 596 bp, Glycine max
agctttaattagattgttttctatctacaatttaaaagaaaatctttattagattccttcttttaaaagctttattagattcttgggtaacaaccagaaaggaaatgaatattaaaagagagaggataaagttacgaaactatactgtatagccgaagaagttcttaaattaaataatgaaatcattggaacaaaaaataggttatatatatatatttaaaacacacacacactgcgttttgaataatcactaaaacttgagacttgagagcgcagctaagctaagctgatcatgcaagacataaaattaagaagtgggaccaattgtgtagaagtttaatcctattctccattagcctaaaggtaaaagggtagacagtacacactacatagtacacacacaaagatcatgttaaaagttaaaacgatttttttcttagaaaataatatttggtgaaaaaattgagcaaaaaagaccattctagaaccaatagtaaaaaataactataaacttatatatatgccagcaacataattttctgctaaaagtgtatactcgcattaaacgaaaaccagccttttttttaaaagaaaaa

SEQ ID NO: 274390 - DNA, 400 bp, Glycine max
  unsure (1)..(400): unsure at all n locations
tgtagaagtgtgattcaacaaaatccaacattttctataggctctataagaagacaagccaatggaattgcccataaattaaatagtaaaattatttttttttaatctttatagtttctatcttgttacaattaagcaatgagatgagatgaatatgtttcagtaaaaaaaaaaggttgtaaataatgtttaaaatttgtattccaccaaataagaatgtttgaaatttggacctaattaacttataaacctaattaattttaacaaaaataaataagtctatattttggaggaaagaaaattttatttctctaaacaagcataacacagcaataaatctttaaaaaatacgcatgantattttctaaaactatatttcatgctctttattttttatgag

SEQ ID NO: 274391 - DNA, 582 bp, Glycine max
agcttattactcatttgcaaccaaattgaagaccttcatttctaattgatccctccatattatacttaaccaatattgacctaaagataaaacaattaaaatttacattttagacccatcaacaaattttaattagtttttaaagtaaaaaataatacatatattaacaaaaaagatcgatctataactcttatttatggttaaaaaatcaatatcttttcaagtttttttaattggttttctgatttgtgtttggtatagggcccatttttataggctatttttaagccaaggctttgtggctggtttgtcttggttactttctatataccttattgaggttaaatgactattaaccagggatacatgatgggtttgttttctgttgtatgggttatgctaacctttgtgccatcatcaatttatttatttgctgataaaaaaggaaagaaagcgagagaagtatagacctgtaaattctaatactcaactggacgataatatttcaacatgccacacgatggcagagacaaacattgcagtgttaatttttaactactatatcaatgtggtatacccaac

SEQ ID NO: 274392 - DNA, 444 bp, Glycine max
ttgggtggaaaatgatagtgagactcaacttggatatcaaccttgtgctacaacaattgcaacaagacccactatccacaatgagagaacaatttttgtttaaaaccttacatcttgtatgaaagatgttctctctttgagttagggttaggttacaagattgactcccaaggagccttctcaccattagaagattaccttcttcataggtgtaaacctcattaatatgctcatcacccttggcttcacccttacttccatttgaggagggagaagaagtagcctcctcttggctactatagatgtcttgactcctcatgatcgtggttttctttgtggggcattgagaagcaatgtggcctttcccaatacatttgaagcacttgatgttactagttctatcttgtgaactagcctttggagtgatttcctctatgtttttac

SEQ ID NO: 274393 - DNA, 442 bp, Glycine max
tatgttcatccctgcatccaaagaatcgattttatcaacgaaaacccacagttgtggaccatattggatggaatcatctgcctttgatagagctttgcaatcggattgatcactatcatcatttgtatatgtcatacaacacgagaagcagcggtggctccccaaccactatgagaggtggatcttccaccgttgtactcgccataatatactaagattttaatgtgggtttcagtccccttaagatatgcatctgggttgggccccattcacacctatatcctcttatgtcattgagcagttacaatgtgtatgcgattcctcaagcatcattcttctatctgtattatagatatatgaatcttgtaacttcataaatcaacactactgacaatgaattgttagacagtaatacggcccttacaaagtggttattttgaaa

SEQ ID NO: 274394 - DNA, 398 bp, Glycine max
ttataagaattcagagcttcaatctattgagaaatcccagcttgccactgtctaatagctctggcacttgacacaacgctattactgtatagagagagaaagtggggaccacaaacgctttctgtagcatatcttcacagaagcataatttgcaagtgtcgcctagcgctcagagctaactttcatcgcatgaatcaaaggaaaagttaacaacataagaaaaaaacaattaataatgtcaagacaagacaatttaagtcttcccttttgtgtgctatggcacgagtttcttgctcaacatatggacgctactttcttgtgattcttctcagcacttgaggattgagtaattatttcattgcttttgtattctgatccaagtgctaaagcacttgcct

SEQ ID NO: 274395 - DNA, 374 bp, Glycine max
ttcaagcggggtgcatgtgagtaaccaggtttcccatctggttcgtgcaactctgaatggaggctcttgccttttgctgagaatgcgtatgatggagggtgattagcctgacgaagccttatacaaaaggtatacgaggagccttaaaggcctgatcgatatcgtgtgaaccgctgctgcataggaggaagcccacttagcttgtttgtgccaaaagaattttttaatggatggacaggcttgggctgatagcataagactttgaccctcttataataagatgatacctacttcctgaattgtgaatgaaggaagaaatgctctggttattcagtactagaaggtgtttccgctgacgaggtccattattgatg

SEQ ID NO: 274396 - DNA, 443 bp, Glycine max
tttgaaatcaaactttgccactggtaatcgattacaggaaactggtaattgattactagagagtaaaaactctggtaacttagaaaattttgagaaaaactcttttgaaaaacaaaactgtgctatgtttgttttttgaaaaatcttttcaatacttcccttgtgaagtcttcttgatttcttctcttgaatcttgaattcatcttctcttgaatcttaaaatcaaacttctcttgattcttgaaacttgttgactcaatcttgaaatcattctcttgggctttttgtcatcatctttgttatcatcaaaactacttgaatcaacttgattcatcatcatgaagcttgcttctacaggtatttttgaccgacatcggacatgattatttttagttgacattgactatgttcttatagtcggcatctactagagttttttccat

SEQ ID NO: 274397 - DNA, 562 bp, Glycine max
  unsure (1)..(562): unsure at all n locations
agcttattgggcagtgaagacttgcaacttctttatggaccaagctggtgaggaaagaaagttgcaactgagtgagttagatgaaatccgcctagaagcctacgagaacgccaagttctacaaagaaaagaccaagaagttccatgatagcatgatagttaaaaaagacttcgtggttgggctaaaagtgttattgtataattctaggcttggactcatgagtggtaagttgaggtctaagtggattggtccttttgttgttactaatgtttttccttatggtacagttgagatcaaaagcgactccacaaacaagagcttcaaggtcaacggacatcgacttaagccattcctcacgaacccttctttagtggacgtagtggtggaagagacttccttactccaccctactcttcctccaccatgacttanggagtttttcttttcctatctccttccttgcttttattacacttgtccgattctttttgatgatttaattgtttttaatcttttaattgtgctacattgagggcaatgtgttgtttaagtatgggggggg

SEQ ID NO: 274398 - DNA, 383 bp, Glycine max
tgggtgatgttgcgcgtactgatgggtaccatgaggtgtttgctggggtttgacccacgcgggtgttgaagagacggcatgggcatctccttctttcctttttgcccctgtcgccccgattcttttggcattcacgtttgtggaggaaacgtaatcaaactttcctctcttcaatccaacctcgattctttccccggcaaacaccagatccgcaaagctggacggcatgtaacccactagcttctcatagtagaacactggcagagtgtctaccatcatggtgatcatctctctctcaaccatgggaggagctacttgtgccgccaaatccctccatcgctgcgcatattctttaaagggttcacccctctttcttgaacata

SEQ ID NO: 274399 - DNA, 229 bp, Glycine max
agctttagataccatatgttgaacgattagaataatacacattagatgccgaatttgcaagtctgacataacacaatatctgatttatataaactggttacgaatatatgcacataaatattacaggatcgagtcttgtccttctaattaaatatgacttgcctataaatcatatatgatttggctataaatctatgttaaataaataccacaaattccgcattccctc

SEQ ID NO: 274400 - DNA, 373 bp, Glycine max
  unsure (1)..(373): unsure at all n locations
tgccgccacggagttttccgactatgcttttgtgtggtggaacaagctacaaaaggagagagcaagaaatgaagagccaatggttgatacatggacggagatgaaaaagatcatgaggaagcggtatgtgccggctagttactcaagggacttgaaattcaagctccaaaaactaacccaaggcaacaagggggttgaggagtatttcaaggaaatggatgtgctcatgattcaagcaaatattgaagaagatgaggaggtaactatggctcgatttcttaatggtttgactaatgatatccgtgatattgttgagctgcaggagtntgttgaaatggatgatttgcttcacaaagcaatccaagtggagcaa

SEQ ID NO: 274401 - DNA, 397 bp, Glycine max
agcttgcgcatccaataccttgatgaggatgtcccatatgttcttaaaactggactgattcatttgctttcaaagtttcatggccttgcaggtgaagacccacacaaacatttgaaagaatttcacattgtctgctccaccatgaaacccccagatgtccaagaggatcacatatttctgaaggcttttcctcattcattacagggagtggcaaaggactggctgtattaccttgctccaaggtccatcacgagttgggatgaccttaagagagtattcttagaaaaaactttccctgcttccaggaccacagccatcaggaaggatatctcaggtattacacacactactggacagagcctgtatgagtcctgggagagatttaagaaactatgtg

SEQ ID NO: 274402 - DNA, 445 bp, Glycine max
caccaagagaatgtcttggataagaagcttagagaggaagctttaatagaggaagagaatgagagagagagagagaaagtggcatgggaatgaaggaaaggtagggagagaagttgaacgttgaagtgtgtctcacaagactctcattcatcaaaattaccacaagtgttacacatgcttctatttatagcctaggtagcttccttgagaagctagtgttacacccctctaatatctaagctcacccccatgccaaaatacatgatggaagaaagcttccttgagaagcttccttgggaagcaagtgttacacccctccaatagctaagctcaccccatgggaacacacctctccaatagctaagctcaccccccccccccaaaatacatgagaatacaaaaaaaaagtccctactacaaagaatactcaaaatgccctgaaata

SEQ ID NO: 274403 - DNA, 406 bp, Glycine max
aagcttggttcatctgagtaaccatcttttccatctgatttgtcaaaccctgaatggaggctcttgtcttttgctgaaatcgcatattctggatggtcatttgcctaactaagtcttctaaaaaaggttgcggaggagccttaaacgcttgttgactttgttgtgactgctgcggtattgtaagacgaacatatggcttgtttggaccagcaccattctcttaaggagggacaagatgctgctgatgcctaggacttgtccatctcacatttacatgaatcctccaacctggaatgtatctgatgcttgaaaagtcctacacattctcttgttgctggacttacagatgaggaggtgtataataaatgtttgcaccctaaccttccagacgctcactgactcccta

SEQ ID NO: 274404 - DNA, 329 bp, Glycine max
tgaggatatagacttcccaagctatttatcttctctctcagagaggctctctaactttctagctatcttactctaataagtggattcactcttgtcttggatcgactcactctacggtggctcactcaagcttgaggatagagacttcccaaactatttatctcaaaaatcctcccaactactttaaaaatttcctttgtactattaacccactctaataatattttttctaagctatggataacactactcaatcgtcaactatttctgtccctatcttcaatggtgaaaattatgatttctggcgtgttaaaatggaaacatatttt

SEQ ID NO: 274405 - DNA, 355 bp, Glycine max
ctaaaaatgtctaaaaaatttctccacatggacgatctttttccttcttggaagggacccccggataatcgtaccttccaaaccttgattcacaactttttacttctactcttgtttgcattcctattaatcttttcctcatttttccatttttttcattttctatttctttttctacttcttttttcttttttcttggtcccttcaattctttattcttgaccactattcgttcctctctttcttgatattgtccccctcacctcatttttcttgcgatcagtacctcttcttgtcagaaattttcttcttatgcccaatactatcctcatcctcagcctccccaaacctttta

SEQ ID NO: 274406 - DNA, 436 bp, Glycine max
tgaaccataactggtgagagtgtgatcttaaactgtgagtgaacgactagcttttagtaatagtctttgcatcaatctctgaaatttagaatgaaatgtatgaatgaggacatgatgaaggccatgattgtatatacaagccaattgaccaaaaaacttaccttgaattataattgtatcctttgcaccttatgtgaactaaattacattttcaaaattgaaccctggacttgaatgaatatctccagataccttgtttagattctaggagagaagatagttcaaggaaaattacctcaaatttgggggagttgattgggatgtaaagtaaaaggtaaagcatcatcacacacaacaaataagttgtgtgttaaaaaaaaaaagcaataaagaaaatgtgtgctggtgtaatatgtcaaagacaattaaagtgaaa

SEQ ID NO: 274407 - DNA, 585 bp, Glycine max
agcttgtatacatgattttgaaatttatgatcctcaaaaaactaggagattgggaaacaaaaacttcctcatcaatatatccatttagggaaacactctttacatccatttggtacaacttaaaattcattattcaagcataagcaagaagtaaccttacaacctctaatctagctaccggtgcatatgtctcatcaaagtctataccatcttgtgggttataacctttggctacaaggtgagccttgaaaacctattttcctagttataacactattttcatcaagcttgttcttaaaaacctatttagttcctatgatgttcaagttattagtacttgttatcaattcccatacatcattccttttaaattgatttaactcatcatgcatagacataatccaaaactcatcttttaatgcatcatcaaaatttaagggttcaacttaagacacaaaagccatatgttcacaaaacaaacttaaagagtgtctagtagatactctcttctcaatatcaccaatgatattgtcaatatatagatttctaggggttcaccattctttgggaagatcttgtgatggg

SEQ ID NO: 274408 - DNA, 431 bp, Glycine max
tccatcacatgagccaaccatgttgggatcataaacccatttcacttaaaaacaaaatgattgaacagggtacctaatgcatggttaactaagaaaagatgtttcttcaggcatctcaatctcataattacatttgccatgcatagcttaagtatgcttgagtcattcatctctatgaaatgttgttgaagtattggcgatcagaattgccattccttggattaccgggttgaaccaagttcatgcttttacgaaaaggttcatcaagtcaagttgaagtatggaagtaaccatctttcaaaaaattggggcgaaagatggattgagttacatcgctgcttcgtctattgccaaacacatttagaactggtgatgtcgttgtaccttctgttcaccatgacaatttaattgattcaacccatatcatgcgt

SEQ ID NO: 274409 - DNA, 307 bp, Glycine max
gctgcagcttccacccttgatgtgctaagcccccacataattaatttctgtagaacctaagcttaacgtgcaccattgagctaagccgctaaacccctgggcatttttgttgattgactgggctaagcacatcacatgcgcttagcccaaaaatagcactgacaaacttttgattccaattgagcttagcacgctcgacgctctaagccctaagaatttaacattttaagattttttttgttgggctaagcatgtctcacgtgctaagccaaaatggtcctttgtgatttaatttttgtcaattggg

SEQ ID NO: 274410 - DNA, 439 bp, Glycine max
tctaaaccttgtacaagaatgaagctctgataccacttgttatacaagtggcctcagatatcttaagaagggggggttgaattaagatattccaaactgtttcccctaattaaaaatctatttcactttttactcaagttatgaattcccttaatgacaatcttcttaaatattaattcaaatgaaacaatttgaatatgaatataaagcaataataaataaaaggagattaagggaagagaaaatgcaaactcagttttatactggttcggccacacccttgtgcctacgtccagtccccaagcaacccgcttgagagttccactatcttgtaaattccttttacaaattctaaacacacaaggacaattcttcctttgcgatatagatcctttacccaagagactcacagtctcttaatcccttagagaatgagaag

SEQ ID NO: 274411 - DNA, 353 bp, Glycine max
agcttgccagcagtgagatgactacgccgccgtttcttatgcccacgacagtcaatacaagagctaccctcgaccatgtacctttatatgctctctcaccaaagacatactaatcacattcatgaatggctatagctcctgattatgtgaagcccgaaatgacaccacctcaccatgtacattaatatgaagctgagcatagacatccgaaacctgcaccgctcatgtgtctttatcaatcagaattcagagcctgtagaattttcagctaatcttacctatcttatatgactcgtcttcactcctatggaatgtgaattggattatcaagccctgcgtaagcagataatgtg

SEQ ID NO: 274412 - DNA, 655 bp, Glycine max
  unsure (1)..(655): unsure at all n locations
ttgcggagagccacatttatgaccaacacattacatggaacttgttttgctcgagactcacgaacatctggctggggagacagatatatgtagttgactctactatactgagagccacacagtctatcatgcctactatgagacctgatgactacacgacaatggtaaatgtggcatgtcatcatacatataaactacatgatggggatcataaactgtgttgacatggtgaaacatgggaccattgtgactttattttaatgcagccaacgacaacccagtatggatattggatggagcgaggacaagcaacattagaagacaatactgtaacgggccagtataatgaggatgcaatatgctctgtcaagagatatggaggattgtctataaaatggtgatctgtcccaaaaacctttctttcgatgctttttttatagggcattcttcaccttctgtagattctagatcgaaaatccatttttttgtcagcccactcagccgtaaagctccttttttttctgcccccgcattgaacctttaattaatgaatttccttacaaatgttttatgggccgtcctttaaaacttaacccaataattggtttggggnaacccctttcccaattaacctgggggggttttcaaaaccaag

SEQ ID NO: 274413 - DNA, 571 bp, Glycine max
agcttattatgtaatgaacagaaccaaacaacaacatcgttcctaggacacaagacaaccagctgccaatgggccctgaattaaaaaaaaaaaaactacgtatagtgcaaacattttttacaagaatttgcataaatactacttagtgattcaagtaagctcctaggtacacctctcattgggattccttcacccatgtttgtatgtaatgttcacattcagcacatcgatcctttgcattgtgtatcgactgaggctcaaggaatccatacactaaaccatgacccaaacttgagctccactcatccataaacctattttttaacatttgaaatgaaaattgataatgatgtatatcataaggaatattaattattagtcaatgatatgaaatttacttgcatcatccacaattgtagtatagctatgttcaaacatttggcacttgatattatttcatttatatcagaatatgttaagaagaatgatgcatctacatttggaatcccacaattagtccccatcccacataaactcaacgggcttctcgtaaataatatacatgctctta

SEQ ID NO: 274414 - DNA, 446 bp, Glycine max
  unsure (1)..(446): unsure at all n locations
tattaacaacatacatgccaagaagataagggctcattaaggtattatcaatcaagatcaagactaactgcatcacctaacaacttgccataatgtccaaccacacttcacaaattatagagatggccagtctcataactcatgactcaatagtggatttatggtatagcatacattaaggatgcaacacacatcactagcatcattcaatctcatttaatcatgcaaaggaaaatacaattaatagttcaagcatgctcaacaaaagcattcataagtaatcacacagagcgcacactangaaaaagagagggtttgggtttatgcgggaaaaatagagggttttggcagaggaagaaaggaaaacaaaattgagaggaagaggaagcataaagacgtatcatcagtctgaaaattgacctaacgtgtctctatttatagctagg

SEQ ID NO: 274415 - DNA, 490 bp, Glycine max
agctttgaactcacaacttaaaaatattgaagggaatgttacacaattaaatcacatcaatcactattgtgaagtgaatcaaatatataaagaattaaatctagacgtataatcaaatatggacggtaaaatttaatcttaacaagtcatgtgagttttttaaaaagtgtgtgactttttaagtaattatatcacataaaatcttaacctttcatgtatgattaaacaattcaaatttaatcttttcactttcatataagatattttatctcataacatatatcttatatatagaaagaatagataccccatcaatttatgtcatcatgggctcattggcagctttttttttttttttaagtataatggttatctaccaataaataacaacagaaaaccttgccagctttgaaaaatataaaagccaaagaccttaaagtctttgaaaaacataaaagcggaagacattaaagtcttggaaagcctaaaa

SEQ ID NO: 274416 - DNA, 486 bp, Glycine max
tttctcataataggtatttcactgtcattaaatgattttttttccaactaaagtgctcactgtcattaaattatgttaattaattgtgttggataaacaaggagctgtgggaccgaggaaacctgcagataggccaaatcatgatgtcgatgatctcctatatctgatgacattgaccgtctcacagtttttttaaagtcaatgcaggttatgtgggatgctatcgtgtttggggtgcataatgacaacttccccttgtacataaagtgtgaagatctgtctgaaatagcacacagtggtcaatgtctcaacatctctattatacaattgtggattctgtaagtcactttagattattgtttattagctaagttattgttttaaattcatacataatttatgttattttaacaacaataggcatatgaatgagacaagtatgcgggcggggaatgccaatgtctatggattcctcgagccatagtc

SEQ ID NO: 274417 - DNA, 530 bp, Glycine max
agcttttcaattcattctatgtacccgtggtggttcacattttgtttcatgtatttttattctcgttttcatttgctttttatacccttttttgacgtgcttaaggcatttatttaagtcatttctcgcttaatctaaaaataaaataaatttccaccgatcgtttgaattgtattatccgctaattttggttaaaatgaattccgaccgttcggtcgtgccgtaaccacgttggaaatcaaaaaaagaggtaaaataataatataataatcaaaaaataccttttagtaaaataaaagcgaaagatcaatcggacgttttctctttgggatttcacattcttaattgaattgactaataactaaagtgaaaccaaggctaaaatcaactcgcctagtcaagctcgtccacaaaaataggattttgaaagtttatcatttctgtttcttaccaaagtaaatgaatcatttttaaggtcccacgccttaaaatgatcacctttcaagtaaaaaaaaggataacccctttga

SEQ ID NO: 274418 - DNA, 440 bp, Glycine max
taatacaaaagtgggtcactctcaaaagagactgttcgattaagctgagaatctagaaggggggttgaatagattctttgaaaatctttacctattcgttcttaacaccgattaaaaacatccccttaaatcaatcaaagtttcttcaaaaattctttagaaataagaaactattatttgggcccttaagatcaattccacaaccaatatgattacaaaactcagagtaatagagaatatgagaaatacataagactttatactggttcagtccaatctggatctacatctagttgttctaaatccttttagaacttccactatacagaaaacataagtacaaacatttttcacacacaattcttgtatatgaaacagatctttctgttgatcctacgagaaaagatttagcattgaaccctatcaattctctaacatca

SEQ ID NO: 274419 - DNA, 632 bp, Glycine max
agcttgtagcaacaaaatgcaaaacatttctaaatcaagctggtttaaaaggtgaattttgcagccatgggaaggaagattaaagataagcattctgaatcatattggctcaatcatcaaacagagtgcaagaggactctttttagtattattaagtatcatcccctattgtgtcatttctttgaaagacttgcatacaacaggggtggtgatgaaagaaatgttacaggttagtgcattttcctcatctctgtacaagttttcctctttgccattttactaatcattaattgatgtagtagtacctagaatgaattttgtgctctaggttaattgttaagagaagaattttttatatctaactaatttatatatggaaattgtttgagcaaaatgaaattttctgaagctttgatcaaaacattagcaaataacaaaggaattcttacattatctcaaattctcaatcagatttagttaaaatcaatagcttttctagaaactatatatgaataacattttgcttaagtcctttttctacatctcaagtccattctataataattggtaggatatattaaatctggatctttttattctagaacgaccctttttctatttttgaggatata

SEQ ID NO: 274420 - DNA, 439 bp, Glycine max
tgactaaattaaacttttcatgatcaacttgctgcatatttgggtggagagtgtgggagccaacatcgcctttctctttctagactctattgcaagtttgcaactccaagattctataacctctaaagcgaggataatatcgaagtttgacatcaagctcaataggtacaatcggtggaggtagagttcttgaaggaagaagccgtgcgaatcttgcttcaccaaacaatgattaagtcttttaaagagattggtcaatctgatgggtcctttagtcatgtgttgcattttcctctttttccataagcacttgtatgtcctccatgctgatagatgttggagccccatatatacttttgtcgcaacctacccttcagtgggagggcgactcgaaagcttcacggtgcgtctttcaagagaggaaaacgcgcggagtcgc

SEQ ID NO: 274421 - DNA, 579 bp, Glycine max
agcttaaagtatgcccgagtcattcatccctatgagatgttgttgaagtattggcgatcagaattgccattccttggattatagggttgaaccaagctcatgcttttacaaaaaggttcatcaagtcaagttgaaatatggaagtaaccgtcttgcaaaattggggcaaaagatgaatcgagtcacatcactgcttcatctactgccaaacatatttaggattattgatgtccttgttacttccagtttcaccttgacaaagatgtcatggaccatgttgaaaatctaaattgattcaaccccatatcctgcgtaaaaattcgcaatacttcaactgtacgtcattcgcatacatccattcttttcattggttgcattgctcattgcattctttccttgaaaaataaaataaaataaaataaaatgaacttaatcattgttatcaaaaagaaaaggacacgctttacggcgcccttaccgaactcgtgctagagctagagtaatgggtgaagcagaggaggtgcaagagaagatgaacgccgacatgggggccatgaaaagagcaaatggcacaataat

SEQ ID NO: 274422 - DNA, 484 bp, Glycine max
  unsure (1)..(484): unsure at all n locations
tgtcaagccccctagcttggacaagtgttgtccgagctactttctgttaagttgtccagggaggacacacttcttgttttgcaggaaaagtcaaacatgtcaagcaagggaagtccttgtgattgacaattctatcttttttttaccattggagaacgcattgaagacaagcatttcatttgtcttttactacgggcaagtgcagtgcacgcatgttactctagcatatgtgtcacttgaggagtggacacgtattggagatgtggtgcatgggatagtagggctacctcgtggtgcgaactttcattgcatcatttcagctaccgctaattactgaagagtcatgcctccacttaaatgaagtatccatttgattttttattaccaccactatgaaattatgctctttctactgaaaattcgtgcttctactcacatttgcgagnccacattactctattttcttatgntatatttataacaa

SEQ ID NO: 274423 - DNA, 414 bp, Glycine max
agctttggtgtaaaggtaactacctatggcagttctattttattttaacatttccgtttggcgcggttagcgtgccaatatgacatttgagtttaaagaccatgcgcttagcctaacctcgcgctacgcccaacttgaaatttcaaattccagagaggatctggggcttatcgccgaaggctgcgcttagcgctttttgcaacacaaaatttttctgccaaatgcacttagcctgagatgtaaggcttagcgcacattccagcttaaacttataaagactagttcaagcttagcacaatcggcgccgctaagcgcatttccaagcattttaaaagcagtaagggattggcgcttaacgcatgctgccgctaagcccaactcgtgaaagttcactttccagaatggatatggggc

SEQ ID NO: 274424 - DNA, 436 bp, Glycine max
tctttactggaaaattccttcctggattgacacttatgctgggactggagttgctggtggggcgatattatgcgggatccgcgttttgagtgggttccctttactagacgggcgccagattggaagggtttctgacgcagaccgaaaaacttggttggtgtggagcatattggtaagtgttgtgaggggtttgggtttatgccaagtaagagctgaagtcatagtgtgggtatctccttccttcttctttgtcccacttgctcgaaatctcctattgctcgtgctggcaggatcgacatagtcaaacttttccctcttcaatccaacctcgatcctctcactcgcaaataccaaatctgcgaagctagagggaatgtaacccaccaaattttcatagtaaaacactggtagcgtgtccactatcataattatcatt

SEQ ID NO: 274425 - DNA, 594 bp, Glycine max
agcttccattgttgagatattgtttttctttttacgctttaattcactccccacaagtaagtgcattttcccttggttatttggctctccattgatgtgttttggtgctttagttgctcattttttgcaaaattcgtgaagcgattcgcatctgaatccatgcttgttttgttgagttgagggtttgtgtgagaaggcattaagcctatgttgtattctgaagcaatggggcatgccacattgtccccattctcttgccatttgtgtccaaacgtgcgcccccgaagtgctcggtgaaatgccccaatgatatatgaatatgattttgcgaaattgggatggtgggactgttttatatatgtacagacagcataggagatctaaaatatgtgccccgaatgcaatttcaagcttacgaaccccaaactttttagcttcaatgcaagaagacatacttatggctaggaatccaaattttgggtttagaattagaaaagcatgaaaattatgacttgctttgtgaaagttttgctcgaatttgggctgccccatgtttgatactttgcacctaagtaatatgaacaaaaccttgca

SEQ ID NO: 274426 - DNA, 447 bp, Glycine max
tagactcagctcgtcttaccatccacaaacagacggtcagactgaggtggcaaatcggatagtagaacaatacttgagggccttcgtccatcgcaagccagcgttgtggggacgatttctgttgtgggcagaatggtcgtataatacttcgtgccattcgagtacgggattaactccgtttgaaatcaccttcgccgaaaaccaccagctatccctgaatacataggtggaacatcacaggtgtcataccctaatttcgtccggggaccatccgtttgttgggatgcgaccctcgtttgaccacttcgaggtacttggcacccatcgttaggcaatctgtgaagtttcgtgacatgctggaagtcaaaaggaagcattgttgcacaatccgtgaagttccatgacatgctggaaatcaaaaagaagcatttgtgcacaatccgtgaa

SEQ ID NO: 274427 - DNA, 452 bp, Glycine max
agcttcttttggaccttgaacaggcaattaactcctctttcaaagaccatgctatgtgctcccgactggaacctttcttactttcgcaccttgagttcactattgctaccccatacagctccgcgaaagacgctccggccatactcttccttgcgagccctcttgggctcttgttcaagggcacttgccgtaatcgcgttctgttgccgtaacaccggacactgcttccgaacgtgtgtaacggccagacttgaacttctccttggccagttttgcctttcctaactcgcttttgagagcttggacttcttcgtgctcttccggtgcttcgaaactatatgtgctgacgacttttaacttggcgagccaatgtaaacctcggatatgaacgatcaacccttgcgggttcccaccaacgatgccattacgaaaggccataagctcttgatctt

SEQ ID NO: 274428 - DNA, 464 bp, Glycine max
tgaccaatcccgacccaacccgggcatagtcggtcagtgagaacatgtgacgtacctaagcaggcgagctcctggcagtcaacagataaaaggaaaacaagaccacagagcaaggaggcttgtggtggctggccagctgtgaattttgtgtaatatgtggattgtggcctctggtaatcgattaccaagggtgggtaatcgattacaaggcttaaaattgaagacagggggctaagatggtctctggtaatcgattaccaaggggtgtaatcgattaccaggcttgaaaacgaggtcaggaagctagggaagcctctggtaatcgattaccaaggggtgtaatcgattaccatgcttataaaaggaaatgggagatggtggaagcctctggtgattcattaccagcttgtgtaatcgattacacagaggaatggggtcactattattttaatattccaaaattt

SEQ ID NO: 274429 - DNA, 689 bp, Glycine max
tcataatttaaaactaattatgtcaaacacaaaccaatttaattcctattaactttggaggccctttttatggttcacccactaaaactggccctaaaaacaaaaacattgctttctgcaccccattttatcttcttgacccataatgtttaaaaattccatgttaatcttcttatattctggaacaggttttttgaaaagggctaggcaaataacacatctttatacggtctggaataccggatcccttatggatacctattccagaatatgaaaatctattttggaatacaaattcacaatgggtgacaagcctaaaaccaaattttaactaaacctcaatcttatgaccacacaatcctttatgttatttaaacatgaaggccgttccacatgcatctttcaaaacttgaacactcctaatgtaacctgaaattccaaatgaacctttttctcaaacattttgtgcggtgaatttgaatgttgggtgcaggcggcccttgcggttaatgaggtctaccgcttcgattttatagaaaagtaaggccgctggcaaagcattttcgctgttgggctttcggggcccgaaaaaaaacaaaggcataaaggactttcttaattacggcccacacataaaacccccagccaatataaactaaaactttctaatacctcactttggccccccg

SEQ ID NO: 274430 - DNA, 434 bp, Glycine max
tctgcttataaaggctatgggatggtgatcttgcatgagaacagctcttacccccactcctaaggcatcaacctccactataaaagtctttgtaaaatcaggtaaggccaatacaggtgtctgacttaactgatccttaagacactaaattgcaagcttggcttcctctgaccaagaaaaactatcttttttcaacatgtcatttagtggtttggctatggtgctatatctccgcacaaatcttctataatatccttccaaacccaaaaatcctctcaactatttgggggtctaaggaagtggccaattcctcatcgcttccaccttatcagggtcagtagagactccttctccagtgataaaatgtcctaagtattctactcgaataaccccaaagtagcacttagatttcttggccaacaagacatttgctc

SEQ ID NO: 274431 - DNA, 761 bp, Glycine max
ctcatctagctcacttagttgcaacttcctttcctgtcctgcctgatcaatagagaagttgcaagtctttacagcccagtaggctttgtgctctatctctacaggaagataacatgccttgccaaagacatctcgataaggagacattcatatgggtgctttgtaggcagtcctatgcgcccaaatctaacctggtgctccaatcctttctgttaggctgcacaatcttctccaagatcctttttatctccctgtttgaaatctcagcctgcccattagtttgggggtagtatggtgtggaaattttgtgcacggccccatactttttaagcaaggcatacatggatctgttacaaaaatcgatgccttgatcactaacgatggctctagggactctaaacctgcaaaacaaattagatctaacaaaatccacaacaactttagcatcattagttcttgtgggtttggcttccacccattttgaaacataatcaacagccaggagaatataaacaaaaccaaaagagacaaggaaagggccccataaaatctataccccaaaacataaacacctcacagaataacatgggttgttgaggcatttgttgtctccatgaaagtgaacccgcctgctctctgacaaggttcacacgtgctacagaatcttccagcatccttgaggaggtgggccaataaaacccacatcaagaaccttgcgagctatcctttgtttgccaaaagggcccctggcgcgcaaaatc

SEQ ID NO: 274432 - DNA, 443 bp, Glycine max
aaagaagcccgaggaagcttctagagggagcccctttatgaagcttctatagaaagctacatgaagctgcctcagttaaaacgctggccagccttcattaaccggtagatcttctcgaaatttggtctgcaactttacaaaacaatttttcatgatctgaccgttgggatcgttgaaaagatgtctggagtgtgctagaagcctcttaatgaagcttctggaggaagcctcttaatgaagcttctagagaaaactacatgaagctggctcggtagaaatgctgcccagccttagttaagcgttggatcttttggaaaattgggtttcaacttcacaagacacgtgtccatgatctgacccttgggtgggtaatggagaatgtggaacttgcttcttgtacttaagaaaatgccatttcttcttcttttttttttcaataaaat

SEQ ID NO: 274433 - DNA, 501 bp, Glycine max
agcttgcccagagaaggagtccacggaggaaatgcttaccacctcaaaagactggaaagtggtttctaatgactcctctgcggcttccacataaggaataaaggatgggcagctcaccaagatgtcttccttgcctgatacgatgaccagatgcccttccactacgaatttcaacttttggaggagtgttgagggaacaactcctactgagtggatccacgggcgccccaacagacagctgtagggagggttaatatccattatttggaaagtaacttgacaggtgtgagggcctatctgtactgggagatcgatctctcccctaacctctcggcgggtgccgtcgaaggcacgaaccaccattgaactcggctttaagtgggaggcattgaatggtaatttctccaaagtgctcttacgcatcacctttaaactggaaccattatcgatgagcactttggctacgatatggtccatacacttgactgatacgtgcaaagc

SEQ ID NO: 274434 - DNA, 453 bp, Glycine max
tgccaacccatggaagctcctaatatctcccacactttttggggtgggccattcttggatggccttgattttctcagggtcattttggaccccatttctaccaactacaaaccctaagaaaactatattatctacacaaaaagtacacttctctatatttgcatagagggtgtttttcctaaagactgaaagaacttgcctgagatgtcctaagtgatcatctaggctcctactgtacactaaaatatcatcaaaataaacaactacaaatctacctatgaaatccctcaagacatgatgcataagcctcataaaggtgcttggtgcattagtgagcccaaaaggcatcactagccattcatacaaacaaaatttggtcttgaaagcgggtttccactcatcaccctttgtcatactgatttggtgatacccacttttaagatcaatttttga

SEQ ID NO: 274435 - DNA, 538 bp, Glycine max
  unsure (1)..(538): unsure at all n locations
agctttgaaggttaattgcataccctaaatttatgtgcatgctcaaatttatatcacatgcaagacttcacttttgtacatcaaaagtcagtttaagcacaaatcttatgttcattatatcaataaatgcatgtaattattaccttttcctaaaaaacttttctgtcctagacagcctctcctccaaagtataccaaataccagcacaagaaaaactactacatcagccacaattgcagccacagaacctgcagacatgctacttccattttctgagggaaggatgaagtctgcttgattgttatagaagacattgttatacgagcttatattgcatgttttaattgttcccgggaatataaaaaatattcccaactaattttataattaaccaaacatatttttttattaaatacttaagaataatattctcatgttttattttcgggaataatacttncaagacaaaaaaagttatgcatgaaacaaacactccattagtagttaaagataagtataactcacagggatttacaga

SEQ ID NO: 274436 - DNA, 379 bp, Glycine max
ttgagccaaatcctgactcaccataaaccttgacccagggtgagaatgtcaatccttaccctcggaagcgaaaagaatagaagggaaatttccaatcaaagaaaaggaaagaaggaagatttccaatcaaagagaaagcaaaaaaagaaaagaaggaaaattccccaatcaaagagtgggagaaagcaaaaagaaaagaaagaaaattcccaatcaaagaatgggagaaagtaaaaaggaagaagaagaaggaaagaaagctcctgatcagggatcgaaggaaaacagaagaaatgtgcagaaaggtctttggaccggacaatatctgaacaatacagaattgtcaccaaatgaacaaaaagaaggaaaggaaaccacg

SEQ ID NO: 274437 - DNA, 419 bp, Glycine max
agctttaagaaaaatcaaacgacaataagtttttactcagatgtcggataaaggcccgtaaaatatcgagacgctcaaaattgaaaacagaagcactcaacaaattcaaacgacaataacttttgactcggatgtccgattgtgtcccgtaatatatcgagacgctcgaaattgaaaactgaagctctgagaaaaatcaaacgacaataactttttactcggatgtccgattgagatccgtaatatatcgagacgctcataattgaaaacagaagctcttagcaaattcaaacgacaataactttttactcggatgtccgattgagtcccgcaatatatcgagacgctcgtaattgaaaacagaagctctgagcaaaatcaaacgacaatcacttttgactccgatgtccgattgagtc

SEQ ID NO: 274438 - DNA, 487 bp, Glycine max
ctaagcttctttggaccttgaacaagcaatcaactcccttttcagaaccatgctatgtgctcgcgactggtcccttttctcccttcgcaacttgagttcactattgctaccccatagagctccgcgaaatttgttccggccatactctttcttgcgagcccttttggtctctcgttcaagggctcttgcggtaattgcattctctttccgtaacccggcacactccttccgaacgtgtgtagcagccaacttgaacttctccttggcgagttttgcctttcctaactcgcttttgagagcttggacttcctcgtcctcttccggtgcttcaaaattctcttcgctgacgacttttaacttggcgagccaatctaaacctcgtatgcgaactttcagccattcgtggtacccaccaatgatgccattacgaatgcctctaagctcttgatctttccttaacgggttttccggggctacatgaacaaaa

SEQ ID NO: 274439 - DNA, 469 bp, Glycine max
cacctgcagcatgcaagcttgagcttggttcaaccccgtaatccaaggaatggattttttgattgccaatacttcaacaacatctgatagggatgaatgactcgggcatactttaagcttatgcacggaaaatgtaattatgaaattgagatgcccgaaaaaacaccatttcctagttaaccatgcattaagtaccatgttcaattattttgttttgttgctgtgtgttttttttttagaaatgggtttatgatcccaacatggttggctcatggtgcctaacacatgcaactaagaatgtagtgtgaagcttcacgcttccccttttttgcttttgttttgcagaggaaaaccccaggatgagcaaacatgaaaacaaatggtatgcaattttgcagatcaaaaaagttgttgaacgcatatgcatgatgatggcatgaatcatggcaaatgtgaggctggattatga

SEQ ID NO: 274440 - DNA, 459 bp, Glycine max
agcttgaagaactatccggaaaggccataccccaaacatggaactccatttatttgaagttttactgcaattaaatcatgtaaaaggtggtatactatttttcctacctcgaccttttatccctataaaaatgtaaaaaggtttttgtcgagaaggttttaacgaggcacacctaaacttatactatcaatgaatacatttttccaacaattatacttgtcatttttttttatagtaccctctcgaataccctttttggcagaggttgaactctacgataacaacatgtgttccctctcgaataacttatttgatcgaggatgaacttatttcgttaagcaatagttccctcttgaataatccctttggccgaggatgaaattatcacaatatatcgtaaagttccatcccgaatactctcttttgtcgaggtcaacaccatacgataaaaatatatgc

SEQ ID NO: 274441 - DNA, 415 bp, Glycine max
agcttgagtctccccgtatacgaagatctgtaatgctatcctcacaaaccaaattaaggtaaaagacaaaattttgaagaggatgaaacctcagagagatcctttttccaatcaattgatcagaattaaatcaataatacggggttatttacctccataaaccatgaatacatgcatccttgcagatggccctagagaatttctagtcattttttattaaaaaaattaaaaagcagaaaagcatcaaccctaaagaagcaaaactagaaggctttggttggaagagatcattttcaaaaagaggtgctcacttttctgattgccctataattcatgcgtatagaacaagacgccaagaaagggacaacgaagtggaaggtgacgagattaggcccaaacccgatataacggttta

SEQ ID NO: 274442 - DNA, 675 bp, Glycine max
  unsure (1)..(675): unsure at all n locations
atcaaacttggagaaagagctcttggggtctatacatganaaccaatcaagcataatggtactttcttcactaaagcggggatccatctccacacatattttatcaatagccacataaaaaatctctgcacggcaatgatgaaaattagtgatagatctcccttctgctcttgaacgaccccgaactggtatttcgtcatccatatttggttccagaatacttttagcaacacaaaatccttggacatcggcaaaaaaattattccagccactctttcattgtgcccaaccgagctttgacaacatcaactaattccatggcattcacaatataaagaccttctctttgccatatatgggaaagctcgttcgcaatcccaacaactttaaccattaccccaaaataaaagcaaatttaagctctacaattatttttgaaaaaattggcacatgccaaacctccatttcaattttttcatttaaaaccatacccttaggcaaccctttttaaccccgggggggaacccacatttttgtattccaaaccaaacgccacttgtttgtttatcgaaagggtggaaaccccccccattttttatagtttttcccccggggggtctctcagtgggagaaacaaaataggaattgggcgtgtaaaagccccccccctttccc

SEQ ID NO: 274443 - DNA, 658 bp, Glycine max
agctttgagccaatatcctgactcaccataaaccttgacccagggtgagaatgtcaatccttaccctcggaagcggaaagaatagaagggaaatttccaatcaaagaaaaggaaagaaagaagatttccaatcaaagagaaagcaaacaaagaaaagaaggaaaattccccaatcaaagagtgggagaaagccaaaagaaaagaaagaaaattcccaatcaaagaatgggagaaagtaaaaaaggaagaagaagaaggaaagaaagctcctgatcagggatcgaaggaaaacagaagaaatgtgcagaaaggtctttggaccggacaatatctgaacaatacagaattgtcaccaaatgaacaaaaagaaggaaaggaaaccacgacctaaaatggtcttctccctttgattaccaaccaaaatcccgtgcgctagcgactttttcgccccgcactaaacaaaaacagaaaaagaaaacgccaacaaaaaaatccaaagccaaaaacacacaaaagccgaaaaacccatcaagaaaacccatttcccaaggcaagtcctattgatccatgatcacgcatgtaatttttgatttgataagaaataatttgcacagtccagtcatgacatatctatggtttggaattaggatgaaacact

SEQ ID NO: 274444 - DNA, 198 bp, Glycine max
ctctaagcgcaccggttcatctctctaagtgcaccgcttgagttcatccgcttaagcgagaaggcgcgctaagcccaaaaatcactaacatgcgctaagcggtccatacgttcgctaagcgcacgagcacgaacaaggccacctattcaagcctgaaaacagaatatgtgaggggagattggactggtattcatagct

SEQ ID NO: 274445 - DNA, 618 bp, Glycine max
agcttgctgtctcatgaggaatgccttgcgcttatatagcatgaaaaagcccttcgataatatgtatgtatgtaaatatgtagcatgaaatgccttgcaaaatgttgaataaaatgccttgcaaaatatgaatatatatagcaggaaaatgccttccataatatgaatatatatagcatgaagtgccttacaaaatgcttggatgggtagcgtaaaagtgtttttcaaaatatgtgtatttgtgagtaggtagcaaaagaagccttccaaaaaatgtgtatatatataggatgtagcatgaaaaggtttgtcaaaaaatatgcacatggatatgtgtcgtaaaatgcttctcacaaaatttttatgtgtgcaaatgcgtatgtgtcataaaatagcacggccccaatatgattattttataaagtgcatgtttacactcgcgccatatgaagtgttgtttggctcttgtctgtaatgattggtatattttttgtaaactaactttccaaatgttgtcctcgcaggaaatgccaccgaggaagctctccgcaaagagatctatgagggacaccgcgggcagaaagaactacccccgcttctgagtttgacagccatcgt

SEQ ID NO: 274446 - DNA, 221 bp, Glycine max
gcttcttagtttcagatgatgcagatgggtttgtagctacctcatgccctcctctaatgactatggcatcatttctggcgctaaactgctgggagttggaggccatcttcttaattaaatttctggcttcagcaggagtcatgtctccaagggctccaccactggcagcatctatcatacttctctgcataatactgaggccctcataaaaatatttggag

SEQ ID NO: 274447 - DNA, 667 bp, Glycine max
agcttccccaacatcaaagtaatacaacattcaaacagcacaaactatcacagccaagaaaacagagcaaaggcagaaaactctgccaaaacaccaaccaaaatcacagcttttctcacttaaagaccccagtaacaattccttcgttccaattcgttaaccgttggatcgactccaaatttttactggaagtctctagtacataagcctacattttgaccgttgggatctactagcaaacatccagaactcattctgcactgctctttccacaaccagcaaatgcctagtatttttctgcacttgtgcaaaatcctgctgcacaatttcacagcaaaaatctgcacaaaatgcagatttcgaaaaccacacttcccctcatccaatcttgcccaaatcaaatcctacaagtcccaaatcatgtatcaatcatgtctaaaccaaattcaagctttaaagcacaacaacacagaatctaggtgtccaacaccccttcattcaatggcttttctaggtttgaaaggtgaaaattaaaatgaggggaatttgaggcaaactcttacctcacacccagtccataacgccaatctaaacttggcccaacctggaaataaccctaaaattccacccaaatcaaatttgaactttcaacacccaatttggccct

SEQ ID NO: 274448 - DNA, 389 bp, Glycine max
gaatggagaattgcactaagcaatcactacgcatagctctcaactctaaggtggaggacacatgaacgaaaacacaattcatggggctccgaaaaaggggttgagaatggagaattacactaagcaatcactacgcatagctccaaactcgaaggtggaggacacatgaacgataacgctattcatggggctcccaaaagattgagaatggagaattgcactacgcaatcactacgcatatctccaaacgcgaaggtggaggacacatgaatgaaaacgcaattcatggggctccgaaaagattgagaatggagaattgcactaaacaatcactacgcatagcttcaaactcgaaggtggaggacacatgaatgaaaatgcaattcatg

SEQ ID NO: 274449 - DNA, 884 bp, Glycine max
  unsure (1)..(884): unsure at all n locations
gaccccacagcccgttganntatgttgccccttgnacaatccccnnnnctnngaaaanagaaccgcaggggaccatacaccacccgaacggggagagagagagattttcactnatcattttcacggcgcccacacacagcccccgggggggaattctcgcagaacctaaccaacacaactaaagccagatctacaagaacaacccaacctanacgacaaccgccaacccttgaaacaactacgaacgcgaaccatgcgaggcacccgcaactagaaaacaaaacacatacatccaactccaccgcaccccccaatatcccaaacacaaacgcccaccccacgccacagaaatcacaaacaccaactaaaccaccagcaacccacacactaaacatgcatatccgatacccacacaccacgtaactacaatcgaatacgccacagcaccgccaacacccaaaaacaaacaagacacaaaagagctacaccaaccacccacaacaaatgccgtatcccactatccccgcacccagcacgcacagcaaaccatcaaacagaacaagccctcatcaaagaccaaaacaacacgcggtaaatgaacgagccgcacagcgcctcaccagcatccaacaaagcaagcaacccccaacacacgcaagccacacactaacgcaacttcccaaccaccccacaccgagtacgaacgcacacacgtccccacatacaaccatcacccttaccatacacatcacctctagcccaccgatacaaaaaaaccaaaagacgtctacaaccctacacaacacccacccaaccatcaccctatccatacacacccaagcacacgcacacaccgaacatcccatcacccaactaccaaaaac

SEQ ID NO: 274450 - DNA, 484 bp, Glycine max
tgcaagcttgtagagggcgcgattctttttatatcccctgagcctaaaagttgttggctgtatgggggagccctccactcttcaaaggccatgaacaacagaataacaggaaaaaaagaccatagtctacaatctacgtaaccattacgggtgggtgtgtaagcaaaccatactctcgcgtgctaagcgcataactattccacttgtttcacaatagggtgcaagcactaccaccaaacctgccaggtaatgatggttgtacacttttgtatgggggaaaattgagagtgatcaacagatccagatacaatgtggatcaatcctcagccgcccactcaaaaagcgtagcctcagaaccagcgaggagtagcggagcgaagcctgtgagctgcccgcgcccaatgagtgccccacatgtccagtagtgcacactaactaatgttggagcacgtggccttaggataataaagaaagggggggttga

SEQ ID NO: 274451 - DNA, 372 bp, Glycine max
  unsure (1)..(372): unsure at all n locations
tgaaaggaaaaaagtagtgaaggagaagctgaaggtggtagtcactanaattaggaaagaatgtgatatgcagaaggatgtcaacatgtccgcagcgaaagcgctagagcaagaaacaaagaaagccagaaaggaagagtggagtagaaacaagtttcgaggggctttgttaggcagcagtaatgagctcaaacttagaaaggccaagagagacaaatcaaggatggagaacgtgatgttagaggatagttaaggaattgtcagaggtccaagggaagtttgaaagagtagttgagcaagacgaaagtgaatatgttgataatcattgatcagtataaagagaaggtgaacctagctactagtcatgggcag

SEQ ID NO: 274452 - DNA, 690 bp, Glycine max
aactcttttttctgaaggatgatagagtccccgtatatagtcagacgctccaaatggaatccccacactttgagcgaattttcaaccacaaagactttttactcagatgtcagattgaatcccgcaatatatccgaaacgtccaaatggaatacggaagtctgggcaattttaaacaacattacttttttcttccatttccaaaaaatctccgaaataaattggacacgtcgctctaaaaagccgaaatcttcaccaaattcaacgacatatgaatctttactccgggtgccggaatccacctcgcaatttgaccaaaccgctgatttgaaaaccgaggcgcgctcgcctattcctggcagcatgctctctcattggctgcctgttagggtccgcagaatcttaaagaaccgcatatcgatgtacgacctccaaaacaagtggcgaaagaacacttttttcggagtctgcaggcgacaggaggcactaaggatgacgaccaaggcagttctcgcttctacgagataggaaggacgttactcggtaggaggctctaccccaagaactacgcaataaggttcgttccaccaagcaaggagggaaaacgtctctatccactacgtaagtatgatcgattaccggcaagcaaggatgccagatggtctagtagtccctaactgatgcaccgtcg

SEQ ID NO: 274453 - DNA, 839 bp, Glycine max
  unsure (1)..(839): unsure at all n locations
cggacccgcgnngnctgaantcgcctgagtagacattgaatatacgcgacactattctaatacctcaaccctctgcatatcatttcgagcgggtcgagatatttccggacttttttggacatccgagatcaatgtttttgtggattgaatttgctccgggcttcccggtgtctattcgagcgtatcgatatattacgggactcaattggacctcagagttaaaggttattgtcgtatgaactttgccacagcttctggattctcttttcagcgtctctatatattacggggactaatcatacatcccactaaaaagttatcgtcggttcgatttgctccaggcttcagcattccatttcgagcgtgtctatatgtttcgggacataatcagacatcctagtctaaagatattgttgtttgagtaggctgaaaactcctgcatgataattcagtcatctcgattcctacgggagttgattggacattccgataaaaaaatactgccgttgaatcttgattgatcgtaggaatcgacgaaccaccacaaatgcgcgcgactnacatgcctcgggtgtatcttattcattactatcgatgttcaaatcaaggtggggacactagcgaacaccattcttggggtccgcaacgagtggaaggtggagtctactcctaatacatatcttaaattcaaattcgaaggggggggtacccggaacgaaaaacctnattgggggtcctaaataggatggtctacgaacgcgtattgggaatctcctactccactcgcaaactacacagggaggattatatgttgaacagcggaccaccgcggccccccc

SEQ ID NO: 274454 - DNA, 550 bp, Glycine max
agcttgcaaaatataataaggaatgacagctttatttgaatgtaccggggcctttcaccaacaatagtggcattacttccgaattgggccgtgagtttcttttccttttgccactctaactacattgatcaatgtctattgcaactaaagatgcaaggctctgtgaagcagggtttggatttacttttgttttgccttgtttcagcattcatttcccttccatcttctcatgtcatatgcacaaactatacataaacatagacgaaacataattgataagcccaaaatttggagttacacgggtctcatgaatagctgatgattatcttccaatcaatttttatttgtcttataatcctctctaagatacagtctttacaagctacctgattgttcattaccactagtttggaaaattcttgggctccttagtccttattccttacagggtgctatcactttctttggttgctttaatttataaaagcaatctactgttatgttcagccctcctcttctgtgtagtctaagcccaatgataaaacctttt

SEQ ID NO: 274455 - DNA, 704 bp, Glycine max
  unsure (1)..(704): unsure at all n locations
acgccnatacgatatcatgcaatgcgnannccttagttatgaacgaggcgcatctatcaanagaaagaggggaccggggaagttttttttttttttctaccaaaagaaggggggcgggttatttattgaagccccccgctcgaaaagaaaaagcaatataatgattccataatacaaaacaggattttcgtgaaaagtatattattgggggatgtgaaagaacaataaaaggtatgtactgattaagtactaacaatctattattaatacaaaaacaatctattacaagtggtggtgttgtaatgaaaacgctaaattaaaaatatattagccaactataacgaaatgtattaagagaaaaacctaaaaagagggaccagttctagtatgggcgatgctaaaaacagcagggaagtgtaaccttagggagaagatccaaagggttatgagtgagtattaagaaatagcgttaggtaggtgaaagaacgcttggatgaattacctttcgaatgagaaaggtcataaagcttctcaaagagtgttattacattgatgaggatgacaagcagtaaccacaatactatctttatatacgttgaagaaggattaaaaggtgcgttctataataatctagtgaatataataatagtgatgttgtatttcccttttttaatttatggtaggaacaaatcgggtggggtggn

SEQ ID NO: 274456 - DNA, 662 bp, Glycine max
  unsure (1)..(662): unsure at all n locations
agcttttacatgcatgttcacaccatatttactatacttcgatcaactgatgcaatctatttgattgaaaagataatttatattactcttctaatgtagtcgacaacaaaaaaaaaaatataacaaaaaatattgttgttcttttaaagggaagtcaaatggcagatgcacaaaaaataataaatttaaatgtcttttatttaataattatttattttatagaaaaattatttcaaatcaaatatataatgtatggaattttaatacttagttggccttcagccaacagtgcctaattctaagagtcatttcaagcacaggttacaggtctttgctttcaaagtaacatggggatcaatgctctcaacaaaaacattattgcaaaataataacacatgaaaaaggatatagtaagcatggaaattaactaaacttggttattcattaatcaaaacaaaattgacttcaagaaaataagctctcccacaaagccagacgtaactacctttaacatctactcaaccaaccaacccatccgtaaagccacctaaactatttaaaaattaacatattaaagaattgaaactttcagttttcatagtgaggtctgaacacccaaaatatatnaagtgatatgaactaccaaaaagaatcgacttttt

SEQ ID NO: 274457 - DNA, 454 bp, Glycine max
tatcttacctatctatctcccagatgtctttgcaaagattcaatagattaaaaacatgaagttctaattcaagatgttttctttgttgcatgggcataatgcaatcactctatgtctagcaatgattttattaagatgtccctacctttgagttctactaaaaattatcctctctcaagcgactaatccctaaaactgatgcatataaaaccttcaatgtatttctaccaaggattaccctctttcaagcgccaaacccctaaagatgatgcaaggatgaagcatataatacatttgttggcattttaggcctgccaagccctaactaaaggggtttagcctttcattgtcatgagagacttttacactttatgggggtgatatggatggaaaaagatggatggatagaggaagaaaagaggataatggacatatatagaaagaggggttcccc

SEQ ID NO: 274458 - DNA, 798 bp, Glycine max
  unsure (1)..(798): unsure at all n locations
cggagcagtnttctgatatacatgatttcccttgaatttcgaatatnatccnnnagccctccccaaganttanntnagggggggggagaggggtcttttgnttttttaaagaaggaagatggggcggttgttatatgtttatcccctcctttcccctcaatacacatatatttaatgtttcctttaactaaacatagataatatctacttacaaaatgacaatttgttgttgtaagtattttctcatgtattttctatccactcaaactataaaataaaagaaaatagattcactgttggggggcgtggagtattcgtaataatacattatatattattaatactattattatgatgtatgattggtagttgaattagatctgataataaaaattgttatatactatcgtatgtactagtattaaagtattcattatttattgactcactcgtcatccatcgatgcatgatcgcctaatgcataataatatgaataatattctccatgtgacagatcgatacgaataatggaatatgatgttttgtttaanggngtgggaagnttgggggccggatttgatatggattgtataaataaagtgaatattgcatacgaatcgcaccgattattgatgtgaatttaacgagaatatgtaagaatttcgggtgtgaatgttaatagaataaataatgctcgattacatgttcatacagtagctattggtgtatagtatataatagagattcgaactttactatttgttcgtctcagaaacagcacccacaaactcctcccct

SEQ ID NO: 274459 - DNA, 745 bp, Glycine max
  unsure (1)..(745): unsure at all n locations
agagcgcgaacatgacttgactntcgnannncnnnnnnanannaacaaggcccaggcaanaaaatcnacagaaaaaaagcatttatcttttcccaaccaacacaaagagggcgaggagaaaaaaagaagcccccacccacccggaccaacaacaaaccgaaagcacaaacaaaaacacaaaaacaacgacaacccacccaagaacaaaaaccaaagaagacacaacaacaaacacagaacaagacgaaacaccaaacaaggaccaacaagcaagaacaaacacaaccaaccacaacgcacagaacagcaaaagcaaccaacacacagaacaaccacaccccaccaccaaagaacaacaagaaaaaacacaaccgagaaaaacgaacgaagcaaacgaacacgaccaagaagaaccaagaacgaccaagaccgagaaggaaacacgaagaaaaaagaaaacacacaaaggaaccccaacgcacaaccaaaccaggcaaacaacacacgaaccaagaaccaacaacaacaaacacacaagcaacaccaacacaaacaaacaaaaaaaaaaggaagaaaacaagacaaccaaagaaagaagacaaaaaacgacaaccacgcaacaacaaccaaaaaaaacaagcagcaagaaacaaacaaacaaccaaaaaaccaacaacaacacgaagaaaaaagaaaccacacagcaacaagcgaacacaaaagaacagaagccccaaccaaaccg

SEQ ID NO: 274460 - DNA, 855 bp, Glycine max
  unsure (1)..(855): unsure at all n locations
gccccgcgcnattgagacatgcatagacccccttaaaaccaaacccccggggggcaccacacgaaggggaacggagggacgaaaggttttataccacgcccacacacaaccaacagaggggacgaacgagggaccgaaagacagccacgacaccagccaaaaacgacaaaacgcacggaggacgcctacgaccgacaggaacgcagtccgaagaaggaacgaaggaaccgacggaacgaggcagcacacaagcaggcagcaacaaccgaacaaagacgatgcaacgacgcagctcacaagcgccgacccaagcgagaacgcaacaagccacgcaagaagcaacgcagcaaaccagaaccgacgagaggaacgaacagcgacggaggcacaaaggcaacacccacccaacgcaggacagacctagcaaacacgcaggcaagcagcgaacaaacgaccacccaagcgctcaggacggcacgacccgagcaagcaccgcagcaccccaagaacgcgcaagaccacgacgaacgaagcaacggaccgaagcagcgaccgcaggacgcacgcgaccgagcaaggaacggagcaacgcaagcgcaggaaggcaccaagaactgaccccaccaacgaagcaatgcaaccaagcacgaaccgcacgcaccaccacagcgagcgcagccacgacagacacgaatcaaaaccacggacgccacgcccgcccggaacgaagcgaccgcaagcaacgggaccacggacccccacagggacagcacacgaaacgaagacaacaccaaccgacggcacacgtacaaacgcaacccaaccggaagcgaccacaaccaagcgaacgcaacg

SEQ ID NO: 274461 - DNA, 850 bp, Glycine max
  unsure (1)..(850): unsure at all n locations
gtaaggnaacgatctagcatctgagaacatcaaattnggnanaatccgaaggaaaccccccncganctttgaggaggagggaaagatcatttagtaattaataaaaaaaaacattagggcggtttttttgagaaatatatatccaccacccccccacacaccacttaaataataatgtaacttataacaaccacctactatacaaacaaaaataacacaatacgaaaacgatgacaaaaaacataaatatcatccacgacataaatactactaaaaacaacaataacaaatattaaaaaaacaataacangacggtagataacacaaggacagaggtgaaacaccataaaataaaatctaaaaaaaaaccataaaaaacaaataaataaaaacaataaataaaaaaaaataaaattaaaaaaaacacaacaaattaccaatgatcaataccattaaacaaacgcaaatacaaataaaacgatagacaaaagcgcaaaaatgtaaaactacaacgattaacaacacaactaaatagtatgatacagaaaaagaacaaaccaaaacaacatactaataaattaaataaataaaatgaatataatagacagaataccaatccaatacacttcaatcaagaacaaaagaacataagtacaaaaactcatcgaaacaacatgaaagatagcataaaaatctagaaataatgttaagataacaatgaaacaaagcacaattaaatcacaactcacaacagaaaccaataataacaacgatagactgcaacggatgttataaatacgacacacgcaaccaaaatacaacggacaaagaaaaaataatgatgatagag

SEQ ID NO: 274462 - DNA, 934 bp, Glycine max
  unsure (1)..(934): unsure at all n locations
agggaacgatgctttgantcatgtacccttgcanaacanaaaaagaacttgggggtgcaaggtctcaacaacccccgnccacacccccacagcactatgttttttttttctcccgnccccaccccnacaaggcggcgaaaatgatatattccactcgttctccttttaaacggatgttccacaacctcgtgtcagattttttaacacaaaatattttcgctagcttatttttacagaggaaactaaagattgccccctcccctccgacttcatatccttccgagtgttgtttctatttgaacagtctcacttacttcgacaccaaaaaatctattttacctattatactatatacttgtattaaaattttaatcacttagggtggtgctgtagctcccatattanttatatttctataaaccacttgtcagacaccaggttacttagtctttttgctctcttaattaacactggtggatcatagcgtttgtctatatacaccttcttttgcgccaacactcactcactctgttacgcggcttgtgtctctcctggatattacaccatagtctgcctctttcttttcacagtcacactcatcgctctccgcacaattcggttctttctcgaggggatgatggccctgccctttaacactttatacctcaagcatctgtttctggtactccccttaatctttttataagatttactctctcacgaatggcactcttttcacctttattattgggggtctgttccaacccaaatcttttctaccgtatactccaccatcccccatatacttttcttttttctttcgtactaatctcatctgtcttactcctgcctcttttctataacattatactttcctatactactcctaagtccgctactatcccctatggccgtgtcctccctctttagccgc

SEQ ID NO: 274463 - DNA, 796 bp, Glycine max
  unsure (1)..(796): unsure at all n locations
cgaggnnatgaancggggcatgcaaanncnttngantgggaacnnncccccgannannnnccnnnnnggagggggggttttttttttttttccccaccccacccaggggaagggttttttttagattccccccccccacaccctccatgactagcgcagaatagcagtatagtacacaaacggtgaggtgcagcagcagttacgcctgtctgccgtagagtccagaagttgaagcatagaacgccttcaggggtattctaacaagattacccatattaaaccccaaccccgaaagacgacgccccggtgaatcatcaaacacaccacattcnattatancactaaaaaactataaataaggggtatacacaaccattgaatgaaggactctccaccacccgggggccaaatggctgacaagactattcgatcggtcgacggagcagttaagcttacgtcccttatataaaagagggtttccatgttggagataaggtaggctttaaggaatggaatttttactnnnncnccttnnnnncacnatttcaatctgaaggagcgaggcgtgactagcttattgagagtcggtaatgtagcatgtatcgtatcgttaagttggctcccgcaccgttagctggacggtcgcgcgccgggtgacgataccggcgctagcaaagatccgacacgataacacatacgtatggagagccgataggccgaggggactgtactcgaattaggtggaatcgtaaacgtatcgtatcgacatagatctgcccggcgaacggcgggggcg

SEQ ID NO: 274464 - DNA, 1147 bp, Glycine max
  unsure (1)..(1147): unsure at all n locations
tctcaacgataacgtcgcaagaacttcangnacccatccaccagtccacgcgcccactgaacaccgacacttacaagcactcattcactactcantgcaacccccccgcgccgccgccgccttgganaactcgtanactattgcgacatatcctaanacaccngcacctgcaanggccacgcaaggcncctccaccgggccnngtcacgaaacggaaatgtgaactgtatccttcttatcaacccggaagccaaccactctatcgggaacgacgaagggacaggcatccatactctaacccctacgccaaacgtcacccctcacaaacaacaacaacacacaacttcacgcacaaacaatcgattggctgccttcttcacacaaaggatagcccaccatgtgcactcaagccccaagaaccacacatatcagtcccaaaatggccctttgtatcttcaataacctaccttcattcttataacacacacaccatcctcaaacacacaacactactgactggatgcgaacttctaaataactctacagtgggccctctcaggcacacaagagccgtaaactcctaacgaggccatttacaacgcccgagggctacgagggccctcttgctcttaaacagtaaccactggcggaaaaaaccgcctcttcaacacaaaacacaatatctgcccaaacacgtaagccccatgacaacaaggatcatcagtcacccaatggaacaataaactaaaccttgggttattccattaaaccaaaaccacaaatagaactcgaagaaaaataaacccctccccacaaaggcccagacggaaccacccttttaacatctacatcacccaaccacccacattccggacagccacctcaaaccactgtacataacatcacactactcaaacaaatcgagcaccttcgtactcccaaatgggggcggccgtcacgcccccacaaccacctactaggcgacgggcacctcctcacaaaagcactcgcgtctctcttctaggaagcagacaaccaccggagcgagccctcgcgctatcaccacagaaccaccgcctcttatcaccaccacccacaagcgctctcatacaccccacaagacgggcaaacctttctatgaaaaccg

SEQ ID NO: 274465 - DNA, 832 bp, Glycine max
  unsure (1)..(832): unsure at all n locations
tacgagggtttgaactgttcnctgaataaccatnaatttttaactttacccacccctcacttaccacaggggggggggggggttttcttttcaaccgcagcctcactgcggacggtgggctcttgtatgggctaaagcaatcactcatggcattcaggatttatcaaaaggtccctaccctttagctttaataaaaattttactctcttcgctcacttattctacaaccggatgcctataagacccttacatgtatcttttaccaagggttagccccattcaagcgcctcaaccccttaagacgatgcaagggatgaaccaaattatacatttcgttggcattttatgcctgcccaaccctaacttcaggggtttagcctctcattcgcactaaaagaccgtttccccttaagggcggtggattgggtgggaaaaaaatggatggttttaaggaagaaagcagactactggtcttctcccgatcgcgccccttgttctctctctcactaaccttgtgcttcattatacccatcgcgctccactgtaatgagaaagataatcactaaagacttattcggggcgcgggggtgtgttattccttccagggggattggggtgtcatggcgccatctcccattttatcattatctcctatcgacttgatctaaatatatgcaccgtcagtgcgactacgctcctcaactaccttctttcgaacatagcatcgacatgctcctagagggggaggcggtttgttttctctttctataanaaagaggaccctttcaagggcgtgccttctaaggcgttttcaaagaaaaccccttgggcg

SEQ ID NO: 274466 - DNA, 1073 bp, Glycine max
  unsure (1)..(1073): unsure at all n locations
cgagacgtgatgtaaacctcgnnacntncggannnncnnnnnnattnaccacagaccccaagctanggancactacggagagcgacagagaagtataattcttttattccanccgcgacacaaaccaacacggggccatggtgaagacaaatctanctatatcccaccccccccaaagcatgctactatataccaactgatcctccccacccacaccatatcccacgcataacactgcccagttcaccccacccatctaccatcgtacatacgccaaccaaccattcctaaccgatacgcatgaacgcctacgctacgcgaaatcaaccatgccacatcgacgctaccgtataccatcactaaccctcactacccctccacaatctcacgctacactgctacatcatgaccccagcacacctcatcggccgtcacatctgacgcacgtaatcccacgtcaccgccaatcaagcgactctaagcctagcgtacacatcagcacacaacatgcaacgactgacaacgaccccacctcacacaactccaacgctcacaacgccacggatacccactcacccaaatcaacgtactatatcacaaccaatcttaccgctgcttactagcatccacacccctctatacgtgcacctcacaaatccacacgctcacttatcaactctacccccacctacactcactactcatccaagaacaccacgcccacatgtcatatcccaactcacatcaaaacgttcaacctctccacattcttaaccatctcacaagccaagtctacactcactaacctattcactccatacaaccacacacattctacactgtacacttccaacacacccatcctatcgtatcgcgcaccgcacgtgcctataaccaaacccacacgttcggaccatcacctctccttacagtaacacacgcacagtaccacccaaccttacagtctacgacatctcctactcgcattaatgctgccgctctatcctcactcatctcnataccgataccattcgactagcatacgccctctcctcatactcagatcgcaaccg

SEQ ID NO: 274467 - DNA, 775 bp, Glycine max
  unsure (1)..(775): unsure at all n locations
nggggcgccgctgaatgctagcatctacnntcaannnncnnnnnnangcccagggccnaggtcccnaacgaaacgccacttatcttattcctttacaaccaccaagggcacgggggaaaatgaaaaaccccacaccccccccaggacgacacaagaaagaacaccacaccagagacaaacagacacaacaaggaaagcacaacgaaccacaaacgccacaacgaaacagccacaaacaaccgaacaacaacacaaacaaccaaaaaaccacgaacaaacgcacccacaaccaacccaccccaccaaaaccaacaccaccaacaaccacccaccacacacaacgaacaaacacgaagaaacaagcacaaacacccacaaccaatcagacagacccaacacaacgcgaaccccaccaccaacgaagcaccaccacacaacaggaacgagaaacaccaagcaccaacgacaaaacgaacaacaacgaagcagaacgcaggaacccgacacgaagcgacgaacaagacacaacgaaaaaagacggagcaggaaaccaacaaacaacacaaacaggaaaacacaccaaaccaccagcacaccgcgaacacacgcccacacgccacaacgaaacaaagaagccaagaaacctgcacacgaccagaaggaaacaacagaacaaaccaaacaaccccacaacacaacactaggaacgacaacacagcacccaacacagacaccgaaccgcacccaacccaaccaccggcagccaagagccacc

SEQ ID NO: 274468 - DNA, 797 bp, Glycine max
  unsure (1)..(797): unsure at all n locations
aaaagcgcgaagtgatgcaggcgacgggatnnacnatanatngggaanaaacaccgggccacnnnaannaggggggggggggggtttaatctttttaaaaacgaccaaaaagggggggtgtggtgttaagnaaaacatcccaccccccaaggacacagaaaggaaagacggcaggaggggaaggaaagaagcgagagaaaggaagagacaagggaggtacggaggcaacggacacgaggacgaacgagagaagcacgcaaaaaaaataaaaagaacaaacgaaggagaggcggaggggggcgagaaagaagaacattcgaaaaaaagagtgagagaaaaaaaacgcaaaanaaggcaggggaagaacgagcaacagaacggggagcaaagacggaaggaatcatagaaggcggaacagaggaacgagcgcaaaggcacaaaaagccgaaacacgcagtgggagaacggnnaaccgacaaaggcgaagaggggaggaaagacaaacaaaacaaggaagacagaggaaggaaaagacgaggaagaggaatggggaagaggggaggggagagggacggaacggagacggtaggacagggaacaaagggaagagaaaggggcgagagcagcaagggaaggcataatgaatgtaaaaacgaaggtataggagaggaaatataaaaggtcatcgccaccgcgcaaggtgaggagggaaggagacggaaaccgcacgagcgtccggaacgaaacaagagggtaggacggaagagaaagatgaccccccccccccccaccccgcg

SEQ ID NO: 274469 - DNA, 1103 bp, Glycine max
  unsure (1)..(1103): unsure at all n locations
cgccacgcccgnttgaantcattattgtgtccgatggccaaaacgcccacccgttggcccgcaaacctcccctacccgcccgacaagcgagggagcaccttttttttctattctccgtcaaacacaaagactagcgcttactcggcgaaatgtccgagctacttagaaccatctttccacttggcatcctacacgattgacaatcctactccaattcttctcaaggtcgaacatagacgccgtaacctttccgaacctgccaaacatttcaggccactaggcgcgttacgcctcacccccgttgaccccctagccaccactatcccaccccgcttcagacgctacgtttccaccgcatgcgttctcacggctaagcgtactaatcctagtcaggagccattcacggcattataagctccctgccgctcacgtccccaagactcagtggtgcacaagccgctacttaggcgcctctcctaagcccaggcttacactccttgacgaactgcgcgacttagcgctcaacacttcacctttactacagcgccttagccgtgcaagtgaggccccctcagctgccacacattcggcgaacttgctgtagcccctaatttacaagcttctccctctcgctccacgaactctaccgcttacaactcattcccattactctactcgccccaccccttctcatcgactgccgtcctcactatattggcncacgagcgatcaatcaaattctcaacaacacagcgtcccttgactttaatctccggcgaacataatcacctgccgacatgtcctcaccagcacgcacgccgtcctcgctgctcttctgaaactccgcacgctctcctctccactctacactgaaactactcggacaccgacacgaaccgctgcatgacgcctgaatcatccgcgcatgatgcactctgcccctcttctggatgacacgcaatgtatcaactcacctacgtgcnctctcaccggctccctgctgcggcaataggaatcattgcctactctcaccgcttcttgcctccacctcatattgtccatcaccctctcctgcgcatatcgcttggcgacgcgcactctcc

SEQ ID NO: 274470 - DNA, 603 bp, Glycine max
  unsure (1)..(603): unsure at all n locations
cgcgggatgntcctgcattcctcgcttcctccatccgaaaacccctctaaaaagggaggggggggtgctttcttctgaacccattacgggcttggggggtttattctttcccccacccataatctttttgatttattatattttacgaacctcacgttgatgctttatttctttcgttcaattcgatcttctactgccatgatcttcctgcatcctttttctcttcattatcgttttcttaccttccctttctttgctcccgtacttcttcgtctcagctccctatcttcttctttctcctagttcctcttttattcacatcattgaatcgattagtacgaccatttctttctttcatcatcattaatttcttaatgtatttatgtcagcagaacatgattannnncgattgcactctttctgtgtactataagtggtctttcaactttgtaactatagatctttctcctgtttataccgttccgtcctctcggctcttttatttctcttctatatgctctttattgtcctctattccttatctttatttttccttctttgtatttttctttttctatctctttattccccccccgccccctc

SEQ ID NO: 274471 - DNA, 516 bp, Glycine max
agcttgtatagttcccaaatttatggttattttgtagtgatttttgtaaataaatcttgtattatggttaatgttgtctctagaacatttccattggatttaatgatgaaatctatgcatttttcaagtgaaaaagacgctaagttttgaattgcaaaatttagcaattgggctaagctcagcagttgagccaagcacatatccaccgctaagcgtagcttcagcatgctcaacgcaaaggagaatctagtagagcatcagcatcaaagtcgcgcgctaagcgcgagatcagtgtgctaagtgcagcaggtgcctttagccaggctaagcttgagactggcgctaagcccaatttcacttactcgcgctaagcgtgagggtggcgctaagcgcagcatcgcgatttcatagcctatttaaagcttgtcttgtgcagaattagggtacaacattctatatcttttacacaccttttaggacagcgtgcataatggccagggcacaaaattttagaac

SEQ ID NO: 274472 - DNA, 881 bp, Glycine max
  unsure (1)..(881): unsure at all n locations
cacacgcgcnnnccctganntccgccgtcancttaccncttcacnntttnagataatanaattccctccanngcattntgaaccaactaattcctaaancccccaaatggtaagacaggcgcttatgagnctttttagangagccacaccctctcaaacatatactggcgtgtttgtacacgcgcatgctctgttcctactcgaattctccacccacacgcctttctcatttctgacattggtgttgaaccaataccctcttatagaacccttatttgatacctatcttctccaagttttgtttgtcatttgggccatacctacggtccttgttttatcaatagccactatccattttttctttgaaatgccatcaatccatgttgtatggctgggcttatttgacgaaacttaccttcaaattccgattacaaatgttctcttctcggggtggtgggttgataaaanctgttctataacaatttcttttattttaaacgtttaaaacccttacctctaaattcttatacttttacccatttcccttaaatctatctttggtcggcataatgaaatttcgatggagttgcctgctatgagtggcgccatgaggagcaaaataaaacggtgggggggaggtttntttaaacctttaattttttctatttcatccacacctaaatatctctttttccaccatcgttttcttatctactctctntacttaaacacaatcactctttttttttctttgaccggtgttatccctccccttgcgggcccctcaaacacacatcttgttataccgctgaccacctttattaccatttggatacttctcttcttttttattgtatgtatttacttcacccccccccccg

SEQ ID NO: 274473 - DNA, 512 bp, Glycine max
agctttgagcaaattcaaatgataatagctttttactcggatgtccgattgagttccgtaatatatcgagacgctcgaaattaaatacgtaaggtactagcaaattcaaaccagaataactttttactgggatttccgattgagtcccgttataaatcgagaatctcgaaattgaatacgaaagctctgagaaaattcaaacgacaataacttttttctctgatgtccgattgagtcccgtaatataccgagacgctggaaattgaatacggatgctttgagcaaattcaaaagacaataaacttttactcggatgtccgtttgagtcctatagtatatcgagaggctcgaaattgaatacataagctcctagcaaattcaaaccaaggaggaatgatgagaaaaagaaaggaattgctcttaaagcttcatcttcaactcaaggaagaagtgataaggaggatttcaatgaaatagacgaagatgatgatctcagtctttttgtaaaaaga

SEQ ID NO: 274474 - DNA, 387 bp, Glycine max
  unsure (1)..(387): unsure at all n locations
tgacacttagaaactaagcttataagtgcgggtctgggagacgaaggtcaagtgttcgcgatatgtgaagatgatgttccaagtacttcggatttggtccgaccatgccctcctgatttccagctgggaaattggcgagtggaggaacgccccggcatttacgcaacgagcataatgtaaacctttacggttttaaaagctctatagttgggcctaggctttagagttttcattttgttaaggctttgtgtcttttgtttttgaatttataatacaaggatctttcttcatctgttcctggtctctacccattctcattcatttgcatgtntacttctttttctgaaacggcagattcgatgacgagtcccccgaaggtactaatac

SEQ ID NO: 274475 - DNA, 740 bp, Glycine max
  unsure (1)..(740): unsure at all n locations
agcttgcatgatttacattctccccctttctcaagcaaattcttaattcttcttgatatcatcaaaatcttcatgatttacattctccccctttttgatgatgacaaccacctgtaggttaggagcaacaacaaagaaaaaatatctatttgcatatagtttactcccccttggttttgcaatgattgcttgtatgaaacagttgaagatttcatatttttcatatgtaaacctattgtctcataaacaatagataatttttcttactattttatcttttatctttctctccccctttgtcaacatcaaaaacaaatcatgaatagagaggagaaagatgttaccacttgttgcaatgtatgagaatcaagtgataccaaaaggcattaaaacaatcattcaatattaatcaagccaaaacaagtccaataacacattcatcaaacaccatcaaataccantcataatcaaatatttcaaattcgaataatttaattaaccatccactaactattccaaataatttctattattaaaaaaaactcaaatttcaaatttcaaattcaaatttcaaatttaaaatttaaattccaacttccacttcaacttttaaaactttcccttccaattccaccttcattttaaccttcaacttccataacttttattttccacttccaacttcagtaacttcctttcaacttccactttcatttttacttttcaccttcaataactac

SEQ ID NO: 274476 - DNA, 294 bp, Glycine max
tgaagtggatgtgaacattagtagcttgttttgtgttttctctaatataaagatttaatttgaattgtacataaagataaatatgactcttaaaaacactcttataagataaactatataaagatgtgactaataaaattgtataaaaaattaaagaaaacattaaattctaaacaagcataaaaaatataagatactttatatgtgtggtgtgatatatatatatatataatatatatacacacacacactatgtgggtatatatacacacatgctcaaagtttactaaagta

SEQ ID NO: 274477 - DNA, 374 bp, Glycine max
agcttgcaacttctaacaccattattggaagcgttgccctttccactctctcctggcctgcctaacattctcaggtcgacagaaggtttgtgtttcttgttctgaaggctacgctcttcctttttttttcctttttctattacctatcttctgaaaattcatggcagatgtgccctaggtctaaatttcaccttaagagctcttttatgtcttgaatacttctgcctcgttatgcaagccaaaagaaactttgggtgtttcggctcaccttattttaacaatataacatcttatttagcttcttgagagaactttgttaaaattctgaaaaaagttcttctaaacatgcaccatatataaaacttttaatcctg

SEQ ID NO: 274478 - DNA, 867 bp, Glycine max
  unsure (1)..(867): unsure at all n locations
ggagccgggggctgactcatggctttgcgataacggtncaactattaaacttatacttcttcaaaaaaatcataatttcgcggatgcatgaggggtttattttgctatgcctaattataaagaccgtggaggcggcttgacaaacacatccaagtcgaagatggtttgcctgccattttaacttcttgtttgcaaaatgttttgtagggcccgctccaaatgtttcaaaagacaaaaaagaagtggtcccaataatttgacagataccgcgggcttaaaacggtgctaccccggaacaactttctcgaatgcccttgaaatggcagacatgtgtctttcgtgaagagccactgtcaacggcgctaatgcaagtcgtatagtggaaactctcaaattcttgtcatccaaaccatatacccccgaaagtatccatttacagttcaacaccaacagggtatggaagagtgggaaatttctttaaaagaacacaccccccgaatgtgacttaataaataacaaaaagcagcaatcttttttataagaacaatttttgtttaagtccaccgcctatataatacttgtagataaactgaggagcaatcgtcgaaatgctcttgaggtccttttttaacagcttacaaaagaacaatgttgagtttttcantggcgggggacaataaaaactcttgtgaggaagaaggagccatgacccctttgaaggggccggcttttcttggagactatcttttttaagaattctattgtcccaagaacttggtgggcgcaaacattaaaacacgctggactctttggccaggggcgtcttcccttgaaagggaatgcaaccaacgagatcccatatcaact

SEQ ID NO: 274479 - DNA, 1163 bp, Glycine max
  unsure (1)..(1163): unsure at all n locations
cgagggnacgacgcgcnccttgaanannatggactnagacattccgtaagnaacccntcgtagaatnctatactagcagcgcatcgcacagccttcgtctttatctggaccctctggcactcgccacatgcatgtctctgagctcttatctctacgacctgcntcatagacctgtgaccgactcacctgtattcgcgtgtaantacaatacttctttgtgttctcttcgtacacttgaccatacaccgtctctctccactggtctctgacatcaccaactgtgtcaccctctcgcacatgtcttctccgtccctaacaacttcacacggtcttcgtntcgagcatccgctcccaccaaatactcccttataccgcatcctctcgattcgctcatatatttctgcatcgcgagcacccccgtcccacgggtagtactttcccctcatacccgccaaagataaactcattcattcttgtccagtcgaccacttcttataaacacatatttctcgctcacaacgccctgcctggacaaactactaaccttgcggccctacattgaccgacacctatctctggctttgttgacgctcttccaatcgcaaaaccagcgctaacataaattttccgttgatcactcgttctaagagaacaaattttggacccacccacttcccccctcggcgtaacgcttttctattatctacgatctctcccatccggactactttctcgagactcgggccgtatcgactccactgttgcgtattgactttctgacccatccactccgttggacaccaatacttgcagcccccttccccaacaacggtcttttttggttttcctccgccccaccatttcacttctgcaacgcatccgccccttctccgctcctcctaacattaaaggacccgcccgactatccagtctcccactacatcttctcgtccgacgcgcacatctccggtcgactttcccttaccgcaccctgcttctacttatcaaactcctccactctcttgcaccgcaaaaatccgtttatcctgcccgctcatatgctttctcatacactactcccttccactctccaattcctcatacctctcatcctcgggtctcttctctgtcatctctctctccgtattcccacctttcaaccg

SEQ ID NO: 274480 - DNA, 477 bp, Glycine max
tttaagttcttcctcaaaactgtcctaagcaaagttccctaagtcctattaacaacttccgtttgcccatcggtttgtgggtgacaagtggttgaaaataacaatttagtgcccaacttgctccacaaagtcctccaaaaatggcttaggaacttagagtccctatcactaacaatgctccttggcaaaccatggagtctcacaatctccttgaaaaacaaatcagccacatgggaagcatcatcaatttttttacatggaataaaatgagccattttagaaaacctatcaacaaccacaaaaatggaatctctaccattgcttgtttttggcagccccaaaacaaaatccatggataaatcaatccaaggatactccggaattggcaatggagtatacaatacatgaggctttaccttagactttgcctttttacatacaatgcaatgttcacaaaatttctgcacatccttttta

SEQ ID NO: 274481 - DNA, 231 bp, Glycine max
agcttccatcagtgactcactgcttgttatcgtgctatgagtcttacggatagcaaatgggactattctctaatctcagccgaaagacgctgacctctccgggaagggtgctggtgactacggtaatgactgcttgctatccggctttgagtcttacggatagcaaatgagactttttctttgtgtaagtcacaagaccctgacctcttatgaaagggggccggcgatgac

SEQ ID NO: 274482 - DNA, 412 bp, Glycine max
ttgaacaatatacttgtccttcatttaactgtctttgggcttggcggccacgctcaacaaagtacttttgacacctactgtacgttgatttgaccaatgctgttatgggaatgttgtgacaatcctttaaaaccttattgatacattctgagaggttggttgtcatgtggccatatcgatgtccttctctatcataagccatcatccattttttctttgaaatgcgatcaatccatgttgctatggctggactcagttgacgaaatttttctaaattttgatcaaaaatgtgcttgcaaggagtgtaggctgcataaaattagttatgaataacaattttaagtatatatgaaagttaaataaaacgtgaccatcaaatacgaaatcttaccccaattcttcaacatttctt

SEQ ID NO: 274483 - DNA, 435 bp, Glycine max
agcttgacctcagatgagagcggattactaaagatctacacctaactctcttcctaacaattaactctctattaatgagtcgatatgctcaatagcttttaaatacactaataccttctcaagatatgacctataactgcccttcaataaccattaaattctgagtaatattctgtctatttgacctaactctttctactaaaacaaattgtgaagaatctcaattttaaagcagactaatcgtatgaacactcacatgttaacgggacctatctacagattcattagactgaccactatgaatgtcttatctaaggacactcgcttaaaaaaattgatgatgcacaaaagccacaatatctcgtattattgaataatgaactatgacagttcaatacaatacaggttattcagtcttcgcatctttttttgcct

SEQ ID NO: 274484 - DNA, 367 bp, Glycine max
ttgtaacttgtcttaatataatatataggcttaattatgttttgatctcttaaatttaggttatcattgtttttttcttgaaatgtaaatatgttttcttagtcccttaatttcaaaaacatatttctttttagtttctcttgtctgatttttggtgatttaaatatataattaatttgtgacaatttttttatcacaagaggaactacaaagaataatttttgaaattaaagtactctaaaaaacagatttaaacccgatagaaaaaaaattaaacccgacagttactccaatttaagtaaaaaaatcatatttaagccttaaaatatataaattgtccttataatttaaaatgtattaagtataa

SEQ ID NO: 274485 - DNA, 587 bp, Glycine max
agcttgcggactataccttcgaccgaacatggccgtgtttctgtctaggcccggattcaaggcgagctgcagcaccagctccgcttccctaactgtactggaggcggttgtggtggctttatcctctatggttttctggagttttaacatgacctccgagatggaagccatttgatcttttaaggccgatagatcggccttcatctattcctacacgccctcttcattatccatttttctggatcgagtgttataggggtgccttggtgttttcttagttatgatcaaattcctaaagaaataaacaatggtgagtatgccaccaaaacatgagtatgcaaatggatgatcggagcgcttggatccaccccaaggttttttagataacatggtgagtccataacttctcattttataaaaagaacaaagctttcatctaacccagattatacaaaggtgttacaagagaacctaacgattcctaattatatgggccatcaaatctatcatgtgttgacagtaattgataacccatgaatctcctcggggcaatacacacttcggccatggcttttgctttggctaat

SEQ ID NO: 274486 - DNA, 383 bp, Glycine max
taccaacatatcctcttcgcctgacactatcaccaagagtccaccaaccgcggatttcaatttctggtgaagcgtcgaagggaccactcctagcgcgtgaatccatggcttccccaaaaggcagctgtaggcgggatttatgtccatcacttgaaaaaccacattgcaagtgtgggggcccatctgaatggggatgtcaatttcccccatcacctcccgccgactaccgtcgaaagctcgtactaccattgaacttggttgtagacgtgacacattaaaaggaagtttctccaaggtggtctttggcatcacatttaaacttgaaccattatcgatgagtaccttagcgacgacatggtccatgcatctgacagacacatgta

SEQ ID NO: 274487 - DNA, 572 bp, Glycine max
agcttgttgaagctcatcttgagtgatgtatccacttccatctttatcaaaataagcgaaagccgcaactaaatgatcttccctgtcaaccttgtttagatgcaatgttgcagctatgaattctccatattcaattgtgccactgttatcaacgtcagcctgtaaaccaaaacaaaattgggttccatggatcaaaataatatactactaaaagattataccttttctaattttattacgcactatcaatatatcattataataaaaatgtcttattaaatgatacttagaacacctctttgcgcttgatcataatcataaacaatgaatagcaaacaataaattgctcccaggatccaggtgccatgaaaaattagttacgcatccctatttatgcatgaaatccactttaatgtaattataataatagcataaccagcatataaaaataagagaacaatgcaacaaattctttgaaagtctcctcttaacactattattatgtgaaaattgaaatcctaggctatccccactaaatggaagacatggagaaaatgtatgttttatgaaat

SEQ ID NO: 274488 - DNA, 344 bp, Glycine max
tttcgattcattctatgtacccgtggtggtccacattttgtttcatgtattttttattctcgttttcatttactttttatacccccttttgacgtgcttaagccatttatttaagtcatttctcgcttaatgtaaaaataaaataaatttccaccgatcatttgaattgtatcacccgttaatttcggttaaaatgaattccgaccgttcggtcgtgccgtaaccacgttggaaattaaaaaaagaggtaaaataataatataaataaaaaaaataccttttagtaaaataaaagcgaaagatcaaaatggacgttttctctttgggatttctcgttcttaatt

SEQ ID NO: 274489 - DNA, 600 bp, Glycine max
agcttgccttgaattgattactatggttatgatgaccaacatgttaagtgaatcaattttgtagtgcaatagttccaagttaggaacatgaagtgttaaattgtagtgcaatgtgtttaacatgttttagaagtcattggtattgtataattcatgagcaatgtctatgtgcaaaagtttttttaggggttggacttgaattaggaaggtgaggccctaacggattctttgaagtctaggcataggggtaaatacactcggtttgagtgctcctttaaatctatgttgatcccatatggttgaagcattctcacaaaatagtgtgaccctaactagtcaccttatgattttacttagtgagattgacttgatatacccattgtgtggcgtgtcttgttatgtctcctaagcgcccaatgtagtttttcactatcatggtaccaaattgcatataagtttgagtcttagtataattgttacataacatctttgaattgtttattatgaaattggaaagtgttgttgcgtcttgattcgagtgtgtgattcatgtgttatgtgcttggtgaatgaaaaatgaattttaatgatgaagtggtg

SEQ ID NO: 274490 - DNA, 473 bp, Glycine max
tgtccaaaactaggtaattaaagatgttcagggtccagaatccaattaagtccatgcaaagattagataacactataacaatcatgaagctctcataataaaattacctctttgatttatggcagatactttactatcaagcaaacaagataaataaaattagaaagaaacccatgaaagatgaagaaacacttgagaattttcattctagtaactaatttgttagaagatttgtaatgctagatcttcccacaaccaatctttcctgaaaaaccattaatgatttaccattcttatttcaaaaatattaaggttaacttttatgaaccataatcatggatcatgttattcgaaagaaaatttataccatcatcaagaaggagaatgatactttaataatgatacttcaaattgtaccatcaaaaggcaatttttaagtttgtaatgattgaataatgtgcataagtattaat

SEQ ID NO: 274491 - DNA, 1503 bp, Glycine max
  unsure (1)..(1503): unsure at all n locations
gcgctatcacagataagtaataacaatctctgctacactcntcacagcacgtccgccgcgctcacagcaacgccgncgtcgtntactccttgcccccancnaccccnnttcccancctcatcnccnaccagcgggcgcgacgggactgaggnttnngaannttccgtagnnatttggtatccggacncattccctnaggaanacactagagnactcgctcgcgctcacgtcagagccatcgtctaaggccctntgcacagnccncatatngtgtagcgagagcgcgccacatatcagtaacgtctcttctntcncctcgtctcaacaatcgaacacatcacgtgagacgagcgcgcacgtcgncgcacgctctactctcacantcgtactanangcgncccatatntgcgcactcacaccnnacagccttagtctccacgaatcgcagatccgcaatgtcatancatatcatacagcacatatctgnctcagagtcacntacntcaacgactggacttatactctcacacaatcaaacggcatgtgcatttctcatgtcacgatacgccggtcactcttaacgaacgatacttctctgaacacgtcaaagcattcctcacccctactccagtcatcgaacataacggtagtacaacaatatctgagagccatagtctacacgtccagaaatcatataatcagaatagtagtacggcgtctcaccacatttcatatacctacgcgtgaacgcgaacgtcctggctatagcgaaactcctatcatttatcaccagtagcgcaacacgacactcgcaaatagatacgtctaactcgtcaaggctgaaccataacgtagagtggatacaacacaaagatgcgggactacgagctgacaataccactacacgcaacgacaaatattntatggtcatagaacgctaggaccgcacatctgatgacatactcagacaccataccacattacaacaattgccttgcgaatatatcgaaatcctcacttccactctatttccattgagcgagagggaaaggaacagatgcactaagtcntcataactccgcggatactgtgcgcaaaggaaaaattacactctacctacacaacccgatgaaaaggaagcatcgtaaggcatcgccccactaaagagaactcaatgcaacatctcgagcaaaggaatctatgcaagcagagtgcggacccggctccatacctcatacctcgttaacaacaaggcaccgacccggaacacggggttatactaatcctacgagacaaacgacccacacacacaactacgctcacaaatataactcaaaccatcactctttctcgggacctcaactggagacacatacgctaactgcctcntcccagaccagacaacgctataccgccatgtaaacatcgatcactgcacaccgggcatccgacactctctacgccgtgacggcaactgctctctacagacaaatgagacaccct

SEQ ID NO: 274492 - DNA, 379 bp, Glycine max
  unsure (1)..(379): unsure at all n locations
gcttaggtatgacttangagtctgacaaaagagttcgacttagttaaaaatnncaacaatttgggacttgaccttgttgccattattatacaanattttattctatcttattctccttattcaaagtatcttccttaaattaacaatttatgttatttgagtttaatatcttaataatactccgcaccgatataatagtaaatgttaaaattgttaaactaataatagttttatacccataaagatcacacatgaaagtctaactatatgctttaatttattcgtttagctaaacaaagaaccttaaataattatttaattttaccaatggctcattttatatattttcctgtgtgtccttaataacattcttatgcgt

SEQ ID NO: 274493 - DNA, 317 bp, Glycine max
tcaaaaaggtccacaaataatagtatgcacaatttaagaagttgagtgcttcttggaacttctttctttgtatgttttggcttggttttccctttaatacaaccccacacaacatatttttagatcccgtacaaatctagataaggaaagaattcattctttattaatcttccatctttaattagaaatgtgacctaaacgtttatgccacaagaaaacagatcgttcattcactaaactatgttaatgccaacattatgatgcagaattaaaacagtttcagcatacaaactgtctatttccaattatataaacca

SEQ ID NO: 274494 - DNA, 406 bp, Glycine max
tttcaactctttttgcaaggtcaatttgttctcaaaatttcaaagtgttcattcacccaggcgcagattgaatatttgcatcacgttgtgtcaactcaaggggtccaaccagttgcctctaaagtccaggcagttcaacactggccaatacctcatagcacgagagctttacgcagcttctttggtttggccggattctatcaaggtttattcgaggatatgtctttttgacagcaccattaacatctttgatgatgaaggaaccttttctatggtctacagaagctcaacttgcttttaataagatcaaggaagccttatcatctgctttggttttgtccctccctatttcacccttccatttacagtggaaacagatgcttttggacaggtattgggcgtgttt

SEQ ID NO: 274495 - DNA, 436 bp, Glycine max
agcttcttatccaaggcaattcttggtggtgaagctccttcttccttggcttattccctagtggatggagcctcccctctcctcttctcctttgccttccgctgcatctccatggtgtaaaatcaccattgaaggatctcattgaagctcaaagatccagcctccatagaagccccacaagcaagcttccatcaagtggtaatcagagcacaagagcttcaagtaggtgctccttaaacctccattaattttttgctttaccttctcttccattgttgtttcttcatttttttctccatgtatctcctaacatgtcttgtgctaaatgttgttaactttattctttagagtttccaccgattaaacttgctatagaagctagatttgattttctatggctcaaatttcttgctcttgctcttgaaccatgaatttt

SEQ ID NO: 274496 - DNA, 386 bp, Glycine max
  unsure (1)..(386): unsure at all n locations
gcccagagaaggaatctacggaggaaatgcttaccacctcaaaagactggaaagcggtttctaatgactcctctgcggcctccacataaggcatagaggatgggcagctcaccaagatgtcttcctcgcctgacacgatgaccaaatgcccctccactacgaatttcaactnttggtggagtgtaaagggcacaactccgactgagtggatccacggacgccccaacagacagctgtaggggggttaatttctccaaagtgctcttaggcatcacgtttaaactggaaccattatcgatgagcactttggctacgacatggtccatacacttgactgatacgtgcaaagccttattatgccctctcccctcggcggggatttcttt

SEQ ID NO: 274497 - DNA, 549 bp, Glycine max
agcttcttatccaaggctcatcttggtggtgaagctccttcttccatggcttattccctagtggatggtgcctcctctcacctcttctcctttgtcttccgctgcatctccattgtggaaaatcaccattaaaggacctcattgaagctcaaagatccagccaccatagaagctccacaagcaagctttcatcagtaagttccactacacccttgagctttagcgccactagtttctaatcactgctctggtggatttcatcattttcgtagtgcacataattggaataattatctttaggaagctataaatagggtgctagtgtctgtatctttaagctttttcttagttatgaatttgagagcactttgagggttttcagagttttgaagcatggacaactccgtaaggacaaatcgtgatcatcgttctttccttattggtatgtctatgtctatttcatataggctttcaagttgtggcttgatcatgagcaactagtcaccctagtctggggttatgatgtaactatcccaatgtaccattttc

SEQ ID NO: 274498 - DNA, 431 bp, Glycine max
tgtaatcgattacacgcatactgtaatcgattaccagaggagtttttcagaaaacattctcaacagtcacatctttttgtgtggttcttgaatggctatcataggcctatatatgtgtgacttgagacacgaatttcataagagtttttcagaacaaaaaggtcttatcctcttatagaacaaaaaggtcttattcaaattgttctatttgaatcaatatttaagaaattcattattaagggaatttataacttgaatagaaagttaaatagaatttttaattagggaaataagttgtaatatcttaattcaaccccccccccttcttaagatatatgaggccacttgtccaacaccatagattcaaacagaaaacgttaatgaaacatgaagcagaaacgtacattacggatacgttgatgagacagaaa

SEQ ID NO: 274499 - DNA, 261 bp, Glycine max
cgcggcatgcagcctccatgactaccgggacttgaaccgaccccggcctaaagacaatttttccctgccacgcattgatctattggtagataatacaaccaagttgccacattttcttatttatggacggcccctccgggtataaccaaataaaaagggtccccgaacatgcacagaagacccctttcgtaaccctatgggggacgttctgctatacagcgatggccttcgggctgaaaaatgctggggcaacctatcagc

SEQ ID NO: 274500 - DNA, 438 bp, Glycine max
tctaccctactttgctataaatagggggagaagtgaagaagaaaagggttcagccttcttggcacttctctctctctcgaaattgctgaggaaaattatttccgtgaagaaaatccaagccgaggcacttctgtaacgtttccgtgagtaattacgtgaagattctcgaccgttcttcaacattcatcgttcgttcttcgttttcttcagtcttcaacgggtaagtacttcgaaccgagcttttcaattcattctatgtacccgtggtggtccacattttgtttcatgtatttttattctcgttttcattttctttttatacccccttttgacgtgcttaagccatttacttaagtcatttctcgcctaatctaaaaataaaataaattcccaccgatcatttgattggatcattcgttaatttctgtaaaatgaatt

SEQ ID NO: 274501 - DNA, 184 bp, Glycine max
ccccgcgatcctctaagtgactgcagcctgcaagcttgcatcctttagtaatttttcctttaaatataaacactacgtatcatctcgtgcattcatcattatcaaactacattgcttgagttatgcaaaatacaccctgaaggaataatcgacattacaccaaccttttacggctgtagaacga

SEQ ID NO: 274502 - DNA, 432 bp, Glycine max
  unsure (1)..(432): unsure at all n locations
tcatgttagtagtatcctcaccattgcatataatctgtctcttcaaatattttagtttgtctaaaaatatttcattcattggtatttcacttcaatactcaaatagttcgtaactaaattttaactcttttaataagagtatttgtgttaaagaaaattatttcatcattgtaattggggcttaagatgtgtatactatcttaaaagacaaatgaaatgacaacatagagggagtatataatatcaaaactgtcccataaaaaaaaatttatggttgtaagtacattactttttatgcgatggaagtggtgttatttatatgttcttccactcttactttctgcttaaaggagactctgagacttctctggagataccatcnaaagaagaagaagaagaagcngaacaccagacgccgagtaaaacgagaat

SEQ ID NO: 274503 - DNA, 516 bp, Glycine max
agctttttgtttttataggcctcatctttaagtgtttattgtctcacaatgagtagatttcttcacttgatctatgtctgatgaatgtggttgctacgagcatttaatgcacgtcatttccttatgtagaaagtccactcttcgatacttgcatgttgagtactgtaaaaggtagtcacttcctttatgtcaaagtaggtcttgtacaagaaggctcttcttttgatggcgattaagaaattttagaccttgacttcatttattctttattagatttgacaaattctaggaggatgtttctgcaaaagagatctcagacacaatattaaatgaagtcttaaatattatcttaaatgtcatattagatcatgactttatctgcctatcgtctaaaacaacaaagcccgacttgtcaaggcatgttcttgataaagcatttaatttgacacatcagaaacacatttcgcataaggcacgacttttaccctttatattttttatcatctaaacaaaaat

SEQ ID NO: 274504 - DNA, 514 bp, Glycine max
  unsure (1)..(514): unsure at all n locations
tgcatttaaaaatgttttaaaaatacttttaattaatatttgtatttttattcctttattaatatatatgtgaggggtagagggtgtcacaacatgtcttgaagttaattttgacagttttgaattttgaaattagatacgatatatttttaacacatgttcatattatgttttgaatctttccaaccctatttagtgtcttatattcttttaaaagatataagttatttcctttgtgcaacattgatttactcagctttgttgtaagttgtttttgttggaattttttgttccaataattaatgtgagctaatattataagacaattatattagttatttatcattagtgagttttattttatgtgatcagattaattgagtccgttagacaactaaatcagatgatgtagacttagatgaacatgtgttggcccattataggataatgataaccctattaagttaacatactataaaaaggctgttgtccncaatataccagccatcacata

SEQ ID NO: 274505 - DNA, 832 bp, Glycine max
  unsure (1)..(832): unsure at all n locations
acgccacgggcttgaatcatgaacaaccccganccttatacaaagcccacgcccgcagcttctaatctcaagcgatgccgggcagctattcttctcttctgcaggcccaatacccacgggatggagccttctatcacctctgtcgcttagcactacgctgcatctccgtagcggaaaatccccctctacgggactatgtgcgactaatacgtgcaggaaacccttgcacacgcacacactatctctcctccaatagcacccacaggccactggagccccaccccacctagttcccaacctcatccgaggagcgccctcaatgacgcgtcgatccaaattgttcactcccctttggctcgaaaaccccaactcccaggccttgaatgtatacaccctgctcggactcaagaacccaccccatgcccctattacttgacagtgacactctctgctatactcctaccaccatcctgccatagcacctcactcaacagccttctaagcacacacgacctgccgccttcctcatcgcatctcacgcgcccgctcatacaacccacttcttaccaaacacccgcgtaagaacgaggtcccctcctaacaacccgcccaaccacgacacgtccccatcggacgtagctaccgcccaaggctccctagacgacgcacccctgccacttaccgaccacaggccaacaccgcaaccatcacttaccccatccaacctagcttctccagcctccctcgcagaacaacgcttcatccagaacccctcgcgcccctaggaaccgcacgccaacgcactcttttgccttcctcaattaccgacccg

SEQ ID NO: 274506 - DNA, 367 bp, Glycine max
tcaagttgcttgttcgccttggccgatgttcactgactatgttaacgacacatggattatcctccacaaggaaaaatttattacagcatggacgaataaggtcatgcaactaggcaacacaacaataaacaggtattaagaactgattttatttgttagtaaggattagtaataaatggtatttaattgttgtatattttcatgtttgttgtgtattttaaatgtatggttgaatcagctcattgggctctcaaaagagtactacaaaatagcgttggagacctatgtagtgtttgggatgccatgaacaacatgatcacgctgcaacacgtcaaaattaaagcatcctttgaaaccaatacgcatg

SEQ ID NO: 274507 - DNA, 558 bp, Glycine max
  unsure (1)..(558): unsure at all n locations
agcttggacatacaaacttgtaaaaattactgagaattggttactttgaattttgagctgaaatttttactgaattttctagaactctggaaatttttttgaaaaaaagaaccagttgttttggataaaaggaaaaaataagaaaaatcacacatgttggcagaaaaatcagtatccagaaaaaaaaagtgaaagggaagtgtgcttgttgttttggctcaaaatttattctataattggttcctatcttataccaatcttagttcctaaatttcaattgaaaattactatgaaaacaagtgccaaagctagaggtttgttgagtctttttgtttttgtttttttgttttactctactctagagccattctaagtttatctttgagtcctagcttgcttctatgtccttttcattgctttaattgttgaataatccttgaaaaattgtcttgttaaaaatgtattggtttagctttcatttcattttttttggtctttggntattgcttgtctctttgcttcttgttcggggttgccatatacggaattggaagaaga

SEQ ID NO: 274508 - DNA, 387 bp, Glycine max
tcctttgtgcacatttgtctcatttttttcgcattcctttcaccccattcaagtaagtgccctctccatctatatttacctttgcattgtgatgtttggtgctttatttgttgctttctttgcaatgtttgtgaggtgagttgtatgtaaaaccataatcaaatgctttgattggtggctgtgttggatggctctaagcctatctttggttcttttacaaatttgcatgtcatgttgctctttatccctcatttatacatgttttaacatgtgcacaccaactgtttgatgaaatgtcacaatggctattctatgtgttattttgaagcttgaatgggtaatgatctttacacattccaaccattattttaggtgtatgatcaactt

SEQ ID NO: 274509 - DNA, 398 bp, Glycine max
gctgccgctcgtctaatctacattgactgaggacgctcatgccattcttggcataagagcatcaccccctgccaaaactaactctcccaatgttcgccttcgaaggaaacgggcccaaagaacccttcttcaaagaggtccaaaacagataacgcatccccaaggaactagttcccatgctgagtatgacagtcctaggtttacgagcgcctgtcaccagcatcgcttcgaggacataaaaggatggttgattctatacgagcgaagcgtacatctcagggacgatgagtctactgatcatccaggaggaaacatggcgccggtggcgggcatcactggctactcccatcgcccaatttgaatcacaaataccccttgagttttatgccaatgcttgg

SEQ ID NO: 274510 - DNA, 363 bp, Glycine max
tgaattctaagagagcacaaatcctagacttacccaatttgtcttttcaatccacttagcttactcactagtctttcacttgactttgttctaacagcacacacactttatttgaacttctctcctttttttttaacacataaaacattttattaatttgttgtgtgtgttgttgtttcttacctttaaaattatccatcaaaccaactcccccaaatttgaggaaaaattgtcttaaaccaatgtgctctcctaaaaccaaagcatggtaaatggtgatgacaatttcaaagcttaaggttcaatttgacaattacaattcagttcacagatgggcgcaaatgataccatcattgataaaca

SEQ ID NO: 274511 - DNA, 400 bp, Glycine max
cgcttaaccaattagatggaacaattggctacacagttaaatcaacaccactcccataattttgacatattaccttctcaatctgtccagaatcccaaaaatgtgagtgccattgcattgaggtcgggaaagcagtgtctagaacctcaaccagcaacatcttcctcatccgcaaatgaacctgcccaacttcactctactccacaaaaagatgatgacaaaaatttaaagagtaagatacataacaatttctatgcacgtgaatctaaagagaagcaggatatcccttttccattccctccaagaccaattttcaacaaaaaaaaggaagaagtatagaacgagatcctgcaaacatttataaaagtagaggtaaacatacctttgctggatgcattaa

SEQ ID NO: 274512 - DNA, 437 bp, Glycine max
tgttctttggccttctaaaaacatgcaattgcttagttctttgtctatctgtttcactactactattcaatcaaatgtagtttgaactgcaatgattcagaatactaattgccattttaacaggtgattctaaggaaattgaagaagtagcaaaagcaaagcatgagtttcactggctaaagttatcatttgcaaccaactttttcactatggctaaagttacaacaaaggaaaagtttcactagctacgttccatggatacatgtaaaatattggtaagggtatgggattttgaaaaaatctagggtacgactttggtaatataaattatgcttgtttgtatatatgctttttttattatttatataacatttttatatatatgtatattttttggaagttatattaacatactcataccttagattttttcaaaa

SEQ ID NO: 274513 - DNA, 201 bp, Glycine max
cagcttattttggacctcgaacaagcatttaacttctctttcagaaccatgctatgtgctcgcgaccggtctctttttttccttcgcaacttggagatactattgctaccccaaatagctcctcgaaacttgcttcggacatacttttgcctgtcaaccatgttggcttcttggaaaaaggccctagcggtcattgcggtg

SEQ ID NO: 274514 - DNA, 453 bp, Glycine max
taccctatttataccgtgtttgaaagagtggggtaatgattctgcagcaatttgtgtttctttagatttttcaatttagtccttgccacattggactcaaacttgccacattgggttgcttacgtggactgaggtgtgccaaatagacatttgactaacggaataaattagattttaacagcaaggacttatttgcataacggatgtaaagatagggactattttgaattaaaatttaagttaaggactaatatgcaaactggttacaatctcagggactaaattgcctattcactcgtctctgtgtgctatcaggcttttcgtcttacagacagcaaaaaagaatgtttatacggataaccactcgggtatttccgtccgtcagcgtgactcaaatgtcagtatgacaaaatcttgtgagcgcgaaagatgacgtaaatctctgcgtatcaa

SEQ ID NO: 274515 - DNA, 534 bp, Glycine max
agctttgctgatgataatgtttctaaaacattaagaaagctagcagatgagcctaaaagaagtgtaataacttggcaaggatacgatataacatcggtgatttaaataaccgatgttgtaattttatattaacatcgattttcggaaaaccaatgttaacgataatactttcaacgttggtactatcaacatcggttaataaccgatgttgaatccttgttttttagtagagtcatgcatatttaaaattgaagacattgctcaatttttacttaaaatgaataatcataactaatttgtaatagatagtgagaaaactcacttcaaaatcacaaacataaagatttctttgaaaagtatagtcagtattaaattcatattttataatttaaataaatatttttttatattattttgaattctaatatgctattgattatttagtttaaattttaatacatatatgttagtagatgtatttaccaaaaattggaacttacgcatgttacggtggatgtggccaatgtgagctcc

SEQ ID NO: 274516 - DNA, 388 bp, Glycine max
tggttcgaggtacttacccgttgaagatcgaagaacgatgaagaacgaatgaagagcgtcgaagaacggttgaaacctttgcgagattcctcacggaaaacgttacggaaacgtttcggaagcgcctcggcttagattttcttcacggaaacaatttttccaagcaaattcgaaagagagagaagtgcctaaggggctggaccccttccttcttgctttcctcccctatttatagcaaaataggggaggtggttgccgcccagctcgcccaggcgagctcagctcgcccaggcgagcagggttgcttcctccagaagcaaccgccttctggaggaatcttctggagggcccaagtgggcctgggtgctatttgcacccccatttttac

SEQ ID NO: 274517 - DNA, 1089 bp, Glycine max
  unsure (1)..(1089): unsure at all n locations
cgtaattgtagacggttatagttacagccactgtctcaacctactgtggtctagattgtatctcccatcttttaccttcaaatcttacattcgcacgtgggctggggctggaaactttacctccctcttantacaggagacctttaaaacagtatcgcaggcatgctagcttgtacggaagcatattgtggatgatggcgtaaccaccacaacagaaggtggtggggagcttttcaggaaggaactggtggctcatcaggagaacaacaccaaggacctgaacgaggaatcctgtagaggaccctggtgatcgttcccttcatgcggagtctcgacataataaaggcgatattgtattaggtttggccggaccctctttgggaccctacctcatttttcctttgtgctataatgttactcaccctcgcggcggtggggttagtcgcgcgacttacctatcggccattggaacaggtactcctctttttataaacaaccacggactgtgagtataccctcattgctcccacgataaatattgtcctttggtcctttcatacgtcgcttcaggcttctcctattgaattttgtattctgcgggtgggaatatagaagaactgctcgcagggatagctaaccggggtatatacaaattaactcctttaatttgtcctcttaaatgatgcatccacgactactccttctgtgtttattatatagaagccacacttttggtatcttatttgtagactaactctataatcttcctgtccatgacattcgttatttgtccaaacgcaataaaaacctaccagggaaaatatttattccatccgttttttatagaagataacatggtttctctcctatcgctttatattaggccgaatctttactatcaaagtagtgtactctttaccaggaagaaaaactcgcaggccttctttccaacaccaaccttacggagtggcacatcaatgcctctctcataagatccttatacatactcaaaatccgacttcttgtcaccgtttatatgaccactctccaaccatgcgtctggcctaggttccatactcacatcacacc

SEQ ID NO: 274518 - DNA, 426 bp, Glycine max
tattggctgttgcattagaggacaagaaaaaaatactagtatatgaatacatggttaatggcagccttcactcctttgtttttggtatgtaatgtaaagaatgctttgattagatgcactagtgttattttttttaacttcagtcacatttaatttaccagcttattaatcttgattaacttatttgctttgacaataaaaaaatagaccaaataaaaggtaaatttctatcctacacatgtttttttttttttttttaattttccagccccacaacctggtatggtttcattttcccgagcacaacacaatagtgccatcatttcttagacaaaccaaaacaacataaggagttggctttattatttagaagaagagacaatatatgggaaggttttacaaaaatagcagtgaacacccggacaa

SEQ ID NO: 274519 - DNA, 1112 bp, Glycine max
  unsure (1)..(1112): unsure at all n locations
gaggaacgaccggaaaccccggcccagcacctctcnctacnnctnccnnnctnttnnnnnnannnnnnccnncccccggcgggcccgtgggncgtganntcatgaaanaacccgcaccncnacacccaccagnagncccgaaaggccagcaaaacgcaacggagacgcgaggcgcccgctttttgtcccacaccacacacacacaacccgccccacgcgggaaccgcaccgggcggaaagcaacgcaacaaaacgacaccgaacgcacctaacgagaacacgacgactacgcgcaccccaaccgangagacagaacgcacgaaacgcaagcggacaaacgaacgccaaaacacgaaccagccccaaacaaacagcacacataagaaaacctgcaacccaaccccgcgcagaaagccaaaccaccgaacaacccacaggaccacgcccagccaacaaccgcgcacacaagcgaccacaccgccacacaccaacaccaacgacacacccctcagcccacccacgcaacgcccaccacacacacaacccaaccacacaagaccccgcgaccaatacgcaaccccacacaccacgaaccacgcgacccgcaccagacagaaacaaacccgcgcccaaccgaccgtacgaacacacgaactaggacaaaaaaccgccccgcacgccaaaccgcgcacaaccagaacaacaagacgcacgcgatcagaacccacacgcacagacagccgccgcgccccaagaaacacaccgcacgccacacgaacgcaccaacaagacacaacgaaaccacagcacagcgagaccgcacgccaagcaaccgacacagccacaaacacgccgccccagcgaaaccaccgcaccacaaccggcaacacaaaaacccccacgcaagcaacagggcacaccagccacccgcaaacgacgcagaagccagggccggcacaccgcagaggaaccgacccacagccaacgcccacgcgagcgcaaggaccgcgaaaacagccaacgggaagcgcaacgacaccgaccacaacgccaccgcgagcgccgccaaacaccgaggcgacgacaaccccacacccacgcgaaacgcaacg

SEQ ID NO: 274520 - DNA, 592 bp, Glycine max
agcttcacatggagctacatcaagtcccaactatttactctataattagctctcacagaattacaatcccataaaattcttcaaaggttaatctatttgaatctgtggagatcaataaattaacatacttccctcaattcttaaaatttcattcagtttatctaattattaaagacactaaaattgtgtcctcttcgtaacaaaaataaatatttttacattggttgtcaatacaataagaaatgtttacatgattgctaatgcaattgctgtaaaaaaaggacatccttattgaaatttgtgactgatgtaaatagacatttttacatcaattgtcaatacaatcgattaacattctctaattcgcgaatgacacaatctttatgggtgaagcatccttgaaaaatttgattaccataaaatgtatgcttagatgctttgaacttgtgtttggactcaaggtgaatttcttccaaattagatttgacaccattggtgtggctatggaggatatgatgaggtatgcaaacttgttaaattgtaagaatcttgatttcccttttctctacttaggtatgtcccttttatttac

SEQ ID NO: 274521 - DNA, 384 bp, Glycine max
tggctctggccaccagaaccatctgattcttaagctcatccatcttattacagatgttgctgtcatgcaagtgcttttctgcatcaaacaaatcaaatttgatcttttgatcatttacacccattttcattatacctttccccatatccaccacacaattggcgattaacatgaatggacgacccaaaatcagtgggatctcagtatcctcttcaatgtccatgacaacaaagttcgcacagaaggttaactgttgcaccttgaccaaaacatctttaatcactccataaggtcttgttatagatctgtctgctagctatagtgtaattctaactggcataatcttcaactctccaattcttctgcacatggatagcgacgaaa

SEQ ID NO: 274522 - DNA, 108 bp, Glycine max
tgcaagctttgatactagatgatgtgaacatgagtatgagtggatcgtttgatacaggttacgaaggtttggatgatgctatttccgatgaatgaagataagttaggg

SEQ ID NO: 274523 - DNA, 353 bp, Glycine max
ctataggagacggaccattccaagtgttggagaagattaacgactatgcctacaagattgacttggctagtgagtataatgtaagtgccactctcaatgtgtctggtctatctctttttgatgcagatggaggagccttggatttgaagacaaatccttttcaagaaggagggagtgatgaggacatttgataaaatttggtgagaggttctctctgggttccttgttgaaccaattatcagacttatcaaggtaatccttgtggcgtctacccagacttatcttccttcattggaagtggcgtctacccggacttatcttccttcaccggaagtggcgtctacccagactta

SEQ ID NO: 274524 - DNA, 437 bp, Glycine max
agctttcttgagaaaacttccttgagaagcttctttgagaagacttccttgagaagctagagcttagctacacacacccctctcataactaagctcacctccttgagaagcttccttaacaaaattcctaacgaagctagagcttagcaacacacacatctctaatagctaagctcacctccttgagatgagaagctagagcttagctacacaccccctataatagctaagctcacccccatgacaaaaaaaagatgaaaataccaaaaaaaaagtccttactacaaagactactcaaaatgccccgaaatacaaggctacaaccctatactactagaatggccaaaatacaaggcccaaacgaaggaaaaacctattttaatatttacaaagctaagcggcctcacacttccccgatgggctcaagatatacccta

SEQ ID NO: 274525 - DNA, 389 bp, Glycine max
tctcggtatattatgcacctgaatcagacctccgggtgacaagttatgaccatttgaatttctcgagagcttccgttgttcaatttcgagcgtctcgatatcttatgcgcttgaatcggacctccgagtgaaaagttaagaccatttgaattgctcaatagcttccactgttcaatttctagcgtctcgatatattatacgcctgaatcggacctccgagtgaaaagttgtgaccatttgaatttctcgagagcttccgttgttcaacttagagcgtctcgatattttatgtgcgtgaatcagacctccgagttaaaagttatgaccatttgaatatctcgagagcttccgttgttcaattgcgagcgtctctatatgtgatgcgcctg

SEQ ID NO: 274526 - DNA, 234 bp, Glycine max
agctttccgcaagacttacggaaagatcttagagttgaccttatcagaggaatccataaaacccatggatcactcacccaatactacaaccagcctttgaaatgcttcacattcggagacttccaattagtaccaaccattgaaaaatttgaggagattctaggatgtcctctcgggggaaaaaaaccatatctttaatccgggggtttcccctttttgaccaaaatggcaccg

SEQ ID NO: 274527 - DNA, 477 bp, Glycine max
caagcttgtccttggattagacatgattgatacatgatttaggacatctaggattcaatttgggcaaaattggatgaaggcatgagtggttttcgaaaatctgcacttatgcagaattttgctgtcaaataggtgcggcagaattttggctttgtgcagaaaaatgcttgtgtggttggctgtggaaagagtagtacagaatgagttctggatgtttgctagtagatcccaacggtcaaaatgtagacttatgtactagagacttccagtaaaacttttgagtcgatccaacggttaacgaattggaacgaaggaaatgttactggggtctttaagtcagaaaaagttgtgattttggtttgagttttgggcagagttttatgtctttgccctatttttcttggtttgttagtttgtgatgatttggatgttgaattacttggatgttgtggaatcttgggtggattgatggggacc

SEQ ID NO: 274528 - DNA, 600 bp, Glycine max
agcttatggagctgataaccctttatttgtacattaataagtcatactgcccaattgaaaagcctcttccatggccctcaaaaatgacaaaaactctctatgaataatgttggtaggttccaaattggcaatgtcaagcattattggtatggaagtgttgtcaacaactaaaaagtagcacatttgaaacatgatgataggaatttgcttgttcaaatgttatccaacaaattcaatggaaaggtgccaattactctgtacaattgcatagctgcactccaaatcaaaaccaccctcctcctcttcctcttcttcttcatcaccatttccatgcccttcaccatcgtcctcgaatcagaattctatttctaataagagttagtcttcgaattactctcaaattgatcagattacactctccctcttctgtcaacttataatcaacctcttcaactaacaagtttgttagttttataaaatatgtagttcagacattaaaataaaagaaattataagtttattgctgttagtgtacctcctaatcttacaattggaaaacttccctattagttcttaagagtaccatcaagaacagggaat

SEQ ID NO: 274529 - DNA, 369 bp, Glycine max
  unsure (1)..(369): unsure at all n locations
taagctccttcaactgcacaaggctcttaatatttgaagagtatccttgtggaaccttcacccgacaaagacactgaaaaaaacttatcttctcctttttggacaaagtatgagaagctgggggcaagtaaattttcttcccatcagaccttggatgcaactatgatcgtatccccatcttagctagatcttgacgggtatttgtcgcaaatgcccttttgcgggcgtgtgaggcgaggctcacgtgtgcgctttccaaaggaggaaagatgcgcggagtcgccaccaacgtctatgtgtggaaaacgtcgganaaaccaaaggaaaccggtcaaaatgaaaattctaagttcgggaattgtatttacg

SEQ ID NO: 274530 - DNA, 551 bp, Glycine max
agcttggccactgtatatatataatgtttcacatttgggtctcaatatatggaacacctttttctttcttttcaaatccaaatataatgatgctaattttgaatttatgttgctgccttatctattctgttattatccccgggaagctgggctcaattttgtagacatccaacttaactaattttcttcttcggtcaatgtattcaaattgcagcgaccagtgaaagagggggcaaacatatctgaaacagtcaagataagttaaacttttttcaagtgttcaagcagttttttagtgtgagaagagaaggagagacattgctgaaagctcttccagtgttatctgtccaccacatctgcctctctagcttgtctcttcatatccactgataaggttgccttttgccatgagagttcaatgagaatctctactcacgccacatgttgacgatcctttataggtcaatccttaagtagtatatacataaaccctctcatatttctctgtctcttttgatgccagatttgctgaagtatccaaaagtatatat

SEQ ID NO: 274531 - DNA, 422 bp, Glycine max
tcgacctaaaaaaagagggacaacaatatcagtgcggtgcatcttaagattcttaagatttgcatgcctttatttgaaaggtcaagaagatgctttaaggagacgctatcagcagctctcactttcaaatttgcatcatcacaggacctcttatctaaatcagacggtaacaattcaaatagccttatcctgctttgactccctcgtgcctcctccaccccaacgtacctttgcaacaatccctgtttgtcaagtccaatcattatcattataatattattgaaacagctctttttgcttttgggccacattactcttatcatcattgcacattctaccttttttcatatgtcccttctattttttttccttttaaagtgacactaaataggtcttctttattagtgggggcaattttgagt

SEQ ID NO: 274532 - DNA, 463 bp, Glycine max
agcttgtcttgtgtagaattacggtacatatagacacacacaatttttgagaattccaaagcaaggacaccacaatgctaatttcgagataaaggctctagaggcagcatgaggagcagttttgcagaaaagcctaaggttcttcaattagagagagattagtgagctgcagagtgattgtgagatgctgaaaagaggaggagggatcccccttcttgtgtaaggaaaaattattctatactctcaatctcatttgtgttagggtttttctgttatggctggctaaacactcttgttggggatttctaaggaacaactgatgtaattactttagtatctaattaattgtgttttatgtgtacaaagctatctttaatgcttaattactgcatgctcttggtttaatcacccatttgtgtgtacacctaggcgactttagaattgggaaatgtattgttgccat

SEQ ID NO: 274533 - DNA, 427 bp, Glycine max
tttaattgtagcttctgcatcaaacagtcaattgatgtgattttatcgagtctggatgcggttccaaacatgagctaagccaattttagtaaatgctctcttttattttagtttttatatttttttaaatgattctgtaatatttaaattttttttatgttacctcttcttattactttgtcattgttattcattaattattgtgatgactaaattagtgaggcctaagattaaaaaaatatgttatagtaaagggttaaaaatacaatatatttatagaaactaaactaaaaattatattctttataattgataaaaaaaagtaaaaatattatctaaaatggtgtcttattaaattgagttaattatattgactctcttaaagttttggtttattatagtctatactccatttttttttactttt

SEQ ID NO: 274534 - DNA, 803 bp, Glycine max
  unsure (1)..(803): unsure at all n locations
ggggatganttatanacatgaaggccttgnaganccctnagatgactggaacatgtaagctttgaagttagtggtgaatgtatttaaagttaacaattttatatggagaaattaggagtatatagaggtgcagtagtgttggaattgtgagatataaaagatgtgtgggatattggatatatgttcatggaagggggaacaatgatttataggatagatagaagattactgtagaaatggttagttggttgttattaatgaaaagggagaatttttggatgtgttaaaaaatttaaagtggaagttgaaatataatttaacggaaggaagaatggtgtaaaatttgatgatggaggtgaatattatggcagaaatgatgggttaggtgaataaagattataggttgttgacgggtaactataggaatgtggaaaatgtaataactacataatggcggggtaagttaaaatggaaggtggtgtttaaanatctaatataaattttaagggaagggaaggaaatatgaaatggtgtcttaagtaagaaaaatagttttcggataagagttttagaatgnagattacactttaaaataangtaaataaggaattataaaaaatttaaaagtttgtgttggggggtangctaaattaaacaattttatggtaaggaagtagatgtgggaggggttttaaggaacagaaaggaaatatggttcctaagaacgaaacgactttatggctggttggaaagaaggggggattaaatgtttgatctaattgctgananttgttctgtagaag

SEQ ID NO: 274535 - DNA, 417 bp, Glycine max
tgccacccagctcgcccaggcaagctctgctcgcctaggcgaacattgtggcttcctccagaagcaaccgtcttctggagggcccaagtgggcctggctgctatttgcatccccatttttactaaatacacccccaactttgttttgtgcttgttttttcgcaaagttacggaaacttatgaatatcgtaacgatacttgctttctttccgcaatgttacaaaaccttgcggatttcataatcatccattttttgacttacggaacattatggaatctcacgaattgtgcaacgaggcttcctttttgatgtctggtatgtcacggaaccttactgattgtacatcaatactatcttttgatttcctgcatgttccaaaactacacagattgcctaatgatgggtgccgagcaccac

SEQ ID NO: 274536 - DNA, 465 bp, Glycine max
agctttgttctttttataaaacgatatgttttgaactcatcacattatctaaaaaaccttgaagtggatccaagtgctccgatcattcattggcatattcatgttttggtggcgtactcactgttgtttgtttctttagggaattcaccataactaagaaagcacaaaggcacccctataacacttgatccagaaaaatggacaatgaagagggcgtgcaagaatagatgaaggccgacctatcagccttaaaagatcaaatggcttctatcacggaggccatgcctaaaactccagaaaactataaaggataatgccacgacgaccgcctccaatgcagttagggaagcggaaccggtgctacagccctgcaataaacttgggcccaaataaaaagacaatggtgttccgtccgaagtatagtccgaagcttacccttatggcttgccttcgaattaacttccc

SEQ ID NO: 274537 - DNA, 399 bp, Glycine max
ttgatggtgttgaaaagaaatcacatgtggtgtctttttttagggggagaatgtgaatgtatgtatacatgattttgatgatgtcaaaagaagaatcaaacaagactcattttgcttcaagattaatacaagattgtttcaacaaacaaagccttgattcaagatttcttcaagatcaagccttgtctcacaatgaaaggtttcaagtcattcaaggcacatgtaatcgattaccaatacatgtaatcgattaccaatggtttgaaattgtgtaatcgattacacatcatatgtaatcgattaccagagactctgaatgttgggaattcaaatttaaatgaagggtcacaactgttcaagaaaaacaactatgtaatcgattacactaattctgtaatc

SEQ ID NO: 274538 - DNA, 592 bp, Glycine max
agctttcaaaaatttctccttatcgtcaaaagttaagtccaggtaaaatatttattttcttccatcataactcttgatcaatgtacatgcatacactatcaaatctcaaagatatttcattattctcagaaaaagcaacatcacttgtaactttcctcacactatttgtttcttatatcatgtctttgagtgagaaaaatgataaaaagaaatttcttcaaatgcccatccaaatcgattgagtaacacaattattaaaatagaagaaaatttaaaataattttgttcactcttaatttatataatctgcactaataaaaatagaattatataatatgccatgtaatcctaaagaaacgggactattaaaagaatatttaaaaaaaaaacatttaaaatcatgataagaatgtattagtaatattatttaagacaattattaagtactatggaaaaaaatgtaaaattaattatatctttatgaaattatttgtatacaataactttttttttctacccgtcatgaaaaggataggaagacaagagatacacttacagtatgttatagtaaccttataacactagatgatgt

SEQ ID NO: 274539 - DNA, 366 bp, Glycine max
ttacctctccaattccctatctctttggtggcctagccctcatgcttgcactcataggattggcattacttatcctagcttgctcttatagtaaaaattattcattggatggtaatgaagacaaagcgaagagggcaacgggaatggaggttgattcaaagcccaagattgttgttataatggctggagatagcaaccccacttacatggccaagcccgtgccatccacacaccatactgaagaagcagattagagaggtatttcgtgatttgagtcatccaatgcatggagagaaaacaccgaattacgagaaaaagaaatgaaaatcctcctcctcttgatgtttcttgtttatacgtttacct

SEQ ID NO: 274540 - DNA, 1011 bp, Glycine max
  unsure (1)..(1011): unsure at all n locations
caggccnaagcgctgtaaactaggactatcaaannncnnnnnnatgggtcacaggcgcaccgggacaacaaccnccccccgcggaaagcacgtttcttgggttattacgagcccccncannnctaggggaccctgcgatttctaacacagcgacaaccccctaccacctacaccatggcaaacaaagcaacgcaaagaatcccggaacatcagcaagaataaacgcaacccacaaggagacccatactccaacacgaacgaacccgagaaaccagggaacaaaaacaaaactcaacagacacactaaccacaccatactaaaaaacaaataacaaacacccaacactcaacaacggggggggggcgggcaaaacaaccaatacactacaactcatcccacactcaaaaaaaaaactaccctacacacctaacccgcaaacactattatcacacaacagaactcacccaatcacacaaacgcacacagtcacaacaccatcgcagctaagaacaacgacaataaaatacgagacggacgacgcgcacccgcgcgcaaaagccgcccacaaacacgcaatgcacactgccgactcactggacgacaacacgacaagaaccgacaagacaacacaagaatgacacggacatgcaacagggacccgcctaatctcacggaacacaaatataaacggagggaacgacagaagcgcagtcnaangacaatactatccaggcgacacaagagcgaatcgactaacaacagcacatcactggtagcgacacataacacgtacggaaaacgaacggcgcacgcgacgcacaaggcacccgagacaacctaatcgccacaaacagacaagcgttgctctgtaatacaccagaacagcatgccgcagaaancacgactagagtagcgcacccngactccgctcacagagtatgaaccactacacacagaatcacacacgtcacaacaggtacactgcgatcggcacaaggtcactgcgccgg

SEQ ID NO: 274541 - DNA, 381 bp, Glycine max
agcttggtcaggttccatagggcatactgctagcattattgtatcatagcacaatacacacactagaggtgatgcattggatttatcaacatcatataatggtgccctcaacgataaagttaatggagctaaaactataccttagatatttataacattctttgacagttacatatacaaagaacctgtccctacttcctcatttttggtgttggagtccaactgcttaaagatatgttatgctatatgctcgcttactaatttaacaccttataaagaggtaatgtatccattaaaactgacacacatagaacgagtggcgcatcactgataagatagagtttgtgtgctgaaatcgttgctagtcatgctacttataac

SEQ ID NO: 274542 - DNA, 749 bp, Glycine max
  unsure (1)..(749): unsure at all n locations
ccgcggntttgaatcgctgcctagaagacaccatagaaatctaagcttgaccacagcagacgaaaaatgcacaacaagcttgttcgtatatcattcttgggtacgagaggcactcgagaaggcgtgatttataggacaccatacatcctataacgccacgcgtccgacaaaagactgcagactacgtgagtggccatgattgccaatgcagcatgcatatggaacgggagccacatagtcacacatgattgcacattgacaccacatgagcaccaactacttgaacaatgatagcgtgcctcaaccctgacgccataccataacttctacgaacagtggagggtagaggagaaaagcgccatgcggagactctcatgcaaggcgctgatgatgaccaactcattcaacgaaggaccgcaagctacgggtttagctgaaatgattggagaacatcagagcccattcatggatgtgtttacagaaaattgtacctcatctttatccattaaaggtgcgaaatataatacttcagacattgtatttgagaggaccgctcaacaggttttcggggttacttcatgtatcactcgagtgttattaactgtcgctctaacatgttccaaaccgctgtagagtaatgtttattggaaaattaatttctataccaccacagtcatgggcatagctcaacttggggaatatcatcttgatattacgtatgagtagatatggacctccctcggcccccc

SEQ ID NO: 274543 - DNA, 812 bp, Glycine max
  unsure (1)..(812): unsure at all n locations
agccccgtcctttaaacatgnatgtcnccttggaaacccccccaatgacgaaaacaccagggcgttcatggacgggggaactatctttttttccctcgaaacctaccaaggggcgacgaagggaacgttctaccctcgcaacatgattcactattcatccccctagacccctcgaacccgttccatccatacctcttctctgcagccctctaggcctccgataaacggtctagcgaatttatctatctatctcgagaacagtacacaccatcttaaacccgtttttctggcaactcgcacctcttctagctacccccgactcattaactctcactctgcagcaacgacttccgatgtttcaatcttcggcctacgactacccttctttcatcacctaaattcacctacaccataacgaactcacctaattaagtataactcactatggttcccctcccaatgctttgaactacattagtacttccagcccttgatattcactataacgtggttccacatgcacttatagcactccacccctatgacagcaaatattgctcgcccactcatttacaaacacaatggaaaactcctctctccatgtcactcacgcaccttatcgacgaaactcaccactctaccatgcgtcccacatctcatacgcctcctaacttcgcatgtaccatacatattagtatcgctcctccctatcattggcaacctattcttcacgtttacgcatgcgatctcaaggccagagtcttccccctaaaactcatgtccatcaaccaccgctcaatatacaccctccc

SEQ ID NO: 274544 - DNA, 895 bp, Glycine max
  unsure (1)..(895): unsure at all n locations
taaaaacaatacaaaaacaatcattcttcccctttgnnntantattattttaaaaaaaaaaaaaaannacgagactgaacactgaataccnttnaatatcgaaaaatccaaagaaacccccccaaannagagaagaagagaattttttattttcaaacaacaaacncacgggggggtttggaaaaataaaccccacccaaccaaacaatccatcaacaaaagcaaagaagaataaaaagatcaagacaacacaaaacacaaaatagaaatcaaacaaacatcaaacccacaagaaacaatccatacaacccgtacaaaacaacacaaaacacaaaagagaccaataaaacaaatcaacacgagaaggaaagcaaacaccgacggaaaaaacatataaaacaaaagcacaaacacacacaacatgggagacaaaaacacctatcgacccaagaacaagaacaaaaaaacgttataccgaaaaccaacacaagaataacagcccccaagagcaaacaaaaggaaaaaatccacaaacctcacacaagcaaagaaacaagcaaaacacacctctacaacatagcaaagacatgagaaaaacacacaggccaaaatacaagaaagtaacaaaccacaacaacttaagccaacacaaaaaaaaaacaacgaccaaagaaaacacacctcaacaagaacgaaccacactaacaacacgaaaaaaacaaagcaaccaaaaaaacgaataaacaatgatagagtaagatgcaagaagagacaaaaagaataaaccgactcgacacgacatnacacaaaaaacccaaanntccatcagcacaccagcaactcccaccccacgaaacgaacacacaaaccgcacaaaagaaaaaagagaaatacc

SEQ ID NO: 274545 - DNA, 1640 bp, Glycine max
  unsure (1)..(1640): unsure at all n locations
ccactggggnaggcnnnnaactttctacgccnttttgcancnntntcnnctagnnnanaccccttttgcnnnannnanannncnnnnnnnnnananannntntatgngtncntanngngnctgtctcacnantgggagcacatgtcacatantcnannncgnncaacacncgccgtcgaaaacgagagagggaggcggtgatatgcgcanncnngatannnatcgaacngncgacccnccacncncaanacancnacacncggggcgggcanatatgtgagttgtgtcatatcatattctctcgacnacaacctaccactcaactacaccatccccactcactacacgtcgcntnccnncatactgcataaacctagtaatcaagataacactcatgacttacgtgacactgcgcacagacantgattatatagcacgtcatcagcagcaacgcgactatacatatatctatatctcaacttactactatcntgntaacaaatcgcttcancatcatctgccactatcaccctacatagcctaacgatcctacccgcgtctctcacactcatcnatcngtcccaatcactcatccacatagcgacctcgtgtacatctaaactgaccngctacgatcgccactctcacactctacaactctgtatatccatctaacctgatacaacatactataccctctaacatattntcatatcgacacaccagatggatcacaatggcaacagagacagaagcgcaatgtgaccacacacaatcaatacgctcacacaatcatcatacactcaactccaacancttatacactcaccacctcacaacttactaatcaaacacatcatcacgtacaatctatacacctacntcactcaagcacatattctatactatctatcggtctaccaatgatcgtatagactaaatacatgatangctagtantaatactctatcatctatcaacataccatacctcctatcaacgacggcactatctacacacccctattatacactagcacaaatatctatcaacgcataagagaaccatatgacactgcatcttaacagtactcngacaacacacacctaaactactacaccacttacatccntataccgcatatcacgcacacaactcgcanatctcactgcgcgataagcgtgtctactccactactaacaatctaacagtacacatacaccatcatcacacatcgccactaantcgtagtctncgacttcaccttaattatagngatctctcgggccagcacacacatgacttcattacactcatantatctagtctgcaactacaaccactctatagcaccgcgcacgtatacatgacaactcgacacatatctagtccaatacttatcacgtcatagcgtcacatatgtcacgatacatcgcactagatgtcgcatcatctctagatacgtacgacagctanacgcactatcgcacgttactcgaatatagacaactcacgctatacccgtctaactcacacacgatatatagtatatctgatacactggcacatccgnacatcagcgcactacctatacgtactacaccgtatatctgtactntgcgacgangcagccactcacg

SEQ ID NO: 274546 - DNA, 896 bp, Glycine max
  unsure (1)..(896): unsure at all n locations
agcgggttgatcgtcgacatganaanccttnantatagaacacancnacagggaagaaananaanggggggggggggaggttaatctctttttatttagacggaatgacgggggggggggtggtgttataataaaccataccccccccacaacatataagaacaaaaatattggtggagatcctacgcattgttaggattggcctccaacggaagcatagactagacgacggggatccgtcacttgatcgtgatagtataaaagtagcataatcaaacaggatatattctgcaatgcaaaaaagaaagagatgagtagacgcattggacgaatcgtatggattacatagagtaatatgatgataaacataccataaagcgcacatataacacaagcaaggtcgcgatctatcgaaatctcggagcatttacctataatagttcaacgccgagtctatgatggaaggtaataatagagtaaggagaaaatataggaggagaccgaacggtcagaataagcaaattaacgaagagaataaaggtgacgggcacccgaagggaatacaaagtgaagttaatttggactataagcgattgctgagtgagtagttgaaattatacacgaagatccacgatggaaggcggaacggagtgacgaatggattaaatgaacggagagctggatcagggtcaatagaatctattctattatatagactgcgactaacaggctcggacttgacgcggtacgaactgagtcggataatacactgtgcgatacgaacagcggacccgcgggttgtcacagctgatggacgtgcatcaggcgtagtggagaagacggcgacactcgaatataaaaagtggaggcgctgtgatttatctanagtagaaacg

SEQ ID NO: 274547 - DNA, 1232 bp, Glycine max
  unsure (1)..(1232): unsure at all n locations
tagatgatncggcangnnntgaannattgatgcnactgaanaaccactcgnaananancccttccnnntattngtgttaaaagggctcgccnnnatnnntntnnnaagagggtgagatagagggagaagtttatnaattttttaangttaattgaaaggaaaagagaaggaaggatgggggtagtgttggtatattatnaaaagtaatatagatgagagtaattaaggaataagaaaagaagagagaaattgagtggatggatattattatgaattggaaaggagaagtaaagaaaatgaattaatagtaagttagttatttaatattttattaataaaaattaaaaaatgataagaataaaaatgattatggaaaagaagggtangattaatatattaattaaatataaatatataaaantaatgtaaaaaatatttaaaataaaaaatataaaaaaagtaaagataaataatgtttgggtggtattttcactaagataatgtaagaggaagttatggagtaagaatatgaaatgtatagtgtaatgaaatagattaagtaaatgtaagtgtacagattagtattaataggaagtgtagatgtaaaaggtgaatgatatagtggtaggtatatgaagaatggtgatatgttataagtcggaggaagatgtgtatgggtactgatgataggtaataggtaatgagttaggagaatgatgaagtgacanagagaaaggtatgaggtaatgcaangtgataaagttatagaggagaggtaactgatcatatggtatggctancgtaggtgagttaattttgttntgatgatgatggatgatatgacgatataggaggatttggaaagtgatggtataaggagatatgttatataaatagagttgaggggaagtctatangataataatattatataaatagaatgtgtatacggttaatgagatagagagtgtcgatgaagaatgcatactatgaagtgtataggatatgatttagtagatgataagatatagatgtatataggtaatgctaaatagttatatacacacagagtgtagtagcgagattagagataacgtaagaagatgttgattgatctagaatattaggtaagagagaatgggtatatggaggattgagtatgtgngtgctgagtgataagtactgagattgtnganatgatatagatggatatgntgtatatatagacgagg

SEQ ID NO: 274548 - DNA, 820 bp, Glycine max
  unsure (1)..(820): unsure at all n locations
aacctctacttgatcacctatatntacaatnatattccatnctctntattacattcntnttannananaannnaagaccgagagatgactcattcctgcaaacccccatttgataaaacacccccccacgaaaaaaaaaaaaataattttttattataacaaaccccttatcaagggggggttttataaaatcaacacccttatcaaacatccaaacaaaaatacaccaacccatcaactattaaacactaaaaccataaaactctccacaacgaaaaattacaaacaaacacaacactctaaaacaacaataaacattaacaatctacgaacataaataaacatcataccacaactttcaattttaacaatctatcactaatactccagatacacacaactacaacgcaacgaaaaatatcaaaataaatatattaaaaaaccagctcacaaaaaacaagaactacaacaaaactcatcctataaatccctagcacttacaactcaactactaacaaatcaaaaaacggcggcagacaagatttttaaaaaatattatctaaaatgaaacaataaatataaatatcgcagagaaaaaccactaataattcactttacacgaaattttatcaacatcaaacgtcaatcaacaaaacaaacaactatacagcaaacaattcaaacaccaactcatctatttgtcaatacaatgtcgattcacataaaacttatcctagcaaggtatgtataaacaacaaacaaacataacattaatgttgctcacttaaaccaataacaactaacccaccccccacccccg

SEQ ID NO: 274549 - DNA, 483 bp, Glycine max
agcttgtgcattcaatatcctgatgttgtgtttcatatgttctcaaaactagactaatacatttgctgcccaagtttcatgatcttgcaggtgaagatcctcataagcatcttaaggagttccatattctttgctctatcatgaaaccccctgatgtccaacaagatcatatctttctgaaggcttttcctcattctctggaaggaggggcacaagattggctatactaccttgcgccccggtccattttcagctgggatgagcttaagagggtgttcttggagaaattcttccctacatttaagaccactaccattagaaaataccatttaggcatcaaacaacttactggagagagcttgtatgagtacctagaaagaatcaagaaattgggtgcgagctgccctcaccaccagatttttgcaaaactcccttttccatatttctatgagggaccttgccaacatggagaggagtatgatt

SEQ ID NO: 274550 - DNA, 387 bp, Glycine max
ctgagagagagcatgaggtgagatctgggcttaatctgcctatacatactctcttcctatacacaccaatgaactacatgtgcatgcccgaaatgaaccccatataaccaatatcacgagcactatggcacgaaatcacatatggatgggaagactacgcttattgcttggatcatttaataacacaaaggaaaatgttggtagcattaatattttaatctgctcggcattatgtgttattatatctacaagcactggatcttccaacacctcacacactatgtatacactcaacccgctctcttatcagagagggtgcatcatactcttttgaccgcgacatgtattggtcatgctctattcgaattaagtatcaccaaacactaa

SEQ ID NO: 274551 - DNA, 639 bp, Glycine max
  unsure (1)..(639): unsure at all n locations
aaaagcgaanatgaccgtagtcgatgcaacnatgggtaaaacaccggcggggaaanaaactggaggaagaaaacttttttaaaaacaaaaagaaggggggggtttaaaaaaaaccccccccccccacaaaagaaaaaaaaaataaaataaaacaaccaagacatgaagaaaaagagcaagcaaagaacaaaaacaaagaataagtacaagaaataaagataaaaaaaaaaaaaaaaaagggggagaagacggagcaaaatcaatataacaaatcttcaaaaataacaaaaaaccacaaaggaacaaaacagaaagccaaaaaccaaaacgaacaaaacaaagaaaacagagccagaacatattaacagaacgaaaaaaaaaagaataaagaaaatcatagaacaagacaaaaacaggaaactaacgagaaatatgaaagactggagaatgaataaaaaacatcaggatagagaaaaggagaacgatcaatcttacaaaacaatctattcaagaacaaaagtatctgatataaaaagtaaggtaagataacaacgataaaataatatcaagagagcacacaatgaacgccgcactacgacttaacgaagaaaataaacagtcccaaagaaggggggggag

SEQ ID NO: 274552 - DNA, 1410 bp, Glycine max
  unsure (1)..(1410): unsure at all n locations
naggcaaccggcncgcnngttgacncnncctggananaaccatgactgaacanctncgcaagnnacccccncccnannnntgagnacggcaanggcttcgcncgggcgcggnanncncggagagcggcaccaccgacgagtattcacacatatcttcctatcctgatctcacaccgcgacacgcgcgacacgaatgaggtgagcgacaggtgggactaactgtcacggaataacgcgacaccatatgcacaactgctctacagaccatcgcgcgagctcaccacacatctctgcatgacgataacaacagtgcgtgccacacagacgcgctatcttgctgcagcgacgagcgccatcatctatctactgcacgctcgcacgtctgtcnactccgcggaataacacgagtagttcatcgtcacacgcggcgcgcggtgcgagagccacgtctatcttatagacacgccgcccgagtcgaagcagccacacgtaatacgctgacgacacctactngtcgaacactcatcacacactcttctctatcatangagaatcaaaaaacgcactcaacaatcgcgccgtacgntgcgcgcgcgaccgtacgcgctacacgatacaacccgtcgacagcaacacacagatacgcaccactcgactggccaccgatcgcacactacataccaatcatcgcaacacgtatacgtcgagctgaacgagcaacagactctccgcgcaccacgcacnccaaacgcatcactcataaccactcgcgcacacgcagtgcggtcaacgcgcaccctcgcaacacaccncatatccgagtgcgctacacgtcgcctacgacgccaatagcgctgacatactcgatcgcgctcacactcgagcgactcgtcgtctacacccgaagtcggcgtgccacgcaatactactcgcacgacgtgcacttaacggcgccacgcgcatcgactcagctaccggcctccgcgacgagatagacgacaccttagacgccgatgctacactcaccgcgactatagcggacgaagcacggctggcgccggangacgcgccgcgaccacagcagcatgcagcgtgaacacacacacgtcngtcgcaacgatgcatacgcacgctccgcgggcactgacacgtcactgacgaccacccatataggatgcgaataccacacacacgcgaggaggacaagtctaccgcgcgaccgatactcacaacatcgcaactcccgcatcatcgcgcaacagcacagcgtcgcgccataacacgtaggccacggcaacactgacgactcgaagaacatcactcccactgcgctgtgcagacctcagaccgctacacgacggaaactacacgatactaactacagcgcatatcgctatcgacgacgcgacg

SEQ ID NO: 274553 - DNA, 740 bp, Glycine max
  unsure (1)..(740): unsure at all n locations
cggcgcgcgngaattgagtcgcttgattgccttcgtcaatacacctctaattatgaaaacccccccgccccgcannanatcgggcggaggagtttttattctctgttgacacgagattaggtccggggggtttttttttatccccccacccactgacatatccttctccttaataccacccatttcctgcgggaactacgagttgcttctctccacgatcgattctctgatcattgcacgaatcctatccgattccaacatcattcgtgcccccatttcacgtgcatcatatttactagtcttccctccatgctcatctatcgcacgcttacccccactaatactcgcttcaattttaatctcatttactctttaacaactgtcatcttacacgacccttccctctacaccctgcccccagtccgttcgttaatccctttccttccaatattatcttttttgcgtttaaaggtcaaattcactgagtgattcactgcggagcactgcactgtagggggttatttatttaatatttactttaactagtttcatagctgctgttcctgactcgagtttcttacccttcgtagtgcgccaaaggcccaaaccccatggacctgggttttagttgtccaccctttttttgttaacccatgcaggggaccgacaccgccgccacgtgcatgattcctctctccttacctccccgttgctccctctaatccctccccccccccccc

SEQ ID NO: 274554 - DNA, 697 bp, Glycine max
  unsure (1)..(697): unsure at all n locations
aaaagacgggttaatgagttacagcctgcanaccnttnntgtgaccctccccngngaacaaaaaaaaacaacaagattttttttttcttttaaaaacacaaaggggcggttttatataaaaacacccccccccccacacaaaaatttaaaaaaaaaaactaacactaccaacaagcaaacaacaactatcatacacactacccttaaacatacaaaataccaaaacacacaaaaaaacaacaaaagcaaaaaacacacacaaaccaatacacatataaaaaaaaaaacaaacccactaaccacataaacacataaaccaaaaaatctaacccaaaaagtcaaccaacaattacaaccacatacaataaacacctaaaaactaacaaacaccacataacacctacaaaacccaaaaaatcaacaaccaaaccaccacttatcaatcaacataaaaaaataaaaacaaacacaaaaaaaaaaacaaccaaataaacttacatcctcctcctaacctataaattcacaattacaaacacaaaaccaaccctcataatataaaatacattataatcatataaaaattcaaaaaaaatacaaaaaataacacccaaatcaaacacctctctacaccccacacatacaatctcccaactcaaacaaaaaactatctaaacacaatgcccactcaacaaaaatc

SEQ ID NO: 274555 - DNA, 356 bp, Glycine max
atcaactctgaacaaaagagatcaactctacacactagagatcaactctacacactaaagatcaactctacacacataggtccaacacttgatgttagggtagcatcaaggtggctcacaaaagactcaagtcccaaaaacttactaactaactctttaatcccggacttggtacaaaaactcgtgcagcctccatgattatatagcaatctgcgtttctgggcttgaaactttttgatgctggaggagatatatctttttttgaaaaaatctgccgttaaagaaactaaaagaaaaacttttgaacttttaactagaatcctccaatcctaaatcttataatcccctaacgaact

SEQ ID NO: 274556 - DNA, 826 bp, Glycine max
  unsure (1)..(826): unsure at all n locations
agctcgcncccgacgcctgagaccttgaaacacctccnnaattagtgatttaagcagcggcccnnnnnnnnnaagnnntaagagaagaaaccagttttaaacttttaaacgccccaagacncacgagacgttttatttaacaaaaaacaacccacacaccccacaaaacaaccaaagcggactaattaaaaaacggaacacacgcacaaaagagctaaaaagggcacaagaaaggcccaaagaccaccaaccaataaaaaaaggccgcgcacaaaaaacaacaccgcaaaaaacacagccaaagaaaccaagccgcgcggcaaagacggcccagcaacaaaccaacccaatgggaacgaaacaaaccaaagagaaaccaaaaaacggacagccgacaccaatcataacccaccacccacaccccacgaccacacacaccacccacaacaccngaaacagcccgcccccaaccaccaaaacaagcacaaaacgcaacaaaacccaacaaaaacaaaaccacaaaaaaacacccaccccaataaacacccccacaaccaaacactcacacaaaaccaaacacaccaccacaccctatcaaaactactcacaactgtacaaaaaacaacacacaccataccctcccacatcaatcccaccacaaaaacaaccccgacaacgaataaaaaaaaacatagcacnacgccataccaatcgaccaacgaacaccaaaactaccaaaagcgaacatacaccaatgcgaacaaatcaaaacaaaatacacaagacaaacaaaacacaaacgaaaaagaacaacaaaacacacacc

SEQ ID NO: 274557 - DNA, 809 bp, Glycine max
  unsure (1)..(809): unsure at all n locations
aaaggggcagaattgatgcctcgatgaacanccgcgttgntaagaaaacantccccccatgaaanntttaattttaaacggggaggggcgaactttttctaacaccaggcaaaaataagaagggggagtttttttaaatcaacccaacacgatcgaggatataaataaaggaaagatacaccaaaaaaaagactcaagacaaatagaaatcaattctacacactggagaacaactcttcaccctagagaacaaaagtacacacataaggcaaaccaatgatggaaggagtaaagccaagtggcgaaagataaaaaaaggtccaaaaaagatactatataaaagtttaatccaggacatgggacataaaataacgcagccttcaatgaaaaataacaaaaggggtggatgggctgcaactacttgatgctgaaagaaaaacaacttattctgaaaaaaatgggggttaaagaactaaaagaaaacttttgaacttttaattggaatctttaatctccaaacctttgagcggggaacaaaactttttaatttgaaaattcgaaccttaagggatggtgaaaaatcgtgcccaaaaaaagcaaacattaaatttttggaaaggggacaaaaagcacggtaaacgaaaaacacgatttatatggccacgataatacgcgccggaagcaaagaaaaacggttccgaacaagggggaacccgcaatctacacttttgtactaggatgttaatatggctagggcaaaaactccagaaattttcgggaacgaagtccagaaactggtaacccaaacg

SEQ ID NO: 274558 - DNA, 844 bp, Glycine max
  unsure (1)..(844): unsure at all n locations
gaaaggggcccgcctgagncttgaagcttggacnnccttgtncagtgatcaacccnccgnnnnnnnnnangtttnangaagagancaaagggtttttatantttttagnngggngangngnggggaggtgtttgttttatagtttgaaataagaaacccactcttctcaaaattttaagtagatnggattaattagaccttgtacgttatgttttagggtactataatggtcaatggaatgttcaatgcccctttatgataagcacatgttgggtttgaagtgtattttttggaaaaatggaggttgaggaaaacttgtgtggagttaatggaacaaattgaattaatttgtagatatgggagaatttagaataagacactggaattggggtgaattttaaagaattttttgttgccaaaaatattttttggttggtgtttcggtatgcgcttgggattggatgtgcggacaaaaaacttttgggaagaattttggatgacatttttggatgaatgggggagaaggaatggttattgttgagtaatgtaatatctgtgtttaatggaaatttgattggttaagataagacttatatcatgggtatacaaatatcattaacataattgtaaatccatatagtgtattaattaagaaaaagattacatatgatttcttaagaaactattttattattagttatataaaatctattccataatatatgaattgcgataataaacaactttttggaatggaatttgatttgactataatgtattataaactatatcagatacgtatatctattgttatggctataatcataatatgagtaaagtaccg

SEQ ID NO: 274559 - DNA, 514 bp, Glycine max
agcttgatcaaaacaattatctaatcattccaatccactcaaatcatacagttgctcattcaaatcattcgcagacactcgttgcatacaaaacaaaccactgcatatcaaattcaactaattcactgttcaaacaagctttctgtacaatcaatcaactcaaagtactaaaatttaaataactaaaatttaaagaactgaaacataaacattgaaatttaaatgactgaacataaatcataaaataactgaaataaactaaattgttcaaaatgcacaaatttaaatgtcttgctcctgtgcatgctcattgagatccaacacctgagcagctagtgaatcctgagggataggctgctttagctcagatgctggtgcagatggcatggaatcatcaggtatgggtgctggaaatggctctggaatctggtctgtggcagtctccttctcttgagccatgtgtacacctgcatcaaaataaaagggctcatgaagagtgagctcatcctccccc

SEQ ID NO: 274560 - DNA, 540 bp, Glycine max
ctgccgaggatgcgttaatagaggaaaagaaagagagagaaagatagagggaggagcacgaaattgaaggaggaaaagggggagagaagttgaactttgagttgtgtctcacaagactctctcattcatcaaagttacaacaagtgttacacatgcttctatttataaactaggtagcttccttgagaagctttcttgagaaaacttccttgagaagcttctttgagaaaactttcttgagaagctagagcttagctacacacacccctctaataactaagctcacctccttgagaagattcctaaagaagctagagcttagctacacacacctttctaatagctaagctcacctccttagcgacatgcataaaaaatatgtgaaacacttgttcctttacacgctaattttaagtttttaaccaatcatgtatatggaattgaagactcgcgacatgcataaaagatatgtgaaacacttgttctttttaatagtatttgtcaggtatctgctggttttgataaataatatgtggaact

SEQ ID NO: 274561 - DNA, 425 bp, Glycine max
agcttcgaattgaatctattgagtgcttgctgttctcatacaaaccattccctatgctactgtaacttccacttccataaaccatcctcccacccactcaagctagcaatattgtcctccatatgtaatgaatttaagtacaatctagggaattttgatgccaatgattgatgtcccacccaagtatcactccaaaatttattttatctctctttcctaccttctatttcaccaaagaatcgaaccattttgtttcattcacccaccgcaagagtaacatagatctctccaccaaatagaatatttttctctacctccacgttttgaaggccccaatcctccatacatggaccataaaatctcactccacgtttggagcgacactggaatgtgtgaaagttaaacactttggctcgtgggacaag

SEQ ID NO: 274562 - DNA, 858 bp, Glycine max
  unsure (1)..(858): unsure at all n locations
ncacccagcgcggcgttgagcgcttctattcatctgacactatctagaacttatgctccggtagacatagtagtcttataagctttcatatatatatatatatatatatatatatatatatatatatatagtagtctttcaagctttggtagatgttggttgttcttttactttcatatgcaaaagtgttgtaccccaacataattgttttagaagtaatataataactaaaaccagaaccatgtctatagacataataaataataatacagaaacaaaaaatttcactatccaattatctacaaattgtgatattttttgcaacaaaatttttgtaaataaagcagacgttgtagatttgcaaccagccaaagaaaaaattattttaggacttgactttatcgcacatgataacaaattagtcactattacaaaagattacttattaatttctacaaactcataaatgtcacccataatagacgaactcacatcagagttacgaataaagcgtggtgatgcccccactaataccagtaaccaatgtccttgtgatatacctgatagttgtgaaatcaaagactaaacacattatggtcggataagcactttagatacattccatgactctcaccatgaaaatattttagacaacataaaaatagaaacctgacctcccatagaattattcgcagcaaatttgactacaaatttgtccaaatcaccaaaactatatctttcgataacataccacgggttatttcacggccttcactaatacgccctatctagacaagaccctcctcaatcttccggacaaaaacctggtctatgtcaccctaccacttctagccctcc

SEQ ID NO: 274563 - DNA, 345 bp, Glycine max
gcaagcttgatgtgtttgttgaagctaaaaaaattatgcactttattgaggtaacaactttccatttgaggtattttatgcgtttcttcctgcatatatctgaagccacccataatgaacagtttcacttttgagtctgattggttcttttcgtgcacactcggttccatggccaagataatgtctacaaggcatttctagccatattgaagatgcacaaagacggaaacaggactcccctgcagtttacgaggaggttagcctaatattttatggcagctttatattggtccttctatttttcttacacttcttttgggaaacttcattaaatatttattgaac

SEQ ID NO: 274564 - DNA, 785 bp, Glycine max
aagtgaaaaggatatgatttttgtaaaaaaaaaaaaaaggaagcctgatagaaaaaatatatgatttttgcctaggaacttaataggatatgatttttgtataggaatagggtgtgataggatatgatttttgtttggttaggaacgtaaagtaaaaaaaacctgatagaaaaaggatatgatttttgtataggaatgtaataggatatgatttttgtatagcaatgtaataggatatgataggatatgaattttatttgctctagaatacaggaacgtaataaaagaaaaaagaaacctaataggaatagaaaaaggaatgttaatagaaataggaaaactaataaaaaataatgagaaatagaaaggaacacctgactcacaccttgtaattaaaattttacttaattataggaatggaatctgctagttttttaaaaaataatataagcatatatatatatatatatatatatatatatatatatatatatatatatatatatatatatatatatatatatatatatatatgggggcgccctttaacgcgtataagggttctctattagatgagggcggggctatatatattaataagggttttaaaaagtctgaccctacttttttattaatatggggggccccgctttttgtttggcggggccccccccgacggtcctccctattttccccccttttttaaggtggcgggttaccgcgccctctttttcttttccaccaatcccctccacatcctctcctcatccaaatatccttctccc

SEQ ID NO: 274565 - DNA, 578 bp, Glycine max
gcatgcaagcttctcacctaaccactacccgtgcgatctctacctaagacccaatcttagatatgagaacctccgtttactccctctcactcacactctcgtgtttacaattaagtcaaagacacaccagagatcaactctgaacaaaagagatcaactctacacactagagatcaactctacacactagagatcaactctacacacataggtccaacacttgatgttagggtagcatcaaggtggctcacaaaagactcaagtcccaaaaactcactaactaactcttcaatcccggacttggtacagaactcgtgcagcctccatgattatatagcaatctgcgtttctgggctgcaacttcttgatgctggaggagatctatcttcttctgaaaaaatctgcagttaaagaactaaaagataacttttgatcttttagtttgaatctttaatctttaatctttaatccctgaacgaacttttctactttgaaattcgaacttttattatcttttaattcgttcccagaagatagatcatctaatctcttgctaactgcacaataatctgttaaag

SEQ ID NO: 274566 - DNA, 469 bp, Glycine max
  unsure (1)..(469): unsure at all n locations
cgaaaatnctaatgagtcattagagatctcttgtttttaccttcaaattgccccatgtgtggcatggtcttgttaatgtcgggattcacaagccattctcctcaaattttagncagcccgcatcaattagaccttgcaccttatgcttcagggtcctacaatgctcaatggaatgccccagggcccctctatgataagcacatgttgcgttcgagtcgtattctcggaaaaatggaggttgaggaaccttggctggggttatggcaaccattgaattatcgagtagatatgggagcaattcagcataggacactggaattggggtgaattctacagactttttcgttgccaaattcatttcttggttggtgttttggtttgcgcttggcattggatgtgcggccaacaaacttttgggatgattttgggatagcctttgtggatgactgggtgagagggactgccattg

SEQ ID NO: 274567 - DNA, 350 bp, Glycine max
tttatttttaaacgggggtgccacctctttttttttcccctttggcaacaacaaaaagccaaaatgtgtggcaatcaacgcccgcagatataagatataactaaagtatttataatcgatcataagtcacaaccaaatataagcccatcattcctaaagtaaaaccaaatattatccaagcataaataagtcaataccaaatataatccaagcataaaagactaagtgccaattatcgaaagataacgaaaggtcaaaaaatgataacataaaaaagcatagcccaatacacgggttataataaaacctaattattatcttaaaactaagaacgtgggggtgatggggga

SEQ ID NO: 274568 - DNA, 358 bp, Glycine max
gctaggatttccaagcattatacagattgagaagagagttgagccttaattttattatctccttgcgaaggtagtttctttttctacaaaaatattttatacaatcccaaccatgataatgtgcacgtttatgttccaaactcggtgtccaaatttcaagacgatccaacgttaacgagtttgagatcgtagttttactggaatagatttgagtatatgtgggaaaaggagaggattttgggagaagaagaataaagaacaaatttacaacgaagaaagagcgtagaaacatatcttaatgtaagaaatgacttaatatatcttttgttatagctaaggcacttcgagcctattattt

SEQ ID NO: 274569 - DNA, 223 bp, Glycine max
tgtgcttcggggtctggcacttacaaaatctttcctcctcccgaatgaagacatgggtaatatgatacttttctacacgtgcccatgtgcaaaaaagggaaacatgaggccggtcataaatagacgggctagcacgacatttttgcgttaatataaccatcttctctgccaactaactttccaaagaatggtcccacaggaaatggcccacacgaaacttgac

SEQ ID NO: 274570 - DNA, 537 bp, Glycine max
tgtctcagcggttatgcgagacaaagaccaacatgttagccatcgtcagcaagtaccaagaagaattaaatctagccacggcccacgagcacaaagtggcggacgagtatgcccgagtgtacgcggaaaaggaggctagaggaagggtgatcgactcgttacttcaagaggcaacaatgtggatggaccgatttgctcttactttgaacgagagtcaagaacttccccgattgctagccaaggccaaagcaatggcggacacctactccacccccgaggagatccacggacttctcaactattgtcagcatatgatagacttaatgacccatataattagaaaccgctaggaagtttctattgtcgctcagatcttgactagttataactttctgaataaaatgagtttatcccacgtttttactccaaaaatcagtgtgaatcaagtcattcccgcattttatctctagcatgcattcattcttctttaactactcctcacatttggttttttaggaaaaacaccataactaaacg

SEQ ID NO: 274571 - DNA, 197 bp, Glycine max
tctataaggacagaatttcaggacaagctatggaatgatgatgccaaggacaggagtcccgctcaacatatcactatagatggtaacataactaattggtcgaccgtttattggaccaactaatttaaccatgttcgtccaatcacacatcgcaagagtaacctaaatgttttcaagcgctagaatattttccacta

SEQ ID NO: 274572 - DNA, 354 bp, Glycine max
agggctaaagtctcacgagtgtcacatgttgattcaacatttgttagcagcggctatacgagacatcttgccaaacaaaggcaagttatccataactcgcctatgcttttatttccatgccatatgtagcaaagtcggtgatgctgactaatctgatgagctggaaaatgacgctgctattatatcgtgccagttggagatgtatttaccccctactttctttgacatcatgattcacttgattgtgcatctgggcagagaaatcaaatattgcggacctgcttatttgcggtggatgcacccggctgagcaaccaatgaagatgttaaaagggtataccaagaatctatatca

SEQ ID NO: 274573 - DNA, 410 bp, Glycine max
agcttaatcacactgagaagttcttcgcccctattcaagaatgtattctgcaaagatcaaacccaaatccctacaaggtttggtactttatttttatttaaccaattagctaggtgtatatgccattactattattagtgatgacacaacccactgatgcacaaaagtctaaagttttggttaaaaatcattcttctcgagtaaatccaaaattaaaaattaaatccaaattatatgaaattcattcacattagcattatttcatgcaaaggtacattattgcaaactatagcctgtacataaaatagtttgataaattttctctccattttttcttttaaagattatgggtgggaactggcaacccacataatgcctgaaagtctaaagtattggttcaagctttttat

SEQ ID NO: 274574 - DNA, 518 bp, Glycine max
acactatataccctcaagcccgttacgtgtctttctacagattaaagcaaagtattatgtgtatatgtcaatcagtagatatcttattgtgaagatcctagaatgcttgccttgaccgaaggtggtcatcaagtccacatagcctctggtctctaccatctcacttgtaaagtcaaggaatggaccggcatgaggatggacaatgttgggggagatgtctctggaaagttttccaatataggatatcaatagaactaccctggtcgataaggaccctagacaccatgaagtttggaataatgatggagacaaccacgaggtcgtcttggttgatggggttgatacccttgaagtccctatctgtaaagtgataggagggaaacttcgttgtagtggtgcgtcaacaaaattaatgttgatgtttccgatagcatatagatgacatttttgggactggtaggactgttcttcataatactgtgctctgatttcagggtgggttcctattcttttggggg

SEQ ID NO: 274575 - DNA, 480 bp, Glycine max
  unsure (1)..(480): unsure at all n locations
ccgcatgcaagctttggntgaattttcttgcctgtttacatgatgatggntgctcttacacatggacttttatcatcgaggcaattttttttctggcaaaatgggttccagtttaacattggcgaaagaaacaattatgtttggtttgatcggtggaatcttttgtgcgctcttttccaaattttttattatgcttgtatctctgtttctagcctcactattaaggacattttccagaaagaagtttgccaatttaatatgctacgaaatttcatttcggatatgtcaacacagctccttaatagcatcttcatcaatgataacctcctggatactgttatttgaagtgcaacattgactattgttacacctacctgtaattgactaaagcttgtgctacctgcaataccctgcttgatgttggatcatgggtttggcctttctctctcttcctacaaatataaaaaaaatcctctggct

SEQ ID NO: 274576 - DNA, 52 bp, Glycine max
agcttgcaagatattattaaagattcatatatttaaaaaaagggcacttgca

SEQ ID NO: 274577 - DNA, 936 bp, Glycine max
  unsure (1)..(936): unsure at all n locations
aagcgcgaggggttnattctcattggccggcccgtttatttaggagaacgggccccccatttaaaattggaacgatggagagggggaagttttttatatttcaaaacaaccacgcttatgcttacagggggacggtgttcactttatttgtgactctactccctccccctccaaaaacgttgggtaatatattacaacatatagccgttatatactctgcgatgtctccggcaaatttacaacttacatgctccctgctacatctgtttgataccaaactcacaggtgccttaaaccctatagtgtatcggatcatagaccctattagcgtcaacatactatcgttggtgaatacgggaagggtttttcctacataatctgacctatattctattaaacgatgaaaaattcggttattatgaaaacttcatcattactattaatgatcaactccgcgcatcattaccctcacattgcattaatagaaggtcttctcacgcgtttcgtgtgcaataattcaataactcactatcgttaaactacactttccccgggacagcaactaccgtcaagaacacatcctatggcttgggtaaatccaggagtatcgactgaaatttacggatccacatttgaaccgtgcttaacctttttcgttcttagcacaatatacttgatgaaaggccgtcttatactagaccggatatcgctctaaaatatgatttcgtaagtcctgtgctacacgttaggcgtatatatacccagagactctccacctctatatatcgtactttattaatagatagcaatactaagttctgtattagtattcccccaagcaacgggccccccccacccctcccccacccctaattatataaagtattcgtgtgtcgactatgcacccaactcaatctcattttaaccccccccccc

SEQ ID NO: 274578 - DNA, 551 bp, Glycine max
gaacgagcctttggcgatcaaactcttttttcatatatgaagacacaagcgcaaggctaattcagttgcgcaagaaagtcacacacgcaggagacctgttgtgcatcaagggaggtaaaccaagaagatttataccaatgagtcataagccattatataagtaaacctaacatcatactttaatccaaaatcttaaagttcaagtttatgaatcttctccttacttatatggttctcaatttttccatttctacttgatgtgagacttcgcctcatacttgtactttaacaatcatttcatcaagtgtgagcctttttcacatgttagtctccctctcgagcggaagtcattatcattcatgagtattccatggtgaccattaagctcatatgctctaaatacttgtaccttcgctccacccacgggacacatcgtttagacccactatcagaaaaaactcttgataccaaggatccattgttgtcatcttacttgttaaagtcggtaatcaagtcgaaacatcgattttgatatcaattgcattgcatca

SEQ ID NO: 274579 - DNA, 181 bp, Glycine max
ttagccaaatggacttaccttgaattaatttctttgataagccctttgagcctaatgggccgtttctttggtttgaagctcattacaagccttaagtgaaaaaccatgatatcaccttacccttaagaaattttggagctttggaattgttttgggaataagctaggaataagtgtggggg

SEQ ID NO: 274580 - DNA, 946 bp, Glycine max
  unsure (1)..(946): unsure at all n locations
aaatggtgtgaatgtnnntttgaatgaccttcgnaagnaaaccctcccncngttgnntaagnggnaaacannnctcctnntntttntnngtanntnttgtagagagaggaagagagatttttttgtattttttannaaaaggaaaaaagagnagtggggggggggttttatttataagtaatatgaactcccccaccaaccacaaattatatatgcttattgttacacattgtattaagtgaatatgtattgtattggtatttattataattttgtatagatttaataaaaaaaaattatatgtatttagaataatagtattatatatatataacaactatgaaatgataatgaaaaatataataataaaatattttattattaacaaatatgattaatgcgatttatgaaataaatttttataattagattatatctaaaaaattattgataaaaatattaatatacaatttttatatatatatgattattgataaatataataaaatctataatatatctgtttgagataattgtggttatatgatataataataaaatgaaatagtataatattatattgattagaattaaaagtattatacatatgttatgttatgttaaaataattaaattcatgctggatcgtattgtttagtaatatgttttaaaacaaatttaatgacatatattaagtctaatatatgaattagtttagtataatgagtatataaacttatgtatataaataataataagtaattcaaattagaaagtgatattttaattaataataaacatgttatatatgatattaaatactatttaagtgaactataaaatttagaggtaatgtaatctgaataatatgtaactaaaataaaataatgtctgaatgatatctaagtatatattaatgataaaataggtaaaaatatatatttag

SEQ ID NO: 274581 - DNA, 773 bp, Glycine max
  unsure (1)..(773): unsure at all n locations
aggggcagagcnttgattcctttgcatacccggngaccctctagtatcgaccaccnagcctgcaagcttttactttcagtctgaagccacaataatgacaacagagaccaacatttcctttaaaatttggaatgccttgaggcatttatcatcaaacacaaaaggaacatctttgacaaaaaattgctaaagggcttgactattttagagaagtcttaaatgaacctctagtagagcccaacatgcaccaagaaactttggacccctttttcattagtcatcaatcttcactttgtccacctctataccatgaacaaaaatgttatggccaagaactatgtcttcttggaccatgaaatgacattttcacagtttaaaataaggttggattcaacacacctctttgatacaagctccaagttgattagacacaaatcataagaagtaccaaaaactaaaaagtcattcatgaaaacctcgatacacttctccaccaaattaacaaatatggctaacatgcacctttggaatgtggtcggtgctttatataatcccaaaatccattcttttgtaagaaaatgcccccaaaggaacaagtaaaggcattttttattaatctttaggtaactaccattgggtatactcaaaaatttatccaataaacattaattgactgtccaacaaattttccaacattaattcatgaacaaaatgggaaagggccttcctgtaacccggttaccctcttgtatcaagcctatcccccactaggg

SEQ ID NO: 274582 - DNA, 663 bp, Glycine max
tcatatgtcacttaggttgcatatgttacacaatatattacaggataaatacttgaattaaaggataatttttgaacatgtgtattatttgattaacaatagaaaatataaataataatacaaaatttattaaaatatcttttttaatatctattatcttaatataatatacatcattattatattttatgaggattcaaaatatagaatacatacaagcaagttaactagttggtaatgtaaatgttaaatatatgacatgataaggttatttaaattagtagataatgtgaattcaaaatacatgaggcatgataaggttgttgagtaaaactaaaatatcaaacatgtggtgttacaaacaacaaaacgaaacacatgtctttaacaaatgcggaaaacataatcagaatatacctccagccatattgccgtgaaagaattattttattttgattcttccaagctcccactctttctttttagatggtatatcagacgaaaatgaaagatgtgagcttagagaccaaacacatgttggaaattttagtgtaattgatctctctattttgttaaaataagagtgcacgcttattttaatgtaataacgagatattccgtttaggcacattttggaagttacatggaagttactaaaacttt

SEQ ID NO: 274583 - DNA, 155 bp, Glycine max
agcttgtaggattatggggtacccatcacatgttgtactatgtggcggtcgggccatggtgaacaacaagtttttcacattcacaaagcgcgcataaacccaccatcccctgttggccaccttcatttgagctcacgtacttccacgtagcccaa

SEQ ID NO: 274584 - DNA, 291 bp, Glycine max
atctaaggccccctttgagggaagagatgcaaattcaacaatctgaaaccctaacaccgctttgaatcgcaggtatgcttttccccatttctcgtcactctcataatttctctctcctacaaatttttcaatgatttggagaagcttcttctagatctggtagcctcgttccaagccataacgtgtgctagctcctctgaacatgtccttttctatcttgttctttataccttccttgccacattttctctatcctataagcccatgccctggaaagccaccactactaat

SEQ ID NO: 274585 - DNA, 214 bp, Glycine max
gcaagcttgtaatgatctggattttgggataaaaattttgttaactatgattgaattggggacgctcattattaaatgtagaataaatatgcaaattgacatctccttgcagaatttatatttacccaattatttgcatccgtagataatatttgttgttgtagcaaagtattgtgttgacattcgcaactcatcaacacggatgttgtgttct

SEQ ID NO: 274586 - DNA, 632 bp, Glycine max
cctttaaactcagccactaaatcgatcatacaaatatcacatgccatcaaatacagatatcactttctaaccagaattttacttccctggccatctatttgtagcgactacttacaaatcctaaacaaacagattaactaaaatttcaagtttcatgctatacactctacactatatctcataccagctccttttattagtgatcattattactatgtattccaagtttttagaaagataagtcctagcataacaagtagaataagaaaaaagattgatgttaacatggaagagatgaactaatttaatgaatccttcatatttaaatataagggtaaaatatatacaccctctgaactctgaattattgccctatatcagcttaccctttaaagttcatcattatttttttctttaactaagtatctctccttctatctcttctaaatgtctctttcaaaaacactagaaataactgaaaacaaattacaaaaaccaaatgcaaatgatcccaattatcaaatattttaattaatataaaattaactacatctagttcaaatacataatgtaaatataactatataaccattactaccaaaataagattataaaatacatgaataaaataa

SEQ ID NO: 274587 - DNA, 618 bp, Glycine max
  unsure (1)..(618): unsure at all n locations
agtatttttgnaatgtgtttnntgggatttataaatttttgnannaatttgtaaaaggggatagtgaaattaatgtgaattgaaattgataagcttgtgcaattttgagcttaataaggttgtgacttgtgatttaacatgaactagtacccttgtagggaggtatataagccaagaagcaggttataatattgaatgtgggcattgggaaattgaaggattcttcaagaggttggatgatttgtcaagttgtctttagatacttgccattaaaatatgcaagtgaaattcatgtttttatattatacagtatacaatcttttatcaatttttatgtgagcaacaactatctctgatntaataatgccttgttgtctaaaaaaatgatgttttattgagaactttaaattgagtttgccctttgataattttgaatctggtgaagttctaccccaaaatgtagatattgagacctttgaatgttttggtaaatttaaaaagatttgttgggtgttgttgttggaggctatttttatgagaaaatttgttcaaaacttgtgttttgtaacaaaattgggtttaaccttataaatttggttgtttataaatggaaaaaaa

SEQ ID NO: 274588 - DNA, 837 bp, Glycine max
  unsure (1)..(837): unsure at all n locations
atgatggtngagaagtnnnnttttattacctttgcaagtaaacannccccgcggtttgttgaggaaaaacantccccggnttgnnnggtgtaagggttataatggggagaaaatttttttttgatacaaggcctaaaaaaagtggggggggtttttttaattaatggaaatccccccaaccaccaccttttttgggtgtttttaattaataaatttaaatgttaatttgtattggtggtttatgaataaaaatattttataatttgttgattcaaaactttggaacttatttatattaatatattatacttgaataagatatgttatattgttattaaactactatctctagcttataaataatatattaagaatttatataatcttaagaattaatttaactatttggtgaaatttttgaaaaatatggttgattctaacaaatatcttgtcaaattaaaatcttaaatataggaaatattattaataatttatgatatcaagttatttaattgatgtaacaaattaaggacatggaaaaattaattctaattagttatagatgatattattgttaagtatgtttgtataataaatattttaagtaaatattatttagaataaggtatatattataatgagataggtaattatctgaccaataatctatgaaaatgtaattaggagtaatatagatgatttcatgatctacagaacttatcttctatatgaagttacatattcaattatattatacatgaagtaattccgataataaaaataatatgatatatgaaggtaacaacatatatgatatatatacctaaattgtaatag

SEQ ID NO: 274589 - DNA, 583 bp, Glycine max
cggagtcaaagagaagctttgacaagaccatcgttagccaaccattttcaacatgatgttaaccaagaaataagtccttcattaatatgaaataatgtcaaatacatccctcaatttagcaactaattgacaaattcatcaaaaaaacaaaatcaaactaaacttgggccagctacatgatccaacacccatttaccacccctaaaccaaccatgaacaaacaactatgaccaaaagcaaaagaaaaacaaagtatttgattatcttcaacttcatttgcaagacatccgtcctcactcctagtactttcatatccacctctcatcaaaagaattgaccctaaatttttagatgttttggatgttctaattatagccttcaacccacaccaacattcaacattacactcatggtagccaccaccattgttggatgacccaccttcatgatgacttccttttccaccatacccatcatgtgaatgttaagcctatcaccaatattgcgcctaatgttgctaaaagaccaggaaagaacgtgaagaccctcaactcttgcaggggatttcactttgaatcaacaa

SEQ ID NO: 274590 - DNA, 794 bp, Glycine max
  unsure (1)..(794): unsure at all n locations
agggtgagaggtgatgcttgcatggaanacccttnngatttgtngaaataacagccccnnnnnnntnnatgtgggtgggggagaagaattttttatttttaaccaanattnagtttaaaagggggaggtgtttttatgtatttataatnaaagacaaaaggaacatttttgataaaaaattggtaaagggcttgaatattttagaaaagtattaaatgaaccttaattagaggccaacattgtctaaaatatattggaacgtttatatattattcatcaaagcttatttagtaaaccttatattctatgataaaaaaatttagggtgcaagaaatatgtttttttgaactacgaaaatgaaatatgtatcgatatataattgtgtggattagttgctaatgttttgtttaataatctatatgatttgtaatattccattttaagtaatcaaaagataaaaagtttatatatgaataattttgaagaatgtttttacaattgtgtaaatttggttatcatttcacttgtggaatgtggttcgtgctttttaaatctaaaatttatggcatattataaagttgaatatgaaattaactaatagttgtaagtgattagcttatcttatgttagctaaagattgtgaaatgattttaagtgttttagatttatagttttgtaagggggtttataaattttttttaaagtctatgtatagtataaaaggggtgaatgtgaccttaacgattgatattggaaaactttaggaattcaaatgaataacggcccactattgg

SEQ ID NO: 274591 - DNA, 1299 bp, Glycine max
  unsure (1)..(1299): unsure at all n locations
aaacccaaaacctgagccttacaccttgaaaaccggcccanatttgtaagggnatctccncccnnnngttgnngnaggtttgggggggaggtttttnttntttttttncngccccccccccncnncnntgggcgtcgtctgtagttttttttctnnnnccncntntctctccctcctccccccccccaaaaaaattataaatatttatatattaataaatttgttgtaaatactattacttatattaaatattgtattgaatattaaaggaaaagcttcatcttaaaaataattattatcttgtaaatatatgaatttcaacattattaatagaaattctaaccaatctatagttatatctatgtttatttaatgttaaaaattctacaatcatttataatattttattaaagacggtgattttcgaacatttattcttctattttcttcgttcaaaatcagatatatatacaaccttcattgcacattcaatatatatgcgcttgtctgagtgtatataacctctacaataatatactatcctattattggttgagttgtgtgattacatatacctcatatcatacatcatctgtataatctctgtcatacgcttcactgttcacattatnatatattagtnttataatcatataacatactacactttgcacataaactatacttttgcgtatatcgctatctatgtctgtatcatgtgcatacaagatataatntattatatattacattcagatcttctttctaaaacacatctcctcaattcctgtctatatattcatatcatcatggaccatctatcttacctattatatacgatagatatttataatagtttcaatatatatctcataacctcattgagatactaatacactttctaaacgtatcatatctgacgtatacgtctatttatatatctcaacaacattattctaactgcttgatactctattcaattcaaacgaggtacttataattatagaacatattccgtgttctataccacctactatatattatcaacagtctacatatatgtcaacagtctcnacatataacattatatatcgatatgtgaagtcgatcatctctttaatnatgtactacgtatgtatactattatctctccgtattatacgtttganaaataactcaaatatctctaatcgtccgactaattaatatactacatatcactgtacttacgatcacttcatataantatatttagtactctgcgctacgataaatcatatatgatcatacatactaccg

SEQ ID NO: 274592 - DNA, 967 bp, Glycine max
  unsure (1)..(967): unsure at all n locations
tagccagaggggntgantcttggactaccccgcacctttgagtataacaccaacgcactccaagcnttgtatggattatgggggtgacccatcaacatgtttttacttatgtgcgcggcccttacccatggtggagcaactatatttttaccacattgaacaaaaaccgtcgcataacaccacactcattcttattgttggtccacactaccaatttgtagcacatcttaccatcctacctagtttaaacatcacaagtatttcgacccaacacctcttcatcgacacagcttctccacatgctccccatcaccgtaagtatgtctttcagacctctactatctcataatatcccacacaacgttttcaaactattccaaatttatccaaggtatgggaccttaacctctagaaaagccaacaagctttcaaaatatttacaaaataacatcgtcatattactcaccttactatttgccgctccatctcactcaaacacagcgtacaccattttaactcgatacaaatccgtgattatgcgatcgcaacaccatcctagcccacgtacaacacttgtaaaaacttttaacgagcattttccataatcataagaccacatgtcatatacatcccaactaaactctcctcttaagatacaacaatcgattaccctccatcaagttactctatactcgaacaacaacactactgtctacgtcatctcccaacgatcatcacatccttctcgtatcttacatttacatacctcatattacaacgtcaaacttcaatattataatcgtagctatcctagtctatactaatcaaacatatattctatactcctccaacaactcgttatatctcaactacgtctatgtcgactacggtgcatacttacatcgacacaactccatacacagcgatcgtgtcgatttagctcaacggtgttgtataatacacatcg

SEQ ID NO: 274593 - DNA, 579 bp, Glycine max
cttgccccttgatatatttgagggactcatggtcactattaatgacaaattccttgggataagaggtagtgttgccatgttttcaaagcccgtactaacgcatacaactccttatcataagttgaatagttaagggtaggaccacttaacttttcactaaaataagcaattggatggccttcttgcatcaacacagccccaatcccaacatttgaagcatcacactcaatttcaaaagatttttgaaagtttggcaacgcaagtatggggacattagttagcttttgcttaagaacattgaaagcttcttcttgtttctctccccatttgaaaccaacatttttcttgagcacttcattgagaggtgctgccaatgtgctaaaatccttcacaaatcgtctataaaaacttgctaagccatgaaaactcctcacctcggtcacagacttaggtgtaggccattcttgaataaccctaaccttctcctcatcaacttgcactccttttgaactcacaacaaaaccaagaaacacaacatggttaataccaaagatgcattttttaagattggcatacaat

SEQ ID NO: 274594 - DNA, 408 bp, Glycine max
gcatgcaagcttttgtgataaatttaggaaatgattgcatttgtaataagaaaagtagaagagtagcatttaataaccattcaaataaggaaagaagattagaggaaacaaaaaaatgtcagtaaaatccaaatccgttcaatagaagagattcccaaatatcaacattttattgcaaggtaattacagtaaactatcaaatgagtaattagaacatgatcgctatatttaaaacaatttttttgtcttcaaaacttaatcaaggtatgactctgtattattgcttttatttcctaatagaatctatcccaaaaaagatgtttactcattactcaatactcattcatgcttccatcataatttataagtactggaccactgataataaattggtacaaactatgccga

SEQ ID NO: 274595 - DNA, 452 bp, Glycine max
gcttgacatctattgatatatcatacaaccagtttgagggcccacttcctaaaactgtagccttcaacaatgctaaaattgaagcattgagaaataataaaggcttgtgtggaaatgtcactggcttggagcgttgcccaacatcaagtgggaaatctcataatcatatgagaaagaaagtcataacagtaattttacccattactttgggcattctaataatggcattatttgtttttggagtctcgtattatttatgccaagcttcaacgaaaaaagaagagcaggctacaaatttacaaactccaaacatatttgcaatatggagttttgatggcaaaatgatattcgagaatattattgaagccacagaaaactttgacagcaagcatctcattggggttggagggcaaggatgtgtttacaaggcagtgttgcctacaggtctagtt

SEQ ID NO: 274596 - DNA, 201 bp, Glycine max
tatgaaaagggcggggagtctttttatctatggaatttgcgcttatgacacacttttattgggtgatattactatgagaattcaaatggaatatgtatggtgttataatgaagaagaaagtaaagatttggtgaatctaacccatgtaacgtttttatcatatattttaacttgtttcaccattgttttattggtttaaaa

SEQ ID NO: 274597 - DNA, 390 bp, Glycine max
atactaagcttgcctcaaaaggtccaggaaagacaatgcggccgatagaactagttccgccccggagtacgacagtcaccgctttaggagcgttgtacaccagcagcgtttcgaagccatcaagggatggtcgtttctccgagagcgacgcgtccagctcagggaggacgagtatactgatttccaggaggaaatagggcgccggcggtgggcaccactggttactcccatggccaagtttgatccagaaatagtccttgagttttacgccaatgcttggccaacagaggaaggcgtgcgtgacatgagatcctcggttaggggtcagtggatcccgttcgatgccgacgctatcagccagctcctgggatatccgatggtattggaaga

SEQ ID NO: 274598 - DNA, 1395 bp, Glycine max
  unsure (1)..(1395): unsure at all n locations
gacggagacgacggannntttgaacnntcnttngaaaaagtgccanatanaccggttttngtgtgatntggnanacaactaccncccgcctgtgcttgtatanaggggttgcttatacggaggagagagaggtgaggaagaggttttttatatatattctcaagcacgacaacaaagtatactctcgtaggggggaatgtgtatttattatcgataaagatattactcccacactcctcaactgatcgcttcgtgagtagataggtgaagtatatactacttgttatagagtatgcgccataaacagcacgcnggcgatagtatactaacgccatattactatacgtctgcgcagangacgcgcatataacgatcgtgcctgttctacgtgtcgttgaataagtgaaacggcactcatatgtcgaatagtcaaatatgctttatatcctatttatcagtgtacagtctatctaatgtgtatacgagtatacaggcgtatccnatttgctatatgcagcgtcatctatacgcgttgtgcactcatatgtgtcgatgcgtataaacgatgtatctcgcacaattcttataatagatactgcttgaaaggtgttgtatgcgtgatacaggacgaatcgtcgtacatcgtacattcacgttaatatgtctacggacatatcgacacacgaggtttagaactgtgagcttagtcataatacgtgtcatctaatagagtcaatatccgtatcgtgagaagtgtgctgagggacgattaataggtgtaaagtttacaaatatttggatggtgtaaagttttcgcgtggaagaacagcgaggttactgatacgtgaatctatagacacggcggttatttgtatcatgaggctagcacgagaggttataaatgtgaagtcgatatcaatgatggtgaaaattcatctctggtattggtatcgacctacacaggtataagccataagtataatgtagtataacgtataacataagtctcgacgctaacgtcaataaggaagatagtaggcgtcacgcgagatatagtgaatatacagcgtgagtggtagagacacttcactgcttaccgttcgtgcgacgcgtatgaacgtgactacagaattctgatagcgcgagatatgcgataaacgtgtggatacatgacgcgacttgtatgtgttatacngcgtagcggacgtgtactgagatgatcagatttaactgccatcatgggttatcatgcgctggcaatcatgtatgcgcagtagagacactgtcgctgtcgtgtgtcgtaacatctgtcactgatctatatatgtgctanggacactgtatagtaggagcatacgtataatcaattacacacatgatatatagcgtcaccgg

SEQ ID NO: 274599 - DNA, 439 bp, Glycine max
  unsure (1)..(439): unsure at all n locations
aagcttggaagtttttaagttgttattgaatattagtttaagnaaagttttnaatgtnntatgaggaatttnngttttnnnattgtttccccccccacccccggttgaaaataacaatttagtgcccaacttgccccacaaagtcctccaaaaatggcttaggaacttaaagtccctattactaactgtcataccctaatttcgtccggggaccatctatttgttgggataccaacctcgcttgaccacttcgaggtacttggcacccatcgttaagcaatccgtgatgtttcgcgacatgtcgagagttgaaaggaagtgttaatgtgcaatccgtaaagtttcgtaacatttcggaagccaaagaaaggatgattgcgtaatctataagggtttcgtgacattaccgaacaaaaaaaacaagtttcataacataatt

SEQ ID NO: 274600 - DNA, 757 bp, Glycine max
  unsure (1)..(757): unsure at all n locations
aaggnnaaagccttgatcatgtatgatcncacctttgtntaggnttacgaatgcannttatgggaaaaaaggggtgaagaacttttttatgcaagggaaanangannnnagnggggggtttaaaaaaagatattgccccccaaaaaaaaagggtaataattnaaatggagataaagatgggtggaattaattggaaaaggattaataataatattatgttagaataaaatgatatttaattatataataaatattgatagaaaaaaattttaagatataaaaatttaaggaaggatgtaagataatattgtaataaagtaataatagtaaatgaattaatggaatataagtaaaggagaaatattattgattaaaaaaaggaataaaatgagtaaaaaaattaaatttagtagtgtttagtgaaaataagtttgaaatttatataaaataaattgtatataagggaaaaaataaaggagaataattagatataatatgaaaagaatggatatataagaattggatattaaataagaaggatttaataataaaatattgaagtgaataaaaaaaatgataaaagttaaagcattgtaattgaagtaaagagatgttagagtaaattaagaaaataatatagaaataatattgttggtaatacagtattatatgagaatgtgaatatattaaaaaaagtgagtaataaaagtagggaaaggaatagaaaagttaacgtgagaaaaggagaataagaaag

SEQ ID NO: 274601 - DNA, 978 bp, Glycine max
  unsure (1)..(978): unsure at all n locations
ctttgacgccattgntagnatcagacnctnatttgnnnggattgnatctgtttcagnnaagaaagccnngtgtatttgttttaataagagggagtanatattgattgtgttatatgaatttttttannntaaatgaagaagttatttttatattagggattaattataataaaaaaatttaataataattatatataatggatgtattatattataaataaaatattattaaataaaatgataataataaatattaatgaaaataaataatatatatgattaattataaaataaaaaatgaatttttatattaggatagattataaattaaatagtaaagtattaattattgtatgataataaatatatataaaattaatttaataattaaaaattgttataaatgtattaaataaaatatttttatttaaattaaatatatattataaatatattaatatatattaataaatatttaaatataaaataaatttaagattaatgaaattataaattatattaattataaatagaaaatatataattatattaatatttatatttaatgatatattatataaataatattaattatgataagttataaataataataattttattatgaataaataaataaaatatgttaaagtataatataatatttaattatatgtaataaaaatgtatatttaattaaaataaggttaatatgagtaataaaattaaaattaatatatttataaatataatatttatttttataattataaatataaatatattaaatattttatatattatatataataaatatatgattatgattattgaataataaaatatatttaatataggtatgtaaattaatttagaataataaataatttaatataaatattttaaaattaataatttatgtataaataagtaaatatatatattatttattatataatattaaatataattatatca

SEQ ID NO: 274602 - DNA, 983 bp, Glycine max
  unsure (1)..(983): unsure at all n locations
agggccagcctgatacttgaatgatactncctttcgtaaggattacaancccnnnnnggggnntttnggaggaagaaaagccttttttttttccacccccaacacgaaaancaactgccgtcggggttttttaaaaataaaaaaaagagggcccccccaaaaaccacaaaaggaatttggagttgagggaaacgtagtaataaagaaagtacaatgtattatcgtgcacaaggaaagagataataaagggtacatggttaaataagaatcaaaatacgagaaattactctatattcaccatctgagtaaaaataaaaaaatagtaaattggtttaactaaagaatagataaatatctagtacttaaacaatcttgacgaaaagattaacaaataataagttagatctgaatgaaaaaatataacaataaaagaaaactcattcatacgtacaataaaaagagaatgatcaattcaatgtgatataataaacgtctataaccaatactcgtattagcaaaaataaacatattatcaaaatcaaccataacactaaaaatatataaatgaatatcaaaaataaagaatatagatagtacattcaaagttcaacatgtaatagatataaattaacataaaagaagaagaatgattcgtacaaatatattcaagaacgtaaggaaactattaatttaaacaggatttgagtataaaacatcaaatactaagcaaacagaataagcattcaatataacgaggacagataattgatcgaatcatacaagataaataaactcacaaagtcaaaaactactacgatcatatatgttaagacaatcgatgaaccataatgaggaatacatagacatataataatgactacagattgaatatatcgatatgagcaaagactgatactcatatacatgatacatacgaantcgaagtcggcacatacatgaagactgaccataacttcgatccg

SEQ ID NO: 274603 - DNA, 1106 bp, Glycine max
  unsure (1)..(1106): unsure at all n locations
gttgagcancattgttaaaatctcatntnnttttgntggatgtgacataccccttntttggtnttgagtattgtaaataatataaaataaattttttttattatttttntggaagtaattaaaagtatgggggagaatatatataatatataagataatatataatatatattaatgatagatattaattatgtgttattataaatgaaaataaatagtgtgtgtataaatagttagattattatatataagaatattatattaaattatgaaaataatatatgtattaaattatatgttgatntaatattataattataatgaatatagtgtgtaatatatatatctattattgtataatgaatatagagttgaaaagatatataaatagatatattttatttgttgtaatagagattattaatatattataatattaatacgataattatagatatgaatttatatatatattgataagataatttaaatagataatgtatataggttagttataatgattattaacagagtaataagagtaataattaaaattattagttataatatatatagtagtttaatatcgataatagtaattaatatagtatagtgaaagtattattataatataaatatataatttgatttttttaatatttaatgaataaagaattgaataagtatatatttatattgaaataataattatatatagaatgagtttatatatattgtattattaatttatattatattatagaaagatgagttattagaataatgttagaggatatatattaatgtatattattaaattaaagttaaagattatataatagaatctatatatataatattattgattatataaagttaacattaataatagtagttataattagatatagtatgtataaaagtagtttgatatattagtaaaaaaaaatgatagatattaggtgatatatggaatttaataagtatgaataaatctagtgatatgtcgtgagtataatagaataatgataaatgaatattagttataaataaagtatagattatatatgtatgaataatttgttaataagtatatatataaaaag

SEQ ID NO: 274604 - DNA, 870 bp, Glycine max
  unsure (1)..(870): unsure at all n locations
agggaagagactttgactacttgcaatgacattccgtttggtaaggtatcatccctgggtttnaantttattatgatgtagaagaaattttaatttattnagggactattttgttaagggtttagtgattatcaaaatgaaggaacctcgtaatggtcttatttttaagtgtaattggatgttaatcttctaaaagaagtttatcaggggcctcgttatagtctttggattaaaagattgggttttttttaaacgtctgtgaataaataaatgttatcaataatatgaattccaaaagcacccttttagggggccttttcctggatgggttttctttaccggttccaaagctttaaattggaagtctatggttttttaacaagaatttaaattaagaaaattcttgtttggaagtattgtgaaaatatggcaagtgttaataaattaccttttaatcccctaaaaaatggtggttaagggtaagttctctttttccttttgagcaatgaattcaagccattttccaataaatggggcgaatttttttttttcggaacacttcaattttggtgaggaaaaaattccactggaaagttgttttttaatgccttcaatcctacaaaaatttttaaattaagaaaagggtattttttgccggaaacaatttttaagaccttttatttggtattccaattttgatttttaaaaaagggcgttttaaatattttggaaaacctccaaagaactttggattttttttttatacacaatacccatgttatttttaaaaaagtaattatgtgaaaattagtaatatctcttttgttctatggaaggggctgtctatattggtgaaaaaagatatcgaag

SEQ ID NO: 274605 - DNA, 505 bp, Glycine max
ttcttattttcagatgatgcagatgggtttttaattaccttatgcactcctttaatgactatggcatcatttttggcgctaaactgctgggagtgggaggccttcttcttaattaaatttctggttttagcaggagtcatgtctgcaagggctccaccactggcagcatctatcatacttttctccatatgactgagtccttcataaaaatattggagaagaagctggtccgaaatctgatggtgggggcaactggcacatactttcttaaatctgtcccagaactcatacaggctctctccactgaattgtttaaatacccgagatatcctttctgatggctgtggtcctgggagcccggaaaaatttctctaataatactctcttaaggccatcccagcccgtgatggaccttggagcaaggtattacaacccagtcttttgccctcccttgtatgaatgaagaacagcccttaaaaaaatgtgtatctttttggacattagg

SEQ ID NO: 274606 - DNA, 545 bp, Glycine max
  unsure (1)..(545): unsure at all n locations
ccctggaagctnctaatatctgccacactttttgggttggacctattttggatggccttgattttgtcagggtgtacttggaccccatttctacaaaccacaaaccctaataaaactatattatctacataaaaggtacacttctctatatttgcatagagggtttttttcctaagaactgaaagaacttgcctgagatgtcctaagtgatcatctaggttcctactgtacactaaaatatcatcaaaataaacaactacaaatcccttaagacatgatgcataagcctcataaaggtgtttggtgcattagtgagcccaaaaggcatccctatccattcatacaaaccaaacttggtcttgaaagcggttttccactcatcactctcttcaatcctggtttggcgataaccacttttaagatcaatttttgaaaaaatgttggcatcatgcaactcatcaagtctaggaatggggtgcctatacttaaagtaatgttcgtgatggccctgcaatctgtacacattctccacttaccatcctttt

SEQ ID NO: 274607 - DNA, 451 bp, Glycine max
catttcaaaagttacgcgctaatgccattgaggtatttcaccgaacacttggtgggcacgcgtttaggcgtcaatagcaagagaacggggacaatgtggcatgtcccattgttccaaaatgcattataggcctagggccatcccatacacacccctaattcaacctaatcaagcaagaaaacaaaccaaaattgccctatatatttgagcacactcccacaatttagagcaccaaaaggagatcaaaatacaccaatgaaaagctagaaagcttagggatggaacacttacttgttggtgatgaacaaaagcgcaaaacggaatcaaaaaatgcgaaaaaggatgaccctagggctgcaaactcgtcaatcccgtgggtatggcttttgaaaagggggaaaagaagtttttgaatgccaaaacgccccccctttcgtcattcttataattt

SEQ ID NO: 274608 - DNA, 571 bp, Glycine max
tttaaattttatttagtgaaaaagatgagggtacttaataaactaagaggggggtgaattggatttcaataaaaacgaacttttaaaattatagttacaaaaactttttttggacagattgtattacaaaacttttataatctaaatttaattaattcaccctttacacgaaatcccttattaaagttattttttttacaaagatatatttttgaacctttttaaaattgattaatactagaatgagagataaagattaaattaagggaagaattatacaacctttttatattggttgactttatattagaagagaagctaatctagttatctaattcaaaaccagaattagatttccattatgtatatagaatctttaaaagtaattaaaactaatttacaattggtagcatagaaaaaagatttatgtatcttaaacttaggtttttagtgaataagaacctatgagaaaatttaccttatgtggaaattatataaacctattctagcatgtttttatggatttatttacaaaaaaaattattttgtaaatccttatggtataacctag

SEQ ID NO: 274609 - DNA, 281 bp, Glycine max
  unsure (1)..(281): unsure at all n locations
ttataagtgtgggtgtgggagattattgttttgtgttngngatatgtgaagatgatgttttaattatttnggatttggtncgaccatgcccttctgatttacagttgggaaattggtgagtggaggaacgccctggcatttacgcaacaagcataatgtaaacctttacggttttaaaagctttatagttgggcctaggttttaaaagttttattttgtttagggtttgtgtgttattgattttaattttttatttatggaattatttgtagtatgttact

SEQ ID NO: 274610 - DNA, 387 bp, Glycine max
gcatgcaagctttagcaagaccttagacaacaatatgaaatcatttagtgactattttgtacatattcaagtgatcaccaaattcaaggaattggtaatggtctcattccaagtgtactggatgttcatctactaaatgaagttaatcaggtaccttcgtatagtcttgtcttcaagcttgtgtctcttcacgtctggaatatgaatgtagcatatagatccaaagacccttaggtgctttcctgatggcttcttcccgttccaagcttcaattggagtcttgtcttttacagacttagttagacatctgttgagtatgtaaatagcagtgtagactacttcagcccaaaatgtgttaaggagtcccttctccttgagcattgatct

SEQ ID NO: 274611 - DNA, 353 bp, Glycine max
  unsure (1)..(353): unsure at all n locations
atgacaanggncaacnaaattttttaattcaggaatgtaagtataattaggtgaagactgactcatggaaactttttcctttatatcatgtttggatgaggatttttatatttccaaagaatttaaagtacatagaaattcaattgcactagggttaaccccataggcccaacactggcctatggagggaggcatccagctagaggggaacaatttagttgagaagggatgtcactgggaagaagattgatgcatgtaatcattttggaaggatggagagttggttatgaaccctggctgggggtaatagggtaaggaattattttagaaatggttgggcaagcctgctggct

SEQ ID NO: 274612 - DNA, 1067 bp, Glycine max
  unsure (1)..(1067): unsure at all n locations
cttttgcacaacacgccctattctnataagggnnaagcgatttcangnccnttctaatcttttnantctgtagatatagagtgatgtagatattatttatccttaactcaaaccaactaatatatggtgaatagggggttatttaaaaacctaaatatcttataccctaccagaatttctttaatggtaaaggcgtatagattactgaattcctgcgtttaaattcaaagattattatatggcataccagtcacaatttttcccactatgtctataagctctatcctttaaacttgtgccacaaccaaatttggggtgtaatctaaacctcagatgctcttaccaatacacttatagtcattgtgaattgaaccccatttgtaatatttatataaaccactaatttacatttactatattttatttgttttttaacactgatgcccgtcttcattttaaaaatatcccccaacatagggggtgtgttatctcccctccccttacaagaagaaaactccttacactaatttaaatgtgagaactataaacgtccctatgaaattggtgtagtctctcatttacaacacagtaaagagggggaaatatcttccctatctctttttctctagcaattccttctaaaatgaaataaaatccttctagctttcaatatggactaaacattgcattctttttctgttttgattttcacaaggctctctttattccacttcacaaaatgctactcgtgtgcactgccttataatcaatatcttgtacaccatttggacatattgacgaataatgactgctaacccatcataattctcggcgaacacaacaaaagcgttacctataattagaaccattaataatattgtctcgatacttatgcaactatctatcgaggtcactcactatctgcgcttaatataatatgcgtttatcatctatacataacgtgttataccgacttctaccttctaagctccattaactatatatcaaactgataactcgacaaagaccatttcctacacttttcacattattctttactatcatct

SEQ ID NO: 274613 - DNA, 479 bp, Glycine max
cactatataccctcaagctcgtaggattatggggtacccatcacatgtggtactatgtggctgtcgggtgatggtgcacaacaagtttttccacatccacaaatcgcgcataaacccaccatcccctgttgcccacctccaactgagctcacgtactcccacgtagcccatatcctcgtttctctcaacaccgggtccccatcaatccttccaagcttccccaacatccaggtaatccaacatccaaaacatcacaaactaacaaaccaagcaaaacagggcaaaagcagaaaactctgcccaaaactcaaaccaaaatcaccgctttttctcacttaaagaccccaagaacctttttctctagtacataagtctacgttttgaccgttgggatctactaaccaacatccagaactcattttgtactactctttccacagccaaccccacacaagcctttttctgcacaaaacccaaat

SEQ ID NO: 274614 - DNA, 409 bp, Glycine max
  unsure (1)..(409): unsure at all n locations
ggcatgcaagctngnttttttttgttggatgagcgttttttttttacgcatgcgattttacaacgatgcgggctttttcttgttttctttgccgcacaagtgaactaatggcatgttctaaagcttggttttttttgctgaaaataattaattagttttacatttttaatatcacttacctattattaacttatgggttaaggttaaaataattttggtgaattattattttgcgctacataaaaatagtgtttaattatcactaagtgacacgttatggggataaattattatacatgacaaattaattttcttaaatcaccattttatgcgttagaacaacattggttaattattattaatttaccccttaattaataaattaattatccctggaaaattaattttt

SEQ ID NO: 274615 - DNA, 529 bp, Glycine max
agcataattgagtttcaaacttatagtctatatgttctatccatacttttgctgatccattgtttatggggttagaaagggtcataattgaatcctaaccatgtagcctaacttcttatttcttatctcccttcttcagaaaaaataaatctacattaactaacataatatatatcggaaacaatcttctagatattatttatcaatgttcgaggcgatattacatggaaaaaaatggtaccttgcggagattatcttccttggtgaggcgagagagacgagcgacgaagagagtgcaataagggtcttcagcagccctgggatcaccaaatgggtcatctgcaaaattcaatttgtaagcataaaatggaacacaaatgaaatttttgaaaaaggaaaatgaatatgaagaaaaaacaaacaaaggccaatggaggaacagagttgagcgcgaataacggcgttgtcgtgaggaacaacatcggtgccgtccatgctgccaacttgtatgggatggtatgaatctgcg

SEQ ID NO: 274616 - DNA, 806 bp, Glycine max
  unsure (1)..(806): unsure at all n locations
nggccaaggcactcgcncttgatgccctcaatgtcccgccccntngataagaaaccatccccccnnntntnaanatttaaggtggatgaagggagaattttatttattttaaantgaaagttagatggggggggggttttatttatataagagaatcaattaaattatggggattttatggatgggaaaaataatggggggatgaaagagtatattgattaataaaaatagtgttatgtgaatatgttagagagaatatagtattataaaggggtagtaatgtttaagtttggaatatagtatatgttatgataagtaataattgaggttataaattagaaattaattttataatattaaagagaattgaagaagttttttaagatggtttaattttaattttgtggtataatgtattgtaggtggtattagataaaaatttgaaaattaatttatggatagggataaatgaataatatgttattataataatatgtgaaaaaaagagattgaaagagagtttttaaagatataattattaattattttgtatttagggatttattggtaattatatttaatatagtaagtattaaacttgaaataagttgaagaagatgaaaagaaattgtattagtaggagggaggagatgtgaaattagtgaaagaaaagtgaaatataataatttttgtatttagaaaaattatggagatataatatatttttttggataagatttgtagagtatagatttagtggtaattttgttatataaatttgaaggtgttaaaagtggtaaatgacg

SEQ ID NO: 274617 - DNA, 1313 bp, Glycine max
  unsure (1)..(1313): unsure at all n locations
nntttgaaagaaccnnacttgggaagnnttccccagcnnncntnangtgnngngtggaagnntatagatctatctctcnctnntatntnnataaannnaaggaatttatatatttatagtgacgatngaggaatagtcgtatatatattgtaaggnnnannangnacanatataatcacgagaacatatattgtggagcagatattataatgatataatatatcactttaagcatgatcggtatctgctatatattgaattaatatatactgtttatatgtatatttgcagaaatgtttatagtggtgagtgaagtcggncgcgaatatatggagattanataaaataggtctgttagaaatataatgtgaaattgatatcataatacctatgatggagagtaataattcttgaatatgagtattgaaagtataataggtatgtgatatctacttttgaattgttctatatatagaatgacgtcgattagagacatgataatatttgttagagattgttctttattatatgattaactattgatatgatatgatatttttgatgaaattaattgttaaatcctcagtaatatatatgtgtttgaaagtatgtggatatgttggtatatatagaagagatcatgttaatatattactcggtgaagagttactctaaaatttaataatatgttaatagtgttttctgtaagtataaatttggaattctaaatatactcaacatcttattaataatatggaataangtgagtatggacgattcaatattcataatatgaccaaagattcattttaatcatctgttaattgtatatacttgtgtgagacggttatgttgaaatgtgagaatgagatgtatgttatgtatatggtggttggacacctcgattatttaaatttgtttaggatatggtgctacatatattagataatgttttatatggtcttggatgttaactgatatgatatatgatatatttattctcctgttatagtgtggtgtgttaatagatgtgataatgaatatgttatattatatacgtcgatagtgatgtgtaattctacataaaatgtgaatagataatgtattatataatattgagatcgctccgtatatatgtagtgtagttattgatgcatagatttgtctggtatgaatagtaatatctatgtaatagtgaaattgttgaagagcagttcatatcganagtgttgttatcatatattattatcanatcatatgtatttatttagacgttattgcatatatatatcattagtgctgcgagtggtatg

SEQ ID NO: 274618 - DNA, 546 bp, Glycine max
  unsure (1)..(546): unsure at all n locations
agcttgcttntacaatctccccctttttgatgttgacaaccctaaaatcaagaaacacatgcgcattctttttcctagtcgatcactcacttaattctccatattcttcccctttgtttttgagtttaagcttcacttgaaattaagctatttaattatatgagttcttgatttaatccctattttctctccccctttggcatcaacaaaaagccaaagtgtgttagaaatataaaacatacataaatgattataaagcataataccaaatgtaagcacatatcactagacatatgtcatcaaaataattaagcttaaaactcataacaattaagagtaagtcaatataatcatgttaagttatactaatcaaatattaaaagaaatactaagcattcaaacgtcataaaaatataaatcatttgggtaagtcactagcatctagcagtcctaattctctcctaatggtgtagaaaagaattttcgttactgggtttgtgaagacgtccgaagttgatttttactatctaaaaattctaaaacact

SEQ ID NO: 274619 - DNA, 361 bp, Glycine max
gcaagcttaaacattcaacttcgagcgtgtcgatatattacgagtctcaatcagacatccgagtggggagttattcgtttgaatatgctcacaccttcaacgttcaattttgagcgtttcgttatattacgggactcaattagacatccgagtaaaaagttattgttttttggattggctcacaaatttaacattcaattttgagcgtcttgttatatcacgggactcaatcatacatccgagttaaaagatattgtcgcttgaattggctcacagcttaacatttaattttgagcgtctcgatatatgacgggactcaatcagacattcgggtgaaaagttattgtcgtttgaatttggc

SEQ ID NO: 274620 - DNA, 456 bp, Glycine max
aaacgacaataactttttactcggatgtctgattgaggctcgtaatatatcgaaacgctcgagattgaatgttgaagctctgagccaattcaaacgacaatatctttttactcggatgtctgattgacgcccgtaatatatcgagacgctcgaaattgaatgttgaacctctgagccaattcaaacgacaataactttttactcggatgtctgatagaggctcgtaatatatcgagacgctcgaaattgaatgttgaagctctgagccaattcaaacgacaataactttttactcggatgtctgattgaggcccgtcatatatcgagacgctcgaaattgaacgttgaagctttgagccaattcaaacgacaataactttttactcggatgtctgattgaaccccgccatatattgagacgctcgacattgaatgttgaagctctgagccaattca

SEQ ID NO: 274621 - DNA, 562 bp, Glycine max
caagcttggggactttactatatatttttttcttttagtaaaccctgttcaaacatatttgaacgaatttaaattgtgattttggatgttggtgtgtttgggtggccctggtcagaagatgttttattaagtgtttatgtaatgcaaggttggtcagtttggttttgcactaatgtatgattactttgtggaatatacttaaagttgagtattttttaaaaatctttgttttttttttcttgtatatgtgtaatcaggagagcccgagaggggtcttgtattgtaagtaactggccatgctaagttttttaataaattgtgttaaccacttgttgcagtaatcaagagttagatcattcatttcaatattcttaaaatttgtttgctgtttaccaaatctgttttgtgggttaagaaattttaatcccactattgcttattggaggagggccatttttttttaaaatttaagaactgataatttttacacttgcttgcttgttttaaggtggctcccaagactgtgttcaaaacaactttgagggaatgccctttttttttg

SEQ ID NO: 274622 - DNA, 539 bp, Glycine max
cctttttgtagaagaaaatataatgaattaagatgttaataacaatcaaatttctccttccacagcttaaaatctacttttccacctaaattttgctatgaactctcatctttctactccattagttgtgtataagttgattttatcttatgggagaagtttgattcattttacctccttaattcttcttattttctttttcttcaagtgtttgttcaaaattttatccaaactagctctaagttgtctaacaaatgacgaggaattatttttaagtttgttcttactcattctgtgatacacctttcttattttttcttccgtagttgcattgcagcccttttgggtagtgaggtcattgtcactgatctgcgagataggctgaagctactgagaaaaaacattgagaccaacatgaaatgtgtttctctacggggttctgtaacagcaactgagctcatatggggagaagatcctgacccagaacttattgaccccacacctgattttggtataataattctctccctcaacccctt

SEQ ID NO: 274623 - DNA, 403 bp, Glycine max
agcttgtacgcacatcgttcgcgtgtatgatattcactccacaaggtttgaagtagaggagagcttcaaccctataacgcaacgtggcggacaaaagtgggcagtaaacttgaatggtcgtcattgtcaatgcggaaggtattctgcgcttcactatccatgttcacacattattgcagcttgtggttacgtgagcatgaactactaccaatatatagatgttgtttatacaaacgagcacatcttaaaagcttatttcgcacaatggtggccttttgggaatgaagcggctattcctccttctgatgacgcatggacacttatccctgacccaactacaattcgtgcgaaaggtcgcccaaaatcaacaaggattagaaatgaaaaggattgggtcgaacca

SEQ ID NO: 274624 - DNA, 473 bp, Glycine max
caatcccttttctcccaatgccctagctttcaacagctcgtttatcttctaagttaatagaaacctggaaatccttcaataacctaaagtccaagataagatataagtgaaattgcagagacagaaatggtcaacatacactatactggaaaaatactgtgtctggaacattaacaacaacttcgaagagattcacaagtaaaggtaagtgttttcctgtggtcccaaccccattcctactgataatagaatactttgtagcagtcatttgttctgtttccatattatgtggcacttcagcaggtgattgagatgatgctggaggctcagcagcttcttcattcccaggaatttcctccatcattcctctcttagctacaaatgacaccgtaaaacatgaatcacaaaaagaacagaccatacttaaatttaaagtccagatatactctgctacagctaggatttccaatgat

SEQ ID NO: 274625 - DNA, 453 bp, Glycine max
agcttataaaaaaaggaaaggatcaaggaataactactcttagacacaagtttattcaaccaacaaagaaagtagtccaaataatagaaaccaacaaggatgaggttgtagtgaagatcaaggaataggacgaggtcatagacaaggacaaggccatgggaaaggctcaacaaatttcaaagaggagaaatctcaacaagaggtcatggccaaggcaactcaagatcaaggtatgacaagtcaaatgtgaaatttaacaattgtggtaaattttacaattgtggccaaggcaactcaagatcaagggatgaccctttattgacgacttgcatgattaatgaaagaagaaaagacaattaatggtacctagacactggtgcaagcaatcatatgtgtggaaaaaagatcatgttggtggagcttggtgaatcgatgaacggaaatgtggctttt

SEQ ID NO: 274626 - DNA, 558 bp, Glycine max
atactacaagatgattccaaaacagaacaggacatctaattaaatatcattgtcatcgaaccgatcttcgtctccggattcctgcaatgggttaatgaacaatgagaatgaggtaaactggtgtgtgttgtttttctttgattcatgaatgttggattggattgacgtgatgtgctttcaaggtttggcatgtccaggtttgtataaagatttattttggatctatttaacaggtgaagttcataattgcatcatgtcacagttttctgaacgaggataaagcagctctagttcaaaactggtgtgacatgttttttttttctgtctcaggtctttcatattctcttgaagctcatatatcatatgcattttattatgaagctcttttccatatttcaattctgattgtttgctttctctttgggcagtattgattgtgttatggacttatgcaattggctacttgctttaagctttgtgcatttatgtctttcatatgacctaccttgactttaagatgaaattcttttttccatgcctttttgcccacaattgtcc

SEQ ID NO: 274627 - DNA, 625 bp, Glycine max
ggatattattgtattttataaccacctcaacagtgatcatttggaatgcaaagaaggaaagtaataataggatgaagtatgaactggaaaggaaagctaagaataaaagagagtggttgtgagttgatcgaaataagagaggtttagttgtagagtcttcaacactaataccttcctaaagagtgtgaggaatggccactttcaagaattttttttaagcagacaatttatgtcattatataccaaaaaattaaatattatattaacagagattaccatttttcagttgtaaatgaatttagtttcctttaatttatttttcaaaaatattactttgacaaattaactagaataagagatacacgaatatgtatatataatataatatatatatatatatatatatttatataaaaaaaatgactatttttattatatttttaatttagaaattatgctttctttaaataaaaaaaaatatatttttttaataatacgatattaatattttaaaattttattattaattatatttagagtttgtcaaaccaaatttttatttttttaaaaaaaacttcataaaaaggtattatttaaattaaggggtcttttaaattctaaaaaa

SEQ ID NO: 274628 - DNA, 573 bp, Glycine max
ttagttgagtggaccccatttcaatggtcttatttggagctttaagaggatatctaagagcatgatgaagtcaagttgaagccttccaagtaagagaaactcaagccaagttctctttgtgaaaatctaccattgatgctttaaccttctcaatagagagagagaccaacttctgtaaaaaaaaattagtaatctgtaatagatctaagatagaagtgagagatttgaatttcctgagaaaccttattgtgaggtgaacatttgtgtttgtgtagtcaaaaacacaaaaactcttttgctattgaaattccaataatggttggaaaaagttgtatctagcgatgaagttggtctaatagtagctaggagtgaagtcaagtggggttgctggcaagttgttgaaatccagcaaattgttggtccaatagtaattgattatgtttgtgaaatctcatcttaaagggtgaaccaatgtacttttttctttcaaaaagaacttaaaaggttgtgaaaacacaattcaaaccccttctcgtggtatttttgtcacttccaattgcattcgagcttaac

SEQ ID NO: 274629 - DNA, 654 bp, Glycine max
  unsure (1)..(654): unsure at all n locations
atttgttnaatgtgggagtggacttttttttttttcaaaaactattcttcccgggggttgcaagaataattaactttttcaacttcctacgctagcttaactactatgttagttctccaatttcttaatttttctttacatattgcattcactattcatttcaatgcttgagagtttacttttttttaaaaagaaattgtttattttaagattttacaaaatgtaaaatatgataattattttttgggggaaaaatgaaacattaacatgcacttaaattgtacttaaaatttgagtgtttgttttatctaaagttgttgtaataaagtacttttgcatattaagattattctaaagtagctattaggaaaaatagaggaagagagagtaaatgacatgtataattaatgatttgatagaaaactttaaaattattcgagatttaaatttagatttaataaaaagagtgtattttgcgtaaaccgtggttatttatatttattaattatattttaaaggatttttttaatcaaattgtttaaaggataaaattatttatataattcaaaaattatcatgtttttttttttttccttattttaaacaaagcaatgaattggtttttgtatagcaataaaatgctaattatatctt

SEQ ID NO: 274630 - DNA, 492 bp, Glycine max
  unsure (1)..(492): unsure at all n locations
atggaagaattgtatatatagtaatgaacttttcatttttttacacaaattcgnttaatgtgtatgctcaaatctattagcttgtgtgctcaactggaaatcttaaatttctattttacatattttatttggcattatgtaacaaaagatgcaaaaaaaagtttactaaacgtttatatcagaggtgggcatcggctgtttatatattgcttgtctggcacaccacaaattcttttttgatttcttttgtccatagattagagttgttttatatagttctagtttgctgtagttaaaatcaatattatacttgcgtaagccatcaatgaactaaaaaattacaattgaaatatagaacacatgattttaggcaagcagtgatagctggaaaaatggagtatgtgggaatggttgcactcatatctataacgatgattctactgatatggatgataacatttatgcccaacacattctaaatgacgaaatatt

SEQ ID NO: 274631 - DNA, 512 bp, Glycine max
aagccctgacagttggtaaggagaggtaaaacttacttggtgatctatcttgaaaggaattagtttctgatccttggtgccaaaaataggaaaacattaactgctaaactaattttgacaattgatatagacttaaacacattcattgatgagataggtatcttaagagttggatttatgcaatactgttgtgctaaaaattataatcaaacattattaagatgtaactatcatctattaaagttttcttagaactgcattaaacgttatgggactacatctattatagatgtaatgagactggagttaagttgatcaaatcgtaagagatgttgattaaataaagtgtcaactaggggatttggaaccatgactttgctattcttatccaaggttcctacttgaaccgcctttttgatgaaaagaaaacaaaaattgctacacgaaatatttccaaactatctgaaattttttttaattattctaacccctttaaatacattctttaatat

SEQ ID NO: 274632 - DNA, 988 bp, Glycine max
  unsure (1)..(988): unsure at all n locations
agggagannnttgatcttgaattgcanaaccttntgttatagagaacaaacgccgngcntgnnaagnntttttcatgcttggcagagaggggaagaaatgtttntatatagtggacanacncaacaacgataggaattatgggcggccgcgggtaggtggatttatcttcaaaatagattcaggtctccgaaccactattctttcgaggagacaacgtggaaaagatagaacttattacaatacatctcgactgctcattatagaccggggtccttcggtatttgctccgcggaaaaagaacagatactgggttgtccaaggtattaaagcaaccgtctatagtccttctccgtacgggtcattatacatgggcatttctacgtctttatcagaatagtctaatataagggctcttatgccggtataaaaccacatcgcggtaaataattccgctccgttacgtcggtggattgtaaaaaattcaagtagtgaccgaatcctttgtttagctgaggtaaaaaagaaatcataattttatctcgaggcaaacagcggttggtcatgcctggtaatagaccaaacgggttgccaggaaaaaaaatattagatttttggtgtgtatacaaggctttacatctttacataatgcataatatgggatatatgggaataccaacttcgggaaattttcgaccttggacgtgtagccttaaacagtcaagtatagaaataccctgttaatcgcaggaataaaaaattaaagttaacgctgtgaacacggtgtttgtttgccttctaaggtaaaaaggggggattaaacatacaataggtttttgtaatgtntaaaanggtgtgnntngagggaaggggggggtaaaaaaggtgagaaacaaacaccatcccgttttgaatttataataaattactactcctcgacatcgatctccaccatcattccacgagacgcacacataccaatccctccct

SEQ ID NO: 274633 - DNA, 480 bp, Glycine max
aagcttttcgcaaagattacggtaaaatttgggacttagccatggtagaagtctctacatattgcctcccttgcccagtattatgatcagccgatgaggtgcttcacctttgggaacttccagctatcacccatggtagaagaatttgaagagatcctagggtgtcctctaggggggaggaaaccatacctcttcacaaggttctatccctcattagctagaatttccaagatagtccaaatcttggcgcaggaattagaccacaggaagcaagtcgaaaatggggtggttggaatgccgagaaaatatttggaggcaaaagcaagaatcttggcaggtaaaggcgagtgggccccgttcatagatattctcgcactgctgattttcggaggattcctctttcccaatgtggatgggttggtggacctggcaccgatcgaaccttttctcgcctaatataaccacaaggaaagcccgttt

SEQ ID NO: 274634 - DNA, 496 bp, Glycine max
gcatgcaagcttctcccctattgtgctataaataggggattaagtgaagaagaaaagggttcagccccttaggcacttctctctctttcgaatttgctaaggaaaattatttccatgaagaaaattcaagccgaggcgcttccgtaacgtttccgtgagtaattacgtgaagattctcgaccgttcttcaaagattcatcgttcgttcttcgttttcttcagttttcaattcattatatgtatccgtggtggtccacattttgtttcatgtatttttattctctttttcatttactttttataccctcttttgacatgcttaagccatttatttaagtcatttctcgcctaatctaaaaataaaataaatttccaccgatcgtttgaaatggatcatccgttactttcgtttgaaatgaattccgaccgtccggtcgtgccgtaaccaccttggaaatcaaaaaagaggtaaaattataattttataatccaaaaa

SEQ ID NO: 274635 - DNA, 535 bp, Glycine max
  unsure (1)..(535): unsure at all n locations
ctatcataatcgattacatagctctttttgagacaatgattgattttttaggagtctctactttaatcgattacttctctcttaaaatgtgcttcagaagtgatcacaacttttaataaaaatagaataaggtgtcgtaatgggtgcaagctatgtaattgattacatcaagaatctaatcgattacattgttcttgaaatttttccagttgttgggaagaacactttaattgattgaaatgataatataatcgattacttcttccaaataatcgattacattgtatatttaattgattacatgcggntataactgttttctctataaatagacaccttgtgttctgccttttaataacatctaacaacttctgaatgtgttagaattatgagctaacattagtaaaacaaagaagagaacaaaaagtgcttataaatagtgtgactcacaatttttaatctttgattatgaagatcatattgtgaaaagggagttgtgattttctcttgagttcnagaagacactcattcattc

SEQ ID NO: 274636 - DNA, 470 bp, Glycine max
ggaagcaggttaaaagctcttttcaaagcaaaaatgttgtttttacttcaaaaccctttgaactacttcacattgatttatttggtccctctagaactatgagtttgggtggaaattactatggcttactaatagtggatgattactcaaggttcacatggactttgtttttgaaaacaaaaaatgaagcttttgatgcttttcgcaaacttgccaaggtgattcaaaatgaaaaaggtctcaacattgtttcacttagaagtgatcaaggaggtgaatttcaaaatgagtcttttgaaaacttttgtgaagaaaatggaattcaccacaatttatctatcccaagaacaccacaacataatggtattggggaaaggaaaatagatctattgaaaaagatgcaaaaacccttttaaatgaaacaatgttacttaaggacttctgagctgatgtgctacacactatttgtt

SEQ ID NO: 274637 - DNA, 661 bp, Glycine max
  unsure (1)..(661): unsure at all n locations
tgatgaacactcagtattttttgttctatcaaatcactattggctctaaataaataaaaaaaatatttgttgtttgagtttgcacactgactaattatgtgatcgtcttactgatggatacacaatcaatacttaattttttctctcaatatgttaaaagtattttgagaacttttctaaattgaatctaagagttcccaagtattttttgataccaagccacttgtggcttttacaaacaaaagtttgaatgaatatagtgattcaatgacactcttagagtgggtaaacaataaagctcaaatacaaatatcttttcttagcaaaggttaaaatagtttaagtacaaagtgtaccgtgcattcatttacagcacttcacttcanaagatcttttgctcattttcaattgatatattttgttgttaaaatcctgagcatgagatgccttttatagacttcagtgaagaatccattacggaatcaatgctgagccttgaaatgacagttgtctcacaaaaagaagccgtgcgacgtggcgcgctctgattggagaggaattgaataaaagtacaaacaattgcatttgctcttttttcacgataaagcaacccttgaggaatattttgtgaatccttttcttaatttcatgttagcatttc

SEQ ID NO: 274638 - DNA, 394 bp, Glycine max
  unsure (1)..(394): unsure at all n locations
tttttaaggaaaaganggggtgtggggaggttgaaattattagaggaaagacgcatgcctatgttgatgtggaagaattattcatatttacctgggttaacgttattagagagaaatcagaaatctttgaagtatttaaagagttgagtttaatatttcaaagagagaaagattgtgttattaagagaataaggagtgactatggcagatagttagaaaacagtaggtttattgaattttgcaaatatgaaggcatcacttatgagttctgtgtagtcattacaccataacataatggaatatttgagaggaaaaacaggactttgtaagaggatgaaagggaaaatgatttatgcaaaaaaacttactttaatctatgggttgaaggcatgaa

SEQ ID NO: 274639 - DNA, 630 bp, Glycine max
agcttcatgaagcccagtatcaagactttttatgatcttggtcttcaataaatcatacacacgaacactctttttggtacatacaaagaagatgtaacaggatggatggaaggttgacctaacaacaagtctgtgtaatttgaatggaagtttttgcgtaagctttttggataattggtgtatcagaattgctcttgattcatgtaaagaaattgtcaaggaaaaacacacagagcaacccccactttaacatcttatacctttaagtttcatttcatccacttaagataacaaatcagctaaaaagttggcattcaagaactagtttagtatagtttgttttccgtaagctccatggataaagtacccacacactgaacacatccattaatggaacatgacatggaaataacatctatagtctaaaatgatatttataaacatgtcaaaagccaaccatgccttgtgctgtgttgaacaaaataaggcaaacatcaaggtttattgtaataatatggatgcaatgaaagcatgtgcacatttatggacatacacctaagaagaagcaaaataatttcaaaagtataccaaaaaaaaatattaaaaagataatgtttttataaacaatca

SEQ ID NO: 274640 - DNA, 467 bp, Glycine max
agcttgtctcagcgtttatgcgagacagagaccaacatgctagctatcatcgccaagtaccaagaaaagttaggtctagccgcggcccacgagcataggattgcggacgaatatgcccaagtatacgcggaaaaagaggctagaggaagggtgatcgactctttacaccaagaggcaaccatgtggatggatcggtttgctcttaccttgaacgggagtcaagaacttccccgattgttagccaaggccaaagcgatggcagacacctactccacccccgaagagattcacgggcttctcggctatggtctctcagaccttgactagatatgacttcctttttgaaataaaatgagttggtcccatgtttctactccaaaaacttgtgcaaatcaaatcactcctacgtttcatctctagcatgcattttctttctttacccactcctcacattttggttttttagg

SEQ ID NO: 274641 - DNA, 535 bp, Glycine max
ccgtcgaacttctccattccattctgcgtggaaatagacacctccggcgtaggaatgggtgcagttctatcccagaagaaccacacaatcgccttcttcagcaaacccttctgttctaagctccttcgtgcttccacttatgtcagggagcttgtcgccattaccaccgcctttaaaaagtggagacaatacttattaggcaatcctttcactattctcacagaccaccgtagcctcaaagaattaataggtcaggccattcaaacacctgaacagcaatgctacctggcacgattactaggctatgactatacaattcactatcgtgtcggaagatccaatgcagcagtcgatgccctctcacggtagccaaaagaagccccctttggccaattttttcttctaaccattccatacttcctttttttttgcaagaacttaaacaacaactcctcaacaatcccttcttcgtggactttcaccgctgcattcaagacaatccttctcaataccctgactactccatacgttatga

SEQ ID NO: 274642 - DNA, 759 bp, Glycine max
  unsure (1)..(759): unsure at all n locations
acgcccccccttatgctttgaggaccccccttttgtgagngnatctngccccngnngnggnngnntgggtgggggaggggttttttttttggtcggggtgtgtggntggggggggttgtgtttttttnttgttttcccggctttctctggtttgcctttggtcttcggcncggggtgttttcttggctggccccctctttgcccgtggcgttcggggtttgttttttggggccttctttcttctttggcttcttcctnctttggggaggggggtttgggtcttcttcccttttgggggcctcttggcttttccctgctcggtgggcttgtcctttccgccttgtttgggggaggatggggcccttttgttggctcttcccttgcgggggtttccttgtttctttcttccgtgtttgctgtggcgcggcgtctctgtttgccgtttccgtggttcttctcttcgttcgtttttttttttttttgtcttgtgtgtnttctggcggccttcttttggtttcctcgccctttttgcgtctttgtttcttgctcccgtccctttctgcctcgtccggccccggtcgcgggtttttcgggttcgttcttggtcctccgttggtccctttttgtccggtgttctctttctttctttcgggggcggggtggtctttcttcttcgtgttggttggtctccccttttttcctccttgcgcgccccttccttttctttcgcttcggtccctgctctgcgcgtttgttcct

SEQ ID NO: 274643 - DNA, 1013 bp, Glycine max
  unsure (1)..(1013): unsure at all n locations
cgccgccatttacngctnatgaactatcggnccnnnntnntgnaaagggnatactttcccccnnnngnnnnnnnnnnnnttntggttgtgtgnnngggttgtgntttgtttttttgnnggnnngngnngngngggnggggtttttttnttntnnttttnnnnntggttcccccctcctcctctgtttttttgttttctgtttctttctgtgttctttcttggcggtttgttcttttttttgttctgtttttttgttgtctttcgttttgttctgctttctttccttggtttttgtctcttggctgtttttgttgtctgcctgtgttttcctgttcttgttctcgtcgtgttctcttttctttgtttgtgtgtttctttgttccttgtgctgtcttttgtgttcgttctctcttgtgcctcttgtttcgtgttgttgcttttctcntgcgtcttgtcctttgttcttctttgtgtctgttgtggttttggtttcttttttgccgctttcgtctcttttgttctcgttcgttgtctgtcggtctctctttctcttgttttttttcggttcttctcgtcgttggtggtttcttttctgttgctgtttctggctttcttgcgtcttctgttcttcgttgtggtgcttctcggctgtttcttttctgttggtttctgtcctctttgtgtgttgtgtcttcgtgtccttcttttccttttttgttctgtttctcgcctgtggttttctgtttccgtgttttgcgcttctttcgttttctctttctctctgtgtgttcttttttgttctctgtgctcgtttcgtgtgtccttgttgtttcttgtggtctgctttggtgctgtctgggtctgctgttttcgtcgttcttttctttccgccgtcgctgcttcgtcctttcccctctcgtttcttttcgttgctctctttcgttgttgtctattgttttcgtgatctgtgtcctttttttcttgtttttcgccgctttgtctcgtgtgttcag

SEQ ID NO: 274644 - DNA, 556 bp, Glycine max
caagcttcaacatcagaccacttccagggtgctggtaactacttcacatggatttgatggggcctatgcaggttgaaagccttggaggaaagaggtatgcctatgttgttgtggatgatttctccagatttacctgggtcaactttatcagagagaaatcagaaacctttgaagtattcaaagagttgagtctaagacttcaaagagagaaagattgtgtcatcaagagaatcaggagtgaccatggcagagagtttgaaaacagcaggttcactgaattctgcacatctgaaggcatcactcatgagttctctgcagccattacaccacaacagaatggcatagttgagaggaaaaacaggactttgcaagaggctgctagggtcatgcttcatgccaaaaaacttccctataatctctgggctgaagccatgaacacagcatgctacatccacaacagagtcacacttagagaggcactccaaccacactgtatgaaattggaaagggaagaacccactgtcagcacttcacattttgggagtccatgttacat

SEQ ID NO: 274645 - DNA, 370 bp, Glycine max
aacagtaatggtggttttgataccatttgttggaaattttcaataaatcttataagggaccaaatgagtaccataacatattacgtcagattatcaagaggttttaaggaatacctggatccatagaggttgattaacaccccacagaatctgacagcggtcacgaacaattggtctaatgaccttcctcaatccaactcacctttttcttacgggacccttcttctctctccccatcgggcgcacccgacactccctacccacccccctccccccccaaacaccactcccctccacaagccgcctcctacccccacgcacgatcctgcgctctccccccccccccccccttccgccccccccccccccg

SEQ ID NO: 274646 - DNA, 478 bp, Glycine max
agcttatccttatggcttgcctccggacttcaccccccatgccaccccgaaagatttaagccaagcccctactttcgaggggcaactcccaccttatgacgactatcccgggcaagacgatgaggaaggagatacccatcttagccccctgctccacctcaaagatccgtccccacatgaactaacccaaccgaacatagtccgccatatcccggcctcacccacacccgtaaaagaatctgttcccttcacggaagataagggaaagattgaggcacttgaagagaggttaagagcagtcgagggccttgacaattacccattctcggatttggcggatttgtgtctcgtgcccaacatcgtcatcgctcccaagttcaaagtaccagactttgataaataccaagggacgacatgtccaaaagggcatctccggatgtattgccgaagagggggcgtattctggggaccaaaagtt

SEQ ID NO: 274647 - DNA, 539 bp, Glycine max
gtgggatacccaatttgatcatagtttccaagcccttattgaaaagttgatgactgctcccgtgctagttttgcctaacctgagagaatcctttgatgtgtattgtgatgcatcagagatgggtttaggaggagtatagatgcaaaatggccaagtagtggcctatgcttctggacaactcaagactcatgagaggaattatcccacccatgatctatagttggctgctgtagtttttgcccataagatgtagaggcattacctgtttggctccaaatttgaggtgtttagtgatcataagagccttaagtacttgtttagttagaaagagttgaacatgcctcaaaggagatggttagagtttcttaaagattatgattttgagtttagctaccatctcggcaaagccaatgtagtggctgtcgccttgagtaggaaatccctacatatatatgcattgatggttaaagagctggatttcctaaacaatttagagaccttagccttgcgtgggaggttaccttttataatgtgagatt

SEQ ID NO: 274648 - DNA, 389 bp, Glycine max
agctttcaagaaattcaaatggtcataacttttcagatgaaagtccgattcggccgcataatatatctagacgctcaaaattgaacgccggaagatgatgagaaatttaaatggtcataacttatcacgcggatgtctgattcaggccaataatatatcgagatgctcgaaattgaacaatggaggtctcgagaaattcaaatggtcataacttttcaattggatgtccgattcaggcacatcacatatcgagactctcgaaattgaacaacgaaagcttttgagaaattcaaatgggcataagttttcagacggaagtccgattcaggcgcattatatatctagacgctcgatattgatcaccggaagccctttggaaatttaaatgg

SEQ ID NO: 274649 - DNA, 572 bp, Glycine max
tataatatcttattacgctcgaaattaaacatcagaagctctcgagaaattcaaatggtcataacttttcacctagatgtccgattatggcgaatcacatatcgagacgctcaaaattgaacatcggaagcccttgagaaattctaatggtcataacttttaactcggatgtccgattcaggcgcatcacatatcgagacgctcgaaaaggaacaacggaagctctcgagaaattcaaatggtcataactttccacactgaggtccgattaaggattataatatatcaagacgctcgaaattaaacatcgaaagctctcaagaaattcaattggtcatcacttttcacacggatgtccgattcgggcgcataatatattgatacgctcgaaattagacatcggaagctctcgaaaaattcaaatggtcataacttttcacacgaatgttcgattccggcgaatcacatatcgaggacgctcaaaattgaacaacggaaggtcttgagaaattcaaatggtcatacattttcacacggatgtccgactcatgcgacatacatatctagacgct

SEQ ID NO: 274650 - DNA, 979 bp, Glycine max
  unsure (1)..(979): unsure at all n locations
accccacggcncccttgagnccttgtagcatctgaannnctcagtaagtaaatcttcccccnttntttnngnngtnntttgtggaataaaaaaagttttttgtatttttaaagagggaagnaaagaaggggttggattggtatatttttaaatattttacaatataaatcaaggttattatattagaaaatgttcgttatgacaaatggtagggcgaatattagtttaatatatataaaaatagtatataaagatgaaagatgtatgtttttatacagctgaattagagttaactatctgtttgattagaatagtaggatacattattataatgtattattttgaaaagtcaaatataaaccgtatataactctgtaatgtttatttgtgtcagcgaatgcgtaaactatcttatttaatataatttttttgattacacatacgtatataaacaatatgagatgttttaaagtgcttatataatggagatatcgtagacaacctgtctatagaagacaatattatattttctatatatttgcaagtgaagttttttcgctaggatggaattttaaatggtataattgtttattttaataacttgaagtgatgaatatatgatggatgtacactaagagcggcattattttaaacaaattatcgtgcgctgatacaacttatattctatctctttgctaattagttaagtgttaatatcgccgataattgtttaattgtaatttatatatcagattaaatatagtattacatgtgtatcaacaaaggtaggagattaattgtgtggaataaactccatggctaatgtttactattataagatcgtagttcgatgtgtttaagaatgggacaactgtgtaaatgatccgttctgagatatgatactagaatacagtgcatatcatcttgtgtaatagtgtttatatgatgtgataataagtcatttaacgtattctatctt

SEQ ID NO: 274651 - DNA, 611 bp, Glycine max
gcatgcaagcttctgaattgcttggtcgatgagcttaaattttcgatcttgttccatgcttgtatgttgtttggacttcaataataataaaagggtctttctctgttctcacccatcggccaccgacaagaggtgtattattgaatgaaaaccacaagagacgtggcgttttggttttgttttttgggtcttctcctcatctctagcatcatccaactttgggaagtggcgttagtgcttcttaccttttcatgggaaacttgtctatacacaacacgatgacttagccttaccacataataagtgggagagtggggtccttatgttgactcttccatatgtggttcttaacttatatttatatttaaataattatcttggaaaagaagttagtacttgcgtaaaaattgttcatccactacagttagtttttttttttttttaacatgttgtaaatataaaagctattcttttgaattaatatgctattattgatatgaaaatcatttccctgtttccaaaatttcttatacagcttcctattcaatgattaaccaagcaccaatatgtaaaataaaagtggaaacttttatcagcactttttttaaatt

SEQ ID NO: 274652 - DNA, 290 bp, Glycine max
aagaacacaatcatcccgtgagttggaagagaacaaaggaatcatagaggaggctcaattatataactctggtctaatagtaataaaacatacgtagtaagcagtgacagtgccggcagagttgccaccaacgagcttgagttgcatatcgatcctcccaaataggtactctttcttggattggaagcccggaccagagactttgtccagagaaagagatagaagctgcccaccattgaatatcttagcacggtgatcaccccatggttgatcaaagtcttggttgaagt

SEQ ID NO: 274653 - DNA, 753 bp, Glycine max
  unsure (1)..(753): unsure at all n locations
cacgcccccagttttgaatcgtgtagtcacgcgcacctttgagaagaaacanacgctgcaattttaaacataagactagtttcagggtgctgtttctatttcaaatgcaaaagattgagcgggggcgggtactttttaggggcaactccaagcatacgatggataaaattggctatactggcatgaaggaaaaacccatcttaaaggggggttcagccttaaacaggtgcccccttaaggattaggggaacaaaacattttccagaatataatggccttacccacgccacattaacattctgataacgggacttaacacaacgtaaagattgatgctggggcatacagggaaacaacaatcggggggcgtgtccattacccatcctcggaagtggcggatttgtgtggaagggccaatgggttttttaataaggcgaggaaaaaatctggtgggcctgccacactttgtacacatgtggagggggcataagaatattttaaaaccgtttatcgggcttttgggggggagaaatttttctgggcatttttttcaggacaaattgtctgtgccaatggacatggtatacaacttgtaggttcgagaaccgacaaggaaggaatggaaatgcttaaatagggggactaatcaatcggaattgctccgaaagcaccggtttaggggttaactatccatacctgattccttatgaaatgcctaagttggagggatcttcgatcaaagtctcacggtcc

SEQ ID NO: 274654 - DNA, 489 bp, Glycine max
acccagctcgcccaggcgagcaaggttgctttctccagaagcaacagccttctggaggaatattttggagggcccaagtgggcctggttgctatttgcacccccattttatataaatacacccctctgccttttttttggtgattctttttttgtaaagttacggaaactcacggatttcgcaacgatacttgttttctttccgtaatgttacggaaccttacggaaactcacggattccctttttttacttacgaaatgttacggaacctcaccaattgtgcaatgatgcttccttttgaattccggtgtgtcacggaaccttatggattatgcatcaataccttcttttgatttccggcatatcccggaacttcacaaattgcgtaatgatgggtgccaagcacctcacaaggaccaaacaaaagttgcatgccagcaaacaaaggtccccggacgaaattaaggtatgacactaggcaatcaattc

SEQ ID NO: 274655 - DNA, 546 bp, Glycine max
agcttccacaacatcgaagcagaaacaacattcaatcgcacaagctatcacagccaagcaaaacggggcaaggcaaaaaattctgctcaacacactaaccaaaatgacagctcttctcacttaaagaccccagtaacaattccttcgatccaattcgttaaccgttggatcgactccaaaattttactggaagtctatagtgcataagcctacattgtgaccgttgggaactactagaaaacatccagaactcattctatactactcttttcccagacaaccacacacaagcattttctgcaccaagctaaaatcctgctacacctattttgacagcaaaattctgcataagtgcatattttgaaaatcacacttcctctcatccaatcttggtcaaatcaaattctacaaatccccaaatatggtataaacatgtcttaaccaaagccaagctttaaaccaacagaacaccaaaattaagtgtccaaaacccctcaattaatggggtttttaagtttgaaaaggaaatttaaaatgaggaaattt

SEQ ID NO: 274656 - DNA, 408 bp, Glycine max
acattgtcttgaaagttctattgttgaatcatggctatgggatcgaagatttggccaccttcaacacacatgccttgaagttgttacatgagaagaacatgatgagagatctttccagcctaaaggagaacaaccaatcgtgtgaaggatgtcttcttggtaagcaacaccgatttcttttttaacaagcagaacatggagagcgaaagatctattggagctgatacataccgacggttgtggacccatgaggacgccctcccatgagaacaacaggtacttcatactcttcattgatgacttctctacaatgacatggggatattttttaaaaaaaaacttaaaagtctttggagtatttcaaaagctcaaggccccttgctgaaaatcaaagtcgaaaaccggtta

SEQ ID NO: 274657 - DNA, 500 bp, Glycine max
gcatgcaagctttgagccaaaatcctgactcaccataaactttgacccagggtgagaatgtcaatccttaccctcggaagcaaaaaagaatagaaggaaaatttccaatcaaaaaagaatagaaggaaaatttccaatgaaagcaaaaaaagaaaagaaggaaaattccccaatcaaagagtgggagaaagcaaaaagaaaagaaaggaaattcccaatcaaagaatgggagaaagtaaaaaaggaagaagaagaaggaaagaaagctcctgatcagggatcgaaggaaaaacagaagaaatgtgcagagaggtctttaaaccaaacaatatctgaacaatacagaattgtcaccaaatgaacgaaaagaaagaaaggaaaccacgacctaaaatgggctttttcctttgaataccaaccaaaaatcccgggcgctaacgaattttttcgcccccacttaaccaaaaaacccgaaaagaaaaagcccaccaaaaataaaa

SEQ ID NO: 274658 - DNA, 585 bp, Glycine max
  unsure (1)..(585): unsure at all n locations
gcttgtgcaaatcaaatcactcctacatctcatctctagcatgcattttctttctttacccactcctcacgtttggttttttagggaaaacactataactaaacgcgccgcaagggatccctatcgcaccagatccaaatctagaacgatgggtgatcaagaggagacacaggaacagatgaaagccgacatgtcggctctgaaagaacaaatggcctccatgatggaggccatgttaggtatgaagcagctcatagagaagaacgcggccaccgccgccgctgtcagttcggctgccgaagcagacccgactcccttggcaactacgcaccatcctccctcaaacatagtaggacggggaagggacgcactgggacacgatggcagccctcacctgggatacaaccgagcggcttacccttatggattgccgcccaactattcaccacccgtcttgcaagaagatgcgggccacattgcttctcccgtccatgaaagagagcctnctcagcagcccgacgaagtccacaaagaccctcaagattacgctcgaagggatgtcgagttctatcccccgatccccga

SEQ ID NO: 274659 - DNA, 611 bp, Glycine max
aggcatgcaagcttgtaaaatggctagacatgatacatgttatggcttggtttggttcaagggtaaaagggatgccccacattatttccatgacacaaatgcaaaaatgatgatttggaaaatttatgcaaaactggtcatgcatgcacctatgcggacactcaagtgtcaaatttttatggtcatgtgatgctagggctcaagatttatttcctttattttaaatcaacccaatgtttccaaaatatgttcttttatcaatttgtgcattcattcgagtccatttcgggcgtccggggaaatttcacagcattcacccttcaggtgtaaacacgtttttttcttttcaaaaatcggtcatgatcaatgaattttttttttgaaaaagagttggaaattatcttttttcaaaagcatgtcggtttttaactatacaacttattttctctttttccacctttttccttaattgcccttcttcttttttctaattgctcttttttatttactccccctcttcttttttctaatagcgctctttttcttacttgccctattctttcctttgggactctttccattaattttctatcctttttatttaatcctta

SEQ ID NO: 274660 - DNA, 656 bp, Glycine max
tattacaggattataacccttttttgataaaaaaaacctttttcaaaaaaaaattattttaactcgcttgggcgagtgtacgatgaagaaaaaataaaaaggggaggaaccccaccttcaccttcatccctcattctttgtcactaggagctcacccatttctccctaaattcgcccaagctagttccttttcatcaaaattcttcactttgcgctcaccactccatcccattcaagtaagtatcacatctccatctaattttactttttcccttgtaatatttggtgatttggttgttgctttctttgcaatggttgtgagatgaattgtagatgaaccaatgatcaaatgctcagtttggtggttgtactggatggctctaggcctatccttggttcttttacgaattttcatttcatgttgctctttatcccttatttttgcatgcttcaacatatgcacgccaagtgtttgatgaaatgccacaagggttagactatgttctctttttagttttgaaatgttggacatggttagtcacttagttaggtatgatacccactcaaatggataattaccataggctatggattgaaattgaaaaaatcctttgagtttgtgatgggtaaccactttgttaggttaaatccccccc

SEQ ID NO: 274661 - DNA, 543 bp, Glycine max
agcttaacaaaaggcatgcgaagtgggtggaattccttgagcaattcccttatgttatcaaacataaaaagggaaaaggtaatattgtagccgatgctctttctcggcgtcatgcattactttctatgcttgaaacaaaattgattggtattgaatgtttgaaaagcatgtatgaaaatgatgaaacctttggagaaatatttaaaaattgtgaaattttttcagaaaatggtttctttagacatgaaggctttcttttcaaagaaaataaattgtgtgtgcctaaatgttctactagaaatttgcttgtttgtgaagcacatgaaggaggtttaatggggcattttggggtccaaaagactctataaacattacaagaacatttttattggccttatatgaaaaaggatgtgcaaaaattttgtgaacattgcattgtatgtaaaaaggcaaagtctaaagtaaagcctcatggattgtataactcattgcccattccggagtattcttggaatgaattatccatggaatttgttttggggc

SEQ ID NO: 274662 - DNA, 671 bp, Glycine max
ttgcggatttggtcttcaccggcgaaaggatcgaagtgagtcttaaatgaggaaaatttgatcatcctgctttgatgaatgcaaaaactggggccaatgaagaggatgagaatgagggagaaacccttgctgtgattgtcattcctacacggccaaatttcccatcagcccaacaatgtcattactcagctaataacaacccttctcattacccaccacccaatcatgcacaaaggccatccccaaatcagccgcaagacttacctgccacatgaccaatgccaaacaccacctttagcacaaaccaaaacaccaaccaaggaaggaattttgcagcaaaaagcctgtaggatccaccccaaattccagtgtcatatgctaacttgctcccatatctacttgataatgcaatggtagccataacccctgccagggttcctcaacctccatttttccaagatacgactcgaacgcaacatgtgcatatcatggaggagtttcaggacattccattgagcactgtatgaccttgaagcataaggtgcaaagtctaattgatgcggcgtggctgaaaattgaggagaatcgcttatgaatcctaacattaacagcgacacccacatggggcaattttgaagctgttgtgatgtctctatgactcattagatttc

SEQ ID NO: 274663 - DNA, 480 bp, Glycine max
atctttttcgtgaagaaaacggggtctatacttttaattttcacgtccagtgccaaatcttggatgttggacacctagtcattaacaggaatgacaaacttggttctccatacaggatttgcttttccaaaattaacaactttggtgcaatatttgctattatgatcaatccacccaacagcaaaccattgacgcttccaaagtgaggttgaaatctggagttcatgtgcagatttaaagcttaccttcacccatataatccccatagaaagtgcaggaaagaaaaaatgagatgttcaagggatgatgtctcctgtaagcttttttatataatggttgggcagcaaaacgaaatgaacgtttttacctttcgaatgatactttactttgaaatcacaatttttttatacccaaactcccgttttggtagggcccacatggctcatgcccagttgtctaatttttcccccccccccttgt

SEQ ID NO: 274664 - DNA, 601 bp, Glycine max
  unsure (1)..(601): unsure at all n locations
catgggatatatcacctccttggctatgttactgaaagcttgaatatattgctctgcaatccttaaacttgctgcctgcaaatcaaatgacaatattaatccctttcctgttattccatgggaatcaataaggttaaaacaatgtgacaattaagaggcagttatatacaccaaaattcaccacattttttccccagcttcggcgataacaccaacatcaacataataaacccttctacctatttagatggtcacatatttgaatgtcttcaagaaatcaaacattataactagtcaaccagatcctgtattaaaactgactaggacaatcaataatgtggtttacatacagaagtctctcagtcactcacacatgcagtctatatggctggaatggcaaaccaagaataaaaaaatgctgaccatcatcgacatacaaacaatagaaatcaattgatctatccatatgccgattgcattatacacttttttgaccaccacaatctaagaatctacatgaagagctagaaaaattacanaagtgatgtgaataaactaattttagtaaatgcaacatataacaaccaaaaatgagttaaac

SEQ ID NO: 274665 - DNA, 575 bp, Glycine max
gcaagcttgttaaaaaattttacaagacgagagggaattggtttttacatgctattactagatttgccacttggttatctaaccttggaaaggctccacaaagagaaagccaatattagaaagatgtttacttctaatgaatggaccttaaacaagttatctaaggaacctaaggggaaagaagctgcaaaggtagtgctcatgccttctttttggaatagtgtgatttacactcttaaagtcatggtttcacttgtcaaagagcttcgtcttgtggatggggaaaggaaaccaatcatggactatttttatgaagcaatggacaaaggaaaagaaaccattatcaagtcttttaataacaatgaaagccagtacaaagatgtggttgcaatcattggtaaaagatggaattgtaagctttatagggcattgcatggcactggccactttctaaattcaaagttcttttatgacaacattgaattgggattttgagttttaggtcctcaatgggttggttgaatggcataaaaaattggtttcacaatttgatgtgctacaaaaaaattttaact

SEQ ID NO: 274666 - DNA, 508 bp, Glycine max
taacaaacttagaaatcaagtgatcatgtattccgaaatatatggggagaaaacggatgcaccttttatctatatacaattgtttgttgcttgcttgaatcttgatttcaggtattgtattgtcatcatcaaaaagggggagattgtagatgcaattggctttgatgttttgatgatgatcatgattatgtgttgctattaaaattcaagacaatacttcaagattacaaggcacaacatcaagatgatcactagaatattaggaagggaattcctaattgaattagcaaaggtttggccaagtgatttaaaataaaaagtgtttttcaaaggttttactctctggtaatcgattaccagaggatgtaatcgattaccagtggccaaatacattttataacagctataaaaatttgaattcaaaattttaaaagctgtaatcgattacacaattttggtaatcgattaccagcacgtagtaaacgttttaattccaattttaaaagct

SEQ ID NO: 274667 - DNA, 779 bp, Glycine max
cgggtcacgccgtgattcgatccatgcaacccctttaatttaaaccaacgcccggagctaaacattagaagcgagggagggaagagtatgattttactcaaccagacaggcgagaaagtaggtgttgattatctcaatgtgctcaccggacaatgtgctctataaagagggagacgtaaaatttccgggctcaaatcgacatttcaagaaatagcatgtgtggattgaattgctgggagcatcggcattgcattgaaaccttatctagatgatgccggacaaaaaatctaacctccgttcatacagtaaaggatcacttgcatttgataaagagctacgattgtcccaaccgagcgactcctggttttacagtaactcaaacacaagcctggcgataaaacaatgggcttttgaaacacgcaaggctttggtaatccacttcccagcattgtattcattacctgaacacaattggatcataaattttgttgatattgggttttgaatatactcctaactcttagatcaatccccaggtcctgttaactcaacccgccaataatgatcattccagttaaaatttaacgcccgtttcccttgcgtcaatacttgaacattcattttccaaagattcttaattaaccggaaatcgataggctcttccaaactttcgaccccttctcccattgaacttccagagtcgtcagcccccaaagctctcccccttgggattttgctggctcaatttcaactatccgtgtccacctactctaatctcc

SEQ ID NO: 274668 - DNA, 1448 bp, Glycine max
  unsure (1)..(1448): unsure at all n locations
gtttgaagccccatagggaaacatgcgagtaacncnctgngggannaacattgtccccatctttngcccantntgatgcgcatatgtgtgtatgtgagagtgttgtgaccggagcgtcttatttctcgctcttttctctctaattattctaagaccaatatacacatcggttgtatacgctggtgtggtggtgtggactcaatatacaatgtaacaactgtgggactctactgaagaatcgtgcatgatcaaactgtgagaggtcaaacatacttctatctgccatcgggtagtatcgagtgcttggtctactcaatagtaagtgcgtcacattctacagcttgcgcattctgaggctggagctgacgctgattgtgcgaatatgacacgttccgtacgtagtatagtactactagnacggacgatgtgttcataatacaaataaatcacgattatcatcttttcataatgacaaatataataaacggtcgcacttcacgtgactatgctatattacacgagctagtagcagaagacacgtactatctctcgacgcgccggtatatacacacgacctacatgtctgatcgacacagcgtgatactcgtaatctgtactatagatgtgctgcgtgcgactaaacgcantgtacattcttgactcgcgaccgtccatacagtgacgtgtgtgcgtgagatacactgntctgcatctctcgcgcacatccagtgatacgttatatgtatagtanctgcgcgtacaancgatacngcgatgacactanacgcgtctgcgagagatatacgcgtatatanagaatcgtatgtcggttacctctttattgcacttatcactatagtatcgtatgcgacgtagagtgcgtgacatatgcgaaacaaccgcccgacagaacaagtggtagcgctatcactctatacgtatatacgtgtcgtactctacgacacggtgtgggtgactgcgtatacgtgcgagacgagagatgtcgtatatcattatacctggctgttgggtgcgacccggcctaccttcctagtttatgtatatagtcatcctgactgagatcgattatgctattgtctgctggagtatcacaacatagttctatcattgactggggtgactgaaaatatcacgtgaactgtccactgactatcgaatcattctctctatgtcttatcgttactactgaatcatcatgtggaatacgcctcttgtacgtctatattctttttatatcgtctgtacatcgcgtaagccgtactagctactatcngatattgcatattcacttctgccacatttcgtatactatgatgaacacgcaatctactgtgactatgggtactcactgttgaacttgttacatcgctgttccacgatattagttgtctccgcacgttgtaaatctcatacatatgatacgaccg

SEQ ID NO: 274669 - DNA, 666 bp, Glycine max
agctttaccttcacaagcacataaacacattactccattaatgcatcacacggtactctatttgaaaatggatcttttactctgtgcctgcaaggactgctgacccttccacctgatagttcatcgcatcaaatagacaaaatatatcataagatataagtctcaaagttcataaatagagagagccacacggtcaaaataaacaaactaaccatgaatgcagaagcaaatattgaaataaataataccactattatgtgtagtggagctttccaacttttgtacctaactgaaggagacttgtcaaccacttgagagcctgtagcagatgcaatacggtaattaatgaagcttcattgtgagaactgtggtaaaacctatagtgacagacaattagtcatcattatacgcctcctcaaagttgacggaagaaacgtccataggacaaagtctatcaaacatttacctacggatttttattatttatagtgacaaattttgtccctacgtataagtcatttttcttggagtaaggccaaaataccaaataccaatgtgaaaccaatgcattaaaaattacaagatcatgtcatattttctttttaggttgaacattcatacatgtaatttttctagtataaaaaattagtaaaactttttaccaat

SEQ ID NO: 274670 - DNA, 586 bp, Glycine max
  unsure (1)..(586): unsure at all n locations
ttaggagaaaccattaaaactaaggtagttcctaaacaaaaatcaattgatgaagcttcgccgagtgtccccattgaaaaacctttattcaaacctttcaaagttagtgataaggctaaacgaaaaattagggaacttagaaaaactaaatccttaattgaaggcgtaggtgacaatcatagcgaattactaaacaagattagtagtttgcttaaggtcattccagatactccccaagcttcggaaaatacttccaaaatggtaacaagaagtacctccaaattaattaatgttattaatgaagatagtgaccaaaacttagataacacaactgagataggatcagtgtcagaaaagaatataaatccattaaactccaaacactggaaaacccnctccaaattatattatcaacgtccaactgcccctgaccttctattagaagaaagaggtgaaaacaattttaaaagttttagtgcaaataacatctatgaatggaacatagatgcacaaacggagtataacatcatgaatacactccaacatatgaccatggtagccacggcttaccaaacctcccatgaat

SEQ ID NO: 274671 - DNA, 294 bp, Glycine max
  unsure (1)..(294): unsure at all n locations
gttaacctggtaacctaagtggttatgatttaaaaatntgnacctgtttgcagactttgtggtttatgctcctctatcgaccaccacacaaaccttttgccttctgtgcaacaatctgaagcaattgaacaggctgaagcttatgctgcaaacatctacaacagacctcctcaacctcaccaggacaatccgccaccacagaataactatgaccttttcagcaacaagtacaatcctggatggaggagtcatcccaaccttagatggtgctaccctttacaacactcccaataa

SEQ ID NO: 274672 - DNA, 323 bp, Glycine max
catgctattactaggcttggcacttcttatctaaccttggaaaggctctccaaatacaaagctcctattacaaagatgttgtctttaaacgaatggaccttgaaccagttatctaaggaacctaaggggaatgaaacttgcaaacgtaatgctcatgcctttcttttggaatagtgtgaattacactcttaaagtcttggcttcacttgacaaaatgctttgacttgtggatggagaaaggaaaccattgctggacaatttttatgaagccactggactatgcataataaaccattatgcaatctttcaattcctatgaaagc

SEQ ID NO: 274673 - DNA, 384 bp, Glycine max
tcaagcctgaatcttaaaactattagaaatggaaataacgtttttatcatttacccgcgccaggaacaaggggaccttcccacgtttaaccaattgtgaaatctaaccaggtttctatctcacaatacaaattaaacttctccaccaaagaaacctccccaagaaacgcccatcctagtatattgccttgagctataacacattcttgctgccttgtctctcctttttccttttttttcttattggtgatagatacatacatgtaataaaagcaaaggccgcgtttgaagaaaattaaacaatgaataacaaattacagccttttaattgtctgtgcgaagcttactgaaacttacatgtgcataacattgtcttgatcaagat

SEQ ID NO: 274674 - DNA, 405 bp, Glycine max
atcttgatcaaaacagtcatgtagtgattccgtttcactcgaattatacaaatgcgcattcaagtcattctcaaacactaaggctcatgcgaaaacaaaagcactatatattattgatcgatcacttcaattgaacgacactctttcggtacaaacaaacaacttaaagggctaaaagttatataagtgaaacttaaaaaaattgtaatataaaatctgaaattcacatgactggacatggatcatatagtaattgagaataaactagaatgttggagatgcacaaatttaaatggactgcttctgtggatgctcgctatgcaggctaaaaaacgttcaacacctgattagctggtgcagatggcgaggcaaaataaagtatgggtgctatggatggctatggga

SEQ ID NO: 274675 - DNA, 447 bp, Glycine max
tcccgtccccgtacttggaaggatctgattaccgccttcctattgcagtattagtacaattctgatatggcttctgaccgtactcaactgcagaatatgtttaagaaagagggtgaaacctttaaaaaatatgcgcaccgatggaaggatttggcggcacaaataactactcccatggttgagagagagatgatcaccatgatggtagacactctgccagggttctactatgagaagctagtgggttacatgccgtccaactttgcggatctggtgtttgccggggaaagaatcaaggttggattaaaaagaggaaagtttgattacgcttcctccacaaacgtgaacgcgaaaagaatctgggccacacgggcaaaaaggaaggaatgagatgcccctgccgtatatttaacacccccgtgggtcaaacccccagatacacctcat

SEQ ID NO: 274676 - DNA, 394 bp, Glycine max
agctttgatggtgtcgagaagaaatcacatgtttgtcatcatcaaaaagggggagaatgtaaatcatgaatattttgatgatatccagaagaatttgcttgagaaagagggagatgtaaatcatgcaagctttgatggtgtctagaagaaatcacatgtttgtcatcatcaaaaagggggagaatgtgaatgtatgtatacatgattttgatgatgtcaaagaagaatctaacaaggctacttcaaatgataagcatttgcttcaagaataattcaagattgcttccacaaacaaagccttgtttcaagattcactaaagaccaagccttgccttaaaacaaagtgctttcaagacatgcaacgctctgggaatcgattaccaagaagtgtaat

SEQ ID NO: 274677 - DNA, 574 bp, Glycine max
  unsure (1)..(574): unsure at all n locations
taaaataaatttttaatgcacttctattaacaatatttggtattttcttatatcaacaattaatatttgactttgtgacagacactaaatgacattgtgtttttcaaattcaaaccaagataaaaaagattcagctcccaaattagtgagacaggataacacttaatacctctggtgttttcatgcaagaaattgtaaaatctaaaagaatgtaaaaaaaataataatttcaaaataaattataagctactttttaggcaaaaaataagatagggattcaccatctaaaaataaataaaaatgtgttgaaaatgatctactacaaaatcttcaacaatttcgcagccatatataatagtgcaaaatgagtaaattgagaagaacaaaaatttttcctttacaaccaatcaacaacatgagtagaataaaaagcccaaaatcaacattattaattaccttacatatttgtggatgcaattgaagagaataaaatatatcaaactatatacatgtactcacatacataattactcaataggtatnttgctttgattttcctaaatttataatttat

SEQ ID NO: 274678 - DNA, 491 bp, Glycine max
atcttctagacagtggttttataaactctctacttcattaattgagaatggtttctctcaatcaaagaatgactattctctttttaccattggcaaaggtgcttctctggttgttctgttagtctatgtagatgacattttgcttgctggcccaagtgctacatgtgttcattctgttcaggccaagcttcaagccttgttcaaactgaagatccttggttccttacaatattttctgggcctggaagttgcaaagtccagcaagggcattgttttgactcaaagaaaatatgccctttctcttttagaggatactggttttcttggctgcaaaccatcctctcttccaatggatccaaatttaaagctcgacatgctcagtggtgatttgctgcccgatccctcaatgtacaggtgcttacttggtcgtctcatgtacctcacttatttaatgcccggaattacattttttgttaacaagctaagccaat

SEQ ID NO: 274679 - DNA, 585 bp, Glycine max
  unsure (1)..(585): unsure at all n locations
tataaactttgttacctgacattttgctctgttctcatctaaacgagttaaagcatgaaaattttttgcaggaatgttaggagcattcttcaagcatattaatgcactgcatttaaatacacatgaacgtttgcataaacaggcacaacatgcaatttcaagtttactcataaaaagccaagcttactttgtattgcaagggtttcccactactataactttgacattgcgggatgcaacggcatttaaagctcttccctgttgtacaaaaggtataatgtcattataattaacttcactttagcagaaagcaataagtatggtttaaatttcattatcattttacctgcgctgcataaatctgcccatttatgtctaacaagtctgctcgttccattccaggtcctcgaggctttgcacctattagcaaagcccattctgcatcttggaacactttataaggatcgataccaatactgacctccctcaacaaaggaaacaaagagtnctccagttccattgcaacacctgcatgttgaaatataacatttagaatgaaaagcatcatgtgtggtatttatacct

SEQ ID NO: 274680 - DNA, 387 bp, Glycine max
agctttggcatgccaatcaaaaatagaacctcttactttgtctccctaaagaagcaaagcaaatgtcaatgtcttttttacatattagggattggatgctagcatgtttgcagcaatctctaatgcccctaacattaagggacataatcttcatatatatttgaccttgctccccccatctttggaccatatgattgcagtaagctccatatcttggatatgctaaacataaaaaccattaaggagactcccttctagaccaagaaccctaaccaattttcataacctccaagctatctcataattatataactgtaggattttgctactaccctacaaacttatagctttcgctaccaacctttctcccaccataataagctgtct

SEQ ID NO: 274681 - DNA, 478 bp, Glycine max
tcaaacttgcaacaaaggagttgagcaggtaaaaaagattcgtcttcaaactcttagaggtgactttgagcgtttgtttatggaggagtccgagtcaatttctgattatttttctcgagtattggccgtagtcaatcaacttaaaagaaatggtgaagatgttgatgaggtgaaagtcatggaaaaaatacttcgaactttaaatccaagttttgacttcattgttaccaacattgaagaaaacaaggatttaaagaccatgactattgagcaactaatgggttccttacaagcatacgaagaaaaacaaaagagaaaaattaaacaaaaggaggctacggagcaactactacaactcaacgtaaaggaagcaaactatgcaaattacaagagccaaagaggacgaggtcgcggccaagatcgtggacgtggaccacgacatggaggagaacgaacacgcggtttccccaaccactcc

SEQ ID NO: 274682 - DNA, 540 bp, Glycine max
  unsure (1)..(540): unsure at all n locations
ctgcagctgtagaaggccagacatgaacatgtttggtttggtttggttcaaggattaaagggatgccccacattatttccacgacacaaatgcaaaaatgatgatttggaaattttatgcaaaactggtcatgcatgcacctatgtggacgctcaagtgtcaaatttttatggtcatgtgatgctagggctcaggattcatttcctctattttaaatcaacccaatgtttccaaaatatgttcttttatcaatttgtgcattcatccgagtccatttcgggcgtccggggaaatttcacagcattcacccttcaggtgtagacacattttccaaaaattggttatgatcaatgaatttttttttcaaagaaaagttggaaatcatctttttttaaaagcatgtcggttttttagctagacaacttattttcctttttcccaatctntttttctcacttgctttaattgctctctttttctttttttttcttcccccccttttttttgattttcttattttccattttcatcatgattttt

SEQ ID NO: 274683 - DNA, 488 bp, Glycine max
tcctccacgttttcctccatacctagaacttcaaaccttcgattctcactcaattcttcaccaaatcacgtcccgtaaagcccaatcttcctctttttcactcctctttcacttccaccgatcaaaatccagaaaaacttcatcaaatggcagagccatcaaagaagagaaagggatcatcctccaccgctaccgctgctgcccatcgccgtcacggcccatccggagcacccacagcacctattcctccttctttgtcatctccaagatcatcaacattgttttcatccgatgatcaacgtctacggtacctttctcagttttcttctagaataatcttagaccctaagtatctagacgtagagttctttaatgatgaaacgtttgattgctatcaagtgtttcaaaattctgggcttgttgatttcatgtcatttaaattgccatattatcctgaacttgtaaggtcttctactgcaatttaaaaa

SEQ ID NO: 274684 - DNA, 419 bp, Glycine max
agcttgactaggcgggttgattttagccttagtttcactttagttattagtcaattcaattaagaatgagaaatcccaaagagaaaacgttcgattgatttttttgcttcattttactaaaaggtattttttattattatattattattttacctctttttttatttccaacgtggttacggcacgaccaaacagtcggaattcattttaacagaaattaacggatattacaaatcaaatgatcggtggaaatttattttattttttgattaggcgagagattacttaaataaatgactgaagcacgtcaaaagggggtacggaaagtaaacgaatacgagaataaaagtgcatgaaacaaatggggaccaccacgggttcatagaatgaattgaaaagctttgattgggttacttacc

SEQ ID NO: 274685 - DNA, 134 bp, Glycine max
tgaaagctcaaggatgagatacttacttgttggagtgagtatgagtataaaaaatgaaagcaaaatgcaaccaaaggtggcttgggggagcaaaaaccatgagtcccgtaagctttcttttttgaatgaggggg

SEQ ID NO: 274686 - DNA, 434 bp, Glycine max
gcaagcttggagaggatgctttaatggagggaaattatagtgggagagaaagagagaggggggagcacgaaattgaatgaacaaaaagggacaactttaattttgagttgtgttttattgagagattttttttttaaacctctttaatgttatggactggtttggaatgaaaaataatgtctgatacatgatgggggtgaattggatggtttgtaaagtttgttcatgtttcatataatatcggaattttggggatctttctgacgtgaatgcttcataaattttttgggctgttgaagcgaaatataatcttataaccccttctggtgaaaagacaatgttttagaaaatggttttctgctgtttcatttttttttcgaacaaaactttgtaaaattatttcttttcaaaaacccgtctggttttttaacttg

SEQ ID NO: 274687 - DNA, 869 bp, Glycine max
  unsure (1)..(869): unsure at all n locations
ntgaggcctgaaaatgcccnccctgagggaccaaacgcccgggtaaaaacccgaagaaagtgggtaaatagctagttttccatatttttttttgaaaccaatctcgataaagtaggcgtgcgttaatccacacctcaacggtttacacctagataacttctaacgattaaaagtcacactcacgagtgttaaaggagcaacacccactagtccattaatgtattaactttcaaaacaatggggcgtgtacaccaacctagcttgcacaactggatccgtcatttgaactatcccatttaagctgtcctgcactagatccaaagcatcgcggtctagacatgatcatcgccaaaagaaccctatataagacatttctagaataagatcaaaccctagatctctagacgaataagacttctaccgacataatgccctgctaaatacatcgggttgtattaaagaccagcagcgctctattcattttaatccgcacccacgagaaattgctcttacgacaaagcgtctctctcatgactatcccttatacatcaaacatctagtcatggcactcggactatgtaccaattccaacaggaatagtgagaaatcccctatcatttttacactctggtcagcactgcgcttcacgatgaacatctcacgcttctcggaattagtttcacgccacaggatttcaaccaccgtgctattacctctcattgcgcttataaaagtcggttcggggaccatattatgtaatacacaaatcgctgccagctctcttgggcttgtctctcaccattctgtatattgtacttgactactcgtgacaactcagcccggtactcgccacacgcctcgctacctcc

SEQ ID NO: 274688 - DNA, 301 bp, Glycine max
tgcaagcttggttcgaggtacttacccgttgaagattttttttcgatgaataacgaatgaagaacgtcgaagaacggtctaaacctttgcgaaatttctcacggaaacgttacggaaacgtttctgaagcgcctcggcttaaattttgtttagggctacgattgtttcaagcaaatgctaaagagaaagaagggtttcacgggctggaccctaaacttctttcactggcgcctataattgtgggatcctgggggacatcctgaatagaaaagcttaataaagtcccatgttgtgtaaactg

SEQ ID NO: 274689 - DNA, 165 bp, Glycine max
ccattgaaacatacaggcggaagcttttggtttattcacgtaaccggtaagtgttggtttgggccataaccaaactgccatatcattacctaaggtagattataatgggataataaacatcgcgggactgattcttaggaatttgaatcataccctgattctact

SEQ ID NO: 274690 - DNA, 313 bp, Glycine max
atactattagccgaatgtacataagataaacggctgtattgtttgttttcctatttacgcgagacccgacaagaactaaatgaagtgttgcgattaagatcatgtgacaagaaaaattacaattgacttttgtaacctgggagagcattgcatcgaagaattctcttactttacaaagcacaaagtttgataatgcacccgtctgagttacgatcaactttcttgatgaagcggggcatgggatatgacatattgcactcgatggggatattcagaaccatttacatattataccccaaaactttttattttt

SEQ ID NO: 274691 - DNA, 580 bp, Glycine max
agcttcaacaatcaatttcgagcgcctcgatattttactggactcaatcagacatccgagtaaaaagttattgtcgtttgaatttgctcagtgcttcaacattcaatttctagcttctgaatatattacgggactcaatcagacatccgagtaaaaagttatcgtcgtttgaatttggtcagagctttaacattcaatttagagcgactcgatatattacgggactgaatcaaacattcgagtaaaaagctattgtcatttgaatttgctttgagcttcaccattcaattacgagcgtgttgatgtattacgggacttaatcagacctccgagcaaaacgttattgtcgtttgaattagctcataggttcaaaatttcatttccatcgtctccatttatttcgggacttaatcatacattggagtaaaaaagtgtttgcccattgaattcttctagagcttgaaaattcagttttggaacctcttgattttttaccggacttaattaaaacatcccggcaaaaaggtttttgtcaatcggaattagctccaaactttaaaattccctttttaaggcgttt

SEQ ID NO: 274692 - DNA, 288 bp, Glycine max
aacgacaataatgttttgcacggatgtctgataaacttttgtaatacatcgagacgctcgaaattgaattctgaagctctgacctaattcaaaccgacaataactttttgctcggatatctgactgagtcccgcaatctattgagatgctccaaattgaattttgaacctcacagcttattcaaacgacaataactttttattctccaggctgattgagacccgtaatatattcacacgatcgaaattgacttctgaagctctgagctaacttcgacgacaatactga

SEQ ID NO: 274693 - DNA, 320 bp, Glycine max
aacgggaaaaaccctaaggggttatttttttttttaaatagcccggaatagatgcttccatgaataaaacacaatccgatacgcctatgaaaagtggacatgagtaatatctataagggatcctaccatccccatacttggaccattcgaacgcaagaagctaccgggcaaggatctgctacacagcaaaaccattaatgagatgtcctcgtagagcaacaaccctggccaaatgtcataacattcaagctttattaaaattatataaccgcatgagtctgcctcaacccaccaaacttaagtcatttgttgccaaaacc

SEQ ID NO: 274694 - DNA, 546 bp, Glycine max
taacgttataggacgagccttagggacacaagttagtggtgatgcggatgaaatccctcaacatcgaaacaacatctgcacgtagataacggacagctggacccgttgctgaagatgttgagcatgtggatcatgcaactgacgaggttcatgagcaatctcatgaggtagttactaatgatgcatgtgctgatgcccaaggttttccatgtggcagccactatttgcgtaggagaggtacttatttcttgaattatataatattttcataataatttttcatttaacttgaagtgattaatatattttttttctggaacgtccttagttgaagttgtcatctcatggaaggaaggtacaaaaatttagaaggcctgctacaaagattgaaagcaaagtggctgccacaagattaagtcttctaattgcatgttccttggacactagtcacagaggatttatatctgcttttgcggagaggtgacacaataaaactaatagtttccttcttttgataggagacgtcactatcaccccctatgatgt

SEQ ID NO: 274695 - DNA, 553 bp, Glycine max
ggcatgcaagctttccttggttgaggtgagagacttttaattcttaaacattaccccatttctctcttccctctcactctccaacctctcaactctttctttgaaatactcgtcatcttgttgattttctctcaaaaccacttcaatgtaagggactgtatcggaatgaagaagatggtcagagacatgatggggttgaagtgatggttgagaaagttgttccatgttgcatataatagtgggttcttggggatcttcatgaagagaaaagcagaagaaagtcagaggctgtggaaacagaagagagtttcaaaactaccagtcaacagagggaaaggttggggaaaaaaagaaaggaggtttcaagatttggcgggctgatctttaatgtgtagttggaactaatagccaacgcgacacaaacttgtctttcatatgtgttggcgatactgattaataaactaacagaatcttttttaaaaacgaaaaaaattattaataaaccagggaaacacacccctgaaggtttgggggtccggaattttattatatt

SEQ ID NO: 274696 - DNA, 580 bp, Glycine max
ttatatttatatcaaattatatatatatcttcaagctttaaaaaatatgtagatttaacctattttctataataattcatcatgttttttacagttaaaatggtttaaatctacatattttttaatgtttaaagttaaattcatgaatgtagaagaattaaaacacatttttccttattcttttaagttttaacacactcagtcatctattccaacctgcttccaattctgactttgtcttttaacctccgccattaaagctttctggtctaggcctaaggcagtaaggcacagacctgaaactgaccaaatgagcagaaaaatcacattcatccatacaagagaagtacttgtagttttgtacgaaaagaataaatttaaatcatacaatcctatataaatagttatgattaaaaattactaggcttttgtcttttaatcttgacttatgtgatttgatcttgtgaaaaagtgtagtaataatttagcctcctaagtctgaaaatcttggagtcctactgcaacactccaagttcaagcaagaatgtagacacctcttctaatctcagataatgaccac

SEQ ID NO: 274697 - DNA, 377 bp, Glycine max
agcttgtatatgacaaaggcagactagttttttttttacaactaaaataggtaacaaagatgagggacgttaatataacttagtcacgtttctctattgaactgaaaatatctgcgtgacctctgcatgcaaattgaggcctattggctccaccaggtaatcgattttgctacgttgccttctcatttgctcaaattagcacgttaatttctatattgcgacatatatgtttcgaataacattgtaaaccaaccatagtggagctatgtcattatgcatgctaagaacccgaaccgttgacgcttgaactgagtacatgttccatcatcaatcatttagctacagataggtcctaactaaggtcattctgttgtttt

SEQ ID NO: 274698 - DNA, 483 bp, Glycine max
tatattatttaaattttcttaattaattttaaacacaatagttttttttttttactgcaatacaatagttagttaattacatcaacctaacatgtgtttatattatagtaaaaaataaattacaattcttaattgttcctttaactagatggtgccttggaaggagatatagctaagagcattcaaatattaagtgtaaattgtttttctagatcaaaccttgaggtttatataggaatgtatcacaactgattgatctgttattctcgcaagagtatattgtgtgattcaatctgttttatctgttgttttgagatcctcaggcacataccacgagtgattaaagtgcttaacaactaaacattgcaaaaagtggaatgctaaactggtaattaggaattccttggtcgatacatgagggcatgaaacaaaaggaagctccactgaacctaatgacaaatccgacggaaggggattaagagt

SEQ ID NO: 274699 - DNA, 459 bp, Glycine max
agctttaatagtatgagtgtgcttgcttttgctttatagctagttggtatttgtatgttttgatacacattaaaactccgttttttgtacaaaattttagcataaattacgaaggacacttgtgttgtgtttcccaaggcagctaatccaaatcaggttagtcttaatatatgtttgtcacaataacttatcaccaatggtgagtagtatgatcaagtcaatggccaagatttattatgttaagtgcactgttgaaatggatttagctaggagagacctttaacttaatgggatgatgtcttattattaaccaaacaccatgccaattagctttatttgattttgttgatataatgatactaggatatcaagatcaacccattttaaccctttaatctcataacataattatagtagggtgttattgggtgttatccaatcaaatactttttgcaagtt

SEQ ID NO: 274700 - DNA, 483 bp, Glycine max
ttttagtaaaattaaataaataaataaatatagagcaaataataagatgagtaccctaggtataaatagttatgttaagtcagctgcctcctttttggcctcattttcgtttattccttctcttctcaaaaccctttctttttttcgcaacccaccaaacctatcttagaaaaacgacgatctcgaacctgttcaccgttggatcgtcgtgaaatttgagtatcatgtttgcaacccaattttgaatattctcaccgttgggaatttcaaaatcatatctgagcttagaggaaaacccttcgcattgtagcattttaatttcccgcagaaacccaaaactgtctcggtaaaactaggatcccagtttcgttagccgttggattttcatgaaatttggatatgttgttcgaaattcaattcctcacacttccacccgtgggaattgcgagataatattcgcgaaaggagaaaaaggaatcgcat

SEQ ID NO: 274701 - DNA, 337 bp, Glycine max
catgcaaaattatgaatgcgaggcggagggctttttttttttatacaaatcgaaccattagtaaaaaggtttggaattcttgatgacatgcaaaggattgccgattattacccaagttttcttaaatacactgtagaacatactagattctgattactaggattgaataaatagaattatctaacattgcttcaatgaatttaatataatgacatatgatgtaataaaataggaccaacgatcatggcatatcattgttttataaaaagaactgaagttaacgtaatcataaccctccctcatttactacataagtaatgccctgaaatatgacttt

SEQ ID NO: 274702 - DNA, 380 bp, Glycine max
atttttcatcgtcattctgtgtgttactcctattgagctctcatgtttggtggtgtgttgacacacctttgctctcaggtgttccaccttggccgcgcttttttgtgaaaaggttccttgggatcagaggattccgacatggaatgcgagccatgcttacactctatagattgaagctgaacaagctttttcagaagctcttttagagctccatccaacttcttcttatgtttatgctcctccgtatgttgaaccccaatggcatgaatatcttacaacacgctcttaatacctttggacgcgaccttgttcggagtctgattcagagcaaagagtcctcgctcacatagggggtatatctttgactcatcaggccattt

SEQ ID NO: 274703 - DNA, 460 bp, Glycine max
agcttgagctcactgttgctgccccacatagtttcacgaaatttttcacggccatgctcttccttgcgagccctcttggtttcttgttcaagggctcttgcggtagctgaattttcttctcgtaactggacacactcttttcggacgtctgtagcgaccaacttgaatttttctttggcaagtcttgcttttcctagttctatttttagagctcggacttcttcatcctctttcggagcttcgaagttcacttcgttgataatctttaacttggagagccaatctaacccttgtgtacgaactttcaaccattcatgataaccactgatgatgccattgcaaatgcccctaagttctttatctttccttaacgggctttcccacgccttatggactctttgtataaccttgaaactttgcaccgccaaatctttcacaacgaaatgagacaggctttttt

SEQ ID NO: 274704 - DNA, 481 bp, Glycine max
tcatacttggagaaagaaaaaataactcaattaatcatataagcacaaactcattatagcaatcaaacaagacaaacaaataaaattttgttagtcatcatataaacaagttaattgaaatgaaagtttcaaccaacttaatttaaaagaaaatggttatgatgttacctttttcatgatttaagtgcctagatcttcaaagatggaagtcagacttttgctttttgcttaatctttttgagagatgttctcatcactttcatagtccttggatagaaggttgatctccttctttgaaccatcggatgagtcattgtcatcccaagcaatatacaccttcttggatcttttttctttatagcttttcttctcattcttctcgggccatgactcatttgaggggcagtttgcctttatgtgactgggttgattacacttatagcatttcagtgtacgagaaacttcttaggatctcttccca

SEQ ID NO: 274705 - DNA, 395 bp, Glycine max
agcttatacagatgttgactatgcaggatcaataactcataggagatccactttcagatattgtacctttctaggaagaaacttggtaacttggagaagtaaaaaacaaaatgttgtagcgcgatctagagctgaagctaaattgcgggctatggcacaaggtgtttgtgaattgctttggttaaaaatcatcttataagacttgaagattaaatgggatgaacctatgaagctctactgtgataataagtcagcaatcagcatagcccataatcctgtacagcatgatcaaacaaaacacattggagtggatagacattttatcgaggaaaagttggataggggtgtgatatgcgttccatatgtgcctactgaaggtaaaaacgcaggttttt

SEQ ID NO: 274706 - DNA, 266 bp, Glycine max
  unsure (1)..(266): unsure at all n locations
tagatagagaataagagagcttagatggagatcgaagaagagagcgcgagcaaaatagggctcacgcctgatatattttaaaatgtaagtccaacatcggttttcaataaaaaaaaaaaccgatgttaacaaaatgatgttaaagtaaacatcggttttctggacgaggaggtagtggtccaccacactgatcggtgctaccacagggggggatgttcggcncccccctccccttttcctcccccttttcccctttttccccctct

SEQ ID NO: 274707 - DNA, 613 bp, Glycine max
gcatgcaagcttgtaatgaatgcaggctaacacatttatttatcactttctggccccaaaagagataccaatgtcatgtgtaacgtaatgaaatggattactctatattcactaataaagacttcagccccacgtgaatattttttaggcagatttttagctttctttttacttatatttatatttttgcctgaaagacatgattataaatacacatgtggaaaaagaagtggaacaaagttgtacagatattttcacctcacactatgtttgtgtttatcctaatatgtatcaccccttacttattttataattatcaggcacccctcttactttaattataacatcattttcactgtttattttgatattgtaatataacatttgatcgtgaaaaaaattatgtgaattataattttttaagaaactaaaccattactacttaaaaaataacgaatttattttactaaaagtttttacttcaataacttaaataatgacctttatttttaattgggactttaatttttttttttttaaacttccacctcccttttaaaatttaatccaattaattattaaaaccccctcctttattttttattttggaaaa

SEQ ID NO: 274708 - DNA, 527 bp, Glycine max
tccatcatgtggtatcaagagcatcttcatttaggtgatgttcttttgcttcctctatctttttgtttggtgaattctctttaattccttgttcttcatcttattctgcatgtatatcctccattttcttgtggcttggtgctgtttagagtagattcaaaaaaaactaaaccgattaaatcttagatctacacttgttcttgcatttctatggttcaaattttgtagatctactcttgaatcatgtttttgtgtttattttaggttctatcatttttaattcataatattcttgtgctgaaactttagatctaaattttcttccaaaatattgattacaaaaaaagacacacaaatctaagtgtaaatcacttaatccatgttgtcttagagtcatgtttagtcatactaattgtcacattatgttctaagtttgcgctgaaatcttattttattgatcgaatcctacacacattcgttcatggtattcttttccattcttagcctatcttttcaattttgactcc

SEQ ID NO: 274709 - DNA, 519 bp, Glycine max
agcttcggaagaaagtgatgaggtacaagccctaaaggcagagcttgaaagagcccgagtagtcgaagagaagttcaagtccatagccatcaaagtctgaaaagagtatgatgaactaagggacgtcaatatggccaccgctgaagccttggaatgagaaaccaagaaggcccgaaaggaagaacacgtgccagcaaagttttgaggggctttatagggcagcaatagcaaactcaagctccgaagaggtgaaaggaatcatcacaggtcaaaggcatgatcttgaaggacgagctaaaggcttaccttaggtcgaaaagaaatttgtcccaacagttaagcgagactgaagggaatatgtgggccgtcatcgatgagtgcaaagagaagctaaatctagtggcgactcacgagcaaaagctaaaggatgagtacgccaagatattagcagaaagcgaagcagggagagggtaattgattcatggcacccagaggcaacaatatggacggaccgattgc

SEQ ID NO: 274710 - DNA, 522 bp, Glycine max
ccgagctgcagatgtccagtgctaggtttgacatccgcgcacttagccgacgtttcaaattcaaatcagtttttttttaacatagacttggattagcatgaggacaagtccacttagcgaggtctgcagatcagaaaagctgcaactctcgctgggatctgggctggcttagctaaaatgatgcatcttaagtacagaggagcatgcgcttagctgataaggactcacttagcactcacattgccgcaaggaattcagcttagctgccatgattggcgcttagcttcatgaacctcagttatagccgtaaagaattgagcttggcggcaatgcctaatgcttagccaaggataagttgtcgcttagcgatccggctgaagcttagctgaattcagatcgaatagaagttggcttaactcatccttggccaacttaccgggctaaatcaccctcagatgcatgggttgggcgcctaacccctcgacactcaccgctcaccgtatatactctatccacctcctc

SEQ ID NO: 274711 - DNA, 364 bp, Glycine max
  unsure (1)..(364): unsure at all n locations
tttgagcnaaaatactggctgaccataaattttgtctcaaggtgagaatgtcaatccttagcctcggaacccaattgaataaaacggaccctaatcaccatggacatggacggattgaacttttgctctccccgagaatcccatctttaaatgggcagcaatgaatatatcaatatatgtattcacacaaattaatcccccctcctattaaagactaacctttattattcaaataaattaacctgtctttaaccccatgcttgattgtcccaaattacaatgtattgcttagttgaacacgtatttttgatctactattcaaacaaattaatcacccctcctattaaaaacctcttatttatta

SEQ ID NO: 274712 - DNA, 1130 bp, Glycine max
  unsure (1)..(1130): unsure at all n locations
gtgagccctttgtagcattcgcanaaatctgggagaaataaaccatcctccctttgacatgtactctagaatcatgcaaatgtgggttttcaatttttttgtgggctaaggatccagaggaagggggggtatataaagttcgctcgcatcccgcttaacttggatgagatattggattttttcattctggcaatttcgtacataccctattggtttcctatgactaagaatcggctgtcacaccttgtttatcattcaattgatctgaaccaaagcgtgaaaacaaatagagctatttatctggtaggataggatagacatctagactatccattattgcgtagggagaggcatacttggccctaactgaaactcttcgtatgatccattctgtcgccctctctcatattaggtcacctatcactgagttctctgtcaagcaatgcgccactaagctcgagccgtccaggtcatcttgggttctcgggatgcgaattgtgtgagcgaaaactgatgcaataatggtgtcctactctacaatgcaacatttgatattgaccctgagatgctcctgtaaactctctatacataacgaatgtatgcatggtgccattggacagcgcttccattcagactattgtgagacattgttgcaatcgcactttatgctggtttgancacatctatatggcgcgatgatcgatactttgcctatgctactcgctctctgcgtcaacttacacgccgcgtagatgtggactctactcgctcacgcattatgacgtcgatcctactctatgtactgtcacagatattgtgtctattagttgatcagacttataatgcgactcgttctgcacatcatacaacgtcatcgtcctagcgattgcgtgtgtacgcgacattcacactggaggttcgttattcgctccgtcgtcatatgtgacacatatcggatcagtatcgtacgttgtacattggtatcgacagtattcttatgcatactctagctatgcttcatgagaatgttctcatagagcttcatattctgtagtactatcgtactttgaattcatgngacatttcgttcatagaaagacatgtactgctacgatatacatactgactcc

SEQ ID NO: 274713 - DNA, 434 bp, Glycine max
agcttgccacccagctcgcccaggcgagcagggttgctttctccaaaagcaacagccttctggaggaatcttttggagggcccaagtgggcctggttgctatttgcacctccatttttactaagtacacccccctgccttttttttggtgattctttttcgtaaagttacagaaacttacaaattttgtaacgatacttgttttctttccgtaatgttatggaaccttgtggattacataatcatccccttttttacttacggaatgttacggaacctcactaattgtgcaacgatgcttccatttgatttccggtgtgtcacggaaccttacggattgtgcatcaatattttcttttgttttccggcatgtcccggaatttcacaaattgcctaatgatgggtgccaagcatcttacaaggaccaaacaaaag

SEQ ID NO: 274714 - DNA, 518 bp, Glycine max
  unsure (1)..(518): unsure at all n locations
tctcaaggaagttttctcaaagaagcttctcaaggaagttttctcaagaaagcttctcaaggaagctacctagtctataaatagaagcatgtgtaacacttgttgtaactttgatgaatgaaagtcttatgagacacacttcaaagttccacttctctccctcttttattccttcaatttcgtgctcccccctctctctttcttttcctccattgaagcatcctctccaagcttcttatccaaggctcatcttggtggtgaagctccttcttctatggcttattccctagtggatggcgcctcctctcacctcttctcctttgtcttccgttgcatctccatggtggaaaatcaccattaaaggacctcattgaagctcaaagatccagcctccatagaagccccacaagcaagcttccatcanggatggccggcagcgggcaacagacgcaccgccgccacctccaaagcccctcagctcatccacaaaaaaagttagtgcattgcctacgaaacat

SEQ ID NO: 274715 - DNA, 130 bp, Glycine max
gcaaggttgtgacttttggcaatttgtataaaactattcacttaaaaaagttgtgacttttgaagaggatcttcagaaacaagtcacttaaacaatcgtgacttttggaaatgtattatttcaaatccct

SEQ ID NO: 274716 - DNA, 950 bp, Glycine max
  unsure (1)..(950): unsure at all n locations
ggtgagaccttagtaacagcgacactactgagtgcactagatccgcctattctaatgagcnanatanaattatgagtttatgagtnaatcttttcttccttttttacacatctgccacatttcatgggagtgcgtggagcatttgactacaaccttacacaattctgtttaaataatagaaggccgataatctttttatagcaataattctccctccccattgtagcgtcttttctccgtgtaaaaaatattctcctgctcatcgcttcatcagaataaattgattacctttgatcggtggcacacatttgtcaagtgttctcatctattacaaaccttaggtggttaattgcccggtcaacttctctagttctacttgctagtccggtaaaagaaacttttggttgcatttaacaaatagtacaactctcgttatcgtgttactctatcatatacggacctccttaaatcaattcgtcgaattgagcggtatcatagtcatctgaatgttctgtcctttctcccttttttgcactacccctgccttctgccgctccttctccatcttgtagtactccactactacaagttatatcatatcggctatctctagtgactcgaaactttactatattatctgttactcattcttcgcataccttctatctcatttcaactctatctaactctttctgtatgtaaccttcttctctcccatacttcgctaccgtctgtcactactatccatactcttcatagatctttattctagtagattcttcatacctcactactgcacgccaatactcactctctctcttcatcatctcttacttctactttgccttcctattttcatttatctgtttcttattcagatcttgtacatatccctatactctagacattctaatatactaactcgttcatacttccagttgatctatccg

SEQ ID NO: 274717 - DNA, 338 bp, Glycine max
agcttttggtatcaattacgagcgtctcgatttactacgggacataatcggacatccgggtagaaagttattgttatttgaatttgctcataggttctgttttcaattacgaacgcctcaatatattatgggattcatgacgacatcctagtaaaaatttatcgccatttgaatttgctacgagccttcgatttgcattacgagcggcttgttatacaccgagaaacaatccgacatccgaagaaaaagttattgtggccagaatatgcttagagcttctgttatcaattacgagcgtatggatatattacgggactcaattcgacatacgagtaaaa

SEQ ID NO: 274718 - DNA, 518 bp, Glycine max
ttacagcagattttagtaatgacccactaacctagaattaaaataacttaatgccattaacctagggaattaaaacaaactaaatggctgagtgtaactgaaattgttggcaaccaaaagtcacccccaacagccaacaagtcagccaccatttggtctcccaaaaggctgatgcctaagttgccaattgggcccttattacaacttgaactaaagcccttttagttgattaacccaaaacatatttttggtcagccaactttacaaggattgggccattatttagacaaactaaacactctaaaattgaaataaagtggtgtcatttagtcctccatttgggccatgatacaactcacaaccttggacttttctccttgaaacttgggcttgtattcaaatagtatggacagcacttgttgaagagcgtccttggctttccttgctctagcccttgtcataggtcctccaagtccttcaagtggatcctttgccttgctcttggtcatgtcctcatc

SEQ ID NO: 274719 - DNA, 711 bp, Glycine max
agctttaatgtgtagataaaaggattttgttgttaagaattgaattatgcgtgactgtaatcaaaagtgttggaaactataattataggcgataaaaaaattgcattaattatattggtactaatagtgtttataatatgtttattttaattcacatgtatttgctctaaaaatatataatcagagtagtcaaatactcaaatcctgatttttaaaaggtttatcttttttgtttttatacattaaattaggacttgttttgtgcaatagataaacaaagatagaatactataagattatagaataaagttgataaactcccaaggttcgttttacacattagtttgatcttgttgtggatgcttatataataatagaagcacattttacccgttattaaggcgaaacattatattttaatacctttaaacaacaaagccaatttatatctaatgaatgggagtaattcttaaattggccttttaatgatcataggtcccaaattaaaacattcatatatcgctatattatttttcccaaaaaatttggttaacattagtttttcaaaagtttgaaacttgtttatccccaaaaaattaaaacatccctgtaaaaaccaaatttcaaaaaataaaaatattttttcataaaaaaaataatcgttaatagttatatagaacttaattttgtgacagttaagtttaacaaatt

SEQ ID NO: 274720 - DNA, 422 bp, Glycine max
tgcaaaattacttcagtttggtcaaagttgtttattttacgataatttattttaaccaaaatatgcaggcttttattttcctttttattgcaaattatggggatgcagtctttgttttgtagttccataagcccactcacttgtatgttcttaagaaaagtttggatttctgctttttttcaaaattttcataaagaaaatctacagttttttccatttggtttaatctgatttccagagtggaaatcctattattcatgattttatttccaaaatcattttctttcttaaaatctggaaattttgttttcaaaaccgtttgtacgcaagttttgcaaaaattcttgtagtgagctcttacagtgtgtttggatggacgaattttaaattctgagaaattctcaattctaagaattttcaac

SEQ ID NO: 274721 - DNA, 528 bp, Glycine max
catgcaagctttatactaagggttattctcataattggtctaaagaattaaaactaatggaaaaatctcaggaacccattgaagaattaaagaccctaatcacaatggtcataaacgattaaaactaatgctccaccgtaaaatcacatctttaaatggtcatcaatgaatatatcaatatattattcacacaaattaatcacacctcctattaaagactagcatttattattcaaataaattaacatgtctttaacgcattgcttgattgtcccaaattacaatgtattgcttagttgaacacgtatttttgatctactattcaaacaaattaatcacacctcctattaaatactcttatttattattcaaataaattaacatgtttttaatacattgctcggttgaacatgtattttgcaaggggaaatgaacctttaatgtaattaagctttatattaaagggtagtctcataattggtctaaataactaaaaattacacaaatatcttaaaaatcccatagaag

SEQ ID NO: 274722 - DNA, 419 bp, Glycine max
gacactatagaccctcaagctttgaattggcatcaagacttaagtcaatttcaataaaagttgctttggaggtataaggatggagagaagggacatagaaaaagtttgtggatttgttgaattgcaaggatatggattttccatttgtatatcttgatatacctataggtgccaatcctagaagggtggaaacttggaaaaccaattgcagacaaagtgaagaaaaaagtattattgtggaagcacacactactatcctttgtcgggaggatttgcctcatcagtttgatattatcttctcttccattattcttttatcttttttcaaaatgccaaaataggtggtggctctggtttggttggatggttggctacagggagagtgtttggctatcaaatatatacactattcctcatct

SEQ ID NO: 274723 - DNA, 581 bp, Glycine max
ttttttcctgagttgtgaactaagcgggtggtttaattttaatttttcttcaagtgtttttttcatgtttttacattaaaattttctacaaaacacgtgtaattattttatttttttctgaatcctattggttaaaaattaaaatctttattatttcactaaaaacaatagttaaatataagaattcttatcatttttaatcaaaattgactattaattaaatccaaatttcgcagttattgtggacaattttttaaagtttgtttataagacaatgattttcataagatcattttctaatttttatatgcattaattattcttttttttaaatacttttacctaattggtttttttttcaaatatttatgaaaaaataattaagtggaattgagagatttgaaaaaaaattaaatatataatgacatataattgacattgtggattaaattaaattaaatattttttttatccaaaaataaattcatttaaatttttttttaattcagaaccgattagtaaaattttgttaaaaaacaacctctgccttaggtattaatacccttaaaaagttcaagttt

SEQ ID NO: 274724 - DNA, 404 bp, Glycine max
gcttctcgccagtttttctttgaacataagaaagctatttcattcttattaagtgggttagagagaaagaatttaagatataagaggcacaaaacagactgagaaagatacaagaggttgttggctctaacgggttgtttgaacatggtaattatgccaagttgaaagttattgttgccttgcaagagcttaagctaactattttgcatctcaatatcacatcttcggaggctacggctctctactctttcaatctcaaggtaattaatgtattacaatttgtcttttctcttttttttttttttaagtccaatcgcccaagtgaaattaagtctctgtactttttttctgacttgcaacctacccataacgtatgttacccctattttcaacagtctatttat

SEQ ID NO: 274725 - DNA, 298 bp, Glycine max
gcatgcaagcttgatcaaaagaggtgggggatcatattcttttttactcgaatcatacaatggctcattgaaattattaataagcactcatttcatgcaaaacagttcactacgtatgatgatcaaacaatgcactgagcgaacacgcttttggtacaaacaatgaactaaaagtgctgaaatttatatgattgaaatttaaacaaatggaaatataaaaagtggaattgaaatgactgaccataaattataaaataatggacaataaactaaaatgttctgtatgcacaaagataaa

SEQ ID NO: 274726 - DNA, 440 bp, Glycine max
tcccgtatccgtacttggaaggatctgattaccgccttcctatagcagtatcagtacaattctgatatggctcctgaccgtactcaactgcagaatatgtttaagaaagagggtgaaacctttaaagaatatgcgcagcgatggagggatttggcggcacaagtagctcctcccatggttgagagagagatgatcaccatgatggtagacactctgccagtgttctactatgagaagctagtgggttacatgccgtccagctttgcggatctggtgtttgccggggaaagaatcgaggttggattaaaaagaggaaagtttgattacgtttcctccacaaacgtgaacgccaaacaaatctgggcaacaggggcaaataggaatgaaggagatgcccctgccgtctttttaacacccgcgtgggtcgaaccccaccccta

SEQ ID NO: 274727 - DNA, 464 bp, Glycine max
gcatgcaagcttgttccttttcactgataaaagtttataactcaaggcggctatttatagagaaaacagttgcaattgtctgtaatcgattaaattggtaatgcaatatattatctcaaagaagtgatcgattacattctcactttaattgattaaagtgttcttcccaacacctgaaaagctttgaaaaataatgtaatcatttagatttttgatttaattgattaaagtgttcttgatcacttctgggaacactttcaagaacaatgtaatcgattaatactcccacataatcaattaaagcagagactcatgaaaacaaacatggtctcaaaagaacagagtgatcaattataggtataggggaatcaattaaactagaacaaaaatttctctgcaagctttttaaaatacttgtgtaaaccaatactaataaaatgtttttgataaaactgaaaattgtg

SEQ ID NO: 274728 - DNA, 489 bp, Glycine max
tgtttcaaaaaatccattcggttctgattggcttgtgagaggcgggtttaaggactaaatcgcatattcattccttttgaattgattcaattcattccttgctttgttcaagatccttattcggagattcatcttcaagtgtagtgtgcttattttgaaaaccaatatcttcatttatgtgaatctcaccaattttggcttcacaaacgtgacaacaattcttgttgaattcatttttgaagcctttgtcacatagttgacttatgctcaaaagattatgcttaagtccatcaacacacaacacattttgtttatttgagtcttgtattgatttccaatgtttccttcacccataattcttcccttattattgtcttcaaaagtgacatatccacctttccttaacacaaggtcagtaagtttagacttgtcaccggcaataagcctagagcaaccactatccaagtaccatagtgagtcttttacttt

SEQ ID NO: 274729 - DNA, 444 bp, Glycine max
atgcaagcttggaattgcaatagtgctaaggtttctgtttttagatactccatattgtccacaattaacttggggtcctgtcttcatgatatctaagtttaatgtgctaaattgaattaagtctgggctttggcaagcgtgtacaacgatatatctgacccgatgactaataggaaagattctacacctataggaactgaaccaactattatcgaattgctaagattctgcattatttaatatgatgactgactaactttgtgatgtctactccaatcacaatgatatgcagtcttgcgaaattgacggtttttgattaaacaaattaaaatactgaaagttctattggctaagcttcttgattctataaagaattccatatgccataaaaacatagacacttagctccagataattatattggctcttgcattgaagaattca

SEQ ID NO: 274730 - DNA, 598 bp, Glycine max
tgtcatcgtgagacatcagaggctaatattttaataaatgtgggtaggaaaaattcaccaaattgatagagaaaaatctaaaatcatacatcttaagcaaataaggcatgctagcccccaacattattgcattttgattccatctttggacattcaaattgttgtttatttttcctgttatcttttcctttgccttagtctaaatttcaaacttacaattcggtatctctttcttcttttgtttctcctcatttcttaataattggatttgcatcacttaagtacaaccaaagtccctctggattcaacagttgaacttcaatttcaatctttactacttgtgataaaattaggacacttgtcaatctattaacaagtttttggcactgttgatggggactttggttttcgtacttggttgttacaaatcccaatttgagagcaatcattctttatttttcatcttttaatttttttttcaaaaaaaaaatggttatcattttttctttactcactcttattttattctttttttaaaattaataatactcataatgataataattattaatataatactaataataatcataataat

SEQ ID NO: 274731 - DNA, 596 bp, Glycine max
agcttattcagcgtggtgggggccagaaattttttttatgcaaatttcatgcagtactgctacttataatttgacgtacagcaaaataatgtggttcaggatgcctggtgatatgatcatgcactcagtgttagttgtcatcttatctacactgtttcagagctatcaattccgataggacagctccatatgcccttgttttttccaaaagttgttttgacgtgtgtaacaccaccttatcaaacaatggccaacataaagcctccacttgtaaccaaatgagacgtgcctaaatgtatcctcacatttttagtgcattattcggtattccatacttttgcaggcatgctttggacatgttttcttcatgttatgctggagtacaactggaaggtattttctgactgatgaattataaggcaacacagatagatagcaagagatcatagaccattatatttctgaggtttgacattatacatctgttttatttcaagcggattcacaccaaaaaattagataggattatcttagctactataacatgcaacggtaatttttgataaagtccttcaaggcaacaccatatgcccctg

SEQ ID NO: 274732 - DNA, 568 bp, Glycine max
tcatacaattaatatagaacctatatcctaatgtcacatcctatcagagcgttgtgtttccgtgtcttctagcatgagattcttcacagtcatccacctattcatctgctcccccgaacacaagttcaagatcatcacaggatccaaacacaacaacacacagggagtgagttatcacattcttagctaattgagaaacaagacaatgaaatatacatattatataaatgagataccacttgcttaaacatagctcacgtaacttcaccacttcatcattcaaaattcacttttcaattatcaatcactttacacaagaatctcacacttcgatcaagatataataacacatcaattagcaagcatatgcaatagttatgctaagactcaatcctatatgcaatgtggtaccatgtcagtgaaaaaccaccctggggcgcttaggagtacataacaagacacaccacacaatgggtttgtcaggtcactctcactaagtaagatcataaggagaccagtcagggtcacgatgttttgtgagaatgttccaaccatatgggatcagcat

SEQ ID NO: 274733 - DNA, 309 bp, Glycine max
gatgcctcataacaattgaattaaaaatgaaaactaaaattctaaactaaatcgaacacttaacctccaaagtggattcaattttataaaaacttcaaactacatactaaaaatcagtccacactgaaccttactacttcagatttttagacaacactatttacaaaacgttgagtgttttctccctaagttgagaatttatattatgcaacacgtacataaaaagacattatagcataaaagagtatttaacacggaagacaacaaaaagataacatatagtataccccgatctatctaacattactc

SEQ ID NO: 274734 - DNA, 279 bp, Glycine max
  unsure (1)..(279): unsure at all n locations
tgatgacaaaagcttggtttatgaattgattntagccttagtttcactttagttattagtcaattagattaagaaagaaaatcccaaagataaatgtccgattgattnttgtgattattaaattattattttgcctctntntggttttaaatgtggttacggcatgacagatcggtcagaatttattctaacagaaactaaaagatgttacaactcatatgatcggtggaaatttattctatnttttgattaggcgagaaaatgacttagctaaatgat

SEQ ID NO: 274735 - DNA, 465 bp, Glycine max
  unsure (1)..(465): unsure at all n locations
agcttagtggagcatggggtatccgacatatgtggtactacgtggtgattgggcgatggagcggatcaactctcccactttcacaagtcaaacataaacataccatccccagttgcccacctttcaacagagctcacgcactcctatgtagcccttatcctcgttcctctcagcaccgggtccccatcaacccctccaagctntcacaatatccaagcaattcaattccaaataccatgaaactatcctaaaccaagaaaacagggcagaggcagaaaactctgcccaaaacacattcacatatcacaactttccttactcatatatcccagtaacattctctttgttccgatttgttaaccatgggatcgacttgaaaatnttattggaggttcctagtacataaatctacatnttgaccggtgggatctgcaagaaaatgtctagaacccaatatgtactacc

SEQ ID NO: 274736 - DNA, 410 bp, Glycine max
  unsure (1)..(410): unsure at all n locations
tgacactttcattcttcatctcatatactttcgggattattttcttccgcttttacgagctntcaagccgttatctaagtcgttatctcgtttgataatttgataaatgaatttcaaccgatcattgatgttgtaatctcgtctaatcactgttaaaacaaaatccaaccgatccttcgtgctgtaacctcagttaaatagaaaaggcgaaatgataataaaataatcaaaatatctctgaagaaaataataataaaataatcaaaatatttctgaaaaaaataatgatcaaatcaaaaaaatcaattggacattttactttgaaattttcctttaaatgagttgataataacccaatgaaaactaaggcgtanatcaacttacaaatcaagctctgtccgcaaaaatcg

SEQ ID NO: 274737 - DNA, 417 bp, Glycine max
  unsure (1)..(417): unsure at all n locations
ttcttccttggcttattgcctagtggatggcgcctcccctatactcttctcctttgccttccgctgcatctccatggtgaaaaatcaccattgaaggaccttattgaagctcaaagattcagccttcgtagaagctccacaagcaagctttcatcaagtggtaatcagagcacaagagcttcaagtaggtgctccttanacctccattaattttttttctgtaccttctcttccattggtgattcttcatgtttctccatgtatctactcacatgtcttggtctaaatgttgttaacatgattctttagacgttccaccgattaaacttgctatagaagttagacctgattctctatggntcanatttcttggtcttgttctcgaaccatgaatcgtgttgagtatacgttcctttg

SEQ ID NO: 274738 - DNA, 401 bp, Glycine max
agaatcggacctcagtgtgaagagttatgaccataagaatatctcgggagctatcgttggacattttcgagcgtctgtatatgagatgcgcctgaatcggacatccgagtgaaaagttatgaccattagaatctctcgagagctttcgatggttaattttgagcgtctcgatataatataagcctgaatcggacatcagtgtgaaaacatatgagcatgctaacttctggagagcgttcgttgtacattttttagcgtctatatatgtgatgcgcatgaattggacatccgagttagaacctatgaccatttgaatgtctcaagagctatcgttgaacagtttcgagcgcctagatatatcataagcttgaatcagacctcagtgtgaaaacgtatgacca

SEQ ID NO: 274739 - DNA, 465 bp, Glycine max
  unsure (1)..(465): unsure at all n locations
agcttgtaggattatggggtacccgtaatatgtggtactaggtggcgatcgggcaatggtgcaaatcaactcttccacatccacaaattaaacatgaacccaccattcccaattacccacctttaactgagctcatgtacccccacgtagcccttatcctcgttcctctcagcactgggtccccatcaacccctccaaagcttcacaatatccaagcaatttaatatccaaacatcatgaactaccctaaaccaagaaaacagggcagaggcagaaaactctgtccaaaacacattccaatagcacagctttccctactcaaataccccagtaacattctcttcgcttcgattcgttaaccaattggatcgactcgaaaattntactggaggtccctagtacataagtctacatttttgaccgtgggatcagctagaaaattntcagaacccaatatgtactacc

SEQ ID NO: 274740 - DNA, 465 bp, Glycine max
  unsure (1)..(465): unsure at all n locations
tgcctcanagagatccagganagacaaagcggttgaaggaaccagttccactcccgaatatgacagccatcgtttcaggagcgctgagcaccagcaacgcttcgaggccatccaaggatggtcattcctccaggagagacgcgtccaactcagggacgacgagtataccgacttccaggaagagatagctcgccggcggtggccattgctggttacccccatggccaagttcgacccagacatagtcctcgagttttatgccaaagcttggcctacagaggagggtgtgcgagatatgcgatcttgggtgaggggtcagtggatccctttcgatgcggatgccttcagccagttcctgggataccctttagtgcttgaggagggccaggagtgcgagtatggccagaggaggaaccaggccgatgggtttgatgaggaggccatcgctcagttgctatgtatacc

SEQ ID NO: 274741 - DNA, 425 bp, Glycine max
  unsure (1)..(425): unsure at all n locations
agcttgtaggattatggggtacccgtcacatgtggtactatgtggcgatcgggcgatggtgcaaaacaactctccacatccacaaatcacgcataaacccaccatccccagttgcccaccttcaactgagctcacgtactcccatgtagcccttatcctcattcctctcaacaccgggtccccatcaatctctccaagcttncgcaacatccaagcaatacaacatccaaccatcatgaaccatcaaaaccaagaaaacagctgcaaaggaagaaaactctgcccaaaaaacacaaaccaataccgcaactntccttactcaaataccccagtaacattctcttcgtccaatttgtaaccgttggatcgactcgaaattntactggaggccctagacataaattacatttgaccgtgggatctgt

SEQ ID NO: 274742 - DNA, 416 bp, Glycine max
  unsure (1)..(416): unsure at all n locations
cttgatgagnaaattggagaggttaatgaaacaacgagatgatgcgctccatgagaggttggatcaaatggagaatagatatcctaatggagaagaaaggaggagaagagggaatgatggtgttcctagacaaaagcgaattgatggtattaaactcaacattcctccctttaaaggaaagaatgatccggaggactacttggagtgggagatgaaaatagagcatgttttctcgtgcaacaactatgaggaggaccaaaaggtaaagcttgccgccacggagttttctgactatgctcttgtgtggtggaacaagctacaaaaggagagagcaagaaatgaagagccaatggttgatacatgggcagagatgaaaaggatcatgaggaagcggtatgtgccgtctagttactcaa

SEQ ID NO: 274743 - DNA, 371 bp, Glycine max
  unsure (1)..(371): unsure at all n locations
agcttatttgcaatatctcttaacttaactattggagaggggacaaagggggcggcggacctttttgaanaatttgcctgacattgcaacaataaccactaatgcctggagtaactaccaacaatgaaggcttaaatgtttttttatttttccatataatatagcattttttttttcattcttatccttgcacaaaaaaaaactgtttgtccttacaaaatgggtttattttatttttcgtccttataatgcctcagacagagggcgagccctgttgcagcggtaaaattgtgccttgttgactttgtggtcatggcgttcaatccggaaacagcctctttgcatatgcaacggtaagggtgcgtacaata

SEQ ID NO: 274744 - DNA, 425 bp, Glycine max
  unsure (1)..(425): unsure at all n locations
tattgattngtcagtaactaaaccctgaactttaaatgattatctcctaataccttggttagattctaggagagcatatggttcaagacaaatttactctaaatttgggggagaaaagttgaaaagaatgaaaagaaaaaggttaagcatgagcacacacaacaaataagttgtatgttaaaaaaaataataaataagttgtggtgttacaataaggtcaaaagcaaattaagaaaagggaatagtgagaaggctatttgtacaaaacaagaaaagatcattgggattagtctaggacttgtgctctcttagaatctaaaccttcgaatcctagaaaaaccaatgaatntttgtagccaagcctcactacaagtccttctgcttatgtttatacatttctgacttgatggcatgagatgaaatgc

SEQ ID NO: 274745 - DNA, 333 bp, Glycine max
ttcttacttcttaaatgtacgttatatacttgctatacgaaccctataattctaagcatatatagccgtagtatggcgttctgccttaattgcatagatagtatggttgtttgtgatttattgatcttagtgatgctaatactctatagctggatgactcatatcaagttatatttcataatgaatacttatttgattcgaccttctaattctagcgcaacctatttttttgtgttgcgtgcttaagtcaaatacaatgatttcactttgaagcctgagtataattaattctttgtgtatgagctacatcaacaaatggatactgatgttcta

SEQ ID NO: 274746 - DNA, 352 bp, Glycine max
aactttcttgcgagatcttacagactcaatttgttgaatagtatgaacttaacccatggactgtttgataatgtcttaacctttaaagaaacaacttaagcgaaaccacattaagccattgccaataatgaggtggctaaggtacaaatgtcaaattattattgatccacataagaaggatattgaaacccatagggtaaagagaatttgctatattgaagctaaaaaatatatatctgatgatagctatgctgcaccgaataattcaagcaaaaaaaaaagaagccataggagtacactttgtgttatttgagaccataaagaaaatgatgtgaagggatgctatagagca

SEQ ID NO: 274747 - DNA, 333 bp, Glycine max
tatacgagacatcttgcccaacaaagtcccgttcacgataactcgcctgtgcattttcttccatgctatatgtagcaaagtgattgatccagtaatgtttgatgagttggaaaatgacgccgcaattatactgtgccagttggagatgtattttccccctgctttctttgacatcatgattcacttcgatgtgcatctggtcagagacatcacatgctgtggtcctgtttatctacggtggatgtacccggttgagcgatacatgaagatctttaaacggtatacaaagaatctatatcgttccgaagcatctattgttgagaggtacattgc

SEQ ID NO: 274748 - DNA, 462 bp, Glycine max
  unsure (1)..(462): unsure at all n locations
tattattgttgtctgttgtatgcagcaatccatttctatatcagcagatcatgatccacttattggactccccttaacaccaacaaagtgacaaccatctcctgaatgtgatgatgaagcaagaagctcacagattttacttgctcaactatcgtctaacaaattaggaaaacatgagcaagttgaatagatttggttgcttagaagtagttcacgctttttttttattttggttgttatttggaagttgtaattgaagtctcctctttggcttattgatgttctgcccctatgaacactacttgtttgtgtgggtgcgaaatctaccggcaagtgcaccggatcgtcaagtaaatacagttgtttgtaaaaagcgtcattcanaataccgttgtttgtaaaaagaattaagtataatgaattgaaaacaaagatatattctattggtatcaaagaaatagt

SEQ ID NO: 274749 - DNA, 452 bp, Glycine max
  unsure (1)..(452): unsure at all n locations
agcttaactaaataccttcaatntttaacttatgtgcttatatgataagtccaaaccagttctgaagaagctattctaaatggccccaaattgtattcttgtgtctctaatgctcgtgctgtccaagcttctggttctggcctgtttattttcttcactgaaataatttgtgttctgtgctgacgagtgtgctgtaagaaactgactttggcgatcttaacctacctaataatctattttgaaaacaggaagaaccgagtccatggatccaaattcaagaattatggttcctgaagataggcatggactccatgcaantgatattttgtgacctgacttggtatgcttgttttacagttcgttgaagtgcaatgcagatatccaagcaagttattcatgaatnctatataattcttttgaacagatgtcgcgaagtgattctgtgtattatt

SEQ ID NO: 274750 - DNA, 340 bp, Glycine max
tatcgcctggactggttgtcgcgctggggaatacctttacatgcgtgggagttggaacacgttatacatatcgtatttgtggtaggagaagtggtggaggtgatgatgaagtggaaggattacagaggttggatagggcgcaggtgctattcgagacaccacgactactgcaaattcaacataacatatccgcatggatcaatggggtagaatactcagcgtacatggttgaggaaacttgctataatcccaataggtgctaatatctgagaaaataacctcagacgagagtctatcgaaaatggagaggctgtcgaataagatatgtctgatatcatgc

SEQ ID NO: 274751 - DNA, 429 bp, Glycine max
  unsure (1)..(429): unsure at all n locations
agctgttttctctgtacacctacattcctatacacgaaaaactttttctatatacacacgcgttgaaaaactctttctctttatatcgacatggtctatataaaacctttattccttttcaaagatttctttttcctttttcaacatacactcattgtttatacaaaaattttctttatatacactcattgctcacacacaagaatttcttttcacacattgtttatacacaaaaaaaacttttcatacattntttttatatacaaaaactcttttcttttctttatatacagatatggcattntgttcacaatgcctctttctttttctattctcggggtatcacgacgttggtcatttatttaggacgacgtcctaaatgaaactctacacggttccgaatttaacaacatatcgacataacaagta

SEQ ID NO: 274752 - DNA, 444 bp, Glycine max
  unsure (1)..(444): unsure at all n locations
tggttcgaggtacttacccgttgaagatcgaagaacgatgtataacgaatgaagaacgtcgaagaacggtcgaaaccttcgcgaaattcctcacggaaacgttacggaaacgtttcggaagcgcctcggcttggattttcttcacggaaacaatttttccaagcaaattcgaaagagagagaagtgcctaaggggctgaaccctttttcacttcacttctccccctatttatagaaaattgggggagaagcttgccacctagctcgcccaggcgagcagggttgcttcctccagaagcaacagccttctggaggaatcttctggagggcccaagtgggcctggttgctatttccacccccatttttactaagtacaccccctggccttttttggtgattctttntttgtaaagttacggaaacttacgaatttcgtaacgatac

SEQ ID NO: 274753 - DNA, 239 bp, Glycine max
ttgaaagagccccggtagtcgaagagaactttaagtccatagccatcaaagtctgaaaagagtatgatgaactaagggacgtcaatatggccactgctgaagccttggaacgagaaaccaagaaggcctgaaaggaagaacacgactcaaagcaaagttttaggggctttatatggcagcaatagtgagctcaagctccgaagaggtgaaaggaatcatcacgggtcacaggcatgatc

SEQ ID NO: 274754 - DNA, 411 bp, Glycine max
  unsure (1)..(411): unsure at all n locations
tggagaggatgcttcaatggagganaagaaagagggagagaaagagagaggggggagcacgaaattgaaggagaaaaagggagagaagttgaactttgagttgtgtctcacaagactctcattcatcaaagttacaacaagtgttacacatgcttctatttatagactacgtagcttccttgagaagatttcttaagaaaacttccttgagaagcttctttgagaaaacttccttgagaagctagagcttagctacacacacccatctaaaaactaagctcacctccttgagaagctagagcttagctacacacacccatataaaaactaagctcacctccttgacaaaatacatganaatacaaaaaanaagtagctactacaaagactactcaaaatgccctgaaatac

SEQ ID NO: 274755 - DNA, 531 bp, Glycine max
  unsure (1)..(531): unsure at all n locations
acgcgagaaacacgtgacnccgtcngtggcggccatttganacccttctcgtcncggngatactctnagacaactgccgcatgcaagcctggacactaagctataatttgttaaacgtctatttccgcaccacgaagccgatgcccaaaatgttgagcacgctgaataacaatctatttttgctacaacctgttattcgacgacgagtagttctaaatggtggttgactgataatgggtgtacgaaccacctgacatatgataagactctattcaacgacttgaactcaactaatgtcttcaaggtcagaattgggaatggtggctatattccagtcaaacgaaaatgcattgttgcacatttaacgtgtttacgtatcaaattaatatcatatcgtctttatgtacttaacattgaccaaaaccttgctacgtgtctgtcagttgattaaaaccgcattacagtcgcctattgacatcaaccattgcttatttatgacattgtttgccggcaaggtctaatggttaaaag

SEQ ID NO: 274756 - DNA, 426 bp, Glycine max
  unsure (1)..(426): unsure at all n locations
tactgagattcttgtcaacacatgatataattaatttcttataacaattgtcgatacagntaaccatgttaagttaaaacagatcgaatgatgaaagataaaactggaaatatttgaagcacttaaaatagcaatgcaatatcatttaacaattaacaaatcagacttataagtgaagaaatgatacctgagaatgatcaagtgtcaacatcttctgcaacaattccagagcatgatgatcaagactataagtcatggggaaaaagctattatatataaaaaaaaccctcgaaaatggagtacatgctaactattttggtggataaaaaagcctatatgctttctgatactcttgcttttatacttactgcctgaagacatccctcagacgtctttccatcggccttggtggcataaatttattat

SEQ ID NO: 274757 - DNA, 458 bp, Glycine max
  unsure (1)..(458): unsure at all n locations
agcttgcatgtggaattgcgaaagccccactccatcattaggattagtacctgacatctcaaacaaacaaatcaaacgtaacaagacaattatagttgctgtttgaatacctcacccactcaagtgtatcacacaattatggcttttctctaatgaaacactcttgccttttaccactctaattccccttgagttcttaggcaattcaagagattatggccacaacaaagaacaattcaccaatatgtgtaaggtaaggctagacaaggaaaaggttaaccaagacaaaggctaacaatgtttntaggcacacatgaaggaaataaaattcagaatttaggaattcaagtaacaatccttcatgcaaccaatatattaccttaaagagtttttttttttaagttcttcaagcatgaaccattcagcccacnatttttttttttttaattgtgcttata

SEQ ID NO: 274758 - DNA, 411 bp, Glycine max
tcttatccaaggctcatcttggtggtgaagctccttcttccatggcttattccttaatggatggcgcctcctctcacctcttttcctttgtcttccgctgcatctccatggtgtaaaattaccattgaaggacctcactgaagctcaaagatccagcctccatagaagctccacaagcaagcttccatcagttttcatgggtgctttgagagtaaatagtagcctatacacttgagagatagagtgtatatcttgtgaggctttatcacttttcattcttgagctaattaactattttgccatgattaggttgcttggatgattttcatgaatgtcttgactctttggatctcttcatgttagatgttaccctttctttttcattccttgagattcattgagaaatatgta

SEQ ID NO: 274759 - DNA, 464 bp, Glycine max
  unsure (1)..(464): unsure at all n locations
agcttcaatggaacttacatcatgtggtatcaagagcatcttcatctatgtgatgttcttttgcttcctctatctttttgttcggcgaattctctttaattccttgttcttcatcttattctccatgtatatcctccatttccttgtggtttggtgctgtttagagtagattcaaaaaaaaaaaatcgattaaatcttacatctacacttgttcttgtatttctatggtgtcaaatttgtagatctactcttgaatcactgttttgtgtcgattttacgttctatcatttttcattcataatattcttgtgctgaaccttacatctaaagtttattccacaatattgattagaanaaaaaaacacacaaatctaagtgtaaatcacttaatccatgttgtcttagagtcatgnttagtcatagtaattgtcacattatcgtctacgtntgtgttgaattttatt

SEQ ID NO: 274760 - DNA, 412 bp, Glycine max
tcttgaacgggatcaatatattcattggcatagattaaaggatgaagtcgtggtacgtaatcttttttggtgtcaccctcatgcagtgaagttatgcaatgcatgtcatttggtgttttttatagacagtacctacaaaactaacaggtatatactcccactaattcactttgttggggtgacaccaacggggatgacattctctgctagatttgcatatctaaagggtaaatgatagcctccctgtagttattgtgactggcaaagacctgacattgatgaatgcagtgaaaactatgttccccgagtgtacaaacttgttgtgcaggtttcatattgaaaggaatgtcaaggccaaatgcaaatcccgaattgataaaaaaaaatgcttgggagtatgtcatggatgcct

SEQ ID NO: 274761 - DNA, 421 bp, Glycine max
  unsure (1)..(421): unsure at all n locations
gtgatctgggatngtgaaatctctaagagttcgaggtcacatggatgtaatttgaaattcatcaaagcctcttggagcttactgaaggaagatgtcaaaagatttcttacgaagtttcatgttaatggtgtgttccctagaggtcgcaatgcatcattcatcaccttgatacctaagattgaggatccacaaaatctgggggaatttacgtccatttcactggtaggatgtatgtataagatccttgctaaaatccttgcatgaagactaaaaggtgctttggtagtgtgattgacaaaacgcaaatcgccttcttggaagggagaaacttacttcttggagtcttggtggcaaatgaactagttgataaggcaagaagaacggaaaagaagtgcttagttnttaaagttgactatgagaa

SEQ ID NO: 274762 - DNA, 415 bp, Glycine max
  unsure (1)..(415): unsure at all n locations
nggagcatttaatttatatgctccagctcgagggggagcattagaatataagctagctgtatctttgtaagagtagtcttgacaggtttagaaaaggctgtttttaagtgtattctgaacagcctaagtaggagcaggttccctagtctgaacctgtcttttcttctttcttattgtactctgtcggtgtcatataaaaatatatacaatgtgtggctgagtaaagtaactcaacacttctctaacgtaatgtgtatatcacacccttcaacaatgtagttcttaactttaacagcttggatatgccaacagatcatccagtcaattgaatgagttccaccacacatgctgacaagtctcactatacacaanaatagctctatttatgcaataatagctgttcccagaagttaac

SEQ ID NO: 274763 - DNA, 450 bp, Glycine max
  unsure (1)..(450): unsure at all n locations
agcttgtactggagaanactgttggacccttatatttgttagacttttaagttcgtattgagtatattaagggagaacaaacaaacaaaagaaatttaagtgccgaaagagctaaggatgtcttanaaataattcatacagatatttgtggtcctttccctaacgattcatggaatggacaaatgtattttattgttttcatagacgactactctttctttaattgatgagaagtcttgatttctagatgttttcaagtcttttaaagttgaagttgaaccttaattacgacaaaaaataacgttgtcaaatatgattgtgatggtgactactacggtagatatgacgtataagaatggcaaaactgaactcttaaagatatggtaagcagtatgattcttgtttaccatagttactttanggaaagacattatagaatgcagtttatat

SEQ ID NO: 274764 - DNA, 406 bp, Glycine max
  unsure (1)..(406): unsure at all n locations
aagtcatgtacaaaactaacggagcacaacanaagtgcctatacaaagatgttacaaaacaaattaccctgccaaatcagctccactggaaccatttatgttggtcttacccttcctttgtcagattctttcactgttcaccactcacgcatttgaaacctccctctagtataaatgagtcatcttacatttgaattgaaaaccaacacaatccactcccctccaagttcattgtcttcacggtgactgattcagtcattgttagccaaaaaaacaccacaattatggcaggtggtaatatgcaaaagaagtcttcttcgggtttcttctcttatttcagcatcttttcatcaaggaagtccaaaggagggtactctgatgcccctgattcgtggcgcagagtcta

SEQ ID NO: 274765 - DNA, 380 bp, Glycine max
agcttcacgatctcacacgtcgaactacatgtatccttcattgcgagaactaagaggggacatgcaaaataaataactctgacactcaaataagtacatgaatgagttgagtatgaaattgaaaagggtgaaataagatctgatctttataacgtgagataggagtttcgagtccttgaatgtgagagagttattacagtgatgtaaccaactctacataattcctaacttggtaataatatatagtacaaaaatcatagcttggagataatagttaatagataattcatcacttatagcatatccaatgggatatagataatccatttatatagataattcatactagagatagttagtcctgtacttgataaaaaata

SEQ ID NO: 274766 - DNA, 463 bp, Glycine max
  unsure (1)..(463): unsure at all n locations
tgctntgttatttataggcagaagttcacataaaagtaggggagttatgtgtaatttctcagatagataatggaatcagaataaaagaaagtaaataaagtaagaggcaagtgtaatttccccaaacaaaacaactgtccacataattagccttaccctcatataactagcccaatttaaaacattcacactttaacaagcaattcactgaaaacagatccaagtttattgaacagtatgcttgataaaatggaataacagtgaaactataattctgatccaagtttatacagttaaagtaaatgaaatacaagtcttgaatatgcatcagttagtttaagactttaagtaactgttatgacatacacgaaccanaagttacaatactgcactacagcctgcagtcatagaatcagaacacagaacaaacaccaaagctattaaatttagcattatactattt

SEQ ID NO: 274767 - DNA, 432 bp, Glycine max
tctcactatatgctctggtcaaatgcacaatctcattagagccatcaacattcaaatagtcaatgaatcttgaggcaagtacagcataatgaaattcataatctaccagataaagactcttcaacataatgtctttaatcaactatacccaattcatcttaatacctgatttcagaccatcaacaatctgtagatcatcatctgttacccgagcatcattacttgacctcggagtgtgaatgtaggtaatgaggtatactactattatgtcctctatagtcaatccaccaacttctaagtgattcctcaagttcattgttggatcaagacgctttcctctataggtctgcatcttgctgtacccattagtcatttcatcgaacttgcagacatcgaccatgtccagaccgactacttctctgcacacagtag

SEQ ID NO: 274768 - DNA, 418 bp, Glycine max
  unsure (1)..(418): unsure at all n locations
atctatacaaaggaatttatatggtgcagcctccaagactccattaagattccttgggtgaggtgggacatagtctgcctacctaagagtaaaggtgggttatggatcaaagatttgattaaattcaatgacgctttgcttgctaaatgggggtaggagttggcaaataatcagaatcagtggtgggccaaaattctattgtctagatatggtggttggagggatttgatttctgataggaactgcagtttatactctccttggtggaaagacctcaaggttatcttcaagcagcagcaaagcaacacaattngcaaaaatagctgtatttacgccatacgtaacgacggtccatggaatacaaaccaagtactcattggcttgacaacaaaggagacactcattggaaatatatatg

SEQ ID NO: 274769 - DNA, 455 bp, Glycine max
  unsure (1)..(455): unsure at all n locations
agcttaacanacttagaaatcaagtgatcatgtattccgaaatatagggggagaaaacggatgcacattttatctataaacaattgtttgttgcttgcttgaatcttgatttcacgtattgtattgtcatcatcaaaaagggggagattgtagatgcaattggctttgatgttttgatgatgatcatgataatgtgttgcaattgatgcaaatgggcttttcaagattaaaattcaagacaatacttcaagattacaaggcacaacatcaagatgatcactagaatattacgaagggaattcctaattgaattagcaaaggtttggccaagtgatttaaaataaaaagtgtttttcaaaggttntactctctggtaatccgataccagaggatgtaatcgattaccagtggccaaatacactttataacagctataaaaatttgaattcgaaatt

SEQ ID NO: 274770 - DNA, 444 bp, Glycine max
  unsure (1)..(444): unsure at all n locations
acaatgtcatgtgataaatgatctaataaaaacatgagaacaaatcaattnttttctaaatttaggaaaaaaaaaattaaacccaaaaaataaaaatattaaaaaagtatttaatcttatgtttatatataattatttacaaaaaatgtataattgatggttaagataagcatgacaatgaagcaccacgagattgtatgttattntttatacttgtttcctagcatcgtctccatcccccgtcctttgttcccaatgaggataataaacaaatataagagagagagagtataaatactcataacaataatagttaccatagatacttacataacatgattataactgtgtagagcttatttaatgagaaccaagactaatatgattaagatatataatatattgtataaaataacactatctatttagctttgatatatctat

SEQ ID NO: 274771 - DNA, 411 bp, Glycine max
  unsure (1)..(411): unsure at all n locations
aagtagctatatggtcatgaatgctatcatgactgtcgaaactagattacaagttttgcaaactttgttgtacgatagaattaattattgattttaaatttacattgttttctatagaaatcataaaatagaaatgtctctctgctatcactattttacggctgagtgcataatatattagcatctaagggaatgactacgatgacgggtagcctgtgacttgtgtatttagatgcacttgcatagggtattgattaaaataacagaaagaggtacaaagcacacacgcatcaaacttaccataatgttatactatgatttcagcaatgaatatatttcatgttccaacttacacaagtatttcattgcgactcataagcanaaataattaatttcacattaattaacaat

SEQ ID NO: 274772 - DNA, 399 bp, Glycine max
  unsure (1)..(399): unsure at all n locations
cgtttaagagattcaggatcattaagatttattcattcttttggtctaattcaaattcttcagagattgtatctgtcatcaaacataggttggcatcttcttcatcttcatcagacgaggtgtcgtccagatcctcccaggtgctcatgaggcccttcttttccttggacttgtattacttcttcttgtcttaagacttcttcagttctaggcattcatatttgaagtgtatatgttccttgcattcataccatattatggagcttttgtctttgtctttcatttccttgaacacccttttggaggagatcttccatctagatctgcctttgntcttccacatcttgcgaatctttcgtgagatgaaggcgagttcatcttcatcagattcttcctcag

SEQ ID NO: 274773 - DNA, 451 bp, Glycine max
agcttgttgacacccggagtattacgtcatcttccgcgcagacaaattctgtcatactgacactggagtcacgtgacatgcgaagataccccagtggttatccgtaaaaactttcttttgctatctctaagactcaaagcatgatagccagctgagtgggtaaacgcgcacaaacaaattctacgccctttatcattcaagcacagtaacctgagtgggtaaacgtgcagaaacagattctgcgccctttatcattcacgaacaatgagctgagtgggtaaatatgcataaacagattctacaccctttatcatttaggaacaacaagctgagtgggtgaacgcctagaaacagattctgcgccctttatcattcaagcacagcaacctaagtgggtaaacgcgcacaaacagattatgcgccctttatcatttcggaacaacaagctgag

SEQ ID NO: 274774 - DNA, 439 bp, Glycine max
ctatgaattctacacaaatcactcctcacacatatactaattctcatgcaccttttacattcaaaactggaaacttagattcctaggcatgagtcatccttctggcactttagtctagcttctacaaactacccacacactcacaatgcacacaatttatttctcaagctaagttacacaaaatcatgcgcaaacgccattgaggcatttcaacgaacacttggtgggcgcatgtttaagcatgaaaatcatgggaacggtggcaatgtggcatgcccccattatctcagaatgcaccctaagcctaaggccatcccctacaacccctcaattcaacaaatacaagcaataatttgaggataaatccctcacattttgagctaacacatgcaacttagagcaccaaaatatatcaatggaaagccaaagagcccaagaa

SEQ ID NO: 274775 - DNA, 401 bp, Glycine max
  unsure (1)..(401): unsure at all n locations
agcttgtgagagtgcaagctctaactacaggcatacgatgaggggagaagttttctttacaactcccccccactctataaaatttcttccccaaaatttcatgaattgggtgggagagttgcaaggtactatgctaatgcatctaagnttcttcgcttttgttcttatttggcttccttggtggcatcttctccttcttgattttgtgacctttactcattttcacttgatctcatatggattctggtagactttgaactattatatatgcgttggcccttcttagaaacatgtcttagaaatttttattctttttcatgtgacttataacaagaaacgagactattttggtatggtttgagagtatatggagtgtttctttcttcttcaatgaaatccat

SEQ ID NO: 274776 - DNA, 431 bp, Glycine max
caatacaaagctaggcttgtcaactacttgcaggggcatctggtgtattcgttccattctgtgtgatgtctcacattatgggaggcactgccatcttgtagagctctaagtgaaatgcttgaggtatagaagccacctaagcgaccgtgcgactatgatcactatacccatttaacagataccatctctaagccattctttgaaaatgtgcctccacatgtctacatattcaagagcatcacctcattccaaaatattcatgcctaatctttgtatcaatgatatcactatcaccaatgaatgtctggtgaaggatccctagtacttttgtagtcgagcatgtgttgagaaattcatcttgatgaactgagcgtaagttacaataccattctttaagtgtgacaatcattcagcagcataactcttcaatg

SEQ ID NO: 274777 - DNA, 353 bp, Glycine max
  unsure (1)..(353): unsure at all n locations
agcttgtggtgaatgcgtcaataaatatcacactatattcactgtctctacctaacacgcattggaaaggccaacattcaacctcagacaccgagctctntcaataaggaacctattcatcctctctgtaacaccataatgtngaagctctatgatctgtttattgatgcacactctatacaaaggggcttctaaatcaaaattataacatctgttatacttttgtcatgcaaatctaattgaaatcgtccttaaatgtatattaagatttttacaaacatgcttgtggatgtaacaccttaaaaggagttgcttcccaaaaaatattaccatcaaaaaagattggtgactat

SEQ ID NO: 274778 - DNA, 423 bp, Glycine max
  unsure (1)..(423): unsure at all n locations
agcttatgcacggaaaaagttattatgaaattgagatgcccgaagaaacaccatttcctagttaaccatgcattacgtaccatgttcaattattntgttttttaagtgaaacgggtttatgatcccaacatggttggctcgtggtgcctaacacatgaaactaagaatgtagtgtgaagtttcacgcttcccccttttttgtttttgttttgtagaggaaaacgcaaggatgagcaaacatgaaaacaaatggtatgcaattttgcagatcaaaaagcttgttgaacgcatatgcatgatgatgccatgactcatgcaaaatgtgaggctggaatatgataacggacaaatgcacgatatgtccattatgatgttatgaagagatgcttatgcgatgcatgacatgaatgcattttacggaca

SEQ ID NO: 274779 - DNA, 431 bp, Glycine max
taagtatgcccgagtcattcatccctatgagatgttgttttagtattggcgatcagaattgccattccttggattatagggttgaaccgagctcatgcttttacaaaaaggttcatcaagtcaagttgaaatatggaagtaaccgtcttgcaaaattggggcaaaagatgaatcgagtcacatcactgcttcgtctactgccaaacatatttaggattgttgatgtccttgttacttccagtttcaccttgacaaagatgtcatggatcatgttgaaaatctaaattgattcaaccccatatcctgcgtaaaaattcgcaatacttcaactgtacatcattcacatacatccatgcttttcattggttgcattgctcattgcattctttccttgaaaaataaaataaaataaaataaaatgaacttaatca

SEQ ID NO: 274780 - DNA, 67 bp, Glycine max
aggtgtcctttgaatgcttttccttttatcgtggctcagagacgggggctgctcttcactatccccg

SEQ ID NO: 274781 - DNA, 425 bp, Glycine max
  unsure (1)..(425): unsure at all n locations
agcttctcccccaattttctataaatagggggagaagtgaagtagaaaagggttcagccccttaggcacttctctctctttcgaatttgcttaggaaaattgtttccgtgaagaaaatccaagcccgggcgctttcgtaacgtttccataacgttttcgtgagtgatttcgcgaaggtttttgaccgttcttcgacgttcttcattcgttcttcatcgttcttcagtcttcaacgggtaagtacctcacaccaaacttttcaattcattctatgtacccgtggtggtccacatttggtttcatgtatttntattctcgtttcatttactttttataccccctttgacgtgcttaagccacttattaagtcatttctcgctaacctaaaaataaataaaatccaccgatggttgaattgtatcatc

SEQ ID NO: 274782 - DNA, 432 bp, Glycine max
cttcattctccacttttattcggagccccatgaattcatagccaagcgctgttcatgcatcctccaccaacgagtcaggaggctcgcgaattgattgccaagcgctgttcgccagttctccattctccactttaattctgagccccatgaatttattgcctagcgcttttcatgtgtcctccaccttcgagtctggagccccgcgaattgattgcctggcgctgttcgccaattctccattctccacttttattctgagccccatgaatacattgcctaggactgttcatgcatcctccaccaacgagtctggaggcctcgcgaattgatgcctagcgctgttccccagttctccattctccacttttattcggagccccatgaatatattgcctagcgctgttcatgtgtcctccaccttcgagtctggag

SEQ ID NO: 274783 - DNA, 403 bp, Glycine max
agcttgtactttcaatgttctttcatatctagagttagacctttacatgaactgtgacagttttgtactttcgataatgttcattcaattatagaattgtctaccattttcaatgtgctccaaagaaagaaattattatatacctaagctaaggaccttctattggtgtcatgaacattttttttttaaatgaattacgaagtttttttttggttacaatcaatcaccatttggataatgtctcctacaaacaatcaaacatgcgcagcttcttaaagtctcttctaataaatgctgcctgtaaataaatagtacttatgacacaagaaaacaacaaaaaagttgcatttcaaacctgcactagctaaaaagcaaacactgtatcttcagtatgggcaatatc

SEQ ID NO: 274784 - DNA, 220 bp, Glycine max
ttacttacataacacacatatgcttggctcaattcacatacatgcatactaaagacgaattgaggcacctcacagcgcccatgagcgcctaacagaattacgaatgccgatgcacacgcgaacttcatgatgaatcttgactatatacacaagaacgtgctacatttcatgctcgattctaaccatatgctgcctaaaaacgcacgctacttcaaccgta

SEQ ID NO: 274785 - DNA, 462 bp, Glycine max
  unsure (1)..(462): unsure at all n locations
agcttcaacttctctcacataactctccttagtcaaactcttcttttatttaatgtttaggggttggtttacaaccctcatgttccattatataacatacaccatatagaatcaataatggacataacaatatacataatagtttttcatagaggtcttagccttcacaatacaaacatagaatatgtcatacaacatccatattagaatcattgatttcatctcattatgacactaagatcatcagctaacatcatgatattcattggactcatacaccactccttagaatcatacaaataaagaaattatttctattccatcaaccacacatacaatatatcatattaccacacaaaagaatcataagaataattcatagctctactacacgtcatacgttatagagccatgtacttcaagtaataaataatcatggaccacttnacccataattatcat

SEQ ID NO: 274786 - DNA, 583 bp, Glycine max
  unsure (1)..(583): unsure at all n locations
tccttcctcccnnnnncacgctgcggggnntttgattaccattgctatatacagtgacacganntagaatacgtctagctttcaagagtgagaggtgcnccgtctaagcagtagcagaactgcttgcacacacgactggttatgatcatatataggcgtatctgtacacggtgcgtcactagtngatcacatgcgtatagacatctctctgtgtgtgagactagttatgactacacccatttgtaccctacagtttatgcttaggtgaatctgtccatgactgtaactacatgaatgacattctatatattctggtcacatgctcgggcgtgcatctatgattaacgatgagctgaagcctaatgtaattagttcatacactgaggcctttagagaacttgaagacacgtgagagtggctcctatcgtatcatgaccagctgctagaaaataaacatactgacatgcgtagctggattgtgctgtgctatactattagagacccatgctctgatgttcggtgactcttggatgaagtggatacagaactgcttatacgcctgtgtgaaccacgtacctacttn

SEQ ID NO: 274787 - DNA, 358 bp, Glycine max
agcttgcttgtggggcttctatggaggctggatctttgagcttcaatggggtcctttaatggtgattttccaccatatggagatgtagcggaagacaaaggaaaagaggtgagaggaagcgccctccgttaacgaataagccatggaagaacgagcttcaccaccaagatgagccttggataaaaagcttggaaaggatgcttcaatggaggaaaagaaagagggagagaaagagagaggggggagcacgacattgaaggaagaaaaagggagagaagttgaactttgagttgtgtctcacaagactctcattcatcaaagttacaacaagtgttacacatgcttctatttatagact

SEQ ID NO: 274788 - DNA, 439 bp, Glycine max
  unsure (1)..(439): unsure at all n locations
ntgcanaaaatgccactctactcgaaatttttgaaagatatgttgttaatgaaaaacagatacatccaccaggagaatattgttgcggaaggcaactgcagtgctgtaatacagagaattcttccaccaaaacataaagaccctggaagtgttactattccttgttcaatcggtgaagtcactgtgggaaaggctctcattgatttgggagcaagtatcaacctaatgccgctctccatgtgcagaaggttgggagagttggaaatcatgcccacacgaatgactntactacttgctgaccgatccatcacaagacctcacggngtaattaaggatgttctgataagagtgaaactacggtctttccagctgattttgtggtcatggatgtggaggaagaccatgangttctagtcatttttggacatccctttatgtc

SEQ ID NO: 274789 - DNA, 547 bp, Glycine max
  unsure (1)..(547): unsure at all n locations
acggctggcgcacgtttgacancnatcttttgancnccnatctcatacacgccgatcctttacagtctacctgtctgcatgcaagcttgtgtcaatgtcgggtggaacntccatgctgtatgatcggtggaacgggttcgaggtggctaataagagtggtccacaaaccgggtgcgaataaagtgaccgtgactgttaaacctaagccttgaagaagtcattgacattgaagctagtccagataataacgacgtcctgaatgacaacaagaatgaacgagatgcccacttcacgaagaaatcacaccacacttttacttcagtgctcactgctagaagcacggtagataagagataacaagactgtaatgacagataacgactcagacaaagaacactcctttgtgttttttttgaagtctgaaccggtaccatgtcgcaccatcacttgcatgatattatctattcctccttgcgttgtctattcgccggcggcatgtggcatatcttacaacctacagggcacacactgacattgtgctttgagc

SEQ ID NO: 274790 - DNA, 380 bp, Glycine max
  unsure (1)..(380): unsure at all n locations
aaatatactcacaatatttcttatccaagaccatatacttgcgacggatataattactgtgagtagtaaaactcttcctttaatctttaatgcaattgtatatctagaacgtaaatntgaaattattgattagttctgaagaattccatgcaccccgttattagtgtgtttgtgctcagtgatactgcaaaactttattaattatgctcatactagttggatgtttgagaccatctacaataccaaagaagaaatatactgctaatcttgcatgggaatcgaagttatggcaaaacgtggcgtcgcgtggtgcgactgtatctaacatattatcctccatattggccacttaattgacacatgatggagacagaaccatg

SEQ ID NO: 274791 - DNA, 434 bp, Glycine max
agcttaacatttaccatggatactactagtaagtagtaacctgacaaaaatgaataatatcaagagaatgtccagaaagcagtgttctaaaaaatggtacttacccagtaaaactgcactaacactaagtgtgagtgtaagtatgaaaatgatcacagatgctctccccagtatggcaatagcctttctcaccaaatgctgtccaacaagtgcagcagcagtggctatagctacgaagtaaagagctgcaagataatatccaaagttgaacattaaagttccatatgataatagctagcagcaagttatggcttccttaacctattaattagtccatctatatcctctattatattatgcatatgctctaggagcggaggagcattgtaaaattactcatcctctcagacaatgccattaccaaagtggacata

SEQ ID NO: 274792 - DNA, 395 bp, Glycine max
  unsure (1)..(395): unsure at all n locations
gacatgattagcaatcaagtataatgttacttccttcactaaagcggggatccatctccacacatattttatcaatagcaacataaaaaatctctgcacggtaatgatgaagattagtgatagtcctcccttctgctcttgaacgaccccgaactggtatttcgtcatccatatttggtaccagaatacttttagcaacacaaaatccttggacatcggcaaaaaaattattccagccactctctctcattgtgcccaaccgagctntgacaacatcaactaattccatgacattcacaatattaagatcttttctttgcaatatattngaaagctcatttgtttcctatgacctggatcacgcacaatctcatttgggtaaactcataaccaca

SEQ ID NO: 274793 - DNA, 256 bp, Glycine max
atgtttatatgttgaaattgcttatggaaaactgttagagatgaatggtagagtttaacctacggttagaaagtgagaatgtgatgttatgagtggaaaaagaatgaggctctgagagttggaaggttaagtctgaattctgtggtaaatggaggttaaagtgagttaatcctaccttgaaatgtcatttacgacttatgagaaagcttggactgtgctaaagagaaaaacaaagatgtgaaattgtacgaattga

SEQ ID NO: 274794 - DNA, 447 bp, Glycine max
  unsure (1)..(447): unsure at all n locations
ctgaatgctctattcaatggagttgacaagaatatcttcatacttatcaacacatgcacagtggccaaggatgcatgggagatcctgaaaaccactcatgaaggaacctccaaagtgaagatgtccagattgcaactattggctacaaaattcgaaaatctgaagatgaaggaggaagagtgtattcatgacttccacatgaacattcttgaaattgccaatgcttgcactgccttgggagaaagaatgacagacgaaaagctggtgagaaagatcctcagatctttgcctaagagatttgacatgaaagtcactgcaatagaggaggcccaagacatttgcaatatgagagtggatgaactcattggttcccttcaaacctttgagctangactctncgatagggctgaaaagaagagcaagaatctggcgttcgtgtccaatgat

SEQ ID NO: 274795 - DNA, 395 bp, Glycine max
atgcagctttgatctcctaaatttaatacgacttcatctatatccttgtatacaactcatctccaataataatataatttatagctgcatactctatcttttgatccacatcataattacgatcttgaaagatatatactaaaggctttctcttatcaagagttgttaacacatttatattcaaaatttctactttctcatgtgatttttctttaatagtaatcaacgattcacaattctgtttacttaacttataacccgaagcaatttaagccaaaacattaacttctttggtttgttctcgaaacacatgctcaaactcaacttcattcaaattacttaacaacttggatgcacatgagaatttatttagcaaattatttttaatgcactta

SEQ ID NO: 274796 - DNA, 286 bp, Glycine max
cagtgctatctacatcacatgtcatgcctgatatggtcgtgacggggtccttcatgatacggagggatattgggcataagacatattgatgaatctcacttgcatccatgtgcaaataaatggacacccaataaaggagcactcactactagaaaaagtcttgtgtatgacagagaaacgacaacggctcatcaaaaaccgtcttagtatataacgcggtggcaatttcttaaatatggatctttcgacgaagacggttttatgaaaactgtcttagaaagctttc

SEQ ID NO: 274797 - DNA, 421 bp, Glycine max
agcttcaatagaattagggacctgcaactgatcaaaaccacctattgaccaaaacatggtcgcttaaggcatatcttcaaccacatcaaggcatcttggacactaggcatccacctcaatccctcggtgagagattacacccttgattgggagagcaagatgaaacacttgccatatgaaaaattgaatgttagcatgaaaatgtaattttcatatccagccccaagagcttgtagccccaatctccctcgtttaaccatgacaccatttgtatgtgttccttggtgtgtactctaccaacatatcattcccccaaacccaaagatcattgaccccctacacaaaagtaagtgagtttaccatgatagctcgagctatatcagagggaagcatagtgtacaatttgaccacgattcaccca

SEQ ID NO: 274798 - DNA, 456 bp, Glycine max
  unsure (1)..(456): unsure at all n locations
ctcaagcattgaatgctctattcagtggagttgacaagaatatcttgatactgatcaacacatgcacagcggccaaagatgcatgggagatcctgaaaaccactcatgaaggaacctccaaagtgaagatgtccacattgcaactattggctacaaaattcgaaaatctgaagatgaaagaggaagagtgtattcatgacttccacatgaacattcttgaaattgccaatgctcgcactgccttgggagaaagaatgacagatgaaaagctggtgagaaagatcctcagatccttgcctaagagatttgacatgaaagtcactgcagtagaggaggcccaagacatttgcaacatgagagtggatgaactcatnggttcccttcaaacctttgagctaggactctcggatagggctgaaaagaagagcaagaacttggcgttcgtgttcaatgatg

SEQ ID NO: 274799 - DNA, 390 bp, Glycine max
  unsure (1)..(390): unsure at all n locations
gcagcttagttgccttatgtcaaaacaattctgatagtaaataaaaagtattttactttgggaattaatattcttaattaccaaattagtttaaaatcttaaacttaagatcattgatgattaagttaaaataatcatttgtcagttgattcaagtgatcgataagtgtttagttgcctttaaacattactagttggttaagtttagccataagctcccctttaaaaaaaattgcgtgcttgaatagaagattccagaaattacgttgggacgggtgaatggaattcccatagtccccaactcttatttntcctaaggtaaagagcaatgtaccgcacaagttgagcatgcttactatcctcagtttttttagataaacgttttatggac

SEQ ID NO: 274800 - DNA, 429 bp, Glycine max
ctgctgggctgatgacaacattaattgtattattttaggcacaccctcccattacgcgaatggcactctcacgtgatacttggataaccgtaatatgcacaaaaacgagagattggtggctacgggtaattaaacagttctttaaaagcaaagcaggctgataattcacaattcagaataatataacattctgcacgctcaagagctaatatgaaaatggaattcaaatgcatgtcgctgatggggatcttcctattgttgcttcacatgggtaagcaatgcagtactcttgcaatatctaacatccactttatgtgtataccaagtctcatgttatgctgatatggcagaatggatgatgaattatataaatcacttgatccaagggttcgtgtggtcatcttataagcattatgtgacattcctgtt

SEQ ID NO: 274801 - DNA, 427 bp, Glycine max
  unsure (1)..(427): unsure at all n locations
aactctttcttttgtttagtcaaaacttctaatgctcttaatctctcctcgtctaaatcaactaactcatctgacatcattttccaataatggtcgattggaatgtccatttgtttttgtactctggctgattgcaaatgtatttcgaccggaagtacagcatcgtgcccataagtcagtcgaaatggggtagtattagttgattccttaggagaatttctacatgcccatagaacttgatctaacgttttattccaatttcttggcttttgggcaatgtgttttttaatcaagttaattacaatcttattggctgcttcgacctgaccacttgcttgcgcgtaatatggtgttgaggttaataatcgaaagccagttttttgggcaaattctttcattnttcgtccagtaaaaactgaaccttgat

SEQ ID NO: 274802 - DNA, 478 bp, Glycine max
  unsure (1)..(478): unsure at all n locations
tcatcttcaattcaagaaggaagtgataaagaagatctgaatgaagatctataaaatgaagttgtgaatctgagtctgatgggtagaaattatgaaagcgatgaagaggtaacatcttctgacaataacttatctatttcctttgatgactacaagatgcattcactaatttacataaagaatcagttaaacttgcaaaactagttttattttctaagaaaactatttcaaacttagaaatggaagttntaaaattaaatgaagaattagaaaatcttagaactgaagtcaaaactttaaaatcaattgacacaaatcaatcttccaccataaaagtaatacaggatagtaaagaagcatctaactcttgtaattgttgtagcaagtttatagaagaaatcaaggatctgaataattctctggcgaaattntctattggaaaaaataatttagatattatattacgaaaacaaagatg

SEQ ID NO: 274803 - DNA, 464 bp, Glycine max
  unsure (1)..(464): unsure at all n locations
agcttagcttggtgactcgtaagtaagaactctttactatggaagatggtgaagatatacaagtcatgtttggatgctctcaaactatttntaatgaattatgttgtcttaacaaaacttttgataactatgataacattgacaaaattctaagaagtttatccaggaagtaaagaccacaggtgataaccttaagaactgtgaagaacatggactccatgtccattgaagagcttatnggatccttacaggttcatgagaaaaaacttcaacaagatgaacgattcaaaaaaggaaaattcttatctctaatagcacanaaagtcgaagcatcttcaacatgcaaggaatctttatccaaagcaacgtccaaaagctcatccanagtngtcaacattgatacaccttctgatgatgactccaataattaaggttcagataaagatgatcagttagatttcaac

SEQ ID NO: 274804 - DNA, 446 bp, Glycine max
  unsure (1)..(446): unsure at all n locations
tctaagcttatcttttcttgttaattattatatnttgtttctaagccttgtattttgctatgtttctatgacatttgaacacttagtatttcttttattatttgattagtatgactgaacatgatgattatatttacttgctcttgcttgtttatgattatgtgttttaaacttaattactttaatgatatatggctagtggtatgtactgacattnggtattgggttttatgtatattttttttaattattcatatgttttatttgaatattgtggatgattttctagtttgtttgatgttatgaatgaagtattgtctttctaagtttgatgaatggttaagttatcttggttgattgttctctattattntgtattgatctattcatgtttcttgcttcatgattgttntatattcttcaatgtatgcattgtgaatgaatat

SEQ ID NO: 274805 - DNA, 394 bp, Glycine max
  unsure (1)..(394): unsure at all n locations
agcttgtagggttaaagtctcacgattgtcacgtgttgatgcaacaattgttagccatggctntgcgagacatcttgcccaacaaagtcaggttaaccataactcaactgtgctttttctttcatgccatatgtagcaaagtccttgatcctgtcaagtttgatgagctggaaaataatgccacaattatactgtgccagttggagatataatttcgccctgctttctttgacatcatgactcacttgattgtgcatctggtcaaagaaatcgaatgtcgtggtcttggttatttgcggtggatgtacccgcgtgagtgatacatgaagatcttaaaagggtatacaaagaatctatatcgtctagaagcatctattgttgagaggtacattgc

SEQ ID NO: 274806 - DNA, 260 bp, Glycine max
gccaagcttacttgtgattattgtatcaacaactctccatccatatagagcgcccccatcttgtgacaatacatcttgagatggttcttaggacaagatcgcccctttatactcgtcaaaatcatgcactttgaattttgcggggactactacatcctagtccaagcaaacatatgttatgtgcacgaacggatagtcaccatagccttcaacagccctccatctcgcttagaggatatcgaggttgcttctttcttcag

SEQ ID NO: 274807 - DNA, 360 bp, Glycine max
  unsure (1)..(360): unsure at all n locations
agctntaagcaaattcaaatgacaataacttttgactcggatgtccgattgagtcattttataatttgagacgctcaaaattgaatgcaggagctcttaccaaattcaaatgccaataactttttactcggatgtccgattgagtcccgtaatatatctagatgctcaaaattgaaaacagaagctctgagcaaattcaaacgacaatagcttttgactcggatatccgattgagtcatttaataattcgagacgctcaaaattgaatacagaatctctaagcaaattcaaatgacaataacttttgaatcgtatgtccgattgagtcattttaataattgagacgctcaaaattgaatg

SEQ ID NO: 274808 - DNA, 385 bp, Glycine max
atgtgttatcagatttgagcgtctagatatattacgggacacattttgacattcgagtcaaaagttattgtcatgtaaatatggtgagagcctctgtatgcaatttcgagcgtcaagaatcatgaaatgactcaatcggacatacgaggtaaaagttattgtcgttggaattcgcttagagttactattcgtaatttcgtgcgtctcgatatactacaagactcaatcggactctcctgtaaagagttatggtcatttgaatacgcgagagctggtatattcaagtctcagcgtgactgaattattatgggagtgaattcgacatccgagtcaaagtctattatcgtttgaatttgctgagagctggtgtattcaatttccagcg

SEQ ID NO: 274809 - DNA, 392 bp, Glycine max
agcttgaaggcaaactggatgcattggttaacttggtaacccagctggccttgaatcataaatctgtacctgtcgcaagggtttgtggtttgtgctactttgctgaccaccatacagacctttgccctttcatgcagcaacctggagcaattgagcagcctgaagcttatgctacaaatatttacaatagaccttctcaacctcagcagtgaaatcaaccacaacagaacaattatgacctttccagcaacagatacaaccctggatggaggaatcaccctaacctcagatggtccagccctcagcaacaacagcagtctgctcctttcttccaaaatgctgctggcccaagcagaccatacattccttcaccaatccaacaacagcaacaa

SEQ ID NO: 274810 - DNA, 430 bp, Glycine max
gacacttagagactaagcttgttcagactatatatgttactgcaaatgttctcacatatgatctatcatttctgtagcgattaccgaggtggcttgatttcatggctgcgttcgtgatatgccgacccatatgctaactggaacagcattgtaggaaaaggtaatttgtgacgccttatctgaagcttacagtgaaatacttatgtgcgctaaatggcacttgtgaaataaacttgtctattgagagcaggctagagttgatcaactggccgatggagagagagcatatcacatattggatcaactttgtgctggatcttcttctgatcttacaggtatatattgtaagctatcaacatgttttgatacatgtacactctcatatcaagcgttctgtgtatggcctatatggcatctatgtgtgagttag

SEQ ID NO: 274811 - DNA, 400 bp, Glycine max
agcttgaaccaaaaccggtgagagtgtgaacttaaactgtgagtgaacgactagctgtgagtaataatctctgcatcaatctctaaattttacaatgaaatgtataaatgaggacatgatgaaggccattattgtgcatacacaagcctgttgaccaaaaagcttaccttgaattataattgtatcatttgcaccctttatgagctgaatgattttgtcaataattgaaccctgaacctgaatgattatcttcagataccttgtttagattctacgagagcatatggttcaaggaaaatttaccccaaatttggcggagtagaactaattgggatgcaaagaaagagatcaagcatcagcacacacaacacataagttgtgtgtaaaaaaaatagaggaa

SEQ ID NO: 274812 - DNA, 424 bp, Glycine max
  unsure (1)..(424): unsure at all n locations
taaaacatacttagacacttcctgagcatgtacgagcagttatgcaagtgggatcagcaacttccattatcagagtaatcgagcacagcggaatctgtagtttagacaagttgcaagtcgtttccaggatgtcaagacatctcacatgacatctgctttctgcttctgctccccctgtctccatgcttactgcagcatcttctaacagctactagtcttctccaggatgtcaagacatctcctgtgacatcagctatctgctccccctgtctccatgctcttactgcagcatcttctagtagctatcatcagtcatcatcagcagcagcagtctccctctcanaatcgtatacacacaactcccncttcaaatcatgaatcatgcatacatcgtatcctactactatggcatacatagtatctt

SEQ ID NO: 274813 - DNA, 321 bp, Glycine max
aatccatataatgtgcacaccactggacatgcccaatagtaccatctccaccacaaggggatgctgtgttgaaaatggaatataacaagtaacataaataaatatacatacattgaaatcatgcatgtaatgtgggcgcaacaacttacaggtcttactacaataaatcctgagaacagattccaaattgcataaaatacagcatccacaatggaaacaacatggtggtttgggttcactcccacaaccatcatgctgtataaggtgaagtacaacaatgtgaagtacatgaaaaatagataccaaaagaatttctgtaca

SEQ ID NO: 274814 - DNA, 239 bp, Glycine max
ttataactttttaagaaatgtttagacaacgcttatcattttattttatttgacaaaatttattagacatgttttttataccagtatccgacctgtatatcataagtcgtgaattaaaccacccaccctatattagacacgtagtaaataagtagctaaatcttcactctttacttaaatcaacatagtctagtttccacaccatccaatttgtgtacctgtgcattctactaatatat

SEQ ID NO: 274815 - DNA, 467 bp, Glycine max
  unsure (1)..(467): unsure at all n locations
taattgcttctgctctttaacagttatcccaagtaccatattcaggcattgtaacttgtatccgcaagtgaattggatgcagattgtgtattgtggttaagtctgtcaactagtcacaggtttttattcaatcaaatagagctggagtctcttgatgttcatgtaggccaatcctacttagttcttgtcacaacaaaccaaaatattgctgattactacatagtagcctctcctaaactgagtaatgccacaaataataacactcttgttggtgttgttgtgcttcattatgacaactctaccacaccggctattgggtctcttccaagtggtccagatccatttgatatgcaattctccatcaaccaagaaaaatccattangtaattgcatttcacaaaatggtgctctgtatgccaaagaagagtttttccaatattctttctttgcttgcttaatgtcaacat

SEQ ID NO: 274816 - DNA, 281 bp, Glycine max
tctattgtcagattgagaatgccgctacccgcacctgtgtccatgattgtcttcatgcctcttacgtgctgatgtccaaatctacgatgccgtattctgactttatcttatccttgaaattgacctgtggaggacgtgctggcttcttgatgtgaccataagatacagttgttcttcgatctggtgcccttcattaagactacactctgctcctttgtcacccaacatactcactctgggaagagtacagtgaatgcttgataagacaactgactgatgct

SEQ ID NO: 274817 - DNA, 382 bp, Glycine max
tcagaagctgcatttccgatcagcttctcttattgaagaaagatatgcacttcttgccttggaaatttgctttatcgcggtgccactgtttgcattgcgttcctttcacgttaacaagatgtttttcactttcaccatcgactttgtcatatcagccataattttcttttctttcttagtcaatcgcccaacgtatggatgtgcaactaaggacttcgccaattcatgagtgtgaattccacagatcaacttcaccatccaaccttcccctccatgcactggtgtttcacgaagcctgaagggacaaccacatttcctactcccgggttttttttgtaacgaattctttatttcaacacacgtacgtaccactcctttcaca

SEQ ID NO: 274818 - DNA, 473 bp, Glycine max
  unsure (1)..(473): unsure at all n locations
cgcgcgcactgaccttcttgacccttttaacctctcgaccggaacttaagtaccgagctgcacttatccaatactttatcaacgattttcctctgatgacccttcttagtaccgcatgatgcatctgcatacggttagaatggaacacgtattcttaacaatatgttacacgttattaaaccccgttatggacaccaacacattgtggttgattgttggaacttcaacgttgtcggccaagttcaccacttctcccactggcaccactatcttcttgatattctccacgtccatacatgtaatgcgaatccccagcacatggaatgtcccttggctgttatttatccaatccatgttacatacagtaatatctaatccttaattgtcggatataatcagcccaatcatacataaaatctacttcgaactaaatcataacgtaataagaacaatctatgtaatatgaacatctn

SEQ ID NO: 274819 - DNA, 410 bp, Glycine max
atgataccgagaaagaaagactaatttacttcatgaaaggtagaaatagaatgctagtgaaccggctgacaaacaaaccaaattttattgacaatgcgtaaccatgctctcttccaactaaatttgcaagagcaccagtgacaaagctctcaatgaatgatatagctattgctagaattaatgtctcatgtgagagatatgtgacttatgtaaggactaataaataaataattaacgattaagggctaaattgtaattgggcttaataggagaagcttctaggttaactgctacttgatgggagtagtggttataaaatgggcttaatacccactaacgtgaaataaggtcctcttcctgaccagaaagtgttctctctcactcatagccatcacgaacagagagagaca

SEQ ID NO: 274820 - DNA, 288 bp, Glycine max
tacatgatgcgcctaaacaggacatctcgtttattggttatgacaatttgaattgctctagagattccattgttcaatttcgagcgtctcgatatattatgaatttgaatctgaccgtccgagttcaaagttatgaccatgtgaatttcctgagagcttccgttgttcaatgtcgagcgtatggatatatgattcgccagagtctgcactccgagtgataagttatgaccatgtgaatctctccagagatttcgatgttcaatttcgagcgtctcgatatattatgcg

SEQ ID NO: 274821 - DNA, 442 bp, Glycine max
  unsure (1)..(442): unsure at all n locations
agcttcttcttncaagacttattcnctagtggatggcgcctcctctccctttttcntctttatcttctgctacaactctatggctgaaaatcaccattgaaggaccttagtgaagctcaaagatccagcctcagtagaagcttctcaagcaagcttccatcacgaatgtgaagtgatacttacaagaagcaaaattacagagggccttgttggtgatgagttaatggagggtgtagtagaagatgtaagtgatgataaggaaggtgtacgagagcgagaagtggctaagaataaagagaaaaaaaaatgagtgttgaaaatgtagaacaaaaaaatgagaaaagcacagaataagagaaatagttttaaggagagagttgatgacgtcttatcttttaagacctagagtcaaataacgagagaagcanagaagggaacacct

SEQ ID NO: 274822 - DNA, 465 bp, Glycine max
  unsure (1)..(465): unsure at all n locations
caatactgatatgtgatggaagttgagaatgacctttgatcactttaaaaggtgtacgagaagtgtggactgacatgagaaatattggaaaagcattgaccatgaattagaaaaggcaaganagaatattgacaggctagatagaataagcaatcgataacaattgttatagttaacttatattgttcatcaattctaaacttcatatggatttaaaaacttggcatcattaaatcttgaaaaacaaacaaacatttaatcagattaatatgtagctaatactatcattgaatgctataacataattgacattaatgttgtacctaatactattatacaatgttaatcaaaatgagcagtcctttcttagcctaacataaaaatgaagatggcacatctattttccttgtcaatgtgcccaccattatctatattaagaaatgaatagaagaactaatgaataca

SEQ ID NO: 274823 - DNA, 420 bp, Glycine max
catgcaagcttgtacatattgcccaatggataaaaaaataaaaaggaattttataaaatctcttacctttctatgggatacattcgttgatatgaacaagaactctaagctttaccttttccacgagatgaacaaccaaatgaaacatgacagtgaagaataaaggaggaaatatcatttccatgtggtataaagtgagaacaacttggatttgtaattagtctaaattcttaactttcaataatttaaccacatatttttttaaagaatgagcataactcaattaatactgttgaaacctcatctgacaatgtagatcacatggctaatggtagcacatgccataccaatatgtgacaattgtgactcttcaacgttccagtcaactttagattttctgagtcgatacaccaagaaatg

SEQ ID NO: 274824 - DNA, 341 bp, Glycine max
gaatagatccttgccctctgatcgctggcatgagagccgtggttctggccatgactctagaaaggagaataagaggtcatcaagatggcgtcctgaagataaagagaaggattctgcgtctgagataagacatgatgttgagaacgaagatggtcacactgaaaaaccttctcctggagttgggaatcgcatggtgcctgatcgtgacactgattctcgtgataaatggaggccgcgacatctattggaagctcaagctgctggtgtggccacataccgagctgcacctgtatttgggctgcagaaaggacgcaccgaatgctccaatgtgctgatttcac

SEQ ID NO: 274825 - DNA, 412 bp, Glycine max
  unsure (1)..(412): unsure at all n locations
accttgattaatgaattaataacgattaatttactattagcttaacattgaacatataacatcacacacacaccggtgttccaattttcgcataacaaaataacttatttgataattaaaatattgaatttaatttaattcaataaatattttagtctaatattattatattatttggtaaagagtattcattacttanatgtgctagttgtccacattataagaataaaattctattgacacttatcatgatcaaatcatatgattacgttgtgcnattaatcatgggattatttggaacatatctttgtcttatactaacaagtgtcttaaaataagaagatatgacgtatcttgaaatcaaatctctattttaaaaaactcaaatttatatctctctaacactataaat

SEQ ID NO: 274826 - DNA, 329 bp, Glycine max
tacttagctacattaccaacactaacaagtacgggcattctttctttgtgacatgtctatccggctcggacaatagataacagacatcacataccgaccgtcgatatttcttatgaatactccactgaccgcccagagtattctttttacctttgaaagagacccagagccttagcatctcattttattacttatgagactaaaatctaacactctattttctacatatgaaaagatattaccgtatgttttaagtcagactttcttatgttactatctaagcgatcattttttatttgcacttaatatccactatcaattgaattgtg

SEQ ID NO: 274827 - DNA, 425 bp, Glycine max
  unsure (1)..(425): unsure at all n locations
acaagtagggagaagcttttacccaacacggtctagtggtaatcataaccaacaaatgtgacctccatattctattctctactacatcatcacctgcatgcctcagaaagaaagcacgaaggtgcaatttccaatcttcctttnttctttctttttattttttctggtatcatttttgcacccttttacaaaacttctgttcttatttactctcccatgagtgccacagtttttaattaccttgtgaagcatataattacgtataataaattacaagtaataatattttattagaagaacatatatatactacccatgaaacatgcttagtattttagcttattgaaattatgaattggttgtagatatggattcatcttgtattgaccattgaattatcttctctccccttatccatcatcttc

SEQ ID NO: 274828 - DNA, 448 bp, Glycine max
  unsure (1)..(448): unsure at all n locations
ngacattattcagttagtggtgtttaagcaaatataatgaataagtgaaggaagtataattatgtttgccatcatttcattatattttcgaattgtggttgtgtttgtataattatataataatatcatttgttgtatattttataaacacgtgccttttaagccgacgcctatggttggtttttttatggatatcatcatattaacttttcatttttaagtttgattagttgtacgatgtggcatactttttaattattaaaaaagttagttattttatgagattgatgtagagagcaaatattttaatcccagggttgttattgttgtgagtgagaagacatatatcatcttatatataaattaatatttttaatattattaactgtttacatcatggtttaattagcacaaataattaaaataaaaatttgaattataacaactc

SEQ ID NO: 274829 - DNA, 379 bp, Glycine max
  unsure (1)..(379): unsure at all n locations
agctttagccaaactgtacaacttggcaataataccacaatggctgttgtgggaaaaggtataattcgtatgccagtgaatggatttattcacgcaatttctggtgtctattatgttcctgaacttaaaaataatctattgagcatagggcaacttcaagaaaaaagcttaactattttgattcaacatgggaagtgtagggtatatcattccgagaaaggattaattatgcagtcagatatgagtggaaatagaatgttttctgtgttggctaccatgataccaaaagcttcttcgtgtttccaaattgtatcagaaaatgaatctcatctttggcattgccggttnggtcacttangctataacggattgaggacac

SEQ ID NO: 274830 - DNA, 457 bp, Glycine max
ctcattgtcatttttgggtttctgtttattgctcgtctctctgtgttcttgtttgtgagttgccatatagggaattggaaaggaggattggtgccatcccttgaagaatttgagtcaagaagaaaggggaaaaccaccttaagagctattggactaagaagcactccaaattgagtgaatcgccaaagagagaacaacctccaaaattgagaaccttattgctatttcgtaattgacaatatacttactttcattgctttcaaattctgtaacaaacaggcctttcattggaagtaagataagagcctccaatagatgaccctacttgcatttgtgtgtgataatgttaggcaattttcccttaagattgtgagtgttttgctgggaacgttaaatgtggtcttccaaacactctgaagatgcacctagcttacattgtttgcttactttcatagtt

SEQ ID NO: 274831 - DNA, 451 bp, Glycine max
  unsure (1)..(451): unsure at all n locations
catgcaacttgccgatccaatttgtgaactgacattttttatcaaaattacataattataatacttaacagatgataagtaaaattaatcatatttttttcatttgtaaaaaattaaactcacatattaaagatnacaattttcaatacagcgttcaattaataaagttaaacccgttaatgataattaagtgtagatagaatgatttcatatatttattctgtcaaaaagtttttatgaatataaaaatctataacataaggattatgtttcacacaacttttttctctcttaagatgttttcatacttttttactacttaaaaatgatattactttttctattcaaacaaaattaatgaactccagaccactttttaacaaacttactccgacaattttgttttaattataatctattataacaataatatctcattatacatataatt

SEQ ID NO: 274832 - DNA, 413 bp, Glycine max
  unsure (1)..(413): unsure at all n locations
aaactgttcaccccaccgtgaagctgagcgatcacatcacatcacaattccacacaattacacatccaactatgtcccaaattgttctgtcctgtttgtctgttattctaggtggacaagatctttttccttaagagattctttttccttatagagatgagggtactttactcagtcagagtctatagagatgcaaccgcagaaccaagcaagagataaatttgttatccctgtaagacacttagcaaaagtgcccctctttttcatcatctattttgtcctcattcctttntgttttaaggggtgagacactgacataaggacaaattttgaaatctaggaacaaaacgataatagcgagatcaatgcacaactacttgtattggatactctttagcacctaagatctttta

SEQ ID NO: 274833 - DNA, 422 bp, Glycine max
  unsure (1)..(422): unsure at all n locations
agcttncagtaagacttccctaattacatcatatatcacatcagctctatcactagtgttctgcaaaagaaacacatggaaaatcacatgcataaaatgtccaaatcatacctgctggagcagcattgtcaccctcaggcctgggagcgggaatatgttcatccctggctgcacgtcttggtggatgaagaagtgctgctgctctctgcataccttgtgaaagccatcttataattggtgttaaagctccacgttggtatctgtcacacatctcaattaggaaaaactacagcttcattcaaacatatacagtaatgagttcagtaatattaactttactgcatggacttgatattgacacacatgcacactcatacaaaatctacatataaatacacatctatgtatataaagaattggac

SEQ ID NO: 274834 - DNA, 462 bp, Glycine max
tgaaatgacatattgttcaacagatactcagctagctgatatacttactaaggcaattaggcctgacagatttgtaaaactcataatagagttggtagttatatcttgtgatgatttggattaaggaggagtgttgagtttaatccaaatataagtaagggtattgttagtagtagttggttagagtgttagttttatactggtttctgttttctgttgtaacaattttttgataaaagcactatataaatgtgcatatgcgtaagtgcttataagaaaatatacacaagtttcattgaaatatattccctatttatatctgtgtgtgagtgtgcaaaggtttattctccaacaatttgtaccatgatggtcactggattcattggccctattatggattaccatttttggtaaaccttctaataatcatagttaatggcttggttttgtttctcgcattct

SEQ ID NO: 274835 - DNA, 427 bp, Glycine max
agctttaggagaaaccatattaactaaggtagtttctaaacaaaaatcaattgaggaagcttcgtcaagtatccccattgaaaaacctttattcaaactctttaaagttagtgagaaggctaaacgaaaaattagggaacttagaaaaactaaatccttaattgaaggcgtatgtgataaccatagtgaattacttaacaagattggtagtttacttaaagtcattccagatactccccaagcctcggaaaatacttccaaaatggtaacaagaagtacctacaaattaattaatgttataattgaagatagtgaccaaagctcacataacacaactgagataggatcagtgtcagaaatgaatataaatccaattaattccaaacactggagaacacccttcatcatatattatcaacgtccaact

SEQ ID NO: 274836 - DNA, 445 bp, Glycine max
cgtgtgttttagcgatactcaccacaattgtgtaacatattctccacatcaagttgatcatgtcctagaagatccagttgaacaacatcaaacacaaaatgttgagcaactttttgaacaacatcaaacacaagatgttgaacaacctgttgaacaacaaccaaaaggtgtggatgtaacattgagaagatcaactagaataaagaaacctgtaattcctagtgattatcatgtgtattcacaagagtctcaatatgactttggagttgaaaatgatcctgagtcatttttgcaagcaattaacagttgcgattctaagctatggtatgatgctatgaaagatgaattggaatctatggtaaataataaagtatgggatcttgtagagtttcctaatgggataaagcctattggatgtaaatgggttttcaaaaccaagaacgat

SEQ ID NO: 274837 - DNA, 349 bp, Glycine max
  unsure (1)..(349): unsure at all n locations
agacttgatctaccaccaccgtcgccatcatcatcttagttntctattattcttaatattactagtactttgttttctagccgagtatttggctatattatgacatttgaacaatttagtgatgcaatcctccctaggaagggaccaatcactagaaccatgagcaagaggcttcaagaagattgggctaaagctgctgaagaacgccctacggttctcatgaaccttacgataaatntctgagcccatgggccaatgttgggtccaattatctttgtacatattagactacgatgtcattatatttggtccttgtatttagggctccatatcgtacgtagggtaccct

SEQ ID NO: 274838 - DNA, 465 bp, Glycine max
  unsure (1)..(465): unsure at all n locations
ttagatcanaatcttacttagatatgaaaggtgataatgctgaagttcagattaaacaggaccagatcttatgctaatgttcgatgaccaataatttcaagccatggagagcctacttcagttcctcctaaatgtaatcttacttgtgtcaacagaatttggtaagtagcaatagattcttgaactgatatccaatccaattagacttcataacttaaaatatgaagaataaaaccatggtcaaccactgcaagataatctggacccctaatgggttcatcagatatctccaatatttccatttcaacaacttctgttaattgtgtgtgtacattataagtttataacaaaaaataaacacaaaatattcttcaattaaaatcatatttcatctcgtaactaanattatcagttattatcaaaatgaaatgcaacttttaattttgattggagatatattatgat

SEQ ID NO: 274839 - DNA, 448 bp, Glycine max
  unsure (1)..(448): unsure at all n locations
cgctctgatagaggtaaaactctaaaaccttgtcattttttttttttgcatcttcttattcctttaacattgtttataacatcttctttttaccttctcttttccatgcatataggatttaaaaaagactatcagggcagactatgctttttaaaaaggccacaccgagccaaaataaaagtctttgataggctataagccaggttgagacctcaaaaattcatcataggctatccttttaaagcctgcgctggcctattctcactcctattcacaagttaaacaacgctgaaaagggtgttgctatgtgcacccaacattattattggtaactgatcttactgaataagcttcttccgtaagatcctacggaacgtgtcttatgtttttgttttatgaanaaagcacaatgctctaaccaactaagctaatgagtcaataccttaca

SEQ ID NO: 274840 - DNA, 409 bp, Glycine max
  unsure (1)..(409): unsure at all n locations
tcgagcatcatatcaatgtgttctcttcagttctcagtgacctgcacgagacgtaccaactcgaatctccaactcacgacataacccctcgcatcaaacctcactgaggtcactatgaattcttgagtatcgtgagacatttccatgcccaaataaaaactgatgtcttcaaaccactccagttgtcacacgtgacataaatctccaaggaatgtagcagtatcgaaagtgatcaatggtgatgggcgtggcatctagtctatctaccggcaccatgtgcactataatgtgacatgtgtaaactgacgtgcgtgtacctcgacacaaccacactctttttgtttgcatactaagccaagctcgtatagggcttgactncttcgacatctcctaaacctataagttgttg

SEQ ID NO: 274841 - DNA, 425 bp, Glycine max
  unsure (1)..(425): unsure at all n locations
agcttgaacacaaattaaaattatttcagtgattagagatcctagccaaaagccaaagatggtaattagtttttcatcctagggaagtgatgaagcttaaacattctcaagtgccaatgcaattttggcacaagtctcaatgttgacctaaaatgcactacatggatacctattggtcaaaagcctacagaataatgcaccccatcaaaatcctctctcttcctttcacttattctaaagtatttcctttcccactctcacatgccacatcagcaatctgttaggctcagctatattagcacaactattctccatgttccncattctgtccttgtttacgtggattagtccactgcatcccttggcacctacaactaagtaatggggtcatctatcactggtactctggacatccgacagacact

SEQ ID NO: 274842 - DNA, 318 bp, Glycine max
agcttaaatcttcatgagtattggctactaccactatgatatgtaatgatgtgtgttcatatgtagcccaagagtttaaacaacatacaaatatatatcattggatcagtaaaaacacaactgaaatgatgtttaactctgtaccgaagttaacagctattcttaggagtttatgatgagccaaacggtgcattaagttaacatatgctatgaataattaatctatgtatcgacataaggatatatctatgcgtgtgcaacatgaacatgacggtaagccgataccttaattctgggaatgggatgcgaatgatcctg

SEQ ID NO: 274843 - DNA, 470 bp, Glycine max
  unsure (1)..(470): unsure at all n locations
agcttcattataagaaaggatacaaattacagtcagttgtaactagcccatgtatatataataattctcatggtaagatcactaattataaagattttccaaagatactcttaaaccccacataaggcaggcgcttaaccaaaaggcacccacaaacgcctcacttttttcctatcatatgtccaacccttaatattatacattaaaataaaattacatcatgctcacctagccatgctcaagactagtaagcaattaacttgacaaatattgtatatttaaaaaattgagcaaaactacggagtatgagtaatttgtgtagtctaatcggctaatccatttgcgagctagcttaacatcttttgctttacacatcttcaatcatatcgtttctagctaaggtgagagtngaaatcaaaagggaaattgaacatacccaccctanacctaatatgaacatgtagtataag

SEQ ID NO: 274844 - DNA, 472 bp, Glycine max
  unsure (1)..(472): unsure at all n locations
tgaaggtgtgtagcccaccatctntcatagtagaatactggtaatgtgtctactatcattgtcatcatttntttgtcattgaggtgccacttgagctgtcaggttctccacctttgggtgtattctttgaaagatctgtgcccccttttttgcacatattttgtagttgcatcctatccgaagccattataccgacactgcctaacgaaggcaaccattaggtcctcccaggaatggactcgggaaggttccaagttagtgtaccaggtaacaactaccctagtaagactttcttggaaggaatgtatcaacaattcctcatcttttgcgtatgcccccatcttccgacaatacatctttagatggtttttggggcaagtaatccccttgtacttgtcaaagtccaacaccttgaacttgagaggggtgatgatattgngtatttgttagacaagtggcctcagatatctta

SEQ ID NO: 274845 - DNA, 457 bp, Glycine max
agcttgtattataaatattcttaattatggcaaattataagcatttaattctcctattattatattaattttattgatttacttttaattagaaattgtgacactattggcacattcctttaatttatctatatatatatatatatgaaattgccaacttcgagtgcaggtcaactaatttctataccattttattattactttctatgtcgttttatacaatttgatatttccactactaaaacacgcatgaactgaaactagaagataatttttgcagatgattgtttccctaagtagatttttaattatatagtccatttcatcttgtaagacgtactaactaattaatgacaagtatgttggacacatgaccctaattatcttaagagagcgtcgaataatttttcactaacaaactattaattcccttctaaattatacgctcagaatgcat

SEQ ID NO: 274846 - DNA, 443 bp, Glycine max
tccctgctatggagagctgaatcctcagttggttcttcctatgggatacttgatgtaaatactttcttatctatctaatgatgttttatgtgttcactgtgctatcagtacttaattctagtgtgtctttgccttgatcatgcaactgcatgcttagttagggtcactcaacattgggaaatggattgatccttagaacctgataggacaaggctagcttattgtattttcacgagacatcggtgtacggtaacctagtttttgatatgctatgtcttaatgcggatctaggtaagtttagtccaacaagagacatctgaggacaaagcttgattaggattagactaaacatgcatgagacatcagggtttactagtccatgagacaacatataacacatgaacattgttaggtagagaacatccttaataacatcagacacc

SEQ ID NO: 274847 - DNA, 452 bp, Glycine max
  unsure (1)..(452): unsure at all n locations
gcttgccaagaaaccgcacacgtcctctctttttacgtcctttgacttttgaatatatatcatttgtccaattagtagaatcttgggtgctttgtaaattttgtgaactctctgcttcaaccattttcctttntagttcatcctacataaatatactttataaattattaccatgcatcaatatcctcaatacttcaatgtcactaaacaaaactcatcttctcaatagttactccttctcacactataaccttttagtagaaaatcgagcaaaacaaagagaaagtattgaaataaaaattaaaattcttacaattacagtagcagcctttttaataataatacttccatcttttcgagtttgagtgtcaatataaatttttgtctgagaacgttgcactcctttagcctttgttgtctaacattacgtaaaaaaactacatcatactatt

SEQ ID NO: 274848 - DNA, 472 bp, Glycine max
  unsure (1)..(472): unsure at all n locations
tctctagagttatcaaggtgttgtttccaaagaagaggaacgattatagattccatggtttaggctttggtactaacgtcaagaagaagttaaagatggatatatgagaatgaaagaaagtgagtttgtgagctagtgtatatgatgccaatacatgaattgtatttatagaacaaatctaacagtaaaacaatttatttggtgggatctaggccattgatttagtgtgtatggtgagttagtgcatgatgccaatacatgaattgtatttatagaaaaaatctaccagtaacacaattcattcggtgggatctatgtgacactctcaaccctcacaaatatagataaataaaaaaagaaataaaatcatacaaaatatatttaaaagtttttaaacacataataataaaaggaaagaaaaccaagcagaattaatgnttcaatttttttaaacacatttaatttaaatcaa

SEQ ID NO: 274849 - DNA, 100 bp, Glycine max
  unsure (1)..(100): unsure at all n locations
gagtgacattntacatgaagttttgtgtcaatttccgtatttttcttggcataatttcacgtttacatctactttcatgtgcataaagaataaatgtttg

SEQ ID NO: 274850 - DNA, 441 bp, Glycine max
  unsure (1)..(441): unsure at all n locations
gacctataaatctcagctttattggcaggaatgaagaaagacgttcgcaagtacattcgggtttgccacatttgtcagcaaaataaaaccactaccaagcgtccggcggggttattacagccattaccagtgccggcgggggtatgggaagatatctccatggatttcgttactcatttaccttcatccaatggctataccgttatcatggatgtagttgaccgttactccaaggaggtgcacttcggcgccttacccacggtgttttccgccttcaaggttgccacgctctttatcgacgttgtttgcaagcaccatggatttcccaagagcatcatctccgacagggatccagttttcttgagtgctttctggagagaattatttcgactcagtggcacgcacctncgcctctgcacaacgtaccatccacaaacggac

SEQ ID NO: 274851 - DNA, 209 bp, Glycine max
atgagtatgctcaagtatacgcggaaaaagaggctataggaatggtgatcgactctttacaccaagaggcaaccatgtggatggatcggtttgctcttaccttgaacgggagtcaagaactttcccgatgttaactcacgccaggcgatggcgacacctactccgccccgaagagatcatgggcttctcgctattgtagcatatgatag

SEQ ID NO: 274852 - DNA, 455 bp, Glycine max
  unsure (1)..(455): unsure at all n locations
gctcatttgcacccttgagctacattcaccttctatgtactttgccaaggtatttcttgttctcaagttgtcatctcctaaaatctatattctgatataaagcttctagagagtgaaaaactatacatgtacctttctcttcatttaaatggactttatgatttctcatttgaatatattcttcaacaccctaattaaagcttgtgtacctgaagaaattatagagattagggaaaagttagaacaaaggactgaataatttaatattaattgaaagtgcttggctagccatttcaattagaggtgtttataaaaaagcctatatttcactggcttatgcaacttatatggcttcactttgctttatgatatatgttagtttttgccacaaaataatgtttaccctcgatattntgtagattctatgcaagtcaatgaagggtgtgggaattgat

SEQ ID NO: 274853 - DNA, 323 bp, Glycine max
  unsure (1)..(323): unsure at all n locations
agcttanggatggaatacttacttgttggtgatgaacaagcgcaaaacggaatcaaaaaatgcgtaaaaggatgaccctagggctgcaaattcatcaatcccgtgggtatggcttttgaaaggggggaaaagaagtttttgaacgtaaaaacgccccccctttcgtcatttttataatttggtgcaggggtggctcgcccactcgagtccanctctgccangcgagctaacctgcactttttttttttttttttttgaagggaacattaaccatgtcccctcccttctcatggattaacattttgcctaactngaacttactt

SEQ ID NO: 274854 - DNA, 445 bp, Glycine max
  unsure (1)..(445): unsure at all n locations
tagactgagttcagcctactatcttcagactgatggccaaactgatcgaaccattcagtcattggaggaccttttaagagcatgtatcttagagcagaagggaagctgggagagttttcttccattgatagagttcacttataacaatagttttcattctaccgtcggcatggctccctatgaagctttgtatggtagaaggtgtaggacacccctatgttggttagagcccggagaaggcctcaccttatgaccgaaagtggtacaacaaaccaccgagaaagttatgttaatccaggaaaggatgaggactgctaagagtangcagaaaagttatcatgataagaggaggaaagatctggaattcgaggttggtgatcatgtattcttgagagtcactccatggactggggttggtcgagcatttgaaatccgaanactcaca

SEQ ID NO: 274855 - DNA, 425 bp, Glycine max
agcttagaacaatatacttgtccttcatttaactgtctttgggaattgtgaatgtatgtatacatgattttgatgatgtcaaagaagaatctaacaacgctgcttcaaatgataagcatttgcttcaagaataattgaagattgcttcaacaaacaaagccttgtttcaagattcactaaagaccaagccttgccttaaaacaaagtgctttcaagacatgcaaggctctggtaatcgattaccacgaagtgtaatcgattaccagaagacagggttgagaaatagctgttgaaaaaggttttgaatttgaattttcaacatgtaatcgattaccagcaacggaacttgggaaactcaaattcacaagtcataacccttcacattataactgtgtaatcgattacacaaacattgtaatcgatta

SEQ ID NO: 274856 - DNA, 388 bp, Glycine max
tccttcatgactgatattctaaatgacactaactactttggttcgcccaacaatatgaaaatattgtgctcatgcatttttacaaagaaaattacatctatacacacatggatctaagcaatacttattcatgtataaaggcatgtgatccaatagatctatcttctatatcatatctgtgtatttgtttataagttcaaatgggtggctgtgatatcagcctaaatgagcatgtgtgtgtgtacctgagtgctagatgtattaaattttcacaatattagatcatgactgcacgttgctgtaactatatcagtttgttgcgtatctataacctaacttaatgaaatagaagcctttagaacaaagcatagacttatcaagattaaag

SEQ ID NO: 274857 - DNA, 374 bp, Glycine max
agctctgcgaggctccattatgttacttggatgataactgcgattatgcagtttgcaaaggtggctctatatagcgtaacgtgacaaacatttggagaggtgcgtgtcttgttttcagacacgtcatgaatattagtacatgtggcattttattagatgattgactatcgcaaaattcaatacactcgagaatgagatcactatgaatctgtgatgtgatctgaaaatagtagtcttactccaattttcagtggtctactttcttaaataaaaactcagatgacctccaagtttcgtaataatagggctatgttatactctttcatggtggcgcgaatacgttaacccgaataaaaataaaaatagtttaacat

SEQ ID NO: 274858 - DNA, 462 bp, Glycine max
  unsure (1)..(462): unsure at all n locations
tctgctaaattcgatcnaccttaaactagagggttattatttttggttgtgttcatgaaaattatggtatttggtgaatgatgggggtgtaattagttgggagatgttatttaattgcagattcctttaaagatacaaggaagcgagggtcaactttggatggacattattcaattgctgcgtgatgggattgattgagtgtgacattagtgtttgcaaaaccataatatatttggatgtttttcgctctctatcgctctgtcttaccttagaattgttgtttttgacttttctccgcgtagtggaattcaatgatcaaaatcaaacatcgtgaggctgagtcagccaaagcaaaagcaagtccaacgagattgagaatgaatcattgggctggatcatagagatggccttcagttcagacccttggtctgaagatttcataaaaactatctacttacttat

SEQ ID NO: 274859 - DNA, 407 bp, Glycine max
agcttgctgaacacgttgcagtatgatcgatattgaagtggtttattttgagagaaaatcttgtgtttgttgaatgaataggattgatcaatggcatgaattgagtgaattgtaatatgtagatcatatgctttcaatgcgtatttagtaattagaagacaaagaacgtggatatggtacatggttgaaaatgttagttggcttgacagattggttgtgaagataatctctaaccacaacctgctgagtgtgtgatctttaattgtgagagaacgactaacattgcgtactgatttttacatgaatctctgattactgaatgaatgcatgagtttgaggataatgaacgccatgattgactgatatatctacttatcccaaaagcttaccttgtgcatgaatgaatt

SEQ ID NO: 274860 - DNA, 275 bp, Glycine max
tttgcggcgctaaggcgccaggagtgggaagccatcttctcaatcaaatttctggcttcactacgggtcatgtctacaagggctgtaccactggcagcatctatcatacttctctccatgttactgagtccttcataaaaatattggagaagaagctgctcacaaatctggtggtgagggcaactagcacatagttttttaaataatctccaatattcatatagactctctccactgagttgcctaatgcctgaaatatcctttctgatggtcgt

SEQ ID NO: 274861 - DNA, 358 bp, Glycine max
  unsure (1)..(358): unsure at all n locations
accttgaacaagcaatcaacttctctgtcagaaccatgctatgtgctcgcgaatggtctctttcttctcttcgcaacttgagttcactattgctaccccatagagctccgcgaaatttgttccggccatactcttccttgcgagccctcttggtctcttgttcgagggctcttgcagtaattgcattctctntccgtaacccggcgcacttcttccgaacgtgtgtagcagccaacttgaacttcttcttggcgaagtntgcctttcctaactcgcttttgagagcctggacttcttcgtcctctttccgtgcttaaacatttctttgctgacgacttttaacttggcgagccaatct

SEQ ID NO: 274862 - DNA, 550 bp, Glycine max
  unsure (1)..(550): unsure at all n locations
nacctcttnnnnnnagcactcggggntttgattgcattgattaccatttgcangaaccgcgacncnatnnnaaagctcangctgatgctattactactatatgttcatcaggtcgacgttgctgtttgtgtctnaccatcatttgcaagactcgtgctcagaagatggtatcgtgttacatcaanggcttcatgctatagtcaaacacacattaggactagttgacgtacttgcttacagtttcgtctagaccaagatgtcgtggaccatgatgaaaatctaaattgattgcgccccatgtccttgcgtgagattcacactacttaaagtgtgtatttttgacatacattcgtgcttttcatcggctgcatagctcattgcattctttccttgatgaagactgcttagtgttactagaatagaattcattataatgagaatgaacttattcattgctatgatagagaacataacatgctgtacggtgctcttaccgaactgtgctagagctatagtatacgaggactacacctattatgcgacctgagag

SEQ ID NO: 274863 - DNA, 443 bp, Glycine max
  unsure (1)..(443): unsure at all n locations
agcttncatcagtgtttaatgagaagggctaatattggctgagtattgatattgttgagctggtgcggaaattggccacataggaacggcagtcacagcatgggttcctcgctccttctcattctctccatttgccccaggcttcctattcatcaaagcagaataatcaaatttgcctcttctcaaacacacttcgatcctttcgccggcgaaaactaaattggcaaagcttgaaggtgtgtaacccaccatcttctcatagtagaacagtggtaacatgtccactatcattgttatcatctcctattccatcattgggggcactacttgaggtgccagatccctccacctttgggtgtattctttgaaagattcatgcnntcttttacacatngatgtaagctccattggagctcgtacgcctacgatcttcttcatcaatg

SEQ ID NO: 274864 - DNA, 310 bp, Glycine max
tgagatgaggaagcgttgagaggaggaacttcctgtttgttttgttcgccacagaatggtgcctgccgatatgtaatggcggtcaggagaccttgcggacagtatgtggagtgctattgtctcaaacctagcttgacgaatctctgaccaacccgggcatagtctgacagtgagaacctgtgaggtacctaaactggcgagctcctgtccgtcaacacatataacgaactaagaccactaagcaccggggcttgtggcggctggacaaatgtgaattttgtgtgatatgtggactatggcgtctggtaat

SEQ ID NO: 274865 - DNA, 291 bp, Glycine max
  unsure (1)..(291): unsure at all n locations
agcttttcgtcttacagaatgcaaaaagtttatactgataaccactcgggtattttcacccgtcagcgtgactcaaaagtcagtatgacagatcttgtgagcgcggaacatgacgtaaatcttcgcgtgccaacgggcttgtcgatcgcgattgacgaagggcgcaaaagacgacgttagtctctgcgtgctattacgcttttcatcttacanaatgcacaaagtttataccgataaccactccggtattttcgcccgtcagcgtgactcaaaagtcagtatgacagatct

SEQ ID NO: 274866 - DNA, 419 bp, Glycine max
  unsure (1)..(419): unsure at all n locations
ggatcacacgcagagactaacgtcgtcttctgtgaccttcgtcaatcgctgttgacaagcctgttgacacgtggagatttacgtcatcttccgcgctcacaagatctgtcatagtgacttttgagtcacgctgacggccggaaatacccgagtggttatccgtataaactttttgttgtctgtaagacgaaaagccatatagcacgcagagactaacgtcgtcttctgcgcccttcgtcaatcgcggccgacaagcccgttgacacgtggagatttacgttatcttccgcgctcataagatctgtcatactgacttttgagtcacgctgacgggcggaaatacccgagtggttatccgtataaactttntgctgtctgtaagacgaaaagcctgatagcacgcagagactaacgtcgtc

SEQ ID NO: 274867 - DNA, 420 bp, Glycine max
gatgcatttgctaagttgtccaacgtggatgcacattttggtttgtaggcaaagtcagacgtgttatgtgaagggagtctctgtatttgacaattctacctttttctgactaatggagaatgcattgaagataagcgttacattttgtcttttgttgtgggcaagtgcagcgcacacgcgttactcttgcatacgtgtcactcatggagtacgtatgtataggagacgcgatatgtgaatgagtggggctgcattatggtgcaaacatttacggtgccatttaagctcccgccagttatcgaagagttgtgcctccatttaaatagagtgtacatttgattctttttatcaccgtcactctcacatttttctttcttttctgaaacttcttacattttgcttacggtctctacaatttct

SEQ ID NO: 274868 - DNA, 468 bp, Glycine max
  unsure (1)..(468): unsure at all n locations
ctatcttacccctacagaagcatctaagagctgcttagattgtgttctcaactcgtaaacgaaaatattctgctgtatgggctcagagaatccatgagtaggagttttccacagcaagctacagaatctttctagtgcttcactcaaagattcatctgggaattggtgaaaggaagagatggcagcctttcaactgggaaatatttcttcagaaacttttccacaacttcatcccaagtcctcaagctattacctttgaatgaatgcagccacctcttggcttctccagatagtgagaatgaaaataagctgagcctaacaacatcttctggcactccagcaattcttactgtgttacaaatttcaatgtaagttgctagatgtgcataaggatcttcattggngcagccatgaaattgatttcctctgatatgctgaatcaaagaatgtggatatgtgatattctga

SEQ ID NO: 274869 - DNA, 495 bp, Glycine max
cgcgcggtaattgaatcatctcgtctcggatcttaagtcactgtgctgcagctgtaactaacataaatctagatagaagtgtgatattataatttcctgagtggaacacctctttttacgaaaaaattggctctggatagttcaacaccaaaaccctttggtggtggaagtctaataaagggctgaccaatggtgtcaccagggggggtgctagtctattatggctacatgtgaagtctaatgggggtgctagcaaagtgttgaaaatcattattggttggcctaacaatagccaattgtgggtatgagaattcttcttaaacttaattataaaatattttttcaatcaattagtaaaaagaaattcgcaccaaactttacactaacttcatgtggataatttaatttattttcttaataacgttaattgatgatgctacgttaccaatatatgaaaattattgattcttccaacgatgatataaatattatccg

SEQ ID NO: 274870 - DNA, 269 bp, Glycine max
tggatcgaggtactgacccgatgaagatcgactaacgatgacgatggaatgaagaacgtcgaccaacggacgagaccttcgcgaaattcttcacggaaaaccttactgagacgtccacgacgggcctccgcttacattatattgacggacctcatttttcccagcaaattacaaggagagagacaagccttaggggctgaacctttgattcttcacttcctccactattgatagcaccatatgggacgtgagtgccgtccaggtcgccc

SEQ ID NO: 274871 - DNA, 471 bp, Glycine max
  unsure (1)..(471): unsure at all n locations
atgcaagcttgaatgaagtcatcatcttttcaaaagctaagcaatagaccatataattcatctagagagatcactaaagcatgctgataaaaagttacaacaaataatctctcatttcctcactcagttacctaacttttgatcaacatgtgtagtgatttctctagaagaattattgttcttcatggtctagcttaacaatcattgcattcctccaaggtcttctaattctattcttttcttttttagaaaaactgaaaatggggcattcataatctccaagtttcttatccactcatccaccaccttcaaattctcctcatcgccatcatatcctcttcanagactacattatataggaaagaaatgatactggagcagttattatagaaaaagaaatatatgacgtgacttttggatggttacacttgcatgtataggagcatttcaaacatatgtgaatatgttttt

SEQ ID NO: 274872 - DNA, 459 bp, Glycine max
  unsure (1)..(459): unsure at all n locations
ngcagatgttgggctggcgaaaatagtaagtctttaatattatacttttatatatagatgtatgattgacgtacgtaattagttatatatatacttaggtagatatataatatagctgttctgctgacttggatataaccacctcagtcatcttatttgtttgtatggcttgcaacttttgcattattattgaagctagagtcttttacttgtgtttctggtggtcttgctttctgaccaatctgattttttcagctaatggggaagtcatatgatctttcttttaatggtagtccttattggatggctccagaggtatgttatcgttcaaatcatctatagtattttggatgggtagacatgccccttttgactctaagttgtccatatgaaggtcgtgaaaggatccataaagaacgaattcaatgctgatgatgtcatggccattgatatatggag

SEQ ID NO: 274873 - DNA, 374 bp, Glycine max
agcttgtgcgaatcaaatcactcctgcatttcatctctaccatgcatttttctttctttacccactcctcacgtttggttttttagggaaaaacaccataactaaacgcgccacaagacatccctatcgcaccagatccaaatctagaacgatgggtgatcaagaggagacacaagaacagatgaaagccgacatgtcggctctgaaagaacacatggcttccatgatggaagccatgttatggatgacgcacctcatggaaaagaatgtggccaccgctgccgatgtcagttcggctgccgaagcagacccaactctcttagcaactgtgcaccatcctcccttaaacatagtaggacgcggcagggacacac

SEQ ID NO: 274874 - DNA, 377 bp, Glycine max
  unsure (1)..(377): unsure at all n locations
ngagatgaggaagtgttgaagggtgaaacttcctgcttttattgtttatcacagagtggtacctggagatatgtcgtgggggtcaagagaccttgcggacgtcaagtggggtgctattgcccagaaccaagcttgaccaatcccgacccaacccgggcatattcggtcagtgagaacctgtgatgtacctaaacaggcgagctcctggcagtcaacagataaaaggaacacagaccactaagcaaggaggcttgtggtggctggccagctgagaatattgtgtaatatgtggattatggcctctggtaatcgattaccaagggtgggtaatcgattacaatgcttaaaattgaagacaggaggctaatatggtctct

SEQ ID NO: 274875 - DNA, 449 bp, Glycine max
  unsure (1)..(449): unsure at all n locations
agcttatgcgcatatttccttacaaacgttctcttgcacaagacattctattaaccgaacaaaatgcacccatatacaatcaaggcagcttcgttacctagattatttacacgtacttccaaggtgtatttgttacttacatcacacacctccttggctaaattcacatacatgcatactcaaagcattntggggtaccaaaaattgcacatgtgcacatcttggtatttctaatacctatacatacacaaacttcatgatgaatcttgactatctacacaataaggtgctacattttatgctcttttcaagattttgctacctaaagccgcatgcaaattcaagtatattttcctttgctgactaacaatgtattcaaattaaaaggtatacattntttggtaatgtatcttctttacataacactgcaacatattatgtcatatttt

SEQ ID NO: 274876 - DNA, 414 bp, Glycine max
  unsure (1)..(414): unsure at all n locations
ctgagggtgcgtagcccaccatctcttcatagtagagtatttataatgtgtctaccatcacgattatcgtgtacctttccatcattgcgggtaccactagggccgccagatacctccaccttttacgcgtgtgctttgaaagatccagccgcctttctgcaaatgttctataggtgcgtcctatccggaaccatatcaaaattgtactgatactgcctaacataggcaaccattangtccttccaagaatggactctggaagattccaagttagtgtaccatgtaacagctaccccagtaagactctgttggaaggaatgtattagcaattcctcatattttgcgtattcccccatcttctgacaatacatctttagatggatcttgggacaagtagtccccttgtacttgtca

SEQ ID NO: 274877 - DNA, 446 bp, Glycine max
agcttgcttagccacaaacatgaaagcaataaaagaatttctaagtgtctgaaacacattacttgattagcgcacagtcgtgcttagcgagttcataaacattaaatcattcatcagaaaagatgaactcgcttagcgggacagggccggcttagcgagttcatctagaaatccagatattcatcaaaaagtgatgaactcacttagcgcattcatcgccatttccaaaaaaattggtgttggatcaagtggccttggaataattaagaaggcgggggggttgaattaattattaatgaacctttactaattaaaaatctatccttcttaatgttactagatctaattacgctcttactataatgttaagaaagtaaagaacagaaatagaaacttaaccaaaagtaaaagtgataattaaagtgcacagtggaaaataaagagtg

SEQ ID NO: 274878 - DNA, 388 bp, Glycine max
  unsure (1)..(388): unsure at all n locations
gtgtctctattcttctctctagctngttcacttctactcctctgttcattcttattagtttgatcattgtcaacttgttcattatctttatctttctctacttctttatctttgtcttggtcatttaattctttattcttgacgattatttgtgtatctttctcctgactactttcacctctcgcatcatctttctttgtatcagtacctttcttttcagcaactttcttcttggatataacactatcctcatactacgcctgcacaaacctgttactccctgtcattacaactttgtatttttccttgggatactcctctgtattcgccacaaaactattggatgacttgtcagctatctgcttggccaattgtcccacctggacct

SEQ ID NO: 274879 - DNA, 233 bp, Glycine max
ctgcagcttttcaaggatgatattctagtctaaaaattaaaatttgcaaggcagctttcttttggaggaccaaggaatggacttctgaccttcataacaacttttcccttttctttccctcaacctggcccctctacccccaatctcaatcctaatttttcaaccttttccaattttcaattccttttccttttccaatccctttcctctttctgggacatataattcttttt

SEQ ID NO: 274880 - DNA, 454 bp, Glycine max
  unsure (1)..(454): unsure at all n locations
tataccacagacttggaattctacccatctcaagttttattcaattcanatcatgtattcaatggtgtactctttttccttacttggcttttttttccctataaggaaatgtaagggtctttttcgagaaggttttaacaaggcacctctttaattaatgaatacaaatttcaattaccacacatgtttatctttaatttctcacaaggttctcctcctgaatacctatattcggataaggacacaccttaaaacatttcaaggtttccctctaaatacctctattcagctaaggatgcaccttaaaacatttcaaggtttccttcatgaataaccctattcggctaaggatgcaccttataacatttcaaggcttcctcccgaatacacctatttggttaaggatgcaccttaaaacatttcaaggcttacatcccanatacccctattcaac

SEQ ID NO: 274881 - DNA, 292 bp, Glycine max
  unsure (1)..(292): unsure at all n locations
gttctaattaacatttacatgtaatatatgtacagaagattaaaaagacattatacaccgtctgtactttgagatcgacctttaagatgaatttcataacttaattaacgaatctataacaacttaattatggtcttataaataaaatacaaaataagtggttcagttcgaattactttgccatgctagtatttttataaaagcaatgtgctttgctacctagtatgaactcttaagataantattcatgctacttgagttaacttttctggatatgatcgatttctcttac

SEQ ID NO: 274882 - DNA, 459 bp, Glycine max
  unsure (1)..(459): unsure at all n locations
tgtcggngaagagagaagagaagaagctntttgcgaaagatacactgtgagaaaaagagagaatgcttccgggaagaaaaaaaatgctttttatttttttaactgaagggcaaaattgacctttcattgaattgctgggtgcaccagcaatattgctgggtgcacctagcatatcccctattctaggtaccaactgacacaaacctattggactagattggttccatgtaatcgatatgggcttattgggctagtctggaataattaccccttaagttggtagtttatgttgacatgaagtgttgacttttttatgcacctccaacatcttgaaatgcttcactttatccaattattgttntgtatatgggttgaagtatgaatcaattgagttattgtagttaacaattaaagttagactaaatggtagaaattaagtgaacgagatcaatccataat

SEQ ID NO: 274883 - DNA, 391 bp, Glycine max
gacttggtagaacctcttgccggattgatatgttcccatgcttgctaaagtgagacaaaagctggtgcaaatcaaaactccgatatctcatgggtggaatggatgaatgcatgaatgaatgcatataacacagatgtaatctaggaatgcggcggtccggggaattcgtccccttcttagacacaatgtctaagggtagcaaagtgccccaacgtacgtttttaagaaggcgacacggaccctccgttggtttgtatacagaacggatcaagacagaacccatatgcgatgcctatgcaaaagacacaatgcgggaatgtacacagtatgataatattcactgaacataagcaaaacggtatatgatacttatgcatggcagtgtaaaaat

SEQ ID NO: 274884 - DNA, 305 bp, Glycine max
catgaaaactactcacctcggtcacagacttacgcgtacgccattcttgaatagacctaaccttctcctcatcaacttgcactccttttgaactcacaacaaaaccaagaaacacaacatggttagtacaaaagatgcatttttcaagattggcatacaattgttcttctctaagcacagtcaagacagattttaaatgatcaatatgcaaatcaagtgcagtgctatagataagaatatcatcaaagtacaccacaacaaactgtcctatgaactctctcaagatatggatcattagtctcatg

SEQ ID NO: 274885 - DNA, 298 bp, Glycine max
aaaataacattatttcttgcactaaattgttgggagttggaagccatcttcttaatcaaattcctagcctcagcagaggtcatatcaccaagagctccaccactggcagcatcaatcatactcctctccatgttgctaagtccctcatagaaatattgaagaaggagttgctcagaaatctggtggtaaagacagcttgcacacaatttcttaaatctttctcaatactcatacaagctttcttcactaagttgcctgatgcctgaaatgtcctttttgatgacaatggtcctagatg

SEQ ID NO: 274886 - DNA, 357 bp, Glycine max
  unsure (1)..(357): unsure at all n locations
catagattagctcattagtatctatcatatatttatctttcttacacaaactntatacaaatgatactcaaataatattctaaccctgaatatataacctataaagatacgcatacgaggaatggagattaacaaanagagtactggtccatgcttctattcagcattcataatgtgagatagaccatagatgtctcaccttaactatttttggatggcatttattggaactgtacgtggagacagatctaaatgttactcaatatgatagtagacattgacatactcatcatatctgtgcttctgtctctttctattagagagggtaacaaaatcttatgaatactattctatata

SEQ ID NO: 274887 - DNA, 441 bp, Glycine max
  unsure (1)..(441): unsure at all n locations
agcttgcttctgtcaatgactttgtcacaccatttcaagttgatcgatcaagatgcttgccagggaaattggggaggttattatggccatggntccccctgtgaatttgtgtccttatgatatcccagcctagaagcattataaagacgagttctttatagtagcatctacctacaatttccttgggggcaatgttgacaggtgtgatccactactcttcaatggaatctacaaatggcgtggacaccagagaatatggtgccatgcgtggaaggtagctaaatttgggttgcttactagctaatgaattgcattttcaaagaggttttgcacgcaacgacttgtgccatcattgtcaacttcactcagaatctatcatccataccttgcgagaatgtgattatgattatgcttacaagttatacgagcaactgatggatg

SEQ ID NO: 274888 - DNA, 208 bp, Glycine max
atagcgcgctgatcgattagaaatagatggaaattatggttacttctttctggatctatgtccctttatattgacacatcggtgcagatgaaaacacatgtgctgacaccataatatcttatggtctctgaaccagctgtctatatcattatggattgatacttgccccagtttcattcattggccttttgtgctggataggaatgct

SEQ ID NO: 274889 - DNA, 448 bp, Glycine max
  unsure (1)..(448): unsure at all n locations
agcttggtgatccaggatcttacagacgactcgttggaaggctttggtacttaactatatctacgtcagatatatgttattgtgtgcacaaattaagtcagtttgtcttcaacccctatacgaaccacatgcatgctactaacatgttacttcggtaccttaagcacactgttattcaaggtattctttttaaggccaacttagacacaaaattacatgcatatgtggatgcaaattaaggatcatgtnctgaaagtanaagatcaaccactggcttctgtatcttcttaggaaattccttggtttctagaaagccaaaagacaaaagacagtaagtatgtcctcagcagaagcataatacacgtccttggcttttgtttctangtgaaatactcggattcgaaattacttactaatttcaatattagaattccttttgtactatcta

SEQ ID NO: 274890 - DNA, 472 bp, Glycine max
  unsure (1)..(472): unsure at all n locations
tgtaatcgattacgcaaggcttataatcgattaccagaagttttttaaactttntataacatcctttagaaatttgaatttaaattttaaagcttgcaatcaattacaacttgtgtgtaatcgattaccagacatgaaaattcaaatttcaaatctgaagagtcacaactcttcagaaactaactgtgtaatcgattacaacaattatgtaatcaattaccagtaaggaattttcgaaaataactcccaagagtcacaactgttcaagaagtttttgaatggctatcaaaggtctataaataggtgacttgngacatgaaattttgaaaaagagaattttcctgaacaaatngtcttatcctctcaataccaaattgtcttataactctcaaaaagaattccttggtcaaaacacttgcaaatntaataaggaatctngagtgatcttcaattngtatatttttcttcttaa

SEQ ID NO: 274891 - DNA, 310 bp, Glycine max
ttctttttgagaccatgattgattttatttccgaatctctactttaatcgaatatcaagtgatataatccattacttctctttcaaaagtggttcaaaagtgatcaagaatactttaatcgattacctcaagaatctaatcgattacattgttcttggaagtttttccatttttgggatgaacactctaatcgattgatgaaatggtaacataatcaattacttcttcaaacaatcgattacattgatatttaatggcatacaggtggttataactacgttctctataaatagccaccttgagttcttac

SEQ ID NO: 274892 - DNA, 453 bp, Glycine max
cgatgaagaacgtgccaacatataaaggagagataaagtaattgctttagcttacaacatcatatgagaggaagccaacatatgaagaaagcatcgattcagggggagctttatgtttaaagatttaatgttctaattatttctaccttgaagcattttagtatgtactaaaaaaatcttcttgatgtgaaaattcttcaatgaataaaatgagatgtttttttgttatgtgtatagactatacctcaaagacttatgatgctttatgctttgattatgatatatatatgcttcgcatctgataagacagactaacatttttatgataagactaactaacacttatgatacttcaactcttaaatatgtgttttcctatcatcatcgaaaaagggaatattgttaagtcaaaagacatttgaatcttaacacgaatcaagaacctcaattatt

SEQ ID NO: 274893 - DNA, 534 bp, Glycine max
  unsure (1)..(534): unsure at all n locations
ttcttactannccccccgcggggattgatgcctgcatgcnctgacctatccaatactcaagcctttctcatcattctaagcagtgctacgcggagaatatcattttatgtcggttgtatcccgactactaggggccgcgacggagaattgctagggattatcgcgctatatattcgaggagaaaacgtgggaatattgaccttgcatgttgtcagggattcagcaccgattaactcccgatgtcttgcttacgattgaggacgaggagatcacccagaactttgtgaaggagctgtgacatcctaattagtgacttagtattagcatagggatttttgtgatgcaaacaagtgactgtgttgttggcaatctagacatccatgctgtgtattgccggcgctaataccatttaactccttcttactatacaaggacatgtgtactttaggcctcatatcctctatagttcgtgagagcctggacatatgtatcagcaccagatcgatctcattgatctgtctcatcctaactctn

SEQ ID NO: 274894 - DNA, 332 bp, Glycine max
  unsure (1)..(332): unsure at all n locations
tgatacatngatatgtctatcgtccaagacaaaatgcttttgggacttttgtctaacagtcgtgggggggggagggcgcgctccctttgcctcgcccttcccctttctccttccctcgctcctctctccccccgtgccctctctctcctccacctttcccgcccccttcttacatatctcccctcacttcaaattcctctccccctaccccttccacgcccacttctcttctccactccccccaaacttccgctctttacttttactccctcccttttctcttccctccctccctggaccctccccctcctcgcctcctcgtcccccctctt

SEQ ID NO: 274895 - DNA, 443 bp, Glycine max
  unsure (1)..(443): unsure at all n locations
tagagtanaagcaaagccacgacaaaatggaaggtgtgaccttgtgaaaaaatcgagtggaagtgatgaagatacaaaaatgataaacaaactgagaaaagacaaaaacagagaaagcatggttagagtagttgaagcaatgctcgagaatgcatcccaacatgcatgaaaaaaagataaatttccaaggcaggcaaactgaaggtcatacgaaaaaacagtccacataattaatatagttcctaatctagaataattttagacatgtcaaatggacgtcaactataaaacataaaatatatcggtgcatgcattgaaaacatgaactgagagagaagaaaaacccgataaggattccgcaaccaagtgaggaacattgcaatgtagataataaatntcatgatagaatcagaaatagaagtcacaatcggaaagagcagtct

SEQ ID NO: 274896 - DNA, 314 bp, Glycine max
  unsure (1)..(314): unsure at all n locations
gtccatagccatcaaagtttgaaaagagtatgatgaactaatggatgtcaatatggccaccgatgaagccttggaatgagaaaccaagacagcccgaaaggaagaacacgaccaaagccaagttttgaggggctttatagggcagcaatagtgagctcaagctccgaagaggtgaaaggaatcatcacgggtcaaaggcatgatcttgaacgacgagctaaaggctcgccttatgtcgaaaagaaatntgtcccaacagttaagcgagactgaagggaatatgtgggccgtcatcgatgagtgcaaagagaagc

SEQ ID NO: 274897 - DNA, 439 bp, Glycine max
  unsure (1)..(439): unsure at all n locations
ntcttcaccccaatatcttcccccacattcaaaaaatgcagcagctacggaaaagcttggttctagcagccccaaggctccattgttgagttttttctttccttttcatgttttggttcatccctacaagtaagtgcattgtcccttgattctttggctctccattgatgtattttggtgctctaaattgtctctgtttggaaaattttgtgaagcaattcatgcttgaattcatgtttgatttgttaaattggggggttatagggaatggccataggcctatctttgattntgaaatgaatgggcatggcacattgtccccattacccattttttcatgtctaaacatgcgcccaccaagtgttcggagaaatgcctcaatggcattcgcatgtgattttgccaaacttagcctatggaacgaattggcacacatgtg

SEQ ID NO: 274898 - DNA, 378 bp, Glycine max
  unsure (1)..(378): unsure at all n locations
agcttctcccccaattntctataaatagggggagaagtgaagtagaacagggttcagcctcttaggcacttctctctctctcgaaatagctaaggaaaattagttccgtgaagaaaatccaagccgaggcgcttccgtaatgtttccataacgtttccgtgagtaattacgcgaagattctcgaccgttcttcaagattcatcaatcgttcttcgttttcttcagtctttaactggtaagtacctcaaaccaagcttttcaattcattctatgtacccgtggtggtccgcattttgtttcatgtatttttattctcgttttcatttactttttatacccccttttgacgtgcttaagccatttatttaagtcatttct

SEQ ID NO: 274899 - DNA, 446 bp, Glycine max
  unsure (1)..(446): unsure at all n locations
tatgacaatctgaaattctcgagagcttccgaatacgtgtgaaaagttatgaccatttgaatattttgagagattccgttgttcaattttgagcgtctcgatatattatgcgcctgaatttgacttgcctgtgaaaggttatgaccatttgaatttctcaagagcttccgttattcaatttcgaacttctctatatgtgatgcgcctaaatcagacatccggggtaaaagttatgacaatttgaatatctcanaagcttcggtagttcaatttcgagcatctcgatatattatgcgcctgaatctgacatccgtgtaaaaagttatgaccattttagtttatcgggagcttccgtttttcaattntgagcgtctctatatgtgatgcgcctgaatcggacatccgagttaaatgctattaccatttgaatttctcgagtgcttccg

SEQ ID NO: 274900 - DNA, 418 bp, Glycine max
  unsure (1)..(418): unsure at all n locations
agcttcggaagaaagtgatgaggtacaagccctaaaggcagagcttgaaagagcccgggtagtcgaagagaagttcaagtccatagccatcaaagtctgaaaagagtatgatgaactaagggacgtcaatatggccaccgctgaagccttggaacgagaaaccaagattgcctgaaaggaagaacacgaccaaagcaaagttttgaggggctttatagggcagcaatagtgagctcaagctccgaaaaggtgaaaggaatcataacgggtcanagacatgatcttgaaggacgagctaaaggcttgccttacgtcgaaaaanaatttgtctcaacagttaagcgagactgaagggaatatgtgggccatcatcgatgagtgcaaagagaagctaaatctagcggcgactcacgagaaa

SEQ ID NO: 274901 - DNA, 412 bp, Glycine max
  unsure (1)..(412): unsure at all n locations
ngttacaacccattattctttgtcctaccaagccactattggctctatacaaatcaaatagatttgttgattgtttgcactaactcttaatcatcttgcaaatgaatatacaatctcaacacttagtcttttctctcaaagtgttcaaggtggtttgagagctttatagaactatacataaatcttttcatagaaagaatttgaatgagagtgcataagttcgtatccatgtcttcaaagcttctatatttataggtcttcttcaacaagtgtttgttgtctctaaattgatagatttcttcacttgagctcgtgtatgaagattctggttgttggaacatttaatgcttccaataaatgcatgtactcccatgctgaanaaccacttttgtgagctttcgtgtngatcact

SEQ ID NO: 274902 - DNA, 387 bp, Glycine max
tgatgtttgtgttgaatgccttaaaggtaaacaggccaaaagcaagaaattaggtgcatatagagctacagacgtcttggaattgatacatacagacatctgtgggccatttcatacaccttcatggaatggtcaacagtattttatatcatttatagacgattactctagatatgcatacttgtttcttatacatgaaaagtcacaatctctagatatgttcaaaacatttaaagttgaagttgaaaaccaactcaacaaaagaataaagtgtgtttgaccatggtggtgaatactatggcagatacgacggttcaggtgaacaacgtctggtggcctttgccaagtacctagaggaatgtggaatcgtcccacaatacaccatgc

SEQ ID NO: 274903 - DNA, 423 bp, Glycine max
tcttatccaggcaattcttggtggtgaaactccttctttcttggcttattccctagtggatggtgcctcccctctcctcttctcctttgccttccgctgcatctccatggtgaaaaatcaaatttgaaggaccttattgaagctcaaagatccagcctccatagaagccccacaagcaagcttccatcagaaaccaagaagaacacacaaaaataaaagaaaatgcggcgacatcctaaattgccccagattctaagcatagtatcgcttgacagcatcagagttcacgggtaaaggtagttcctcgccatccatgttggtaagtaccaaggctcctccggtaaaagccttttttacaacgaaaggccctttgtagttcggggcccacttccctcgattgtccttgacagcatgggacatctt

SEQ ID NO: 274904 - DNA, 435 bp, Glycine max
agcttgtaggattatggggtacccatcacatgtggtactacgtggcagtcgggcgatggtgcacaacaagtttttcacattcacaaagcgcgcataaacccaccatcccctgttgcccacctccaactgagctcacgtacttccacgtagcccataacctcgtttctctcaacaccgggtccccatcaatcctcccaagcttccccaacatcaaagtaaatcaacattcaaacagcacaaattaccacagccaagaaaacagggcaaaggcagaaaactctgtccaaaacaccaaccaaaatcacagcttttctcacttaaagaacccagtaacaattccttcgatccaattcgttaaccgttggatcgactccaaaaatttactggaagtctatagtacataagcctacattttgaccgttgggatctactagt

SEQ ID NO: 274905 - DNA, 468 bp, Glycine max
tcattaagaggcttcctccagaagcttcctcgtggcttctttgagaagctttctcaagaggcttctttgagaagctagatccttatctatccacacccctctattaactaaattaacttccttaaaaataattacggatgaaaataacgcaacaaatattcaaacatcaaacataattactaatagtatatagatatatatatatcagggtgttacaactctcccacccttttagaaatttcgtcctcgaaatttaccttactcaaacaaggatgggtgagcttctcacatctgactttctaattcccatgtggcatcttctcctgatgcacctccccagatcaccttgaccaacagaatctctttccctcttaggtgttttgtttgcctatcctcgatcctcaaatgcaatgtttcatatgtcaaattctccttcacttgtacataatccaattcaatcacatggga

SEQ ID NO: 274906 - DNA, 280 bp, Glycine max
  unsure (1)..(280): unsure at all n locations
cagcttgtcattaacgttgaaaccgcagcttctgcttctgctccncacttctccgctcattctctgataaaatatgtgtttggggtcctcatcgttgccatcgcttccatctttgcgtgagatctcagacacttcattgtcacgtcatcatcttaatttctttatggttcttttatgtttaattcttcatggctgtccaattaatgaattattatgttgacgtattttcgtgttgttgtatcgtgatgtcaacaatacatgtctaatatgatttggactg

SEQ ID NO: 274907 - DNA, 417 bp, Glycine max
  unsure (1)..(417): unsure at all n locations
ttggattcatgaactgcanaaccaagcaaagtgtgttacatattaaatgtgtccttatcggaactatatgcatcaattaaggtacttttggcctatattaccatgtcaatgccagcagaaactcctgcttcaattgaataagtgaagtttgcgtgaggtggtaaagtgatcctatcaataccctcaaaatctgaaataacaaagccctggtgtaatcaacgaagaggtaaggggttatttaaaatagtgttcataggatgataaacagattcaatgctatattcgacaaagtattttaccttgaaatggagagtattcttgaggtagccagtaataaggtcattgatagcatgcatttttactccattccaactggagtaagagaccataatggatgccacacccttgctgattgag

SEQ ID NO: 274908 - DNA, 250 bp, Glycine max
gctgcagctattccgtagctaaatatccattggtggtaaatcgctttttagagaagatcaatgaatgtggcttctacaaaaagctgatataacttgtgcataagctaagctttctggcccacaacaatagtgtgcttcttttggcaaaacagcttatccattggagaaggtacgattcaaaaatctctgaagttatcacgggataaatgccacatacagaacgatggtgtagaatgccttcttatgtcct

SEQ ID NO: 274909 - DNA, 237 bp, Glycine max
tatctcacgcttcttctgcccgtgataagaattgtttacacgttactctgttttctgtgagataactgggtgcgtttagaggtcaccatgcctgtacatttattcttttctgcaaaccatataacatacatggagcttgaaacgtgactggtatgaacagatgctgaactaacataatcatggcacagatgtacgaatgcttcttctagatagaattctgtcaccgagcaaccttat

SEQ ID NO: 274910 - DNA, 445 bp, Glycine max
agctttgttggctttaccagaattatattatataaattaaatttatagttttattgacaattaatcatatcttaatttttattctatttcttataactcttttattagcttctactatatatagagagagaggtaattatactagaatgagagttgaataatatgttactcacattattaaatcttttccaatgacagatttttattaaataaacaagtttatttaacaacttttgtctagtgactaagataagttttcttaagtacaggtgaattggtgtccaatgatatataaaatttattcttcaatgaacatcttgtgtttagaatgtattaataataaactttgaaataatttaataagctaaagagaaatggtaaaaatacctcattttatactggatcaggcaatctgagttacgttcaattctgcgccaccaactag

SEQ ID NO: 274911 - DNA, 229 bp, Glycine max
tgataagcttgatccttgtctatacacgccgctctaatggctagattgagttccttaacaataacgactggtgagaattacgctccacatattctcacatcaaacataattactaatagtatattgatatatatatatcagggtgttacaactctcccacccttttagaaacttcgtcctcgacatttacgttactcaaacaaggacgggtgagcttgtcacatctgac

SEQ ID NO: 274912 - DNA, 527 bp, Glycine max
agctttgacttgagtcatcaagagattataaatttgtgatcctggcatgagtttcattaacagtcaatctttcgagatctttcaacacttttctacataattttctaattcatttctcttcatctctctaaaagcttttgatcgacactttctcttccaagaaaagatctttgttcaaacaacttgggttattcatctttttcattctcttctccctttgccaaaagaacaaaaaggactaaccgcatgaattctttactgtctctcttctcccttacaaaagattcaaaggactaaccgcctgagaattcttttgattcttcccttccccttaaccaaaagatttcaaaggactaacctgcctgacatatcttttatttccccttacaaagattccaaggactaaccatctgagaattctttgtccccacacattggagggtacatcctttggggtacaagcagagcgtccatatacttggggatttttatactgagaacaagagagggtgcatctcttatggatc

SEQ ID NO: 274913 - DNA, 1173 bp, Glycine max
  unsure (1)..(1173): unsure at all n locations
cgccccggnnttgagtcatgctttcgnccccggcactcccatctcccctcttagattatagatgcccgaaggtttgtacctacctttatgttccctcccttacttagctcatacgcattctttcttgcccgtacctggtgtcactttgaggcccattcttttctatattaaattctttaggctctcagccaagaaatcaatgtcctcccaagcgggctctccacacacttgggcagctaatctaatccatacatttcttcttccgttaattacctggacgtctctttccttcataataatcactttggatagaaaccaaactccttgctctctcgaaatacatttgaatgggttggggggggcacaaccttcgcccacaataactatttccttattacaatcctcttttcccaggttatcttctactaacatagggcctcttttttcccaactagaaagtgntgagtccaactaccctcggaaaatcatacaccttctcctggaacggcctctttgcggtccctcggacgcaaccactgagaaattctcttttttcctccatgaatccacatcttttgttataagggcaatttccccacatatccctagaaatgtgaacctcttgtgacgccactcgtctaatcccacctccctcattgtatgtatagcgcacaccttttcttctttatatagagtatgatgagaacatcagatcctttcttaatacacactgtactctcacactcctcctctggtgcacacctctctccgacgagtgtattatatcgtctgtgcgtgctctcacacacaatcnagtttgctaacacatcctctctctctaccaatcgtctttgtcgccccggctctacttctctaccctctcacttcgcgtcactccaacagctctatcgcaatacactacttacgatccaccttctccatcatatttccacacaccacatcttggtctgccgtctcctcatactaccctgcttatgacgacatgacgcgtcttcctcgtcttgctcctgcgctgtactanccagctcgcgtgtctccgtacttctatcctctattcgaatctctcctctcttcacctctgtgtgtggcgtgtattcatctcatccttcatatctgttctcgcaccgttcatagtcctatctctctactacg

SEQ ID NO: 274914 - DNA, 540 bp, Glycine max
agcttattgtcatttgtcaaccttttcatacaagttttcgggttctttgccattgtttctttctaattaagtttgaatggagatcgaaatacaagtctgacacgtctgtcatgtagtgattggcattatactttttttattgggtcattttaaaattgtgtagggtcattttttaaaataagaaagagtgaatattttttttagtttaagatatccctccaaaaaaaaaaattgatactttaaattcacgaatctttttatttacttctaacccattaacaagggatcacttgatttccatccgtactgttttaggataaaaatataataatatatttaatttttttaaagggaaaatttaatatataatattataaatatattacaaaaacataataatatataaagtcaattatgattatttacaaaaagtagataaacatttagaaaatcgtaagtaaaagaaatgtttttatgacttttattatttttaaactttaaatgagcagtagaatatatgtacaatttattcttttcata

SEQ ID NO: 274915 - DNA, 361 bp, Glycine max
  unsure (1)..(361): unsure at all n locations
tgcatgcatctaccttacacagaccccactgggtgggagcctcaaatatgggctcaccctgattttccttaaaatttatgtngctttaaaatgttgagaaacattccttgaattccctattgtcaaatagctgctacctaggaatctggacacgggtggaattaccatactaaaaaaggtgggagatgaacctggaaaactggaacaccagaaaagccgctggaaacaaagccagatttttccctctcctgggtaactcgagcatacattattattactatacagctcatcaaccaagagctaggttaatagatgatctcatggattacaagctcatttttaaacttcacatcgacaatgc

SEQ ID NO: 274916 - DNA, 572 bp, Glycine max
  unsure (1)..(572): unsure at all n locations
agcttttaaaagaactgaaactcagcttggcaagttggtagatgaaatgactaaagttgtggacaaaagagaagaagagtatgcaaagattgaagcacatcaagaaagtattcttcaagttaccacaatccatcatcaattgattaacgaagaagaaaaggatgaagcctccagtactccagataatccttgcatggcaactactggctatgttgtaggtacagataaaggttgattggaactcagtgtggaggatcagaaaatctcttttgacctctttgaagccatgaaacactcagatatgggtaatgcctgttttcaagaagaagaggtggagcangaaataacatcatcagctttaaccatgatattacattttcctttggaaaaagaacctggttatgtggtagactgcttagtttgcgatgaagagcctgatgatccaaaaaacaactttattggtcatgtggtttttgaagaattaaaaaaatttaaaccaacagaaaaagcccaagcagaattaaagatcctttccacgcatttaaagtatgggttttgaaaaataatgagac

SEQ ID NO: 274917 - DNA, 465 bp, Glycine max
tcatgatgaatcaacaatgatgatgacaacaaaagatgatgacaaaggtgatgaacaaaaagctcaaaagatcaaagaacaactcaagtgaatcaaagaacatctcaagtgaatcaagaacaggtcaagagttcaagaatcaaggagaattcaagactcaagaagaaagcctagaatcaagaatcaagaatcaagaatcaagactcaagatctcaagaatcaagatcaagattcaagaatgaagaaaagactcaatcaagataattattaaaaagttttttcaaaactttgaatagcacatgagtttttgataaaacctttaccaaagagtttttactctctggtaatcgattaccatattgttgtaatcgattaccagtagcaaaatgagtttgaaaaagttttcaaattgaatttacaacgttccaaatattttcaaaaagcttgaatcgattacaatgtttt

SEQ ID NO: 274918 - DNA, 529 bp, Glycine max
agcttcttgaggaagcctcttaatgaagcttcttgaggaagctacatgagctgccttggtaaaaacgttgcccagccttcgataaccgttggatcttcgtgaattttggtttgcagcttcacaagacaattgtacacgatctgcctgttgggatctttgagaagatgtctggagtgtgtgtgaagcttccgttcccgagagaatttctcatttaagcatttcagcctttgctttcgtgtagcttaggaattccttctcctttctttcttccaaagtcatttctaacgccccaagcattttcttcatcacccacaaccaccattagccatcacaaaccgccattgttctccattgagacccacattgaaaggaaccctttaaccgaaacggaatttttcaacttggctcgcgatttctgtagagaatgaaacccctatctgacctttcatttttcttcgaggtaccatggatctatgcctgttcttggtaaatcagcctgcctttgattttttctgaacttggacctcca

SEQ ID NO: 274919 - DNA, 273 bp, Glycine max
tgaaggtttgtacatgaccaaatctttagttaagcgtctttacctaaaacggtctttgtatttgtttaagatgcatgaagatagatcactatgacaacaattggatttgtttaataaactgattctagatcttgaaaatatcgatgtcactatatgatgatgaggatcaagctttgttattgttgtgctctttgcctaagggttactctaatttcaaagagactttattgtttggaagagactttgtttctcttgatgaagtgccagctgctc

SEQ ID NO: 274920 - DNA, 529 bp, Glycine max
agcttgacagctgggaacttatgaggaaatacttatttgggattcaatcccctaatgaaacatctagtaatttatttatttaacaaaaattccgatatctatcccaaatagatcattttaatcgggtgaagaacattcataaaatgatgaacttaaattttcatcattacagtttttactacacctaaaatttggacttaaaatcttatttaaagaaactaatcacccctttcgtgttgtaatattatttaaacaaatctagcatcatatataactcgaacaagccttatattatttataacacatcatatatcacatagtttaaataaaggccaataattattttcgtccctaaatgtttaaagcattaataaaatttattcttgaaagataaaaattcaaattttagttctcaaaagtgaaaaagtgtaaccaattcatatattcgctaaccttcaatgaaagaaccctgtatgacatatccagaaaccaacttgttccccattatacggccagacaaaatgactat

SEQ ID NO: 274921 - DNA, 286 bp, Glycine max
tgcccagtatcacattaatgaacttgcacatcacatggcattttagagttatatgaaaacattaatgttgattatgtagcctcataaaaagcaggcgtgattgagtcgttcgtggaggaagccgaatcaaagtaaacaacactccatactaataatactgccgaaatagatcagaccttttcttgtctatggtggccctattatggagtggtccgcccctgatccctttaatcacccactgggggaagccactggctaccttttttatattcaaccgtccggaaaa

SEQ ID NO: 274922 - DNA, 479 bp, Glycine max
agcttccacaacatccaagcaaaacaacattcaaacagcacaagctatcacagccaagcaaaacagagcaaaggcagaaaactctgctcaacacatcaaccaaaatcacagcttttctcacgtaaagaccacagtaacaattccttcgatccaattcgttaaccgttggatcgactccaaaattttactggaagtctatagtgtataagcctacattttgaccgttgggatctactagcaaacatccagaactcattctgcactagactttccacagccaaccacacacaagcatttttctgcacttgtgcaaaattctgttgcacaatttcacagcaaaaattctgcataagtgcagatttcgaaaatcacccttcctctcatccaatcttgcccaaatcaaatcctacaagtcccaaatcatgtatcaaacatgtctaaaccaaagccaagcttcaaaccacagcaacacaaaaatc

SEQ ID NO: 274923 - DNA, 620 bp, Glycine max
tcttagtttcagatgatgcagatgggtttgtagctacctcatgcactcctctaatgactatggcatcatttctggcgctaaactgctgggagttggaggccatcttctcaattaaatttttggcttcagcaagagtcatgtctccaagggctccaccactggcagcatctatcatacttctctccatattactgagtccttcataaaaatattggagaagaagctgttctgaaatttgatggtgggggcaactagcacatagtttcttaaatctctcccagtactcatacaggctctctccactgagttgtctaatacctgagatatccttcctgatggctgtggtcctggaagcaaggaattttttttctaagaatactctcttaaggtcatcccaactcgtgatggaccttggagcaaggtaatacagccagtcctttgccactccctctaatgaatgaggaaaagccttcataaatatgtgatcctcttggacatctgggggtttcatggtggagcagacaatgtgaaattcttttaaatgtttgtgcgggtcttcacctgcaaggccatgaactttggaagcaaatgaatcagtcccattttaagaacatatggga

SEQ ID NO: 274924 - DNA, 472 bp, Glycine max
agcttctgcaattaattttcattacaatgctaacatttgttttcttcaatattaactgatagttgaagtaagaataatccatttatcatactctaaatatgcttagcattaatgggacgaagaaatgtcttcttgcagaaggatggtgtactgttcttgcaacaaggcaggttcgtccttgaactatgaatttaatttgtgatacattgtgcataaaccttcatgtaatgcagtttttactggctggtatagcttattaatttgattcaatacttgacggattcacatagttttgcaccgggctattatggactgcacatcttaagatgtggcgaaattccaagctttagagacaacggaatcaccacctacctatttttgcacaaacaaattaacttctttccaaaaaattgttgatgcctatgggtaatttacgtagacctgagcatgttgcatttaaaatgcattccct

SEQ ID NO: 274925 - DNA, 542 bp, Glycine max
tgccgcattacaccaagttgctgaagggccggttgttgtctaagttgctgagccacataacggagacggggtattccctcttgctccccaaggcttctttgtgtcacttgaatgtggccactgatggcatcacgcaaacaccgaaagtggggagaaattgttcttaaagcaagtgtaggatatggttctgctgctccacacccggcaaccatgtcaaaagatgacaccacaatctgcatctgatggcagtactggctggatcttttatctacctataaccagtggaaacaaggaatcttttatggagtccgccattggccgacactatcatgaattcataactaactgctttttcaatagttaaacacaccgttcaaactatgggagcaacaaatgaattctacaaacattatagatataactgtagagcaatattatgccctcttaattaatcgtcattcaaatagaattaagaacgtctaaactgtgtgaacatccactatataattaatggctttatggtggtgcaccagttcaatctg

SEQ ID NO: 274926 - DNA, 369 bp, Glycine max
catgccagcttggagcatatgatttgcatgcttctgcttgagggggagcgttaaaatattgtggataaagctatcttgacgagacacccgtgttgtgcgggtgaaaacaggtatctcccactccttgaaccctatatatatatatccaatagtgtgcaataaaatctgaggggcgaaaattcaaatttccccgctactctttgacggacctttgccacgccttcttatatgatgaaatattacccttattaacttatttttataacaatgcatgcccttcatatatattgcgtacttcatttctatgaaacattggacacggcatggcaaaagatgaaaagctgagccaatcgcatgaaacatggaagc

SEQ ID NO: 274927 - DNA, 464 bp, Glycine max
tttctaatactcaatcttgattggagctcaaaattaacaggacggcatcaagtcttcatacattgacaataatctatgaatatcgttgcacagctcttgagacccttctcgcttctaaggtgcgtcagaagcaggtcgagagatgtcgaatcaatgagatttcaagactcgagaagctagctctctgtgaatattgacgattctttatgaactacgttatatacatggaccatccatcatattatcgaatgcttactgccctttattttaccaattataaaacattattctctaaacttggattatcacatgagttttctatataagctcatccaaagagtgattactgtctgcttgtcgattgccataccgtatttatcgattatcaagctcaaaatgagttctaccatcaaaacaaagtgagtgttcatcgtacaacctattagacatagctgtattcgatt

SEQ ID NO: 274928 - DNA, 564 bp, Glycine max
agcttgtaatcgattacacatatactgtaatcgattaccacagaagattttcagaaaaatattctcaacagtcacatgtttttacttggttcttgaatggccatcaaaagcttatatatatgtgacttgagacacgaatttgctaagagattttcagaacaaaaaggtcttatcctcttaaaaagcaaaatcgttttatcctcttacaaattccttggctaaaacacttgtgattcagtaaggaattatttgagtgctcaaattgttcaatctatctctttcaagagagatttcttcttttcttcttcttcattctgaaaagggattaagagaccgagggtctcttgttgtgaaagaattctaaacacaaaggaagggttgtccttgtgtgtttagaacttgtaaaaggaatttacaagatagtggaactcttaagccgattgcttggggactggacatacgcacaacggtgtggcccaaccagtataaatctgagtttgcattttctcttcccttacacccccttaattattattgctttatattcatattcaaattgttcta

SEQ ID NO: 274929 - DNA, 434 bp, Glycine max
tgccgcccagctcgcccaggcgagcaaggttgctttctccataacgaacggcccaagtgggcctggttgctatttacacccccatttttactaaatgcaccccctttctatttttttgtaatactttttccgtaacgttacgaaactttacgaattccgtaacgatacttattttccttctgcaaggttatgaatccttaccgattatgtatttactcttttttagctttcgaagaagttacggaaacccccggattgcgcaaaaacacctattttcgacttccgccacattacagaatttcacggatcgcgcaagcctgcttacttttaatttctgagacgtctcaggacttcatttactgtgcaacaaaggatgccaagtatctcaaagcggctaaccaaaagttacatgtgatcaagtaataatccccgac

SEQ ID NO: 274930 - DNA, 410 bp, Glycine max
agcttgtgcattggataaaatgaaaaattattgttatagttacaaggcctatgtggccaaattcccacaaagaagagaaaagatattgacaaaggcaacctagacacatgcatcacacttgctccacaacaccctgtccttcattagcagcttgctcctcctccgtaacaatttcctcttgatcaagcaaaacaccattattcacatccttgaagggatcgaagagacccaagtcaaggtccttcataaaaaatttggcctgtctgacaaccttttgaaagcctttttcatgctggtccatggcctcctttttgtacaaaatcaactcttgcttaagctccttgctggcctcctttccttggcagcccgcaacttggacttctccagtttagactctgactacttaagtc

SEQ ID NO: 274931 - DNA, 330 bp, Glycine max
tgttcgggtagagagagatcgatctcgagttcatatcatggtcttaaaggaggagttggcggagttagctgcttgctcaagatccaagaggagtttgacccaacacttagaagccacacagcagagcatgctaactataatagggcagtacacagaggagctaaaccaatctttggctcatgagcaagagcttgattaggactgcgcacaagcatactccgaaaatgacgcaagagggaaggtgattgatgccttgcttctataagcgaccatgtggatggatatgttcgccttgaccttaaatggaagacaagacctgccgcgactact

SEQ ID NO: 274932 - DNA, 317 bp, Glycine max
agccccgtacattttgcggaaattcttgttagtttacataaaacacaaagttaattaggtctcatcttccattataaaactttctactgaaagaagttcttttcatcatagacaaaatgctactcttttaatcatagactctctctttatcagccttagacctattggcaatataaatgctttctttattgttatgactctataagtctagtttgttgcataataatgggtataatttagattacagataaacatcaccctgggaatggagatcacgtttcttaatttttttccccacctgttattgggtgggacat

SEQ ID NO: 274933 - DNA, 467 bp, Glycine max
tagcacctggaacccgaacgatccatcgactagcctgtcaatgttgggcaaaaggtatgcatctttgggcacatagtatgcatctttatgacattttctattttttgttggcctttttgaccatgatgacattggcttgccaggtggaatacctggcttctcttatgaagttagtattgaaaagtttgtccacttcttctcttataactttgcggcggacttctttcatcttccttttcttctgtgatatcgatttggcctatggacaaatggcaagtttatggcagataatgttggtatggagtcccgacatgtcatatggctgccaagcaaacaaattcatgtttctgtgtagcacgttagcgatgcatcgatgctcatggctggtgaagtccctactgagctacgtacactacccgggtttaagtttgaattgcaacttgatgagctcttcgatgggtttgggg

SEQ ID NO: 274934 - DNA, 927 bp, Glycine max
  unsure (1)..(927): unsure at all n locations
gccacgccgactggcctgatggcccttctccccctcatacactctaccccccacatacgctccgcaaaccttcgtatncaatctcttatccccactgcgccgccgggcggtgatgcatttctttcctttcgggccacggatacctcgagagcagcttcggcatttggaatttatgtacccggaacactgtaatcctttggccatcaaaaacataacaagaggtcgtgtgcgaaatatacttggaggcacttgggcgccgcgagaataaccaaagcttgccaatcggcaattctcaaggataaccccttccaaacataccgatatcggctcgctttacttggccttggaggcgggacaactaatgggattaaaatttcaattgccttttgccttttggaaggagaaccgataacactgtggtctgggctttaaaacgggtttccaggcattatcatgacacctgatgtattcctaatgctgtgggggcgaaaaaaccccaggtttattaatgcaaaaaaaattgtttctccttgaggccggtaactcgtttgggatttcaaatcgataactgacgttgaaggaaaaatggaacaaccttgcggggtaaaacagcacctggaattttgccctaggagcatacgggagcttggtgaactgcccttttgatcatgcgttcccagaacggctttttaagattgcagatgcttgcgtacttcggccagagtttgtcgaatattgaaacaaaaaatggttggatttcccgcacaaaaaaaattggacaaactcgtcgaagacaaacgtgaatcgcggtaacaaagcccggacatttttaacctcgaacactggtcattaaaaattggcgtcggcaaatccccccatagactggatcaaacaacttgcttgtcggctttacaacccaaggttgcc

SEQ ID NO: 274935 - DNA, 425 bp, Glycine max
actatctagaactgaagctatcgacactgtggaagcgcgaagggttcttgatgtactgaacggcccatatactgacattggctgggcctccatgatgacaaacgactgccccgcatgatatacatgtgacataatgtgtgcgtgactatacagatactctacctagggcgtaccgagactggttctgcgatagcaacgaaaacaaaacgtacggactatataataactcttttaatcactctctagagagtacggacactaccggatcgcgcaaaaacacctctttttgacttccgacacattacggattttgaccgatcgcgcaagccaggttgcttttaattgctgagaccgatcaggacatcttttactgcgcaacaaaggatgcctggaatcttcaggcggctaaccaaaggttacacgtc

SEQ ID NO: 274936 - DNA, 472 bp, Glycine max
agcttatccacagtagaatcagcttgatgtaccacatactgcaatgtatgtgtcatgctatgatgaaaacttccttggccaatgtagagaactgcacatccaatcctgttaacacagaaaaagtgcaatttgtaatacagatccaactaaacctgaaaccagtaaaacagaaggaagagagagatgtgtacaatgctgtaaatgtgaataatatcacgagaataagggaaagggcatagcatgttggtgaataaccatatggctctcttttatgacagaagtaacaaacaccgatgatcactaagcataagccaaagcccaagaaccagactgctgcaatactgaacaaaggagctgcggtatatgccacagactgcattcaataaaaaaatagtaagtggactttgtttcttgaaattcaatattgcaaagctaaccagctagcatagtaagcttaaagtgctcaaaactg

SEQ ID NO: 274937 - DNA, 281 bp, Glycine max
acactatgaatctcaagcttcctcgtggcttctttgagaagttttctcaagaggccttctttgagaagctcgatctttatctacccacacccctcttttaacctaagtaacctttttgaaaattattactggtttaaataacgcaacgaaatgtaatcggacatttaacctaataagctataatttttggatatatttatcaggggggtgcactcttggctcttattgggaattaaaacaagactattcttttttgaagattttattttttttacccatga

SEQ ID NO: 274938 - DNA, 451 bp, Glycine max
agcttctgtccctgagaaactggttcccagattacaacagggagtgaagattgctgaaaaccctagccttgcaacaagtcctagggaagtagacacggagatggacaagaaaatccgcagtattgtgagtagcattttaaaagacgcctctgttcctgaagctgatgaagatgttccaacatcttccaccccgaatgtttctgtgcctgatgttgagaaagatgttccaacatcttccggcccaaatgctgaagccctcccttcacccagtgaagaggaatcaacagaagaagaggatcaagcctcagaggagacccctgcaccaagggcaccagaatctgctccaggtaacctcattgacttggaagaagtcgaatctgatgaagaacccattgccaacaggttggcacctggcattgcggaaagacttcaaaacagaaagggaaaaacc

SEQ ID NO: 274939 - DNA, 521 bp, Glycine max
ttgtagcagatgccactctactctaaattcttgaaagatatgttagcaaggaagcataaatatattcatcaggaaaacatcatagtggaaggaaactgcagtgctgtgatccaaaagatccttccacccaagcataaagatcctgggagtgtaactattccttgttcaattagagaagtcaatgtgggaaaagctcttattgacctgggaactagtatcaatttgatgccactatccatgtgcagaagattgggagagttggaaataatgcccactcgaatgacttttcaattagttgcccgctccattaccaggccgtatggagtaattgaagatgtgttggtcagaataaaacattttatcttcctggcagactttgtggtaatgggatatctctgaagatactgacatacctgtaatattgggaaggccattcatgttgaccgcaagctacataattgatatggggaaaaagaagctggagctaagttttgaagatcagaaaattgaatttgatttgt

SEQ ID NO: 274940 - DNA, 492 bp, Glycine max
agcttctcttggaccttaggcaaatcctcaattcatccttcaagatcaaactgtctactcgtgattggtccctttcctctctctggagcttaagctcgctgttactgccctacagagcccctcggaatttgttccggccatgttctttcctatgggcccttttggtctcttgttccaaggccttggtggtggctatatttacgtctctcagttcggtgttctcctttccgatcctaatagctgctgatttgaacttttctttgactatttgggctttctcaagttcttccctgagggcctgaacctcttcgccctccttcggagcttcaacttccacccccttagtggttttcaaattcgagagccaatccagaccttgcatgtaggctttcaaccacctatggtagccgccgatgggcccgttgctactgcccttgaattccttgtccttcttttgcaccatcttccatgccttgcgcgttggtgctattg

SEQ ID NO: 274941 - DNA, 689 bp, Glycine max
tgcatgatttacatctccctctttctcaagcaaattcttcttgatatcatcaaaatcttcgtgatttacattctccccctttttgatgatgacaaccacctgtaggttaggagcaacaacaaagaaaatatctatttgcatatagtttactcccccttggttttacaatgattgcttatatgagacaattgaagatttcatatttttcatatataaaaagttgtctcataaaacaatagataatttttcttactattttatcttttatctttctctccccctttgtcaacatcaaaaacaaatcatgaataaaaaggagaaagatgttaccacttgttgcaatgtatgagaataagtgataccaaaaggcattaaaacaatcattcaatattaatcaagccaaaacaagttcaataacacatcaattaaacacaatcaaacacaatcaatcatcaaatatttcaaatcaaattaattaaattaacaatcaactaactatacacaataatttctatttataaaaaaaaattcaaaattcaaatttcaaatttccagattttttaaaatttagattttaaattttaaattctaaatttttaaattccaacctttaatttcaactttttaataaccttcccctttcaacttccaacctttatttttaactttcaatttccataacttttatt

SEQ ID NO: 274942 - DNA, 539 bp, Glycine max
agcttgtccatgaaagctcgagtggtgatcttatcgacttcgcaagcatgtatgaacggattgttacagatgattttgggtgtaccttttcttttgctaatagtgtgtttgatctattcaggagtgtctttttggcctttgatcgggttgtctgcaaaacattttgacaatcactaatttctgctccatctattatttctcagtggtatgtacactccttttaactagaaattgtctgatagtataaggggatttaactagtggagcaacatatgggtgaatagttgaatattttctggtattaaagtccaatttctccctttaaataaacagaaaaattatcatatagtataagatcattgccccttgttataatgttgactaatctctatatgacatttaattaagttgttaagtttgcaatttttttaataatattaattatgggttatgtgaaaactataagaaccatgtgatgaaaacttgggattacctaatactttttcattttacatattttttattcactaaattttatt

SEQ ID NO: 274943 - DNA, 403 bp, Glycine max
ttatcataaatattatattgacatcaaagtcactctatttctttttaaagtaagctatatagtgaaaaaaaaatgaataaatgcttggttgaaattattcaccaccaattccctacgaccacccttttcaccacaatgatgaatgggaaaacaaaaaagtaattaagtacatttcttgaagcactttaaaatttaaatgttgtctgcaatttggttttatagttttacataggtttaataatgtgatatctacacttgacaccttttcattttagtccctatttgaaaataccttagattttacaaatcaagtcctgccatttattgaaattacaacggtgttgaatttggtctctatactccacattggttttttattttaatgttaatccttatatgaaaa

SEQ ID NO: 274944 - DNA, 419 bp, Glycine max
agcttgggaaatcctcatgttacaagctggttttgcggagttgaattacaccctaaaaccaaattctaagaatcatgaacgatgaactctggcatacaaaatatgaaaggcggccacggtaaattaacataacaatgttaagaacattgatggctctgcaccagcaatgaacaagcctaacgctatgaattgatctgatctggaagcaagtgacagtggctccaggttttcacaaaaaaaggtttgactcatccggactgtaccatctgactggttcaccagttttttaaaaactcgctgactcccaacggttcatactacgctgtatgcatttccactctaatatgccacctacaccaaattacctagctggtccattggtcctaccaaccagaccaatcttattcataactctggtt

SEQ ID NO: 274945 - DNA, 375 bp, Glycine max
ttaacttgggcgtttgtaatggaaacaaggatgaacaacattgttttccttataagagggcccatgagacagcgcaataggccctcctacaataggtgaacatattctaccaatagcgggctgtggctatacctgctattgctctagccgatgctcgacatcaaaaggtcggcatgtgaaatgccaacattctacaacgttatcctaaagtataatccccttaccgcgaggggtcccattcgaggaaatatgatatctgctacaagcatggattgtaaaaatgatgaaagaccaagctagcattccttcatgatacacgcgccaatttaactaagaccccgaaataaatgaaaatacatttatttaaaagtcata

SEQ ID NO: 274946 - DNA, 436 bp, Glycine max
agcttccacaacatccaagtaattcaatattcactcatcacaaactaacaaaaccaagcaaaacagggaaaaggcagaaaactctgcccaaaactcaaaccaaaaatcacagctttttctcacttaaagaccccagtaacatttccttcgttcaccgttggatcgacttgaaaattttactggaagtccctagtacataagtctacattttgaccgttgggatctgctagaaaatgtccataaccacatatgtactacccttttcatagccagccatacacaagcatttttctactcttgtacaaaattctgctgcacatttcaacaacaaaattctgcataaagtgcagatttcgaaaaccactctttccctcatccaattttgcctaaattgaatcctacaagtcccaaatcatgtaccaatcatgtctaaacc

SEQ ID NO: 274947 - DNA, 430 bp, Glycine max
tgaagtgacctattatgatgtgtgtgggccttttaaagtgatatccctaggaggtaacagttactttgtgtcattcattgatgaatttactagaaaaatgtggatctatctcattatgcaaaaaagtgaagtgtttaacatttttaagaagtttaagttattgagtgaaaaacaaagtgataaggtaatcaaagggcttagaacaaatggaggtggtgagtataactcacatgaatttcaagtattttatgatgaagatgggataattcatgaagtgacatcttcctatacacctcagcataatggtgttgctgagagaagaaacataaccattctgaacatagccaggagcatgatgaaagggaagggaatacctcattacttttggggagaagcaacttctactgctatgtatattctgaacaagtgt

SEQ ID NO: 274948 - DNA, 429 bp, Glycine max
agcttcagataaaatcttctaaaccttttcccttgataaaaacatcagggactaaattatgccaattcctctttcaaggacacattgtcatccctctgatctatatgctccaatgctcctctatccacaaaatttaccattctgtgaggcacaaaagccttaagtaaaatgagttgcttcttaattaaaactcctattcttcttgtagtgcttcttctggggaaagtactccagacttatctatacatgtggcatgacaagtaccaatgatcaatgagagtaagttattccaagattttttcaccagttgaaaaaagattaaataccacagttccaaccaaatacaacccaactgaaaccttgaaaacatcatcccaggagcctgaaaatagtccaagaaaaaaaacggcaatatattcttgtcccaaa

SEQ ID NO: 274949 - DNA, 523 bp, Glycine max
tgccaccaagctcgcctaatgatgggtgccaagcacctcacaaggattgtgcatcaataccttcttttgatttccggcatgtcccggaacttcacaaattgcctaatgatgggtgccaagcacctcacaaggaccaaacaaaagttgcatgccaccaagcaaaggtccccggacgaaattagggtacggcagttgcccctctttacttgtcttttattggagataaaagggaagtaaagataagacactaatttcgttcctctcggttgacgagagtcgcgggtgaccataacatcttcgcatgcaaatgacttgtgttccccgggggaacaaaaggtgcagaagacgatgtcagtctctgcatgctatcaagcgttctgtcttacagatagcaaaagaatgtttatacggataaccactcgggtatttccgcccgtcagcgtgactcaaaagtcagtatgacagatcttgtgagcgccgaagatgacgtaaatctctgcgtgtcaacgggcttgtcggccgc

SEQ ID NO: 274950 - DNA, 352 bp, Glycine max
agcttgaccaatcccgacccaacccgggcatagtcggtcagtgagaacatgtgacgtacctaagcaggcgagctcctggcagtcaacagataaaaggaaaacaagaccacagagcaaggaggcttgtggtggctggccagctgtgaattttgtgtaatatgtggattgtggcctctggtaatcgattaccaagggtgggtaatcgattacaaggcttaaaattgaagacagggggctaagatggtctctggtaatcgattaccaaggggtgtaatcgattaccaggcttgaaaacgaggtcaggaagctagggaagcctctggtaatcgattaccaaggggtgtaatcgatt

SEQ ID NO: 274951 - DNA, 446 bp, Glycine max
tctacttatgtggcagggcgggcttccttcaccttcttgtctccaacgtgaactttgaccattgttcttccttcccgcgatgcttcttttcatgtccgcctgagtgggcttatagcctaaaccatacttcccacgatttgcttgggtatttatcaggctagttatgccgccggtgttatttcctaaacccatcccgggttcataaccgttccccaacctaactttggccattattaccggtgcatctgacagacaaagctgcccaaaaagggagtccccggaggaaatgcttaccccctcaaaagactggaaagcagtttctgacgattcttctggggctttcacataaagcatggaggatgggccgcttaccaagatatcttcctcgcctgacacaaagaccaagtgcccctccactaccaattttagcttttggtggagtgtta

SEQ ID NO: 274952 - DNA, 520 bp, Glycine max
  unsure (1)..(520): unsure at all n locations
agctttttcatcaaaagtggaaataggcagaatggagaaaaagtacctgcaagagctcgagtgctttcgaatcttgttcagggttccagtaatcatgcttcagaaaacccccaaaattagataacgggaatcgttccaaaattagcaaacaagtgaagtgtaaattggaacggtaacgacagtgggaagaagatactttaccacatcaccgacgacgacgacgactcgaatagaggaagcggccattgaagagcgagagaggttgagttcgggctcacacaatgactgggtaggatgttggaagaagaaatgctaggcgcgcgaacacatgggcacggacaaacctttcatgaagagagaagttttgaaactgtttgtaaaaaaaaggagaaattgaaaatttgaaaaaaacaaaacgatttaaacaattttcaaaaattaaaacaatgtttattttttcatttacatcttanatggagaagaactgaaaaaaatattatattaatccttaaaaaataac

SEQ ID NO: 274953 - DNA, 333 bp, Glycine max
tggggagaatggtaaagatgttaagaacatatctttggaacatttgaacattcaagaaacaaatggggaaataattggtccagaagatgatatattacattgtgttaagaaaaatgatgaagtgaataaaacaacgactaatagtgccattaacaatgatattttgtcttctaaagatgctacagtggttgcaaatcaagtgcatgtctttatcaatgtgttaagtgatataaaagtttttgaagtgccagaacaaaagggcagcttaagtgaagcagttactgcccagggcactgagtcacaagtgcctgaaattgtcaatggttctgtggc

SEQ ID NO: 274954 - DNA, 442 bp, Glycine max
agcttcaccttttggtcctcctcatagttgttgcatgagaaaacatgctctattttcatctcccactccaagtaggcctccggatcattctttcctataaatggaggaatgttgagtttaataccatcaattcggttttgtctaggaacaccatcattccctcttctcctcctttcttcttcattatgatctctattctccatttgatccaacctctcatggagcgcatcatcttgttgtttcattaacctctccaaatgttgcatcaaagcttgcatttggaattgcgaaagccccactccatcattaggattagtacctgacatctcaaacaaacaaatcaaacgtaacaagacaattatagttgttgtttgaatacctcacccactcaagtgtatcacacaattatggcttttctctaatgaaacacttttgcctttta

SEQ ID NO: 274955 - DNA, 470 bp, Glycine max
tgtaacctttggttccttgaagatgtcttaacactttctttgcaactttctggggctccaaaacttgcccaaatatgctcaccaattctacttgaagttattgatgaactcctcttgtatacatataatggcttgtttgtaagtatgtagcaaagttgagaggagcaccacaagatacgccactgtttgaaatctcatcgtttacatgatcgtaatcaacatcaatgttaccattgtatgtatcttggtcatcttcaacaatcatgttatgcaatataatgcatgccaatataatatttttcattgtatcgatgtgtcaattatgcgaaggaccacatgtaattgcaaatcaaaattttaacacattaaatgctctctccacatcctttctcgccgaatcttgatattttgcaaaaaactttcctttattttctctccctggggcatggggatggtttttacaaagcgac

SEQ ID NO: 274956 - DNA, 368 bp, Glycine max
agctttagaattagtagtgaccatagtctaatatagaggccaatgaaatctcaaaagtgcatatctttgttctcatgtgaaacacattgtttgggcctagctagtgtttcccttaccattttctacccagtctttcagaaatcacatgtagtgttccccttcatttcatttggtagcaatctgaaagctatcactctttgaaaatgagggccctctgtctttcacttttttgctaacaattagcatgtcatacacgagctgcaaacttagtcgactcaactaaaattatgctatgcaaaagctgcaatgtgtctaatgtctatggtcgaaccaaagcttgttattaaacacttttgcccagtttatag

SEQ ID NO: 274957 - DNA, 429 bp, Glycine max
ttgaccaaaccccagcagcaatcgtatccttagagacttgcctcagcaccttgtctccgagactgagaataattgcactgtgtgccttctgcaatagtgttttcttattcccatcagccatcatcttttcgagtttgacttctccatcaagtgcttccaccaggccctgttgaacaagaagagctctcatcttcaatcgccatagcccgaaatcattatgtcctgtgaatttttcaacctcatacttggccgagctcatttcttgaatcaaactcaaaaatcgctccacgttcaccgcaccaatttgttgtgccaagatcatattttacttcacaaaagaatgagtttcttgtatgaacaagaacaagcaaaatgcatgttaaatacaagttttgaaatttacttgaaattttgaaatcaaagcaattc

SEQ ID NO: 274958 - DNA, 470 bp, Glycine max
agcttcactagtgaagagggtggtagatgacataccgaaggcgctcttggcagttgtcacctgccaaattcatttttttcagcaatagtttttccttgcaaggcatgcagtggaaccacgtgcgacaagatgtcaatctttctccgccccgaagctttcatgcagtatcagcgcaacaccattttcttctttggccttggggttctgctgatgtcacgtgccatctcaatgcaagcttgatcaaccaatccccagaaattccttgactatgacaaaaaattgactattgctttctgcaatctattttgaagctccaccttgataatactgtgttgctttacaagagtgctgagactgaattacataaactggtggaatctacatgtgctggtttcctagcattgtatattcccctactctcttgtcatttgaaacaacattgtcttggactattcaacttatattaacct

SEQ ID NO: 274959 - DNA, 322 bp, Glycine max
tgttgtatctttcaagttccaattacaatctacaatttgttgcatttattacatgaaaaacaagggattaattaactggaagtgagtcaacacttgacactcattctgagagagcttattagatcttttgaatgttatgacgattatcaatgttgcccttgctgcaaagtatacagaagcgtgaagattgaagaatccaaattcatatattggatggaatatgcacatagtatgtggggaacggcactaggagggatgtttgctttgccatattcatacctccttcataaggggtatattaccttgagattgggactgatac

SEQ ID NO: 274960 - DNA, 430 bp, Glycine max
tgccacgcttcttcttggacacttgaacaagcaatcaacttctcttttaaaaccatgctatgtgctcgcgactggtcccttttttcccttcgcaacttgagttcattattgctaccccatagagctccgcgaaatttgttccggccctaatcttccttgcgagcccttttggcctttcgttcaagggcccttacggtaattgcattctcttcccgtaacccggcacacttcttccgaacgtgtgtagcaaccaacttgaactttttcttggcgagttttgcctttcctaactcgcttttgagagcttggactttctcggcctttgtcggggctttaaaattctctctgctgaccaccttttaacttggctagccaatctaaacctcgtatgcgaactttacgccattcgtggcacccaccaatgatgcca

SEQ ID NO: 274961 - DNA, 448 bp, Glycine max
ttcacacggatgtccgattcggggagataatatatcgagacgtctcgaaattgaacaacggaagctctcgagaaaatcgaatggtcataacttttcacacagatgtccgattcggggacataactcatctagacgctcgaaattgcacaacggaagctctgcagaaattcgaatgctcataacatttcactaggatgtgcgattcggggacataatatatcgagacgcttgaaattgaacaacggaagctcttgacagatcggaatggtcattacttttcacacgaatgttcgattctgggacataactcatccagacgctcgaaaatgaacaacggaaactctcgagaaattcgaatgggcctaacatttcactccgatgttcgattcggggacataatatatcgagacgctcgaaattgaacaacgggagctctcgagaaaatcga

SEQ ID NO: 274962 - DNA, 407 bp, Glycine max
agctttgggaagttggctctggaaaattagtcatacaatatctgggtgctatacatacccagctaaagtgcccggtacataagatgattgatatgtcatacagtctattgagtaaattaatcttggtcaattcatatgctgataagcaaaccttctggtattactgatgcagatgcttgtatttttaacttgcactcacatgtttgcgctcatctttttattagttaattaacattgcttctcttaatttacattaaattgcactaacctcccctgaatttttgtaaaattacacagacacccttgcttttttaacatctgcaataacctccctttagggagtctgatgcaatactcttccaacaatgtgtaatgcataaaagggtgcctgtatatttttcaaaaat

SEQ ID NO: 274963 - DNA, 529 bp, Glycine max
tctgaacaaggtgatttatgttctgtaatttcttgcgattgatctctaggggtccagtgctgttaaatgaaaggctatcttcagggttccactgatctttaatctcattttctttggattcttgagcatcctcacctgcagaatttgattttataattatataggtgaaaaaaatcacatacttttggacaatcatatgatacatacaagaaatatctatcggtcaaatctttgggacgaatttcaggaaatgcaaattaagcatggaaaaatgtacaaggccaacataacaatttcaattatgtctaatgcatgtgcttgttttgtagctggtaccaataccattcttacatttgacagggactaactcttgacgcacatacacttcaaatcacttgaggcttgctgaaaaactagtgatccaatagaaagcaatatcatttctaggagacaaatcttacatttattttcatgcacaagtgccaatgcaagcttgatcacaacttaaaattccaagattggtatcact

SEQ ID NO: 274964 - DNA, 551 bp, Glycine max
agcttcttagtttcagatgatgtagatgagtttgtggctacctcatgcactcctctaatggctatagcatcatttttggcgctaaactattgggagttggaagccatcttctcaattaaattcctggcttcagcaggggtcatgtctccaaaggctccaccactggcagcatctatcatacttctctccatgttactgagtccttcataaaaatattggagaagaagctgctcacaaatctggtggtgagggcaactggcgcatagttttttaaatctctcccaatattcatataggctctctccactgagttgcctaatgcctgaaatatcctttctgatggtcgtggtcctgcaagcagggaaaattttttctaagaatactctcttgaggtcattccagctcgtgatggaccttggagcaaggtaatataacctgtcctttgccacttcctctaaaaaagacgaaaggccttcaaaaagatgtgatcttctttgacatttggagggttcatggtggagtagacaatatggaattctttcacaagttta

SEQ ID NO: 274965 - DNA, 590 bp, Glycine max
tttgttgggaatttctgctgagccttgatgtaaaaactctttactatctatttaatgttgttttgatgtgttcattgcttctatctgcatttaatttttgcatgcttgtggactgatcacccatgtgtgtgtaaagtgaggatttttagcattggaaaatgttttgaatccttataactggatagagtagggctagataactgtatgtctggacacagagtgtagggatttagtttttaatatgttgtaatcgtaatgcaattcatttaggctaagtttgacgagacatcctagaacgtggtttaaatagaattagtccattcacgcgaggaatcggtgtttggtgtatttgccctcatcatagaacacaaaaacaaccttaaatagaaaaaaacctttaaatacatcaagttactcagtagaagggctcaacgttttaatcatttgtttatctctcgcatttaccttgtttaattttgtagttatctttagaattgccactatatcctatgtttatttccatttcatgattttatacaaatgtctacttattgaatgaacgctttttccaatgaaaaaaactccttgtg

SEQ ID NO: 274966 - DNA, 816 bp, Glycine max
  unsure (1)..(816): unsure at all n locations
gcccccggccnatgaatgccttggattanccgcngatcctntagagacgacccgcacgcatgcaagncttgggctcttgtcctaaggcgcgaatgtgtttgctttatgattgccgacatgctgacgccgaccacctatactttgttggacttggggaaagaattcttttcaaagaatatcttattcctctcgtaccccattgggaaaccgttcaaccacctcgcttactttgacaacggcatgcttggcgggggattctaaaatgaaaggcttcaaaaaatcctatgcatggttattggtgggaccctacgttacagctggtattgaactaattggcactgtctcctcctcatggtctcaacttgatgggtttttgatcttttgatggcccacacttcaattttcttgtggcttggttgcttgatctacgctttgtgggcctccttgaaaagtgcaatatactttggtttggccataacaggaatgcccctttcacggcctcctaggggggtgggcgaactatttggggcatcagcataccttggcttgaagccatccctccgaaaaacccatgttggctccacctctttccccccccccgtctttcactctgccccggaccttctgccccaccgcccacctccccgccttctttccttacttcctggttcgcccaccttcgccatcttgctccctccctccaaactcctcctccgcctccctcctccacgctctctcttttcaaccctcccccttccgccgttctctgctgcccccctttacccatccaccatcctccccctcgtccctcacccc

SEQ ID NO: 274967 - DNA, 261 bp, Glycine max
agtacgcacatcgttcacgtgtatgatatccactccacaatgtttgtaattacatgaaagcttcaaccctataatgcaacgaggcggacaaaagtgggcagtagactggaatggtcatcattgtcaacgcccaaggtattctgcgcttcactatccatgttctcacataatcgcatcttgtggttacgtggagcctgactactaccaatatatatatgttgtggataccaactagcacattgtagaagcctactccgcgaa

SEQ ID NO: 274968 - DNA, 380 bp, Glycine max
cgcttcatctctttggatcatatatgaattacatgtgacttttttttttaattctgatgtatagttagtatttttttacactattaactaattaataattattttacatttaatttgtaaaataattattataaaaattaataattttttattataaaataatgcatttgttttaacatgaatgataacaaaaagacatatcaaacaacaatgactagaaaaagatgcaagtaactaataactttgtattaaaattttggaaatgtttaatatatttatccctatgatcaatgtaggaagttgcatgattataaaaaaaattcaaaatttaagttaaatttattgttaattattgataaatccttgtaatgttgaatcaa

SEQ ID NO: 274969 - DNA, 475 bp, Glycine max
tgggctggaagataaggatgataactgataacttacccgtgttttgacatcttcaacttgaaaagagtttaaggggagtttaaaaatctgaatgcgttgatagtttaggtattttatagtgaaatgtcatgtatagtaatattggttttttttttttgtaacaatagttttaaaaggttatatttgagatgattttgtaaaaatcgttatagtaaattagtagtgtattaaaattaaaattaaaaaatatgtggaggcatgatttaatttattttagttcattttaagccataatttattaaaataaaattttaagggcaaaattataatattaaatttttaatgataccgaactcattcatgaatttacagtcaagtatctaattaagttgtataccaaacttcattattcattcatgagttttgttgggtttccaaattcactttttcttaaaactcttaatgatatgctatt

SEQ ID NO: 274970 - DNA, 1334 bp, Glycine max
  unsure (1)..(1334): unsure at all n locations
agttagaatgtanagaagtggtatgtgaattatcatatagcatggtatattgactagcatgtcgtntgcagtgttgaatagctttatgaatatgtactaaccncatccaccaaccagccgcgaggggcgnntttggatttgagntgctagtgtgaagananctggtgtattntatatttaagaagatacgccgctggcagtggcttgaagaaactctgtgtagtgtgaacgatagaatgatgtttgttcttcaattggtggcgtcactaatataggattgaggtggtgtggaatatttgtatatagtaggaatgaatatgttnatggataaacattagcaagattggaaagcatgaaagatgttaaagacatggggggtgtgctaaatgagatgaagtctataattcatatattaaaatgaaggttggtatctcatgtggaactgattatatatagtggggaagaaaagtgtggtggctcaatctggttaattaatatgaaattgggtgaaaatgtggataactgttctaggaggtgtgaagttgaggtggtggaggtgtagaaaaaggtcttagtgggtttgtgagggaaataattaatgagagaaatgtcattggtggtcttcaattctaacgtgaattaggacagtgtatgagtaataggtaggtagcgtgagaagaagagagatcttaaaatagttgagtgaagatgaaatgtggtggttagaaaagaagaataaggaggcgggtgtgtggttgtctgatattatatataagaacaaagtgtgaattgatgtaaaatcggtaaagaagctatggatgttatgtataatggtggaggtcagtgttgatagatgtggatatgtaataatactttattaatgatatgtgttaatgagcgagtatagtaatagaatacattttctatggaagtgtgtgtagtggtagagatattggtagagacggagtgagagaagaaagtngtgggcggaagatgagatgtgcgtgatagatatgtagtcgatgtgcggatagtactgaatatatgaagatagggtggtgtaagatgcagagactcggcgatgagagtcgatgtgaggnatatgaatatgatagatgattattgttgatagaatgaacgactgtatgatgggaagaaagatggngatgtgatgatgtaagaatgtgttatgaanganatacgtatgttagtgtggtgaatatagatgttattaggaatagatgtgtgttagtagtggtatagtgagttgataatgagctacgacgtatatgaatgagtgatgattcgagnttcagtggaactgcgcgaggtag

SEQ ID NO: 274971 - DNA, 932 bp, Glycine max
  unsure (1)..(932): unsure at all n locations
gctccgcacacgaggcattcgacttcctnacaactgctttactaactcttcgttcgctcnttcgcgctgttacctccacataaatccctctaccanccaccagacccgcgccgcatttgatgcatttcattacacctcccgcgaccctttataatcgactccacgcctgcacgcttatatcacaagattgacgccacatttggtatttgtttgaagaacatgaactaatgatcaagcgaaacctagactacttaaaccgggacccacaggacaaacaccttaggcccttcgccttccaccatcaatgggaccggaccttaaaacaaaacaatggttggaagatacttgaaacctaaccttttaaaccaaagccaaactccaacaactacaatagaaacctaaccgcccaatacataggaccaatgaatgacctatatttttcaaacataattatagcaacacaaatggggaaaaaaaactaactggttttgaaacacaattaactataacgacttaccatcatcttactctacattaaaccttgcaaattgacatcaacatgaaccggtaacaaaacctattcgttggaaaaataatcatattgccgtaccctcaccttattcaaatatcaatcatattagtcagtctaaatactgtttcaacacacgacaacagaacaccaaccaccgcacagggactttcattattaacatcgaatacacacatccctttccaggcgtcccctgggatctacaccccagcccaacggcactcccacaatgattcgcacgcttttcggaatttttccttcccaacttcttccaccggcaaaagcgcccaactgtaccaaggaggaacgcctaatggtgaaaatgaacgacccaccctccttcataaccggggccatacaaatcctacaaatcacaagtccg

SEQ ID NO: 274972 - DNA, 595 bp, Glycine max
ttaagtgtgactatgtcccagaccaaaaattaatctcatagtcgatctaaaagacaagagcttgtaggaatatctcacagtcccactagggagccaaataccctaattacaactgcgaaatataatggaccaaaaataacattaagctttttgaaatgattaactttaaatagtgacaactaaaatccaccactatctttattttatttccaaaaaaaataaacaattaaaaaaattatcatctcctccaacctcttttagatttgaaaaggtaaaaaatgcagcaccacatatatatcaaacaacattaacgaaccaccaaaaaaattgattgcatagggagattgcggcagagatggaaatgggagcgagacaacaatctttttgggtcggtagtgagagatgaagcggcgtacaaagaatgaaccactatccattgtgattgaaaataattggggaatagaattattatcgttattaaacaataaatttgaatgaagataataatattaataatcacatgagagtaaagattggtgttccgaatatcatatctctttttttcattatttaataattttttaatttttaaata

SEQ ID NO: 274973 - DNA, 190 bp, Glycine max
attttttaccattttgattgaataaagaaagcttcctgaaatggcttgttttgcaaggcctagcatgaccaagttagtgccagcttcccaatctcccatgggatctcacccttgaaattcttgtttccacctgcttagaagacttggagctttcttaaagagctaatgctttttggaatttcaccactga

SEQ ID NO: 274974 - DNA, 448 bp, Glycine max
taggaacccatagacaatgagcaaattccctttcttcacataaattattttatcattaaagataactttacatccaataagatttgactactttaaaacatcattttattcattaatataatgtgacgataaggtagattcctatcagggtcttgggtaaaaatactcacatcggcgatatatataaattatagtatgaaaataatattgatggtaggggtctcagattgagaactagctagtccttcattattataacgtgttgggataaagtaatccaagaggggaaagtattttttttaaaagggatatagaattttttttacattaatataataataggataaaaataatattaattagttaactttataaaataaaaaattaaaatattaaaacataagatatatttgttttcatgcatcacattagctagtaccaaggctag

SEQ ID NO: 274975 - DNA, 568 bp, Glycine max
agcttgtaaacaacactgcggttgcaatattcaatcctgactttttttgacctccatgtccttgttgcccaaattcctatgatttctcaatacattaaatacacgctccatttccaaattccatgtaaaataacttcttattttttcattatttcttcctgaaacttttttttgcccatcattcttctattagatgactctatcaaaggtaatgtcagttatttaacttgctcataacaaatattagatacaacctactttattcatttgacttagtcattacacaattatagaaaatattttaagcacagttttatgccatagcaaagtacgcaaacagtttttttcaatagcaaagtacaacacattacaaagtacacaaagtttgtctggcaatacaaattacatataaaaaagaactatccctaacccaaagtttttttaaccttggatagttagcaaacatattcataaaaaatggatctcgaaaacttggccacccctcagtagcttgaatagttgggataatatcttgggacatatttttgaaactatttcctttttattg

SEQ ID NO: 274976 - DNA, 431 bp, Glycine max
tgcgcgttgaggtgggctattgaaacagtgatgcagttgttcttttcttagatagtgaaccaatggtgtgatacgagtaacaccaataggagtttttgctggaatgggaaatgactttgtacaaccttcttcacaattacagtttaacacgcttacttttacacacaaatccggcaatagggtggcgcatgaattatctcgattagcattttttgtaaagcaagtttattgggctgaggaggtaccttcccggatagaacactctgcaatggattatgtaagacatttggcccttttgtcttgacggaaatcatccctctcttaaaaaaaatataaacttttaattcccacattgatacatcctcagcatcctctatattgttttcgtcttcaggactagctctcatcaaataaatgatgttcaaattgga

SEQ ID NO: 274977 - DNA, 415 bp, Glycine max
agcttcaacaactctcacactgcatgatttatgtttcatctattccaatctgactaatgttttagctttaagaaaaatattttttttatattaacttatgtttttcatttttccaaaaaatattaaaatatcctatttcaattttaccaactaataattattgttgtcttgaaatccttatttttcttaatctatgtgaaaaaatcttaaacatcattcattttggaaccaacggagtaataaatactcttccattaacgatatactactaactttgtccctaaatataagactcttttaactaattcactccctttaagaaaattggttaatttagttagtatcattaaatttggtacaatattatattactttttcaaaattacccttaaaattattggaacatattatctct

SEQ ID NO: 274978 - DNA, 510 bp, Glycine max
ttgagccaaaatcctgactcacaataaaccttgacccagggtgagaatgtcaatccttaccctcggaagcaaaaaaagaagagaaggaaaatttccaatcaaagaggaagcaaaaaaggagagaaggaaaatttccaatcaaaggaaaaaagagaggaaaggaaattcccaatcaaagagtgggagaaagcaaaaagaaaagaaagaaaattcccaatcaaagaatgggagaaagaaaaaaagagaaggagaagaaggaaagaaagctcctgatcaaggatcgaaagaaaacggaagaaatgtgcagagaggtctttggaccagacaatatctgaacaatacggaattgtcaccaaatgaacaaaagaaagaaaaggaaaccataacctaaaagtggtcttctccctttgattaccaaccaaaatcttgtgcgtcggagacttgttcgcctcgcgtcaaacaaaaacagaaaaggaaaaaaccaccaaaaaatcaaaagccaaaaacaca

SEQ ID NO: 274979 - DNA, 360 bp, Glycine max
agctttcttataaattttctctttcagcaactatataagtattctttcttaacaaattaagcatctctatgctctcttcaatttcacaaagaaatgctttacggtaaactcacaaggctattgtcctatcacgcgaatgtacacgatataagctcaagaactcatagaaagttattgcatacaaagaagacacttaattagaaagagattgcaaaaattgttcgtttagaattgatgtcttcatttgttcttctagagacttttataggaaatgagaaaatattcattgaagcttctctataccaatgaaaatatggatgttggtgcatttagtgccataataaatatttttcactaact

SEQ ID NO: 274980 - DNA, 415 bp, Glycine max
ttatgagaatccgcattcaaaagcaccatgaagattcaattatatgatttttaattattaattaataatataattaattaactttttaaacattatttttaattttttttttcacaaactaaaagagagataaaagataatagaaggctttgagatgaaagaaacatatacttttaattgtggagtaattttgaaaaaaaaattgattattctattacttttaattgtttgataccatttgtcattaagatatccttcaataggaactttcttatttccaaccattgagagattaccctcgttggccaatgagaagaaaggcaaaatcaaagtttgtttttggttttaataccccgtttagatatggagacgagaaaaagggtaaatgattaaaatcacgttgaaattacaatta

SEQ ID NO: 274981 - DNA, 1127 bp, Glycine max
  unsure (1)..(1127): unsure at all n locations
cccgcttgtaacgaatcttactcaataaccgagtgatccacccgcatacaataactatatttgtagtgtcctacttcctcacaagccgccggggcattgaatcactcaataccatcgaagacccgagatcctctagagtctacctggccgcctgtccagcccgctcgagactgagcaattttatgtgcaacaggacgatgcacaaaacaaagcgcaacggtgcttgaactttgcaatacgacctctcttcactgttatggcgccaacaagcaaacattgtaacaactagtctatacacctgtttaacaacaaaacctcacaaacccaaatttgaacaaaggccaataaaccccttcttggaagaggctcacaatacattcttctattttattccaagcaagacaaaaacactgggtgaatccgatctaccccaaaactatgtggcaaatccgactttaaaacataaggctctcttggcgttgaaaaagaatgtgaactcttttaatattctgaactcttgaaaatttcaaacgtttcaaaagagccactgagtaatgccgattaaccaaaaatcatttggcaaattagaatgtaccaggcttctttaggaaaaattatatcgggcaaacagttctgctatacaaatccgaatttttggaacaaaccttntatctaaaaaaccaatatttggcttacttgcgttaaatcggacttacacaccaatttctgggcaaatcgcacttaaccacgaagaagcgaacaacctctcttagctaacaacagtctttggaccaaaacactcatgtggcattctcaaaggttcggaaacaacttttctaaatatttaacctggtggaggactcctacttaattcttggctcttacgactctccctaatttaagccctggaatcgctctcatgaaatacttaacccttccaacccttggacattgcgtccttgaattggaacctctagaatccacatggaattcgcgtgtttctgattgaaaatttgcaaccctcttggcatacaccattttgccaacaatctacttctctacacccanagtgggcacacttcaacaccacctccttngatataatgtctcgagacaccaacaggacg

SEQ ID NO: 274982 - DNA, 769 bp, Glycine max
cggcaatgaatcatatcatttaccgatcctatacgtgctctatctcaactcagcgtgatcgcgggctgtctatcataacatgcagaatgtctgctttgaataggctattacctagtcgtgacgtagaaaactccacccgattagtgttctcgtggatattgacatcgtacgaatttgctcctcaatggccgaatcagcaagctaatattttttatgaaatccttctgcatggactaagtgattgattaaagatattaacattgttctaggagaaaatatattcttgttcacgaggctcctacttagcgcgaacactgagccttgtcttatggtacacattatgtcattatcttgagaaaccaagcattcccttgagttttcccttctcaacccttgatttacggcattgttttcttaccaagatgacaattgtagacagccttcataatgactttctttctttcaatacaagatggtattttgagcgttctgcccttaattagaagaacaggctcgttagaacataaaaactaaataaacatttggggggcgaaaggtttcggtgatccactataaaaatttcttttggcctgctgcattggtaaaagggtgaaatcttaacactggaagattgcatccttccaccttttaagaaaacccccccccggaagatcatttacccattcaagtccttggtcccccccccttttggggggcccaaagttaacccgacacgttgcccatggggtgcccccccttactcctaggg

SEQ ID NO: 274983 - DNA, 456 bp, Glycine max
agcttgagttcgctgttgctaccccataaagcctctcggaacttgtttcggccccattcttctttttgagccctttttgtttctcgttctaatgctttgatcatggccacattgacgtccctcagcttgtcacactctttcttgaccctaacagctatcgccttgaacttttccttgactactcgcgttctttcaaggcttgcacttcttcgctctcctcagggacttcagcctcttccccacttgaactctttagctttaggagccaagttatcacttgcgttcaagccttcaaccattgatgatatccgccaataacaccattgtttgttcctctaagctccttatactttctttgcactgcattccattcttttcagactctttgaagcattcttgcattgggatcacttgaaccttgtgcaatgaaaagcatgatgctctctttctatggcg

SEQ ID NO: 274984 - DNA, 1112 bp, Glycine max
  unsure (1)..(1112): unsure at all n locations
cgtcgaatatgtacatgagcatattacacntgtctatctcatacgttactttctctntgtcntcttactcntcacntttattagtcgtnntnnnnnnaaagcatagagtnnannaagtattanntctattttttctttcaacccgancncaacgggagnaccgtttagtattagccatatctatataaccntgtacaactatanacacatacatnacaatcctgcgccaaatgtactcggaaaccataggagaaagaacatggcgttgaaagcaccataaattatttacactttcttgcgaggcacaaaagtgggtagcactcttagtaagagggttagagatggctctcataaaaaaataaaatggaaatttttttgggaagggggataaagggcaacgggaagtttaatttgaagggggggagaggtttggattaactagttttaattaatatcactcaattgtgtggtcttctaaacatataaatatttaaaacacggtggaatatttaatggtgcgattcaaaacctatattttgaatttattttggactcaaaccaaataataggggggctgaacaattaattaacagaaattttagaatgtttctcaagcactttggattgttaaaaaaatgaatccccccaaatgttttataatttttgcaagggcgtgaaaatgaaaccaaaaggtagaactatagagtcctacattgactcatttgacatgtaaaattcctatttgtaaaaatataaaaaaaaatttttaattaaaggtggaggtgatcaaaactgtttaagaaatgttgaaactaaattattgtgccataaaaaattttgctctgtttttctaagggtggtctttctatattcaacccgaaagtgtttaaaattgttcacacgaggtacttggtgaactaatagaatgaatatcagcgtcccaaagtcctattttttattgtggggatgggaaccccgaggtgtaattatataaaggagttcttgttttcgaagagttaaaatatcatatttgtggatactgtggggcaatcctattaaatttcgtggaataatgttacgaaattatatactgattcaaagatataccgacg

SEQ ID NO: 274985 - DNA, 464 bp, Glycine max
  unsure (1)..(464): unsure at all n locations
agcttgtgatcgcangttctgaggagattgtggcggttgcgcgttgaaagggagagagtgggggttgtaagagagtgatgttcatgatggctattcctccatttgggataagttcatctaactatctaccaagtcatcttattatccaaactagaaattttaacaatgaaaggatattaattaaagcaattaaaaattttaaaatttaaaattctttaaatttccaaaatttctcatccaaatatactgttaatgactggaaattgagaaaagaagcaatgtggaagtgtttacttaaaataagtctggttttggcattgacaagtatttttttgtgatactagaaccctaattaaaagggtctatgttacgaggagggatgggcgagctaatgatgaggctcacataaacagaagtgttgggtaatacagcttgaaggtttttatcatgggggggaatctgtt

SEQ ID NO: 274986 - DNA, 515 bp, Glycine max
tatatatcaaagatctgataatttagaagttgtcggctactcaaactcggattttgctggttgcgttgactctcgcatgtcaacatctggatacatcttcatgatggctatcaaagcaatatcttggagaagtgcaaaacaatcattagttgctacttaccatggaggctgagtttatttcattatttgaagcgacatcacaaggtatttggttaaaaagtttcatggtcgatctacaagtgattgattatgttcctagaccattaaagatatattgtgataattcagctgctgtttttttgactaaaaaaaataaaagtggaagttgaagcaaacacgtcgacattaagtatttagtcttgaaggaacatgtcaaagcaaattaaatcatcattgaaaacatcagtattgaactaatgattgcacatccattgacaaaaggcatgcaaacaaagtcatttaatgatcatgttaagaatatgggacttgattttgtcatattaagttcccttttt

SEQ ID NO: 274987 - DNA, 523 bp, Glycine max
agcttagctacccacacccctctaatagtaagcttacctccttgacatgagaatctagagcttagctactgatgtgtcatcattttctcatatttcttagccctttttgtcaccattttaattattgattagccttaattgtcaaattaattatgcagttttatcatttgggcctactggattaattttatgtttttaatttaatttcaggagaattataagtaattgggcttgaatccagaattgggcttgcacttgaagagaggaaacaattttattctaccaaatcttatcttatctagatttctcatctggatattatttcatctagattttatcttatcatatctagattttatctcatctagatattattttatctaagccttatcttatctagattctattttatttatgggcttggacttaaaacagatctgtaagctttgggggctgacaactatataacagccccaagttctaatttaaggcttctctctctctctttcggtttagttttttt

SEQ ID NO: 274988 - DNA, 248 bp, Glycine max
ctatctatacgtcttgcactatgttgttaacaaagtgagagatcagaacctatattgctgaaccaatagtaccatccggaattaaagcgcaaactggacagttaaagagtctggctgtatgactactagcacgaccgagttttatactgatatctacaactgcctgcgcctacaatcaacctggggtccttgatatttcctttcagccttgtaatgtcctttacaagcaactatccacaggggatgtg

SEQ ID NO: 274989 - DNA, 528 bp, Glycine max
agcttcaagaaaaggccaaactccccttcaaaatatgatttcaggcttaaataggtggctttgttcgtgctcgtgcgctcagcgtacttctgaaccgcttagcacgcattagtgaatttcggcttagcgcggcttttctcgctcagcggatggaccgaagcggtgcacttagtgggatggcccttcgctcaacgaataggcacaactcatccgtcttccagattcttcctcgtgcttagccgaggattgttgcgcttagcggatggctcgctaagccagtggattggcttagcgagagggtgaaaatcagcacttcaaaacttgcctaattatcctgaaattgagagaaaatgattattaaatacacaaaatagaagtactacatatttattacctatctttaacaaaaattaattaccacactacaaaataaccataaattggacgagtttgatacaatttacacaagttttatacatacaagttagtcgtattaaccgactaacaacttccctaaatttacaggtt

SEQ ID NO: 274990 - DNA, 534 bp, Glycine max
tggagaggatgcctcaatggaggaaaagaaagagggagagaaagagagaggggggagcacgaaattgaaggaagaaaaagggagagaagttgaactttgagttgtgtctcacaagactctcattcatcaaagttacaacaagtgttacacatgcttctatttatagactaggtagcttccttgagaagctttcttaagaaaacttccttgagaagcttctttgagaaaacttccttgagaagctagagcttagctacacacaccaatctaaaaactaagctcacctccttgagaagcttccttgggaagctagagcttagctacacacacccatctaaaaactaagctcacctccttgacaaaatacatgaaaatacaaaaaaaacgtccctactacaaagactactcaaaatgccctaaaatacaaggctaaaatcctatactaatagaatggccaaaatacaaggcccaaaagaaggagaatctattataatattttcaaagaaaagaggacccacccttggtcctgggctc

SEQ ID NO: 274991 - DNA, 590 bp, Glycine max
agctttgcctccccaaagataactcttcatcgtcttcgaccaacaaatataaaaaaagaaagtattaaaaatccaaaaaactcagggcgaggtgtagagaaatgaaatcaagaattgaagtgaatataatcataccaagaactttgagcgaacggaatccattcaagaatcaagaagcacaatcaaagaaatgcaagtaaaaattgcaattaagaagtgaacgaaattgcaggtccagaaatttaaaaaaaaaaaaaaaacagttccagagtcaaggaaaatagtgaaaaatctagatacgcacgtcaaagacgaaacaaatgtcatgttttatcttttatcttttattctatttccaaattgtaccccctttagagtgagtgagacctacggagaaagtaaaatattggggaagagcatgaagattacaacggggacggggtcaaaaatttgaaagtttctatccctttgggctctttatggctttttatgagaaatttcccttttcaatgcttatggctagttaaaaccctaaactaagattgggatgtacatgggcttgtgaaccccacaagctctattttaaatgg

SEQ ID NO: 274992 - DNA, 413 bp, Glycine max
tcttggggttggcaggctattatagaaagttcattgagggattttctaaattggcattgcccctaactaagttgactcgtaagaatgagaagtttgtctggaatgagaagtgtgatcaaagtttccaagagttgaagaggcggttgacgacagctccagtgttaattttgcccgaccctaagagaacatttgaagtgtattgcgatgcaagcgggcaaggcttggggtgtgtgttgatgcaagagggaagagtaatggcgtatgcttaacgtcaattacgttctcatgaagataactatccgactcatgacttggaactaccagcggtggtctttgccttaaaaatttggaagcattatttgtaccgcacttgttttgaaactttccgtgatcacaagagtcttaaatacttg

SEQ ID NO: 274993 - DNA, 412 bp, Glycine max
agcttcggaagaaagtgatgaggtacattccctaaaggcagagcttgaaagagcccgggtagtcgaagagaagttcaagtccatagccatcaaagtctgaaaagagtatgatgaactaagggaccgcaatatggccacagctgaagccttggaacgagaaaccaagaaggcccgaaaggaagaacacgaccaaagcaaagttttgaggggctttatagggcagcaatagtgagctcaagctccgaagaggtgaaaggaatcatcacgggtcaaaggcatgatcttgaaggacgagctaaaggcttgccttaggtcgaaaagaaatttgtcccaacagctaagcgagactgaagggaatatgtgggccatcatcgatgagtgcaaagagaaccttaatctagcggcgactcac

SEQ ID NO: 274994 - DNA, 400 bp, Glycine max
tgaccaatcccgacccaacccgggcatagtcggtcagtgagaacctgtgatgtacctaagcaggcgagctcctggcagtcaacagataaaaggaacaaagaccacaaagcaaggaggcttgtggtggctggccagctgtgaatcttgtgtgatatatgggttatggtctctggtaatcgattaccaagggtgggtaatcgattacaaggcttaaaaatgaagacaggaggctaagatggtctctggtaatcgattaccaggggatgtaatcgattaccaggcttgaaaacgaggtcaggaaaccatgaagcctctggtaatcgattaccaaggagtgtaatcgattaccaagcttaaaaagggaactgggagatgatggaggcctctggtaatcgattac

SEQ ID NO: 274995 - DNA, 503 bp, Glycine max
agcttggacataccattgaagtttgctacaagaaacatgggtacccgccgggatacaaagcttttattggaagatcaagcgtaaataatgtgatagcgggagaggggaaggtcacagatgatcaagaacaacgtcatgaatcccaagagattattagtttttctccagagcagtgcaaagccttactcgctttaatccaacaaccatctgcaggaagcacagcttctaaccacccacaaaccaaacaggttgcctccatatcttctactgatacagtgactaacccaggtataccttcttcccttagaactcaaaaatctacctcctgggtattagactcacgagccacagatcacgtaacatgtttcttaagtaaccttcatttttttaatcgaatcgaacctaatatgttgaaactcccaaacggccagcatgtttacgccacccaatccaggggggggcatcttttgtcattcataactttactagaagttctctatata

SEQ ID NO: 274996 - DNA, 487 bp, Glycine max
tctgatagcgagtccttctcccctgagaggttggtggaattttgccatgtcggttggggtacctcttgtctttgtagggggggtaaggccttctactactcctctagacgacgagcctgtcatcgttaccacaattcttcccccttttgcttttggggcacagggaatgagagacaacagagatgttagggtttctccctgtaacaggcatagctgcagtgctggaaagctttcgtcccttcccatcattgttggctacgaatgagtaaagaacagtgtcttcatgtaccattccttgatcacatctgttgtgattgtcggggctctatggcactagttggaacaacttgaactggaggactcctacaaaatgactatttaagcttgtgggagcaatgaatttccactcataaaggtggcattcggttgtccacccttcttctatatgtattgctgcctgttcaagttcctaatttgacattctact

SEQ ID NO: 274997 - DNA, 679 bp, Glycine max
agcttctaaactttatacaagaatgaatctctgtataccacttgttagacaagtggcctcagatatcttaagaaggggggggggggctgcctcccctactcccactcccccatcccccctctccactccccccctcctcccccccccacccccatcccctccccttacccccctcccactccctcttccctcacccccccccccccctccctcccctcctctctctccccctccccccccccccccctccccccccccccccttccccctccccccccccccccccctctctccccccccctccacctctccctctctccctctcctcccccccccccctctccccccccccccccccccccccccccctttccttccctcccccccctccctccccccccccccccttcccccctcccccgcctcccccccctccctccccctctcccccccctacctcccccccctcttcccccccccctctcccccccccctcccccccccccctttccccccctccttccccctcccccctttcctcccccccctcctccctccgcccaccctcttccccctcccccccccccctcctccccccccccccctccccccctctttccccccccctcccccccccttctccctccccccctcccccccccctctcccccccccctcc

SEQ ID NO: 274998 - DNA, 600 bp, Glycine max
tatgctgcaaacatcaacaatagacctcctcaacctcagcagcaaaatcagccacaataaaacaattatgacctctccagcaacaggtacaatcccgggtggaggaatcatcccaaccttagatagtcaaatccttcacaacagcagtagcaacaacaacaaccttattttcagaatgctactggtccaagtagaccatacgttgctccaccaatccagcatcaacaacaacaacaacaacagccctagaaatagcaaacagttgaggctcctctacaaccttcccttgaagaacttgtgagacaaatgactatgcaaaacatgcagtttcaacaagagaccagagcctccattcatagcttaactaatcagatgggacaattggctacacagttaaatcaacaacagtcccagaattctgacagattaccttctcaatctgtccagaatcccaaaatgtgagtgccattacattgagatcgggaaagcagtgtcaaggacctcaacctgcaacatgttcctcatccacaaatgaacctacccaacctcactctactccaaaaaaagatgatgacaaaaatttaaagagtaagttaccta

SEQ ID NO: 274999 - DNA, 348 bp, Glycine max
agctttaagatgaatcaagaatgattcatagaagttttgatgataacaaaggcgatgaccaaaagctcaaacgttaagaacactttgtgatgatctcaagaatcaaagaatgagctcaagatgttccacattgaatcaataacacttccaggttcaaagagaaaatttgatttcaagaatcaagaatcaagttttaagattcaagttgcaagaatcaagatcaagattcaagacttaagattcaagagtcaagagaagaattaatccagataagtatgaaaaagtttcttaaaaactgaggtagcacatggattcttctcaaaacttgtttaccaaaaagtttctact

SEQ ID NO: 275000 - DNA, 888 bp, Glycine max
  unsure (1)..(888): unsure at all n locations
ntgaattcnnttcgtttncgtttacgttacccttctcaaacttgaacttgatgctctcaacggtatgacaaatgaaacgacgttagaactttatactagagggtgtgtgagcacccaccattgacaggatattgaaccctgttattatgcaacacagatactcttgccgctcgattgggctgagcaattaactccttaatttctataaatgaggttatcaacccttgagtctcacaacatagctgtctatcttgtacatttctttccaaaagctgataggctaaattaaccatactttccttcaacgctgctttgacaacacttacttgagaatctacagctattgctactcccatcctgatggccctctttcatctttttttggagaagtttccttggcaagctacatcctagacacgcacattcatctagaaactaaaacctcctttttggggattacatgaaaattggggcaaatggccccctcctcctgaaccacttcttcaatattgcaatcttttgacaggctgcttttcctattctaccaagaatgccccaaaatgtcaaggcgccataacattggaggactggaataatcattatttatggaaccttgaacacgaccccatttcttgttcattcgggcattagaaccttgtccccttttatttctttttttccaacaaggattttgtttaacaattttataagacaaagcttgtttaacaactttttattccagggcaatttcttgtcttaggatttcttgatttcttggctcttacaatttaccttcttcccatttgcatccgaaaaacattttcccatctgaaaaaaattgggatagggctcaggaagggatactcttgcccacttttaaaaagattt

SEQ ID NO: 275001 - DNA, 415 bp, Glycine max
  unsure (1)..(415): unsure at all n locations
agcttccttgagaagctagagcttanctaaacacccctataatagctaagctcacccccgtgacaaaaaaacatgaaaatacaaaaaaaatcctactacaaagactactcaaaatgctctgaaatacaaggctaaaaccctatactactagaatggccaaaatacaaggcccaaaagaagaaaacaacctattctactatttacaaagaagagtggatccaaccttggcccatgggctcaaaaatctaccctaacgttcatgagaaccctaaggccttctttatcaactctagcccaatcctcttggagcctcttgctcatggctctggtaactggtcctttcctaaggaggattgcatcattatctcttgggataaaattatcttggttaaacctcactaattctcaaatgata

SEQ ID NO: 275002 - DNA, 473 bp, Glycine max
tcttgcgtatccgctcttggtgctctgaatcccaaaaacaaatccctcttaatactagctattttgaattctttagttcctgaatgtgcaaccttaaaattgttgcttgttcccctctttgagaatgaggaggatcttcataggacttcatccagctgatgtttgtcgccagtttccatcatccaccacccttttcttctctgccttatcacgtttgttgttgttaaacccatatttatgccttcttcccttcatgtcttgttttatcacaactttagccgaatctcctatctccagcacagttgaatcttctgtcttatgagtttctcaaacttgtttattcacttcatgaagaactacgaaactgctgtggagcaaccgagtgagtcctaatgttatatactccttatagcacatgcatagtgacacatcaacattagttgttggcggaatagatgggatcttaagattgc

SEQ ID NO: 275003 - DNA, 454 bp, Glycine max
agcttaatctcgctgttgctgccccacagagcccctcagaacttgttccagccgtgctcttccctacgagccctcttggtttcctgttccaaggctttggtggtagctacatttatatctctcagttcgacattctcctttcggatcttcagagctgcttatttgaacctttctttgactgtttgagcttgctcgagttctgtcctaagggcctgcacctcttcgtcttcctccggtgcctcaacttcctcccttttatcggttctcaaactcggaatccaatccaaaccttgaacatgggctttcaaccacttacggtagccaccgatgggcccattgttactgcccctgagttccttgtccttcttttgcacaccctccatgcctcgcagaccttttgaagtgcccccatgttgttcttattgaacctcgtgacatgacaagcgcgagctct

SEQ ID NO: 275004 - DNA, 476 bp, Glycine max
tccaaattagtgtaccacactaccgcagctccggccaagctatcctgaaagaagtgtattaatagcttttcatctttagagtgggcgcccatcttacggcagtacatcttgagatggtttttgggacaagtcgtccctttatacttgtcgaagtccgacactttgaacttcgggggaataacaacatcgggtactaagcaaagatccgtcatgtctgcgaacggatagtccccaaatccttccacggccctcaatctttcctcaaggagatcgagcttcctcctttcttcagttgctgggggcggcccttccgtggacaaaactattggtggtgctgcgatgttgggttgaggcaacgtgcctggtgccggcccttcggggatcgggggatagaactcgacatccctttgagcataatcttgagggtctttgtgggacttctcgggctgctgaggaggctcttttttatggacggg

SEQ ID NO: 275005 - DNA, 299 bp, Glycine max
agcttctcagatccggtcatggaaagacttggcaactgccttcattaggcagtaccaatacaacacggatatggctcctgatcggagccaacttcagagcatgaccaagtgggaacatgagtccattaaagaatatgctcaaaggtggagagacctagcagtccaagtcgtccccggtatgactgaaagggaaatgatcacgattatggtagatacgttgcctacgttctactacgagaagctgataggatatatgccggctaactttgcaggcctcgtcttcgccggaaaaagaatcc

SEQ ID NO: 275006 - DNA, 378 bp, Glycine max
tgagataaggaagtgttgaagggtgaaacttcctgcttttattgttgaccacagagtggtacctggagatatgtcgcaagggtcaggagaccttggggatgtcacgtggggtgctattgcccaaaaccaagcttgaccaatcccgacccaacccgggcatattcggtcagtgagaacctgtgatgaacctaaacaggcgagctcctagcactccaccgataaaaggagaacaagaccacatagcaaggacgcttgtgggggctggccagctgtgaattttgtgaaatatgtggattgtggactctgcgaatcgattaccaacggtgggaaattgattacctcgcttaaaattgaacacaggaggctgagatggtctct

SEQ ID NO: 275007 - DNA, 410 bp, Glycine max
agcttatctacccacacccctctattaactaaattaatctccttgaaaataattacggataaaaataacacagcaaatataatcaaacatcaaacataattactaataatatatagatatatatcaaggtgttacaactctcccactcttttaaaaatttcatcctcgaaatttacgttactcaaacaaggatggataagcttctcgcatttgactttctaattcccacatgacatcatcttctgatgcacctccccagatcaccttgaccaacagaatctctttccctcttaggtgttttgtttgtcggcataccctaatttcgtctagggaccattctttgatggcatacaacctttggttgaccgcttagaggtacttggaacccattgttgcacaatacgtgaagt

SEQ ID NO: 275008 - DNA, 301 bp, Glycine max
agcttggcgtgcaaaggagaggcgtcttgccgttatattggctcttctgaacaaggatattacctacttccttcatactgtgaacaaattaagaaaacaactcctggaagcgttgcagacgtatttactggtgcagataaccgcctccagagattctttgcttccttttatgcatcaattaatggttttgttaatgggtgcttgcccaattgtgcacttggtggaatccacctgaaaagtaaataccttaacacattgctttcagcaacttcatttgatgctgatggtgggctgtctccac

SEQ ID NO: 275009 - DNA, 545 bp, Glycine max
ttgatattaaaaattggaattaaaatttgaaaattaaaattttaaattataaaattaaaagcaacttttgatttttttttataaatttaaaatttaaaactaataattgtaccaaagaaagcattaatttataggtataaatttattaatctgatgatgtgactttgcacctactattgagatacaatgacaaatatctctccgttgaatttaacttcgaacttgactagaacaacttaaataaactagatcgacattagaggtcaacattgaaaatcgtttccatattttcaattcatgcaaaaactataaaaaaaattaagaaaataacccaatagggtttggactttggatagtttgtataaaatcctaattttaaacttcatactgtcattgcaaattgttttaaaaaaacattaagaatatttatgattgaatatgagagtttgtttaagatacaaaacaaaataatgaaaaggaaatttgtggtgatgaacctaattaaaccggaaattggttttatttaatgaaacactattatatta

SEQ ID NO: 275010 - DNA, 479 bp, Glycine max
agcttgaggtcaagaacattgagatcagtggctgaacttgaagttaagctgggagtgagatgagatcaaataaaaatctaaattaattaattaatttattttgaacaagatagatttataaaagcttagcttggctagcgtccaactagtctggtatgatcatttaatagcatgggttcaaattggggtctgcaactccatttacggccacaaaatattactgttgcagagctgcccacaattgtggtgtgaaattcaatcacacaaaataccacaatccatatgcaacatagctgaaaagggaacctaatagaactcaatggaaccttggctccattctattcgacttttttgtcaaaaaaagagagactcatttaaatattctattctaacttggaagtgccaatgatcaaatgagtgtggctgtatgggatgttgggaaagaacaaatcttaaaatgaatgaaaatttatactatc

SEQ ID NO: 275011 - DNA, 439 bp, Glycine max
tgtgtagaaatgctcatgttaactattctaccaaattagatgcactgcaattgatatcctttctgacaattagtgcatgaatgatttagtttatttttgaaactaattactattttttatgaaaaaaaattaaaataggtaactattttcataaaagttaactagcactgtaaatgcataagcccactctacccaatatcgtgtgtttgtgaacccatacttcaattagcttgtatgtaatactaaataatgtgatacataaaccttttgaaatacttttatacatacaattgttagatctttagattttgctagaacgttggcatgaaaagaaaaaaatatgcaaatacttcatcaacaagtagctagcttcaagtcattcaagaattataatcagcatattcgttagacattttttaatttcatatcatacaagaaa

SEQ ID NO: 275012 - DNA, 412 bp, Glycine max
agcttctcccccatttttctataaatagggggagaagtgaagggaaaaaatgttcagccctcctggtaattcgagatcacttgaaattagtgaaaaaaattgtttccgtgaagaaaatccaagccgaggcgcttccgtaacgttttcgtaacgtttctatgggtgatttcgcgaagattttcaaccgttcttcgacgttcttggttcattcttccgtcttcaaccggtaaattcccgaaatcgaacttttcaattcattctatgtacccttagtggtcctcatttgttttcacgtgcttttattttcatttcatttactttccgtacccccttttgacgtgctttagtcatttacttaagtcattttctcccctaataaaaaataaaataaatttccaccgatcatttgatt

SEQ ID NO: 275013 - DNA, 497 bp, Glycine max
tttaagcctgtatagtggcttaaggagttgaggcaggcaagcctcaatttctgggtttgcgatgaactcgctaagcgaggctattccactaagcgagttcatacatttctttgaatttctgggttttaggatgaactcgctaagtgagccttgtgcgctaagcaagttcatgaagtttgtctgaatttctgcattttcgggatgaactcactaagccagagccttaaggcttaacgagtctatgatgctggttgaatttttctaggattagatgaactccctaagccggccattcacactaagcgagcacacttaaattagtctggctctttgaggttttctgcatttcaacaatggcttagcgcgacactcacgctaagcccaatttcgcctctataataaaattgggctaagtgagcctgtctcgctaagcccagagcaatatgaatttctggatgtttgttcatgcactaagcatgccatgtgccctaagcgca

SEQ ID NO: 275014 - DNA, 573 bp, Glycine max
agctttgtgtaatcgattacactgatttggtaattgattaccagtgatagtttctgaacaaatcaaaagatgtaactcttcaaatagtttttgactttttcaaattggttttaagtttttctaaaagtcataactcttctaatggttctcttgaccatacatgaagagtctataaaagcaagagtttgttttgcatttcatatcaatctatcaatcaatctatctatcaatcttttccaattcattctttacacaagcaattctttcatattgatttctgagtctctttaaacttcttcttcttcttccttttgccaaaagctttccaaagttttctagttttccaaaccttgaaaacttgtgctattcatctttttcattctcttctccctttgccaaaaataattcgccaaggactaaccgcctgaattctttttgtgtctctcttctcccttttccaaaagaacgaaggactaaccgcctgaattcttttgtggctccttttttccttgtcaaaaattaaaacgacacagtctgagaattttttgatcttccctttccatatacaaagat

SEQ ID NO: 275015 - DNA, 574 bp, Glycine max
tttacgagagagattgacaagaaaatattactagcaactctaggatgagcaaatagacacctgcagtactaagaaggtaatttataaattaatcctcaccggaatgactgaatagaaaccatttggtattggttctgaaagcactccagtgcgctagagattttgtgatgctttttgagaagacaaaacatctttgtcaaaatgttgaggagactccttattacttaaagtctcatcctaagaacccaaataaacaaatccaaattttttcaacacaatctgaaggccaccacgacacattaaatggcccttgctctgctggccctgcatcttctcgtgtctgcttcatgttcttatatatttggaatgaaaaaccatgtcgtcaccattattaacccataagagacatatctaggctaaaggattttcttaaaatacaaaacctttgaatatatatttcagtaacgcccactggttcagctggaaataattgtacctgcctgaacccaaaaacaaagattttggatttttaaaaaaaataaaacacccctttaaaaagggatgaaaattttca

SEQ ID NO: 275016 - DNA, 450 bp, Glycine max
agctttgaatgctctattcaatggagttgacattaatatcttcagactaatcaacacttgcacagtggccaaagatgcatgggagatcctgaaaaccactcatgaaggaacctccaaagttaagatgttcagattgcaactcttggctacaaaattcgaaaatctgaagatgaaggaggaagagtgtatttatgacttccacatgaacattcttgaaattgccaatgcttgcactgccttgggagagaggataacagatgaaaagctggtgagaaagatcctcagatccttgcctaacagatttgacatgaaagtcactgcaatagaggaggcccaagacatttgcaacatgagagtggatgaactcattggttcccttcaacctttgaactaggactctcggatagggctgaaaagaagacaagaatctggcgctcgtgtccaatgatg

SEQ ID NO: 275017 - DNA, 446 bp, Glycine max
tggagaggatgcttcaatggaggaaaagaaagagggatagaaagagggaggggggagcacgaaattgaaggaagaaaaagggagagaagttgaactttgagttgtgtctcacaagactctcattcatcaaagttacaacaagtgttacacatgcttttatttatagactaggtagcttccttgagaagttttcttaagaaaacttccttgagaagcttctttgagaaaacttccttgagaagctagagtttagctacacacacccctcttataactaagctcacctccttgagaagctttcttaagaagattcctaaagaagctagagcttagctacacatacctcttaaatagctaagctcaccttcttgagatgagaagctagagcttagctacacaccccctataatagcttagcttacccccatgacacaaaacctgaaaat

SEQ ID NO: 275018 - DNA, 406 bp, Glycine max
agcttggtcagatttgaatcataaaaaaatctatatttttaagtcgggctctggccttatttcgtgttagctcaagtacaacatggcgctaattaattataattctatttctaaattaataataaattataatcttttgcataatatgaaaataaccctaatataatctattttggatatgcattataaaacatctttaaattttaatttcttaatagaaaattactcaaatacactgtctattttaatttgggagcactggcaccctaattaagagggagaagttgcccgtcagacatgcaataacattacgaagtgacccttaaaaaaaacattatgaagtggaattttaaaaatgaagaacatttctataaaaaaaacgatgaacaacatttaaactgataaa

SEQ ID NO: 275019 - DNA, 408 bp, Glycine max
taagcagcagtgacaatgaaagcataactaccttataccttgaagcatttagctttgatgaagatgagtcttttattagttcagttccctcattgcttgcaaattgtcttgtaccatcagcaaaagttcccactgccattccactgagggaaaccaccccatcctcaccaacctccttagagacagacagtggcacaagcagctatgcaacaggcttatcaagtccaattggtgctactttccttgagtgtctatttcctttgtatccacctaagtcttgcttccttgaaagtgatgagaatttggaaaaagtaacttcaagtgcacaagaactaagaaagaaagagcttgatcttgaagattgtgccggtgacttggtaatgaggccaccaacacttggagagctga

SEQ ID NO: 275020 - DNA, 576 bp, Glycine max
agctttgcgaaaagcttgtcgctggagccgacccatcaattgccctaactttttcagactggtgattcctaggctcttgaccttgacttgatagaacctctttttaagtgaaggcgcctgactcgatcccatgttttactaaagtgaaacaaaacccagtgtgaatcaaaactctgacatctatcatgggtggaatggatgaatgcatgaagaaatgcatatgacacaaatgcattttatgaatacgggagcccggggaattgtctccttcttagatacaacattcggacagcatggtgcccgacgtatgcatttaagaaggcaacatggacccaccatcggtttgacaaagtgagaggatcaagacgcaatccgtgcatgatgcagatgcaaaaagcacaacacggggatgtacatagtacgacaatatccgtaaataattataagcaaaggcgtacatgacatttaaggactacatgccatggcagtgtaaaaatggcacgtaccgtgtttgctccgtgcccctattttagggaccatacaggaagaaactaaaacggcttttagtgataattc

SEQ ID NO: 275021 - DNA, 473 bp, Glycine max
tcacaagcaagcttccatcaagtggtaatcagagcacaagagcttaaacctccactaataatcagctttaccttctcctccattgttggttcttcatttctctccatgtatctcctcacatgtcttttgctaaatgttgttaacatgattctttataatttccaccaattaaactagctatagaagctagatttgatattctatggcttaaatttcttgttcttgttcttgaaccatgaattgtgttgagtttaggttcctttaagtattgtcttgctattttttgtggctgaaacctaaactataaaattattataaaaacattaaagtagaagaaaacctcaaaaatctagagtgacttgttcacctattgtagttttttcatagaagtcatgtctagtcatgaaacttgtcacataagatttcttatgttgcgctgaattatatttttcttggttcttttgctaactcat

SEQ ID NO: 275022 - DNA, 415 bp, Glycine max
agcttggttcgaggtacttacccgttgaagatctaagaacgatgaagaacgaatgaagaacgtcgaagaacggttgaaacctttgcgagattcctcacggaaaacgttacggaaacgtttcggaagcgcctcggcttacattttcttcacggaaaccatttttccaagcaaattcgaaagagagagaagtgcctaaggggctggacccttttcttcttcatttcttcccctatttatagcaaaataggggaggtggttgccgcccagctcgcccaggcgagctcagctcgcccaggcgagcagggttgctttctccaaaagcaaccgccttctggaggaatcttctggagggcccaagtgggcctgggtgctatttgcacccccatttttactaagcacacccccctctgctgtt

SEQ ID NO: 275023 - DNA, 457 bp, Glycine max
ttgcagatttggtcttcgctagtgaaaggatcaatgtgggtccgaaaagaggcgcatttgatcatcctactacgacgactgaaaaaactggggccaatgaagagggtgagaaaaagggagaaacccatgttgtgactgccattcctatacgggcaagttttccaccaacccaacaatgtcattactcagccaataacaaacctcctccttacccaccacccagttattcacaaaggccatccctaaatcaaccacaaagcctgtctaccgcactttcaatgacgaagaccacctttatcacaaaccacaaaaacaccaacaaaaaggaattttgcagcataaagcctgtagggttcaccccaaattccgttgtcatatgctaaacttgatcccatatccactcgataattcaatggtagccataaccccaaccaaagttcctcaacctccatttttc

SEQ ID NO: 275024 - DNA, 486 bp, Glycine max
agcttgttgaaaagacacatttcttcaaacaattttgaaaaggtacaatggatctagatatatgtgtctgacttcgaaaaacaaaagagagatgttctaagaaaacttaattgtcaaatgttctctcaacaactattggacaaacatttacaaatctattgagaattcttctgagatcttcaatttgtatcatctactctaaagaaatatttttgttaatcttagaaactcagttgtaatcaagagactagttgtctcttggagaatcttgaacacaagggtgaggaatcccaaggtgtgttcaaagtttgtaaaagatttacagaaatagtggaaaatctcaagtgggttgcttgaggactgaacgtaagcacgggcagtggccgaaccaatataaatcaagcttacaattccctctctccttatcttatttattttattgccatcaattttgtcttacatggttaaaagaacattattaatttg

SEQ ID NO: 275025 - DNA, 418 bp, Glycine max
tgcatcaacgttacacttcatgaacccttgaggcggaggactccatgtttctctatcactggcagtctccaaagcattgttgtgccactgcacctctttagcacgaaaccaatcttggtaaaaaattgtctgcaattttaatcactgctcaatcttaaacgtccttggtactccataatttgtcattacgccgatgccaaagactctacagcatcatggcaacacgcttcctttgacacaaattgattttttcgatcagtttgaatataaaaccggggcatgaattcacctcaaccaagagttcttcaatagtatgccttaactgaatctcctcccagcaacccatgttttcaatttgtgaagcacagagtctgcatattaacgagcactctacaccacggggtctcaaattggactt

SEQ ID NO: 275026 - DNA, 442 bp, Glycine max
agcttttgctacaagattattgcatttgaaaacgctcatgcatacacatatacgtgcatatttgttatcttatgacagggataggatcgttttaagcaatagtcaaataccgcgccaaatccaagacagagatgaatcgaggtatgtggtaacgtggccacgatttgctgcgcaatgtcatttcctgctttcaggtacttggagacagacacgaatggatgctaggcccatgatcaacatatcactgtcccgcgtccagctccggacaatcgagaagcgctactgggaggcagcccactatcctttaaattcctacctattattgctgtttatacccaaaagtgcgcccaccaagtgctcggtgaaatgccttaatggcatttgcgcataagtttgtgaatattgcttatatatttgggctgtgcatatatggttgcaattt

SEQ ID NO: 275027 - DNA, 445 bp, Glycine max
  unsure (1)..(445): unsure at all n locations
tctggtgggacatcttgacttgctttccaatctgacattcaccacagattctgccttcttctattttcagattgggaatgcctctaacagcacctttgtcaatgattttcttcatgcctcttaagtgcagatgtccaaatctttgatgccatattttgacttcatcttctttggaggatagacatgtggaggagtaactggtttcttgaggtgtccataggtaacagttgtcctttgatctgctgcccttcattanaacttcactcttctcatttgtcaccaagcattctgactttgtgaagtttacattgaatccttcatcacacaactgactgatgctgatcaagtttgcagtcagtcccttcaccagcagtactttgttcagattacgaagtccatcatggactagctttcccattctagtgatctttcctttagagccatc

SEQ ID NO: 275028 - DNA, 311 bp, Glycine max
agcttgaagcttgaagaagttttgttttttgcatgtcccactctcttgagtgacatttgcattggctgctataatgaatgctgcatcttactccacatcatatcttttgtgcctcctgcatcataatgcgtgagtgagaagaaaatttctaaagttacaaaatttatttcaaaggcaaaactctctgttttaatcgactaccaccttatcattatcaattacaaagttgtttttaagacaatgattgatttattcacgagtctttgctttaatccattaccatgtgatataatcgatcacttttttttcta

SEQ ID NO: 275029 - DNA, 366 bp, Glycine max
tgcctgtccgatgcagcagtagtgatggcccgagtgatgttggggagtggttacgaaccccgaatgggtttacgcaaagacaacggccgcataactagcttgataaacaccaaaagaaatctggggaaacatgggttaggctatagacccactcacgcacatataaatagaagcattgctgaaaggaaaagcggaattctacgttcccggctgagacaagaacgcgaaggaagcccaccctgccacatcagaacgagctttataaactcgcgtctacgagaacaacgtctagtccttgccatatacacagatgatgttccgagtgctttgaatttggtacgaccgtgccctcctgattttccacta

SEQ ID NO: 275030 - DNA, 467 bp, Glycine max
agcttgtacgaatgtaagaaacatcttctacgaccttggtgatccttgactccatctcattgaatcgcatgtccacttgtaactccaaagtatcaaacctttcaccaacaaaggtttgaagaccatcgaacctgtccaaaatcttttgaagaagaaaggaatcttctccaccatgtaaatgtccttcttcatcaatgggatgagcaccctttttcacccaagagccatcatgctctttacggtaaccaaaggatgcaatcacatcagcgcctattagaaaggatctcttgattggaacataaggttcaaaatcaagaggaatgttgaagtgttgaaggaagagggtgactacgtgtggatatggcaatggagcatttaatcgcaatgccttatgcatgtgatatcgaactaagtgtgcccaatcaatttgtttgccctttatgaaaagcccacataacaataagata

SEQ ID NO: 275031 - DNA, 350 bp, Glycine max
catctaccggagggacatcttgacttgctttccaatctgacattcaccacagaatctgccttgctcaattttcagattgggaatgcctctaacagcacctttgtcaatgattggattcatgcctcttaagagcaaaggtccaaatccttgatgccatattttgacttcatattctttggatgataaacatgtgaaggaataactgtgtatttgacgtgtacctacgaaacagctgccctttgatctgctgaccttcattagaactttactcttctcatttgtcaccaagcattctgactctgtgaaattaacattgaattcttcatcacacaactgactgatgctgatca

SEQ ID NO: 275032 - DNA, 409 bp, Glycine max
agcttagcttagcttctacttgcttgcttagctttgacggatagagagcaaattttttaactcactatgtacaacttactaatgagtcaacaagtttcatgggttctccccctctaagaaacttaaaaatttgggttgtcagcttgccaaagtggttgttaagttcgaagcccgactgaaagagtcaaagtccaggctggaggagtccaacatgtgggtggctaacgagagggagaccaacaaggagcttgaataagagttgataatgtacaagaagttgtggagcaacaaaaaaaggctttcaaaaagctgtcaggcaggtcgggtttttttgcaaggaccttgacttacggtcttttgacccttttcaaaacatggaggataatgttctgcttgacaacgaaaatat

SEQ ID NO: 275033 - DNA, 1443 bp, Glycine max
  unsure (1)..(1443): unsure at all n locations
acacgagtgcgttgctagtcagctcgagcacgtagactctatcgcactctcantancntaacncattantcactcgactctactncctatagagagctgatccacatcntntcnnnnannncatatccagagccgtacgcgagnnatacgtgagagttggacactacctattngnctaagntncacccngnatcnactcatttantatatatctgtcagcgtctatctacactaggatgtaacatacacagagtctacatactactacattatctgccagcgcgtcncactctgttcacttctgctggtcgactacaccggcatatatacgctatgctaatacatagagactgtnacagcatcgcactgattctgcatntagtnacgttgtaactgtcactatcgctgngtcaatgcactaacacacagggatcactctcttatgctacacgcacgtgctgtatctttggatgtctaggcnagtatatatactctaacattagcacatattgtctgccaaatatagtaacttcaagtacaggatacctattgtgatactctatcaatcaacgcgccatagtgtaaatccagaatatctgcgagcattcggcatcttgtggtaattgaacacaaagagcagataagataattatcgactagacggacactacgttgataataaccttacgcagtggtgaccgacctaactattagtagtaatcactggggatagagtctcaggaatctcgttccctacatctacagagtgtaagatggctgaggcacaccacagcaaaaaattgcatcacaatcatgagtcggcactgcgcacgaaaatgcacttccattggcaatacactgacgaaagaccttcatttacgccaatttgagataacaatatacttccctcggcaacttatacaggctttgtaatactacgtacgaacattcaccctgcttagaatttctcgagccgtaaaattgtcggcgcgcccctccctcatccgtgaatggagacccgacattcttcactcgtgtgtggggagcgagattacggacaccaacacaaaatacaaaggtgtctgtggtgatcaaacaggacttcctagtacctatacggtgaacgtggtatccgacgctgatatatctctcgtgtatcaccccgtggagtacacgggaactaacccactcgctagtgcgcgacccgagacgaagagcagatttaacccgctcacctgcatctatttccacacantctagtgctagtacacatctcgtaacgtgacgacacactgtaaagtaagcaanattctctatgaccgttccagcgcgagaggcatcatgaactacacacgagcggagcagagcgcgactgcattctgtagangntgcaggcgtatatataatagtgggacatgcgatatgtacgagactaacatccgn

SEQ ID NO: 275034 - DNA, 481 bp, Glycine max
agctttgatgttgtcgagaaaaaatcacatgtttttcatcatcaaaaaggcggagaatgtgaatgtatgtatacatgattttgatgatgtcaaaagaagaatccaacacggctcattttgtttcaagattaatacaagattgtttcaacaaacaaagccttgattgaagatttcttcacgatcaagccttgcctcaccatgaaaggtttcaagccattcaaggcacatgtaatcgattaccactggtttgaaagtgtgtaatcgattacacatcatatgtaatcgattaccacagactctgaacgttgggaattcaaattttaaatgaaaggccaccactattcaagagaaacaaccgtgtaatcgattaccctaatcctgcaatctattaccaaagaggattttcaaggaatatcggccacagtcccatcttatcatttggattttgaatggcccccacacgcctatatatatgtgtgac

SEQ ID NO: 275035 - DNA, 758 bp, Glycine max
attgttgtattttatgagttatgtatacaatagaattttatttctttagggatgggatcaaacaaatgcaaggactgatgattgaaacttgatatccataatatatatttactagatgagaaaaagagtagaagttgatgagttggaaagataggggaaggtagatttgacaaaaaaaattgaaattgttttaaagtttagggaatgtaatatgggggagaaaatttgaaaatggggataactctaaaagtttcaggaggcgtaattaaaagacaagtgtgagggagggatttggtgaagaattaaaattatttgaattataagttaaaatagggaaatagtgaaaagttggaatatgattatttggggaaggttaaagtgaaaattatggataagtggagatttgatgataggattctgttaagaaatgagataataaattttctaatctaaatatgtttgagatgttaaatgaaagttagtttaagaatatgaagctaagataaggggaaaataacaagaaataatggatttttagtttgaaatgaaatggttaaggatagaatttgagggaagttgtaatttgaattagcgaataaatatttaaaagtgtgtaaatgtgaaggtggttaaagattatgatgtaaaggaaggattaattaagcccaattattaggagtgagggttttggagtgtatatattttatgtagttggataagggtacaaataattgtgatagaggttaaagaaatgtcag

SEQ ID NO: 275036 - DNA, 507 bp, Glycine max
agcttcgtggcaaaccagtggttggaggacattgttttatggtgaagttgatgcgtgagattcataatcataaatttgtcaagtcattagttggacatccatatgttgggcaattgactaaagctgaaaagacacttattgctgatatgaccaagtcaatagtgaaaccaagaaacattctgctaactctaaaggagcacaatgccaataattgtacaaccatcaaacaaatatacaatgcaagaagtgcatattgttcttccattagaggaagcgatactgaaatgcaacatctaatgaagcttcttgaatgggatcaatatattcattggcaaagattaaaggatgaacacgtggtaccttgatatgttttggtgtcaccctgatgcagtgaagttaatcaatgcatgtaatttggggcttttgatagaacatacctacaaaacaaacgggttcagactcccaatggtttgatttgttggggtgaccaccaccaggatgaccttc

SEQ ID NO: 275037 - DNA, 58 bp, Glycine max
tataatctcatcttgattgactatcaagaaaagattatcacccacttgacttattgga

SEQ ID NO: 275038 - DNA, 537 bp, Glycine max
agcttcctcggggccatttccggcgaaggcaaacatttggaaagttagttttaccaagggatgctactcttaaaacaaaaatggcatacaacctcctccaataaatacaaacatcaatgtaaatgtagagcaagcttatgcgcatacttctttacgagcgttcacttgcacaagacattcttataactaagaaaaatgcacccatatacaatcaaggcaccttcgttacctagattatttatatgtaattccaaggtgtatttgttacctacatcacacgcatttcctttgctaaatttacatacatgcatactcaaagcactttggctatcaaaaattgcatacgtgcacattttggtatttctaatacctataaacacaaacttcatgatgaatcttgactatctacacaataaggtgctacatttcatgcttttttttcaagcttttttttttttttactacctaaaaccgcatgcacatttaagtatattttcttttgctgactaaaaatgtattcaaataaaaggtattttt

SEQ ID NO: 275039 - DNA, 515 bp, Glycine max
tgccatagggatagattgaacgaagctagtaactaatgccagccaaaattgtatgtatggatagactaaagcagatagtgatcaatataaagaggctcaaaggtcgtggtcatgttgtcaagtatcaaatgatgtgaaagaaatgctattcaatggacaacaatatatataggagatatgataaacatatgaaagggaaaaggaaaaggaatagtaagaaagcgatagacatgttaagttatgtaatgaggtaagtatgaaaaggaataatgaaatggaattaaaacaaaaattatttaaaaatgactatattattttataagttaaaatttattttaaaaatagaatataagggatactttattttgaatatatacaaaagatttacaaagtcagattacagaaatgagtatataataatggttttttcggtttttttaaactatatttatgttttttcaacgtattattcacaattgcacatatataatactcatcttacatttggcacattt

SEQ ID NO: 275040 - DNA, 418 bp, Glycine max
agcttggattgatccagtccaactagggatcgaggtttactaatttaggctacaacatagaacacaaaagcatgattaataagacaaacatccttatatgcatcagttggtctgttagaaagacccaagacttctatctactgttgccaattttacttacttgcatttttactgcttttatcctagacctactttaattctgttttaaaccatcaattatcaatgtttctttcaacaacgccttatttatgaatttaacccggtcttagactagtttccctgagttcgatactcagattcattcgctttaatttttaaatacttgacgatccggtgagctttccaatataccggatttccctttgaatatatttgtacgaaaaaaaagtggaacaaaaaagcacccgaagtgaaatcc

SEQ ID NO: 275041 - DNA, 479 bp, Glycine max
ttacaaaacacatgcaagtatccagaaatataaacttggatgtaccatcaagtcgccatcgatacagaacatccacaagataataagattgatgcacaaaacactacattaatcagaagaattaccagaagacattctactgaagaacaatctttaaaagataacccattaccagctcaagaagatatcatgaggcagccactaagacaagataacaagcattaacaactatatttcaaattcaaaattttgcaagctgtatagtacaaaatagtagaaaaatgtattagccaaagttgaaaagctggagaagttggaggaaaaacaattgacatacagatagatgaaagggaagctcatgcaattttgaatgtgtttgaaaattcctctaacaaccatatgttggaatcaaatccatttacaagctggaatcttaatgatgaaaaaacttcaataagaaaatcgtcagtgaatatgaa

SEQ ID NO: 275042 - DNA, 533 bp, Glycine max
agcttcaagtgcattgaattaagaaaccaagtacatcaaaccctatttggaggaaaaataaaacttgagtatctcataaccagtaaaaaaatataagaaagcaaacaattataatttatcagagagcagaaacaaagacacagacatactattttgcaaagtccaagtgataagtttcgaaacaggttataggttaacaggttattaatagttacatatttaagaactcagtccaccccctaaaagggcaagtccaaaaaattgaagaaagagaattagagtacttctttccagtttccattgttttgacagcaagggaatacggaactcaaattatatacttgaacccactcaaaaagtagctccaaataagaaatattcattataactagagtaaaactaaattctaaacagtgttattaatggtggaaagccaaaaattctaccatataaacattccattgcagccaccatatctgattcccttcacaaattgcccaggtggctggcaaaaaaattgcaacaccattcca

SEQ ID NO: 275043 - DNA, 428 bp, Glycine max
tctcaaggtgtatggagactcagctctggtgatacgccagttgaaaggagaatgggaaaatagggattcgaagttgataccctatcaaactcacatcttgaggttagccaagtactttgatgatatttccttccaccacatacctcgggaagagaatcaaatggctgatgcattagccaccctgacatccatgtttcaacttgccccacacggggatctgccgtacatcgaattcaaatctcaaggcaggccggcatattgttatgcaatagaggaagagcgggatgggaaaccgtggtatttcgacatcaagcagtatatcgagaataaagaatacccaccagggatttcggacaatgacaaaaggacgttgaagagattgggctactgttttctttgtaagtggtactatcctttacaaacgaaac

SEQ ID NO: 275044 - DNA, 390 bp, Glycine max
agcttcttatacaaggctcatcttggtggtgaatcaccttcttccatggcttattccctagtggatggcgcctcctctcacctcttctcctttgtcttcctctgcatctccatggtggaaaatcaccattagaggacctcatttaagctcttcatccagcctccatagaagccccacacgcaagcttccatcaagtggtatagagcacaagagcttcaagtaggtgctccttaaacctctgttaattttttgctttaccttctcttctattgctgcttcttcatttttctccatgtatctcctcacatgtcttgtgctaaatgttgttaacatgattctttagagtttccaccgattaagcttgctatagaagctagatttgattttcta

SEQ ID NO: 275045 - DNA, 429 bp, Glycine max
tccccaacatccaggtaaaacaaaattcaaacagcacaaactatcacagccaagaaaacagggcaaaggcagaaaactctgcccaaaacaccaaccaaaatcacagcttttcccacttaaagaccccagtaacatttccttcgtttcaatttgttaaccgttggatcaactcgaaaattttactggaagtctctagtacataagcctacattttgaccgttgggatctgctagaaaacatccagaactcattctgcactactctttccacaaccagcaaaacatagtatttttctgcacttatgcaaaattctgctgcacaatttcacagcaaaattctgcataaagtgcaaatttcgaaaaccacactttccctcatccaatcttagccaaatcaaatcctacaaggtccaaatcatgtatcaatcat

SEQ ID NO: 275046 - DNA, 331 bp, Glycine max
agctttttggagtacaaacatgggaccatcttattttatttcaaaaagaaagtcgtatctagtcaaggtctgagagaccatacaagtttcctaatgatttctaattatgtgggccattaaatctatcatatgctgacaatagacgagaagcccatgaatctcttccggggcggagtaagtgtctgccatcgccttggccttggctaacaagcggggaagttcttgactcccattcaaggtaagagcaaaccgatcccatccacatgggtgcctcttggtgtaaagagtcgatcaccctttctttagcctctttttccgcgtatacttgagc

SEQ ID NO: 275047 - DNA, 1053 bp, Glycine max
  unsure (1)..(1053): unsure at all n locations
gacggtgcctcgacttattcgtaaacgttcttttatcctcccgccatttcttctctagttctttgtnttnctntccccccgancaccgaccgtgattgcatgccatcncncttccgcgacactatataatactctatcttgcgaagatgcttcattggaagaaatcaaagagggtttttatatagagaggtgcgagcactaccagggacggaataacaggacggacaaaatttgtaacctttcacgagatgtccttacttcgaactctcatttactcaacagctaccacaaagggtccacccaatgctctctatcgtatcacactattgtatctttatcttgtgatacctcttcttagcgatcaatcttcactggataatgtctcttctttccagtaatctttcttacagtaagttaacagccttgcgcgtattcaactgaccgatctcaataaatctaatatttccacctcccttggagaaagccttcctttcacaagcattccgagtagagaaggttagtagctttagcttacaaccttacctctatcttaattagcctaagtcccacactctcttcccaatcagcacgtctatgaggtttattctacccacccacgtaatcaatatgttaacattcattcccggttgtccccaactactgcgtaactcctaccttttcaccaggttagtttattaccataagaccaacatctgaaatgccctccgaaaaaacttcggcttaaaacctcttatactcacttataaatggccccaacataatcaccggccttggacgaacaggaataaccccattcttcaacattttaccaaagcatactgcgcggcgctcatacccttaagcacctgccgcctccagaattctataccctcatgggcttattgatgaaacccttaggggtcctattcctgcggatcactttagcgccaaggatacttgggatctcttctctacacctatgctcccttccagggcccagattcgactctctttagaccccttttcgcatgataccaccgatcagggcggtcc

SEQ ID NO: 275048 - DNA, 460 bp, Glycine max
agcttctcttggaccttgagcaagcagctaacttctcttttaagaccatgctatgtgctcatgattgggctctctcttcccttcgaagcttgagctcactgttgctgcccaacaaagctccacggaatttgtctcggccatgctcttccttgcgagccctcttggtttctcgttcaaaggctcttgcggtagctgcattttcttctcataactcggcacattctttccggacgtctatagcgactaacttgaatttttctttggcaagtcttgcttttcctaattctatttttagagctcggacttctttatcctcttatggagctttcaaggtctcctcgttgataatttttaacttggagagccaatctaaccctcgtgtacgaacttttagcccttcatgataaccaccgatgatgccattaccgatgcccctaagatctttatcttttcttaatgg

SEQ ID NO: 275049 - DNA, 485 bp, Glycine max
tcactattatcaagcgagtcggagacccagcataaccacaaatcgacctccactccctatgtatcacacagacccgagtatagggcctaatacctcaatgtgtgtgcaaaggtataggtgccatatgtgcacagaacaaacaaacatttccaattacgaatgtaatagatagacgaacacactccaaacacaagatcataacaaaaggttatatacaaatatggacaaagcaaaatataaaagagaaaagggaacctaaacaatgaaaaagtcatgataaaaaattgcacactgatcaactgacttaactctctatcaagtccccaatggaatcgccatctattgcaatctaccctacgataggacgacgaagggcaaaccagataagccaaagcgctcgtttgcaagggagaaaatgagcggagtcgccaccaatgtttattcaaggaaaacgtttaaaaaatcaaaaagaggtttgggaattt

SEQ ID NO: 275050 - DNA, 62 bp, Glycine max
agcttcattgcctaacaagcttacttacaacagcacgccccaagagactcagcataaggatg

SEQ ID NO: 275051 - DNA, 915 bp, Glycine max
  unsure (1)..(915): unsure at all n locations
actcatccgactgccttcactaactaacctaataccatcactcgactcctctctattcacnagtanccttctctctcatatanaatatcctcctanccactcgccaccgcgccgtggatgcatttcatgcccttccgcgacactatacactatccaagcctctaaggtgaatggatagacaactctggagaaatttctattgctacgataatgggaaaacaaggatatgctagtcgacaccttctctgagtcacattttgacgtcaaacaattgctttgatgatattatcctccaccacataccataggaacagacccaaactcccgaggcattacacgccctgacattcatgctcgaactagccacacacggcaatctgcctgtccatacaattcaaatctcaaagcaggccggcttattgttatgcaaaaagaggaacaatcgaacgcgaaaccgcggaatttcgacattaagcaatataccgcgcataaagaaccccccccatcgattcaagaacacgacaggaggatagttgatgaaactgaagtaatgatatttgtgaaaaaggtactattcctttctaaacgatccccccccgtggctcttcataacattccttagatcccaaaaagcaaacttcatgatcgatgaaaggcactattgtttttatcagatccaacctcatgagcttaatcttgtcaaaaaaaatcctgagcgccgccttattatggcgatcctcgcacagcgaacttaatccatccggtcaggaaataacttaaacactctgaactatcctaaacaatgtcaaatgtcccaaccatattctccaaatggcacgctccgcgccatggacctatccatgcgacggaaaaatatccaccgtcggcatttagacaccaggctgtttaaccgcg

SEQ ID NO: 275052 - DNA, 933 bp, Glycine max
  unsure (1)..(933): unsure at all n locations
accgccctactcccaacgaaacaccttcacacccatcgtacgcctcactctacctacccaactcgactctgcactttctccacaatcattcccctgggcccgccccgccgtgactncatttgacccccttcaagttccggggaactctacagccgacccgccggcatgcaagctcgaaaataaacaaaattttattattaaactaccacccaaactctactgtgaatttaaggacaagaatccatcaccgaagcaaactctttatttaatccgagccgggtaacacccatgtcttccacaatccacccatcaagaaagcgaatcatttggcaagaccaataagctggacctaacagtcgagagtctgcggaacaacccaataacaacaaaagcccaagatgaatcacaccagccccaaaccaaattctgggaaaaatctattcagactcaagctacaaacccaattctcaaaaaattcaaataaactacaaccccccttgtcaaaaggggtgctgcgacaatccaactcggaaccttttccaccccaaccgagaatcttagccctagacgacacaccctatacaaatttcctaacagggcaaaacacgacttaacccaaacaaaaatctccctcacgggctccctatttcgcctaaaacttcaatgtcccaaggaaccgccttccacaactataaaactcacccggtacccggcgctcaacaccaacttatacacacggggaacacaagaataccctcttctttccaaccacgcccaaattaacccggttcccatcttactcccttcgaggggcattccacacaaaaacccttctccataccccttctcttttacaacccacaaacaaccggccccccccaacaagaaggccgccgtacacaccgcccctttgaacctgtgctccaaatcccg

SEQ ID NO: 275053 - DNA, 344 bp, Glycine max
ttagctctttcttatttggataatgcccaactgaggaagtttcttttcaagtggatcaaatcattcttaatgatgtatgagtttcctcttctttaccttaataacgtccagtattttgactctaaataaaagatagagctaattattattatttattgttagacgaaattaaatcatttttattgttacagcttaacaattgtccagtattactatttgttatcctcctatatatgacaactttcgatctgactgttgttaaatctacaagattagattacatcacaatatcatatacgtgctatatttattgaatcaacccattgatacatgaaacatacttc

SEQ ID NO: 275054 - DNA, 315 bp, Glycine max
  unsure (1)..(315): unsure at all n locations
cagctattagncgaattttccccatttatctagccgaccccgccattggaagaaaatatctgatggtgcgcttcaattaatttatcacaggtacgtcatcttgtccaaactgtgccgcttttcttgtgaaacacgagtgctcatccacattgcacaggttcacctggaagattcattcccaaaggcttatgactttggcgggagtttatagaccctggaaatacgtttccaaattaaagaggcgtgagcctcgacgatatcttgagatgctctatatcctcaaggtccgcgatttgttgagtcacatgacatttg

SEQ ID NO: 275055 - DNA, 355 bp, Glycine max
ttggttttaggtcatatgagcaggataaaaggaaacagtttttttgtctattcaaaaagcacagagatgtcaaactgagcttattagacgtggtgttctgttaattcctgtatatttggggagaagggcacgaaacaaaactagagaaaaatagttttggcctaaagccaaatgctgctgaaactttgacatgtattgggggaacaattgatataaccatctaccttaatcattccagctcttcatccaaagctcctgtatcttagatgagatgacactaacccataaaactttgctaggaaaattttgagaagagagcacagtccataactgcaaaagtaaagttgaaaactga

SEQ ID NO: 275056 - DNA, 459 bp, Glycine max
agctttgtataatgagaatctatccttcaaacatgctttgaaatttggcatctgaagtctgagagctctgggcagataagtctgctaaagctagaggtggggcttaagtagaagatgcagggatgccagctattggggtaaaggaagagggaatatcagctgctctgagcttggtcttccttgtctctggaaaattaactgtttggtcattcgcattccaactattctttatgatataagctaagtcaatggtcggtcttacgttttcataggaggtaagggcatcagatcccactccccttgatctacacaaggttgtgattaaagctgggaagcctcatcgagaagagttagactgagcgatcatggtcatttgtccagagatcaaactgccaatgttcatgtacatgcttgtgattaagccatataccaacctagctttgtctgtgttcaaatctg

SEQ ID NO: 275057 - DNA, 460 bp, Glycine max
tatccttatggcttgccttcggacttcactccccgtgccactccggtagatataagccaagcccctacttttgaggggcaactcctgccttatgacgactatcccgggcaagacgatgaggaaggagatacccatctcggacccctgctgcacctcagagatccgtccccacatgaactacctcaaccgaacatagtgcgccatatccagcctaacccacacccgaaaaagaatctgttcccttagcggaagataacggaaagattgaggcgcttgaagagaggttaagagcagtcgagggccttggcaattacccattctcggatgtggcggatttgcgtctcgtgcccaacatcgacagtccctgccggttcaaagtaccagactttgattagtacaaagggactacatgttcgaaagggcatatccggatgtattgccgaaagatgggtgtgtattc

SEQ ID NO: 275058 - DNA, 486 bp, Glycine max
agcttgtgctttaacctgcctcagtaatataatatggcatgtgttaaggcacctgctacaataaactagctgtgcgtgtgtgcaagtctgaaggtgaatgttctatgtttcaactcttttctccttattgttattgtcttaatacggctagaatagaaaaagtttttggaagtaaattaaggattagctcacctttgctgatttgaatagttcatcaagaacctcggacaaagttggatgtgcatgaacggcaaattttatgtcctgcattgtaccacaaaacggtgaaatttaccaaacaggcaggataaataacagtgaaagactttgagaccattattaataactaaatgccaggtgcacacataaatgtggtagaaaaacttacctgaatatgtgtccctaatgctattgcattggatgcttcatggatgagatctgctgcatgcaaaccaaaaatatgaactcctagtatctctccattgt

SEQ ID NO: 275059 - DNA, 366 bp, Glycine max
ttagctctttcttatttggataatgcccaactgaggaagtctcttttcaagtggatcaaatcatttttaatgatgtatgtgttacctcttctttagcttaataatgtccagtcttttgactctaaataaaagattgagctaattattattatttattggtagaggaaattaaatcatttttattgttaaagcttaataatgtccagtattaattgttgatatccttctatatatgacaaccttagatctgactgatgttaaattcaaagattagattaaattacaatattatatacgtgctatatttattgaatcgaccacttgatacatgaaaccatagctcttatgtttggaatctacatctat

SEQ ID NO: 275060 - DNA, 483 bp, Glycine max
agcttgtaagatttgcaagatcatcttccttgacaacttcgcgaaaaagattgccgtcaatatgaagagataacaatttagagagtgatccaagactttcaaatggatttccactgaatttattcatagagagatcgagatatcttaatgatgaaagttttccaaatgatctaggaagagcatcaccaattgagttgttggaaaaaagtaacgtgtcaatatttttaaatgccccaatatgatctgtcagattgcctgaaagtcgtgaactctgaactgcaagtgttgtgagtccatgggaaatacaaggagcacgaatttctaaaagttcattaacctgttggttgaatttgagatatgataaatctatcacccttaagttgcagagattacccacagaagttggaatgtttcctttcagttgactatatgaacaatgaagtccacaagagaagtcaaatacccaaagaagttggaatgttt

SEQ ID NO: 275061 - DNA, 508 bp, Glycine max
tcgatatcttgacttgagcgccaatatatttcttggagaaggcatgtcaattccttctttcctcgggacaatgacttccttgactcacctcgacctctctggtactggattcatggggaagattccatctcagatttggaatctctccaatttggtgtatcttcgcctgacgtatgccgccaatggaacaattccatctcagatttggaatctctccaatttggtgtatcttggccttggaggtgattctgttgtcgaacctctgtttgctgaaaatgtagaatggctatcaagtatgtggaagcttgaatatcttcatttgagttatgcaaacctatccaaagcatttcattggctacacactctccaatctcttccttctttgacccacctatctttgtcagaatgcacactccctcactataatgaaccatacttgctcgacttctcatctctgcaaactctccatcttttcgtactagctattccccttgccttttttttgtcc

SEQ ID NO: 275062 - DNA, 467 bp, Glycine max
agcttaacaacctgcctacatattgaagcagttttcctttcactgtcacggcccttggcaataatcctgtcaaaaagttcaccaccagcacacagctccataaccacatgaactgattggttatcctaaaaagcacctaaaattaaggctgcttcatgaagcttattaaacttttgaacatacttcaacggtaagtgcggctgtgagtatacatggcaatgaggtatggcatgaacgggtattgtctccccaatccccgactccgacttcccaacatcttcccatacccgtacccgatacctgacgggttaaaatttattatcccattccccgacttgttgggtattacgtattcctccacccctgtgccggactaaattcaaattagaaaaatattttttggtcaagaaaatattaaaaatttgattttacaaaaaataaaccgaatgttaaacatttatttttaa

SEQ ID NO: 275063 - DNA, 891 bp, Glycine max
  unsure (1)..(891): unsure at all n locations
tactactctttactcagttnttcctcaattctcataccttacctccctactccctaaagtttcctcnttcttcctccccacaccccaaccganttgagtgcatgccattgcattaacgtgacactatctaatacttagacttaactctaacaaaccgagtttgcataagaacactgagcctacattttcgagctccactccctatgtatcacacggacccgaggatatgggctaaaacgccaatgtgtgcgcaaaggtataagtgcccttatgagcccggaacatacaaacattgccaacatacaaatgttatagataaacaaacgctctcctaacacaagatcataaccaaaggttatattccaatatggaacaatgcaaaatatataatagaacagggcacctttacaatgaaaaagccatgataaaaaaatgcacactgaacaactgacttgacctttaataaaaatcccaatgggaactcccgtcttaacgcactcaaacttgattaagtatgcaatagggcttcccaaataacaccatgacgattcctgtgggggtaaaaagaagcgctttgccaacgtggtttttatgcggaaaccgcggctaaacccaaaagatggcttggaaattttaaaaaaaaaaacgatgccttgacaaggaagaagaaaggattacaaaacacaccttctccgtagggtgaattactttttgaaagttagaaaactcggccgtagaacgggcccatgaagacgtactaataatttttatgggcgcaccagaggttgaatcataaccaaccttccctataatggtcccgcaaataaagaaatattttattttttccgacacactggtctaactgcaacggtgaatttcaaccatacaact

SEQ ID NO: 275064 - DNA, 471 bp, Glycine max
agcttgagcgagagaagatgcacaagtttcataaacctaaaccttcgcaaaaatagaaacacgaatagaaacacttgagtgaaagaaccttcgagtatgagagaaacacgaacaaaaacagaaaactaaggggcttcaagggatttcttacctttgcaaagagtgacaaacacaacgacgacgacaacgaatggaaggagacaaggcgtgagagagaggaaagggttagtgtaagagagagatgcatgagaggctgagaaaagcaatgaaagggcataagaatgaaaaaggaaaactttccatttaaatacaattttgtaaaaccgtcgttgaacgcttgttttcaaggatggtttttcgtgaaactgatgttgttttgtggtttaaacgaacatttcgagaaacaggcctacaataatattaattatttacaaaaatgtcaccacatttaagataataatggttttgata

SEQ ID NO: 275065 - DNA, 574 bp, Glycine max
tccatcaaaacggttcaaccttataagaaggcaagaggttgactctttgagagggcctctcatcctaaactctaaagatagggaattagatttgggaaattggtatataaagagaaatctatgcacttatagcctaatatgaacatgatttttgggatgcagatgcatgcaaccttcatcttgaaatgtagtaaatgtaggctttgtatctagtaatgcaaaaggttttgaatcatgaaaattgtgtaacgctcatgacattctttccctagtggagtcgccatctgtcgcaacctaccctacggcggaagggcgaggcgaaatgccaaaaggtatgtcttctaaaaaagaaaacgcataggagttgccaccaacgtttattcgaggaaaacgttagaaaaaccaaaaggaggtctgcgaatattgaaaataagggttcgagagttgtttacgcatggggaaggtattagcaccccaagcgcccgtcacaaggaacgaaagccttttattaagtgttcgcaacgtgacttcaaaattatttacttttcccttttaaaattttatttttattttt

SEQ ID NO: 275066 - DNA, 380 bp, Glycine max
gcttgtccacaaaaataagcttttgaatgtttatcactctaatttcttattaagtaaaatgggtcatttttaaagtccaacgccttaaaatgatcacctttcaagtaaaaagaatcacttgattcacgcataagaaagaactacgtacgtttgattttcttatcccaattgacgaatacgtacgagcaaagggaaacacccttgtcgaccacaaaaagagaaaaaatataaaaagggtataaaggatataaggacataaaagggaacgtaaaagtcaaagtcatgtttgcacattcgattaaaggctgctgtcccttgtgaccgatgtgtggggtgctaataccttccccgcgccgaaatacaactcccgagcctttcac

SEQ ID NO: 275067 - DNA, 528 bp, Glycine max
ttagcaactctttctttttgtttagtcaagacttctaatgctcttaatctctcctcgcctaaatcaactaactcatctgacatcattttccaataatggtcgatcggaatgtccatttgtttttgtactctagctgattgcaaatgtatttcgaccggaagtatagcatcgggcccataagtcagtcgaaatggggtagtattagtcgattccttaggagaatttctacatgcccatagaacttgatctaacgttttattccaatttcttggcttttgggcaatgtgttttttaatcaagttaattacaatcttattggctgcttcgacctgaccatttgcttgcgcgtaatatggtgttgaggttaataatcgaaagccagttttttgggcaaattctttcatttttcgtccagtaaaaactgaaccttgatcagtggtaattggttcgtggttaccaaacctataaataatataattttgaatgaaactaattactgctttctgatcaaccattgggaaagggact

SEQ ID NO: 275068 - DNA, 504 bp, Glycine max
agcttatgcacggaaaatgtaattatgaaattgatatgcccgaagaaacaccatttcctagttaaccatgcattaggtaccatgttcaattattttgttttgttgttgtgtgctttttttttttagaaatgggtttatgatcccaacatggttggcccatggtgcctaacacatgcaactaagaatgtagtgtgaagtttcacgcttccccttttttgttttttttttgtagaggaaaacgcaaggatgagcaaacatgaaaacaaatggtatgcaattttgtagatcaaaaagtttgttgaacgcatatgcatgatgatgccatgactcatgcaaaatgtgaggctggaatatgataacagacaaatgcaggaacgatatgttccttatgatgttatgaagagatgcttatgcgatgcatgatatgaatgcattttacggacacgagagccccgaaaattatctcttcttacttgcgcatttgggggcgcaatgccccatgtg

SEQ ID NO: 275069 - DNA, 445 bp, Glycine max
tgcctcaaagaggtccaggaaggacaagggggccgatggaactaattccgctcctgagtatgacagtcaccgctttaggagcgcttgtcaccatctgggcttggaggccatcagaggatggtcatttctatgggagcaacgcgtccatctcagggatgacgagtgtactgatttccacagaggagaaacgtcatcggcggtgggcatcactggttacccccatggccaatttcgatccagaagatctccttgaggtttatgccaatgcttggactacagaagagggcttgcgtgacatgaagtcctgggagaggggtcagtggaacccgtaccatgcagatgctattgggcagctcctgcgatatccgttagtgctggattagggccacgagtgtgagtatggctcagaggaggaaccggtctgatgggttcgatgaggaggcct

SEQ ID NO: 275070 - DNA, 512 bp, Glycine max
  unsure (1)..(512): unsure at all n locations
agcttatacggatgctgactatgtangatcaataactgataggagatccacttccgaatattgtacctttctaggaagaaacttggtaacttggagaagtaaaaaacaagatgttgtagcgtgatctagtgttgaagctgaatttcgggctacgacacaaggtatttttgaattgctttggctaaatatcatcttatatgacttgaagattaaataagaggcacatatgaagctttattgtgataataagtcagcaatcagcatagcctataatcttgtacaacatgatcgaacaaaacacattgaagtggatagacattttatcaaggaaaagttggatagtggtttgatttgtacaccttccgaaggtcaacttgcggatattctcactaaaggattgcacactccaaattttgatagaacaatatgaaagcaaggactggataacatctatcctccaccttgagggggagcgttggatagatgagcatttattgatgattttcttttca

SEQ ID NO: 275071 - DNA, 450 bp, Glycine max
tagcgagtacatacattttggttctctgtggtgcgctccatctaatgtcgtataacggcgtgtcaatgtctcaatttgcgtttgtgctgattgtttatccgatatagcttagctgcattgctcgcctctgttgactgtttgcttaccatgtttgaatgaatcttgctaggcttttgtgtgtgtctggaacccatgaacttgctaagcatgcatcatgtgcttatcgagttcttgcataatagatttatgtatgaatttctggaaaaacattcatgatctcactaagcctacgacgtgcgcttagcgagttcattccatcttgattcgtgctcatgaattatgggcttttgctctttgcgttcttcatcattcatcaatgttcctccagattttttatttatctagaaaccggtgcccgctaagcacgctcatgtgctaagcgagccattt

SEQ ID NO: 275072 - DNA, 615 bp, Glycine max
  unsure (1)..(615): unsure at all n locations
agctttgagccaaaatcctgactcaccataaaccttgacccaggtgagaatgtcaatccttaccctcggaagcaaaaaaagaatagaggggaaatttccaatcaaagaaaaagagaaggaaaattttcaatgaaagcaaaaaaagaaaagaaggaaaattccccaatcaaagagtgggagaaagcaaaaagaaaagaaaggaaaattcccaatcaaagaatgggagaaagtaaaaaaaggaagaagaagaaggaaagaaagctcctgatcaaggatcgaaagaaaacagaagaaatgtgcagagaggtctttggaccggacaatatctgaacaatacagaattggcaccaaatgaacgaaaaaagaaggaaagggaaccacgacctanaatagtcttcttcctttgattaccaaccaaaatcccgggcgctagcgaccctttttttctcggcccgcacttaacaaaaaaaacagaaaaagacaaagcccggaaaatcaaaagcccaaaacacccaacagccgaaagaagaaaccaccaaaagaaaccattcccaacggaagccctattgatccatgatcaccctgtaatttttgatttgataagaaataatttgc

SEQ ID NO: 275073 - DNA, 407 bp, Glycine max
ttttggagtctaaacatgggaccaactcattttatttcaaaaaggaagccatatctagtcaaggcctgtgagaccatacaaggttcctaacgaattctaattatgtgggccattaaggatatcatatgctgacaatagccgagaagcccatgaatgtcttcgggggcggagtaagagtctgccatcgtcttggccttggctaacaatcggggaaggtgttgaatcccgttcaaagcaagagcaaaccgatgcattcacatggtagcctcttggcgcaaagagtctatcaccctctctctagcctcttttgtcggatgtacttgggcatactgattctcgactttatgatcaggggccatggttatacctaactcttctaggtactcgtcggtgatagcctacatgtt

SEQ ID NO: 275074 - DNA, 427 bp, Glycine max
atgcagctttcaaaaatggttgacaataatcatcacacagcagaaccctagcaagagtacccatcatatcttcgcaaaaccccatacccacgaaatttaagagagaaagaagtccacccaaacctggattgtcaaaggcccactcgtagccacgcactttacgaccccgaaaatgcgtctgctttcacgatttggggcagaaatgggcaccaaaggttgaagctttgtttggagcttcaatggagaatgagggagaagaaaggccacgtgagggagagggagagacaaggcttctgcaatgttttctgctgagtgaagagagagagagttgctttttggtttttaaaacgctctttcctcttttcttattattttattcaagctctgccacatgtccctatttgattggagcaaaaagggcccactt

SEQ ID NO: 275075 - DNA, 417 bp, Glycine max
ccttgcctcaaagagatctaggaaggataaagcggctgaaggaaccagttagccaccgttttaggagcgctgagcaccagcagcgcttcgaggccatcaagggatggtcatttctccaggagcgacgcgtccagctcagggatgatgagtataccgacttccaggaggagatagttcgccggcagtgggcatcacaagttaaccccatggcaaagttcgacccagacatagtcctcgaattttatgctaatgcttggcctacagaggagggcgtgcaagatatgcgatcctgggtgaggggtcagtggatcccgttcgatgcggatgctctcagccagtttctgggataccctttagtgctggaagagggccaggaatgcaagtatggccagaggaggaaccggtccgatgggtttg

SEQ ID NO: 275076 - DNA, 943 bp, Glycine max
  unsure (1)..(943): unsure at all n locations
ccgcttcaccgcgccacctaactcatctcctcccacccccctcctaaagcgcaccgtcgattancttcctaccttccccctcccnctcannnacccacccacgccaccggccgtgcattcntttgattccctctcaaccacccggatcctctatagtcgaactgaggcatgcaagccggcgagaagagcagtgcctatgattattaataacaagccccaactacttcatcaccttctcgttcgccttataacccccatgaatattctactattatatgccaaaaaagaacgtccccatattgctcaaaagtagccgcacacatcaagcgatgcataaatcacagatatgttacaagctaccaaaagattgaacaacactatcccataatactactaaatagaactgaaaatatttttcaactaagatatgctcaacaagatctaacaaaaactgaaaattcatttataaaataatataccatgatactacctacttatttaagccccacctgatgaactcgccaaattaataaccacaaactaaacccccacaactttgtgtctctattaaaatccaatcaactcaaattctatattattaagagaaatgatcgacctgaaccctaacttgcgacgaatgtgacagggaacatagactctacagcagaaactcttacaatatataacatgacgagaaaacatgaaacgaggtcaacacaaaacacgtagtcggatttcgcccaacaaaaaattttcaggcactataaccccaaactcttcagaattcggcctaaggggctcccaccaaaaaatctctccctaacgcagctttaaccagtaccctcccccccgcccctcttcccttcttaacaaaacaactccttaccctaactccgctccancaccactctcaaaacaactcttaccctttgcgacaatttcc

SEQ ID NO: 275077 - DNA, 1158 bp, Glycine max
  unsure (1)..(1158): unsure at all n locations
cgatatgcacaaattataaccgaatcctnttaagtcacacaacttactccacttccatcaactntctcagaagtggcgatttccgtncnnaatcccaagccccacgcatttgattgcatgctattcacgcgacactaacacaatactcatagctctagtcatttgccagatgcgatactgttaatggtgtccgcgtacgtgacgatctttctattctaagagcatgtactgcacagtgtgttcgtagaacagaacgtcaacttcttgggccagagcaattggatatgttttaatggtccagaaagagacgtgtagactcgcgctatgtgtctggtctgctagaagaacaagtttaagcaatagccaaggtcgtggcaatagaaatctcttattgtaggcgacacatgaaatcgagactctgtgagactctaactcgaacctaaagcttgagtcatggccactccatagctgacttcaggggcagagcaatatgtcactaagtcacatactacttgcatgaaaatgtactgtgataaaacagtgtcattggatattacacataaatctcctacgtaacctggcctctgttgacgaagatacaaattaaattcattgcatgccgtgaatcaagcaaacaaacggagtcggttggatagttcggtgctgaccaacatccattaaccccaatgtctccgtgctataattctcttaaaccggttttgaaaaaacaagcgtgtctcacgtataacgaaccgcctgcatcgggcataagacccacgccactctggatacccatgtgttccaatggctggcggacggctataatgatgaataaatgcgccctaaatgcccgaaacaataatttttctcattcacttatagggagagacacttaatgctctgtcctatgtctctaaagaaaatcaaggtatactttcggtatgttcatcgatgttcaagtcgttaaacaactggcatcacctctaaaacccactggacccctaacttggtcttaacgggggcatatcgccttcaccgaccgaataaatacaactccgctatacaccgctccaacatttcaaactctccctctttcagccccgtcaacaactctatacgtcacttatctctccacgggcagatataaaactacatccc

SEQ ID NO: 275078 - DNA, 769 bp, Glycine max
gtgggtgattcattgaaccgtggaaatccagcgactgggggatgcccctgaagagaatttcaggcatggcaggtttttccgtttgtgaagggtgtaatctttggaaggagaagatatttggcatgccggggatggaaaggttagctggtggaatttattattcgggtaaacttttgccaagggttggcaaacttgaaaattggttattctttaaatcctggttgggaaccctaatttggaaagggagttattggaagcacccaaccttaataactaccagtttaagaagactactgactttttattttaaacttaaaagaaattttattaatggcttaaagtatattaatttcagaattttttaaaaaaatcctttaaattttttcaccgcttctaccttttaggcaatacttttttcactcaccacgactggactcattctcgagcacccgacctactcactttcctgtttgatcgccaacctccttcttcctaccgaggcggcggccttaccttttcaaagcttattctcatctcgttcatcccgcattctttacttcaacaacctggttctcatctacttggctgaccatctcgactactcactgtcttccctcacgacctcccgttctacacctccctcgcgtctcgcacctgcctgttctcttcctccgccccctcgcacattctgtattgtccttccctcttcgtctatctaaccctcccgctcgcgtgtggcctctcctctcttctaacgtctctcgccccc

SEQ ID NO: 275079 - DNA, 287 bp, Glycine max
tcgctttatctgttacgacgtcgttgttatattgggcccacccctttgcaagtggagcgtccgaagttgatacgggccccactatacattgcctgaaatgcgctgcttttacattattaaaaatctatggaaaagctgtcatgctggatcatttgtattatggaccagaaaagaataattgaaaagttttcttattatggagcaaaaaaatctctaataatgattttttaaataaaatcataattatttcacttaatgttgtcttatctaatgttcactatgtaaga

SEQ ID NO: 275080 - DNA, 392 bp, Glycine max
agcttaccgtaaaacctgggacttaaccatggtagaagtctccacaaaagccattgcctccctcgcccaatattatgatcagccgttgaggtgcttcacctttggggacttccagctatcacctatggtagaagaatttgaaaaaatcataggatgccctctaaggggaaagaaaccatacctcttcttaaggttctatccctcgttagctagaatttccaagatagtccaaatctcgcgcgcaagaattagaccacagggagcaagtcgaaaatggggtggctggaataccgaaaaaatatttggaggcaaaagcaagaatcttggcaggtaaaggcgagcgggtcctgttcatagatattctcgcactgctgatcttcgaaggggtccct

SEQ ID NO: 275081 - DNA, 315 bp, Glycine max
tgcctcaaagaggtccaggagggacaaggcagccgaaggaactagtttcgctccggagtatgatagtcaccgctttaggagtgctgtacaccagcagcgcttcgaggccatcaagggatggtcgtttctccgggagcgacgcgtacagctcatggacgacgagtatactgatttccaccacgaaataaggcgccggacgggggcatcactggttactcccatggccaagtttgatccacaaatagtccttgagttttatgccaatgcttggtcaacaaaagagggcatgcctgacatgagatcctgtgttagggg

SEQ ID NO: 275082 - DNA, 388 bp, Glycine max
agcttcttcattagacctcagggatcagtcctctttcctggccgacgtcgactgtcatttttttcaatcaatattggtgtataatattttcctgccgaggtgggctaatgttttcctggtcaaataaatgggaacataccagtttcggccgaaacaaaacgtcggttgagctccacaagaaaaaacctagccggcctacattgtaaagtttttatgcaacaccaaaacaagaaaacttccagtgccgtaaaaaaaaaccatcatcggccagcgagcgtttaataaaaaaaatctgtcggggctatttcacgaccgatgtcggctattgagttttctattcaatccctgaatgagatttgcatgatgtccattaggaaatgttcgatcg

SEQ ID NO: 275083 - DNA, 344 bp, Glycine max
taatagctgacaatggtcgtgaaataggcccgactgatatttttcttccgacattacgcaattttttttaaaaacgctcgctggcagacaatgtttttttacggccgaggaagatttcttgtttaggtgttgcataaaaaatttacaatgtaggccggctaggtttattttgtgcgagctcaaccgacgtttggtttcggccgaaactggcatgttcccaattattcgggcaagaaaacattagccctactcggctaaaaaatattattcaccgatattgataaaaaaaaaatgacagtccatctccgacaggaaagatgaacgatccgggtttaaaaaagatg

SEQ ID NO: 275084 - DNA, 474 bp, Glycine max
agcttaggaacccaaactttttagcttcaatgtgagaagacatactcgtggctaggaacccaaaatttggttttagagtcagaaaagcatgaaaattaggacttgcttgtgagagtttttactcgaatttgggctgccccatgatcgatactttgcacctaagtgacgtgggaaatgcttttcaatggtatgtggatatatgtggggcatgaaattccttgccaagtgtgaatgattattttcctaaatggatgtatgatagcatggaattcccttttgaatgcaagtatgtgcaggatgtaattagctttccaatatgcagaaacaataaaatttgtatgatatatattccaaatgtgtgtagttagtttgtaatagcaagtatttacgatataattaagtgtgagttttgacgcaatgccctgggcgtgagaatgtatgttcttttcacatgcatatatatgtatgacaatt

SEQ ID NO: 275085 - DNA, 440 bp, Glycine max
ttttggagtagaaacatgggaccaactcattttatttcaaataggaagtcgtatctagtcaaggtcttagagaccatacaagtttcctaacgatttctaattatgtggaccattaagtctatcatatgctgacaatagccgagaagcccatgaatctcttcgggggcagagtatgtgtctgccatcgccttggccttggctaacaatcggggaagttcttgactcccgttcaaggtaagagcaaaccgatccatccacatggttgcctcttggtgtaaagagtcgatcacccttcctctagcctctttttccgcgtatacttgggcatattcgtccgcaatcctatgctcgtgggccgcggctagacctaactcttcttggtacttggcaatgatagctagcatgttggtctccgtctcgcataaacgctgagacaagct

SEQ ID NO: 275086 - DNA, 299 bp, Glycine max
actctattttatacaaacctgggcccctccaaccttggtgcacatgctctttccacgaccaattgtgataatttcggccagctccttcttctcttcgtccccaattttggcttcattgatgatctccgccggactctacatgacagccctacgttcatgggccacttcgataaagtcaaggcccaacctaatgcctttcctgattttcacctttataacgggcttctctttttcaacggcccgatatggttggattccaccaacccctttattccccaccttttgcttgaaattcaccc

SEQ ID NO: 275087 - DNA, 294 bp, Glycine max
tctaactgtaactggtctttatcttaatgaaacaaaatacttgttttggcgtattgaaatgtgtattttttgtttaacaagtttctaactctaatccaaacacacacataaagcctacaccaatttggatcgatagagcgacgatatcatgtttaacaatatatacacgtagattcgtttatttctgattttatttcggttaactacatcagctttatgttgttggataataagattttgccagaggtcaacatttaattagggatggacgtgtttttcaaatctattaaatta

SEQ ID NO: 275088 - DNA, 341 bp, Glycine max
cgggagccaatccaatccctgtgtgcggactctcagccacttatgatagccgccgatgctaccattactgcttcccctaagctctgtgccctttcttgagaccgcactacatggcttgtgaactccttagagtacccctcgcattggggttactgaaaccccgtgcgatgaaaggcatgatgctttcaattgatggaaactctctcatgggggagccaaactggcttatggcgaggacgggattataattaataccaaccccttgtgtcatcaagggaacatttgtacatcctttacatgaagacagaacgctgactcttcctttcttttaaccagggaac

SEQ ID NO: 275089 - DNA, 522 bp, Glycine max
tcaaaccacagcaacacaaaatctaggtatccaaaaccccttaatttaatggatttcaaggtttgaaaagtgaaattgataatgaggtaaatttgaaccaaactctcaccttacacaagtccataacatcaatttaaacttgttcaaactggatttacacctaaaatttcatcgaatcaaaatttgactcctcaacacccaaatttaccctaaaaatggctctttgttcactttggtcatttgtttttctctctagcacagcccaaactttctcataagtcctaaaagacatttcaagctaggattaactcactctaacctctaaatactaccaattccagatttggccttccagccctcaaaaattcactctttttccactcataacaccatattctcaccttctaaccctaggttaattctacccttcatctctaacagttttccataagcaatttccccacataaacattacaagccttctcataaaaaccctaaaacagaatgggtatttttaactct

SEQ ID NO: 275090 - DNA, 343 bp, Glycine max
agcttggaaacaattcgaagaaacccggcttatacctaactgggaggttagtctaatgtggcaatcgcaacttgaaaagaaaatttttacaacaatttcattattttgatttcaaaaaacttgatggcaattatgtgtgccacattacaagggattaggaaacgagcacaatcaattcaaaaacacaacgactggcctcacgtactttcacgtgggggatatgatttgccttgagaacaaattgttagacgagaaaagaaaaaggatacaccaggaagcattgttgagtgaaaattcacccagcgttgatgaccccccatctcccaataaaagacatgttaaa

SEQ ID NO: 275091 - DNA, 444 bp, Glycine max
tatagttattggagggagaataaaataatccaaaatcaattgtacccttcaagtaacgaagaattctttttgcggcttttagatgaggagaggtaggagcctccgtaaagctacacacaactcccaccgcatatagaatatcgggccttgtattgattagataccttaaactccccacaagaatcttgaagatcgtggagtctaccttctctccttcatcaaactttgataacttcaagccaccttccataggtgtgttcacgggattgcaatcaagcatattaaatttcttcaacacttcttttgtgtagcttccttgtgagacaaagataccatttctccgtttgcttcacttccattcccaagtaatatgacatgagtcccatatctgtcatatcaaattcatgagatatggactcctcgaagtctttaaacaaatttggg

SEQ ID NO: 275092 - DNA, 432 bp, Glycine max
  unsure (1)..(432): unsure at all n locations
agctttccaaaatatgggagttctacaatttacatagtgtcatccaaagcaaaaggggccacagtgatggcttcagccacatgtatacaatcatcaaatttctatacaacaagtcaaccccatacaaaaacaaaagagtaaacctaaccgtcagtcctagatacacccaccctcaaaaagtatataaaactagtccatggaactgtccactatgatgaagagcctccactggtcgccatctctctcgggccactatcctccgtagagtctgcctcagatgccgacatgacttcctcgggagaatccacctcaggaagtgggtcctctagaaaatcaagagcatccacagcacgctcaggaggtagctcctcgggatcctcctcanggtctttctcggatgacgtcacctcgatcacttggactggcttcact

SEQ ID NO: 275093 - DNA, 471 bp, Glycine max
ttatgtaatcgattacactgatttggtaatcgattaccagtgatagtttctgaacaagtcaaagatgccactcttcaacagactatacttttaaatggcctaagatttttaaagccaaactcttctaaaggctctcttgaccagacatgaacagtatataaaagccgggctttgtttttcatttcaaaacaatcattgtatacatcaatcttttcccattgattctttacacaaaccatttttccacattgatttctgaggctcttagaacatcttcctcttcttccttttgccaaaagctttaccaaggtttttggttttccaaaccttgaaaacttgggctattcatctatttcattctcttcttcctttggcagaaaaaatttgccaaggactaaccgcctgaaatctttttgtggctctcttcttccttttccaaaagaacaaaggactaaccgcctgaattctttt

SEQ ID NO: 275094 - DNA, 760 bp, Glycine max
caagtttaacctggtaaaattctgactcacataccctccagaggttcacaacttcccacgtgttttgcacatgtacacagcctgaaaaaaatatggacagcattctcaaaattcgcataacattaaccaccagtccaagagcacgggacttccttggtctgaagcctcacaccaattagagggaagcttctaccaacaccataagaaaacggtctaccttggggtgaacttgcaatttcatgatgaggctctgattactagctaccttttcagggttatattggattattctttccatgacaatgtgggaaccttgatttgatgctgtacctaccatttggacttaattccccatatgaattttatcatcgacttaactgtccaaaacgggggcgggaaagcaacatttctttatgccatggcctttggaaatctggcgtaccacaccttgctgccaaccattggtgccggtgcgttatgagcggacctgactttataaacctcaaggccgacccggggtaatagactcgaaatatgaaccttgcctatggcttccaacacaggttggctccacattatcggagggaacaccccccaactcacgcaaccacgatcttacctcgcccaccctttggcgaaaaccaaacccctatgccccgcctacgtttcggtaaatcccccccctgaccctccacgatctaatccatccgtacactctctccactttcacacttcctgaatatactgctctcctcccccc

SEQ ID NO: 275095 - DNA, 202 bp, Glycine max
tcatagtcgagtagacagatggcaccaaacccttgaatgatgaatgggacatgcgtatgctaccgcacagggctgtacaacagcatacaaagcatgctaacacatataatagttatgagggcgcatactatccatcaaatgctcacgctaacagggaatcccatgatgctgattctacgcaaaagtacgggtattgactata

SEQ ID NO: 275096 - DNA, 373 bp, Glycine max
gcaagcttataatgtttattaaatttgcattatgatcagaccagaagaatatacaattttatgtaaaggaaaattatgtcctattgtgttaaaatcacatcattcaatgaaagatagtgcttttgctgtaattttattaataaactttatcaaacactaaataagcactaaatcacattacgtccgattatcaagacgttttaagaaatacctggattcatagagcttgatcaacacgcaggagaatcttacagcgatcacgaacaattgatttaatcaccttcctcaaccaaatcaccttcttttttatgggacattccttttctcttcaaatggggagaggagaaattgtcttttgatttggtgtcttggg

SEQ ID NO: 275097 - DNA, 329 bp, Glycine max
tctgcaaagggcattgtaatctctagcttcttgaaaatatccagaaatcttgctagatgaacctctttatctgttctagaaggtaccaaaggatatgggacttctttcccttcaggtggagattcttctctctcgcacactcactcttgctatatctcttcgctattctattttttttcaatacgctcattgcttttccttttctttttctttttctttatttttctcccttacatatcgtgttcactcactattattgatgtctacttgttcttttaatactctacctccaactcttttttaaactcactccaagactttaccacatg

SEQ ID NO: 275098 - DNA, 690 bp, Glycine max
ctgcaccaaaattatacattgagcaaacaacactgatctaaatcgtgataaatcctaattaatcggaattggaagcttataacatttaacttggataagatttcatatggaaatattatttactctgccacataacacacttaatgtaccactcctatcattagatagttcttgagaagcgaacagactgaaaggcatcttattgggtatcaaattcaccttttttaataactaaaatatgtataacggtctccacactcccgttctatgctttaaacgtatcctactcgaaccaggttcctgggcatttaattatatggggtatttacaagtttaccttaatcttcacaaacaagatttttttgaaaatatcattatttttcactaataactatcacaactaaggattcttggtttagctccttaataacaaactcatccgataatttcaatcctgaatatcaccactttggttcttctaaaaacacacctcctgagctaataattactaaacggcatgggttgacgaaattttcaactcgaacaacaataccttacgctccggagcgaacaaaacaacctccaaactggatcgcaccaacttctacaaaacatcctccagggggccccccggcgccaatcgacgaaccaagcctacctctccctctccggggagggcactgctttacg

SEQ ID NO: 275099 - DNA, 424 bp, Glycine max
taaagaaactttaatatcttaagtgtgcttcgtgaatgttgtagcagaatcagaccaattgaaacctaaacatctacaagtcattatttttgcatgatcaattcatcatgcaaagtcttgaaactaaaacacaactcatttcatgttcttatgctttgcaatgttctttatagttaggcttaaaggctcaatacactttatctaacaatattttgactagaggatgcatctatattgccgatcactactagaaatatcattttttaagttggctgaatcgtatcttttacgacagtttcgaacccgtgtaaaatgcagtgtcgtaaaagaaaaaaaagttttaaaaacgggtattatatatatatatatatatatatatatatatatatatatatatatatctttttaccctgattatcgggaa

SEQ ID NO: 275100 - DNA, 322 bp, Glycine max
taccacgggataaaggggactcccggcagccattcaaactaaaaatgttgtaagaatcctgagttttgaacgctccagcgacacttgggtagtgtgacaagtatgttgagataatgaaaagtgatgccttaagatgcatattgtccctgaagtcaccccattcatggagaatgtgaataccatcttcgactttttcaaaagtgccaaaatacgtactcaggccacgtatatcagggaccaatcacctcaataagggacagagccaccttatgatggaaagggtctcagagcatatgataactgcacttctctttccagtacc

SEQ ID NO: 275101 - DNA, 391 bp, Glycine max
ggtttatgtcaatcccaccactgggagaggatcatgcccacataaacaaaagtttcataactatctagaggtcgaagctcgaaaaaatactccaacagttcactctaattggaaagttgtccctgaatctctaaagaacctaatataggatgacatttgggggtgtgtagtgagctatgaatttatattagactttccctaatttaattggaaaacaatgatattcaataactgataaaaaacaatttttaattacaaggaaaaatggatatacctaaagctgtgaatgccaactagaaggtgatggtcatggtacccactatatggaagtaatttaagtcttacttgacccctacatacatatatgttgtcaatgaaggtgaagaaaaac

SEQ ID NO: 275102 - DNA, 341 bp, Glycine max
  unsure (1)..(341): unsure at all n locations
tggacactccaaatctgagtgcccagattggagatatcttaccacaagaagaaacagctctacatcaatgacaagaaaggtgttatgaccacttgggaagatctagacaactccttgtccaaagaagatgaagaagaagcccatntatgtttgatgacagatacatcttctatagaatctgaataagatcaagaggatgaggtcaatctcaatgatcntaaatctcttaaaaaagattatcacgaactactgtccaacctatccattctctcacaagcttacaaaaacttgtgaaatgatttcccaatattatcatcagatcatttgaaacttgagaaaat

SEQ ID NO: 275103 - DNA, 438 bp, Glycine max
  unsure (1)..(438): unsure at all n locations
ttaatcatttccaaatatgcatgttaattatgacgcatcaacaagaatcaagccaaagctattgtgcaagcaatcaatggggcaaaacacaccacatgattatgatgatggatggctcaaattctcacaaaggtaaaatcatcactttcaaattgagctttcagaactatcatgacatgtagagaagaatcaatgatntcaagtcacataatgtcaagaacttttattttcaaaacaattacccatttcttgaacatatcctataattcaaagaataacatgcagagtcgtacgtgcacacaaaattgacccataatattaaactgaaaattcgacgaaactaacaacattaacaaattaacacaactaatcagataacataaccaacaaaactagcacaaccaaagaacacttccccnnccccatacttaacaacac

SEQ ID NO: 275104 - DNA, 439 bp, Glycine max
atctctgaggcagctggcgcgtgcgagctatggccacccggagctgataggatttatgatcttggctacgcccgagtgcctgagctctatttacaggtgggcaactggagatggtgcgtttatgtttgactcgtggaagtggcagagttgatttgtgccatcgcccgatcgccacctattgccatatatgacgggcgccccataatccaataagcttgatgtgagaaagcgtggaatagtcagtctttctactctagtttgttgaccacatagtggtacctgcagatatgtcccgggggtcaagagaccttgaggacgacatgtggtgtgctatcgcccaaaaccaagcttggctaatcctgacccaacccgggcatagtcagctagtgagaacctgcgacgtacctatgcaggcgagctcctgacagtcaaccaatat

SEQ ID NO: 275105 - DNA, 352 bp, Glycine max
  unsure (1)..(352): unsure at all n locations
ttgagtgaaaggatgtgactcttcacatctaaacttgagtttcaacgttcaagggcactagtaatcgattaccaaaacattgtaatcgattactgccttttgaaaattaattggaacattgtaaattcagtttgaaaactttctcaaactcatgttgctactggtgatcgattacaacaatatggtaaatattaccagagagtaaaacctctttggttaagggtttgtcaaaaactcaagtgctattcaaagttatgaaaaaactttntaatacttatcttgatagactctgttattcattcttgaatcttgatcttgattcttgagatcttgaatcttgatgcttgattct

SEQ ID NO: 275106 - DNA, 440 bp, Glycine max
  unsure (1)..(440): unsure at all n locations
agcttaaaggagaagttggttttctgaactctaaactggaaaacatgacaaaatcaataaagatgctgaataaaagctcagatatgcttgatgaggtgctacagcttgngaagaatgttggaaaccagagaggacttgggtttaatcataaacctgctggcagaataaccatgacagaatttgttcctgccaaaaacagcactggagccacgatgtcacaacatcggtctcgacatcatggaacgcagcagaaaaagagtaaaagaaagaagtggaggtgtcactactgtggcaagtatggtcacataaagcccttttgctatcatctacatggccatccacatcatggaactcanagtagcagcagcagaaggaagatgatgtgggttccaaaacacaagattgtcagtcttgttgttcatacttcacttagagcatca

SEQ ID NO: 275107 - DNA, 345 bp, Glycine max
  unsure (1)..(345): unsure at all n locations
tcacatatagagacgctcgaaattgaacaacggaagctctcgagaaattcaaatggtcataacttgtcacttcgaggtccgattcaggcgcataatatatcgagacgctcgtaattgaacaacagaagctgtcgagaaattcaaatggacatcagctttcactcggaagtccgattcaggcgcatcacatatagagacactcgaaattgaacagcggaagctctcgagatattcaaatggtcataacttttaactcngaggtccgagtcaggcacacaatatatcgagacgcccgaaattgaacaacggaagctcttgagaaatcaaactgtcattacttttact

SEQ ID NO: 275108 - DNA, 447 bp, Glycine max
  unsure (1)..(447): unsure at all n locations
agcttgctcgtcttgctgatatttatcatgtagacctttctgatgatgaccgaggaacaattagggatcaacttgaaacttatgtgcttcaagtgagaagaaatgcttctttttccacttgtgaagatgttcaaagtttggctatgaagatggttcaaactgagaaacatttggtatttccattggtttataaacttattgagctagctttgatattgccggtgtcgacagcatccgttgaaagagctttttcagcaatgaagattatcaagtctaaattgcgcaataagatcaacgatgtgtggttcaatgacgtgatggtatgttgcaccgagcgggagatattcaagtcactccgcanagaagtctcggaaaggacacttgcctcgtaattntatttaacccgctattgtaagattatgtttatctcttttattntaaactata

SEQ ID NO: 275109 - DNA, 393 bp, Glycine max
  unsure (1)..(393): unsure at all n locations
tctaacaactcttaacctgctgcaccatatgctcctcaagcacatctagcagaacatgaagaagtgatagttgctgtggtagtggaggcaaacatggtcgacaacaatgtggactggattctagatactggtgcttctaaacacttatgcgccaacaaagagctttttcaccagaatgaggatgctgatgactgagaatgtgttttcatgggaaattcagctacagctggagtgcttggtaaaggaaagattctccttaaacttacttcgggaaaaacattatctttgagtgatgttttgtatgttccctctctgcgtangaacctaatttctggtagtcgtctaaatagagctggataataattggtttttgaagctgacaaagtagtaata

SEQ ID NO: 275110 - DNA, 357 bp, Glycine max
  unsure (1)..(357): unsure at all n locations
cgggcatagtctgtcagtgagaacctgtgatgtacctaaacaggcgagcttctggcagtcaacaaataaaaggaacaaagaccacaaagcaaggaggcttgtggtggctggccagctgtgaatcttgtgtgatatatgggttatggcctctggtaatcgattaccaagggtgggtaatcgattacaaggcttanaaatgaagacaggagactaggatggtctctggtaatcgattaccacggngtgtaatcgattaccatgcttganaacgaggtcagaaagctaggggagcttctggtaatcgaataccagcgggatgtaatcaattaccangcttcataaaggaactggaacact

SEQ ID NO: 275111 - DNA, 428 bp, Glycine max
  unsure (1)..(428): unsure at all n locations
agcttctagccaaatggaattaccttgaattaattcctttgatagcccttttgagccttgtttccctttccttgttttgaagctcactacaagccttaaatgaagaaccatgatatcaccatatccttaaggaattttggagctttggaattgttttgggaataagtgtggggggtttttgtttcattggataacttgttttgttggctatgcttcatgatgtattttgggccatacttgatgtacattgtatattggttaaatgttggacatgcaataaagttgagtgaataagatcttaaatggcacaagaatgatgaaactcttggntctactctttatgtttaaactntatctttacttctttntattgtcttattttttttcttaatatgcacttattccccattgctcctctattcctttgg

SEQ ID NO: 275112 - DNA, 373 bp, Glycine max
aagaataagagaattctcgaggtttcacacttgcacatctgagaagaaaactcattctacccggagctcgtggaaaatgcccacagacaattgtgatagtagggtacatctgatgttagtcgctcatgccgactccttaggattccttttgaatccaagggtggcctttgttgtataagttcttttgggatcaacccatgtcatcaagtttcagtgagatcgacaaacccttggcatcactctataatcttaagtcacgaaagtttcatctggtaatacaccaaagtgtaaccatccattgccatccttccattgtatgtgcgatcgatcccaaagccttatgttgtgttgttttcaaaataatcaaagtttt

SEQ ID NO: 275113 - DNA, 389 bp, Glycine max
tgaagcttggagggaatatttgttctatcttacataacaacacatgtatgttattgtccataattcttagatgctcaacatttaaaggtgtcgaagttagctctctacaaaattggctaagttcaacaagtggcttccaaatagatcttggtaatgagtcaaatgcaattggaagcaaccggtgcatgaaaacatgacaatcatgacttttcattccatgaatttttcccttgttaagatccacacatcgacctaaattggaggcatagccatctggtaactttagttctttgacctatttaagaacagcgagtctttgggatctggtcattgcataagctgcctttggtttacagaactcttcacgaacaacatctaccagctcaagc

SEQ ID NO: 275114 - DNA, 348 bp, Glycine max
  unsure (1)..(348): unsure at all n locations
tgagtcggatatctaggaaattcttcgatcatttaaatcatgtccgtccttttggaagaaagcccaagaaatctttgccaataatatccaaagcttgtttgatgcaaccatgaaagttacagccctcaagcaaatcaatcatgacatgatcgctcatgtgggtaaggctcgagctgccgtggaagaactgaaaaagttccttgtagctgattcattataagaagtgaatagganacttgacaagttctacatggttcttattttgagaagcttgaattcagactttgatcatgtgcgtgatcaagtacttgctggagaccagattccatcgatgggatccctcatcac

SEQ ID NO: 275115 - DNA, 432 bp, Glycine max
agcttgaagagcttcttgagtcttattctgttatgaagaatatgactgaagctatagaaatgtcgaagaactgtatacaggtgttggagctttgtgtcaagtgtaacgatcacatttctgaaggccagttttattctgcattgaaaactttggatttagttgaggaaagttgcacacagaatattcctgcaaaggctatcaaaatggtcatagagagtagaattcctgctataaaattgcacgttgagaagaaagtatgcactgaagttaatgaatggatggttgagataatgagttctgctaaaaatattgggcacacggcaattggccgtgctgtgacagttcgtccaagggacaaggaaatgctagaacagcagaggaatgccgaggagcatagtatttcaggactatgcgatctagcttatactttgg

SEQ ID NO: 275116 - DNA, 248 bp, Glycine max
atatcctgatgagggtattccatatgttctcaagactggactaatacatttgctgcccaagtttcatggtcttgcaggtgaagatcctcataagcatcttaaggagttccatattgtttgttccaccatgaagccccctgatgtccaagaagatcatatctttctaaaggtggtcctcattctctggagggagtggcaaaagaatggctctactaccttgctcccaggtccattttcagctgaaatga

SEQ ID NO: 275117 - DNA, 444 bp, Glycine max
  unsure (1)..(444): unsure at all n locations
agctntgagtagaanagttgagatttataggtaatctatcacatgagcatgtacttttaattctgtacttttcttcccaattaaagaattaatttatgctaatttaccaggcaaaatacaagtgacacagacaattgtttctacaataatcatttcatggtgattcatgatcttctaagagagctagcaattcatcaaagcaaccaggaaccaattgaagaaagaaaaagactgattattgagacaaatgaaaataaaagtgaatggtggctttgcgagaagcaacaaggcatgatgacccgtatattgtcattatgctttagatattgtgctaaacagaaataccagcagatccctgctcacacattgtccatatcannatggtagttatccatacaaaagcttagctacacagtaatgacaatagacattctataattgata

SEQ ID NO: 275118 - DNA, 565 bp, Glycine max
  unsure (1)..(565): unsure at all n locations
ccactgggcgttgannncaatganatcgactgcgctcgtctattacgtgacactatataatactgcagcattattagtgcaggtctgggagacgaattgtaagaggtcgccatatgtgaacatgatgttccacgaactctggatctggtccgaccatgccctcctgatttccacctgggacattggcgaatggaggaacgccccggcatttactctactagcgtcatgtaaacctttacggatttaaaagctctatcatggcgcctacgctttatagttatcacattgctaagggtncgtgtcctctgttattgaagtgatcatacatagatcttgcttactctgatcctagacactacccattcatattcatatgcgcgtcaactacgttgtctaagaccgcagatgctatgacgagtgcnccgagggacatatacttgggagcggtctataatttncgctctaaatgacctgacgatatgacagcataggttgtggacttcattgactcaaagatgggcgccacatgaccataatgggcctatatgagagcaagctatagatn

SEQ ID NO: 275119 - DNA, 425 bp, Glycine max
  unsure (1)..(425): unsure at all n locations
agcttctagtctcaattttagcgtctcgatatattacccaattcaatcggacatccgagtaaaaagttattgtcgtttgaatttcctacgagcttctgttttcaatttggagcgtctcgatatattaaaggactcaaccggacatccatgtataaagctattgccaatttaattttcttagagcttcggatcaaaattttgagcgtctcgatatattacgggactcaatcagacatccgagcaaaaagttattgtcgcttgaatttgatacgagcttctattttcaatttggagaatcttctcataaattacaacactctgtccggcatncgagtaaaaagctattgtcgcttgaattctctaagagtttccgcctcaatctggagcgctccatatattacgggactacaccgacatccgtgtat

SEQ ID NO: 275120 - DNA, 309 bp, Glycine max
ctggatgcgttggtcaacttggtaacccagctggccttgaatcagaaatctgtacctgtcgcaagggtttgtggtttgtgctcctctgctgaccaccatacagacctttgcccttccatgcagcaacctagagcaattgagcagcctgaagcttatgcagcaaatatatacaatagacctcctcaacctcagcagcaaaatcaaccacagcagagcaattatgacctttccagcaacagatacaaccctggatggaggaattaccctaacctcagatggtccagccctcagcaacaacaacaacagcct

SEQ ID NO: 275121 - DNA, 405 bp, Glycine max
  unsure (1)..(405): unsure at all n locations
agctntcacttttgctttaaaagagaaatcaacccatcaaaaaaagaaaccaatgcaaattattttttgaaaatacttttatttgtggtaaggaggattaaagtctataataacaatattgtgtcaataagcgcacactaccaaccattgtcgtataagagaagcatgcatgtacttaagatcgtatctatcctatctattgggatatcttaacttgaagaatgaagataattgaattagatttcggtcttaaacttagatcttttgtatttgagtcaagttaattaagattataatgtgagttgttgttgtatattaattttaacccattctattctaaaaagtaatttaataattcatactttctcatatcctatttataaaactcaattactaaattcatta

SEQ ID NO: 275122 - DNA, 423 bp, Glycine max
  unsure (1)..(423): unsure at all n locations
tatgcaattgtgttatatccagagcaaaacatatntaagcctattccagtcaaacagaaatacttcttataaaagacatcggtggtgttaaaaaaaaaatataaagtgtaatacaaaactttccaacagataattcattcaatgtggtccaaaggttgtttagaggttaattttaaattgaaacattaaaattgaagtccaatgcaatttcaattattgagataaacatgataaatggtactttagctcttttattcagtgatccttgcatacataatgcacaccaggaaatttagcagcaaattagatttcagtcatttgcatcagtaatgttgtcttggatcaacgctgctacataccaatgtaatttgtaagcataagctaaatggtgtngtaatatactactctcttatcttataatga

SEQ ID NO: 275123 - DNA, 416 bp, Glycine max
  unsure (1)..(416): unsure at all n locations
agctntcttttggtcatggataatcctgatgaggtcaacttgtggtggctggttggttgaagttctcaatctcataaagtagggaaacatagtctcttacaatgcatctttgcacttggggcaatgatgcagctagtgaggttctaaccgaaaagcgtctattgttggttgaaaactatttccaaaccccgtcttacgtctaggttcaccctatgcctttgagaatttctggaagggcttcctcaagggcaaagccttacgagccttacaaactatttccaaaccccctcttaattaagtttgcaagacttactcctatggtaagtgaatatcctatatatctatgtcatcctaaactatctattagctcttaagaaggagattacggtaaaaaaaagactttcattctggttacc

SEQ ID NO: 275124 - DNA, 384 bp, Glycine max
  unsure (1)..(384): unsure at all n locations
tgatggtgtcgagaagaaatcacatgtntgtcatcatcatatagggggagaatgtgaatgtatgtatacatgattntgatgatgtcaaagaagaatctaacaaggctgcttcaaatgataagcatttgcttcaagaataattcaagattgcttcaacaaacaaagccttgtttcaagattcactaaagaccaagccttgccttaaaacaatgtgctttcaagacatgcaaggctctggtaatcgattaccaggaagtgtaatcgattatcagaagacagggttgagaaatagctgttgaaaaagggtttgaatttgaattttcaacatgtaatcgattaccatatgcctgtaatcgattaccagcaacgaaactntggaaattc

SEQ ID NO: 275125 - DNA, 378 bp, Glycine max
  unsure (1)..(378): unsure at all n locations
agcttgaatcggacatccgtgtganaagttatgtccatttgtatttctcaagagcttccgtagttcaatctcgagcttctcgacatattatgcgcgcgaataagacatccgtgtgaagagttatgaccatttgaatatctcgagtgcttccgatgtttaatttcgagtgtatcgatatattttaaacctgaatcggacctcagtgtgaaaagttatgactatttgcatttcgcgagagtttccgatgttttatttcgagcgtatcgatatattataagcctgaattggacatccgtgtgaaaagctatgaccatttgaatttctcaggagcttctgttgctcaatcttgagcgtctggatatgtgatttgtctgaatc

SEQ ID NO: 275126 - DNA, 357 bp, Glycine max
  unsure (1)..(357): unsure at all n locations
ctcagctataatatatcgatacgctcgaattaaacattgganactctcgagaagatcagatgatcatgacttttcacacggatgtccgattcgggcgcataatatgtcgagaggctcgaaattgaagaacggaagctcttgagatattcaaatggtcataacttttcacacgaatgtacgattcgatcccataatatgccgagaggctcgaatttgaacaacagaatctcttgagaaatccaaatggtcataacatttaactcgaatgtccaatttaggcgcatcacatatagtgatattcgaaagtgaacaacggaagctctcgtcaaattcacatggtcataacttttcacactg

SEQ ID NO: 275127 - DNA, 268 bp, Glycine max
  unsure (1)..(268): unsure at all n locations
ctgtctcaaaccaattgattctttaaatattttcttaccatatttaatcctttgattttctctaattgctgtcaccaaccctctcctcttttttcctactacaaactctcaaagtctgattttctactccaaatcatatcataatagatcttttactcccagatcaccaactaatatatccaatttgggtcatcagacccttacgttctttgngacgttttggttctccaactagcccatatgcataattacatgtgttctttcatgg

SEQ ID NO: 275128 - DNA, 309 bp, Glycine max
atgcataatgctcattttgcttactgcagctgggttatttcaattcccatatcgcatcatatttgctgttgccactttgaaatcattggacatttatgacactgagagcacctctccgatagctgtattagctggccttcactatgcccgaataacagatattaccgtggaaattatagatgctagcaattccttttctggtttgagaattaagatgaatatttacggaaagggttaactctaactgttacttgctcataaggtcatgtgatgctcattatttggcattagcctcacaagatggtatct

SEQ ID NO: 275129 - DNA, 653 bp, Glycine max
  unsure (1)..(653): unsure at all n locations
ttcctctttccctaccataaacttctncaactcacgcatgaaatctncatntnnaagcgcggtcacggctaacgccttgagcactttagatcctctaatanacctgaagcatgctagcttagactgtgccaacgaggaatgtgcatctccaacgatttatctagagccatctctaaggtaccaacttgcgcgcttgtaggagctcaatatttctgactctccgtaacggtacttctatgcgtagtaactcaactttggatgctgacgtctgtctgatcatgatcgaatcctanncacctctggtgtcgatgactcgatgaggtcatagcatcntacaggntttacgctccactcactccacttatatagntttcttcatataccctgtgaataaccgccatctctgatccgatagcggtctctagcatacgctaatatgctagaggttgttttgttctgaaagcttgcacttgcgttagacatgattgatacatgatttacgactcgtaagatacactctgggaaacattggatgacggcaagtctgacttccaaaatccgtacttgatgcagaatcttgctgtttaatatgtgcaccagatctttggctctgcgcacagaatgatgagcatctcgtcgtttctggagagacg

SEQ ID NO: 275130 - DNA, 319 bp, Glycine max
  unsure (1)..(319): unsure at all n locations
gctcacattatctgcttcaactnctaaacaatccanaatttttggcttctggttttatgtcaatacatcaaaatcttatgttttacttgtgtcatcatgtaatgcttcctctactattgattccatacaacagaaaacaaaacactaaaaaatgaaacctaatatcatcaacaacataaaccaaaatttttggctgctggtttgtgcccatccccacatttgatcttcgatgaccaatctacaaattccccccgccccataaaatgataaagaagaaataaagaacttcgaaccagtcagaagaaaagcgtaattaaat

SEQ ID NO: 275131 - DNA, 437 bp, Glycine max
  unsure (1)..(437): unsure at all n locations
agcttgacttatttgctaaatgagttaggtctggcccaagccttaaacgggttgagccatatgccctcaatggatgacctgacctacttccacccctaattatcaataatattttattaaatgcctgtttacgcttatatacttacttaaacttatgggccttgtataaataacgttaggtgagtagactttcatattaaatcaaatctttaaataaacaagattttttctaatggtaagaacatatttaatagtggatcttgaagtagaattttgacctcaagatctgatcttggcaagatctactgctagagctagatcaagatctcctgtgtgtaggatgggttcttccataagaaccatgaaggtttaaatcattctaaaaaaatncatttttacattctncttaacaatntatggagggaagtaacagaaaa

SEQ ID NO: 275132 - DNA, 278 bp, Glycine max
  unsure (1)..(278): unsure at all n locations
ctcactctaagaagtgcattcactcttatcttggatggatatgaatgaaggctcctacccttatttatactactccatctccacaataaatggtggagatttcttgtctcatatggtgaagatcaattctctagaatgctccacacattctangagtttctacactcttccatatccttgcataaggttccagatagtttcacacatctctacaatattccagacgttaacacattcttccacaagcttctagagagttctacactactctagagctc

SEQ ID NO: 275133 - DNA, 443 bp, Glycine max
  unsure (1)..(443): unsure at all n locations
agcttatnttctagtagtgcgaacacgtgttctcaatggatttccccatcatatcagcctcataaatgccctcaattcaaaggacacaactagattctaacttcactctcaactagaatgagatgtagatataggggagatctagagattcttcctccactcatcgcaactgagacagagctcgtgccataacctcagaaccatatttccattgtcggtattgaacattggtgccatttgtgggggaaaatatcacaacaaaaatttgaaatactatcactgatccatcggttcgagttggatccgaaaagctttccgataagaaatgtggagacgcacaagcacgagtcctcaaccgccaacacccaacacttgaagcagaaagggaaagaatcagcatctcctacttgcactgttgtcacanaatgaccaccacgtccaaa

SEQ ID NO: 275134 - DNA, 342 bp, Glycine max
  unsure (1)..(342): unsure at all n locations
tggcattgcccctaactaagttgactcgtaagaatgagaagtttgtttggaatgagaagtgtgatcaaagcttccaagaattgaagaggcggctgacaacagctccagtgttaattttgcccgaccctaagagaccatttgaagtgtattgcgatgcaagcgggcaatgcttggggtgtgtgttgatgaaagagggaagagtantggcttatgcttcacgtcaattacgtcctcgtgaagttaactatccgacccatgacttggaactatcagcagtggtctctgctctatagaattggagacattacttatacggtactcgttttgaagtttcagtgatca

SEQ ID NO: 275135 - DNA, 416 bp, Glycine max
  unsure (1)..(416): unsure at all n locations
agctntgtcagtgtaaggtggatgtgcgagggacgggttgccgtgataaatgaagaaaaccctcaagaccaaccaatttgggtgcggttgtgtcctctagagtttgaattgnggaattggcaagtcgtcaaatgacccaggatttccatgacaaattcaatgtaatccaatagttccaaccctattgctgggcctaggctctagggtatgctctttggttaggcatgctttttttaaaaaaatgggttacgttgattttaatataaagaccttctttattgatatgatccctctcgtaccttcgctcatttcattnttttgcatatttattcttgttgcaattaaatgatttaccgcaaatctgaggttaagtcctataagggtaacgataaatcaagcagagggggacgaggatg

SEQ ID NO: 275136 - DNA, 308 bp, Glycine max
  unsure (1)..(308): unsure at all n locations
tcgattcattctatgtacccgcggtgggccacattgtgtttcgtgtatttatcttctcgctttcatttactttccgtaccccttttgacgtgcttaagccattttatttaagtcatttctcgcttaacctaaaaataaaataaatttccaccgatcgtttgaattgtattatccgttaacttcggttaaactgaatttcgaccgttcggtcgtgccgtaaccacgttggaaataaaaaaagagggtaaataataatataataatcaacaaatgtctnttagtaaaataaagcggaacatcaatcggac

SEQ ID NO: 275137 - DNA, 436 bp, Glycine max
agcttgtccattgcttgcgcattcacagacgtcagcgtcgcgacattgaaatctcagcacaccggacaaacaagctccaccttatcctcttcctctttcttcaatttgatctcattccattgattcaacctttcttcagttcctccaacgtcggcgaggttggatctcaatccggcgaactcgtctcatcaccgcctcgaaatgcataaatgattggtgttagggagtccttggttcggttagttggagggaaagggaaaggttagaggcagatactagagggtgcttgtctgagtctgagaaggaggtttagaaacaaaaatcataggattttgaagaaaaacgaggttgaagaaagaaagacgtgtttcttcttgagtacagagagagagtgagacggatagtggaaatacagatacgcttgagagagtagggc

SEQ ID NO: 275138 - DNA, 222 bp, Glycine max
acattgaaaaatgccagaaatgcacaaacctagatatagggttggtgtgattaactaggtttcaatgaattcaatgaataggaataagagcaaattacagcaacacccccctaagcttttatcaaaatatacataaccccatcctcttttttattattctacactaacccctctaagtttgaaaacattatactaacaccccaacaaaacttacactaacac

SEQ ID NO: 275139 - DNA, 415 bp, Glycine max
  unsure (1)..(415): unsure at all n locations
agctctgatgatatggtcttcaccgacgaaatgatcgaagtgggtctgaaaagaggcaaatctgatcatcttgctttgataaatgcaaaaaaaaaaaaaaagctggggcaaataaagagggtgaggatgaaggagaagcccgtgctgtgactgccattcctatacagccaagtttcccaccaacccaacaatgtcattattcagccaataaccaaccttctccttacccaccgcccagttatccacaaaggccatccctaaaacaaccacaaagtctgtctaccgcacttccaatgacaaacaccaaccaagaaatgaattttgcagcgagaaagccttataattcaccccaattccagtgtcctatgctgacttgctccatatctatntgataattcaatggtagccataaccc

SEQ ID NO: 275140 - DNA, 332 bp, Glycine max
  unsure (1)..(332): unsure at all n locations
tcgaactggagcagttatcatggaacctaatcatctaaatgtgtaagttaacattgattattgactcaatagataaaggcgtgtatagcttcctactgtattgtaccattctgactcactatgtagaccacattcttctgtttatgttgggtgtcatcattntcatgaccattaatcttattctatatctgcaggtatgaacaactgatagaccataccaaggcccttaacggacgccacttacaagtggttagtcaacttctggaacatgcacaagctcaaacaacacgatgattgtgtaggtagatcaatgagagtatttgtntatctat

SEQ ID NO: 275141 - DNA, 392 bp, Glycine max
tgctcgtcaagagtcggcacctactactaaaataccaactctcaataactcagcgattcataccacacacatacagacacgggttttatctggggccacgtatagatcttaagctatgtgcattatttaggagatacaccgagcctacctgctctcgatgtatgctagaaccattctcatcaataatgcccaaccaatgtgaatgataagtgtatgagacaacgatgccctctgctgtgtcttttacacgatcaacctctcgctgactttcttcgtgaccaccagacctagctctaaccgatgaagttgttgctccactatgaagagacactgcacctccatgacttagtgcgcaactcgcaacacttgaagatttagcggatatcatattc

SEQ ID NO: 275142 - DNA, 463 bp, Glycine max
  unsure (1)..(463): unsure at all n locations
ntttaaccccctttgattgcctgcactgcttaacgcgacacttcnaagactcaagcttgctggtctagcagaaataaacatcttttgcgtgtgatctaaagcagcatctgcgctgatgaacactaggcgaagaacagacaaccttgatgagactgattatatctatcttcgctttgactatagtctctactggagtgtgattgctgtctgtcacactgctggagtcctgacatgctacacagatgtgtaatctcatggactcccaagaatctcgcatttgacatggattccgaatggaatcatgtcattcccaagttctcaagttcttgtaaactgaaggaagccacactgggggtacgtctctatttaattacatcgcctgacgctcacgtccaacatggcttgtctccaggacatctgaaagcttgctacggaccgtgagtctccggagctaaaccttcan

SEQ ID NO: 275143 - DNA, 418 bp, Glycine max
  unsure (1)..(418): unsure at all n locations
agcttggttcgaggtacttacccgttgaagatcgaagaacgatgaagaaccaatgaagaacgtcgaacaacggtccaaacctttgcgagattcctcacggaaaacgttacggaaacgtttcggaagcgcctcggcttatattctctttacggaaacaatttctccaagcaaattccaaagagagagaagcgcctaaggggctggaccatntccttcttgctttcctcccctatttatagcacaataggggaggtggttgccgcccagctcgcccaggcgagctcagctcgcccaggcgagcagggttgcttcctccagaagcaaccgccttctggaggaatcttctggagggcccaagtgggcctgggtgctatttgcacctccatctttactaagtacacccccctctacctttttt

SEQ ID NO: 275144 - DNA, 630 bp, Glycine max
  unsure (1)..(630): unsure at all n locations
tatgagctcttacanantanacntantntttttnctgtnnactctatcttnntcntntcnttctccccatggcnacacgccacgttgannccttgggtttgactcccctgctatgtaagcgacactataccatactcaagcttgcctaattaacctgaaattgagagagtatgattattatacacacactctggaagtactaagtgtttattacctatactctacagaagatactcataacactacacaataaccatgaattggaggagcttgacacaatttacacatgttttatacacaagaattagtcggattcatcgactaataattattcatggaattataacaaatgaaataaaaccttatgcgccaatggcacatttatcaaagcatttatctggcacaggctacagctccccatctccaccatataacataatgactatcaacccaaacacagacacacattgggaatgactatcacaatttacaatatagacactacaacaggtgaacatatagtcttagagctgaatttcataatgaccctcctacacaaaagacatacattattgcactattacagttacacgctctagataccacatcaaaaataattcgtacatcatg

SEQ ID NO: 275145 - DNA, 460 bp, Glycine max
  unsure (1)..(460): unsure at all n locations
agcttataagaacaaaattgccgcaatcattttcaaatattcatgtgaattacgacgcatcaacaagaatcaagccgaggctattgtgcaagcaatcaatggggcaaaacacaccaaatgattataatgatggatggctcatattctcacaaaggtaaaatcatcactttcaaattgagctttcacaactatcatgacatgtagagaagaattaaggatttcaagtcacaaaatgtcaagaacttttattttcaaaacaattacccatcttcttgaacatatcctataattcaaagaanaacatgcaaagtcgtacgtgcacacaaaattgacccacaatattaaactgaaaatccgacgacactaacaacattaacaaattaacacacctaacaaattaacaaagccaacaaaactattcaaaccaaagaacactccctccccatacttaaacaacaca

SEQ ID NO: 275146 - DNA, 357 bp, Glycine max
  unsure (1)..(357): unsure at all n locations
attggtcttcaccgacgaaaggatcaaagtgggtatggaaaaaggcaaatctgatcatcctgcattgatgaatacgaaaattgtggcaaatgaaaaggatgagaatgagggagaaacctttgctatgactgccattcctacacggtcaaatttcctgtcagcccaacaatgtcattactcagccaataacagttcctctcacccaataatccacaaaggccatccccaatcatccacaaagcctgcccgctgcacatccagtgccaaaacaccaaccaaaaaggaatnttgtagcanaaagcctgtangattcaccccaaattctagtgtcatatgccaactngctcttatatctac

SEQ ID NO: 275147 - DNA, 334 bp, Glycine max
actcttcctacttttatctcctgaccacccagtgataccttggagatatgtcacggcggccatgagaccttgggaacgctaggtggggtgctattgcccaaaaccaatcttgatcaatccccacccaacccgggcataatcagttagtgagaatctatgacctacctaaacaggcgagctcctggccgtcaccccatataagaaccaagaccacaaagtcagaccgcttgcgtggcggctggctccctatggatctcgagcggtatctggaatttcgcctctggtaatcgattaccaacggggtgcaatccactacaatgcttacaactggaca

SEQ ID NO: 275148 - DNA, 355 bp, Glycine max
  unsure (1)..(355): unsure at all n locations
cacacaaatgacatgctcctgagattcactagttgatctcgcaagcaattaacttagactagcggttgtttaccaaattcaggcgtaaacaaattggcacgcccagtgggactggtcaattgtgtgttttagttttaaattattattaaagttgtttagtgcagttggtttattgcatttttagttgttttgattntgtatgcatttaagaagtgggaaatctgttccacacttaacagaattcanaactcgtacaaggatggctagaccacccncaagtaatcgaaacaatgaccttccaaatatggaggggcaaccaacgcagacctctgtcagtaatgccaatataaattct

SEQ ID NO: 275149 - DNA, 159 bp, Glycine max
cccaccttctgacctccattcgctcattatagctatccaagcgtaccaaccagtcgttcaaagtccccactaactgcctcacaacaatcaccgcccgtcgcgccactcatcccagtacgctcgcatccatcaaccctctcgctaacggactccacaacg

SEQ ID NO: 275150 - DNA, 565 bp, Glycine max
  unsure (1)..(565): unsure at all n locations
tctcctcccatccgcacctcntctaccacaatctggcatgttatgtgtctgttcgcactcagcgaggcgtcggttgacgccttgtagctctgtcgaccctagacatcacctgcatgccatccaccttatccatgacaatctcacgccgcacatgacacccatattctagatactacaacaaaatggtctctaacacactgcatgcactcaatgctttcctatctagtccgtaggaagaggaagtctacatgttacaacactcaccgttcctaaactccatcaagaacttatatacgcagatcgaataaggccatcttaggactcaagcacacactacaacatggaatgataaactcatacatcctctatcggtaccttagtcattcctaccatgcgcgatcgatctctgctcgcgtatcctaaggcagctactataatatacatcttagtctatttggataacatcagaccgaacacgaatgactctacacttatcacatactcgttctcactaaatattttttcctctaaatacctggagacttcatactctaaggacagatcc

SEQ ID NO: 275151 - DNA, 444 bp, Glycine max
  unsure (1)..(444): unsure at all n locations
gagtcacaacttttaagtgagtagttttcgccaagagtcataactttaaacatgggtcttcaaaagccatcaaatgactataaatatgtgaccatgacacaaatttcaaaagactgattaacagtattctcaacatctttctaagagtttttgttcaacactcgctttgtcaagaaaagttcattgggcaaaaacttgtgctattctatttttcttcctctcctccattcttacaaaaagcttttcaagagacctactcttggtgattgttttcaagagaaggtcttcttggttgctaacactgaacacaagggaccaacgttccttgggttcattgcaagaagcaggaattgcttcttggttgatcactggacacannagaccaacgtcttttgggttcattgcaagaagtgcgtataactttctggggtgtatcactggaca

SEQ ID NO: 275152 - DNA, 402 bp, Glycine max
agcttgttactggtgccccatagaacccctcataatttgctcttgctccattcttccttttgggccctttttgtttcccgctctaatgttttaaccctggtcatgttgatatctttcagctcatcacactttttcctgaccctagtgactgccgtctttagcttctttttcaccactcttgtcttttagagctctgctttcaaagcttgcacttcttcactttcctcaggaatatcagcctctttcccacttatacttttttagctttgggagccaagttatcccttgcgttctagacttcaaccacttgtgatagacgctgatgacgccattgctacttcccctaagctccttatcttttctctccactctattccatgcttcacggatttttgaagtatc

SEQ ID NO: 275153 - DNA, 292 bp, Glycine max
  unsure (1)..(292): unsure at all n locations
cgtcctgtgatgaaagctccaacaggtttcttttggttgggatgtgtgctccatcacgcaagaatgcttggtcactagcagccatattctcaatcaattccatggcttctttacggtctacaagtttattgtcccccctacaaacacatctaanagctacttggagtgtggccttaaccagtcaatgaagatattgagctggactagttctgaaaatccatgagtaggcatctttcttagtaacccatgagatctttccaaagcctcactctaggactcgtctggaaatgat

SEQ ID NO: 275154 - DNA, 431 bp, Glycine max
agcttatgtggcaactcttgttgaacagttttctctcagttactttctatttattttcatatttatcaaagtgcaaaagatggaagtaaaagattccaaatgagaaataaggttgatgtaaaaataaatcacttatctcttggtattttctatattgtttgcttatggttattgctttcatagaggtttctcattttattcctattggcttgtttcattgagatagacctgacaaatgcttgcgttgtttggacagttcaacttcccgggaattgtttcatcttgctctgaacctcacttaactgtgtatgtagaattggaagagaaaacactaatggaaagtctggagaaacttgttcaggtaatttctgtgtaaccttttacgtatgtgctctgtgacttacttctgattctctccatattgactaaac

SEQ ID NO: 275155 - DNA, 531 bp, Glycine max
  unsure (1)..(531): unsure at all n locations
nttacacactgattacggaccttaganactaagctntacgngattggtcttcatcgacgaanagatgcaagcgggtatgtgaatatggcacatctgatcatcctgcattgatgaatacgacaattgcgcaaatgacaaggatgagaatgacggacaaacctttgctatgactgccattcctacacggtcaaattttctgtcagcctcacaatggtattactcatccaataacagntcctctcacccaataatccacaaaggccatcctcaatcattcacaaagactgcccgctgcacatacagtgcccaaacaccgaccaaataggaattttgtagcacaaagcctgtctgattacccacagtctattgtctatgcaacttgtcttatattacttgatatgcaaggaagctaaccctgccaggtctcacctcattttccgagatcactcgacgcacattgctatatggagagtctggacatcatgagactgatgactccagtgatgtgcaagctaatgatgcggctgctgn

SEQ ID NO: 275156 - DNA, 447 bp, Glycine max
  unsure (1)..(447): unsure at all n locations
agctcattccanacttaagagagttgaggctatttggttgttctctttcagatacaaatattcaatctcctgtttattcaccttccaacttttccactgctcttaccatccttgatctttcttcaaataagctcacatcctcaacatttcaactgttgtcaaactttagccttaatcttcacgagctttatcttggtcataataacattgttttgtcatctcctctctgcccaaactttcccgctcttgttatccttgacctttcctataataatatgtcatcatcagtctttcaaggtggtttcaacttcagctcaaaacttcaaaatctggatttgcaaaattgtagtcttacggatgaaagtattcttatgtcatcttctctcattatgagttcttcatcttctcttggtttccttgatctctcctcaaatctgctgaaatcat

SEQ ID NO: 275157 - DNA, 405 bp, Glycine max
  unsure (1)..(405): unsure at all n locations
acatctagatctaagtggagattctcttcgtggagatatcccttctgaagtagggaagcttacaagcttacgacacttagagatctaatcttcacttcttttcgtggagaaatccattctaacgtanggatgcttacaagcttgcaacatctagatctgagtggaaattctcttcttggagaaatcccttctgaagtagggaagcttacagccttacgatatctagatctaagttataatgtggctattcatggagagatcccttatcactttaacaacctctcacaactgcaatatctatgtcttggagaacataatctntccggaccaataccttgtccggttggcgaatcttctatctgtcatactcttagacttgaaggcaatcttgatcttaaaattaac

SEQ ID NO: 275158 - DNA, 306 bp, Glycine max
gaatgatttccagatcgagtccacaagttcaagatcaagttcaatttcaagcttcaagaaaagaaatcaagacgattcaagaatcaagagaagtttgatttcaagattcaagagaagatgaattcaagtttcaagagaagaaatcaagaagacttcacaagggaagtaatgaacagatctttcaaaaaacaaacatagcacattcttggttttcaaaagagtttttctcaaaattctctaagttaccagagtttttactctctggtaatcgattaccagttctctgtaatcgattactagcggaaa

SEQ ID NO: 275159 - DNA, 373 bp, Glycine max
cggagaggatgcttaatggaggagaagaaagagggagagaatgagggaggcggagcacgaaattgaaggaagaaaaaaggagagaagttgaactttgagttgtgtctcacaagactctcattcatcaaagttacaacaagtgttacacatgcttctatttatagactaggtagcttccttgagaagctttcttgagagaacttccttgagaagcttctttgagaaaacttccttgagaagctagagcttagctacacacacccctctcataactaagctcacctccttgagaagcttccttaagaagattccttaagaagctagagcttagctacacatacctctctaatagctaagctcacctccttgagat

SEQ ID NO: 275160 - DNA, 324 bp, Glycine max
  unsure (1)..(324): unsure at all n locations
agaagtgaaaatgagaatggggtaactttggagcacactctcatctcaaacaagtctataacattaatctaaactctctcacactggctntacgacgaaaactctaccgaatcataatttcactcctcaacacccaatttaccctacaatttgctcttgccttcactttgatcattcattctcctcctttgcacagcccaagctttcttacagtcctaaatgacatttcacactacggttaactcactctaacctccaattacctctaaatccagattcggctcgtcacatcctcacagtatcacactcttccactcatatcac

SEQ ID NO: 275161 - DNA, 322 bp, Glycine max
gctacctaggctataaatagaagtatgtgtaacacttgtggtaactttgatgaatgagagtcttgtgagacacacttcaaagatcaacttctctccttctttatctccttcaatatactgctcccccctctctctctctctctttcttttcctccattgaagcatcctctccaagcttcttatacaaggcaccttcttggtggcaaatctccttcttccatggcttattccttagtcatatgccatgacaataaacaaatctcacggccagtcactagaatgtgtcggattttactcgccctagtaatgtaggaattttcag

SEQ ID NO: 275162 - DNA, 393 bp, Glycine max
agctctggcgctggaaaactatattacaacacctaggttctagtttaggatctctctcctctttctcctttattcttcgtcttggcaattccagttctgactcttagttgtatcaataaaatttcgttcttcaatctataatttcggtctctattgattaatggaaggctaagtccccagcgttgttctctcttgaggatcaagcacagctctctttgacgctctattattactgttaaatactgtccagtttttcatcttcactaattactctgaattcgttgctattaattcatgcatgcttagtgcttgattaattgtctctgcgcttaatctacgttcatgcttaatgatcatttatgagtgatcggcgtatgtgttacttactcacat

SEQ ID NO: 275163 - DNA, 94 bp, Glycine max
ttcccccctaacagcacctctggagctctggactggctatccccccttatctactactctgaaagactgagtctcccccttaagtagtacccct

SEQ ID NO: 275164 - DNA, 507 bp, Glycine max
  unsure (1)..(507): unsure at all n locations
cgccgggggttgtacttgatcctgaccacccaagttagctanatcctcactgtgagtgacaaagactactgtctgtgtctttacatggcggagtgggatggtgttactagagttgagaggtaaagaagtacttacccgctggttccatgatgacacttgcttaatgactcttatgattgcgattcgacctagacttgttcaatagtacataaaaccagccttgccttggacgaagggctgttatacatacgcagctctggttatcattaccaggagacagggctacacaatgttgggcaagacgtttgaattgaatttttacatgcatcgaatgcatatgactgtaccgttgcccctaccaaccttggcattcctattccaaaacttcattgtcatacttcactgtgtatcagtacacacacttgtatcgctttcatcgacaagttcacataattggcacagcaccttcttttatactgggaatgcctcgaagctctaatagaaccg

SEQ ID NO: 275165 - DNA, 479 bp, Glycine max
cggctaattaacctgataatgagagataatgactatttaacgcaccaaacggaagtactaagtatttattacctatacttaacagaaaatacttatgacactacaaaataaccatcaaattggaagagtgtgatacaatttacacaattgttatacacaaaaggtagtcgtattcaccgactaataacttccccaaatttacaggtttgcttgtcctcaagcaaaaagagaacaactcacttgtgatcaagtgacaataacatgtcatgactatgtacataagtgtatgccacaaaagttactgattgtctgataagagattggagtaaaatgcgctcctaacttgtcttcacaaggatacagttatccaatagagaatagaatgtacctacacatgaatggagtaatataagataatattaccgaagtgcctaatcatagttacggctctgttactcaaccaacgttaaatatcatta

SEQ ID NO: 275166 - DNA, 441 bp, Glycine max
agcttttgcgcaagaatcagttcgtccaatggaacgacgactgctaagtggcgttcggaaggatcaaacgatgccttatgaatcctcttgtgcttgtgccaccagtgcctagaagatccctcattctatacatgactgtgttggatgagccgatgggatgtatgctggggcagtatgacgagtctgggaagaaggagcgggtcgtctattacataagcaagaagttcacagcatgtgaaatgaactactctttgcttgaaagaacatgttgcaccttggtatgggcagcccaccgcctaagccaatacatgttgtggtacaccacttggctggcatccaagatggacccagtcaagtatatttttgaaaagccctctttcatcggacggattgctcggtggtaggttctactgtcagagttcgacattgtttatgtcactc

SEQ ID NO: 275167 - DNA, 420 bp, Glycine max
  unsure (1)..(420): unsure at all n locations
aagctattatgtactcttgtcatagcaacaattctactttcaaccaagtgcttatgacatgaactctgatngggattagtttttttattgaatgagtgtctaattaagttacttacccagattgcattctgaatgaaacatggattaatgcttcttcattttcatgatttggtttctaaatagttaacaatggttcaaattcctctgttttggcaggtgctgtctgcatgctttaccgtatgcacccttggttatgcagcagcaggtgttttgggctacttaatgtttggacaggaggttgaatcacaagtgactttgaacctcccaacaggcaagttcagttcacatgtggcaatattcactaccttggtcaatcctataaccaaatatgcattgatgcttactccagtcataaatgct

SEQ ID NO: 275168 - DNA, 433 bp, Glycine max
  unsure (1)..(433): unsure at all n locations
agcttgcctaattaacctgaaattgagagaatatgattattttactcacaaaatggaagtactaagcatttattacctgtacttaacagaaaatacttataacactacaaaataaccataaattggaagaggttgatacaatttacacaagttttgtaccgcaaaagttagtcgttttcaccatctaacaactcccccaaatntacacgtttgcttgtcctcaagcaaaaagagaacatcttacttgtcctcaagtgacaatgacatgcagtgactatgtacaaaggtgtatgctacaaaagttattgatcgcatgataagagaatggagtaaaatgccctcatcacttgtctttcacaaggtatgcagttatccagagagaagaatatcatgtaacctgaacaattagatggagctgatcataagatagata

SEQ ID NO: 275169 - DNA, 383 bp, Glycine max
  unsure (1)..(383): unsure at all n locations
actaagctntcatcatttgtttctcaagtcatagtaggacacacctagttgctcatgatcctaggaatttaaatgaaacaagcacaagctcggaaggtagtcatacctcacaaaatatatatatatgtatgtttaggtagcaagataccttggatatgcatgtatatagcaaaaatatctcacaaaacatatatatgtttaggtagcaagataccttggatatgcatgtacatagcaaaaatatctcacacaacatatatatgtatgtttaggtagcaagataccttggacacgcatgtatatagcanaatacctcacaaaaatatacatatgtttaggtagcaaaatacctcatggaaaaataaagagagcaaaaagagcga

SEQ ID NO: 275170 - DNA, 433 bp, Glycine max
agcttcttatccaaggcactctcttggcggtgaagctcctctttccatggcttattccctagtggatgacgcttcctctcatctcttgtcctttatcttccgctgcatctccatggcggaaagccaccattgaaggacctcattgaagctcaaagatccagcctccatagaagcttacatcaagtggtaatcacagcacaaaagctttaagtaggtgctccttaaaccttcattaatttttggctttaccttctcctccattgtcgtttcttcatttttctccatgcatctcctcacatgtcttctgctaaatgttgttaacatgattctctagaatttccaccaattaaacttgctatacaagctagatctgattctctacggctcacacttattgttcttgctcttgaaccatgaattatgttgagtttat

SEQ ID NO: 275171 - DNA, 322 bp, Glycine max
tagcacctagaacccacacgctccatcgactagcctgtcgatgctgggcaaagggcatttggggcacgccctgttcaaatcagtatagttggtgcacattcaccatttgtccgtggccttttttactgtgatgatgctggccagccaggtggagtatctgacttctctgatgatgttggcatggagaagtttgtccacttcttctttgacaactatgtgtcggtcttctcccatcttccttttcttttgtgatattgatttagcctggggacacatggcaagcttgtggcatataatgttggggtggattcccgacatgtca

SEQ ID NO: 275172 - DNA, 452 bp, Glycine max
agctcggaaacaaactagtactagacatatcttcatctatgattggattgttaggaattttataattcctaattaattaattagtgtgggctacttattatatttatcatttacattagttatttatatttatgggctcaataaaagtgatctaatttggtgagcctgttggactatcataaaaaattaatatcggcttgataagcggaaaccagtttgtcccgttagggaataataagaactctaacaggctaaaacctaaagtaaggttgtggtcctcgatacaccaaatcagaaattctattctcttctgcccatttgacaagaaacctaaggtcccaaaaggaaaacggtgatttggttgaggaagaacacaaaaccaacaattcctcagactcatcaattccgttacttatcatggatccaggtattttttcacaacccctcttgat

SEQ ID NO: 275173 - DNA, 141 bp, Glycine max
  unsure (1)..(141): unsure at all n locations
ctctgactttgtatgtggaaagcatatactggcttgggccttagaggaaatgaaaatngcattttgattggttttggatgatcaatgcattttcttttatttagttactctgaacacacttttaacactgngctgtatata

SEQ ID NO: 275174 - DNA, 237 bp, Glycine max
  unsure (1)..(237): unsure at all n locations
cactttattagggtatctcttgatttgattttgaagagaaggccatagatcaatgtataccagaagatcaatgtgagtaaaatttgttttctttgtttgtacgcggatgatattttgcttgtggttaatgataagggtatgctatatgagatgaaatagtctctctcatagaactatgatatgaacgatattggtgagacatcttatgtcatangcattgagatccatagaanaaga

SEQ ID NO: 275175 - DNA, 434 bp, Glycine max
  unsure (1)..(434): unsure at all n locations
agctntcagttcaagcctcaaggaagtaaatttatgctaaaataacacttactaaagtttccatttgtttatatataatcattctcagcacaagaagcagagctagagctgctatatatagaggacagttcaaaaagaatgaaagaaactagactatttatagaattctagagctgctattttgagacaacaggagtaatagtaaagttatattttttgtgatctggtgtcataaaatgataatatactttagagttggcttagggttggctggccaggagttgggagtgggcccttaattcaacatatgcattttcatgtgttgctgggacttcaagaaacaagtacggctgggctaggtatatctaattcaactcatctggaccttacaaaatgaataatacactctctttttctcttctctgaattacttt

SEQ ID NO: 275176 - DNA, 282 bp, Glycine max
  unsure (1)..(282): unsure at all n locations
taatgacatgacacattaaatgctgagttacatcgtctgttattattattattattattatgattattattatgagtgctgaggtacatcgttaaatgttaagtaaatatatgatttttatgtatataactgttatttaccaataacattaataagaaagcagaagtcatacattataaataatatattntagaataaccttgattatcatataaattataattattctatcttacataacatttataagaaatcttgttaatatatgaaaatcgatagatg

SEQ ID NO: 275177 - DNA, 421 bp, Glycine max
  unsure (1)..(421): unsure at all n locations
agcttgtattagcgggccgactgccagccttttataatgctactgggagtagatatcatatttttgactatatctgcaatacctgttttggctcgtgaaattatttactagcttctctatttgttaacttgagtcatgtttgcctattcccaggttaaccttgatccacccatcatgaacataccacaactcaggtcgtggcctgagtctcataatgctcgtgctgctggacttagactaccccctctccaggcttaacattgatccttaccttacatagttctgaatagattaatcttgtttctgctacgaaattatttcattttatctntcgactaatacagaccttcattaacacacgatacgacgataccaaaagatgataccaaacattccacacaactctgcccatttctcttga

SEQ ID NO: 275178 - DNA, 450 bp, Glycine max
ggggaaggaagctccaagcgtgacacgtggttctatatttgattctaggttcaaaactaacacaatcgagcatattaatgacaattaccttcacatttataaagtacatgtatgtatatgactctatgatccgtcgtcttacgactactatagggatgaatatctcaatgatgatgaataattaggtgactcagacacgtgacattactatgaaactccacaatatacacgcctaacatgaatatatgctgggaagcctaagagggattagcaaacgcttatagggatctgataaggagaactatgttaaggacacacttataggcgcataatctggacacaatgtcagaatgttaatgttctagagtctttaagataatgataaatgcgtgaccccctccagataatgaatcttaccttatgtagacagtcaaacgacgaaaatagtcg

SEQ ID NO: 275179 - DNA, 433 bp, Glycine max
agcttgtcgtgccatcactgtttccgcccaaactcatcctaggctcataaccatcttttagcataactcgtgctaccattaaaaaggcaccaaacaaatgaggttgtaccggaggagactccacataagcactattcacaatctccaatgcttgaaatgatgtttctatcgactcctccgcaacttcaacataaggcatagaagatggacaactcattagtatgtcctcctcgcccgacactataaccagctgaccctccaccacaaatttcaatttctggagcaaggctgatgggagcaccccaacagaatggatccaaggttgacctaacaagcaactgtaggtggggtttatgtccatcacttggacagttatctggcacgtgtgtggcctaatctgaatccggagatcgatctctcctctcacgtcatg

SEQ ID NO: 275180 - DNA, 470 bp, Glycine max
  unsure (1)..(470): unsure at all n locations
agctcgtttccagaacaatttgtgtagcttggtttgtcaacttctattgttaaggtgtgattttgaaccttatagaagtcttgtgagcaaaatcttggaatctggtcgctgattatgcgttgctaaaactagctganagcttataagatatgagcttcaatacaaaagactagaaacttataagtacctgacttaagtgttaagtgagattaactaatatgttagttgataaataaaataaagacatagaatgatatatttaagacttctatttgaatttattttgatgacttatcatttgaaaagtaagacttgtttataaacacaagtaaagacttgctgtttactctattatttaaaacaaacttataaacaatatcggtgaatatatatatcttgctttgaaaaatattcaataaaatttaaataactttatattagttttatggaaattatttaataaaacaaag

SEQ ID NO: 275181 - DNA, 412 bp, Glycine max
  unsure (1)..(412): unsure at all n locations
agctnttatcctcttatatttgtactcaaattatttcttgttgaagtgtgtgtgtgcgtgcatgcatgcgtgtgcatgtgtgtactatataatctctacttatttgcgattcttttgctctcttttgatttaagagtcgtacataaataatgtatgaatgtttcaccgtccctttgttttattattatcttggttttaatgcaatatcatctttaggttatatctatctcatgacatttagctggagtctgatttcattagtttctcccctcttggatttggttcttgaattgcgctaaagtgatcttaatagtcttgtagagggagaattagaatgtcctctcacatctttcaattatgaaatattaatcatatactgagtatgtttccctcttcaacattgcaatccaac

SEQ ID NO: 275182 - DNA, 610 bp, Glycine max
  unsure (1)..(610): unsure at all n locations
ctcccactcgtcctggccacttctncctttctnctatattttcanttctttntcnctatgcacgacgcnnnnttgaaccttgatatncntctgcactacgcgacactctagaactctgaagctngatatgtgcgtagtactcatcgcgacggctcttaaatctgtacttatccattatgatacctgatacgctaaggtctgcatttgcaaaacacaaggtgctgatatagctatactactgtgcatactggacgagctaggcatcttgaaatcgacagacattgatcagatcttgtccattgactcgattgataatgtcatatgtactctgctaagcatttgtttgtctttactatatattcgcatctgccatatatcgagaggcacacacatatagaattgattatgattgtcaaaacgagcatctgtaattaaatactcttatcacacggttaacacgcctttggatcatatagatctaaccaaattcactctccacatatgttcacgcctgtcgaggaaattagcgtgctcagtctgtatcgactccttcaaggacgattgatgctacaacatctccatgtgtgtttaccgtcggatatctctatgg

SEQ ID NO: 275183 - DNA, 438 bp, Glycine max
agcttgcctcaaagaggtccaggaaggacattgtagccgaaggaactagttccgctccggagtatgacagtcaccgctttaggagcgctgtacaccagcagcgcttcgaggccatcaagggatggtcgtttctccgggagcgacgcgtccagctcagggacgacgagtatactgatttccaggaggaaatagggcgccggcggtgggcatcactggttactcccatggccaagtttgatccagaaatagtccttgagttttatgccaatgcttggccaacagaggagggcgtgcgtgacatgagatcctgcgtaaggggtcagtggatcccgtttgatgccgacgctatcggccaactcctatgatatccgttggtgttggaagagggccaggaatgtgagtatggccagaggaggaaccggtctgatgggttccatg

SEQ ID NO: 275184 - DNA, 235 bp, Glycine max
ccaaacttttctcctaattaaaaatgtatcttactttttactcaaggtatgaattcccttaatgacaaacttcttgaacattaattccaatgaagcaacttgaattatgaatgttaagcactattcaataaacgagagttatggaagagataatgcaaactcagttgtatactggttcggccacacccttgtgcctacgtacagtcctcaagcgaaccgcttgagagatccacta

SEQ ID NO: 275185 - DNA, 326 bp, Glycine max
  unsure (1)..(326): unsure at all n locations
cctcttgaaaacatgcataaactctgcctccaaacaactaattctccattactcgcatcattatgtaatccgattgaaatcgataattctcagtacacagacgatggggatagagttattggtagaaattcctaccattcacgtattacatattattaaccatcgaatgttcgtgtcacaatgggcattttgagcaaaaagtgtgggcgcttttacgcttgaagtgctgaagcgtgaatgcccatgaacatttcgattcctatcctagccattaactcctgcaagantctatcctattactttttcttacttcttaagccttgtga

SEQ ID NO: 275186 - DNA, 366 bp, Glycine max
  unsure (1)..(366): unsure at all n locations
ggcatncatagctgcgaagaagaagatattaataaactggcatgtntactaccaaaacaaatacgaaagagatccttccaagaggccaactattcgggtagctttcttttcatgatatactatcaaattactttttctaattctagaagaggcccccttttagcattttctttttcacaagaatagccataattggggatatcagctaataaccttttatgtttcacgattcgatttattatctatagacaggtttcctgggtttcttgcggaataaagttgatgctattgatcattatactgcaataattgataaattgagcaaacaagtaagtactgatcaaatcatacaatggatatgtcaat

SEQ ID NO: 275187 - DNA, 429 bp, Glycine max
  unsure (1)..(429): unsure at all n locations
agcttgccacccagctcgcccaggcgagctatgttgcttcctcctgaagcaaccgccttctggaggaattntctagaaggcccaagtgggtctggttgctatttgcacccccatttttactaaatactccccttgctcttttttggtgattctttttccgtaacgttatgaaactttacgaatttcgtaacgatgattgttttctttccgtaatgtagcaaaaccttacggattacgtaatcatcccctttttaccttccggagcgttacagaactttacggattgcgcactaacacttccttttaatttctggcatgtcacagaacttcacgaattgtgctacaatactttcttttgactntcggcatgtcacagaacttcacgaactgtctagcgatgggtgccaagtacctcgaagtggtcaaacg

SEQ ID NO: 275188 - DNA, 261 bp, Glycine max
  unsure (1)..(261): unsure at all n locations
atgtgcaaatcagaatgctcagaatcagaatgctcaaaattataatgctcaagatcaggatggtcaaaatcaccaataacagaatgcacagattcaccagttatggaatgctcagaatgatcaaaaggtataaaatgatgcctaactaatctatgaaatgtcctatctatctcangatcaaagggttgtaagtcagatggattgcctctagtcatacactacattcagcatgcacacaactatgtgccttgtcatgtaaat

SEQ ID NO: 275189 - DNA, 455 bp, Glycine max
agcttcatcaccttctcgttacccttcaggatcttttgtccaatgaaacccttctggttcaccattttctttcgttgttccaattcaggcatagttctgagcttttccaccaccctttggactccccaatgggatggccaaacctctggctcaggatcattgtggccataaactatagcacacgcttcaatgccacagagggtgctgagttcctcaaccttcttcagcatccccttcttccttttcttgtatgttgccctccttgcagcatcattccctatgaatgcgagtttcaccttttttctagtcatgacggtgaccagaaaaaatggagagaaactaaaagaaaattgaaaagagtgataattgtggtggttttctattgccaccaacaatctctttatatggaacaatttgatatgcgtttgactttcctgtaagcctttggtgatagt

SEQ ID NO: 275190 - DNA, 349 bp, Glycine max
  unsure (1)..(349): unsure at all n locations
acaccatanagatgcttaagattatgaaaacaaaagaggatattcacaaaaagggaaaaatagtgagaatgaaattacttggtgtagatccagtgtcaggcataataagagaagatgcccaatacaaaatgaaacaacatataattcatagtaagatagcaagaattttgtaccgacaaattatttntataaagatccaaatgtcaaaaagttttaataaacatagaaaatagacaagctgtgaaccaaggtatatgaaaagcattaggatatcgttctaaaattattgctagaattggagaaataaacaataaatcattccctagataatncacaattaattcacaaa

SEQ ID NO: 275191 - DNA, 453 bp, Glycine max
  unsure (1)..(453): unsure at all n locations
agctcgtacgattatggagtacccatcacatgtggtactatgtggcggtcgggcgatggtgcaaaacaattctccacatccacaaatcacatataaacccaccatcccctgttgcccactttcaactgagctcacgtactcccacgtagcccttatcctcgtttctttcaacactgggtccccatcaatcctcccaagcttccacaacatccaagtaattccacatccaatcatcatgaactaacaaaaccaagcaaaataggcaaaggcagaaaactctgcccacaacacaaaccaatatcacagcttttcacatacaaataccccagtaacattctcttcgttccaattcgttaaccgctggatcgactcgaanattttactggaagtctctatcacataaatctacattatgaccgctgggatctgctataaacgtgcagagcccaatct

SEQ ID NO: 275192 - DNA, 448 bp, Glycine max
  unsure (1)..(448): unsure at all n locations
tggtacctaatgtgtggttaactaggaaatgatgtntcttctggcatctcaatctcataattacattntctatgcatagcatacgtattcccgagtctttcatctctatgaaatgttgtcaaagtattggcgatcaaaattgtcattccttgggttatagcgttgtatgaaaaaggttcatcaagtcaagttgaagcatggaagtaaccatcttgcaaaacattgnggcaaaagatggatcgggttacatcaattctttgtctactgccaacacatggttgtgccaatttacaaaataaaagaacttgatgactattgatgtcaatggttgtccaatttcactttgactagacacgatggaccatgttgttntgatgaanatctaaattgagtcaaccccgtgtcctgtctaaaaatcgcagtacttcaacaatgcatcattcacata

SEQ ID NO: 275193 - DNA, 419 bp, Glycine max
  unsure (1)..(419): unsure at all n locations
ctcagcttaagaaaaggccaactcccttccanaatctgatttcaggcttaaataggtggctttgttcatgctcgtgcgcttagcgcacttctgaaccgcttagcgcgcattagtgaacttcgacttagcgcgacttttcttggtcagcgaatggactgaaacggtgcgcttagcgggatggcccttcgctcagtgagcatgcacaactcatccttctttcagattcttcctcgcacttagccgaggaatgttgcgcttagcggatggctcactaagccattagattggcttagcgagagggtgaaaatcaacacttcacaaactcgtctaattaacctgaaatggagagaaaatgattattaaacacacacaatggaagtactaagtatttattacctatctctacccanacataatta

SEQ ID NO: 275194 - DNA, 399 bp, Glycine max
  unsure (1)..(399): unsure at all n locations
agcttgactagttggtgacttgcgtgtgtgagccatgttatattaactaaggagttcaaaatagtacggtcgatatatcggattcacagctaatattgtgttaactcgatagtgtaaaaaggtgggggattgagctagatttttttagtttctttnctcaccaaccacaagggatatataattaattctatgtcaaaaagctctaaagaagcaacaaacttttctaacttctctcatgttttcaaatagatcatcatggttctgaaatgaaccatccttttttcttgcacaaatcaaaaccaaaattactaattccagcatacaatataagagaaaggtataaccgaaagcatatccaacctcgcaagagaatctcaaatattcatattcctccttaac

SEQ ID NO: 275195 - DNA, 355 bp, Glycine max
  unsure (1)..(355): unsure at all n locations
tattcacacccgagtctaagttcttggcagattttgattatatacgaacctataaacatgttttgtgacttttattcatgtatacaggtcattgctttcctacttagtacttactttaaacattctccttttacataaaattctgcagcttcngctgtggtggctgctggagttgcagtgctgctgatggtcttggcttgctgctttatgataaagatcatttgggagggagaatacaacccattggataattgaagggtttctgaaggaacatggaccccttcctacagctaggtacagctattcagaggtaagaaaactttcggtagtgtatacaaagggaagttacaaaatg

SEQ ID NO: 275196 - DNA, 113 bp, Glycine max
tttcacatccacaatgcgcgcataaacccaccataccctgttgcccaccttcatgtgagctcacgtactcccacgtagcccatatcctcgtttgtctcaacaccaggtaccca

SEQ ID NO: 275197 - DNA, 443 bp, Glycine max
  unsure (1)..(443): unsure at all n locations
agcttcccagatccgatcatgtaaggacttggcaactgccttcattaggcagtaccagtacaatacggacatggctcccaatcggaaccaacttcagggtatgactaaacgagagcatgagtccattaaggaatatgcccagagatggagagatctcgcagcccaagtcgtaccgcccatgacggaaagggagatgatcacaattatggtagatacgttacccacgttctactgtgaaaagctgataggctacatgccagctaactttgcagatctcgtcttcgccggagaaaggattgaatccgggctacgaaaaggcaagtttgaatatgcttccaatatggcccccaacaacaacagaagagccttatcagtgggcgcgaggaanaaggaaggagacgcccacgcggtcaccaccgccccaacatggatgaaagcaccct

SEQ ID NO: 275198 - DNA, 355 bp, Glycine max
tcatgaagttatgtcagctaatggtcacactaaataggtatatttatctactttatctcatttaccaccctatgggaaatgatttttagtaggaagtttatttgcaataatagtatttattcctaatcatctctggtattttctcttatctgatgattggttgcaatttgcaaatttattcatactgcttttgtatcaaattaatttggcaggaaatagcacaactcagatagttttcatgaaatttctccaaaagattaaattgtaacttgttttcaccattttgattaataattatgctactgtagttgatgtttgctatttcatttctttatggcgaagtttctctatctaa

SEQ ID NO: 275199 - DNA, 374 bp, Glycine max
  unsure (1)..(374): unsure at all n locations
agctntttggtttggtgttgcctataaaatttacaacgtatgacggctaggtttttccgtgcaagctcaaccgagggttcgttccgaccgacactggcatgttgttcttctcatttaggaggataagaaaacgttcgcccaccccggcaaaaacaaaaaaaaacattattcacggaaattaatccaaaaaatggttgctgacgtcagcatcgagagatgaccgatcgatctctaaacaagaagaatcaccggatgacgccgatcaaacatttgctaatcgacatctttcagatttcattcatggattgaaaagaaaactcaatagccgacatcggtcgcgaaatggccatgactgatattcttcaaccgacatt

SEQ ID NO: 275200 - DNA, 340 bp, Glycine max
  unsure (1)..(340): unsure at all n locations
tctaccatgccaaaacgaaagagactgagtatggatttaatataacacagctagtaacagtgctctgggtcaaacacccacatcactacatgaaagagctgagagtatttcgggttttacaaaggaacgtaatttggaaattccgaccacgccaatgtgaccggngttcagtgtatgttacgaaaataacatgcatttcatgaaaggataatgtttacaaagtctctttctctaaggttgttcanaggaagcataagacaagcaatggcagttccaaagtcagaacagatgcaaagacaagatgaaactaacatgaaacaatcatagaaccatgattacc

SEQ ID NO: 275201 - DNA, 519 bp, Glycine max
  unsure (1)..(519): unsure at all n locations
cgaggagcacgcggtgttggcttttgaacaccttctacgaccngagatcctctgagccacctgccgcatgcaagcttaatgaaaccaacaaaagtattacccttatccataacaacncaaaacttcattgagaagaactagaccatcctgacgacttggctaacctgcgatgctcaccaaggaagaaggagagactaccaaggatgatcgaaagagatgacgaaggagacccgaatggatgaggaacgagattaccgcatgagagagaattgaggaaggcacagctctcacgttgtgacgaactggacagagaaattctgagggtttacaaaatgaggacgacatactctattattttgaaattttctgaggacatatattgcccagcattgcttacggaatacgattccgacaagctcattttacatgctacacatctgaccattacgatcagatctgcttatagcctctactttcccactacctacaagaaatcaataaccaacactcttaccaacg

SEQ ID NO: 275202 - DNA, 252 bp, Glycine max
acagggggggaaatccacttgattcaaactggacaaagcaaataattttcttggtatacatctttatgctcatttatcatctaccccatgagagaagaatgagttttgtctatctcattgaggctgcaactcatgtcatctatgtaacgactcgtcgtttctacatgtcaattagagaagtgatataacacacaactgtattttagctgatttaagactgttcaatgtaatctatttatgaatacacatatg

SEQ ID NO: 275203 - DNA, 422 bp, Glycine max
  unsure (1)..(422): unsure at all n locations
agcttctatagaaggttcgttcctaatttctctacaattgcatcaactctcaatgagctagtgaagaagaatgtggcatttacctgnggtgaaaaacaagagcaagcctttgctttgctcaaagaaaagcttactaaggcacatgttctagctcttcctgacttttctaaaacttttgagctagaatgtgatgcctctggagtgggagttggagctgttttgttgcaaggtgggcaccctattgcttattttagtgaaaaacttcatggtgccacccttaactaccccacctatgataaagagctttatgccttaataagagcactccgaacttgggaacattatcttgtttccaaggaatttgtcattcatagtgatcatcaatcacttaagttcattagagggcaaagcaagttaaacaa

SEQ ID NO: 275204 - DNA, 96 bp, Glycine max
  unsure (1)..(96): unsure at all n locations
gtacccccctttttactaaatgcacccncttctatttttttgtgattcttttttccgaaacgttacgaaactttacgaattgtataacgatactta

SEQ ID NO: 275205 - DNA, 438 bp, Glycine max
caagcttgtaacccatggaagcttctatatctccacactttttggggtgggccattcttggatggccttgattttctcagggtccacttggaccccatttctaccaactacaaaacctaagaaaactatattatctacacaaaaggtacacttctctatatttgcatagagggtgtttttcctaaggactgaaacaacttgtgtgagatgtcctaagtgatcatctagcctcctactatacactaaaatatcatcaaaataaacaactacaaatctacctatgaaatcccttaagacatgatgcataagcctcatagaggtgcttggtgcattactgagaccaaaaggcatcactagccattcatacaaaccagacttggtcttgaaagcacgtttccactcatcacccttcttcatcctgatttggtgataaccact

SEQ ID NO: 275206 - DNA, 360 bp, Glycine max
  unsure (1)..(360): unsure at all n locations
tattaggtattaattgttctgcatatctaacaatcgtgggtntaaattgctggtagtcgtgcgatccttgacattgcgtgaaaatgtgtttgtcatgatttggttgcagagaatcgtaaaatctttatgttgcggtcgcaattgtggttatatatggatcatgatttaaaaccatactagacaatttgcgctttgtgtttatcaatcgattaattgatgattgaatgtgaaaattaatacaagttnttggcaatgtacggcaatgagaggctccaacaactcaagaaggggcttatcagaccaatacgatggttcatgcanggcgacaaacccattgacaaatgtgagatgtgaccccat

SEQ ID NO: 275207 - DNA, 334 bp, Glycine max
  unsure (1)..(334): unsure at all n locations
agctcggcttcatgtcttggacctgaatagttatcaagccattgcttctgcgaacttattcatattgtcccttaaattacatcattttcggcagtccagntgttcggtgttctagatttgatttacttatgattgttatgacgacaagtgttatcagctttgagcttgttggcaatcaagcagcagatgtcatatatatcgaacattactgccaatattgtgacataaatataataaccgctgtcgtgtcacgtccaaacatttaatatagtagagagatcgtgaaactctatagtgtatctgagggatggtatgtggaccaccttcaacgagt

SEQ ID NO: 275208 - DNA, 354 bp, Glycine max
ctacctcgagcataaatggcacctcataacggtatataatttatagtatcatatgtcaattatgtaagatatctatcaatgctctgtttaccggtgatgattagttacttacgcgtgcattggtttacgttttcagacatggatgtatgttgcggttccagttttactctatgcgtcagagagaatactcatattatttcggtctgggttgtatacagtccgtcttgtaaaggtgagcagattaagcgaaccgatcagagttaggctccaaattagttttcaacttaaaaaatatccttgtattacttgacttgactactcttaagtgaaatacgcctgcgctaattgtgagca

SEQ ID NO: 275209 - DNA, 437 bp, Glycine max
  unsure (1)..(437): unsure at all n locations
agcttctagcgtacccgctattggtgctcataatattccaaaaacaaatccctcttattactagctattttgaattctttagttcctgaatgtacaaccttcaaattgttgctcgttcccgtatttgttttttgcaaaaaagaaaattaatctgaaacaattcaggctgaattgttatcgttattattactcgaaccataaggaataacagctaaacaagtaatttaaaatgtaacttttaaattatgtggtatttttttaattacaattttacttcaatatctaattttgttaatctacttaggtcgttttttaaatataaatatgaatttaaaggtgatctactgataatataaagtacttgctaatcacaaattatgatacgtatcattttaaattttaacttaattntataaatattaataaatttataataa

SEQ ID NO: 275210 - DNA, 297 bp, Glycine max
  unsure (1)..(297): unsure at all n locations
agcatttagacaaatttttaatntaacttttgtgcaaganaaatataagcacgtgactaataataattttgtactagagctgctaaaactagtgcgtagtactctgctttaaatatctaaattaagaatagtactttgctgtagaatatattcacgaattcattcttataagagaaatgagtcgtggaacaaatttgcttaacatattggactgaggaaaacgttattacaaattcatgtgaaatctctggttcatttcaaatataccttctctccaataaaacttatatatgtaac

SEQ ID NO: 275211 - DNA, 272 bp, Glycine max
  unsure (1)..(272): unsure at all n locations
agcttcaacattcaatntcgagggtctcgatatattacgggactcaatctgacatccgagaaaaaagttattgtcatttgtatttgctcacagcatcaacattcaatttcgagcgtgtccatatattacgggactcaatcggacatcccagtaaaacagtattgtcgcttgaatttgctcagagcttccgtattcatattccagcgtctcgatatattacaggacttaatcagacatccgagtaaaaaggtattgtcgcttgaattcgctca

SEQ ID NO: 275212 - DNA, 276 bp, Glycine max
actcggatgtcttgattgagtccgtaatatatcgagacgctctaaattgaatggtgaagctctgaccaaattcaaacgacgataaatttttactcggatgtctgattgagtcccgtaatatatcgagactctcgaaattgaatgttgaagctctcagccaaatcaaacgacaataactctttactcggatgtctgattgagtcccgtaatacatcgagacgctcgaaattgaatgttgaagctctcagcatattcaaacgaccataacattttact

SEQ ID NO: 275213 - DNA, 450 bp, Glycine max
  unsure (1)..(450): unsure at all n locations
agcttgctcgctaagccactcagccctgctggctgaataagccttggctaagcgagcttgcccgctaagcccaaggcacatatgattttatgtatattttgtcatgcgctaagcacaatttactctctatttctgtaattgttggaattgggcttagcaagccttctcgctaagccatttatgtccagtagtgttgtcgtgctaagcgcgtctggccgcgctatgcgcaatttggtttctattgcggaattgggcttagcgcgcctgctcgctaagctgattctgcaaaaaattctgatctgtgtcaactcgctaagcacgtggctgtcgtgctacgcgcttgagtaatttttcataaggcgcgctaagcacccaatatgaatttcagttttattttacagcttgtcgtttcaaataaaaacctattntaacttggtttctatgtttctt

SEQ ID NO: 275214 - DNA, 549 bp, Glycine max
  unsure (1)..(549): unsure at all n locations
attgaaccttgctatctgtgacactctcaatactaagcttgtaggtgctngactgcngtttctattggcccaccatcttcaaagatgcgtggagaatctgtagcacttgtgagccttgtcagagagcangcgtctcactttcatgcagacaacaaatgccttaacaacccatgttgttctgtgaggtgtttgatgtccggggtatagactttatggggcccttccctgtctcttttggttttgcttatattctccatgatgttgattatgtttcaaaatgggtggaagccaaagccaccagaactaacgatgctaanggtgttgtggattttgttagatctaatatgttntgcagggttggagtccctagagccatcgtcagtgatcaaggcacccatttttgtacagatccatgtatgccttgctcaaaaagtatggggtcgtgcacaaaatttcaacaccttnccactccaaactaatggcangctgagatttaaataggagataaaaggatcttgagaagatgtgcaccaacagaaggattgagcg

SEQ ID NO: 275215 - DNA, 422 bp, Glycine max
acgagtcaagggtcggacgtatgatattagaggataaatcgaacgcttgtcaaaggtcaaagataagtttgaccgaacaactaagtacgacgaacgagaatatgtctgtcatcatcgaccaacttaaagagaagctaaacctagctgctagccatgggcagagactagaggatgagcatgcaatggtatcagctctacaagtggaaacggaagcgagagagacggtgatagaatcattgcacggggaagctatgaaatggatggatagattcactctcattctgaatgggagtcaagagcttccaaggctgttagccagagccaaggcaatggcagatgtatactcagctcctgaggaagttcatgggctcttcgattattgccaacacatggtcgagttgatgtcctacataattaggaac

SEQ ID NO: 275216 - DNA, 345 bp, Glycine max
cacccctaataaccgtgtgtacttagtgcattcaataaacaatggaatctttgaatcattatctaaggtgtcataatacggtgcatttgcttgcctaaaaccctcttgtccaagatcacgtagcatgtcttctatttgatcaccgacttgttcatcagttggagcagttggaggggttgatgacatttctggtaactcaccgtgccatatccattttgtataagtaggacagataccatcacagataaggtgtgttctaatgtcatccaaacaatgtcgtcgcccattcaaacatttaacacaaggacaaaagtatagtccaccattgtcggatgcattatcttt

SEQ ID NO: 275217 - DNA, 430 bp, Glycine max
  unsure (1)..(430): unsure at all n locations
agcttcaagaagccgtggattntgtgatcatatcccgtctctatgaaaggatggctggtctcattgctgtgtccaacgctggggaagtggcttatggtttcaattgcaatggcatgtttaagggctgtgccactgaaaatggcttcatggaggtcggaatctgggaatagctccattattttccttcatggctgtttcgatgcaacttttggatttctgtaccatgttccactgtagtgtacggtctttctgctggtgcccgatttagataaaaaatggtaaccttgtttctaagaattacaaaaaaatgcgaaacaataatatggtaactttggtgctttctcaaaataaagacttgtggtagacctatcaaacccgtgtcctttttactatacttacttaacttcttctcttntcttcaatttatata

SEQ ID NO: 275218 - DNA, 337 bp, Glycine max
  unsure (1)..(337): unsure at all n locations
gcatcttgtgttgataaacatgcttgcaggtgntcttgggtcaagaccctgtagacacaaaaggaggcataaagttatgtcataataagacaaacttctccataagcacttgcagaagactaattaataagcagaatgaatcaaactntcttccacaagttaatacaacttatactggtataaacttctcgatcctgagacgttagaagagagaacttctataataagctgattataacttatgggagaagcttaattacatntagtcttattttcttctcctataagtacttatagagaagttatccacatagtgcaatggcagcatcatatatgt

SEQ ID NO: 275219 - DNA, 310 bp, Glycine max
  unsure (1)..(310): unsure at all n locations
agcttcgataatccatttcgagcgtgtcgatatattacgggactcagtcagacaaccaagtgaaaagctattgtcgcttgaatttgctcagagcttcgatcttccatttcgagcgtctcgatatattacgagactcaatcagaccaccgagtaaaaagttattgtcgcctgaatttgctcagagcgttggcattctaatcccagcgtntcgatatattacgggactgaatcacacatccgagtcaaaagctattgcgcctcgaatttgctcacagctttagtattccatttcgagcgtctcgatatatta

SEQ ID NO: 275220 - DNA, 582 bp, Glycine max
  unsure (1)..(582): unsure at all n locations
accctctagcaattctantntntcaactttcgtctctgcgctnnccctcnccccccgcccggagggttgaacttgancccatgaatnccngaacttaganactaagcttgagcaatcatacganataactgtgacttgtgttctctgagccccgaataatctagacgctaaaatggatatccgagctctgagcagattcaacgacaattactttttactccgatggccgactggagatcgtaatatatccaaacgctcaaaattgaatgctgaagctttgagcacaatccaacgaccatcactctcttactcggaaggctgactgagtcccgtaatatagcgagacagctcgaaatgaagactcgaactttgagcaacatcaaacgacaatacctcttactcggatggttgatgagtcccgaatatatcaaacgctcgaaatgattatcgagctctgacatattcaacgacataactcttactcgatgctgaatgaagccgaataatccgacctcgaatggattccaactctgacaaatcaaaccacatactgttacttgaatgcnactgagacccgacacg

SEQ ID NO: 275221 - DNA, 442 bp, Glycine max
  unsure (1)..(442): unsure at all n locations
agcttaacaaaatttcaccactgctaggtaattattttcaacagacgtttgacacgtgaccgtcaacggctgagtttaatggtcaatgtctaattgaggcttcagggatcaacattgcagaattttacaaaatataaggattcaatttgtaaattaaattagcggaggatcaaatgcgaaattggacctaaagtgggggaccaaaagttcaattttgcctaaaaaataattgtgtatgacttaaaaaaattaatttaaaaatcaacaaactcttattataatntgtaatttgatgttattacatatactaatatacattcatattttattatgaaatatttattaaaaacaattaaataaatagtatttgattaaacagacataataataattctcttatccgtttagagtaaaatttctttttctttctttccctgtgatg

SEQ ID NO: 275222 - DNA, 334 bp, Glycine max
tgagttaagctagcctaaagagggatcgacgtttattactttatactacagcatagaacacagaagcatgattgattagagaaatatccttatatgcattagcttgcttgttagacagacccaacacttttacctactagggtcaatcttacttacttgcatatttactattttactccagacttagtttaattctgttctaaaccatcaatgatcaatgtttctttcaacaatgccttatatcttaatttaaccttgttcaatgctagtaccctgagtttgatactcggattcatacattttaatgttaaatacttgaacataattgaacata

SEQ ID NO: 275223 - DNA, 241 bp, Glycine max
tctcacagaagattctcaaggaagcttatcaaggtagcttctctagaagcttctcaaggaagctacctatgtgtcgcaacctacccttctgcgggagggcgacgcgtgactcgcgggatgcgtgttccacgaaaggaatacgcgcggagtcagcaccaacgtttatttgaggaaaacgtccgaaaaaccggaaaagacgcgatctacgaactttttaagtgaaaggttcgggagttgtatt

SEQ ID NO: 275224 - DNA, 555 bp, Glycine max
  unsure (1)..(555): unsure at all n locations
tcctcactcctcnccactcttcttcctantttctatctnttcttgtnnacgnaccnctacgcgacgccgtgcgagggntttgatngcttgtagcctcgcgatcctcanatcgactgcagcatgctagctttgatgtaacatttggagaggtttatgtatcaacgagatgatgcgctccatgagaggctggatcatatggagaattcagaccatatgaattgctcacgagcttcccttgtcaatttctagcgtctatacatataatgcgccctattccgacctcccagtcaaaactctttaacatcttcatatgttcacgagctttcatcgcctaattccgagcgcccccatacattttcccccccaatcccccttgcagaggacaacattcaccttttgaatgcccaaaagctcctactctcattttctaccgcctaacctttatttcccccaatcgcccccccagtcccatttctacctttccattgctaacagcttctctgtcaatttcagcgtctgagatttatgcgctcaattgaccctcccctaaagttt

SEQ ID NO: 275225 - DNA, 235 bp, Glycine max
cgcataatatatcgagacgctcgtaaatgaacaacggaagctatcgagaaattcaaatggacaatacttctaactcggagggcctattaaggcgcataatatatctagacgctcaacatcttacaacggaagctctttggctatacaaatggtcataacttctcactcgaaggtccgattaaggcgcataatatatcgagacgctcggaactgaacaatggaagctcttgagcaa

SEQ ID NO: 275226 - DNA, 432 bp, Glycine max
agcttgtgactcttggcaatttcttttaaaataactagtcacttaaaaagttgtgacttttgaaaaaatcttcacaaacaattcacttgaagaattgtgacattcggaaatgtattttttgaaatcagccactggtaatcgattaccattaaggtgtaatcgattacacatcaacagatgtgactcttcattttgaattttgaaaatcttaacgttttaaaacactggtaatcgattactagagagtaaaactctatggttatgattctgtgaagacttcttgtgctactcaatgatttgaaaaaaaactaatacttatctagatcgagtcttctgtcgattcttgaatcttgatcttgattattctcgaatcttgaatcttggaacttgattcttgaatctttgctcgaaactatgcttaactcttgattc

SEQ ID NO: 275227 - DNA, 414 bp, Glycine max
agcttgtacggctaaagtctcacgattgtcacgtgctcatgcaacaattgtgagccagggctatacgagacatcatgccacacaaagtcaggttcatgataactcgcctgtgctttttcttccatgctatatgtagcaaagagattgatccactaatgcttgatgagtcggaaaatgaggccgcaattatactgtgccagctggagatgtattttccccctgctttctttgacatcatgattcacttgattgtgcatatggtcagagaaatcaaatgatgtggtcctgtttatatacggtggatgtccccggctgatcgatacatgaagatcttataagggtatacaaagaatctatatcatccggaagcatctattggtgagaggtacattgcacaagaagccattgaatttt

SEQ ID NO: 275228 - DNA, 325 bp, Glycine max
aatcacatgtttgtcatcatcattaatggggagaatgtgaatgtatgtatacatgatattgatgatgtcaaaagaagaatcaaacaaggctcattttgcttcaagattaatacaagattgtttcaacaaacaaagccttgattcaagatttcttcaagatcaagccttgcctcacaatgaaagggttcaagtcattcaaggcacatgtaatcgattaccaatacatgtaatcgattaccaatggtttgaaagtgtgtaatcgattacacatcatatgtaatcgattaccagagactctgaatgttgggaatttcatatttaaatg

SEQ ID NO: 275229 - DNA, 375 bp, Glycine max
  unsure (1)..(375): unsure at all n locations
agcttccttgagaagctagagcttagctacacacacccatctaaaaactaagctcacctccttgagaagctttcttgagaagctagagcttagctacacacccctataatagctaagctcacccccatgacaaaaaaaacatgaaaatacaaaaaaaatcctactacaaagactactgaaaatgccctgaaatactaggctaaaaccctatactactagaatggccaaaatacaaggcccaaaataagaaaacaacctattctactatttacaaagaagagtggacccaaccttggcccatgggctcaaaaatctaccctaggttcatgagaancctaaggcttcttatcaactctagccaaatctctggagcct

SEQ ID NO: 275230 - DNA, 333 bp, Glycine max
  unsure (1)..(333): unsure at all n locations
atctttctcanacttgagtttcgaaaggccaagtatgaagtctttcctaactagatgattgagatgatgcatgtgtatgtgtgtagtcctatgatgtcacaaccaagaatcatctatcttaattatcagacaactcatctcatgagatgatgaatgctcaatgtttaacatattgatattacctattctcttgccaatatggacaacctcaccggacatagcttcactaataagacaacgattcttactgaattcaattttgaagccttagtcacatagttgactaatgctcaggaagttatgctttagtccattcacatagaacattcttta

SEQ ID NO: 275231 - DNA, 451 bp, Glycine max
agcttgtaacaagctcaaaagttgctcaacgatcatagcctacaggtcttttgtttcttcgatgatggcgacaatatatttaaattttagatctaacgatctaagaattttctccataatgtttacatcatcaagcttttcaccacttctcttaagatgattggtgattgctaagactctagagaaatagtcggagatgactttaccttctctcatatgcaaggtttgaaacttaactcttacactatgaagacgtaccttcttgatcggatctgctcccttatacgaggtttgaagcttctgccatgcttctttcaccgactttgcttctgaaaccttcttgaaagcatcatcatctactcctagatagattagatagagagccttcttgtctctctctcttgagtctctaaactatctctttgagtctgagaaagactaccctcattct

SEQ ID NO: 275232 - DNA, 188 bp, Glycine max
aataataaaaattattttaataaagaattaattttttatattaaaataaacaatttatcatgcgccatagtttatgattaaatataagcctaaaatatcttttaactaatgacattaattatttatgcttatataatatcactactagaaataagagattctacatcggttattttcaacatactaca

SEQ ID NO: 275233 - DNA, 400 bp, Glycine max
agcttgtgcatccaataccctgatgaggatgtcccatatgttcttaaaactggactgattcatttgcttccaaagtttcatggccttgcaggtgaagacccgcacaaacatttgaaagaatttcacattgtctactccaccatgaaacccccagatgtccaagaggatcacatatttctgaaggcttttcctcattcattagagggagtggcaaaggactggctgtattaccttgctccaaggtccatcacgagctgggatgaccttaagagagtattcttagaaaattttttccctgctttcaggaccacagccatcaggaaggatatctcaggtattagacaactcagtggagagagcctgtatgagtactgagagagatctaagatactatgtgcca

SEQ ID NO: 275234 - DNA, 346 bp, Glycine max
  unsure (1)..(346): unsure at all n locations
tcaattaccatccatgtgtaatcgattacacattggtaagatttgaattcaaatttctaatgactggtgtaattattttcagctgcttgtaattgactacaatcctcatgtaatagattacatgccttcaaaaatattcaaaatcatttttaaaagcgttctatgaagtgttttggccactggtaatcgattacatcctctggtaatcgattactagagagtaaatctcttgtaaaaatattttagcttaaattcattggccaaacctctcgtcgtttcaacttggaattcccttcctaaatcactagagatnntcttgatgatgtatcttgaaattcttggattc

SEQ ID NO: 275235 - DNA, 380 bp, Glycine max
agctgttcgatctcattctatgtacccgtagtggtccacattgtgtctcgagcatttctattctcattatgctcactctctatacccgccgttgacgtgcttaagccattctacttacgtcatttctcgcttaacttaaaaataaaataaattcccaccgaacgttcgaatagtattattcattaacttcgggtaaaataaattccgaccgagtgctcgtgccgtatccacattggaaatcaagaagaggtctaaaataatataataatctaaaagacatctttcactaaaataaagcggaacatcaagcggacattttctctttgggatctctcattcttaatcgaaatgatctataactgatgtgaaactaaacgcta

SEQ ID NO: 275236 - DNA, 225 bp, Glycine max
tgtgtggatgatttcttcagatttacctgggtcaactctattatagagaaatcacacacctttgcagtattcaaggagttgagtctgagactctcaagagaataagactgtgtcatcaagagaatcacgagtgaccatggcagagagtttgaatatagcaagtgtactgaattctgcacatctgaaggcatcactcatgagttctctgcagccattacaccacaa

SEQ ID NO: 275237 - DNA, 426 bp, Glycine max
agcttctagaaaacgttgatgtcaaatgcattctatttttcttccatgtttcagttgcacgtagcttgtgtcttcttaacaaatagggcatgcgcgatggcccttaacacaatatccacccaaatttttgtatgctggaaagtcattaatggtacaaaataacattacacacaacttgaatgtctcatttcaatacccatcaaacacaataacccccttgttctacaactttgtcaagtcttcaatcaagggactgagataaacatcaatgccatttcttggctgtcctgtgttcgatatcatcatagacaacatcatgcattttcgctccatgcacaatcaaagaggcaagttgtaaattactagcaaaacagaccacgcactatgtcgagtgcttaaattgccataaagatgcattccatcctt

SEQ ID NO: 275238 - DNA, 291 bp, Glycine max
caaagtactttcgacacctactatatgttgatttcaccaacgctgttatgggtatgttgcgacaatccttcaaaaccttatttatacattctgagaggttggttgtcatgtggccatatcaacatacttctttatcataagtcatggtccatttatccttcgaaatacgatcaatccatgttgctatggctagactcaactgacgaaatgtttctaaattttgatcaaagatatgtttgaaggaatatagcctgcatgacattagttagcaagaacaatcttaagtatata

SEQ ID NO: 275239 - DNA, 446 bp, Glycine max
  unsure (1)..(446): unsure at all n locations
agcttgtgaaactctcaaagaaaaaaagtccatgttgtcttataaatgagaaaattgccaaagaattgctctggagaactttcaagagttggaaaacaaactcaaatgtctacaaaaggatttgagggaactaaatgaacttcacaaccattaaagtgaggaaagaaattatctatggagagaatatgcacaagcacacaaagattatgaggatcttaaaataagtaaacataatctttgggtggaatgtgaagaacataaaagatctatgaaattcttgaatgaaaagcttttgaaaatgaagaacttaagagtcaacatcaggatgttataaaacttcatgaggaaattggaatcttaaaatctatgtttagtgggatagagaatcttgaanaaactattaagatacagtacatgtccctcagatagatctggtaacggatatg

SEQ ID NO: 275240 - DNA, 440 bp, Glycine max
agcttaaagcatgcgcgagtcattcatccctatgagatgttgttgaagtattggcgatcagaattgccattccttggattatagggttgaaccaagctcatgcttttacaaaaaggttcatcaagtcaagttgaaatatggaagtaaccgccttgcaaaattggggcaaaagatgaatcgagtcacatcactgcttcgtctactgccaaacatatttaggattattgatgtccttgttacttccagcttcaccttgacaaagatgtcatggaccatgttgaaaatctaaattgattcaaccccatatcttgcgtaaaaattcgcaatacttcaactgtacatcattcgcatgcatccatgcttttcattgagtgcattgctcgttgcattcttctcttgacaaataaaataaaatgaacttaatcattggtataacaaag

SEQ ID NO: 275241 - DNA, 358 bp, Glycine max
  unsure (1)..(358): unsure at all n locations
ttgagccaaaatcctgactcaccatataccttgacccagtgtgagaatgtcaatccttaccctcggaagcggagagaatagaagggaaatttccaatcaaagaaaaggaaagaaggaagatttccaatcaaagagaaagctaaaaaagaaaagaaggaaaattccccaatcaaagagtgggagaaagcataaagaaaagaaagaaaattcccaatcaaagaatgggagacagtaaaaaaggaagaagaagaaggaaaganagctcctgatcagggatcgaaggaaaacagaagaaatgtgcagaaaggtctttgaaccggacaatatctgaacaatacagaattgtcaccaaatgaac

SEQ ID NO: 275242 - DNA, 433 bp, Glycine max
  unsure (1)..(433): unsure at all n locations
agcttgntaattgtaatagatgctagatagaagtgagagactatatttcttgcgtggaaaccctctgtgaggtgaaaatctatgtccgtgcactttaaaacacaaaaacccctttgttgttgtaagtcaaacaatggttgtcaaggttaaaatccagtagtgttgttggtctaattgaggctaggttgaaagtctaatagaagtattagcaggttgttgaaattcagtggttggttgtgtttgtgaaatctcatcttaaagggcgaggactaggcgtagctcaagcttgggctgaaccagtataaaaatcaatgtgcactcttttttctttcttctatttgcactattattgaacaaatttgtttactagttttgttaatctttaaaacagaaaaaactttcacaatacacaaaaaactgaactaagtttatc

SEQ ID NO: 275243 - DNA, 297 bp, Glycine max
  unsure (1)..(297): unsure at all n locations
tagttacttgcgcttatgcgagatgacctgcaggggaaaatgggcttctagttttcaagctggaaccaagcttaagtgtgactggaaccaagcttaagggtgaccaagcttaagcgtaggctgaaccacgcttaagcgagatgacctgcaagggaaaatgtgctattggatttcaagcttaaagcgtagagtgagccangcttaagcatggtcaagccaagcttaagcatgattaagcttaagcatatggcgagccaagcttaagggtgaaaccttgcagaacgtgtatgaatgact

SEQ ID NO: 275244 - DNA, 247 bp, Glycine max
gccccactccatcattatgattattacctgacatctcaaacaaacaaatcaaacgtaacaagacaattatagttgctgtttgaatacctcacccactcaagtgtatcacacaattatggcttttctctaatgaaacactcttgccttttaccactctaattccccttgagttcttaggcaattcaagagattatggccacaacaaagaacaattcaccaatatgtgtaaggtaaggctagagagaca

SEQ ID NO: 275245 - DNA, 441 bp, Glycine max
  unsure (1)..(441): unsure at all n locations
agctnttcttatagacaaaattaagcatgcataacaaatttaccttattgtttttgtttgtacatttgattcgcgtgatatcattctcttgatgctgtataagaccagtttaaactccaccttctccaccgaagcaatatctgtgactttaaaatatccaaacttttcaggggcttaggcataacttcacctaagtagcttttaagggttgcaatccttgcacataaagcaactcatcaaaataatccaaaaaatatcggcaacttattaatctacaatcctaaaattagttgtttaccttctgtcaggccctaatttcgtttggggacgatcatttgctaaagtttggattcttgccagccgaattgagctgcttaacgccatgtgagaaagcatacttacaccatgttgtcctctcaaggttatacaaccaatgatatg

SEQ ID NO: 275246 - DNA, 330 bp, Glycine max
  unsure (1)..(330): unsure at all n locations
tgtganagagaagggcatttcacagctatggattgagactgattctacttcagcagtggattatattttaaataaacgcgtgcagaaaggtgatccttctgctcctcttgttgagtccatactcgagttgatgataggaaattggacgtttcgagtatcccattgttatcgtgaagcaaacacagttgctgactggttgtctaaatatgcgcatactactgcttttggtcttcatgtgctcgatgttcctcctcatggttgtataacatacttaactgatgactctactggagtttatagacttcgtactgtacgtgttattgactcatg

SEQ ID NO: 275247 - DNA, 345 bp, Glycine max
  unsure (1)..(345): unsure at all n locations
agcacatgatcaacattatgatggccatggaatatactcntcattgcattcatcactgctgaatctttgtcggcaataataacttgagggattgcatcatgtcttagaaaacaacctcaaaactgctccacagcccaaacaacattgtttatatgttctccctccaaatacgcaaatgcatctgaaaatttcatcccaatacgtgtcacaccaacaatgttaagtaaaggccgcttttgtctgcttattctataggcactatctatgaaaaatatcaaattacaggaatcgcttaatttcatctgcatctggacgagcccaaaatatatcattacaacatcttca

SEQ ID NO: 275248 - DNA, 269 bp, Glycine max
  unsure (1)..(269): unsure at all n locations
gagccatgttctcagtatgaaaattagtagttgaatgctcaaaatcagaatgttcagaatcaccagcaacataatactcaaaatgctcgaaatgcacataatgatcaggatgcacactatgcctaactaatctatgaaaggctctatctatttcangatcaaagggttgtaaatcacctggattgccctagtcatgcactatatgcaacanatcatgtatctctcanataagcaccagnggaggggtaaaactataactatagtcaaat

SEQ ID NO: 275249 - DNA, 437 bp, Glycine max
  unsure (1)..(437): unsure at all n locations
agcttgagtgggatcttcccagttatattattactataacgctccatgtcattgataacaaaaatatttatacctgggccgagaacaaagtctaacgaatgactcataatggcataacacattcgcaccaattctatcgcacgggttcaactaaaatataatacacagccgtatgtcaaaaattgaactacacaaaatgtcaacgcatatgtgctatgcaaaagtgcaggtctgcacgatcaaatcaattgtacaactataagtaaatggaatgaaagcaatgtggctccactatgacaaggagagtaacacacatcctctaaaaatctcatgatgaatggaaataaaacgaaataatgccattgatgaacaaatgtcataaaaaaactatatcatgactngaacatagaaatactacattttatagtctttaccaa

SEQ ID NO: 275250 - DNA, 353 bp, Glycine max
  unsure (1)..(353): unsure at all n locations
acatgcctaattcctttgagtgacatttgtattggttattatcttgattgacggatcttagtacatttgatatatgtcctgcatcatacatcatcattgtttacgtgaacgaaattttctaagttagaaaattttcttcagaggaaaaaactctctatgttaatcgattacaaccaacttgttgaagcttgtagagatgagtctcgtattggtttaatcaattacatatatctcacaatacattacactgttatgtgagacaatgactaatctagtcaagagtctctgctntaatcgattaccaagtggatcaatcgagtatagatctctctcattacagtgttagatgtaac

SEQ ID NO: 275251 - DNA, 428 bp, Glycine max
agcttctcaaagaagccacggagaagcttcttgaagaagcctcttaatgaagcttcttgaggaagctacatgaagctgcctcggtaaaaatgctgcccagccttcgttaaccgttggatcttctcgaaatttggtctgcagcttcacaagacactcgtccatgatctgaccgttcggatctttgagaagatatctggcttgtgctcgaagtttccgttcccgagagcatttcttatttaagcacttcagcctttgctttcgtgtagcttaagaaaaacgtcatttcttcttctttctttcttccaaagccatttctaaagtcccaagcactttctccatcacccacagccaccattagccaccacaaaccatcattgttctccattgaaaccccacaccgagaggaactcttcaaccgaagcggaatc

SEQ ID NO: 275252 - DNA, 175 bp, Glycine max
gcggaaagatgcgcttattgcgactactctattggacaaccgtgacttaatgagcaagctcgctgagcccaaatccaacaatttgaataacggagagataattgcgcttagtgtgatacggcatgcttagcgcatatcaaaacacacgaactctaagtgttcgagaacacaacac

SEQ ID NO: 275253 - DNA, 451 bp, Glycine max
  unsure (1)..(451): unsure at all n locations
agcttcttatccaaggcaattattggtggtgaagctccctcttccttggcttattccctagcggatggtgcctcccctctactcttctcctttgccttccgttgcatctccatggtgaaaaatcaccattgaaggacctcattgaagctcaaagatccagcctccatagaagccccacaagcaagcttccatcagaagccattccataagagaactgaaccggatttgcaagaaagttgctgatgtctggaagaaattggatttaggcaaccagataggactaagacatgtaacgtggtgtattgattattaagagaaaattgagacaattgtttcagtttgctgaacctttcatgttatgatcaatagaattagacttgcataatatgtatttgagaatntttgtatctgattctccaaagctattcttatgaatgtctctaaataacta

SEQ ID NO: 275254 - DNA, 318 bp, Glycine max
  unsure (1)..(318): unsure at all n locations
ctcagcttggtagaagctctaaatatcttctnttctactcatttcttcattttcttgctaagcctctatgttgggttcaaaaatttgtttttcatcctttgaagattgagacttcaagatctgaacctttatgttagagatagggggagcaacatgaacaaaatggtgaataacctctcaaggaaaatcttgaaaaagttttgaagatgttttgacttttacatacctaactcccttgagtggcatntatattggttgaagtttctaagttagaaaagattcttcaagaggaaaaaactctctgctctaatcgattac

SEQ ID NO: 275255 - DNA, 405 bp, Glycine max
ggtatattgattgccttgcgcttactttcaaccttcctatgtatgtcgaactaactaggatttcttacccaagttttaggagtccaatattcacttaggatcaacatttcagccagcaattcaatcaccaaaactcaaattcacaatagacacaatcataaggaaacctaccagctcaagtaaaggttcacaatccaagactctctaagaattttgcatgaacatgttaaggactaattaacatgaaagatttgactcaaatcaaataataagctaaaataatttcatacactcatgagcaaatgagttagacaaagaaacaagaaaataaaattcagcacaacataagaaatctcttgtgacacgtttcatgactagacacgacttctatgacaaaactacaat

SEQ ID NO: 275256 - DNA, 375 bp, Glycine max
ttttgatttccagccgtgtatttggctatattattatgacatttgaacaatttagtatttctttatctgcatggtgtgtttgaaaaattatgaattatgttatatgactatgtgatgtttctatataattgatctagtcatgtttcttgcttcatgattaggttatatattttccatgattgctgtgtgaatgattacttgtatatgtatgtgtcatacattgtacgcactttggctttttattggtgccaaaaggggagagaaatacgggttaaatccaggtcatgaacttaatatcaagtgaagcatcatatccaaaacagacgtggagaatggaaatttatgtgagtgatcgactaggaaaagtgtgtgtgt

SEQ ID NO: 275257 - DNA, 418 bp, Glycine max
agcttgtagatgtcacttaagaacatacgtgcaacggaagcaacggagaacttggctggtcatgttttgaagtgagtatactctgtcaaacaatctacaatcacctaggtaattgacttcccctgtgacactggtaagtgtgtaataaaatccatacagaagtctttccagacctaattgggaataggtcaaggctataaaaggccatgctatttgtgattgggagacttatgctcttgacaaatctcacaggtttgcacatactccttgacatcccgacacatgtgtggccatgaaaaggaagctgccaaacatataagcatgcctttaacacttgagtgtcctcctgcaagggtggcatggcaatcttgaagcaactgaaagcaaagcgcagactctagtggaacacataagcact

SEQ ID NO: 275258 - DNA, 238 bp, Glycine max
  unsure (1)..(238): unsure at all n locations
tacacacacccnctataatagcttagctcacccgcatgccaaaatacatgaaaatataaaaaaaggtccaactacaaagactactcaaaatgccctgaaatacaaggctaaagccctatactactagaatggccaatatacaaggccccaaagaaggaanaacctattctaatatttacaaagaagagaggacccaaccttggtccatgggctcataaatctatcctgggattcatga

SEQ ID NO: 275259 - DNA, 455 bp, Glycine max
  unsure (1)..(455): unsure at all n locations
agcttgtgcatccaataccctgatgaggatgtcccatatgttcttaaaattggactaattcatttgcttccaaagtttcatggccttgaaggtgaagacccgcacacacatttgaaggaatttcatattgtctgctccaccatgaaacccccagatgtccaggaggatcacatatttctgaaggcttttcctcattctttggagggagtggcaaaagactgactgtattaccttgctccaaggtccatcacgagctgggatgaccttaagagagtattcttagaaaaaaatttccctgcttccaggaccacagccatcaggaaagatatctcacgtattagacaactcagtggagagagtctgtatgagtactacgagcgacttaaaaaattatgtgccagctgccctcaccatcagatttcggagcagcttcttctncaatatctttatgaatg

SEQ ID NO: 275260 - DNA, 510 bp, Glycine max
  unsure (1)..(510): unsure at all n locations
atgctntaccggcaattacgtacattcagtaatgaaattgcatcttatatgacactagtagtgttaaacacacacacacacatacatacatatatatatatatatatatatatatatatatatatatatatatatatatatatatataggtaccaaacatttgcaacttcaatgctagatttgtgtaatcttttatcttcaaaaatacatatncattgtaaaaaataaataggtgggagcatatatcttttccattttataatgagtggacgaacaatgatccacanatcgcacttgacaattaagatatatataatacgacaatagaactatataatcttccattagatntaataaaaggatacacagttactttccagacatncttgaataaaagagggaatacagagaagtgtggtgtacatatatatcatgtgactcttgtctattttagctagtttatttaaattcactcgcagttggtttagtcagcttgctaaagtaacacgg

SEQ ID NO: 275261 - DNA, 405 bp, Glycine max
agcttaagaaaaagcttaacaaacttagaaatcaagtgatcatgaattccgaaatatagggggagtaaacgctttatctatatacaattgcttgttgtttgcttgactcttgatttcaggtattgtattgtcatcatcaaaaagggggagattgtagatgcaatggtcttcgatgttttgatgatgatcatgatgatgtgttacaattgatacaaatgggcttttcaagattgaattcaagacaatacttcaagattacaagtcacaacatcaagatgatcactataatattaggaagggaattcctaattgaattagcaaaggtctggccaagtgatttaaattaaaaaaagtgtttctcataggttctactctctggtaatcgactaccagaggatgtaatcg

SEQ ID NO: 275262 - DNA, 375 bp, Glycine max
  unsure (1)..(375): unsure at all n locations
cccatcacacgtggtactatgtggcggttgggcgatggtgcanaacaattctccacatccacaaatcacatataaacccaccatccgctgtttncaacctcaactgagctcacgtactcccacgtagcccttatactcgttcctctcaacgccgggtccccatcaatcctaccaaagcttcacaacatccaaagaattcaacatccaagcatcatgaactaacacagccaagaccaaagggcagaggcagaaaactctgcccgaaacacaaaccaacatcacagctnttcacactcacataccccagtaatattctcttcgttcaattcgtaaccattggatcgactcgaaaatttactggaagtctctagcaca

SEQ ID NO: 275263 - DNA, 434 bp, Glycine max
  unsure (1)..(434): unsure at all n locations
agctcttgacactccaaccgtatctggccttgacattaaccaaacttaacaccgccgacaacatcgtcaaagaattattgcacctcgtatacaaaggcttctttgagtcactatgcaatccttcatacataggggcatatgcttgctgaaaagactcttgtcaaggctacgaatcatatcctccaagcgatctcccatttctacatcaaacggttcagaagaccgtttgatgaaaagactcactctgcatgtcagtcatttcaccataccatatccatgtcgtgtaattcttcttaatcccatcacacaatagatgcttccgtatgtcgcccaataattgtcgtcttccgttcanacaatcgatgcaaggacaataatatttttcatctttatccagtcaacctctctctgaaacacattgtaagaactactcg

SEQ ID NO: 275264 - DNA, 199 bp, Glycine max
  unsure (1)..(199): unsure at all n locations
gacagtcattcaaaatgaaaagaatgacctaacccccacaatgattggcactggctggagaatgtgcatcgattatcgcaagctcaatgaagccatatggaaagatcattttcctttaccattcatggaccaaatgttggagaggcttgcgggacangcttattactgcttcttagatgaatactctgggtacaatcag

SEQ ID NO: 275265 - DNA, 306 bp, Glycine max
gcatatatatccgctatcaccttcaatagcaagattaactagggaatatgagtcatcttggctagacaaaacccacgacacaaaattcctaacactttaaactctcttgcgtctgaacgagtcagaggccgtaccaggtgcagagtatataacatgagaattgaacgtgagactagtgagccgttcgcaaaagtatctccatcgcttagacaatacacaagttcgaacagcaagttgtgtccataaaacttattatgtggcaaacctcctcacatggggcacttttaaaaactatttccccacatg

SEQ ID NO: 275266 - DNA, 232 bp, Glycine max
actagacattctcttaaagatttatgccataatatggcatttgtgtctatgattgaacctacaaatataaatgaagccataatggatgatcattggatagttgctatgtaagaagaactaaatcagtttgagagaaataatgtgtgggaactagttgagaaacctgaaaactaccccatcataggaacaaaatgggtatctaggaataagttagatgaacatggaataatca

SEQ ID NO: 275267 - DNA, 393 bp, Glycine max
  unsure (1)..(393): unsure at all n locations
agcttcttagtanattgtggggagtttgaagccatcttctcaattaaatttctggcttcatcaggagtcatgtctccaagggttccaccactggcagcatctatcatacttctctccatgttactgagtccttcataaaaatattggagaacaagctcctcacaaatctggtggtgagggcaactggcacatagatctttaaatctctcccagtattcatataggctctctccactgagttgcctaatgccttaaatatcctgtctgatggccgaggtcctggaagtacggaaaatcttttctaagaatactctcttgaggtccatccatcttgtgatggaccttggagcaaggtaatatactcagtccttcgccgctcccctctaaaaacga

SEQ ID NO: 275268 - DNA, 297 bp, Glycine max
  unsure (1)..(297): unsure at all n locations
agtagcaacatcaagtacgcaatgaattcaactcttcatgttaataatatatagcatgtaatcaaccttttcctttatctgctataataactgataattnacaacaggctcattaatctacacanaggaataacaatacaagagacctttgaactaaaaacaaaactctatccttnggatagaaaacaatgaaatctggcaaccaacagataataatctgacgtagactaaagaacatgtaactttacaaaagaaatgatgacaacgtataaagggagcaagctaacttctattatc

SEQ ID NO: 275269 - DNA, 437 bp, Glycine max
  unsure (1)..(437): unsure at all n locations
agcttagtaattcaaatatataagttnttgtagcttgatatttagtacatgcttggtaaagattattctgaattatctttcgtatattgtacgacatggaatgcaaatttatctttactcacttaatatgtcttgtctttttttttcaaatgtaacactcactttctatttgttttttttattgcactcaatttctatttgtattagtggataattttaaaccttcccttcctatatataacctaaggcaatttatagcttcttgacaaattcatagcaccggcagggatggataaaggggacaagcagggcttcaaccccctccctcaaaagccttttattttctcttagtaactctctcttacaaactctaataaatgtataatacattttttagatacaaatatggaggtcaatgtcattaagcagtgccaatc

SEQ ID NO: 275270 - DNA, 358 bp, Glycine max
  unsure (1)..(358): unsure at all n locations
gcttcgtccgcagatccctctngtaagactaggcctagactaaacagcattattgtacaacataattaataccaaaacttaatctgcagatctctcttgtaagactaagtttcgatcctgcttcaatcaagttctaaggcaatagtacatttcccaatgctaaagtcacctaactatgcacacaaatggatgatcggaccacaagcatacaaacattaagcattgaaggaagcattgaacataganaacataatcaattagatattaggtatntacataagctattcattagaaatccccaactagggtatntagccagccattacaaaagaaaccctaaccataataagcttataaa

SEQ ID NO: 275271 - DNA, 409 bp, Glycine max
  unsure (1)..(409): unsure at all n locations
catgcaagctntaaagttatgttgtagttataaataatgcacatgacatcatgcaattatggcacagttgcagaaagtctttgatttataaaatcttaaatggcgtttgttttgccacgagtaaccttagcgacctaatattatttgaacattgtaattcttaaaccttttgctcatttgtttaaaatattgcttatgttttcatttgccgcacgaaatttttttgcaaactacaaattgcagcttcttatctgataataagctattgttgttctccctcccatcatcgcactgctagcattttgacatgtatctctgcacgtatgtatgtcatacttatgttcgcaacgtatctaaacagttatagcattatctatgttgcggattggcaatttctagtgcatgcatg

SEQ ID NO: 275272 - DNA, 302 bp, Glycine max
  unsure (1)..(302): unsure at all n locations
cagaacctagtggggtagattctaccttggtactcccatgtgatgttcatttcgaaattgtagggtttgagatttgaaatgtttctgctttttttccaaactcgtctgggggtatgcaccacaaacatggctgttgagagtnttgaaccctccgccgatgactacgtagaatttcattangaaatctcgtatgaggtaccaataaatatgtgcacatgcatgngcagactntgatagaggctaggctcgcgggtntgttattatatttacgtgtatcggcttgagatttctaccttgcatac

SEQ ID NO: 275273 - DNA, 268 bp, Glycine max
  unsure (1)..(268): unsure at all n locations
agctttgacaaagctaaccgaacatcatcaaaatcatttcgtggcccggngatggttgagggattgaaggttcatatttctgctactttgttgcgataatatctccttgtgatttgtatcttgaggattctaagtgttgtaattgttcaataagatgagactgtattagctctgctaaattttcatgacttcagttaaatatgagtaatataaagttgtcttatcctaactaaccgccaaaggtagctcgagagggggtgggggtggg

SEQ ID NO: 275274 - DNA, 285 bp, Glycine max
  unsure (1)..(285): unsure at all n locations
tacgcgtgagcacttataatttggaaatttaaaagccaaaatccgtcccttgttagctagtcaaagtgtcataaaagataacatagtaatctacaaaccaatagaggatagtttgaagaacgtttcatcatataacatcagatgtgatcaaaccaagaaaaataagcaaccttttctttatataatggggcagggctcagtgatatacatgaataattctcatttcccaaaggactcaagctattactaatagtaaaagactgcannacctgtattgctaaactg

SEQ ID NO: 275275 - DNA, 1007 bp, Glycine max
  unsure (1)..(1007): unsure at all n locations
ctacgtacttctgcctccgccccctccctcttctacgtccgtcccaccctcgcctccccccctcccncccccgcgcggcccctttgtttcttctcttccgccgcggatatataaaaacgcccggaggccgcccgagggtcctaattgacgctcctccccgttttctatcaaattataaaatggggtgggaagctcaaaactttatgagatacaagggccccctctttaagaagacaaccacccgttgggtagggggcgcaacaaaaaaaaaaaacgcatgtgcatataaattacgtcccccctggctggtgtccccgaataggctctatattgaggacaagatagaaagaagatccatatttggtgatactataaaccctattgacctcataaaaaaatagataaattggggcgtcacaatgctttatccctgctaacttgaactacacccccctttgagctggcctcctggcaaccaactagtggaatttacacggcaaaacctatattctccccattgggggtggatgtgcttaggaataaaggcgagagccaaaagtgggtttaaaaaaaaacacctcgggatattatgttggccctaacccaagaggcaagtaaaccgcctttgaattcgtggccacacgggcgaaacaccactcagggtctcttctgtcttttccgaataaggaatggtttaaatttaccatcgctctgagttatccccaagagttttttttgttaatgaccgaaattcatatttcccaatttccaaatttacacaggtgcatattttttaaacaactcaaaatggttaaattttgcaattccacacccccacattcaacggtttagtaaaaatcccccttttacacattccgaagctttcatttctggacgtttggagctgcacataaatttttacattncacactttcaagggttcgagaaccttccccgatacaaaagtgtagcttgccaatttggaacagggaacttccacagaaact

SEQ ID NO: 275276 - DNA, 1070 bp, Glycine max
  unsure (1)..(1070): unsure at all n locations
cgcgctgggnnnnattgattagccatcgctatnnaccnngccaccaattnnannatacnnaaccctccaagactgttcaaaactttaaggtccccttagaggcatggaggtcactagatatttgtttcttttcatcccataacaatttagggatgctgacagatgaggacttattcaagaaaagctttgtggagacatggcggctccttactcccggcacttttatttgcgtggagtcttggtatcttggaacggtctgcattaaactactcctatgtcttgtagaagcacaaattcaactttgcggcgtcgtactctatcctaaacccaaacaaatcttctcggtatctttccttctcagccctgttcgctataataacaagggttaacaaaagttccctaattttcatccttgtgaataaagtccgattttaatataccatgccaccaatttaatccatataaattactacttcaagcgctcactttatgacctctacctggtttcttcctaacaaatgggttttacgaagcttataatgttcctatttatctaccctgtcgcttcctaggtataacccaggagaatactaaactattttctcttgatacaccccttgtcaatcccttctggaaacttattacaataatattttctatctgggaatagcgatcgaactcttttcttaataatcatctctgaaactaactattatggtgttacatgatccttccgtctggttgctacgtaagcctcttaagcgaaatcctctgtttcaatgtatcactctagcatcattccggccacgtctaacaggtttgctccactctcaggatggctttaccctcagactacatctatctatcgctcacattcacacggttgcttatcctcgtccgccattcccttcttcatcctgactctgaacagaactgatctttcaggcttctcacttgatctcctgtggctcccacaacggcgccagatataacttgctcttctattctactcatccacctgacatccttacagtaactattattctcgttctgcagttcttttcggtgcc

SEQ ID NO: 275277 - DNA, 458 bp, Glycine max
  unsure (1)..(458): unsure at all n locations
agcttgaagacatggagacattctttggtcaatatgccaaggtaatattttaagattggtgccatgtttactttacaacattttagctagagagcattatagtaacctctctctattgttgntggttttgatgcatgttatgtgacaactggcatgaaaaccgtataaaagttcacttgatctcttgatatgaaattggagcacaatcactatgctttttataaacaaatgtcttcagcatttaaagagatatgaaattggagcacaattgctatgcttcttataaacaggttgtcttgatattttaaaaataaaatctgaaatttgattccacggattaatctttacatgcttcaaattatgtattaatttaatgataaatttttttgtcagatagtcctgggggtatgaagtacttttgatgatttattttactttttatgtaacaaaaaagaaaa

SEQ ID NO: 275278 - DNA, 229 bp, Glycine max
tcttaattgccaccattgtttcttcccttcactgaaaatccatggttggtccatattaacatcctcctctaaatctccattctaaaaggcagttttcacattcatctgatgtagcttccaagtcataatgggctactaatggccatgataattctgaaagaatccttttgtgagactggagaaaatgttctcatataatcaatgccatctttctgagtatatcccttag

SEQ ID NO: 275279 - DNA, 404 bp, Glycine max
tgcatctccatggtggaaaatcaccattaaaagacctcaatggaagctcaaaaatccagcctccataaaaaccccaaaagcaagtttccatcaccttccttcctcgggtcatcacagccttgcattcttcttttgaattctactaagtgttagctccaaaaatattagaaaatttttctgcaagctgtttgggtagctgccctacctggacctctagatttttgatggctgactctgtgctcttatgattagtcaacgacacctgcataaactaagcaagagtttcttccaactttgttgttctctcatataagctaggccctttgttgtatggcattgtaggtggcccaccctggtctttattgaactgattaccagagtgagttctccaatgattatgctac

SEQ ID NO: 275280 - DNA, 433 bp, Glycine max
agtgacacttaaatactcagcttcatccttagatccctcttgttggactaggctcaatttagacaacccttctagctttagactaacttaaaccaagtttcgtcctcagatccctcttgttggactagactaagcttaaatagtttacgaaagtttagactaatttaacctaagcttcgtccttagatccctcttgttggactagacttaaaccaaacaacattattgtaacaacatatttaaaaccaaaacttaatccgtagatccctcatttaagactaagtttcaatcctgcttcaaccaagttctaaggcaacaatacatttcctaatgctaaagtcacctaactatgcacacaaatgggtgatcagtctaagagcatacaaaaattaagcacttgaagaagcattgaacaccataaacacaatcaact

SEQ ID NO: 275281 - DNA, 237 bp, Glycine max
gggtcaagaaaccttggggacctcaaggggggtgctattgcccaaaaccaagcttgaccaattcccgacccaaccccggcataatcggtcagtgagaacctttgatgtacctaaacaagcgagctcctggcagtcaacagattaaaagaaaacaagaccaccaagccaggaggcttgtggtggctggccacctgtgaattttgtgtaatatgtggatggtggcctctggtaatcgat

SEQ ID NO: 275282 - DNA, 412 bp, Glycine max
tgggaggattgatggggacctggtgttgagagaaacgaggatatgatctacgtgggagtacgtgagctcagttggaggtgggcaacaagggatggtgggtttatgcgcgcattgtggatgtggaaaacttattgtgcaccatcgcccgaccgccacctagtaccatatgtgatgggtaccccataatcctacaagcttgagatgaagaagtgttgaagggtgaaacttcctgcttttattgttgaccacaaagtggtacctggagatatgtcgcgggggtcatgagaccttgtggacgtcaagtggggtgctattgtccaaaaccaagctttgaacatcccgacccaacccgggcatagtcggtcagtgagaacctttgatgttccttaacatgcgagcttctggctattta

SEQ ID NO: 275283 - DNA, 456 bp, Glycine max
agcttgtaaggctttgggtgggacatgatagagagactcaacttggataccaaccttgtgctacaacaattgcagcaagacccactatccataatgagagaataatttttgtttaaaaccttgcatcttgtatgaaagatgttttctttttgggtttgggttaggtcacaagattgactcccaatgagccatctctccattagaagatcaccttcttcgtaggggcaaacctcttcaatatgctcatcacccttggcttcaccctcacttccacctgaggaaggagaagaagtagccttctcttgactactgtagatgtcttgatcccacatgatcatggttttctttgtagtggcattgagaaagaatgtggcctttcccaatacattttaagcacttaatgttactagttctatcttgtgaactaccctttggagtgatttcttctatgttttt

SEQ ID NO: 275284 - DNA, 473 bp, Glycine max
tatggcgcctgaggatgaggatgttgtcgctttgaaggagcaagttgctttgaaggacactactgacaaaaagaagaatgaggtaagagatgagaggagtcagtggagagaaaaaccaataattgtcggaagggaagaaataaaagacaatgaaaaagaaatagagggaggaaaataaaaagaaaaataagaaaaagaaaaattttaaaaaaataaagaagaggaaaagagtaagagtgaaaaagcaagagaaaagagtaaagaaacagcttcagatgaaggaaaggaagtgccataccctttggtaccttccaagaaagataaggaacgccacttggcgagattcctagatattttcaagaaactagaaataactatgccatttggagaagctttgcaacaaatgccactttacttaaagtttttaaaagacatgttgacaaggaagcacaagtacattcaccaagaaaata

SEQ ID NO: 275285 - DNA, 276 bp, Glycine max
ccaaatcttaattcttcttgacatcatccaaatctttatgaattacattctccccctttttgaagatgaccaccccctgtgggtaggagccaccacaaagaaaaaaaatctattttggatataaattactcccccttggttttgccatgattgcttatatgaaacagttgaagatttcctatttttcatatataaacctattggctcataaaaaatagaaaatgttcctactattttatcttttaactttctctcccccttgtcacatcaaaacaa

SEQ ID NO: 275286 - DNA, 464 bp, Glycine max
tcttcacatagtccgcctttgcttgaccttctttatgcttataaacagaaacattatgcataggcaaaagattaagtggagttagtgggttaaaaccacaaacaacttcaaaaggagaacaattagtggtgctatgaacagatctattgtaagaaaattcaacatggggtaaacaagcttcccaagtttttaagttcttcctcaaaactgtcctaagcaaggttcccaaagtcctattaacagcttccgtttgcccatcggtttgtgggtgacaagtggttgaaaataacaatttagtgcccaacttgctccacaaagtcctccaaaaatggcttaagaacttagagtccctatcactaacaatgctccttggcaaaccatggagtctcacaatctccttgaaaaacaaatcaaccacatgggaagcatcataaacttttttacatggaataaaatgagccatt

SEQ ID NO: 275287 - DNA, 288 bp, Glycine max
tgtttactttacaacattttaacttgagagcattatagtaacctctctctattggtggtggctttgatgcatggtatgtgaccactggcctgaaaaccgtataaaagctcacttgatctcttgatatgaaaatggagcacaatccctatgctttttataaaccaaaggcttcaccctttaaagagatattaaattggaacacaatagctatgcttcttataaacaggttggtttgatattttaaaaataaaatctgaaatttgattccacggaataatctttacctgc

SEQ ID NO: 275288 - DNA, 593 bp, Glycine max
tgctggttagtttgggagcacatatgtagtttgtttatgtggaatttgcagtcccacttgttgttgttttacccatggtttgattgctataaattgaagaaaaaatttcactatttagtgtggattctacactttttttttttactttaatccaaatatttcttcttgattttatttcattttcttctcttcttctcaatcaaaacataactgacattcatatctaattgactcaactagtataggctagtttgacttttttttccttcttgtataaaaaaaatcaaattcatatataataaaatttaaatataattacaagatcaattattaattttttaattaataattggtattattggattttatcatctaaaatacaccccactcactttaaatgggtaattttcatgataaaattattgaatgttataatttctatttcatttaaaataaattaaaaagttgcttaatttttaaaattaaaaagatttaaatttatgctaagatattatattattaatttaattttaaaaacaataaatttaaacatttttttaaaaatattaaaaaaatcctttcttttttttaaa

SEQ ID NO: 275289 - DNA, 485 bp, Glycine max
caattgttgactccccaaaatatttaaaaatttttctgtcaactggttggggaactgccccacccggacccttaaattatttaagggcgacccctggcccttaagaataaataaacacccctctctaaacttaaccagaatttctttcccccctggcggtccctcaaataaccaagcccctgttggtatggatgttaagcggcccccacctggcttttttggaacggttaccacaacgagggcctccattgatattcttctggtaaaggttgccccgtttccatttaaaaaatccccttgctttaaaattttctacgccgggttccccgtaattaaattctggaaaggttcttcaggggaataaaaaaacctaccccgagcttcacccttaaggaccacctttttctccaaataaaataaagggaaggttaccacccccccttgaatgccaacttattttcgcttacttaaacttctagctctcg

SEQ ID NO: 275290 - DNA, 364 bp, Glycine max
agcttgaggaaggtattagcacctctcacgtttgtctcaaaggacaacagcctattttttagaattatggaaattgtgttacctaactttatttctttttattttttgaggtcgacaaaagcggggcttttgttcctacgtaccctcctttagagaggaaatcagacctacgtagttctttcacatgcgtgaatcaagtgattcttttttacttgaggggtgatcatcttaaggcgttggaccttaaaaatgatccattttacttggtaagaaactgaaatgataaacttttaaaaacctatttttgtggacgagcttgactacgcggattgtttttaaccttaatttcaccttaactattaat

SEQ ID NO: 275291 - DNA, 522 bp, Glycine max
  unsure (1)..(522): unsure at all n locations
tgtaggattatggggtacccatcacatgtggtactaggtggtggtcgggcgatggtgtacaacaagttttccacatccacaatgcgcgcataaacccaccatcccctgttgcccacctccaactgagctcacgtactcccacgtagcccatatcctcgtttctctcaacaccgggtccccatcaatcctcccaagcttccacaacatccaagcaaaacaacattcaaacagcacaagctatcacagccaagcaaaacagagcaaatgcagaaaactctgctcaacacatcaaccaaaatcacaggttttctcacttaaagaccacagtaaaaattccttcgatccaattcgttaaccgttggatcgactccaaaattttactggaagtctatagtgcataagcctacattgtggaccgtgggatctactagcanacattgagaactcattctgcactagacttttcacagccaaccacacacaagcatttttctgcacttgtgcaaaattctgctgcacaat

SEQ ID NO: 275292 - DNA, 545 bp, Glycine max
agctttgagccaaaatcctgactcaccatataaccttgacccagggtgagaatgccaatccctaccctcggaagcaaaaaaagaatagaggggaaatttccaatcaaagaaaaagagaaggaaaatttccaatgaaagcaaaaaagaaatgaaggaaaattccccaatcaaagagtgggagaaagcaaaaaaaaggaaaagaaggaaaattccccaatcaaagagtgggagaaagccaaaagaaaagaaaggaaaattcccaatcaaagaatgggagaaagttaaaaaaggaagaagaagaaggaaagaaagctcctgatcaaggatcgaaagaaaccagaagaaatgtgcagagaagtctttggaccagacaatatctggacagtacaaaaatgtcccccaatgaacgaaaaaagaaggaaaggggacccccaccttaaaaaagtctttttccttttgatacccaccaaaaatcccggcgctaacgactttttttttctcgccccgccttaccaaaaaacccgaaaagaaaaagccccaaaaaa

SEQ ID NO: 275293 - DNA, 221 bp, Glycine max
gcgatcattgatagggtgatgaccacatggaggtgaatgaggctgatgactatttgacggatattcacgctcatcatggactctaccagtgcaacgcgatgccgtatgtgatgtgcatcgctacaacatcattgcaagtgaccatgagagctattttgacaccctaactacacatttcgtcaatgcattcctatgacgatagcctaatgtatagaataacc

SEQ ID NO: 275294 - DNA, 454 bp, Glycine max
ttgaaaagaagttcataagaaaatgggctaatgcaaaaaaagctacatccgtaaagggtcacttttcatcccccttctagtgaccgactaattcacttcaaaataaagatcgggtggaagtgacaaattaagattatagaatatgggtcaatcttttgacttgatagaccaagtcgtatttgttgaattaggattcatatggtgaatcataaagactaagatttatattttgaatcgtgaatttgagtaagattcatgatcagtaaagagaatacgcctagaatgatacaactaacaaaaacatataaaagctcaaaatcattattaactaataattataattgtaaatgtaagagcattctaatattattaagcatattcaagagcaaaacatatatatagtgtggaaggagaaacacatttaatgaccacgatcctaaaaataatgggaaaa

SEQ ID NO: 275295 - DNA, 435 bp, Glycine max
tgccaaatgttattacagtccttttaaagtcacaaaatgcatcgacaaagtttcccacaaactgcagttatcgaaaggttctcgcattcatccagtcttccactattccattctaaaattgttcctccaatcctcatcgaatgaccctcacccagtcgcactacctgtcgcggacaaggataaccaacctgtcatcactcctttggccatactcagtactcgctgggattactcctacactggacatcgtttaatggtgcttgtgcaatggtcgagtcttcactctaatgatgcatcatgggaagagtgagtctccttgaaagatatttatcaacttgaggacaaggtgcttttcgatggtcttgggaatgataggtagagaaagataataacccaacaagcccacagtgaaaggcccaagaggaaaatcaactc

SEQ ID NO: 275296 - DNA, 794 bp, Glycine max
  unsure (1)..(794): unsure at all n locations
cgccccggccntttgatacctttgtaacttctggaccgggaaccttggcgcccgcaggctgcaacttgaaaaggtgctctattggtggaaaaaaagaaaaagccgggagccccaaattggacgaattaaagaaggggaaaaactgggaactttgaagggttcttcataaacctttctttcttcaaaggtaccaacaggggtacccctgcctttatttattgacatagcgtgttctttgagaagcctttttaaaaaaaacttctttgaaaagcttctttgaaaaaactttccttgaaagctcgaagtttaggctcacccccccatcttaaaactaagactacctccttggaagcttccttgagaaggtagaacttaccttcacccccctataataactaagctcacccccctgaccaaaaaaccttgaaattccaaaaaaatccttctacaaaaaatacttccaatgcccctgaataccatgcttaacccctttctactagaatggccaaataccaaggcccaaagataaaaaaaccctttttattattaccaaaaagaagtggacccaccctgggtcatggggctcaaaatttaccctaaaggtcatgaaaaccctaaggcctttttattaaatctagccccaatctcttgaagcctcttgctcatgggtttgggaactggacctttcctcaggaggaatgcataattcctctcccttgaagaagaattgacctccaaaccgtggggcccccccctcaaatcaacttccccggaaaaggaattaactaaaaaac

SEQ ID NO: 275297 - DNA, 435 bp, Glycine max
taactctttggttaagcacacttgacaatatatgagaaagatcctggaagaagtaatgactatatagattccagcagtattcataccttaaggctcttcaacaaatagaccttcaagctttgatggaaaaaactactactactagaaggacaaaatgaagctattcctggaatctcaaaatgtagatttgtgggacatcatagaaattggtccatataagtccatgaaaagaacacaagtcgggaaaataagtttccttttggactccaatgcaaggttattttaaacatgtgcagtcagcagatttgagaatgacaagattgcttattgtttgataggaaaggatacctggaacactcttaagacaacatatgagggaacaaatctggtaaaagattcaaggttaatatactaacttacaaatttaagatgttt

SEQ ID NO: 275298 - DNA, 367 bp, Glycine max
tgctcactcctatggctctagccttgtctgagtcatagagtgcctccattgctctccatgtattgggaatgtctggttgctcaaaatattctttattgagtccaaatgttccacttttcattcggactggccagtggatctacagcacaaacccatttagtttgttttaagacagaataattgatgaaaatgaaatcaacccctgataactaaactctgcattacatgaatgcgtataaccgatgcactttgctcaaagcgttatttttatttaaagcacttaggggcaaagaaaacgtttttatttctcccattttcagtttaaaatactttcaagttaccatgtttttacgtctatcaactttgt

SEQ ID NO: 275299 - DNA, 343 bp, Glycine max
agctttttatccaaggaacattcttgggggtgaagtttcttcttccacagcttattccttagtgggtggcgccttcttttacctcttctcctttgtctttcgctgcacctccatgggggaaaatcaccattgaaggacctcgttgaaactcaaatatccagcctccatagaagcttcacaagcaagctttcatccccatcaaacatcaaaatgcaccaacgtaccaacccaagaagttaactacatgggaggacaacaacgatcgtataataacttcaaacaaagaggttttcaaaacatacatggatactacaaccgagcaggaaacaaccaactacaacaa

SEQ ID NO: 275300 - DNA, 541 bp, Glycine max
  unsure (1)..(541): unsure at all n locations
tccttcaagtggtatcagagcacaagagcttcaagtaggtgctccttaaacctccattaattttatttctttaccttctcttccattgttgtttcttcatttttctccatgtatctcctcacatgtcttgttctaaatgttgttaacatgattctttaaagtttccaccgattaaacttgctatagaagttagatttgattttctatggtttaaatttcttgttcttgttcttgaaccatgaattgtgttgagtttaggttcctttgagttttgtcttgttattttttgtggctgaaacctaaaccataaaattcttacaaaaatattaaagtagaagaaaacctcaaaaatctagagtgacttgttcacctattgtagttntgtcatagaaatcatgtctagtcatgaaacttgtcacataagatttcttatgttgtgctgaattttattttcttgtttctttgtctaactcaattgttcatgagtgtatgaaatatttttgcctactatttgatttgagtcaaatctttcattgtaaat

SEQ ID NO: 275301 - DNA, 291 bp, Glycine max
aaaagcttcggaaaccataaaagatagttcatagatggcgccccaaaataacaacaaaatgtttgaatatatgacaattatcactctccattatcatatagcattttataggttagaaattggcttaaagacataattatgataaaaaaaaaacctttttccctaatttaaacgaattgatctattagttcaagcggcccgttggctagttgcaagaacgacaccatttagattgacctgtattaacttcatcacctctctagtgaaataacttaaatgggaaaatctttc

SEQ ID NO: 275302 - DNA, 413 bp, Glycine max
agccttttggtcgcgattcagattcttcagctgcattaactagatcactcaagcagtatctgacagaagaacaaattttcaagttttttaactaaaactgataatcttcaattcaactttaagattgtaaagtacattttataaaatgggaaatattatacaggattgaccactatcttgggaaagagcttgtggaaaatctttctgttctccgattctcaaatctcatctttgaaccattatggtcaaggcaatatataagaaatgtacaggtgatattctcagaagattttggcactgaagggcgtggcgggtaacctttattccttaacagctttcacactttctgttcttataatggggattcttatacattttcatatctgtaccatgtgtaggtacttttgaccatt

SEQ ID NO: 275303 - DNA, 405 bp, Glycine max
agctttctaaagttttctggttttctaaaccttgaaaacttgtgctattcatcttttcattctcttctccctccgccaaagagtattcgccaaggacttaccgcctgtattctttttgcgtctctcttctcccttttcagaaagaacaaaggactaaccgcctgaattcttttgtgtctcccttctcccttgtaaaagaattcaaaatgacacagtctaagaattcttttgattcttccctttccctaatacaaaagtgttcaaaggactaaccgcctgagaattcttttgtatccccattcacaaagtatcaaaggtttaacagcctgagatctttgtcttaacacattggagggtacatcctttgtggtacaagtagaaggtacatctacttgggtttgactg

SEQ ID NO: 275304 - DNA, 407 bp, Glycine max
tctagtatttataggccttcttcaacaagtgtttgttgtctctaaacgaataaatttcttcacttgagttgatgttcgaagattgtggccattggagcatttaatgcttgcattaaatgcacgtactccttcatgctagaaaaccactcttgtgagctttcatgtcgatcacttcaacagaaaactgcttgctttaagtcacaacaagtctatcaccaacaatgcaaatcttttgatggtgtttggaaacttctagatcttaggcttcatttatacttcataagattctacaaatcctatgagaatgtctctgcaaaatgaatctcatacatagagcaataaatgaattcttaaatgccataaattaatattgtattaaatcatgtcatgtctcttttatcatctga

SEQ ID NO: 275305 - DNA, 424 bp, Glycine max
agcttaaaggtcaatcaaagaatgagttcaagatgtttatgatagaatcaagaacacttcaagattcaagaggaaagttgatttcaagaatcaagatcaagatccaagactcaagattcaagaatcaagagaaggcttaatccagataagtatgaagaggttttttcaaaaattgagtagcacatggattttgctcaaaacatgtttacgaaagagtttttactctctggtaatccattaccacattattgtaatcgattaccagtcgcagaatggatttgaaaatgttttcaaatgaatatacaacgttccaattgatttcaaaaagctgtaatcgattaccatgttttggtaatcgattattagtgcctttgaacgttgaaatgtaaattcgaatgtgaagagtcacatcctttcacataaa

SEQ ID NO: 275306 - DNA, 493 bp, Glycine max
tccattgtcacttctacctcatttgacactattaaagattattcaagtttgcttgcaaaaggggcacaacacagggagtgtgagaagttggagatgggtgatcagaatattctagaggaaccaagagtttgtatctatttagtatagctagctagagagatgcatgtactccagaagtgtgatggttcgtgaataatgtcatcctagcaatttcaacaatttcagatccagtgttcaatcaataatgtcaccatactttacctttttatttgcttctgctctatccctcttatctccctgctttcatttgctaattaactgactacctttgaatacaattagttagctagcattcttctataataagttgttaatcctattatttgaatagagtatttattaatttttatggacgatgcatgaaatctgattgaccatttctttaatgagaatttttttccaatcccattcttcttaattacaagatttgaaa

SEQ ID NO: 275307 - DNA, 1218 bp, Glycine max
  unsure (1)..(1218): unsure at all n locations
tgtatctccaccctcacactctcctctcatatccatcactctcacgtctncccctccaatcagacgctcccacctccatncccccgcgcggccccctttgataccatcttgaacccgcgaccttttgagcgaccccaggccctaaccttgtgggaaaaaaaaacacacatccctccttatttaaagataaaattcttatgcgcaacccccctttcttccaagaaggaaggaggattaatgggacgcccctcttgtggattgctggtacccccaaagaagcatttggctcgaaccggtaaccccttctttaattcatcacaacaattcttgggaacttggttgaacgggcggataatttatgaaggcctcttggcggaacttcattcttatggtggcgccttgctcccaaggacacccaccttctatcttttcatctccttttaatcccccaaaatggcgataaatccctcccaacggatttacgggcgagcgttttataaccccacttctctccgatggttgggatgcgcaccataccaacacatcatttatcctctacctgcgctacatgtggcccggcgtcttgttaacaaacaggaacaatcgataggcggctctccaccataaacccgacaccctcgacgggccggctcacaaaaatgtctaccactccaaccggtggctacaaccaactcggttttggaagaaactcaaatgcgcgacagggtcggcgacagaaactaatatccacttctcacgctggcccgcgcacacatcgtgccacacacactggcgcactggtggatatctggcttgtcacaacaaacccgcccggcgcccacaccatcctctctgcgggtacacaacacacgtcactccgccgcgcgccattcacatcctctctcacacactaccaccccaacccgccgtcacctcacccttcactttcaaaacccgcgtctcatcgacctcgcgacgtctctcctccccacatccaccatcgctcccctgtctctcaacatatcacccactgacgcgactccaccgntgccacatctctcgccatcatcgtacgctcctcgnctcggcgcacgcatctcatcataaacacatcacactccgctcttacgtcactatcgctcgcactctctctatctcacgatctcctctaccactctgccatctaacactacacactatcacatcccgtccgcccgn

SEQ ID NO: 275308 - DNA, 1017 bp, Glycine max
  unsure (1)..(1017): unsure at all n locations
cccggtggtagttgacatcgatgcacggacacgatagaatacaaactcctgcttcacaaagatttggcagggattaaggtgaatgaagtttttttgtttaaccggatttggcttatgtggcaagctttgctctctactaaggtgctgttctctcattggattcgcccacgggaagctttcaatcacagtggtgcgtgtagatatgccgctagttcaccgtcgatgcctataaggatcatgccgaccattatcattatgactttgagagcagaatgttttgattgaaatatagcgtaacaatcttcgttgttcccttggcctttgcaatcccctccaaggtccgccgctttaccattgtagcgacacgcccttgaggctcaccgtcccaatgtattaatttatttgggagtcgtataattctcactccagtaaagggtttctataatgccttctagtataaggggccttctaaagccctttcgaaagagaaaacctgatgacccacctacccatttttattttacattcttgggaacaataaaacccttatttttatcaatgtggatttttgttgtctttatgaaacgacattgacttttctccaatctctaaaatatggcgctactcttaaatcaggcagtccattttactcgcaatctctggaggataagctctcagatcccaccctaaagatacatttttgggcatgacacttgccatagaaccttttttcatagaaatcctcaaaactctcttaattcattcgccttttcttagcaccaatttctgtgatccacgtcatcgttaccgcgaaaaatacacatgtatgttccaaaattttctttctggaaaaattgattacgccgtttttatacacaaaccatcagtgtttgttataaaggtcgaataaaatggtggatcctttcctcacgcacttcccttgtacagtaanataggcgcctcgttcgcactccgcacacaatctacatctgctcactacacccattgtctcgaacg

SEQ ID NO: 275309 - DNA, 278 bp, Glycine max
agcttcggtattcaatttcgagcgcctcgaaatattacgggactcaatcagacacttgaggaaaaagtccttgctgctcgaatttgcccatagcttcggcatttaatttccagcggttcgatatattacaggactccatcagacacccgagtaaaaacgttattgtcgctcgaatttgctccaacctctaacattcaatttccagcgttccgatattttacaacactcaataggatacccgagcaaaaagttattgtccgctgaatttctcccacacc

SEQ ID NO: 275310 - DNA, 305 bp, Glycine max
ttgagcaacttcaaacaacaataactttgtactcggatgtctgattgatacccgtaatatatccagacgctcgaaattgaataccgaagctctgagcaaattcaaacgccaataagtttttactcggaaggtcgattgagtcccgtgatatatagaaacgctcgaaaatgaaaaccgaatctctgagcaaattctaacgacaataactttgtactcggatgttcgattgagtcccgtaatatatctcaacgctctaaatagaatgttgaagctttgtgctaattcgaacgaccataacttgtttc

SEQ ID NO: 275311 - DNA, 508 bp, Glycine max
agcttattccaaggacagtttattatcatgcacagcctatgtcgcaacgtgcccttttgcgggcgagcgaaggcgaggctcacgggtgcgcttttcatttaaggaggaaaggtgcgcggagtctccaccaacgtttatttgtggaaaacgtcgaaaaaaccgaaggaaactggtcaaaatgaaaattctaagttcgggagttgtatttatgcttgaggaaggtattaacacctcttacgtttgtctcaaaggacaacaacctattttttagaattgtggaagttgtgttaccttaactttatttctttattttttgaggtcgacaaaagcggggcttttcctcctacgtaccctcctttggagaggaaatcagacctacgtagttctttcttatgcgtgaatcaagtgattctttttacttgaaaggtgatcattttaagcgttggaccttaaaaaagatccttttacttgatagaaactgaaatgataactttcaaaatctattttt

SEQ ID NO: 275312 - DNA, 464 bp, Glycine max
tataagaacaaaattgccttaatcatttccaaatatgcatgtgaattaagacccatcaacaagaatcaagccaaggctattgtgcaagcaatcaatggggcaaaacacaccaaatgattataatgatggatggctcaaattctcacaaaggtaaaatcatcactttcaaattgagctttcaaaactatcatgacatgtagagaagaatcaaggatttcaagtcacaaaatgtcaagaacttttattttcaaaacaattacccatttcttgaacatatcctataattcaaagaaaaacatgcaaagtcgtacgtgcacacaaaattgacccaaaatattaaactgaaaatccgacgaaactaacaacattaacaaattaacacaacttacaaattaacaaaaccaacaaaactagcaaaaccaaagaacaactcccccccccccccccccatacttaaacaacac

SEQ ID NO: 275313 - DNA, 723 bp, Glycine max
cctcttgggcatctattataaaacaacttaaggtttggatcccttttggctattaaccccccccttttgaagatgaaaatccctggaatccagaccaggttttttccaagatgatagccacggttaatacagaaccttaaatccccctatcttttggcatgcctgcccaactttatgatttaaatgattctaacccaaggtctaggttctctccccctttggcaacatccaaaaagaaataagccaaacaattccataatctaaaacaggacgccaaacataaaacccaaattaaatccatacattgtcataaccaccaaaggaaatcgagaaatataatagaaagggcgagaatacgatacctgagcaccaaaagccaattcccggggtaaacctaggaccaataatactaatcctataataacaataacttaaaagataatggtgccctggtggggataaaacaggtcggttaaggaaacattttttcacttggggacctggatcctggaataaaccgaggtgcaccttgaatttcctgggatttaaaattggccccaacaaaagtttgaaaaccttaaaaattgtccaaaagccttcaaaaaaaaaaggaatattttcaaccggagtgtgcccttctaaataagcgggtggagccccttttttacccaaaaacccttttgttttttgggggaaccaaaaaaagcccgccccacagccccc

SEQ ID NO: 275314 - DNA, 421 bp, Glycine max
taatgctgatgggcagcctttgaagatgctgaggaagaacatgaccactctagctcagacatggagtgttctttccttttctaacctcattcctacctcccacacatttgatgtcaccttggacagagccaagttgatttatggtattattataaagatggatatgaatttggggtacctcatctcccaccagatctctttgattgcacagcatgatacatccagacttggattccctgccttgatcacaactctatgcaaggccagaggagtctaatcagattctagatccctggagaacttgagccttgacattaacttggcatatattaaaaagaaatgttggaatcttgatgatccaacagtgacatttagagggccaaggaaggccaggggtaagagataagaggtccccactact

SEQ ID NO: 275315 - DNA, 397 bp, Glycine max
agctttctagaatattcaaaatcattttaaaaatgttttacgaagtgtttttggccactggtaattgattacatcctctggtaatcgattacaagagagtaaatctcttgtaaaaatattttagcttaaattcattggccaaacctcttgctgtttcaacttagagattttcttgatgatgtatcttgaatttctttgattcttgtcttgaattaaacttgagaaacacatgatcacatggcatcatcaaaacatcaaagtctttgcttctacaatctccccctttttgatgatgacaatttaattcctaaaatcaagatacaagatagaatatattccagatataacgttcactcattccatactccccctatgttatggaattaatgatctcttg

SEQ ID NO: 275316 - DNA, 525 bp, Glycine max
ttaaaagattggctaaaattttgttaaaacataagcacttatacaatgaaggaaagctggagttgctgcacatgctgtctaacattatgtcaaggaatcagatcgggctgcacaatgcacaaggcaagataaaatgtcaaatgaagaattgaagctgcaggatccacgatgtcggatacaatgtccaggacatcctgcccgaaaatactggacacataaacctgttatatctttaacagattaatgtgcagttagcaacagatttaggcgatctatctttaggaacgaattaaaagataattaaagttcgaattacaaacttgaatagttcgttcagggattaaagattaaagataaaaactaaaagatcaaactttatcttttagatctttaaatgcaaattttcaggagaatgatagatcttatccagcgcaagttgttgcagcccaaatacgcacactgctatataaacatgaaggctgcacgggttttgtaccaagtccgagaatgaagagttattttgtg

SEQ ID NO: 275317 - DNA, 395 bp, Glycine max
  unsure (1)..(395): unsure at all n locations
cagctttataagcgcgggttcgggagacaaaagttatgcgttcgcgatatgcgaagatgatattccgagtactttggatttggtccgaccatgccctcctgatttncggctgggaaattggcgagtggaggaatgccccggcatttacgcaacaagcataatgtaaacctttacggttttaaaagctctatagctgggcctaagctttaaagtttttccttttgttaaagctttgcgtcttttgtttttgaatttataatacaaggatctttcttcatctattcctggtctctacccattctcattcatttgcatgtttacctctttttctgaaacggccgatccgatgacgagtccccccgaagtactaataccttgggacccggctatcgact

SEQ ID NO: 275318 - DNA, 497 bp, Glycine max
  unsure (1)..(497): unsure at all n locations
ttttgattatttttaatgtttccctctcctctctcatgcctctttgtatcgncactcttcctctcactctctatactcaaggtcaacctcttgcaacaagtacaaagaagagccctttagaaggaacacattcaccgtggtgcgaaagtcacacgtgggcgacatcaagcttcttcacaaggtttttctcttattggagcattggggcttgatcaactttgacactgccccaccttcttcccatgcggatgaagagtatatggaggaggagtattgcaaggtttgcttcaaagagggtgcccccagttagtttccattttgaattttgaatttcaaattttgatttgagtgcataatagttggttctattattttgatttatgtagtttgaaacttttgtttttggtttctgaattatgagatctggcttcagatctgcaatacctgtgcttgtgagattgatttttgaatttgtatggctttattaattttttttc

SEQ ID NO: 275319 - DNA, 305 bp, Glycine max
agcttttgtgaaaacttcatgtgctactcaatgttttgaaaaaatttttagtacttatcttgatcgagtcttttcttgattcttgcatcttgatcctgactattcttgattcttgaaactcgaaacttgattcttgaatcttgaaaatcaatttctctcaattcttgaattgctcttgactcaatctttgaaacattctcttgggctttttgtcatcatttttgctatcatcaaaacaccttgaatcaatcttgattcatgactcaatcctgattcaatcatgaagcttgcttctacaaaaagcg

SEQ ID NO: 275320 - DNA, 413 bp, Glycine max
tgcttgtggagcttctatggaggctggatctttgagtttcaatgaagcccttcaatggtgattttactccatggagatgcagcggaagaacaaggagaataagggagaggaggcgccatctactaaggaataagccctggaaaaaagagcttcaccactaagatgaaccttggataaaaagcctggaaaagatgcttcaatggaggaaaaaaaagaaggaaagaaaaaaagagggggagcacgaaattgaaagaagaaaaagggagagaagttgaactttgagttgtgtctcacaagactctcattcatcaaagttacaaccagtgttacacatgcttctattcatagactaagtaactttcttgagaagctttcttaagaaaacttcctttgaaaaagctttttgagaaaac

SEQ ID NO: 275321 - DNA, 298 bp, Glycine max
agcttgaaatgcctcatttttatgaggggagaacaatgtcccagtttatcttggataatcatcaactatgacgagtgcataataactttcaccaaaactcatgactcttgatggaccaaacaaatctatatgttgtaattataaacgttgagttgttgaaacaacgtttttggatttaaacgatgccctaatttggtttcccttttgacctgcctcacataatttatctttttcaaattttagccttggcaagccaacaaccaaatcttttgaaaataatttgtttaaatggtccata

SEQ ID NO: 275322 - DNA, 498 bp, Glycine max
  unsure (1)..(498): unsure at all n locations
cttgcctcactgnacctnccttcataaaccctcccatgagccctctctccaatttttgacccaataaacaacagtttggggtcaatcagaagattctcatcaattgttagcagctcctcttctattgaaccattgttgtgactcactgattttgaatccaatcctctagtagtactgttctcatattccctctcttctcctttccctttgtttctttctctgtaactcatgctgcacccttaaactataaccaagtccctcatttcaatacctaccaagaattataaagaaaaaaaaactcttaaaacaaaaaataaacccccctcccctgaatcttccttccaacataaacaacaactccaaagttaaaggaaaaaaagtaaaaaaccaaaattttcttctaacagctaacaatccccttcatccaaaatcaatcatgccctgccacccccaccttcaaaaacattaaaaacccaaatttttttcatatattgtgct

SEQ ID NO: 275323 - DNA, 385 bp, Glycine max
cagcttgtaacgtggctgggttaacaaagaattcatggtttttcatggatgcaaagcttaggttttaggagaacattcacatattccctattttcttaaactatcatgacttccttgctatatccctcttttatttgtttatcccattaacatcacacaatattctattaggttacaattgcttcaggttcctatctttcattcaatgttttttttttacaatggcattgtgccaagttttgcagttaacattgattgtgtgatgttgttacaatccttgtacatagaaagtttcaagaactccctcaaatttgaaacaaaacatcttttctaggacaatgctcttctacaacctaatacaagatgtgccaagtaatcatttcat

SEQ ID NO: 275324 - DNA, 474 bp, Glycine max
ttgaagagctatgtcagaatttacgaacacattgaacactaaagtgttgagtgacttgctcataatatcacaaaagtgtgcccggatgaaataagagaaatttggatccacattgaagacccaagtaatgttgaaatttggatcatttacattagcatcccccattgcttcagcagtggcatagacccaatttggggcagtctcaggtgtaacagccaccggatacttaatgcttgaaggattcaccgacacatttaggaccgagctgttgacatgaaggtatttcctatcattcacccaagtcctacccaaggtgtcattttgggcagtaatcaaaggaccccccatgttcaagcgataaacagtttcaaaggcaagttcagaaagtccactgaatgttgctggcgggttaacagccaatgcatgatcaaaaaacaactcattcggcattgacacgacttcaattgcattgac

SEQ ID NO: 275325 - DNA, 849 bp, Glycine max
tcctatcctcttcttctatctctcatccccccttccctacttactcacctccccctactcccaccccgccccgcgggttttgctcttaaccgccatcttaatggactgcagctgcaaccggtcactcattaggtgaccctcctattttatggtaaggggaacaatctgatccgactttaaaaccccgacttcactatactcccttccgataaacatttgtacgatgtacccgctcttgagtgcagaaaaacctttgcttttaagcattatgctccaactcatgggaatttttgccaaatggtcaacaaatggaatggagcttcatttttccccatatccacgaaggtcatatgaattacaaacccattgagaactcatctttccttataatgaccctaccttgctcctttaatagtggacatttggtgggggacaaccctgcttcccttctttcatttataacgaactttctccggattggtcacacaactaaaccccaacagcccagccttaatcaccccttaaaatcactcaaaccccaacgccctggcggtaaatcaacttataaaatcattttgccaatggaaaagattttcccagccaaaacaagttcttcgaaaaacacccctcaacaaccaaactaagtttttaccaacgtcctttggaccattgcccaccgatttgagcagacccggcttaaaaatctattctatcctacaactcgccggccaaaaattctccaaactcaaccctaataaatccctaaaaaaacttactgggatacatttccaacacctacttttctctaggcccctgcacacgagctcccagcaatttctcatctaaacc

SEQ ID NO: 275326 - DNA, 805 bp, Glycine max
ttattgtggcattaagtgctactgcctaagtaacgacgaattagtgattgatctttaaagtgttcctttgtctcttgccatgggatttacctgaacctaacccaacttacaagggttcacatatttttatgtacaaattttgacttctagcccaaggaacaaccgttatgggttaatttcgttttaagcttttcaaaaataaggttacctgtaagccactctaaagaggtacatatatacatcccccccactaactcatattaaccttattgtaaaccaacccccctaaaagtgtttttcataatgaaatttccaagattcttgaatactcatgaaatcggtgaactaattccattaacacgtttaaagttttccaagactaagactaatttaattgaagaaaacctcttcgaaagcacattcttcacaagcttatttctttatttatggctaaccattaattcatttttccccactttaaaaaagctaattactttttaccctacaaattttaatataaccgctaatacccaaagataaatgtgactttttttaaactaagaaaccaatcctaactttacgaccaaaaggcccccattttcctaaatattccatcttttccctttttaataaaggttaaaaaaccccccaccaacttctcttacccctaacttatattttgaaacaaatattgaccccaattttaaccggtggttaaacccactcttcctagaacaactatttcttcaggccctgtttatccaattgaactctatcacaattcacccttttatataaacattcc

SEQ ID NO: 275327 - DNA, 894 bp, Glycine max
  unsure (1)..(894): unsure at all n locations
cattccttttcctcctcttcaatcttacctctcaattccttttcatcccccccctccctcctcctcnnnnnnnggggcccgccccgcttgttgacatccttgtcaccccaanntttaaagaggaaccgccgcctggcaacctattgtaataaaactcccaaggaacttaaataattttanaatatnatttttttaacccctgcaaaccgccctcccagcccctcccacatgaaacccctcgccngcccccctccctttcccaacctctcttgatcctatttcccaaatgtttaaaatctcctgcttgccttgctttacaatgtccaattcacacccctattaccgaattaccattcaaaatgggcttattttctgcacacatgggcgttccatttgccttgatgtcaggcctgtccctttaaaggctttaatgacagacaccaggtcatctccatttattagactctaatttcgtcaccctataagtgaattcttttgcattggaatcgaccctccccatacaaaacttccttcttctttatgaacactatacacccttcatttcctcttattccttttaccggaacataaccacccgcttccccgccttctttgctccttttaagttcgagctttaaaaggaggacggctcgccccaacgccaagctgccccttttaaatcacctgcatccccaccccacatgctggagtgctatccctcctctctataaactggaaaccttcagctaaactgctgccccttgaatgccacatgctctcactaactcttttcccccttccacaatatccctcccctttatcaacaattccgaaccatattacttttccctaacataaagaacatctcttatcctatactcatacccctctatc

SEQ ID NO: 275328 - DNA, 408 bp, Glycine max
ttttggagtagaaacatgggaccaactcattttatttcaaaaaggaagtcatatctagtcaaggtctgagagaccatacaagtttcctaacgatttctaattatgtgggccattaagtctatcatatgctggcaatagccgagaagcccatgaatctcttcgggggcggagtaggtgtctgccatcgccttggccttggctaacaatcggggaagttcttgactcccgttcaaggtaagagcaaaccgatccatccacatggttgcctcttggtgtaaagagtcgatcacccttcctctagcctctttttccgcgtatacttgggcatactcatccgcgattctatgctcgtgggccgtggctagacctaactcttcttggtacttggcgatgaaagctaacatgttg

SEQ ID NO: 275329 - DNA, 422 bp, Glycine max
agcttaaaggagtactcaaagctggtgtatttacccccaaggcctatactctaaagagtctgtcagggcctttctcttctaatctaggaccaatccaaaaaacattttaacacatagactctatctatgaactatacaaaatacacaaatcttctattgttctcaaaataattttaactcatcgtgcctcaaagtgatcaactttgttgggttaccatagtggatcccatcacaatactcgttgcacattaactcgtcgcccttaaagggtcttacaatccattgattgtatgattcatagctcacaactcaatgcccacaacatctcaatacacatgtgatctcacaatttaacacatagtcaacttgtcacttacacacaattcattacacttttataaatcctaatacctcatggtatc

SEQ ID NO: 275330 - DNA, 467 bp, Glycine max
  unsure (1)..(467): unsure at all n locations
ttgatggtgtcgagaagaaatcacatgtttgtcatcatcaaaaaaggagagaatgtgaatgtatgtatacatgattttgacgatgccaaaagaagaatcaaacaaggctcattttgcttcaagattaatacaagatcgtttcaataaacaaagccttgattcaagatttcttcaagatcaagccttgcctcaaaatgaaaagatttcaagtcatccaaggcacatgtaatcgattaccaaggcacatgaaagtgtgtaatcgattacacatcatatgtaaggggccatacctatactggagtgatcgattatacangagtgatcgattacacattatgtcctaaggcaatgctctcactagaatctacccaacatagagggtgtctacattctttaccatacaatggcctctaaggcgccatacctatactggagtgaaaactattgtgtatgtaaactctttcagg

SEQ ID NO: 275331 - DNA, 994 bp, Glycine max
  unsure (1)..(994): unsure at all n locations
gcccggagctcccaccatgctcaccccccccacccccccgtcctccctccaaccaaccanccctcccccgccccgcgcttgtaacatctaaaccccggatcagaagacgccgcagccagccggaaagacgatgtatatgagacgaagaagctatgttgcgagtatatcacagagacacaccaacacgccgatgacgagacgcataacaacgctccactgaaaacgtcaagacctctagtaaggaacccaacacaaatccaagaggaagtccatcataaaccgggacaatccctcggaccaacgggtcaaggaagcagaaaccagcgcacgtaacgaaggatgggcccttaaagccacattcatcctcaaagcagagaaagagcaaaattacgaaacgatggcaacgcacacgacacagggctantcgggaagaaaccggcggcaaaggcccaaacgcactatcaaccaactcaccagaacagccccgaaaccccaaggagactaagagccctgctgagaaaaaccacagacaaaccacgcgcgcctcgcagcctgcaaacccaacgctagtcgaaacttctgggaacgacgaaacctcaataggcccctaagaagcgccatcgggcacgagaagctcgcccccctctccaaaatccacagaatcgacaaaagcccctaggggtgccccaaacctaaccgctcgggaaaacccgaggctctacgccccgccaccaaggaacaccaccggagcactcacagggccacaggggggcgcaactccatccttgcccaaaccccagccaatggtcaaacgcctctcggcggataggcgcacgaacacaaacctcactcccggttctaacgagggaaccgctatctaacaacaagggacctcacacccaccgacagtacgaagaaccccctccccataccgagaaacgctgcacatcacaggacctcccgctccaaacaacacgcaacacagaaagcgccc

SEQ ID NO: 275332 - DNA, 910 bp, Glycine max
  unsure (1)..(910): unsure at all n locations
cacacacaaccgcgcactgtacgaacacactacgacntttgctcttatcaacacacaacgcgcataatctcacttcctcnncnnncgcccggggnttagatgcatcctagcaccgacacgacagaaanaanactcaagcacngaatgaacgaacccggacgaaccgcatgaacactttttgttcgagtgacctgctcataaggggacaaaaatgaaccccgatgaagctacacgcatacggaacccctttgatggacctttgcacgcgggacacccgcccgataatactatcaatcatcatggctctccaagcgacaaacacccgggggaagacaaacacaagaataaaaatcgccaataacgaaaatgcacattggaaagaataaccttcttagataacccatcaaagcataaaaagtatgataataatcagccgggggcaacaccaagaataaatcagggccaaaattcaaagatcaccgctgaacagaccagaaaaaatatacatgaacaaaggagacataaacttgcgaatattgcacgatatcagaaatgaaacattaatattcggccctttcaccaaataacccaaggcgaattattgacgagcaacccgataatttatccagaaaaaaaagggacccgtgtccgaaacgggctcaatcgtcaactctgggccctatgacaaactaaggttaaacacagggaggcgggaactatcaaaaatctggcgaaccacgaaaaaaacgtcactcaaaattgggggtaatccgtaaagaaagccaacagccctcggggccccaagtctgtcttaactgaaaagaaacaattctactggacaaccgccccggaccgagaaaaggtccgaaggcacctcgaaacttttcccctcacccgcaaaatcacgccg

SEQ ID NO: 275333 - DNA, 417 bp, Glycine max
agctttcttgagaaaacttccttgagaagcttctttgagaaaacttccttgagaagctagagcttagctacacacacccatctaaaaactaagctcacctccttgaaaagcttccttgtgaagctagagcttagctacacacacccctctaataactaagctcacctccttgagaagagaagctagagcttagctacacacccctataatagctaagctcaccccatgacaaaatacatgaaaatacaaaaaaaaagttcctaaaacaaagactactcaaaatgccctaaaatacaaggctaaaaccctatactactagaatggccaaaatacaaggcccaaaagaaaggaaaaaactattctaatgttacaaagaagaggggatccaaccttgacccatgggctaaaaatataccc

SEQ ID NO: 275334 - DNA, 473 bp, Glycine max
tctaaactttatacaagaatgaagctttgataccacttgtttgacaagtggcctcagatatcttaagaagggggattgaatttatatattacaaactatttccccaattaaaattctatttcactttctattcaagttacaaattcccttaacaatgaacttcttaaatattgattcaaatagaacaatctgaatataaatataaaacaataataaataaaagagtttaaaggaagagaaagtgcaaactcggatttatactggttcggccacacccttgtgcctacgtccagtccccaagcaacccgcttgagagttccactatcttgtaaaatccttttacaagttctgaacacataaggacaatccttcctttgtgttcaaaattcttttacaacaagagacccttcgtctcttaatcccttaacaattatgaagaacggaggaatgaatctctcttgaagagaaagatt

SEQ ID NO: 275335 - DNA, 470 bp, Glycine max
  unsure (1)..(470): unsure at all n locations
agcttccacaacatccaagcaattcaacatcttacatcatgaactatcaaaaaccaagaaaacagggcagaggcagaaaactctgcccaaaacacaaccaataccacaactttccttactcaaataccccagtaacattctcttcgttccaattcgttcaccgttggatcgactcaaaaattttactggaggtccctantgcataagtatacattttgaccgttgggatctgctagaaaatgtcctgaacccaatatgtacaacccttttcacaaccagccatgcataagcattttctgcacaagcacaaaattatgctgcacattttaacagcaaaattctgcataatagtgcagattttcgaaatcactcttgccttcattcaatttttcccaaattagatcctacaagtcctaaatcatgtataaatcatatctaaaccaaagacaagctttaaaccatagcaattc

SEQ ID NO: 275336 - DNA, 217 bp, Glycine max
gggtaccactactggaaaacccgcatgccaatcatttttgaggcgatagatttaaatattttggaagccataaaacaaagaccctatgtttcctctataatagccggaagtgccacaatttaaaaacctagaacagattggactgaggaaaaaagaaaattagttccatataatttaaaggcccaaaatattattacatctgccttatgaatagatg

SEQ ID NO: 275337 - DNA, 841 bp, Glycine max
  unsure (1)..(841): unsure at all n locations
gtgagatattaaaatggtnagaaattattataactggagcccgacgtgacgctgccttaaccccaagtgagccttccaccgctgcgacaaactcctggtttctggagaaatttccaacggggtttaattttgaaagcaaggatgggataatcttaggggacatattttcatggggcactgttttaaaaatagaaaataccgcaacttctcttgataattaagaatggttaattatattgttgactatagatggattggatttttgggcggattaatttatctcacaaagcaatcattatttggaaaatcgggaaggattattgagagatattccaattggttcataaggttttcattcaaagtgggatcgaggtagtggggtgaattaattgatatcgcaaatctgtcagtattgaataactgacaaatggtattttttaaatctaaaaatgggttataactgtgtttgaaaacgtcgggtgttttgtagtagagggaattaaatcagggttcatgatgtatgtatatttatataacgaatgtgcgctgtgtcatatttctaaggggattatgtcatatctccatgaagactggcgaaatgggtttatcactatcgtgggagagtgaggaatttgaataaaaggaaggatttttttcttaaatgtaattggaaactcggtggtgaaggggggactacctctgtggtgagagtgcatctatatcatcctccccaggaatatatgatatgaactcggtgtatactgaacatgtgcacttattttcacgtacggtagatatcattatcnagggcttggtttcgtatctatatccgtgatatccc

SEQ ID NO: 275338 - DNA, 159 bp, Glycine max
tgaaattgaacaacggaagctctcgagaaattcaaatggttattacttatcacacgtcagtccgattccggcggataatatatcgagaagcctctaattgaacaacgaatgctttcctgaaattctaatggtcataacttatcacacggaagcccgatt

SEQ ID NO: 275339 - DNA, 341 bp, Glycine max
agcttgaatggcttactgaggatggagatgtgctttgtaacgaagcaagtggagttgaatatttgcattggaaagtacaatgataaggtgctttgtgatgttgttcctatggaggccaaccacttactcttggggagaccatggcaatttgataagagagcttatcatgatggtttcaccaacaagatctcttttacgtattaaggcaaaaagatagtgctccaaccattgaatcctcaataaatgtgtgaggatcaaagaaaaatgagagagaaaattctttctgaaaagagagaaaaagaaaaagagagcttaccactttaaagttcaaaaagtgagga

SEQ ID NO: 275340 - DNA, 469 bp, Glycine max
tcgcggcaagccaatggttggaggacaaagctggacggtgaatttgatttgtgggattcataatcatgaattggccaagtcattatttggacatccatatgccggacgattgagtaaagctgaaaagacacttattgctgatatgacgaagttaatggtcaaaccaagaaacattctgctgactctgaagaagcacaatgctaatagttgttcgaccatcaaacaaatatacaatgcaaaaagtgcatacctttcttccataagaggaagtgatactgaaatgcaacacctaatgaagcttttgaacgaaatcaggatattcattggcacagattaaaggatgaagacgtggttcatgatttttttgggtggccccctgatgcactgaagttagcccacacatgttatttggaggttttgattgacagtactacaaaaaaaacggtacagactcccctggttgatttgg

SEQ ID NO: 275341 - DNA, 344 bp, Glycine max
agcttgtcgggttcaaatttaattaatcgcttgggacatccctatggactgagcgaaaaggctcgggtcattaaagactacccatcttttaaggcacaaaacaaggattaaaacagcgaaaccctaatcccacattctttaaaagattgcgacgagaaaattatagaggacaggaatcccttgcgggggggaaccacagaaaacaaaagcatgtggtgacttctttaattgccccaaattttaagcgtagtatcgcttgacaacgacggagttcaccgctgaaagtagttcctcgtcatccatgttggcgagcacaagggtccctccggagaaagcccttttta

SEQ ID NO: 275342 - DNA, 536 bp, Glycine max
tccacaacatccaagaaaaacaacattcaaacagcacaagctatcacagccaagcaaaacagagcaaaggcagaaaactctgctcaacacaccaaccaaaatcacagcttttctcacttaaagaccccagtaacaattccttcgatccaattcgttaaccgttggatcgactccaaaattttactggaagtctatagtacataagcctacattgtgaccgttgggatctactagtaaacatccagaactcattctgcactactctttccacagccaaccacacacaagcacttttctgcacaagccaaaattctgctgcacctattttgacagcaaaattctgcataagtgcagctttcgaaaatcacactttctctcatccaaacttgcccaaatcaattcctacaagtctcaaatcatgtatcaatcatgtctaacccaaaaatcaagcttcaaaacacagcaacacagaatctaggtggtccaaaccccctcattcaatgggttttctaaggttgaaaagtgaaatttaaaat

SEQ ID NO: 275343 - DNA, 314 bp, Glycine max
agcttcctattcacttcttccaatgaatcagctacaaggaactttctcagttcttccacggcagcccgagccttacccacatgagcaatcatgtcatgacttgtttgcttgagggctataaccttcatggttgcatcaaacaagctttggatatcattggcaaagatttcctgggctttcttccaaaaagagccacccgatttaaatgatcggaggatctccaagatatcccgctcaactgattaccataacacgacacatagttgatagtcaagcttctcccattcaggtcttttatcaactgaaacagaatc

SEQ ID NO: 275344 - DNA, 441 bp, Glycine max
tggttttgggcaatagcaccccacctgacgtccccaaggtcttctgacccccgcgacatatctccaggtaccactctgtggtcaacaataaaagcaagaaggttcacccttcaacacttcctcatctcaagcttgtaggattatggggtacccatcacatgtggtactaagtggcggtcgggcgatggtgcacaacaagttttccacatccacaatgcgcgcataaacccaccatcccctgttgcccacctccatctgagctcacgtattcccacgtagcccatatcctcgtttctctcaacaccgggtccccatcaatcctcccaagcttccacaacatccaatcaaaacaacattcaaacagcacaagctatcacagcccagcaaaacaggacaaaggcagaaaactctgctcaacacaccaaccaagatcacagcttt

SEQ ID NO: 275345 - DNA, 395 bp, Glycine max
acttccagctggaacttatataccctcctgggcctggcctggtacgtataatttttcaaaaaattgctgcccgggtttttggttgcatatcctggttttaactggcatggtcctttcttctgtaactgcaaaaaaatatttacttgttgagtggcttctaactttaataatctttaacaatttttaattaaagaatgatgcccattgctgattgcatgaacaaatgaattggaatccttccaatcctttgaataacttcttatgctatcatgcatgaggaatatattgcaattttattcatatgcccgcatatataaattcttgaccccatcaaatatgttattaacttattatctattactatgaagctcttggttgaatgttacatttcatgt

SEQ ID NO: 275346 - DNA, 540 bp, Glycine max
tcagatgcaagctcaaaggaaaattataatcgtttagaaacaacaaacacttgaaaatgaaaacctataaatactagatgctttgaagaaatgagtaacgaacctacacgctatcattcaaattctttatgtagaaaactctttgtatattcttataaagtttgaaaagctctcaaaacatcttgaatactctaagacaaaaaactaaatgcttagatttcacatttgtttgtaagatgattaagatttaatcagttagcaaatcaaacaacatatcttcttatttgtatagaaccaacagtggcttggtaggacaaagaatattcggttgttaaagcttggcgataaactttgttgtgagagctaaaagtaacagtgacaaatacttgtaacttttgtgaaattagtgaaacttgattgctaaccaaaaactgaacttagtctgaatggtagagacaaaccaatataaatatgggtcttactttctttttaggtaatctttggcttaaactgacatagtatttgaattttgaatcttgt

SEQ ID NO: 275347 - DNA, 1269 bp, Glycine max
  unsure (1)..(1269): unsure at all n locations
ttacgtcgacccaactctactctgctcgcgttcantncttcatcaccgcgtccgaccatagaactcccacntgcactcccacacaacacagtcgccacctataaccccccaacgccccgcacgggcntgtttgaacacccttggcacaacccgcgatcctctaaaccaacccggccggcaggcaagcctctcccacctgcggagagcgaaatcaacaatcttttttaatacgcaacaaccgcagccctcaacagcaacctctcgcacccactgtcgcctgccacccgagcgccactgcaccctccacatataccgtctcgcccaacacacctcgcaaggtggactcgcgacacgcccatcaatctcattttcaagaaacacccgcagctcagtgcccgagaacggacgacacactgtgagccaaactctctggaacacataacaaccactggcaatgcgatcccaagacactaagcccatcctctgaccgccacaactgtgcacacttccgccacaaccctcactgcaaacacggaatccactacattgtccacttgtgcggcgcgagatccgcctacactctctggggatgcggccaaccttcgcctttcacccaaccactccttatcaaaacgacaagcgtagagggaatgcaacacctcaacttcgcctgggccccatcacctcgggctacaaaacaccgccagggcaacacggtctgtgccgccatctacccactgcacccaacacagactgatgtgtcgctcgcacgaacccgacaacacaacttcctcgcatacaagcactgcggactcacacctgcccgccaacgcccgccaaaccgccacggcaccaccgacaccacattccgcagctagggaaggcgctcccctctaaaattacccaatcttaacccgaccgggcttaaaaaccaccctcctacaaccaacgactctccacccaccccaactacactgaacacagataagtcacacaaaaatcgcaccctagtgacatatcttacaaagctcccacacctacaccacgatcagcacagagcgatgaagagacccgcacacacctcacaaccgtcgcagcgtaacacacgaagaaacgaccccgtaaccacacacccaacaacgtgccgccactctcaactaccatcacacgcctgcacactctgatacactgcggtgtaacgatcaacactatacgaacatataatcgtgctactacactatcctcactactactacagtcggctcaccg

SEQ ID NO: 275348 - DNA, 408 bp, Glycine max
ttacagcagattttagtaatgacccactaacctagaattaatataacttaatgccattaacctaaggaattaaaaaaaaacttaatggctgaatgtaactgaaattgtggcaaccaaaagtcacccccaacagccaacttcagccaccatttggtctcccaaaaagctgatgcctaagttgccaattggacccttattacaacttgaactaaacctaactaaagcccttttaattgattaacccaaaacatatttttggtcagccaactttacaaggattgagccattatttagacaaattaaacactctaaaaattgagacaaagtggtgtcatttagtcctcctccatttgggccatgatacaactcacaaccttggactttttcttggcttttcttgctctaacc

SEQ ID NO: 275349 - DNA, 205 bp, Glycine max
agcttgtattttaaacctcgatcggacctgttttctgttctatgtttaatgtgatttttttcgatcaatatgggtgaataatattatccttttcggcaagggctaatgctctgctggcctcatgaatgggaacatgccagtttcggccccaaccaaaagaatgttgagaatccaccaaaaaacctcaccgcccctcattggcaat

SEQ ID NO: 275350 - DNA, 423 bp, Glycine max
ttgatttcctttgttccggaaacctttcttttctcatgtgcacccaaacccaatctccgggttcgaagacaaccttctttctccctttgttggcttgtttaacatagcttttatttttcctctcaatttgatctttgactctctcatgaaacttcttcacatagtccgcctttgcttgaccttcttaatgcttaaaaacagaaacattatgcataagcaaaagatcaagaggagttagtgggttaaaaccataaacaacttcaaaaggagaacaattagtggtgctatgaacagctctattgtaagaaaattcaacatggggtaaacaagcttcccaagtttttaagttcttccttaaaactgttctaaacaaagttcccaaagtcctattaacaacttccggttgcccattcggtttgtggg

SEQ ID NO: 275351 - DNA, 299 bp, Glycine max
gcttctacttaagcggcagggcgggcttccctcacttttttgtgatccacgcgagatttgaccaatgctctttcctaccgcgatgctttctttcatgccccccccgacgggcttataacctaaaccatacttcccacgatttccttgggcatctatcacgctagatatgcccgcgctgactttgcctaaaacccctccgcggtcataaccgctccccaacataaatcgggccatcattactgctgcatccgacaaaacaagctgcccaaaaaacgagtccaccgcagaaatgctgacca

SEQ ID NO: 275352 - DNA, 435 bp, Glycine max
ttacagcagattttagtaatgacccactaacctagaattaatataacttaatgccattaacctagggaattaaaaaaaaacttaatggctgagtgtaactgaaattgtggcaaccaaaagtcacccccaacagccaataagtcagccaccatttggtctcccaaaaggctgatgcctaggttgccaattgggcccttattacaacttgaactaaacctaactaaagcccttttagttgattaacccaaaacatatttttggtcagccaactttagagggattgggccattatttagacaaactaaacactctaaaattgaaacaaagtggtgtcatttagtcctcctccatttgggccatgatacaactcacaaccttggacttttctccttgaaacttgggcttgtatttcaataatatggacaagacttgttg

SEQ ID NO: 275353 - DNA, 340 bp, Glycine max
agctttacattaaattttagtaatggcccactattctagaattaaaagaacttaatgccattaacctacgaaattaaagaacttaatggctgagtgtaactgaaattgtggcaaccaaaagtcacccccaacagccatcaagtcagcccccatttggtcttccaaaaggctgatgcctaagttgccaattgggcccttattacaacttcaactaaacctaactaaagcccttttagttgattaacccaaaacatattttttggtcgccaactttaaaaggattgggccattatttagacaaactaaacactttaaaattgagacaaagtggtgccattta

SEQ ID NO: 275354 - DNA, 445 bp, Glycine max
  unsure (1)..(445): unsure at all n locations
acggttttgcaacctattaaatgcggaagcacttcatcggaaattgttgactaaagccaggacagcaaaagttgatcctgttgttcccaagcaacaaactccgcgagacattgccgagatcacaatctgctaaggttttgaacctcagcggaatcattggatgcacgaggaagtgatgaagatgatgatgacctataagcactggttctacttgctgacaccaaagcaggtagttcgagttcgctaatttctttgaaattgaatgcgagaaaaaagtcgcagattgcgataacggagtcgnaaancgtctgaagtggtgtcacagccatcggaaacaacgtttaagtcaccacaaacagtgaaatcggcagtggtttggggaggaggaggattaaaagaagtaccttgttgtttgcgaaaccattaaccattcttaggataaaca

SEQ ID NO: 275355 - DNA, 468 bp, Glycine max
agctctgcaactttttatccctagcacaattgttttgattcaaactattcctgcactagacgagtccaaccaatcccaaacaaggtcatattccatcgaattttttggtcatttaacgcatgtattgatgcgttttcattttataaacccattgtgcaaatctatggaacatggctatatggaagatacaaagggatgttgttaattgcaattgcacaagatggtgctaacaacatatttccattgtcatttgtcattgtcgagggtgagacaacagatgggtggcacatttttttgaaaaacttgagaacacatgtgacacccccacatggtatatgcttaatctctgaccgacatgagtcaatccaaaatgcctacagatgacctgacagggggtggacagcagacacctcgtcacatgtgttgtgtattcggcacctatgcccaaactacaaaaaaaaaaccatt

SEQ ID NO: 275356 - DNA, 686 bp, Glycine max
tttctaacaaagaaaaagatattgttttaaaattgacttgtcaatttattgcaaacttcagatatagaatttgcaatctcaacagctctgtctcaagttctgcttcttctgaccccaaagacagccttcaatacattaagaattatagaaacagctacttttacttgctcaaactgacgcctctgaatggaaataaagactgaaaaagacaaaataagtatgaaacaaaacttcaagcaatgtggcttcaaatcattgacggacataaagtgagacacatctgctcagcccaaactagcatttaggttttgcatttcatcaacaaagataaccttaaattttaacataatagctcaagtggtaagatagattcttcttcattggtctccatgctataaaaaatgagcctaataaaatatgaaatgcaacttgtagctaacaagaataggtgatttaatagcaagcttgaaactaagaacctttaagagtatttattttatctaaatttaattggtgaataaaaataaaagttcaagtcttaaaatatggaatcatttaagtcttcactggcataaaaaaattggatttcatcaatgctttcttcatcactcaaaatccaaaaattacttcaacatatatcagaaaaattaattttccccaaaagaaaagcatttaattcttttttg

SEQ ID NO: 275357 - DNA, 303 bp, Glycine max
agctttctcttttgtgtaactatctcatcctctttttcaagtgtacaatgaagcttggcagattcaggtgcaggtgctgctactggtggaggcacttgaatttggttgccagacctcaaggtgaaggcactcacatttttcggatcctgcacagtttgtgaagacaatttgtcagaattttgggactgagcttggttcatctgagtagccatctgccccatttgatttgttagactctgaatggaagctcttgtctcttgttgcaattgcatattctggatggtcatttgcctcactaactct

SEQ ID NO: 275358 - DNA, 461 bp, Glycine max
tggtggattatgggggttccatcatatggggtactaagtggcgatcgggcgatggcgcaaatcaactctttcactttcacaaatcaaacatgaacccaccatccccagttgcccaccttcaactgagctcacgtactcccacgtagcccttatcctcgttcctctcagcaccgggtccccatcaacccctacaagcttccacaatatccaagaaattcaatttccaaacatcatgaactaccctaaaccaagaaaacagggcagaggcagaaaactctgcccaaaacatattcacatattacagctttccttactcaaatactccagtaacattctcttcattccgatttgttaaccgttggatcgacttgaaaaatttactggaggttcctaggacataaatctacattttgaccgttgggatctgctagaaaaatccagaacccaatatgtactacctt

SEQ ID NO: 275359 - DNA, 929 bp, Glycine max
  unsure (1)..(929): unsure at all n locations
atctacatgactatgctcatatcttctcattctcaccctctatctcccgtccctctctactttcncaaacccctcgccccggccgttgtgactcatgtacaccgcgatctctaaaacgacccccagcatgcaacctgcccctatttcgaacaacaattttggtttttcaatataccctttaaggattgaaaattattattatttcaacttttacaaacccaaaaaatttccttaagggtggaaactttgagactccaatgctttaaatttcaaactcgaaggtggggtctaaactctcaacggtgattgggacctttttaagtacttcccaattctccacgtactatgtaatacccctataaaatgaaaaaaattcagaaaccattaacaagtacgtcaatatttcttttttcccatgatataaaattattaaccaaatcatgtgaaacccaccaaattatacaaaaaagaaacatatggacattgccatatttggaaaagcctaaatgccaataatactacacgcccgcttggcaaaatatactcccaattagaagcctaaaataattaacgcccttcccacactgcaaagaatcatccaatggtgaaacgggaaaaacttattattatacgagaaaccaccccaaaaaagtaaccctgataagaaaggggcccctctaataataatggggaaactgtgtttgcaacccctgccaaataatggaactcatacccctcttaattaaccctaatcaggctgggaaagaaaacaccactccaaaaggaaggtacacaaatccacgctcttgatcgcttcacacgcctaacacaaaaactgttgtttggttcgggcaaaaccaacctttgaaattaccggctaccaaaaatccgcattccataacacaaccctattaaaaaaaccaacaacc

SEQ ID NO: 275360 - DNA, 713 bp, Glycine max
actataaatactcagctgttaagaattgatgaaaaatcaagaacatgcttgttctcatatcgatcgcgtgcatgatattcacttccacaggtttgaagtacaggagagctttaaccctataacgcaacgtggcggacaaaagtggacagttaacttgaatggtcatcatttgtaatgcggaaggtattctgcgctttactatccatgttcacacattattgcagcttgtggttacgtgaacatgaacttctaccaatatatagatgttgtttatacaaatgagtaaatcttaaaagcttactccgcacaatgatggcctcttgggaatgaagcgactattcctccttccgatgacacatgaacacttatttctgacccaactacaatttgtgcgaaaagttcgccaaaatccacaagaataaggaatgaaatggattgggttcaaccatctgagcaccgacaaaaatgtagtagatgtggagcccaaggcataacaggcgtcgctgtccatgcaaattgagccggaaatttgtcaaaacattgattatgtatgttacccgagggattggatttgtttaaatctttcaatgtattgaatttcttaggttcatgaattccgtatttaataccatttttgttaaaatacgtgcttaccaaacttttatataaaattcttcttacatttttacctcccaaacttattttttaataaa

SEQ ID NO: 275361 - DNA, 398 bp, Glycine max
agctttaagcaaattcaaatgacaataacttttgactcggatgtccgattgagtcatttaataattcttgacgctcgaaattgaatacagaagctctcacccaatttaaatgacaataactttttactcagaagtctgattgtgtcccgtaatatatctagatgctcaaaattgaaaacagaagctctgagccaattccaacgacaataacttttgactccgatatccgattgagtcatttaataatttgagacgctcaaaattgaatacacaagctctaagcagattcgaatgacaataacttttgactcgaatgtcccattgagtcattttataatttgagacgctcaaaattgaatgcggagctctcaccccatttaaatggacataacttttta

SEQ ID NO: 275362 - DNA, 421 bp, Glycine max
tcagaccaaagcaactcaaaatctaagtatctaaaaccccttaatttagtggattttcaaggtttgagaagtgaaaatgagaatggggtaaatttggagcaaactctcacctcacacaagtgtataaccttaatctaaacttgctcaaactggttttacgcctaaaattccaccaaatcaaaatttgactcctcaacacccaaattttaccctagaaatggctcttgccttcactttggtcttttgtttttctcctttgcacatcccaagctttcccacagtcctaaatgacatttcaaactaggattaactcactttaacctccaatttctactgaatccaaatttaaccttttaaaccctcaaagcatcacactttttcacttataacactacattctcactttctaaccctaagtaac

SEQ ID NO: 275363 - DNA, 374 bp, Glycine max
gcttttagcctcagatgatgcagctgattttgtatctacctcatgcactcctctaatgactatggcatcatttctggcgctaaactgctgagagttggaagccatcttttcaattaaatttctagcttcaacacgagtcatgtctccaagggctccaccactggcagcatctatgatacttctctgcatattactgagtccttcataaaaatattggaaaaaaagctgctctgaaatctgatggcgagggcaactggcgcataattttttaaatcgctcccaatactcatacaggctcttttcactgagttgtctaatacctgagatatcctttctgatggctgtggtccctggaagcaaggaaaaatttttct

SEQ ID NO: 275364 - DNA, 418 bp, Glycine max
ttcacaaaacacaaaggttctttctaatataactcacaaaagtgtagatttgaaactaaagcatcatatagagctttgcaaaacggtaagaatatgaaagttcgagagcttaaagtatcactcaataatttaatttgtataaacacttggttcttttcaaattagttcttgataatgaatgtcgaatcgttcaaaaacaaataaaactaggaagttctgtaacatgggattaacctacgtcgaacccacaagtatgattcaatatggttcctacattcattcacttataaacaaaaggggggaatttcatctaacaagttgtaagcgattctataagaatgtgaaaatacaaaaacagagttcaaaaaattgaaaagaacaagaaccaaatacaatttgacatttaaaagcttaatcc

SEQ ID NO: 275365 - DNA, 323 bp, Glycine max
agcttgtggataatcatatccaaatgtttcctgatatcatcatgatgattcaccagccatggatgacctatgcataaaatcaggctatcttcaacatacttcatgaaaattaaagtaagaatattgataccatatacaccaccatgggaaatgggaagacatacttaatgcctgagctgccggaaatcttttactgtaattcttattcaacaacctctgtacaaaatctttatcatcaactgataaagaatgccgacgagcctcattaaaactaagatctgtcttgagtacatcccgaaatataccatattctggccgggccc

SEQ ID NO: 275366 - DNA, 413 bp, Glycine max
tcctagcggtttctaattatatggacctataaatctatcatatgctgacaatagacgagaagttcgtggatctcctcgggggggagtaggtgtccgccatcgctttggccttggctagctcttcatcaatggattcctttgcatcttggaagatgaatggcaatgtaatggagaaaggaagagagagaggagacgccacttcaaggagaagatgagtctagaagaagctcaccaccataggaggccatggataagagcttggaggaagaaagagatgaatgaagggagaaggagaaaacagcccgaaattttgtgctctaaatgagctctgcaatctgagagttaatactcacaagatccaagtttaaaacaatgcccacctttgacctctaattatacccctactggccccc

SEQ ID NO: 275367 - DNA, 381 bp, Glycine max
agcttatgcttttacaaaaaggttcatcaagttttgttgaaatatggaagtaaccgtcttgcaaaattggggcaaaagatgaatcgagtcatatcactgcttcgactactgccaaacatatttaggattgttgatgtccttgttacttccagtttcaccttgacaaagatgtcatggaccatgttgaaaatctaaattgattcaaccccatatcctgcgtaaaaattcgcaatacttcaactatgcatcattcgcatacatccatacttttcattggttgcattgctcattacattctttccttgaaaaaaaaacaagagaacttactcattgctataaaaaaaaaacacatgctttacggtgcccttaccgaacttgtgc

SEQ ID NO: 275368 - DNA, 806 bp, Glycine max
ttatcccctgataccttctattaggacatattaatcttaacttcttgggcctttctgcgaggcaacatttgaaagttttttacctgggactttctttaagcaaaatggctataccttctccataattcaacccatggaatttaaacagcctatgccctttttcctactacttctttgcccagacattacccaaaaagtcccccttatccatcaaggcacttcggtacctaaaatatttaccacgtacttgccaaggtgtattttgtacttacatcacacacattcttcttgggctgaaattaacatacatgcattctcaaaacatttttgggtacccaaaattggcacatgtgcacattcttggtaatttctaataccctatatatacacaaaacttattgatgaatctgactatcttcacaaaaaggtgctacactttcattcctttttttaaagtttttgctaccctaaagcccgcatgcaaattcaagcatatttttcttttgcggactaaaatttgtatttcaattaaaaagggatatttttttgaataatgttttctttccataccatgcaacatatttatatttattttttttgccaaggcattttgactaccaaaaaattttatttcctaccttcaagattttgcttttatacccaaatgtaaattgccaaagttatttgctcctttttttaacctaacatttttacaagcacaatccttacctctaggctaggaaaatattgaacgtggccatacttattgtggccaaaaggtactttccccatatgccctctttttg

SEQ ID NO: 275369 - DNA, 862 bp, Glycine max
acacctcctatcccccccccgccccgacttttcccacctacaccctcccccccgcggccctgtgctttaaccgcacataaacactgagcagcagctctttgacctgacaacatcaactctttttaaaacagctatgtgctcccgacaggtccctttctttcccttccgaaaatgagctcactattgctaccccaaagaacgccccgaaaaatggttcggccaaaatccttcttgcgaggcctcttggtttcttgttcaagggcccctaccgaaattggcatctcttcccgtaaaccggcaaactcccttcgaaagtgtgtaaaaaccaactgaacttatccctggggaattttgcctttcctaactagcctatgagagcctggacttccctctcctcttccggtggcatcaaaaatctctttgctgaacaattttaacttgggtagccaaactaaaacgccgatgcgaaccctcagccctttctgtgacccaccaaagaatgccaataccaaatgcctctaaactcttgaacatttcctaaacggggtccccacgccctaaggaatccttggatagacccggaaatttggggcgccgagattccctcaaagggaaagaggacaagcctttcttccggcggagctccccctaatgggggaccccaatttgttttataccgaacgggggaatcgcaaattaaaacaacccctcgtccccaaccaaagggaagggttggggcaactccccccagaagggaaagaaaccctttctttcctttctttccactcggggggaaccacccgaaaggtttaaactccctaaaccgggcgcacaaagctggaggccaaatcatatttccccg

SEQ ID NO: 275370 - DNA, 438 bp, Glycine max
ctaaagataaaggatagcgactacctgaaggattattggcattagttgatgtaaagatagaatggttatcattgtatcgggcatgtctatgttttttaccttaagaacaacaaggtacaaaattaaaggtaagtgaggaagacttttgaagagagctaggttgagaatatgcctctgggacagatgtaattgggtcatcctcagaagatagcttctcaaaaatgagaggttaaggggatgaaaaggagggagaaaggagagtgtggatgtctctaaattgtgttttggcatatggaaaacaatcctcatgaaaaataatgttcctgaaagtggtaatggctcaagttgttaaattgtaagtgacataaccctttatttgggtttataactccaaaagattcaagggtttaacacaagcttaggttgattttttttttt

SEQ ID NO: 275371 - DNA, 406 bp, Glycine max
acctaattgatcaaacgaaaatttatttcaatttggaaaatattggtgcttatctgttgagaagttaagatcgatacaattgaattatcaatgtacttacaaataggccaacagttccaagaccaaaaatcaccacagttgatccttttgacacgtcagcaacatttcatgctgcgcccagacctaatgttttaaaaaaatgagtcccataatcaacaaaaaaataataatttatcaatgacattaacaacacttattgggatctatggctctgacagtgtctaatagcaaaagttcatagtatattatttgtgaggtataagacagaggaggaaaataagctccacatttgtattttgcctacaaattcattcaatgccacttggaactaacaattccttcaatt

SEQ ID NO: 275372 - DNA, 542 bp, Glycine max
tagacattagagtcatccaagagggctagtgtcttcaggggctgaaaattatataaaataaaataaaaatagaacgttagatatcaaaatgtgtaaatgaaaataaataaaattcttatacctataaaaacaaatttctagaaattgaagtaaccagaataataacatcaagttaatgatagattaaaatcacaatagtttataagaaaaatatttatggtaataatgaagatctttaatatcttaagattaagtattcaacatcgataattatgagtttaatgatcatgcagcggcaatgaaatttttatggttaattaatcttaatattacttttgtaaaactccatgaatttatcatatacattggaaattattagatgtcagtataaaataattttagacatttagtgcatagcttattttctctaattatatctctatcttattttattatgatgaagacttttcatccaaattttcaaaacgttccatagaacatagttttattaaaacaaaatatggatgttaacaccaaatacc

SEQ ID NO: 275373 - DNA, 429 bp, Glycine max
agcttcataaagaatcaatattggttcaaagatgttttgatgataacaaaggtgatgacaaaaagctcaaaggtcaattcatgataatcaaagaatgagttcaagatgttccagattgaatcatgaacacttcaaggttcaagaagaaatttgatttccagaatcaagattcaaggttcaagatttcaagaatcaagatcaatattcaagactcacgatttaagaatcaagagaagaattaatcaagataagtatgaaaaagttttttcaaaaactgagtagcacatggatttttctcaaaacttgtttaccaaagagtttttactctttggtaatcgactaccagatttttgtaatcgattaccactcgcaaaatgtttttgaaaaagtttttaactgaatttacaacgttcccattgattttaaaaa

SEQ ID NO: 275374 - DNA, 1035 bp, Glycine max
  unsure (1)..(1035): unsure at all n locations
cgatactcacctaccatcccatttatctatacgtcaacagcctaatgttttcatatacatanatatnnnnaatcggttgatgcatctttacccccttaaaactaacttgctcaagagtccagaaggaaaaacggcccaaagaaccattttcgctcccgagtatgacagccaccgcttctaagaagcgctgaaacaccagcaagcgccttccaggcccaatcaaacgggataagcctattgttatacgtgggagccgaacgccgtcccaacgtttatgtgacgcatagcagtactaacccgaattttcccaaagaaaggagaataagtccagccagacggtgcggccatcaattgagttaaccccccattggccaaacctcaaaccatacatagttcttgaatattatgccaatgcttgggcctaccgaaagaagggccgtgtcgacataatgagaaatcctcgggcgaagggggtacaagggattcccggttcgaatacgggatgcttatcaaccccgtgttcctggggaatatccctttaaccgcgctgaaagaagggcccctcaaatggccaaatatgtggccataaggaaggaaacccgggtgcgattgggttctgcatgagggaagtgtctttggcccaattggttgtgttattcaccccgggcaaggattttatgtcccgagactggcctcatgggagagtcaaatgtctaatatcatacgcccacccaaaattaacccacccttgatccccaatattgaatagactttgttgcttcaacacaaatctttcctatgcgatcataaatcttcaccccccctttgcccaaaatgtaacacggggaatgccaatctttcacccgattaaatctccaatggctcatagtcaacccgtttgcctttatctatttagacgtatctgggtccaaccaacacctctggtacccacaatagacccacgggaacttcggtgttctcggccaaataaacagacgcatgttaatagaggggaaatcctctgctacctccccg

SEQ ID NO: 275375 - DNA, 328 bp, Glycine max
aactaatttcgcttccgagtacgacagtccctggtttaagagcgctgttcaccagcagcgcttccaagccatcaaaggatggtcctttcttccggagcgacgcgttcaacttagggatgaacagtatactgatttccaggaagaaatagggcccccgcggtgggcattactggttactcccatggcccagttcgatccacaaatagccattgagttttatgcccatgcttggcccacaaaagacggcgtgcctgacctgatatcctggggtatgggtcaagggatcccgtttgatgcccacgcttttcgcccacttctgggatatccg

SEQ ID NO: 275376 - DNA, 402 bp, Glycine max
ttggaaaatgttgtttttcaccttctcgctaagccaatatgctggcttagcgagcattcgctaaacgcaacactcctgggctaagtgcgaggaagaatccagaagaagatgagctgtacaaattcgctaagcgcaccgcttcatctctctaagtgcaccgcttcagttcatccgctaagcgagaaaggcgcgctaagccaaaaatcactaacgtgcgctaagcggtccatacgttcgctaagcgcacgagcacgaacaaggccacctatttaagcctgaaatcagattttgtgaggggagtttggactggtattcagagctttgcatgtctagggtttctagagagagaaaggtccaagttccaaagagttttgagagattttgctgtgtgaagatctgcag

SEQ ID NO: 275377 - DNA, 1004 bp, Glycine max
  unsure (1)..(1004): unsure at all n locations
gccccaccgaggnttaagacattcgactagcaccgcggatcctctagagtccacccgcacggccatgcaaactcttttagcctaagacggggccgccattttttttttgtcacccgctgcgccacgctccaatgatgactcgtcgtcagttccccacccgctacacaatggctggaaatttctgcgaactctccatgaaatcctcgaatataggatttaactttcccattacacaggcacgtaaattttaatttccaagggcctactctcctacctgtgcaatcaatttgggcatcacagtcctcatacactagcgaaatggaagcgcattaattctctccacttctttataaatcgcagaacatgcgtcctaaaatacaaaaaaggggaagagctccccgagccccacaaaattggttttaacaaggcctcaccagggcatgaatacagaactgattcacactctttctgatcaaaggatcctgaacaaaatcccataataagatggcgtcgccagacggtgttttggcacccaaaacaattatcttgtaaccaaaatactaatttgtaagcgccattgacaccatagaacaagggggacatgggaacccacggaacttaaaaacaagtgcttcttgcctcttgattacccaaaccaaaaaattcccgcggcccttaaccgaaattatttttttctcctcctcggccctttctcctcgagttatcatggatgaggccaaacaccccgcgcaaaattctttagcccacgattcgccccggctccctccaactgatgaaccccctcaacataatcccaactttctacggcgagcgctattttgttccacatatcccccaactacacttctgtatttattacgaaacaaattcgccaacccacggcaataacatatcttttggtttgcatatacgaacaacccctccccgggcgcaaactgaaacctcttcgaagggatctctcttatcttgccgcccccctcttc

SEQ ID NO: 275378 - DNA, 1327 bp, Glycine max
  unsure (1)..(1327): unsure at all n locations
aacataacaacgatcctcaccaccttacgtcgcgacaaaccttcttacgtccttacccccatccatactcnccacccgcccccgaggttgatgcctcgatggcacncacngaaataaaagaaaancaagcgcgaaccacagaaagaagcgacgaccacagcagagaagagngatattactttcctgaggcacccacaaaccacgcgacgtaccacacaactgccgncattggcaccactcactcgacgatggccaacgcgcgtatgcccagcaatcgaggcatagtggccacacgacngcacaccacataacacttcgccgtggacgcacacaacagaaagcaggactacacttngtacgcacgcacgcnagaacctcgcgcacaatatgtatcgacgcgaataatcgcgcctgctgtccatatgagacagaaatacggcaccncaacatngctcacgaaaggaatagtgaaacgcacactcgcggcgcagtaacacgatcgcgaacacctctcaacgtggcgagtatggagaacggccacgtgtatcctaacgagttcgctgatctagcagatagggaaccacaatatacatcgccctactcacaatctatccgcgaagaaggcagcgcattgcgccccacaacccgaaggaacgatgcattcgcacgacacacaccgcaatctgttcatccccacaatgaatgcacgcacacaagcataatgtggcaacaacgtgacgaccccaaaccaactcacctggcgccccagcgccgtgaaggcgcacacactcgggggaccgcgcaatgcgccgcatgcaaggacccactaagcaaacgcggaagaagccggagttaaatgacacagaatatcgcacagcgcattaaccgcgagcatactaatacacaccatgcgcagggccacatggcacacatataaccaacggcgccatcgccagagacacaaacacagcgcattacaactcgtctccacggagagaaacgacatctcgcgcggacccaaccacccgcctgtgactgaccacgcccggatntaccacccttctctgtctcgaccntctcagagaacacgcgaacaaccgagcgagacgtcgacatacaagggagaccgggtgctctgcgtcaacgacaaacacaacacatcacaatctgccgacgagccagataatcaccactgcaatatgatcgcacgacacgacncacagaacgcctcccactataagtaaaactacacgacgctcgtgcaaagcccactgcctcctagggaaatacaaacgaaacgggcaccacaacctcgcgcgacgcaacc

SEQ ID NO: 275379 - DNA, 467 bp, Glycine max
  unsure (1)..(467): unsure at all n locations
agcttttccataanaattatattgatcaagagttaaaagggggaaatcttgatctcctcagtctttagtaacaagcaccgttttttactgtatcgntatctacttttcaatgagtgtgcacttttgtccattaactaaatttcatagaaaaacaactaagaaatgaatagcacggttactgagttgaatcctgggatcctacaatatcaaaactcatcctgcagtggtagttttgcttagaatcatcgtagcgagtatgatgtgatttttattacctttcatcacattatcaaagttgttgtaatcaattctaagtctattagatgaatgtttatttgttgtaatccattaaattatcatggtgaaatctttagggaggagctattcgccaaaagctatattacctcctgaaagatgagaaagatgtgcattttgcatttggaaacatcacataaaatgggattaat

SEQ ID NO: 275380 - DNA, 465 bp, Glycine max
aagcttctcgaaagattccaaaactagcatacccgtgcatgatttgcattgtcaaacgcacagaaggcagatgccagattcctacgcacaaaccgctgttgaacataaccaatgtaatctcattcttctccaaactttcaatactccccccttaatatccaaccaccaccgccggaccatatagcccgccacccaacgccaactgaaccaacaccacgcatgctctcctcatctccccaaacaacaacaaagcctggctgctctttccatttcccagcacacccggcaaccatggtggtccaagacacaacattcctgcacggcattacctcaaaaaccctcctagccccatcgaaatcggcacacctgacatacccagcaagcatagaattccagctaacaacacttctctggggcataccatcaaacacatggggcccccgctcaacgccaccgcgcccagca

SEQ ID NO: 275381 - DNA, 1084 bp, Glycine max
  unsure (1)..(1084): unsure at all n locations
acgtcatcttatcctctttccctttccaatatttgtatgctatgaacacaccaacagaaacggtaaatttctcccagagcggggccntttgttccatttttttcccctctcggaacactaagaccctcggaaggcacggaaggctataaatccatagacgcgatggcataatttctcatcttttatggcatacaaaaatacgtggagggcaagccttcaactaaactctcgcagataacgtcatcgaataacttttaataccacgaaggggcggcgccgcaagatccgacttcacagatttttccgcccgaagaccatacacgcttgcaactcaagaataatggtggggctataaaaacggggaacacaatctcatttcaaaaaacttttgtatatcaaatagaaaatgggaacaacgcaacctaatgttcatacgccctacacaaatcatgggggaaagaacttcgaggcactcttatgcgtggtccctcggtgaaactctaatatcgacatcgcagtctgtcaaaacaacgatttacatcctctaaaagaagtggagaactacacttgtaacataccaaatgggagaggggcgtagcaaaccctggttctgagtctaccccccccagacaaaggatctctctaatccgggaaataccacccgcgagaacaatattctttaattgttctcaagcaagacgagaagccactaaagtcatgcgtcaatatgtgggcttaacaacatggtaagacggcattatcgtcgcgacggaggtttctcgcgcaataaatatcaacaagacataacaacgtcacatgggacagggggataaggtctactcaaaccaaaacacgtggcgagacggtcggttacaccagacaccacagcgtaaccaaatgtgctttctatcgactcacggcacaacacagcgtatgactcctgcgaacacacaacacgtcatacctccctcatatgacatatcctattgtntgcgagtgcgacgttcatatatccatcgacacagcacacaacacatgtcatatagtgtcgcttcactcacagacgtacgctgtatcaatgccg

SEQ ID NO: 275382 - DNA, 927 bp, Glycine max
  unsure (1)..(927): unsure at all n locations
cgcctgattggcatagcgaccatctgcttctctantccttcttttcatcatcctacctaactnccanccgccggccttggtgctcttgctaccaggaactatgaaatttggttaagacaaggcaagagcaatatgcgaggaaaatataagcctagctttatcagcccaccaagggagaaagaagggttatttttttttcccggagaactgggctttggggtgcacatggaaaaaaaaaaagggattcccggaaccaaaggaaatcaaaaccttaaaccaaagggaaaaagggaccatttcaaggtgctttgaaagaatccaaggcgaatgcgttcacaagttgaacctggcccggtgagcttaatggtacgatacaccgtgaaggggtctgaattatttttttttcaagcagaaggagaatccgattcgaagaacaaatgctttctcaaaaggagaaaatggttgaggacatgttcaagaacaagggcaaaagatccccttgaaggacttggacgacctatgacacgggctacagccacggaagccaagggaacccctccacaaatgcctgccatactatttgaaaacaaccccaggttccaggaaaaaagtccaaggtggtgagtgggatcatggcccaatggaagaggactaactgaccctacctttgggctcaatttagaacggttaagtttgctaaaaaaagggcccaatcctggtaacatggctgaccaaaaactgttgggggttaaacaacaaaaagggcttattttgggctaactccgagatgaaataaaggccccattgggtacctagggcaaacccctttgggaaaccaaaagggggctacattttggccggtggcggcaactttaggtagcccaatacaccttcctcagaccttgaggtacttaaagtgtcagagac

SEQ ID NO: 275383 - DNA, 1166 bp, Glycine max
  unsure (1)..(1166): unsure at all n locations
acctctatagtacgatccactctactccccctcagtcccacccccttccttcatacatacacctccttcncncncccggcccgcggcncttgatgacctcttatcaccgccaggcatcaaaagatccaccggatgcaagcctgccttaaaaaaagggctggagacatacatttttttttagccaccttanagcatggaacgacaagctggcaattcggtggcactcctatagtcccacaccggacatgacaaacgaatcacgcaccgggcctgcgagacattgccacaactgtcaacgagtcacagtgaccaaaaatcgaagacattcgaagaatggcacgcattccaacggatgctcgcgattaccaacgaaaccacggacaccctctagacccgaaacatactgagacttgcatgaaagcaatcagaaacttgcagggaaacaccgatggaaaagacactcatggtcccagaacatgacgggccccgcaaaagaaacttggcactactaataacattgttgtgacacatcccgcatgaacacggacctatttgtgcgcacacctacgcccacgcacgaaaaacgcatcgactcctcatccttttccccgcactccgcacaataataggacgattcagtcaacaaaggctnctgataatcacgacaaacttacgaaacgcaagttctccgattccgcgggtgtttatacacgaatgttgaccggaaatcgaatgaatcaacagagcctcccgacgaactccgaaactatcgcaccgttgttataatacctccaacgaagacacaacacttcccacaagaggaagagcagagcgaccatctttttcttcaccaccaaagagagcctcggcgcggcacaacatacccgccctcacgtggctttgcgtaaaacagacgaaccgcgcggaactggatgtctcgcaaccacagccgacgaggcacgcgaaccccctctccccggagacttttccgacgtttctccaaacctggtctcgacaacctctttctnaaaggacaaccaaactctcctccacaggggcgctctggaacgccctcaccagacaaactctctcctaaaacgccacacgcttctgtttcctggacccggcactaatccnactgccaacagacccaacaacatcgttcg

SEQ ID NO: 275384 - DNA, 341 bp, Glycine max
tgggaggattgatggggacccggtgttgaaaaaaaccatgatattggctacgtgggaatacctgaacttagatggaggggggcaacaagggatggtgggtttatgcacgcattgtggatgtggaaaaattgttgtgcaccatcgcccgaccgccacctagtaccacatgtgatgggtaccccataatcctacaagcttgaaatgaggaaatgttgaagggtgaacttcctgcttttattgctgaccacagagtggtacctggagatatgtcgcgggggtcaggagaccttggggacgtcaggtggggtgctattgcccaaaacccaagcttgaccaatccc

SEQ ID NO: 275385 - DNA, 335 bp, Glycine max
agcttttaagctactcaagatgaacaatccaaatgaatgatattaccttttctagccttaaataacttttatgtacatgatatatatttgattttggtttgaaccctgataatttgtttggtggttcgaatccctcatatattaaaagctttgggttggattcctgtcggcaattcagtgaggacgcgatactatggcatgaatagatatgtattatacgggtcgctgagatgatgctacgccattaattgagtgatgagcctttgttatgtctcctaaactcggaacgcccgacaaatttattaggaactcgggataaaggattgcgtttatat

SEQ ID NO: 275386 - DNA, 614 bp, Glycine max
  unsure (1)..(614): unsure at all n locations
ntgtcgctcatggacgtcaagatgtgctggctgtttccattggacgactagagcaccctagtcgtgtccgtgatgctagagccagtgtcatgatcaaacaatactttcaaccgatttcaagaggctcctgcacgtctatgtccttggctcccaaagacttggagcagctgtcacaaaaaatcaaggatcggttggaggagttgataaaaaaaaaggaacttgatgactaatgttgtccttcagccaaatgcagtcccagatgcaatcacaaggactcgtattgtctcctatgtctgaggttggtccttctgttgctcgtgtcagcacaaaggaaagttgtgttgatccctcanggcaagacctatacacgagtgactcagaaaaatgtgggttatatgtcgatgagaatcctccctgtctggttgcccttggaagagtttatgatgggtcaacgatcgtccatgtaacatctcggtttttcgtaaataaattaaaagtggttttatttagaaataaataatgaggtttaataattaaataacccaggagaaataatttttttatttaaataatgggttggaaggaaataaaaaaaaggtgggatcaatggacct

SEQ ID NO: 275387 - DNA, 290 bp, Glycine max
ccgcctgcaagcttgggattgcgatctattccagcctgcgcgtatttatataactgcggaccctgcgctgagagggacctcttcatgcgctaagctgagcttactcacgctaagcgcaaagacccttgattgattggctgaagggttcagctacgagcacagggctggggtaagaccaacatgttcactgtaagttgcaccattacccttcgggattaacgaggatgaagcgcttatcgccacttcctctttgtgaacaataattatagctgagctaagcgcgccatcct

SEQ ID NO: 275388 - DNA, 280 bp, Glycine max
ttatagttcaacatttttaaatcaaaaacaaaataatgcttatctcaggtcttaacatctaatcctttattctaaagttaaactactagaatttaccaacttgaacctgtacatctcaaatcatccttgaatccataattatgcaaaaaatatcaagaatcagatttaacttcattctatttgaaaataaaaacttactagatatttaaccatggctgtcaaatacaatatttaagtcttatttaatttgaagcatttaacaccatccatgacctatgct

SEQ ID NO: 275389 - DNA, 473 bp, Glycine max
agcttatgcgcctatttccttacaaacattctcttgcacaagacatttaaccgaaaaatgcacccatatacaatcaaggcagcttcgttacctaaattatttacacctacctccaaggtgtatttgttacttacatcacacacatctccttggctaaactcacatacatgcatactcaagcattttggggcaccaaaaattgcacatgtgcacatcttggcatttctaatacctacatacgcaaacttcatgatgaatcttgactatctacacaataaggtgctacatttcatgctccttttttcaagtttttgctacctaaagtcccatgccaattcaagcatattttcctttgctgactaaaattgcattcaaatttaaaagggatatttttttgtaataatgttttcttcacataacatgcaacatatttatatatatttttttgggagacattttttgactacccaaaa

SEQ ID NO: 275390 - DNA, 235 bp, Glycine max
accatgattaaccaatggagaaccgcgaaaaacgggtcaaacctttgcgagaattctcaccgaaaacgttaccgaaacggttccgaagcgccctcgcttaaaatttcttcacggaaacaatttttccaagccaattccaaagaaagagaagtgcctaaagggctggacccccttcttcttcatttcctcccctatttatagcaaaataagggaagggggtgccgcccagctcgcc

SEQ ID NO: 275391 - DNA, 349 bp, Glycine max
agcttgttgttgctatcatgtgatgtgaacaaccttaggaatgtatgcatgtgttgaattgattaagtgttggtgtacagttgataatcttaggttttggaaattgtcatcatgtgctatgcgcatagttgcgtgctaagcgtgtatgtattgttgcaagagacacacttggcgcatgatagctcgctaagcgcacataaactctcgctaaacgcaaaaagccgtgccgagcccaaaaatctctatgcatggagtcaatttaaattgggcttagaacaagatagcctgctaagcaccccaaaactcttgctaagtgtgaagcgtcccgtgaagctcacaatcccctatg

SEQ ID NO: 275392 - DNA, 482 bp, Glycine max
  unsure (1)..(482): unsure at all n locations
ntctagcttttcattggtgtattttgatctccttttggtgctctaaattgggggagtatgctcaaatatataaggcaattttggtttgttttcttgcttgattaagttgaattaagggtgtgtatgggatggccctatgcctataatgcattttggaacaatgggacatgtcacattgtccccgttctcttgctattgacgcctaaacgcgcgcccaccaagtgttcggtgaaatgcctcaatggcattagcgcgtgacttttgtaaggaaacaacccatggggcattttggtttgtacacattttcttttttttggaatatgtattcattcctgaaaaaggctagagtaattgccccgcatatatcctangcctaggaactaaaattttatgcaaaaagaacacaagaagaggtgcatattgggtaaagttaccctttttggcagccatcagctatgggccatgctacaataatttcccta

SEQ ID NO: 275393 - DNA, 395 bp, Glycine max
ctatgctcttttgtggtggaacaagctacaaaaggagagagcaagaaatgaagagcccatggttgatacatggacggcgatgaaaaagatcatgaagaagcggtatgttccggctaattactcaagggacttgaaatttaagcttcaaaaactaacccaaggcaacaagggggttgaggagtatttcaaggaaatggatgtgctcatgattcaagcaaatattgaagaagatgaggaggtaactatggctcgatttcttaatggtttgactaatgatatccgtgatattgttgagctgcaggagtttgttgaaatggatgatttgcttacaaagcaatccaagtggaacaacaattaaaaaggaaaggagtggctaacaggagttttaccaactt

SEQ ID NO: 275394 - DNA, 1057 bp, Glycine max
  unsure (1)..(1057): unsure at all n locations
tcgcacaccgaaacaaaatttccacatgaaagagaacaaatgcgacctaggaacatctattcgggatcagaagcgantactgtccnacacaaancacccgcgcnntttagaagcccagctgagaacccacaccaaagacccgccaacttggaaaacaaaccccggaagccggggaacaaaaacccgggggggatcacaacaaaccccgtattaaaccgaccggaaaacggcgacaacaaccggggcaaagtctctccgaaaaatgcaaccaccgagaaaccgcaccaagaaaaccaggaaagggaacccaacccggcccactcaggaccgtacccaggccgggcgaccattaaccacgcccgaatacccctacgaaaaaagaaccggcccgaaatcgcgccgggaaccactagaaatgcgtcaggaaccctcccacatcggaaagaccaaaatacggggaacgaggacggacaccacaacgccgcgacaagtcgaaccaccggaaacccccagaccaaacacgggatgcgtcacaacaataagccacccgaccgtcccggaagaaagaaccctggagaggacccacaacgggcccagggtggaaaaacggagagccccaccagaacagagaaacgcgcccccaccggcggacaccgaggggacggaccaggcgaccaaagcaaccggaaacccccgaaaatgggaaaacagaaccgctgcccaaacccgcaagggcccggaaccctgcagaaccacgaaacaaagcccgtcaagaagtaaccggagagccccgaaacccaaccacaggaggccaccaagcaactcaaaaggacgcaacacgtgccaacggaaactccacgcgggggccaacacaaatcgtagacggcccgacggagaacaccggcaatgctcataaaagcgcgcaagaggggggccccacaccaccgggagggccaaagagggaggagatcgctgcaccggccccgggcgacgcacgacagcggcggcacaccccccaactggccacatgcacagcacaagcatccgggccagcgcg

SEQ ID NO: 275395 - DNA, 464 bp, Glycine max
ttgttgtaaataccataacttttatgttaatctttgatgggttttaaatctttctttaaattgcggccataggacttataattctgaacatagaaaagtaaatcatggttgatttggtggcagggaagcacagccaatgaaatgggccatgaagttgagggtggctttctacttacctcaagctctacaatattgcactactaaaggaaagggtttgtatcatgatctcaatgcctacagaatcttgtttgatcaggtataactggtgtttaataaatgctctccagttctaactaaaccctgtttcttcctatttgaaacttggattggcttgggatgtatcaacaggatgctcatcccaggttgtcctgcttttggactcatggaaaagagcacagatggcaacagttacagcacaaacctggcttttaccccttctgaatacttaaagactggcaaaattt

SEQ ID NO: 275396 - DNA, 1242 bp, Glycine max
  unsure (1)..(1242): unsure at all n locations
tactgtctctattatagttaatattctgcgccttctcatctatcatagaataacaattaaactattactctacctactctggtccgacgggattatgcctctctttaagcgaccccatactaactcaatccgtcattataaccggttacatcgggaagcggtggacgtgccacagagcattttattgctgttggcagaactcctaacggtggaaaaagcgcgcgaaaaggaatcatggaaacaacattctccggaaattgatgattaatccaatgggtgtcataggtcgggattgtgcattttcctgggaatatactcttgtggtcatcggcggcgagaaaaaaatgtcctgtcaaaccggtgagtggaaactggctgttctactttcctacacatttgttttcgactcactcaattgacgtgacaaagaggcgcgcaataatagagaattgctgcaaccctgcgtcggatacaagaagttgcactcgaacgaatgtcaagcgtgtggggaaagaaggtccctagaaaacgtcatgacctttctcttacaacactatctgtgagcgttctcactgggcgaaaaaacaaaattagtggcttcgtgatgtgaaagagcaaatgcggaaacactactaatattgcggagtgatagaagaataacccctacgcggagctaatccatctgactgcctctcaaataagacgagcaatcccaaggggctctataattatatagctgaggtgacacttatcatgctctataacacacccacgcacgtaaagtaagctgtactaccaacaaacgcgacgaacccactctctgtctcggtctactcatactgaacgaagtgaatactcgagagctataatactctctggtatgccgttccacgcgactacattgctcagtactgcaggtgacatcaccgccgtgcgataatcctatcattcacacatagcatactgcacaacatagtgttatcatatacgttcagagcacgacctcagtagcgctatatcaaaaaatgcgtgtcaagcaactcatatgatataataacgctatgtgactaaacagagtgcgatgtgtgacaacctacatagagtcggctcatggtgctacctacgcctgtgtgatctacttgacttgtacgctgtaactatataanggcggtgtcacgtgcacacagatcgcgcgtggaatanttatactctgctgctgcgaggcacctacaagtatgcgcc

SEQ ID NO: 275397 - DNA, 1212 bp, Glycine max
  unsure (1)..(1212): unsure at all n locations
tcgaccgaccattcccgagctaccacacctactccgtcatccgtctgctcgcaagtatgactgtacctccactcangacacatcatacactnttctnctctnacaccggccaggcgcgncctttgatgacnttctttagaacncngcgctcgcacacaccaggggaacctcccaaggccgcacacgcacgacgagccaactcgaagaggccagaacacgggatgtgtaacagactcctaagaaatagacctccaccgacgtggaagatcctgaacaagcgccagacgccacaacctggacaactctttaagggcctcgcgacaaaatcgcccatccacaggcgcccactgccgccatcaagcgtcggagcacaacacgcctgaactaggaaatggttcgacaacaaacaacaaaacactgggcgcgcgctatcagcaagaggtgataacaacaccattgaaacctcaccccctcaacccccaaaacaggcaagagccgcaaccacccaaaaactctacctagtatccatggaagcgcgtttctagcaagccaggcctcaaaaacaagagaacagctgcttacaccccccccaacaaacttccgaccagaaagcggaactcgaaccgtggaatactccaaaaagatcggccaccggtgtacaacaacattcacagaacactggggcacacgatgcgaccgcaaatctggaaacggccaggactttcccgtccgccccggagcatctccccagacaacggggcggccaaacaaggccgaaacgcgacaccacaccaatctaagcacaggcgctcccccactcgcccaccccaacccagaggcacactccacgacgccgcggccacaaaatacgcccgactattcatcacgctcgatcaacagccgcacacatcgtcctgagaactaaacgcagagctcacctcacgcatcggcgtgaacacaccgcactatgaggcccgcctcggaacaccataacaaacacggcgcgcccgcgggcacacaactcacaactccttctctcgcgggcccgagacacacacggagcaacatcaaccccgacccacccgtgtctcaggtggcgcggggatcgtatacctacgacgggggaattgcgtcaaccgacacgcctctccaactctcctgaagtgagcgcgcgctnggcggagagaagaccatacactgtacgtctgcccg

SEQ ID NO: 275398 - DNA, 1139 bp, Glycine max
  unsure (1)..(1139): unsure at all n locations
gtggagagatccgtcganacatgggtcacttcctcgtccccatctctatatatacgcggacattattatagtgtagctatccatcctcacgcccgacgcgatgagtgcattctgattaacccttgccaaanacacccaacgactgataatatcggagattccagtacaaaccgtcccgggagatgtatgaactctctttacggctgtgctccgtcagaaggaaattcgatacaaaaatgttctggaccaaattatggagacgaatggcctgcttaataatttaatgtacgaaaaagtcggattaagaagaaagacctattaaaactggtactaggcttcatgtgcataatttggaaggaaggcatatattatgcagacacctggctgggtttaagtcattccatataagaacaactccacctaacttgaagatgattgaaaagtactaagttgagccattaactgacagaactatattaacgtggggtgccctaagcatggaggaagcacatttatttggtccttccttctgatgttttcttaccgaagaagagaaatggacattaaatttcaaaaggggacattgttaattttatccgcctgaaaatacaactaagaaattattgttacatcaaaactataagtttgaaaaaaaaaacgccctaataaagacgggagcaactaggagtctatagaaggcccttttttctggggcaacaggaaacactgtggagggatgagcctcttataaaccaatccattatgagaaaaacgcgtgtgggaatatatggaactgctggggatttcaattaaggtaatgggaatacggaattgaattacgaaatgtcgcagcgtgtgcacgtagatgaattgggaactcccatttctataaaataaaaaggtcgaagaataactgtttcgcagaaagtataagacacaacggactataatacatggcgngtacttcacgtgcttaacgcatctaatacagtcacaggtaagtttagtgaatagcgctgcatttctgcgacctgctcttattcggaggaagaacacaaatattatgaactattcgaagatcttaatcgggagaggaaagtcttcgagtcgcatacataatacaacgcatacatcgttcc

SEQ ID NO: 275399 - DNA, 1071 bp, Glycine max
  unsure (1)..(1071): unsure at all n locations
atacgcacccatccacctcgatcccatnaattgttacggctgtctactctccacgactaatcaccatacttatctcatcactccccaggccccggccggttgatgacatctttgaacagcgacctnaatcaacaacccaaggcagccatccgaccctccaacgtggcaccgaacaaaccttttttcacatgcgaacaactagcccacagagagaacacccgtatgcgcgtcaaaacaaccaccctaccccaagagaaacaacgaatcaaagcgataacgtaccggagaggacaaacgaggcgagacaacaccaacagagaacgccgtgaatcacaactggaccgaccccccagcgcagggaaaacctcgcgccgcacgccgccataaacggaaaacagcaacgacacacaccggcgcgtgacagcctcacacaaccgtaccacaatcccactcccgcaaaacaccgagcaagacacacacccaccaccccacgctgtatacgagatacgtgacccgccgaggcatgcgaccgacccgccccacaaacggcgtcatccaccgacggcgcccacaaaccacatttaccgccgcaccactccacaacacgcggaagctcctgcgaacacgctacgactctccacgaagacacactacctcacacgacactgcaataagtcgcgccgagacaacaccgtcggagactctccacgtcgtcacagcgcgaacaccccgcgccacaccaccttgacataacgcctcgagcaggtgacagtcacatcaccacaccaacatgtctggcctgatccgaccgtctaacaccggaacacacaaacacaaagcccccagtgacgctcgcacacatctctgcacacgatgatctcggcgtacatcgacgaccgccactgacgactctcgacggtgcgcaccgaacgcaccagcccgacgcatatccacgacgacctcactcacacggccgaagatactcatgcctcgcctgaccttgcgtctcctaaccacagcatccactcatgacgacgtggcgatgcagactcgaacgatatcctccccccg

SEQ ID NO: 275400 - DNA, 378 bp, Glycine max
agcttgtgattgtgatttatttcagcctgtgtgaaaatataagtgcagaccttgcgctaagaggcatctcttcatgcgctaagctgagcttactcacgctaagcgcaaagacccctgattgattggctgaatggttcaactaagaacacattggtgcactaagcccaacatcttcactgtgaggtgcaccttaagcaatgggcttaacgtggatgaggcgctaaacgcccctttctttttgtgaaaatttattataactgcgctaaacgtgccatcctgcgctaagccacagattattttggtaggtgagctttgaagctaggcttaatgggaaaagacacccttatcgccaaaatattttgttttgaaaacattgga

SEQ ID NO: 275401 - DNA, 396 bp, Glycine max
ctagctcaacagaataatccaaaaatgtcaaagacatgggcgttgtttaagcgtagcaaaactttctgtgattggtttaaagatatacaatctttgcggatgagaatgcttctgaaacattcacaaaactagctgatgggcctaatagaaatgttataacctgggaaggatacgacataatccggtgttcattttacacagaagcacaagatgacacaagtacaacgcataacagcggggtcaccctatgggctggatctcaacacttttgtagatgtcctgacgccaacccctatgtaacttacatcccttactttaagatcattgatgaaatttgggagcttaattatgtgaaatatacagtatgtgttatcaaacgttaatgggttgacagct

SEQ ID NO: 275402 - DNA, 919 bp, Glycine max
atttcacaacacccaccacacccctcaaccaacacaacttgcttccccccaatcccacctctcctcttctcctcccccccgccccgccgccatgatacatcctagaccgcgacctctaagacacccgccggcagcaacttgccgctacgaaaaatcccaacacggctttgtggggcggaacaagccccaaaacgcgagaaccaagaaacgaccacccgacgggtgacacctgggaccgagaagaaaaacaccaacgaagaagccggatggttccagctcgcaaactaagggaaccggaaaatcaaccccccaaaaaataaccccaaggcaaccaagggcggcgaggagcatactaaggcaaccgcatgcgcctccacaagcgacgccaaaattgaacaaaaagaggagggaactattggcccgactcttaaatgggggtggacaaatgaaacaccgcgatactgccgagcctgcaagagcttgctcgaaatggaaaaattgccttcacaaaaccattccaagcggagccacacattacaaaaggaaacggggccggttaacacgcaaccacaccaactctcggtccctcaaacagcaaaccacacgggtaaaaacaagcgggcggcaccacaacaaatgccccacccaactcaaacaaaaccccgctcaaagcccaacaggaaacctccaaaacggaagaaaaagcgaaatgccctaagcgccacggccacggcacacacctcatgaaccgccccaacaaaaggccccgggcccttcccccagcaccccctatcagcgcacccgcctgcacagagacaaacggacacctcacccgcccatctccagcggccactcctcacgacaactcacccctcttcacacccaaccctacgcgcccactcgcccgtaccacaccacc

SEQ ID NO: 275403 - DNA, 926 bp, Glycine max
  unsure (1)..(926): unsure at all n locations
gcagtagcgagcgttcccgccgatccgatgttcatctggcccaattctgtgttctctatttacactcttnccttccccgccgcgcagtgtgtgacccctgcataccggacctaaataccatcttgcaaccctagtcgtcggagatagcaggccactttgatagcttgcaacgcatacgtggcgtaccctaagtctatctttaactgcctcccttctcggcctcaaccaagatattcgagcgggatattccgggcctcaaaccacaaaatatcttttaggccctgggcatgaccaagcctttagagaccaagtttcgggaccccaaaagggcccatttggtgccttaaccatccacacattcgttccaaaggcacacctttagcgctgacgaacaccctaagccactccaaacttttctcctttaaacaccttagtcctccaacagtatcaagaccgacctggcactagcatatgctcttactgggaagaacgggactatacccggtacaaatggggcccacacggttcttctctttttactgagggaaccatccttaacctatcccctggacccggaccttgtctagacccaccttcctctacccaaccacctaagcgagcccgcctttaattggtgtctgttggctaaaggcactttgggacggtggtcacccctaacccctcaaattttagggcagattttaggttcgctgggaccctatctggcccggggcctgttggatatacaaccattaagtccggaaacaccttttaaggcgggacttgcaggtgacattcacactttcgaagaagcttcttcttcgaggaaaatcagcgcggcggcaaatggcctgaaggccttattgcgcaaacatgttagaaatttctctggactccgtgcaaaaccactgctacaatgattgacc

SEQ ID NO: 275404 - DNA, 1131 bp, Glycine max
  unsure (1)..(1131): unsure at all n locations
cgcttgtaccaacgtacacactcgctngcaacttcaattcatcatttagtgacatcatcgacgcgtgttatcctctcttntctcccccgcagagcncttgtgactctttgctactaccgcacctatagaaaaatcgagcttggtatagttgatcacagaaatacaagagattcacaaacttatttgcttcaggtcatcaagggctgactcacttgtaacacccagacattggattcagtcttcatatcaccataaaccacgaagattcccgaaaccatcacctgttgttcataaccacctgcaagaggaggtagtgtcctaaataatactagtaccaactgagacctcagaattgagttgacaatgcaccacaatttcattgtgatgccattcttagtgcactccatacacaatagcttgtcgcggatctaacgatggaaaatgaacggtgcgaatacaaacccggcctcaaattcagaatattacacacagcctctaaattatcgaccctcgatctgaatcgttatccttatcatcgtacaccacctccggtataccgcctggaaaggcgatcgtaactataaataaaaatactatgtccctataggcgtttctataaattctgtgagtggagaaactccgtcagagagacagaaaccggccaaaataaagctagaaatataccccatttagagactaaatctctaactagtcacaaagtgattgaagagaacaaccttttccccttggaagagaaacatgctgctatgcggcagatgatgcccccgacagattggtctaaatttgtcccaaaacaaatagtacgcacattaccatctggcctcgaagagagtttcgtctggtctgaaaaggtgtaaaaaaaggggaagttccacacacttgggaagtgaaaatacgtccgcacctttaccttggtatctccaacaccaacgtatactttacatgctgttaactcacacgtcaagattggaaaaattaatgagatgacaacccgctcgcgaaaaaatcttgttacccacacactttgcacttgaacaacgctttcacgacaaaaattcttggcaaataacccttagtcgttgcctaacaaacatccgcgcgttaataacg

SEQ ID NO: 275405 - DNA, 336 bp, Glycine max
agcttcagtaatgtgagttttgaaaagtaagttttaaatgtatttactctgagtcatcaatatacagttattagggagatatttaatctctacacccaagaaataatccacatgacctacctgtttgacagagaatgcagtgtgaaacttggctgtgagctgctgaattaaaaaagttgaacctacccgtgatgactatatcatccacatagaccccaagaataacaatatgaacctgttgcgtgtagatgaccagagaaatggcacatttgcttcccttcaatcccaactgaaatagagtagatttccgcttatcaaaccactgccttggaactt

SEQ ID NO: 275406 - DNA, 1043 bp, Glycine max
gtatgtattctatcgctaactctataccttccggaactttctgttcgtcatcatcctcaacttttctatactacacgccacgagcattgtgcatcccttcattagggacctataaatactcaagcctaacgaacaccaagcctctcaagttttagctttacggaaaagatctcgggtcccttaacgaaaaacaagcccctcaaaagttttaactttagggcaaagagaaatattctggagactaatttgaagagctacgagccaacacctcagaattgtgacaataaagtgaatcacgctcacaagcaaattcacagtttgaagccccacaactaacaaattagtatatacctgccaactaacaggttaagttgtctggtatattagaaccatgaattcattcccattatattagccataatatcaattgttctgtgttgagtttttcacacactttaaaaatcaaatcatattgccacactctgatctgaatttgaacctgaataaccaaacgtggttccaagttcaaactcttggaccatccaaagttaccaagtttcattaagctggttactaaaatacccatgggaccatgatccattcccaatgtcactcacagtcaaaatctagtaaattcatgaaatgcaaaatttttttgggtaccccaacacatgctagctatccaataaaccacatttttaaaactgactattgggcacacataaaatattactcctcaattaatcttgaaccccactttgccacctacctctaatggtacaaattctctttaccctcacctggggtgggccgcgcaaattaaaggaacaagcgccctaacacagaatactctccaagtcatacttttgtttataaccttctggtggtaccaacataaggaccgagtatagaattgtaatgggtcacaatttataggtattaattgatcactggtcttcatattttcatataggtgaaaaacgtgctccaccggaaggcgcctctgtgtatcattgtacatctctcgacaatctatctctgct

SEQ ID NO: 275407 - DNA, 759 bp, Glycine max
tccacactgcagcctactcctcctcctcagcctcttcttccctcctaccccccttatcacccccgcgcggccctgtgattttacctgcggacctaaccgcccagctgcaacctagtcaaggctccagcgcttttcattttgaacgaacgtatccctggggctcctccctccgcctgcgtgacacccgcgtattacggcgggcaccgcgccccgaaaacaagaaaggcggggtgacttataacatcacaccctaccacaaaaaatattcctctagggctacacagctgttcccaatttactactcaaagaaatttaaccctaatcacaactgcgatccaatgcccccgcaattaatacgtggacaacaggacacaccaccgaatttctccgggtcggggccaaccctgcccctttttctcccaaaaagatgggggcgccgaatcttttaacctgtaaactactcttcaacccaatacccaagggtgcccccccctgttcttcgacaaactcaggggggccccccccacaactggctctaaaaaaaattccttctttgtttcgccccaactccactagccggccccttttcccacccacagatggccccccttaggcgaaaaaaaccctcaggcgtgactccttacactcttcgacgggggcacaatcacactcgagcaccttcacttcaaccctttctcctagaaggcgcacaccatactcacttccaccggggcgccttcacacaccccccggcagatc

SEQ ID NO: 275408 - DNA, 573 bp, Glycine max
ctcagcttccatcactatttcttcttgtgtcccgacttcttgcacaatttataggtaaattcctcatccttcttctattcctttgctgagaagtcccttccgcatcacccttaaccttctttcttttcttattctgagagggcgaagtcaagtgagcactttcagttctatctctctgcagcctctccttcttttgcgcccagtgagatataagctcattgagggaccatttttcctttctgagtgtttgatgtgccatcattttctcctatttcttaaccctttttgccccattttaaatactgattagtcttaattggccaatttattaagcaggtttattatttgggcccattcacctaatttgatgtgttaatctaatttcaggaattaatgaagcattgggtttgaatccccaattgggcccgggtttgaatccccaattgggcttggacttgaagagggcacacatttttattctacaacactcaaaccttatccttatctttaatctaactacaaattatttaaaattgaatcccccctccatattatttaatctagaacttatct

SEQ ID NO: 275409 - DNA, 323 bp, Glycine max
agcttgtggtctcatcatgttcaaccctatttataaatcaagctttttaccaatcatactttcactaatgaaaatttaattgatcaagctttttactatactgttgaagccacgtgggagaatttaacatacccaaaatgaagtggggcctgctataataaaaaatatgcgtttcaacacactgtgaagaccgcaactttaactatgtcaaggttgtataataaacaatcatgcactggaattcgcctaaatgatagggtcctagcttatgccaccatatgacttaaattggatcatttacatggtgatatatatgggaactc

SEQ ID NO: 275410 - DNA, 331 bp, Glycine max
tcctgtgggtgtgcagctcaatgatgatgattattatgagtgctcaaagggggtgttgtgcaaagttggagagtttcctcaaatcaaatcaatgggtttgaatcacttgtgggttgatgtgactattatggccatgatgttggtaggttacacactaattgcttatttagcactactgagagtgaggtcgagcttgcttagatacgtgtacacataacaacaaaacttggaagagttttgtcctaattaaactgcgggaagaataatactagactagataaaatattggacttctgatgcccattatgtaatgaaattgtgatcaactctc

SEQ ID NO: 275411 - DNA, 1030 bp, Glycine max
  unsure (1)..(1030): unsure at all n locations
tgccctactatatatcactcaccaccgtgctaccacaccacatatcttcacactttctctatactacaccctccggcggcggcncanttgttcaacatcgatacacccgacgcagcttctacacgcgacctcccatgaccgacccgcctgctcaacagccctcaacacaaaaaaggggtttcttgacccttctccgcgccggacccagcggcagtgaagcatgaaacttgccagaatctctgcaattaagagagggatgcatacattataaagaaggagaacgcgtataatcttggcatacgcaaagagggtgtttcagacccactcaatctcgacccatgggacgagtaccatcgcctctaaataggtggacttcgtataacaagccttaaaggagttcgctaaattcattgaaccccctggacgcttgaaaaggaatacatctcacaaacagcccttggggtgaagatatctagggacaaggactatcgggttcacagggcaaaatttattctaatactttggggggacgggaaaagctcccctttccacatgaagggcaatagaggctcaagctatcagcaccaccgcaatcacccaatgttattacgtcgcgataataaccaaaacgcagaacaagcattcggcggggaccgggtcactgatggcgccaaaaagctaactccatggcgaatcaacagtaatctggtcggaggataactagtcttgatcccacgcaaaattataactgggggtgaggtcctacgacatctgcgcctctctataagaaattcagacactttcgaatccacagaagaaccacagtgaatttctcggcggccacacgctcacactaccaagacctcgacaagggccgtcccagctaggcgcaaaccatctgccgattcggatgcggccgagaagcaaaggccacaggatcggcacccctcgtgccgtccgcaactagaggacaagctaaaacaactctggcgtggactcgaaacaccatcttggaacactgctgcttccc

SEQ ID NO: 275412 - DNA, 941 bp, Glycine max
gcaacaatctaccgctactaccctgataagaattggggctatccttttcaacattccccgcccagagctgtgcctctagaacccccccatacaggacacactgtagactcagcctccacaccggagattatgtaccgcaaacgttttcatcctcaaaccaacggcgtcaacagggaagcgatgaagtccatccatatcacaacgcgaacccacgaggaaacgcctagaaacaacgccgtaggatctataacaacttgtaaacaggaacctataaaatctaaaaagccattaataaacaccacaaacaccgcatgacaatggaagagaacacagggagaaggaacgtgaacaacaacgaatgaaaaagaaatggcccgaacaaaaagatataaggaagcaaaaaaacctcacctagaaacagaagccctggaaaccacaagaaaaaaacttcacgtggaacgcgtcagccatggagcctcttcataaaggaggccttagctgcatgcccatccatccaacgggaaccacaaggaagaaaaataaaccgacgacgccactctcaagagaaaaagaaccagaaaatacccaccaccatatgaaacccacgataaaaagctttaaagtccgaaaaataataaccgatggagaaagaaaaaaagagcacaaacctttgacgccctcaaagagggctgaaaatatgacggggaattttccacagaacacagctgaaaaaaaaagccccacaaggccgttaatgataccccaatggcacacaaaactggaggcgaaattgagattctattcaaaggcgaccgaattcgaagtagaactcggcaccccaaattcgacgcacaaatccaccaattccaatcgagaagcgtagtatagttcaacccaccaaccacaaatctcacctaaggcgcctccgggaagcaaaatcg

SEQ ID NO: 275413 - DNA, 758 bp, Glycine max
tgcaagcccagtggttggaggagaatgctggatggcgaaattgatttgtggagttcataatcatgaattggtcaagtcattagctggaccatccatatgcggggccattgactaaagcttgaaaaacacttattgctgatatgaacaaattccctggtgaaaaccaagaaactgatgggaaacttggttggggggcttctatggagggctggatctttgagctttaatgaagtcttttaatggtgattttccaccatggagatgccccggaagaccaaagacaacaaagtgagaggaggctccattcccttagggataaaccatggaagaatgatctttcccaaccaagatgagccttggattaagaagcttggaaagatgctttacatgtaggaaacaaagaggggaaaaaaaaggacagggtgggaccctcaatttgacggaatcaccgaacgggagaaagtggaacttttgaatttttctcaagagaaatcttcttcccttaaagttcacaccaggggttccccttccctttcttttaggaatatgggccctcccttgggaaaccttccttgaaaacttccttttaaaaaaccttcctttgaaaatctaaacttcgcttcccccccccctgttttaactcagctcccctctctggacacttcccttaaaaatatcctaaaaaaccttagcgtctcccccccacaccctttaaataggtaagctcacccctcttggaagcaaacctctagcctttc

SEQ ID NO: 275414 - DNA, 1176 bp, Glycine max
  unsure (1)..(1176): unsure at all n locations
ggcgcggagcantctctctgtccactacttccaggatattaaatattggttatcctantcttatatgcgttgttcttctgctcccnnccaaacaccccgagcagcttgattgcactgcttctgttcacgcctctgactatatgaagttgtacancgtcttctagatgtctcctaagactatgagcaacatggaatgctccntctatatgacgctgagacactgttatagaagtggcatcgacgatactgtattaagaaggcgtgtggaagtcatccgactagttcgatacagcatcgaatacaaacggggacgaggcatgattgacacttctgaatgtgctgtgcatctcacagacatactcaattcggttccagagtccctcacccggaggccttgacaccattcgtttatataatccaactggagtgaggctaggctgatctaagaacatatataatctctgacaacaagcctctcatggacgaagagcgttggttattcagtacacagcatatactgttgccaaagggtgctaagaatataggctttttgcgcaatcaacatttctggtagaataattcccatcctcccctagacgaataatgtcacttccatgaagtatatacattaaaaaagggctagaaggattgagcttacaacatcactcctctcatatcatttaacctggaggcttcagtccccgtgtcctaatgtgcatctagacattcttagtatagaaggagggccctccatctcccctggaatcaaatcaagaaatgctcggtgaaactcaggatggcggtaaaacccgcgattttaataacaatggccgcaaatataatggcccgcaaagaaacgaacacaccaatgcttttcaattatcatagaaaagaggcgcccagtcttgtcctcaggggcctaaagaatcacccttaagggtcacaaaaaaaactatggggttctttaaaaaatggaaacctgaactcgttggcggatttagttccaataaccttggggggtaggaatgaaataattaacctcgatccattgggcctttacggttggatgcttgggctgggaactttacagctaacccggccctttgtcttgttatatcgaaaacgctcagggggcgggagagccccctctaccaagagcacaagatagaactagtt

SEQ ID NO: 275415 - DNA, 505 bp, Glycine max
  unsure (1)..(505): unsure at all n locations
agcttttaaagagttctacactattctagagttctccaagacgttctaaaaaattatacacttttttagaaagctttagaattttctagagcctctccaattaaggagggatcccaacatattttacagtgactttaaattccttgaattctattttggtgttcaacccatctatttgttatgtgtatgtacatcttaagaaagtgataatcaattaacttcaaattactctaaatttttttctacatttgtagcaggaacatataacaaagttttggtacagaaataggccacgaaacattgtgcatggtagatttaacactcacatgggaggtttgctcgttttcttaaaggtaaatgagccagcatattatccattgtatcactactataaaaaatgctntttacgacaccgaatcaacatcggttgtaaaaggacccgctgtagaaaattgaaccgctgccattttttgaattatcgagaaataaaatacattttacgacg

SEQ ID NO: 275416 - DNA, 435 bp, Glycine max
  unsure (1)..(435): unsure at all n locations
cctttgtcactccacccatatctggccttcacattaaccaaacttaacaccaccaacaacagtgtcaaggaattcttgcaccccaaatacaaaagcttctttgaattagtttttaattgcattggtcattcactgcaattaactaaaatctaatgtcctcaataaaacttcacactatgcatgtattctatgagaactgaaatttgtgttgtgatccactacctctgcacattcattttgtaagatatattgaaataccagataaaattcttcattaataaaaatttccatctttattaaaaagaaaacaatttccatctaatgcttcactaatataggcttaagagttaagattggttcanaggaataccattgctgcagaattgagattctactaataaaataaatcctatgttacaactctattcatcaatc

SEQ ID NO: 275417 - DNA, 513 bp, Glycine max
cttttggggatatatttcaccaatgacgcagctccacaaaccccaataccccccggcaactaaacctgttcctttcccataccaaaacagccatgcagtcccgtggaggtatacacctccgagtgaaagggaagaagaagccaccgacatcagctcattgtcggccaaggtaaccaatatcacggggctgagcggtgtgacccgcagcggtcgcatgtttacaccttccgacctgccaacacaacttgcaaacattaagggaaagaccaagatggtggaggagcaaaatgacaagacgaccctcactttgaatgaggatattccggtaaagggtcttccggagaaaagggatggcagcggcaaaaaggaagtgtcactagaggaagcaagcgagtttctccgcattattcagcagagcgagttcaaagtcatttgagcagctcaacacaaccccgacccaggtctctcttttggattactcatgagctctgagcctcatcgggctttgctagt

SEQ ID NO: 275418 - DNA, 366 bp, Glycine max
tctatattagctgcaccattttatcaatgagcacaagttgagtgtttttctgaacattagagattatctcttttatcttagtgagagtgattctcctacattcttgagtgattcaagaacaccctggctgtattaaaagactttcacaacctttgagtgtggcccttcctggaaagagtgattctttccttcctatcatctccacccttgttctttcaaaccacaatttcagaaaatccacctttgcccaaaattattttgtgaccataactgccatttcacacactcaaattaagtgagtcttgagccttaattgaatttcagaacgagacctttcaccttcttttggaatcacctcatttggag

SEQ ID NO: 275419 - DNA, 380 bp, Glycine max
agcttagcaagctttcaacaaatttcttcacaaataactatcaaaaggcataaacctagtaaaactacccatcatatctcccaaaacccaatacccatgaacatttatgtgagaagaagtctacccaaacctgaaatctgaagtcccactatgtagaggtgcactttacgacttcgaaaatggcttcttttcgcgatttggaacacaaatggtgagcaaaagttggagctttgatggaacttcaatggtgaggaagaagaacggaatatccacctgagaaaaagagggagagaaacttctgaatttttttggctgagtgagtaacgagagagagaacatggcttttaatttaaaaagactttttctctttcctttttttt

SEQ ID NO: 275420 - DNA, 381 bp, Glycine max
ttgtgtaccagcaaacaaataactaccctaaaactgaaatttaaagaactgaaacataaaagctgaaatttaaatgacataaatcataaaataactgaaaataaactaaaatgttctgaatgcaaaaatttaaatgtcctgctcctcctgtggctgatcttcattaaaatccagtgtggaactgctgatgaatcctatataaactgctcaagctccatgactggtgtggcatcatcaagaataagtgcaggggctagagatggctttggtataatctctggagaagtttccttctcccgagccataggtacacctgcatcaaaatcaaaaggctcaagaggagtcagctcattctcaccctctacttgtgctggtagtggc

SEQ ID NO: 275421 - DNA, 381 bp, Glycine max
  unsure (1)..(381): unsure at all n locations
agcttangctaaattaggctaaactttcgtaagctatttaagctaagtctaatccaacaagagggatatgagggagaagcttaatttaagttagtctaaacctaggagggttgtctaaattgaccttactccaacaagagggatctgaagacgaagcttggattgattcactccaactagggatcgaggtttagtaatttaggatacaacatacaacacacaagcatgattgattagagaaacatgcttatatgcattaactggtctgttaaaaagacccaacacttctagctactgctgtcaattttacttacatgcatttttactatttttaacctagacctagcttaattctattttaaatcatcaattattaatgtt

SEQ ID NO: 275422 - DNA, 403 bp, Glycine max
tagaggcaattaatcaaacacgaagcgtgcatagattaacattaactaatatgggttaattggtgaagggaaaactgctatgaaactacattataattagctgaataagcccaaatattaaaactcaatacttcattaattcctgaaattagattaaagaccaaaatccggattaagctcaatactttattaattcctgaaattagattaaagacattaaattagctgaataagcccaaatattaaaactgcctaattaatttgacaattaagactaatcagtaattaaaatggtgcaaaaaggtttaagaaatatgagaaaataatggcacatcaatgggcatttggagctccatcctcaataagtgggctgagatggactccaaagatggtgggtgatgtg

SEQ ID NO: 275423 - DNA, 270 bp, Glycine max
cccgcatgcaagccttcatggtgtccaaaaaaaatcacatgtttgtcttcatcaaaaagggggagaatgtgaatgtctgtattcatgatttaaatgatggtccataagaatctaacgaggctgcttcaaatgataagcctttgttttaaaaataattcgagattggttcaacaaacaaagccttgtttcaagactccctaaagaccacaccttgcctttaaacaaagtgctttcaacacctgccaagctctggtaattaattaccaggaa

SEQ ID NO: 275424 - DNA, 177 bp, Glycine max
acaccccatttttctccccctttggcaacatcaaaaagcctattaacttggggatcaaaacagatatattataatgaagtgggaacagatcaattaccaagtattaggcataacccaccaaacttataaataaaggataacccaaccagaattcaaacaggtcaaaattcaaaaaca

SEQ ID NO: 275425 - DNA, 396 bp, Glycine max
agcttgatttttttgtatggctatccctgttatcttaattatcagcaaattgtttcacgcccaactcttgatgttgattggcgaaacaatgtttcatttgctacatgctcctctaataaaatgatacatgtttgcaaaattggagggaatagaccaatcaaaactttctcagggcatcaggtatctcttcctagtcaaccagttcactgatggttttttttattaatatactaacttttaattggaaaggagacaacgactttccatcacaaaatagaataatatgctcacttataattcaactatgaggatattcagttacagttttaatcatttctcaaacattctgaaatacttttgtttcacgatgaagttaatgccattaaatgggaacca

SEQ ID NO: 275426 - DNA, 529 bp, Glycine max
tctcccccaattttctataaatagggggagaagtgaattggaaaagggttcagccccttaggcacttctctctctttcgaatttgcttggaaaaattgtttccgtgaagaaaaattaagccgaggcgcttccgaaacgtttccgtaaggaatttcgtgaaggtttcgaccgttcttcgacgttcttcatctgttcttcatcgctcttcgatcttcaacgggtaagtacctcgaaccaagcttttcgattcattctatgtaccccggggggtccacattgtgttctgtgtatttttattctcgttttatttactttttatacccccttttgacgtgcttaagccattttatttaagtcatttctcgctttacctaaaaataaaatagattttcaccgatcggttgaattgtattatcccgtaaccccggttaaaatgaattcctaccgttcggtcgtgccataaccccgctgggaaatcaaaaagaagttaaatactaattttatcattaaaaattccttttagtaaaat

SEQ ID NO: 275427 - DNA, 663 bp, Glycine max
agcttggcaaacacgttgaaaatcttgtgcatgtatctgaagtacaagacatcgaatattgtaagcaaaaaataatttccatcaataccaaaaatgaattggttgacccacaagccaaaataaggaaactgaccatataagatttatcatcaattatttttgcattagctgtacaatgtgcaatttgaacaagaatgttccaatagacagaagctctatagtgcaccccagatacctgtttttgatgactcagatacaaacaaataaataaaactaatcgatttttcaaattatacaatccaaaatattgtttgagaactggaatttggaatttaatccaacaaaatatataccttctgatcagcagccacaacacttgaaagagtaacaagccttaccattaaattcacatccaccacataaaaagcctgtagcagaatctaacctgtatgaaagacgcatgttcaaaccaatgttttgcttgacagaaatgaacatgcatgaagcaccacgagggaagcgcataagtgtgtttatattttctgtcagctcatgatgtcagtcctaaccaatataaattaaattcagcatgacaaccttctgaaataacataccctaatcaccttgatgtcttcttgcccaagttcaattaaacattttttt

SEQ ID NO: 275428 - DNA, 476 bp, Glycine max
tttggtccaaattatattcctattaaagtttagaagtgcattggagcaccaaaagaggacaaaatcataaacgagacaagtatcacctttcccatttgaattcgtgtgacctcttagacagaatttccaagggagcactaagaggagtttgattgagatcagaaatgaaccattccgagaaaaacacaagcagtgcaatcatctgaacatgaagcaaacaacggatattaacggtcaaagatcacatctcttgtatgacacctacaatataatcaatttattaagatgcagaaagtgaggtttcttataccacttgttgctagataaccaatagcccattagtcatggaagaagacgttcaccaagaatctacaaaaaaaaaggtcattttttgggtgttctatagctactccatccctgttaatttggttttctcaaagaatattaaggtttgcccttttcgttctcccttatag

SEQ ID NO: 275429 - DNA, 833 bp, Glycine max
cgcaacgggctttgtgacgtcttgtcccgccatgatcttatacagtctacctgcatgcatgcttacttatctttgacggaagagagctccaattgattttgcccacgcattagacccacaatgaggcatccctgtgtgtttcccaaaacacgcctgcccctgattatataatgcgacaacgagcagtcctcaaacttccattttgaaccaccccgttgtgtaagagaactttaaaactctcccaaaggccccatttccctaatctaaaccattaatgttaataccaggcttaaacgttcctttagccgccgtgcggagcgaaaagaaacgcattcgcaacgtacacccatgcagcggagacgctttcggttttttttggagcggcccttttcacagcggaacaccgcgcacttgggaaaaaataattccgccgttacttttaagcacagagagcacttgacgggtttcgttggttttgttcgggggcaattcggcccccttttttttttccagacacccagggctacatggctggaaataaaaaaccttcgaccttgggactgccttactcctaacccgctgttccgcggggcaaactaggccccaaacatagagtttcataccccccgctcgggcgcatctttcaaactgaggcattcatattttccaacccctcaaattcttaacccgagcctcgcccaaaaggggggtctcataacactcttacgcggttcgcgcaactataatctttctcccactctatcgctgattctgcctcagcactccgtgtctggtcctcactcccctcctaagcctccaccagcccctattcg

SEQ ID NO: 275430 - DNA, 389 bp, Glycine max
tgaatttaatgaatctaatagtactacaataaagtgaacattttataacggatgctctatcatatatttgactgaacatttaagttggaaatattctgaaagcccctttattcctgaatattacccaagcctcaggttttgtgataatggatcccccgcaaacctaaaagcaccatgaactaaatctttttactgttgtgggggtcttctaagaaagagtttgatatttattttataggtttttgttcgagattttgtgcccagtgctctagcctttttgatgaatggtgaacccgagatagtcaggaacttcttgttgaagacacctgcatcttcagggttgggaaaaaaaagtacatcgggttaagcttggtgaaggtgtgatgcca

SEQ ID NO: 275431 - DNA, 310 bp, Glycine max
agcttgttgggggcgaccgacactctatagaactaatagaggcctataatcagagcaagaaatcccaaagccctgttggacttctctgggtccactaagtgtcttgtaggcgctatacctgcaatctggtaaatagcgttagaaatcagctgagccatatgtacactcacctatgtcaggatggcgtaaaccaactaacacttctgcaggctgaagtctgagttgtggccgctggggaaaatgttgctaagcaacaatgtcatccagatctaagtaatagtggtcacatgatccaaacccgtcttcccgc

SEQ ID NO: 275432 - DNA, 415 bp, Glycine max
ttaggagaaaccattaaaactaaagtagttcctaaacaaaaatcaattgagggagcttcgccaagtgtccccatcgaaattgaaaaacctttattcaaacctttcaaagttagtgagaaggctaaacggaaaattagggaacttagaaaaactaaatccttaactgagggtgtaggtgacaatcatagtgaattactaaacaagattggtagtttactaaaggtcattccagatactccccaaacctcggaaaatacttccaaaatggtaacaagaagtacctccaaattaattaatgttataaatgaagatagtgaccaaacctcagataacacaactgagataggatcagtggtagaaaagaatataaatccaattaatttcaaacactggaaaacacccttcaaattatatt

SEQ ID NO: 275433 - DNA, 362 bp, Glycine max
agcttgatgaagtattccttcttagtttcctggatgcacacacagtccaacttgtattttagattgagctttctaataaacagccatttgatccccctgcccaaacctctgcaattatatgacagaattatcattatcagtaaagggtactcccttctcaactgccattgttttatctctgtcttacatatcagcccccacctttttgatctgatgaatattgccctcataagtcagaccccatttgatttataagctcccattgtttttaagaattgaatggtttttccgtgtctgcaaattctttatccaaatcttccataacctccatttgggcttctttctttctgcccaattttttt

SEQ ID NO: 275434 - DNA, 448 bp, Glycine max
tatgtagaaattttcttttctaaatacacttaatcaaactcatcagtaagcataacctcaaaagacttatgatttgtgttcaaaagctctggataagatttgttggaatcaaaataaatttatctttgaaagcgagagtgaacacccttcggctattgttaacatgatcttgcaacaggttgatcctgtcaacattagcattatgtagcataaacatcttggggctattcaatgtgttgatcgtcatattccttccatcagatgaatccattccagagcctaatcaatttaaattgaatagtgatggatcagttcatgaatatccagaaaaaatctatagttggagggagggttccaaaaccttttgggggttggggttttttcttctccctcaatattggttttgctttggtctacatacctaacttggggccaatgttttatggaa

SEQ ID NO: 275435 - DNA, 283 bp, Glycine max
agcttcaacattcaatttcgagcatctcgatatgttacgggactcaatcagacatccgagaaaaaagttattgtcgtttgaattagctcaaaagttcaaccattcaattttagcgtttcgatatgttaccggactcaatcaaacatccgagaaaaaagctattggcgcttgaattagctcacaagttcaacatttaatttccagcggctcgatatgttacgggactcaatcacacatctctgaaaaaagttattgccctttgaattggctcacagcttcaaca

SEQ ID NO: 275436 - DNA, 544 bp, Glycine max
ttggagtttccaagtgccaattcgtcctcttctttagtccagtcttcttctggcttcaattcatcagtgggctttccttctgtgtccagcatcttgggatgttcccagcctttgatgacagctttccaagttctgctatccagtgatttgaggaaggccaccattcttgctttccagtattcatagttgcttccatcaagaattggtggtctgttcactggtcctccttctttctccatgttcatcagaatttatctccccagatctcactctgtgatttcgagtgttggctctgataccaattgaaattctgatacccagggacagatgtcgtacaggatgtcacgacatcacgcttaaaaacatgcaaattgtatggtgtcctatgaacagattaaacacgtaataacaccagagaattgttacccagttcggtgccccttacctacatctgggggctaccaagccaggggaggaaatccactctcaatagtgttagttcaaggtctaacaaccccctgtttacaacctttctacctaacca

SEQ ID NO: 275437 - DNA, 897 bp, Glycine max
  unsure (1)..(897): unsure at all n locations
ttatttctctgttcctcgaaagccgagcgagaccccgccaatgtatctgagtgcgactccgtaatgtgatatcacctcacagcggcttgagacaagattcttatcccataaataactgtgttacattcgggtgtccagatttgagtccccggtatttatatttcgcatcagcctcgttgaattggaatagtcgtgcaaacctccttgatgcacaactttcacaccgagccagtaagctttttttacctccggatcccctgagatagaatccccgtaattataatcgaaagagccttcaatagatgaaaagtaaaagactgctgacatatatgtcatacccacgacttccttttttaactggcgatgtaatgatttgaggaccccgtcaatctatttggggactcttcctgagatggcaatgatccaaagatgcttagaagaatctgacaccaacaatttggctcttataaccgggcatggttggaatttgagttccatgaaatctttcgctgggccgccatgaaaatgggcaggatgcggaatctctttgtggcanaatgaaaaccccatgggtctcctcttcccacgccagaatatgtcgtgtggaatcccgctccatactctttggccaggcattctaataatgaatatggggaatgattttgtcgcaatgatcccaaaccgcaaccattgtgttgaaattagtggccccgcacaaggcccccgcgggtaatattcgaacatgcggggtcaaatgaactttctaattccttgagcccaaacttcgaccactacatagcaggattcgcctcggctgtgtggttggggtcacacccagggtttatcggaagccccctacactaatcgcgggggtcttacagcccatttcacggcccc

SEQ ID NO: 275438 - DNA, 390 bp, Glycine max
tctacattcaatttcgagcttttcgatatattactggactctttcggacatccgagtaaaaaggtattgtagtttgaatttgctcagggcttccgtattccatttcgagcgtttcgatatattaccggactcaatccgacattccagtaaaaagttattggtggttgaatttgctcaaagcttcggtatttcatttcgagcgtttcgatatattaccggactcaatcagacatccgagtaaaaagatattgtcgtttgaatttgctcaaggctttcgcatttcatttcgagcgtctcgatgtattacgggactcaatcagacatcccagtaaaaagttattggcgtttgaatttgcttaaaagcttccacattcaatttccagcttttca

SEQ ID NO: 275439 - DNA, 545 bp, Glycine max
tgatccggaagccatccgtacgtgcgtgaggcacaaacgccatctacgtaccttgtttgccgccaccgaccaccgcaaagcttcacgccggaaacttcaccttcaccgctgcactcaaccttgctacccccacgaactatagacaatgccgtaggaaaaagtggaaaactacaagaaagctttttgaaaatggagtaacaagctgttccggaaaaagaaatggcatttttaatgaagaaagctgatagggacaattttggccttttatatttttgctaggcgcacctaacaccactctttaggctttttggaaaatctttcacatgctttccactctaccatattcaaatgggttcaaaaccctaaacaaaaaggaaaatatatgagtatacctatttacacttacaccttttaatgcagattttaagttaggaccaaatttacgaaatgttaaaactctttaattttcaaagggcacaattcttcactgggatttttaagtatttttttgggattcctactggggctattattataaaaaatta

SEQ ID NO: 275440 - DNA, 416 bp, Glycine max
agcttcgatatagatattaaattgaactgaaagctaagtatgtacataacattatctaggaatagaaattgagagaatttcactgggcctgcatgagttagtgactatgtggccattgggaaacttaacaattataggatttatttccttgtaagaagaaaatgagtgaagaaagttgtgacatgatctgtggctcctaaatcaagtatccattcacttgatttgtcttgtttacactaccagttatggataaaatcttacctttatgtgtactactagatccagtgattgtatcaatctgattcacatgtgtattgctatgaattgagttttggtgcttcaacaatgtcatcaaggctttatattgttgaaaggtcaaccttatttcatcattttatgccatttggttttggtct

SEQ ID NO: 275441 - DNA, 486 bp, Glycine max
ccaaatatggccctatcgagcacgataagtttttaattacaaacgaacaaatgaaatgagtatgccatgacaggttaatataccagtctacaaatgaacaaagactcaaacacaagatgaaaatgtaattttgcactaattaatccaacaccataattgcactttattcatttacaagttatagccataggctagcacaaggtagcagttaacttgaaacttgtgagtcatccacaatagatagagtaataataggccatagcatacagacaactgccactaaatgaaaaactaacctggtaaagtccatgaaataatccagctttcaacctccatacttatcagcctaaggtggaagcaagtgatgaaaaacagtgaacatcactttcatttcatatgattgaaccctattgataatccacgtatattggttcaatgcagcatacttaacctaagaaagaacaacaggtgagttactcataattc

SEQ ID NO: 275442 - DNA, 428 bp, Glycine max
tcaaagggctgaaagggatgaatcaagagtggaaagtttaatgttttagattagttgaaagcttgtccaaggtcaaagagaaatttgaccgagcagcttaatagaaccaagagaatatgttgacaatcatcgacccatataaagagaagcttaacctagctgctaaccatgaaccaagactagaagacgagcatgcaaagggatcggctctacaagtggaaaaggaagccagaaagagagtgatagaatcattgcacgaggctatgaaatggatggatagatttgctctcactctgaataagagtctagagctttcaaggctggtagccagaaccaaagcaatggcgggcgcatactcatctcctgaggaagatcatgggcttttttattattgtcaacattatgatcgagtggaatccaacataatt

SEQ ID NO: 275443 - DNA, 347 bp, Glycine max
  unsure (1)..(347): unsure at all n locations
agctnttagtaacaaaatgagagattattacttttaatgagaagttactataattatttgatggaaagataataatcctataaataagagaaaatttgtttaatattcacaaaagctttggataaagcacaaaaaaaatgtacctcatgtttataatattattaataataagtaaagataataaagataaacaaaattggttaaataaatctcaaataatctaagttcaaattatgtaccatacttatataatgatagataatttctttttcttaaaatcacacatgatctctcttgacattatcggattgctcaaaacggagaagaatagagaaaatacataattt

SEQ ID NO: 275444 - DNA, 335 bp, Glycine max
ctataaatctcagcttgacgcgggaaggaaaccagtgatgagaaaagtaaaagggtattctccttatggctacaggttcttgttctggactggtaacgttgtcttcttctctttctagaacttattatatcatccatgttttgtaaagaatctgtttgtttcatacctctgtcgagtttcctcgaaaatcactttaacttgaatcttcatctcttgcctccctaataaatctctaacagctttgcttgatttcaaactccgacaaaaaacaaccttgtcgacacagcaaagcaaagtctcatattaatataagaagatgtgtttggtgtttgagt

SEQ ID NO: 275445 - DNA, 413 bp, Glycine max
agcttgaatcggacatccgtgtgaaaagttattattttttgaatttctcaagagcttccgttgtgtaatttcgagcctctcgacatattatgcgcccgaatcggacatctgtgtgaaaagtcatgatcatttgaatttctcgagagtttccgatgtttaatttcgagcgtatcgatatattataaccctgaatcggacctcagtgtgaaaagttatgaccatttgaatttgacaagagcttccgttgctcaatttcgaatatcactatatgtgatgcgcctaaattggacattcgcgttaaatgtcatgaccatttgaatttctccagagcttccgttgttcaattctgagcgtctccatatgtcagtcgcctgaatcggacatcccggtgaaagcttttacccttttaattt

SEQ ID NO: 275446 - DNA, 385 bp, Glycine max
tatcatatatcgatacgctcgaaattaaacattggaaactctcgggaaattcaaatagtcataacttttcacacggatgtccgattcgggtgcataatatgtcgagaggctcgaaattgaacaacgcaagctcttgagaaattagactggtataactttttacacggaagctctcgtgaaattcatatggtcataacttttcacactgaggtccgattcaggcttataatatatcgatgcactcgaaattaaacatcggaaactctctaaaaattcaaatggtcataacgtttcacacggatgtccgattcaggcgcataatatgtccagaggctctaaatttgaaaaacgaagctcttgagaaatttcaatgggcataactttt

SEQ ID NO: 275447 - DNA, 331 bp, Glycine max
agcttcttatccaagacactcttggtggtgaagctccttcttccatggcttatttcctaatggatggcaccttcgctcacctcttctcctttatctttcgcagcacctccctggatgaaaatcaccattgaaggacctcgttgaagttcaaaaattaagctttcatataagcattctcaaacaagctttcatcaagcccgatgaggcatcttaccatattcctccttccatggcttattcctttgccatattcttgcaaaatgccaaacaaatatttcaagaatatgtgaaaagcatcttatcatattccttggggagctcgaggggggga

SEQ ID NO: 275448 - DNA, 1506 bp, Glycine max
  unsure (1)..(1506): unsure at all n locations
cacacacacttcntntccgtgccatcgtcgccgtgtnntnncatgctcgatggtctcgaaanctactctgantcangcgctgtcacataattgaagatatgtctttcganacctaatctacatacatgccnnnnnnnnaacggggnattggactgccgtagcttgttatacccccctcacctctattacagacgacgaacacttctggtacctccaagcgtgctgacncggtaancngagaccgatatcacaacgactgtttttcctattaaccagcctcatagtctacacatatgtgagcgcagcacgaggcgttgagtaccggacatactgcggagcaacgccattgtgcacaacaacgggacaggatagaacatctcgcttttagcaacaccatatntgagtgagcacagggggtctcgtcacgcaaccacgcttataaaccaagtcatctattcttacgtacgtgcatagcgtgcaacagtaactctagagcagagagtgctgcaaagaccaatctgggactcctagcgatcagctggtccactataaaatggtggtgacacataaacagaaaaaaataaatatcctctcactatttcaaaccatcgtagatagctgacgaagagaggaatggatcgnnnctgtaanccagccggcaatatctcttcagccaagcaatagggtgtaggcgctatacctgctcggagtcacagatctacgctgcggagtataatantacacgcgtgacgggacataagtcacatcacgagaaacgtggttaacatcccggcgacactcctgtcttgtgctgacgtataccgtctgtgacactactacaacaactgatgccgcatcgcctggattcgtgctcattaagcccgacgcctacctcggcgnntntagtggaccaacaacggaaagtcaacttcacacctcgtctgttggcctacgcgtgccgcacacactttcgtcgaaacatacaatacagagcgttgattcctagcgtctgcacaatgcgcgagctcgagtctcacgcatcganatgcccggcgagaagacatgtgcgacgcgcggaaagactttccangacggcgtcccgcacatcttcacatgacgcaacgacacacgcgctcggctgcatacatcatctacgcgcgtcatgtcgatacgcagantcgcgtacgcgagaggagngtgagtgngagtgaggtgatatanaacgacaccgaactaccacctcaccactcgcgcccgacacaattgtgnataatccgtgcgtagggtcacacatataagatatgatatagtgtagatgatatntgtatgtgagcgacgcatgagaaatagagatggangattgttaagttnagtgtgtgtgaggatgagaangagtgagctcgcgctcgcgggngatactcgtccatatactcactaacantgngtatctgacacgacagactctgtgagnanacgactctctcatgctgtactagaagcgagagc

SEQ ID NO: 275449 - DNA, 558 bp, Glycine max
agcttaaactcatttatagtgctttgccattattattcccagatctattgttactaaaacctgattgggttccttggtgtaatctttaaatcgattaattaagtaactggtctgtgattccaatttgagtggtacgtttatgcatatgactaggagtgagttagcactaaattggatttgaatagagtgttaattagttcataatttgaaccacatttataaaatagttacataataattgtaaagaatttttatattgatattcaattataaattatcataaatgataaatttgttgactttaaaaataaatatattataagttacacctataatagattttgattggctcatagtattttttatatattaataatacataaaattaaactcaatatttattatttattatatacagaaaaaatcatacatatatatatatatatatatatatatatatatatatatatatatatatatacatatatatatatatatatataacacaaaaatctttattttcaggtcataaaatatacatgttgtctattaaaaaaa

SEQ ID NO: 275450 - DNA, 474 bp, Glycine max
tgtagacttttgactctgtgttgtagccaatgaaaatacacttttctcctttatcggccaatttcttcctaagttgatctagaacatgtgcatatgctatgcacccaaaaactttaagatgtctaattgatggtcactgtccattctaggctttttctggcgtcttgtcacaaacacttttagtcaggcacctattcaaaaatgtaaataattgtagcaactgcttctgcccataactccttaggcatttccatggccttcgacatgcacctcaccatatccatgattgttctattctttctttcagctactccattctgctgaagcatgtatcttgttgccaattgatggtgaatcccatgctggtcaaggaaagttatgcaagtgagatattcttgtccttttgtcagtcgaagtactttgattctacacccattttgcttctctaccaacacatttgaaagcatcacaagc

SEQ ID NO: 275451 - DNA, 329 bp, Glycine max
agcttggactgtgctagagagaagaacaaatgatcaaaatgaaccaagagctatttctacggcaaaattgggtgttgaggagtcaaattttgattccgtggaattttaagtgtaaattcagcttgagccagcttacattgatgttatggacttgcgcgaggtgagagtttgcttcaaatttacctcattctaaatttcacttttcaaacctacaaaacccattgaattgaagggtgttggacacctaaattctgagttgctgtgctctaaagcctgaatttggtttagacatgattgatacatgatttgggacttgcatgaattgattt

SEQ ID NO: 275452 - DNA, 534 bp, Glycine max
  unsure (1)..(534): unsure at all n locations
tgtagaatggctagacatgatacatgtcatggcttggtttggttcaagggtaaaagggatgccccacattatttccatgacacaaatgcaaaaatgatgatttggaaattttatgcaaaactggtcatgcatgcacctatgcggacactcaagtgtcaaatttttatggtcatgtgatgctagggcttangatttatttcctctattttaaatcaacccaatgtttccaaaatatgttcttttatcaatttgtgcattcattcgagtccatttcgggcgtccggggaaatttcacagcattcacccttcaggtgtagacacgttttttttctcttcaaaaatcggtcatgatcaatgaaatttttttttcaagaagagtgggaatcatctcttttaaaagcatgtcgggttttagctagacacttattttctcttttttcaccttttttcttaactgccttctctttttttcttatatgctctctttttctttacctcccctcttctttttttcttaattggctcccttttctt

SEQ ID NO: 275453 - DNA, 311 bp, Glycine max
gcttctccaaagggcattgaaatttctatcttcttgaaaatatccagaaatctagcaagaagcctttctttgtcttttctagaaagtagcaagggatatggtacttctttcccttcagctgaacatgctttcttcttttttctttctaacacactcactcttgcttttcttcttctcttcttttctctctttttctttttctattttctcattttttttctttttcttttcaattactttttctttatttttcttctcaccttattttttgttcactcacacttattgttgccctcttcttcttctcatcc

SEQ ID NO: 275454 - DNA, 468 bp, Glycine max
ttcaacaaatgtcttcacaaataatcatcacacagcagaaccctagcaagattacccatcatatctcccaaaaccccatacccacgaaatttaagagagaaagaagtccacccaaacctgaattttcgaagtcccacttgtagccacgcacttcacgactccgggaatgccctctttttgcgatttggagcggaaatgagcaccaaaggttggagctttgttgggcaacaatggtggatgggagaaaagaagaagaaagctgcgtgagagagagggagagctgtctgaaattttgtggggctgagtgaagagagagagagttgctttttggtcttaaataaaaggttttccctttttccgttattttattcaagctctgccacatgttcctatttgagtggagcaagaagggcccactttctctttttgactgtgacccatactcagtcacaaaagtgagaaaaatct

SEQ ID NO: 275455 - DNA, 913 bp, Glycine max
tcaccggccacggcccttttgacttcttctgccccgggctcctttaagaccacctgcaggcatgccagctttcataggtgaaatcacgaggcaccttttttttttacagcctggaacggggcggacgttgctccatgttctccataatgcttcaaaaccaggaaggttccaaacatccacccaataagcacgaattgcacacaactctaccacttcactggaaatgcttcacagagtgatcccacaaggcgcccaacacgaaagccctaaactcacatctattgaacacggctctattctataataagcgatccaaaagcggctgttaagctcacataggaattgtcctcccaagtcccttacccctgaccattttagacattgctccaaacctagttgccctctctccactgtaaaataacacagtcgtgaccattctgaacctaccagctaccctccaaatgatattccaatgaacttaaaatttcggagccaccttatctaatgatgaccgagaataccccataaaaatttaaaaaaaatcccaccttaacttttgaaccaacaatgcggttctaaaactcaaaaagtaccactgcaaaatacacaaactttttcaccaaataactttttttgggaagacggaaaacctccaaccacgcggcttcaaccggccacccgcgtcgttcttaccgtgtaggaaaatttttccctacaccacactaccctttaaatatccccgcatcttacttaccccacccaaaatcattgcccgtccgcacctcttacccaaaacaaactctcgctctctttttgaacacctctaatcccgatcaaaccaacgcctctatcttattttcccctaacacatcttggttctacacaatctctccatccccacattcccgcccct

SEQ ID NO: 275456 - DNA, 466 bp, Glycine max
tggatttccttttagtagggaatctttccttcctaagatgcatccaaacccagtccccctcattaagaactagctcctttcttcctctattgcccttaattgaatacacctttgtttggttctctatttgggtcttaaccctctcatgcaacttctttacaaactctgacctagattccccttctttatgtatgaaagaagtgtcaagtgggaggggaatgaggtctaagggtgttaagggattgaacccatagacaacctcaaaaggggattgcttggtggttctatgaacccccctattgtaggcaaattctacatgaggaagatactcatcccaagacttatggttgccttttagaagagcccttaaaagagtggataaagaactattcactacctttggttgcccatcaatttgtggatgacaagggggagaaaaaaaaaacttaatttctaacttaaccca

SEQ ID NO: 275457 - DNA, 349 bp, Glycine max
agcttttaaaatgaaactttatctctagtaatccattacccgaaactgggagtcgagtaccaaagagtaaatactctggtcacttacaaaattttgagaaacactcttttgttaaacaaaactgtgctatgtttggcttttgaaaaaatcgttttcatactttccttgagaagccttcttgatttcttctcttgaatcttgaattcatcttctcttgaatcttgaaatcaacttatcttgaatactgaatcttcttttgaacttgttgactccatcttcaaatcaatcttttgggctctttgtcatcatcaaaactacttgattcatacttgaatcatcatcatgaaac

SEQ ID NO: 275458 - DNA, 465 bp, Glycine max
taattaaattctatttaactaattattaattatatttagcattactctatttaaattaattatataatgctacactaattaaatagttaatttggtgtttaaaattctaatttctaaggttttgactaaacttgcttctatttacaaaactatcattaattggtataccaacacatccacttattattttctacttggaaatttttagggtgttacatgtttgagtatgcattactttgtttcaaacatggactagtaattttaactaaatttacgctatttttttattctcgtgggtttgcgttttactatagcatgcacgattctagtgccaaaattgatttttgaagcaagaaagcaagaaacttgctgtattttgaaagacttgtctaattaatgcttgtcaactgggatttttcttttcattcaattcccattttttccattcttttattattttacatg

SEQ ID NO: 275459 - DNA, 731 bp, Glycine max
tttctcgccgaaaactaacaggacgacccctcatattctcccaaaaatctccatacgccactcaagattgtaatgagaagaaggagagtccatcccccaactctggggtatttcgatagtaaccacttacgaagatccacgccactctaacgaaacccgaaaaagccctgctttcgcgatttggagcagaagtgagcaccaaaggttggagctttgttggggtttcaatggagaatggaggacaaggaaaaagcaacgtgaggaagagggagagcttctgaattttctgatctggctgagtgaagagagagaagaagtctctgggcttaaataaaaagtttacctctctctctattattaaattagagctctaccacatgtccctagttgatcggaacagacagggcccacgttgttatttgtgagtgtgagccatactccggcacaaaagtgagaaaaatccgacctctggaacgctaaaaacctgcttccgggtgcgggccgcctctttgggtcaagaactccggttctatgagaaccgtggcgccagggtttcaacgcaagctttatgtatatcaaacgcctcgaatggaaacccaagggggggtacaagatgcgccccctaaaatgacaccccggcccccgcgcagaattttaaagtaaaaggttgggaacaacccctttgcctgcacaacttagattcggttcctttaaaagacccaagccccccg

SEQ ID NO: 275460 - DNA, 364 bp, Glycine max
aatacttattctcgagaatggagaattgcactaagcaatcactacgcctatcttctaactcgaagcggaggacacattaacgaaaactcaattcatggggcttcgaaaaaagggtttataatggataattacactaagcaatcactacgcatagcttcaaactcaaatgtggaggacacatgaacgataacccacttcatggggctccgaaaagattgagaatggagaattgcactacgccatcactacgcatagctccaaacgcgaaggtggaggactcatgaatgaaaacgcaattcatggggctcccaatagattgataatggagaattgctctaatcaattactacccctatgtccaaac

SEQ ID NO: 275461 - DNA, 771 bp, Glycine max
ggcccggtcttaccttgtacccttgtccggaccttagaggcggcgcttccacttgtcccgccgaaaccatttccactatagtactgacacggagagcttgtctttatggctaaaccaacggtttgaattcagaaagaaatctaaatgtttttttaaaggcgactaaattaacactccttgtcttataaagttgggccgtaggatccactgacctcaagtaaggcttgaactcccttatatataataagacgtttggttgctctacaattggtttgctcatctttttggattacttcaccattctcagataagtggtgggaacctaccctttagtgggaaggcgagccctgactccgcggatagcgtgttcatgagacgaatacccgcggagtccccacaacgtttatttgagaatacgcttaaaaaccggagaaaacgccaccttctaactataaaagcaaagatgggcagtttttttactccccgggtaggatttttacctaaaaaggcgggccacaggaaagcttctttaataggactggccacattaccttgtttccaccccccctttacaccacatatacttaaatcccgcttaccctcatccacatctgggcgccctcacccgcgtcccctatggcaagcactcgtccttctccccccttcaaaaaaaaccccccctgtttcttcccatttacactactcctctaccgccttcccttcttgccaacaacttccattgtccccccaatttctacaattttaatcccg

SEQ ID NO: 275462 - DNA, 311 bp, Glycine max
ttttaacaccgctggtggttgggaaccaactcttttccaatgtaaataggcctgtggatttaacaccgattgacacttttcttgcttatcaccgccctaagaaaaacctgaacattgctggtttggacgaagcctatgacacatttgacctaagatgccaaaaaagcagttccaggaatggctgttttacaccccactttttatgtatgggtgggctcccatgttttttggaatgaaaggaaacctatctgccccctataaaggcatcacatgtgggccgagaaaggaaaagccaattgggaaaaactctt

SEQ ID NO: 275463 - DNA, 921 bp, Glycine max
cgccccctgcgatttgagaccatgtaaccccgtccaaattgtggaaaaaaacctcctccccccaagcaatccatcctatcctaatatctcaaacattatttttacttttttaatggaaccacccctctagggcagatattattataattgtaggcgtaaaacacttgctccaaaacattattcaaaactcagaactttctttcctcactacaaatggaccctattcaaaattactctaatggtacctactatgcagatcatactattcatacaagtagacatttcatattggaagctcacttatgttcgcgttcataatattcagacccgtatgtattaaatcctataaaataacttattacacacacataagcgaatactctttcatccttaaatgaatctctctaaacaatctttttataggtctaactggttgaaatcaatgtcatcaataacgtactgctttctcgggttacaccccgccaaaataatgtatttcttatttccatgaactatcagaataccgtattatatggaacaaacgcgatgctttaagctccgccattttctatatttaagaaacgatgataaaacgtactacctgatgcactctgatataattatcagtcgtgaccgctccaccatattgttaatactcaagtgattatcatgcactatttcacatttctcaaaactcacggttgatatctctgtcccgcataacaaacagcatcgattaaatggatacgaactgtaatggtcttgatcagttcgttactcccacctacacaatacattaaggctctaactaactcttactatactctcactcttgaatcgatttaatatctcactaacacatactcacttttgtttctagcaatattctcttcaataatcgtcgccatagacgtcagcacg

SEQ ID NO: 275464 - DNA, 989 bp, Glycine max
  unsure (1)..(989): unsure at all n locations
aggatgagcgcnattgagcnctgagtacnnttctctcnnnnttttnggnaatagaaccactctcgccttggaagaaggaagncttntannannaaaaacaagagangntttaggannnnccccnnnnnnnnnnnnnnnnnngggnnnnnnnnnnnnnnnnntgcannnnnnaaaattgaattggggtttgaagaaaattgtcatttattcataaattgagaacaagtgggtaaaacaatgcgctcgtatgttataagaaaaaaggcagccgtttctctgagaaagacttttttggagaaaaaattgcttgagaagcgttttttgagaaaacttcttttgagaaagctagaagcttagggtttcaacacccaatttaaaaaagtaagtttaactttctttgagaagatttgcttggagaagcctagaggtttagcttagagaacaacccctttaaataaattaagggtcacctttcttggagaaaggttgcttgaggaaggttagaagcttaagtttcaacacagaccccttttaatataataaagttttagcttcctttggagaaagagaaagattaaaggctttaaccttactacacccctaataatattttaggcttaatccccattgagaaaaaaaggttgtaagagtaccaaatttaaaggtccttatcttttaatagaattattctaaatgggcgttggaataaaaagggttaaacccctctatttactatgaaagggcgaaaaataacagggttgaaaagaaagggaaaaaacctttttttatattttatcaacgaagaagatgattctaaactttggccctatgggggtaaagaaaattttaactcataggtggatgaagaaaacgtacaatatcttttttaatatggctatggccagggctcttgtnggtagttttttacataaacgctttagggggtcgatgagtataagagcctctaagggttaaggcgttataagagt

SEQ ID NO: 275465 - DNA, 474 bp, Glycine max
agcttaaagtatgcccgagtcattcatccctatgagatgttgttgaagtattggcgatcagaattgccattccttggattatagggttgaaccaagctcatgcttttacaaaaaggttcatcaagtcaagttgaaatatggaagtaatcgtcttgcaaaattggggcaaaagatgaatcgagtcacatcactgcttcgtctactgccaaacatatttaggattattgatgtccttgttacttccagtttcaccttgacaaagatgtcatggaccatgttgaaaatctaaattgattcaaccccatatcctgcgtaaaaattcgcaatactttgactgtacatcattcgcatgcatccatgcttttcattggttgcattgcttattgcattctttccttgaaaaataaaatagaatacaataaaatgaacttatcaaaaagaaaaaaacatgctttatggcgtccttaccgaact

SEQ ID NO: 275466 - DNA, 355 bp, Glycine max
tgactactcggaggcaaagatattctatccatatttgaatacatacaatacaacccacagtggaggagttatcctaacttttcctaccaaaataatcaagatcaaggaatatttaaaggggtagtttattgcacaaaaaaaaagttaagtagccttctaccttcaataaccgatagatatggtagctaagactttttaaaaactctaaatattaagcaatcaccatccaagttgtatagccttgaaaaggggtttgtagtgagttaaaagaagtctaacaagtttgcgagtcgctccatccaaaacttgaaacctaaggtggagccaatgatggataaaatggagaacatggcta

SEQ ID NO: 275467 - DNA, 479 bp, Glycine max
agcttgccgccacggagttttccgactatgctcttgtgtggtggaacaagctacaaaaggagagagcaagaaatgaagagccaatggttgatacatggacggagatgaaaaagatcatgaggaaacggtatgtgccggctagttactcaagggacttgaaattcaagctccaaaaactaacccaaggcaacaagggggttgaggagtatttcaaggaaatggatgtgctcatgattcaagcaaatattgaagaagatgaggaggtaactatggctcgatttcttaatggtttgactaatgaaatccgtgatattgttgaactgcacgaatttgttgaaatggatgatttgcttcacaaagcaatccaaggtgggccaccatttaaaaggaaaggaagggctaaaaagagttttacccacttttggtcttctatttggaaaaacaaagggatgaaagatggggctggtacttttagaatt

SEQ ID NO: 275468 - DNA, 328 bp, Glycine max
ggttgatacacctatgcgtctgttttataccatggttaacctgttttgagctaaggtattgcaaaattcttttctaacagagggctgaggcagcaattgctattgggttttgatgatttcattgcagatgccttgcaaggtactggattctatcaaaaaggaacattggaaaataagagagctgatggtatatcattgctgaagaggttattgagaaaaaaaaggaaaaaagccaaatgtaatatatctgtcattcctttcacaactgatggaaagtagccattggagttctatttcaaaaaaagattatgtgctccttcataaattt

SEQ ID NO: 275469 - DNA, 324 bp, Glycine max
agcttgtgaagtataaaagggagctcttcatattattaattttgcttgggatatacgtggatgataaggattccaaatgtatcaacatcgcatcacttgcaaccttcaaatttgtctgcaatgaatgagaaattattacatgatacatgatcatatatgttcaaccaatttctacctgacatgtaattaagcattatcaatttttttttgtaaactgaaaattttgggtgcatgttgtgtaaaaacatgtgggggtgcaagactatgtaataatttccaggaatgaacactgttggtgacacaaggatttaaatttagcgacca

SEQ ID NO: 275470 - DNA, 468 bp, Glycine max
atggttatatactattgttactaaagcagattttgagaatatcataccaacaggaaagcttcactagtctaatattcagtctcatattggaaggaaaaaacatcataacaagttcctactaggtaaattaaatctattgtttgatctagttaattatggtttccatctggaatgttaacaaaagggttcagaatttccaacggtaccacttggctaatagacacataagaataactgtacaacatattaaaaagaatggaaattgggtgtgaaatataattctcacaaataatttacacacctcggttccatgtttaacaatggattcattaggaccaatgttactacggcccattggcaaaatttggcaagaaattctacagcagttactggatcagcatttttgttgcccctaaattcattgtaaaaagacattatgtttaaaaacaattcacagattagttttta

SEQ ID NO: 275471 - DNA, 605 bp, Glycine max
agcttctctctacctataaatacaacatcaaggtattaaagaaaaacaatgaacatgaatagagaaacaagagtcgtgaatcaagaaaaaagagaaaagaaaaacatttgaaacaaatacactaagcctaagagagtttatcctttgtgatatacaaagtacttatgagagattagaacttcattgtaaattcactctgagtgttgtaaataatctctaattctatattaaaattttgtttatgaaagcaatgagtgacttagtgacaaataatacttagtgttcttagattcaggaagagtttaagggttgtaatagtagtagccttgagaatacttgtaagccaaaagtgataggaaaaaaatacttattgcaatcaagtttgattagtggaatcctttactggttgggaaaagagaactggatgtagtattatttactggtcttctttagctaacaaagtatttaaaagccattattgatacattttgcgcacaaagtttaactggaaaaaaaatttatccatcattggatgacaaaacacttgtagtcattggacgaggggttttataaacatcctttcattttaaaagggtttttttttt

SEQ ID NO: 275472 - DNA, 486 bp, Glycine max
  unsure (1)..(486): unsure at all n locations
tgaaagatcccgggtagtcaaagagaagttcaagtccatagttattaaannnggaananannnnnannaannaanggannnnaatnnnnccccnnanaaagccttggaatgagaaaccaataacgcccgaaaggaagaacacgaccaaaacaagttttgaggggctttatagggcagcaatagtgagctcaaactccgaagaggtgaaaggaatcatcacgggtcaaaggcatgatctggaaggatgagctaaagtcttgccttacgtcgaaaagaaatttgttccaacagttaaagcgagactgaaaggaatatgtgggccatcatcaatgagtgcaaagagaagctatttctatcggcgactcacgagcaaaggctagaagatgagtacgccaagatatcagcataaagggaagcaatggaaagggtaattgattcattgcactaagaggcaacaatgaggatggaccgattggtcttactttg

SEQ ID NO: 275473 - DNA, 464 bp, Glycine max
agctttcacaatattcaaacaatttaattccatttgtcatgaaactaccctaaaccaagaaaaatagagtggaggcagaaaactctgcacaaaactcattcaaattccacagttttttcctactcacatgccccagtaacattctctttgttccaatttgttaaccattggatcgacttgaaaattttactggaagttcctaatacagaaatctaaattttgaccgctgggatatgctagaaaatatctaaaacacaagatgttctacttttcccgtgactagcgctgcacaaccattttttctgcataattggtaaaatctgctgcacaatttgacagtttttgctgcataatttggcagatttcgaattctaccttgcttgtatccaatttcgctcaaattggatcctacaagtcctaaaccctgtttaaatcatgttaaaaccaaaaacaaacttcaaccc

SEQ ID NO: 275474 - DNA, 530 bp, Glycine max
  unsure (1)..(530): unsure at all n locations
tggagaggatgcttcaatggaaaaaaagaaaggagacccnnnnnaannnnnnanannnnnnnngnnngaannnnnnnnnnncccannnaaactttgagttgtgtctcacaagactctcattcatcaaaattacaacaagtgttacacatgcttctatttatagactaggtagcttccttgagaagctttcttgagaaaacttccttgagaagcttctttgagaaaacttccttgagaagctagagcttagctacacacacccatctaaaaactaagttaacctccttgagaagcttccttgagaagctagagcttagctacacacacccctctaataactaagttcacctccttgagaagcttccttgagaagctagagcttagctacacacacccctctaataactaaggtcacctccttgagaagagaagctagagcttagctacacacccctataatatctaagctcacccccatgacgaaaaacctggaaaatcccaaataaagggccctctacaaagactactca

SEQ ID NO: 275475 - DNA, 519 bp, Glycine max
agcttcatgatgaatcaacaatgattcaaaggtgttttgatgatatcaatgatgataacaaaagatgatgacaaaggtaatgaacataaagctcaaaagatcaaagaacaactcaagtgaatcaaagaacaactcaagtgaatcaaagaacatctcaagtgaattaagaacaagtcaatagttcaagaatcaagaagaattcaagactcaagaagaaagtctataataaagaatcaagattcaagattcaagatctcaagaatcaagatcaagatccaagactcaagattcaagaatgaagaaaagactcaatcaagataagtattaaaaagttttttcaaaactttgaatagcacatggttttttgacaaaacctttaccaaagagtttttactctctggtaatcgattaccatattgtttgaatcgattaccagtagcaaaatgagtttgaaaaagttttaaactgaatttacaacctttcaattattttcaaaaggctggaatcaattacaatgtt

SEQ ID NO: 275476 - DNA, 258 bp, Glycine max
  unsure (1)..(258): unsure at all n locations
gtttggagcttgctttataaagggaatcactgatcgatcgactgggctgnnnatannnnatggggggnngnnngnnannnnnnnccccnnaattttgggaactgatacaggaagaacttttccggaaccaccacgggcaagaggttggcgatgagagatggcgcgagttccgcatacgtgatatgggatctgagcaaagaatagtgaatgccttggcgaacaggttctcgccgggttgatacaaaagtgagcattgtt

SEQ ID NO: 275477 - DNA, 297 bp, Glycine max
agcttgaaaggaaacaccactgtttttgtgaatcattggatccatttggaaaaataaaacctaatgtggagttcactattgtctgactgcttgtctctcccaagaatgccatagttttttgtaagagttaggttatgactgaaacttgtggttttttactgtgttaggctgggttatacatatagatgagttgtaatatcagtgctatattttttaaagattaaaaatgcgcatgcccatgctttttgtatgtgttgtcaactacaccaatgacccgacatgctttaaacttgcatc

SEQ ID NO: 275478 - DNA, 331 bp, Glycine max
tgcaaaatgattttccttgttaataatgttcttggaggaatccttttcctctttttcattccccttgggctttgaagtgaaggacttactattcttcttttttcttttgtttttctagtttttcttgctcatacctcttattatctttgggtttagaaggtgcagcccttaagatgtcttgaccttggtctttctttggataagagtgagagccataagattttgaagtaggcttccttttaagttggtgctctaaccttatgcaaagttggactaggtcatctagggtcctatatggaaggagctcaaccttgttcctaattgcatatta

SEQ ID NO: 275479 - DNA, 89 bp, Glycine max
cctttggggggcttggaatcactagaaatatgacagcgaagagctatggtttaaattcgaagaaaaaagtagaggctcaactataaccc

SEQ ID NO: 275480 - DNA, 830 bp, Glycine max
  unsure (1)..(830): unsure at all n locations
ccccggggngtgnnttganntcgtgcaccccctgaacatagaannntccccccccccgccccgcgccccncncccccccccccccnctcncctcgncnnnncccctccncgcccctcnnannacannnnnnnncnnnnnnnnngggagaatgttagggaggattttccaaacttataaacacttccaaaggtcggtcctcactggaccttggcctagtcgacgccctaggaaaacctcaggactatggatacacgaactaaaatggaggctgcagaaaaggctaccctcgctgatcacagaccaaatagtatattaccgaagctgccaaatagggaatatcatgaacaggggccaacacataacccagttcaacttgtgaaggacccatgtccatccccaattcagcaaattccggcttagaacctgcaaaatggagatcgacagtgtaccttcttaaaaaatagcccaaacctaccaaggcgcagcccatgtctcaaggaccggaccttcaatgagggccgaaaaaaaagtgcggaaatacccgctttgaaggacaacaagggaaacgctccccgggaaaccaagttgccacaccaagccgggaacactccgcccgaaagaccatctaaggatctgaaacccccatcacaacagaaccttaacctcccatgtttgaacaaggatactcggaaacaagaaaacccccctggcacatagaaaaatttcctccaaccgtcagaaaaaacgacaacaaagggggaagggccccccaccaaaaaaaaataccgtgcctgaaaccaaaatcacctctggggaaaaaaccaaagtc

SEQ ID NO: 275481 - DNA, 446 bp, Glycine max
agcttgccacccagctcgcccaggcgagcagggttgcttcctccagaagcaacaaccttctggaggaatcttctggagggcccaagtgggcctggttgctatttgcacccccatttttactaagtacaccccctgcctttttttggtgattcttttttcgtaaagttacgaaaacttacgaatttcgtaacgatacttgttttctttccgtaatgttacggaaccttgcggattacataatcatcccctttttgacttacggaatgttacggaacctcactaattgtgcaacgatgcttccattttgatttctggtgtgtcacggaaccttacggattgtgcatcaatactttcttttgatttccggcatatcccggaacttcacaaactgcctaatgatgggtgccaagcaccttacaaagaccaaacaaaagttgcatgtcatc

SEQ ID NO: 275482 - DNA, 288 bp, Glycine max
cctttgtcaatgagtatcttcatgcctcttaagtgcagaagtccaaatctttgatgccatatggggacttcatcttctttggaggatagacacatcgaggagtaactggattgttgaagtgtccataagtaacacgagccctttgatttgctgcccttcatcagaacttcactcctataatttgtcaccaagcatactgactttgtgaaggttacattggatccttcatcaaccaactgactgaagctgatcaagtttgcagtcactccctttaccagcagaactttg

SEQ ID NO: 275483 - DNA, 579 bp, Glycine max
agcttaacaattatattattatatttccattactatagtattttttttgtaatgaacatgcttaaattgaaaacttaagtttgaatagagggatgaaaaacctagctataggaataattgtatcgctttctacaatatatcaattaccacatcttttaacaccttgtttaattaaattcctcattccagagctcaactcaaatttggcagcttcaatgtttgttcatgcaattgtgaatatgtccaccacattttagaagatatcctctagaattacgtagcatttggtatgtgcttgtgtcctcctaatttgacaattaatctatttgaattctgaattcgcaaggtatttttgaactaattagggcactattttgttgtgtctgtgcacgtgtggcaggttttgataatccatcttcaatctgcttgatattattaggtatgaagaagggaatcacgaggagactaatttttaaatagtaagttctgcttgctacttatttttctatgttccttgctttcaaaacttgtgcttgcacaaattgtatatgtacttgttaagtctggacaataattaac

SEQ ID NO: 275484 - DNA, 598 bp, Glycine max
  unsure (1)..(598): unsure at all n locations
ttgcacaaaggtntgaaagtccttttaactccnnnnantnnnnntnnnnnnnnnnnttnntnnnnnnannnnnnnccccccnnngcaccaccacttccggcacatctacaaaatcatttggataaagttcaaccatcctcaacaaatttttcacatcaaaagctttaaatgatgatgagggactcaaacatgaaacacattgtaaaagttcagtattctcttcatcaaacctagcattgagctcatgcaactgcaaatctaaaacactaaataaaaaatcatgcttataatgatgaaaattagaaacactataagtggtagcatgtcatctaggtttcttcccttgcacatacggtgcatccaaatcaagcacattaatatcatgcttattgcaaatttccataaccttagatataagttctttccattcatcatttcctatttcttggaaattcttctttggtggctttgacaagtgataaagcatttcaaaagatcttgatcacgcctttggagcgcttcacttaaatcatttgtaaaatctcaaatctcaaccctcatgtataacatggaaattaaaatcaaggactgaagccca

SEQ ID NO: 275485 - DNA, 497 bp, Glycine max
agcttcgcaagatggcttcctcgtcaagctcagctctctctcagtctctccacaaccaaaaatttaaaaaaaaactcaacaacccttccaaaatcaagatttcagctttaagtaggcaatcctgtcggtgggcgcgtgcttagtgaaagatgagctcgcttagcgcacataagtgacttctggcttggcgtcagtcttctcgcttagcctaagggttaaaagtggtgcacttagcgagttcacactcgctcagcgcctctgtacagcttttccgtcttctagattctcacgtgcgcttagccgaaagatagtgcgcttagtggatggcttgcccagtgcgtggcgtggctcagcaagttcataaattctgcacttcaccaatcttgcccattttttcagaaaattgaaaggaatgatcatttcatacacaaaattgggatactgagtacctattacttaaattaacaaaaaagtattacaatactacccaaaacaac

SEQ ID NO: 275486 - DNA, 340 bp, Glycine max
ttttgggatgtttccagcctttgatgacagctttccaggttctgctatccagtgatttgaggaaagccaccattcttgctttccagtattcatagttggttccatcaagaattggtggtctgttcactggtccttcttctttctccatgttcatcagaatttatctccctagatctcactctgtgatttcgagtgttggctctgataccaattgaaattctgataccaggggacagatgttgtaccggatgtcacgacatcacgcttcagaacatgcagattatatgtgtccgtatgaacagattaaacaagttaataacacaagagaattgtttaccca

SEQ ID NO: 275487 - DNA, 547 bp, Glycine max
agcttcttttggaccttgaacaggcaactaactcctctttcaaaaccatgctatgtgctcgcgactggtccctttcttcctttcgcaacttgagttcactattgctaccccatagagctccgcgaaatttgttccggccatactcttccttgcgagccctcttggtctcttgttcaagggctcttgcggtaattgcattctcttcccgtaacccggcacactccttccgaacgtgtgtagcggccaacttgaacttctccttggcaagttttgcctttcctaactcgcttttgagagcttggacttcttcgtcctcttccggtgcttcaaaactctctttgctgacgacttttaacttggcgagccaatctaaacctcgtatatgaactttcagccattcgtggtacccaccaatgatgccattacgaatgcctctaagctcttgatctttctttaacggggtttcccacgccttatggattctttgtatagtcttggaattttgggcgccgaaatcccttcccaaggaaagagacatgctttcttt

SEQ ID NO: 275488 - DNA, 407 bp, Glycine max
  unsure (1)..(407): unsure at all n locations
tgttgtgcaccatcgcccgaccgccacctagtacgacatgtgatgggtnnnnnataatnntanaagntggagatgaagaanngnnnnnnggnnaaacttcctgcttttattgttgaccacagagtggtacctggagatatgtcgcgggggtcaggagaccttggggacgtcaggtggggtgctattgcccaaaaccaagcttgaccaatcccgacccaacccgggcatagtcggtcagtgagaacatgtgacgtacctaagcaggcgagctcctggcagtcaacagataaaaggaaaacaagaccacagagcaaggaggcttgtggtggctggccagctgtgaattttgtgtaatatgtggattgtggcctctggtaatcgattaccaaaggtgggtaatcgattac

SEQ ID NO: 275489 - DNA, 528 bp, Glycine max
agcttgcttgagcttgcagctaataacgatgttgaaggtttttagcgaatgattgagagggatccttcctgtgtagatgaggtaggactatggtacagtcgtcaaaagggatctaggcggatggtcaatgagctcagaaccccattgatggttgctgctacttatggtagcattgatattctggatctgattctctcactttctggctgtgatattaataaaccttgtggccttgacaagagcactgcccttcattgtgctgcttcgggtgggtctgaaaatgttgttgatgttgttatattgcttctagcagcgggggctgatccaaattctgtggatggcaatggtcatcgtccagatgatgtcattgttgttccttccaagcatgagtctgttagaaacaatcttgaagcacttctttaaactgatgacttcattgcagtgtgtaatttcagggtggacaccgcttcatcaaatgcatattcttcacctttgtcaacattatcagagaatgggtctccttttgca

SEQ ID NO: 275490 - DNA, 503 bp, Glycine max
  unsure (1)..(503): unsure at all n locations
ttcaatgctcttaagcaaaagttaaccaatgcccccatacttgttttgnnaaannnnnnaaaatntttngaaattgaaggggaagnnnnaaaaatgggattggggctgtattgttacaagaagttcatccaattgcttattttagtgaaaaattaagtggtcctacccttaactattctacttatgataaggagttgtatgccttactgagagcgttgaaaacatggcaacactatctttatcccaaggagtttgtgatccatagtgaccatgagtccctaaaatacttaaaaggacaaggtaagctaaataaaaggcatgccaaatgggtggaatttcttgagcaatttccttatgttattaaacataaaaaaggaaaaggaaatattgttgcagatgccttgtcaaggagacaccttttgctttctatgcttganacaaaaatgattgggattgattacttgaaaaaaatgtatgaaggaaatgacacctttggtgaaatc

SEQ ID NO: 275491 - DNA, 433 bp, Glycine max
agcttattgcaacttaattgtagtctagggtttttggaatgggggaaaggtttttgggaacgactgataatttgtgtaggtgagagaaggggttcttctttagtctccaatccatcttatcttaatagtgtctagatccaaatgatagtgaaatatggcccaagcattatacaataaaccctacctaggatagttgttgtcctatatggtggatgttacccttcctgtaactgttcgtttaaccttctaccggagagttggatgttcctttgatgaacctggccttaaccctttatgggagtgtcaccttcctttaatgaacttattcttggccctattacggggagctgcgtactccttttttggattttcccttattctttctggggaagctttcccactcctacttggatggatccccccccctttacca

SEQ ID NO: 275492 - DNA, 291 bp, Glycine max
tatgggtgtaattcctgatagtaccttagtttattgggagtctaacttatgttctatatctaacggtttacaaagattttgttgtttggattttatgcggaaataaaattgaagtgtataattacattataagcttgttttgtttgaaatatttatgatgtgattggataaatctctataaaaaataaaggttgaatcaattggaaataggcaagattgatatcacattgcatgtaattttaatattggttatgcatattgagctatgtaatatgaagaattgatgtgatg

SEQ ID NO: 275493 - DNA, 372 bp, Glycine max
agcttgttgagctatgtcgaggcttaccaaggtgtctggacttttattttgtgaacctgtgaggatcaccaagtgtgaagcttgggtttgtctagtttgcaacacatttgctatgcttttgcatatatggcactcgtcgtgggtggcatgtactggagacgtaatggcatgctcttgcatatatgtcactcttcgtgggtggcatatactaaagacttaatagtgtgctcgtgcgtacattgtacttgttgtgggtgatatgtactaaaatcatggtagtgcacttttgcatttatgtcactcgccgggggtgggatatattggaatcattgtagtgtgctcctgcgtacatgtcactcgccgtaggtgaca

SEQ ID NO: 275494 - DNA, 479 bp, Glycine max
  unsure (1)..(479): unsure at all n locations
tgggaaagatctaacagactcagcctantgttcaccacacctccccgccgccnnaccncnacncacccnccnnntanatnnnnnnnnnnnnnannntatgggattagtggaagagcgctctcaaacagctgataagtctattgctgggacattaatcagtacattggccaccatgaagtttgatggttcacgtactatgtatgaacatgtcattgagatgacaaacattgcaacaagattaaagaccttgtgaataactgtgaatgagaactttcttgtttcagtttattttgaactcattatcgcctaagtatgacccattccaaatgagctataataccatgaaagataaatgaaatgtgcacgaattgcatagtttgttagtttaggaagaaatgaggcttaagaatcaaggaagtcactcagtccattatgtaagccaccaagggaatccagaagctggaaagaaatttatgaag

SEQ ID NO: 275495 - DNA, 591 bp, Glycine max
agcttgaaggcaaattggatgcattggttaacttggtaacctagctggccttgaaccagaaatatgtacctgttgcaagggtctgtggtttgtgctcctctgctgaccaccatacagaccttttcccttccatgcagcaacctggagcaattaagcagcccgaagcttatgctgctaatatttacaatagacctcctcaacctcagcagcaaaatcaaccacagcagaacaattataacctctccagcaacagatacaaccctggatggaggaatcaccctaatctcagatggtctagccctcagcaacaacaacaacagcctgttccttccttccaaaatgctgctagcccaagcagaccatacattcctccaccaatccaacaacaacaacagcgccagaaacagccaacagttgagacccctccacaacctttcctcaaagaacttgtgaggcaaatgactatgcagaacatgcagtttcaacaagagaccagagcctccatttagagcttaaccaatcaaatgggacaattggctacacaattgaatcaacaacagtcccaaaattttgacagctggctttttaaac

SEQ ID NO: 275496 - DNA, 417 bp, Glycine max
  unsure (1)..(417): unsure at all n locations
tgtggatctagccgtgatcgatcctttttttgcttatcaccttaacanggaaagnnnggnnattggggnnntannatangcgnntnnnccctnnaatttaagatgcgagaaaagcaatgcaagaattctctgttgtatgcctgctctttatgtatggttggtatcccacgtctttaatcatggaagtagatctatctgtcccctacaaggtcattgtatgtacttatgaaaggatgaaacaaattgtgaagaactcttggcaggcataatgggagcgtccattatttggttcccacggtggaaagaagggggggcaggagtattatgctcatgtgaaggatttcaaaatgtccctttgatggggatgaggggttgcatcaactataaccctgtgttggccataagacagttaggata

SEQ ID NO: 275497 - DNA, 1149 bp, Glycine max
  unsure (1)..(1149): unsure at all n locations
cggaccccgcgaccgnttttgaanaccctttgatnagtccccttgtcaganacaccggcngnnatcctnctaggagaacgcactctcgcagnngctatgcatagactcttggagaagaataatnncaacacgcactatttataccttgnctcatctgcggcgatgctctcagatttgcaggcgcgtctctaagtagtcatctgaagcaccctctctcgaaaatattgataaaacctgcaaagtcttctcattgantacatgttctaataccgaacatactagacatttgttatatctcgcgcattgttctctatatttgaagtttcctcgtgcacatatattaccgagcaacgcctctgtatatttatataaaattcgagagtcttcttgatgcatatattttatataccgagcaatataacttcttttgacatctggcagtgtcgccgcatctgtngttcctcaattcgcgataatctcaacaccccttctgtaaatttgtaaacaccggtaatgtcttctcgagtacaaatattcaagaccgaccaacttatcttttttaaacttactggatggttcacgattggcgtcctctcgtatatattatacacagcacgctctcgcaaaatgttaaaaaccggcaagtgctcctaatgataatagttcaaacaccgacaattaatcctttttgaacatccgggaggatccgaaatttgggttctccggaaaggaatatctccagtaccgccttcgtatattggataaaacgggagagtcttcctgataaacaatattataacggaacaattaatctttttctacctcggatatgtgcgatttgaaccccttgtaaggaatttcagagggngcttcgttaatttgaataaccagaaagtctcttgggaacaattcaaaacgaacaataaattcttcaccttcggatggtccgtatggacaactcgataatattttccaagacgctcccttactttgaaacactgggacgatcttggacacaattttaagatgagataataatatctctttttatcgccgatggttccaatcgtggagtcccggtacgaatatattcgaaaacgcctcaccnttattgtgacacacgctcggccttctcgaagatacatagcg

SEQ ID NO: 275498 - DNA, 882 bp, Glycine max
  unsure (1)..(882): unsure at all n locations
aggcacggggntttgaaacgctaggtacncagcaaacaatcctganactatttgagacatatcaatgcttctctttacaattacgagngnnttnatatattattttccnnnnnnnnnnnnnnnnnnnnnnnnnnnnnnnnnnnnnnannnnggcnnnnnnttgattgtggctgtattggcagctataagtataattacatattgctctatttgtgaaagtaaagaatttaaaaggtactagccttaaatattttacttatgataacgatttaattaccatagtgagaacgttgtaaagaagggaacagtatatttattcgaaagagttgggaactatagagactatgaatcctcttatagaattaaaaggacaatgtcagctaaataaaatggatgccaaatgggtggaaatacttgagcgatcaatttatggcattaaacattacatgggaaaaggatatattgtttcaaatgccttgttataggaaatccttatgttttctatgcttgaaacgaatatgaatggaattgaatatcttgaagaaaagtcgtaaagaaatgaccccttttgtgaatatctttaaacaatggtaaaagttttctaaggatggttttataaaattgaaggctatgttttcaaaaaaagaaattatgtgatgccaaggtgtttaataacaaacttgcctgttttgttaacttattaaaggggggtttatggggtatttttgggtgcccaaataacttttcatactattacaagagcttctttttatgggcttccttcaataaacatagtggccaaattttctttagcatttttattgtttcaacacagtgcaattaaaaaagaatgtcgcttcggttgtaaatccctctcccatt

SEQ ID NO: 275499 - DNA, 691 bp, Glycine max
agcttcaatcttttacttgtgtttcattcagatgtatttactactttcaaaactcaatacctttatgtatttatgtactttttacacatatttctataggttaaagttatttcattactctcttttttgtctaaaagtggtatatggttatatctaaaaatgacattttgcactcataaagtatttcgaaagatgcatttatttttaccgaacaatttatcttttgtcatgactagtatgtaataaataaataaaaaagaaattttttactcatgttttcttaaaggaaaaagctttcttcactggattgatgaacatgattatctaaaataaatttaaattaaaggaaaaaggcgtgatttttcataatagattttaggatgtcacacgataagcttaaatattttggatttctttttgtctcacactatattgttagaaaaactcctgaattttttcttttgcaaaaatattataagctattggactaattatatctttggtttccaaacttttcttgaaattttacttgtagtccttaaacaaaaatttaataataatatttggtcccctataatattttttctattcaatagtcttaagttctttgttaccaagtaaaaatggttaatttgaataccttaatcaattcaatcattgtattaggccccataactcatttttttttttt

SEQ ID NO: 275500 - DNA, 426 bp, Glycine max
  unsure (1)..(426): unsure at all n locations
ttaaaatttgaattaaaacgttnaataactgcaggtaatnnattacnatnnnnaannnannnanagngnanannnnnnnncccaannntaatagctggtgtaaatcatttttggccactgttaatcgagtacatcctctggtaatcgattaccagagagtaaatatcttgaaaaagactttttaacttaaatttcttggccaaaccttttgctacttcaattaggaattcccttcctatttaatatgcccttcctaagactctagagactgtcttgatcatccatcttgaatatctttaatttctttgtcttgaataaagctttgaaaaaacatgtgatcctttggcatcatcaaaacattcagcttgatcctttgtctacataatggagagcagatgcttacctcgacggtgatacaacaaaata

SEQ ID NO: 275501 - DNA, 490 bp, Glycine max
agctttatgttcctgtttttatttcttttttgttgattttcttgctttgcttttcgctgggttccgtttgtttcctatactatgtttgttacgttgtttcgtttggttcccatgtgtgaaggtttaacttttgtgttttattggttggtcattgttgacatttgtatctgcatgtttagtccgtaactgattgtctgcccttttgactatttttgctcatacttttggatttattacatcatcaatttaagagtggcagttctatgcagaattatggcagtactcctgacaagattaagtttatagacgggtcaagaaaaaccctttaactaactgtaaggatcacggatctttggttcgttgggactcccaacaagtctgaacaagctgaaaagggtattggtgaatctaatggatgggcctttattgttttttgggtgcttgattggttaccattcaatcaggtgtttatatactttgcatgttaaag

SEQ ID NO: 275502 - DNA, 525 bp, Glycine max
  unsure (1)..(525): unsure at all n locations
tagacgaccttgttgagtnnnaatcctctcctnttctctcggcnacncctcntctnactgccaanaaaacgaannnnannnnnnnnnnnttttgaaagacaaaaaaaaatgttttaaaaatacttttaattaatatttgaattttttattccttattagtatatatgtgaggggtagagggtgtcacaaagagactactgcaaaatagccttgaagacccatatagtgtttgggaagccatgaacaacatgatcactctacaacacactgaaattaagacatcttttgagacaagcacacatgtggtcgaacatgttttaaagttacattgtacaaaagactaattggcatggtatcaaggcatgcgttaaaccagattgctgctgaatttgagccagtgaattatgttggcattgacagttctcttgtggatgtattatgagaactacttatggtctctcatgtgcatgtgaactagctagatatattgttggtagcataccacttgacacagtccatatattt

SEQ ID NO: 275503 - DNA, 370 bp, Glycine max
agcttgctgccacggagttttccgactatgcttttgtgtggtttaacaagctacaaaaggagagagcaagaaatgaagagccaatggttgatacatggacggagatgaaaaagatcatgaggaagcggtatgtgccggctaattactcaagggacttgaaattcaagctccaaaaactaacccaaggcaacaagggggttgaggagtatttcaaggaaatggatgtgctcatgattcaagcaaatattgaagaagatgaggaagtaactatggctcgattttttaatggtttgactaatgatatccgtgatatttgtgaactgcatgaatttgttgaaaaggatgatttgcttcacaaagcaattcaagt

SEQ ID NO: 275504 - DNA, 410 bp, Glycine max
tgaaacttttactggagggtcctaatacataaatctacatttgaaccgtgggatcttctaaaaaatgtctagaactgaatatgtactatctttcccataaccagcaatgcactagcatttttctgcacacatcaaaaatttgctgcacaattcaacaacatttttctgcataatagggcaaaattcgaaatccatcttgcccacatccaattttgctcaaattggatcctacaagtcctaaatcatgtataaatcatatttaaaccaaaaacaagcttcagaccaagcaattcacaatctaggtatctaaaacccatcaatttagtggattttaacgcttgagaagtgaaaatgagaatgggatattttggagtaaactctcatcttcaacaagtctataacaataattt

SEQ ID NO: 275505 - DNA, 553 bp, Glycine max
agcttaggaacccaaacttgtagcttcaatgcttggaaacatgcttatggctaggaatccaaaatttggttttagaattagaaaaacatgaaaattaggatttgcttgtgagagtttttgctcgaatttgggctgccccatgtttgatactttacatagaggtagcgtggaaaacaccttgcaatagtgtgtatacataggtaaatataaggagcatgaaattcctagcaaagtatgaataattgttttcttaaatgaatgtatgatagtgtggaatgccctttttgaatgcaaatatctacaggatgtaattagctttccaatatgcgtataaatgaataggagtgaaacagcaaaaatttgtatggtgtacttcaaatgtatgtaagtagtttgtgatagcaaatgttcaggatattaattatgtgtaaagcttgacgcaacactctgagcataaaagtgtgttttcttttttagaatgtatataggtgtatggcaattaaaatatattaaatgttcttggatgttgacatgggtaataagatacttttta

SEQ ID NO: 275506 - DNA, 560 bp, Glycine max
  unsure (1)..(560): unsure at all n locations
tgttgaaatcgccatgttgggatgagttaaacatacccattntgnnnnanggnttttgtgatgatgntngngangnnnannnnntnnaattgctgatggaaatctgttagagacgaagggtagaactaacctagggttagaaagtgagaatgtgatgttatgagtggaaaaagagtgagactttgagggttggaaggctaagtctgaattctgtggtaaatggaggttaaagtgagttaatactagcttgaaatgtcatttangacttatgagaaagcttggactgtgctagagagaaaaataaatgaccaaagtgaacaaagagccatttctatggcaaatttgggtgttgaagagtcaaattttgatttggtggaattttacgtgtaaattcagtttgagcaagtctagattgatgttatggacttgtgtgaggtgagagtttgctttacatttacctcattctanatttcacttttcaaacctagaaaacccattgaatggatgggtgttggacacctagattctgggtgctgtgctttaaagcttgattttggtct

SEQ ID NO: 275507 - DNA, 414 bp, Glycine max
agcttacttaaatatattccttgaaatgggtttttctttcatcaccatcttctgtcgttaaaaaataaatgcagacactaacataataacaactaatattagtattttggtactactataatggatttttttttatacaagacgaaccaaaaggccaacaggaaacaaactccctaataaatctgcatgtcttcacaaaaataaatctgcatgtagatgaaaagaaacaaaggaagggggttatcaaacaccttacaaccagaatagagaattttggcaaaatttgcaaaagcatccacaaaattaactttctgaaaacaatgctgccaaaaaattagcttcccaaaaacataaaattatggtttttttttttagaaataacacttatgatatttcatttcaaatcaaattttg

SEQ ID NO: 275508 - DNA, 350 bp, Glycine max
  unsure (1)..(350): unsure at all n locations
tccttttttnnaataatatattggatgtgacccnnnannnttnnnnnnnnnnnnnnnnnnnnnnnntnnnnncccnnnnnnnattgtggatgaacttatgcaattgccggtgtttaattaggaaaaatggatccagggtctcttgcttactggattacagattggcacaagtttgaaaaaagtggggcttgactcttatgaatgttgacctgcttggaatcttttctcctaatagaaggctctttctaaaaaacaaaatggcgctacaattcattgctccagactccatactacggacgatgtctcttgccttcttctgccctataaactgtttcactttgggaatttta

SEQ ID NO: 275509 - DNA, 241 bp, Glycine max
agttaaatgaataatatagcttgtcattctattacttcttactgtataaaagactattacttcaataagagaagccaaatttgatttgattgtgcaattgttcaagttttgacaagacaagtgaaacttcatgtttttattggttggaaatatttcaatgaaatgttgaagtgtaaaagcctgcttggtagagaagagtaacttagtgtgcagttaaaatacttatatttggaagtcagca

SEQ ID NO: 275510 - DNA, 155 bp, Glycine max
aaatattttcaacccataaaaacatgaagtttcacttgtcttgtcaaaacttgaacaattgcacaatcaaatcaaatttggcttctcttattgaaggaatagtcttttatacagctagaagtaatagaatgacaagctatattattcatttaact

SEQ ID NO: 275511 - DNA, 563 bp, Glycine max
agcttcttatccaaggcaattcttggtggtaaagctccttcttccttggcttattccttaatggatggtgcctcccctctcctcttatcctttgccttccgctacatctccatggtgtaaaagcaccattgaaggacctcattgaagctcaaagatccagcctccatagaagctccacaagcaagcttccatcagaagtgattgatttcaatatacatgattgattttttgtctttggtaattgtgtccaagtagttggaagtttgaaaattaaaatttggaagtttttggaagtttgaaaattaaaatttggaagttatcggaagttgaaagttgaaaatggaagttggaagttgaaaatggaagttgaaagttgaaaatagaaattggaagttgaaaatggaagttactggaagttgaaagttgaaaatggaagttgaaaagtggaagtagaagttattggaagttggaagttgaaaatttgaaatttaaaatttaaaatttgaaatttgatattttgaaattgacatttaaaaatttggaaaattgaatttctttttttg

SEQ ID NO: 275512 - DNA, 418 bp, Glycine max
cccctgtgcatgaactcatgcaatttccgttttctaatttggaaaaatggattcacggtctcttgcttcctggattacaaattggcacaagtttgaaaaaaatggggcttgactcttatgaatgttgacctgcttggtactctttcctcctagtgtagggttttttcgagaaaacaaaatggcgctacaattcattgctccagactccatactacggacgatttcttttgccttcttctgccctaaaaactggtccaacttgggaattttatcttaaaaatttagtggtaacattcccttattcattcatttaaaatcactgtacttttggttggaagatgcatgaaatttatgggaagacatgagataaaaaaaacggataattgaatgtgtgggcataaaaaagttgagacatgcc

SEQ ID NO: 275513 - DNA, 492 bp, Glycine max
agcttctggtgactgggaagcacgttattctgttgttttcccgatcggttccttcgccaagtatgtgtatatgtgtatatctgtattatattcgttgttctggttgttgtttgtattttgttttgtgcagaagaaaaaaagaagaagtagagatgagagtcgtcatcgcaaaaaaggcaggacggacgaaatcagtgtcctatctttgctttcctcttatctccgatgagaggtaagtaaagaggggaaactgtcataccctaatttcgtccggggattattacttgatgacatgcaatctttggttagccgcttcgagatacttggcgtcctttgttgcacaataaatgaagtccccagacgtctcagaaatctaaaagaagcatgcttgcgcgatccgtgaaattccgtaatgtggcggaaagtcaaaagaggcgtttttgcgcaatccgtaagtttccgtaactttttcgaaagcttaaaaagagtaaa

SEQ ID NO: 275514 - DNA, 502 bp, Glycine max
  unsure (1)..(502): unsure at all n locations
tgaatcctagcaccatttttgggaaagttttgaaagaaaatgactctgaantcanaaaaagggatnnanggtnaaaannnnnggggnnnnnnnnnnngaataataggaaaaaaaaatactataatttactatcattttggatttaatataatttatatttttcccaaaaaaaaatactataatactataatttgctcactggacgattagatacaacttatttagtggatttgtagtcaatttatttagtggtcttcgaaccaaaacgcccttttgtgttttttattatttgaatcttgatttacacgtgttcataactcctgtttatttatagtttaaatatgattttggcttcggcaatctctgaagaataaaaaattaaataggaattcataatatttagaaatactacataggtaaaaaaaaaaaaaaccttgcatggacttattttggtgtatcttgcatggactagactaagttctttatattctcattgacttta

SEQ ID NO: 275515 - DNA, 495 bp, Glycine max
agcttgccgcccagctcgcccaggcgagcaatgttgcttcctccagaagcaacagccttctagaggaatcttctggagggcccaagtgggcctggttgctatttgcaccccccctttttactaaatgcacccccttttatattcttttgtaattctttttcagtaacgttacgaaactttacaaatttcgtaacgatacttattttccttccgtaaggttacgaatccttacggattatgtatttactcttttttacctttcgaagaagttacggaaactcacgtattgcacaaaaacacctctttccgacttccgccacactacggaatttcacggatcacgcaagcctgcttccttttggaattctgagacgtcttgggactttcatttattgcatgttatcaagtaataatccccggacgaaattagggtatgacatttgtaatctacaaatgtggtgattcatttggcaaatagaaatgttgctcaccctg

SEQ ID NO: 275516 - DNA, 504 bp, Glycine max
  unsure (1)..(504): unsure at all n locations
taggaacccaaacttgtagcttcaatgcaaggaaacgtgcttatggcttnnganccccaaaattnggnnnnanaattanaaannnannnnnnnnnnnatttgtttgtaagaatttgggctgccccatgattggtactttgcacctaaataacatgggaaatgattttcaatgctgtgtagatatatgtgtaaatatgaagggcatgaaattctttgcaaaggatgaaggaatattgaggtcacttcctaaatgaatgtatgatagcatgggattcccttttgaatgcaagtatgtgcataatgttaaatatcttgccaataggcataagtgtgagtgaaacaatgaaagtttgtatggtatatatatcttgagtgtgtgtagttagtttgtgatagcaaatgtttaggatataattaagtgtaaattttgacgcaatgccttaaacgtgagaatgtgtgtttcttttaaaatgcatatatatgtatgacaattggaatgtgttg

SEQ ID NO: 275517 - DNA, 483 bp, Glycine max
agcttcaacattcaatatcgagcgtttcgatatattacgggactgaatcagacatccgagtaaaaagttactgtagtttgaagttgctcagagctaaggcattcaagtccgagcgtctcgatatactacgagactcaatcagacattctagtaaaaagttattgtcgtttgaatttgctcaaagcttctgtattcagattcgagccttctcgatatattacaaggactccatcatacacccgagtaaaaaagtcattgtcgtttgaattttctcaaaacttcaacattcaattccaagcgttccgattttttacaggactcaattcgattgccgagcaaaaagttattgtcgtttgaatttgctcaaagcttcggtattcaatttcgagtgtctcgatatattaagggactgaattatacatttcaataaaaagttattggcgtttgaatttacacataaattcggtatccattttgagcact

SEQ ID NO: 275518 - DNA, 270 bp, Glycine max
tgaaaaagattatgaggaagcgggatgtgccggctatttacttaagggacttgaaattcaagcttcaaaaactaacccaacgcaacaagggggttgaggagctttttcaaggaaatggatgtgctcatgattcaaccaaatattgaagaagatgatgaggtaactatggctcgatttcctaatggttacactaatgatatccgtgaaattgttgagctgcacgagtttgttgaaagcgatgatttgcttcacaaaaccatcccagtggag

SEQ ID NO: 275519 - DNA, 509 bp, Glycine max
agctttgatgtaacatttggagaggttaatgatacaacgagatgatgcgctccatgagaggttggatcaaatggagaatagagaccatatgaattgctcaagagcttccattgttcaatttcgagcgtctagatatataatgcgcctcaatcggacctccgagttaaaagttatgaccatttgaaatgctcaagagcttccattgttcaatttcgagcgtcacgatatattatgcacctgaatcggacctgcgagtgacaacttatgaccatttgaattgctcaagagcttccattgttcaattttgagcgtcacgatatattatgcacctgaatcggacctgcgagtgacaacttatgaccatttgaattgctcaagagcttccattgttcaatttcgagcgtctcgatatataatgcgcctcaatcggaccttcgagttaaaagttatgaccatttgaattgctcaagagcttccatttttcaatttcgagcgtcacaatatattat

SEQ ID NO: 275520 - DNA, 244 bp, Glycine max
tggtcataacttttcacatggaggttggcttatgcgcataatatatctagacgctcgaaattgaacaatggaagctcttgagcaattcaaatggtcataacttgtcactccgaagtgggattcaggcgcataatatatctagaatctcgaaaatgaacaatggaagctcttgagcaatttaaatggggattactttttactcggaagggcgattcacgcgcctaatatatcgagacgctcgaaa

SEQ ID NO: 275521 - DNA, 1155 bp, Glycine max
  unsure (1)..(1155): unsure at all n locations
aggatatgcgcnngttttgaaacccgttgttagcaantcttgcgaaactctcggnagaaannatatcataccgcntcctcgtaggttatgtatatacatttggtgtgataaggggagaatgactttttcgtttcatcttctcacccgatcttataatttgcataggtgcgctcttgtcttcaattaacttaatccgaaagccaactattattgcacattaggaacatatttactcttcatgtgtcacctgagggacaactgtattcgcaactggcctctcatttctatcctacccgcttggcaatcatacataaaccatcaatggattctgaaagccttctcaatctctggccctactccagattttaagaccgaaattaacgcgacttccttttatttaacgattcaaaagacaaaaggtgctgtctttacatttcactgtttcttaaagttcggttaaatgctggatacaaaattcctgaccactctgtcttcttaccgatttagaaagtgtcactctggcgtaaaaaaatgaacaatttgtgtaggaatggtgagagttaaggaagtcctttctgttattcacaagggatatcctataattaagatccgaattacttgggtgatctcgtgtgtcttaatacgggtcgaaaggcagatcttccggngactccaaccgtgacgattcgaatcatttagtctggataggaaagccaaatacaaataatttccccaacagatttctatttcgaacacatattagcacttcctctgaatacaaatggaaaaccccggtaacggctcccacgcattacattgtatatatctctacatcgttgaatatatcgcttctggaacctatgaactcaaaaaccattatattcgcctaattgtcataactccagactagaatcacaggcgtgtaaaaacctttatagacttcgaagaagaacaacactcgatttaaattgttctatgttccgctcttggggaaatacacaccggcgtaaccacttacttgtaatgcggcgcgcttcatctactctcgcagagaaatctcggctttcgattatattctttgtaccgtagtgcaaaaccggagtactcatacagaatatattactctaatgcgactactggtcggctacaacaact

SEQ ID NO: 275522 - DNA, 1254 bp, Glycine max
  unsure (1)..(1254): unsure at all n locations
acatacactctcctcatacttnctcccctccctcctccttactgctctctatctcaaaacctgatcactccncccncncncccagcgcgacggggtttganaccgtagccatctacgnccactttgtgaacacaatgagagccctgaatgccccatccactgatttctcagtgcgcacacatannnnacaacgataatttatntnnnngnnnnnnnnncnnnnnnnnnnnnnnnnnnnnnnnnnnnnnnnnnnnnnnnnnnnnttnnnnnccccgcaggcatnatattggaagaaaaaaagattcctaataaatggacactctattcatctatcgtgacactactaatctaaccgtttgaatagtgtgtgtacacctaatataaatcacaactacctcagtccctatcttagtgtattggccgacttcacctcagaaacctacttaatgtataacctacactatacgtttatcaagtggataacacgaacgtacagacccttacattaatatatgtggtcatatgcgacaccaattatacagccccaccattgcagacgagtttaatataatcacgaaaatccttgtagaataacacgaaattccaaaacctccttgtcttacttaaatcgaaaaaacataatgaatttcttgacttaaatgccaatacatttgcaaaaaaataaaaaatactattcttaaagatctgtcactaattatattagaaaactaaccgacatcattgctcactagacaaataaactccaactcctggacccgagactgtaataaatgtgctcaaaattcccaagcgccctaaaaacataagacttttgttaagactccaattggaccttctaaaccacaatggatccaccctgcatagggcgctccacatccaaacttgcgggccaaacacagaccatgtacaatagtagctgctacaagctctctttatataccgcgcctataatccccactgtncaaatccaaaaaatcccgcaaccattcgtaccattgttcccccaacaattatcacaagatgaggagactnccaaattatcttgagtcctcccgcataatctacgntgctcgggagcttacacttgatctaaatatagcagtaagcgcttttnctctcccctcgaattctgcataggtctccgcactcccgcacggtattatatttaataaccccctctggtctccgcgccggtttgaaaatatatatacaagcgcgtttcaccctcttgac

SEQ ID NO: 275523 - DNA, 463 bp, Glycine max
agcttttcagaaggcacattggccactggtaattgattacatcttctggtaatcgattatcagagagtaaaactctttaaaaaaaacattttaagttaaatcctttggccaaaccttttggtggttcaacttgaaattttcttcctaagactctaggaattatcttgatcatatttcttgaatttcttgggtatcttggattcttgtcttgaataaaacttgaaaagcgcattcctttggcatcatcaaaacattaggatagctttgcttcttcactatggaggttcaccgacaacaccttgcatgtccactaactttttgtgttgtgctccagccatttcattcagggtcatcaacaaaaacaatgtcacaaatgctcattctgccacatcaaatatgacacaaccaatgtttaaccccaggaaccagaatgccaaacaaaatcaacttataccatcaaaaa

SEQ ID NO: 275524 - DNA, 1114 bp, Glycine max
  unsure (1)..(1114): unsure at all n locations
cgtaactgtgantctatcgccactacaccccacncncnctctcntgcccnnnnnntntccacctctnttcactnnnncccnctcnnnncctcccccccccgcgagagcgagcggnnnnnttagatagcgatggtatcntacgngnacactcatagnaaattcatcnagnncttgagagtccttaggtactcaattgtcatcgggcaccccnntttttnatcatccatacantttattttnnnnggannnnnnnnnnnnnnnnnnnnnnnnnnnnnnnnnnnnnnnnnnnnnnnnnnnnnnnnnnnnnnnnnnnnnnnnnnnnnnntgtggatanaattangggagagaagaaagaanataactctattgaatttgtacactaatcccatttcgggggggaagataaatgcatcatatttggagatagtgtttctcgcccaacacaagaacacatatcttataaaatgacgtaatagaaatctgcgtcaaattggagcgaggtacgaaataaaacttaatttaaggggattggaagcaaattaattaaggggatttgaaacaaaaccaccttttgggagcgatataaaatgaaacctgagataaaggtgtgcataaccacaggccatttatagttggaagaagaatctggatggcgcaaaaggggaagaagcaaaaagtacccgggaatgtataagattcacaaatactgctgggggtaaaaaaaaaaaaaccttggaaggactagaaacggagaatttggtaggaaaacaacgaatccttcacatacgtaacggcatctttagtaagaaaaagatgatcatccttacgacatacggtagtgtaaaaaattgtcaatacagtttgcaaggatgttaacgactaaatcacggggtgacccggaaaatcaacagaatgtgcctctttttaaatctcttcaaatggggggagccgaggtgattttacccaaaaaatctacgggggcgagccttaacacctcctgctgaattcaaacattggagcagctgtttctacacacaacgcccccggcaaaaatattataaaaaacccccctttttccgcggggaatattctttaaaaacaatgcgcagagggc

SEQ ID NO: 275525 - DNA, 355 bp, Glycine max
cactatggctcaggacaagaatgtgtatgaagctgaaatatattcaacctgaccacgcgttgaagcgtctcgagcgggaaacaacaaaagacccaaaagaaagagtggagtaggaacaactttcgaggggctttatggggcaccagtaacaagctcaaaccttataaaggctgacagggacaaatcaaggatggaaagcctggtgttagaggataaattaaagagttgccagaggttcaaggagaatttgacagagcaattgagccaaatggaagagaatatgttgataatcatcgatcaatataaagagaacgtgaacttggctggtagtcatgggcacatgctgggagatgaa

SEQ ID NO: 275526 - DNA, 793 bp, Glycine max
  unsure (1)..(793): unsure at all n locations
accccccgcccgcttttannnnnnnccccnnnnnnnnnnnnnnnnnnnnngnnnnnnntnnccccnnnntttanttgtaactattgaagagcatatttgggaaccttgagtagtttaatctttgggacgcacctatgcgaatagtgatttcataattcactaatattttgggattaaagattactacgcctttagggacttcatttaagagcctgaaaatgggtccattaaaatagcacaactggctatcttttgaaaatttattccatgtttctaaaattaatcctttggattcttttttcatttaaaccaccctttatgttttcccttttgtgaaaaactagcattattccctcattttcacaacccagctaagtcacctaacaatgttgcatgttgttcctacggtgcccacctagccttccaccaccacacttccaatctccacaatcgtaagtttcttatcaaacaataaatacaccacgcccattcccttttagaatttgtaagctcctctggtataatacaaaagccctagagtttaaggacttaggggctttcacagaaaatcgataaagaaaaagtgatttttattgatctgttgccctacgatatagactaagttgttttttaaaggcttatatacggattagcacaaaggaaatgcatggaggaagtacaaaaaatatggcaatgcatacacaagcctgacggtgacccagaagggaacaagcaccgacacaccattcgttcttccatgagggatgttacttaggactttcacgatttattc

SEQ ID NO: 275527 - DNA, 658 bp, Glycine max
gacgcacgagtgaacttaaacttgtgaaccctttcatacccacctgagctgccactttccgtgttttacaattactttcttcaagttttggaagctcccttcagacccttgatcttaggccgggatactccccgtatgaagaacccacccaaaaataggttatccttgctactgagaaccgacccgtacttgtgaaaatgcgcaactcggagaaccggtcaaaaccaaatttcacccaaatgagtcctgaatagagtggatggatacttgtcatttaactcaaaacatggaggcaaagtctaagcctcaaacatccccgcaagaacaaagccttcattgaaccgtcaactcaatggaaaaaggtaaccatagaatcctcacccttcttcaattactcctacctttagaccttccaattccaagtttatacacttatttgcgcctgcatccaatccttacttacccaaaaactccctgcccctattcctgtcaattactcaacaaaaaaagctagcactatctgctacattctgaaacccgcattctcccgaataagtctcgccttcacgctccgatcttgatccctcctaaattgccccttttcctgagaggctaatgaattttgacaattaaaaaggccgctctactttgcgggtcg

SEQ ID NO: 275528 - DNA, 1028 bp, Glycine max
  unsure (1)..(1028): unsure at all n locations
gagtttgctccncatttcnnnnnnnnnnnnnnnnnnnnnnnnnnnnnnnnnnnnnnnnnnnnnnncccccnnnnaatttatttggaaatttaactttaattgccattataaatgtgtcaaacaattgttcaatttctgctaggcgggccacccatatggggccaccacacctatacttcgtggtcnccactggagaagccaaccttcagaggaacatctttggcgtcttgtacacaccccacgaacgggatccacatcaatcacaaatccatgtgcggcccacaactaaacacacactcattctaacacatattttcacacgcccataacgcaacattaattatcgcgtgggtccaagcgtatcccaacctcacttgtaataaagaaagccgggtgccaatatcgcgggagacattggggatcttcccttaactcttcaaccaatacaccgcatctgacaaccgttgtctatctcacgaaggaacatattataataatctcatataagcccaccatcgcgcacaaagtctcaacatctttgcctttgacccgtctcaaacggtgagcccattctgacacaaagcgtttctcccctcgaatggtatttacaatgtgcacgcaacctgtaacacaaatacgcgggaacaatttgtccctttacgcctaccggtagatgtaggatcaacactgattggacccaccccttttatattcatatcctctgaccccattgcatcacacaaaatcactgtttaagcggtccgaaaattcctccacanaaggctcccctctttgcgggttttataaattatgggaacaacacaaaccaataggcctgggcccggtcttccataatagagaaaagacaattctctttaatcgcttctctttccaagaggggagggtaacactacgaacactggcggtggctcttcacttagtcaatgaaaaaggccctcagatcttactcttctgttggcccgctcttcctttcaacggacgtaaattcaccacctatttatctgccc

SEQ ID NO: 275529 - DNA, 458 bp, Glycine max
agcttctgtccctgagaaactggtttccagaatacaacagggagtgaagattgctgaaaaccctagccttgcaacaagtcctagggaagtagatacggagatggacaagaaaatctgcagtattgtgagtagcattttgaaagacgcctctgtgcctgaagctgatgaagatgtcccaacatcgtccaccccaaatgtttctgtgcctgatgtcaataaagatgttccaacatcttccggcccaaatgctgaagtactctcttcccccagcaaagagagatcaacagaggaagatgatcaagccgcagaggagactcctacaccacgggcaccagaacctgctccaggtgacctcattgacttagaagaagtcgaatccgatgaagaacccattgcaaacaggttggcacctggcattgcggaaagaatttaaaacagaaagggaaaaacccctctta

SEQ ID NO: 275530 - DNA, 491 bp, Glycine max
  unsure (1)..(491): unsure at all n locations
ttgatgcaacagttggagaggttaatggaagaaggtatatctncnctnnatnanangnnnnatnaaatgganaatanagannttccctnnaaaagaaaggaggagaagagggaatgatgatgttcctagacaaaaccgaattgatggtattaaactcaacattcctctctttaaaggaaagaatgatccacaggcctacttggaatgggagatgaaaatagagcatgttttctcatgcaaaaactatgaggaggaccaaaaggtcacgcttgccgccacggagttttccgactatgctcttgtgtggtggaacaagctacaaaaggagagaacaagaaatgaagagtcaatggttgatacatgggcggagatgaaaaggatcatgaggaagcggtatgtgccggctagttactcaagggacttgaaattcaagcctccaaaactaacccaaggccacaagggggttgaggagtatttcaaggaaatggatg

SEQ ID NO: 275531 - DNA, 463 bp, Glycine max
aggagcatgcgagcttctttgagaaaactttcttgagtagctattgcttagctacacacacccctctcataactaagttcacctccttgagaagcttccttaagaagattcctaaagaagctagagcttagagacacatacctctctaatagctaagctcacctccttgagatgagaagctagagcttagctacacaccccctataatagctaagctcacccccatgacaaaatacatgaaaataaaaaaaatccctactacaaagactactcaaaatgcctcgaaatacaaggctaaaaccctatactactagaatggccaaaaatacagggcccaaacgaaggaaaaacctattctaatatttacaaagataagcaggctcatacttagcccatgggctcaaaatctaccctaaggccatgagaaccctagggcctttccttgatctttggcccaatctac

SEQ ID NO: 275532 - DNA, 410 bp, Glycine max
ggctaaaattaacacataatgttggcacctctttcaaaaaaccaagagatcattaaaggtccaatgccttaatgttgttgtctcctttcaaaagaatcaaaagatcggttaatggtccaacgccttaaatgaccctttgattcagtcgaaatatatcttgcaaaaaagataaaaacaacttaaccaaacgtttagttctcaaagaactacgtaaggctgatgtccttatcacaattgaggaatacgcaggagcaaaggaaacaaccccttggcgaccacaagaagataaaaaatataaaatgcataaaaagacataaaaaggcgtaaaacaaattgaaggcataattcgacactcgattaaaggctgtcgtcccttgtgacggatgggtggggggctaaaaccgtccccg

SEQ ID NO: 275533 - DNA, 439 bp, Glycine max
agcttctgtagtgtaggggggttgacataaatgtctgatcttggcctatttttcatcatccgaaaagagcattcgatcatgttacttacatttagaggtgccaaacaagttgtatctaagttataattatgatcattcagcaaaactcacttctacaattgtgctatcttctaaatattgtgcagttggaacaaattcttgtatgccacttcaactgatcattctttttttaactgaattatgcatgatgtttgattctattgtatggttagaatgaatactgtacaaatattagtttatgaacttgttgtcacaaatgacaaccacaatcttgcttgatgcgatcgccaattacatattggtttgtgttaaaaaaggtgtcttgcaattttgttttttgtgttccctggaaaaaagccttcctgccctaattcatatt

SEQ ID NO: 275534 - DNA, 510 bp, Glycine max
  unsure (1)..(510): unsure at all n locations
tttggtcctcatcaaaagcaacaggccaagcctanaaataggttnanaanggnactaattggatnaaggggaannnttaattntgtacttattgacatcaacttcatgcattaattttcagaaatttcaattttgtaggggcaccatgggcacaacatatctgccaatgaaacacttaagaaacttgctcctaaacgcaaggcaccaacaacaagcaaggcaccaataacaaatattagaaattcaagcaaaagaattaaagggtgtcaactaccaactattgagaagaaggttcagttgggaattggattcctacttcacaataccaattaaacatgcaacacaagaaaataaaatccaaaacaaaacacaaaatcaacatttgcttacgttctagcgtggccatctccaaagccttctccccagatggtttacattgcacgacatgaacaaaatagtgggacatttgcacttcaccatacaggagatgaggacgacaatgatgacata

SEQ ID NO: 275535 - DNA, 285 bp, Glycine max
agcttgcctaggcgagctaggcggcaacctcctcccccgttttgttgaaaaatggcttctggggcttccgtaatgcttccgtaaaatttttgaaaactctgggtaagcatatttcacttaggattggtaaaagggaagagaaaaaagaggaaaataaagttcaaaatgcttccataacttttccgtaaagtacgaaaggggggtgaacttaataatttgggggtgcatccggaaacttcctaaggaagcctggggcaagctgggcggcaagctcctccccatttt

SEQ ID NO: 275536 - DNA, 353 bp, Glycine max
  unsure (1)..(353): unsure at all n locations
tctccaaagaacacagtatcatcagnatantgcagaacattctaggaanntngnnnnnnnnannannanntnnnnaannannnnnnnncannnngttttcctcattagccctgtcagtccttcagccactaagtcaaagagcaatggagccaaagggtctcgttgtctcaaccctcatgatacacacacacacacatatacccaactacaataataaagcataagcacccttgaaacccagcatttgaaattagttacataaaaaactgctgatgtctatatttgtctgtaattgaatttgaccttttgtatgttcttgtatgcgaacagcgcaatttgctatataaacaact

SEQ ID NO: 275537 - DNA, 484 bp, Glycine max
agcttgtacacctctgtttctctacctttcattacaaacttttgtggttgagtgacaaaaacttcttcttctagtgagccattaagaaatgcagattttacattcatttggtatacttcccagcaattgtagctagccattgctattacaagtctcactgtttccaacctagcaacaggggcaaatacttcatcataatccagaccttgcttctgtagaaatccctttgcaacaagtctggctatgaactttgttacttctcctttaggattcaacttagttttgtagacccattttactggtatggctttctttcctgttggtagctttgtgagactccatgccttgttttttctaatagacctcagctcttcttccattgcttcaacccaatgggagtgcttcaaagcttctttcacgcccaataggttccatctcagcaagtaaggccatatggacaaaatcaccatcaactgtaatcgag

SEQ ID NO: 275538 - DNA, 220 bp, Glycine max
gacctattcccacccctattggaggggattggcgttgcgtcttacaactttggatataaactaattgaatctaacaaaaattccagcttgtaaagtaagcattatccccaaaacttatacactatttttgccatatcaataataaaccacgagatctccaacattgtgatcatacatatataaaagatcaagtatcaggaattgcctaatttttgagaga

SEQ ID NO: 275539 - DNA, 603 bp, Glycine max
agcttatcagctacttggttactctccctaagtgaatggagccaaacaaagtttccttgttgttcctcaaaagccttgaaatttcaaaacatgctttaagacaggtgaaatgaagggcagccatgattcagaagtgaaatagccacaaaggaatcagattccaacatgaattgcttgaatcttctactccgggcaatttcaattccaagcatgatagcctcgagttctgcagttacaactaaacaatagcatacatcaataacaaaagagaagttcgctttgccattataatccttgagaactccaccaacaatggccttcttcgtgtctctattgattgaaccattaatattgagtttgaactagccatttgaaggcttgcttcaactaatgtctttatgacccaaaactttacctttcattgggggcaataaatttcatatagctcatactttcttgctattgcatcaagctttgcccataatcctgacccgctatcacatttggtagaatctacaaattcccagatatcgttttggtttgacaccaccattgaatatcccaaggcaccaccaaaatctggattccaatttttgcctataa

SEQ ID NO: 275540 - DNA, 495 bp, Glycine max
  unsure (1)..(495): unsure at all n locations
tgtctcccttccttgtgagggatttcggngcacaaaatttcaaggntatttaaagannnnnnnnnnnannnnaaannnnnnnnaannnnnnncnnnnaatttaggggcattcgtaatggcatcattggtgggtaccatggatggctgaaagttcatatacgaggcttagattggctcgccaagttaaaagtcatcagcgaagagagttttgaagcaccggaagaggacgaagaggtccaagctctcaaaagcgagttaggaaaggcaaagattgccaaggagaagttcaagttggcccctacacacatccggaaagagtgtgccggattacgggaagagaatgcaattaccgcaagagcccttgaacaaaagaccaagagggctcgcaaggaagagtatggccgtaacaaatttcgcggagctctgtggggtagcaacagtgaactcaagctaccaaaggaaaagagggaccagtcgcgagcacatagcatggtc

SEQ ID NO: 275541 - DNA, 408 bp, Glycine max
  unsure (1)..(408): unsure at all n locations
agcttaaataagctctaagaccattgattctacacatatatttcaatncgcttgtgcttgaaatgatgtattaagcatagacaacacacttgacctgtgcactattccactgttaaagactagtaaagttcagaatgccacttcataacatattcagacgaaacacaatagaaaggggtcagtattaatacacatcaggaattcaaccacaattgcagctatgatatcaaggattttgcctttttgggtaattcacaaccgcactgcaatcacaattgtggctgcatttgcctgcaattctccgcaatgtcaaagattgtaacagccgactgcgaatgcaatttaaaaccttgagcttcatgtgttcacacccatcaataaaaatttgaaatgcatgatgcaattact

SEQ ID NO: 275542 - DNA, 393 bp, Glycine max
taagaaaacagtaacgaattttgaaaattaagtagtgccatacaatgatgctgaataaaccttcagttaattttttacccatctaataaacaaataaaataagaaaacataaaacctatttctaaaataaatttcaataaagattaaaaaattagcacgcctttaataatataactcagttcagatttcaattactctttcgagtctaccacaccccctaaagacagtcagtacaaaggaaaaaaatatttagccctaaagaccaggcttgtaattcatataagcttctaaaaatatacatgaattgaacaacaaaagtcaagttttaatctaaggtctttagcatggtattacattaactgagaaacaagaaatttccaaatcttaaaaatc

SEQ ID NO: 275543 - DNA, 265 bp, Glycine max
agcttcatgatgatgaatcaagctgattcaagtatttttgatgatgacaaagatgatgacaaaaagctcaagagaatgatttcaagattgagtcaacaagttcaagatcaagattaatttcaagtttcatgaaaagaaatcaagaagattcaagattcaagagaagtttgatttcaagattcatgagaagatgaattcaagattcaagagaagaaatcaagaagactttataagggtaagttttgaaatgattttttaaaacact

SEQ ID NO: 275544 - DNA, 1185 bp, Glycine max
  unsure (1)..(1185): unsure at all n locations
gctcagagctntataaccttgtaggacatctcaatggtcggnnncnnntttntttttatttgatttatatctggnnnnnnnnnnnttnnnnnnnnnnnnnnnnnnnnnnnnnnnnnnnnnnnnnnnnnnnnncnnnnnnnnnccnnnnnnnnnnnnnnttggtgttgatnttgtgtaaatgtaagaccatgagatgaatatttaatggttctctttaagtattatcctgcacttagtgggtggaatctctatcacgtatccacttaaatgggtcgagtcatgtaatactantgttatctctatcatcgaaatcattttgttactttaccattacttatacaataactacgtatctcctttacttactattcctgcatctctgtctatttctatatttcttacatcgttatttgtgactgctcgaatggatttgtcgtcatcatttgatgtctgcatcttgtttatttattgcactctatgtatttatctttttttgttcttctttgctataagttagnanaatgtatattgttaacttcttangtatctatnttgaatgattattaaatttgaatgtctacanncncattataatatatttgcttcgctaaatgtggtctgtttgttagtatattagtctatattctgatacctttctataatcatatctgagtctatccattctaaattgctactgntcccctaactccttctcctctttatcntctcctattaatattcccnccacttttgttcttttcttgcattctacatcattgactaccacctatttgtttatattacactaactgtgctacgcttgcttatgttattcctatttctgcttatttgtttctcttactactatgcttattgtatattctgaacattacttgttttcttatctatangtactaaatcttgatttctccactagccttcctattgatgtatgactggtatttcttctcgtncgctgtttgtgatgatggtttcggtttatctttgtgtactgagctgtattgagtcgatgctacattcgctagtacctctgatcatctcattngcttctgctatgttatctgtatatctgattattgggtctagctagctgtcttttctccgtcgatatagtatgactcatagactttaacatcgattctgctctgtagatatacggcgcgt

SEQ ID NO: 275545 - DNA, 305 bp, Glycine max
agcttagtgcatgttttagagagattaaaaaattttaatgtcggttacctatcaacagtgcatgtattatgacattcttctgatttctggccgttaatgatatatattctggaggttccgggctgcaacaactttcattgccctagggcggtacttgcaatattttggcttgcgatgtattttgggttaatatatttaaatttatttattgaaataaatacttattttaataaaataagtattttttttatttttttaggggggttgttttatatgcttttttaacaaagtactttatataaaaa

SEQ ID NO: 275546 - DNA, 468 bp, Glycine max
  unsure (1)..(468): unsure at all n locations
tatcttaattgaagtgagagtgtgaaatggaatgttcacgcttnngnnnnnnnnnnnnnnannnnnannnnnnnnnnnnnnnncnnnnaaaatattgacatattaccagcactcgagtaaggcaaatcacattaacataacttcatatagaaataaactagtcacataaggagcaaaagagatattaccttcagcatcacattcttgaatgacacaactttctttgcctcttttacggagagctacacatattattgaatattagcacacaatatatattctgaatataactgaaattcacaacgatgaaaggttaccttatcccaatatgcccctaaaagatccctatttttattagaatcctacaatgagtaagaagcataaggcaaaaaatgaggaagatttggaaaagagaaaatgatgaagatctggaatagagaaaaccagaaaatactcttgaggggaaaa

SEQ ID NO: 275547 - DNA, 101 bp, Glycine max
agcttgtacggaagaagtgaacagtaaactggtgtacacaactctcaaattttaagcgaagggcattttcgctcattcacttaaaatgctggccgcactta

SEQ ID NO: 275548 - DNA, 177 bp, Glycine max
  unsure (1)..(177): unsure at all n locations
tccaaattggtataccacangaccgncgccccgacaaatatttngnnnannnnnnnannnnnnnnnnnnntnnnnnncnnnnntggncccatcttctggcagtacatcttcaaacgattcttggggcaagatgtccctttgtacctatcaaaatcaggtaccttgaattttggggag

SEQ ID NO: 275549 - DNA, 127 bp, Glycine max
  unsure (1)..(127): unsure at all n locations
agcttggaataaggtgcaccagttttttgcatttgcttgnggggccgcagcttgaccataaccaaatccccaatcttaaaactcacctctcttgtatgatcgccagcaaattgcttcatacgttttt

SEQ ID NO: 275550 - DNA, 188 bp, Glycine max
  unsure (1)..(188): unsure at all n locations
tctatcaaagaagtaactttttacaaagccaaggatggagatttnananggnannnnnanaannaaggggggncaaacntcccccannngagttaagagccaagtcatcaagagaaacatactaacttagaagagctgctgatacagatcatgcagaagactgagtcacacgagaaaagcactgatgc

SEQ ID NO: 275551 - DNA, 285 bp, Glycine max
agctttgagcaaattcgaacgacaataacttgtcactcgcatgtttggttgagtcccgtaatatatcagggcgcactcaatggaatgttgaagctgagagcaaattcaaacgacactaacgttctactcggatgtctgactgagtcccgtcacatatcgcgacgcttgaaattgaatgttgaaggtctgagctaattcaaaacgacaataacttcttactcggatgcctgattgagtcccgtaatataacgagacgctcgaaatttcaatgttgaacctatgagc

SEQ ID NO: 275552 - DNA, 491 bp, Glycine max
  unsure (1)..(491): unsure at all n locations
taaacattcaatttcgagngtttngaatattatttaccctttnnnnnnnnnnnnnnnnnnnnnnngnnnnnnnannnnnccnnnnnnnaaaattaaattatgagcgtcttgatatattacgggactcaatcagacatccgagtaaaaagttattgtcgtttgaattggctcagagctttaacattaaatttcgagcgtttcgatatattacgggactcaatcagacatccgagtaaaaagatattgtcttttgaattggctcagaggttcaacattaaatttcgagccgtctcgatatattatgggactcaatcagacattcgagtaaaaagttattgccgcttgaattggctcatagggttaacattcaatttcgagcggctcgatatactacgggacttaattagacattcgagtataaacgtattgccgtttggattggctcagagtttaacattcattttcgagcgtcttgatatattacgggactc

SEQ ID NO: 275553 - DNA, 504 bp, Glycine max
  unsure (1)..(504): unsure at all n locations
agctttaagccaattcatacgacaataactttttactcggatgtatgattgagtcccgtaatataacgaaacgctcgaaattgaatgtttaagctttgagccaattctaacgataataactttttactcggatgtccgattgagtctcgtaatatatcgacacgctcgaaattgaatgttgaagctctaagcctattcaaacaacaataacgttttacttggatgtccgattcagtgacgtaatatatcgggacgctcgaaattgaaagttgaacctctgagccaactcaaacgacaataactttttactcggatgtccgattgagtcccgtaatatatcaggacgctcgaaattgaatgttgaacctatgagcctattcaaacgacaataactttttacttggatgcctgaatgagtcccattatatatcgagacgctcgaaattgaaagtttaaactttgagccaattcaaacgacaataactttttactcngatgattgat

SEQ ID NO: 275554 - DNA, 384 bp, Glycine max
  unsure (1)..(384): unsure at all n locations
taaacattcaatttcgagcgtntngttatattactggcccctttngnnnnnnnnnnnnnnnnattgnnnnngaannnnncnnnnnttaaacattcaactttgagcgtctcgatatattacgggactcaatcagacatccgagtaaaaagttattgccgattgaattggctcagaggttcaaaattcaatttcgagcgtctcgatatatttctggactcaatcaaacatcccactaaaaagttattgccgcttgaattggctcataggttcaacattcaatttcgagcgtctcgatatatttcgggactcaatcagacatccgagtaaaaagttattgtcgcttgtaatggctcagaagttcaacattcaatttccagcgtcccg

SEQ ID NO: 275555 - DNA, 650 bp, Glycine max
agcttaagacaacttgtgtaataaattacaattttgttgtaatcaattaaaatagagagtttttccttctgaagaatttttccaactttagaaattttcttaattcttaataattttactaatgctaatgcaagcaataaagcaataaactagttctttccaaatgcttatgcaatgcaagcaaatatgcaattcatacgcagttcatctccccctttgggcattaacaaggccaaagagtttaaacttatgcacaaaaaagaacacacaaattgaaggaaataaaccatagcatttcattaatcatgaaacattgcaaacaattaatcattaatcattgacctttctaatcaaacacttaattttctttaaacaaacacaaacatggaaaaacataacaaaacagactaacaaatagtagaaccaagcactgaaacataattacgcttcatccttaactgagttaagaagggtactgatgtgccatcattttcttttattttctaaaccctttttgcaccattttaattattgaatggtcttaattgtcaattaattaggcagttttattattttgggcccattcagctaatttgatgtttttaatcctaatttcaggaattaatgaagcattgagcttgaatctaaca

SEQ ID NO: 275556 - DNA, 509 bp, Glycine max
  unsure (1)..(509): unsure at all n locations
tgaaatgcatnattnttatgagtaataaatagngtnaagnatannnannnaannanaananngncnngnnnnnanannnnncaccaaaactcataattctagaaggaccaaacaaattcatatgtaacaattgtaatgattgagtagttgaaacaatctttttggatttgaatgaaactctagtttgttttcccttttgacatgcatcacataatctatctttttaaaatttcaatttaggcaaaccaacaactaaatcttttgaaattaatttatttaagtgttccatgtttatgtgagcaattcgtttatgacatagccatggatcatcatctttgctaagaaaacattgattattatatagtttatggcttaaagttatcatataaacattggtgactctataccctatatgctntatattagtaacatgcttatgctctatgagacaatttttagaatcaaattatactagatagcctttatcacataagtgactaacactaagc

SEQ ID NO: 275557 - DNA, 202 bp, Glycine max
agcttattctgattgtagggtcgtaggagagtataacaagcacccccaaacactcaggaacttataatctgggtgtctgttgaacaatttctgataaggcacctcttgattaatagaggatgatggaaggcgattgataaggtacatgctagaagtaacagcatggtccccgtccacaagagtcatagagacttgcgataac

SEQ ID NO: 275558 - DNA, 210 bp, Glycine max
  unsure (1)..(210): unsure at all n locations
tgatcatcttnaggtatgatccacgaatttacccttanntgtttannnnnnagnanagangntgntntaggnnnccggggnntaccattgagaacaccaagtaaaattatgaaaaacatttattgtttgaaatcaaacattgatggaagatgattcctaatagcaatcattatatcatcttctttgctaataattataaacggaacgtgt

SEQ ID NO: 275559 - DNA, 402 bp, Glycine max
agcttgtaatcgattacatcatttgtgtaattaccaaacacaaaaaattcatttttcaagtctaaagagtcacaactcttcaaaaacaaactgtgtaatcgattaccacattcatgtaatcgactaccagtaaggaattttcgaaaataactcccaatagtcacaactgtttaagaagtttttgaatggccatcaaaggcatataaataggtgacttgggatatgaaattccttagagtttttctgaacaacattgtcttatcctctcaaaaccaaattgtcttatgactctcaaaatattccttggccaaaacacttgccaattcaataaggaatcttgatcaatctttaattgtaatatccttctcttaaagaaagaaaatccttcttcttcttattcaa

SEQ ID NO: 275560 - DNA, 408 bp, Glycine max
  unsure (1)..(408): unsure at all n locations
ttataatgagttttttatttattgacactagaatcaataatatcaanannnnnnnnnnnaatananannnnnagaaaannnnncnnccnccccnngttaaattggaatttttcattctagtcaaagaagttaagcctattaaacattgacacagatgatacatgagaattcagtgaattgggaataggtaccgcacaataaaattcacataagcattttgagacataaaacacatgttatacatataattcattcagataacaatcaatgtatattgatgctctcctttgggtgatacaccaacacaacatacaaacatgatgatgctaataaaactcttaacatcatttgacaattaaatatgcacccaattagtagtacctactaccttagggtatataaataaac

SEQ ID NO: 275561 - DNA, 372 bp, Glycine max
agcttctattctgaatttcaagcatctcgatatactacgggacacaatcgaacatccgagcaaaaagttattatcgtttgattttgctcacagcttctattatgaatttcaagcatctcgatatactacaggacacaatcggacaaccgagtaaaaagttattgtggattgattttgctcaaagcttctgttctgaatttcaagcgtctctatatactacgggacacaatcagacatccgagtaaaaagttattgtcgtttaattttggcagaacatctgttttgaatgttcaaacgttttggtatactacgggacacaaatggacattcgggtaaaaaggtattggcccttgaattttgctcagaactttt

SEQ ID NO: 275562 - DNA, 484 bp, Glycine max
  unsure (1)..(484): unsure at all n locations
ttgagaaaaatcaaacgacaataactttttactcgaatgtccgtattggggnccccnnnannnnannnnnaaannnnnnnnnnnncnncnnnnnnaaatataacgacaataactttttactcggatgtccgattgtctcccgttgtatatcgagacgctcaatattcagaatagaaactctatgcaaaattaaacgacaataactttttactcggatgtccgattgtgtcccatagtatatcgagacgctcgaaattcagatcagaagctctgagaaaaatcaaacgacaataactttttactcaaatgtccaattgtgtcccatagtatatcgagacgctcgaaattcagaaaagaagctctgagaaaaatctaacgacaataactttttacttcgaggtacgattgtgtcccgtagtatatcgagacgctcgaaattcagaccagaaggtctgaacaaaatcaacgacaataactttttact

SEQ ID NO: 275563 - DNA, 477 bp, Glycine max
gcatgcaagcttgtgccaaagttaccctgccagtcgtggataggatcttagctttccatttagtaatttttcgccagatatttctaatatggggtttaaacagctactcatttctcttatgatcctatactaggaaacccaaataggaatcaagattattagtaatagtcacctgaagctgttgactaagctccctcaccttagcttatgagacattagttgagaagagaacctttgatttgctcatgttgatcttctggctagatgcattagcaaaagggtttaatatctggttgacttccccagctgctacactgaagcttcagccaccaaaatcagatcatccgcacagaataagtgtgagacattaacccaccgagaatggatgccaggtaccattctgaactgaatcttggatgagatgtgcccatctctgaatacacaacacaaatattttagggagagaacgggtccccc

SEQ ID NO: 275564 - DNA, 553 bp, Glycine max
  unsure (1)..(553): unsure at all n locations
atagaatagctaagcttcttacaggattaacttgatctgtaagtnttaaaaatcaactttatcnntaaaaaaanaannnannanannaataatnnnancatttnnnnccggagatgggtgcaccagcaatgatactaggtgtacctaacaacactctcaactaattcaactaattcatactttatgctttattggactctcattacaattttctaattcattgataatgtccaaaactaaattaaattaataaaataatactgaatgaacgatgaaactaaaagtgtttgataaattattttatatgaatcttgtataaatcattttcaataaaaaaaattattgaatttttatctatttctaattaagtattgtttattttagatggtgaacctaacactctttttaagtaaataatactatccctctattttgttaacgttatacagttaaagggtgacagtgtaaagtgtaaggataaaaaagagaggaaagtttgtataaatcttacgaaattttaaaagtatcaatataatttacttacttttttaat

SEQ ID NO: 275565 - DNA, 353 bp, Glycine max
agcttgaggacacatgaacgaaaacgcaattcatggggctttgaaaaaggataagtatggagaattgcactaaccaatcactacgcatggctccaaactcaaaggtggaggactcatgaacgaaaactcaattcatgggctcccaaaaagggttgagaatggagaattgcactaagcaatcactacccatagctccaaactctaaggtggaggacacatgaacgaaaacgcaatttattgggtctccgaaaaaggttgagaatggagaattgcacttagcgatcactacgcatagctccaaactctaaggtggaggacacctgattgaaaacgaaattcatggggcttccaaa

SEQ ID NO: 275566 - DNA, 559 bp, Glycine max
  unsure (1)..(559): unsure at all n locations
tgccgcccagctcgcccaggcgagcaaggttgcttcctccataagcaatnnnnnnnngnnagaannntnnnggaggnnnaannnggnnnnncnnnnatttgcacccccctttttactaaatgcacccccttctattttttggtaattctttttccgtaacgttacgaaacttcacgaatttcgtaatgatgcttatttttcttccgcaaggttacgaatccttacggattatgtatttactcttttttagctttcgaagaagttacgaaaacttacggattgcgcaaaaacacctcttttcgacttccgccacattacggaatttcacggatcgcgcaagcctgcttccttttgatttttgagacgtctcgggacttcatttattgtgcaacaaaggacgccaagtatctcaaagcggctaaccaaaggttgcatgtcatcaagtaataatctccggacgacattagggtatgacagttgcccctctttacttacctctaatcggggataagaggaaagccaagataagacactgattttgtctgtcctgcccttaacg

SEQ ID NO: 275567 - DNA, 505 bp, Glycine max
agcttcctagtggtttctaattatatgggccattaaatctttcatatgctgacaatagctgagaagtcagtggatctcctagggggcagagtaggtttccgccatcactttggccttggctagcaatcggggaagttcttgactcccgttcaaggtaagagcaaatcggcccattcacattgttgcctcttgatgtaacgagtcgatcacccttcctctagcatccttttcagcgtacacttgggcatactcgtctgccactctatgctcgtgggccgtggctagatttagttcttcttggtactttctgatgatggctaacatgttggtctctgtctcgcataaccgctgagacaggtttcttttgggccttgagcaaaccttcaactcatttttcaagaacaaactgtctactcgtgattgggccttttcctctctccagagctaagctcgctgttgcttccccacagagtccctcggaacttgttccaaccgggcttcttcc

SEQ ID NO: 275568 - DNA, 269 bp, Glycine max
  unsure (1)..(269): unsure at all n locations
tgaatgaccattgtataggccatggggggatgtgcaccagcttaccatanntnggaggntnanntnttnnaatttnanaaggaaangnntcnnnnnaacatagacaaaaatggagtgaatagacaatttagtccctgagattgtacctattttgcattttagtgcctaactttatgttgaattgaaaatacttcctatatttacttcattgttgcagaattcttcttttaataaattttaaagtgacgttgttattgatgtcaatttta

SEQ ID NO: 275569 - DNA, 1276 bp, Glycine max
  unsure (1)..(1276): unsure at all n locations
agagagggcgagcgtcgcagttatncattctatctcgtcnctaactctatggtctcgtagactgcgactctctactgtcataacgataatattaaaatatnccactccaaacactaagcccgcagatgcagttgaagaccactcngaagnaccctcgctattctctcggtgatcgatcaatgaaggactacctacatattgtctgtaattcaacgaatcgaggtggactggagaccgtctattacagaggttttatgatacncctatcgttgtgaggcgggacgtcaacacgctggcgtagacgactatgcaatcttatatcagcggatgtaacatatgcgctctcactcattattagactcctatacaaaccgaagtacgctatggcgaagcagactctctggtcatctgtcaccaccgatacggcgagacctgctctactgtattaattcttcagcatatagctgaggcacgatcattgtcctacatcaggagcatacggaatagtacaacacagtcggtcagtatagaggtgatcgctagacgagagtagagtacacatgagcctntggcaacactagacccaagaccctgaatcagatctcacccgagacagagaccccgtaaggcgagtgattcacacgtttgggagaaatctcacttgaaaaaagattcgtgtgcacgtaaatgtgtcgacacatgaaaggagagcctagtgggtgcactatgagtaacactcaataagtggcgtactgttcgtctctgttatgataccaagatactcaaacccaggcagccggaatatgactgggctgtcacgcgaagaatagacgtattatgatatcacttgagatgttactcgtatatccagatcccttgtcgtatcaccanttgctgcggatgtaacgtgcatgatcacacaagatcgtcgcggaatgcgctgacaaaaaggtcagtcatgtaaacgaatgcgcaagtgagtgagtaaatgaccctgcgaaagacggtgaagatggcgaccctgcatacacaacgcgcacacttcggtcgcaggatgcactgacgctgatgcggtcgaacagtcacacctacagcgtgctccgaaatggagtagaatgggtaactgagaccgtctcgtgcacgtattgagctacagttcctgtttacgcggcggagcttccaattgtacatgatgagctgcacgtcgttatggcacctgaagtgggcagccgaacactagaatgagactgtcgactatactagagcacaacaatcg

SEQ ID NO: 275570 - DNA, 288 bp, Glycine max
gagaggcttaagaagaatactaagaaagtctaaagaggcttaaggagaaaaaatatattggattttatgcttgcgttagaggaaatcctacagctgtagggactggatgtaacattgttgcccaagatttatgggtgaaccaatatagttatgggtgtgctgtcttccttttgtttatgcttcttatacatgtgtacgctttatattcattatatttacattgaaacttagttaacagttgtacacttcaacaaagttttttaaaaacatttttaacttcaaaagaaa

SEQ ID NO: 275571 - DNA, 336 bp, Glycine max
atcttccgcaacatccaagtaatttaatatctttatcatcacatttttacaaaccaagccaaacagggcaaatgcataaaactctgcccaaaacacaactcataattcacagattttcacatacaaatacccccagatacatttccttccttccaattcgttaaaccgtggatcgaacgttaaaattttctggaagtctctagtgcattacctctaccttttgaccgctgggatctgctaagaaacatcccgaaagaaaattgcgctactttttccacaaccagcaaaacataccattgttctgcacttattcaaaactctgctgcacaatttcac

SEQ ID NO: 275572 - DNA, 421 bp, Glycine max
  unsure (1)..(421): unsure at all n locations
tgcttgtggggctcttcccccgccggatcttcgatctccccngnnggtnnnnnnnnnnnnnnnnnnnannnnnnnanannnnnnnncnnnnnnaggagaaaaagtgagaggaggcgccatccactacggaataagccatggaagaaggagcttcaccaccaaaataagccttggataacaagcttggagaggatgcttcaatggaggaaaagaaagagggatagaaatagaaaggggggagcacgaaattgaaggaaaaaaaaagggataaaaattgaactttgaattgtgtcttcacaagaatctaattctttaaagttacaacaagtgttacaccatgcttctatttatagactaggaatcttccttgaaaaactttcttgagaaaactttctttaaaaagttctttgagaaaactttc

SEQ ID NO: 275573 - DNA, 492 bp, Glycine max
agcttgaggttttccatgcaatttatatgtcttttgaattcgaagaaaactttcatagcaaccgaagacaacgtgctcaatggataatagagcaagtgccatttgtaagtattgtcgatcgattttggcgtgaaaaaaactccaacttctaaatcataagtgtgcttttttatatttccgcttagtataattgccattggctactgtttagctttcaaaatataaattttatttgattcctaaagaaaaatttattctttattctgcatgttccattattacttataatatgcatgtttttgaatcggtaggccctgggatataactttcacggacttctaaatctccatgtggactttgacaacaacagcggttgaatcatcattgaaaactgccttggatgatttatgtatctttaacaatcttacatttctttaccaaaggaaggtaaaacttctcgattaaggagtgattttccaaatttggcttttt

SEQ ID NO: 275574 - DNA, 524 bp, Glycine max
  unsure (1)..(524): unsure at all n locations
tatctgtatgtattaaataanagtaatgaatttttttcatatttnntnngnnntgaangntnnnnnaaananannaatnnnnnncttttnaaaaacagggtgttgaaagagcataacaagactttcctaatctggtttaaagatacaatctttggtgatgataatgcttcttaaacgttaagaaagctaacaaatgggcctaaaagaaatgttataacttggcaaggatacaatataaataagtattccttctatacaaaagcataagacaagaaaagtataatgcaaaacagtggggttaccctaagggctgaatctcaacacttcgctagtgtacatgattataatttcagtgtagcttccatcccttactttggtttcgttgaagaaatctgggagcttaactatgtcaaattcactgtctgttttttcaaatgtacatgggctgacaaaaatattagtgtgcagaccaatgatgtatgatttaccttgggtcatcttaagaacttcacataccagaatga

SEQ ID NO: 275575 - DNA, 301 bp, Glycine max
  unsure (1)..(301): unsure at all n locations
tgttgggttgagatttaattaanngcttggggcatttccatttannngannnnnnnnnnnnnnnnnaaaaaannannnnnnnncccannnngggttgaatgatgattgaaacaacgaatttacaatgcaaaattctgtataatattgggaggaaatatatatagaggacaggagtaccttacgaaaatcacaaaaaatcttgcatgctttgagtaacttaactgaaccaatgtttaagcgtaatattgcttgactaagacttacggaatgggtgagagtattacttattgatcaatgatgg

SEQ ID NO: 275576 - DNA, 574 bp, Glycine max
agcttcttatccaaggctcatcttggtggtgaatctccttcttccatggcttatttcctagtggatggcgcctcctctttcctcttctcctttgtcttccgctgcatctccatggtggaaaattaccattaaaggacctcattgaagctcaagatccagcctccatagaagccccacaagcaagcttccatcaagtggtaattagagcacaagagcttcaagtaggtgctccttaaacctccattaattttttgctttaccttctcttccattgttgtttcttcattttttctccatgtatctcctcacatgtcttgtgctaaatgttgttaacatgagtctttatagtttccaccgattaaacttgctatagaagctagatttgattttctatggttcaaatttcttgttcttgttcttgaaccatgaattgtgttgaagtctaggttcctttgagatttgtcttgttattttttgtggctgaaacctaaaccctaaaattcttacaaaaatattaaagtataagaaaacctcaaaaatctaaagtgacttgttcacctattgtagttttgtc

SEQ ID NO: 275577 - DNA, 550 bp, Glycine max
  unsure (1)..(550): unsure at all n locations
tgtaatcgattacacaagtnttgtaatcgattacctgaggggattnttanaaaataatttnnaaaagtnaaatttattcnnnngccccatgaatggccatcaaaagtgacttggaaacacgaatttaaagagagttttcattgcccaaacagttttatgctctcaaaagattaagagtttttctgaactgaaatgtcttatcctctcaaaaagattccttggtcaaccacttgcatattcaataaggaattttgattgatcttcattgtacaatctatctcttttaagagagatttcttcttctcttcttcttatttctgaaaaaagatttaagagaccgtgggtctcttgttgtagagaattcttgaacacaagggaagggttgcccctgtgtggttcagactttgtagaaggagttttacaaagaagagtgaaaatctcaagtgtttgcttgaggactagacgtangcacgagaagtggccgaaccaatatanatcaaagttgcatttctctcttctctaaacttctttttttattggtatttatctt

SEQ ID NO: 275578 - DNA, 563 bp, Glycine max
agctttaatgaatttaattttttttatattaaattttcatttttaattcaaatattaactacctatattttgaaattaattctttttgatttattaaagaatttctcttttccactaaagctaaactacccattccattgctagtcttgtgttttacttgaaatgtttgaatattttttcttgtatcttttgcatgtaatgattttttgttgttattagcttgttaattatacctttgattgagaatgatggtgtgtttagaattagattagattataacttttgcatagtattcattaattctggattataatttttatttttgtgcatcttatctttaatttctatatagtataaattataaatttttgaatctataatctctggtatagtggttatcctgctacacatggtatagtgtttttggggccagccatgccttatcatgatcccagatttatgatattaccctttcatttatttctaagttggatgacttggatctaaactatcatcatcttttgagctgcagttaaacatgtggatttaatattgataaataa

SEQ ID NO: 275579 - DNA, 531 bp, Glycine max
  unsure (1)..(531): unsure at all n locations
ttcatgactnntgtggngacaagctcaattatttananttnannnnnnnnnnntnnnatntnnnnnnnannanngaggnnnnacaggctcaattatgaatgatcccacaaaccaaagaaaccaaaccacaatctttattcgatatatagtttaaaattcttctcacaaaaaaatatggtttaaaataattttattttgttatgttttcaattataacttattatattaataaatttattaaattttataatagcaatattaaaaatcatatgagccataatctatctaattaaatgacactctaaacagtttatgtcattataactaattaactctagttatatgttaggtggagccatcaaagtgaacataaaaaattgatctaatcggtaataaatacattcattcattcatataacgtaaggaccttaattattcatttatattatcgttgtgaaaatttttaagtattatttgaggtttgtgatcatgaactgataatccaattcactttaaattttatttgaaaaa

SEQ ID NO: 275580 - DNA, 535 bp, Glycine max
agcttcaggctgctcaattgctccaggttgctgcatggaagggcaaaggtctgtatggtggtcagcagaggagcacaagccacaaacccttacaacaggtacatatttctgatttaaggccagctgggttaccaagttaaccaatgcatccagtttgccttcaggcttcttagtctcagatgatgcagctgagtttgtagctacctcatgcactcctctaatgactatggcatcatttctggcgctaaactgctgagagttggaagccatcttctcaattaaatttctggcttcagcatgagtcatgtctccaaaggctccaccactggcagcatctatcatacttctctccatattactgagtccttcataaaaatattggagaagaagctgctccgaaatctgatggtgaaggcaactggcacataattttttaaatcgctcccagtactcatacgggctctctccactgagttgtctaatacctgagatatctttcttgatggctgtggtcctggaaacacggaaaaatttt

SEQ ID NO: 275581 - DNA, 434 bp, Glycine max
  unsure (1)..(434): unsure at all n locations
tgccacccagctcgnccaggcgagcagggttgcttnntnaaaannaaannnttntggaggatnntnnnnganggnnnnnnnnggcctgattgctatttgcacccccatttttactaagtatacccctgccttttttttggtgattcttttttcgtaaagttacggaaacttacgaattttgtaacgatacttgttttctttccgtaatgttacggaaccttgtggattacataatcatcccctttttgacttacggaatgttacggaacctcactaattgtgcaacgatgcttccatttgatttccggtgtgtcacggaaccttacggattgtgcatcaatattttcatttgttttctggcacgtcccagaatttcacaaattgcctaatgatgggtgccaagcaccttacaaggaccaanataaagtcgcatg

SEQ ID NO: 275582 - DNA, 443 bp, Glycine max
agcttctcgcatttgactttctaattcccacatgacatcatctcctgatgcacctccccagatcaccttgaccaacagaatctctttccctcttaggtgttttgtttgtcgtcataccctaatttcgtctagggaccattctttgatggcatacaacctttgcttgaccgcttagaggtacttggcacccattgttgcacaatacgtgaagttttgtaacatgccagaaatcaaaaggaagcattgttacacaatccgtgaggttccgtaacatgccggaaatcaaaaggaagcattgttacgcaatccatgaagttccgtaacattccaaaagcccaaaaaaagatgattacgtaatcccgtaagttccataacattacggaaagaaaacaagtattcgtacggaattcgtaaatttcccgtacgttacgaaaaaaagaatc

SEQ ID NO: 275583 - DNA, 791 bp, Glycine max
  unsure (1)..(791): unsure at all n locations
tcttgtgggttctttgagaagctncccccccaccctcctctcccaccccnannnnnnnnnnnnnnnnnnntnnnnnnnnnnnnnnnagggggnnaaaaataattacagataaaaataacacaacaaataatcaaacatcaaacataattactaataatatatatatatatatatatatatatcggggtgttacaagggaggcaaataattgggaagtacaggcggcccccattttgtgcaagttcaaaacaagcatgccttcccaccatacggattgtcttccaactatacaccacccaatgttgcacacactcccgatgagaataactccactcccatactcattgagagccaacaaccttaatatgatcatgcacatgtttctcaacccatgggggagacacatgaagtaccccaccacaatctatccgactttgagccttgccttaaatttgtcgttgaagggcaaataatttgggggtgttcccctaccaaaacttttgaagggttttaatttcattaacaaacataaccctttgcttttggggggaggagattttttctgctatcgcggaaaaaggaaaatttaatattattgaggaaaggcttatggccattgaaggaggtggagaataatgcttttgctgacataacaaaatttgccttacgtgtgaacccttatttcttttaaattaaagcggccaatttcataatttcaagggaacaacctggcccaagaatccctaaaattttcttttgaaaaatggtgttttcctcaaaataaaaacaac

SEQ ID NO: 275584 - DNA, 404 bp, Glycine max
agcttgtatttaaaaatgttttaaaaatacttttaattaatatttgaatttttattcctttattaatatatatgtgaggggtagagggtgtcacacagaaacttatatgttagcttcaaattagttgttaatattctaagaaccattattagatatattctaccatgctaacaatgttacatattctaatgtcaattagttgaaacttctattgtatggtaatgtaaattgttgcaaaaatgtagactatataaattcttgtattatataattaaatgattttacaattgttgaaatagatgaataatatacttttgtttcaaatgtttagtgtattaaaggttaaaaaattctaagaaatttccaaaaattaaaatcacgccaaaaaatgttccaaaaaaatt

SEQ ID NO: 275585 - DNA, 407 bp, Glycine max
aatcattgtgtttggaaatgaacatttatcactggcttctttgaaaaatatcagcatataatatgcatgattctccttccttcttgtggaatattataatatggtgtttggttgcttggggtggtgtggaatgtaatggcatggagtgatatgagatggaatgaaacaagttatccactttgttactttaatactaatcaagttatacaggttctagaaggtgtaattaaatatagatggaatacattgcctattgacaagctagacagaattaaaaatttcatctctgatgttattgtataagtaccagccacactttgattgattttttgttgattcttatagtccttttgcatcttttgtctcgttattgacccccttttttttgcataacttttttggaaatg

SEQ ID NO: 275586 - DNA, 495 bp, Glycine max
cccgcaggcatgcaagcttagcacgttatccgcttgctaagcgagtcatcttttgttttccaggcttatcgcgaaattggcgctaagctcagatccacttactcatgctaagcgcgaaaatgacgctaagcgtgactttcagatcaagaagtccttgtttagcctgatttgcacagaattcaagaaggaagagagaactgttcactactcagaggcctgaagagtgtgaatttcatagaccatacagtaaagcaagaggccaagtttttatcttttaaggagattagtgaatttttgaatgtttgcgaaaaacctacaggtggaggagacatccccactcctttgggagcaagcaataactcttgatacctttttctttcatggaaaaagagcttccttgccatgaaagggtaaaaccctcagtggggattcttattggataggggatgtagactctttttcatatctatttaacgctggtttatgatgggcccc

SEQ ID NO: 275587 - DNA, 485 bp, Glycine max
  unsure (1)..(485): unsure at all n locations
taataccaaaaactaaccggctgaggattgaggaacgatgaataacttntnaanaanngnnnaanaannnnnnaagaatnnatnatnnnncccccnnggaagcgtcacggaagcacctcggcttgaattaagtacttccctgttcttcttctgaggaatttttagtgaaaacgtaatggacaaaatgtagaaccgccttaaactcagcccccctcccctatgtattgcaaaaaaaaaaaatagggttgcttatcgatgatgttttttgagcgcaccccccaattaatcaattcacgccccagattcttctaaatgaattttcctgagtgcaccccccaatttgatgagtgcatcccctccaagttgcttagtgatgaattttcctgagcacaccgtctactttgatgagtacacccccttcagattgcttactgaagaagtttcctgagcgcaccccccaaattgatgagtgcaccccctgcagg

SEQ ID NO: 275588 - DNA, 527 bp, Glycine max
agcttagattgattcggtctgacgagggatcgaggttttgttatttaggctacaacatagaacataagagcatgattgattagagaaatatatttatatgcatcaagttgtttgttagaaagacccaacatttctacctactattgtcgcttttacttaccttgcattttatagtttttagcataaaggttttgtttaaattctgtttgaaattatcaatcatacatgttctctcaacaatgcttcatttttgaacttaactgaggctaacattagttccctgttttcgatactcatattcatccgttttaattttttaatacttgacgatctggtgcactttctggtaaacccctattgaaatttttttgaaacataattgatcaaaaagtaactgcaatggggaagcaaaaaagtatttatggtgccgttggtcgggaaataagctgttagtagagtttaattcagttttgtagcattgctttaatttggtttctttgattggcggaatctttgactaacatagt

SEQ ID NO: 275589 - DNA, 671 bp, Glycine max
  unsure (1)..(671): unsure at all n locations
agcttcagacctaggattggtataaaataggnaccaattatagaattaatctttanccnnnnnnnnnnnnnannnnntnnnannnnnnnnncccccaaaatgatttttctgttaactagagtgatttttcttattttttttcttgaatccaaaatcgcttggttctttttttataattttggtccagatgtctagaaaattcaataaaaatttcagctcaaaacatgtagtgaccaattcccagtaatttatacaagtttgtatgttcaagttgccagcaccagtgatttcaacctagaaatcaagagtagtgtttatgttgcttaaagcttggatagttacaatttgtgtttgcttatgctcaattatcttgaataacacaattcaagagagcttaagacttatttgatttacaaatccagacactacttaacaccacaactcaactttattataggcatcatgtaggaaacttataaaacaaaaaaaaaaagagttctacaacaagactcttctaagaattgatttaaaacatgttatgaactaaataacatgcatgaattacacttaaaaatcaaaagataggcttagaatgaccagaatgcttgaaaaatgtttttaaattcatcaccaaataaaaatcaccccaacttaaacatatgtgacattac

SEQ ID NO: 275590 - DNA, 499 bp, Glycine max
ccaagcttagcagcaacggcagctgctgctgcctttttgatattatcttcagcagtttggaaaggagcatatgatacagaagattgaacagaagtaggctgagatggatctgtggcttctgctgcttggttaagctgcttcctgataccaacaactttttcgatctggccttgtgcaaccttcacaacattaaaaccatctatttgtgtaaatcaaatacatgtggaatcagttgaaacagatgcaaaactttacgcatttaatcatccaatatacgcaaaatctggggagatatcacatataaactcataaactaaaatacacccttttgagaggaatttaatctcctagtgtgctctatcttagagaatgacatgtcggtattaacttcttttaaattttagatacagattcttacgaattaataatggcttaaataacaatttggtctctatagaaaatatcctatttttgggtttagtcctttgggcaatgcact

SEQ ID NO: 275591 - DNA, 417 bp, Glycine max
  unsure (1)..(417): unsure at all n locations
tcacgcgttgctccattttgcatgggttntatcgtacccttttacatatgnnanggngannnnnnnnnnntnnnnggnnnnnnnannnnnnnnncnnnnaacctgccttgctagtgacaccccttcccttacttctcccgtaacaccttcacttcaaaaatctcctcaacattaggtaatatcaaaggtgccaccccgtgaatcccttgtcgatgttacagaagaagttcagaccaaaatcgccatttattctctactggtaggggaatttattcatataactagaatataaaaaatagggaaataatatttcatcattgtagtgggacaaagcactgtgaaaccagtagcttcgtatttaacgaaagcatcttacctccgtacataccgttatgagattggttctttaagcttaag

SEQ ID NO: 275592 - DNA, 415 bp, Glycine max
agcttgcgggtaggtcacaaaaatatccatacttctatgaaaaattataacattaatgatttggataagaagacacgtgcaataaattgagagcttttgagtttctataaaagtcaattatataaattgattttaatttatgcaaaaaaaaaactcaatttattttatcttcttatattgctttttcaacttttggagaaattttatcttaacgatattgtacataaaaatataagttctatcacatgaaattgaattgaagtgagaacacctttggatatttgtgcgtgctatgaatttttaggattgcggagagtgtgggaaaaggtgttaatgacatgaaagaaagggacttgggggtgccaattttcaatgggaaatgtggggattgcaaatattgcaagtgcgaaaaaac

SEQ ID NO: 275593 - DNA, 237 bp, Glycine max
ccattcactatggaataagccatggaagatagaagcttacgaccaagagagtgccttggataagaagtttaaagaggaaacttcaatggaggaaaagaaagaaagagagaaagagagagaggggagcacgaaattgaaggaggaaaagagggagagaagttgaactttgaagtgtctcacaagacttttatttattaaagttacaataagcattacacatgcttctatttataacct

SEQ ID NO: 275594 - DNA, 453 bp, Glycine max
agctttatgtgtttataaatcatccaagcaatcaacaccattgactaaacagcataaaatcatccaagcaacattttgaatgaatcaaacaaggaacgaaaataaaattaaacttgtaaagccaaatgagaccgagaggcttgggcaacaacttccgagagttgtgggggctaagaccagtgacaactaggggcggggggcttacctgttcacagtgtgggctgatagtggaggcggaatgtagctgctacggagacacgatggtcacaggcacaaaattgaggcacggggtcacagagagcagaaatgaaacgaatggtccaaagggagtaacaaaagactaggggcaggggtcttttaattggggataattttacattccaatggattgattcctttggtaaaatccatcataaatgaataccttctgacaaaattaaatctttcaaaaaa

SEQ ID NO: 275595 - DNA, 461 bp, Glycine max
  unsure (1)..(461): unsure at all n locations
taagaaatccacaaacagnnagtgccccatccaccacaccctccgggccaatanaatnaancaaaacaaacaangaatntgnnttggagaaaccacgaattgggtccaaatatttctaagcacaaacaaactagtacaaatctagctaaattgcatcaagttttctaaaaggctattagataatgcatataatcattattggcctaggcttataattatacaataaatatgaacctagtagccagctttaaaaaatgacactcttcacaaagttgcagtctacaattgaaatcaacatacatgtataatgaagattattttgaacttcattagaaattaggaaataaaaaattcacctcgcaaatgaaactgctaatgtatagatgtcataccctaatttcgtccggggacatttgttgtcaatatgccgaccttggttgatcactttgngacacttaaaa

SEQ ID NO: 275596 - DNA, 488 bp, Glycine max
agctttcaacaaatgtcttcacaaataatcatcacacagcagaaaactaacaaaactacccatcatatctcccaaaaccccatacccacgaaaatcaaaggggaaagaagtccacccaaacctgaaatttcgaagtcccactcgtagccatgcacttcacgaccccgaaaatgccctcctttcgcgatttggggcagaaatgatggccaaaggttgaagctttgcttggagcttcaatggaaaatgaagaagaagaaaatggcaacgtgagggagagagagagctgtctgaaaagctttttggtcttaaataaaagggttttctctttttctattattttatttaagcaatgccacatgtctccatttgagtggagcaaaaagggcccactttccctttttgactgtgacccatactcagccacaaaagtgaggaaaaatctgatctttgaaacgctaaaatcctgcctcgggttgcgtgccatttct

SEQ ID NO: 275597 - DNA, 611 bp, Glycine max
  unsure (1)..(611): unsure at all n locations
tctcccctattttgctataaatagggggagaagtgatagactttaagggttnannntnttagggatttntttttttntnnnnnncgctgaggaaaattatttccgtgaagaaaatccaagccgaggcgcttccgtaacgtttccgtgagaaattacgcgaagattctcgaccgttcttcaagattcatcgttcgttcttcgttttcttcaatcttcaacgggtaagtacctcaaaccgagcttttcaattcattctatgtacccgtggtggtccacattttgtttcatgtatttttattctcgttttcattttctttttatacccccttttgacgtgcttaagtcatttatttaagtcatttctcgcttaatctaaaaataaaataaatttccaccgatcgtttgaattgtatcatccgttaattttggttaaaatgaattccgaccgttcggtcgtgccgtaaccacgttggaaatcaaaaaagaggtaaaataattatataataataaaaaaataccttttagtaaaataaaagcgaaagatccattggacgttttctctttgggatttctcattcgtaaattgaattgactaataactaaagtgaaac

SEQ ID NO: 275598 - DNA, 609 bp, Glycine max
  unsure (1)..(609): unsure at all n locations
agcttttatctacctgagcaatagcttcttctttaatactcttaaggccatccagatgatactcatatgtagcccttgagaggtcctaagcaacatccaaattaaaatatcaacaattcaatttcaaagacaaaaggtattatactagtttaaataatgcaactatgaaaatgtagaacagacggttcaatgaataaggaaaataaatcaaaataaacaaacgggaaaagcacacatatgagtaaaagtacctggggagttggtaatggaaaagcatcaaaaggagagactaaacaacttgctttggcagccaatttgtgaagtgctgctgaagcatcaacccttcttctttacgcccttctcgcttgaagatttaagaatatccaatagcaattctaatcatgtacatttagcagcatattcattgcaaaatacttttaccatcatgaggaaaagaaaaaagtttaaaattatctattatgaaagaacatncaaacgttacaaattatttattaccactattgtcaatgaatataattttaccattctgaggagaaccattaataaaccagagccattgttacacgtatttgaagccctttttctaaa

SEQ ID NO: 275599 - DNA, 557 bp, Glycine max
  unsure (1)..(557): unsure at all n locations
tgtcccccattttcttataaatagggggagaagtgaaggggttttncnnnnnnnnntnnnngnnattnaanaatnanttnnnnnccannnaaaaaaattggttccgtgaagaaaatccgagccaaggcacttccgtaacgtttccgtggggattttcgcgaagattttcagccgttcttcgttgttcttcatcgttcttcggtcttcaaccggtaagttctcgaaaccgaacttttcaattcattctatgtacccttagtggtcctcatttgttttcattagcttttattttcatttcatttactttccgtacccccttttgacgtgctttagtcatttgcttaagtcattttctcacctaaatcaaaaataaattaaatttccaccaatcatttgagttgtaatatccgttaatttcgtttaaaatggaatttgaccgttcggtcatgccgtaaccacgttggaaaccaaaaagaggtaaaataataatattataattaaaaatatcttttagtaaaataagccaaaaaaatcaatcggacgtttctctttgggat

SEQ ID NO: 275600 - DNA, 577 bp, Glycine max
agcttagaatgcagaagaagcagcattcaatttaataatgttctttaaacatgccagacaaaattgattgcaataaaataaatgagataagagaagagagaatgcaaacatagttttatactggttcggcaaagtccgtgcttacttccaatactcaagcaacccgcttgagattttcctttctctttgtaaattcctttacaacttctgaaccacacagggacaactcatcccttgtgttaaggaattcttacaacttaagagaccctcagtcccttaatcaatctctttgaatgagaagaaagaaagaagaattctctcttgaagaaaaggatattacaattgaagtccatggagaaactcttaatggatttgcaagtgtttgcctaagagtttcttttgagagagcatttggcaatgaagttagatgtgccatcattttcttctatttcttaaaccctttttgcaccattttaattattgattagtcttaattgcaaattaattaggcagttttattatttgggctcatttaactaatttgatgtttttatctaattttagaaataatgaaaca

SEQ ID NO: 275601 - DNA, 442 bp, Glycine max
  unsure (1)..(442): unsure at all n locations
tatacgacctaggatgtggttttgtgactaaattcaattcanacaccnntnttgnanttgnnanattggtanaantccntnnttcaatgatcaccatgcaaaatttgccattaatcaaacatctagtgtgaaaaatgttttctctttgactttccttcatagacttcaattgacggccaagtaaccgcctaatcatcaacaattctcccttcggtgttttctccatctctaagaatcatgtctttcttttttttttctttcaattttgtgcactctttcctttttccactctagaattctccttgagttctaaagcaattcaagagaaagtttacacaaggttcaaccactaatttgtgacaagaaaaaggcttagggttaggctaacaaaggcttagaacaaggacaaaaattctagcaactacacaatgggatttttttt

SEQ ID NO: 275602 - DNA, 430 bp, Glycine max
agcttaaataggtgggttggtgcgtgctcacgcgcttagggcaaatctgaatcccttagcgcgcataagtggattttggcttagcacgcttctctcgcttagcggatgagctgaagtggtgcgcttgatgacctagagcggtgcgctcagcgaacctgacagctcatcttcttctggattcttcctcgtgcttaaccactgagtgtcacgcttagcgaatgcttgctaagccaacagattggcttagcgagaaagtgaaaacaacatttttcccaatttgcctaattaacctgaaattgagagaaattgattattaaacacacaaaacaaaagtataaatgatctattacttatatttaacagaaaatacttattatattacccaacaactattaattggagaaagttgatacaatatacataagtttta

SEQ ID NO: 275603 - DNA, 558 bp, Glycine max
  unsure (1)..(558): unsure at all n locations
tttaccttcnnnccccaagcagcgaccaacccancccaacaaagnanaangagccagaaatnaatgaaaccccaggggggaaaaacaaaatatgaaatcaaacaactaaataaaaaacaaatcacaaactaatgaaataaaaaatgaaacctttggtaaaaagaccccttgtgagagttttgtgaaaaatgaaaccaaccttgtatgaaccaccatgagagagcaagggtctcaaaattgcaagggagcgagaacgtgtgggttgagaagtgtggctcaagaggagtgaatagtgtttgtacaaaggaaagaacgagagagagaaagagaggagtgagtgtgtagagaaattgaaattctttagattttaagagaatttcaaattattccttttttgttgattaaaaatccttgttaaaatgacagatattcaatctccctttaaattattatccaaacactaaatttaaaatgtcaaatattcaatgtcccatttaaaatgaattaccctatttaaagtattgatccaaacacaaaagtaaggtatctaaatatatg

SEQ ID NO: 275604 - DNA, 389 bp, Glycine max
agcttctcgatatattatgcgcctgaatcagacttccgttacaaaagttatgaccatatgaatttctcgagagccttcgttgttcaatttcgagcgtcttgatatagtatgcgcctgaatcggacttccgtgtgataagttatgaccatttgaatttgtcgagagcttccgattttcaatttagagcttctcgatatattatgaacctgaatcggacttccgtgtgacaagttatgaccatttgaatacctagatagcattcgttgttcaatttcgagcgtctcgatatattatgcgcctgaatcggacttccgggtgacaagttatgaccctttgaatttcttgagagcatccgttgttagatttcgagcgtctcgatatattatgcg

SEQ ID NO: 275605 - DNA, 541 bp, Glycine max
  unsure (1)..(541): unsure at all n locations
tctcgatatattatgtgcctgaatcggacttnngttnnaaaaannnnnnnnannnnaatnnntnnaaannnnnnnnccccnnnttcgagtgtctcgatatattatgcgcctgaatcggacttttgtgtgacaagttatgaacatttgaatttctcgagacctttcggttttcaattaagatcgtctcgatatgtgatgcgccagaatcggacttccgtgtgacaagttatgaccattggaatttatcgagaccttccgatcttcaatttcgaaggtctcgatatattatgtgcctgaatcggactttcgtgtgacaagttatgaacattggaatttctcgagaccatacgttgttcaatttcaagcgtctcgatatattatgcgcctgaatcggacttccgttagacaaggtatgaccttttgaatttctcgagagcttccggtttttaatttagagcgtctcgatatgtcatgcgcccgaatcagacttctcgggtgacaagttatgaccattggaatttttcgagagctttcgatgttc

SEQ ID NO: 275606 - DNA, 368 bp, Glycine max
agcttctatataagctgaaccattttatcaataaacacaagttgagttttattcacaaaatcagagtttatctcttttatcttagtgagagtgattctaataaattcttgagtgattcaagaacaccctgactgcatcaaaggacttttacaacctttgtgtgttgccctcgtcggaaagagtgattctttccttcctttcatcttcaaccttgttctttcaaaccactattacagaaaatccacttctgcccagaattatctcggggccataactcccattttacacacctcaattaagtgattcttgagcctaaattgaaatttcaaacgagacctctcacgtcatttttggaaatcacctcattt

SEQ ID NO: 275607 - DNA, 327 bp, Glycine max
cgatatttttcagccgacattgcacaattctttttaaaaaagctagctggtcgataatagtctttttacagaaaagtaagttatattgttttggtgtagcataaaaaagttacaatatacttcaggtaagattatcgtgcgagttaaaccgacattttgttacggtcaggaaaacataagtccatctatacaaaaaaaatatttgctaaccgtcttcatgcataatttattcaacgattgaatagaaaactcaataacctacaactgtcgtgaaatagtcacaactgatattttttacccggcattgaacatatatttttaaaaaaa

SEQ ID NO: 275608 - DNA, 420 bp, Glycine max
agcttggaacctttgggtgacaacaatcttgaatccatcctttgagtggttttgattccaagatttccaccattggaaccaacctagagcttccccatccattgcgaccattatagtctccagcttgtccttttcccttacgacatgcaactggaaatatctttcgatctttgtcaaccagtccataggatcctcaccatcgaatatggacatttccaaattcctccaccgattgtcgtcatgcaccacaatgtcctcatttcctctgctcatgttagttatgtgaatgtttgtagtaggagattttttttcctatgacgttgccaacctttgtatcatcctttaaaattgaattcaaccgtgattccactacttcccgaatcttttctattactttttccatggcttccatgcgtgcct

SEQ ID NO: 275609 - DNA, 334 bp, Glycine max
ttttttatattaaacttaatggattgtaaatatttaaacattttggtttttttgggtgctttatatctttttctttgccttttttttttaatattataatatcatttctttcatttattatttttaattttatatatgaaaaataattcttaaatgtgttattgattatcatcaaaattgaaaatttacggtttttagaatgattacgtataaagtgaatttataaattataattgataaaaaaaaaataactggttaaatttttattttttttaaggggatttatatttatatttaaatttaaggataactgttattatgaatgatttttggg

SEQ ID NO: 275610 - DNA, 359 bp, Glycine max
gcaagcttgtgacccctggcaatttctttaagactagccactgttataattgggttttttcgaaaaaaacttcactaacaagtcacttgaagaattgtgactttcggaaatgtatttttccaaatcagtcactggtaatcgattacccttaaggcgtaaccgattacacatcaactggtgtgacccttcatttcaaattttgaaaaataaaacggtctaaaagctctgggaatcgaaaaccagtgtggtgtaatcgatcacacgaggttcacaatctttaaaactatttaacataagtcataacctcttgaaatttgaaatcttaacattttaaaacactgggaatcgattacttacct

SEQ ID NO: 275611 - DNA, 581 bp, Glycine max
  unsure (1)..(581): unsure at all n locations
tttagaataaaagatatgacataattnttatttttataaagataaanttannnnnnanannnnaaannnntnntnnnnnnnnnnnnnnnnnnnnggagacccaaattcatacctctttaacggtataaatagaaacatcaacctaaggcaaagtacaccatacacaaactagaaaagttcaaccctagttgtagacctaaaagtagaaagaggatttgcatagatttgtctagctatagatacacgtagagtcttcacattattgaagaaaattttagttgcttcaagaacgcacatccaatacacaaatctatttttcttcatttattattgctatatattttttaatgcaaaatagatcataattttccgcagcaagtattgggtacacttctacgtaactattaattcaagagcaaaggtataaaattcattttgctcattgaccccgttgaggtaataggtcaatggtccaaacggtacgccaataattgatccggcttgatctgatatgtatattaaaaaaataaaaaatatatatatatatatatatatatatatatatatatctattatatata

SEQ ID NO: 275612 - DNA, 586 bp, Glycine max
agcttaatcagacaattgatgataatgtgtgcattctcaatggcagcttcttgtcctgcatgcatgaacatagtttacataagacagcatatttataggtcactcattattcttgccaaaaattacattatcaccaccaccttcatccccaacacaattgtgaatagcatgacaatgctttctttgtgaaaacaagaagctatagaaagacaagtgcaagtcccagatattacaccagaatctagcatcaggtatataatgactgatgatcaaggtgattgtgaaaatatccactcacaagtaatccttataacgacccaatttctttcccacataggaaacataaaaagaaaccatttaacattaaataatactataagcctgataattaccaattttctcagtccatatcccagataagactagcagcagaccatataacatatctttatcttggatattttctgtcaacatggacaagcaatccaataaaaactgtgattaactgcaaaattttttaaagaacttaatggccgtaaaagtaattgaaccacaaaatcccacacaatggtttgttgaaaattaa

SEQ ID NO: 275613 - DNA, 427 bp, Glycine max
tatatgaatttcttctatgaccttccttcacactcggtaaactagagaaatcaagggaggttctagaggtgccaatgggagttgcaaactcactcctaagaccctcagttccggttgatgtgctcaaatgaggaggattgctaacttgatatccagatttttcttgtgatgaaacatgactgtggtgatgactactacctttaccttgtatcagatgcctgagcttgccaaagagtttggactggtttgtgctaattctggcggcagatgaattatcaacagaagaaaaatcatgacactctccgaagtcagggatagaagaagcctgtgaggaggaccattggtctatatcaaagtccacaatggtccctgggacatcagaatttgcataatcaggataagctggttggctttcttctcagaacga

SEQ ID NO: 275614 - DNA, 596 bp, Glycine max
agctttgtgtaattgattacacttatttggttatcgattaccagtgactgtttctgaataaatcaaaagatgtaactcttcaaaaggattttgactttttcaaattggttttaagttttttctaaaagttataactcttctaaatggtcttcttgaccagacatgaagagtctataaaagcaaggctttgatttgcttttcaaaacactttattcaatcaatcttttacaagccctgaatctctttgaacttcttcttcttctttgtaccaaaagctttatgaagttttctgattttccaaaccttgaaaacttgtgctattcatcttttcattcccttctccctttgccaaaaagaattcgccaaggactaaccgcctgaattctttttgtgtctctcttctcccttttccaaaagaacgaaggactaaccgtctgaattcttttgtgtctcccttctcccttgtcaaagaattcaaaacgacacagtctgaaaattcttttgattcttccctttcccataaaccaaaagaatttcaaggactaactgcctgaaaattcttttgtttccccattcacaaagtttcaaaggactaa

SEQ ID NO: 275615 - DNA, 168 bp, Glycine max
aaaaaaggaatgatgatgtttctagacaaaagcgaattgatggtattaaactcaacattactctattttaaggaaagaatgagccataagcctacttggaagggggaaagaaaatgccacagatatttataagcaaaaactatgaagaggaccttaaagccacaattg

SEQ ID NO: 275616 - DNA, 1117 bp, Glycine max
  unsure (1)..(1117): unsure at all n locations
tgcnccactgacgaananntttagaannaacccttgagaaagnacccttttggagagnaacccaagcgcgaanctactcttngnaagaggaggactctcgtcantagactatgcacaaaaccctttgcgcaaggctatccatatatatgcacgagtattcacaggatatangtcatatctatacnnnnngtgtcacgcatacccacnctggatacaccttattataanatatgagtgaagagcaggagacgtccctctcactacactacttttgctcttaactgcgtgcacaactctgtattgacattaagaagcgctggctttcctcttattactttatcgtattcacaattgtatagactaacaaggctcattctatatattctctcattattatccgaactcatcgtccataattatcttctcgcccctactatttccattttgtggtccctcttacccttcacccaattcccatagaatacacgaccaatacggcatggatacaaaaatctcatttcccttttctcaaaagacctgtctattattcttgtaaatgtttttgcccctgaattattttatttcggcgtatgttctaaaaaaataaccaaaatatgaactccattacaaatgtcttattacctccatacttaataattaattatgttttaccttattataattggccctagacacaaatgatattataatataggcctataagaaaaaatccttttatttctataaaaaaattgcaaagaaattggcgaaacacgtaattatataagattttttctagctacttctttaaatatagttaatattggaaataacaaaatcgttgaactcttggctaaaaaaaccgccctaacagtgcattaaaataccactttactctaactctctattcaatgcttgttcagagctaacatccactctccaaaattaaagtgaggtgttagactgtggaaattattacattcaacaacatactgcgaatctatcaataaccataaaatccacttccaaattcccttcatttctctttaatataatctagactcggcccgcagacatcttatctcctctgtaacttctcacaacccctttatatccg

SEQ ID NO: 275617 - DNA, 394 bp, Glycine max
atgatattgcagaattttagaacaaatgcacattcatggacaagattctacaggaaaaagagaaggaagcaatgaagatccaccagtagaagtcaaagcaaataatgattttccaagagagtgaaaaacttcaagagatcatccccttgacaacatcattggtgacatctcaaaaggggtaactactagacactctctcagagatttatgcaataacatggcttttgtatctatgatagaacctaaaaatttaaatgaagccataatagatgaaaattggataatagctatgcaggaagaactaaaccaatttgaaaagaatgatgttgggagttagttgaaaaacctgaaaactatccaatcattggaacaaaatgggttttttaaaataaat

SEQ ID NO: 275618 - DNA, 449 bp, Glycine max
agcttgtaggattatggggtacccatcacatgttgtactaggtggcggtcgggcgatggtgcaaaacaattctccacatccacaaatcacatataaacccaccatcccctgttgcccaccttcaactgggctcacgtactcccacgtagcccttatccttgtttctctcaacaccgggtccctatcaatcctcccaaactttcacaacatccaagtaatttaacattcaatcatcacaacctaacacagccaaaaaaatagggcaaaaaacagaaactctacctaaaacacaaaccaatatcacaacttttcacattcaaataccccaataacattctttttattaccagtcgttaaccggtggatcgactcgaaaattttactggaagtctttaatacattaagttattttttgacccgtgggaactggttaaaaaaggccaaaaccc

SEQ ID NO: 275619 - DNA, 369 bp, Glycine max
gatttaatgatgaaagctgtgcattttcaagtgaaaaaaaagctaagttttgaattgcaaaaaacagtagttgggctaagctcagccggtgggctaagtgcatatccaccgctaagcgcagcttcagcgcgcttagcacaaaggagaatctagcagagcatttgtatgaaagccgcacgctaagttcaagatcagtgcgctaagcacagcaggtgccttcagccaggctaactcgagactagcactaagcccgaatccacttactcgcgcttagcacgacggtggtgctaagtgtagtgtcacaatttcggagcctatttaaagcatgtcttatgtagaaaataggtaccaccttttttgaaactttta

SEQ ID NO: 275620 - DNA, 561 bp, Glycine max
agcttcttattgtgggtttgaattaatttcgtttcattttttcagaggaagttatatcaattggaagagttactcaagaagtttttgaacgtattgctgccacaaccacaaggtactttttgtttattaaatatactttgtgcgtttagatatgattaaaaatataaaattttcttatgggttgttattggttggtaactttgtgtatcttaaatttttttgttgattggtaagttggtattaaatgcatgcctgtcaattttgattgatgcttactgattcagcaatattactgccaatacagtaagatgtaaactgaatggttaccatggggttgattcagcattcttactggctatacaagtaatttggtattaaattgcccccatgtcaatgttggattgatgccctttcaccttaccaaaactcaaaactttttccctttgggcttctctccatttatgtctacctttttgaatcaaatcttggatgggggattgggaaggttctcaactcctgtgcatcaccaatgaagacctttctaaaatcatgcttttgggt

SEQ ID NO: 275621 - DNA, 464 bp, Glycine max
  unsure (1)..(464): unsure at all n locations
tccgttattcaattttgagcgtntngatatatcatgnggccccttntcannnnnnnnnnnnnaaannnatggnngnnngaannngcccaaaaattcagtggtcaatttcaaaggtgtcgatatatgatacacgtgaatcagacatccgagagaaaagttatagccatttgaatttctcgagagcgtctgttggtcaattttgagcgtctcgatatatcatgggcatcgatcatacattcgagtcaaacgttatggccgtctgaatttgccgagagctttcgtggtcaatttcaagggtctcgatatatgatgcacgtgaatcggacatccgagtgaaaaaatatagccttttgaatttctcgagaggttccgttgttcaattttgagcatctcgatatatcatgggcgtcgatcatacattccagtcaaaagttatggccgtttgaatttgccaaagcttccgt

SEQ ID NO: 275622 - DNA, 906 bp, Glycine max
  unsure (1)..(906): unsure at all n locations
gttcatgactatctgccatataactaccctacccccacacattctacaaccacttctcttcactatccaaagttaaaaaccaccagcaccagagaaattgaaagcttaagaccttgttggaagccctctagnaaacccacgaaactgcagcatgcacccttgccttgccacttgatatatttgaaggactcaaggtcactatgaatgacaaaaacctagggacccaggaagaggcgccaggatgtcaaagcgcctactatagcgaccaacccgctaccataagatcgaaaaacaaaggggtggaccagctatgaaagcattccaagaaacacattggatggggcgctcagcaaaagaacaggcaacatcccgccaatgtgatgcgtgacactcgaaaacaaaagatttatgaaagagtggtaacacaagttcggaggcaaaaagaaacaagtggctaaaaaacattaaaagcatgctcatgtgacttttgaaccatgcaaccaaaataaggggggaacccattaaagaaacgtgctggggctgggatgctgtccgctttgcaaaaaaagcaaggcctgtcaactctcaccttagtacacgagaaagcgtaagtccctaaacaatgaggctaacccggtacaaagaaaaggcagggctctttaacacccaacaatggcccaaaacacctttgggggacacaccaataactggttctcaaactggctagcaaccgggtatcctaaaccacccaaaacagctacaaccgaccttactttcggacccccgtgcgagcgcatacacacataatatgacgggtgtcacccccaactaacctcctaaaatcgcgtcaaacaaaatgaggcatcatacaccctgaaagagcctggaaccctatttcaacccccc

SEQ ID NO: 275623 - DNA, 635 bp, Glycine max
  unsure (1)..(635): unsure at all n locations
ttcaaagaaaaaagctctagatgagggttcactgtaatcaattannnnngnnanntannatgaaaananattnannttngnnnnntatgttcccatgaacccgggtatagggccctttttcactcacagtgtgtgcaaatagtgttggtgtttgtgtgcatcaaatgaataaatatttaccctatgcatacattttaaaatgcactaaaagcaacaaagagtttatatacataagaacataatgaagggaaaccaacaaagggataagtcatggtaaaacattgcacaagattaaatggcctaactctctaaaaacaatccccagtggagtcgccaactgtcgcaacctacccttcggcgggagggcgacgcgagactcgcgggatgcgtgttccacgaaaggaatacgcgcggagtcgccaccaacgtttatttgaggaaaacgtcggaaaaaccggaaaagacgcgatctacgaacttttaagtgaaaggttcgggagttgtatttacgcaccgggaaggtattagcaccccacacgttcgtcacaaaggacgacagcctttaatcaaatgtgcaaacatgactttgattttaacgttccctttttatgtncttatataccttataccctttt

SEQ ID NO: 275624 - DNA, 622 bp, Glycine max
agctttgatttcctttgttccggaaacctttcttttctcatgtgcacccaaacccaatctccgggttcaaagacaaccttctttctccctttgttggcttgtttaacatagcttttatttttcctctcaatttgatctttcactctctcatgaagcttcttcacatagtccgcctttgcttgaccttctttatgcttaaaaacagaaacattaggcataggcaaaagatcaagaggagttagtgggttaaaaccataaacaacttcaaaaggagaacaattagtggtgctatgaacagctctattgtaagcaaattcaacatggggtaaacaagtttcccaagtttttaagttcttcctcaaaattgtcctaagcaaagttcccaaagtcctattaacaacttccgtttgcccatcggtttgtgggtgacaagtggttgaaaataacaatttagtgcccaacttgctccacaaagtcctccaaaaatgacttaggaacttagagtccctatcactaacaatgctctttggcaaaccatggagtctcacaatctccttgaaaaacaaatcagccacataggaagcatcatcaactttttacatggaataaaatgagccatttt

SEQ ID NO: 275625 - DNA, 348 bp, Glycine max
  unsure (1)..(348): unsure at all n locations
ttgagcagaatnaaangacaataaatttttactccnanggnnnannngnnnnnngnnngnatnnagaagttcgnnccccnnanaaaagctctgagcagtatcaaacgacaataactttttactcggatgtccgaaagaatcccgtaatatatcgagacgctcgaaattcaaaattgaagctttgagccaaatctaacgacaataactttttactcggatgtccgattgtgtcccgtaatatatctagacgcacgaaattcaaaacagaagctttgagcaaaaatcaatgacaataactttttactctgatttgcgattgtgttccgtagtatattgagacgctcgaaa

SEQ ID NO: 275626 - DNA, 385 bp, Glycine max
ccaaatattaaacccaaagcaagtcccgtgaaactcaacacgatgagggaacttcttcaatttgcacaaagctatggtaccatgggaaccccagaggatgcaagcatttgtaaacttgtctctttcactgcccgtttagaaacatactcttgcatggaatcaccctgcaaataagtattagatcattagtcaacttttattacaggtgggttggtctaactcctctataagttgcgtcaaaatatttccatgccgccacaaattagtgttttaaaaacctaaggtttattagtgctggaccttgggtccctcctgcaataccattttgaacccccttgccaactattattccaggaacactacaactagtttgacccaccatggt

SEQ ID NO: 275627 - DNA, 962 bp, Glycine max
  unsure (1)..(962): unsure at all n locations
tgctgannncnttttgnttttgannncctttagaacctttgtatanacgtcaccacnctnctctcctgcttctttgtctgtcttctgnnnnnnnacactncttcgctctgtctcttnctttnnnnacnnanncgnnnnnnnnnnnnnnnnnnnnnatnnnnnnnnntgngtgnngggcctaggggggnnnnnnnnaannntatgntgaatattattattttggtgtgtattttctataatggatgaattacaatataggttaaagatttcttgaattaggaattacttctaataggtttgagtattaaaattatctccataatgagatttaatttgaacaattagcgaattatttttgagaatatcaggccagttatttaaaacgataaaattattaggttaattataaaaatttttactgtgattgaaacaattattatgaaattatattttttaattttattatataatttaaaatacataaatttgtaatttttaaattgaaaattatttttaatgcaaaattattaaattaaatttaaaactttttaaaataatgttatatattaaataataagaaaattttttatttttataaatcttaaaattaaccattttttcaattaattagaaattgtttcaaaaattttacacaaaattaatttcatttttttaaaacttttgatttgaagaagaattactttaatattaaaatattgtttgaatttttttaaattaaatttatgatttttttgaagaattaattaaattgttgggattcatatttgtatagtttaaagcaaattttattttaatnttttaagttaaaaaggtttttgtaagataattgtttagatttttgttttgtgacattattttcttaatatttgtaactcatttttaaataaagaaaccgtaattattttgtttgtattttgtgtaatatattttagtcatagttc

SEQ ID NO: 275628 - DNA, 272 bp, Glycine max
agcttgcatatgaataaatgtcatatgtttatcaattgaagaagcatatgttccgcataaagagcaaaggaaagtctcatggcattgtagagtgaccaaactgatgccctatgatcaaaacacaaggcagtgaccatgcattgaaagctttccaagaaacacattaagtcggtgctcaagtaaggaattggaaacttcttgcttatgtctgtttgaaacgagaaaacaagtatatgataatatagtgattctataaggtcttatataaagag

SEQ ID NO: 275629 - DNA, 463 bp, Glycine max
  unsure (1)..(463): unsure at all n locations
tgcaagaccgagttaatctagttgtcggttcccaattgacnntnnnntannanntnnnnngnnnnannnctacnnnnnccccnnattcattggtcacaaaactgaagattgcactacctttaaggataaaatagaaaaattgatccaaaaggggaatctatagaagtttgtcaaaaactaatcacatgataaaaactatgaaagggagtgagatagagccaagaacgtagtaggacccatgaggcaacagaaacacaatgttagggatgagaatcccccacccgaaactcgacttcgagatgtaatcaacataatagttggaggattcacgaggggaagaagttcaaactcgacaaacaaactctaagtttgtagccttaagtttgttaacttggtcatagtaaaaaagaagcccacaaggagcctgcccctatcactttcacgaataaagattttgagggga

SEQ ID NO: 275630 - DNA, 334 bp, Glycine max
agcttgttaataaaatatagtaattatgttgttagagtgcattagctccatgacctgcaaaattgactactcttccttctagatgaattgtcatactctaataaaaaaaataacatatcacacatgtctttagaaaattatagaataattaactgctctctttctaattttttagcactccaatctggttcatcaaagtgctttttctcctggtttacactgatggtaagcgactacatcttataataattcaccaagctaaatcattttactgattattaattaaatgtaaatatttttgtttcaaacaacatgccccttaaacataattttt

SEQ ID NO: 275631 - DNA, 434 bp, Glycine max
aattccatgttttactaaagtgaaacaaaacctagtgcgaatcaagactccgacatctatcatggatgaatgcatgaagaaatgcatatggcacaaatgcattttatgaatatgggagcccagcagatcgtccccttcttagatacaacattcgggcagcatggcgcccgatgtatgcatttaaaaaggcgacatggaccctccatcagttcgtgagaaagtgaggggatcaagatgcaactcgtgcatgatgcagacgtgaaaaaaggcacaaaaagaggatgtacataatatgacaatatccacaaaaaatcatacaagaaaagcgtacatgacattttaaaataaatggatggcagttgttaaaaaagcacgcaacgtgtttggtttgtgctcctattttaaggaacttaaagggaagaaattaaaaggct

SEQ ID NO: 275632 - DNA, 385 bp, Glycine max
agcttaatacctgaaattactaaattgaaaaaggaaaaaataaaatcaaattagagtcttgactcctctagttccatttactcctcttcaagttaaaaaatgtccaaaatttttataataattaaattaatataaaaggacaaaaaagctttaaaaagtgtactcaaacgatagaaagcatgatttaattttttcttcttcataaaaacactttatttggagccacacccttagtcttttactatttgattcgatgcaattcgattagtgccacacccttagtcttttactatttgattccatgcaattcgattagttatctatttgatttataagaatgaatattaacgacctttactcttatgattggtaacgaaatcatata

SEQ ID NO: 275633 - DNA, 415 bp, Glycine max
  unsure (1)..(415): unsure at all n locations
atgtttcatttgagttcaatgctatggcacagagatgggacaccatcaaagtggacgacctcaagatacaaaggaatgaatttgtggctgtgaactgcatgtttcagtttgagcatctgctagacgagactgtggtgttgaataatcccagggatgctgttttgagattgattaagaatgcaaatcctgacatatttgtgcatggcattgtcaacggatcctatgatgtaccattctttgtgtcatggttccgggaggctctctttcattacactgcattgnttgacatgcttgacaccaacgttgctcgcaagaatccatgaggttgatgtttgagaaggaattgtttggacgggagatagtgaacattatagcttgtgaaagttttgagaggggtgaaagagcacaaacatac

SEQ ID NO: 275634 - DNA, 139 bp, Glycine max
agcttctacccaaatggacttaccttgaattaattccatttttagccctttttagccttgtcaccatttccttgctttgaagctaactacaagccttatgtgacaaagcatgatatcaccatatacccctagaatcttg

SEQ ID NO: 275635 - DNA, 529 bp, Glycine max
  unsure (1)..(529): unsure at all n locations
tccatcaatatccatgacataaaaaaantagttataaacgttttacgattnaccnnnanggnangnnnanngntttnnatngngnnnnntttnnaaaaccatcaacaaataatagagtcattttggtgggctttaggttaaggcgactaatcttctctaagaaagaataaggcatgaggttacaactcgcgcctaagttaagtagtgcatgatcgatagagagatttcctaatgtgatgggaagtaaaacatcccttgtcctccaaatgtttttcaggtcttacttgatgtagcacatcctatgtgagtttttcaataggtggttcctccttcttcccttgtagcatctccatgtatttcttgaatttttccatcctcccatcttcttcttgcttatggatgtttagcttaataaaattaaacaatggagtcttaaatgaagattccttgcgctgaaggtttggcctgggcttttatctcttcctctagcatggcgctttttatctacctctttttcttttttaccttc

SEQ ID NO: 275636 - DNA, 739 bp, Glycine max
atcattttttactggcaatcgattaccagaggagggagaacttcgtgaacttacaacaatttctgacactctgtaatctcccttccaatccgacgtcgtgcctctctgctcgtcctaccgtaaccccctatacctatcccgcattttcctctcgccgtttgcctccttccacctcattctctgccactccaacataatctatttcagcgtgtccatacctatcaacctcgtctctctgccccattcaccgcctctctaaccatcgtactccttttcactccgtctccgacctcaagactgtccaaccctcgttctcttcctcaccctccgtcactcacaccttgctccctgtcgttccacacaaacctaactcccgtatcatctcctcccacccctcaccgcgtgccgtccctatctaactctgcgccgcattaattactagatctctagcctattccacctacggctccctatctgctcctcccgaaacgcttacttaccccatccaatcacccacatctcccttctgaacctttttcatctctccacaccccttatctgccaccgaccgctaccttcctcaccacttgatggttctattaccttcgacttctacattaccgcgctcgcacaatcctccgtgccactcttaactttccatctcatagctcaacctcatttcataccatctcccatcttccactccctataaactcatctccaccccttagactcacct

SEQ ID NO: 275637 - DNA, 836 bp, Glycine max
  unsure (1)..(836): unsure at all n locations
agatgaggaagcgttgaaggttgaaattttctgcttttatctcccttttnnnnnnnnnnnnnnnnnnnnnnnnnnnnnnnnnntnnntttnnnnnggggtaantttatgctgagattatactctcttgagagaataatactcaaacccaacacagatgcaccttgaacaagcccctatagaagctattgctgccacacccacctaaattacatctctaaacctttaacctcactcacaaaccataccccaaaatatccactccccctgccactaaaactcgcaatcaccaacccactcaccctttccctctactctttcctcccccccactcactcccccacctatccatccgccctcccatttcacctccaccccctccccccccctcttaccctcttcactcccacctccccacctcctctctctccgccttacacctacccgccctctcccacaaataatactctcactactactacctcctctcactcatcatctatccccaacccttttcttccttctcccacacaaccccccccccaccttctcaacccctatccaacaacacttgtcacatacactacctcagcctcacatcctcacttctacccgctcccatctccactcacaccccctctagccaccctctcactcctcgactcctcctcaccatccccgctacttcacctcactcatccatcattgctatctcctcttactctaaacacactctctctcctctgcatcacatcccacatcctctctcttctccccacacgtcttttactacaattccaccatagctcgtctctatactctctgatccacctcccct

SEQ ID NO: 275638 - DNA, 84 bp, Glycine max
agcttagtaacattatacaatttgacaaaattcaattcttgattttggacaattgtttccagcacgcctctgagatcatcgttg

SEQ ID NO: 275639 - DNA, 995 bp, Glycine max
  unsure (1)..(995): unsure at all n locations
tctccgcgaggtactagggtactagttagctgnntatccatttgnntnnnngnngnnnnnngntnnnnnggnnnnnccannnnnnagnnntggntnggtgggattttattaaacattttagtgtggaataaagttttctctttgacttctgcttcatttacttcaattggccggggcagttaaccgcctaatcattccaacattttccctttccgtgtttctccncatcttttaaaaatcacncctctaccttccctttttgtttcaaattttcgcggccctcttctttttttttcactcttaaaaatcctcccttaacttcttaaagcactgcacaaacaaaaattttcctcttgggttctcgccctttattttgttgcncaataaataacggctttatggttcacggctatcaaaacggctgtttaacacaatggctacattcatttttatctacttctcagccgttgcggcattctttttcggagggggctgtaacaccttttaacttttcgggactctccaacccttgttaataaactcactgtatttttacattctccaaacaatcttctgtaagggttcttcttagcncgcggatacccttatctggttcacgcgggacgcgagggtcttcttatctcgccgaatatggtccctgtctcaatctgatgttttatctctccgcttctaaaggcgactgttctcactngcgtctcttgactaatcgatctcggatgttaaccaaaccgattccgtgtcgtctgncctacccatcttggacggatgtcggtggtggcatctctctacacattatgcggacaacgccggtgtgctctcactgtgttcatacggctgtcagctttacgntctgcttgcttcgactgtctcgacgntcttctctataccggtcgcgtactantcggcaatacgtctgttctcttactacgcatatatgtcgaacgctctcttgtctcctctctgacagagagggt

SEQ ID NO: 275640 - DNA, 149 bp, Glycine max
agcttctagattgggataccatgctacagctgtttcggccaagctgtcttgaaagaaatggaccaacaaattttcatccgcagaatacgcccccatttttcggcaatacattcggagatgcccttttggacatgtcgtctctttgtact

SEQ ID NO: 275641 - DNA, 822 bp, Glycine max
  unsure (1)..(822): unsure at all n locations
agccgggggatgatttgtgcacttgaataagtgaatatngaatnnncgcttcggtggggggcggcggnnccttttgttttttttgttttntttcgcttgtaacttctagtgaannannaaaatanncctgggnnnnttgtaagagtttttttaagggtgattagttttgaaggcgggatatacttaatggggtgatattaaatttgaaacttatatttaagaaattttggttaatatactttaggtgtaaggaaagattttgatttgggagagattagttgtttaaaaatttattgaaatttgtattttgttggttataaatgataaaatgggtatgatatgtgggtgatattgttaaatgtagtttattttataaatttgtttgggagatagatatattaagagtttgttttttttataatatttatttaaagatggttggtttttttttaattgtattgaatgttatttttacattatgttattgagttttttttaagtatttgtatgtgttatttttttttttgatgttagtaggggtgttatttttataatattggtggtatgtttatattattattttgtattttgtatttttttattatttgtgagtttattttaatttgtttaatgtttggtttttataattaaatattagtgaagttttgttatattatatagtttggtgatttttaatatatttttgatatttttttttttttttagtatgatatttatgtggggttataattttatattttttttgttttcgatatttattatgttaagtttttggatagttttgaatttattgtattatgg

SEQ ID NO: 275642 - DNA, 223 bp, Glycine max
agcttgaggttataagcggatctgttttgacaatttcgagaatataacattgcttgataactattgtgtttcaatggtgccaacattgccaatccccaaatacatgcgtgagaatgagggaatgtgatacaatataatcgcgaaccgcgtgtgaggaatggctatttgaaattaaaagagactaaattataaaatgttatattaaataagcgtcttaaagaaa

SEQ ID NO: 275643 - DNA, 211 bp, Glycine max
tgtttagacaactcgtacaattttcaaatgtttgaaaactccctccaacagccataaacaactaacttccaagcttatttaatgagatcaatttgaaggagcttgttgcaaggaaggagtgccacaaagagatggtttggtcataagagttgagtagctcaaaaagataccttatatatataaaaaaaagtttttaggcaaaagattctag

SEQ ID NO: 275644 - DNA, 392 bp, Glycine max
agcttaatgcaatcagcaattggcctaaggtgtatgaagagcaaggcttcccttcaaagattgggattcccaagtaaggaaaaggaatagatctcatcggaaagctcaattgggattttatagcaatcaccttgcggttggaaagagaaccatcaaagaattgacaattttcaaggttgattatttggccagatgcatccccatatagtcttaaaaggttcatcaaagaatccaaacccttcttagttcccctactaaaaattataatgtcacctacataaagaatatgagaaggagtagcatatttctggggactagccattggcaagatattttgtcccttccctagagaactgcaaacatatcccataatgatttaaaagaactgcgat

SEQ ID NO: 275645 - DNA, 781 bp, Glycine max
  unsure (1)..(781): unsure at all n locations
agccacaattttcctctttttaatgcaaaggcgtgtctcccttnnngnnnnnnnannnnannnnnnannnnnnngnnannnnnnggnnnnnnnnttanctttatgctgagactatacccttcggagagtacaaagctacaaacccaaaatagacgctaatgaagaagaacgtagagaggctaaagctgccccaaccaatagatctagattccgaaaccttgcacttcaaaagaagaagcctacgcagaagattcccttgtccccgggagtaaatcccctaatgaccaactcctcgccatccttggagaccgagcggcccgccgatacctacgttaaggcgtgtggggcgctcccgcagctctcaagattctcactgcccccagccggtccccctctaagggggggcaccctcatactaccaacacccgggcgtcacactacgcgcccttggccccgcatcgcactcccactcaaatcctcccataccatctcccttccaccccacctctccgcgcctcgccctggcttacccgccgcgctgcgcgaccactctcagggccctcggtttctgccctctcgccgcccaccgcgtcttcctcacgcctcccactcgtcctgcctccgcctcctgcccgctccacctgcgacacccagccctatcgactcttgccagcacgcatcaccgccgcgctgccaccccgcatctccctaccgctgccaatgctcgcccttctctcaggcctggctctccgtcatagcacgtttgcccccccccccgccc

SEQ ID NO: 275646 - DNA, 223 bp, Glycine max
agcttaagacctgtttccatattcaaatcaatttagtgctttaaaagctgctcttttatcaagtccatgcaaaaacatctgaattcatttggtttttgggaatgtccttcattgttttaaaaaaacaaatccttttgttgtgttttgatccaaaaataagtttcaaaaatactggttgttgagtctttctacaacatgctttgttcagaaaaactttctattt

SEQ ID NO: 275647 - DNA, 255 bp, Glycine max
  unsure (1)..(255): unsure at all n locations
tatgcttttcgttgggcatnttttatggttgtagatttttttttnnagngannaannnnngananaaanngnnaaaaaannaccannnatagagctcgggggatagggggaggaaatctattccactgcatagttgaagatgctagaacatcaagtttaaatactgaacagcgctagtattaaaaaaaccatgataagtctcacatcaagttctatgctactttcacagggcataccacaaccctcctccttaat

SEQ ID NO: 275648 - DNA, 434 bp, Glycine max
agcttcctcggtgccatttcctgcgaaggcatacattcagaaagttagttttaccaagaaatgctactcttaaaacaaaaatggcatacaacctcctccaataaacacaaacatcaatgtaaatttagagcaaactcatgcagatacttccttatgaacattcactcgcacaagatattcttctacctaaaaaaaatgcacccatgcacaatcaaggcaccttcgttacctagattatttatatgtacttccaaggtgtatttgctacctacatcacatgcacttccttggctaaatttacatacatgcattctcaaagcatttggggtaccaaaaattgcacacgcgcacattctggcatttctaatacttatgcctatacaaactttgtgacgaatttcgactatctacacaataaggcgcttcatttcatg

SEQ ID NO: 275649 - DNA, 874 bp, Glycine max
  unsure (1)..(874): unsure at all n locations
agcgaggcnnatgagattgtggnactaagaacccttggttttaggcgagactatataagactgtagctttttattcaagaaaattttttgggggntttacccccnnnnnnnnnnnnnnnnnnnnnnnnnnnnnnnnnnannncnnnnncctnnnnnattgtatattttaatggaattggatggctgaaaattaagagaggttgtattgatcgaagagtaaaatgctctccaaaaaataagagtttttatgaaccgaaaagtcatatacattcataaataaatcttgggcaaccactttcatattcaataacgaattatgatggagctgtattgtacaatctatctctttttaagagagaatatttcttctcttggtctcaatacggaaaaaagatttaagagaccgcggggctttctgttagtgaaaattcttgaacacaacggaaaggttgccccctggtgggtcacacctttttgaaagagttttaacagagagggggaaaatctcattggtttgtttgaggactaaacgtaggcaccaaaaattgtccgaaccagtataaacaaagttggcatttttctcttatccaaaacatccttttttgatgcactttttttttggtttaaagaacttatctttaaatcggcgtttggataacgaccgtttaaggggggactggtcatcccaaaaaaaaaagcgaagcgttaactcgggaaaacactccccttttcatcacgcagcgcggctttcttctaaagacaaactcaggcacttggcgcaaacacccaattttggtaaaccccctgtttcttaaaagaaaaacttttcggaggaaggtgacaagagcctttctaacaacctccccatcactgg

SEQ ID NO: 275650 - DNA, 397 bp, Glycine max
gcaataattattctatttaatcccgattattataataaaatttaacgcatatttaattcacgtcggtttaaaataaacaatatttatttaatatatattaaattttgtaatacaaataaaatgctgccataaaaaacattttttatttttaaaaaaatatacagattacataagtaaatatttattattcaaatttacatgcgcattaaaaatgtattagaaatgttagcgataattatgtatactaaaattatttaatttataaaggaattgattcatttacctactgggtagagcattgccataataaccccagaatttttggttcgagtcttggcccataatttttttaaaaatattttcaattaaacacctctcggaaaaagaatttttattt

SEQ ID NO: 275651 - DNA, 361 bp, Glycine max
aaaaatgatgatttggaaattttatgcaaaactggtcatgcatgcacctatgtggacactcaagtgtcaaatttttatggtcatgtgatgctagggctcaggattcatttcctctattttaaatcaacccaatgtttccaaaatatgttcttttatcaatttgtgcattcatccgagtccatttcgggcgtccggggaaaacttcacagcattcacccttcaggtgtatacacattttttttaaaaactagttatgatcaatgaattttttttaaagaaaagttggaaatcatcttttttcaaaagcatgtcggtttttagctagacaacttatggttcttttttctctctttgttgtttt

SEQ ID NO: 275652 - DNA, 274 bp, Glycine max
aacatggttatggctaggaatccaaaaattggttttaggaatagaaaagcatgaaaatagggacttgtttggtaaaaattgggctgccccatgattggcactttgcacctaaataacacgggagatggtttttaagggcgcgcggatatatgtgtaaaaatatatggcataaaaaatatgttgcacagtgtgggaatatatggtacaaaaataccttgcaaagggaatgaatagcaaacaatgcatttcaaagcatgtatggtttgggataaat

SEQ ID NO: 275653 - DNA, 408 bp, Glycine max
  unsure (1)..(408): unsure at all n locations
tatgctgcaaanatttataatagaccttcttcgcannnnannnnnnannnannaannnntnnnnnntttnaannnntccccnnaattcatgttggaggaatcatccaaatctgagatggacaagtccttcacaacaacaacagtctgtccctcattttcagaatgatgctgatccaagcaagccatatgttcctcttccaatacaacaacatcagtcacaacaaagacaacaagcaactgaggctccttctcaaccttccttagaagagttagtgaggcaaatgaccatccagaatatgcaatttcagcaagagacaagagcctccattcagagtctgacaaatcagatggggcagatggctactcagttaaaccaagctcagtcccaaaattttgacaaatgccttt

SEQ ID NO: 275654 - DNA, 440 bp, Glycine max
tatgaattccatgaatctacaatgacacacaatgatgcctaagtatgaacaatctataaaatatgaattccattaatttaaaatcacacaaaaatatgaattccatcaatttcatgaatttaaaatccagaggtatagaagaacgaactgagtttcttcttgtcgactatgaatagaagaagccatccacaccttgttttgtctaagctctagtctcagattttctatatcaattctacctttatccttgactcctaaatcttttattactaaatgaaaagcagtgatgagacaagattagcacagaggttgctttaatcatttatcagtactgagtgtggcacaggtgttacctgtggcttgtgttccaaaaagctttgcttgctagcaggtgttttcatttctagcatcactttggttgtaggctttatgctacgcac

SEQ ID NO: 275655 - DNA, 344 bp, Glycine max
  unsure (1)..(344): unsure at all n locations
tgcgcgaagtcgtgttgatgcttatcgagtcgaatgagcgagaaagaaacttaacactcactcaaacatacaatgatcttccttccaaagatggcatgtgaagaaaaaaaggatgcagcagcagcatcccttgacattttggtaacagaatatgaatttttttctgcttatnnttcctttccacaagagagaataggagatgattcttgtacattcttccactccattatgtcactagacttaactgttgtaccttatagcattctctattattaatttcatgtctctgtattttcttttggagttcagcctaacatatatatatatatatatatatatatata

SEQ ID NO: 275656 - DNA, 433 bp, Glycine max
  unsure (1)..(433): unsure at all n locations
gcgaagggcaaacattggaaagatagttnttaccaagaaatgctacccttaacacagaaatggcatacaaccccctccaataaatacaaacatcaatgtaaatntagagcaagcttatgcgcatacttcttcacgaacgttcacttgcacaagacattcttataactaagaaaaatgcacccatatacaatcaaggcaccttcgttacctagattatttacatgtacttccaaggtgtatttgttacatacatcacacacatttcctttgctaaattcacatacatgcatactctaagcactttggctatcaaaaattgcatacgtgcacatcttggtatttctaatacctatacatacacaaacttcatgatgaatcttgattattgatcgaggccgtacccgaatcanataaacattaaaatgtagtaact

SEQ ID NO: 275657 - DNA, 445 bp, Glycine max
  unsure (1)..(445): unsure at all n locations
catcagaccacttccagggtgctggaactacttcacatggactngatggggcctatgcaagttgaaagccttggaggaaagaggtatgcctatgttgttgtggatgatttctccagatttacctgngtcaactttatcagagagaaatcagaaacctttgaagtattcaaagagttgagtctaagacttcaaagagaaaaagactgtgtcatcaagagaatcaggagtgaccatggcagagaatttgaaaacagcaggttcactgaattctgcacatctgaaggcatcactcatgagttctctgcagccattacaccacaacagaatggcatagttgaaaggaaaaacaggactttgcaagaggctgctagggtcatgcttcatgccaaagaacttccctataatctctgggctaaagccatgaacacagcatgctacatccaca

SEQ ID NO: 275658 - DNA, 448 bp, Glycine max
tcaatgttaatgtcacatcagataatgtcaaaaaccatatcatattatggagatcgtggtatggtattgtaagtgagatccttggccagagtggatttgattgggatggcactaagcacatgatcacagttgagaatgaaaatgcttggaatgaatattgttgcactgtaattattctttaatatgatgctatttgttattcaaagtagattggatttgactttctctttttttttgttcagtcgcataaatcggctaaaccatttcgattcaaggtgcttcaaaattgggaagatatagtggatttgtgtgctaaagatagagtcaccggtcatggagctgaaattgctatgatgctgatgaagcgatgagtagagaaacaaatgaagtggaattcatggggttaggtgctactgccatagatttagaagaaccaagctctaataca

SEQ ID NO: 275659 - DNA, 463 bp, Glycine max
  unsure (1)..(463): unsure at all n locations
ttgagcgacctgcggctgcaagctttaattttttagtccttaagttnttaaagtctatttttagtctcttaactntntttactccttaagctnttaaatnttttttagtccttaagtttttaaaatctatttttagtctctttttttttcagtcttacttttaatcctttaactcttctttttcattcttacttttaatccttttaagggcctataagaacaaaaaagtcaagagagcaaaaataagaatgttataaaagttaaaagactaaaaatagataaataagtttaaggactaaaaacataaactntaaaaagtttaattaaggactaaaaagataataaaaaagagcacaagacaaggtgtggggggtaattgaaatctactaagaaataaaaatggttattcattagttgtgagaaaattttcaattttcttgtatttaagatgtaaaatcacaac

SEQ ID NO: 275660 - DNA, 453 bp, Glycine max
  unsure (1)..(453): unsure at all n locations
tgtagggttaaagtttcacgaatgtcacgtgctcatgcaacaattgttagtcgtggctatacgagacatcttgccaaacaaagtcaggttcacgataactcgcttgtgctttttcttccatgctatatgtagcaaagtgattgatccagtaatgtttgatgagttggaaaatgaggccgcaattatactctgccagttggagatgtattttccccctgctttctttgacatcatgattcacttgattgtgcatctggttagagaaatcaaatgctatggtcctgtttatctacggtggatgtacccggttgagcgatacatgaagatcttanaagggtatacaaagaatctatatcgtncggaagcatctattnttgagaggtacattgcagaagaagccattgaantttgttcagaatacttagagaaggctaaagctgttgggctttctga

SEQ ID NO: 275661 - DNA, 443 bp, Glycine max
  unsure (1)..(443): unsure at all n locations
agctnttannattttttagtccttaagttattaaagtctatttttagtctcttaactttttttactccttaagcttttaaatnttttttagtccttaagtttttaaaatctatttttagtctctttttttttcagtcttacttttaatcctttaacttttctttttcattcttacttttaatccttttaagggcctataagaacaaaaaagtcaagagagcaaaaataagaatgtaataaaagttaaaagactaaaaatagataaataagtttaaggactaaaaacataaactttaaaaagtttaattaaggactaaaaagataataaaaaagagcaaaagacaaggtgtggtggttaattgaaatctactaagaaataaaaatggttattcattagttgtgagaaaattntcaattttcttgtatttaagatgtaaaatcac

SEQ ID NO: 275662 - DNA, 466 bp, Glycine max
  unsure (1)..(466): unsure at all n locations
tgagatgaatttgttcaatntgatgaaatttcggtacaatgcatttctagttgttctctgagtgcatacttgattgtcgaggaattaatctcaccgctttcatgtcgtgtacttggagatcaatgagaaatgctgctgaaatttcgtcaaatttaacaaaagagacttaaccttgacgtatgaatctaccataaaaatatgtcttcttgaagggatagggtcacatcattaataaaaaaaagtgagattttcatgcatcgaataactttgtgagtatcacagagttattatttagatggatcgacgttgtatgaacgaaagtcgcatgagccttgcatatgaggaaggcgtggaagagttcttgcaatttgcttctaaaagaagtcaaccaggtgaggacgaaaaatatttttgtccttgtataaattgtttgaacaagagacgacaaatactcgatgacatacgg

SEQ ID NO: 275663 - DNA, 444 bp, Glycine max
agcttgttgattaagacaagttggaggcgttcttactttcaatacattgacgactcaactcaaaggataaatgtatcatgggcaatacatttatcaaatttcaaggcaagatttataggaagccctgttgctgagtgacacattattggagtctttatgccttctgtttttgtttaatgcatttataggatttcatgtttattttgcttgataagtgattacttcacatttgtataagggtagtaatgctacttgctacttgtagaatttccgttgtcatgctcatgtcatgcctagagggtagtgctattttcttctttattaaattaataatgttgcaagcttagcttttctctattcaccaataatctgattattgctgtattatttggtggaagttgcttatgcaccagtaaacatactcagttataggagatttacaat

SEQ ID NO: 275664 - DNA, 389 bp, Glycine max
acactctagaatactgacgctcggtgcgaggtacttactccgtgaagatcgtataacgaatgatgaacgtcgaagaacggctgaaacctttgcgaaattcttcacggaaacgtttccgaagcgcctcgacttagatcttcttcacggaaacaatttttccaagcaaattcgaaagagagagaagtgcctaacgggctgaacccttttcttcttcactttctcccctatttatagcaaaataggggaggtgcttgtcgcccagctcgcccaggcgagcaaggttgcttcctccataagcaacagccttctggaggaatattctggagggtccaagtgggcctggttgctatttgcacccccatttttactaagaacacctcccttgccct

SEQ ID NO: 275665 - DNA, 452 bp, Glycine max
  unsure (1)..(452): unsure at all n locations
cccggatctctaagcaccgcggctgcagctgatcaattgaggagagatgttcggaagtattcaactaccacaggaaagaaagttgttggagcaaaatgggtctttcacaacaaactatatgataatggtaaagttatgagaaacaaagcatggttagttgctaaagaatactcacaagaagaaagtatagactacaaagaaacttatccacctgtagcatgtctagaggcaatacatatcttactttcatttgcagcttataaaaatatgaagctatatcaaaaggacgtaaaaaatgcatttctaaatggcttaattcaagagtaagtttatgttgaacaatctccatgctttggaagtgaaacctttcctcaacatgttttcacactcaacanagccctatatggacttaagcaagctcctagagcttggtacgaaaaactaagttcatt

SEQ ID NO: 275666 - DNA, 453 bp, Glycine max
  unsure (1)..(453): unsure at all n locations
tcanaacacagcaacacanaatctaggtgtccaaaacccctcaatttaatggattttctaggtttgagaagtgaaattgatgatgaggtaaatttgaagcaaactctcacctcacacaagtctataacatcaatttaaacttgttcaaactggagttacacctaaaatttcattgaaatggctctttgttcactttggtcatttgtttttctctctagcacagcccaagctttctcataagtcctaaaagacattttgagctaggattaactcactctaacctccaaataccacagaatccagatttaaccttccaaccctcaaggtctcactctntttccactcacatcaccatactctcaccttctaaccctaggttaactctacccttcatctctaacagttntccataagcaatctcagcacatacacatcacaagcatcatcataaaa

SEQ ID NO: 275667 - DNA, 442 bp, Glycine max
agcttctatgaaggttggatctttgagcttcaatgaggtccttcaatggtgattttccaccatggagatgtagcggaagataaaggagaagaggtgagaggaggtgtcatccacttgggaataagccatggaaaattgagcttcaccaccatgagagtgccttggataagaagcttaggaaggaaacttcaatggaggaaaagaaagagagagagataatgagatccaggggagcacgaaattgaaggaggaaaagaggaagagaagttgaactttgaagtgtgtctcataagactctcattcatcaaagttacaacaagtgttacacatgtttctatttatatccgagggagcttcctcgagaaacttccttgagaagctttttttagaagctagagcttatctacacacacccgtctaataactaagctcacctccttaa

SEQ ID NO: 275668 - DNA, 363 bp, Glycine max
tggttcgaggtacttacccgttgaagaaccgaaaacgatgaagaacgaatgaagagcgtcgaagaacggtcgaaaaccttcgcgaaatcacacacagaaacgttacggaagcgcctcggcttggattttcttcacggaaacaatttttctaagcaaattcgaaagagagagaagtgcctaaggggctgaacccttttccacttcacttctccccctatttatagaaaattgggggagaagcttgccacccagctcgcccaggcgagcagggttgcttcctccagaagcaacagccttctggaggaatcttctggagggcccaagtgggcctggttgctatttgcactcccacttttactaagt

SEQ ID NO: 275669 - DNA, 387 bp, Glycine max
  unsure (1)..(387): unsure at all n locations
agctngaagctcaagaaaaagcttgaagatgttttagaagaagttntggcttttagatgttattagcagcttcaactaccccattcatcttgggcctgtatggcgtggaattatggtgttggatcctgaaatcctcacacatttccttcatcattttgttgttcagattggtggcattatttgtgataatcttcttgggcaacccataccggcagattatctctttcttaatgaacttgaccaccacactccttgtcacactggcatatgaagcagcttcaacccatttggtgaagtagtcgatcgcaaccaaaatgaagcgacgtctattcgaagccttggcctcaatagccccaatcacatctattccccacatagagaatgcct

SEQ ID NO: 275670 - DNA, 443 bp, Glycine max
  unsure (1)..(443): unsure at all n locations
tgttcgggtagatatttaattgttcattggattntctgttcctcattggaatttggatggatatgcatgtttttaaggctttttagtttgatactttgatggcaacaaatcaagatgaaatgagtgaccttagtgctttttttttttccagcataccggtaccattttaagagttgtaatgctaattttttagccttataatttacctgtttattagacgaaaaccctaaccattgtccatgaagtgttctaatgtttcatttttctttgattcatttgaagaaaaaaatgttcatggcaacccttatctaataattaataatcccgaataaataattctaatatgcacaaatatcagcatgattgcttgttattctagctgcatcacttttttcttntgctacttaaaatatctattatagcattcataataccttgatacc

SEQ ID NO: 275671 - DNA, 414 bp, Glycine max
  unsure (1)..(414): unsure at all n locations
agctnttcgattcattctatgtgcccgtagtggtccacattgtgtttcgtgcatttntattctcgttntgtttactttttataccccctgttgacgtgcttaagccattttacttaagtcatttctcgcttaacttaaaaacaaaataaatttccaccgaacgtttgaattgtattatccattaacttcggttaaaataaattccgaccgttcggtcgtgccgtaaccacgttggaaatcaaaaagaggtaaaaaataatataataatcaaaaagacatcttttagtaaaataaagcggaaaatcaagtggacgttttctctttgggatttctcattcttaatcngaatgattaataactaaagtgaaactaaaggctaaaatcaattcgcctagtcaagctcgtccataaaaa

SEQ ID NO: 275672 - DNA, 429 bp, Glycine max
agcttgttgtatagaaatcctcgttgaatgtgctttttacaccgaacaacatttcatttgtttcaaactgatcccatcccctagaaaaataaaaaaataattgtcaacgtaaaacaaaaacagaggagctattaagaactgcaataagaaacaaatgacaaaaacctggatataaataatggtagtagcaatgtcatatattccattaagcctcatcttaataagtaaagacctagcacaaaatcccctatttcagttttggaatgtcagaataattcataaccagattttatgccaatattctttcaataattccgagggcgagccctggtgcagcggtaaagttgtgccttggtgacttgttggtcatgggttcgaatccggaaacagcctctttgcatatgcaagggtaaggctgcgtacaacatc

SEQ ID NO: 275673 - DNA, 530 bp, Glycine max
  unsure (1)..(530): unsure at all n locations
cggcccctcggcgcccntttgatcgcaatcgntganncgcctnnttagagtacacaatgcatatacgtgacactatagagatctgaagcttgctgctggtcatactttaagcacaccataattggagagcggcctagtctgagaccattcatgttcatgcatcgtgatgatttacacactacaacacttgatacaatggaactataatgaactccttgggtgatataaccgtgtagcgatcaaaatactatataggcagcttatttcaagacatctacaagcagctctgacatcactcaacttatgttaagatcattaactattccgacaaacccacatgagtcccatatgcacggaccactattaacaagctaagacatgcttttgatagaacattatgacgagctctcacttgctcaatctacttgagaaaagaacatgtgaatcatagcgatggttcctcatagctcaagttatataatgtatgtgttacgacatgttgaacatctcctgtagatactgagagtgga

SEQ ID NO: 275674 - DNA, 380 bp, Glycine max
  unsure (1)..(380): unsure at all n locations
agctntctaagcgctattntggtccattccttgttactaaacacattggtcctattgcttatcgcttgtaactaccactttcctccaagatacattcgaactttcattgctttcttttgaagcttcaccaaggacctatgccttttgtctctggtgaattaccacctaacgctttggataataatccatagctggtcgagccacttgctatcttggccaccaagttagataattctacatctccttctaccanaatggtgctagaatagtggcttggtttggcattagaagagactacataggagaaatgggactctcttaacaacatttttcaccttgaggacaaggtgcctctcccaaggagggaattgtagcaactc

SEQ ID NO: 275675 - DNA, 395 bp, Glycine max
  unsure (1)..(395): unsure at all n locations
tgtatttcttgtttgactacatataaggatatctccacaatctgttagtcttcaactaatttgctgttctctctgccagaaaataaaacatcaatacagagatagggctgctgatagaagaatattgcatggtggcttccgcatgggtccaggacagaagaatctgtcggacatttataatacaccatcttcacctcgtgatgattgtccacaagaagctaccgccaacgccttggagatgtcatttggagctggtagttatgctagacaacttctacnaagcatgggttggaaggaggtatcttcttactttcttatcatcanattactcccttttattttattgaagattctaagaactgctaatataatttcaactcctatcacaactttct

SEQ ID NO: 275676 - DNA, 300 bp, Glycine max
  unsure (1)..(300): unsure at all n locations
agcttaaggttagtgttggtgatcaaaggatatcatnttcctctccctttgatgttgtttggttgagtcatggagtggtaagcacctcttcttcttccgtttggctccattttcatttttctcataacgcaccaatgggagcttgggagaaagctctattttcggggggtttgatttcatttgtggtcatatttgggtttagggtaatgtcgttgcgatggacttgttgttggagtggaggaaagtactacattagacctaaagctcattcatttctcattcttcttcacaaagttctct

SEQ ID NO: 275677 - DNA, 432 bp, Glycine max
  unsure (1)..(432): unsure at all n locations
atcaagtggtaatcagagcacaagagcttcaagtaggtgctccttaaacctnncattaatttttttctttaccttctcttccatttttgtttcttcatttttctccatgtatctcctcacatgtcttgttctaaatgtttttaacatgattctttagagtttccaccgattaaacttgctatagaagttagatttgattttctatggntcaaatttcttgttcttgttcttgaaccatgaattgtgttgagtttacgttcctttgagttttgtcttgttattttttgtggctgaaacctaaaccataaaattcttacaaagatattaaagtagaagaaaacctcaaaaatctagagtgacttgttcacctattgtagttntgtcatagaagtcatgtctagtcatgaaacttgtcacataagatctcttatg

SEQ ID NO: 275678 - DNA, 155 bp, Glycine max
  unsure (1)..(155): unsure at all n locations
gatggaatacttacttgttgatgatgaacaaaatcgcacaatggaatcaaaaaatgcgaanaaggatgaccctanggctgcaaactcgtcaatcccgtgggtatggcttttgaaaggggggaaggtgaagttttgaatgcctaaccaccccccct

SEQ ID NO: 275679 - DNA, 326 bp, Glycine max
  unsure (1)..(326): unsure at all n locations
ctaagcttaatcggacattcgtgtganaagttatgaccatttgaatntctcaagagctttcgtgttcaattctgagcctctctacatattatgcgcccgaatcggacatccgtgtgaaaagttatgaccatctgaatttctcaagagctttcgatgtgtaatttcgagcgtatcgatatattataagcccggatcggaactcagtgtgaaaagtcatgaccatctgaatttcacgagagcttccgttgtgcattttcgagcgtctctatatgtgatccgcctgactcgcacatccgcgtgaaaagctatgaccatctgaatgtctc

SEQ ID NO: 275680 - DNA, 413 bp, Glycine max
  unsure (1)..(413): unsure at all n locations
gcaagcttataatatatcgaanatgaacaacggatgctctcgtgatattcanatggacataacttttcacactgaggtccgattcaggtttataatgtctcgatactctcggggtaagcatcgcaccctctctagaaattcaaatggccattacttttcacacggatgtccgattcgggcgcataatatgttgagaggctcgacattgaacaacggacgctcttgaaactttgattggagcttaactggacacacggaagtacgattctggctactctcatgtcgagacgctctgtctgaaaacccttgatgccttagagaaaaagagatgcgcttttcttttacactatttaagcaatgccacatgtctccatttgagtggagcaaaaagggcccactttccctctttgaat

SEQ ID NO: 275681 - DNA, 74 bp, Glycine max
tgccaattcgtcttcttcttttgtccagtcttcttctggcttcaattcattattgggcttaccttctgtgcgcc

SEQ ID NO: 275682 - DNA, 97 bp, Glycine max
gggacgaaatgagtgaaagatcactatgttaaatttttatggcaaaagagttagggtttgagaggtgtggctgctgcaagaacaaaaagaacatttg

SEQ ID NO: 275683 - DNA, 458 bp, Glycine max
tacctcatcaatctcaggtcaggagatggttccactatctaggcacctcgttctaacattctccaataaaccttagttgatgcaacatttgctgcaaagaattttttgtgaaatcagaccacatgttgattcttttatttttgccaagaatctttgcaaattacagtggaaattggatttacaacatttggtgtaagttcttgaatgaaaatatatggcagctagccttggaaaggagttaaagagcaaaatgcttttatctttagtaattaatgtaaatttcaaaataaaaattctcaaacgtatatgcttctcctatattcatgtataaggtaagcaagcattataaaaagttataatgaaaagaatagctatttctatcatattcaaattttatctgacattccaacttttttcttttttacaatgatgagcttgagtaaacttttaacaactaa

SEQ ID NO: 275684 - DNA, 497 bp, Glycine max
  unsure (1)..(497): unsure at all n locations
ntgaatcatttgtaccgtgatcctctaagtcgacctgcggcatgcaagcttatgtaacttacagaaacaaaatacaaaataatgatttttttggatcaaaagcctagataaaattattagagatcaaaagaaatttttttaaaatatttcaaaaactaaaaacatatttaagtattttaatatattctcttattaatatatatatatatatatatatatatatatatatatatatatatatatatatatatatatatctaacacactactcttattattcttataaaaaactctgcacacagtgaatatatatatatatgtgtgcgtatataanatacacataacacatcgcacgagatatattgtgtgctctattataaatgagggggtgagacttctataagagagtctttacaccttttatatccacccctttatctctctctttatatatatataaaaacaccactntatatactcttgtgtatggggagacn

SEQ ID NO: 275685 - DNA, 400 bp, Glycine max
cttctcccttatttgctataaatagggggagaagtgaagaagataagggttcagcctcttaggcacttctctctctctcgaaattgctgaggaaaattatttccgtgaagaaaatccaagccgaggcgcttccgtaacgtttccgtgagaaattacgcgaagattctcgaccgttcttcaagattcatcgttcgttcttcgttttcttcaatcttcaacgggtaagtacctcaaaccgagcttttcaattcattctatgtacccgtggtggtccacattttgtttcatgtatttttattctcgctttcattttctttttatacccccttttgacgtgcttaagtcatttatttaagtcatttctcgcttaatctaaaaataaaataaatttccaccgatc

SEQ ID NO: 275686 - DNA, 267 bp, Glycine max
  unsure (1)..(267): unsure at all n locations
tcgtcccggatccttaagtcgcctgcggcatgcaagcttcatgatgaatcanaaatgattcanaggtgtnttgatgataacaatgatgacaacaaaagatgatgacaaaggtgatgaacaaaaagctcanagatcaaagaacaactcaagtgaatcaagaacaagtcaagagttcaagaatcaagaagaattcaagactcaagaataaagtctacaatcaagaatcaagattcaagatctcaagaatcaagatcaagattcaagact

SEQ ID NO: 275687 - DNA, 419 bp, Glycine max
  unsure (1)..(419): unsure at all n locations
agctntcaacanatgtcttcacaaataatcatcacacagcagaaaactaacanaactacccatcatatctcccaaaaccccatacccacgaaaatcaaaggggaaagaagtccacccaaacctgaaatttcgaagtcccactcgtagccatgcacttcacgaccccgaaaatgccctcctttcgcgatttggggcagaaatgatggccaaaggttgaagctntgcttggagcttcaatggaaaatgaagaagaagaaaatggcaacgtgagggagagagagagctgtctgaaaagctnnttggtcttaaataaaaggggttttctctttntctattattntaattaagcaatgccacatgtctncatttgagtggagcaaaaagggcccactttccctttttgactgtgacccatactc

SEQ ID NO: 275688 - DNA, 68 bp, Glycine max
  unsure (1)..(68): unsure at all n locations
ntgagggtgcgtagcccaccatcttttcatagtagagtacctataatgcgcctaccatcacgattatc

SEQ ID NO: 275689 - DNA, 462 bp, Glycine max
  unsure (1)..(462): unsure at all n locations
gcatgtaaanatatgcatgaaggccggtctacgagaaattattcgtcggtctaccatcactatggtactggccaatatgctcgagatctatcacccaacttattaacattctcttgtaattggaaacactcggcttctcctcatgaggttattgaattagattctggactaaagatatcaggtgttgcctcatcctctcattatttactcgcaaatatagacattggtaaaacatattgcggacaaactcctttacttttataaatcaatcttcttttaatagcaataaggcaacccttctttggcggctgactgattcgcatgtcatacttacgaccatcctatacatgcatgtggtatcgcttcgctactgctactacacttcagttgtatgaatcattctcacgcactcgctcaccaccgcttatcctggtcgaacacatcgtgatcctcgtcctcacg

SEQ ID NO: 275690 - DNA, 218 bp, Glycine max
  unsure (1)..(218): unsure at all n locations
agctntgtggagtagaaacattttaccaacttatgttatttcaaagcggaagacatatctagggactgtccatgagatcatacacctgtgttattcatactatagtcatttgattggtctgccatgtgttagctgatggaactactttggatgcattgatttatgatatgccaatacatgaaagagctgcctttgtgttactcatgaacactaaatgc

SEQ ID NO: 275691 - DNA, 440 bp, Glycine max
  unsure (1)..(440): unsure at all n locations
tcgtagtacanaacaacataatactaaataactctcaatagatatattcaatcattgaacttgtgtaaatataatgtattgtaaccactagtctctgttatgactaataatctaagaataacaatgatgatttttcaatttaaaaatatatattctatatattctataaaaataataatagtaattgaatattaaaaaaaaagtctaatgattttataaatcaaaactcaagttaatgaattaatctagatttgatccacgtacacaaaatactcaacccaaattgcttaaattggtttgagtaaattcaaattcaaaagtattctataacgatgaacaccccttctaacgatagaaaagttgttaaatagtgttatcatcttagacacttcctatatttgtattcaaacttttgatctataaagaaacattaataacat

SEQ ID NO: 275692 - DNA, 177 bp, Glycine max
  unsure (1)..(177): unsure at all n locations
gttgataacattacacacttcaattgctncttgactgcgacaactatgctttcatccacatgattctttgcatgagaagggttaaatagaaagaacatacttgtcaggagaaataactcttggagaaatgtattttgcgcaactaacctggtccaatattgtctataaatggcccca

SEQ ID NO: 275693 - DNA, 420 bp, Glycine max
  unsure (1)..(420): unsure at all n locations
ntatcccacacctgatggagtcaaacacggatcagttaatatcaganaccaattnttctttaaaagccatttttctgtccatatctaaagaacaataacaacaatagtgatgttagctacatggatcacacaatgttactgggttcagttaaaaaccaaattctcaggctattcatgtctaaaatacattcaatgtaattntacattggctatcaactgcccaaaattacccacctcttttatcctagcctgagacaatataaaatttgactaaaaagtacaatattggaaaagttccaagaagattattcaaacaaatattttgcatgttaaaagctcatctatttttgtctgcagttttcccagttcaatcatcattaaacttgcacttgccgaaatgacaggcagtaatactggaca

SEQ ID NO: 275694 - DNA, 413 bp, Glycine max
  unsure (1)..(413): unsure at all n locations
agcttcttcagaattctagatntgtttagtttttgagcaccagcagttcccccctaaaagttcgtggaaatctcagcaacaacaaataatacgcgggacaaaaacaagaattgtatgattatcataaactatttatatcgtgtcaattagaactgcaatgaaaaatcctacaatttgaaggaaccccaagagagatgttaacaatagcacaagatatgattggtaaagtttaaaaatagggattgatttgattttgaaattcactcaagtttggttggatttgagtggcctttatttaattttagttgagtgcttatattgataatcttacctttatttgtaaacccactttacctattcttatcaaggataagaaagtgagtgttaaaacaaaatgaattccattcaatttt

SEQ ID NO: 275695 - DNA, 378 bp, Glycine max
gcatgactggctaaacacctttgatggggatttctaatgaacatctgacgtcattatcttcatatctaaccgatttttcttcttgtgtccaatgcttcttcagtgcttaacttttgtatgctcttagtgcgatcaaccatctgtgtgcctagctaagtgattttaacattgggaaatgtattgttgccttacaacttgaatgaagcacaattgaaacttagtcctacaacagggatctctgaattaagctttggctttacagatgttgtcacaataatgatgtctggtctaagtctagtccaacaagagggatctgatgacacagcttacgctaaatcacgctaaacttcttgaagctatttaagcccagtctagtcc

SEQ ID NO: 275696 - DNA, 439 bp, Glycine max
agctttgcatgatcaggagttggccctgatgtaagctctacatcattgttaagaatggcttgaagctctgagacaaaggatccacaagaactacagttgctggtgttggagggagaggaaaggtttaatgagttgatgtttaaggagctgaggtacggggagttgtagtacatggtgcctcagatcctctggccctagatttccgggcttcctcgaacagtgaccgaagggtcattcaagttcaacatttccttttaatataaaccaaattaatggctgggctcagggattctaaggtcacagaatcacatgtgactcattgcgccttccatatatcagtactaagggatggaaaacccttcctcatagagtcttgttgtgtgatgagagacatctgacctgagatgagggatcccacattcatattcatcttgtatta

SEQ ID NO: 275697 - DNA, 352 bp, Glycine max
atctcataggaatgacttcactttctaagcggctggtacaatgttttagcctcttctatgagcttcacgaggaacctacacaaagacaccattatgccattcaactttcaaaccttcctgtcgatggtaaggatgcgcatttctagtatcgatgtacatttgtcagggccggcctcaatctcccggtgggtgaccatgaaccataaaaatgcttcgttgtcgacctcacaggtgcacttttcatggttaacgtgcatgtcataccagcgaatctctccgaacgctatctctaacctcgtcacatgtcgggccacactgtgagacttgctgaccatgtcaccccaattaacct

SEQ ID NO: 275698 - DNA, 555 bp, Glycine max
tccccctccctcaactctattgtataattattgcttcttggactctaaaccctatcggccgccatagttgagccagcgtaaggacagttgcccactcgcagcaaacacatgcaacgcacggctggcaatttggcctgattaattgacatgattgacgatgattagatctattcgattcgcgcctgatcgaagtgctgctgcctctacgatacctaccatggcagcggaacttatccacaaatcatttgaattcagcgtcttataatcttcctagaatgccttaataatgttgaactgtctacacttcgggatctggtattgtgtctgtaccatgcctcaaatccgcacccttaatttcttgaccagtaaatggggctatgagtcccgtctatctgttcctatcaatggagtggcatacaaccatatctagggtgcgtttgcaacgttcaacgtcataatactctgacggtacgatattataactatatgtctaaatccgctctgctggcgataccacgaccgatcaagtcgatcctctgtagagtctcatagccc

SEQ ID NO: 275699 - DNA, 439 bp, Glycine max
tcctccgagtcacctgcggcatgcaagcttctttgagaaaacttccttgagaagctagagcttagcttacacgcccctctcataactaagctcacctccttgagaagcttcattaagaagattgctaaagaagctagagcttagctacacatacctctgtaatagctaagctcacctccttgagatgagaagctagagcttagctacacaccccctatgatagctaagctcacccccatgacaagaaacatgaaaataaaaaaaaaagtccttattgcgaagacaactcataatgccccgaaatacaaggctaaaaccctgtactactagaatggccaaaatacaaggccttgacgaaggaaaaacctattctaatatttacaaagatgagcgggctcatacttagcccatgggctcgaaatctaccctaaggctcatg

SEQ ID NO: 275700 - DNA, 440 bp, Glycine max
  unsure (1)..(440): unsure at all n locations
ntatgactcctgattctntggaacttgattcttgaagctntttgactcctgattctttggaacttgcttaactcttgtttctttggcatcatcaaaataatcttggaagtcattgcttccacaccaattactcctaattttcgaataacatgtagatatgtttttaatttttagtttataaattcttatctctaatttctattagaaaaagacgcgtgcaaaagttataaacaattctcaaacacccataaaaaagattcgcaagtgtaggttgaaattatagcctccctgaactcacaataaaaagacccgtacaaaatttataaacaactccagagcacccataaaaaaagacctatgagtttaggtcagcattatggcctccctgggtacatgataaaaaacccgcgtaaaagttataaacaactccaggaacacat

SEQ ID NO: 275701 - DNA, 419 bp, Glycine max
gcaagcttgaccgttgacgagttccttaaggcatatagatctcttcgaagtcgcggcaccaacctccacgtcggtgatgtggtggaccccacggagccgcttcagcgtgagatcctccaaagtaacgcatcgatcgagcaccgccgcgattcccttcgctccgaacatgcacgacgcgcacgatagcttcttcaaggccttgcagttttcgcctacgccggccattccgagttcagttatgtcgcggcagccgcgcagcttcaggcgcgtgagattcctgcaccgcagagagatcagaaccaaagcgtcgtcgtttatgctcgcgcactttcggtcgcatcgtagagcgagtttcgtcaccgagtcgaagcggctgaatatggaacggaccaaatctagtaattccggctgtgcgttga

SEQ ID NO: 275702 - DNA, 206 bp, Glycine max
agccaagatgcaacaattcatagctactttataactcagggattaacctgaactgagaactcatatcatgtggcacatatccagaagtgagccacggacattatgctcagtccaaggtacaatgtaaccatgcgtttacacatcaattttatacttagcactaaaagaggtcctaattcgactaagagcgtgcacatccactttaa

SEQ ID NO: 275703 - DNA, 589 bp, Glycine max
  unsure (1)..(589): unsure at all n locations
ccactctctcctaccctntcttcntctnacctctcacttcctctctttccctcacnagcnatatttcttnttacccctccacacgacgtcacactttggacgtgtgancccgtgtcgtccngngacctctagatcgactgctgcctgcaacttatagctcaatggcattacctctgaattaaatgctttgatagcccntatgagccttgtgtcccttttcgttgcttcgaacctcactaccaggcttaagtggcacatcatgatatcaccatattcttaaggaatgtcggagctttggaatcgctctgggaataagcgtggggggtttttgcttcattggacaacttgatttgtcggctatgcttcatgatgtattacgggccatacctgatgcacattgtatataggttaaatgttagacatgctgaatgacatgtcggtattcaccagctattgagttaaaaaaaaaatatcgtacaaaaatatccaaccaaaacgcaataagctgagtgcataaatctaaatggacaagaacgatgacactctggacttactttcatgttcaacttatatcttactttttgcattn

SEQ ID NO: 275704 - DNA, 439 bp, Glycine max
  unsure (1)..(439): unsure at all n locations
ctcagcttctcaagaagaatgaccagagaataaggatggattactcatcanaggcaatgaaggaggaagccacaaggagctaaattagagcactttgggaatttgttgaacggctcacttagcgacactagcttgctaagcgcaatttcatccagaggaaataatttgcttagcgacactagcttgttaagcgcaattccagctagaggagaaattgcgcttagtatgaatgtctcacttagaagcaaccttttgcgagtttgagttgggccagcttgcccaagcgagcaaaatttcgcccaggcgagtttaacggggttacaaatatgttcagcaacgagaaaaacatgattcttctacccctcttctcgtaaaccctcacccaaaccataaacttcccttcttcttcacccacaaccaccggcaaacaccatgagct

SEQ ID NO: 275705 - DNA, 409 bp, Glycine max
  unsure (1)..(409): unsure at all n locations
tagttatctcagatgctacactgctcgcagattgcagtggacagtggagttgaatagaggcataaacaagaagaatatgtacatatgctacaggtatatatttntcataattgtagttcctaaaagacataatttttgaaggaaagtcaaagtatcattaagtttctttgcttcaagtcaaagtattcattggaagttttcaatttacagaatgaatgtactaacgctaagatagagctactagaacagaacaagtgcatccagaggctcgcactggagcttgataagaccactcaatttgttgtgagaataactgaacagacaagacaagttttttcttaatctctagagaggacaagaactttatgctttatgtcacttactctagtcttgaattttgagggtttct

SEQ ID NO: 275706 - DNA, 417 bp, Glycine max
  unsure (1)..(417): unsure at all n locations
agcttgtagaacggctggacatgatatatgtcatggtgttggtttagccagcggttcagggataaaggaatatcccacattatttccatgacacgcgtgcaacaatgatgattcagaaattttatgcaaaacttgtcatgcatgcacctatgtggacactcaagcatcaagttttgtggtcatgtgacactagggctcaagattcatttttcctatttaagtcaatccagtgtttccaaaacatgctcttttatcaattcatgcattcatccgagtccattttgggtgttcgggaaaattttcacagcattcacccttcaggtgtatacatattttttcaacaaaacacttttgtgttntgatcagtgaatctttttcaaagaaagagttggagattantttcttttgaaagcatct

SEQ ID NO: 275707 - DNA, 404 bp, Glycine max
atgctgactcgcttccatatctacttgacaattcaatggcagccataaccctagccaaggctcatcaaccttcatttctacgagaatacgactcgaaacgcaacgtgtgcttgtcacggaggagcccggcggcattccattgagcattgtatgacccctaagcataaagtgcgaagtctaattcgatacgggccggctgaaatttgacgagaatcgcttggtgaatcctaacattgacaaccaacaccatacatggggcaattctggaagctgctgttatgacctatcacgattttcacagttatgccattattataaaccacagctgcaatgctaaatgatatggatcaaatggacatccttgtctctctcatcctctcatgaacacatctttgcttattcaa

SEQ ID NO: 275708 - DNA, 594 bp, Glycine max
  unsure (1)..(594): unsure at all n locations
gagcgcagaagcgaatgcgantctcantcagtatagttagtaagtagaggttaaacgtcgtactgtcaacgtatctcgcagtccgctatannncncnactcgggacacttgataccgatgacgctccnagngaaccttanagcaacccgcagcatgcaagcttattggtactgactatgacatacggtatttgatattgtgncgccggacgtaatctccaaaggatcaactccccaaatttccttcgccagttcgttatgacatatgtagatggatcacctatgatgtcttgcttccatggataactaataacctctctgatggtataagcatggaaccaatcaaagaaaatgacattacatttgacctttcccactaaagcatacaatgtaatgtcactgcaacccctaaaaaagcgaaacaaacaaagttacaccccgaacgcacaaactaaacctccagcatagctctctccgtctcacaacgatcatctatatcacaccgacccctataagatctttaagtgataacaacacctcatgccctcaccggtcgacacacatatcttacataccatgatgcacgcgagggccc

SEQ ID NO: 275709 - DNA, 424 bp, Glycine max
  unsure (1)..(424): unsure at all n locations
agcatacctgcatgcatgcangcttcaactagtaaagcactttaccaactcgtgatagaatttgaaattgcccaaaataacgggaagatgatttgggattaattcatcgagccataattagctatctataagggcacaacttaacaaacacccaatccccctcagtaaagaatgtggccccatgatgcttatcaacaaccttattcatggattgttgggcacaaagcaaatgagcttttaattgatgcatagccttgtccctgtcaaacaatactgacgtgatagaacccactaatgtctctctggccaaaagcatagcacaaaaggaggtgatcaaccatagacgacctcgaagggagtcttctcgatggctgaatgcaaacaagtattttgtaccaatactctacccacggaagtcataaat

SEQ ID NO: 275710 - DNA, 415 bp, Glycine max
taaccgagactcgcgctcccggttaaggggccagtagtttccttttatcagtttctgggccacccccctgatattggagggcgaccaactatgcaagcacaaccagagagggaggctatcacgcagctactatgcataccggggcaagatttcacccgtgccgctgcaaagagacgagtgcggatcatgcgcaccaacatgaccactcttacacagatatagatgacattgctacttagcaacattatgccctgcccagcgaccgcaatgccaatctccccctgcaaaagtatcagttggtctgtgtcgtcccgacatgggtaagtatgcatatggttcaattgatttctgataccatctattgtttgcagggatcacaaccacagagacacccagtggacctgaagaagtcaac

SEQ ID NO: 275711 - DNA, 314 bp, Glycine max
agcttataacaatggattacctggatacttgttcaacgactcctcaagtagtcgagaagcgacagatgcaagtgttccatgggcttcactcccattatctattgcaaaacttgggagggtaaatctctgaaattatgaagcagttgctcttcaaaactaaaataacaaaaaatgcagcgcatttttcacttcaaaaatgcagcgcaggtctttcacatttcttcaagatacgtttgcatttgccaacatgaatacacagtagtgttctttacacggcagaatattgtttgtgattcgatcaattgtggagactt

SEQ ID NO: 275712 - DNA, 457 bp, Glycine max
  unsure (1)..(457): unsure at all n locations
nnttggagtagaaacatgggaccaactcattntatttcaaaatggaagtcgtatctagtcaaggtctgagagaccatacaagtttcctaacgatttctaattatgtgggccattaagtctatcatatgctgacaatagccgagaagcccatgaatctcttcgggggtggagtaggtgtctgccatcgccttggccttggctaacaatcggggaagttcttgactcccgttcaaggtaagagcaaaccgatccatccacatggttgcctcttggtgtaaagagtcgatcacccttcctctagcctctttttccgcatatacttgagcatactcatccgcgattctatgctcgtgggccgcggctagacctaactcttcttcgtacttggcgatgatagctaacatgttggtctctgtctcgcataaacgctgagacaagcttcttttggactntgaac

SEQ ID NO: 275713 - DNA, 438 bp, Glycine max
  unsure (1)..(438): unsure at all n locations
agctntntgctgcanaattcctttntgttggtggttttttttggtttgtgctaaaggtggtcttcgtcattggaagtgcggtagacagactntgtggtagatttagggatgacctttgtggataactgggtggtgggtaaggagaaagtttgttattggctgagtaaagatattgctgggttggtgggaaacttggccgtacaggaatggtagtcacagcatgggtttctccctcatcctcaccctctttatttgccccagttttctcagtcgtcctagtaggatgatcaaatttgcctcttttcggacccacattgatcctttcactggcgaagaccaaatctgcaaagctttgagggtgcgcagcccaccatcttttcatagtagagtaccgataatgtgtctaccatcacgattatcgtctccctttccattatt

SEQ ID NO: 275714 - DNA, 457 bp, Glycine max
  unsure (1)..(457): unsure at all n locations
cgcatgatnntacatctcctatttctcaagcaaattcttcttgatatcatcaaaatcttcatgatttacattctcccnctttttgatgatgacaaccacctgtaggttaggagcaacaacaaagaaaatatctatttgcatatagtttactcccccttggttttacaatgattgcttatatgagacaattgaagatttcatatttttcatatataaaaagttgtctcataaaacaatagataatttttcttactattttatcttttatctttctctccccctttgtcaacatcaaaaacaaatcatgaatagaaaggagaaagatgttaccacttgttgcaatgtatgagaatcaagtgataccaaaaggcattaaaacaatcattcaatattaatcaagcaaaaacaagtacaataacacatcaatcaaacacaatcaatcatcaaatatttcaaa

SEQ ID NO: 275715 - DNA, 453 bp, Glycine max
  unsure (1)..(453): unsure at all n locations
agcttganaagactntntgaaacaatactcggttagatagtctatatagaggcttagagaatactaaggcataggtgtaacactatggattttttaatttatgttaagtgcttgataaatactacaagaagaaattaaatttaggttcatgatatctacaaatgaatttaataaatatatttttgtgttatgtgccataacactatcgataacttttgtgagtgtttggcctaaagtgtgggttgtgagattgttggattttatatgtgagtttcctctagttgtagaaaaaaaagtgtccttagaagaaataaaggggcaaatagccaaactcaaaacattttccaagcttttaaacattggaagcttctccttaattcattntcgcaattcttcttcttcttcttcttcttcttcttcttcttctctccttatttcctttccttcctcctc

SEQ ID NO: 275716 - DNA, 449 bp, Glycine max
cgggtcaaatttgttgacaatcaaagatcaagatcagaagaatctcgacaccattaaaaccatatacaatgcacgtaagagatatcgtctctaagaaaggggtccaaagacagaaatacaacatctgatgaagttaatagaacacgacaaatatgtttattggtttagatgagtggacattgaagatgtcattagagatataatgtgggcacatccagattccatcaaactcctaaattcattttcaacaatattgatttatgatacaaattacaagacaaacaagtactatctttcgctgttggaaattgttggtatcacttcaacaatcatgactttcattgtttgtctctgcttatttaagatttgagaaaatggataattttgaatggactttaagcaagttgaaaggatcttttgtgagagacgatgtgtcgccttagattatt

SEQ ID NO: 275717 - DNA, 398 bp, Glycine max
gcttgctctaaattacattgatgtttatgggaggaggttgtatgccatttttgttttaagagtagtgtcctactggtaaaactaactttccaaatgtttgccttcgcaggaaatggccccaaggaagcttgcctcaaagaggtccaggaaggacaaggcagccgaaggaactagttccgctccggagtatgacagtcaccgctttaggagcgctgtacaccagcagcgctttgaggccatcaagggatggtcatttctccgggagcgacgcgtccagctcagggacgacgagtatactgatttccaggaggaaatatggcgccggcggtgggtaccactggttactcctatggccaagtctgatccaaaaatagttcttgaattttatgccaatgctt

SEQ ID NO: 275718 - DNA, 364 bp, Glycine max
  unsure (1)..(364): unsure at all n locations
acggaagctctcgaganattcaaatgctcataacatttcacacggatgtccgattcagatgcataacgtatctagatgctcaaaattgaaaaacagaagctctcgagaaattcaaatggtcataacttttaacatggatgtctgattccgaagcataacatatcgtgacgctcacaattgaataagagaagctctcgagaaattcaaattgtcataaattttcacacggatgttcgattcggggataaaatatgttgagatgcttgaaattgagagataaaagctctcgtgaaattccaatggtcataacttttcactcggagttccgattcaagacacttgaaattgaccaacggaagctttt

SEQ ID NO: 275719 - DNA, 427 bp, Glycine max
agcttgctctaaatttacattgatgtttatgggaggaggttgtatgccatttttgttttaagagtagtgtcctactggtaaaactaactttccaaatgtttgccttcgcaggaaatggccccaaggaagcttgcctcaaagaggtccaggaaggacaaggcagccgaaggaactagttccgctccggagtatgacagtcaccgctttaggagcgctgtacaccagcagcgctttgaggccatcaagggatggtcatttctccgggagcgacgcgtccagctcagggacgacgagtatactgattttcaggaggaaatagggcgccggcggtgggtaccactggttactcctatggccaagtttgatccacaaatagtccttgaattttatgccaatgctcggccgacagaggagggcgtgcgtgaca

SEQ ID NO: 275720 - DNA, 451 bp, Glycine max
  unsure (1)..(451): unsure at all n locations
gacctcagtgtganaagttatgaccactttaattttccgagagcttccgttgttcattttcgagggtctttatatgtgatgcgccttaatctaacatccgtgtgaaaagttatgaccatttgaatttctcaagagcttctgttgttcaatttcgagcctctcgacatattatgcgcccgaatcggatatccgtgtgaaaatttatggccatttgaatttctcgagagtttctgatgctttattatgagcgtatcgatatattataagcctgaatcggacatccgtgtgaaaagttatgaccatttgaatttctcaagagcttccgttgttcaatttcgagcgtctcgacatattatgcgcccgactcggaatccgtgtgaaacgtatgaccatctaaatttcgcgagagtcttcgacgtttaatttcgagcgtatcatatattataagcct

SEQ ID NO: 275721 - DNA, 435 bp, Glycine max
  unsure (1)..(435): unsure at all n locations
agctntgatggtgtcgagaagaaatcacatgtttgtcatcatcaaaaagggggagaatgtgaatgtatgtatacatgattntgatgatgtcaaagaagaatctaacaaggctgcttcaaatgataagcatttgcttcaagaataattcaagattgcttcaacaaacaaagccttgtttcaagattcactaaagaccaagccttgccttaaaacaaagtgctttcaagacatgcaaggctctggtaatcgattaccaggaagtgtaatcgattaccagaagacagggttgagaaatagctgttgaaaaatgttttgaatttgaattttcaacatgtaatcgattaccatatgtctgtaatcgattaccagcaacgaaactttggaaattcaaattcanaagtcatatacccttcaaatataactgtgtaatcgata

SEQ ID NO: 275722 - DNA, 445 bp, Glycine max
  unsure (1)..(445): unsure at all n locations
tctatagaacgttcattcctaatntctctgcaatngcatcacctctcaatgagatagtgaagaagaatgtggcatttacctgcggtgaaaaacaagagcaagcctttgctttgctcacagaaaagcttactaaggcacctattctagctcttcctgacttttctaaaacttttgagctagaatgtgatgcctctggagtgggagttagagctgttttgttacaaggtgggcaccctattgcttatgttagtgaaaaacttcatggtgccacccttaactaccccacctatgataaagagctttatgccttaataagagcacttcgaacttgggaacattaccttgtttccaaggaatttgtcattcataatgatcatcaatcacttaagttcattagagggaaaagcaagttaaacaaaaggcatgcaaaatgggtagagtacct

SEQ ID NO: 275723 - DNA, 417 bp, Glycine max
  unsure (1)..(417): unsure at all n locations
agcttatatatatcgatactctcganattattcatcggaagctgtcgagatattcaagtggccatgactcttcacacggatgtccgattcaggcgcatagtatgttgagacgctcgagattgaactacgtaagctcttgagatattcacatgggcataacttttcacactgatgtccgattcaggcttatactatatcgatacgctcgaaattgaacatcggaaactctcgagaaattgaaatggtcataacttttcacacggatgtcctattcggacgcataacatgtcgcgaggctcgaaattgagcaatggaagctctcgagaaattcaaatgcgcataacttttcacacggatgtccgactcaggcatataatatattgatacgctcgaaattgaacatcggatactctcgag

SEQ ID NO: 275724 - DNA, 446 bp, Glycine max
  unsure (1)..(446): unsure at all n locations
ntcacaatatccaagcaattcaatttccaaatatcatgaactaccctaaaccaaaaaaacagagtagaggcagaaaactctgcccaaaacacattgaaatatcacaactttccttattcatataccccagtaacattctcttcgtttcaattcgttaaccgttggatcgccttgaaacttttactggaggttcctagtacataaatctacattntgaccgttgggatcttctaaaaaatgtctagaactgaatatgtactatctttcccataaccagcaatgcactagcatttttctgcacacatcaaaaatttgctgcacaattcaacaacattnttctgcataatagggcagatttcgaaatccatcttgcccacatccaattttgctcaaattggatcctacaagtcctaaatcatgtataaatcatatttaaaccaaaaaca

SEQ ID NO: 275725 - DNA, 443 bp, Glycine max
  unsure (1)..(443): unsure at all n locations
agcttccttggggccatttcctgcgaaggcatacttttggaaagttagttttaccagtgggacactactcttaaaacaaaaatggcatacaacctcttcccataaacatcaatgtaaatttagagcaagcttatgcgcatatttccttacgaacgttcgcttgcacaagacattctttcaactaagaaaaaaaatgcacccatatacaatcaaggcagcttcattacctagattatttacatgtacttccaaggtgtatttgttacttacatcacacacatctccttggctaaatttacatacatgcatactcaaagcattttggggtaccaaaaattgcacatgtgcacatcttggtatttctaatacctatacaaacttcatgatgaatatngactatctacacaataaagtgctacatttcatgctcttttcaagttttt

SEQ ID NO: 275726 - DNA, 286 bp, Glycine max
  unsure (1)..(286): unsure at all n locations
cagtaaaggaggagaccactccaaattaaaccccacagccatttccatcctttgcacctgctctggaggagacgcaaccatcaacactggatcttaatgaacaccaaccacaggaggaccatgatgtttaaattttttgcattctgaacactntagttattcttagttattttatgattatgtcatttaaatttcagcttttatgtttccattctctaaatttcagcattngaatttcagtagtgtacttgtttggttgctcgcacaaaaagctcgattgaacaat

SEQ ID NO: 275727 - DNA, 433 bp, Glycine max
agctagctgccacggagttttccgactatgctcttgtgtggtggaacaagctacaaaaggagagagcaagaaatgaagagccaatggttgatacatggacggagatgaaaaagatcatgaggaagcggtatgtgccggctagttactcaagggacttgaaattcaagctccaaaaactaacccaaggcaacaagggggttgaggagtatttcaaggaaatggatgtgctcatgattcaagcaaatattgaagaagatgaggaggtaactatggctcgatttcttaatggtttgactaatgatatccgagatattgttgagctgcaggagtttgttgaaatggatgatttgcttcacaaagcaatccaagtagagcaacaattaaaaaggaaaggagtggctaagaggagttttaccaactttggttcctctag

SEQ ID NO: 275728 - DNA, 447 bp, Glycine max
  unsure (1)..(447): unsure at all n locations
nntgggactctgagcttgaggagggtagcaatggtcaacaaccaatgccaacaaggaggtgcagccattgcttggctcagaggaccccgcagtggagggcaggaccattaggtccaaagacactatgcaatgcatgtggagtgaggtacaagtctggtaggttgctaccagagtataggccagccaagagtcctacttttgttagctacttgcactccaattcccacaagaaagtcatggagatgaggatggctgttttctccaccatttctagtgagcagtagtagtggttgttacttattagaggtatatttctatgtaaaaaaaaaaaatcaaacttcaaattttatgaacaaaaaactatttggcaaacagagagatactgttaaggggagagtgcttaatgctatgatngattataggcacatttattatatgacttattat

SEQ ID NO: 275729 - DNA, 431 bp, Glycine max
  unsure (1)..(431): unsure at all n locations
agctnntgcggattggtcttcgccggngaaatggtcgaagcggatctgaaaagaggcaaatttaatcatcctgcttggacgaatgagaaaaccgaggcaaatgaagagggtgaggatgagggaaaaacccatgttgtgactgccattcctatacggccaaatttcccaccaacccaacaatgtcattacttagccaataacaaccattctccttacctaccacccagttatccacaaaggccatccctaaatcaaccacaaaacccaccttccacacaaccaatgctaaacaccacctttagcatgaaccaaaacaccaaccaaggaaggaattttgcagcaaaaagcctgtagaattcaccccaattatggtgtcctatgctaacttgctccattatatactngatactgcaatggtagccataacccct

SEQ ID NO: 275730 - DNA, 387 bp, Glycine max
ttgaccgaatcgtctctgacagcgtttagatatgggagccaattcactccttgtgttaggatcctcacccactcatgatagccgccgatgatcccattactgcttcccctaagctctctgtcctttcttcacgccttataccatgccttgcgaactccttggagtaccctcgcgttgtggtcactgaaaccccatgcgatgaaaggcgtgatgctttcgtctgatggcactcctctcatgggacatccttctcatgaagatagaatcctgattcttactttcttgtagcgagggaaccaattaatagacgcccctccatgctagtcaagagttggtcccaattcgccttttctttttcgatgcacgagtggtgaccttgtagcggat

SEQ ID NO: 275731 - DNA, 430 bp, Glycine max
  unsure (1)..(430): unsure at all n locations
agcttgtcatcattggtcttgaaggcacgggattgaggtaagtggaaggtaaaccattgatagagtaaaggtgcacaacaagaaatggttccacggccagcctgggtacggtcatggatagaatggtaggtattggcgagtagagtgggtacggngttctttgtaagaaagattttaatggcattgatatcgatgaagttgtcaatatttgggaagagtaaaaggccatatataaggagggctaggatagaatggaaggcaagtgtactagctgcttcagcaaatatggaggcttgttggtagaggaagtgggtgggaaaaccttggaggcctcctttagaggtaaggtttgcttggatgatggaggttntaagatggagagcggctgcgatgtcggagggtttaggggtaggctcacaaccatggaaag

SEQ ID NO: 275732 - DNA, 413 bp, Glycine max
  unsure (1)..(413): unsure at all n locations
tgtggactataccttcgactgaacacggccatgtttctgtctgggcccggattcaaggcgggctgcagcaccggctccgctttcctaactgtactggaggcggttgcgatggctttatcctctatggttttctggagttttaacatgacctccgagatggaagccatttgatcttttaaggctgatagatcggccttcatctgttcctgcacaccctcttcattatccatttttctggatcgagtgttatacgggtgccttggtggtttcttagttatgatgaaattcctaaagaaataaacaacgatgagtatgccaccaaaacatgagtatgcaaatggatgatcggaccacttggatccaccccaanggtttttagataacatgatgagttcagaacttcttagtttata

SEQ ID NO: 275733 - DNA, 415 bp, Glycine max
  unsure (1)..(415): unsure at all n locations
agcttccatcaagtggtaatcagagcacaatatcttcaagtaggtgctccttaaacctccattaattttttgctttaccttctcttccattgatgattctttatttttctccatgtatctcctcacatgtcttgtgctaaatgtttttaacatgattctttagagtttccaccaattaaacttgctatagaagcttgatttgattttctatggttcaaatatcttgttctttttcttgaaccatgaattgtgttgagtttaggttcctttgaattttgtcttgttattttttgttgctgaaacctacaccataaaattattacaaaaatattacagtagaagataacctcataaatctacagtgacttgttcacctattgtagttntgtcatagaagtcatgtctagtcatgaaa

SEQ ID NO: 275734 - DNA, 426 bp, Glycine max
  unsure (1)..(426): unsure at all n locations
ggcagggttaaagtctcacgattgtcacgtgctcatgcaacaattgttagttgtggctatacgagacatcttgccaaacaaagtcaggttagccataactcgcttgtgctttntcttccatgctatatgtagcaaagtcattgatcctatgaagtttgatgagctggaaaatgaggccgcaattatactgtgccagttagagatgtattttccccctactttctttgacatcatgattcacttgattgtgcatctggtcagagaaatcaaatgttgtggtcttgtttatctacggtggatgtacccgattgagcgatacatgaagatcttaaaagggtatacaaagaatctatatcttctagaagcatctattgttgagaggtacattacagaagaagccattgaattntgttcagaatacattga

SEQ ID NO: 275735 - DNA, 400 bp, Glycine max
  unsure (1)..(400): unsure at all n locations
agcttgacaaccgatgaaaaccgtgttgactatcaaaacaaggagggaaggttatgtggctggaattcaattaatattattgctgctgcgctcattgggttntgcaagaagctctgattgttatcatatgattgaaaactcttatgcataaaattggttacaatgctttatattttgagggtaatcatatatgctagtgaatggtggctgcctttatgaaacaatatgatatctatgagaaaccaaaccgataagttaaagctatcttacttattcttacaacttgatttatttgttctgtacttctcacttccatattattggtgtctgctcaagcatatattgacattgtgacaccctctaccccgacatatatatatatatatatatatatatatat

SEQ ID NO: 275736 - DNA, 448 bp, Glycine max
  unsure (1)..(448): unsure at all n locations
tctctctaagagggcaaggaagcaccccgcgagagaaggatctagtgcggctccacaagcggacatagaatttgacggacactgctttcgaagtgaggaacaccaacaccgctttgaagcgatcaagagttggtctttcctcaaagaaagacgggtccaactgagagagggagaatacactgagttctatgaagaagttgccaggagacaatggactcaactcacagggcccatggctaaatattacccggaaatagtcatggaattctacgcaaatgcatggcccacagaggaaggagtcagcgataagcgctcctaggtgcggngtcgatgggtcccctttgatgaagatgccatcaatcagttcttagggcatccgttggtcctggaggaggggcaatgttgcgagttcagtgaaaggaggactangcttcgagattcgatgagg

SEQ ID NO: 275737 - DNA, 427 bp, Glycine max
  unsure (1)..(427): unsure at all n locations
agcttgaggatagagacttcccaagctatttatctctacttggatctattaggaatgaaggctcctacccttatttatactactccacctccacaatgaatggtggagattacatgtatcctagggtggagattaattctctagaatgctccacacattctaggagtctctacactcttctactctttttcatatccttccataaggttccagaaggttccacacatctctagaatattccagaggtttccacattctttcacaagcttctagagagttttacactactctagagttctccaggacgttctagaaaattctacacttttccagaaagctccaaaattttctagaacctctcgaattaaggagggatcccaacactttccagcaaatggtattcgaanaggctctgtgcaaaaaatgc

SEQ ID NO: 275738 - DNA, 454 bp, Glycine max
attgaacattgcacttatattatccagtggtttgatgcttggttttgaaattcagtgtttgttgattggtttgaagtgatcgattgcgtgatttgagtgaattggaatgcataaatcatatatgttttgaatcagtgtgtagtgattagaagagaaagaacatggattaggatcatgactaaaaatgttagtcagtttgacagtttgattgtgaaggtattcattagccacaacccggtgagagtgtgatctttaagaacgactagcattaagtaatggtttttgcatgaacctctgaatatggaatgaatgcatgagtttgaagaggatgaaggccatgttttgattgaatgagccacttagctaaaaagcttaccttgtgaatgaatgatatatcctttgtacccattttgaactgaaagtatgattgtttgattgaaccttgagcctatac

SEQ ID NO: 275739 - DNA, 449 bp, Glycine max
agcttataactgacatatgccaatgcatgccaattccacactacgtggtggaacaataatgtgtcatgatgccaactcaacactacatgcattgggaagaagaatgatcgatttgcaagtaattaatagtagtatatatattagggaattgtagtcttctgaaaaatttcttaactttttttatcatcttatttttaaaatattagacttaatttcacttttttcttttaaatattatgatagtataactttaatccttttatttttcattatgtcaattaacttgtataatttttttccggtaacaattggattcctaagagagtaggagttataaagtttacctgatgattgtgaaaggagattaagcattaaagagagaagggagagataaataatggatttgaattctctcattaaccttctaaaaaattaataattagcattag

SEQ ID NO: 275740 - DNA, 460 bp, Glycine max
  unsure (1)..(460): unsure at all n locations
tatcaacttcaacttanaataagcttccctgtcaacaacaaanaaaacttanaataagctctaattcacagattggtggcagagtttcttacaaaagaagatcaatttattatttttttcactgtttagaataaactgatttcctagtttaatataaatgaaaaacgattctaaatagagaaatgatattccaaacaaaccatacaatcatagatttttttcttttcattaaaaacaacatgcgttcttaaatattgctgagacaaaggtgtttgtcacaaggagatagaacatataccaaattttcaatcctatacatgcacaataaaataatttatgagtggccaaattacaaaagcattaaaacagtatcggagaactctattccttcaaatggattcacttgactggtctcggtttagttagtctaatgtaaggtctaagtactacaggtctaatt

SEQ ID NO: 275741 - DNA, 433 bp, Glycine max
agcttgtcagatgagagacaagagtttgagataaaagtaatagcaacacaaagtctccctcaagagactccaacagagattgctcccagaaatgaccacgagcaactcgaagctgaagtgcaacctgtagaagaagttggtatgtgtccttttcctctaaaattatgtgtttcaatttgcaaaatcaattcttacattttaatctaaatttcattgactaatgtgtttgttatttatgatcttgttattcatttattgtttctttgttttcgatattcagacttagatcaaagttattcgatgagtgagggggacaaggatgaggatggggatgaggatggggatgaagatgaggatgaggaagagtatgttaagttgatttgtcattcaaaatttctctagtcatttcaatgtgcagtttttgttttttaat

SEQ ID NO: 275742 - DNA, 450 bp, Glycine max
  unsure (1)..(450): unsure at all n locations
tctagtcgtccatagacctcctctgtggtacggtctagcaaacgttgcatctgtgcattcatcgcatccactaacagacgttgagcgccgtccaactgatggtactcgtcaccaccaccacctgctccagccataattcaacaggaaaaaaaaatgtgcaataaaaattattaaggtttcaggacctcacaacactctactcacgtctcttagatggtagtacactcgtgtttaatgctctcaataggcttttgtgtaatgtattccctcttgccttttaccactcgtgtntcctcttaagttcctggatggaccaaattagacacacaaggtaatataaaataaaaggaaagacaatataatgatcacaaacagatttgatttgggataacaacttggacttgatttggataataatatattagaattggatttggataacaggtgagc

SEQ ID NO: 275743 - DNA, 444 bp, Glycine max
agcttgtcagatgagagacaagagtttgagaataaagtaatatcatacacaaagtctccctcaagagactccaacagagattgctcccagaaatgaccacgagcaactcgaagctgaagtgcgacctgtagaagaagttggtatgtgtccttttcctctaaaattatgcgtttcaatttgcaaaatcaattcttacattttaatctaaatttcattgactaatgtgtgtgctattcatgatcttgttattcattcattgagtctttggttccgacattcagacttagatcaaagttattcgatgagtgagggggacaaggatgatgatggggatgaggatggggatgaagatgaggatgaggaatagtatgttaagttgatttgtcattcaaaatttctctagtcatttcaatgtgcagttgttgttttttaattggttctttc

SEQ ID NO: 275744 - DNA, 370 bp, Glycine max
  unsure (1)..(370): unsure at all n locations
ggagtaganacatgggaccaactcattntatttcaaaaagtcgtatctagtcaaggtctgagagaccgtacaagtttcctagcgatttctaattatgtgggtcattaagtctatcatatgctgacaatagctgagaagcccgtgaatttcttcgggggcggagtaggtgtctgccatcgccttggccttggctaacaatcggcgaagttcttgactcctgttcaaggtgagagcaaaccgatccatccacatggttgcctcttggtgtaaagagtcgatcacccttcctctagcctctttttccgcgtatacttgggcatactcgtccgcgaccctatgctcgtgggccgtggctagacctaactcttct

SEQ ID NO: 275745 - DNA, 454 bp, Glycine max
agcatgcaagctgctatataagctgaaccattttatcaataaacacaagttgagttttattcagaaaattacagtttatctcttttatcttagcgagagtgattctcctaaattcttgagtgattcaagaacaccctggctgtatcaaaggactttcacaacctttgtgtgttgccctcactggaaagagtgattctttccttcctatcatctccacccttgttctttcaaaccacaattgcagaaaatccacctctgcccaaaattatctcgtgaccaaaactcccatttcacacactcaaattaagtgattcttgagcctaaattgaatttcaaaacgagacctttcacctcgttttggaatcacctcatttggagccctgtagcttccgttattgtcatttctatatttctgtgcagccaccacttaacctacgttttaccatcccattca

SEQ ID NO: 275746 - DNA, 338 bp, Glycine max
  unsure (1)..(338): unsure at all n locations
nttatccatggcttcatatggtggtgagcttcttcttgactcatcttctccttgaagtggcgtctccaatcatctttcttccttctccattccactgccatgatcttcaagaagcaaaggactccattgatgaagaagattcaaggcctacacaccccttgatggaagcttgcttgtgaagcttctatggaggctggatctttgagctgcaatgaggtccctcaatggtgattttacacgatggagatgcactggtagataaaggagatgacgtgagaggaagcaccttccactagggagtatgccatggaacaaagagcatgaccgccatgaaagtg

SEQ ID NO: 275747 - DNA, 439 bp, Glycine max
  unsure (1)..(439): unsure at all n locations
agcttgaaattcanaataagaagctcctagcatatccaaacgacaataactatttactcggatgtccacttgagtcccgtaatatatcgagacgctccaaattcaaaacggaagctcgtagcaaatgcaaaccgcaataacttttaactaagaagtccgattgagtcccgtaatatatcgagacgctcgaaattgaaaacagaagctccgagcaaattcaaacgagaataactatttactcaggtgtccgactgagtcctggaatatatcgagacactccaaattgaaaacggaagctcttatcaaattcaaacgacaataacctttntctcagatgttcgattgagtcccgtaatatatcgagactctccaatttgagaacggaagcccttatcaaattcaaaagacaataactttntactcggatgtccgattgagt

SEQ ID NO: 275748 - DNA, 448 bp, Glycine max
tatccatatcacacacagtcgaggtagatttacaattggcatcctcatcacttgtgtcacattcttcattgcattgcacatccggttcttccttcaaacttcaccaccaccatcatcatgggaaagttctatcttcaacaccactcacaatgagctcaattccacggtccataagcttggttcctcggtcacgtttcttccactcaaggatctccgttatgcacgtgcacctcttgaaggccacacatggttcatgagttccatgtatgacacacatgaagttggtgaggtccaataccagcaattcccatcagaaccatcacatggtaagcttctatgtctcaaaggatgcgacacgcatgtcgggtcatggaactcctatgctttggcatggcctgaggcattgccttataacaccaccttcatgaaggttaacttttgtgtcata

SEQ ID NO: 275749 - DNA, 410 bp, Glycine max
  unsure (1)..(410): unsure at all n locations
agctntccacattaaatccccttctccttctctcaattctttcatttcttcttcctccttaagcttctcctcctcctcaaaagcttaagtttataagaaattcattccaagatacttgtctttcgaatttatgaagcttatttgttggttacaatttggtttctactagtgggaatgccagactctaattctgttcgggttccatgaaaaaagaaaacaaaagaacaataatgaaataaaaaaaataagaacaataataaaacaaaaaaaacaaaaaaagaacagtaataaatgaaaaaaaaaacaaaaagagcccaaagggacctaatggactctctttaagagccaattatctttgaaagcccattagatcaagagggaaggtctgtgcattaattacacattaaaga

SEQ ID NO: 275750 - DNA, 450 bp, Glycine max
gttgcttctacgacacacacacatattaagccactatacatcattcacatgttagaacataattcaatttttacatgtatctaatcctaggatttacatgcacaatctaaaaagagtcaaggaaccaactaaggaagagttgataataaaacacaacttgttagagataggagggagcaacatgacgaagtttgaagaagttttgtcttttaacatgcccaactctttgagtgacatttgtatagtctctatcttttcatgtgtacatcatgcatcatcatgtagaagtaagaagattatttgtaaatttagaaacttatttagtgcataaaactctattctaatcaattacaaggctgatcgtaatcaattacactagtgtttgtagcatgcaaagagaatctagttttgattttatcgattaccagttaatcataatcgattacacaa

SEQ ID NO: 275751 - DNA, 436 bp, Glycine max
  unsure (1)..(436): unsure at all n locations
atcaaaccatttttttccatcatagttaaaacaatctcaaatagatacccacgagttcaattntgattgttatgtctaccactgaaatcaactctttaaccaattgtgtcattgtcccttcaatcgaaatatgtgacaacaattaaaagttacataggatcacaactgattntacaattcacacaaagcacgtggtttattgtgtgaattgtgaaatcaatggtgtttgtgatgatcctatacgtaacttttaattgatgtgtcatgttttgattaaaggaatatatataagacaaaattggtgagacaagtgatttcaatctatgaaaaagatataaatattgaatatgatgtggtataaaaatatgataactttataaaaaattacgtaagtatattttaagatcaatcataattatagtttgttaacacactc

SEQ ID NO: 275752 - DNA, 446 bp, Glycine max
  unsure (1)..(446): unsure at all n locations
ctttcanacccccgtcatgagctntggatatgacaatggtgaaatattttatttatgatatacgtaaagcttttgttatatttaaaaaaagtgaaacagcagagtcggttgttagaaagttagacgagggctgtctcttaatgtcaaatgggcggtatgtatacaaaacaaagtttataaagttaggattgctctccacttatataatttatctcggtactatctttattccatgggagacttcaacatgttccattttttcttatgactatccaccatgtgagactttcaacacacccctctatctatgtgtgaccacttaaccaccctctatctaggtgtgaccacttaaccacttaactacattgtcaaatagcatggattccactctctctcctgtgtgtgtgcacattggaaaagagggaaacacttactactgcatttgc

SEQ ID NO: 275753 - DNA, 420 bp, Glycine max
  unsure (1)..(420): unsure at all n locations
agctntaagcccaacatataatcgattaaaatgatgcagtaatcaattaaaacaacaaatcttgaaccataacaccacaaacacataaattgtaatcgattaaaccatgaggtaatcgactaaaatggaatatttcaaaaattgataaatgtcataccctaatttcatccggggaccattgtttggtggcatgaaaccttcgcttgaccacctcgaggtacttaacacccatcgttaggcaatccgtgaagttccacaaacatgctggaagtcgaaaggaagtattgttgcacaatccgtgaagttccgcaacattccagaagtcaaaaagggcattgtggtgtgatccgtaaagtttcgcgacattccggaaagaaaataggtgtcgttacgtaatccgtaaagttccgtaatgtttcg

SEQ ID NO: 275754 - DNA, 449 bp, Glycine max
  unsure (1)..(449): unsure at all n locations
ngcatctgaagttgcgtaagcccgcctacatcattaggatttgttcctgctatctcatacacacaaatgaaacgtaacaagacaattatagttgctgtttgaatacctcacccactcaagtgtatcacacaattatggtttttctctaatgaaacactcttgccttttaccactctaattccccttgagttcttaggcaattcaagagattatggccacaacaaagaacaattcaccaatatgtgtaaggtaaggctagagagacaaggaaaaggttaaccaagaaaaaggctaacaatgtttctaggcacaaatgaaggaaataaaattcagaatttatgaattcaagtaacaatccttcatgcaaccaatatattaccttaaagagattttttttttaaagatcgttaagcatgaaccattcagcccaattttatnnttttttttta

SEQ ID NO: 275755 - DNA, 426 bp, Glycine max
agctggctaattcctaatatatgtgtaagaattatgttataaagtaagattaaggtattgaatttatgaattaaaatataaaatacgagaacttcctattctagaatagtaaattaacaagtagtattcagatttgtcatttaggggagctgctgccttatcatcaccctgatccaaaattgcgtgagacaaaatattaatccctaaaatacaacatttagacaatgaaagttgtattctttgcttaaacgggttacctcacatgcattaattggcttccacaaaagagcaaaagaaaaagaaataaaaaaaatgtataattaattaaaatggtcacaaaatcctaaactatctgcacattggactttgaggttgatgagaaataagcaggttgtttgaggaacagtatcccatcatcttctcaat

SEQ ID NO: 275756 - DNA, 406 bp, Glycine max
cctcgactgagataagcaccatatagacataattgtgaagtcaaaagtaaataagtatctgaaatacttcaagaagagaggttttgattttatttaattgttaactcttcattcttttccatttttcactttgtttttattaatattgtatttgtttatattttcaatttatttcagagaataaagagctttgagaaaaatgaaattgaggccacaaaggcattgatcagtttttatgttttgcttgcctttaatctttgtatgccttggattacccaaatttaattatgtccagtttttgtgtgttctcaacttcttatcttgtcttgcaaaatagcattccaaagtagcatcacttagaaatttttattgtatggtattgatgcgtttcattttctaatcctta

SEQ ID NO: 275757 - DNA, 420 bp, Glycine max
agcttggttttggatgcaagagatctcaagagtgggtgcatattaggtgaagctacccttttgggccagcaatcagctatgggctacgccataaatagtttccttacatctagatgtttagaaattttgttcatcttgaacatgtaggtgtagaataggtagcaaaatgcctttagcaatttacacctttggatatggtagcaagatgcttggatttgtgtacatgtaattttttggtagtcaaaatatctcacaaaaatatatatatgttgcatgttatgtaaataaataccttacaaagatacctttttgatttgaatgcaattttagttagcaaaaaatatacttgaatttgcatgccaatttaggtagcaaaaaaacacttgaataaagcatgaaatgtagcaccttattgtatgg

SEQ ID NO: 275758 - DNA, 399 bp, Glycine max
  unsure (1)..(399): unsure at all n locations
tcaatgttaatgtcacatcagataatgtcaaaaaccatatcatattatggagatcgtggtatggtattgtaagtgagatccttggccagagtggatttgattgggatggcactaagcacatgatcacagttgagaatgaaaatgcttggaatgaatattgttgcactgtaattattctttaatatgatgctatttgttattcaaagtagattggatttgactttttctttntttttgttcagtcgcataaatcggctaaaccatttcgattcaaggtgcttcaaaattgggaagatatagtggatttgtgtgctaaagatagagtcaccggtcatggagctgaaattgctatgatgctgatgaagcgatgagtagagaaacaaatgaagtggaattcat

SEQ ID NO: 275759 - DNA, 434 bp, Glycine max
  unsure (1)..(434): unsure at all n locations
agggctttaatttttttagtccttaagtttttaaagtctatttttagtctcttaactttttttactccttaagcttttaaattttttttagtccttaagtttttaaaatctatttttagtctctttttttttcagtcttacttttaatcctttaacttttctttttcattcttacttttaatccttttaagggcctataagaacaaaaaagtcaagagagcaaaaataagaatgtaataaaagttaaaagactaaaaatagataaataagtttaaggactaaaaacataaactntaaaaagtttaattaaggactaaaaagataataaaaaagagcaaaagacaaggtgtggtggttaattgaaatctactaagaaataaaaatggttattcattagttgtgagaaaattttcaattttcttgtatttaagatg

SEQ ID NO: 275760 - DNA, 104 bp, Glycine max
  unsure (1)..(104): unsure at all n locations
ggattgaattgtttatataacattctcactatacaggaagagnacaaaggagatngggtgttttacagatatgaacatgccttataatgaagatagtgcctaaa

SEQ ID NO: 275761 - DNA, 290 bp, Glycine max
  unsure (1)..(290): unsure at all n locations
tttaacaagaaagatataagctttaaatgaaactaattntaagatggaatgcttaaaattagtccgtcacctggtacacttcctattgtgtgcttattcattgtttttaagaaaattttgtgttaaaattttttggacaggtggatgcagtacaagttaatgacctgaattgtattgacgaacaatctctttctccagaatattctggtgtttatgatgcttttggtgaaccagacatattttcttgggtgggtgaccacttccaggttgaaatttcactttttatctcc

SEQ ID NO: 275762 - DNA, 66 bp, Glycine max
cttaccttgaattaattcctttgatagtctttatgagcctatgttcccctttctgtgggaagaaac

SEQ ID NO: 275763 - DNA, 83 bp, Glycine max
agcttgatgacgcgggatgggctaacattcatgatgatggtctgaatgtgaagacaaatctgcttgccaatcatgggggatcg

SEQ ID NO: 275764 - DNA, 86 bp, Glycine max
gtgacacatagatactaagcttatacatgtaaattgaacaattcaagagttccatggttcaactcaaatgataaataattctcaaa

SEQ ID NO: 275765 - DNA, 204 bp, Glycine max
cttcaattgaattaatatgtcttcaacatgtgcattcgtccattcgtggaggcccttgcggatgttggcctgtgtgccttcacatgacttgaatggatgtccaacctgaactacatggaatccaattgtacctccctcgtttattcacgtctttctcttaatcctataaccattttatctcattcttactttaaatcctcttaa

SEQ ID NO: 275766 - DNA, 354 bp, Glycine max
actcaagcttcataaggttataaacgggatgaagctatctttcacggctcctcgagtgtcttgctagtactctgtgtattagctttaaatcatgcccgttattattttttattgtttttatcattttcactgcctcattgactcgattactacttttatttttataaacaacttttccaaacattaaaacataacaggatttataaataaaacaagccatatcaagactcttttaatcgttttacattgttttttccaaattcatatattctaatttgcaaaaaatgaattgcaacaaaagaagaaaaaattaatgagttatttgaagacatctttttatcgtctttatcttat

SEQ ID NO: 275767 - DNA, 97 bp, Glycine max
  unsure (1)..(97): unsure at all n locations
agcttcaattggaattaatatgtcttcaacatgtgcattcgttcattcgtggaggcccttgcggatgtnggcctgtgcgcctttacatgacctgaat

SEQ ID NO: 275768 - DNA, 458 bp, Glycine max
  unsure (1)..(458): unsure at all n locations
gggcatgtcanaaatatgcatgagggccaaactaggagaaattattgtatggtctggtatcactatggtcctggccaattttctcgtgatatataaccaagttttattaacattttcttgtaattggaaaaactcggttacacatcatgtggagattgattaggattcaggactaaagatatgaggtggagtcacatcatacaataatttctccgaaaatagagaaatggaagaaacatattgaggaaaaaataagttatatttataaaaaaatattctttaaattgtaaaatggaaacctttatttggtggctgactgatttgtaggtcacactttggagcagccttctcaggcatggcatatggctntttaactagtccaatacttcagttgaatgattcatcatcaggaactggtcaagaaggacttaaacttgttagaaaatatggtgattctt

SEQ ID NO: 275769 - DNA, 440 bp, Glycine max
  unsure (1)..(440): unsure at all n locations
agctngaagactttgtttcaggactttngctttctctcttttttgccattagtgggcttaaaactaacctagggctcatccatggctcatacacctgggtaattcttattatagtcatttttttggcctgccttggtaaagttgttggaaccattttggttgcattgttttatgaaatgccaatacatgaaggagctgcccttggtttactcatgaacacaaaaggcctcgttgaaatggtcgtgcttaatgttgggaaggaccagaaggtgctaatactataatcaataatgttatattatatccttctattatcttcaatacataaagcattcaatactttgtttaacaaatatgaagaaaattatatgaggagaattatgctagtagctcaatcaattcctctctagatgagtggtttatacatgtngatcatttac

SEQ ID NO: 275770 - DNA, 409 bp, Glycine max
  unsure (1)..(409): unsure at all n locations
ctactcttgttgactgttttcaagaaaaggtcttcttggttgcaaacactaaacacaagggaccaatgttccttgggttcattgcaagaagcaggatttacttcttggttgatcactggacacaaaagaccaacatcttttgggttcattgcaagaagtgggtacaacttcttggttgttatcactggacacaagggaccaacgttccttgtggttcattgcaagaagtgagaataacttcttggttgtaatcattgaacacaaaggaggggattcctttgtggttcattgcttgtcaaggattttacaaggatagtggaaatctcaagcacgttgccttgggattggacgtacgcacgggttgtgtccgaaccaatataaatccgngtttgcattctctcttccctta

SEQ ID NO: 275771 - DNA, 393 bp, Glycine max
  unsure (1)..(393): unsure at all n locations
tctcttataacgagtaatatcatctatgtattacaatatgcttaatttcccaagcaatatactcaaagtggtaataaaacttatgaataaactcaatgtttattcttggtccaaaacataattttttctcaaataaatcaatgtgcacctaaatatgataaaatatcacaatataaaagtttcaactctaacctatatgtatacaatcataaagtggaaccaagttccattctttctacatgatccttgaacttaaacggtggcatgcccttagttaaaggatcaacagtcatcaactcagtgcttatatgctcaatgatcactntcttggctnttactctttctctaatgactaagtacttaatgttgatgtgcttactttgactttcactt

SEQ ID NO: 275772 - DNA, 461 bp, Glycine max
  unsure (1)..(461): unsure at all n locations
atcctctgagtcacctgctgcatgcaagcttctccctatttgctatttatggggtataagtttataagaaaagggttcagcccctgaggtacttctctctctctctctcaatagctgaggaaaattagttccatgaagaaaatccaagccgaggcgcttccgtaacgtttccgtgagtaattacgcgaagattctcgaccgttcttcaagattcatcgttcgttcttcgttntcttcggtcttcaacgggtaagtacctcaaaccaagcttttcaattcattctatgtactcgtggtggtccacattttggttcatgtatttttattctacgtttcatttactttttatacncccttttgacgtgcttaagccatttatttaagtcatttctcgcttaatctaaaaataaaataaatttccaccgatcgtttgaattgatcatccgttaatttcggtaaaa

SEQ ID NO: 275773 - DNA, 74 bp, Glycine max
agctttataagtgcgggtcagtgagacgaatgtcaagcgttcgcgatatgtgaagatgatgttccaagtacttc

SEQ ID NO: 275774 - DNA, 415 bp, Glycine max
tctaccacaatcttacattgatagggggagaattgaaggacagataggtcagcctcttaggcacttctctctctctcgaaattgctgaggaaaattatttccgtgaagaaaatccaatccgaggcgcttgcgtaacgtttccgtgagtaattacgcgaagattctcgaccgttcttcaagattcattgttcgttcttcgttttctttagtcttcaacgggtgagtgcctcacacccatctttttcaattcattatatgtacccgtggtggtccacattttgtttcatgtatacttattcttgttttcatttactttttatacccacttttgacgtggttaagccatttatttaagtcatttctcgcttaatctaaaaataaaataaatatccaccggtcgtttgaattgtatcat

SEQ ID NO: 275775 - DNA, 379 bp, Glycine max
  unsure (1)..(379): unsure at all n locations
tcttcatttacacttgtaggataaganaaatgaaataagactatctcatgaactaaaattagctcttgaagtcaagatcagttttttggagaagctaagtgacaaaagcttctacagaaagttgattttaacttatgcataagctaattttagcctatgggaaaagtctattttattttacttccctattttcttctctcacacgtagttatgaagaaatttattcaaacgcaaccttctgttcttgatggttctctcgctaatagctatggttcctagcataagtgcataatcatttcatcaattctaaagacaattcaacaagtcaagcagagaagtcacactggatttgcattcaatctatcctcaattaccacat

SEQ ID NO: 275776 - DNA, 374 bp, Glycine max
atgactagaatatgccctcgcaatgaccatcattgcttagccttatagtaatacgcaatccctgacttagctgtgaatggaaagagcatatttgggaggggactcagaaaccccaataaagatgactagctaatattgttagcagagattagtcttagtcatcaacagagttaacctataaatatcatcataaccaacaaagatctctttctttcaatcagttccttgttaggctgtgtcaagtcctcactcttgtctctgttcgctctctcaatctttccctcttcttgcttctcctctcactatcacaatgatcttttaggttcattaagaaaaattaaaactcactaaacccttattactaatacatatat

SEQ ID NO: 275777 - DNA, 442 bp, Glycine max
tccgttcccgagagcatatcttatgtaagcatttcagcctttgctttcgtgtagcttacgaagaacgtcatttcttcttctgtatttcttccaaggccatttataaagttccaagaactttctccatcgacccacaggcaccattagccaccacaaaccatcgttgttctccacaccgagaggaacccttcaaccgaagcggaatcttccaactaggcttgcggtttcggtagagaacgaaaccctaatctaacctttctgtgtctttcgaggtaaccatggttctacgcttgttccttgctagcttgcatcctgtctttccatctattctgactgtggaaccgaccttgtatgtgttatgcttcctttgaaaaaccattgagaaagagactctgtacacgttatcctttcatgagatgcatgtgattttggtaacctacac

SEQ ID NO: 275778 - DNA, 385 bp, Glycine max
attgggcgtcgaaaatgcataacagaactttctatgattggttttaagatacaatctttgcagatgagaatgcttcagaaacattaagaaaactagcagatgggcctaaaagaaatgttataacctggcaaggatacgacataaataggtattcattttacacataagcacaagatgacaaatgttcaatgccgaacagtggggtcaccctaagggctgaatctcaacactatgcaagtgtcaatgacgccaatccctgtgtagcttccatcccttactttgtgttcattgatgaaatttgggagcttaattatgtgaaatttacagtatgtgtcttcatatgtagatgggttgacagcaacaccggtgtgcgcactgatgatat

SEQ ID NO: 275779 - DNA, 452 bp, Glycine max
acctttcatcatggcatgttgacataagctcaatagttgagggtaaaatttgtcaaaaaagaaataaaattcgacaaaaatataagagtttgagataaaatttgtcaaataaataatattatgatcttattaaaatgtttaatggtgcttaattttaaaaattttctaagttttctaccataggagctctttttttcaccccatccatgttgtcacatgtgggtgaaaagaggaaagagagggatgggatttctcttgctttaggcataacgggccaaagtgggaggcccacacgaagggttattagctcagtagtaaagtgtgtccttgataattgtgtcggcttggagtggagtgagacatgtcattgaatagcaaggagatagccacttcgttatgaaattagaaaagttaagagcccttcattcatttggataatttcgaatgaagat

SEQ ID NO: 275780 - DNA, 442 bp, Glycine max
  unsure (1)..(442): unsure at all n locations
agctnggtgatggtcataaggtgataacaaatgtagtgtgtataggggtcaatatgaagatggngggggattgaagtgattgtggatgcgttggtgttggagctagggggaatggatatggagttaggagttgcctggttaagcactcttgggaaggtgattatggattggaaggccatgactatgcaattttcttatgaaaatgagttggtgaaattgcaaggtcaaggcagtaaggtggtcagacaatgttatttgaactcctatcttgaggatactcatagcagaactgagctgggttggtggtgggttcatctacagtcaatggaagcaaccaagtcagtggttcccaaaggcttaaaacctatactagaagaattccaggaagtgtttggaaacaacattcagctacctcctgagaggagtcaggtgcatcggatta

SEQ ID NO: 275781 - DNA, 450 bp, Glycine max
  unsure (1)..(450): unsure at all n locations
tccatcatacacgcnctcgcctttgtagggctacacgccctcacctttagaggactacaagtcctcgccttatgaaggctacgcaccctcgccttcagaagactacacgtcctcaccttcaaaggactgcacgtcctcacctttatagggcggcacgccctcaccttcggagggctgcacaccccttcgcttttagagggctacgcgtcctcactttcagtgggctccacatccgcaccataagagaatntaaggtcctctgcccttaatgcttaatcgagacttgtgctctcggttaaggggccagtcgtttcctgttatcagttcctgagccaccccctgatattggagggcgccaactatgcgagcacagccagagagggaggctatcacgcagctactatgcatanccgggcaagatttcacccgtgccactgcaaagagacgagt

SEQ ID NO: 275782 - DNA, 144 bp, Glycine max
  unsure (1)..(144): unsure at all n locations
ggcaccactggttactcccatggccaagtttgatccagaaatagtccttgagttntatgccaatgcttggccaacagaggagggcgtgcgtgacatgagatcctgggttaggggtcagtggatcccgttcgatgccgacgctat

SEQ ID NO: 275783 - DNA, 467 bp, Glycine max
  unsure (1)..(467): unsure at all n locations
ntgagccaaaatcctgactcaccataaaccttgacccagggtgagaatgtcgatccttaccctcggaagcaaaaaaaaagagaaggaaaatttccaatcaaaggaaaaaggagaaggaaaatttctaatcaaagaggaagcaaaacaaggagagaaggaaaatttccaatcaaagagaaagcaaaaagaaaagaaagaaaaattcccaatcaaagaatgagagaaagaaaaaaagagaagtaaaaaagaagaaagctcctggtcaaagaaaccagaagaaatgtgccgagaggtccttggaccagacgatatctgaacaatacagaattgtcaccaaatgaacaaaagaaagaaaaggaaaccatgacctaaaagcggtcttctccctttgattaccaaccaaaatcctgtgcgctagcgactntttcgccccgcaccaaacaaaaacagaataggaaaaagccaac

SEQ ID NO: 275784 - DNA, 190 bp, Glycine max
agcttctagccaaatggacttaccttgaattatttcctttgttaacccttttgagccttgtttccctttccttgttttgaagctcactacaagccttaagtgaaaaaccatgatatcaccatatccttaaggaattttggagctttggaattgttttgggaataagtgtgtgtgtgtgtggggggggggg

SEQ ID NO: 275785 - DNA, 444 bp, Glycine max
  unsure (1)..(444): unsure at all n locations
gtatatattggtttctctcattcgtcatggacaggtgagcctcttattaaacttgacatggcttaatgaaggtgttaaatcaaaattttgcttttatataatatttatgaattcttttatcccaaaaataaataaaaaagtgaaaaatagtgtcttgtttatttagagattgcggctnttatgtttctaatgcaccgtatattgtcaatagacaaaccctctatctataggaatttgctcattttgaccaatttaactttaacctttattttatgaagtgctatatttgtagtttatcagctgaccttgccgtgtgtttggtgccagttctctaccagtcttcctaagtattcttcttcaactgctcaaaggaacctatagaacttttgtcaggtatgactntaattcagctganggtagaaaagacagggggaagcctttgac

SEQ ID NO: 275786 - DNA, 191 bp, Glycine max
agcttctagccaaatggacttaccttgaattaattcctttgttatacccttttgagccttgtttccctttccttgttttgaagctcactacaagccttaagtgaaaaaccatgatatcaccatatccttaaggaattttggagctttggaattgttttgggaataagtgtgtgtgtgtgtggggggggggg

SEQ ID NO: 275787 - DNA, 435 bp, Glycine max
  unsure (1)..(435): unsure at all n locations
agcctttctaagagacttaagatcatcaaaatttacctcattgtcctggtctaattcggatccttcagaagttgtgtctgcaatcaggaatttgtttggttcttcatcgtcttcatctaatgaagtgtcgtctaggtcttcccacatgctcataatccccttcttttctttggtcttaaagaatttcttcttatcttgacttttctcttgatctgtacattccgacttgaagtgtttaggttttttgccctaatagcacattctggagcttttgtctttgtccttcttgtcttgaggctttcttcttgaaaagcttctccacttggacccacttttgtttctccatatcttgcagaatttgcgagagatgaangcaagctcatcttcatctgagtcctcatcaaatgaatcattgactttaagcactttggactc

SEQ ID NO: 275788 - DNA, 436 bp, Glycine max
ccgattctatctcgtgaatatatttctgtttcctaacattgtattatgaacaggctagagtgataaatatcaacaataaactataggatccaacgtttaccaaaatacgccagactctgcctacataattgattcggcaaaaataacgcggggttacctatactgacacagcgggtcgaaacttctaagccactccctctaacggccgattagtatcaactcattaccaataaaagagaaattaaaactcatacatataaacatattatctaaaatatttctaataaaacgcatacacaccataaaggaaatcatacaatcttccatcattggcatttaaaagtgtattatcaacttattatgacaaccaaacgcatataaatcagtgtttctataaattaattactacccattctcatgtctagaccaataaata

SEQ ID NO: 275789 - DNA, 441 bp, Glycine max
  unsure (1)..(441): unsure at all n locations
cgtaggattatggggtacccatcacatgtggtactaggaggctgtcgggcgatggtgcacaacaagtttttcacatccacaatgcgcgcataaacccaccatcccctgttgcccacctccatctgagctcacgtactcccacgtagcccatatccttttttctgtcaacaccgggtccccatcaatactcccaagtttcctccaacatcaaagtaatacaacattcacacagcacaagctatcgcagccaagcaaaacagggcataggcagaaaactctcgccaataacaccaaccaaaatcacagcttttctcacttaaagaccccagtaacaatttcttcgatccaattcgttaaccgccggatcgactccaaaattttattggaagtctatagtgtatacgcctacattgtgaccgttgcgatctactangaaacacc

SEQ ID NO: 275790 - DNA, 428 bp, Glycine max
  unsure (1)..(428): unsure at all n locations
agctntccacttattaatatactgcactgatttaaggctgctatctcgctcgatgatttctggttgacatgtttcttgtttctcttataatgaatgcacataatggtgtggaacgatgagaaagagggatgccattcctaatgcgatgccttgatcacatttgaggacaattttttacagcaaacatacacaaaccccgtatagtgcattaagcgatatatttgttaatatatacattttttgtagtatgtacggctacttaaggatcacgagcctgaaaagtaatgacaaaacataatataaagcatgaaatatattccacgcttatgcctgttaagtattgcactaagcaatgcaacactagagatgatccaactcagcggtctttctttcgtacagcatttggatcagacatcatgtccatcatc

SEQ ID NO: 275791 - DNA, 470 bp, Glycine max
cgcacactatgaaactcaagcttgcacagcaagctgcattaaatgtcatttccctgagatgcaatgtgtagtgttgtgagttatcctcgttcttgatgctgcgaagatgaacgggggcacgtgaagccactcacactgtcgcaatcattgcatcccctcatagatcaaggttacgcgttacgcccctacctatatatagggtttccattttcaagccactctttcatttttcctttctatctccctattgctttcgagtttctctggtgtgccaaatatggtgaaaattttccttctcagcgatgttggtgcaacaggttctgacagatcatgatggtgggtcacagttactgtggccattcatcatacaactcaaaaaatataaaaggaggtccatagataacactcatattgaatgaacaatgatcaaagataccatttccattggtagatgagacatatatatatat

SEQ ID NO: 275792 - DNA, 397 bp, Glycine max
agcttcaagaaaaagatggcctcagcaaactctttatttccagaagggaattctatcaatagacctccaatctttaatggagagggttaccattactggaaaacccgaatgcaaatttttattgaggcaatagatctaaatatttgggaagccatagaaatagggccttatatacccaccacagtggaaagagtttcaatagatggtagttcatcaagtgaaagaataactatagaaaaacctagagatagatggtctgaagaggatagaaaacgagtacaatacaacttaaaagccaaaaatataataacatctgccctgggaatggatgaatatttcagggtttcaaattgtaagagtgctaaggaaatgtggaacactcttcgattaacacatg

SEQ ID NO: 275793 - DNA, 446 bp, Glycine max
  unsure (1)..(446): unsure at all n locations
tgtatggtagaggaatagaagaatgggaatctactttggatcatgtatgaaaaaaatcctcctagagacatacacatggcacttaaaatatcctttgatgctctgggttacctcgagaaggaggtttttctagacattgcatgtttcttcaatggatttgaattagcagagatcgagcatatacttggtgcacatcacggttgttgtttgaaatttcatattggagcattggtggaaaaatctcttataatgattgacgagcatggccgtgttcagatgcacgatttgatacaacaaatgggtagagaaattgttcgacaggaatcaccggagcaccctggcaaacgcagtaggttatggtctactgaggatatagttcatgttttagaagataacacggtgagtaagactgagatcaatggtttgatcttcattnttagcattga

SEQ ID NO: 275794 - DNA, 437 bp, Glycine max
  unsure (1)..(437): unsure at all n locations
agctgggtccncaaggctntatgaagactcttctcaaaatctagaggtaaatctgggatctctatcagaaactatgctagaaggaacaccgtgtagtctaactatctcactgacgtacaagctagtcaacctctctaaagaatatctgatgtttattgggatgaagtgagcagatttggtcaacctgtctacaataacccaaatggaatctaaacctttgggggtcctaggtaaccccactacgaaatccatggagatgctatcccacttccactcaggtatctctaaaggttgcaacttccctgaaggcttctggtgttctatcttagctttctgacacactaggcatgcaaggacaaactcattaacttctttcttcagacccggccaccaaaacatctgcctaaggtcctggtacatcttagtcgctcccgggt

SEQ ID NO: 275795 - DNA, 520 bp, Glycine max
  unsure (1)..(520): unsure at all n locations
cgccgcacgcnnnncctgcgggcntnnatgaacgcttgtgancccgtgctattacggacactctgtgcgcgatgctcactgagagacgttctgacacggctcgtattctcactggattagattacttctctgcaacattttttgatagcgaattccaacgacagaaaaatgcctaacgtgctgggggcaccttacatcttcatttcctcccctatgtataccaaagatagggaagaggttgccgaccagctaacccatgcgagctaaacatcgccaatcgagcgagggtgatttctacaaaagcaaccgtcttctggaagaatcttcaggatggcccgagtgtggctgggtgctatttgcgcccccatttttaccaagttcaccccctgtgttattgtttggagattcttttatcgtataggcactgaaacttacgaatttcgtaacgatccttgttgtctttccgtaatgttacagaaccttgcgaattacatcagcctccactttttgacttacggan

SEQ ID NO: 275796 - DNA, 339 bp, Glycine max
agcttatgttgatctcatatgggttgttcgttcttgcaaattagagtgaccctgactggtctccctacgattttacctagtgagagcgacttgacttaccagtgtgtggtatgtcttgtcctacgcgtccgacaggatttttcactgacatggtaccacattgcatataggattgagtcttagtatatttgttgcataacacttgtgtattgatcaatattgattggttgagtgatatcgtgttttgatccttaagtacgtgaatgatgtgaaaatatgtgagacgcgtagtggtgagatatgatgttatgtgataaatggtggaatgacgtgagttat

SEQ ID NO: 275797 - DNA, 436 bp, Glycine max
  unsure (1)..(436): unsure at all n locations
ntcatggaattaacttcaagaacacatgtatgaacttgggagaagaagaanaatatggtctnccctctctctaaaagcttcaagcaaaatgggagaaatgacctagactttgtcttttaaaacaacactaattgtaggtgaaatgcttggaacaatggaaattgcaaaacctaatttttatcttcttagtctaagcactttgaatgacaattaatatgactaatgggtagcttggatagcccgtgatgtgctctctatgacctcagtcatgccttatatgacttatttcactctttccaaaactaactataaaaggctaaagtgtgctctggccaaaaatggaaaagttgctcttactaaaattggcaattcctatcttaatcctctagacaaatgtgctaacctttatagaataatgttctaatctctcttgaaa

SEQ ID NO: 275798 - DNA, 433 bp, Glycine max
  unsure (1)..(433): unsure at all n locations
agctggtagaatggctagacatgatttatgtttgggttcganccggctcacggataaaagggatgccccacattatttccatgacacaaatgcaaaaatgatgatttggaaacttcatgcaaaactggtcatgcatgcacctatgtggacactcaagtgtcaaatttttatggtcatgtgatgctaaggctcaggattcatttcctctattttaaatcaacccaatgtttccaaaatatgttcttttatccatttgtgcattcatccaagtccatttcgggcgtccggngaaatttcacagcattcacccttcaggtgtagacacatttttcaaaaattggttatgatcaatgaatctttttcaaagaanagttggaaatcatctcttttcaaaagcatgtcggttttttaactagacaacttaattttcttt

SEQ ID NO: 275799 - DNA, 379 bp, Glycine max
  unsure (1)..(379): unsure at all n locations
ntacagcatattctagtaatgacccactaatctagaattaatataacttaatgccattaacctacggaattaaaaaaaaacttaatggctgagtgtaaccgaaatagtggcaacaaatagatatccccaacagccaactagtgagccaccatttggtctcccataacgctgacgcctacgttgccaattggggtcttattacaactcgcactaaacctaactaaagaccttttagtcgattaactcccaaaacatatttttggtcaaccaactttacaatgattgggccattatttacacaaactacacactctaaaattgaaacaccgtggtgtcatttaatcctcctgcatatgggccatgatacaactgacaacca

SEQ ID NO: 275800 - DNA, 221 bp, Glycine max
agctaggaccattctaaacctttgagtttctgccgccaataccgagcgtgtagatgagtcatgtccccgaatcggacacctgtgtgaaaagctatgaccattcgattttctcgagagcttccgttgatcaatttcgagcgtctcgagttattatgaccccgaatcggacatccgtgcgaaaacgtacgaccatgcgactttctcgagagctgccgctaggc

SEQ ID NO: 275801 - DNA, 434 bp, Glycine max
  unsure (1)..(434): unsure at all n locations
tgtagcacggctattattatggttaatggttggactacattgtgagatacactgttagttgtctataacaatagtttttgtaagtataatataatatcaatgtgatgatatgaagaataataataatctataaatgaattgcaaattccaaattacaaatctgtattaagtatcatcattagtagctcaacgttgtctttttcgttcttgcaaaatagttttcctacgcttctntcgttcagcatatatgtccatgagtagctgatttctgcaacaactgccttataattgccaaacaacaggaaaatcacatgttgaaactgagtcaaataagtcgatgtagtaggctgactttaaaatgataccaacattatagttatttgcatctgcttcaccaagtaaagggatatgtatctgccatagaacaagcagaa

SEQ ID NO: 275802 - DNA, 442 bp, Glycine max
  unsure (1)..(442): unsure at all n locations
agctngtgcatataggctntaatttactgctatattggctttttctntcttgaaacaagaacaagtggaggaggagaaacatatatacatatcctttaaaaatggttaccatgcttgtcaaaaatacatatccttcatacacagtacattttgtcaaattgtaacctgaccatacaccatcttttgagaaaccaacttgaggctattgtggntcaagtgccctagtattttgcatgtgccacattcaaacagtcgttaaattccctcttttgtcattaacacgaatntttttctcataattaaagggcaaaggaaatctcctggtctttcatattgatgcgacaataattcatttcaacagggattgctgctaaaaaacataaatgttttttggggatagtttggagcttgaagaaatgggtattgttgaatttgatttatt

SEQ ID NO: 275803 - DNA, 349 bp, Glycine max
  unsure (1)..(349): unsure at all n locations
cttgatntgtgtggctctacaatctgttcttgcaaaggatacattccaagctctgttgatctctctctntaatatagccaacagtgcaaacggtatcaaatatcttcagattgtgtcgtctctttactgctactattgttaattaatcaatgaacaataaagtcattacaccaggatttgcgtgataatggtgtgaaccgaccccatcttaatcagcttctcattatccattacttctcttattatatactaagatttgattggatgtgcttcttttctttattgtagatcattctctgatccagccttttagagtggatgttaccctgtctatgattaacatgggctc

SEQ ID NO: 275804 - DNA, 393 bp, Glycine max
attccgccctacaaggaaatatcattgcgaaaatatgttttcatcggattaatctgatgagttaataaattaaagtaagccaattaatatttgtatggcggttggaatcattacaagcaataagtggatctccctgacccgacacatattccctgaagtgcaggggatattcatttcttgtaggagtactcatgggcatggcaactcatcatgcacctctctagtctctactctctacccaacaagtgctgaataattcatcaagtactaatttactacagtaacaagtcatttgttattttttataacctatatctatgtcataaatatatatatatatatatagatctctatatatatatagggacctatatatatatatgctatatatat

SEQ ID NO: 275805 - DNA, 308 bp, Glycine max
gcaagctttgaatctttacaaaagcatgcatgtttggtatcgtttatagttgttccagataataaaaaaacaaaagaagaacgaatctagaacatcaacaatattttaatctactccgagaaaaaactatccagaacctaattaataaggaagaaaaaaagaggatcatatttggaggacaagaaaagagattgtttgggtaagagttcgggaaataacaaagtaaatcaagacagcggcggatccgcgacggcggcagatctgaacgaagaggggtggaacgatcaaaggtgataatggtggaggcg

SEQ ID NO: 275806 - DNA, 425 bp, Glycine max
  unsure (1)..(425): unsure at all n locations
tggtggatgaagaagaaggagaaaagcaacgtgagggagatggagagagagctgtctgaaattttttctgttgagtgaagagagagagagttgctttttggttttaaaaggcttttccctcttttcttattattntatttaagctatgccacatgtctncatttgagtggagcaagaagggcccactttctcttttgattgtgacccatactcagccacaaaaagtgagaaaaatctgaccttgaaacgctaaaatcttgcctcggtttgcgtgccgtttctctggttccagttcctcacgtttctctgcgcccgtcggggtcagttttcgaaagtaatctatatatatatcaaaacgctcagaataagaccccgagcgtggttcagaggttggtttcgttaaaatttaagtcgcacacaaaacg

SEQ ID NO: 275807 - DNA, 149 bp, Glycine max
aacaacgaatctataacgtccactgtatttcaatctactccgatagacatcaatgcagagccgttttgacagggacgaaacctccaggatcagatctgcaagaatagagatgagattgctgggataagagtccgggagagaacataatt

SEQ ID NO: 275808 - DNA, 244 bp, Glycine max
ttctacctcaatgtgtgcatactgaatggcgatagcgccacgctgcggattgtatgcttaagcacttgtgcggtatttaccaccagaaatggtgcactctcaggtctatctgcgtccgtggcgcatagggacgccaggcactggatcctgaacactcggtgaattgaacgacaataacgtttagtttgatgtctgatggagtccttgtatctatagtgaccttcgaaattgaatgttgaagccg

SEQ ID NO: 275809 - DNA, 427 bp, Glycine max
  unsure (1)..(427): unsure at all n locations
agcttctaaactttgtacaagaatgaagctctgataccacttgttagacaagtggcctcagatatcttaagaagggggggttgaattaagatattccaaactgtttcccctaattaaaaatctatttctctttttactcaagttatgaattcccttaaagacaatcttcttaaatattaattcaaacgaagcaacttgaatgtgaatataaagcaataataaataaaagagattaagggaagagaaaatgcaaactcagttttatactggttcggccacacccttgtgcctacgtccagtcctcaagcaacccgcttgagagttccactaacttgtaaattccttntacaagttctaaacacacaangacaatccttcctttgtgtttagagatcctttacaacaagagactcacagtctcttaatc

SEQ ID NO: 275810 - DNA, 431 bp, Glycine max
  unsure (1)..(431): unsure at all n locations
gctttgaatgcactattcaatggagttgacaagaacatcttcagactgatcaacacttgcacagtggccaaagatgcatgggagatcctgaaaatcactcatgaaggaacctncaaagtgaagatttccagattgcaactcttggctacaaaattcgaaaatctgaagatgaaggaggaagagtgtattcatgacttccacatgaacattcttgaaattgccaatgcctgcactgccttgggagagaggataacagatgaaaagctggtgagaaagatcctcagatccttgcctaagagatttgacatgaaagtcactgcaatagaggaggcccaagacatttgcaacatgagagtagatgaactcattggttctcttcaaacctttgagctangactctcggatagggctgaaaagaagagcaagaatct

SEQ ID NO: 275811 - DNA, 608 bp, Glycine max
  unsure (1)..(608): unsure at all n locations
ccacctctctctcctccccttacncgcgcatgacttcgtctcctantctaaatatctcctctcntntntcctcncncccggatctgcacgctccnctttgcaccccttcgttgaccccccttcgtttaacgccttcacatacactactcaagctttgccacagatcctctctgcatcatgcaatggtctatgtggtgttcgccacacttgctcagagaggatgagccactcagagcatcccttaagcctatcttcatggtgacactatcaacgcttctgatagagaccatcatccgcatccccttagcacatagcagggtgtctgaacgtcccttagagaagcaagctgatgccactaccgatagatctatatctcgacgtctcgcacttactactacaaaattattcctaagccattactgtggctgctactgataccggtactgaactactcctcgtgatagcacaccaccagacgtctatttatgacgtggccatcgactttgtcccatagacattgcattccatctactgtgttcgtgaaacgtatgcactcatacaaaccttccggattgaggaccactcgatcggcctcctaatcatctacc

SEQ ID NO: 275812 - DNA, 420 bp, Glycine max
ggatccttacactgcgctcagctaactcattcagctctatttacgactaacagcatcagaaaattatgcgttgattgctaagatcacattcatttcgagcgtctcgatatattacgggactcaatcagacatccgagtaaaaagttattgtcggttgaattggctccgagcttcaacattccatttcgagcgtctcgatatgttacgagactcaatcagacatccgagtaaaaagctattgtcgtttgaatttgctcagagattcaacattgaatttcgagggtctcgatatcttacgggactcaatcagacatcccagtgaatagttattgtcgtttgaattggctcagagcatcaacattcaatttcgagggtctcgatatattacgggactcaatcagacatccgagtaaaaattta

SEQ ID NO: 275813 - DNA, 438 bp, Glycine max
tcaacctagaggagacgaaccattccaagtgttggagaagatcaacgacaatgcctacaagattgacttgcctagtgagtataatgtaagtgccactttcaatgtgtctgatctatctctttttgatgcagatggaggagccttggatttgaggacaaatccttttcaaggagggagtgatgaggacataaccaagggcaaggaccatgaagcacttgaaggtcccatgaccagaggcagacttaaacaagcccaacacatcatagagacaaggctggtcatttgtatagctgtcattgatgatgattgaaggcccaagtggagaaagatgaaggcccagaggcagaggcactaccaagactactaattgttgctgaaggcccaaactaacttgaaggcccaagttaaataagttcttagttataatttaattttatt

SEQ ID NO: 275814 - DNA, 319 bp, Glycine max
agcttaatgcactcagcagtttgtctatggtgtgaagagcgaggctacccttctaagattgcgatgcccaagtaaggaaaaggaatatatctcatcggaaagctcaatagagagtttatagcactcaccttgctgttgggcagagaaccatctatgaattgacattattccacgttgattatttggccagatgcatccccgtattgtcgtagaaggttcatcaaagaatgcatgcccttcttacctcccctactaaaaattatagtgtcgtctacctagagaatatgacaaggtgtggcacatttctggggactaccca

SEQ ID NO: 275815 - DNA, 449 bp, Glycine max
  unsure (1)..(449): unsure at all n locations
tgcttgagaagctactatggaggagagatctttgagcttcaataaggtccttcaatggtgatttttagccatggagttacaacgaaagataaaagagaagaggtgaaaggaggcaccatccactagaaaataagccatggaaggagaagcttcaccaccaagagagtgcctaggataagaagcttagagaagaagcttcaataaaggaagagaataagagagagtggcgtggaaattgaaggagaatagggagagaagttcaactttgaagtgtgtctcacaagtttctcatccataaaagttatgacaagtgttacacatgtttctatttatagcctagcacatgggaaacttccttgagaagcaaggaaggtagcttccttgggaaactagatggnggctactcacacccttccaacagctaagctcaacccatgccaaaatacatg

SEQ ID NO: 275816 - DNA, 367 bp, Glycine max
  unsure (1)..(367): unsure at all n locations
agctggcctcanagaggtccaagaaggatattgcggccgaagggactagttccgctcctgagtatgacagtcaccgctttaggagcgctgtacaccagtagcgcttcgaggccatcaagggatggtcgtttcgacgggagcgacgcgtccaactcagggacgacgagtatactgatttccaggaggagatagggcaccggcggtggacatcactggttacccccatggccaagttcgatccagaaatagtccttgagttttatgccaatgcttggccaacagaggagggcgtgcgtgacatgaggtcctgngtaaggggtcagtggatcccgtttgatgccgacgctatcggccagctcctaggata

SEQ ID NO: 275817 - DNA, 107 bp, Glycine max
atctgacgctattgctccaacatccatgtatattaaagagagcgcttgcgcactcttcttataacaccttagctctggcacgattacttgatgtctaagaattgtgc

SEQ ID NO: 275818 - DNA, 314 bp, Glycine max
  unsure (1)..(314): unsure at all n locations
caagctcgatcctgaaacaactttatgattatagacttgntgcttatgagtacatggctaatggttcattggataaatggatattcaacaagaacaaagaggaatttcagttggattgggatacaaggtataacatagcacttggaatagcaaaaggacttgcttatctacatgaagattgtgactcanacattattcattgtgacattaaaccagaaaacgtgctcctagatgataatttcagggttaaggtttctaattttggtttggctaagctcatgaaacgtgaacaaagacatgttttcacaacactt

SEQ ID NO: 275819 - DNA, 408 bp, Glycine max
cctccctcaaactccttttaattatataataatatatttttgtgaaaaagtatattattaataatatataacaataaatatattttttatagtaaaaataaaattaaacaatatatactagttagtatataatgatgtcgcaacctacccttttgcgggcgagcgaagcgaggctctcgggagcgttttccaaaggagaaaaatgtgcggagtcgccaccaacgtttatttgtggaaaacgtcggaaaaactgaaggaaaccggtcataaagaatattccaagttcgggagttgtatttacgtttgaggaaggtattagcacctctcacgtttgctcaaaggacaacagccttatttttagaattgtgtgaaatggtgttaccctaactttatttctttttttatttt

SEQ ID NO: 275820 - DNA, 291 bp, Glycine max
agctgggttcgaggtacttacccgttgaagatcgaagaacgatgaagaacgaatgaagaacgtcgaagaacggttcaaacctttgcgagattcctcacggaaaacgttacggaaacgtttcggaagcgcctcggcttagattttcttcacggaaataatttttccaagcaaattcgaaagagagagaagtgcctaaagggctggacccttttcttcttcacttcctcccctatttatagcaaaataggggaggtggttgccgcccagctcgcccaggcgagcagggttgct

SEQ ID NO: 275821 - DNA, 316 bp, Glycine max
  unsure (1)..(316): unsure at all n locations
gttagcttctgctcgtgttgggaagcacttggcttgcttttgttatgcgggtaagcattacggttttgctcctgctaagcggttaaactttgttgcctaatttaatgaagattgtcccaaattggggattattaatcagctttcttgaacaattcatcccaagctggaagtgctaagtagacagcttccaacttgcagggagcttgccgggagctattagagatatatcaattgagtcttgattagtagagactgataaaatattcattacttacaaattangtagctctgtaatatatcagctctcatttgtata

SEQ ID NO: 275822 - DNA, 485 bp, Glycine max
  unsure (1)..(485): unsure at all n locations
gccgtgtanagctgancttgagttgatccctgcagacctctnatcgctgcagctgaatnagagttaaagggccttacagaatttctgtttttagactactcacacgtatgatgattaatgtgacacgttttatgatcgtctgtcaccacttaattctttgaggccatcatgggatgggcgacacgattggagcgactcgttccactcagggacaacgagtatactgatttccagtaagagataaggcaccgggagcggacattactgtataaccgctatgcgaatcttcaatgcacaataaatccttgagaattatgccagtgctgcgcaaacagaggatgagcgtgcgtgacatgatgatcttgttaagagtataagattccttcatgcctaactctactgccactctaagatattcgctggtgatgaagaaggcacgattgtgagtctggcagatgatgaacctggctgtgtgtcctatgacg

SEQ ID NO: 275823 - DNA, 461 bp, Glycine max
  unsure (1)..(461): unsure at all n locations
agcttgttagagctatcatcacatgatgctttattggcacataacaagttgctttctaagcaacttgagattntaacggaaacactcggtaagttgccaactaaattgtccattggtcaacatacacattcttgggttttgtaagttacaggttgtaccatttgtggtgaggctcatgaaacaggccaatgtatttccaccgaagaaaacactcaagaaattcattttatggggaatcaacaacgacaagggtatactcaaggaggattttaaaacttttagtagagtccctataatcaacaaagacagtggaggacacaccctggtaactagttcaacaaagaccagaatggaccttcgaataggtcaattcaacaagggcccaacattntctggaggacgacgaagctggaggagactntgactcagtttatgcacgtaacaatgccaaatcataaaag

SEQ ID NO: 275824 - DNA, 194 bp, Glycine max
aatgcgaatttcgtgacctctgggctgcgaacacgctaactctcctggtattgcttttgaatggtgggaaaagaagtattcaatggcataacctcccccttcatcatgttttatattatggtacaagggtctctctaccaggcgatctaacttagacttttattttatttatgctaaaagaatgtggattgaat

SEQ ID NO: 275825 - DNA, 458 bp, Glycine max
  unsure (1)..(458): unsure at all n locations
agcttattganttttcatgaattgaaccctgaactttaaatgattatctcctaataccttgtttagattataggagagcatatggttcaagacaaatttactctaaatttgggggagaaaagttgaaaagaatgaaaagaaaaaggttaagcattagcacacacaacaaataagttgtatgttaaaaaaaagaaaaaaaaataagttgtgttgttacaataagggtcaaagcaaattaagaaaagggaatagtgagaaggctatttgtacaaaacaagacaagatcattgggattagtctaggacttgtgctctcttagaatatanacctttgaatcctaagaaaaccaatgaattgttgtagccaaacctcactacaagcctgagaaagtccttctgattctggttatacatttctgacttgatggcatgagatgaaatgcacagattgggacctct

SEQ ID NO: 275826 - DNA, 283 bp, Glycine max
  unsure (1)..(283): unsure at all n locations
atttagccttagtttcactctagttattagtcaattcaattaagaaagagaaatcccaaagagaaacgtccgactgatcttctttcgctntatttcactaaaagggtatntcttgattattatattattattttacctactttttgatctccaacgtggttacagcacgaccgaacagtcagatgtcattctaacagatattaacggatattacacatcaaatgatcggtgaaaatttattgtatttttatattactcgagagatcacttaaattaatgactg

SEQ ID NO: 275827 - DNA, 454 bp, Glycine max
  unsure (1)..(454): unsure at all n locations
agcttctatagntattttctatctaggatagtttatgtgatgatgaaattggtataaaaacgcaagtagttaagacgtcatgctgaaaaattgtttcttgttatgaagaagacaccaaagaataaagaaatcgggactacttgggaacacattgcatgtgctattatttaataacgattcttataatctacctttacaccttatatgatagtattgtgtttctgcgctcaacatttttttaatacacccaacaataaaaggaaaaaataaaaaatatccttacatattacaattacaatctgtatggaacttacagattatgaattcataagcttcgtatgaaatttgtaactcgaacatgtaactgtaacgttattagcacgatgttctaaccaactgagctaatagatcaattatgttaaaaataattcacacatatatatatatatatata

SEQ ID NO: 275828 - DNA, 441 bp, Glycine max
agcttcttatccaaggctcatcttggtggtgaagctccttcttccatggcttattccctaatggatggcgccacctcttacctcttctcctttgtcttccgctgcatctccatggtggaaaatcaccattagaggacctcattgaagctcaaagatccagcctccatagaagctctacaagcaagcttccatcaataaagcatacctttttctgtattttcatgttgattattcctaccaaaaggtatgacaaacctaaggtgtcccatatgagtacctaagtctgtattgaaactaaaaataagagcaaacctacctaatgagtccctatgtacacaaatcatgaagatgttgggtgtacgagtgattttccaaaagagtgttgcactactcaaaacattcatcataccacctattttagggaagcctaataatacttat

SEQ ID NO: 275829 - DNA, 303 bp, Glycine max
  unsure (1)..(303): unsure at all n locations
tgcctcatgctatagtttcatagtccatctatgaaaacgaacccaaaccacaatctggttcttcatgatctttgaattcttaatgaaagttggtcggcatctctacaccaccatgtaatgatcccccaccatccaagggccctcaaacaaagcatgtntataatattgaatagagtaaattgcaccaggaagaaaccatcaagtgtcgacaattcgaatctttttcgcatgagcccacattttttatcttaaattcaatgattntgaaccatactctctttcttaggacatgaacaaccacat

SEQ ID NO: 275830 - DNA, 357 bp, Glycine max
agctttatgtaagacaaagatgttcaagatattcaagatggatgatcaagacaagtctctagtcttagaaagggtatattaaataggaggggaattacaattgaagtagcaaaaggtttgaccaagaattttaagttaaaaagtctttttcaacaaatttactctctggtaatcgattaccagtggccaaaactgatttacaacagctattaaaatttgaattcaaagtttgcactgtgtaatcgattacacatatatggtaatcgattaccagcagtttctgaacgttttaattcaaattttaaagcttgtaatcgattacacacatactgtaattgattaccagaggagtttttc

SEQ ID NO: 275831 - DNA, 343 bp, Glycine max
  unsure (1)..(343): unsure at all n locations
gcttatagtgcggttcggagacaaggtcaagcgttcgcgatatgcgaagatgatattccgagtactttggatntggtacgaccatgctctcctgatttccagctgggaaaatggcgagtggaggaacgccccggcatttacgcaacaagcataatgtaaacctttacggttctaaaagctctatagttgggcctaggctctagagctttcattntgttaaggctctgtgtcttttgtctttgaatntataatacaaggatctttcttcatctgttcctggtctctacccattctcattcatttgcatgtttacttctttntctaaaacggcagattcgatgac

SEQ ID NO: 275832 - DNA, 282 bp, Glycine max
agcttggtcttgggttacacatgactggtacatgatatgggacttgtacgattcaatttgggcaaaattggatgagggaaatagtggttttcgaattccgcactttatgcaaaattttgttgttggaatgtgcaccagaattttgtctaagtgcacaacaatgcttgtgtatggctggttgtgaaaagggtagtacatatggggttctggacattttctatccgatcccaacggtcgaaatgtagacttatgtactagagactgccagtaaaattttcgagt

SEQ ID NO: 275833 - DNA, 160 bp, Glycine max
ctgattgatgatatgatatatgcttgctcacaactttggttgaaatgctcattgttatgttgtatcttgcgtcttcaaacaaacaaaggagcggatcactatctatttgttagcccaccactgggactaccgtcacacaacaaatgacatgacatctgta

SEQ ID NO: 275834 - DNA, 426 bp, Glycine max
  unsure (1)..(426): unsure at all n locations
agcttgtgaatcatctatatcaactgcggatcaattaaaacctatgcggatcaactcattgcatatgcggatcaacctgaatgagctggatgcaaaaaaatatttttaaaaatacacaggaatatttttaccttttcacgttaagtgctgggtgcaccagcaataatgctgggtgcacctagcaacaccctttagtaagtatgatataataacttttcagtgctcatctatctgaaacataatccttggagtatgtttttattgatatgatatatactattttaaaatgtttcaaaaacgaaagagttatgacttaaaagagtcttatttgtgctggaatgcaacaaatntaaaatgactacgaaactcaaaaccagagcaagtatgtttacattctttatgatagattcatttattagaagtaaa

SEQ ID NO: 275835 - DNA, 346 bp, Glycine max
  unsure (1)..(346): unsure at all n locations
gcctttggactctctcattctctaactcacttctgattctcatagcacgagcctgcttttcttctgcttccctttttaagtctgaagatggtttcttctttctgtcaggagacattaatttatcatgcagagtacgtacacgttcagcactttttcggctcaggcttggtgaatatggcaggcgggaagagatacgaaatggagatgaaagtatgtcctcccagntccttttctccttccaagcattcaaagactttcctggagcagaactccttttctccttatctttttcaggcagtggcatttgcctcctaagatatctgtggatctggggttttctcattac

SEQ ID NO: 275836 - DNA, 447 bp, Glycine max
  unsure (1)..(447): unsure at all n locations
agctntacatcttatctgttttattgtttcacggtttttaagtcttggatattcaacacctttcttgtcacttggatcatcttacatgtacccttccctggctgctgctaacgctgctgtgatttctgctggtgaagaaattgcgacgcagggattgccattggggatttgtcccctggtttgtttatttactggttcacgaaatggtatggtgttaggaaatgatactctatttttataaatgctatcctttcttaagcggacatgaaattaaactaatccattcatgaaccaatgtttctgatatcccatttatttttgcctaataaatgtttaaaagtgtcacttgtgctgacttttgaatccttcatctcctgtagtttgctctggtgcacaggagatatttaagcttcttcctcataccntctgtgatccatctaaactacg

SEQ ID NO: 275837 - DNA, 421 bp, Glycine max
atacggtggattcttgtcacatctttatctgaattgaactaagccattcttatctcaaaagcgaggacataagcccaactttaagaaacatgcaatcaaatactcacttctctttctctgtatatataacccatatatacaagcatgtgcctagacatgtgcaaagcgttaccactcctattttcctgcaatggcaatttccactctcatcaaaacttcaaccctcaataatcagcccttccttctactttaaacctaactacaaagattctttctataaaaaaagtgtttgcattgctagtaatatcgcatgtttagagtttatttaacatgatctaatagttatagtacttaaccaactcgattcatatttcttttttgacaggtcacaatatcatgtcgagttgaaatgatatgacac

SEQ ID NO: 275838 - DNA, 251 bp, Glycine max
agcttgtacagaactatctgtctatcagatattgcttcttgtgagacacgacatgtatggatttatatcacatgccacatccttgccatataatctgtccaatgataagtgacacctacaaacccaatgtactgtgttataaagtggactcataactatgactaacctgggtgacgatgagtgtattctttagcgcttggtcgttggagctaccaccttgtgaatagctttctattctataatcttaaacc

SEQ ID NO: 275839 - DNA, 161 bp, Glycine max
agctcgtatgacggctggacatgatatatagtccggcgatggctgtgccacccgctcacggataaaggaatgtctcgcattaattccatgacacacatgccacaatgattagttggaaagtttatgcaaaactggtcatgcatgcgcccatgtggacactc

SEQ ID NO: 275840 - DNA, 318 bp, Glycine max
  unsure (1)..(318): unsure at all n locations
cgccatgtcgtcgntgtcgccgttccgacccanaccccttccagactcatatgcatgccctaacatcacacaggccaccattaaagcggcactagatgagcacgggtgcaccgagggagactcgacataagcattgcataccacttccaaagcttggaaagatgtctctaaggattattctgtggcttccacatatggtgtagaagaaggacaacttacaagaatgtcttcctcctcgaagactatgatttactacccttccaccacanatttcaacctttggtggagtgttgaagggactactccgactgagtgaat

SEQ ID NO: 275841 - DNA, 403 bp, Glycine max
  unsure (1)..(403): unsure at all n locations
agcttgaagganaactggatgcattggttaacttggtaacccagctgaccttgaataaaaaatctgtacctatcgcaagggtttgcggcttgtgctcctctgctgaccaccatacagacctttgccctttcatgcagcaacctggagcaattgagcagcctgaagcttatgctgcaaatatttacaatagacctcctcaacctcagcagcaaaatcaaccacagcagagcaattatgacctttccagcaacagatacaaccctggatggaggaatcaccctacccttagatggtccagccctcagcaacaacaacagcagcctgctccttccttccaaaatgctgctggctaagcagaccatacattccttcacaatccaacaacagcaacaaccccagaaac

SEQ ID NO: 275842 - DNA, 532 bp, Glycine max
  unsure (1)..(532): unsure at all n locations
cgcctctgttttnttagttgcnntcgtctgagcnngcccaaatgatacctatcttntacgtgacactataganatactcagctctgcggatatggtctttaccggtgaaaaggtcgaagcggatctgtaaagaggctgatttaatcatccttcttggacaaatgagaaaactggggcaaatgtagagggtgaagatganggagaaacccatgttgagactgcccttcctatactgccaagtntcccaccaacccaacaatttcattacttaggcaataacaacccttcttcttacctaccatgcaactattcacaaaggccatacctatattaaccacaaaacccgcctaccacactacctatgctaaacaccaacttatctctaatgcaaacacctatcagaggagggatcttgtcgcaaaaaaccatgggatcaaccaaatctcgggtcttgctgcatgctcccaatacgtctataattcataggagccaaaccacacatgggctgaacccatttttcctgtataatgaa

SEQ ID NO: 275843 - DNA, 381 bp, Glycine max
agctttccgcaagatttacggaaagatcttatagttgaccatagcagaggtatccatagaagccattgcatcactcacccaatactacgaccagcctttgagatgcttcacgttcggagacttccaattagtaccaaccattgaagaatttgaggaaattctaggatgtcctctcgggggaagaaaaccatatctttcctccgggtgtctcccctctttgagcagaattgcaactgtggtcaaggattcagcaagaggtttggaccgcataaaacagattcagaacggcatagcgggcctaccacagaggtacctagaagacaaggcgaggggtatgtccaatcaaggagattgggtccccgttatggatgtgttagcttt

SEQ ID NO: 275844 - DNA, 413 bp, Glycine max
  unsure (1)..(413): unsure at all n locations
agcttgcatatcanatgattaaagggtgtttgacgccctctactctgattaaagaacaaatatgtaaaactcatataatgcagaaacaganaagtgtaaacttcacacaggacatgggattaatactgcatgtgggtgcaattcttttttaaaactccataggatcctaaaccctctttttcgttattatttagttaacttacatgggaaacttgaaataataaatcaattatataaatatttatgttgtaagtaattcatattgttattgttagttagcggacaagtcagtgatatgagttaatgggcctgcctatagattagatacagcccaaactgttagtgtgacagctggtattagttggacttacgtcaagcgtataaaaattgctatgtgtatactagtaaaaaat

SEQ ID NO: 275845 - DNA, 283 bp, Glycine max
  unsure (1)..(283): unsure at all n locations
tgatatgtgaccaaatcggtttaaaattaacttaataaaaggttatctaagtttgcacatctttgtgactcttgnggcttgcgtatttgcatggatgttatggctcgatatgcataaacaaaaggtttgtaattatcatatgcttaaagctataagttgacgtgttcaggagtgaccatagcatcttaagcaatgtaatacatgaattaatcttttgtgcatggggaaataataattagtacagatcaaatatcatgatatntctatacccatatgcatgatt

SEQ ID NO: 275846 - DNA, 461 bp, Glycine max
  unsure (1)..(461): unsure at all n locations
cagcttgtcaagctacagcttatatccaatcttgagcaatctatgcaactcagtagggacctcaccaaccataagcacagacacatagttgatgtcctacacaggaacacggacctgtttgcttgatagccttctgacatgtagggaatccaccccaacattatctgccacaagctcatcatctgtccccaggccaaactggtatcacaatataagaggaagatgggagaagaatgatacaaatcggttagagaagaggtggacaagctcctcaatgccaacttcatcagagaagccagatattctacctagctcgccaatgtcgtcatggtcaaaaaggctaatgaaaaatggcaaatgtgaatcaattatactggtctgaatagggcgtgccncacagatgcataccttctgcccaacatcgatagactagtcaatggagtgtccgagttccaagtact

SEQ ID NO: 275847 - DNA, 523 bp, Glycine max
  unsure (1)..(523): unsure at all n locations
agggcaatgggatgatccctgctattagtgacctatagatactcagcctttctgatcaatggtccgtcaaaacatgagacttactatgatgagttngacaccctaccccaacatgcatattaatgaaaaaaaaacattctatgcggaatctaattaaagtcaacctcattcaagacaattagtagttaatccccatggattaaaaggccacattcgcttcactagtacccaatgaaacttattaaaaacagtctcggctcataacaatgtcgtgcatgtgtaccatagaactagaatgaagcagccggattacctagagtagaataacatgtagagaacaccatgcagtngaaacagatactcatacgcggatgcacgtcctattagagcatngtgtcccatcgtnctctagcacgacgttctttaaancatgcacctagtcatcagctacatgacacaatgtcgagatgtcatngatccaacaccactacctcgagaggagtgtacatccttagcaattaaa

SEQ ID NO: 275848 - DNA, 445 bp, Glycine max
  unsure (1)..(445): unsure at all n locations
cttgtgtattgctgcattctactaatatatggagttgtttactgctctgcttgagaataacaattgcttgaccacaacaaccctagaggcggtaagggacaatggtctttcaaataaacctgttgtacatgaacaaagattatatcatgcggtgaccgtgtcaaacgaactagcgaagtcattgcataattgttatagtaactatattcaatgtacctgaacaaaatgatttccaaacacgtgaccgacacatcttatgcggtgcccagaagaatcacgtggtggttgacttataagaggaaaaaatgccatgctntgttgtcaggacaacgatacaaggattacggtataccgtgatgcaatcacatataccatcttcgttagatccatccacttgtccacactaacctgaatcaaccaaacatacacatgtaagtaatttaaa

SEQ ID NO: 275849 - DNA, 443 bp, Glycine max
  unsure (1)..(443): unsure at all n locations
agctntagtcttaaatgcgtttttttttcttttctaaaatatcatttttgctttgtttcttttctaattataccaacttaaacaatgttgctccccattattctgaataacaatatggcattagcatgtattcccatgttcatgcccaaaatagataatagtttatattaatatgtttgcaatttaagatttgatagattaataagcttacatatgagtatggcaatttatcaatattgacttggtcctattcctttcttcaagcattccaacaccaacttagaatacaagtaaggcttatcaattatttacttacccgatcctttntctttatattgtgtatgtatttttagtctttgcagttagacttttaaaactgatcttctcttcacattttttagctcttgcttgtttggttatcctacaattatatcatgtatact

SEQ ID NO: 275850 - DNA, 509 bp, Glycine max
  unsure (1)..(509): unsure at all n locations
agcttcaaactctntgggccgaagatgaatgaacagcgcttggcaatgacattcatggagctccgaataaaagtggagaatggagaattggcgtatagagctatgcaatcacattcgcggggctccagactcgaaggtggaagacacatgaacagcgctaggcaatgacattcatggggctcccaaaaaagtggagaatggaggatatgcctanagggtccacacttangcaatcaagaagcttagctcccaactctctgggtggaggataaatgaacagcgcttggcaatgacattcatggggctccgaataaaagtggagaatggagaaatggcgtatagagctaggcaatcacattcgcggggctccagactcgaaggtggaggacacatgaacagcgctaggcaatgacattcattgngctccgaaaaaaagtggagagtggaggatngcactanangctccacacctangcaatcatgaaacatagctcacaacacgaaggtgg

SEQ ID NO: 275851 - DNA, 298 bp, Glycine max
agcatgacagaacaattctctatccattcctatccatacaaatcatacaatttctcattcaaaccattctcaaacactcatttcataccaaacaatccactgcatatcattttcaatcaattcactgttcaaacatgcttttggtacaagcaaacaactcaaagcgctgaaattttaaataacttaaacataaaaactgaaattgactgaaattaaaataattgaacataaatcataaaataactaaaaataaactaaaatgttcaacatgcacaaatttaaatgtcctgctcattat

SEQ ID NO: 275852 - DNA, 403 bp, Glycine max
  unsure (1)..(403): unsure at all n locations
tgcactcaatgtagatgtgacccagatgaatctccgaaggacttttataatgtcacaagggatatacataaccaaaaattgactacaaattataaaggaggtctattntgttgtcaggacaacttacaatgcaagcaaatagagggttttcaaggttcaaggagaatggtttccttaagatacaaaattagttgggttgattggaacatataccaaataccagttaaggtttacatacttgattccaccgacaaagtgaggtcaaatggttccaaaatacttcatgattgtctggtagataagttnttcaagacagtactctatgataaaacaatatacttctcaatcttattagagtgagtgaacaaaagtaaatcttaattccttgcaggcagagtatacc

SEQ ID NO: 275853 - DNA, 418 bp, Glycine max
  unsure (1)..(418): unsure at all n locations
agctntgtgtaatcgattacactaatttggtaatcgattaccagtgattgtttctgaataaaatcaaaagatgtaactcttcaaatagtttttgactttttcaaattggtttttaagtttttctaaaagtcataactcttctaatggtcatcttgaccagacatgaagagtgtataaaagcaaggctttgttttgcatttcgataatcttgaatacttttccaatcaatctcttacaatcctttacaagccttgaatctctttgaacttcttcttcttctttgtaccaaaagttctttgaagttttctggttttccaaaccttgaaaacttgtgctattcatcttttcattctcttctccctttgccaaaaagaattcgccaaggactaaccgcctgaattcttttgtgtctctcttc

SEQ ID NO: 275854 - DNA, 347 bp, Glycine max
  unsure (1)..(347): unsure at all n locations
cctcatcgtctctcacagtctttagaattgggagccaatccaatccttgtgtccggactctcagccacttatgatagccgccgatgctcccattactgcttcccctaagctctntgtcctttcttcacgccgcatcccatgccttgcgaactccttggagtaccctcgcgttgtggtcactaaaacctcgtgcgatgaaaggcgtgatgctttcgtctgatggcactcctctcatgggacatccttcgcatgaagattgaatcctgattcttccttccttctagcgagggaaccatttaacaaacgcccctccatgctagccaagagttggtcccaattcgtctttc

SEQ ID NO: 275855 - DNA, 415 bp, Glycine max
  unsure (1)..(415): unsure at all n locations
agcttgtaatcgattacacatatactgtaatctattaccagagaaaattntcagaanaatattctcaacagtcacatgtttttacttggttcttgaatggccatcaaaggcttatatatatgtgacttgagacacgaatttgctaagagtttttcagaacaaaagggtcttatcctcttaaaaagcaaaatcgttttatcctcttacaaattccttggccaaaacacttgtgattcaataaggatctatttgagtgctcaaattgttcaatctatctctttcaagggagattacttcttgtcttcttctttattctgaaaaaaggattaagagaccgacggtctcttattgtaaagaaatctgaacacaaaggaagggttgtccttgtgtggtcacatcttgtatacgctttaca

SEQ ID NO: 275856 - DNA, 293 bp, Glycine max
ctggcgagagtgtgaccctactctgtgactgaacgacttactgtgaataatgatctttgcataaatctctgaattctagaatgatttggataattcagaacatgatgaaggccatgaattggatagacacaagctcttttgacccaatagcttaccttgaatgatacttggatcttttgctcccttggataaaacttattgatttgtcatgaattgaaccataaactctgaatgattatctcttaataccttgtttagattctaggagagcatatggctcaaggcaaatttac

SEQ ID NO: 275857 - DNA, 436 bp, Glycine max
  unsure (1)..(436): unsure at all n locations
agcttcaacaatgcatcactgacagctnttttctccatctgcaaaattattttgcaagatccagtgattaataagccatgaaattgggcaacatgaaacaaaaaataaactcacttctgaatgaagaaacaaacaacacgtaacacacctgatgcttttcaagcaaactgagaacatcacttctggccttcatctgcttctctgttgctaaaattagtgattccatttgcttgacattataagttaaatagttcgtattaatattgatattctcattaacaaattttatgtcatacaaattcaagataagttaattaaaaagatttacgcttttctttacttcctcaaattttctcctttgttgtatagttgactnttcttgttcaatcagctcgtgacaccagcgatcgagttcatcattcatggtatctatctc

SEQ ID NO: 275858 - DNA, 266 bp, Glycine max
  unsure (1)..(266): unsure at all n locations
agaagtggaactttgaagtgtatctcataagactttcattcatcaaagntacaacaagtgttacacatgcttctatttatagactaggtagcttcctttagaagctttcttaagaaaacttccttgagaagctttcttaagaaaacttccttgagaagtttttttgagaaaacttccttgagaagctagagtttagctacacacacccatctaaaaactaagctcaccttcttgagaagctagagcttagctacacacacccatct

SEQ ID NO: 275859 - DNA, 413 bp, Glycine max
agcttcggaagaaagtgatgatgtacaacccctataggcagagcttgaaagagcctgggtagtcgaagagaagttcaagtccatagccatcaaagtctgaaaagagtatgatgaactaacggatgtcaatatggccaccgatgaagccttggaatgagaaaccaagaacgcccgaaaggaagaacacgaccaaagcaaagttttgaggggctttatacggcaccaatagtgagctcaagctctgaagaggtgaaaggaatcatcacgggtcaaaggcatgatcttgaaggacgagctaaaggtttgccttatgtcgaaaagaaatttgtcccaacagttaagcgagactgaagggaatatgtgggccatcatcgataagtgcacagagaagctaaatctagcggcgactcacg

SEQ ID NO: 275860 - DNA, 281 bp, Glycine max
tgaattgatcaattttatgatgtgagtgaattggaatgcatagatcatatgccttgaatgagcatgcagtcattataagagaaagaacatggaattaggatcatgactgaaaatgttagttggtttgtgaggttgattgtgaaggaacgcattaaccgcaacccgatgagagtgtgatctttaattgtgagagaacgactaacagtaagtaatggtttttgatgaatctttgatatggaatgaatgcatgagtttgaagatgatgaaggccatgttttaat

SEQ ID NO: 275861 - DNA, 437 bp, Glycine max
  unsure (1)..(437): unsure at all n locations
agctntagacaacttgtgtaatggattacgataaggctataatcgattaaaacaaagagtttttccttctgaagaaaattttctaatttacaaaattttcttctcacttattcatgatgatgcatgatgcacaaaagatatgatatggactaagatgcaacgtatagtataacaaccaatacaaatgccactcaagggagttgggcatgtaaaagacaaaacatcttcaagcttttctccaagcttcaagctttagtcttcatgttggctcccctatctctaaccatttgcccctttctggctntgatgatgcccaacttgaatatgacattgagtgcatttggagggtccgagtctcgagattagagacttatttctcttagtcaatcctggatgcttaagacaaatcatttatatcatcatcatatatcttacta

SEQ ID NO: 275862 - DNA, 294 bp, Glycine max
ttctatggtgattttccaccatggagatgcagcggaagataaaggagaagaggtgagaggaggcgccatccactatggaataagccatggaagaaagagcttcaccaccaagagagtgccttggataagaagcttggagaggaaacttcaatggaggaaaagaaagagagagagaaagcgagaaggggggagcatgatattgaagaaggaaaagaggcagagaagttgaactctgaagagtgtctcacaagactctcattcatcacagttacaacaagtggtacacatgcttct

SEQ ID NO: 275863 - DNA, 448 bp, Glycine max
agcttatccagatcgaatgacaaagatggactatactttaacacaatatatgcaaggattcagcacaaaccagaagaagactgatgcatctatgacaaatctacaagttcaagtaagacaactgtgagaataactatccgaacatggtagcggatctttctcagcacccacacatgtcaacttaacggaacattgttatttaattaccacaaggctggggactatgggtggcttgacggatcttgatgaacttagaataataactgagttgattaagagaacgagatgaatgatcatgtgatgactactgaaaaagtggacgacaaagtggtaatgcgaataagacataactaaatcacgtgaactaaccagtaatagcggtaatgctatagtataccatccaccaatcgagcatctttcttatccgcacgctctgtctatgaaagat

SEQ ID NO: 275864 - DNA, 455 bp, Glycine max
  unsure (1)..(455): unsure at all n locations
agcttgatagcaaacaatcacatacctccattgagccagataaggagaggcttctttgatggttcagattcagtttcatataagtagagttgcggcagagtgaaggaccaaggtatgacaagtgataactgctaaataatagtgaattaatagtggaaaatcggtctaaaattaacttagaattaattatttagcagttatttatgctttaatttggaaagatttaattaatttcaaattttgattgcagatgtgaaaaagggaggtataacaagcaaaaaggagcagaaataaaggaaaaaagaagaaaatcagaataagcccaagcccaagtttgcacctataaataagagggtcagcctaggaaaacaaacacactttctgagagctcagttttcagacctctggcactcagntctctccttttnctttccttttcttatattcttaatatc

SEQ ID NO: 275865 - DNA, 458 bp, Glycine max
agcttggttctgggcaatagcaccccacctgacgtccccaaggtctcctgacccccgtgacatatcctcaggtacccgtccatatgtgatactaggtggcgatcgggcgatggcgcaaaacaaatatccgatttccacaagcccaggcgtaagcacaccatccccagttgcccacctttaaattgagctcacgtacacgtaggtagcccttctcctcattcctctcaacaccgggttcccatcaacccctccaagccttcacaatgtcaaatcaattcaattccatttgacatgaaactaccttggaaaaaaaacggagtggaggcagaaatctttacacaagattcattcgaattccacagagtttttcctaccaacatacctcagtaaagtcctcatccctgattcgttaaccattggattgccttgaaaatataactgcgggttcctaatacaga

SEQ ID NO: 275866 - DNA, 286 bp, Glycine max
tttggtgattacctagatgatgaccaaaaccccaagagaatgatttcaagattaagttaaccagtttccagaatccagagaagtttgatttccagattccagaaaagatgaactcaagattcaagtgaagaaatccagaagacttctaaagggaagtattggaaagatttttcaaaacacaaacatagcacagttttggttatcaaaagagtttttctcataattgtctaagttactagaagttttactctctggtaatcgaataccaatttcctgtaatcgatta

SEQ ID NO: 275867 - DNA, 445 bp, Glycine max
  unsure (1)..(445): unsure at all n locations
agcttggctcacacctatgtctctntaacatttactccaatgcatttagattagctaaaagactgaactcatgagtcatgaattactttaagatggataatgcaacctttctattgaacactcgatgctcggcgcatcggaagacgcaacatgtggttctgtcattgccaatccagacctaattgtcccatcaagcctaggaattagccattcttgtagttgttctttatctccatagcgcagtaatacctaaacgtaacgaactgctacgaaattagacaaaaatgcaccatagatagagcgcatgctaaatatgatcaacccacaagagaatccaattaagttcagtcagttattgatcaaccaagcaaatccatgagtttcatcttacctccatattacctggtgcacgtgcaccacaactaaacactcgtggagcccaaag

SEQ ID NO: 275868 - DNA, 477 bp, Glycine max
  unsure (1)..(477): unsure at all n locations
tggccgtgtnttttgatccatgctattacgngacacttagaatactcaagcttctatgctacagttgcaccaagaatggaagcacatggattcatttttttttgcncaatcatggtcttccaactgaaaaatgacacacttttaaattgttacaattttccttttgaatcattttatcgaagagtattttttacacatagacatttggtattttttttcggagaataaaaatagtatcagatattacataatattcaggtagttaactctaataagtagacatttggtattgtctctaccaaatttaaatcacacaatattttactgactttatgtaaaaacagtatacagtattgcaatgctttacctgcaccgtcttggacataattatcagtttgaaatgactcagcacatcttctatttgactttgcaaggatccaactgcatacacaaacaaatctctaaaaaagaccgttg

SEQ ID NO: 275869 - DNA, 441 bp, Glycine max
gcttacattattaaagaccttcgatctccatgtttgctatgtttgcgttctgagcgacttgcgaggcgaactttcataactttactttgattttcatgttggccattgtgcaaatctgtttgactggatacatcacacaaccttagaccttagcatatcttatgcttattttatcctttggcacaccatgtatatcatgtacttactttatatggtcttctgattagctgctcacataagcttacatttttattgtgaatcctgtgtatgccatcgagctgcgtaaattattatttgaagcctcagttatatctttctaaaattatgttgtccatcttagtgttcatgtcagatcttcatgataatgcgacgcgtgcatcaatttatactcatagtttgcagagaaatcctcatttggagactgtcctaattctcaatttc

SEQ ID NO: 275870 - DNA, 546 bp, Glycine max
  unsure (1)..(546): unsure at all n locations
aggcccgtntttgatcatcattacggccatganacttagctcttgccgacattctttttacctccgctgatnctnccttctcactccattcctctcccctttgggatcactgcaatgcccatcaccccaaaccaaggcagaaccaccagatttcaagacagcaaccttgccaaacacagcataattccacttggaaccctncacaagctggcacaaccgctgtcggagacccgggtcagtactgggcgatggcgcaaccacaccggaaaagacactattggaaagtgcggaaataaagaacgcaacagnctcttgacccagcacagactccaacacacccttggtcttctcgttcacacaaaacttctcacccatcatcttttttcacaggtaatatctcataaatctcaagaccaaaacttttttcanaacccggttcacagagatctcaactgagcccagatttccanaaaccccccaaatttgcttataaaccctagaaatcaactcttgaaacatcccactanaccacnatttgtgaaattg

SEQ ID NO: 275871 - DNA, 390 bp, Glycine max
  unsure (1)..(390): unsure at all n locations
agcttcatgatgaatcaaatgtgtttgatgataacaacgatgataacacaagatgatgacaaaggtgataacaaaaagctcaaagatcaatcaaagaactcaagtgaatcaaagatcaatcaaagaacaactcaagtgaatcaagaaaaattcaaggtttaagatctcaagaatcaagatcaagattcaagactcaagattcaagaatcaagagaaggctcaatcaagataagtatgaaaagcttttctcaaaaattgaatagcacatgatttttctcaaaacatgtttaccaaagaattnttactctctggtaatcgattaccagattggtgtaatcgattaccagtagtaaagttgttttcaaaaacgtttcaaattgcaattacaac

SEQ ID NO: 275872 - DNA, 318 bp, Glycine max
  unsure (1)..(318): unsure at all n locations
cattcccattttgtgttatatcatatcaactgtgctgtggctattcatttactaattntagtctattagtttggtgctagagaaacgtgattttcttgaatcttcaacgagatacattaataaataagcacatgttcaattcacgtatgaaggagtgataatcactggttatntcattagtcattaccctagttatctaatgttaactnganatgaagttctagaatgtgtctggagatttggagagtcatgtngtgtcagaagccttggtgcacatngtatgtagtatgtgtgacatactatactccttatcatttg

SEQ ID NO: 275873 - DNA, 515 bp, Glycine max
  unsure (1)..(515): unsure at all n locations
gcccgggggttgatgantcctgcattacngctctttgataccagcctatcattatgggctatattggaatttgtgcctactttacccatctggcctgtgcanggcctatatgacactgtagaacttccaatggagcatggtagtagtcgcttgaaagaatagaaaattatctttaattctgtcaaaaattatcttggaccaattctgccctttcgagggtcaaattgagcttagaagtcaaaatctctgcacttgaataattgggcagaatttgggctttgctttgtgtaattaagttaattaggtggattagatgagccttatcaaggctcatcccttccttcttagtagtaaatggctatattggtggaaagtagctcgctaagtagttaagtacttcatgttgtgcaagctttaggatcaaaatctttctctctcttctctcattgtcttcatcttctcctctttcactatgtcctcctttttctgacaaattgtgctctctctgtgagata

SEQ ID NO: 275874 - DNA, 266 bp, Glycine max
  unsure (1)..(266): unsure at all n locations
ggacactactcttaaagcaaaaatggcatataaccttcttccataaatacaaacatcaatgtaaatttagagcaagcttatgcgcatatttccttacgaacgttctcttgcacaagacattctattaactaaaaaaaatgcacccctatacaatcaaggcagcttcgttacctagattatttacacgtacttccaaggtgtattttgtacttacatcacacacatctncttggctaaatttacatacatgcatactcaaagcattt

SEQ ID NO: 275875 - DNA, 379 bp, Glycine max
cagctctgcttcacaatctctttctttctgatgatgacaacttctaacatcatgaaacatacacacacacacacacacacacactttctcctactcgatcactcttataaatactcccccttcgccttcgaatctacgctcatcttaaaattaaattgattactcatgtgagttcttgatttatccctattttctccccctttggcatcaacaaaaagctaaagtgcgtatcaaacttaaagtatgcaaatatctcttatacattcataaaaaaacatcaaccacatcctgaagtcaaaagcatgaagcaacagtcataaatagattaacttataaaacccacatacgcaaataacatacttgttcaaccaaaccattc

SEQ ID NO: 275876 - DNA, 442 bp, Glycine max
  unsure (1)..(442): unsure at all n locations
agctntgagagggagtttgggacttaccgagtactatagaagattcatttgcaactatggacaaatagctcgacccctagctgatttattgaagaaggaaaatttcaagtggactactaaaagtattgaggactttacccagttgcagcaggctgtcaccacagctcctgtactatcaatgccaaatttctcaaaaaaaatttccatataatgtgatgcatccggaaagggagtaggggctgtgttaactcaagaaaaaaggcctattgcttatttcagcaaggctctggcagattcaacactcactaaatcaatntatgaaaaggaattgatgaccctagttctagcaattcaacactggaggccttatctcttacgtcagacatttactgtngttactgatcagaagagtctaaggtacctcttggagcaaaaaataaca

SEQ ID NO: 275877 - DNA, 134 bp, Glycine max
atcaaaagatttgtggttgcatattgactaacactcgatcatcttatagatggatatacaatcttagcacttagtattttctctcaaggtgttcaacgtattctgagagttttacaaacatttataggaatata

SEQ ID NO: 275878 - DNA, 197 bp, Glycine max
tatattgctagagtcatgtcatacaaacccttaatttgatgcaatctcgcacgatgaaataccagcgtcgcgccaatatatgaccacattcccgcgcttcacagccccatagaagacacaatctctcgtgtatagctatacgcctatcgctggcatacttactggtcgagatgactacaactcccaacggacgcacg

SEQ ID NO: 275879 - DNA, 234 bp, Glycine max
  unsure (1)..(234): unsure at all n locations
tcttctggagggccaagtgggcttggttgctatttgcattcccatttttactaagtacacctccctgccttttttggtgattctttttttgtaaaggtacagaaacttacgaatntccgaatgatacttggtttctttccgtaatgttacggaaccttgcggattacataatcatccccttttttgacttacggaatgttacgggaccttactaattgtgcaacgatgcttcca

SEQ ID NO: 275880 - DNA, 534 bp, Glycine max
  unsure (1)..(534): unsure at all n locations
tgacgtgtcnaatgaacccttgnangacgngcncnttttgatccgctatgcttttcgtgcactattgaatatctcagcctggccacatgatccaatgccagttgcgctacattatgaaatgaagagtgataacgggcggtnacacactatgccatacattntctcacaatatttattatgaattaaaatttatttaaaatattagaataccggtgaaacttctttaataaaaaataaaattttggtatttctacttaagtttaatccaccatagaaacacatttaaagtagtgtaaaaagccgtgtactaaatgaatatattataagcgccatcccaattaaaaattcgataatatactctattatatcanagcattgatttctctttgggtttcctacatcattcctttanaatattntaatttccacttctatcnttttttaattntatgaaatttggcatgcaagacatgtgnccagattatatanatcaatcaagaaacanagccttgtctatattctgcaaaaaaaaaa

SEQ ID NO: 275881 - DNA, 447 bp, Glycine max
  unsure (1)..(447): unsure at all n locations
agcttaggttatggttcagtgtatggtttccttgagccacagtctatacaccacgcaaaggacagacgtgaagaatgtcaataatacattgaaacgtgggccaagtaatcacattgacaagtgtacttaggaccttacttgaatcagtaagtgaaattgatgtcattattgtgaaaaagtttgcattataagttctttaattacatttttttacttcaagacacattgacaacttcttgttatgtgtccacgggacaatattgttgtttgattttcttctttacgtaaaaagcctgatgttcacatcaaggttgcaattaacaggttattgttaaaattataacaaatttattgtttaccaagtgtagtatagcaacaaagtatcttctgttatatacgttnttggtattctggaaactagtgcaatgaagaaattatncagtagtt

SEQ ID NO: 275882 - DNA, 133 bp, Glycine max
  unsure (1)..(133): unsure at all n locations
agcttgaatcggatatccgtgtganaagntatgatcatttgatttctcaagagcttccggtggtcaatttcgagcctggcgtcatattatgcgccccaatcggacatccgcgcgaaaaggtatgaacctttga

SEQ ID NO: 275883 - DNA, 542 bp, Glycine max
  unsure (1)..(542): unsure at all n locations
cttccttccttcatactctactatgtnanttnnntctcnnnnnctnaccggcgcgcgctgacacatgaaancctggatccacagtcactgcagctgcagcttgcgaaacctaggtcctcatttagagagttactgactngttcagcgagcgccgggtgctcacaacacgacgagggatccctcttcttgtgtcaggaacaattattctgcactctcaatcctatttgcgctaaggcttttccataatggctggctaaacattctcgctggggatttcctaagaacacttgacgtaatcacctctaatatctaattaattgagtgtacagctaacgcgactttagcattgggaaatgtactattcacttcgcctcagcttagaatctccatgcctcttggtccgaacacccatttccgtgacagttaggggacctctacattgcgacatgtctactcacctataactcgatcaagaaggcatgaatcacccctttccctggcgggactgtgggtctccgcctccttaaacgccgtcctgaacc

SEQ ID NO: 275884 - DNA, 368 bp, Glycine max
  unsure (1)..(368): unsure at all n locations
gttctcatactctttcccttctctcccaactgatccccagaagatgcaccaacacctgtggagaccttaacaacacccaccacatctccatcttttcccaaaccacaaccaacaacaacacccacgtcagcttcgcctctcttggctgtttcccaccatcccgaactcaaaacagtcgcaccaatggctctgctgtcgcttttgcgctctcattcgaccaaccaccacatccagcttagtcgtccgttgcctccatcactccgcaccgcccactgacattaccgncatggccattgccacgaaatcccttacgacaatgacaccatcctactcggcgacgcctgtcgcaagcatcagattcatccgcg

SEQ ID NO: 275885 - DNA, 435 bp, Glycine max
  unsure (1)..(435): unsure at all n locations
agcttgaatcatgcagccactctgctcttcaatccactgcttaaatctccaaatatacacttgcgacctctgacttagacttgagaaaacaaatccagcccattctggtgaaatcatctataaagatgatgtaatatttactctctttaagcgaagcagtcctttgacgttcgaccaaatctgtgtgaatcaaatgtagcttctctgttgctcttcacgttgattgtttgaagggtaatcttgcttgcttaccatattgacatgcttcacaacttgttaatttataatctaagtgagggaagccatgaaccaactgctttcgttgcatgttcagcacaattgcatgatgaaaatgacctaaccttttgtgtcaagcctctgtactgtttacagtanctggataggctgcttgctcctcctttagtgggtcaaatg

SEQ ID NO: 275886 - DNA, 384 bp, Glycine max
  unsure (1)..(384): unsure at all n locations
gcttctttgaaaggagtttgatttgttatgctttgttggtagaaattntcttggaaatattaatttcccttgataactggcccaatggggatttaccattaaatgcaactcatcattgggcaattatatgtatgtgagctgcaagcttgcaactgaaaaactcgatctgcaaaatttatatcatttagcaaactagatcgagtgactttcttaattattctagtctatgtatatccttgtagctctttcaagtttcataagattacataaaagttaaaactcctattttttatatnttaatggttntaaaatattacaataacactctntatcattctattntttctattntattattngaaatattatattatatcctctatc

SEQ ID NO: 275887 - DNA, 382 bp, Glycine max
agctttgattagtgctgtttttcaccttctcgctaagccaatctgttggcttaacgagcgtgcactaagcgcaacactcattggctaagcgcaagaaagaatctggaagaagatgagttgtaccagttcgctaagcgcaccgcatcatctcactaagcacaccgctttaatccatctgctaagcgagaaaggcacgtgctaagccaaaattcattaatgtgcgctaagcggttcaaagttgcgcaagcgcacgagcacgaacaaagtcacctatttaagcctgaaatcagatttagagaagggaagttgggctgcgattcagagctttgcatgtctagagattctagagagagaaacgtccaagctccacagagctctgaga

SEQ ID NO: 275888 - DNA, 89 bp, Glycine max
gacataatgctccacgtggatctacgaatgagtcgcatattatgaaaatagactccagagcgcatcacgactgatgatgaaagttgatt

SEQ ID NO: 275889 - DNA, 360 bp, Glycine max
agctctataacaatatactcgttcttcatctaactgcctttgggcttgtcggccacgattaacaaagtactttcgacacctactgtatgttgatttaaccaacgttgttatgggtatgttgcgacaattcttcaaaaccttattgatacattctgagagatttggtgtcatgtggacatatcgacgttcttctctatcataagtcatcgtccattgttcctttgaaatacgaataatacatgttgctatagctggactcaattgacgaaatctttctaaatcttgatcaaaaatgtgcttacacggagtgtagcctacataaaatttgtttggaacaacaattttaagtatatatgaaac

SEQ ID NO: 275890 - DNA, 297 bp, Glycine max
  unsure (1)..(297): unsure at all n locations
ccacactgctcttaatctttttgtactcatgcactcaagactaaaaggttgtgtacccccttggcccaccttagtcggcttagtgacaaccacacttgccttagtctttttgtgcttatgcactcaaggttgggagttgtgtaccttctcgaccccatcgtcgaccacactcacccttattattntcatgcttatgcactcaagattggcggatatgtacccctcggtccacatcggttggccctatgacaaccacactcacccttagtctttttgtgcttatgcactaaagactgg

SEQ ID NO: 275891 - DNA, 431 bp, Glycine max
  unsure (1)..(431): unsure at all n locations
agctntaggcaaattcaaacgacaataactttttactcggatgtctgattgagtcccgtaatatatcaagacgctcgaaattgaatgttgaacctatgagccaattcaaacgacaataactatttaatcggatgtctgattgagtcccgtaatatatcgagacgctcgaaattgaatgttgaagctttaggcaaattcaaacgacaataactttctactcggatgtctaattgagtcccgtaatatatcgagacgctcgaaattgaatgttgaacctatgagccaattcaaacgacaataactttctactcggatgtctgattgagtcccataatatatcgagacgctcgaaattgaatgttgaacctctgagccaattcaaacgacaataactctttactcggatgtccgattcagtggtgtaatatatc

SEQ ID NO: 275892 - DNA, 215 bp, Glycine max
  unsure (1)..(215): unsure at all n locations
cgagcgtcttcatatattacaggactcaatcagacatccgagtaaaacgttattggtgtttgaatgtgctcaaagcttcaaaattcactttcgagcgtctngatatattacgggactcaattagacatccgagtaaaaagttattggtcgtggaattggctcagagcttcaatattcaattacgagtgtctcgatatattacgggactcaatcag

SEQ ID NO: 275893 - DNA, 448 bp, Glycine max
agcttatatcaagaatgtcatgttttacttcacataaaccattagtccatcaacactctatatatttgttattataaaaactataggtatttttcaattatccatacatagcatattagaccctccaaatctaacactcttcttatgtatcaaggaccaataataaactaatatccatgatagaaatctaacacatacaccaataacttatagccaatctggttctttttttttgtgaatataaccaatctgttataacaaataattttgataaaagaaaatatttaatctctatctttcattattttaatatatctaatgattatattattaacattgattcactagtggattacttgatacacttcttcaaagattctcttcgaaaaatatgacttcacttccaaattaatatcttggcgctctcctctcacatccgttcttttat

SEQ ID NO: 275894 - DNA, 189 bp, Glycine max
gcgatggagcacaacaagtttttcacatccacaaagcgcgcataaacccaccattccctgttggccacctgcatctgagctcacgtactcgcacgtagcccatattctcgtgtctctcaacaccgggtgcccatcaatacttccaagcattcacaacatccaaacaaaacaacattctaacagcacagc

SEQ ID NO: 275895 - DNA, 385 bp, Glycine max
  unsure (1)..(385): unsure at all n locations
agctntgataagtgttgttnttcaccttctctctaagccaatctgttggcttagcgagcgtccactaagcgcaacactcattggctaagcgcaagaaagaatctggaagaagatgagttgtacaagttcgctaagcgcaccgcatcatctcactaagcacaccgcttcaatccatctgctaagcgagaaaggcacgtgctaagccaaaattcattaatgtgcgctaagcggttcaaagttgcgcaagcgcacgagcacgaacaaagtcacctatttaagcctgaaatcagatttagagaagggagtttgggctgcgattcagagctttgcatgtctagagattctagagagagaaaggtccaagttccagagagttttgagatat

SEQ ID NO: 275896 - DNA, 265 bp, Glycine max
tgcatcatttacattcttcctctttctcaagcaaattcttaattcttcttgacatcatcaaaatcttcatgatttacacaacacacaccccattgactcatccaacatagtcatatataggataaggggtcttccgagcaccggtggcacaagcacaagaggattcatgaggcaccgcttaatcctttcgaatgccactcgacattcatcgtcccattggacagacaggttcttacgcaataacttgaagagaggctcacaagtg

SEQ ID NO: 275897 - DNA, 413 bp, Glycine max
agcttgaaatgaggaagtgtggaagggtgatatcttcctacttttattcgttgaccacagagtggtacctggagatatgtcgcgggggtcaggagaccttggggacgtcaggtggggtgctattgcccagaaccttgtcagtcagtgagaacctgtgatgtacctaaacaggcgagctcctggcagtcaacagataaaaggaacaaagaccacaaagcaaggaggcttgtgtggtggctggccagctgtgaactttgagtgttatatgggatatggcctctggtaatcaattaccaagggtgggtaatcgattacaaggcttaaaagtgaagacaggaagctaagatggcctctggtaatcgattaccaaggggtgtaatcgattaccatgcttaaaaacgagatcaggaagc

SEQ ID NO: 275898 - DNA, 435 bp, Glycine max
agcttcaacattcaatttcgagcgtctcgatatattacggtacacaatcaaacatccgagaaaaaagttattgtcgtttgaatatgctcagaggttcaacattcaatttcgagcgtcttgatatattacgggactcaatcagacatccgagtaaaaagttattgtcgtttgaaatggctcagaggttcaacaatcaatttcgagcgtctcgttatattacgggactcaatcagacatccgagtaaaaagtcattgtcgtttgaattggctctgagattcaacattcaatttcgagcgtatcgatatattacgggactcaatcagacatccgagtaaaaagttattgtcgtttgaactagctcagagcttcaacattcaatttcgagcgtctcgatatattacgggactcaatcagacatccgagtaaaagttatt

SEQ ID NO: 275899 - DNA, 515 bp, Glycine max
  unsure (1)..(515): unsure at all n locations
gccggggtttgtgcatcatgactaccataaatctaagctactctgcgccaaatatatcatcggacgtgtttgttaatatatacgctccttcttcagacctangtcggtcgtgtgtcctggccgacctgggctatcatttcactctcactgtcaatatcagagaatcatgctttttatgccgatgtggtctcatgtagtcctggccgacaaaatgagaacatgccagactggcgaaacacaacttcggttcagatccacgaagaaacctagctcaactgcattgtgaattattgaggcgacatggaacatactaaacttgctatgacgctaaaaatatattatccgccgctgatctgaacaaaatcgcgcgatcgttgctgacatatattcgtctgcgctatgtaactgccgatgacagatatggtaattctatgtccccctgactatattggcatatgcctatacgatccgtcagccaggtcctcgccatcttgttatgacgctgcactgtctcn

SEQ ID NO: 275900 - DNA, 291 bp, Glycine max
gcttcttagtttcaaatgatgcagatgggtttgtagctacctcatgcactcctctaatgactatggcatcatttctggcgctaaactgctgggaagtggaagccatcatctcaattaaatttctagcttcagtaggagtcatgtctccaagggctccaccactggcagcatctatcatacttctctccatattactgagtccttcataaaaatattggagaagaagctgttctgaaatctgatggtggtggcaactggcacatagtttcttaaatctctcccatactcata

SEQ ID NO: 275901 - DNA, 485 bp, Glycine max
  unsure (1)..(485): unsure at all n locations
nntccctcatcatccacgtggctattctcttcttcttcctctccattgaagcctgcattaaagctccaaactttgctcaccatttctactccaaattgcaaaaggaagccatttttggagtcgtgaagcgcacctctacgttgtgggacttcaaatntcanggttgggtagacttcttcttacatcgaattcctgggtattgggtttttgggagatatgatgggtagttctactaaagttatgccttatggtagttatttgtgaaggaatttgttgaaagcatgctaaactcgtcatggttgatgtgagccacatntacccattctgtttcaaggtttatgatgatgctttgtgatgttnggtgctgacattgtgatagacactggtgagatgaagggaaaagtacttacggttaatgtgagaatgacatgtgacgtagaaagtgtgagatttacgctagagagctaacttgggtagtgagatgn

SEQ ID NO: 275902 - DNA, 441 bp, Glycine max
agcttcttagtctcacctgatgaagatgaattcgtggctacttcatgcactcctctaatgacaataacatcatttctggcactaaattgctgggagttggaagccatcttctcaattaaatttctagctacagcaggggtcatgtcttcaaaggctccaccactggcagcatctatcatacttctttccatgttattgagtccttcataaaaatattggaggagaagctgctcagaaatctggtggtaaggacaactggcacatagtttattgaatctctcccagtattcatataagctctctccactgagttgcctaattcctgaaatatcttttctgatggtcgtggtcctagaagcagggaaatgtttttctaagaatactctcttgaagtcatcccagctcgtgatggaccttggagcaaggtaatataaccagtcc

SEQ ID NO: 275903 - DNA, 327 bp, Glycine max
  unsure (1)..(327): unsure at all n locations
aacagccttctggatgaatcttctggagggcccaagtgggcctggttgctatatgcacccccatattttataaatacacccactgccttttttggtgattctttgtccgtaaagttacggaaactgacggatatcgcaacgatacttgtgatctatccgtaatgttatggaaccttgcggattacataatcatgccctttttgacttacagaatgttactgaaccttactaattgtgcaacgatgcttacttgtgatttccggtgcgtcacggaaccttacggagtgtgcatcaataccttctttcgattntcggcatgtaccggaa

SEQ ID NO: 275904 - DNA, 396 bp, Glycine max
agctgggacaatcggatctgactaggagttgattgctgtgttttattcaccaagtataaacattattaagacttgagagaaccttttcatttgacatgtccaattataagttggtacctatgtttacttttgtcgtggtatatttgtggtatcaatcttggactaccctgtttaacgttgggtttaatttttggtgcagtgtggttggagctactacaataggtattggattttatactatgatgtgggaacactctgaaaagaatgatatggtaaatgagaattgtgattttgtcccatcttcttcagctcctctgttgtctaccgaaaacatggatgtgtagctatactcgtggtaacagggaagggaatacttaacaatggttcatagttagc

SEQ ID NO: 275905 - DNA, 199 bp, Glycine max
ttatccctataaaaatgtaaaaaagtttttgtcgagaaggttttaacgaagcacacctaaacttatactatcaatgaatacatttttccaacaattatacttgtcatttttttttatagtaccctctcgaataccctctttggcagaggttgaactctacgataacaacatgtgtttcctctcgaataacttatttgat

SEQ ID NO: 275906 - DNA, 397 bp, Glycine max
agcttgcttctacaataccctaattgtgtccggcgataattgtttgttgacatgcagatttttgccggtcatgttgagttgcttaaatccaattatcgcgtgatccataagatttcatgatatttcagaaggaaatgagcaaaaactcaaaatggaggtgaaaatatcaatttagggggtgttcttcactcttaggctcatttaagcccattaggaagcctcaacatgaagcaaatagctcgcctaggcgagcatgttgcttctgaactaagccactagctcacctgcgcgagttgggtggcaagctcctccctctatttttgtataaataggcggcggaggctcacgggaaggggtgcagcacccttagtgagcaaattacactgaaattggtgag

SEQ ID NO: 275907 - DNA, 353 bp, Glycine max
  unsure (1)..(353): unsure at all n locations
gctctaagttgctgcatggaatgactatatgtctgtctggtggtcaacacaggagcacaaaccacatacccttgctacaggtacaaatgtttgattcaaggccagctgggttaccaagttaaccaatgcatccagtttgccttcaagcttcttagtttcagatgatgcagatgggttngtagctacctcatgcactcctctaatgactatggcatcatttctggcgctaaactgctgggagttggaagccatcttctcaattaaatctctggcttcagcatgagtcatgtctccaagggctccaccactgccagcatctatcatacttctctccatattactgagtccttcat

SEQ ID NO: 275908 - DNA, 398 bp, Glycine max
agcttaataaagccacaagaaaagatcactactcatttcccttcatggatcaaatgcttgagagacttgcagggcaatctttctactattttttggatggctactcaggttacaatcagattgcagtagatcctcgagaccaagaaaagacagctttcacatgtccctttggtgtttttgcttatcgccgcatgccattcgggttatgtaatgcacctgctattttccaaagatgtatgatggctatttttgctgacatggtagaaaaatgtattgaagtcttcatggatgattttttgatttttggtgcatcttttgagaactgtttagcacatctagagaaagtgttacaacgctgtgaagaatccaatctggtgcttaactgggaaaaatgtcac

SEQ ID NO: 275909 - DNA, 489 bp, Glycine max
  unsure (1)..(489): unsure at all n locations
catatagccattgattcgggtgttatgtgttgttgataatgtatataaacatactatgggttttctttactacgctatgtataaagctagagatgagatggttaggaggtttccgagaaataagatgagagtatagccttacttggtggtccttgatatgtgttgggatcataacttcacaaagatatacatgcaactggttattggttaaatccaccttgtagattcaatgttgaagaatatgattagcataagaacacccaacctagcattttggaacccattaatatgtatacacatgaagatcctgaggtgcgagataaattaaatgaaggcatgaggatatacaaaaatactaaaggagatnttgcaagacgagcgactgtacgtgaacagaacacgattatgccacgtnnatttagtgtttgatactatgataacnnatattacttgtgagttattgtaattagtcataatatattcattata

SEQ ID NO: 275910 - DNA, 413 bp, Glycine max
agctactgggtcacttggattatttcttgaggctaaaaattaaatatcttcctaacagatctatcaatgactcacaacaagtatgtgcgtgatttgctatcataaaacataaatggctgaggcacattctatctgcactcctatggttaccaactgcaaattatctaaacatggggctgatctatctcatgatccaacactctatatatcagtgggtgccttgcagtatgctatccttactagaccagaaatcagctttgctgttaataacgattgtcagaatatggttaatctcttggattctcactacgctgtggataaaacaatgttgagatatctcaagggtacacttggtcatggtctacttattcaacacgctcatgtttcaaaacctatcgcactttatgctttct

SEQ ID NO: 275911 - DNA, 466 bp, Glycine max
  unsure (1)..(466): unsure at all n locations
ctcanagaagtccatgaaggacagagcggccgaaggatctagttccgccccggagtacgacagtcaccgctttatgagcgttgtacaccagcagcgcttcgaagccatcaagggatggtcgtttctccgggagcgacgcgtccagctcanggacgacgagtatactgattntcangaggaaatanggcgccggcggtgggcaccactggttactcctatggacaagtttgatccagaaatagtccttgaattttatgccaatgctnggccaacagagganggcgtgcgtgacatgagatcctgngttangggtcagtggatcccgttcgatgccgacgctatcagccagcttctggggatatcgatggtgttggaagaggccaggaatgcgagtatggccgaagaagaacccgtctgatgggttcgatgaggaaggccatcgccaccttctatgtataccgggcan

SEQ ID NO: 275912 - DNA, 429 bp, Glycine max
  unsure (1)..(429): unsure at all n locations
agcttcgaagaggtgaaaggaatcatcactgttcaaaggcatgatcttgaaggacgagctaaaggcttaccttatgtcgaaaagaaatttgtcccaacagttaagcgagactgaagggaatatgtgggccgtcatcgatgagtgcaaagagaagctaaatcttgcggcgactcacgagcaaaggctagaggatgagtacgccaagatatcagctgaaagcgaagcaagggagagggtaattgattcatggcaccaagaggcaacaatgtggacggaccgatttgctcttactttgaacaggagtcaagaacttccccgattgctagccaatgccaaagcaatggcggacacctactccgcccncaagaagatccacggacttctcagctattgtcaacatatgatagacttaatggaccatatgattag

SEQ ID NO: 275913 - DNA, 552 bp, Glycine max
  unsure (1)..(552): unsure at all n locations
agcacgctggggnnttttgatgtccattcgcatttaccngncncntttgattacgcctagcatttacgtgacactatagagaactcaagcctgctcgtggcttctgtgagaatctagatccttatctacccatacctctctattgactagaataaactccgttaaaataattacggatgaaatgacacatcacaataatcccacatcaaatataagcaatatatatatatatatatgtatatatatgtatatatatatatatagatatatatatatatatatatatctatatatatcagggggatgctatcaaagcgaaagagctctaaaaatgaagctctgatagcacatagaagcgataatacatcattagatagatgtgagagtgtttatataaagttctgcatcatgaaaaaccacctacggatatatctctgcgctaccgggaggtgtctttaccacatagagagagattggggagagtgaacattatttgtggggtggtgtgccctcactgtaaaaactacattactcacattagtcatggtggtg

SEQ ID NO: 275914 - DNA, 438 bp, Glycine max
  unsure (1)..(438): unsure at all n locations
agcttcagctagagggagagtgttgagaatcaatatacgatcaattntagattatgtgtttattatcatatcagaattttaggaacaatatctcctataattaattgtaattaatctacataaaggagcatccgctatgtactgtaacacggttttcgtctattatccctctattttgtctcctattatacaaaatacaaacctaacctaataaatataaaattgcaatttacaagagaagatagtcgttcaaatataatttttggtcccaaaaatgtctttttagtcaaatataagatattcttggtacttgaagaaattcagccagtaaataaaccagctggtcatcagaattcacaaatgagatggtagctaactacaccagatttaatccccttacaaatgaagtggcaattaatttctatatttgctcatgga

SEQ ID NO: 275915 - DNA, 298 bp, Glycine max
  unsure (1)..(298): unsure at all n locations
tagggatgtaagatatggatgtataatatgtaaagagtttngaaatgaggagaggaagttattgagaaattaaatggatataatatttaaggagttgaattagaaattaatatggaagatttagttgagaaggaagtttgagaattagggaatatattaatttgatgtgtgtttaggatttatataggaattaaaatgaaagtgaagttaggaaattaagaggtaattttatatgatgaagataaggtataatattgataattgaattaaataggaatttggaattgaatgtatgatt

SEQ ID NO: 275916 - DNA, 521 bp, Glycine max
  unsure (1)..(521): unsure at all n locations
agcacgggggnatgatccctgcattccggcctttgaaactcagctggatgtggaatgggtttgggaacaggatgagaaattgttatatctatttttccaaagctacaccaaaaataaggcttgcaacattcaagtgttttctgctcttcggaaaggaagcatctcgaacacaccagaagtcataacgcagatcgcaacagtcagattgttcccggctggtctataaacctccagaccaaatttcaagatgatccaacggttaacaaattcaggaggttgtttttaccgagagagcttcangcagcttccttgagaagcttttctcgagagacttctttgagaagattcctcgaaaggctttcttgagaagttagaagtttaactactcacacccttcctataactataactcacctctagagataaacattgataaacaacacatcaataaattaacatcattataatactaatatatttacggtgtacatcctagataagaactaatacaaatactagat

SEQ ID NO: 275917 - DNA, 461 bp, Glycine max
  unsure (1)..(461): unsure at all n locations
agctntgtctgcagatccctcatttaagactaagtttcgatcatgcttcaatcaagttctaaggcaacagtacatttcccaatgctaaagtcacctaactgtgcacacaaatgggtgatcagaccaaaagcataccaacattaagcattgaatgaagaattgaacacagaaaacacaatcaattagatattatgtatttacatcaactgttcattaaaaatccccaactagggtgtttagccaatcattacaaagaaaccctaacaataaatgagattaaaagcatagaatgatagtttcttacacaagaagggggattcctcatcctcttctcagcatctcacactcactntctactcaataatctctctcaaatgacaaaacctacgcttcaatgcacacattgttcctctttgctgcttctagggctcttttccaaaataggcactgtggaatgatgc

SEQ ID NO: 275918 - DNA, 213 bp, Glycine max
gccaaaaaagaatagaggggaaatttccgatccaagaaaaagagaaggaaaatttcccatgaaagccaaaaagaaatgaaggaaaattcccccatccaagagtgggagaaagccaaaaaaggaaaagaaggaaaattcccccatccaagagtgggagaaagccaaaagaaaagaaaggaaaattcccaatccaagaatgggagaaagtaaaaa

SEQ ID NO: 275919 - DNA, 189 bp, Glycine max
agcacctgagctccgctcttatcggcaattcttggggtaatcctttttctcgcttttcctagggatgggctccccgggctttccttgcttccagcatccctggggaaatcccatgaggacttttgacctcaaaacaccctttaatatcttgaggatttttatccggggaatttggtaaaaatcccccat

SEQ ID NO: 275920 - DNA, 292 bp, Glycine max
agcattgggccgcatcagcaacagtatattggtgtctgaatgctatgaaatgagcagccttgctcagcctatcaacaacaacaaagattacttgtttgcccaaagaattgggaagaccctctatgaagtccatgggaatgtgcttccaaatcaggatcatggactacaagtgggtgtagcaacccacgggaagcagaattatcatacttacattgctggcaggtagtacattgatggacaaaccttttaacgaccttagataaccctttctagtacaccaatgtcttgactc

SEQ ID NO: 275921 - DNA, 359 bp, Glycine max
gtacttgtaaggacctgattactgctttcctaaggcaatatcagtataattccgatttggctcccgatcacactcagctacagaatatgttcaaaaaggaaggtgagacctttaaagaatacgcacagcggtggagagacctggcagcacaagtggcccctcccatggtcgaaagggagatgatcaccatgatggtagacaccttgccagtgttttactatgagaagttggtaggctacatgccgtccagcttcgcggacctagtattcgccggggaaagaatcaaagtagggttgaaaagagggaagtttgattatgtttcctccacaagtgccaatgttaaaagaattggagcaact

SEQ ID NO: 275922 - DNA, 240 bp, Glycine max
cctatgttgttgtggatgatttctccagattcacctgggtcaactttatcagagagaaatcagatacctttgaagtattcaaagagttgagtctaagacttcaaagagaaaaagactgtgtcatcaagagaatcaggagtgaccatggcagagagtttgaaaacagcaagtttactgaattctgcacatctgaaggcatcactcatgagttctctgcagccattacaccacaacaaaatg

SEQ ID NO: 275923 - DNA, 456 bp, Glycine max
  unsure (1)..(456): unsure at all n locations
tgcaagctntaggatatgtgttactaattaattttttcaaaaacttaaatttccaagttttaagactgttgggattttgataaaaagtatcaaattgatgaagtaacaaaatagtattgtgtgataactagataattaatagtaaattaaatagactatgaagattaagaattgaagtaaccaaaattaaaaggcaatcacattttgttaactgagaaaaattttaaaatttgagcttggaaattttcacaaatattttggtgtgtgcagtaaacaaaatctaaatcaatgaaagaaatttgtcgaggtttaagtttatcaaaccatcctaacatgcaatcactattnttttattcaaacaaacatttcttatcatcaacccacaatcttattcaaacctcttgaattagagtaaccaagtactagcattaagtggtaaaaccctttttactttat

SEQ ID NO: 275924 - DNA, 312 bp, Glycine max
  unsure (1)..(312): unsure at all n locations
tgaatggtgatgacatttgttgggccttggcaacactatgctttgataactatgctgaaccaatgagaaggtacttgcatacatatagagaggttgacgtagatcataataaggtcaatcttcaagaaaaagggaatagtcctgaagagaaagacgatgaattatttaaattgagcaatagaggggttgggctttgaccaattattatgcttatagtagacaggaactcgntaatccattcatactcatcactgattactgattagatgactagtatatttaagggttttgtgaggatgagaaaatatatgt

SEQ ID NO: 275925 - DNA, 432 bp, Glycine max
gagctcgctgcgtgcaagcatgaaaggaggctctaaatacatcttgttatgagtccatcatcacttaactgttaagagaatctaaaccccgcagctctcaatgcaagtgctcataatgtgtggttcacggatcaatcacttgaacgcataattagtgctatatgagcccgacggagaagctccacaaacgtttgcatctgctatgtcatcattcaagaccaataaaagtatcttgctcttgtggtattgaagaattatagataagctcttttaaatgtgtctcgtaagacagatgatttattttttagttctattagaccagaatataattatttatttcaccaagttattgcgtcttttaaatgatcttcatttaacattagagagcttatagctttctgtctctctctctgacacacacacacacacact

SEQ ID NO: 275926 - DNA, 425 bp, Glycine max
  unsure (1)..(425): unsure at all n locations
catgcaagctntgagctaaaatcctgactcaccatatttcttgacccacggtgagaatgtcaatccttactctctgaagcaaaaaagaatagaagggaaatttccaatcaaaaaaaaaaaaaaagagaaggaaaattcccaatgaaagagaaaaaagaaaagaaaggaaattcccaatcaaagagtgggagaaagcaaaaagaaaagaaagaaaattcccaaccaaagaatgggaaaagtaaaaaagaaaagaagaaagctcccggtcaaagaaactagaagaaatgtgcagaaaggtcttttgaccagacaatatctgaacaatacagaattgtcaccaaatgaacaaaaaaggaaggaaaggaaaccacgacctaaaatggtcttctctctttaattaccaaccaaaattccgtgcgctagcg

SEQ ID NO: 275927 - DNA, 244 bp, Glycine max
acattcacaaaacgcgcataaacccaccatcccctagtggccacctccaactgagctcacgtactcccatgtggcccatatcctcgtttctctaaacaccgggtccccatcaatccttccaagcttgcccaacatccaggtagatcaacattcaaacagcacaaactatcacagcccagaaaatagggcggaggcagaaaactctggccagaactcagaccaaaatcacagctttttctgactt

SEQ ID NO: 275928 - DNA, 437 bp, Glycine max
  unsure (1)..(437): unsure at all n locations
agctntctncactaagttgcctgatgcctgaaatgtcttttctgatggcagtggtcctagatgcagggaagaatttctccaagaacaccctcttaaggtcatcccagctgaaaatggacctgcgagcaaggtaagatagccaatcttttgccactccctccagagaatgaggaaaagcctttagaaagatatgatcttcttggacattatggggcttcatggtggaacaaacaatatggaaatccttaagattcttatgaggatcttcacctgtaagaccatgaaacttgcgcagcaaatgtattagtccagtcttgagatcatatggaacaccctcatcaggatattgaatgtacaagctttcataagtgaaatcaggtgcagccatctccctaagagtcctctcgcgaggtggaggttgagtcatgttctcagta

SEQ ID NO: 275929 - DNA, 556 bp, Glycine max
  unsure (1)..(556): unsure at all n locations
agccctgtnnnnttttttgactccttgntattacccgacactatagataactaaccctncactttattctgggtcgattgggtagaaataagagatatatagaaagaattaggatnaaaataggattgagatttaaagaaaagacaaaataaattattattgtgacaagtaacgtaatgcaaaaaaaaaagaagaaaatagttaagtttaagagaaagatgacagggtgttatcattaaagatacctgtgaaaaaaaataatccttangacattggaaacttcttttctgggcatacttttgcaagctaaacannacctctctagctcactgttttattgtactnaatgcggaaaactaaactcaaacttggcaacagagcttatgcacttctggaggtgctagactatttgncaatanatgagacaatgaatgaaatctgtatggntgcatatactcannattacanttgatgccactaaaaatttcagtagggatgtctgatggtcaatgcatataagtncaatcttgctactttaccatatctctagtagtat

SEQ ID NO: 275930 - DNA, 315 bp, Glycine max
agcttaaggagcttgttttataccatacaagcctttgtttagtttgaaaacatgataagcgtagatagaactctcaaactcaacggttgttccacatatacctcttgcttgattagtctatctaggaacacactttctacgtccatttaatgcagcatcataccgtgatgggcaacaaaggacaataaaatgtgtatttcctctatacaaccaataggagccaaagttttagtataatagataccatcttgttgcgagtaaccttcggctacaagcttagccttgttcctcccaaccttacatgtttcatcaaac

SEQ ID NO: 275931 - DNA, 65 bp, Glycine max
agagaagacacacaatttatgctctagagagctataaatctgaagttaatttaaatgatcaattg

SEQ ID NO: 275932 - DNA, 194 bp, Glycine max
  unsure (1)..(194): unsure at all n locations
tagattctacagttctgtaaattcaaatnctcatccngtattctttgttaacaagttgcactttcaccgatgaaatatttattgtgtgccaaaaggggacatattttttttgctgcatatgatttctaccccttctgatatgaattccaccacggactaccgctagtacttagtgccatgcctgatgacaacca

SEQ ID NO: 275933 - DNA, 245 bp, Glycine max
  unsure (1)..(245): unsure at all n locations
tttatttatntctcattaatcttattcaatttaattaaacaataatcatgatttatatcttaataaattcattgtaaacgtttcaccttatataatagatgatcaattataaaagtcgataataaaaattaatggaaaatcaatatcatatagtgtgaagaacaagaggatcaaatattacagtagaattttaggaagcagaattataatttaacctaaaacttatttgagtatttcttttcttc

SEQ ID NO: 275934 - DNA, 449 bp, Glycine max
  unsure (1)..(449): unsure at all n locations
agcttgtagaatggctagacataatacatggtgaggtttggtttggttcaaggataaaagggatgccccacattatttccatgacacaaatgcaaaaatgatgatttggaaattttatgcaaaactggtcatgcatgcacctatgcggacactcaagtgtcaaacttttatggtcatgtgatgctagggctcacgattcatttcctctattttagatcaacccaatgtttccaaaatatgttcttttatcaatttgtgcattcatccgagtccattttgggtactcgggaaaattttcacagcattcacccttcaggtgtgcacacattttttttcaacaactagctatgatcagcgaatnttctttttttcaaagaagagttggaagtcatctcttttcgaaagcatgttggtttttcagctagacaacttattnttctttttctctc

SEQ ID NO: 275935 - DNA, 391 bp, Glycine max
  unsure (1)..(391): unsure at all n locations
atcatatgtggtactaggtggttatctggcgatggtgcaaatcaactcttccacatccacaaatcaaacatgaacccaccatccccagttgcccacctttaactgagctcacgtatacccatgtangccctatactcgttactctcagcattcggtccgcatcaacccctccaagcttgcacaatatgcaagcaattcaatatccaaacatcatgaactatcctaaactaagaaaacagggcagaggcaaaaaactctgcccaaaacacattccaagaccacaactgtgcctactcaaatacgccagtgacattctcttcgttccgattcgttaaccgttggatcgacttgaaagtttactggaggttctagtaaataagctacattttac

SEQ ID NO: 275936 - DNA, 445 bp, Glycine max
  unsure (1)..(445): unsure at all n locations
agctgggcaaatattgtggctgttgaagacatcaatagattatacaaagacattgaatagtttgctaatttatttctatccatcatttgaatagtttgcatttgaaatcatatacaagatcaacattgaaaagtaaacgtaatttctttgcattttaaaatatatttaaatgatccttattttacttacaatgaaccttgtcgcaacctacccttcggcgggagggcgacgcatgactcgcgggtgcgtgttccaagaaaggaatacgcgcggagtcgccaccaacgtttatttgaggaaaacgtcaaaaaaactggaaaagacgtggtctacaaattttacgtgagaggttcgggagttgtatttacacacggngaatgttttagcacctcacacattcatcacaagggacggtagcctttaatcagatgagcaaatatgactt

SEQ ID NO: 275937 - DNA, 335 bp, Glycine max
  unsure (1)..(335): unsure at all n locations
caccgatcgtgtgatattggatgcaattgctctcatatgcccaatttaaccaagtcttgacgacacttcaaaccattctttgtcttgcctttaatggtaagaatggtcccaattgaactatcacagacatttttctgcacatgcatcacatcaatacaatgtctaacatcaagattggactagtaaggaagatcaaagaatagttaccttttcttccatatgtttggctcagacgatgctntctttngggtctgtccaaagacagctgtgatgtcattcacccgatcataaacttattttccttgcaatggatttggcacagtctcattttcctg

SEQ ID NO: 275938 - DNA, 458 bp, Glycine max
  unsure (1)..(458): unsure at all n locations
agcttggtcagggtggttctggtggtgtttataaaggttatttcaaagactcatacacctatgcttctataaagaggatatcaacaaattcagaatagggtttagaacaatacacaacagaagggatgatcattgaccaattgaggcacacgaatttggtgaaactcactggaattagggtatggggttggtgttcaagttcaacttcaaatctatggtcaacttaattacaccattgaatactgaatagccaacgagactaatcataatcataaagacataatgatctaaaattgtactataacttcttagcatctagccaataatatagtcatgcatagcaataattttccctacgcttactgaaaaggtaccatgattcatagctactcatattcatcctacaacattatgattnttttaatgaacatgaaatcaaatagttaataagtacatgt

SEQ ID NO: 275939 - DNA, 411 bp, Glycine max
  unsure (1)..(411): unsure at all n locations
acactaagcacacaaatctatgattcaaaacccctcaatttaatggattttcaacgcttgagaagtgaaattgagaatggggtaaatttggagcaaactctcacctcacacaagtctataacatcaatttaaactttgtcaaactggatttacacctaaaattccaccgaaccaaaatttgactcctcaacacccaattttaccctagaaatggctctttgttcactttggtcatttggttttctctctagcacagcccaaactttatcataagtcctaaatgacatttcaagctaggattaactcactttaacctncanataccactaaatccagattttggccttcactctagaacctcactctttttcactcataacaccatattctcacttctaccctaggtaactc

SEQ ID NO: 275940 - DNA, 392 bp, Glycine max
agctgcaacacctccctcgcgatgttaaagtgctccctactctttaaattgaagtttggtgtatttcttattgaacagagttttccagtttactgattcttgaattgcgaggttcgatgatgttgatatgagcatgaattgaagggataaatgaataacttggctgtgtgttgaagagggaatattgattaatcacgttttttttgttggtgagttcaggcatatgatgcttcgagattgcaaatttctgaggcggatggagaggctgtggagaacactatataccgtgttgcgtacaaaactaccaacgtaagggtgcacaaagcacttgatcctgaagaggctgcattgcttgatgatgacgatttgtcacggtcgggatctgatgttga

SEQ ID NO: 275941 - DNA, 275 bp, Glycine max
  unsure (1)..(275): unsure at all n locations
ctctttctacagctacttcaagatgctatagaataaagtcaaagagattaggcaaaaataggaccaatgaattaaatgattagttaacataaactcattggcataatcttttatttatttttataaatattacataacttccttgcttctaattccacttncaaacatatcctaaatatttttttatttataaaacattttttcataataattaatggatgtaatccaccaataacttaaaatagaatttaataatttagttatgaaagaaatat

SEQ ID NO: 275942 - DNA, 123 bp, Glycine max
atagtatgattgggaacccacgcgctcaatatatataagagtcgattcctcgcggaatgcattaaggggagcagcacttacactaatatggttagcagaaaacactgctactgtgccatcaaa

SEQ ID NO: 275943 - DNA, 387 bp, Glycine max
  unsure (1)..(387): unsure at all n locations
agctntgcatagcctcttcatatcttctggtatcgtcatcatcataataaacctcatttgatgtgtcatctacgaccatgaagcttaatctattatgtgcatggtgcactcgagtatattttctagaacgctcatgcgttgggttcataggttgttgaattggctctaagataggttcattaacctgatcttgaactatagcttgctcttgagccataattgtcggaagtgatgacctttgtggtacctttggaacattaaagaaaggtatctcagcttccatctcatagtcctgagttttttcattggttaattgagtttcatcaagcttaactttaccatgacttcttcctcctgcaagaaatctcctttctaaaaaatataact

SEQ ID NO: 275944 - DNA, 403 bp, Glycine max
agcttgatgttaagtgtgaaaagtgcaacatgttgggggcatcaagttagaatttgcaaaagtaattttcaacaaaagaatgttgttcaagttgcaaatcaacaagaagaaaaacaattttttgtagcaacaagttctacaagcaacaactcaagtgaatgttggctagtggatagtggttgtaccaaccacatgacccacgatcaagaggtttttagaaaattggacaaatcacaggtatcaaaagttagaatcggcaatggtgattttatcactgttgaaggaaagggaactatagccattgaaagttatgcacgtagaaaattaatttatgatattgtgcatgtacctgagatctatcaaaacttggcaagtgtgggacaatcaattgagaacgcgttaa

SEQ ID NO: 275945 - DNA, 288 bp, Glycine max
  unsure (1)..(288): unsure at all n locations
ccatgtatatcactagaacctggtgaatgaagtgaatnttcctaagcttggacatttctccacagcgccatttgtagtgacatcctttataactaagttgttattatgtgccaacatgtttgtgtttgaagcctattacaagacacactagatcctgtccctattacatgcctaaacctataacttgcactcaatggtccattacttgcaatgttaccaatctgattctcatataataatgaagacttgaatagtgatgatgattcttgtaccaccccaacttttact

SEQ ID NO: 275946 - DNA, 443 bp, Glycine max
tgctctacgagatactctggaggcgagctggctgcatgcactctctcgagatgttataggtctccatggtggttcacattgagttttgtgtatttctaatctcgcagcgtttactcagtataccgactcttgacgtgcttaagccattttatttaagtcatttctcgcttaaactggaaatataattaacttccaccgatcgttcgaattgcattatccgctaacttccgttaaaataaattgcgaccgtgcggacgagtcataaccaccgtggatatctgaagcaggtggaaaatgatgtaataatcactacacatcttttagtgaacaaaaccgccaaatcaatggggacgaatgcctttgggactgctcattcttaattgaattgacgagatcactaaagggaaactaaagctcaaatccactctgctagtcaagctcgt

SEQ ID NO: 275947 - DNA, 335 bp, Glycine max
  unsure (1)..(335): unsure at all n locations
cgcgagctctgaccactggtctttcttcccgcgatggcttttttcatgtccgcctgagtgggcttatagcctaaaccatacttcccacgatttccttgggtatttatcaagctagttatgccgccgttgtctttgcctaaacccatcccgggttcataaccagtccccaacataactcgggccatcattaccgctgcatcggacagacaaggtttgccaaagagggagtccacggaggaaatgctgaccacctcanaagactggaaagcggtttctaacgattcttctgcggcttccacataaggcatggaggatgggcagcttaccaagatatc

SEQ ID NO: 275948 - DNA, 395 bp, Glycine max
  unsure (1)..(395): unsure at all n locations
agcttctctgttcttggttaattattatattttgtttttaatccttgtatttggctatggttttatgacatttgaatacttagtatttcttttaatacttgcttactatgactgaacatgatgattttattgacttgctcttggttgcttatgattatgtgttttaaacttaattactttaataatatatgacttgtggtatgtacttacatttgatattgagctctatgttttttatttatttattcatatatgcttttttcgaatattatgaatgactttctggattatatgacattctatgaagtattatctttctaagattgatgaataggtaagccatcttgttcgattggtcctattctcgcgatttggnttatattatgacatatgaa

SEQ ID NO: 275949 - DNA, 288 bp, Glycine max
agacacactgctggcttctactgttagctataacagataccgagatctattctaaagatacacataattatgactcatcattataacactccccctcaagctggagcatataaatcatatgctccaagcttggaacatataacctgaatcctatgcccccttaagggtttagtcaaaatatctgctggctgatcactggagttaatgaactcagtgacaatatctttagacagtgatttctcccgaatgaagtgacaatcaatctcaatgggtttcgttctctcatgg

SEQ ID NO: 275950 - DNA, 535 bp, Glycine max
  unsure (1)..(535): unsure at all n locations
cggccggcgggcagttgannccatgaggaccctggattgactccgtcgtcgtgcccgccgatcctctagaagtgatcagcaggcatgctagctcgttgatacaatgccgcntgcagcatttgatgctgacctttttcatacctccattacacttggtggccaaacctctatgatgtataagtacatgagcccatacacgtcttatcatgaaaatgcacgtaaaataacatcttgtatcctattatgtttgcctaacacgattcgattaatcgccattcttacattagatgacggcattgaagctaatgtgacttagtccaactgcacatttcaaacattccatatgacctactatatacatctgacgagttcactgcacaatcatacacaatatttcaagctatgttgttatgcgatagccaagcacagtagagtctatcttcaatatgagagtacattagcaacaaagcacacatgcgtgtgtgagcaatacacagtacatttaagtaagaactatccgcatgtcaaagatctg

SEQ ID NO: 275951 - DNA, 516 bp, Glycine max
  unsure (1)..(516): unsure at all n locations
agccaggggatgatcatccatacggcccttgaacctctcttacggcacacttaagcgcacctaacgtagcttgtttatattaatttatctagaaagagtcattattaattggaatttatttaggggggtcattanctattttccatcatgcggcggtatatacctaactctttaatgtgaactagaccctttactttaaacaagctaaattcatgggacgcaaaatctcttaaaactttatacaagttaaaatttgctgcaaatcgataatagatacattanaatattgcgatgaccatgaccagaagacttaaatatgcttttactccctataaaagatgaaatattatttttagttctcggataaaaaaatctcgtgctgatccttgaaaatggttaatttcgcttcgtcgctgatgactatctaataacttatttgcttttttgcttatttaacaaaataagactatatattttcttatacaataacataaactatttttttagaaattaaag

SEQ ID NO: 275952 - DNA, 289 bp, Glycine max
  unsure (1)..(289): unsure at all n locations
agctcgtattggganagtatgacctcccattggctgctctcctaaaaattacaaatatccggacactctctatccatgagaaactaagaatcacgagagctcatctccgttgggtaattaagtaggttaccctgagctattgcagacctctttaatattcgccttcgattcctacggataacaagaaaacaagatgagaaactcggagaaaccaatcgaaggaaacgaatactgatgtacgcacatcatagcgaatagtagtgatcataccataaaagaaacacaagcc

SEQ ID NO: 275953 - DNA, 212 bp, Glycine max
  unsure (1)..(212): unsure at all n locations
agcttntatacaggtgttatgatgggttctgtatatcgcgactgcaagaacggttgcatattttgttttcaccaacacctgtatggcttttcttttttggaaattatatatgacttgaaccgtgtacatataaatatataacttgtaaccacttcagactcaagatctcatcatctattcatttctaagctcacaaaataactccataattg

SEQ ID NO: 275954 - DNA, 547 bp, Glycine max
  unsure (1)..(547): unsure at all n locations
cgcacgagnnnnnnatgattcccttgcatgtacgcgacccatttgaatcccctatcatgtacgcgacactatataaaactccagcttgctcgtccgatgcaatatttatgatggcccgagtgaagtatgtgagtgggtaccacccccgaatgggtttatgcatagacaactgtggcataactagcctggataacgccaaaggaaatcctgggaagtatgggttaggctattaacccaatcaggccggtgtatagagaaccactactgaaaggaaaagccgaagtccaaggtcgcgcgtgagacaacaaagcgaaggaagcccaccctgtcacataaataggagctttataagtgcgggtctacgggacgaaggtcanatcgttgcgatatacaaagatgatgttccgagtgcattgaatttgcacaaccgcccctcctgattcgacttgaaattggcagtggaggagcgtccgacatttacgcacaagcatatggtaaccctaccgtttaagacttatagtcggccacgcttatagtttcttttgta

SEQ ID NO: 275955 - DNA, 429 bp, Glycine max
agctttcgagaaattcaaatggtcataagttttcacacgaatgttcgattcggtgacataactcatctagacgcctgaaattgaacaacggaagctctcgagaaattcgaatgctcataagttttcacaccgatgtccgattcggggacataatatatcgagacgctcgaaattgaacaacggaagctctcgagaaattcgaatggtcaccacatttcactcggatgcccgattcgggaacataatatatcgagacgctcgaaattgaacaacggaagctctcgagaaattcgaatggtcataagctttcactcggatgttcgattcggggacataacttatctagacgctcgaaattgaacaacggaagctctcgagaaattcgaatggccatacgttttcacacagatgtccgattctgggacataa

SEQ ID NO: 275956 - DNA, 321 bp, Glycine max
agctgagcatgtgatgcccgtattattgctatttgagcacttaatatccatatccatatgagatatatctatctaaatatgaaaacttgccatgttcattcacaccaatatgtctcatgtgcaaatatcgcttctcagcattactgcctaagttcccttactatgaacctgaaaagactcaccttgattacttagtaaacaactaatcactcaattacctttatgagtgtcccatgcacgtaacatctctcctacatgctaaggtcgatcgcaatgctgtactacatctagatttaccacgccaggtcgtttcatcatcta

SEQ ID NO: 275957 - DNA, 274 bp, Glycine max
  unsure (1)..(274): unsure at all n locations
atgaattatccacattggcatgctgagaggctttgtccttcccaatatgtcctggaaacatggcaataccgtgccctttgtcctgngaaagagttgcagacctgcaaggaacattaccatgcaattctgtggagggtgcaacattaagattgctgggcttggctccatatagtgatgcagaacctgctgcagctggccaaaatggattcatcctcgcgattncgtggtgatacaaaatattgcgagcaatgtagcagtgggtggcacacctttt

SEQ ID NO: 275958 - DNA, 430 bp, Glycine max
  unsure (1)..(430): unsure at all n locations
agcttgtgcgaatcanatcactcctgcatttcatctgtaccatgcattgttctttctttacccactcctcacgtttggttttttatggaaaaacaccataactaaacgcgccacaaggcatccctatcgcaccagatccaaatctagaacgatgggtgatcaagaggagacacaggaacagatgaaagccgacatatcggctctgaaagaacaaatggcctccatgatggaggccatgttaggtatgaggcagctcatggaaaagaatttggccaccgctgccgctgtcagttcggctgccgaagcagacccaactctcttggcaactgcgcaccatcctccctcaaacatagtacgacggagaagggacacactgtggcacgatggcagccctcacctgggatacaaccgagcggcttacccttatgga

SEQ ID NO: 275959 - DNA, 495 bp, Glycine max
  unsure (1)..(495): unsure at all n locations
ggcgggggttgatcatgcattcggccatgtatctatctggcgttntaactagacaaccctntatgcgcactactttattgtttcccttcgtccgtttcatttcgtggctgctctcttttcctatatctcttttcttgctttattaagtatttatcatttggtcattacctctctcgaccttcctttgttaactcttttctctctganaagcctgggacaaggcaccactactagtacttttaccacaggtgaacgataaacgcacaagaatggtaggtcgtaatatggtgacgaaatagatgacagccataacgccgaaaatttgtaacagaaacgagccattatgatagtcatgttagtaaccatatgaacaaattgagatagtatgtcacacacatggcaatacagaaacgttatagcaactatagaataacgattgtcgaaatgcgngacctcggccgtgtctgttctccagagccgataatctgctctcta

SEQ ID NO: 275960 - DNA, 452 bp, Glycine max
  unsure (1)..(452): unsure at all n locations
agctgtggcataatcaaaacatcttggcgaatcatcatggtgactttgcttgcataatactcccctttgtgatgatgacaaacctgaaatcaagagatgcctacaaattattttctagtggctcactcactttattctccccctgtgtttttaagtttaagattcattttaaggcaagctaatgattgtatgaattcttgatttatatgaccccacatttttctccccctttggcatcaacaaaaaggccaaagtacgttgtaacataaaatcatacgcaaatggataaacatacaagaaatgtattcatacaagaagaaaggagaaacttataaaaatcaagcaagataataaatcatccacatatcataataaaaacatatgtatcanataagtcataagtcatcaacagtaaaacaaatcatctgtctaagtcacctacatctacaagt

SEQ ID NO: 275961 - DNA, 311 bp, Glycine max
agatgtctaaagttatatagtcatgtcaggtcttgcttttatagactcttcatgtctggtcaagaaaaccattggaagaagtatgaccttgagaaaatcatgtcaagagttacatctcttaaccttttattcaaaacatgtcactggtaatcgattactataatcatgtaatcaattacaccatgcattttatgaaaagatatgactcttcaaaattgaatttgaatttcaacattcagatacactggttatcgattaccaatatattgtaatcaattacatcattttaaaaaatatttggtaatcgatta

SEQ ID NO: 275962 - DNA, 418 bp, Glycine max
  unsure (1)..(418): unsure at all n locations
agcttcctatacgcttactccagatataaccagatcaggatgcatgctctagacgaggagaaaacaacatttatcattgaagatgccaacttttgctacagggtcatgcctttcagtctaaaaaatacaggtgctacataccaatgactaatggaccgagtctttaaatagcagatcgggcgaaacgtcaacgtatgtggcggacctggaagaagtctttggggaactctgcanatatgacatgcgcctcaaccttgaaaaatatacttttagggtaggcgaaggcaagttcctcggcttcatgatcactcactgggggattgaagccaaccccgacaaatgcactaccatactggagatgtgtagcccaaccaacgtccaagaagtncagaagttgaatggtagggctagcatcctg

SEQ ID NO: 275963 - DNA, 401 bp, Glycine max
agcttgacacagcagaaaaattctatgcttctaaggtaagcaatacaaacgtataatatatcatgtactgggtgaaatctaacaggtttctctgatcaactaatataaactacaataacaccaataatagtagcagtgggtatgcatgattttaattatgatctattactagcgctaaatttaacatgttaatcatatattggcatgtcattaaaggggttggactatatataatggtttattctttgggattataaatttgatacagttgtcatataattgtttttttcacactcagccaatataacatcaccctatatccgaatctattacacaagttgacgatattcaattgcataacaacttatgattgggctacaataaacagattttgcactgca

SEQ ID NO: 275964 - DNA, 267 bp, Glycine max
gtacagtaataacatatagtataaaatataaattatgtgtaaccttatcaatacaattaaattttccaccacaactacctgtatttaaggaccttccgcataaagagtagaaagagtaacatatagtataaaatataaattatgtgtaaccttatcaatacaattaatatttccagcacaacaaccacaaccacctgtatttaaggaccttccaaacttgtcaatacaattataattttcaccacaagaaccacaactacctgtatt

SEQ ID NO: 275965 - DNA, 383 bp, Glycine max
  unsure (1)..(383): unsure at all n locations
agcttgagatgaggaagtgttgaagggtgattcttcctgcttttattgttgaccacagagtggtacctggagatatgtcgcggnggtcaggagaccttggggacgtcaggtggggtgctattgcccaaaaccaagcttgaccaatcccgacccaacccgggcatagtcggtcagtgagaacctgtgatgtacctaaacaggcgagctcctggcagtcaacaaataaaaggaacaaagaccacaaagcaaggaggcttgtggtggctggccagctgtgaactttgattgatatgtgggttatggcctctggtaattgattaccaacggtaggtaatcgattacaacgcttaaaattgaagacatgacgctaagatggtctctgg

SEQ ID NO: 275966 - DNA, 303 bp, Glycine max
agcttcgacatcgccacctagtcatcttgatgggtttctgtgatgaacattcacagatggttcttgtgtatgagcacatggctaatggcccctttcgttctcacctctatggctccaaccttcctcttttgtcatgggaaaagaggcttgaaatatgcattggtgctgctcgtggcttgcactatctccacactgatgcaactcaaaatattacacaccctgatgtgaaaacaacaaacgtcctgttacatgagaactatgttgccaacgcttctgacttcggtttgtcaaaagctgtcccac

SEQ ID NO: 275967 - DNA, 354 bp, Glycine max
  unsure (1)..(354): unsure at all n locations
ttatgttaccttgatatgctaaaattgtnagaaggggaaacacgttccatgtcggccaagacttgggggagcaattggtcctcgatcttgtgatcatgttcctcacgtttaattctgtcttatgttgtgttttgcatgatacatgatatgccttacttttttcattttttattttgggatgtctcttacgagataaaggaattttgtagcctggtgaagaacctttgccaattgatccctggctcgtggttcctgacaagagcagatatgtcgatcaacaaaccttgaagatgcaagaaaatccagaggagtactaatacaagattgatcttaaaaacacttttaagtcacttg

SEQ ID NO: 275968 - DNA, 436 bp, Glycine max
  unsure (1)..(436): unsure at all n locations
agcttgaaattcctcaatcactatcaaaagaagagctgtgctgtacatactgccctgacaaaaaagaaagtggtttcctgatgtagtgttcaacacaacaacgacaaagagtagtttctcagcttgaagaagcatgtgcaattaatgcacacatttaattctccaacaaccacgtttttcatacgcaagcttaagaaagaaaatatgtccatttagagacaatatatactcgattgaaggaggcctataaatagaagaaactttgaagacatgaagtatgaatcgaacggctcattatttaaattctttctataaaaagatctttatgtaaattcttataaagttcaaaaaagctatganaacactttgctcatcttgagagaagagactaacgactaaaattttctattcatctgtacaatgatagtgttagtca

SEQ ID NO: 275969 - DNA, 396 bp, Glycine max
caccctaatatcagcaggtgcaaacaatcacaggttacttggtgcccacttaaagtggaattaaacaaggaatatacttaaagcgcataaaaaagttaaataatgctcaaaataggcaatcctagcttaaatcttaccctttccttgatgtcacccaaagttggcaagtacagcttatagaattcctctctgaatgcaaccacaaacctaaataaagtttagaaaccagcaagaataagacaattagaatctgtttgattttgaaataaattaagggacaacaagatacatctactatattatagtattttcacttttaaaggactaaagaacgaatatggaccataatggatatagtatcatttggatatcactaactcgctcttacttagtctg

SEQ ID NO: 275970 - DNA, 260 bp, Glycine max
acacctgatctgagcgatgcctaagcaaccaatgtttttcaaaagtacctacatgaatgccttactgctaagtgcattatcttggcatcaatgagctcaaaactccagaggcaacatcaagacatggacccatatgagattgtcgaacactctacaaagatggacggtggtcaaagcacgaagactagatttcagttatctaaggctctatttagatcctcacttgctgtgaatgaaaatgttggaccccatgttggaca

SEQ ID NO: 275971 - DNA, 479 bp, Glycine max
  unsure (1)..(479): unsure at all n locations
aaggcctatttccatgttcatatcaatatagaggctngaaagttggtctttatcaagtccatacaaaaacatttgaattcatttggctatttgggaaaaccattcattgttattcattctccatagttgcagaaatcactttggtgtgttgtgatccaatccacagtgagtttcaaacacaccggttgctgattccttccacagcatgttatgtcttagaaaaaatttttatttaagtcccaaaacacagctattataatctacgactacactaagctaacaaaatatatcctagcagagcggaattagtcaaaaacacgaacttgcgttagtttcctagcaaaagtcataacagtgaatagagtaatgaagtgcttaagtctatacatagcgagtaattacatgaagacagtcatgaatctttgagatcatggctgagagctcatnttctccatgaatacttcataggacctgcgtgg

SEQ ID NO: 275972 - DNA, 283 bp, Glycine max
agcttggttcgaggtacttacccgttgaagatcgaagaacgatgaagaacggatgaagaacgtcgaagaacggtcgaaaccttcgcgaaattcttcacggaaaacgttacggaaacgttttggaagtgcctcggcttagattttcttcacggaaacaatttttccaagcaaattcgaaagagagagaagtgcctaaggggcttaacccttttccttctcacttcctcccctatttatagcaaaataggggagatgcttgccgcccagctcgcccaggcgagca

SEQ ID NO: 275973 - DNA, 225 bp, Glycine max
  unsure (1)..(225): unsure at all n locations
atatattcatcaggaaaacatcatagtggaaggaaactgcagtgttgtgatccaaaagatccttccacccaagcataaagatcctgggagtgtaactattccttgttcaattagagaagtcaatgtgggaaaagctcttattgacctggaacccaatatcaatntgatgccactctccatgtgaagaagattgggagagttggaaataatgcccactcgaatgac

SEQ ID NO: 275974 - DNA, 317 bp, Glycine max
atgacaatgcttctgaaacattgagattgttagctattgggccaaagctaaatgtcctcacatggaaaggatgtgatatgaaaaaaatttccttctacacaaagtcacaggccaataagagtagagtgccaaatagcaggggtagtcttgatgttgattccttgcacttttctagtgcatcaaataataatcttaatcatgtgtccatgcctttctttaaaagtgatgaaaaaacctaagagccttgatatagtaaattcagagtgcctatttttaagtgtaagtagattaatggaaataccgatgtgcgacatgat

SEQ ID NO: 275975 - DNA, 352 bp, Glycine max
catcatcatatactctagccctgagtgcaccaaagaaatctgcaatcataaattgcataccattagtcttattgtaatgtaagaacatctaagagctaaatgacagctagagaaaagtgttatttagttgctattaaaaattgcatttatatgtaaattgaattatatttggtgtgatttatatatgcatttgtatgtcaattatttggataaattatgttgaactaaatatactaattgtggatttggataaattatgtggattagttaggattccaaagctttgttacaaattatttgaatgggttaattgacgaataaaagtaaatgttcttcacgaattcagatcatg

SEQ ID NO: 275976 - DNA, 450 bp, Glycine max
agcttagaaacttgctattattaattgtctaattaatatctaacatcctcccttaattggacaattcttctgcacaccaagtcttgctcgcaatcttcaaaaatcttcaaatttgagagacttggtgaaaatatctgcaacttgatcttgagtcttcacatgagtcaattctactactttcttggcaatgcactctctaatgaaatgataccttgtatctatatgcttacttcgttcatggaacaccagattcttggcaagctcttgtgcagatctattatcaacatagatctttgtgctttccttctgcaacaagtgaagttccttcaacaatcttcttagccaaatggcatgacatgtgcaagaagttgcagctatatactcggcttcacaagtagaaagtgtcacaatgacttgcttcttagaactccatgtaaaaacacaatcacc

SEQ ID NO: 275977 - DNA, 419 bp, Glycine max
caggctataccagacatctcggcaaccacatcaggttatccataactcacctagtctttttgttgcatgccatatggcagcaaaaccgctgatcttgtcaagtcaatgagctgcaaaatgaggccgcaattatactgtgccacttggagatgtattttcaccctgctttctttgacatcatgattcacttgattgtgcatctggtcacacaaatcaaatgttgggggcctgtttatttgcgggggatgtaccccgattgaagcgataaataaaagatcttataacggcatacaaagaatctatatcatccacaaccatctcattgttgagagggacattgcacaacgaaaccatcgaattttgctcagaatacattgagaagccttaacctgcggggcttcctgagtctcacatgatga

SEQ ID NO: 275978 - DNA, 434 bp, Glycine max
  unsure (1)..(434): unsure at all n locations
ctctntttctattattttatttaagcaatgccacatgtctccatttgagtggagcaagaagggcccactttctcttttgattgtgactcatactcatccacaaaaagtgagaanaacttgacctttgaaacgctaaaaatcctgcctcggtttgcgtgccatttatctggttccagtttctcgtgtttctctgcgtccgtcggggccagttttcgaaagtaatcaatatatatatcaaaacgctcagaataaagccccgaacgtggttcagaggttgatttcgttaaattctaagtcacacgcaaaacaatggtttttaaactaattaattaagaattaacccataacctcccaggtatggacttctcttccttaattagcctaacccttgtatcttgcccccactattcctacttctaccaagaacatatatg

SEQ ID NO: 275979 - DNA, 510 bp, Glycine max
cgcaaaccaaatgctcaccactactagaggagaagccctcacgttgttttgtataaacctccttctctaaataaccattaagaaaagttgttttcacatccatttgttacaactcaaggtcaaaatgagaaactaatgtgcagataatataaagagaatctttcttagatactagagaaaaagtctctgtgtagccgattccttctttttgaataaatcccttaacaacaagttttgccttgtattactcaatgtagcctaatgaatcccttttagtcttaaagaccccatttacatccaatgggcctttgccccattatgcaactctacaaggttccaaactctgttactctgcatggaattcatctcatcattcatgggatcataccataaatttgactctttataactcatggcttgatcaaaagtttcgggatcattttcaacctccatattatagtccaattctttgcaatataccatataattccctacgaatagctgactttc

SEQ ID NO: 275980 - DNA, 450 bp, Glycine max
  unsure (1)..(450): unsure at all n locations
tgcaagctntgatagtgtcgagaagagatcacaagtttgtcatcatataaaagggggagaatgtaaatgtatgtatacatgattctgatgatgtcaaaagaagaaccaaacaaggctcatttgcttcaagattaatacaagattgcttcaacaagcaaagccttgcttcaagatttacttaagatcaagccttgccttaaaacaaagtgcttttaagccattcaaggctctggtaatcgattaccaggtagtataatcgattaccataagacagggttgagaaatagctgttgaaaaggattttgaatttgaattttcaacatgtaatcgattaccatatgtctgtaatcgattaccaacaacgaaacttttgaaattcaaattcaaaagtcatgacccttcaaattataactgtgtaatcgattacancaaacattgtaatcgattacc

SEQ ID NO: 275981 - DNA, 421 bp, Glycine max
  unsure (1)..(421): unsure at all n locations
agctntaactgaaacactaagtaagtttccaactcaattgcatgctagtcaacctttaccctcatctgttttacaggttacaggttgcacactttgtggtggagctcataggtcaggcttgtgtattcccattgaagaaacatctcatgaagttaattacatgggaaaccaacctagacaaaattttaatgcaggtggattttctagattgcaacatggccaaccttactaggaacataatcaatggagaactcaccctggtaatcagttcaataaagaccagggtgggtcacctaacaggccacaacaacaagggcctaacttatatgagagaacaacaaagctggaacaaactcttgctcattgtatgcaggtgccattgactaatcataagagcacanagtcagccataaaaaatcta

SEQ ID NO: 275982 - DNA, 533 bp, Glycine max
  unsure (1)..(533): unsure at all n locations
tccatacaagctaccaaacaaaatataagtatgaactgaaatttaaaaactgaaccaaaatttaaaaactgaaacataaacataaaatgtactaaagacaaaataatataaactattcaaagtgcaagaaaataaagatcctgaacttgtcaatcatcttgtgcaacgtcattcaggtccaatgctggttcagatggtggatcctgagaaataggcaagtccaacacttgtgcatatggctcaggatcaggctgacgagatggatatggtactgcaacatcctcctgtacaataattggatcagtctgaaaaatgaagggctcacgtggagagggctctgagatgtcaccagaagcatccttctgtgcaggctaaggctcctgggctacagaagcctcaccccctaccaaaggagaatgctggactcctagccagggccaccttttgaagcaattcttcaatgctcataactcgctatcggggaaccacatcattgcaaccctacatgaacangagctggccctgatgctgtt

SEQ ID NO: 275983 - DNA, 417 bp, Glycine max
  unsure (1)..(417): unsure at all n locations
tgcaagcttatccctagaggggatggaccttttaggttntggagaggatcaataacaatgcctataggttggacctcccagaagagtatggagtcagcaccacttttaacatttctgatttaactccttttgcaggtggagctgatattcatgaggaggaactaacagatttgaggtcaaatcctcttcaaggggaaggggatgatgcaatcctccctatgaagggaccaatcactagaaccatgagcaagaggctccaagaagattgggctatagctgctgaagaaggccctacggttctcatgaaccttagggtagatntttgagcccatgggccaaggttgggtccaattatctttgtacatattagactangatgtcattatatttggtcctcgtatatagggctccatattg

SEQ ID NO: 275984 - DNA, 646 bp, Glycine max
ctctttgtgcgatctatatactctcctgctccggatcacaggctcatcttggtggtgaagctcgcccttccatggcttaatccctagtggatgagaccttctctcaccctttttcctttgtcttcccgtgcatctccatattggaaaatccccatttcaggacctcattgaagttcaaaaatccagtctccatagaagctccacaagcaagcttccatcagcttgcttctacattataaaggctatagatctaaatatctgggaagccatagaaattggaccttacattcccactatggtggcaggaaatacaaccagtgaaaaacctatagaacaatggagtgaggaggaaagaaaattaattcaatacaatttaaaagccaaaaatataattacatctgcttttagggatggataaatactttacggtatcaaactgtaaaattgccaaagatatgtgggatacccctacggtaactcctgaaggaacaacatatgtgaaaagatctaggataaatcctttgactcatgaatatgaattatttacaatgaattccaattgaaaccctacaagacatgcccaaagaggtctacacccctcaactaaatcatcttgcctctctcaggaaaaaaagtttccccatga

SEQ ID NO: 275985 - DNA, 457 bp, Glycine max
  unsure (1)..(457): unsure at all n locations
agctntgatggtgtcaagaagaaatcacatgtntgtcatcatcaaaaagggggagaatgtgaatgtatgtatacatgantttgatgatgtcaaagaagaatctaacaaggctgcttcaaatgataagcatttgcttcaagaataattcaagaatgcttcaacaaacaaagacttgtttcaagattcactaaagaccaagccttgccttaaaacaaagtgctttcaagacatgcaaggctctggtaatcgattatcaggaagtgtaatcgattaccagaaaacagggttgagaaatagctgttgaaaaaggttttgaatctgaattttcaacatgtaatcgattaccatatgtttgtaatcgattaccagcaacgaaactttggaaattcaaattcacaagtcataacccttcaaattataactgtgtaatcgattacacaaacattgtaatcgatta

SEQ ID NO: 275986 - DNA, 645 bp, Glycine max
  unsure (1)..(645): unsure at all n locations
tntacttatgtggcaaggcgggcttccttcaccttcttgtctccaacgcgaactttgaccattgttcttccttcccgcaatgcttcttttcatgtctgcctgagtgggcttatagcctaaaccatacttgccacgatttccttgagtatttatcaggctagttatgccggcgctgctttttcctaaacccatcccgggttcaaaaccgttccccaacataactcgggccatcattaccgctgcatcggacagacaaggttgcccaaagagggagttccacggaggaaatgctgaccacctcaaaagactggagagcagtttctaacgattcttctgcggcttccacataaagcatggaggatgggcaacttaccaagatatcttcctcgcctgacacgatgaccaagtgcccctccactatgaattctagcttttggcggagcggagaccggaccgactcccactgagtggatccaggggcgccccaacaggcagctgtagggggggttcacatccattattttggaaggggactggacaggggtgaaggcccatccgcacctggagaacagatctctcccttacctcctcggcgagtgcccgcaaaggcccgaaccaccatcgaacttgggcttaacgggaaac

SEQ ID NO: 275987 - DNA, 350 bp, Glycine max
agcttatcaatgagagagatagcaagcatcaaaggtgtgagaataacccttttgcgcgccatccctttgaaacagctccattgaagcgggaatgtcaagagggagctcctacaatttacaaagctgaaatgggctaattgtggtgagcgagagtgacctcctaatctgcttgaggtcaaagggtttgagcaatctctgccactctgtctcattggcactactactactactactactactactctcggcttcattgtgatcattgaaattggtttcacgggcacaggtgccaagtgggaaagaagggattatgaagcacagtagcatggctctattgacatggattgata

SEQ ID NO: 275988 - DNA, 499 bp, Glycine max
  unsure (1)..(499): unsure at all n locations
agggcaagagcagcgtgaaccctgatatcncccgccagcntctggcaagannacaancaatctacangcatgcatgccttcacgtagaatgcgtagacatgtacacatgtctgctggnggccaggntcaaagatgaactggatgctccctatgatttccacgacacaactgccagactgatgagtcgggtacctatatgcaacactggtcatgcctgcatctatgccggcgctcaaaagttgactccatacgcgcatgcggtgctagggctcacgattcattgcctctatagtaagagacccaatgcaccaaaaaatgatctaatacaatcgagcatcgtacaaatcctttcggcatgatggaaacttactcctacaccatgcgtgacacctgtgtcaaaaatgactaaaccaagagtttgtccagatggacgacatcgccctctcctaccatgtggatcacagccaacactaatatttactgttacggataccttttg

SEQ ID NO: 275989 - DNA, 439 bp, Glycine max
  unsure (1)..(439): unsure at all n locations
gcttgcttctacaagggtctcgtctattccaaagtatcccatgagcccaccctcatgggtctctctcacaagtaatttcctaatggatccttgaggtatgcaaagctntccctctttgaacaaatactccatctccaaatagaatccatcttaggcctttttcccacaactctcgtaatgggagagaaatgttcatctaaagcatacaagtccctaatattatcaaatcctaaaatttgagctcctacggagcaaaacaatgtgtatctcctaaatagggcatcagctaccacatttgatcttccctttctgtatttgataacatatggaaatttctctaggtactctacccatattgcataccacttgtttaacttgctttgcccttcaatgtacttaactgattgatgatcactacaaatgacaaattccttggaaa

SEQ ID NO: 275990 - DNA, 734 bp, Glycine max
ctacgtgaataatgtacttttattatccagtggttgatgctttgttttgaaattcagtgatcaattgtatgatgtgagtgaactgaaatgtgcagatcatatgccttgaatgagcatgcggttattagaagagaaagaacatggaattaggattatgactaaaaatgttagttggtttgtcaggttgattcttaaggaatgtattagtcgcaacccggtgagagtgtgatctttaattgtgagagagcgactagcagtacataatggtttttgcatgaatctctgagtatgaaatgaatacatgagtttgaagtggatgaaggccatgttttgattgaagatagccacttagctaaaaagcttaccttgtgcatgattgatttatcccttgcacccattttgagctgaaagtatgattgtctgattgaaccttcaccctgcctagatgaagtccctttacccttgcttacgttgcacgacacccaccctccacaacacgaactctgcgtccccccccactctccccccttcggccccgtctcccgcccctctccactcggccccccactcctcccccccccccccctctctcccccccgcccccaaaggcggccgaccccactctccgccgttccgcctcctcccccctcctccacctcccccccccaaatcactctcccgccccctctcacccccacgccttcctgtcatctcctccccgcccgacccccccc

SEQ ID NO: 275991 - DNA, 397 bp, Glycine max
  unsure (1)..(397): unsure at all n locations
agcttganaccacagcaacacataatctacgtatccaacacccctcattctaatggatcttctaggtgtgagaagtgaatatgagaatgggataaattcgaagcagactatcgcctcacacaagtctataacatcgatttaaacttgttcaaactggatttatgcctaacatgtcaccgaatcagaatttgacccttcaacacccaaatgcaccctagaaatggctctgtattgattttggtcatttgtttttctctctagcacagcccacactttctcataagtcctaaatggcatgtcaagctaggattaactcattgtaacctccatgtatcacagaatccagatgtaaccttccaactctcanagcctcactctttttccactcataacacca

SEQ ID NO: 275992 - DNA, 358 bp, Glycine max
agaggtggcctacccacggccaccagcacaagatcccgggacaactatgtcccaagtataccgccgcaaaaaatgctagaagaagggtgagtcaatcttttcaccaagaggcaagccatgttcgatgggatgcggtgttggctctttacccttgacacgggaagtcaaggaaacttcccccgattggctatgcccaaggccaagagcgatgggcagacaccctacctcccggcccccgaagaaaattcatgggccttctccggctattggctagcatattgatagaacttaattgggcccacataatttaaaaaaacgcgtgggaaaccttgtatggggctcctcaggacctttgact

SEQ ID NO: 275993 - DNA, 392 bp, Glycine max
  unsure (1)..(392): unsure at all n locations
agcttgtagaatggctagacatgatacatgtcatggtttggtttggttcaaggataaaagggatgccccatattatttccatgacacaaatgcaaaaatgatgatttggaaactttatgcaaaactggtcatgcatgcatctatgcggacactcaaatgtcaaatttttatggtcatgtgatgctagggctcaggattcatttcctctattttaatcaacccaatgtttccaaaatatgttcttttatcaatttgtgcattcatccgagtccatttcgggcgtccggngaaatttcacagcattcacccttcaggtgtagacacattntccaaanattgattatgatcaatgaatctntcaagaaaggttgaaatcgtcttttcaaagcatg

SEQ ID NO: 275994 - DNA, 446 bp, Glycine max
agcttagccagatagaatgtcaaagatggacgatactttaacacaatttatgcaagtatccagcacagaccagaagaagactgatgcatctattaaaaatctagaagttcaagtaggacaactggcaaaataactatccgaacaaggaagtggatctttctcagcaaccacacaggtcaacttaaaggaacattgtaatttaattacaacaaggttggggactatggttggtttgaaggataatgatgaaaaaagaataaaaaaagagttgaaaaagacaacgagaaaaatgatgaagtgatgactagtgaaaaagtggaagacaaagtggtaagtgaagaagagaagaagaaatcaaatgaacaaaccagtaataaaggtaaagctatagtaaaccatccaccaattgagcatcttccttatccgcaagctctgtcaaagaaaga

SEQ ID NO: 275995 - DNA, 351 bp, Glycine max
  unsure (1)..(351): unsure at all n locations
agcttgagatgaggaagtgttgaagggtgaaacttcctgctnttattgttgaccacagagtggtacctggagatatgtccggnggtcaggagaccttgtggacgtcaggtggggtgctattgcccaaaaccaagcttgaccaatcccgacccaactcgggcatagtcagtcagtgagaacctgtgatgtacctaagcaggcgagctcctggcagtcaacagataaaaggaaaacaagaccacaaagcaaggaggcttgtggtggctggccagctgtgaaatttgtgtaatatgtggattgtggcctctggtaatcgattactaagggggggtaatcgattacaaggcttaa

SEQ ID NO: 275996 - DNA, 432 bp, Glycine max
  unsure (1)..(432): unsure at all n locations
agcttgtaagaatatggngtacccatcacatgtggtactaggtggcggtcgggcgatggtgcacaacaagttttccacaatccacaaatgcgcataaacccaccatcccctgttgcccacctctaactaagctcacgtactcccacgtagcccatatcctcgtttctctcaacaccgggtccccatcaatcctctcaagcttccccaacatccaagtaattcaacattcaaacaacacaaactatcacagccaagaaaacagggcaaaggcagaaaactctgcccaaaacaccaaccaaaatcacagcttttctcacttaaggaccccaataacatttccttcgttccaattcattaaccgttggatcgactcgaaaaaggtactggaagtctctagtacataattctacattttgaaccgtgggatctact

SEQ ID NO: 275997 - DNA, 571 bp, Glycine max
ctaaagctttttcatttagagacaaacaaattaagtcgcgcgttcacttattaaagtatttaaaccccatgttagccattgtatttctaatgtagtcccttcatgtattgattttattatctttgatgaaatgatataggcatctttgagttaaaaaaaagccaaattagttcgcacatccccgaattatctgataatttttaattaaaggtttaataaaaaaaatcaattgagtccctaacttatattcttttttctttaatcagggccttgctaaatatgttgactatgggcaatgacaaatttaattgaaaataaacagaagttcagggcctaattgaaaaaaaaacatttaggaaccttttcaaggacatgtttgagaaactctctaattcgattcaactttcagctatatttttttaagctcttatacactacttctaaatctaacattgtcaactctattatatttgcacatagtattcgtacctctctagatcactattgtcatatctctactctaggattctcacgcttatgggtcttaagctcactattctcaaaccctttt

SEQ ID NO: 275998 - DNA, 445 bp, Glycine max
gatgaattgcgagattgatctaaaaataagtttattttttattattttattaatgaataacgattgatttcaaaataatttatgcaggtttaacaaaaaggttgaaattcagaaattaagtttaaacacttaccaaagaagagaaaaagacttgagacttcaagatactacgatcaagttcattttcttgacaaccagaatcagattttattgttttagctcattcttattttatatactcatctttgtagtgttttacatattataatttttaatttcatacaaatatatatatatatatatatatatatatatatatatatatatatatatatatatatatatatataaaatacgtgtgtcaactagaaaatatgagtctcgctatctacaacttcagagagagagaagagttgttgctttaattgtatcacacaatagagcg

SEQ ID NO: 275999 - DNA, 659 bp, Glycine max
tttgaagataaaggataagatatttttcttgtttttccaagttttaccaagtattcttgagcccttctttcatcaagcttaggtaagtgacctctattttcaactttaagcttgattttcacttcattttttttttgcctattctcacttgtagtttcaaaaccttattttgcactcttgaaggtttgaaacttgaatctaaactccctcattcttccttctaaattttgtggagcctacaagaggtaagggaggtctctccaactcttgaaccatatgctttttgttgaacttcctggaacatgttgctttgaaatttttgagttggggtcatgtgctaaatctgtcttctgagttgcttcccttgaatttttggtgccaaaaatgagttctttgcatgttaaaacatagagttagcctatgtgaatcatgcaggttttgatgatgcccaaggagcatccaacaagattgcttcaacaaacatttcaaagggtaagcattgcttcagactaatactaaggtgtctccataaacattttaataagcattggttcaagattaatttaacggcgagcccccacgatccagaaaaagataagggcccaaaaaaatccattgggtgaaaaacctttgcctcaaacatattatttccaacctcc

SEQ ID NO: 276000 - DNA, 433 bp, Glycine max
agcttgtaacttctaaatgtatatttttttatcttatttgcaatatatttgtcagtgttttaatcaaacatctagataattatttttcattggtctaattaaacagtgaattaattacttgcatttccaattatccttcttcaaaacgtataggggtgtcatcgtgagttagttggagtgcaaaaagaaatgcccgacaaggcaaattaagttgctaataagaccatgctaaacgcgacagaagatactccattgagcccgagattgcacaagccatctatctatttatgggctaaatggtaattgtcctattcgctcaacattaaaccatttcttttaatatatggattagcgtattggacttcttcggcaactctatttccctcaatccataccattaaaaaacacaaaaagctattccattcttaatata

SEQ ID NO: 276001 - DNA, 348 bp, Glycine max
agcttcgatggagcttacatcaaatagtcttatttttgggaaaagctgcccaaaattctatatttggtcttctatttacttctttcttaaattgtaaatgggcatacgagtttgttttgaataccatagttctcctctttaatttagaattttccttaaaataccagtctcgtgatattatggattgttgttgtatgaggtttatcttgccggaagacctggggaatatgaatcccaagcatgaatctatatgtatgtgttgcaacctgcccttcggcggaggtgcgatgcgggactcgtggatgcgtcttccaaggaaggaaaatgcacggagttgcctccaacgtt

SEQ ID NO: 276002 - DNA, 565 bp, Glycine max
cacgcttcatcaacacaaacctgtaactattccagtgcactcaaatgattcaactctcattcatttcaaacataaccgttcatttcaaacaaaacacaccaccgaaatatcaaattcacccagttcacctgctaaacaaactttttgtactaccccgaaacaacactaaaataactggaatttcaaaagaatgcaattcaaatcaaccaaactaaaacaaatgaaacataaatcaaactaaaaagcacactaaagactgataaactaaaatgttcataatcttcaaaattaaaaaccaaaacagaatttaaatgtcctaactctcctgaggatgatcttcatttagatccgatactggagctgctgatgaatcctgaaatgggggactcaagctccaatggctagtattgatggcaaagtctccacatgagctgatgtaaaagatggctttggcatgggatttaaaaaaattttctcccttttaaccaaacggatatttgtaacaaatgaaaaaagctcttggacaagagtgagcccatccctctacaactaaaactggcccctc

SEQ ID NO: 276003 - DNA, 394 bp, Glycine max
agcttggaaaggcccatgatagcatgatggtggtattataaaagtttgaaaattgctacttgacacgagagtgcatgaacattgaacttatggttccaagtacaaaaagttggaaacatactgtaatagatgatattgatgcgatctcttttaaacttttcgctccacaatccaagatttgtgcttagtgcatactagttgtagaggaaacaattagttaagtgcactacttgcgctaaaagtgcaccaaacttcatatcttctccaagtaatctcatgtatgtcacgtggccttacaagatatctcatgcacattaagcttgataaccatgctaagcgcgctttttcatcaatccaaaattactttcttctttgttggacaccaaaactctac

SEQ ID NO: 276004 - DNA, 428 bp, Glycine max
agcttgtaaagtatgaatcacctttattctttcttctatggaccgtatctcttcggtgatatccatgtctcctgttgagttgatactgtgagcagaacaaatgcatgtttcttcaattgacaaatgaacttgtataacataatgtaattacttggtaaaaactcattttttagtcatatattgataaaaaaatggatacaacaaggttagtgttggcgtaaaggttttgtgcatgattttcctccgaagcttcggcttctttggaagcattctcctgtccccttacagctttagctcttccaagtttgtgaggccaattaaatgttgaatagtgaaattattgcctatttgagtcaaacatgtgcagaaagacccacttatattaaacaaaaactattaataacaatggttggcctcaaaagtaaaca

SEQ ID NO: 276005 - DNA, 689 bp, Glycine max
ccttcataaagcctcgtatgggtagaaacaagctgctagagctcgtttcaacaacatttatgcttactttagcaggcaaggttttaggagtgaaaacgatgcaaccctttatgcgaaaagggtcgcggacggcgggtctctaattcgctctgcgtatgttgatgaccctctaatgactagcaataatcaacaagaagggcaacaactgatatcggagatgcaaaatcacgcttagatatcccaccttatgagaaatgaattattttctaggcttggaagtgcatcaaagtgaagacggtatttttctgaatcaagaaaagtatgcctatgaaattctgaagaagtctacaatgaaaaggtgccaatttgtccctactccttcggtgcaaaatctgaaactactccaagatgatggagctgaaaagacgggcgactctctttataaaaatgcgattggaagtttgctttatctcactttatctagaccagaacctacgtatgcagcccgcttactcttaacatttaataaaaaatgtaagcggggtacattttggacgagcacaaaaaaccccccaactcattgaaactcaatttaaaaacctgggttaaaccctcagaaaaatgtgacgtttgtttgggtatcgcgaccaccgattaggcttgaaaccctcgctgaacctaaaaagccc

SEQ ID NO: 276006 - DNA, 370 bp, Glycine max
  unsure (1)..(370): unsure at all n locations
agcttcttatccaaggctcatcttattggtgaagctccttcttccatggcttattccctaagggatggcgccgcctcttacctcttctcttttgtcttccgctgcatctcgagggtggaaaatcaccattaaaggacctcattgaagctcaaagatccagcctgcatataagccccacaagcaagcttacatcaagtggtatcagagcacaagagcttcaagtaggtgctccttaaacctccattaatttttttgctttaccttctcttncattgttaggtcttcattattctccatgtatctcctcacatgtctngttctaaatggtgttaacatgattctttacatggtccaccgattaaacttgcta

SEQ ID NO: 276007 - DNA, 652 bp, Glycine max
  unsure (1)..(652): unsure at all n locations
tgcaaccctggcgttagcactaatttacgtgtatattttgtgcattataatttaaaaaatccaataagattttatttatgtgctacaatttcatgtctcataagaaaatatacaatttcatagggttataattttccatttgtgtctaaaaaaatctctgatcaggatcgtggtcccattctcctaaaattgtaaaatattatatatagaaataataaatttaggaggtttttttaattagaactaaatttacactcattaatttctgtagttaattaggactaaaattatactcattagttttcataattaatgttacttaatcaaattttacaaagcattaaattatgacacaaaccaaagaaactattcacaaattttattataaatgattcaagccttaaaaggaaataaaatttcaattttcaccaaaagatttaacttctattcacatgcaatattttgtatataataaaacatatcattatgaaataattattaccttatatattanggactctaatttactatttcaccttgggcatattataggttgtggtcactatgtggtttttatttcaccaaggaaatggagattaccgtttgcaaaaaaaatatttcttttcttattatgatatgggataaaataatt

SEQ ID NO: 276008 - DNA, 464 bp, Glycine max
  unsure (1)..(464): unsure at all n locations
agcttattggtacagatggcacaatatcttgagtagatgaagtatgacttgaacaagcttaaaataaggaaacttgaacccattaaagacaacatctttagatatatatatctttcctataggtgaaagacacttaaatcctttgtgagaagtagaatatccaagtaagacacgctcatgagaccgaaattctagtttctgactattgtagggtcttaagaaaggatagcatgaacatccaaatgattttaagaaattataatcaagggtatgtttaaacatagtagtaaaaggaacttcaaaatttaaggatgaagtggcaacctattaatgagaaaaacaattgttgtaaattcaaattccctaaatntgagtggaagggaggcctgtttgagaagagtaagtcccaattctggaatgtgtctatgttagaattctattacaccactttaatggtgagtatg

SEQ ID NO: 276009 - DNA, 451 bp, Glycine max
  unsure (1)..(451): unsure at all n locations
agctnttcgattcattctatgtacccgtggtggtccacattgtgtttcgtgtatttttattctcgtttcatttactttttatacccccttttgacgtgcttaagccattttatttaagtcatttctcgcttaacctaaaaataaaataaatttccactgatcgtttgaattgtattatccgttatctcttcataacatcataatgaacatatcgttcctgcatttgtccgttatcatattccagcctcacattntgcatgagtcatggcatcatcatacatatatgcgttcaacaaactttttgatctgcaaaattgcataccatttgttntcatggttgctcatccttgtgttttcctctacaaaacaaaaacacaaaaggggaagcgtgaaacttcacactacattcttagttgcatgtgttaggcaccatgagccaaccatgttggga

SEQ ID NO: 276010 - DNA, 586 bp, Glycine max
cctcaaggtttgcgcttatcggcatcatacatttcacaaaatatactaagtatgggatttgtcgcaacgaaatgcgcttatctcaagtaagctccgcttagcgcgcggcttccaacaaaaaaatcgactaagttacctgggcttagcgattcagccttggttagccacatgtatctcaacaagaggatgagtgctcatcctcaaaagatgaacttgcttaacatggtaggcgtgcttagcaagttcttccaagaacgcgtatattcaatgaatactgatgaactcgcttagcataacatgctcgcttagcgagttcatcgcgttttccagaaaaacgcagaaaacgcaaattgttttcttgcacttttgtgagcctctaaaagggagattatacatgcaaaccaactaaaatgacttctacagtacaaacatatattaaggccctaacttttactacttttaaaaaaaacattcaaaccttaagattctaaagcttaaattaagggtgttctaacctaaaggttaaccacagtaaaagagaaaagggaagtccggaactacttggatcggcgatgcctttggaatg

SEQ ID NO: 276011 - DNA, 455 bp, Glycine max
agcttattggtacagatggcacaatatcttgagtagatgaagaatgacttgaaaaagcttaaaataaggaaacttgaacccattaaagacaacatctttagatatatatatctttcctataggtgaaagacacttaaatcctttgtgagaagtagaatatccaagtaagacacgctcatgagaccgaaattctagtttttgactattgtagggtcttaagaaaggatagcatgaacatccaaatgattttaagaaattataatcaagggtatgtttaaacatagtagtaaaaggaacttcaaaatttaaggatgaagtggcaacctattaatgagaaaaacaattgttgtaaattcaaattccctaaatttgagtggaagggaggcctgtttgagaagagtaagtcccaattctgtaatgtgtctatgttagaattctattacaccactttaatg

SEQ ID NO: 276012 - DNA, 374 bp, Glycine max
actgtgctctggagatacaacaattgagggtgattgaaccaagatccctttctaaggcaaaattgggtgttgaaaaatcacattctgattccgcgcaactttaggtgtaaatccacgctttgcaagtttatatggatgttatggactggtgtaaggcgagcagtctgctttaaatttacctcattctcaatttcactttctcaaaactagaaaaccccattgaatggaggggtgttggacacctaaattctgggttgctgtgctctgaagctcggttttgggttacacatgattgatacatgatttgggaccttgcaggaattgatttgtgccaaattggatcagaggaactctcatcttgtaaatctgtactt

SEQ ID NO: 276013 - DNA, 404 bp, Glycine max
  unsure (1)..(404): unsure at all n locations
ttctaaataattatatgaacactttggtcaatttcaattatgaatattaatttttaaattatatataaaaacctaaaaaaagtaagaaaaagagaaaatacaaaatcaatatctctctaaatttttccttactntatttcatcaattcatattaattagaaaaatgctcgatttatagggttcacgctcaacacaatagcatatcaatttcacaacaattggtctgtcaaacatatataattcactgtaataattataaggatgaaatgaaaattgcaaaaacaccccanaactcattccaattgttatctctaaggatccctacacatgttctcactaatccccaattgtgaataactcatcccttacctctgagcggactcacgtgtcttcagctagcgata

SEQ ID NO: 276014 - DNA, 517 bp, Glycine max
  unsure (1)..(517): unsure at all n locations
cagggaagagnagagtgagctcctgaacntcccancttagaaanantcangctgcnnntnagttgagttntggattgagtaagttactttctaggggtatttgcctaagtgcttgtgtggttgaagagaggatattactattccatactcccccttcaacaaattgcatgggtcctacacctctgattctctatttaactcacatattccttctcaatccctgttccgttcgtatgtcttccacgcgacctaactcaacctaagagatggttcttgatctttgagaatagtactctgggaatgtcactcataggaatctattagacctgcattttactctgaccttccttcggaatattgtaaactgtacccaggaatcttcctatcttttgtntgagagcatgccatatttgtgtatattccttaaacatccctaactaccaagggtgagcataccactatgaggaatacactgttgtatatttaccacaaccacagtcttttccaataagtgtgg

SEQ ID NO: 276015 - DNA, 461 bp, Glycine max
  unsure (1)..(461): unsure at all n locations
agcttagaaacccaagctcttagcttcaatgcatggaaacatggcttatgtctaaaaatctaaattntgttttgaaagtggaaaaacatgaaaatttggacatgcttgagagggttttctactaagaatttggctgcccccatgagggatactttgcatctaggaaacatggaaaatacctttcaatggtatggatatatggtgtggaattatccctcacatgtatatagatggcaatgatattccttttcaaatgcaagtatgcgcatgacgtaattagctntccaatatgcatataaataaatgtgagtcaaacaacataaatttgtatgttaaatacttcaaatatgtataggtagtttgtgatagtagaatatctaggatgtgattaggtgtaaattctgacacaatgcctcgagcacgagaatgtgtgttcttttcaaagatgtatatatatatat

SEQ ID NO: 276016 - DNA, 559 bp, Glycine max
tgaggactatacctccgaccgaacaccgtcgagtttctatctcggtctaagtctattgcgggctgtagcaccggttccgcttccctacctgtattggaggcggccgccgcggcattatcctctatagtttcctgaagctttagcatggcctccgtgatacaagccatttgatcttttaaggccgataagtccgccttcatctgttcttgcactccctcttcattatccatttttctggatcgagtgttataggggtgcctctgtgcttttttagttattgtgagttccctaaagaaacaaacaatggtgagtatgccaccaaaacatgaatatgctaatgaatgatccgagcacttggatccacctcaagatttttagataacgggatgagtttcagaactctttcgtttataaaaaggaacaaagcttttatctagcccaagatcataccaaagtgttacaacagaacctaacgggttctaattatattgggcactaaatctatcatgtgttgacagcagttgattatcccgtgaatttcctcagggttggacacact

SEQ ID NO: 276017 - DNA, 377 bp, Glycine max
  unsure (1)..(377): unsure at all n locations
agcttagcctggctgaaggcacctactacaattagcgtgcgactntgatgctgacgctcagccaaattctcctttgtgctaagcgcgctaaagctatgcttagtggtgaatatgtgcttagcccaactgttgagcttagcccaactgctacattttgcaattcaaaacttagcctctttttcacctgaaaatgcacagatttcatcattaaattcaatggaaatgttctagagacaacatgaaccataaaacaagatttattaatcaaatttactccaaaatgaccataaatcggngaactatacaagctttggaaaatgatttctatacaaatgttagttatataaagcgactaacaaactcncccaaattacaat

SEQ ID NO: 276018 - DNA, 595 bp, Glycine max
actcaagcttgtttctacacttagcgcaactactaaactagacagcacaggcttggtgagcagtctcgctaagcccaattctaagaaatttaaaaacagaggcataatagcgcttagcatgacatgcatgcttagcgcccaacaaaaacacaaaaatcctaagtgtctaatacacaatactcgcttagcgcatagctgcgcttcgcgagttcaacggataactgaacagaaaagatgaacgtgcttagagagacagatgggcttatcgcgttcatctagaaatccaaaatctttaacagaaacgatgaactcgcttagcgcagcaaggctcttagtgcgttcatcgcgattttcagaaaaataagggcttctcaccccttctcataggcccctattgggccatcaaaccctaatcaaaacatgcacattgtgactacagtacaaacctaaagctattctaactaacaactaacctaacattaagcataaatagaaattctacctaataatcactaagttctctatcctaaggtggaaaatttagaacgacaatgaagtaaagtaaagacacttacttgcattgtgtagatgaatg

SEQ ID NO: 276019 - DNA, 395 bp, Glycine max
  unsure (1)..(395): unsure at all n locations
cttcaaatnttgtctatatattattacaactcataaccaatccatattcaaaacgacaaaagctttcaacgagctcataacattttaagttcgttctcaatatcattctagctcggaaccaatacttattcaaaacaacaaagtatttctaatcatcaaaacagaagaaagttccaaatgaacccagtttaataaaaatcatcatcttcaaggcgggagattgcaacagaagtaacgtcagttatcaatggttctgtcggttcacctatattgaaaaataaaagctagaatataaatatttaacttgacaaattgaattcaatctttganaagaataccttcatcatcagactccatttcagcgaggcaaatagcatgttcatttcccacattag

SEQ ID NO: 276020 - DNA, 341 bp, Glycine max
  unsure (1)..(341): unsure at all n locations
agcttctaatgataaatacaactaattacttacaattctaagcaatccgattgaagactttgcacttctatctcctagcttatgtcaatcaccgagtcaaccacccnccaataataattgcaactaacaatttttgaataaaaaaaaacctctagaatatattcttgacccttaataattgcttttgggagtaagtttagtttgtctctatcataccctgctcctcatgctcatccaaccatanataaataaatatttcatataaaaacaatacaagaacaagtgaatcaccaaagttataaacaatataaacaaaaaactttaaaaaaagcatggatttt

SEQ ID NO: 276021 - DNA, 404 bp, Glycine max
taagatgttaactgaaggctcatgattgaagtaccaccatactcttacacgaccaaaaatgaaaaatttacagggcggcgcatatccttacatcaatggccaatctttctcaccaaaaactgaaacaaatcctccctaaatttaaagcatgccttaactctacttcattaaactccaatacctaaacgagtacttattttaaaaaatatattaaactattccttgtaaagcatcccgctaactggcgtgaaaatcatccaccgtaaaaatcatagaaaaaaaattataaataacataactcctgcctataaataaaaaagactctcactctaagcttcctaatctaggccgaaatactacgctagcatctggttctttttctaaacaatccaccatgaccataa

SEQ ID NO: 276022 - DNA, 468 bp, Glycine max
  unsure (1)..(468): unsure at all n locations
gggatccttacgtcacctgcggcatgcaagctgaaatgaacacggaagctctcagatatctagtggcataaattncacacagatgtccgattcggggaaataatatatcgagacgcacgaaattgaacaacggaagctctcgagaaatntgaatggtcataacatctcactcggatgttcgatccggggacataatttatcgagacgctcgaaattgaacaaccgaagctctcgacaaattagaatggtcgtaacttttcacgcgaatgttcgattcggggacataactcatctagacgctcgaaatcgaacaacggaagctctcgagaaatctgaatggtcataagttctcacacggatgtccgattcgggaacataatatatcaagacactcgaaattgacaacggaagctctcgagaaaatcgaatggtcataacgtttcacacagatgtccgattctgggacat

SEQ ID NO: 276023 - DNA, 356 bp, Glycine max
tctatataagctgaaccattttatcaataaacacaagccgagttttattcagaaaattacaggctatccgttttatcttagcgagagcgattcctctaaattcttgagtgattcaagaacaccctggctgtatcaaaggactttcacaacctttgtgggctgccctcgctggaaagagtgattctttcccttccaatcatctccacccttgttcttctaaaccacaattccagaaaatccacctctggccaaaattatctcgtgaaagggctcgtttgaaactccacttacggtccagaatcacttaatttcactgcggccaccgggaattattgcgtcacaaataattttgggcc

SEQ ID NO: 276024 - DNA, 450 bp, Glycine max
  unsure (1)..(450): unsure at all n locations
agcttccaaacaaaaantttcatgtaggtggaccttcttttagtaattctgacttaccgcagcctcctatccctattccattcccacctagagcaatgccaaacaaaaaaatggaagaagtggaaaaggagatcttggagaccttcagaanagtagaggtgaacatagctctgctagatgccatcaagcagattccaagatatgtgaagtttctaaaggagttgtgtacccacaaaaggaagttcaagggcaatgaaaggattagcatgggtagaaatgtgtcagcattgataggtaaatatgttcctcacattcctgagaaatgtaaggacccaggtactttctntataccttgcattattgggaacaataaatttgagaatccatgctagatctangagcatcagttagtgtcaatccttttgtcaatttcaattctttatctcttgg

SEQ ID NO: 276025 - DNA, 582 bp, Glycine max
  unsure (1)..(582): unsure at all n locations
ttagatttatgattcatcatgaatactcatgtcatcctagagtaatcatcgatgaatgaaaggaaatagcttgccttcctattgatggaactctcaaagggccccagtacttataatggatgtagtccaacatggcttttgttgtgtgtacaacctttggaaacttcatttagtgtcgcttcccatagatgcaatgctcacaaaactaaagaggttccaccttgcgatttctaagtaagcctccattgcttagtatatgcaaacctttttcacccatgtggcgtatgtgtagatgctatagagaattatcagacgatccattggacacatgggttctagattgcgaaatagaaaagatagaggctgtcacagtggacccttgaaagacgtacaaggcctcttgcttggctctctacattataacaaacttcttttttcctctgatctgcataactctgccttcaacccaacaagagaaaccttttgaatcctatgacacncatataaaaaagatttttcttagctctggaatgtgataaacttcaatcaaagttcctaaaacactatcatgcatattgattt

SEQ ID NO: 276026 - DNA, 484 bp, Glycine max
  unsure (1)..(484): unsure at all n locations
cgcccccggtganccttgagacctggatacccggatcttaagtgaccccagctgccgcttgtaatcacttacccttttgagtttataagcttcttcaccctagattctatttgctatgctttattggcaaattgaaccaatgtctctatccatcatacattcctgggtgtaatacaacccttattccttattctctctctcgcacacacacgatgtatanagacgctacaattcgtagcttatatgtcatttctaagtataccgtgatgttatcccttgctatgttctcacacacacttatattcatcttgtaggcccacagagaaatgaaggatagtgtaacggaatccgcgaatattaatgatgcccatacaagtgatggagcatctctcttgtacttttgactctcactaattgactggacaataagccttcaaaggactctaatcttacctttggtccccacgttttttaatatactatc

SEQ ID NO: 276027 - DNA, 603 bp, Glycine max
actctataaaatcccccgcgtttcacacacagatgtaaacctgagaagaaagaaagctttttctgcgagcttttaaaacagtgccccacacactgaaactacctgaaaagaacgaacctcccaggtgaaagcttttaaaaaagtgcgccacacactgcaactgcatcgtaaaaggacctatatatacacgcttaaatcccaatgcaggtgttacctaccacctaagtcgcctgtaccattggcaactacactttatactaactcgcctatatgagtggggatttccctgtcacgcctgcatcctgcaaaagcctgagctcctgagctccctattgcaaagctgaagccctacctactggaactcgacagccaaactggcggtaccctatgcatggcagcatccccattattacctgcgattagttcatggagagcaaactcccccagctcactggcagcttgcttggaaaatgcatgcattttacgtgcaaaacagtcccctgacgaaaaatcttttaaaacaatcccatcttgggaaaataccttttacaagtaaccccaaatggggaaatttgcccaactcctaaatatgttattttttga

SEQ ID NO: 276028 - DNA, 327 bp, Glycine max
agcttcatcagatgctgcatgtttgtatcaacttttattatagaagaatgagatgcacttcctgcatatgaaatatgctttatcgcggcgcgactgtggtcatagtgatccttaaatgctagcaagatgtgttatggtttcaccatcgactttgtcatatcagcagcaattgtctttccctacttagtcaatcgcccagcgtatggatgtccaactaatgacttggccgattcatgattgtgaatcccacatatcaacttcaccatacaacctgtacttacatgctctggtttgccacgaaacctgaacggacgaccgcattttcta

SEQ ID NO: 276029 - DNA, 399 bp, Glycine max
agcttcataagagagtcaaaaaatctaattgagatgagaaataaaagctatgctaaacaagccaacaaagggagaaagaaggtcgtctttgaacccagagattgggtttgggtgcacatgagaaaagaaagatttccggaacaaaggaaatcaaagcttcaaccaaggggagatggaccatttcaagtgcttgaaagaatcaatgacgatgcttacaaagttgagctgcccggtgagtataatgttagttccaccttcaatgtctctgacttatctctttttgatgcagatggagaatctgattagaggacaaatccttctcaagagggagagaatgatgaggacatgacctagagcaagggcaaggatccacttgaaggacttggaggacctatgaca

SEQ ID NO: 276030 - DNA, 431 bp, Glycine max
  unsure (1)..(431): unsure at all n locations
agctntgcggatntggtcttcgtcggcaaaaggatcgaagcgggtctgaaaagaggcaaatntgatcatcctactttgataagtgagaaagctggggcaaatgaagagggtgagaatgagggagaaacccatgctgcgactgtcattcctatatggccaaacttcccaccaacccaacaatgtcattactcaaccaatatcagctcttctcattacccaccacccaatcatccgcaaaggctatccctaaatcaaccacaaaacccacctaccacacaaccaatgctaaacaccacctttagcacgaaccaaaacaccaaccaaggaaggaattttgtagcaaaatgcctgtagaattcaccccaattttggtgtcctatgctaacttgctcccttatctacttgataatgcaatggtagccataacccct

SEQ ID NO: 276031 - DNA, 346 bp, Glycine max
acgtaattcttgtgttttccagattggttccttgtgcaagttatgtgtatatgcgcaaatgtgtcttatattccatgtttcggctgtcgttcgtattttgctcttggcacatcaaacgagaataagctcagatgataattcgtcattacggtaagggcacgaacggaccaatttagggtcgtatctttgctttcctcttacttcgatgagaggcaagtaaagagaggcatctgtcataccctaatttcctcccggggattattacttgacgacacgccacctttggttaaccctctccgagacacttgccaccctcttgttcacactagcataagtcccgagaccg

SEQ ID NO: 276032 - DNA, 424 bp, Glycine max
  unsure (1)..(424): unsure at all n locations
agcttagatagaaacattgaacacatganaataacctcagatagataataaaaatatttacatcaagtactcagtagaaattcccaacaaaggattttagccctctattacaagggagcagctttcacaaataggagaagggttttagagaaaataccaaattacaaagaagtggggatgtctcctccacctctaagaacctagaaaataactctaaaacctagaatctacctaaaagttaggacctttgcttccttgctcagcttttcctctattctttgcacataattcgtagtcagttcagacctctttcatgttgtcacgctctctctttttttctgtgcaaattaagcttaaaaagggctttctgacctcgaaggcgtgcttagcgccattctcgcgcttagcgcgagtaagtgatatt

SEQ ID NO: 276033 - DNA, 534 bp, Glycine max
agcgacctatagatactcaagcttctcaaggaacttctctcaagaaagcttttcaaggaagctacctattctataaatagaagcatgtgtcaccacttgttgcaactttgatgaatgagagtctcgtcaaacatacttcaaaggtccacttctatacctctcttattccttcaatttcgtgctcccccctctctctttctctccctttttcttttcctccattgaaacatcctctcccagcttcttatccaaggctcatcttggcggcgaagctccgtcttccatggcttattccttaatggatggcgccttctctcacctattttcctttgtcttctgctgcatctccatggtggaaaatcaccattaaaggaccccattgaagctcaaagatccagcctccatagaagccccccaagcaagcttccatcaagtggtaatcagagcacaagagcttcaagtacgggctccttaaacctccattaattgttttgctctaccttctcttccattgttgctccttcatttctctcc

SEQ ID NO: 276034 - DNA, 458 bp, Glycine max
  unsure (1)..(458): unsure at all n locations
agcttanaacaacttgtgtaatcaattactataagactgtaatcgattaaaacagaaagttttaagtttagaagaaattatctatttttagagactttctccttactactacatgatgatgcatgatgcacatatgaaatgatagagattaagatgcaacacacaatacaacaatcaatacaaatgccactcaagagagttgggcatgtaaaagacaaaacttctttaagcttcatggctaagtcttcatgttgctccccctacctctaacaatctcccctttttggctttgatgatgagaacttgaatttgccattgagtggcattggagagttcgactcttaagagtagagactcgattntcttagtcaaccggaaagtttcttaacactaagagaagtatcaattcatatcatcatcatcatcattaggtagatatatattaaaatatacagagc

SEQ ID NO: 276035 - DNA, 607 bp, Glycine max
  unsure (1)..(607): unsure at all n locations
tacccatctctgttcttagggttttatgatgatgcttgtgatgcttgtgtgctgaaatggctgatggaaaactgatagagatgaagggtagagttaacctagggttaaaaagtgagaatgtagtgatatgagtggaaaagtgtgatgctttgaggatttgaaagccaaatctggatttagtggtcattggagtgtcgcaatgtgcccttcccgggcgagtgaaggcgaagctcacgggtgcactttccaaaggaggaaagatgcgcggagtcgccaccaacgtttatttgtggaaaacgtcggaaaaaccgaaggaaactggtcaaaatgaaaattctaagttcgggagttgtatttacgtttgaggaaagtattagcacctctcacgtttgtctcaaaggacaacaaccaattttttagaattgtgggaattgtgttaccttaactttatttctttntatttttttgagggcgacaaaagcggggctcttgctcctacgtacccttcatcaaagaggagatcagaccttactagttctcttctttaaagtgaatcaagcgattctttttacttgaaaggtgatcacctaaaggggtttccccttta

SEQ ID NO: 276036 - DNA, 458 bp, Glycine max
  unsure (1)..(458): unsure at all n locations
agctnttgtgagggtccttacagggagtaaattgagttttatagagaattcaatcaccataaccagtaaagtgctaccgtagccaagtaggtccttgttagagtagtaaaatattcgaagtaagttttaagtttagtggagtgcttgtaagaggccaagtagcgacctatgttcttccatgactaaagactcattgaaggatttatcctacgcatgatctaaagttggtagccatggtgtgcgccttcacatttttggaggcattaccgttagttttgagataatgtgagaaccttagaagttggaatctgaggtagaagagatgagtagaattcttaagaatcttgttgtaagtctaacttcatctgttagagctagcttagtagttgataattgagtangaaaatccttaatgcaatcaatnntcttagttagggagtagatatcatgaatatcaa

SEQ ID NO: 276037 - DNA, 672 bp, Glycine max
ttagtgtcatgaacaatacatttgagggtccaatgcctgagttcaaaaagcttgtgaggttaagggcattgtttctgtccaacaataaattctctggcgatattccggatgatgcttttgagggcatgacaaaactgaaaagggttttcttggcagagaatggcttcacgggtcatattcctaagtcacttgctaacttgcctagactttgggatttggacttgcgtgggaatagttttggaggaagcataccagagtttcaacaaaaggatttcagaatgtttaatttgtcgcataaccaattggaaggttcaataccagaaagcttaagcaacaaggatccaagttcatttgctggtaagttaatagtcatttctgttttttcaccaacagacttagtttttaatttgtctgttgtttgtcgttgcatatttaatttatcttatttggttttgaaaatccatgtttactcataacttatttgaacctcactcctttgccaaactaaagcttttgcttcctatcattccttgctacatagatcatatataaaatctaatagcacatttgggaaactcttgcaatgtcattagcccaacaataaaattttaaattacattcagatacaacttgtaaaggtttacactattaattggggttcctccatgtccc

SEQ ID NO: 276038 - DNA, 386 bp, Glycine max
agcttcgtcctttgtacgaagtaagtagagatacatatatcgtgaataatcatctataaaggtgataaagtattttggactacttgcatccatatctggacaacaaatatctgtatgtatgatttctaataggtttgagctcctctttgcatcgtttttagacttgttagtttgcttacccttaatgcaattcacacaagtgtcgaaatcagcaaaatccaaagtactaagtactccttcatttaccaatctcttaattctctcgatagagatgtgtcctaatctatggtgccacaacatagaggattcctcattcacaacacattgtttaaccctggcagtaaaatgcatagaattataagaagcatcattttgcaattcaatat

SEQ ID NO: 276039 - DNA, 558 bp, Glycine max
cgaagtaaaacacaaatggtgccattttctgctgcattttgcagcactttaacgattgacaaaggcgtgaagaaacaaacgactttaaagtcgctgtccttcctacgacttcactattggagttaacgggccagattgaatcattgaatggcgcggattgaagcacgagacatttgctgaattgttgaagtcgcggaataccacacgacttcactattcatgcaattcattattttatatatatatatatatcctaatgaatttacagtttgcattcttaagctttcttataaatattatactttcagcatatattttgtatgtaacataaattagtgtgtagttattattaatttacgattttgttagataaattattatacatgttaaattaattttgttaaactattattttatgtgttagtatattagcgcgtagttattattaatttacagcttacttagataaattattatacatgttaaattattattttatgttttagcatattagcgtgtagttattattaatttacaagcttagctacataaattatt

SEQ ID NO: 276040 - DNA, 312 bp, Glycine max
atttgatcgccaatactctgactacatttcatagagatgaatgactcgggcatacttatgctatgcatggagaatgtacttatgagattgagatgcccgatgaaacctcatttcctagatagccatgcattatgtaccatgttcaatcatatttggtttttaagagaaacgagtctgtgatcccaacatagttagctcacggtacctaacacatgcaactaagaatgcagtgtgaactttcatgcttcctttcttcgttttgttatgtagacgaaagcgcaaggatcatgcatgagtcaacatgaaaataaa

SEQ ID NO: 276041 - DNA, 426 bp, Glycine max
  unsure (1)..(426): unsure at all n locations
agcttaaagctcaaggaaaaatttgaagaagttttggcttttacaaacccaactcctttttgagtggcatttgaattggttgttatcttggttgctgcatcttagtacatttgatatctggtatgcatcttgcatcatcgtggttagtataaaggaaatttgctaagttagaaaaatttcttcaaaggcaaaaactctctgttttaatcgattacaacatcattgtaattgattacaacaagttgcctgaagcttgtagagctaagtctggtatcgatttaatcgattactgatatctcgtaattgattacactggtgtntgagacaatgactacattagataggagtctctgcttaaccaataccaagtggatactcgatactttctctcgtcatgtgtcaaggtgacagacacttgatcgatac

SEQ ID NO: 276042 - DNA, 671 bp, Glycine max
aaaatcagcttatccactcaagctggaaagagaatagtgtataccagacactgaagaattctaaaagcttttcacccttatcgacgattgaaaaaagctgttaatggaagtcacgagaatgaacgccccccggaaacatcaactggaaaccaagttcatgatcgtgtaaaggacattggaaccatatttgggaagtcccagaataagacatcatctcccaacaacatgtggaagaaacactccatattctttgagcttccatactggtgtgatctatttttagatggtatgcatgtggaaaaaaatgtgtgggataacgtaattgggacctctctctaacattaaagggaagacaaaggatggtttgaaatggcgtcaaacttggttgacatggaaatacgagagcagttgcatcccatattacaagggcagcgaacatatttacccccagcatgccacacaccttgtcaacagcagagaagaaaagtctttgcaatgggtggcggaaggtccaatttccacaaggatacctctcaaatattcaagagcccttgtgccctaatgaacttaagtgggcgggctcgaaacctatgattggaaggtctaaagcaacaatattggctgtgcaattccgacaactggccgacaaagtaggggggcctaaccccgtg

SEQ ID NO: 276043 - DNA, 406 bp, Glycine max
  unsure (1)..(406): unsure at all n locations
agcttataagccacaagtcctatcttttgcacatattgaaaagggacgtaaaatcttttagccaatttggaatattgacttccagtggccgttgactggtgttgaggtcgtagcttgaccaagacctgagttcctacttcaaattggacattgcgtctttgcttatccgcgctctccttcattcattgctgggccttgattattttctttgtcaaactggatagcaaggcatcatgctcagtcaaccatttgttggatcaagtggcctcggaataattaagaagggtgggttgaattaattatgaacgtgtcttgactaattaaaaatttattcttcttaatgttactagattcaattaggctctactaccaagntatacgatagtagagaacagaaataataact

SEQ ID NO: 276044 - DNA, 638 bp, Glycine max
tgaccagtccacataagtgagacttctatttgccaaaagatgatgagttgcttccatttcaagaagattgatttcttctttctttggctttgttcatctaatatcaacaatattaggatccataatcaatttccattcaatcatatagtgtactgaataaaaaataatctgataaaagcctaacatgtgtagcctttcttgacatgccttttttgaaagcctgacagcttgcgtgactttcagtcaatgaaatttgcgttagaccaatgaaatttgagtgaatgaaatgggtgattgaatttgcgttactcatttgcagatcatggttaagactacaggattaagtcgtaccttacgctaagttactaccacaagtgtgggcagaggagatcgcgatgattcccatgatgccttccaaccgtcgaccgcctactggatccgcccagaagcaacgaatccttgtgactgcaacacaccctgagcccagtcattcctgcgccatatgttcaggatgaacccatggaagcaccacctgctgtggaggacattgtggcgaccattctggggacccaagcccaaaaggctgcttaagaccccccttaaggatttccgggtggtccgaacgacccctccctgtt

SEQ ID NO: 276045 - DNA, 431 bp, Glycine max
aagcttcaactagtattggatggaagtctcttccttatggccatggctgtcattggtatcggtctacgagtatttattgccttattggtaatggcatatgtgcaaatacgaagcattcacatgcttatgatgtgatcaacaagatgtgtgaatgacactttgttattaaactaatcaccgggttactggatcacttcaactaccgagtacctaattgaattggttgtatcgttccccaaccggcaagtggttgcgatggaagtattaataaggtcttaaactgagacatttatactagaatattcgtttaagatgagaccccaaattctcatcgtttaaccagataaatagctatcttaatcaatttcgagaggttccttgttcaccagggaagtcggtatttcgactaatttatacaaactgtttaattt

SEQ ID NO: 276046 - DNA, 52 bp, Glycine max
ccccccccccgtacgtcgcaacttgcggccccctgctcctaactttctcttg

SEQ ID NO: 276047 - DNA, 388 bp, Glycine max
gcttgaagaaagagtcatagatgctctgataaaatctataatttatagtatgtaattgcagcaggtattattgaactcatcacctcacgaacgaattctattaattattttaatacggttaattctttggacataaaacataataacttgcatttgaaggatcaaatcactataaagtaaaataaaggaggtaaataaggagaaattgtttatctttgaaggacataatgagaaattgttaagaaaataatcaaatactactgcccagttagatactttgacttggtgcccaacagcaattagagtgcatcgacaatttctattttgacttagtgtgcatgtgcaacagcaattatagctttcaacggtcaaggttctcactgccaca

SEQ ID NO: 276048 - DNA, 693 bp, Glycine max
ttgatgttgttagtcgtcatttggatgtcgagagtgtcatcttgttggattctgagaagaagatcaataaaatcttggtcctctaattcagctccatcttcttttgcaattttgttcttttcttgatgctctctgatgatgttttccaggaccttgtcaacctgcttgtgcaacttcttcaatctggtcatctttccagttaggaaatataagaatggaattgaaggaaagacatcagcaaggtcgaatcctcccccggattctacgatttttcggatcaaagacacaacaaactcatcttgctccttgtatatgccaccgaatgctaccctggaaatagaggcacatatcaatgagaaaattctactggtgagattgataggcgaaccagcagattcgcgaatggagtcgataaactttgctgcctcgtcttctctaatggaagcaaaagactgaactcttttggtgctcagaagctccgtggcacacatttttctcattttgtctcagtgatcaccatatggagcaaaagcaatgcccaatcccccgtaggatatcatttgaccaaaaacaagatggggtctctggagaaaagaacatcatgtgttttcactatttcctttgccatctttggggaggatgcaaccactgttgaaatttacccaattggaggtgcattagagtccctatttt

SEQ ID NO: 276049 - DNA, 421 bp, Glycine max
  unsure (1)..(421): unsure at all n locations
agcttctgcataattggagagttctagagagagaaaggtccaagttcccgagagtttgagagaanttgttgtgtgaagatctgcagagaccagagctgggagaggaagccgtcttgagagcttgagatgagtttctgagtgattgtgaagtcctagaggtggacgagacatccccactagttgtatttttgcaatctttcattctcttctctttgctgtaaaggaagcttcccagttatggaatgctaaatcctctgttggatcttccttgtaagtacttgatgtaaatatcttattatcgatttaatgatgttttgtgtgttcactgtgctatcagaacttcattctaccatgctttntccttgatcacgtagatgcatgtngttttatgatcagtcaacagtagaaactggtctgattc

SEQ ID NO: 276050 - DNA, 515 bp, Glycine max
tcaagccaaggccagatgctcatgcatgcagaggcttcttcaagaaaaactccaaactccctttgcaaatctgatttcaagcttaaataggtggccttgttcgtgctaatgcgcttagcgcacgtatggaccgcttatcgcacgtttgtgatttttggctcagtgtgcttctctcgcttagtggatgagctgaagtggtgcacttgatgacttggagcggtgtgctcagtgaacctgacaactcatcttcttctggattcttcctcacgcttagccactgaatgtcacgcttagcgaatgctctctaagccagcatattggcttatcgagaaggtgaaaacaacacttttaccaatttgcgtaattaacctgaaattgagagaaattgattattaaacacacaaaacaaaagtataaattatctattacctatatttaacaaaaagtacatataatattacaaaacaactataaattggagaagtttgatacaatatacacaggttttatacaca

SEQ ID NO: 276051 - DNA, 452 bp, Glycine max
  unsure (1)..(452): unsure at all n locations
agctntatgcacggaaatgtaattatgaaattgagatgcccgaagaaacaccatttcctagttaaccatgcattaggtaccatgttcaattattttttaaagtgaaacgggtttatgatcccaacatggttggctcgtggtgcctaacatatgcaaccaagaatgcatcatgaattttcatgcttcctttttttttgtttttgttntgtagaggaaaatgcaaggctcatgcgtgagcaaacatganaacaaaaggtatgcagtttgtagaacaaaaagtatgttgaacgcatgatgatgcaatgactcatgcaaaatgtgaggttgggatatgataacggacaaatgcaggaacgatatgttcattatgatgttatgaagagatgcttatgtgatgcatgatatgaatgcattttacggacacgagagcccnnggaaatatctcttcttac

SEQ ID NO: 276052 - DNA, 499 bp, Glycine max
cctgagctaattcaaacgacaataatgttagtgctcggatgtctgatttgatccccaaacacatcgagacactcgaaattgaatgttgaaactctcaccaaatttaaaaatcaataacatcttactttcatccccgattgagtaccccaatacataaaaactctccaaatttaatttacattctctgacctaattcaaacaacaataactttttactccaatattcttatagaatccccctaattaattgagacgctcgaaatttaacgttgaaactctcaacctatttctaacgaaaataaatctttcactcagaatcctcaaatattcccgtaatatattcaaacgatccaaattgaattctgcaactctgacctatctacaaccaattaactttttcctccgactgttaattgacacccgtcacctattagacgccccaaactcaattcttaacccctcagctaatttaaacgacaaaaacttttttatcccatat

SEQ ID NO: 276053 - DNA, 416 bp, Glycine max
  unsure (1)..(416): unsure at all n locations
agctntgataccatatcanaattagagaactaagtgaacaaagagaataagagaaaacattcagaacagaaaatggaanaactgatattatggattctgaanaagttagntttaatgcagttacaaaggaggtatntataaacctctagaccttgaagtggattgcacctcacaacaccatttggcacggttaaaaaccaaatcttcagatattatttaccaatgcactngctaagaaaaaattntgtaagcaatataaaatcataaacttgtaacttattgaatgtttcagacgtacttcattattttctgattgataggcacttctttgaactcgtttctcaagttctattagctcatttcgcagaagctcgaagcggcggatttcattgggttcttggtccacaacccctacg

SEQ ID NO: 276054 - DNA, 584 bp, Glycine max
atactcaagctcgactttaacccattattgcttgtcctatcaagtccccacttgctttaaacaaatcatccagatttgccgcaagtttgtccactaactaatacgtgatcgccttatggatgaatatattacttagcactttagtcttttctctcaaggtttacaaggtgttttgaaagtttactatctatacaaagatttacaaaaagctttatacgaaagaatgaaagaatatgttcacgcaagataattcgtatgttgtttctttaaaacttcttctatttatagcttccatcttcaaatatttgttgtctcacaaccgctggattcttcactatgttctttgtctgaagtcttgagctcgctggagaatttaacacgtccattcttcatgaaggttcatgctggtaggcaagcgtgccttatactttaacagaaaaagtcaggcaaatttccccatttggggcaattttaaaaactttttccctcaatggggtggttttaaaagtatttacccccagggggcaccttttggacgtgattggctgcatggggcaaacaaaccgccactgggactggcgggt

SEQ ID NO: 276055 - DNA, 458 bp, Glycine max
  unsure (1)..(458): unsure at all n locations
agcttcatgatgaatcaacaatgattcanaggtggtttgatgataacaatgatgataaanaaagatgatgacaaaggtgatgaacaaaaagctcaaaagatcaaagaacatctcaagtgaatcaagaacaagtcaagagttcaagaatcaagaagaattcaagattcaagactcaagaagaaagtctacaatcaataatcaagattcaggattcaagatctcaagaatcaagatcaagattcaagactcaagattcaagaatgaagaaaagactcaatcaagataagtattaatttttttttttcaaaactttgaatagcacatgagtttttgacaaaacctttaccannagagttttactctctggtaatcgattactatattggtgtaatcgattaccagtagcaaaatgagtttgaanaagtttcanactgaatttacaacgtccaaatattttc

SEQ ID NO: 276056 - DNA, 593 bp, Glycine max
  unsure (1)..(593): unsure at all n locations
cccatttaataatcaagcctcctatncaacacagttcttggaggagaagctccttcttccttggcttattccctagtggatggtgccttccctctcctcttctactttgccttccgctgcatctccatggtgaaaaatcaccattgaaagacctcattgaagctcaaagatccagcctccatagaagctccacaagcaagcttccatcaagtggtaatcggagcacaaaagcttcaagtaggtgctccttaaacctccattaatttttttttttgctttaccttctcttccattgttgtttcttcatttttctccattgtatctcctcacatgtcttgtgctaaatgttgttaacatgattctttaaaatttccaccgattgatcttgctatagaagctagatttcattttctatggttcaaatttcttgttcatgttcttgaaccatgaattgtgttgagtttaagttcctttgagtcttggcttgctattttttgggggtgaaccctaaaccataaaattcttacaaaataaagtagaagaaaaccctcaaaatctaaagagacttgttcacctattgtacttttgtcata

SEQ ID NO: 276057 - DNA, 475 bp, Glycine max
  unsure (1)..(475): unsure at all n locations
cctgagctgcagcttgaaattataaagatacaacaagctggtcgaggtgaaccaagccatgagtaggagaattgatcatcataaggagggaagtttaagcaagggtaataactaggggcaaaagaaagtacaaaaaaatgataatccaacatattaaaagcatgttcggcgtactatttaatctccacaaccaaaccattgaagcttgcacaattcacacgtgtattttatgatatttctgcaactaagtagaatgcttaatgaaagaaaaggaaaaagataacccatgcaacttccaactttgggaaagagtgaacccaatgaattcataaacacggtccaattcatctcatcctagcaacatataacanatntgacacaatntagcagaatgggtggtgtntntaacatgatgcctgcagtttgagcataatanactccatacaggcaaagaggatacaaagaacatgtggtt

SEQ ID NO: 276058 - DNA, 605 bp, Glycine max
gatcacttttatcatgaaatgcatacgatgagtgggcattacataattgaattaatcaaagctatttaaaggaattgactaaaactttatttacattataattagacatttaccggacgttcatgacttcgctgaaatatgtttatacatatttttcatgtaaatcaatatgcgcatataaattttttatttgttatatatgtatcctatatttttatctaatgatatggtcgctattattttatatatacatcctcacgaaaagatacaaaaaaagttgccattgggtggagaattcccatccacttgctgtctcgttcgctgcctccagtcataattatgctattggcccacttggagttctgactatagctgcaatctatcccattttggggagaagtgtacccgcagtggagttagtaaacagaattagcggaccccaacaatatagctcattcgagatattgatatgcgtcttactctcatatatttatatatatatatataggtcaaacggttaatcactcaaaccatatatatacgtctaatgacccctatatatatatatatatacatagaatttatatgccttccgatcacggggg

SEQ ID NO: 276059 - DNA, 427 bp, Glycine max
  unsure (1)..(427): unsure at all n locations
ctgcggcatgcaagcttcaagaatcaagtttcanagaatcaagattcaagaacaatcaagtttcaagattcaagattcaagaacaatcaagatcaagattcaagactcaagattcaagaatcaacagaagactcaatcaagataagtactaaaaaagtttttcaaaatattgagtagcacaagaatttttcactaaatcttttaccaaagagttttactctctagtaatcgattaccagaaggtagtaatcgattaccagtagccaacattgtttttcaaactgatttacaaagctgtaattgattatcatgagcttgtaatcgattaccaatgttttaaaacgttagatttcaaatttcaagagtcacaactagtgataaaacattntcaaaccattttanacttggggtatcgatttcataatac

SEQ ID NO: 276060 - DNA, 534 bp, Glycine max
cttgcaagcctgagttgaaacttgcttattataagctgccacacaatccagctcttagaagacacccctactggaattccacggtaaacaaatggaaaatcccatagtactgcatttgaggaattgggctgcatccctgcaccaactttcacatttacccagaccaccaacgtggcttttagaatagcttatcttgaggccacaaacctcttcaaagcacctcagaatacattttaagattctaatattatgctgagtggcatcttcaaaaaacagagtattgtcagcatattggaggatggctcacttcttcctttaaagatcccacttggtagcttctgaacagattcttggacacagctgacctcatcaaacctgtgagacctttcactacaatattgaaaagaagaggtgcaaggggatcaccttgccttagacctctcttaggagcaaattccttagatgggctctccttaactaaaatggatttggctgcagggatatacaaccatttattcatttccttccaccttt

SEQ ID NO: 276061 - DNA, 445 bp, Glycine max
  unsure (1)..(445): unsure at all n locations
agcttgtacacgacaacaccaacaaagtccaagaatccctccataacaatgatgctcaataccaacacgctctttcccaccttctctctgtctctcaggtatatttgcaattcatgcatattgatatgctcatatgcaaaaactagtttcaaattttattcttgcgtatggtgtttgtttattatatgcatagtttgtcaatcttccttaaaactttattntaatattaatggtatgtattgaatgtttttaatggttgagataggtagcactgacacagaagtgctgaatttattggcagttgaaaggagaagagatacttgagcaattcgaagcttctagttcttctgagccggtcgcttctataactcaggaaacagaaagtgaaaatgatgatgctgcggaaagtagggaagtgaaatgatgagataatcaagaactaaag

SEQ ID NO: 276062 - DNA, 717 bp, Glycine max
tcttgcgtagcccctcttgggctcagagggatgcaaaaacttatccctcttattactagctatttggaattctttagttcctgaatgtacaaccttcaaattgttgctcgtttccctctttgttttctgcgcaaaagaaaattaatatgaaacaatttacgctgaattgttatcggtattattactccaaccataaggaataacaactaaacaagccatttaaaatgtacccttgaagctaattggcatttttttaattacaaggttacttcaatatctaattttttacctctacttaggtcgcttttttaatatgaatatgaatttaaaggtgatatacagataatataaatgacttgctagtcacaaattgcgatacctatcatttttaattttaacttacttttataaatattaataaatttataataacacaatcttttaacattgtgcctgccgttctataataaccggatatggatttatgtgtatgaaacataccatcattaatgcttaattagaaattacaccctgggctgtagggaatccttttctttactataatctccctttcaagcctttgaatggctattgttaattctttgcctctgaaagggttaactcttcaacagggccttggacccacttttttcaggaaaccctcctttttattcccaagtaatttatttgggtttagggtccaccattaaacccttg

SEQ ID NO: 276063 - DNA, 404 bp, Glycine max
  unsure (1)..(404): unsure at all n locations
agcttacacaaacattcactagtcctacacacactctacaaatagtcatcatcattccatagttctaatcaatcatgctcaatatgatgcttgcacctgatctcaactttcaaatgaaatgtggtaccatccccaaggaaatagcctaagtgtgtccacacgacactctcacttaggaaaactatgaagtaagtgtctaggtcaccctgtcgtgcacaggaaactcctcccccacgatgatcagtctgagtctcaagggagttccaaaccgagtgacatgcctccaagtacaagtatttctcctcgtgagaacctacaagtacttactgacaaagtttatactatntncatgtcatatgaaagatgaaacatgggcaccatgaatgcactaaccgtggataatt

SEQ ID NO: 276064 - DNA, 656 bp, Glycine max
catcctcccccttggattgtgctacaatgctcatgcttctttgggcaccatgagaaaacctatgagcctacgctgaaacattatcctgaagcgctcttcatgtcatcaacggatccgaccgaatcattattagagaatccatacaacttgaattcttgacatttctcaaatttgacacccataatcaacagtgcccttaacataccttaatattctctttgcttgttttaaaagcatttcacttgcataatggataatatgagacaaaagatttacaacaaatataatgtttggccttgttacagtgagatacattatacatccaatcaagctcctgcaatatccttcatcaaatttatcagcagcatcttccttgctgaaattttctttttgatatattagggggctaacaaatttgcattcctccatttgaaacttcttcaaaaattcttttgcatatttcttttcgaagattaacactttggtttgactttgtttgaccttcaattccaacacaaaagtcttgagaccaagatcagtccattcaaaaaaccgcgattatttcttggttgaactcccctaaatagcccttgcatcatctccaggactcaaaacaatatcccgcttccagagaaattttaaaaaagtgtttgccc

SEQ ID NO: 276065 - DNA, 342 bp, Glycine max
  unsure (1)..(342): unsure at all n locations
agcttgctagagaatattctcattctatattcacttgagatcacctatntttgaaaggttgtactttgatttgcctgacgaaaattcagttatatttgaagatggtgatggcattgatgttttgttgtccataccaaccgtataagagtctatgtttacctcttagctgcaagctaacaacattctttatcaagcaaaagatcttacatatctacaattcataagataatttacatacgttgcctaaacagatgttggaagccatgttaaggaggctgtgcaattggaaggcttaactgggtgccttcaagtacttgcaaattgtattatcctatgatgatg

SEQ ID NO: 276066 - DNA, 496 bp, Glycine max
tttaagatcacatcctttcccggccataatgagagtgctatcgtttcacaagtcactcaagacttttcaagaagaaatgttctatgcaatgccatataatctcccaaaacgagacatattattcacaaatggagttgggcaactattgattagtaaaacaacatgcaaagcacaacaccaaaacatcggtggccacttggactgaaaaataaaggctttaaggcacatttaataagatgctgatgtttattctccactattccatttcagcgcggaggtcaaaaccctacaagatctggtgtctcatactagcatcatgataaaactatttcatgataaactcaggaccatttatctaacccgaagtagtattcactcttggatcaaatcacttcttaacataagaaacaaacgcttcatacatacagtcttggtgcaccaactatcaatgaaattgtccttttatttgagtgcatcttgacctcatttggtccca

SEQ ID NO: 276067 - DNA, 371 bp, Glycine max
  unsure (1)..(371): unsure at all n locations
agcttgtgcctctttatgtctgggatatgaatgtagcatatanatccaaagacccttatgtgctatgctgatggcttcttcccattccaagcttcaattggagtcttgtcttttacagacttagttggacatctgttgagtatgtaaacaacagcgtacactgcttcagcccagaatgtgttcggtagtcctttttccttgagcatcaatctagcaatctccataactgtgtgattctttctctcggacactccattttgttgaggagaatatgcgactgcaagtagtcgctcaatgccttcatcctcacaaaatctttcaaactcgcgagaggtgtactctttgtcgcgatcacttcttaatacttttat

SEQ ID NO: 276068 - DNA, 637 bp, Glycine max
  unsure (1)..(637): unsure at all n locations
tgtaatgagcccaaaattttctcaatggttatagcctacaaatcttttgttttttcgatgatggcgacaatatgttcaaactttggatctaatgatctaagaattttctccataatttttagatcatcaatattttcaccatttctcttaatttgattggtgatttttaaaattctagagaaatagtcggagatgacttcattttatttcatatgaaacgtttcaaacttggctcttaatgtttgaagacataccttcttgactggattcgctcccttgtatgcggtctgaagcttctcccatgcttcttttgtcgactttccttttcaaaccttctcaaaagcattgtcatctaatccttgatagattagatagaaagccttcttgtctctttttcttgagtctctcaaaccatccctttgagtttgagagagactacccttattccttggctcggtgtggcctttctctattatctcccaaacatcttgtgtaccaaggaaagtcttcatcttcatgctcctattgtcatagntgctcttgttgagcattggaacttggaatggaaccatgccgctactcgccatcttcttataaaggaccttctaactttgatgcctatttgttgaaatgaaat

SEQ ID NO: 276069 - DNA, 392 bp, Glycine max
  unsure (1)..(392): unsure at all n locations
agcttatctatgananaatcagaagggaaccatcagaatgccattctttctgaacaaaattggtgtcaagttcctcccttagtgtcctaatcagctgagagaatttgtggaagccgagtggaccgtactatcagatctctcattgagaggcaaatgagctgtcttgcaaacttaagagtgtttgtatgtatgtcttaaaattggttgaacgccaatccagcgttcagttgtattggaaagtgagacaatagaaatacacactattatcatcatggtgtgttaagttgatgttgaatgtgggattagttagacaaaactggtgtccatacgttgtgtttgtgttaccgtccaaccaaacataaccaacgtttttttaagaaagcttcaagatg

SEQ ID NO: 276070 - DNA, 511 bp, Glycine max
tagcataactaattccctgaatgacaaaagtcaatagttgaataagaaaaccaagttaaaaatatgggtgaacattttttatgcgagaacaagttcgagcagattgtctccaatgaagaatataagtgttgtactttgtaacaaaaaaagaaaagaggcagagtgagaacttgacaaaacctgcgggatggccaagctagcaatagtgaggccagaaacaaggtcagatttgaagagtttgagattatacttaggaccccattggagaatagggaacacatattgagctccaaggatcagttttctcttaagaggttgtcccttgaattggcgcagaggatcatcagggaagaaagtttccttgagccctacccttgagtttctgaaaggtgctcttgtgagggggtggcacaacttggtgcacttccatggacatttctatgcaatgagaatggatagtacatgcattattagtctccattttgaaaaaaacagaacttattaagagaaa

SEQ ID NO: 276071 - DNA, 386 bp, Glycine max
  unsure (1)..(386): unsure at all n locations
agctntctcataagtcctaaatgacatttcaagctaggattaactcactttaaactccatttaccacagaatccagatttaaccttccaaccctcaaagcctcactctttttccactcataacaccacattctcactttccaagcctaggttaactctacctttcatctctaacagttttccatgagcaatttcagcatataaacatcacaaacatcatcacaaaaaccctaaaacagaatggctatgtctaactcatcccaacatggcaatttcaacaagctttcaacaaatgtcttcacaaataatcatcacacagcagaaacctagcaagactacccatcatatctcccaaaaccccatacccacgaaaattaaaggagaaag

SEQ ID NO: 276072 - DNA, 355 bp, Glycine max
  unsure (1)..(355): unsure at all n locations
agcttnctantctataaatagaagcgtgtgtaacacttgggggaactttgatgaatgagagtcttgagagacacacttcgaagttccacttctctgcctatattattccgttcaattcgcgctcccccctctctctgtctctgcctgtttcctttcctccattgaagcatccttccaagcttcttatccaaggctcatgttggtggagaagctccttcttccatggcttattccctagtggatggcaccttcgctcacctcttctcctttgtcttccgctgcatctgcatggtagaaaatcaccattaaaggacctcattgaagctcaaagatccaggctccatagaagccccac

SEQ ID NO: 276073 - DNA, 190 bp, Glycine max
ttattgattgtcatgaattgaaccttgaactttaaatgattatctcctaataccttgtttagattctaggagagcatatggttcaagacaaatttactctaaattggggggagaaaatttgaaaagaataaaaagaaagaggttaagcatcagcacacacaacaaataagttgtatgttaaaaaaaagaa

SEQ ID NO: 276074 - DNA, 209 bp, Glycine max
  unsure (1)..(209): unsure at all n locations
agcttngctctaaattacattgatgtttgtattgatgggaggaggttacatgccatttttgctttaagagtaatgtcccactaaaactaactttccaaatagttgccttcgcaggaatggcaccgaggaagcttgcctcaaagaggtccaggaaagacaaggcggccgaaggaactagttccgccccggagtacgacagtcaccgcttt

SEQ ID NO: 276075 - DNA, 613 bp, Glycine max
tcgtcttacagacagcaaaaaagaatgtcgataccgatcaccccctcggtatttccgctcggcaacgcgactcaaatgtcagtatgacagattttgtgagcgcggaaaatgatgtaaatccccgcgggtcaacgggcttgtcggccgcgattgaccaacgatgccgaagacgacattagtctctgcgtgctatcaggcttttcatcttacagacagcaaaaaagaatgtttataccgataaccactcgggtattttcgcccgtcagcgtgactcaaatgtgagtatgacagatcttgtgagcgcggaagatgacgtaaatctccgcgtgtcaaccggcttgtcggccgcgattgacgaagggcgcagaagacgacgttagtctctgcgtgctatcaagcttttcgtcttacagacagcaaaaaagaatgtttatacggataaccactcgggtatttccgcccgtcaacgtgacttaaatgtcagtttgacagatcttgtgagcgccggagatgacgtccatctccgcctggcaaccggcttgcccgccccgattgacgaacggcgcacaacacaacgctcccctctgcgcgctataggcttttcctcttcacc

SEQ ID NO: 276076 - DNA, 455 bp, Glycine max
  unsure (1)..(455): unsure at all n locations
catgcaagcttgtatagttccccaatttatggttagtttggagtaaattttgtaaaaaaatcttgttttatggttaaagctatctctagagcatttccattggatttaatgatgaaatctgtgcattttcaagtgaaaaagagcctaagttntgaattgcaaaaagtaacagttgggctaagcgcataaccaccgctaagcgcagcttcagcgcaaaggagaacctagcagagcatcagcatcaaagccacgcactaagcatgagattagtgcgctaagcgtagcaggtgccttcagccaggctaagggcgagactggagctaagcccaatttcacttactcgcgctaagcgcgaaggtgacgctaagcgcaatgtcgcgatttcagagtctatttaaagcctgtcttgtgcagcaatagggtacactcttgacacaatactcanggcacagaat

SEQ ID NO: 276077 - DNA, 391 bp, Glycine max
agcttacgaattattggagagtggtcaaacttctatgttatcacattgagaatcttgaatgaagggaacatgccaatccattcagaagcaacaagtgctctgtctagtttttcctacactatgtctggtttcccttctcgcttagaccatgtatactaatacccttctattggaaaatcatgaaggttggaattgagaacaacagctctgaagcctctgatgagccaattcgggtgatcatggataccaattctatcttgctgtgagagaagatcactaaaatcatcgaatatgcaccatgggagatttgataagccagtagcgatggatcttaagatctcacgagtctcttcttctatggcagatgtgataaccatagaaaccaatgagc

SEQ ID NO: 276078 - DNA, 427 bp, Glycine max
  unsure (1)..(427): unsure at all n locations
agctttgagccaaaatcctgactcaccataaaccttgacccaaggtgagaatgccaatccttatcctcggaagcaaaaaaagaggagaagaaaatttccaatcaaaggaaaaaggagaagaaaatttccaatcaaagaacaagagaaagaaaatttccaatcaaaggaaaaaaaggaagcaaagaaattcccaatcaaagagtgggagaaagaaaaaaagaaaagaaaggaaattcccaaccaaagaatgggagaaagtaaaaaagaagaaagctcctgatcgaaagaaaacagaagaaatgtgcagagaggtctttggaccggacaatatctgaacaatacagaattgtcaccaaatgaacgaanaaggaaggaaaggaaaccacgacctaaaatggtcttcttcctttaattaccaaccaaaatc

SEQ ID NO: 276079 - DNA, 429 bp, Glycine max
attacatacatggatactcaaaggattttggggtaccaaaaattgtcaatgtgcaccttgttggcatttttaatacctatacatacgcaaactttatgatgaatgttgactatccacacaataaggtgctacatttcatgctcttttttcaaatttttgctacctaaagccgcatgcaaattcaagcatatcttcctttgctgactaaaattgtattcaaattaaaaggtatatttcttgtaatatgttttcttcaaataacatgcaacatatttatatttatctccttttttgtgagacattttgaactatcaagaaattatttttacatacattcaagaattttgctatttatatccaaagtgcaaattggcaaaagtattttggctacctattttaaaacctacacatttcttgatgacggacaat

SEQ ID NO: 276080 - DNA, 403 bp, Glycine max
  unsure (1)..(403): unsure at all n locations
agctntantattattggaataatattattattcataaaatatatatgattataagattcattaatactatattttaatttattttgataaagttttattattaacaaaaaatttgatgcgtatattagaataatttatttttatatgttattcttatttgaataatttaatatctgggattgatttatatctaataaaatagaattaaaaaattactaataatgtaaaaaaacaatattacaataatttttagaatactatatatatctctaatagaatgatataatataatataatatatttgatgatattcatcttattcgataattaaacaatccaagctagcctactatatataaacaacaaaaatcaagcttatatgataattaaatcgtgtcattta

SEQ ID NO: 276081 - DNA, 413 bp, Glycine max
agcttgtaggttaaagtctcacgattgtcacgtgttcatgcgacaattgctagacgtggctatacgagacatcttgccaaacaaagtcaagttaacgataactcgcatgtgctttttcttccattctatatgtagcaaagtcattgatccagacatgtttgatgagttggaaaatgaggccgcaattatactgtgccagatggagatgtatattccccctgctttctttgacatcatgattcacttgattgtgcatctggtcaaagaaatcaaatgttgccggcctgtttatctacagaggatgtactctggtgagcgacacatgaagatctcataaggcttcagagaatctattcgtcagaacatctattgtgagaggtcatttacaagaaccattgattttgtcaaatact

SEQ ID NO: 276082 - DNA, 735 bp, Glycine max
tggtagaagccaggtggttgacttttcaagaggacagaccctacataaaaacaaacttgcttgccaatcatggagaggggtgggttaatgccatcgaggtgagtaggttacacgggcccaaacatttgaaggacataacgacctccagaaggtttatctacaaagccttgcaaaaggtgggcatgattccccacggcgggcgcagaaaagattcttgcttaatgcatctgggtgaactgcatgacatggaaacatgtttggcggtaagagatctattacaatagatgatagaccaaggccggcttgaggtcggcagtgaaggggaggaggaacaacatgtatacatgcagtcggtagatgaaaaaggtcctaaaaagcctaaacttttggtaatagacttcaccagggacacggctccccaaagacctcaacacccctcggcagtatcgggtagtagacctattccatttccttacaagaacagtcgtgcagttccgtggaggtatgcccctctgggcggtaggaaggaagaagctaccgatatcaggtcactatcgcccagagtgaccaatattaccgggctgagtggcataacccgcaacggtcgtgtggtcgcaccccctaccctgccgaatagcccgcaaccctaaaggaaagcaaaggacaaatgtcaaggcgatcctgcactggatgaggatgttctgacgaaggatcattcccagcgaaaaagggttg

SEQ ID NO: 276083 - DNA, 336 bp, Glycine max
  unsure (1)..(336): unsure at all n locations
agcttccattggttgagttttgcttcccttttcacgctatgnttcactccctacaagtaagtgcactttgccttggttatttggctctccattgttgtgttttggtgctttagttgctcatattatgcgaaattcgtgaagcaattcacatatgaaaccatacttgttttcgctaaattaaggtgttgtaagggatggccttaggcctatgttgcattctggagtaatggggcatgccacattgcccccattctcttgctattcatgcctaaacatgtgcccaccaagtgctcggtatagggacaacatgtagaggttaaaatgagtgcctgaatg

SEQ ID NO: 276084 - DNA, 710 bp, Glycine max
tgggtgatgttgcgcgtactgatgggtaccatgaggtgtctgctggggtttgacccatgcgggtgttgaagagatggcatgggcatctccttccttcctttttgcccctgttgccccgattcttttggcgtttacgtttgtggaggaaacgtaatcaaactttcctctcttcaatccaacctcgattctttccctggccaacaccagatccgcaaagctggacggcatgtaacccactagcttctcatagtagaacactggcagagtgtctaccatcatggtgatcatctctctctcaaccatgggaggagctacttgtgccgccaaatccctccatcgctgcgcatattctttaaaggtttcaccctctttcttgaacctattctgcagttgagtaccgtcaggagccatatcagaattgtactgatactggcttaggaaggcgcgtatcagatccttcccagacggataccggaagccttcaaatagtgtcccccctaccgagctccggccaactttcctgaaagaagggttcaccggttttctctttaaatggggccccctcttacggagccattttgagcgggttttggcccagtcctccccttttcctttccaagcccggccttcgccctccggggataacccctgcgggctcagccaaaaccctcccggtccgccacgggtatccccccagttcctccccccgc

SEQ ID NO: 276085 - DNA, 376 bp, Glycine max
  unsure (1)..(376): unsure at all n locations
agcttgctaacccatggaagctcctaatatctcccacactttntggggtgggccattcttggatggccttgattttctcagggtccacttggaccccatttctaccaactacaaaacctaagaaaactatattatctacacaaaagttacacttctctatatttgcatagagggtgtttttcctaacgactgaaagaacttgtctgagatgtcctaagtgatcatctaggctcctactatacactaaaatatcatcaaaataaacaactacaaatctacctatgaaatcccttaagacatgatgcataagcctcataaaggtgcttggtgcattagtgagcccaaaaggcatcactagccattcatacaaaccaaa

SEQ ID NO: 276086 - DNA, 639 bp, Glycine max
cgtcaaagtattttaaagtacactattgacacatctttgcatacaaatttttcttgaaaacaatgtttataaaccattggacaacaatctactgctttttgtgaaaacataagacttattagtggacaacaatttatgtgaacttataactacttctaaaatcacttccattgtgaaaagttttcaaagtttatctaacacactattcaaccccccttctagtatgatttgttgtatttcatcatagtccttggtctttccattaatctaacttagcttagggttagtttagtttattttagtttcttttgcttgaggacaaacaaaactttaaatttgggggagtttgataattgttgtgcatgcttaacttcttcatttaatttacacattagttatattctttttccttatatattgcttagtttgataccatttagcaaagatttaacattttcttaggttttagtcttttgaaatgagtttttacaaaattcattagcttttgtgtgatttgaagtgttttagttcacaaacaattgaagtttgtagttgttgattgctcgttggtcgagtcaagcctctcccaacgagggtgctcaaaggagaagacacatggcaacttaggaatgagaacct

SEQ ID NO: 276087 - DNA, 459 bp, Glycine max
  unsure (1)..(459): unsure at all n locations
agctnttcggagtataaacatgggaccaactcattttatttcaaaaaggaagtcgtatctagtcaaggtctgagagaccatacaagtttcctaacgatttctaattctgtgggccattaagtctatcatatgctgacaatagccgagaagcccatgaatctcttcgggggcggagtatgtgtctgccatcgccttggccttggctaacaatcggggaagttcttgactcccgttcaaggtaagagcaaaccgatccatccacatggttgcctcttggtgtaaagagtggatcacccttcctctagcctctttttccgcgtatacttgggcatattcgtccgcaatcctatgctcgtgggccgcggctagacctaactcttcttggtacttggcgatgatagctagcatattggtctccgtctcgcataaacgctgagacaagcttcttttggactttga

SEQ ID NO: 276088 - DNA, 528 bp, Glycine max
acacttagaatctcaacctcttatccaaggctcatcttgggggtgaagctctcttttccatggcttattccctactggatggcgcctcctcttactcttctcctttgtcttccgctgcatctccatggcggaaaatcaccattaaaggacctcattgaagctcccagatccagcccccataaaaaccccacaagcaagcttcaatcatcttgcaaaggtcatgactactgtaagagacatgtctttcttttcctaattcttttaatattttccttctttcttcttcccttatttgttccctctcaccttgatttattcctaccctctcttttcctttttcttttctttctaagtttcctttccataacttgagggaactccactcatctaagattctacagagagaaagcccttatgactagtaccctcaccattaacactagatgaaagatgactcctattgggtcctaaggcggggtcccttccccgctcgggtctgccaaaagcaaaatcccgggtctacaagaa

SEQ ID NO: 276089 - DNA, 425 bp, Glycine max
  unsure (1)..(425): unsure at all n locations
agctntagttactacaatgatgcgacaatatcttgttcgttaatagtttaaaaatttacatttatagtggattagatatccacacacacatgattattttatgtatccataagaagtttggatgattttcttgacaggacataaaatgtggtaatggtgatttggaatctctcttacatatggtgatatggtgtatagactgtcctgagaaacattttgcaaaggtaattactaattttcttctactgaagctgacttattaaaccaatacactattatatagaaaacttaaatggtaatgccttatcatactaaggtgtcaattcattagaatctactgatcaagtacattctgaagattaatctaaaatctgcttttacagaaatatgtcaactaacagaaactgtgtatctttaaatgttca

SEQ ID NO: 276090 - DNA, 401 bp, Glycine max
  unsure (1)..(401): unsure at all n locations
agcttagacgaccttgttgagtcgagaatactntattatntatttggacaagtttgaatatgatgtaaaagaaaatgaatgtgaacctttttcccctttgaaagacttgtaaaaaaaatgttttaaaaaatacttttaattaatatttgaattttttattccttattagtatatatgtgaggggtagagggtgtcacactacgaacgtttcttctgtcaactttgaggaggcctataatgacgactaattgtctatcactataggttttacctactatgtatagtgtgtaggtaaaagtcattaacttctacttacatctcctaactgtaggtaaatgtctttaatatgtacatatcatcttcaactgtaggtaaatatgtttaacatgaacacctctaat

SEQ ID NO: 276091 - DNA, 495 bp, Glycine max
tcctcggggccattcttgctggtgatgaacaaaagcgcgaaacggaatcaaaaaaatgcgaaaaatgatgacccaagggctgcaaactcgtaaatcccgtgggtatggcttttgaaaggggggaaaagaagtttttgaatgcaaaaacgtccccccctttcgtcacttttatattttggtgcagaggtggctcgcccaggcgagctaacctgcaccccctttattttccttttttttttctttttgaggggaacatttaaacatgcccctcccttctcatggattagcatctcgcctaacttgaacttacttaggttagaattaggcgttgattacctattttattattgctatcattttttttctttttaaaacaaacaaatagtaaaagaaagctgcaaaatacaaaggatacggggctgccttgcaacgacattctctgctcgtttcgcacaaaaaaaggcaacgatcggtcggtcgtgaccccatccccgc

SEQ ID NO: 276092 - DNA, 446 bp, Glycine max
  unsure (1)..(446): unsure at all n locations
agcgttctccccaattttctataaatagggggagaagtgaagcataaaagggttcagccccttaggcacttctctctctttcgaatttgcttaggaaaattgtttccgtgaagaaaatccaagccaaggcgcttccgtaacgtttctgtaacgtttccatgagtgatttcgcgaaggttttcgaccgttcttcgacgttcttcattcgttcttcagtcttcaacgggtaagtacctcanaccaagcttttcaattcattctatgtactcgtggtggtccacatttggtttcatgtatttttattctcattttcatttacctttttatacccccttttgacgtgcttaagccatttagttaagtcatttctcgcttaacctaaaaatgaaataatataataatactaaaaaataactttttagtaaataaagcanaaaatcaatcgg

SEQ ID NO: 276093 - DNA, 533 bp, Glycine max
tgtaagtatttgttggtataatttgcctgttccattaagctcttaatgtctttaaaggttacttcctcattgacatcttttgtcttgaatggaattgccatgacaggtttattgttactatctttgatgtttggtagttgatattgtgttgcgggaggtaattccgattggattaactcaccatccttcacttgccaatttgttatgacatttgttgttggatcacctatgatgtcttgtttccaagggtaatctatatcctttctgatggcataagcatgaaaccaatcaaagaaaaggacattaattttgactctttcgacaaattcgtagaacttgtcttggatttgttttctgtttgtacccttgtaatgttggaaaaaccatctcctttggggttcattctccggagaataaaaatctttcctaaaggtgtccttatcaatgctaaagttgtcacataacatcataaggttccatagaagagtatgttggggattggatcgacttttgggcgccctcctgttcttggt

SEQ ID NO: 276094 - DNA, 358 bp, Glycine max
tcttgattttaagcccttctcctagttagtttgagttcctcttatggtctatcgtgtgtggggtactgcaatagggtgtttttacacttcctttgaaaaacccttgagaatgagacattataaaagttatctttttatgacattgatgtgattttcgtgaccttcactaaaccccggtcacattggcgagaaaggaattgcaaaatgatgtctgcttttactagaatatgaaacacccctcacccctttatgttttgacaggggtatttgactctgaatgctgacattaacgttggtactgaaatctatactaaagttccttcaagttggtatatagaaccttgcttttggattgatg

SEQ ID NO: 276095 - DNA, 547 bp, Glycine max
tcacagagaaatagaaactgtctgagctagatttccatatgtgcaagaattgcactgcacactgagtcacaatgtaatttgtctatgtgagatttactctaagtacacgtatccctagggagattagcacaacaatctaggaagttattgtgttaatctacacgtttaacataggatttaccaattttggcaaaaaacaattttaaccatttttttatatgtctactttatccatttcttgctaaaaattcaaatgcaaaaccacccacttatggcaagctagtgcacatccccccatggcctatacaatggtcattctaaaaaaaaagaagatggaactcacaaaccaagagggggtgaattgggtctaaatcaaatccaacaaaaaaatagagttttgaaaagctttcttttgcaaggatcattatatcacaaacttttgttaaaaccaatatttaatcaatcacccttaacacaaaaatcctttgctaaagatcttatcaaaaaaacattttttttgaccttcaacaaattgttcaagaatccc

SEQ ID NO: 276096 - DNA, 437 bp, Glycine max
  unsure (1)..(437): unsure at all n locations
agcttgctctccctctntctaatcttcacaggtcatgttcgtataagctctagataccatgttaactattacacttttacagaaaaatgacttgaattgcttattcacttctcaattgattacaggaggaaccttgcttatatagcaggttaatagtaactacttgttggttataagaaagcaaacttaaccaaccttataactaccagtttacagctttttaaaactttgaattattcctaacaagaaagtccattaaggagaaagtcgaataaataaactgctctgacatcctctgatgaagagtcaatcttacttcaaagtttaaaaaggagcacaccaaagaaaacaaaattcaacgacatgtgaccggcaaaaggaaataaatacaaaaagtctattttaaataaataattttggtggtttattcgcatcat

SEQ ID NO: 276097 - DNA, 679 bp, Glycine max
tctccggtaagctaaaattaaatttgtccgtgtttcatgatgtaaatgattttataagaccaatctatcatcaacttaagtatttattcgtgagtacagatgattaaacaaccaacttgatatgtttacggctaaaaagcataggaaggtgagtatgaggaaataaagcactctaatgaacttttaacaaagagacataaatccaaagttcagagaattacgttacaacacaggtgaataacaacagcaacacaaaccaaattctttgcaaacgatttgaacctttatccttgatgttaattccccatccgcagcatagatgaatcacaagtgccaagccaaatgagataaaccatatgacagcaagggttaaaccagccacaccagtgaatccaactgactgaacatataatagttaaaggactgattaatttacttgaagtgaacaccccaatttggaggctattatgaacaagagggaaaataaattctctcaaagaacaacataactgaacaagagtagaaaaaaaaacaatgccaagaaattgcaagtggttattattgtaatgggcaaagaactattctattggggcatggagaaatccaaatgttctcggaaatcaagtaaatatcaggcctttatcggattactttagccttaaagattcaccatatttac

SEQ ID NO: 276098 - DNA, 401 bp, Glycine max
agcttgagacttaattgcattgttctttccataatcagtagtcagcagtgcactctcacccatctccattacaagcctttcttcttcctgaacacacatggtcattaattcattgatagaccatttatctttatgtgtgttgtaggaaatcttaaatggcccatattcatgcggaagggtgttcaaaatgaaatgcactatgaaggactcagacatatcaacctctagtttcttaagctgagctgaaatatctcgcattttcatgatgtactcacgcacacctttcacactggtgagccgaagagaagaaaacttcatgatcaaggtgcttgctaaagtcttatctgaagtgatgaactgggcatcaatggccttatacaagactccgaccttttcatgct

SEQ ID NO: 276099 - DNA, 643 bp, Glycine max
atagaatactcacagctttagagacgtcagcagatgcagacaaaatttattgtaccccttattaaatcttctctagatttgaacattacctcttcaccatcaaagttgatagtgtcattaggttaaggatcttcatcctctaagcatgcatccaatgctggttcagctttactggtggacgcatcaaccatcagacataggttggcttcttcctcgctgtccgtgtcaaacgatgaatcatccaagtcctcccaagtggttatgaggcttttctttttggacttgaagaatttcttcttcttatcctttgacttttcaaggtcaggacattctaacttgaaatgtcttggcatcttgcactcatagcagatgactcgacttttctccttttcgtgaaaggatcttttagacgaactgttaaacctggaggagttcttgtttttccacatctttctggtgatcaaacttagctcgtcatcttcttcattaaaggcatcatcattagacccttcttctaaacatcatttaatagccggggcctaaataatgacctctttgacacaaagttgtattttggccttttgaacccgaagggctaccgacttccctttctatgttccttcatcttgaacaagctcttgct

SEQ ID NO: 276100 - DNA, 576 bp, Glycine max
  unsure (1)..(576): unsure at all n locations
cagtgcttctcctctcccttcttctantacatactttnntgctatcactccatttacactacaactcctactcggccacgggtgcccttgtgacctcgtcgacgcgcacttctatcgactgcagcagcaagctatccaggatatatattaagagtgttgatgtttatttaaggcagcggatattactatgtctgctatctctggcgacaagttctatgacttcgacacaagcatctttataatngtctattccaagttgtctgtcatatatatgacgaactccacctaatatgacatagatagggaataagtccttgagcaacatgcataagttcactactctcctcggccagggatgaaaatcaaaattaaaattcgaatcttatcagtaattgtaatatacctggccgttatgctttctgagacacaatatatatcctctattatatatggaaatgaactatcacagacgtcatgcatatgtatatgttgagcctctgaatatgaaaaccccaaaaatactcaccttcataatgtcagtcatggaggatttatgaaagggtcctcgctcaacan

SEQ ID NO: 276101 - DNA, 436 bp, Glycine max
  unsure (1)..(436): unsure at all n locations
catgcattaatttcatatattacttacttattctttgcctttgtttgcttggcgcctctggtatattatggtttggtatataaaattagctcttgatatatatatatatatatatatatatatatatatatatatatatatatgctcacaatggttggagcttaatttattctaaaatctaccaatatttgcattaaagttntgataagaatatgtcaaatcattgattattttttaaagtccaataaggaatcatattttttgaggagtcataataattagcaatatttgcacttgcagttcccccaattcactcaagaaaatgaagtcttttaaactttntgacaacttgcaagctgcaaaatatttttngggtctcaccaccaacatgtttagcccacttcgtgttgtgtctaatcagtcatcacacatggtn

SEQ ID NO: 276102 - DNA, 556 bp, Glycine max
tgaacattagcttcagccacgtaccgacaagtttcaccaacccttgggtctgtctctcccaaaatctgcttctggacttctaacccagcggtgtagcacattattgaattctcaagttggcccagcatagcataggtgtctcccagttgcatgtgaccagcaaatttagcaagggcatgttgttggctttccccaataacaggaatctcaattgagcgctcaagaatcggaattgcctcagcatattgacccaagctgcaatatattgctgctgtaacatgtaaacacataaccagctccaaacttggtttcccattaccaaacttctcaaacagttccattgcttgaagagctaagtcaagagccttctgcggattatcccctgatgaaatcagaactcttgcctgctttagcaatacaggtgccccgctcaagtttttctaatgctgactcagccatacttttaacttgggtttgggacacttgactacctataggaaaattcttcgtatttcttacacccagaaaccccccaatccggttcctaaaaggttgc

SEQ ID NO: 276103 - DNA, 328 bp, Glycine max
  unsure (1)..(328): unsure at all n locations
agctntgaaggtgcgtagcccaccattgtccataatagaatactggtaatgtgtctactatcattgtcatcgtatnctcgacaatgaggtgccacttgagctgccaggttctacacctttgggcgtatactntgaaagatccgtgcacactgtgttgcacatattttgttgttgcattctatccgaagccattataccgacactgcctaacgaaggcaaccattatgtactcccaggaatggactcgggaaggttacaagttagtgtaccaggtaacaactaccccaataagactttcttggaaggaatgtatcatcaattcctcatc

SEQ ID NO: 276104 - DNA, 465 bp, Glycine max
tgacataacccattattttttgtcctaccaagccattgttggctctaaaaaattaacacaacatatgttggaagattgcacaacgactaatatgtgatcgtcttacataccgatatatcactcagcactttagtcttttctctcaaagtatacaaggtgttttgagagcttactatctataaaaaaatttatataaaaaaaactttttacaaaaaataatgaatgaataattcatcacaagagagtttgtgtcttatttcttcaaagatgcttctggatataaccttcatcttcaagaattcgctgtctcaaaatggattcttcactttgttcttcgtttgaaaacttgaaccccttggagcatttaaagcttgcatcaaatgtgcattctttcttcatgcaaagtccatgctgataggcctacacattttgtacttcattgaggaaagtcacctcctttatcat

SEQ ID NO: 276105 - DNA, 434 bp, Glycine max
  unsure (1)..(434): unsure at all n locations
agcttgnngaaattagttattggcatgtntttgtttggagaaggcgtattttactattttagaactcagtagaaagtataaatctagggattgcatctttaaataattttccaagttcttgttaaatatttgttacattgacctaatttaaaaaaaatatatatttagttcaagaacaaattaaataagtaaactagcaacctggtccctgaataatttgatattttcaattaggttcctatacagtacttaaacgaagcctaacggaaatgttgccaaggatccaattaaaaacaatntactagtttagggatctaaatctaattacagactttaaagtataggaatttatttaaaatccataaataatccagaaaccaacaaattaacttaaccttaaacaaatattatgtctttagtgtaatcttattatt

SEQ ID NO: 276106 - DNA, 610 bp, Glycine max
tctagccaaatggacttaccttgaattaattcctttgatagcccttttgagccttgtttccctttccttgttttgaagctcactacaagccttaagtgaaaaaccatgatatcaccatatccttaaggaattttggagctttggaattgttttgggaataagtatggggggtttttgtttcattggacaacttgttttgttggctatgcttcatgatgtattttgggccatacttgatatacattgtatattggttaaatgttggacatgctgaatgaaatgttgtttctcaaaggctataaagtaaaaaaaaaattcgaaaaaagaaaaagaaaagcaataaagttgagtgaataagatcttaaatggcacaagaatgatgaaactcttggctctactcttcatgtttaatttttatctttacttctttttattttcttatttttttcttaacatgcacttattcccctttgctcctttattcctttggaatttagcacttattccatatttatccataccttgttcttggccccattaccaccttaaaagacctttgaaccttatgggcctggggttggggggtggattggcaatttaaaatcctgcc

SEQ ID NO: 276107 - DNA, 430 bp, Glycine max
  unsure (1)..(430): unsure at all n locations
agcttgtgcccttaccactntgtagtaattcaataccctgaccaagagcttttgtggatgtgggaatggaaacaaccatgggagaagcagaaagaaataattaatttgaaaaattaattttgaaaaacttgaggtacttactcttttaacccttgggagaaggggaaagaaatccccacatatgtgcatttattgacaaatgcctctttatgccctttaaatacaactactgatacttgatttagaagtctccaaacacaagttgtacaatcattatgggatacaagtaaaacaataataatgataagtatagtgaaaacactaattctccaaaagtaaaacgaagagtaaaggaagaaaggccactgaagtatctagttacttttctttcttcactcggacgtcaaaagaaaaaagagacatacatatg

SEQ ID NO: 276108 - DNA, 602 bp, Glycine max
atgttactattaagaaagaatatgaccgaaaaacaggtagcatgagacagattgtaaaaagaacccaaatactggtgaaacctaatgggaataatgaacaaggaaagtatttcaaggttgatgaccaaccaaatatcttgtcttgtagacctaaagttaaataaaagcactcacacagagtgttcaaacaaagttctaactcaatagcaacttcaacttaacacaaaaattcattctcaagtacagctaggtcaaacaaagaaccccataaaaaaacacaacaacacttaggttttccaatgggcacataattcatagtatacacctaacgcacagaaaccattaccctatgcctatggtgaagcttcactggaatgtcctgcggacgagtagcacacccatgaccaccctttacacacaaattaccctaacaccaatgaaatatgaatgaatgaatcaacccatatattttaaccctccatctaaggccattcattgcaaattgcccgtaaagcacccttacctaaaatcggtcttcacccttttctaagccccctttgaaaagccaatcccccacccagggacttcccacccactaaaac

SEQ ID NO: 276109 - DNA, 319 bp, Glycine max
  unsure (1)..(319): unsure at all n locations
agcgtaaacattcaatntcgagcgtctcgatatattatgggactcaatcagacatccgagtaaaaagttattgtcgcttgaattggctcacatgttcaaaactcaatttcgaacgtctcgatatattactggactctatcagacatacgagtaaaaagctattgtcttttgagttggctcagaggttcaacattcaactttgagcgtcccgatatattacgtcactcaattggacatccgagtaaaaagttattgtcgcttgaatacggtctgacgcttaacattcaatttctagcgtctccatatattaccggactca

SEQ ID NO: 276110 - DNA, 220 bp, Glycine max
gatgtctgatcgagtcccgtgatatatcgtagacgctcgataattgaataccgaagcgctgagcaaattgaaacgacgataactgtgtgcttggtatgctgattgagtcccgtggtatatcgagaagctccaatgtgaatgtcgaagctcagagcacatgcatacgaccataacttgttgctcggatgtctggttgagtccagtgatatgtcgagatgct

SEQ ID NO: 276111 - DNA, 656 bp, Glycine max
gctttccgatatattaccggactctatctgacttccgagttttaaggaactgtgggtccaattcgctcagggattcggaataccatccttagcggctcgatctttttctggactcaatctgagagtagaatgacaagttatcagtgtttgaaaatgctcacaggcgggggtattccatttcgagcatctcgatgtattagcggacctaaccaaacatacgagggcaaagctattgtagctttaatttgctcagggctttcggattccatttggagcgtgtcgatgtattacgggactcaatcagacatccgagtccaaagctgtcgtggtttgactttgctcagagctgttacataccattactagcttctcaatgtattaccggacgtgacacacttccggaggaaaacgtatcctcacttgaatttgctcacaacttcagcattcaatttacagcgtttccatcttttcccggactcaattagaccctccgagtacaaagcactgtcgttcggacctgctcacagctcccgcattcaatttcaaacggacccactcattccgggactccctcggaaatccgagcacaacgttttcgtgcccgaatctgcttcaagctccggcgtcccatttccagcctcccgaagttttcccgg

SEQ ID NO: 276112 - DNA, 434 bp, Glycine max
  unsure (1)..(434): unsure at all n locations
agcttgccgactataccttcgaccaaacacggccgtgtttctgtctcggcccggatataaggtgggctgcagcaccggctccgcttccctaactgtactggaggtggttgccgaggctttatcctctatagttttctggagttttaacatgacctccgagatggaagccatttgatcttttaaagccgatagatcggccttcatctgttcctgcacgccctcttcattatccatttttctggatcgaatgttataggggtgccttggtgttttcttagttatgatgaaattcctaaagagataaacaatggtgagtatgccaccaaaacatgaacatgcaaatgaatgatcggagcacttggatccacccncaggtttntagataacatgatgagttcagaatctcccattttataaaaagaacaaagctttca

SEQ ID NO: 276113 - DNA, 618 bp, Glycine max
tgaaggaaaacttgatgccttggtcaacctagtaactcagcttgccatgaatcagaaatctacacctgttgcaagagtctatggtctatgttcttctgcagatcaccatatagatctttgtccttctttgcagcaatctagagtcaatgagcaacctgaagcttatgctgcaaacatttataatagacctcctcagcagcaaaaccaacaatagcagaataattatgacccttcaagcaatagatacaatccaggttggaggaatcatccaaatctgagatggacaagtcctccacaacaacaacaacctgtccctcctttccagaatgttgctggtccaagcaagccatatgttcctcctccaatacagcagtagcaacaatagcaacaacaaagacaacaagcaactgaggccccttctcaaccttccttagaggagttagtgagggcaatgaccatccaaaatatgcaatttcagcaagagacaagagcctccattcaaagtctggacaatcagatggggcagatggctactcagttgaaccaagctgattccacaattctgaccaattggcttcacacattgtgccgaatcccgaaaaatgtgagtggcctcac

SEQ ID NO: 276114 - DNA, 431 bp, Glycine max
cgcaagctttcaaatgcaagttgaccattgttttccataatggattctgctaactgactatcaagtcttctggcaacctgcatgggttgaaataattaacaagaccatgctgccagaaggaaaaatcatgagcattgatctttcatagatgaaactattgactaactttaaaactttagaataattagggcaacttttagatccagcagcacatggagattttttgtgaccataacacagttaaagtgaatcctgcctagggtagctttgctattcttagccggtcccaagcccggataaaaggagagggttgtgttaggctttcgacagccaacgttaaactttgtcgaatctctatgacatggatcaattacgtaataatgtgaatgctatgtcgttgcccggaagcaacgcgctgtatggctcgagta

SEQ ID NO: 276115 - DNA, 526 bp, Glycine max
tacagaggaaggtcttgtaaaattttctactcgggtatcaatccaggtaattggatatacccaaacccaatactgagatctcagtggtttagtaattaatttctgaggaaaaatatgccaaaccaatattataacttaattacattagagactaatagatttgtatgacagaaagaaaactttaatttttctggtgtttaatatatgttcattaacctaagatgttttggttaaaacacaaacagttttgtttaaaatttaaatggattgtagaacaacttataatttaatcttccatctcaagtatcttttgatgttgtactttcatatagaatttttaagtcatttgataattttagggtcaaccatcattatagtgctcttaatgactgtagaatgttatttggatttgtccactatccatattgcatgcattcaaatgttctggtgttgtgacatgtaatatttctatttcatgggtttctataatgacaattattacaaatgctcatgatggttttaaaat

SEQ ID NO: 276116 - DNA, 390 bp, Glycine max
  unsure (1)..(390): unsure at all n locations
cagcttcatgatgaatcaagaatgattcacagaagtttagatgatgacaaaggtgatgacaaaaagctcaaagatcaagaacacttcatgataacaaagatgaagatctcaaagaatcaagaatcaagattcaaggttcatgttccaagaatcaagatcaagattcaagactcaagattcacgaatcaagagaagacttaatcaagataagtatgataaagtttcttcaaaaactgagtagcacatggatttttctcaaaacctgtttaccaaagactctntactctctggtaatcgagtaccagattatggtaatcgattaccagcagcagaatggatttgaaaaagtgttcaactgaatttacaacgttccaattgatttgaaaagct

SEQ ID NO: 276117 - DNA, 574 bp, Glycine max
ctgtaaataggtggatcaaaacttcatttgggcaggtgatctatactaacaaaagatttgtactattaaatggttttttgtttactccccaacagaggaaggggggctaggccttacagatgtgataaccattaacaaagcggcttccctcaagctctgttggagcttcctctattctaatgacacttgggctcaattttatagggctagattcattaagaggaatgaaaacttttctctgtatagaaaatcctccatatggccttccattagacctcatttcaatctggccaagaccaacatgggttggatccttggctctagggaccaagtcaatttttggaatgattgttggtgcctttagtgacttctctcagaagctattatccttcccccatctatttgtaatcaattttttgcctcatttacatatttttggcataatggtagttaggcccttcctgacttcatcttttcttgggttcctgggttgcatgactctattaagcacttttgttagcccaacccattttccatttattcaagcttattttgtcccaagccagtcctccct

SEQ ID NO: 276118 - DNA, 367 bp, Glycine max
  unsure (1)..(367): unsure at all n locations
agctntgaaggtgcgtagcccaccattttccatagtataatactggtaatgtgtctactatcattgtcatcgttttttcgtcattggggtgccactttgagctgccaggttctccacctttgggcgtattctttgaaagatttgtgccccctttttgcacatgttctgtagttgcatcctattcgaaaccatatcaaaattgtactgatactgcctaacaaaggcaaccattaggtccttccaagtatggactcgggaaggttccaagttagtgtgccaggtaacaactaccccagtaagactttcttggaagaaatgtattagcagttcctcatctttgcgtatgcccttatcttccaacaataca

SEQ ID NO: 276119 - DNA, 631 bp, Glycine max
tgttcgcacatcgctcgcatgtatgatatccactcgacaaagtttgaagtagaggagaccttcaatcctattatgcaacgtggcggacaaaagtgggcagttaacttgaatggtcattattggcaatgcggaaggtatttctgcgcttcactatccatgttcacacattattgcagcttgtggttgcgtgagcataaactactaccaatatatagatgttgtttacacaaatcagcccatcttaaaagcttactccacacaatggtggcctcttgggaatgaagcggctattcctccttctaatgatgcatggacacttatccctgacccaactacaattcgtgcgaaaggtcggccaaaatcaacaaggataaggaatgagatggattgggtcgacaaaaatggggtttatgtaagacctactaaaaattatctaaaatcctaaaatgagatctatgaaaaaataaagagatcttcaatcttaggtacactatgcatgatccaccaaaagtgatctaagatcccaatttgagatctaccactgaagttgctctaagaggatcaacaaccggacaaagtaaggatccttttctaactacgcacccctaacacaataaaataaattattatt

SEQ ID NO: 276120 - DNA, 384 bp, Glycine max
  unsure (1)..(384): unsure at all n locations
agcttgcttgtggngcttctatggaggctggatctttgagcttcaatgaggtcctttaatggtgattctccaccatggagatgcagtggaagacaaaggagaagaggtgagcggaggcgctatccactatggaataagccatggaagaaggagcttcaccaccaagatgagccttggataagaagcttgaagaggatgcttcaatggaggaaaagaaagaaggagagaaagagagaaggggggagcaaaaaatcgaaggaataaaagagggagagaagtggaactttgaagtgtgtctcataagactttcattcatcaaagttacaacaagtgttacacatgcttctatttatagactaggtagcttccttgaaaagcttattg

SEQ ID NO: 276121 - DNA, 669 bp, Glycine max
tgtcaaataatgtctcattgcttataaaaaatgattggcactcaaacacttccacagtcttacattttatcttttaagcataaaagtgtcaaagataagatccttagcatgtataacttatctttgtggacctttgggataagtcctcaagatgtccagctataatgggtcctagtaaaattggcaagatgaaatttgagtcacaaagaggcttatagctacactaatgagatggaggccacttgggacatgttatttcaaatgttggggttttgttctatttttggtcagaaatgtgaggaaagaaagttccaggctggtggggaggcctactttgacttactatctgttgtgtcttttaaagaacagcgatggaaaaagttaggtgatatgtgtagcttacgatgtgactaactgagactacacaggaccacggtggcaacatttcctttaaggaaacacttatgaatttgcggtccaattatgtgagtggaagaaataatactttggttattgcacctaaaaatatgaggcccattggcaattggaccccttgaagatacccatcccaattgactacttcacccggaatcctacgagaccctccctttcctgctgccgccttgccccggctccaacctagccacctacctctccaccccccccccc

SEQ ID NO: 276122 - DNA, 380 bp, Glycine max
agcttgcctgtccgatgcagcagtaatgatggcccgagttatgttggggaacggttacgaacccggaatgggtttaggcaaagacaacggcggcataactagcctgataaatgccaaaggaaatcgtgggaagtatggtttaagctataagcccactcaggcagatgtaaagagaagtatcgcgggaaggaagggcggtggtcaaagctcgcggttgagacaagaaagtgaaggaagcccgccctgccacataagtagaagctctataagcgcgggtctgggagacgaacgtcaagtggtcccaatatacgaagatgatgttccgagtacattggatttggtacgacctttgccctctgattttcagctggggaattggc

SEQ ID NO: 276123 - DNA, 458 bp, Glycine max
tgccgcccagctcgcccaggggagcaaggttgcttcctccaaaagcaacagccttctggaggaatcttctggagggcccaagtgggcctggttgctatttacaccccctatttactaaatgcacccctttttctatttttttgtaattcttttttcgtaactttacgaaactttacgaatttcgtaacgatacttattttccttccgcaaggttacgaatccttacggattatgtatttactcttttttagctttcgaagaagttacggaaacttacggattgcgcaaaaacacatcttttcgatttccgccacattacggaatttcacggattgcgcaagcctgcttccttttgatttttgacacgtctcgggactttattcattgtgcaaccaaggacgccaaatgtctcgaagcgggcaatctaaagttgtatatcattaaataataattcccgg

SEQ ID NO: 276124 - DNA, 418 bp, Glycine max
agcttctgcactatcctttccccacttgaaaccctctttctttaacagattagtaagtggtcttgttatcctgccatagccttcaataaaccttctataatacccagccaaaccaagaaatcccttgactaatttcactgttttaggcacaagccatttcaacacaacatccactttcttcctatccatggtcacgcctgctccagaaatgatatggcccaagtattccaccttttttctaccaaagctgcaccttttgaaattggcaaagaactcattcagaatctgtagtgttaggactaatctaaggtgtccaaatgcgcctcccaactagcactatacaccaatatatcatgaacgaaaactaacacattttctgagaaatgcgtgtaaagtggaattcatagcacattgaaat

SEQ ID NO: 276125 - DNA, 526 bp, Glycine max
ctcagcctcgacattctcttattttctatatattttggtgcctatccatgtttttcctctctggtgtcatttaattgaaacaaattataaaagctattcgagaataaaacaactgatggtcacatcaacatagtttcatcttagacattctgtgctgcagtcatctcatatttatttgctgcctattcgactgcttatgttttacagaccatgtaatatccatgttctattttcagatttacttgatcaaaaaaagaaaacctatcccaacatgttgtgtttttagaccagatacatatatataatttatgtgtttgcctttgtagctgttcgatgtatgtccacatatgacacaatcaaagttcttctgtttcatccatgttaaggttgattaccatcatagattagccatcttgatgtactagttttttcacatttaattcaattatattaacaactttgttagatacttaactcaatcataatcttttgtactctccatttagctatttaagcctcttttttt

SEQ ID NO: 276126 - DNA, 404 bp, Glycine max
cttccttggcttattccctggtgatggtgcctcccctctactcttcttctttgcctttcgctgcatctccatggtgaaaaatcaccattgaaggacctcattggagctcaaagatccagcctccatagaatcttcacaagcaagcttccatcaagtggtaatcagagcacaagagcttcaagtaggtgctccttaaacctccattaattttttttgctttaccttctcttccattggtgtttcttcatttttctccatgtatctcctcacatgtcttgttctaaatgttgttaacatgattctttatagtctccaccgattaaactcgctatacaagttagatttgattttctatgggtcaaatttcttgttcttgttcttgaaccatgaattgtgttgagttt

SEQ ID NO: 276127 - DNA, 455 bp, Glycine max
  unsure (1)..(455): unsure at all n locations
cttcacaatatccaagcaattcaattccaaatatcatgaaactaccctaaaccaagaaaacagggtagaggcagancactttgtccaaaactcactcaaataccacagctttccttactcttataccccagtaacattctcttcgttccgattcgttaaccattggatcgacttgaaaatcttactggaggttcccagtaaataaatctacattctgaccgctgggatctgctacaaaatgcctgtaacccgaaatgcactactcttcccatgactagcaatgcacaagcatttttctgcacatttggtcaagttggctgcacaatttgacagcattttgctgcataattcggcagatttcgaaatccaacttggccacatccaattctgctcaaattggatcctacacgtcctaaatcatgtatagatcatatttaaaccaaaaacaagcttta

SEQ ID NO: 276128 - DNA, 432 bp, Glycine max
gctgcctaataacctgaaattgagagaaaatgattattaaacacacaaaatggaagtactaagtatgtattacctacacttaacaaaaaatacttataatactacaaaataaccataaattggaagagtttgatacaatttagacaagttttatacacaaaagttggtcgtattcaccgactaacaactcccccaaatttatagttttgcttgtcctcaagcaaaaagagaacaattcacttgtcctcaagtgacaataacatgcagtgaatatgtacaaaggtgtatgcaacaaaagttactgattgcatgataagagaatgaagcattatgtactcatcacttgtctttcacaaaatatgcagttattcaaagagaagaataaaatgtaagctatactattagatgaagttaatcataagacaaatatta

SEQ ID NO: 276129 - DNA, 455 bp, Glycine max
  unsure (1)..(455): unsure at all n locations
atagtctcatactgtttgtggtttttataagttttcacatagcagataatgactgttcaatactgaaggaataaagaanaataagtgactgtatgcataattacataccagaacaagtccaataatatttgtaggctgctcataatagacaggaactctgctatgccctttctccaatattggattcatcaaatccctgcttaataataagcattcagttggatgacaaaatgctgtataagatagaaaagctagtttgaacttgtaattnttttgagtcacaaatagagtccatacctatcaagctttacattaatatcaatagaaaatatatcagttatgggagtcatggcatcactagctatcttttcatagagtccttacctgtaggctgtaaggaatagaatagaagaanaaccaataccctcaaataatagatgagaaactcacctaat

SEQ ID NO: 276130 - DNA, 441 bp, Glycine max
agcttatatatcaaagatctgacaatgtagaagttgttggctactcagactcggattttgctagttgcgttgactctcacaggtcggcatctggatacatcttcatgatggctaacggagcaatatctttgagaagtgccgaacaatcattagtttctacttctaccatggaggctgagcttatttcattatgtgaagtggcatcacagggtatttgggtaaaaagtttcatagtcggactacaagtgatggattctattcatagaccattaaagatatatagtgataattcagctgctgtttctctagctaataacaataaaagtggaagtcgaagcaagcacatcgacattaagtatttagccatgaaggaatgtgtcatagcaaatgacatcatcttcgacaacatcattattgaactaatgattgcagatccattga

SEQ ID NO: 276131 - DNA, 370 bp, Glycine max
cactctcttgatgatgaagcttctttctctctggctcattctctagtggatggcgtctactctcacctcttttcttttatcttccgctgcaactccatgactgaaaatcatcattgaaggaccgtattgaagctcaaagatccagcctccatagaagcttctcaagcacgctaccatgaaatattcatatcttttttaaactctgttgcgaatgaagtatcaactacttctacatcagaagttccaatgtcatgagaagcttgcgtacattcaaattcctcatctccatgaaaattcttatagctattaaacagctcttggaaagttttcttcactataaaacttagacgctctaacagatatcttaata

SEQ ID NO: 276132 - DNA, 428 bp, Glycine max
  unsure (1)..(428): unsure at all n locations
tatccaaggaaaataccttcatctgacttagcatcaaattttcctaagttatcttttccattattcaatacaaaacatttacaaccaaagatatgaagatgtgagatgtttggttttctgccattgaacaattcatatggagttttctttaaaatgggtcttattaaagcccaatttaaaatgtagcatgcagtgttaacagcttcagcccaaaagtattttggaagaggagtatcatttaataaagttctagcaatctcttccaaagatctatttttcctttcaacaacaccattttgttgaggggttcttggtgcagaaaagttatgctcaatcccatgcttatcacaaaataattcaaattctttattttcaaactcacccncatgatcactcctaatagatataatcttgagattnttcttatn

SEQ ID NO: 276133 - DNA, 449 bp, Glycine max
  unsure (1)..(449): unsure at all n locations
gggagaggatgattcaatggagganaagaatgagagagagagaaagagagaggggggagcacgaaattgaaggaagaaaaagagagagaagttgaactttgagttgtgtctcacaagactctcattcatcaaagttacaacaagtgttacacatgcttctatttatagactaggtagcttgcttgagaagctttcttgagaaaacttctttgagaagattctttgagaaaacttccttgagaagctagagcttagctacacacacccctctcataactaagctcacctccttgagaagcttccttaagaagattcctaaagaagctagagcttagctacacacacatctctaatagctaagctcacctccttgagatgagaagctagagcttagctacacacccnctataatagctaagttcatccccataacacaatacatgaaaata

SEQ ID NO: 276134 - DNA, 453 bp, Glycine max
  unsure (1)..(453): unsure at all n locations
cgctgcatgcacgctntacagcagaatttagttatgacccactttctctagaattaatatatcttaatgccatttacctagggaattaaaaaaaaaacttaatggctgagtgtaactgaaattgtggcaaccaaaagtcacccccaacagccaacaagtcagccaccatttggtctcccataaggctgatgcctaggttgccaattgggcccttattacaacttgaactaaacctaactaaagcccttttaattgattaacccaaaacatatttttggtcagccaactgtacaaggattgtgccattatttagacaaactaaacactctaaaaattgagacaaagtggtgtcatttagtcctccttcatttgggccatgatacaactcacaaccttggacttttctccttgaaacttgggcttgtattctatagtatggacaacacttgttga

SEQ ID NO: 276135 - DNA, 452 bp, Glycine max
  unsure (1)..(452): unsure at all n locations
gctaacaataaagatcttctctatgatagtctataaaagattcagacataaaaatgcacaccatatactcacctcaacattatccccatacagattaagtatatggttttcattattaaaaacttgggcagggtacttgtttctagcattacatgccatgtcatctgctagcatgagtataatcctctcatccggtatttctagccgtttaactgtcctgaatgagaaagaagttaaagaccaataatacatcattgtcaagcataattcaaacaatttaaaaaagaaaaaaaggctaaagttgtatacgtacctatacaatgacagggtattggccatatgccgataattaaacctgaacaagggaagcagcacatttagtatactatgcatgccatacaacaagaaacctacatgtaaaatataattcanaatacctctgtaagacacat

SEQ ID NO: 276136 - DNA, 391 bp, Glycine max
  unsure (1)..(391): unsure at all n locations
agcttgcctagttaacctgaaattgagagaaaatgattattaaatacataaaatggaagtactaagtatttattacctatacttaacagaaaatacttataacactacaaaataaccataaattggaagagtttgatacaatttacataagttttatacacaaaagttagtcgtactcaccgactaacaactccaccaaatntacagttttgcttgtcctcaagcaaaaaaagaacaactcacttgtcctcaagtgacaataacatgtagtgactatgtacaaaggtgtatgcaacaaaagttacttattgcatgataagagaatgaagtaaaatgccttcatcacttgtctttacaaggtatgcagttatccaaagagaagaataaaatg

SEQ ID NO: 276137 - DNA, 414 bp, Glycine max
  unsure (1)..(414): unsure at all n locations
cacttatgcttgagtgaaacaganactgtttgatntctgctaagcatctctccatgacacttgtctcctacctagctgtatttagttgtgttgcttgctaacatgttcttttctatgaaaaactgcatgccttgtgaaaagcaattgataaaggcattcctgtttcatttgatatcatgcaactgatattttgggagttacacacattggtacataatcattgcatgttttgtcacttggggaccaatgagctattctttatttgcttgaggacaaacaaaactgtaaatttacagttcttttgtgtaacttttgtgagggtatgttagtcggttaatatgactaactattgtgtaaaaaagctgtgtgaattgtattcgactcctttcatatacagttctatttttactattg

SEQ ID NO: 276138 - DNA, 430 bp, Glycine max
  unsure (1)..(430): unsure at all n locations
agctntaggagagttacacatactagatagggcttgtgttctaataaaaaccccatggctccctatgataaaccaccatagttacaacattcattaatggggtcgcgtacatgattgagattgtagaggaggtatgttgtgggtctcaaagctgcaattgtaatagagggggtcatggtgaatcatctaaagaaatatctttagagtggagcgacattggatgtgacatccagtcagaggaagatcaggtggacgacgaaactccgacaccaaacactatctcatattctgagggagacgcatgggctgggactcgtgggaagcaattattacttgttgtatattacccatactttgcaacaacggtcaacaatgttgagaacatggactactcaccaaatagtggacccacccactacagtttatgtga

SEQ ID NO: 276139 - DNA, 444 bp, Glycine max
tcattaggctatctatggcctcaaacaagctccaagggcttgatttgatagactcaaagagactcctactgaagtttgagttcatatccagcaagtgtgatcccactttgtgtactccaagggatcatctactatctacatgctagtatatattgggaaacatccaagtcccaaatcgactagagataaggccaatatagaatatataagtggggggcaaccctcatcctttaagctaacttttagggttgagttagacttgaacccacattctaagatgatattagaacttatcttagatctattaaaagggagtcacccaccatattatccatgctcgaagcacaaacgtgttgggcgtgaggggatgtattgtggaaaacccaagtcccacattggttagagataacgcccagatagactgtataagtgagggatcaccct

SEQ ID NO: 276140 - DNA, 401 bp, Glycine max
  unsure (1)..(401): unsure at all n locations
agcttcgcgnttccactttaattttattttatggtctgggcagctcatttaacaaataggtgaaattcaaagttttttgtttaaaaaaacctatttaattaaacaagtgaagttatagatctttaaaaaagttttaagcaatcacattggtgaatttaataccacaatttaatccaattacaagtattttcttttcttatatggtgttcaacctttttatttttatacaatgtggactttatttaaacttgtactctaacaatctttcccttaaatttgaatctctctccatgatagattttcctttgaataaaagtcatgttttatggaggaatatttcatggggtcactatagctagcatgctttagatactagcaccgtctctccacccaatggacac

SEQ ID NO: 276141 - DNA, 119 bp, Glycine max
  unsure (1)..(119): unsure at all n locations
gcgtatcttcatacagattggaatatttctgatactgggctgaacctgttgnaggagatgttgatgatattccaggtgtcgacactgttattatcttgttcacaactcgcactcgctga

SEQ ID NO: 276142 - DNA, 434 bp, Glycine max
agctttctcggagccatttcctgcggagacaaacatttggaaagttagtttacaagaaaacgcttattttaaagcaaaaatggcatgctaatctttctgatttagaacaaacttgtgcacacatttccttaatgtaaaacatttatgaacgtgcatatgcgtaaaatatcctactatttatatcaacatacaaggatattcaaaacattctagttaccacacatatatatttttttgaaaagaatacatatacgcatgcttaaggtattgtgtcaaaattacacatgttcatatcctaagtattttgctaccacaaactacctacgcacatttggagtattttattaacatatacatttttgttgtttcatatttgcttatatatgcacattgaagagctaaactcatgtcatgcacacacttgcatttatttg

SEQ ID NO: 276143 - DNA, 444 bp, Glycine max
  unsure (1)..(444): unsure at all n locations
tgttnanaggggtatggaaataaatgtaatgaaagtaaaagtacacaaaacaagtaaggaccactaagggtgcatagaatgaattgaaagattcgatttcgggaacttatcagttgaagaccgaagaacaacaaagaacgaatgaagaacggtgaagaatctccacgaaatcgcttacggaaacatctcgaaagcgttacgaaaacatctccatgaaaagagggaggtggttgtcgcccagctcgcccaggcgagttaggtttcttccactataaggcaccgacttcttttggaacccttaggaaggcccaagtgggcctggtttctatttgcactccctttttcactgaatacacccncttttgtgtttntttaattgatttctttctgaaacgttgcgaaactttacggattatgcaatgacacctgttttcctttcggaac

SEQ ID NO: 276144 - DNA, 523 bp, Glycine max
  unsure (1)..(523): unsure at all n locations
nnnccgccacgcgcgnnnnnatgcncccccgntnnactccggctgngtngcttgcattaacccccaccnatagacgactnaancttgtaggtatttggaaagtatgttgtctgactcttcccaactttatatacctgctcgagggcctattgtggtgccagccatgctntacgtatgtgatggtgtatccaaactctctgcctatgaacgcgatgaatgtacgaatggatatttctgcctaccatctttgaatacattctatcgcgatcttgtggaatggctggcatgacgcctgtgtgagggccttttatcatcctaattgtcccaacttctatattttatttttcngacggactaagattacattaacccacctccgttggcaacataagacctatggttcctccctcaccccttggccttgacatacctggctcttaatgggcacattttcaaccctggctaaggccctcattggcggattgctggccaccttcgcccacactggccacaccaatggccc

SEQ ID NO: 276145 - DNA, 415 bp, Glycine max
  unsure (1)..(415): unsure at all n locations
agcttcatgttntcctttgcctcctctaacttgtgaaatttggatttgttttgaaatgatgtcactttaagtcacttattgtaaacgtcaatgaatagcctcgactgtcgatggttccttaattcatttaaaaagcttaaggaatgtttgatgaacataaaagattaactcaacatgttcatatgagacaataagctggaattttaaaaccatcaacataatggtctcaacaagaactaacaatatgtcaaattgcccatagttgagaatgatggagaagctgggatcaaagattatcaattggctattcaaattcacgttttttttaaaaaaaaattgtagttctctccatgaagtcgctgagtgactcttcctcgtcttgctgaatgtttgcaagtgccactacagtcaggtg

SEQ ID NO: 276146 - DNA, 345 bp, Glycine max
tcttaagaagtttagcttctgataacctagtaaggtacactttctgttgccattattatgaaacaaaaatgcttgatattttgtgatgtgttagaattttttcctcccttgtgtaacatctgcttccttttggggatatttggtggcaggttgaacgtatttcttatttagactcatctttgaacagtgataattgtgaagagcaatctgcacgcagagatgcagtatgtgaaacacaattggataagcaaccttctgcagaaaattcaaatgaatccgaagcaaatcgagatgataaatctgatgagacttttcttaataactcaattcagagttctaatatta

SEQ ID NO: 276147 - DNA, 427 bp, Glycine max
  unsure (1)..(427): unsure at all n locations
gttgactatgatttaatgctgtgatcatgtgttaggaatattatngngcagtgcagagcatgtataagtgtatactttgtttctactccttggcacttctggtgctgctgtattaatatataagttttgtttatctattaaaaaaaaaacttataaaatgagaattgttctcacttatgacatttcatttagtcaaatgattagtcggtgatagatttctaatacagagtgtttatttttcctataaaaaatcataaaacaactcatgctccaagtaaattatacctctttagaatcaacacaaaaggaatttgacagcacacatttatcgtaaagaatacataccattacatatataaataataaattctaaactgtactgcaccactcatcttattctgtatgtataatacatacttattgcata

SEQ ID NO: 276148 - DNA, 524 bp, Glycine max
  unsure (1)..(524): unsure at all n locations
aggggcccgcggggttttgaagcatcagaatctgatgatncactcgaanncngatcctngagaatatatatatatatatatatatatatatatatatatatatatatatatatatagagagagagagagagagagagagagagagagagaatcttctttcaccaattaatgatgccatgccaacacgtccaaacttttctgggactacactgtaactgtgtgttttctatatacaattacaatgtattcccagctagctgggatatgtctgcaagcactttaatattttatgtttacattttcaagttggttcttgtaaacaaaatctgagatcaagatcgagtggaactgcccttatatcgnggtgcctacctatggtgtggctgttgaaacctaaaaaaaatccaaattctcattttctgatttgtgagagacttgaagcacttattttccataagatcttgcaagatcacatattctttagaaccattaatatcccacgaacatcagtattgatatttgcc

SEQ ID NO: 276149 - DNA, 296 bp, Glycine max
gctcccgaatatgacagtcgtcgttttaggagcgctgagcaccagcagcgcttcgaggccatctagggatggtcatttctccggagcgatgcgtccaactcagggacaatgagtataccgacttccaggaggagataattttccggcagagggcatcgctggttacccccatggccaagttcgacccagacatagtccttgagttttatgccaatgcttggcatacagaggagggtgtgcgagatatgcgatcctgggtgaggggtcagtggatcccattcgatgcagatgctctc

SEQ ID NO: 276150 - DNA, 464 bp, Glycine max
  unsure (1)..(464): unsure at all n locations
ccacagcaacacanaatctaggtgtccaaaacccctcaattcaatggcttttctaggtttgaaaggtggaatttagaatgaggtaaatttgaagcaaactctcacctcacacaagtccataacatcaatctaaacttgctcaaactgaatttacaccaaaaattccaccaaaccaaaatttgactcttcaacacccaattttgccctagaaatggctcttggttcactttggtcatttgtttttctctctagctcagcctaacctttctcacatgtcctaaatgacatttcaagctagtattaactcactttaacctccatttaccacagaattcagacttagccttccaactctcaaagtctcactctttttccactcataacatcacattctcactttctaaccctaggttagttctacccttcatctctaacagttntccattcagcaattttcagcctac

SEQ ID NO: 276151 - DNA, 435 bp, Glycine max
  unsure (1)..(435): unsure at all n locations
agcttctacatgtctagagagttatagagagagaaaggtccaagttccagagagtttgggagattttgttgtgtgaagatctgcagagaccagagcttgaagaggaagtcgtcctgagagcttgggatgagtttgtgagtgattgtgaggtcttagaggtggaggagacatccccactacttgtatttctgcaatctttcatcattctcttctctttgntggaaaggaagcttcccagttatggaaagctaaatcctctgttgaatcttccttgtaggtacttgatgtaaatatctttttatctatctaatgatgttttgtgtgttctctgtgctatcagtatttcattctagtatgcttttaccttgatcacatagatgcacgctntgttagggtcattcaacaatggaaactggtctgattcttagaacttga

SEQ ID NO: 276152 - DNA, 424 bp, Glycine max
  unsure (1)..(424): unsure at all n locations
cttctatgcaggctggatctttgagcttcaatgaggtcctttaatggtgattntacaccatggagatgcagtggaagacaaaggagaagacgtgagaggaggcgccatccactatggaataagccatggaagaaggagcttcaccaccaagatgagccttggataagaagcttggagaggatgcttcaatggaggaaaagaaagagggagagaaagagagaggggggagcacgaaattgaaggaagaaaaagggagagaagtttaactttgagttgtgtctcacaacgtgacatcctgtaaatttctacccagaatttttggaaacaatgtattttgaatgattatatatatatatataagtattattcagtgtatatgcatatatgttcttgatagaagtacgaatagtgggggcaagatatg

SEQ ID NO: 276153 - DNA, 443 bp, Glycine max
  unsure (1)..(443): unsure at all n locations
agctcgtaggattatggngtacccatcacatgtggtactaggtggctgtcgggcgatggtgcacaacaagtttttccacatccacaatgcgcgcataaacccaccatcccctgttgcccacctccaactgagctcacgtactcccacgtagcccatatcctcgtttctctcaacaccgggtccccatcaatcctcccaagcttccacaatatccaagcaaaacaacattcacacagcacaagctatcacagccaagcaaaacagagcaaaggcagaaaactctgccaaaacaccaaccaaaaatcacagcttttcccactcaaagaccccagtaacaattccttcgatccaattcgtaaaccggtggatcgactccaaaattgtactggaagtctatagtgcataagcctacattttgaccgttgggatctactaacaaacat

SEQ ID NO: 276154 - DNA, 447 bp, Glycine max
  unsure (1)..(447): unsure at all n locations
tacccgtcatatgtggtactaggtggttatcgggcgatggtgcaagtcgactctccacatccacaaatcacacataaatccaccatcccaagttgcccaccttcaactgagctcacgtagtcccacgtagcccttatcctgattcctctcaacaccgggtccccatcaatccctccaagcttccataacatccaagcaattcaacatccaaacatcatgaattatcagaaccaagaaaacagggcagaggcagaaaactctgcccaaaacacaaaccaataccacagctttccttactcaaataccccaataacattctctttgttccaattcgttcaccgttggatcgactcgaaaattntactggaggtccctagtacataagtctacatcttgaccgttgggatttgctagaaaatgtccagaaccgaatatgtactacccttt

SEQ ID NO: 276155 - DNA, 446 bp, Glycine max
  unsure (1)..(446): unsure at all n locations
agctntntatctttgcttcanaatcacaacttatatagaaaaagagagatgaggtaggttgactatgtcatggtcgtgaagctcttgatcttgaagagatcagagctcgtgtcgcttgcggtgtcgtctttgacaatggcacgcaccttcatctggaacgggaagttgagttgcttttgtgacggatttgatgatggctcatccggtagacaaaaactcgagggattcacgtggcaaatcttcattgaggtagaggggggaagtaagaagcgaagcaacaaggtagagggggagaaggaagaactgaagaggtaaaggggagtctaagagtaagtgggagacaaagaaatgagagagtacatggagagataaaaattaaaaacaaactcacttttaagatggtttttacaaagttgccttagaataacagtcttttaagatgattt

SEQ ID NO: 276156 - DNA, 384 bp, Glycine max
gcttgccacccagctcgcccaggcgagctaggttgcttcctctggaggaacttcctggaaggcccaagtggggctggttgctatttgcacctcctgtttactaaatacacccccttgcctttttttgctgattctttttgtgtaacgttacggaactttacaaattccgtaacgatacttgctttccttccgtaatgttacggaaccttacggattacgtaatcatcccttttttggctttcacaatgttacagaacctcactgattgcgtaacaatgcttccttttgatttacagcatgttacgaaacttgacggatcgtgcaacaatgctctcttttgacttctagcacgtgatggaatgtcacgtattgtgcaaaatgggt

SEQ ID NO: 276157 - DNA, 354 bp, Glycine max
agcttatgactctagacaatttctttaaaactagtcacttaaaaaagttgtgacttttgaaaaaatcttcagaaacaagtcacttgaagaattgtgacttttggaaatgtatttttcgaaatcagtcactggtaatcgattaccattaaggtgtaatcaattacacatcaacagatgtgactcttcatttaaattttgaaaattaaaacgtttagaagctctggtaatcgattatacaagtttaaaatactttaaaactgtttaaacataagttataactcttgaaatttgaaatcttaacattttaaaacactggtaatcgattaccagagagtaaaactctttggtaatgat

SEQ ID NO: 276158 - DNA, 395 bp, Glycine max
  unsure (1)..(395): unsure at all n locations
ntacattactcctcatgcttctcaccatgtctaataaggttctatttcttcgttctgccacaccattctgatccagagaaccaggcatagtgtattgngcaacaatcccatgttcttgaagaaatttcgcaaatgaacctggtgcttgtccatcctctgtgtatctaccatagtactccccaactctatctaatctcacgatcttaatttgttttccacattgtttctcaacttcagccttaaaaactttaaaggcatctaaagcttcattcttagaatgaagtaagtagagatacatatatcgtgaataatcatctataaaggttatgaagtatttcggactatttgcatccatgtctggacaacatatgtctgtatgtatgatttctaataaa

SEQ ID NO: 276159 - DNA, 386 bp, Glycine max
  unsure (1)..(386): unsure at all n locations
agcttgtggcactctntctgcacattctatatctctgcttcatatggcatacttatagacttttaaaatggtcacatagcaaaatctctctgttcatccagcaagtatgttctgaattgtttatcacaattcaatgatatattcttacccctttcaaatttatgcctgacatatcattcctctctattcctcaaaataattccacatgtgaatgtgctaacccagtttctctacactagccagggaatgaactgctgactaagtttccttcctgccaagaactatgtatntttttttatctgatattacctggaaaacgaaaacaaaagaaagaaatatgatcgggaattccacggtgaagctggagattgataggtaatccctat

SEQ ID NO: 276160 - DNA, 235 bp, Glycine max
  unsure (1)..(235): unsure at all n locations
cttgattgcctaggtgtggaccctcaagtgcaatcctccattctncactcttntcggagccccatgaatgtcattgcctagcgctattcatgtgtcctccatcttcgagtctggagccccgcggatgtcattgcctaacactgttcgctaattctccattctccacttttattcggagctccatgaatgtcattgcctaccgctgttcatgtgtcctccaccttcaagtctggag

SEQ ID NO: 276161 - DNA, 432 bp, Glycine max
agcttgaggttaatcgtaaaactgcaaagacatgaccttgtgagaggtttaccaagaatgtcatacaaagttgatttactttgtgaagcatgtcaggagaggaaacaaattaaaacctctttctcaagcaaaaactctatttccacctaaagaccacttgaattattacatatcaatttgtttggtccaactagaacaacctctgtcagtcgaaagagatatagtctggtagtagtggatgactactcaagatggacatgggttatgttccttgctcacaagaataattccttagagatcttctttaaattctataaaaggattcaaaatgaaaagggagtatgccttacttcaataagaagtgatcatggtggagagtttgaaaatgagaactttcatctattttgtgaagaaaatggaattctttataac

SEQ ID NO: 276162 - DNA, 415 bp, Glycine max
  unsure (1)..(415): unsure at all n locations
gtcaaagatggatgtatctaatatgaagtgaatcaatatttattaatgttcattnttttattcttaactctctctttatctattctttaatgtaaagacgttttagtttaataaaaaatcttaaattcttgtcttactatacatttatgttaaatattaaaaagagagttttaatatatatttaaaataaaaaattatttaataatcatgtaattacttttaaaaaaattgcataactttaagatttagttttaattcttttatcattttatcctccgcctaattcactcctttaattatttggatataagctttcttaattatatgtctctctatatattaaatttttaaaaatttatatatatttttactaccatatactttataaattaaaaaaatacattaacagttatac

SEQ ID NO: 276163 - DNA, 405 bp, Glycine max
  unsure (1)..(405): unsure at all n locations
agcttattatagatttgacaacattgatcacgctaatagaaatcaaatgactataataccctggaataataatgaaaagtttaatcgttaccaatgaattatgtatgtaataagtattaattgtttctaattcaccaaaaaaagtactaattgtttctcaagccaatttcattgatagtataaaaaaaattaaaaaaaagttntccaaccgttaccctatgtgtaagataaattgtaatatgtaccattaaagttattgtctaacatactaacatgtattaaaaaagttttgtatatgttattgatagacgtgaacaaaataaatacacattatttattttgtctagatttaatgaactcatgtaaggtacatgaatgcaccctaactactcgcccccaccacca

SEQ ID NO: 276164 - DNA, 454 bp, Glycine max
  unsure (1)..(454): unsure at all n locations
taagcatgataaagatattgagcatatatgtttcaaagatattaatgtttacatgattgatatgaaacaacaattatctgattatgggattgtattataccatattcccataaaatgtgacaacacaagcgccataaatatatctaagaacccaatctttcactctataaccaagcacatagaaattacgcatcattttcttagagatcatgtcctacaaggtgactgtgttctacaatttgtagataccaaaaatcaactcgcagatatcttcacaaaaccactacccaaagattccttctacaccattagaagagaattaagacttntagatgccaatgacttagacaaatgatctattctatgttatgatgactcatcacttgtttaatacacatgctcttattatgttttgtgaataatgtctgacatctatgtcgtcatttattttctg

SEQ ID NO: 276165 - DNA, 436 bp, Glycine max
  unsure (1)..(436): unsure at all n locations
agcttaatccttccctccttataggctttctaaatagcttgctgaaacactaaacaattggaagcattatgactataagagttgtgccatttgcaatattttttgtcttgtatctcatcagctgaaggaattttatgaccatccatcaatcgaatttgctaatccttcaatagatagtacataatatgactgcctttaaaatgtcaaatgagtattcaaacttctcatttgtggaattagaagttcttgctttcgctgttttcaatgctagacaagagtaaagcttttcacctggcaattttggatgccatgatcttagcttccccttgaatagaaatagtagtgtattcatcagaatcaacaattgactccagttgtggtccacgaccctngttttcctgtatttgttctttatctatgatgagttgctccaccc

SEQ ID NO: 276166 - DNA, 464 bp, Glycine max
  unsure (1)..(464): unsure at all n locations
accanatgctcaccactattagaggagagaccttcatgttgtgtcatataaacctcctcctctagatcaccattaagaatagctgatttcacatccatttgttgcaactcaaggtcaaaatgagcaactaatgcccagattatacgaagagaatctttcttagatactggagaaaaagtctctttggaatctattccttccttttgagtaaatcccttagcaacaagtcttgccttgtatctctcaatgttgcctaatgaatcctttttggtgttaaagacccatttacatccaatggccttcgccccattaggcaactctacaaggttccaaactttgttactttgcatggaactcatctcatccttcatggcatcataccataaatctgactctttacaactcatggcttgatcaaaagtttcaagatcattttcagctccaatattatagtcagattcttg

SEQ ID NO: 276167 - DNA, 291 bp, Glycine max
  unsure (1)..(291): unsure at all n locations
agcttgtcaaatagggaagcgagttaaaaaattctttctaagcaaaaacgttgtttctacttcaaaatcccttgaactacttcacattgatttatttagtccctcaagaacaatgagtttaggtggaaattactatggcttagtaataggggatgactactcaaggttcacttggaccttgtttttgaaaacaaaaaatgaagctcttaatgctnttcgcacacttgccaaggtgattcaaaatgaaaaaggtctcaacattgtttcaaaataagtcttttgaaatatttt

SEQ ID NO: 276168 - DNA, 361 bp, Glycine max
ggaccttcaaactagctgcttggggctttatggagatggatcttgagctttttgagatcctttaatggtgattatccaccatggagatgcagcggaagacacaggagaagaggtgagaggaggcgccatccactacggaataagccatgatagaaggagcttcaccaccaagatgagccttggataagatgcttggaaggatgcttcaatggaggaaaagatagagggagagaaagagataggggggagcacgaaattaaaggaataaaagagggagagaagtggaactctgaagtgtgtctcacaagactctcattcatcagagttacaacacgtgctacacatgcttctatttatagac

SEQ ID NO: 276169 - DNA, 280 bp, Glycine max
  unsure (1)..(280): unsure at all n locations
agctngtacaattttgctacatgatagtcctccattgggtggtttgcttttcctttaactaggctaaagccatacttaactgagccctgatggctcttgcccttgccagaaccacatgaagtgcgtccttccaccacctaaaactatttaaaggtaaatacaataaccaaagaatcttctggttaacataacataaatgcaacgcaatgtcaggaacatgggtgaaattaaaaagaaatttcaagggacaaggcacatggctgattatcaaagggaacat

SEQ ID NO: 276170 - DNA, 355 bp, Glycine max
  unsure (1)..(355): unsure at all n locations
tattccaactcatcctatgtattcttcctgcagagaattatagatcatattttttaagacaaaaaacccgccatgtttggaaaaaaataaccttatctttntttgtgtgttctcatccttatctctctagctagcagcgatttttaacaactttcacacacaatgatattgatattgacagttaattgaacatcttggccataattatcatgaactactccaaatggaaggagaaatgatcttcaacctaaatttaatgaatattctttttaagtcacatacttaagtataaaaaaacggataaattaatcggtgaccaaacgtgtttcatatgtcaaactaacctattttaaca

SEQ ID NO: 276171 - DNA, 405 bp, Glycine max
  unsure (1)..(405): unsure at all n locations
gcaatgactggcaacaaattntgttagtcagagggaatgattatttatgccagtaaagaattgtgtagtttgtatgcattgaacttgattntcttttatcccctttaggcatttgtataccattctcattcttttaaaagcttctattgcatgttttttctctttttaaaaatgaatgtagaatttccactgctagttggactgatgaaaagaactttgatcaatttcttaatggactgctcttttgggatttcatttttcaaatacgtcaatgtcttagatgtgatgaagggttcgaaaaatattgtttcacatgtttccagctgaagttgttgagtcatgagtgggccagctgggcctgctaatggtagtcatacgaaaatgatgataatagtgataattaaa

SEQ ID NO: 276172 - DNA, 424 bp, Glycine max
  unsure (1)..(424): unsure at all n locations
tctccttccatggcttattctctagcgaatgacacctcctctcacctcttcttctttatcttccgttgcaactccatggctaaaaatcaccattgaaggaccttattgaagctcaaagatccagcctccatagaagcttctcaagcaagcttccatcaagtgataatcagagcacaagagcttcaagtaggtgctccttaaacctctattaattttcagctttaccttctcctccattattgtttcttcatttttctccatgtatctcctcacatgtcttatgctgaatgttgttaacatgattttttagaatttccaccgattaaacttgctatagaagctagatttgattttctatggttcaaattccttgttcttgttcttgaaccatgaatngttttgagtttaagttcctttgagtttt

SEQ ID NO: 276173 - DNA, 443 bp, Glycine max
tatgcgcatatttccttacgaacgttcacttgcacaagacattctatcaactaagaaaaatgcacccatatacaatcaaggtagcttcattacctacattatttacatgtacttccaaggtgtatttgttatttacatcacacacgcctccttggctgaatttacatacatacatactcaaagcattttggggtaccaaaaactgcacatgcgctcatcttggtatttctaatacccatacatatacaaacttcacgatgaatcttgactacctacacaataaggtgctacatttcatgctttcttttttttttttttttttcaagtttttgctacctaaagccacatgcaaattcaagcatattttcctttgctgactaaaattgtattcaaattagaaggtatatattttttttgtaatatgttttcttcacataacatgc

SEQ ID NO: 276174 - DNA, 456 bp, Glycine max
  unsure (1)..(456): unsure at all n locations
attgtctctcacagtctntagatttgagagccaatccaatccttgtgtccggactctcagccacttatgatagccgccgatgatcccattactgcttcccctaagctctctgtcctttcttcacaccgcatcacatgacttgtgaactccttagagtaccctcgcattgnggtcactgaaaccccgtgtgatgaaaggcgtgatgctttcgtctgatggcactcctctcatggggtagccaagctgtcttatggcgaggacgggattataattaatacaaccccttgttctcatcaagggaacatttggacatccttcgcatgaagatagaatcctgattcttccttccttctagcgagggaaccaattaacagacgcccctccatgctagccaagagttggtcccaattcgcctttcctttntcgacgcacgagcggtgatcttgtagcggatag

SEQ ID NO: 276175 - DNA, 426 bp, Glycine max
  unsure (1)..(426): unsure at all n locations
ctcacccttggggtgaatctccttcttccatggcttattccctagaggatgacgcctcctctcacctgttctgctttgtcttccgctgcatntaaatggtggaaaatcaccattaaaggacctcattgaagctcaaagatccagcctccatagaagctccacaagcaagcttgcatcaaagaccttatcttctctagggattcacccacccatatattctataagtccaacgttagccaccacgacaacctacaatattaggatgagggcctactaagtacccacaacttatgtgcttactcacatgcaatgtcaacaatttatgcatgcatgttatgacaaccaacatcaaaatatcatacaccatcgacattgaattgatcaatcatcatcatattattctatttcatcatcaactcaccattc

SEQ ID NO: 276176 - DNA, 465 bp, Glycine max
  unsure (1)..(465): unsure at all n locations
atggtgacgaatcaagtcgttntgatgatgacaaanagcctataagaatgatttcaagattgagtcaaaaagttcaagatcaagattaatttcaagattcattagaagaaatcaagaagattcaagattcaagagaagttgatttcaagattcaagaaaagacatcaagaagaatcaagattcaagagaagaaatcaagaagcaacaagtcaagacttcacaagggaagtattttaaaagatttttcaaaaaccaaacatagcacaattttgttttacaaaaaagttttctcaaatttttctaagttaccagagtatttactctctggtaatcaattaccagtttcctgtaatcgattaccagtgataaaatatgatttcaaaaagttnttaactgaatttgcaatgttccaaatgacttttaaatggtgtaatcgattaccagtgtatctgaacattgaaattc

SEQ ID NO: 276177 - DNA, 447 bp, Glycine max
  unsure (1)..(447): unsure at all n locations
agctntgagccaaaatcctgactcaccataaaccttgacccagggtgagaatgtcaatccttaccctcggaagcaaaaaaaggaagagaaggaaaatttccaagcaaaaaaaaggagagaaggaaaatttccaatcaaaggaaaaaaagaggaaagaaaatttccaatcaaaggaaaaaagagaggaaaggaaattcccaatcaaagaatgggagaaagaaaaaaaaaagagagaaggagaagaaggaaagaaagctcctgatcaaggatcgaaagaaaacagaagaaatgtgcaaaagaacaatacggaattgtcaccaaatgaacaaaagaaagaaaaggaaatcataacctaaaagtggtcttctccctgtgattaccaatcaaaatcctgtgcgtcggtgacttgttcgcctcgcgtcaaacaaaaacagaaaaggaaaaagc

SEQ ID NO: 276178 - DNA, 464 bp, Glycine max
tgtagaagtaagtctcatatcggtttaatcgattattgatatctcataatcaattacactgttgtttgaggcaatgactaatttagtcaggagtctctgctttaatcgattaccaagtggattaatcgattacttttctcttgttcaagtgtttagaggtgaacaagaacactttaatcaattacttaggtcatctaatcgattacatagttcttgagttgttttctagatgttggatgtacactttagtcgattacttagataatctaataaattactttgttaatataatcgattaccttatagatttaatcgattacagacggttataactgttttctctataaataaccaacttgagttcacatctatacatcatgagattattagagaatatttagtacatcttgaaaataacatcttagccttagaatgagcatgatttcgtgttttcattagtgaat

SEQ ID NO: 276179 - DNA, 444 bp, Glycine max
atgtctatccacaatcaattcaaacaacatgcaagcagccacaaagtttcatggatatatttcaatttacgcacacataattcagattttaaaatgaaaggaaacattagtgaattgacttaccagatatcacaagacgaagaatgataaatgtttgcatccacaagagaaagaaatgtatactatatcttctattgaagatgatattagatatataaagcacacatgcttgatacacacaagaagatgaaaacattgcctcgtgcaaggtatcttaagtatatatcaacgtaaaagacaacaaatctaacaaatacttgaaaggctcattatataagtaatggaggataacatctcttacccttcaaaatcctttgagaagtttccccaaacatgtgtcacatgacaaagatcttgataagttgttccaacataaacaagtgc

SEQ ID NO: 276180 - DNA, 409 bp, Glycine max
taagttcttgaatatatttggatattgctttcattacttccttgatgctcacctcgggcttagataaccctacgtcataaaaagtgagtctcctccagaacatatggattgaatccagtgggatgcaaccaacaacatatttggatagctcacaagcacaaggaagaccgtgcgtggttctcatcacacaaccataagtggaaggattcttgccagcatagtgagcacgctcaaattcagcagcaatctgatttaaagcataccttgaaaccatttcaagaagcctcttgtataaggattttttgaagacatgtccaacgacatgtgtacttgtttcagatgatgctctaatttccgtgtgctgtagcgtcatcatgttgttcatcgcataccagacactgcataagtc

SEQ ID NO: 276181 - DNA, 418 bp, Glycine max
  unsure (1)..(418): unsure at all n locations
agcttcctagtcttctggactcaaattgccatattaaaggcagagcaagttgaaattgaacttgtttgcaatcatgggaatattttacctaagcttcataatgatacttcacgtgatattcaatttaatgaatgttcctattataaattccaacatcacttgaagggtcatgatatcacatccgtacaactttaaatatagaatcatattcgaagacttaaaaaaaatgagttgaaatgcctttggaaaaaggaaatgcatgaatagatatgttctgtttcgagtatgccctttntgtggatacccatgaaataaaatatatcttcaaatacttggcatgagttcaaatcagaatgtatttggaatatttacgcataagcatatctataaatagaattcggtcaatgtcttatttcat

SEQ ID NO: 276182 - DNA, 403 bp, Glycine max
  unsure (1)..(403): unsure at all n locations
ntgatgcaatcttctcatccttaatggtgttcctcatgttgtatgcatagttctccaaagcattctttgcgtcgaccttcttcttgtgctcctcatcctcggccttgtacttctccgcctcttggaccatcttctcaatctcatccttcgatagtctacccttgtcgttggtgatggtgatcttgttcttctgccctgtggtcttgtcctcggcagagacattcaagataccattggcatcgatatcaaagcagacagtaatctgaggaacacccctgcgtgctgggggaatgccagaaagctcaaatttacccaacaagttgttggccctggttctagctctctctccctcatacacctgaatcaagacaccaggttggttgtctgagtaagtagagaacac

SEQ ID NO: 276183 - DNA, 407 bp, Glycine max
  unsure (1)..(407): unsure at all n locations
agctntataagtgcgggtctgggagacgaatgtttagtggtcgcgatatgtgaagatgatgttccaagtaccttggatttggtccgaccatgccctcctgatttccagctgggaaattggcgggtggaggaacgccccggcatttacgcaacaagcataatgtaaacctttacggttttaaaagctctatagttgggcctaggctttagagttttcattttgttaaggctttgtgtcttttgtctttgaatttataatacaaggatctttcttcatctgttcctggtctctacccattctcattcatttgcatgtttacttctttttctgaaacggcagattcgatgacgagtcccccgaatgtactaatacctgtgacccgtctatcaacttcgagcaagaaatga

SEQ ID NO: 276184 - DNA, 458 bp, Glycine max
  unsure (1)..(458): unsure at all n locations
ctataaaactaagcttcgacatgataatggagacacatgaacagcgctaggcaatgacattcatggtgctccgaacaaaggcggagtatggaggattggcttgagggtccacacttangcaattatgaaactcagctccaaactcgaaagtggaggacacacgaacaaccctaagcaagaacattcatgtggctccgaaaaaggacgagaatggaggattgccttgagggtcctctcttatgcaatcatgaaacacagctccaaactcaaaagtggaggacacacgaacagccctaagcaagaacattcatgtggctccgaaaaaggacgagaatggaggattgccttgagggtcctctcttatgcaatcatggaacacagctccagactcgaaaatggaggacacatgaatgacaacgcaattcattcatgtggctccggaaaatgatgagaatgga

SEQ ID NO: 276185 - DNA, 327 bp, Glycine max
  unsure (1)..(327): unsure at all n locations
agctnggcacgggcatcttagttcattccttatgaataatgattntaaaagaggaaaatggatacaactatgttatgcaagaattatgattcccaatttagcaattttattaagaattggcttccacgttttctctcttcttgggttagctccaatagggataccaagatacacaaagggaaatttattgatcatatagtttatgatactagcataccttctccaagtgctatctntaaccctaataagtctaaagaaacttttatgaaaattaactttaaggcccaagatgagctcgaaacctcttaatatacttttaatggtata

SEQ ID NO: 276186 - DNA, 415 bp, Glycine max
  unsure (1)..(415): unsure at all n locations
tgtgcatccaataccctgatgaggatgtcctatatgttcttatacaggactgatccatgtgcttccaaagtttcatggccttgaaggtgaagacccacacaaacatctganagaattccatattgtttgctccaccatgaaacccccagatgtccaagaggatcacatatttctaaagacctttcctcattctttagaaggaatggctaacgactggctatattaccttgctccaaggtccatcacgagctaggatgacctcaagagagtattcttagaaaaatttttccctgcttccaggaccacgtccatcagaaaggatatttcacgtattagacaactcaatggagagagcctatatgaatactgtgagaggtttaaaaaattatgtgcccgttgccctcaccaccagatt

SEQ ID NO: 276187 - DNA, 432 bp, Glycine max
  unsure (1)..(432): unsure at all n locations
agcttgcctcanagagatccaggaaggataaagcgaccgaaggaaccagttccgctcccgagtatgacacccacctctttaggagcgctgaacaccagcagcgcgtcgaggccatcaagggatggtcatttctccgggagcgacgcgtccagctcagggacgatgagtataccgatttccaggaggagatagttcgccggcggtgggcatcactggttacccccatggccaagttcgacccagacatagtcctcgaattttatgctaatgcttggcctacgaaggagggcgtgcgagatatgagatcctgcgtaaggggtcagtggatcccgttcgatgcggatgctatcagccagttcctgcgatatcctttagtgctggaagagggccaggagtgcgagtatggtcagaggaggaactgggctgatggtt

SEQ ID NO: 276188 - DNA, 299 bp, Glycine max
  unsure (1)..(299): unsure at all n locations
ggcctcanagaggtccaggaaggacaaggtatccgaaggatctagttccgctccggagtgtgacagtcaccgctttacgagcgctgtacaccagcagcgcttcgaggccattaagggatggtcgtttctccgggagcgacgcgtccagctcatggacgacgagtatactgatttccaagaggaaataaggcgccagctgtgggcaccactggttactcccatggccaatgttcgatccaaaaatactccttgagtattatgccaatgctcggtcaacatatgagggcgtgcgtgacatg

SEQ ID NO: 276189 - DNA, 382 bp, Glycine max
agcttctcggctcatgctgggaacgcctctagttcaacacccgtgcagcctaaggcacccacccagagggaagctccccaagttccaactccgaacgcgactcgaccggccggtaattccaacacgacaaggaacttccctccgaggccgttgccggaattcaccccgctcccaatgacgtacgaagatcttctaccatccctcatcgccaatcatttggccgtggtaactcccggaagggtcctcgaaccccctttcccgaagtggtatgaccctaatgcaacttgcaagtaccatgggggtgccccggggcattccatcgaataatgcttggcccttagatacaaggtccaacatctaatggatgccggatggctgactt

SEQ ID NO: 276190 - DNA, 422 bp, Glycine max
  unsure (1)..(422): unsure at all n locations
accatggggtacccatcacatgtgttactatgtgtcggncgggtgatggtgcacaacaagttttccacatncacaatgcgcgcataaacccaccatnccctgttgcccacctncatttgagctnacgtattnccacgtagnccatatcctcgtttctctcaacaccgagtccccatcaatcctcccgagcttccacaacatccaagcaaaacaacattcaaacagcacaagctatcacagccaagcaaaatagggcaaaggcagaaaactctgcccaaaacaccaaccaaatcacagcttttctcacataaagaccccagtaacaattccttcgatccaattcgttaacccgtggatcgactccaaaattntattggaagtctatagtacataagcctacattgtgacccgtgggatctact

SEQ ID NO: 276191 - DNA, 205 bp, Glycine max
  unsure (1)..(205): unsure at all n locations
agcttctgtnttcaattttgagaatctcgatatattacgggattcattaggacatccgggtaaaaagttattgtcgctcgaatttgctcagagcttctaatattaattgtgagcgtctccatctattactgcacttaatttgtcatcccaacgaaaaggtattgtggattgcatctgctacgacctttgcgtttacaatttcgag

SEQ ID NO: 276192 - DNA, 161 bp, Glycine max
ggtagcatattcaaacgaccataacttttaactcggatgtctgagtgacgcccgtaatatatcgagacactcgaaattgaaagcagaagctctgaggaaataccaacgactatatctctttactcagatggctgactgtgggccgtattatatcgggaccc

SEQ ID NO: 276193 - DNA, 413 bp, Glycine max
  unsure (1)..(413): unsure at all n locations
agtcttcaccttttgtcctcctcagttgntgcatgagaatacatgctctattttcatcttccactccaagtaggcctccggatcattctttcctttaaatggaggaatggtgagtttaataccatcaattcggttttgtctaggaacaccatcattccctcttctcctcctttcttcttcattatgatctctattctccatttgatccaacctctcatggagcgcatcatctcgttgtttcattaacctctccaaatgttgcatcanaacttgcatttggaatagcgaaagccccactccatcattangaatagtacctgacatctcanacaaacaaatcanacgtaacaagacaattatagttgcttgttgaatacctcacccactcaagtgtatcacacaattatggcttt

SEQ ID NO: 276194 - DNA, 378 bp, Glycine max
  unsure (1)..(378): unsure at all n locations
tcctctaccaggtgaaaaacattgtcggccagcgcttgtattanaattgcgcaatgtcggctgaaaaacatcagttggggctgtttaactaccgatgctggctactgttttttctattccacccctgaataatacttggacgatgtcgatttggaaatgttcgatcggagtcatccggtcatgcttctttttaagacctcgatctgtcatcttnttctggccgacgtcggctagcattnttttcgatcaatatcggtgaatcatgctttttgccaaggtgggctaacgttttcgtggctcatgaaatgagagcatgccagtgtctgccgaaacacaatctcgcacgaaaaaccctagccgacctacattgtaattttt

SEQ ID NO: 276195 - DNA, 414 bp, Glycine max
  unsure (1)..(414): unsure at all n locations
catcttggggngaagctccttcttccatggcttattccctagtggatggcgcctcctctcacctcttctcctttgtcttctgctgcatctccatggtggaaaatcaccattaaaggacctcattgaagctcaaagatccagcctctatagaagccccacaagcaagcttccatcaagcggtaatcagagcacaagagcttcaagtaggtgctccttaaacctccattaattttttgctttaccttctcttccattgttgtttcttcattttttatccatgtatctcctcacatgtcttgtgctaaatgtttttaacatgattttttagagtttccaccgattaaacttgctatagaagctagatttgattttctatggttcaaatttcttgttcttgttcttgaaccatgaatt

SEQ ID NO: 276196 - DNA, 462 bp, Glycine max
  unsure (1)..(462): unsure at all n locations
tagccctagaggggatggacccaatcctccctaggaagggaccaatcactagaaccatgagcaagaggctccaagaagattgngctagagctgctgaagaaggccctagggttctcatgcaacttanggtagatttctgagcccatgggccaaggttgggtccaattatctttgtacatattagactaggatgtcattatatttggtccttgtatttagggctccatattgtaggtagggtaccctagaaatataggatttttcaacccttgtatttttgggcacctagactagtttttgtattaggggtagttttgtaatttcacatgcactaagtggatatttgatgtgtgtggttggaaataaatttaattgaattggtagaagcccaatccaattaaattntagagggggaggtgagcatttgcttactacaccccattgccacatcatatagtcaca

SEQ ID NO: 276197 - DNA, 417 bp, Glycine max
  unsure (1)..(417): unsure at all n locations
agcttcatggtgatgaatcaagattgattcaagttgttttgatgattacaaagatgatgacaaaaagcccaagagaatgacttcaagattgagtcaagaacaattcatgaatcaagagaaatttgatttcaagaatcaagaatcaagtttaaagtttcaagaatcaagaataaaaaataatcaagatcaagattcaagactcaagattcaagaattaagaaaagactcaatcaagataagtactaaaaagttntccaaaacattgagtagcacatgaagttttcacaaaagcttttaccaaagagttttgaatctctagtagtcgattaccagtttactgtaatcgattaccagtagcaaagtttgttttcaaaagctttcaaactggaattacaacgttccaattaatttcaaaat

SEQ ID NO: 276198 - DNA, 456 bp, Glycine max
  unsure (1)..(456): unsure at all n locations
tgtcttgtgcagaattagggcacagactntaagtagaggattggcaaagattccaaagcacaccatagttcctacttcgggaaaagagctctggaggcagcaagaggagcagcttttgcagagatacctacgttttgtaagcttattattgttagggtttcttctataatggttggctaaacaccctagttggggatttctaataaacggctgatgtaaatacctaatatctaattgattatgttttatgtgttcaatgcttccttcaatgcttaatgtttgtatgcttttggtctgatcatccatttgtgtgcatagttaggtgactttagcattgggaaatgtactgttgccttagaacttgattgaagcaggatcgaaacttagtcttacaagagggatctgcggattaagttttggttttaattatgttgntacaataatgctgtttagtct

SEQ ID NO: 276199 - DNA, 424 bp, Glycine max
agcttcccgccatggtattgaggttaatgattccattgcttcttttagatttaaggaaaatactgttgatcgatgtatatatctgaaggtcagtaagagtaaggttattttctaattttgtatgttgatgacattctgcttgcaactaatgatcttggtcttcttcatgaaattgagaagtttctctctggtaactttgaaatgaaagatatgggtgaggtaagatattgtgatatggatagaaatattccataatatatcacaaggattgttagacttatctcagaaagcatatatcaataaagtattagagagatttacgatgacaaggtatttttagcatcacctattccaatttagaaaaggggaaaatttagttttgcacaatgtcctagatatgatatggaatgaaaacatatgaaag

SEQ ID NO: 276200 - DNA, 418 bp, Glycine max
tgtacgcacatcgttcgcgtgtatgatatccactccacaatgttcgaagtattggagagcttcaaccctataacgcaacgtggcggacaaaagtgggcagtaaacttgaatgatcgtcattgtcaatgcggaaggtattctgcgcttcactatccatgttcacacattattgcagcttgtggatacgtgagcatgaactactaccaatatatacatgttgtttatacaaacgagcacatcttaaaagcttactccgcacaatggtggcctcttgcgaatgaagcggctattcctccttctgatgacgcatggacacttatccctgacccaactacaatttctgcgaaaggtctgtcaaaatcaacaaggatgacaaatgagatggattgtgtcgaaccatctgagcacccgaaaaaat

SEQ ID NO: 276201 - DNA, 438 bp, Glycine max
  unsure (1)..(438): unsure at all n locations
agctnttgttttaggttnttacgtttttttgttctaaggctactgttttcgttcttaatgcaattttccattttctgcttctaattacaatttcgttcttgcttcttcttctattttcatttatgtttctgtttcatttacatttctgttcatttacgtttctgcttcatgtttcatttgcgtttttctgtttgaatctatggaaggctagtttttctggtgttgtttccttttgaggacgaagtccaactctctttgaggtttcgtttgtaatgtggtttcctagcagttttcccttcaccagttatcccaaattcgtgaacattaatcagtgcatgcttcgcgttcgattaattgcctctgagcctaacttgcgttcatgcttaatggacgaagggctaattggtgtatgtggtgcctaatcacgtattgacaacc

SEQ ID NO: 276202 - DNA, 467 bp, Glycine max
  unsure (1)..(467): unsure at all n locations
tgaagatgctcgtattaagggtggccgaaaaacaaaagaatattctgagacataacaaacaagtattgtaacgttgtcagtccactggacgaagggaacttgagaaaattgagttaatcttacctttgttaagttggcgagtttcattgtattcaagcttattgtgtaaacacctattgagtgattagaatacattttctatcaaatatatattatttgtgaaagacaagagtgacttagagacaaataatatttggatcttaatctcaaggggagattaagtatagtgctagaagtggcctagagagtactcattgtagtcaaaattgacatagaggatacttggttgtaatcaaatatttgattaatgaaacccttcaaggtttgaaggaaaattgaacatagcccaagaattagagtgaaccagtacaaaatctttgtgtntcattactgcatctatataacta

SEQ ID NO: 276203 - DNA, 448 bp, Glycine max
  unsure (1)..(448): unsure at all n locations
agctntgttcaagaccttttaaactcccaaagaaactagttgttagaagtgaagtccttaactctgtcatgaattcataaggaagttttaaaaaatgccatttgtacatgacttgacatatttgaattggttctgaagaagccattccaatgctcaaatatgagtagcttatgaaggtacattagaataacattttggtgtttgatgaagaagaacctattcacaagaaggttctttctaatgaagactataagatatgactttataaaaggatcaacttcatcaagcttgacaactcttcacaacaaagatcgatcattttgaagtaattcacttagtatatataatttgtgcaagttgttgttgttggtgttgtgcaattngtccttcgtgcaatctccattatgatgtttcacatcagattctaaaactcaactttcaacaaaaa

SEQ ID NO: 276204 - DNA, 459 bp, Glycine max
  unsure (1)..(459): unsure at all n locations
tgtcttcacanataatcatcacacagcagatacctagcaagactacccatcatatctgcccaaaccccatacccacgaaaattaaaggagaaagaagtccacccaaacctgaattttcgaagtcccactcgtagccacgcacttcacggccccgaaaatgccctcctttcgcgatttggggcagaaatgatggccaaaggttgaagctttgcttggagcttcaatggagaatgaagaaggagaaaatggcaacgtgagggagagagagagctgtctgaaaagtgtgggggctgagtgaagagagagaaaagctttttttggttttaaataaaaggggtttctctttttctattattntatttgagcaatgccacatgtctccatttgagtggaaaaaaagagcacactctctcttttgaggtgacccatactcagccacacaaagtgagaaaaatctga

SEQ ID NO: 276205 - DNA, 377 bp, Glycine max
  unsure (1)..(377): unsure at all n locations
agctntaagccaattcatatttctataactntttactcggatgtctgaatgagtcccgtaatataacgaaacgctcgaatatgaatgtttaagctttgagccaattctaacgataataactttttactcggatgtccgatagagtctcgtaatatatcgacacgctcgaaattgaatgttgaagctctaagcctattcaaacaacaataacgttttactcggatgtccgattcagtgacgtaatatatcgcgacgctcgaaattgaatgttgaacctctgagccaactcaaacgacaataactctttactcggatgtctgattgatgtccgtattatatcgagacgctcgaaattgattgttgacctctgagccaat

SEQ ID NO: 276206 - DNA, 451 bp, Glycine max
  unsure (1)..(451): unsure at all n locations
tanacattcaatttcgagcgtctccatatattacgcgactcaatcagacatctgagtaaaaagctattgtcgtttgaattggctcagaggttcaacattncaatttgagcatatcgatatattacgggactcaatcagacatccgagtaaaaagttattgtcgtttgaattggctcagagctttaacattcaatttcgagcgtctcgatatattacgggactcaatcagacatccgagtaaaaagatattgtcgttctaattggctcagaggttcaacatataatttggagcgtctcgatatattatgggactaaatcagacatccaagtaaaaagttattgtcgtttgaattggctcataggttgaacattcaatattgaccgtctcgatatattatgggactcaatcagacatccgagtaaaaagttactgtcgcttgaataggctcat

SEQ ID NO: 276207 - DNA, 367 bp, Glycine max
agcttcttgtcgatcaacttgatctgcaagcttctcgcggatcaacttgatccgcaagtttcgtgtggatcaacttgatccaaaggaactacacggacaaaaatgctcacggatctactttttcctactgcggcagaaaaaagaacgaagaaatgcagcagaaatgcaacagatcaatactagcctacactacaataccagaaatgcaacagaaaggtgaagcagcagaacgaagaagaagaagaacgcgcttacctcgatgtcgccaacaatggtgagcagtagaacgaagaagaagaacgcgccacaaggtgaagcaccaccaccagtcgaggtcgcgcatgaggaggaagaagaaaatcaaccc

SEQ ID NO: 276208 - DNA, 442 bp, Glycine max
  unsure (1)..(442): unsure at all n locations
tgaaggcctccatgtaattngaatggcacttgctgcatgacttttaattgatccgannaaatgtatggactagtangaactnttgacatacaaattntgtgtcacagtaactntntttttagaatatttacagcatttccttttcattacaaaccagtttattcagatttacaaaatttgaattaattaaaattatttggaagaaatgttcctgataaaatcgcgtcaataattntaaaatatcatactacaatatggaaaatgatttggaagaaattatttggagtatatgattggtgacatatcttcatggttatataagtgctttttacgaaatctctttaattgcgtggtaagaaaatgagttaaattcaattattttttttataaactntcctagatgattgatggaatttcaaataagcgcgttacaataattcac

SEQ ID NO: 276209 - DNA, 397 bp, Glycine max
  unsure (1)..(397): unsure at all n locations
agcttctatagaaggttcgttcctaatttctctattattgcatcacctctcaatgagctggtgaagaagaatgtggcatttacctggggtgaaaaacaagagcaagcctttgctttgctcaaagaaaagcttactaaggcacctgttctagctcttcttgacttttctaaaacttttgagctagaatgtgatgcctctggagtgggagttggagctgtattgttacaaggtaagcaccctattgcttattttagtgaaaaacttcatagtgccaccctcaactaccccacctatgataaagagctntatgccttaatatgagccctccaaacttgggaacattacctttgttccaaggaatttttcattcatagtaatcatcaatcacttaagtaca

SEQ ID NO: 276210 - DNA, 393 bp, Glycine max
  unsure (1)..(393): unsure at all n locations
ngagatgaggaagtgttgaagggtgaaactttctgcttttattgttgaccacagagtggtacctggagatatgtcgcggaggtcaggagaccttgnggacgtcaggtggggtgctattgcccaaaaccaagcttgaccaatcccgacccaacccgggcatagtcggtcagtgagaacctgtgatgtacctaagcaggcgagctcctggcagtcaacagataaaaggaaaacaagaccacaaagcaaggaggcttgtggtggctggccagctgtgaattttgtataatatgtggattgtggcctctggtaatcgattactgagggtgggtaatcgattacaaggcttaaaattgaagacaggaggctaagatggtctctggtaatcgattacca

SEQ ID NO: 276211 - DNA, 427 bp, Glycine max
agcttgaattataatataaacataagcatgatattaaataataaaaaaactataaagcttcacaaaaataaagaggataatacctctttaataataaatctcagaacgttagaaaattctccaactgttggcactccctctggctactcaaatgccacaaaggtctgtccacgtgaatcataaggaagagacctgagaggcttggagaacacctctgagaattcatctgcatctgaagcatccacagtcacaataacctgtaatagagaaaaataattacaaagaccttggagttggattattttatgaaaaattcgaagcatctataatattcattacatcttccaacaattgctctggtatcgtgtttgtgcacttgtactgaaacacaacatgcctatcataaatgtgtttaatgacattaact

SEQ ID NO: 276212 - DNA, 401 bp, Glycine max
tatccggtcgatacgctgccgtttctggatatatgccgccatatatttctgccaactgtccatttcgtttccgcgtctctatctcattcactcaatcctctcaattacagcaataataatctaccgagttattttggtcttttcttgggtacatacgtcattctggtatttaatatatattgtattctttaatatttttacgaaattgaatcttacatacattgaatgatatttattgcataatcaaaccattcaatactggcatcaataatatgcaaaaaatattgataaaaatctaagcttaacatttgtgacaaaatacttaatagatatcaagaagtgagtaattataatacataatatactattctttttactggaagatactagttattatatat

SEQ ID NO: 276213 - DNA, 372 bp, Glycine max
agcttgaaaaacagatcctcttgataattactttcaaaacagacccagttccggaaaaagtttgtaaaactaaccccatggggtcaatttgtcgcccagctagacccagacccatacaatcctatttaatatggggttggggttagagttagtccacatgccatgttattttaaaaattgatttttttcaattgtaaaaaaaatatttttaagtcattcggctaggattaattttagttgaccttgactagggttatttatagtcgacttcaaccaaggttattttcggatgacctcgatggagattttttcctcctacctcagctatattattttatgtttaccttattagggttgttttttgttgacctc

SEQ ID NO: 276214 - DNA, 356 bp, Glycine max
  unsure (1)..(356): unsure at all n locations
cgtanagcaggaagtatgggtnaaggaaatgtaagaagagatacagacgatcgagacaaacaacacgtgggagttagtaaaccgtccccatggaaaatatatcattggggttaagtgggtctataagacaaagctcaaccctgatggcaccatacagaaacacaaggcaaggctagtagctaagggttactcacagcaacccagaattgactacaatgagacatttgcaccagtagctcgtcttgataccataagagctctaatagctcttgcgtcacataaaggatggagtatccatcaactagatatcaaattcgccttccttaacgacgtacttgaagaagatatctatgtgg

SEQ ID NO: 276215 - DNA, 279 bp, Glycine max
ttgactatttatgttatacctcatggactgtgatatttttctcacctctcctaatcaaaatatattatgcttcaaaatatgcacgagcttgaagagagctaatttgcagctcttcaaaatatgcgagaaagaccaacttctagatcaaggctatatggctgacactgatggctatcaaaacttgttgggtttgatgaaacacagatttttgagtctcacgaacccgaaatatatgtaagaggctgggtgtcacttttttagctttgcaaaaattatttc

SEQ ID NO: 276216 - DNA, 444 bp, Glycine max
  unsure (1)..(444): unsure at all n locations
tgctacacannataaccttgattgtgtcaatcttctgtgattgtgtgtangaactangaagtangaaccattagcctaggtgacatctggtaaataaccagattgagatagtttggtgtggccatgactatagttctaatagcagccatgatattaaaagtccctttttgtcaacctaaattcagtttagttaagaaaaattcagttcccttctccctaattnttatctcctgtttcccacttttttctccaatctctcttcattatctgattttatttcaatgattcaactctctccataacttttcctgacatgttggaattntctttaacctagttagattgaagacgaggaatatcaataatgaggcataatattttgcctaaatatagttcattctatacttcanattaaaatttgcaaacctttgatgctgctagtta

SEQ ID NO: 276217 - DNA, 225 bp, Glycine max
  unsure (1)..(225): unsure at all n locations
agcttgtaatgtgactgggctaacaatgaaattatggattttctaggattcanaacttatgatctaggagagcattcattccccaaaattattaacaaaccacaacttagaaattttcacaacaccaatttttttgctttgctactcttttcaacacattcattttctttgatgatggttaccccagcttttattctttaaagtaaataatatttttttttttgc

SEQ ID NO: 276218 - DNA, 321 bp, Glycine max
  unsure (1)..(321): unsure at all n locations
tagtanttttcttcagagcctcaagctcatgcttaaagagccttcttgggtgagccttcacatatctggttggtagagcatctttatcttcttcaattagaagttatttgccttcgtagtagttagccttctagtataagacattcatcgactattatctgaaatcatgtatctgaagtggctatgcatgaaaattgtgacccaagcatgaaatgggtatgagtattgagcctttcaatcctcctgaatgaagctcttcttcatctaatttcttcaatgtaaggagacaatttcattctgagctcanggtcatagtctaat

SEQ ID NO: 276219 - DNA, 438 bp, Glycine max
  unsure (1)..(438): unsure at all n locations
agctntntgagataaaaatggtagctttagaagaaacaatgaacatgtgaaaaaaatcgaaaaatagcacatggagagggaaaacgaagcacattcatagagtttggagataaaaatcgaagctttttgagataaaaatgatagctntaaaagaaacaatgaacatgctgtgaaaaaaaatcgaaaaaaagcacatagagagggaaaacgaaacataacctttgagtttttcgttcggcatctccgtcatttccgtcctgcatttggagaacaacagcaccaaggcatcgtcttcgaatggtggtaggaaaaaaaaagagaatgaaagagagaatgagaatgagaaagggtggagagagtgaagtaaagagaacggtggtaggaaaaaaaaagagagaatgagaatgggaaacggtggagagaagaatggaataatta

SEQ ID NO: 276220 - DNA, 453 bp, Glycine max
  unsure (1)..(453): unsure at all n locations
gacaactntcctgcatgatgccncacacgactctnttcaatttgtactttntgcattccactgcatatttgcatccacttgcacatctctcaagtgcactaatcttactagaatgaagtcttagtcagatcgatagttgtgctcgagtccctgtgaactatcacacaattgttgattgttggacgatgtacaatagtgatagggtggatgatagtgttggttgtttagtctagtactcttgtcttttgaataggtcgtccaatcttctataatctggtggagcgtccagttacatagaagggagtgtccagctcgatggttcattggcataagttttgttatgattgttttttggtggaactattttcgtttagacaattatgtgtaaccttatttgtaaggagctctatattctagatttaaagagttggagagagatctgaaccatttaat

SEQ ID NO: 276221 - DNA, 428 bp, Glycine max
  unsure (1)..(428): unsure at all n locations
agctnttanaagaagaaaacctcanaacagacccattctaaacacagttagaggagatcacggagatttctagaacctccaggagcaacaagaagtgccttaaaaaaacaaacttcttatttttgttctgcgacaaaagagagtaaaacagaggaatgatagagagaagagacaaaccgagaggatcttatcattgaacttgtgatcagaaggtgaaggagaaacgtgaacatgaacaaagaagaaagaagtgacaactattgagaatactgatgcgccgagaaaccttctgagcatgcccaatggaacaaccgtgttgttgcgcctctgcattgatcctcctcttctttctacacgttattattattaatgatattgaatataataacaaaacagcgtatagttataataattattattattatata

SEQ ID NO: 276222 - DNA, 406 bp, Glycine max
tctttagagtagccctaagacagttatttggttaggtttggttttttttgactttgatactatcgctttaagacaaaaagacttgtcctataatctatgaatgtggcttgaaggttgggttgaaatatgcattaactcctaacattaatatttaagcgggattgtttgttcatagcagagagttagattcttgcttttactgagttcactatatgtgtcaacaaaaggggattgtttacaatgcatgtaaatctctgttgtattatctactaaatactgcaatgtcataagaatcatgaattatgatttgtgtgatttcatttcattctgagaatgcgttcaaaatcatttatggtgctgaattgcaccttgaataatctcgattgctagaatcacaccttggatt

SEQ ID NO: 276223 - DNA, 444 bp, Glycine max
agcttatccttatggcctgcctccggacttcaccccccgtgccactccggaagatttaagccaagcccctacttttgaagggcaactcccaccttatgaagactatcccggacaagacgatggggaaggagatacctaccttggccccctgctccacctcaaagatccatccccgcatgaactaccccagccgaacatagtccgtcatatcccggcctcacccacacccgtaaaagaatctgttccctttgcggaagataggggaaagattgaggcgcttgaagagaggttaagagcagtcgagggcctcggtaattaccctttcttggatttggcagatttgtgtcttgtgcccaacatcatcatccctcccaagttcaaagtaccagactttgataaatacaaagggacgacatgtccaataggacatctccggatgtattg

SEQ ID NO: 276224 - DNA, 457 bp, Glycine max
  unsure (1)..(457): unsure at all n locations
aacctgaaattgagagaaaatgattattaaacacaaaaaatggaagtactaactatttattacctatacttaacagaaaatacttataacactacaaaataaccataaattggaagagtttgatacaatttacacaaaagttagccatattcactgactaacaatctgctcaaggaactgctctacatttgtaattggcatatggtgggtcaattcttgcaggctctgcataataataacctgtccctggaataagctatgtancatancgactgtagtttaagagctctgggcatctggtcctgctgatgcagattgaggagctggagcggatgatgaagggatgtcatctgctctggccctggttttcctttctcttgatgccatttgtaataaaaagaactcacaattcacattagaccaacatttattcacgctcaaaatcaacaaacataaa

SEQ ID NO: 276225 - DNA, 440 bp, Glycine max
agcttcccatgagtctccttaccatcaaaagatctccctcttctggtggaagaaaaccatcatcctccacttcactagaggaactatgagaacttttagatgactcactatccacctctctattctccaacaaaatcatagtccttttgttaggacattgggatgcaatatgaccctttcccaaacacttaaagcatttaatggaactagttttattgggagggggttgagtaggagaagtacgattacctcttgaagacttcctttcaagatgttgtgaagaagaaccctccttctttgaagtgcctttatccttccaagatgaataagtatatgaaatcttattgtaggtttgtttcctcttcagttgttactccactttcacaaccctatgtataagttcatccatgttgttgtagctttgaagctctacaacatct

SEQ ID NO: 276226 - DNA, 428 bp, Glycine max
gcttgcatcaagtggtaatcagagcacaagagcttcaagtaagtgctccttacatctccattaattcttttctttaccgtctcttccattgatgtatcttcatttttttctccatgtatctactcacatgtcttgtgataaatgttcttaacatgattctttagagtttccaccgattaaaattgctatacaagctacatttgattttgtatggttcaaatttcttgttcttgttcttgaaccatgaattgcgttaagtttacgttcctttgagtgtcgtcttgttatatctctgtggttgaaacctaaaccataaaattcttacataaatatgaaagtacaagaagacctcacaaatctatagtgacttgttcacctattgtcggtttgtcatacaagtcatgtctagtcatgaaacttgtcccata

SEQ ID NO: 276227 - DNA, 444 bp, Glycine max
  unsure (1)..(444): unsure at all n locations
agcttctatataagctgaaccattttatcaataaacacaagttgagttttattcagaaaattagagtttatctcttttatcttagtgagagtgattctcctaaattcttgagtgattcaagaacaccctggctgtatcaaaggacattcacaacctttgtgtgttgccctcgctggaaagagtgattctttccttcctttcatcttcacccttgttctttcaaaccacaattccagaaaattcacctctgcccagaattatctcgtggccacaactcccattttacgcactcaaattaagtgattcttgagcctaaattgactttcaaaaggagagctttcacctcgttttggaatcacctgatttggagccctgtagcttcagttattgccatttctatatttctgtccagccaccacttaacctacattntaccatcccatt

SEQ ID NO: 276228 - DNA, 550 bp, Glycine max
  unsure (1)..(550): unsure at all n locations
cgggccaacgtgggggnnnnnnnattgatacccatgtttgatcctgtcgcaataccacactcaagctgtacagcagactctggtaatgaggtatgtgaaaagaatgtatgtaacttaatgtctcaacctacggaatgacaataaagttaatgtgctgagtagttagctgacaattgatgtgcagccaaattatcacctcgaagaccgcagaacatcagacaacgaatgaagaaccgtgaggatgatgcctaagatgccaatcgggcccttattacaagttgaactaaacctaactaaagcactattaattgagtaaccccacacatatttctaggcagccaagtctacttcgattggacgcttatttatacatactaaccactctgaaagctgagacggagcggtgtcatttaggccttctctatttggggaatgaaacacctcacgaccttggatatatgaacttgattctggggcttgcgtacaattatcggggattgcactgagccgtgttcttccttgggaacgcttggaatatatctggataccg

SEQ ID NO: 276229 - DNA, 391 bp, Glycine max
gcttcagaatacataatatcttcatatttaccttggaagatggccaaattttaatcccaagaaaaactacagtagtcaatttagaaaaaagctgattaaatccacgacagaattacctcttctgcacaatatttgtaaaggacagatctttccctgaggtagcgcacagcagttttcagaagctcactaacttccggattgtcagcgccactcaatttctacattgcgcctgaacccagctagaaatgaagatgataagagtgtctatatatatatatatatatatatctgtatcgagagagagagagagagagagagagatttgatctccatatgataaacaacttgtaagtgactgacacaatactagatataaaatgtctatctttga

SEQ ID NO: 276230 - DNA, 455 bp, Glycine max
  unsure (1)..(455): unsure at all n locations
tntanagagttctagactactctagagttctgtggcatgctgagacaccttacagttatttgcacctcgtcattcggagaccccaagtccgatgacacgcatagaccaatgtggtcatctacaccctccccggagatgtcagcgtctttcgaccgagactatttagtctcaccttttgctatccaacgacccaagagtccggtgacatgcggagacaacttacggttatccacacctcgtcattcaaaaaccccaagtctgataacacgcagagaacaatgtggtcatctgcaccctccccagagatgtcaacgtcttcttgtcgagactttagtctcaccctcgtcatccagagatggcaagtccgatgacacgcaaagacatctcatggntatccgcaccctcatcatccggagacggcaagtccgatgacacgcagagaccaatcatggtca

SEQ ID NO: 276231 - DNA, 426 bp, Glycine max
  unsure (1)..(426): unsure at all n locations
agcttgttcaaagacaatgactgtcacaaggaatgcaacgaaggccattcaaggaaaacaacaaagcttaccaaggtagacggcggtgaacatcctagtagacacgaccaaagcgcgaccacggcctcacggtggctttgcgagactcagagtaaggagtcacgatggtggcgaaagccacatagcgtgggggtttgtgagggagggtttgcgagagactaagcgagcgcgagaagacaaggatttgcagtttgtaacttttcttaaaaaatacaatatcagttntttgtcgaaactgatgttaacactcagttttaaaaaaactgatgttaacgacattatgttaacatcggtttcgacaaaaccgctgttaaaaaatgacactactaaaaaaatgagtttaacatcgtttataacatcgataaa

SEQ ID NO: 276232 - DNA, 447 bp, Glycine max
  unsure (1)..(447): unsure at all n locations
taacttacagtgagtgtttcaggcttagtgccactacctgcgctaagagcacttncaatgacttcaaaacagaatgatgctggcgcttagcgcatcttttactgctaagcccagcttgaaagctcatnttagagaaagaatctggggattagcgctggatggcgcgcttagcgcaactataagatattgtgacagagaggaagtggcgcttaacgcatcatccatgctaagcccactgcttaaagtgcaacttacaatgaagatgttgggcttagcgcagcgatgtgcgcttagctgaaccattcaaccaatcaatcagaggtctttgcgcttaacatgagcaacgtcggcttaacgcgtgaagagatggcgcttatcgcatcgcttgttcttagcggataagcaatctaaaaattttctaagccattctctgttatctcttcccac

SEQ ID NO: 276233 - DNA, 383 bp, Glycine max
  unsure (1)..(383): unsure at all n locations
agctngaagaaagagtcatatatgcttgcataatatctataatttatagtttgtaattgcaataggtattattgagctcatcacctcacgaacgaattctattaattattttaatacgggtaattctttggacataaaacataataacttgcattttacatgcatttgaaggatcaaatcagtataaagtaaaataaaggaggtaaataaggagaaattgtttatctttgaaggacataatgagaaattgttaagaaaataatcaaatactactgcccagttagatactttgactcggtgcccaacagcaattagagtgcatcaacaatttctattttgacttactgtgcatgtgcaacagcaattatagctttcaacagtca

SEQ ID NO: 276234 - DNA, 447 bp, Glycine max
  unsure (1)..(447): unsure at all n locations
tatgctgcanatatatacaatagacctnctcaacctcagcatcanaatcaaccacagcataacaattatgacctctccagcaacagatacaaccctagatggaggaatcaccctaaattcagatggtccagccctcagcaacaacaacaacagcctgctccttccttccaaaatgctgctggcccaagcagaccatacattcctccaccaatccaacaacagcaacaaccccagaaacagccaacagttgaggcccctccacaaccttccctcgaagaacttgtgaggcaaatgactatgcagaacatgcagtttcaacaagagactagagcctccattcagagcttaaccaatcagatgggacaattagctacccaattaaatcaacaacagttccagaattctgacaagttgccttctcaagcctgtcaaaatcccaaaaatgca

SEQ ID NO: 276235 - DNA, 426 bp, Glycine max
  unsure (1)..(426): unsure at all n locations
agctntatctctgccattattaagatctgcccatccaccatatttggatgttaaaattctaacccataactgattttgattagaggataaagcccatatccatcttcccatcaaagctgcattaaatctggtaatatccttaatcccaagtcccccatcctccttggggaggcaaatgacctcccacttcacccacacaattttcttgaggtcttgagaacccccccacagaaaatttctttgtagagatatcaatttcagaactactctttgtggaattttaaaaaaagataggagatatatgggtagagcagttaatactgaatttatcaaagtaaccttccctgccattgataggattttctggttccacttagaataatttgcttcatattttntaatcagcggtttccacatcaagtagct

SEQ ID NO: 276236 - DNA, 420 bp, Glycine max
cgccaatgaaagaatcaaagtgggtctgtaaagaggcaaatttgatcatcttgctttgacaaataaaaagcctatggcaaatagagaggatgagaaggaggaaggaacccatgctgtgactgtcgttcctacatggccaaatttcccaccagctcaacaatgtctttacccagccaatatcaacccttcttattacccaccacccaatcaaccacaaaggtcaccctaaatcagccacaaagcccgcctgccgcacatccaataccaaatgccacccttaacatgaaccaaaacaccaaccagggaaggaattttccagaaaataagcctgcagaattcaccccaattccaatgccatatgttgacttgctctcctatctgcttgataatgcaatggcagtcataagcccaacaaagact

SEQ ID NO: 276237 - DNA, 436 bp, Glycine max
agcttcttatccaaggctcatcttggtggtgaagctccttcctccatggcttattccctagtggatggcgcctcctttcacctcttctcctttgtcttccgctgcatctccatggtgaaaaatctccattaaaggacctcattgaagctcaaagatccagcctccatagaagccccacaagcaagcttccatcacattcctacacggtcaaatttcccatcagcccaacaatgtcattactcagccaataacagtccctctcacccaatcatccataaaagccatccccaaattagccacaaggcatgcctgcttaccaaatgcacaatgcccaaacaccacctatagcgcaaaccaaaaaggaattttgtagcaaaaaacttgtaggattcaccccaaattccggtgtcatatgctaacttgctcccatatctac

SEQ ID NO: 276238 - DNA, 395 bp, Glycine max
  unsure (1)..(395): unsure at all n locations
ngacatgaggaagtgtggaatggtgagacttcctactatgtattcgctgaccatcgagtggtacctagagatatgtcgcaagggtcaagagaccttgcggacatcaggtggggtgctattgcccacaaccaatcttgacgaattccgacccaacccgggcatattcagtgagtgagaacctgtgatgtgcctaaacaggcgagctcctggcagtcaacagataatatgaacaaagaccacaaagcaaggaggcttgtgtggtggctggccagctgtgaactatgagtgttatatgggatatggcctctggtaatcgattaccaagggtgggtaatcgattacaatgcttaaaagtgaagacatgaagctaagatggcctctggtaattgataacc

SEQ ID NO: 276239 - DNA, 402 bp, Glycine max
  unsure (1)..(402): unsure at all n locations
agcttcagctggaggtggagtgttgagaatctataattctaaatgatattgtaataaatgtagtttgtaagcatataatccctgatttacaggaaaccaaatatcctgtatttatgtgtaatcaatgttataagcctatataaacacgccatccgtgtgtactctaacacanatttcactctatcatccctctgtctctcattttacacaagacacatttgtattcaaacctaatctgatctaataagtgacgaaagaaaaaaggcaaataaaaaattatttagggagcaaactttccaaatttacctgcaatatgatcaagtatatggcttccaatgcctgaatacgaatttctggatcattaactagttcacgttcaatcgagagtgcagtcccaagttc

SEQ ID NO: 276240 - DNA, 328 bp, Glycine max
  unsure (1)..(328): unsure at all n locations
gtcttagtataattgttgcataatacctatgaattatttattatgaaattggtgaagtgttgtcactgtcacgtcttgagtcgagtgtgtgattcatgtgtaatgtgattggtgattgaaaaataaattttaaatgataaagtggtgaagtgacatggattgtattaagttgaactatgtgataaatattttcataatttattcttcttatgtctttngttatctgtatttcatttagaaatgtgataactcactcctgatgtgtgtttgtgtttgggctaaatgccatctttgttcacgtgagctagcctatgatgatgaatatgct

SEQ ID NO: 276241 - DNA, 446 bp, Glycine max
  unsure (1)..(446): unsure at all n locations
agctntgagacgcatgtgaaactttggcatcatcaaaacattcagctntatcctttgtccacaatctccccctttntgatgatgacaatccctgaaatcaagacaagctatatacaagatgatagcacgttcacacaacccttactccccctatcttttggcatgtatgcataactttacttaatgataaatttctaatagataattgatttctaacccaagttctcctctcaagttctctccccctttggcaacatcaaaaagaactaagcaacataatcaatatccaaacagagccaaacaataaaccaaaataaatccatacattgtcataaccaaccaaatcaaagccaagaattataatataagtgcaagattacgataactaagcaataagaagccaaatacacggcgataaaccaaagtactaataatacttaattact

SEQ ID NO: 276242 - DNA, 451 bp, Glycine max
ctggtggagcatcttcatcatcttcaatcagcaactccttacctttgcagtaatgggccttttgatacaaaataggcttattagtgcctatctgaaattgagtgtctaggggagctaggcaagagaattatgaccccaacatgaaagtcatgtgagtgttgaacctttgaattctatgaaaagaaaatttccttgatttgatctcttctctataggtagagcttcatttgaggccatagtctgatagctcatagtcttgaaagttcacactttcttcaggttcttccaactgaatctcctatgtttgaaaagtctctatggacttggtgcgatcccaaggaagaacaacactgaaggtacataagagacacatcgactattatagatccaagggagtagagaaaggcatttcagcagactcagactctctacttttccatacacttgcacc

SEQ ID NO: 276243 - DNA, 425 bp, Glycine max
  unsure (1)..(425): unsure at all n locations
agcttagaacaatatacttgtccttcacttaattgtctntgggcttggcgatcacgatcaacaaagtactttcggcacctgctatatgttgacttgaccaacgctattatgggtatgctgcgacaatccttcaacactttattcacacattctgagaggttggttgtcatgtgaccatatcttcgtccagatgtattgtaagccatgctccatttttcctttgaaatgcgatcaatccatgttgctatggctggactcaattgacaaaatttttctaagttttgatcaaacacatgcttgcaaggagtgtacgctgcatcaagtttgttaccatcaaaagttgtaggtagatatgaaagagaaaattaacttcatgtataaaataaaccttacccaatttcttgaacatctctttntgtttcacg

SEQ ID NO: 276244 - DNA, 463 bp, Glycine max
tgatcctcatggtgatctatctgctcttcttgtttggcatcagcaactatgcctacaaacccacaaaatgtaaagaattagaaggttcatttgcctgtctctttagaagttcaatccctgtcatgccaacttttttctttttcctgtgttcatgacaaaactgaaatctaagaataatcatgattgaagatacttccaagttccaacatcataatttttgagattcaaatattttgtttaaattctacgatattgagattaattgttcgtctcaattcaatgttaattaattgaactgttaaattttcatagcatagctaatctcacactggcagagtgcataaagaccatcagaataaaactaaaggtgataaggttggttagatggttaagaaagaaaggaggaagacaaagtatgagagttcaattcttcctgctaatagaaactaacacataatatttg

SEQ ID NO: 276245 - DNA, 440 bp, Glycine max
  unsure (1)..(440): unsure at all n locations
agcttgccaactccctcactcagtggccgagatatcttattatcctgcaggtatagttcattcaaattctgtagcagaaagatgctctctggaaggcttcctgacaaattatttttattaatagacagatgctgcagagaggaacaatcacccaaatttcgtggaatctcaccagaaaagtagttacttgacagtttaaatactcggagctgagtaaaagaggaacacatagttgtatctatagagccttcaaattgattattgctaaagtccatgatctccaagtttggaagatgaaacaagctgtgtggaagagagccagtgaagagatttttggaaagcttcaagactctaagttgatccaaacatgctaatgattcacagatcttccctgtaagttgtgtgcttncaagttccaagcgaaccaccctcgtgccaac

SEQ ID NO: 276246 - DNA, 445 bp, Glycine max
  unsure (1)..(445): unsure at all n locations
ccacccacacccctctaatattctaccgcttagactcactntatatgtaacaaaaataatctctttaaaattaattaaaaatcatgagttctggtaaatttatttctcatttaatataaatcaagagactcaatcatttgagaagcaaaacctaaaaaaaattataattttcaataaatcttaaccaattataaagagaatataattaaataacaatctataattaaataatcttataaaagtcaacaatttatgattaatttatataacggtgacacatcataataatattatactctttttattaaaattagctgttctatatctaatttcatgttatgcggatagcttaccatattatacgctccatcaacacttattaatttctttgttatccttctctttttatcacattntataacctattatacttacactgcattat

SEQ ID NO: 276247 - DNA, 438 bp, Glycine max
agcttcatataaacaaatgtaagaatgaaacctctaacggtgtatttaagagacattgttataacaccatattaattctttcatatatttatatgaggatgtgacttctaaaagatcataagaggcgagatggtgatacatcttattttattacctagtagaaatcatatagctacattgaattgcatcatctagaggtgtttgcatacatgacaacccaagtaatattctctaataaaagaaaaattaattgatagttctgcatctgtgccataactgtcttcacaataatttaattattttctactaagtgtgctttgtgtgataatttacttaggtaataactttacgacaatgaattaactacgaccatgaaagatctgatggaatgggcacgtttaaaagatcaacctttttctagaatgaactaaaagaaac

SEQ ID NO: 276248 - DNA, 456 bp, Glycine max
  unsure (1)..(456): unsure at all n locations
acaacggtttcagtatcattactatagagtacaatgttgccggattcaagcatggaagcgcaagttactgctgtaagatttggaatgagatcttggctttcgttcccatttgtgaaaagccgcagaccggtgccggtcaagttcaacttggaactagagggaagcggtgggttatcacggttagcattccagacaatagttttttcaggtggactaccactgatcagccatattccatcagcgaagccattaccttgagagtaaaacctgaaagcaaaatggccagaacttgatgcccatgaacttttactgcctttgccttcaagagatagccaagaccccaacacattttgcttgtatattatcttacgagccaaacctaactctgaatattcaatcgtctgatacccaatctagcagtaatacttagctntcttccttctttatgtttcttct

SEQ ID NO: 276249 - DNA, 434 bp, Glycine max
  unsure (1)..(434): unsure at all n locations
agctntcgagaaatacaaatggtcataacttttcacactgagctcttattcaggtttacaatatattgagtcgctcgaaattaaacatcggaagctctcgagaaattcaaatggtcataacttttcacacggatgtccgattcgagcgcataatatatcgagatgctcgacattgaacatcgaaagctctcgagaaattcaaatgggcataacttttcacactgaggtccgattctggcttacaatatattgagacgctcgaaattaaacatcggaagctctcgagaaattcaaatggtcataacttttcacacgaaggtcagattcgggcacataatatgtcgagatactcggaattgaaccacggaagctctcgagaaactcaaatggtcataacttttcacacggatgtccgattcgagcgcataatatat

SEQ ID NO: 276250 - DNA, 467 bp, Glycine max
tgcgcatatttccctacgaacgttcacttgcacaagacattctattaactaagaagaatgcacccatatacaatcaaggtagcttcattacctagattatttacatgtacttccaaggtgtatttgttatttacatcacacacgcctccttggctaaatttacatacatgcatactcaaagcatttcggggtaccaaaaattgcacatgcgctcatcttggtatttctaatacctatacatataaaaacttcatgatgaatcttgactacctacgcaataaggtgctacatttcatgcttttttttttcaagtttttgctacctaaagccacatgaaaattcaagcatattttcctttgctgactaaaattgtattcaaattagaagggatatcattttttgtaatatgttttcttcacataacatgcaacacatttatatatattttttgtgagacattttgacta

SEQ ID NO: 276251 - DNA, 304 bp, Glycine max
  unsure (1)..(304): unsure at all n locations
agctngaacatctcttgatgtgctctacacgatctgcggcatgccttatattgcttgttgtacttgtctaatacttactctataacgataacgcacagctttgccgccggaggcaaaaattgttaatgctgagacnggtaaagagtaacctaatcttctatgaaatgcgtgcggacttaccgtgattatgtgcctaaacttacctgacatatctgcactcatagtgaacctggcatagagaacactctcacagagacaaattacattacgacttaatgcacagcgcacttcttgcacagatgga

SEQ ID NO: 276252 - DNA, 455 bp, Glycine max
tggatggcgtcgagacgacatcacatgattgtcatcatcctatacgggagaacgcgaatgtaagtatacatgatattgacgatgtcaaagaagactctagcaaggctgctacaaacgatgatcatccgcttcaagaataactcgcgattgcttcacctaacaacacctggtgtcaagactcactagccaccacgcctcgcctttaaacacagtgcttccaacacatgcgaggctctggccatagactatcatgaagtgttatccatcaccgcaagacagggttcagaaattactgctgtatcgtgacttgaagctgtgatgcgaacttgttatccattaccctatgtccgtcatcgattaccagcgctgagaactttggaaattcaaattcaaaagtcataacccttcaaattataactggtgtaatcgatacacaaacattgttatcgattacc

SEQ ID NO: 276253 - DNA, 349 bp, Glycine max
  unsure (1)..(349): unsure at all n locations
agctggattggacctcagtgtgaaaagntatgtttatttngaattctcgagagctttcgttggtcaatgtcgagcatctcgacatattatgcgctcgaatcggacatccgtgtgaaaagttatgaccatttgagtttctcgagagcttccgtggttcaattccgagtatctagacctattatgtgcccgaatctgaccttcgtgtgaaaagttatgaccatttgaatttctcgagagcttccgtggttcagtttcgagcctctcgacatattatgcgcccgaatcggacatccgtgtgaaaagttatgaccatntgaatttctcgagagctttcgatgtttaatttcga

SEQ ID NO: 276254 - DNA, 421 bp, Glycine max
  unsure (1)..(421): unsure at all n locations
tctaaggaagtcttcttaagaaagcttctcaaggaagctacctagtctataaatagaagcatgtgtaacacttgttggaactttgatgaatgaaagtcttatgagatacacttcaaagttccacttcttttcttcttttattccttcaatttcgtgctcccgccttctctctttcttttcctccattaaagcatcctcttcaagcttcttatccaagggaattcttggtggtgaagctccttcttccttggcttattgcctagtggatggtgcctcccctatcctcttctcctttgccttccgctgcatctccatggtgaaaaatcaccattgaaggacctcattgaagctcanagatccagcctccgtagaagctccacaagcaagcttccatcaagtggtaatcagagcacaagagctt

SEQ ID NO: 276255 - DNA, 397 bp, Glycine max
  unsure (1)..(397): unsure at all n locations
agctngagatgaggaagtgttgaagggtgaaacttcctgcttttattgttgaccacagagtggtacctggagatatgtcgcgggggtcaggagaccttggggacgtcaggtggggtgctattgcccaaaaccaagcttgaccaatcccgacccaacccgggcatagtcggtcagtgagaacctgtgatgtacctaagcaggcgagctcctggcagtcaacagataaaaggaaaacaagaccacaaagcaaggaggcttgtggtggctggccagctgtgaattttgtgtaatatgtggattgtggcctctggtaatcgattaccaagggtgggtaatcgattacaaggcttaaaaatgaagacaggaggctaagatggtctctggtaatctattacca

SEQ ID NO: 276256 - DNA, 461 bp, Glycine max
gacactataaaactaagcttctatataagctcgaaccatttatcaatatacacaagttgatgtttattcagaaaattagagtttatctcttttatcttagtgagagtgattctcctaaattcttgagtgattcaagaacaccctggctgtatcaaaggactttcacaacctttgtgtgttgccctcgctggaaagagtgattctttccttcctatcatctccacccttgttctttcaaaccacaattccagaaaatccacctctgtccaaaattatctcgtgaccataactcccattttacacactcaaattaagtgattcttgagcctaaattgaatttcaaaacgagacctttcacctcgttttggaatcacctcatttggagccctgtagcttccgttattgccatttctatatttctgtccagccaccacttaacctacgttttaccatcccattca

SEQ ID NO: 276257 - DNA, 341 bp, Glycine max
agcttgagtgaaccactgttgtatgagtcaatctaatgagagagcctctctgagagagaagaaaaatagcttgggaagtctttatcctcaagcttgagtgagcctctatagagcgagacgagatttcatctctattttgcaaccctactattcactttgtattgtggaagaatctccatattggagaattataatcgtttgaccacattactacctttaattactaagtgtctatcttaaacttcacgaagcgggaaatgatgagtttttccaacacaaataaaggcgtatgtcatctcatgtccccattacaaattcacaatgtccataccatgatacca

SEQ ID NO: 276258 - DNA, 412 bp, Glycine max
  unsure (1)..(412): unsure at all n locations
agcttcctcctttaccaccccactcttctctcctttgttgctcttttgttctgaacaccatttcatcttcccctctttaatgggtatctctttgtttcacaaaattccttgccttccatctgtttgatgttctgattatcgttgttagtttgctaaaaccctaaaaagtttgcatttttatgttgccggggccattgggtattcaaaatttcaacctttttttttgttacacattgttggaaaataaatgtttaatatgggtgtacgcttactggttgctttttatgctctgaagatgcatgcttgattgatgggatgatccatttccattttggagtggctggttgcttagttttactgggttttgcatttgattgaatttgctcagcattattacattntatgtttgatg

SEQ ID NO: 276259 - DNA, 415 bp, Glycine max
  unsure (1)..(415): unsure at all n locations
tagaaagtgtgctaactaatgttagaataaggatgtagggattaagtgggtctaacttatgtcttatatgtcatcaagaaaggaaactctnttccatcttttttgtgattgtatggatactaagttgatgtggcaattttttattcgagtataaggttcaatacaacatcaattctttcataaccaattgtcgcaacctacccttttgcgggtgtcgcaacatgcccttttgcgggcgagcgaangcgaagctcacgggtgcgctttccaaaggaggaaagatgcgcggagtcgccaccaacgtttatttgtgggaaacgtcggaaaaaccgaacgaaaccggtcgaaatgaaaattctaagttccggagttgtatttacgtttcaggaaggtattatcacctcttacgtttgtc

SEQ ID NO: 276260 - DNA, 400 bp, Glycine max
agcttatccatttcaatgttagaatcaaaatgtgttcatcagttggtcaaattaccatcaaataccagtggttggtggattctttatgaattggaacatatatctacatgggataaaataacaaattcaatacaagttggtacatgcaagattaatattcgggttatggttttttgtttacatgtgtaagatatacaatcggatgcatccagtcagtgtggtatttgtctataaagtcctttattatcaagccacaattcacatcaacacaattgaataagagctcactgtttaagcaaagaaaccacgttaggtgcaaggaaatttgatgaaaaagctataggctatctctttgcttcccaggtcctgacttcatttgtagcacgacaggaaaacaatt

SEQ ID NO: 276261 - DNA, 420 bp, Glycine max
  unsure (1)..(420): unsure at all n locations
ctttacactacgtatntaaattggtttgacattaattntntattacaattaacattttatattttttaacctattaaaaaataatttttaaaatcaaattcttgagatgaatattctttattaaatcaactacgaaaatttacacttaacttatgagaaagaacaattgacctaaaactacaataacaattaaattattagagagaaattactctgttttatttaaggttatggtacttttaatataaatagaactttttttttttgcttaatgacatgagacttaactaatttattaaatatgttatttcatctagttaatatgagatcgatcaatattttcttatgagttgaagcaggaaaacttataaaagcataggttttacgcatgaattattgtaaaaatttacattatcttac

SEQ ID NO: 276262 - DNA, 418 bp, Glycine max
agcttcacatggagctacgtcattgacggtttctcaaattccttgctacgttaataagcatacctctgtatgtctccatcttgatgtagccttccattgattcctcaaacttgcagactcccccatatttagtcctgcaactgctttccaaactgcaacatcaatgatcatctctacatcattaacagtagagtataaattgccttccatatcaacacgggcacatgtgtagaaaacctttaccaactcaaggtagaagatttttatcttctacaccaatcttaacaaaccatatgcttcaagaaggtagagaaatttaaatccctgttgagagaaccattccaagttcagaaactttggttattcttacattctccatggcataaatcatcttgaagtcagtcttcttgttttcatt

SEQ ID NO: 276263 - DNA, 334 bp, Glycine max
  unsure (1)..(334): unsure at all n locations
ctatcatttaatcttttaagtctttctncaattnttctttatcaattacatgagtctgtacctaaataaaacaagacaaaaaactaattatttttatcaagtaataaaaaagcattatattccacaaagttatgggccagaattctgggtttctaacaaataggtacatacaaaattaatatgtccattntataattataaaatatttcaagataacaggcccaggaaaaaagcccttttggattaacatatttactaattagttctcttaaagattctagacattaaagatgtanggagactataatagtcatctcaatcaatatatgaacct

SEQ ID NO: 276264 - DNA, 327 bp, Glycine max
agcttctagccaaatggacttaccttgaattaattcctttgatagcccttttgagccttgttttcctttccttgttttgaagctcactacaagccttaagtgaaaaaccatgatattaccatatccttaaggaattgtggagctttggaattgttttgggaatgagcgtggggggttttagtttcattggacaacttggtttgctggctatgcatcatgatgtatatggggccatacttgatgtacattgtatattggttcaatgttggacatgctgaatgaaatgttgcttctcagaggctaaagagttcggttaaacaaaattga

SEQ ID NO: 276265 - DNA, 458 bp, Glycine max
  unsure (1)..(458): unsure at all n locations
tgtagaatggctagacatgatacatgtcagggtttggtttggttcaaggataaaagggatgccccacattatttccatgacacaaaaatgcaaaaatgatgatttggaaactttatgcaaaactggtcatgcatgcacctatgcggacactcaagtgtcaaatttttatggtcatgtgatgctagggctcaggattcatttcctctattttaatcaacccaatgtttccaaaatatgttcttttatcaatttgtgcattcatccgagtccatttcgggcgtccgggaaaatcttcacagcattcacccttcaggtgtatacacattttttcaaaagctagttacgatcagtgaatttttccaaagaaaagttggaaatcgtctcttttcaaaagcatgttggtctttcaacttgacaacttattttttcctttttctacctttntacttacttacccc

SEQ ID NO: 276266 - DNA, 445 bp, Glycine max
  unsure (1)..(445): unsure at all n locations
agctgggagaggatgcttcaatggaggaaaagattgagggagagaatgagagaggggggagcacgaaattgaaggaagaaaaagggagagaagttgaactttgagttgtgtctcacaagactctcattcatcaaagttacaacaagtgttacacatgcttctatttatagactaggtagcttccttgagaagctttcttgagaaaacttccttgagaagcttctttgagaaaacttccttgagaagctagagcttagctacacacacccctctcataactaagctcgtctccttgagaagcttccttaagaagattcctaaagaagctagagcttagctacacatacctctctaatagctaagctcacctccttgagatgagaagctagaacttagctacacacccnctataatagctaagctcacccccatgacaaanaacata

SEQ ID NO: 276267 - DNA, 465 bp, Glycine max
tgtagaatggctagacatgatacatgtcagggtttggtttggttcaaggatataagggatgccccacattatttccatgacacaaatgcaaaaatgatgatttggaaactttatgcaaaactggtcatgcatgcacctatgcggacactcaagtgtcaaatttttatggtcatgtgatgctagggctcaggattcatttcctctattttaatcaacccaatgtttccaaaatatgttcttttatcaatttgtgcattcatccgagtccatttcgggcgtccggggaaatttcacagcattcacccttcaggtgtagacacattttccaaaaattgattatgatcaatgaattttttcaaagaaaggttggaaatcgtctcttttcaaaagcatgttggtttttcagcttgacaacttatttttttcttttttctccttccttttttttttatcattatcatttgg

SEQ ID NO: 276268 - DNA, 433 bp, Glycine max
  unsure (1)..(433): unsure at all n locations
agctntnttctcctcatcatagtcctattcctaataacttccatttgatttcttcttctaatttgcatcattgcctcttcctcaatcacaaacctcctcattagaacatcatcagtcaatgatttgcccctgaatactctccttccctcagtgctaagcctagcactatttgttctttcatgttcattttgcaatggctttgatcttggataactattgcttcttctaggtggcacctcagctctcaaaatctcattgtaggaatagattggtgcacaaagacaaacccttgtgaaggatgatgcaacctttagagaggcacattttcttagcctgttcttgttgttaggacttggtgtactaggtacttgaggggattttggcattgatgatctcttccataaagttgaattaggtgttggaatttctgtag

SEQ ID NO: 276269 - DNA, 457 bp, Glycine max
  unsure (1)..(457): unsure at all n locations
aacaatgcaagcttatatagagccctcagccgtgggttttgacaaagttctggtaacataattcataggcagttttatggattattgaaaggtgtatacaaactattaacaaacaaattatgtttgttgatccttttttgaaatgtgatttatattagctttattttaaaagacaatttgcatgattggacgaaacggtatcgaacactatttacttgcgtgacacccataaacaacacaacacaccgaaaagagaaagcatccatgcatgaaataagcaaaaatagaatagactatagcatatggttttttttgggtgaaccaagatatcccacatacaaaagtcaaagactaatttttcgatccatttttttatatgcagaaagaaatcangaatcaaacctgtgatcacaattaagattatttatcaattatatcatacattgatataacatgt

SEQ ID NO: 276270 - DNA, 439 bp, Glycine max
agcttttcgattcattctatgtacccgtagtggtccacattgtgtttcgtgcatttttattctcgttttgtttactttttatacccccctcttgacgtgcttaagccattttacttaagtcatttctcgcttaacttaaaaataaaataaatttccaccgaatgtttgaattgtattatccattaacttcggttaaaatcaattccgaccgttcggtcatgccgtaaccacgttggaaatcaaaaagaggtaaaaaataatataataatcaaaaaaatatctttttagtgaaataaagcggaaaatcaatcggacgttttctctttgggatttctcattcttaatcgaattaattaataactaaagtgaaactaaggctaaaatcaactcgcctagtcaagctcgtccacaaaaataggcttttgaagttggtcatttc

SEQ ID NO: 276271 - DNA, 444 bp, Glycine max
  unsure (1)..(444): unsure at all n locations
tganagtgtgtaaccaaccattntctcattgtagaacaccggtaacgtgtatactatcattgtgatcatctttttctctgtcattgaaggtgccacttgagctgtcaagtccctccacctctgggcgtattccttgaatgactcatgctcttttttacacatgttttgtagttgcgttctatccggagccgtatcataattgtactgatattgcctaacgaaggcaaccattangtccttccaagaatagactcgggaaggttccaagttagtgtcataccctaatttcgtccggggattattacttgacgacatgcaacctttgattggccgtttcaagatacttggcaccctttgttgcacaatatgtaagtcttgagacgcaccggaagtcaaaaggaagcagggttatgcgatccgtgaaattccgtaatgtggcggaaa

SEQ ID NO: 276272 - DNA, 439 bp, Glycine max
agcttgtgcttacaaaatatcattaaacaaattagattggcttaatactttaatgttatcatatgcagccacaacaaaagaaaatgcatgccaaattcacaagtcctgtgttgcaactgcttcgagcataattattggtttgcaatgatcacctacagtaaattgaccttttcaaggtgcatgataattttttcattcctagtgcatacaatcaactgaatccaacatacccggaatgccacatgtatcctccatttgtagtacgtggcggaaacattataacaaatataggattttgagaatttttggtagaagaaggtacacaattatgtatataattgtatgtggagttgtctgggggcggcggaaacatagggaaaaatggatggaaacatttgtcgagcacatgttggcccacatacaattgtgaatcttgatt

SEQ ID NO: 276273 - DNA, 273 bp, Glycine max
tgatcgcaatatagatgaaagccttaacaacacgaaatgaattgaaagtctcagatttggaaaattacccgttgaagaatgaagaactgatgaagaactgcgtatgaactgacgaaatccttcacggatttgcttacggattcttttcagaagcggtaccgatgcaccttgacttggattttcttcacggaaacaattcttttctcccacaataactgtaatgcatagccagcgggatcaggcaccgttagaacctctgctttatgccttttt

SEQ ID NO: 276274 - DNA, 409 bp, Glycine max
  unsure (1)..(409): unsure at all n locations
aggtatatttcctctacaatctttctttcatgcgcgtaaagtatcccatgtgtaccccaaaaatgatgaggcaattgctcaactgtaatgaaaacatatacacagagactttcacttcatggtacacatactataagcatatactttacaaacacacactgactcatataagcttgatattctagtttgccataagaggagtgtcgccccttaactttcttgaggaaagcgctgacagggataagagataacgctcactatttgaaacatgtgctataagtatacaatgatcagtattgctcctcaaacctcttttggatgttgcttaaacggattgacatcacacgctatataaaactctatggggcactatcatgagtaatttcattcatgtgacaatactgaaacn

SEQ ID NO: 276275 - DNA, 443 bp, Glycine max
  unsure (1)..(443): unsure at all n locations
ngatacttggtactctattcacttcttcaactcttgtatttatatttcccacatcaactctcacagtgcctgaattccgcaacagtaataccattaacacgtctctctttcgattcacgctttgtttgattgattgccccaatggccgcgtgtggctatatatctgctgccaacttcaatcatcttgttggcgccagaaacttatccaaattcagttcttcggatgccacaatttcgttatcatttggcgggagcgattcaatgggtcttagtttgcgacccgctccaattcgtgctcctaagaggaaccatttctctcccttgcgtgtcgtttgcgtcgattatcctcgaccggagctcgaaaacactgttaatttcgtcgaagctgcttacttgtcttccaccttccgtgcttcttcgcgtccactaaaacccttgaacat

SEQ ID NO: 276276 - DNA, 416 bp, Glycine max
  unsure (1)..(416): unsure at all n locations
agcttcttctgctcctacgtcatattcaggaatctanttttgttttgtcgcaactttgtcatgatggaatttatgttatgcttgcactattatattttttatttttttatcaggggcaaatgttaatcgctagattgccgcattctattaaccaagttagattcacaatgtatgctgatgcacgcagatgtgtcttattttttctcgttttttttatttgaatctatactgatgaatttgtttccctcttttcttgccatttaatcatttgactgaaatttatgcaattttcagtgctagagatgagaacgaacttgctttatgtgtcaaagatttgaactctccgagcttccatccttccttaggttctctctgggtcacggattcactcgagagaaaggatgcgganagagatc

SEQ ID NO: 276277 - DNA, 453 bp, Glycine max
  unsure (1)..(453): unsure at all n locations
ntagccatctaagtcaattatgaaattaattttntgtccgatatttaatgttgtcacatgagctatacttattggataagttatataagtatactactaattactcatacaacatctaaattaataaaaagattgcagtgcttataaaataattattagaaagatatataaagagattaaataaaaagatgtattacgttttattgatagaggtatataaataaaaaaatacaacgaaattcattcagcatcgctattctttttttcaaatttagaagtatgaaatgaaattaatctcttttgcattatacagtaaaaatatataaaaaataaaataattattttatttatgatgcttcattttagtttatttcacttaaagtttctgcattgaaatttctcttattgattctggatcaaaggtatttttttacaaataatattactttaaaa

SEQ ID NO: 276278 - DNA, 380 bp, Glycine max
  unsure (1)..(380): unsure at all n locations
agctnttaatggaagtcaagagcatgatattttcccgataccgttgactagtgagcaggtatatcagcgggttcaacacctgaatactgtatttgggaagacctaaaagaaggataaaagtcagagttgcatatggaagaagaggtccattttttttatcttccgtactggtgtgatcttgacgttagacattgtattgatgttatgcatgtgaagaaaaatgtttgtgacagtgtgattaggacactccttaacattcaaggcaagaggaatgatggcttgaatacccgtcaagatctagctgatatgggtatatgatcacagttgcatccaaggtctgatgggaagaaaatttacttgcccccagcctgccatacttt

SEQ ID NO: 276279 - DNA, 455 bp, Glycine max
  unsure (1)..(455): unsure at all n locations
taacgcattntacctctaagggtcttgtaattgcataatggtggtcagtctctcgatgttcccaccatggtatagcttcaatctctgaccatttactatccatgttctgtgcggagtttctgactgagggtcaagtaattccacaactccatatggcttgacttccttcatggtgaatggtccagactatttagactttaatttgcttggaaacaactttaatcttgagttgaacagcagcacttgttgtcctggcctaaagtccttctttagcagcttcttgtcatgataagcctttactttttctttgtacagtctgaaagactcataagcattcaatctcatctcttccagctccaagagttgcaacttcctctnttcccctaatagagcctcatcaaaattcaggaatttcaaagcccagtatgccttatgttccatttctaccagaaagt

SEQ ID NO: 276280 - DNA, 423 bp, Glycine max
  unsure (1)..(423): unsure at all n locations
agcttaacaaaaacaaaaagttggtgaanaaactagcctataaatatcatgtccttttagcctctgaagcagtcatcaagcagattcctcgtctcttgggacctggtctcaacaaggcaggcatgttttattgttttggattttgaatctcttttggacattttagagagaacttggtgatttgcttgttttaataacttacatcggtcattgctgtgttatttttttgttaatcgttggtcacattctgctattacatgctctgtttttaagtacgaacattataaaatctttcaagtggctttctgtatcatatcgaatatggtatattagtcctttcttttccatctagtaagatgctctgttttaaagatttgatatcttctgggttttaaatttcaatgtcgctttagcttgatctat

SEQ ID NO: 276281 - DNA, 365 bp, Glycine max
cgcaggaatatatagctcccatcatatgtgaatgcgatcgatggaattttgctgtggcagataccatctaattaattcgtgagctgcaatgtgtgtttatcaattccgacactatgccttttctttgatctaatagactacggggagaagaagaaaaaggcttgccttacacgcgtgtctgtattattaaatgtgagaatatactaaaacgtctgcgatccgcatgtattactctcattgaattatgcaaaagtattgattggctggcgatattgaaccacaaaggcgactaattttaatcactatacatgatatgttcggctggtgaagacactcggatccactaagttgcatatttgctattt

SEQ ID NO: 276282 - DNA, 368 bp, Glycine max
  unsure (1)..(368): unsure at all n locations
aaggctattcttagaagcttggaactatctgttggcctaaaaatcaaatcttctgacagccagcgtcgaagcaattggtcaatctgaaccgcggatcagatgtgctggtgatttcangaactgtggtccaactacaactatgatgtctgctatcttgggctgcctattcgaggcattctcataacgaatgtggcgtgaggaccttttatcaatgaattcgcggctcgactgagcaaatggaggcagagaagaattgtagatggctgggggaatcaccctttctaatgtagcttaaaactctgccttgtgggctgttttttaagctccttccttgatacagccctacgccaaaaattcttggagaataa

SEQ ID NO: 276283 - DNA, 290 bp, Glycine max
  unsure (1)..(290): unsure at all n locations
catagtctgtcagtgataacctgtgatgtgcctatacaggcgagctcctgttactaaccgcatccacatcacttacttctgctgaaggatgcttgtgtggtggatggacctctatggatcttgagtcatatactgtaatatggttctctggtatccattacccatggtgggtaatcgattacaacgcttataaatgaaggcaggaacgtaaaatggcctctggtaatcgattaccaagtatgtgtaatcgattaccangcctaaaaatgggatcacgaacgtgagagggc

SEQ ID NO: 276284 - DNA, 402 bp, Glycine max
agcttatgctgcaaatatttacaataaacctccttaacctcggcagcaaaatcatccacagaagaacaattatgacctctccagcaacagatacaaccctggatggaggaatcaccctaacctcagatggtccagccctcagcaacaacaacagcagcctgctccttgcttccaaaatgctgctggcccaagcagaccatacattcctccaccaatccaacaacagcaactaccccagatacagccaacagttgaggcccctgcacaaccttccctcgaagaacttgtgaagcaaatgactatgcagaacatgcagtttcaacatgagaccagagcctccattcagagcttaaccaatcagatgggacaactggctacccaattgaatcaacgacagtccca

SEQ ID NO: 276285 - DNA, 377 bp, Glycine max
  unsure (1)..(377): unsure at all n locations
ctgttatgtncaaatttggttcattacttttactttcttgtctttntatacttctcattataaccattgattacttttgcttaaaattgatccaatggctgataaaaaaaaaatcttaagttattatttttttaaaacttcatagagaagcatttttactttctctctctttgtcaactcttgacaaaacccatttccatctctccttcgcatcccatttcttcttcttctcttcccatttcgatttttttcccgacaattcccaacagtgtgccaaggtgagttctgaatctcatccttcctttatcttttttccatttccacttttgggattctaatgtcaaagcttcttgataggtttgatttgagcaatcata

SEQ ID NO: 276286 - DNA, 218 bp, Glycine max
  unsure (1)..(218): unsure at all n locations
agcttctccttcctttgtctatacataggggatggagggaagaacaaaaatggtcaaccctnctggaatctgagattcacttaaaattagtgagaatnaatatttccatgaagaaaatccgagccgtgcgctttcgcgacgttactgtgggtgaattctcgaagatgttcaaccgtcttcgtaagtcgtccggcgttcttcgatcgtcttcggtctta

SEQ ID NO: 276287 - DNA, 370 bp, Glycine max
  unsure (1)..(370): unsure at all n locations
ngaaggcatggaacccaccatcttctcatagtagaacaccgacaacgtgtccactatcattgttataatctcctccgtcattgggggtgctacttgagctgccaggttcctccaccgttgggcatattctttgaaacattcatgctcttttttacacatgctttgtagcagcatcctattcggagccatattagaattgtactgatactgcctaatgaaagcaaccattaagtccttccaagaatggactcgggaaggttccaagttagtataccaggtgacggctgcactaataagactttcatganagaaatgcatcaacagtntctcatctttcgcgtatgctcccattntcctgaaatacaccttc

SEQ ID NO: 276288 - DNA, 428 bp, Glycine max
agctggctagctatcattaccatcatcaaccactttccctgtcagttttcatagactcgatataggttatgtttgaaaaaaattagctaaaaaattaattataagttaaaaaattaattagaagttaaaaaaaaataacttattaagttataaatattcaataaaactaacggttaaaatagatgcaaaatataaaatgacagataaataataaaatcataatttatttaaaaaagataataaaaaataaataaatatattaaacataaaagtgaaagaaaatataaaaagttaaaagttattattttaagcgtttagaaatatatattagaaattaataaaaaaaaatatttactaaatagtcaaacaaaattttttttaccaattgatatatatacaacaaacagacatttgttatggacaaatct

SEQ ID NO: 276289 - DNA, 466 bp, Glycine max
  unsure (1)..(466): unsure at all n locations
gcttaacatcagaccacttccagggtgctggaactacttcacttggacttgatggggcctatgcaagttgaaagccttggaggaaagaggtatgcctatgttgttgtggatgatttctccagatttacctgggtcaactttatcagagagaaatcagacacctttgaagtattcaaagagttgagtctaagacttcaaagagaaaaagactgtgtcatcaagagaattatgagtgaccatggcagagagtttgaaaacagcaagtttactgaattctgcacatctgaaggcatcactcatgagttctctgcagccattacaccacaacaaaatggcatagttgaaaggaaaaacaggactntgcaagaagctgctagggtcatgcttcatgccaaagaacttccctataatctctgggctgaagccatgaacacagcatgctatatncacaacagagtcacactta

SEQ ID NO: 276290 - DNA, 426 bp, Glycine max
agcttaaaggtgtgtaacccaccatttttcgtagtagaacactgtgacatcctggaaatttctacccgggattttgtaaacgatgcattttgaatgattatatgtaagtattattcagtgtatatatatatatatatatatatatattgcttactttcaaaaactggcccgacgggtgcagagaaacgcgagggactggaaccagagaaacgacatgcaaaccgaggcaatattttagcatttcaaaaggtcagattttttctcttcttgtgaatgagtatgagtcacatcaagagaaaaagtgggccctttttgctccactcaaaagaagacatgtggcacagcttttaaaaaaaaaagggaaaagaggaagccttttaaacacaaagccacgttctctctctcctcattcactcagccaaaagt

SEQ ID NO: 276291 - DNA, 424 bp, Glycine max
gattgcatgatgttaggttagatgttagtcagaatagtgttaggggttttgatttgcatacaatgtatgtcattttgacatgttttggttaggatttgatggtctaatagaggcctaagttgagggggctgaaagagccctaatttttttggaattggcaataaacgcactaagtgtgccttgctgcactaagcgagttcatcacttttttgatgaatatctgggtttccagatgaactcgctaagcgcggttgtgcgctaagcgagtaatgtgtttcagacacttacaaaaattttcattgctttcgtgtttgtggctaagtgagcttgttcactaagccactcagccctgctggctgaataagcctgggctaagcgagccctgtcgcgctaagcgcaattgactctctgtttatgtaattgt

SEQ ID NO: 276292 - DNA, 442 bp, Glycine max
  unsure (1)..(442): unsure at all n locations
agctntgaagaactcatgctgccattttataagcacaactttnttttgtcattcataaattagcagaagagtttaattactgagtttgttcttagaacggattccagttcatgatgaacttataaatgacaacatagtcataacttgaatcttataatattcccaaattaataattctgaattatcttcggtgttattttaaataaataagcaatttgatattttcctatatataaagtttagaacaaattgccctgacattccttgtgattttttaaaattgcacacaatacttctatctaacgtttacactaatcttcttataggaatacatgtgtaatatttttcttagagaagaaatgtcaatataatctatttcaaacattnttttatataacaatctatttcaaacaattaaagatagggatttaaaggacaaaaa

SEQ ID NO: 276293 - DNA, 424 bp, Glycine max
  unsure (1)..(424): unsure at all n locations
atggcgctgcacccggtgcctgagattgaactgctcatattaaacaccccaccaattgnggcaaaaaaaaaaaattctgtgagaaacacaaaaataatgggaaatgagcagcaccaccaaaccaaaaaaaaaaaccaaaacaccttcattggtatcagtttctgttgctctaattgatagtctcctccctgcaatgtccataaaaacaccaagaatttcaaatccactgaaacaagccacatcaaaaaagcataaaaactgcaactttgaccatcttggtcgctaagaaactattagaacatgattggttagcacattgaagatggggaaataaaagaagggccaaaagggtattcagaacacacaagagttgactgaaagagcaaccagaaagaggtggtgtgagccacctactggaaaatga

SEQ ID NO: 276294 - DNA, 435 bp, Glycine max
agctagttcgcacatcgttcgcgtgtatgatatccacttcacaatgtttgaagtagaggagagcttcaatcctattacgcaacgtggcggacaaaagtgggcagttaacttgaatggtcattattgtcaatgcggaaggtattctgcgcttcactatccatgttcacacattattgcagcttgtggttatgtgagcatgaacttctaccaatatatagatgttgtttacacatatgagcacatcttaaaagcttactccgcacaatggtggcctcttgggaatgaagcggctattcctccttctaatgacgcatgaacacttatccctgacccaacttcaattcgtgcgaaaggtcggccaaaatcaacaaggataatgaatgagatggattgggtcgaaccatctgagcaccgacaaaaatgaagtagatgtgg

SEQ ID NO: 276295 - DNA, 471 bp, Glycine max
  unsure (1)..(471): unsure at all n locations
tctaacaagttatcttagattaatggttntggttcaataattgagttgcgtaatttgactgtaagatgtcatttgctttcagcttgggattgttctgcctgggtacgtacttatgcattatatttggaagaaagactcgaatgtttccaggttctgaactatgatattgaagctgagcgtctagctaagcctgttgctggggaggacaaggtaattttctctctcttggataaaataagagatttattacaatgaagtgagtgggaaggtaatttcattaagctatgattatacttttgtgtgatattcaatcaagtgaaaagcatctatgacagtttttgcatggaaaaatgaatacagaaactaccttatctcctttacatgtaagatatataagtatttaattcttaggcattntattggttgttctttaggttctcagacctacatgactgtcataaatattaatag

SEQ ID NO: 276296 - DNA, 419 bp, Glycine max
  unsure (1)..(419): unsure at all n locations
agcttggcatacccgaagccatattatgattatatagatgatgcatatatactgatggtgaggagggtcctgcctgatccttaagtctcattcaagtccttgttgccgccgatggtaattaatgtatattaacgagtcactcaagtattgatggtgaagggaacaagtgtcggaacaccgtgcagatgcctttcactgctaatgaagcttaaaatactactaggttttaattnttgaagggagttgcttaattggtatacacttacgattactttgttctttatagtcagaagcaagattacattttaaggataacggctgntatgtggatcctaatttttttactggtcaatgatatccatttcaatattcttgaaacgaacacgatatcccgggctgaaaatatttgtgtatacttg

SEQ ID NO: 276297 - DNA, 426 bp, Glycine max
  unsure (1)..(426): unsure at all n locations
tgcanaatctataattntaattgctntcacagttcctctgtgaatgcatcaggttctggtaaaaaaaaaaaaaaatttaactcattctttgccccctcccctagctcttttactttttgtcattgatctcaaggaccaggttttcaatgaggttatataaatttttacatgggacaatgtcatgacagtgagtaagaaggaattgcaaattcatttccttattatatttaattttctaatttcatgattttttcctacttgtaacaccaatatcaaattctctgggattcttgctcttccatgctttatggtggtatttaacataaccattttttgataatttagtatttttctgtacgattttatggtgacaataacatttnnttgttcatgattgacattggaaagcagctgcgggatacaatc

SEQ ID NO: 276298 - DNA, 406 bp, Glycine max
  unsure (1)..(406): unsure at all n locations
agctngngctgtgcaagagataaaacaaatgactataagtgaacaaagagccatttctagggtaaaatcgggtgttgaggagtcaaattttgattcggtggaattttaggtgtaaatccagtttgagcaagtttagattgatgttatagacttgtgtgaggtgagagttttctccaaatttacctcattctcaatttcacttctcaaaccttgaaaatccattaaattgaggggttttggatacctaggtttcatgttgctttggtctgaagcttgtccttggtttagacatgattggtacatgatttgggacttgtaggattcaatttangcaatattggatgagggaaagagtggttttcgaaatctgcactttatgcagaattctgttgttgaaatgtgcagc

SEQ ID NO: 276299 - DNA, 413 bp, Glycine max
cggttctaggtacttacccgttgaagatcgaagaacgaatgaagaacgtcgaagaacggtcgaaaatcttcgcgaaattcctcacggaaacgttacggaaacgtttcggaagcgcctcggcttggattttcttcacggaaataatttttccaagcaaattcgaaagagagagaagtgcctaaggggctgaacccttttccatctcacttcctcccctatttatagcaaaataggggagatgcttgccgcccagctcgcccaggcgagcagggttgcttcctctagggcccaagtgggcctggttgctatttgcacccccatttttactaagtacacccctgcctttttttttgtgattcttttttcgtaaagttacggaaacttacgaatttcataacgatacttggtttctt

SEQ ID NO: 276300 - DNA, 434 bp, Glycine max
  unsure (1)..(434): unsure at all n locations
agcttggagaggatgcttcaatggaggaaaagttataaggagagaaagagagaggggggagcacgaaattgaaggaataaaagagggagagaagtggaactttgaagtatgtctcataagactctcattcatcaaagttacaacaagtgttacacatgcttctatttatagactaggtagcttccttgagaagctttcttgagaaaacttccttgagaagcttctttgagaaaacttccttgagaagctagagcttagctacacacacccctctcataactaagctcacctccttgagaagcttccttaagaagattcctaaagaagctagagcttagctacacatacctctctaatagctaagctcacctccttgagatgagaagctagagcttagctacacacccnnctatatagctaagctcacccccatg

SEQ ID NO: 276301 - DNA, 458 bp, Glycine max
  unsure (1)..(458): unsure at all n locations
ntgatggtgtcgagaagaaatcacatgtttgtcatcatcaaaaagggggagaatgtgaatgtatgtatacatgattntgatgatgtcaaagaagaatctaacaaggctgcttcaaatgataagcatttgcttcaagaataattcaagattgcttcaacaaacaaagccttgtttcaagattcactaaagaccaagccttgccttaaaacaaagtgctttcaagacatgcaaggctctggtaatcgattaccaggaagtgtaatcgattacccgaagacagggttgagaaatagctgttgaaaaatgttttgaatttgaattttcaacatgtaatcgattaccatatgtctgtaatcgattaccagcaacgaaactttggaaattcaaattcaaaagtcataacccttcacattataactgtgtaatcgattacacaaacattgtaatcgattaccagt

SEQ ID NO: 276302 - DNA, 423 bp, Glycine max
  unsure (1)..(423): unsure at all n locations
agcttctcaaggaagttntctcaagaaagtttctcaaggaagctacctagtctataaatagaagcatgtgtaacacttgctgtaactttgatgaatgagagtcttatgagacaccactcaaagttcaacttctctcccccttttcctccttcaatttcgtgctcccccctctctctttcttttcctccattgaagcatcctctccaagcttcttatccaaggcacattcttggtgacgaagctccttcttccatggcttattccctagtggatggcgcctcctctcacctcttctcctgtatcttccattgcatcttcatggtgtaaaatcaccattgaagcacctcattgaagctcaaagatccagcctccatagaagcttcacaagcaagcttccatcaagtggtatcagagcataagagc

SEQ ID NO: 276303 - DNA, 461 bp, Glycine max
tcatgcttaactatgtatggcaaaacttcattactgttgttcaagacatacaagtgagcttgtaacaaatcttctacacttggagtgatcacctgcagtcctcttgaacccttaccacccactctgtcatcatgccgagactcaggaagcccaacaggtttagccttctctaagtattctgaacaaaatccaatggcttcttctacaatgtacctctcaacaatagatgcttctggacgatatagattatttgtatacccttttaagatcttcatgtatcgctcaaccgggtacatccaacgtagataaacaagaccacaacatttgatttctctgaccagatgcacaatcaagtgaatcatgatgtcaaagaaagcagggggaaaatacatctccaactggcacagtataattgcgggctcattgtccaactcatcaaacatgactggatcaatgacttt

SEQ ID NO: 276304 - DNA, 432 bp, Glycine max
agcttcacaaggcccaacgaatgtctgtcttcattcctcctatccacaccttccatccttgccaacaaacgctttttagtatgaaaaaattcccaaaagattggttgttccaagatgaggccttgcccttgaaggaagaaacaacctcatcccaacaaaggcgccctcccaagcatctctgacaatatcattgaaggagttatcaactagccagttagtcatgaacttgaaatccctcttaccataataaatgtgatgatgctttaaagagaccaacacaagtttgtgatctaatttgaaaagagaaagatgagtaacttatatcaactttattcactacctaaggaatcatcttttctaactcaagtatgtatctgcacacaaaaataagtatgcttttgttagataaataaatgtccaatcaaataaaga

SEQ ID NO: 276305 - DNA, 440 bp, Glycine max
  unsure (1)..(440): unsure at all n locations
ctntgattntagaccaagtctaaggtgatatagaggagctcataataaataatatatttcacgattaattgtcacgtatgtcatttaattaagaaaggagaaaatggatgtatgatgagaatgaagcagaaaggctacatttgtccaaaaagcatgagaacttacttgctgaattgcttcttcagtgcagtataacatcccaacatagacatttgaagagaggccatttgcatccaaagccattttaattgcaagtgcctatacacgcacaatgaaccataaaagcttcgttagttcaagcacaaattaccaatacacaataaaccatagaagcttcgttagttagccgaagttggtggcgacgaactgggcaccaccagcagtgtcgtcagcagcctcgcgcgccactatgggttctctatatgcgggtgggttggaag

SEQ ID NO: 276306 - DNA, 425 bp, Glycine max
agcttgtaggattatggggtacccatcacatgtggtactaagtggcggtcgggcgatggtgcacaacaagttttccacatccacagtgcgcgcataaacccaccatcccctgttgcccacctccaactgagctcacgtactcccacgtagccgatatcctcgtttctctcaacaccgggtccccatcaatcctcccaagcttccacaacatccaagcaaaacaacattcaaacagcacaagctatcacagccaagcaaaacagagcaaaggcagaaaactctgccaaaacaccaaccaaaatcacagcttttctcacttaaagacccccagtaacaattccttcgttccaattcgttaaccggtggatcgactcgaaaattttactggaagtctctagtacataagcctacattgtgaccggtgg

SEQ ID NO: 276307 - DNA, 405 bp, Glycine max
cctttcttttctcatgtgcactcaaacccaagctgctggttcgaagacaaccatttttctaccttagatggcttgtgtagcatagctattacttttcctctcaatttgatctttgactctataatgaagcttcttcacatagtccgcctttgcttgaccttctttatgcttaaaaacagaaacattaggcataggcaaaagatcaagaggagttagtggattaaaaccataaacaacttcaagggttaagaaagaagaatcatcggatgacgccgatcgaacatttgctaatagacatcatccacatattattcagggattgaatagaagatacaatagccgacatcggccgttgtaaatcagcgactgatatttttcatccgacggtgcgcaatttcttttaca

SEQ ID NO: 276308 - DNA, 270 bp, Glycine max
  unsure (1)..(270): unsure at all n locations
agctngcacttcttcgttttcctcaagaactttatcttctttcccacttaggccttttagcttcaggaacaaagttatcccttgtgtcctagacctcaaccacttgtgatagccgccaatgatgccattgctacttcccctaagctccttatctttcctttccactgtattccacgctttacgaattctctgaagtatcctcatattggcttcactgaaacctcgcgcaacaaaaggcgcgatgatctcctncgacgatgcacctctcat

SEQ ID NO: 276309 - DNA, 443 bp, Glycine max
  unsure (1)..(443): unsure at all n locations
taactaatcagatgggacaattggctacacagttaaatcaacaacagtcctagaattctgacagattaccttctcaatctgtccagaatcctaaaaatgtgagtgccattgcattgaggtcaggaaagcaatgtcaaggacctcaaccagtagcatcttccccattagtaaatgaacctgcccaacttcactctactccaaaaaaagaggatgacaaaaatttaaagagtaagttgcctaacaatttctatgcaggtgaatcttccactggtaattctgacttacagaagtagcatatccctcttccattccctccaagagcaatttccaacgaaaaaatggaagaggtagagaaggagatcttggaaacatttataagagtagaggtaaacatacctctgctagatgcaatanagcaaattccaagatatgctaaattcttg

SEQ ID NO: 276310 - DNA, 338 bp, Glycine max
agctttgagccaaaatcctgactcaccataaaccttgacccagggtgagaatgtcaatccttaccctcggaagcaaaaaaggaagagaaggaaaatttccaatcaaaggaaaaaagagaggaaaggaaattcccaatcaaagagtgggagaaagcaaaaagaaaagaaagaaaattcccaatcaaagaatgggagaaagaaaaaaaaaagagaaggagaagaaggaaagaaagctcctggtcaaagatcgaaagaaaacagaagaaatatgcagagaggtctttggaccagacaatatctgaacaatacggaattgtcaccaaatgaaccaaagaaag

SEQ ID NO: 276311 - DNA, 413 bp, Glycine max
  unsure (1)..(413): unsure at all n locations
tgtaggattatggggtacccatcacatgtggtactangtggcggtcgggcgatggtgcacaacaagttttccacatccacaatgcgcgcataaacccaccatcccctgttgcccacctccaactgaactcacgtactcccacgtagcccatatcctcgtttctctccacccgggtccccatcaatcctcccaagctttcacaacatccaatcaaaacaacattcatacagcacaagctatcacagccaagcaaaacagagcacaggcagaaaactctgctcaacacatcaaccaaaatcacagctnttctctcttaaggaccacagtaacaattccttcgatccaattcggtaaccgatggatcgactccaaaattttactggaagtctatagtgcataagcctacattgtga

SEQ ID NO: 276312 - DNA, 651 bp, Glycine max
agcttgttgtatgacagttaagaatcagaggccttgatggaaagggattgaaagctagagagcatgtgagaaaggaattctcagaatatcatatttgattaaacattaagaatgagtacagcattgctcttatttacagtgaatggttaaacactagagtgggcaactgattgccaactaattagcccatcttaaataataaactaactaatttaacaactattacattattaatatctctgttaacctgtttatagggttggttgtgttgaatgagtgaatgtaatacacatgcaccccatggggggatcggccctcccctttctcccctcattcccctccccccacccccctcctctcccccccccctccccccccccttccccctctcccccccccctcccccctactccttccccctcccctcccttcccgaccccccccccccctctcccctcctcccacccccccccccctcccccccccccctccctctcccccctcccctctccccacccccccctcccctccgccccccccccctattactcccctccccctccctccccctattcccccctcccccctccccctctctccccccccccctcctcctctctccccccccccccccctcctcctccaccccct

SEQ ID NO: 276313 - DNA, 263 bp, Glycine max
ttgtaccttgtgcttgagtgctacacactgctcgatagagtgccccgagacaccaccatgataggcgcatgtggtgtccggattgtaccatcggggaaatggcagttgatagacgtttttggggctcaccataaccaattggttgctgagcaaatatggtagtaggtcggcatacgacattggtatcgaggtgaactccacgagctttctttctaggaagttccttcttgggttggtgatggtattggggttgggatttacat

SEQ ID NO: 276314 - DNA, 1005 bp, Glycine max
  unsure (1)..(1005): unsure at all n locations
tccgtcgtctcagctcttaccctgtctcatcctacctancctaatcctccctccccactcctnttaccaccncangctcanncgcnacttccctcccccttatnnntcnttnnatttttcctccnnnccctcaccgacgcgccnccgcgcggggngnntnntttgaancnccnctcgctaagaccccccgcgaatcctctagaaacgcacctgcacgcacgcacagctttgactctgagtcatccaacagactatatttatgtgaccctggcacgaacctcacatcatgcctttcaaaactccgtccaacaacccacaaacccatctttgaatcttctctctcaacatcggtcaactctccaaaaaactatgctgaatcaccctctcttcatctcttctaaaagttttcgctcaaaactttttcttccaagaaaagtctcttcgaataaaaactcgggctactcatattttttattctcttctccccttgcccaaagaacgaaggactaaccgcctgaaacccttcatggctctcttctccctttcccagagaacccaaaggaacccaactgagaactcctttgaccctccccttccccttaaactaaagatcctcaaggaccaacccacctgggatatcttttgtttcccctttcccacacattcaaagggaccaacccgtctgagaaatctttcgtcccaacacatccggaggggacatcctttgtggcacaagtagaaggcacacctacttggggcatcgtatacccgaaaacacaacagcggccctcttttgcggaccaactccacgggggcgacacctcccctccgggcttcccaacaaaaaaaagcggacggcccacccccgcggcaccactccctcccaaacgcctttctcacggttgaaacaaaacctcccacaacccacgcccctcccggacccgccccccccacccgctcacccccaccacccaccgacaacaccccccgccctcccacccgccg

SEQ ID NO: 276315 - DNA, 921 bp, Glycine max
  unsure (1)..(921): unsure at all n locations
agggccccggnnttgattcatggcactgctataacggacacttttaaactcacccccgcgtgccttgagaatcggagcaacggagacnntttgcttttttgtggaacaagggcaagcaaactggagaacgtagaaagatgatttggaacccccccttcaacgccaagatgagttcagaactagctttcctcccaaaaaaaccggggataagaactttgaagtgggagaagattttttgtggcagaagaatacaaaaagctctcaattttatgcctcaaatgaagtctaaacctttggagagtggtctcaaatgaccaaagctgaaaaaatgtatacacaacgcccctattttttgcctaagtgtaaatacaaatttaaagaaaaattcgaaattttattcaaaattcactctgatttgaattttggggagcccaatttgaagcccaaatttcacttattatgattagcgaaattttagctattgggtgaacccctaattcaagcttaagttccaaaattgctccttttaatggtgccttaggtgcgactgatctctgttaagccctgaatggacatgtccccaagtgttgaccttttttattgcggccattcgggtgtatcaaggccaatgcctcaccttccccctcatggtaataccaaaaatttaatggaatggagcttttctccggtccatcaaagttttttcccccaccccacctcaaacggcactcaacgctgtggaaattccaacctacgcctcatcaaaaacaagttatgggtctcaaaaaacaacgtttagaaacctcctcactttaaccttatcttcctactgggccctaattcctgcccaaatcataaatccttatccatatttccaaggcacaagggtcatatactcctacatgtcacaatatccccggc

SEQ ID NO: 276316 - DNA, 386 bp, Glycine max
tccaatatagcttagtgaagtgtaacattcatacactcacacgtgcccaagcattttcacataaacattcccttttatctctcttattccaaaactctcaatcttacatctgcacgcccaagcattttcttaccgcattatctcagtcaaaccaaagcttcaacgatacaagtaagttccctactaccttttttctgctatttttctgaactttaggttagacaaccttaaatctagctttaagaattataggatattaatatttttagaagtagttagagtttaagactctgtgaagctgtcttgtgtaaaatatgttgagaactctacatgtgtgatattcctattaaaggcctccatactggaagaaaatgcatttcattttt

SEQ ID NO: 276317 - DNA, 794 bp, Glycine max
taaccttaggttgttcaccatgttgttcatgttgtttcccctatctctaaaaatcttcccatttttggctttgatgatgccaaacatgatccttagttttatcctgaaaatttcttaacacttaagaagagattaattcatcatcatcatgtatcatatatatatatatatatatatatatatatatatatatatatatatatatatatatatataaaacaatgtggtgctcaatgctatgcaatgtagttaatatgcaataatgtatattcttcttccccttttggcattaacaaggcccaaaagttgattattcacaaaaaaacacacacctgttatcagagaaataaaatatatttcatttaacttaaagcttaaatgatctttatacaaagacacacaaacttttctcactataaacttagacatgcttgcaatgtattaattgcaatatgtatatttttcttccccttgggcttaacaaggcgaaaaagttgtttttccacaaaaaaaccacccctttattagaaaaaaaaattttttttctttacctaacgcctcttgtgttgttgaccaaagcaacacgcttttggttttgtcaggccttttggaccaaaacacctcccgaccttcttccccttttttttttggtttgggggtctcagggtaactatttttttttttcaccttccttattttttaagggggttcaatttgtagggctttcggggaaaaattcttaagaaaaaccccctccgtattgaaacaccagggtgcttgtggctctctttacg

SEQ ID NO: 276318 - DNA, 391 bp, Glycine max
agcttgaggaatattatggaactgctagagacgccgctattactattgggctacacacgtgagtctgcttaaaggtaagagataagtttatcgcaattggtgtgaatgaacatgtgtagggatccttaaatgattaaattggattttattttgggatgtttattgaattataatctttctttacgattataaatataatattgttgtatttgacagaccaattgatgtccttatgcgaattggttgataaaattaagtgctcttagtgttttcatggttttgacctatgattttaattcattgattttaatatgatcgtgtggaattgtttgaggggctttactccccatgtgtgaaaaacatcttgtataaattgttatattgagattat

SEQ ID NO: 276319 - DNA, 333 bp, Glycine max
tgccacccagctcgcccaggcgagctcgggttgcttactgcttaaaattcgccttctcaaggaatattctggaaggccccattgggcctggtagctatttgaacccccatttttactaaatacaccccctttctctcttttggtgaaatatttttccgtaatgttacgaaattctttaaattacgcaacgatgctagttttcttttgcgattgttacaaaaccttacggattacataatgatccatttattgccttccggaacatttataaactcttacggttgcgcacttacactatcttttaattttcgggatgtttctgaactttacaga

SEQ ID NO: 276320 - DNA, 427 bp, Glycine max
agcttgccacctattgaattctgaatcaacacggtactcttaacccaagtggacagacgaatcacccaagtgctagaggttctcaaccaattaaatgtcaacaagacaatgagcacatagcaatagaacagaatcacaatatctggcctcgaatggaagacaacctttttttcttcccacttttctcatctaatttgctatgtaaattcatccttgaaatgaaattcacaactacatcctcaacaagaacatattatttaattacattgtgaaccaaaagttacattgcaaagtaaaaaaaaaaaactggcaagaaaccaccatttgggaacaaacccgtacagcgccattttttttttggcttagtattattattcacttacccatgtacacatgatcttaacttaagtctaaacagtacaacctg

SEQ ID NO: 276321 - DNA, 557 bp, Glycine max
tatactattggtgaacgttgcatgtcccgccattcttatttgcggcatgcttcatgtcaacatgtctcgcctgtgttactggcgacaccctccagctcagcatgtctcgcctgtgccactggcggcatcctccagcaacacctatgtctccagttcttctggcggcatccattgaggaacagaccctcttcgtaaaaagtttaaaaacataccctctttcgtaattagtttttaaaagtaaccccttatttgccagtaacctacttgcatatggaggtttaggtagaattattaaggtttgatttttccactttaattttaatgtatacacacaataaaaaataaaaaagacgataacttggatttttttaagtaaaaattagttattgaaaaagtttggtaaatattttacgcacttacgtgcataaaaaaactttttatataaaaattcttaaaacaagtttttttttatagaacaatcatgagaataaggatattttaaaaaagttcattggaggagtttagagttatgacgaacttttgatatggacacttaa

SEQ ID NO: 276322 - DNA, 907 bp, Glycine max
  unsure (1)..(907): unsure at all n locations
cctacacccaagtgccncaccctccaccacccctacccacctgcaatcantccttactacatcccccccccnnnccccccccggcccccgggcctgtaacctcctaaacacccgcgattaaaaacaccgcagcatgcagctgagggtgaaaaaacaacagcctatgttagaaaggacaaacaccatacagagggataaaagaaacccgaaggggcagaggtgctcaaacactaacaatgagtacacgaccgcccctatttacagggaaagggtaaacaataaaagtgggcaactgaatggcaaccaaacaccccaatctaaaaaataaactaactaaattaaccaccaacacaacaataaaatccctggcaacccggctacaaggctgggtggcggccatgaccgacacgccacacacacgcaagcccagggggggaaggaaaaactggccgacgacaaccaccaacccaccccacccaccactcctccccccaaccaccaccccggcccaccctccaccccgcccacacctcctgccccctcccccacccccactccccccacacccaaccgactcacccccaacccccccatcccccgacccccaccgcccatcaccccccccctccatccccacccaaagcgcgccgtcacccaccacaccaccccaccctttgaccctacaacaacccgcccggtacacgacccctctacaccaccccccgccacccccccacactgtccccgactccccacctcgccacccgcccactcaccgcccgcgtcggcctcaccaccctccccccccccctcaacacacccttctaaacaccctcgcacccccacagccaccgtcacccccactacacccacaacaacccacacccaggcccacccgccccccccg

SEQ ID NO: 276323 - DNA, 936 bp, Glycine max
  unsure (1)..(936): unsure at all n locations
nagccnncccgctggggttttgaattcaatgccnttggcannaacgcgacactatataatactcaagccccactgtttcctgggattggctttgggcttttcctgctcaccttatgtggaaggcaaaaaaagcctccttctgggggggccagaaccatcaatgaaataccactctggaaaagctagaattctaaccttgtgccaggacctaccggccgagggacagtctcaagtagacagtttctatggggcgtaggcctcccaaaaggtaacggaagcgtgcaaaggtttcctcgggccaaacggaaattggccctcgagtgcaaaagcagaagggagcttgactgcaagacccacccgtcgagcaaggacgaaagtcggccttattgatccgaccgtgcccaatggaaaggcccgcgctcaaccgataaaagtactctaaggataacagctgattctccccaagacttccattgaccggagagttggcaccttcattgccggctcttcccacctggggctggagtatggttcaaagggttgggcttgtcccccattaaaagcggtccgtgaacctgggttcaaaacgttctgaaacaaatctggccataatccgggtgggcggaaaacctttaaaagaccctttcctattactagaggaaccgggaggaacccccccttgtttgccaattatttgtccccccgtgtaacaactgtggtaacccagtgcccgaaccggaatcctgtcgtacattctctcatatcttacacccactccaagaaagaagtcctctcctttctcactacccctcaaactccctgcgttaacaatccaaaatatcaatgtgtttttttcccacaggatgcgctcaataaatttttaatatatcctaaaaccgtcactatatcactatctacttcttacactcatattcg

SEQ ID NO: 276324 - DNA, 362 bp, Glycine max
  unsure (1)..(362): unsure at all n locations
agctttgacttgagtcatcaagagattataaatatgtgaccatggcatgaatttcacatcatctttttcaacatctgtttcaacaatcaagaaatctatctttcaatcttctctctcaacatcgttcaactctttcaacagattttttctgattcatcttctcttcatctttctaaaagtttttgttcaaaactttttctttcaagaaaagttctttgatcaaaaacttgtgctactcatcttttttattctcttctccctttgccaaaagaacgaaggactaaccgcctgaattcttttatggctctcttctctctttccaagagaatncaaaggacctcaactgagaattcttttgattc

SEQ ID NO: 276325 - DNA, 402 bp, Glycine max
tgtaggccttggatcttcttcatcaatggagtcttttgcttcttgaagatcaatggcagcaaaatggagaaagaagaaagatgattggagacgccacttcaaggagaagatgagtcaagaacaagcttaccaccataagaagcaatggataaaaacttgaaagtaggagaagaatagtggagggggaagaagaaaaagagcacagaattttatgcctcaaatgaagtctaaactttgaagtgtaattctcaaatgatcaaagttgaaaaaatgcatacacaaggcctctatttatagcctaagtgtaatacaaaattagaagaaaatttgaatttctattcaaatttcactcgaatttgaatttgtggagcccaattttgaggtcaaatttcactaattatg

SEQ ID NO: 276326 - DNA, 285 bp, Glycine max
agcttcttacgagacctactattggtgaccgatattcacgagacagtcttgttggttgaacactgaacacacgggacctacattccttggattcattgtaagaagcgggattcgcttctatggtgatcactggacacaaaagaccaacgtcttttgggttcattgaaagaaaaggggacaactttttggttgttatcacttgacacaagagaccaccgttgctttggggtcattgcaagaagagggcataatttcttgggtgaatcactgaacagaaaggagggg

SEQ ID NO: 276327 - DNA, 460 bp, Glycine max
ttgtcctcagatccctcttgttgaactagacttagaccaaacaacattattgtaacaacatattcaaaaccaaaacttaatccgcagatccctcttgtaagactaagtttcaattcttcttcattcaagttctaaggcaaaaatacatttcccaatgctaaagtcacctaattatgcacaccaatgggtgatcagaccaagagcatacaaaatttaagcactgaaagaaacattgaacacaagaaacacaatcaattagatattaaaataattacatcagctgttctttagaaatccccaacaagggtgtttagctagccattatagaagaaaccctaacaataatgagattacaaaacctaggtatgtctggcaaagctgctccttttgctgcctccagatctctttttctgaataggcactatggtgtgctctgggatgttataaaagttctgtaccc

SEQ ID NO: 276328 - DNA, 748 bp, Glycine max
gcatcatgcttgagaatattagggaccgctaacacttctgttttactattgggctccacacctgagtctgcttaaaggaaagagataaggttattgcgattggtgtgaatgaacatgtgtagggatccttagaagaataaactggttctgtttttgggaagcccattgaaatataattcggtctttacgaatataaatgtaatagtgttgggcccgacacaccaattgacggtcctattcaaaaaggtggctaaaatgacgtgctcttagagtttatatggggttgacccatgattttaatttattgatgttaatatgagcgcgtggaattgtttgacggggttttactccccatgtgtgaaacgcaccttgcaaaactggcttcccgaaatcatggcctggcggttcctattgtggcggagggcgcaacttcaccctcagaccacccgtgccaccccccggctttaaacgggcgcgcctccccccctccccacttctctcgcccccacccatctccaaatccctccctcccccccgaccttcccccccctcctccgccctccctcccccccccccccccgtcccctcccccccctccgtcccacctcctctcctctcccgcactcccccccccctccgccccctccctccccccttccctcccccattcccctccctccaccccccctacctccccctaccccgacccttccccccgccctccctatcccctgctccgtcccccccc

SEQ ID NO: 276329 - DNA, 429 bp, Glycine max
  unsure (1)..(429): unsure at all n locations
tgtggaataaagcctaaacaagtatttatctttgctacctgttttgcagtcccttctcctgcagagaatgggatgttcaaagtcttaacatagtgttattgcaagcataatgatgccagctttttttgcctttcttgatgaaaatattgacttaaaaaattatcctgctttangtggaagtgactgatgctgctattcttgccctaatagaaaactactgccgagaagcaggggtcaggaatcttcaaaagcacatagaaaaaatttaccgaaaggtctgttaatttgtttttttaggtcaatacagtcaacttttagttactgacagtgaaaaggctatgttgtatatggttgaaaagacaaccactcatgatttgatggtttcaataattttggctgcttatttcatcactatatctgaatttgaat

SEQ ID NO: 276330 - DNA, 361 bp, Glycine max
cgccgcatgcaagcttttgaatcctacaaaaaccatgatttgttggtaccctaacctcattacaagcctagaacgtcctttggattcattttgtgtgtttatttctgcatgatctgagatgaaatgcaaaggttgggacttgcgctagttggctatgatggaaatagcctaaatacttgagcttgagtgaaacaacgactatgaggttttggttgatgatccttccttgatttctaccattcacactagcttatttcagttgtgactctaatgcgtatgttcctatctttgaaaagctgcatgtttgtgaacagacattgattgaagcattccatgatattcacttcatatggctgaattt

SEQ ID NO: 276331 - DNA, 507 bp, Glycine max
tgatgtgtcattattttctcctatttcttaaccctttttgtcaccattttaattactgattagccttaattgtcaaattaattatgcagttttatcatttgggcctacttgactaattttgtgttttttatttaatttcaggagaattataagcaattggacttgaatccagaattgagcttggacttgaagagagcatacaattttatttcatcaaatcttatcttatccaaattttatttcatctagattttatttcgtccagattttatttcatccaatcttatcttatcttgtccagattttattttatttcgtttatgggcttggactcaaaacagatttgtaagctttggggttgaggacctatataacagcaccagggttttagtttagagagagtttttggagaggagaataattttagggttttgcaattccagtttttactggtcatgcccactggtcatgtagcaataaaatttgttttctgcaaattccgttttc

SEQ ID NO: 276332 - DNA, 893 bp, Glycine max
  unsure (1)..(893): unsure at all n locations
cggccactatcaccccccatccccccctnantaannnnnnnnnnnnncttnttcctcccccaccccnnntcccacgcccnccgcggctgttgcatcctctncnacccggatatctagaacgaccgcaggcagcaaacttgactgggccgccgagacttttttttgaccagggctagaatatcactgcatatatataacatctggtgctaccccaccagaaaacgatcgctcaaacctcctctctcaacatcgttcaacgtctttcaacagatcctctctgagtcatcttcccttcaacatccaaaagttattgatcaaaacttttgctttcaagacaagttccttgaacaaaaacttgcgcccactcatcatttttatactcttcccccctctgccaaaagaacgaaagactaacccgcctgaaacctcttatgcccctcttctctccttcccagaaaaaccaaaggaccccacctgagaaaactcttgactttccccttcccccctaaactaaaaaatttccaaggacctaaccacctgagaaatcctttgggttcccccttcccaacactcaaaggactaaccgcccgagaaatctttgtccccacccaccggagggggccacccttgtggggccaagagaggggacccccacccggcgaatgtgatccggagaacaaagaggggccccctttggggagcacttcaagggggggaaacaccccccggggttccaaacaaaaccagggaagggccctccctcgggggacttcgcctccacaggcactcccccggccgcaacacaaccttccaacccccagctggctcgtcaattctcatacccacccccccgtcccaacacaccccaaactcccctccccgcaccccctcct

SEQ ID NO: 276333 - DNA, 793 bp, Glycine max
ctcgcacttatttttttcaatctcccgggcgcgctttcgacgaggcttcactttccaactacaaaccatctccaccgaccgcaccttctctttttcttatacattagatttacgacgcgaatcttcctttctggcgaccctatctgctagatcgatctgatcctacgcctcatcactgatttacaccattttctgccatattccggcgtgggctctcatcatacgccgctttcaacgccctaagtctaatctaaacacgggctcagtgtctcttatgaatggcttcagacctgattttcgggtcactctttggtcgaccgccttgccgccccgttcgcaagacaccacagggctttcgccgttccaagtccctcacgtcgtaacctacctccatcctcgggcaacattcccagcctctcccgcccctcaccccccaaacccaccctccccccgcccgccttgctcctacccctccatccacacctgacacttctccctcactattccccccatccccgaccctgctcttgctctccttcctgcccacccctcgtggaccgcaccccactcgtcacacactccctcgcctctctcgcccccccctctcatcccacatctcatccccttctcgaccttctcacgcgccactgtaacaccccttcatcgcccccaatcaatcccatcgcgcccacatcactctactcctataccctctctccaccccctcatatccactattcctccctctcgctattccaaacgccacttctgttactcttctctcccccacccg

SEQ ID NO: 276334 - DNA, 966 bp, Glycine max
gttcatagccctgtttgaatacccctgtctatttacctgacactaatcgaatactcaagactttttacacaagggtacattaagaatctatactatttataagcatgatttatggatgaataccaaatggctaccatgaatcaaggaatgatggctcaggtccccacgcaacaaaaatcatttttcgccctatattatgtacttctcccaagtgtaaaagtcttatgctcacaatttaaaaagccctcattttgtgggccatcgaacctctgtaaatgtatatgtcttttggcactaatattttgtccaatcttccccttaaatcttcctctaactgtttgactgattaaactactgaaaaataatttcatcatctcctgtgtacccccaaagggtttgttaagtccctttatttggaccacttaaataatgtctcacaaaaaatctttgttcgaaatttttcataaatttcatgacaccttcctttttcatggccttccacaaagccttgcgcggaaaatattttgcgcccctctggccaaatccaaattaaaccctaatataaattttaccttggtggaacaatatttttttcaaaagatggtcttaaacattcttcaccattccccccctcttcggggattatcttaatcctcccacggaacctctaaaaataaaattttattttcctcaaattgtctcttatatacccctccaatttttacaaaacattggggaagttttcttttggtttttatcccatcaatctttttctaaggggctacctgctaaacaccctttcagcttctcagccttctcctcaatccgtcccctttccgatttaacacaggcggcccttttttatcccctatcttctaaaaaatacatgtctcctttcctcgtacaccgacttcatcgccgcctatttcaataccatttcccttgttttattcctgggcctatcct

SEQ ID NO: 276335 - DNA, 262 bp, Glycine max
agcttaaaacatagaggggaaacttcgcttatattctttttatttcccttctatcaatacactgcatatatatagctatatgtgctcactactgcccttgattggagattttaactacactttatctcttaatgagaggccagcaaacacgaattcttttggtcgtagagatatgtaggatttacgcgatattcttcaaggaggtaatctctttgacatacgttttcaaggggaccctatgacgtggagaaatggtagaatg

SEQ ID NO: 276336 - DNA, 115 bp, Glycine max
ctctacttgcctatatgacggaaggctagaaatattgcccttttttgtttgggatctacagtctattcacagcttggaggtgttggatatcagaacgaaacttgtttataccggg

SEQ ID NO: 276337 - DNA, 895 bp, Glycine max
  unsure (1)..(895): unsure at all n locations
acactccataccctttcgccatcccccccatacccntttctnntaccaattattatatcctccatcnnccnnccccagccccccgcggcatgtgacacnctggaccaccgcgatatagagagctgcatgcatgcatgctatatggcccaaaggcccgatagtcttactgaaattaaaatagactgaaaatagattataagagggaagagctattgaactaacgaacgaaatacacttttaaaagatgagaaaatcaaacactcacggtattgaatgcgagagaagaaaaacgtcaactctcttaatttcatatgacatcataaactaaggaacaagatttatctcaaaaaaatagactggcccgccaattcggccaaggataccttaaaaaaaaatgcaaaacctagaataaatttacgaccttggggacatcatttttgggaatcaaacgtcattgtgtgtcggaattggctcatatgctgctgaaaactcaacgggatccatcctcaccggccaaaatgttttttaccccttaaactataagaccaaaaacccaggtgggaaactttaaacggggaaccgcctatatcaccactgggaaagaacgctttcattttttgggaccctctttgcaaaggctctagcccttgaggaactagggcgctcaacaccgtccgatgccccacagggtaacccgccacaaaaaaacggcacgacgggctccctctctcccaaaaaaactcttaaggtctggcgggctcctctacttcgccctcccgccccgggacaggcctccccccggccacacccccattccatacctcgccccccgcgccccccacatccgccctcgcccagctccgctcaaccctgccgggacaacctcaccccaccc

SEQ ID NO: 276338 - DNA, 424 bp, Glycine max
tcattcctcacaagtctagtgtttctcttaatcccacatgtgtctcggttataagcgtttcaattacaacaactgaatagtaaaattcccaactttgcacatcatctcagaaaatacaatcatacatacacaacatggatcactatggactttatcaggcttgtaacgtggctgggctacaaagaattcatgcttttttcttggattcaaagcatggttatcaaactctcgagttaactcgctaactcttacaagtgtatgagtccacttaccctctacgagttgactcgtgtgtaaactctctttttagtagactctataaactctaagtaaacttggtagactcttgagtttacaactaagtcagcaagttaaaaaaaatagaccaaaatgtaagtcattttgagttgctttttgtttgttt

SEQ ID NO: 276339 - DNA, 925 bp, Glycine max
  unsure (1)..(925): unsure at all n locations
aggtggaggggaatcctcacactctacagcctcctcctcaatcactcgtctcccntcctccattcatactcnacnnnccnncacgcccncnccgcagccatgtagtacctcctctanaaccgcgacgctttatagtcgaaccgcacggatggcaacttttcaggaagtcactagttataaatttattttgtgtaacacctgttgtaactttgatgaatgaaagttttatcacacacacttcaaagccccacttctctccctttttaacccttaaaatacccgctggccccttctcatagtggcgaagcccccccttccatggcctattcctaatggatgggcgctcctctcgaacacaccataaaaatatgaaaagataccacaaaaattttccaacaaaaaattaaacttaaactatggaaacctgcctaacgaaagcttagaaaaataaaacaataaacttggaaataaataaacactagcatacacgcaattttggctagtcagagacctcacgcagcctaccgaaggctgccacaatatgggaaaaatttttttcccccaaactcatatataacaacagccattctgacacccgaagcgaaagctatgggcggtttgaagcttaacaaaaccacagatccaaaatcttttgaaatctctccaaaactagccacaaaaaggggccccgcgaattttcacaccaacttggagtcaaaaaaccttacccacaaaaaattcaccacaaataccaaccctcacatctaaacccaaattgcctcataaactgggcgcaaacaatcacctattccctcctaatgcatcgcggcgggaacaaaaaacaacaaaaacgtcttaactccggccccagcctactattccctcacactaaaaacgaactacgggaacgcgtgacaaaggcgcc

SEQ ID NO: 276340 - DNA, 382 bp, Glycine max
  unsure (1)..(382): unsure at all n locations
tgaaagctcaaaagaagactcaaagnttcattggttgtgtaatgcaatgaaaaagtcagcatgctcactggatgaagagaaaaaattcaagacatgatatgtaatcaacaaataaaggattagaagaatgttgcagacatgaacatctgcacaatgaacatgacatgaagaacaacattgtttcaacacttagaaaggattttcatcaacaagatgagttcattttgggcattgtatctcgagtttcaaaaatgcaattgatctattcttgatggctatggaaattttgcataaagagccttaaatttcatgaacaagttgtggtctaaatcaaactggatcatggtcaaaattgagcctgaagttgttaacgttgatttgt

SEQ ID NO: 276341 - DNA, 423 bp, Glycine max
  unsure (1)..(423): unsure at all n locations
agcttctcaccccttggcccagggtaganaccctttaataggaaccaagttagggtgccttatccttccaagaaattgaatcatctcatccaattcctcaccccttgcagtgcacactggcctcagaaacctaagcagcctcaccttgttgctcctttgcaacaaagccttgtacagtgttccatagttggattttccaatcacttcaccaggagcatccaaaatgtcacatattgtaaggtcctctccaccttgaaagatcatcaaatcctccttctgtgccacatcctcctccttgtgttctgaactctcaatgtctttactctcatcatactttgacacccttctcttgcaatagaacacataaactgcaacaaaaactaaaaaagtagctgaagctagtccaagcactagtatcaacat

SEQ ID NO: 276342 - DNA, 449 bp, Glycine max
ttggggttgaggaccaatataacagcaccagggttttagtttgaggagtttttggaagaggaaaatgttggatcgagaggcctcaaaataattaaaaaagggggttgaattaattattcctaaacccttactaattaaaaattactcttttaaggcttttactaaattgttaaaagaacgaggagtagaagagaaacttaacaaaaagtaaaagcggaaattaaatgcacagcggaaagttaaagagtatagaagaaggaaacaaacacacaaggatttttatactggtttagcacaaacctgtgcctacctccagtccccaagcaacctgcggtccttgggatttctttcaaccttgtaaaaaaccttttacaagcaaagatccacaagggatgtacactcccttgttctctttgaatctagtggatgtaccctccactagaactgat

SEQ ID NO: 276343 - DNA, 524 bp, Glycine max
cagcttatgctgcaaaacatctacaacagacctcctcaatttcaacagcaaaatcacccacaacagaacaattatgacctctccaacaacaggtacaatcccgggtggaggaatcattccaaccttatatggtcgaatccttcacaacagtagcaacaacaataatagccttattttcaaaatgtcgttggcataagcagaccataagttcctccaccaatccagtagcaacaacagcaacaaccctataaatagcaaacagttgaggctcctccgcaaccttcccttgaagaacttgtgaggcaaatgacgatgcaaaacatgcagttttaacaagagaccagagcctccattcagagcttaactaatcagatgggacaattggctacacagctaaatcaacaacagttctagaattctgatagattaccttctcaatttgcccaaaatcccaaaaatgtgagcgtcattgcaattgacgtcgcgaaaacagcgtcaagaacctcaaccaccaacatttttcc

SEQ ID NO: 276344 - DNA, 455 bp, Glycine max
tggttcgaggtacttacccgttgaagatcgaagaacgatgaataacgaatgaagaacgtcgaagaacggttgaaacctttgcgagattcctcacggaaaacgttacggaaacgtttcggaagcgcctcggcttagattttcttcacggaaacaatttttccaagcaaattcgaaagagagagaagtgcctaaggggctggacccctttcttcttcacttcctcccctatttatagcaaaataagggaggtggttgccgcccagctcgcccaggcgagcagggttgcttcctccagaagcaaccgccttctggaggaatcttatagagggcccaaatgggcctgggtgctatttgcacccccatttttactaagtacacccccctctgctgtttttatggcgattctttttttctaaagttacggaaacctaccaatttcgtacgaaccttgcttt

SEQ ID NO: 276345 - DNA, 413 bp, Glycine max
tagcttcaacaacagcccggaactgatccttacattatcccacagcagcttaaaacccaaccaataatgctgcaaggtcgacacaaattcccctcttcagtgaaccagtttttttgcccaatccttcctgcagcagcgacaattagcacaccaaaacacgcaataaccaaccattgacgaataaacatttcactgcttcaaatttctatctaacaaattcaaaagcccgagctgcaatttctatactctaaacaaaactgtaacctcaatttaaaatcaaatgcactctcaacccgaaatgcaacaatcagcaaacctaaacgccaaatcaccaacgaacaaacatttcaccgttttaaatttcaatctgccacaacaaatagcaattgccgccccaaacctacaatttcaaa

SEQ ID NO: 276346 - DNA, 428 bp, Glycine max
tgaaattttgttggaagacatgaatttggaaacagttttacctattaagctacggatttgtcaaaatatccaactgttcaatcggaggagtaaatatattagagacccgatttcatttcttgagacatcaagtaaacgtggagaattgggagttggagtactgtcaaactttgaagaacaaatctcagttatattcacaatattcacaaaaccattaaaggcagttatatttcaaaattataagtttgagagacaaagtgagtgtattatctttagcaaatctgaattaagggggagtgttgagagtgattctcttttttgctaagtagaggttgtggtgttttaaattactgcaactatttctttgtgtacctaaatttttctggacaccccaccgattttggacatttcaaatattgttcttcagt

SEQ ID NO: 276347 - DNA, 365 bp, Glycine max
agcttgtagaatggctagacatgatacatgtcatggtttggctcggttcaaggataaaagggatgccccacattatttccatgacacaaatgccaaaatgatgatttggaaactttatgcaaaactggtcatgcctgcacctatgtggacactcaagtgttaaatttttatggtcatgtgatgctagggctcacgattcatttcctctattttaatcaacccaacgtttccaaaacatgttcttttatcaaaatgtgcattcatccgagtccattttgggcgtttgggaaaaatttttacagaattcaccctttacgggtatacacaatttttcaaaaaactagttttgatcagtgaattttttt

SEQ ID NO: 276348 - DNA, 377 bp, Glycine max
  unsure (1)..(377): unsure at all n locations
tcggaagaaagtgatgaggtacaagccctaaaggcagagcttgtaagagcccgggtagtcgaagagaagttcaagtccatagccatcaaagtatgaaaagagtatgatgaactaaaggacgtcaatatggccacagctgaagccttggaatgagaaaccaagaaagcctgaaaggaagaacacgaccaaaacaaagttttgaggggctttatatggcagcaatagtgaactcaagctccgaagaagtgaaaggaatcatcacgggtcaaaagcatgatcttgaaagacgagctaaaggcttgccttangtcgaaaagaaatttgtcccaacagttaagcgagactgaagggaatatgtgggccatcatcgatgagtg

SEQ ID NO: 276349 - DNA, 467 bp, Glycine max
agctttctcccaagtcctaaatgacattttaagctagtattaactcactttaacctccatttaccacaaaattcagacttaaccttccaaccctcaaagcctcactctttttccactcataacatcacattcttactttctaaccctaggttaactctacccttcacctctaacagttttccataagaaatttcagcatataaacatcacaaacatcatcacaaaaaccctaaaacagaatgggtatgtctaactcatccaagcatggcaatttcaacaagctttcaacaagagtcttcacaaataaccatcatgaagcagaaaactaacaaaactacccatcatatctcccaaaaccccatacccacgaaaatcaaaggagaaagaagttcacccaaacctgaaattttgaagtcccactcgtagacacacacttcacgaccccgaaaatgccctcctttcgcgat

SEQ ID NO: 276350 - DNA, 389 bp, Glycine max
tggggtcccttgtttcccattcccctctcagctggtgaatcaccagtgctgagtccccgtatactttgagcagtttgacattagagtcaattgccgcctggacgaccaaggcacacgcttcatactcagccatattgttggtgcagtcaaaccccagcctggccatgaaaggtacacattgattgtttggagagaccaatactgctccaatgccatggcctagaacgtttgacactccgtcaaacaacacggtccacttgtcccgatcctcgtctagctttttctcaaataaggccataatgtcctcatcgggaatttgggatgcatgggctgatagtcgttgagaggctgctgacccaataatctgccaggcgcttctttatcgcctt

SEQ ID NO: 276351 - DNA, 1147 bp, Glycine max
  unsure (1)..(1147): unsure at all n locations
tcggcgcgcacccacgccaacatgnccccccccactctccacgcgtctcttcgttcaccatcgagacaatnngtgcacaacacacncnncccaccccccgcccccccagccggcttgttgaacatctctcttaacaccccacccattctatacaaactanctgcatgcatgctactttatggctggcccagggtagaaccctttttttataatgccggtaggcggcgcttgcgaacgcagaaactagaaaagccatcaagtccatccttagggcagacaatagtcctacaaagctaagcatcataacgttgatgcaactgtgtgagaaagacctgtaacgagatccataggaggatcacgcaatcacttcacccctagcagccactatgccacaaaagggagggctcattcccccaagaaagaacaataaatgcttcttgtgcgtcacatgcgtctccttgaggtctgaactctcaacgggcttactaccataaaacttagacagccctctactgtgatagacacacaaattccctgcacctctaaactaaaaaaaggggcatgaaacataattccaacacacctacccatgtaaacacccggagggcgggaggcgggctcgttcctctcatcaacacaaaaagtcaaaacactcctgaaccgccacacaagccggaacgtggtattgccaccactatcacacactcgagggcttcgcctaaacaacaattcccggggccaaagacaacacatctngctccacctgctcgcgcctactcctctcatctatatataaacagcgccccactccacgccatctctctcgtggaacataataacaccgtcgcgcccccgaactaaacacagttcccggtctccatcaaaaacacaagcgtaacatacactttacatncactctgtggcgaagcacttnttcatcgacaacaccgcccgccacatacgacaancacacacgcccagcctctcttactgcgcctccaactaaacaccaccgcaccatccctgaactcccggaagcgcacgagctcaacctctcttcatcccatctctcggcattccgcgctagtctgccacatcccacgtgccacgccgctcgctcagcacacatcctctcactccgcacccg

SEQ ID NO: 276352 - DNA, 370 bp, Glycine max
tgtaatgaagtaattaatagtttaatacctttcattattacgttatccaaagtatcaagaggattgagatcataaacaagtccctttgcatctctctcccaagtataaccaatcaacttcaccaaattggggtaacctctcaatgttggattagtccaaaattttacttcctcctgcaaaacagaatcattgagcttccaaaatccgtgacagataaaattaaatttggaaaaaatataagaaaaaaggttatacaaaagtgcaagagatggggagggaacttgctttgataatcaaattctcatcatcatatttggaacttaactggtgcattctttcaccatcccaaatcttcactactacatgttga

SEQ ID NO: 276353 - DNA, 379 bp, Glycine max
agcttgattaaccgcatcttcagaaaaaatattttagctttgaagaccaatcaagcctctaccataaaaatttggaagggttcacataattggcttggacttggaaaggattaacatccccttgcataagctttttttccaacttcaacatttcttcatcaatagtcttttggatcatatccctgaaagggaaacaactattagtccaatgtccattgacatatttaaatttgcgatatctatttccttttctttggtccaacggtgtaattttatgagaaccactaagcgccactcgtttatcctctaaatatacctcaaaaattttatcacacctagtaacgcccaaactatattttgagtttacaaaatttttttc

SEQ ID NO: 276354 - DNA, 586 bp, Glycine max
  unsure (1)..(586): unsure at all n locations
tgtatgcaaccatattgcatcaaatccagtctttcatgaaaggactaaacccagatcaattgtcatttgtcagagaaaagtgttatatagagaaatcacaactaacttaactcaagtgattaattagctgatatattccctaaatttgttcgaggtttttgtgttaaatatatttgtaacaagcttagcacatatgatatatatagggtaagtttgtttaaacttatttcttgaaaaagtaattattttaataaaataaataaatttttatttttattagtgtgtttgtctaaactgctgcttaaaaaaagctatttttttcttattttgagaagtaaatcatatctgtttattagaaaaacacttttttgaacttatttcttgaaaaaagttcttcttgaacttttttaaatcatatcaccctacatatgacatangtgagtttgtttaaacttatttcttaaaaaaaaagaattattttaataaataaacaattttctgttttctagcgtgcttgcctaaaatgttctgctaaaaaaagtgaattaatcactcattgggccttatagttcatgaattgacattt

SEQ ID NO: 276355 - DNA, 980 bp, Glycine max
  unsure (1)..(980): unsure at all n locations
cactctcctctcttatnacacttccttactctattaccgcgcgaacaacgtannnnnggttataattaatatccaatcacccctctccccccccgccccacggcgccctattgacccccctctcgaacaccgcgtattctatagacacacctgcggcatgcaagcttcaaaaagaagaaggcctcagcatcctttttatttgcataggggaacgatatcaagggagcccccaaactatactggagagggataccattactggaaaacccggacgcttatatctatagagcgcatggatgcacctatgtggacactcaagtgacaaatttctatggtcacgcgacgctagggctacaggattcatttactctatttaatccaaccccaacaattccaaaataagaacttttataaatatgggcagaaaagcgaatacaacttgggcgcctcgggaacaacagtccagcatatcaacctcctagggcctgcgaatgttttaaaataatagggatgaacaatggaagattgctcaaagaaaagacggaacaatcttcctatttacaacaagcacagaacgtttgccagctcagacgaactaaggataacttgcccctaacccactgagtttgacacatcccaaaacgaatgctaccggaaaacgtccccacaccacgccaacagagcatctacacgaccgtggtaagagccacccaaaacctcctacgaaaaaaattgtacagaatgatgagctttattaaacaacggggcttaacagggttttatgttcacacaaacacacccccaaacaacgggccggtgggtgaactttcagaattattctaccctggttctttggggccctcttttcgcaaaagccgcacgcaaactcgagtatgggtttatcggcatctccccccccctcccaaacactgccccgacaatcgcacgatctgcccctaaaaaacacatcctcacactac

SEQ ID NO: 276356 - DNA, 268 bp, Glycine max
ctatataatactcaaaccttataagggcaggtctcggagaccattgtcttttgttccccatctttgaagcatgaagatatcaaggtcttcggatttggtccgaccatgccctcttgatatacaactgggaaataggcgggtggaggaacaccccctggtttacgcaactagcattgtgtcaaccgtatcagccttaaaagctctatatttgggcctgagctttagagatttcattttgacaacgctttttgtcttttgtcttggaatt

SEQ ID NO: 276357 - DNA, 960 bp, Glycine max
  unsure (1)..(960): unsure at all n locations
gcctgggatgcgacgcttctagcacacccctncntccttcacnactatcactcacgtcgtacatattccacacatactcactactccacactcctaaaccnaccacgcccgcgcgcnnncttcatttgactnnccttcctaaacncncgccanatttagagtcgatctgccagcatgtaagctttgatgcaacatttggagaggctaatgatttaacgagacgacgcgctccatgagaggccggatcaaatggcgaatagagaccatattgaacaacaaaggacgagaagagggaatgatggcgttcctacacaaaaccggattgatggtattaaactcaatattcctccctttaaaggaaagaatgatccggacgcctactcgcagtgggacatgaaaactacagaacgttttctcatgccccaactatgacgaggaccaacaggtgaagcttgccgccacggagtcttccgactatgctccttgtgcgggggaacaagccttacaaggacagaccaccacatgaacagccaatggccgacacatgggcggacatgaatatgatcatgaggaacccgctcattacctcagggatctgaaaattaacccttcaaaaactaaccacccaacgcaacaatgggggttcacgaaatatttcacagaaatggactgcgctcattcattccgcaaacattggcgaacatcaagacgccaccatgggccgacttcctcatgggttgaacaaggatctcgtcgaaatgttcgaccgccggagttgctgccatgaaagacttccttccaccacaattctcggtctcatcccctctcaaaacgcaacgaggccctaccaacaacttcacaccacctcggtttccctatcttggacccaccaccgttacaaccaagggcgttgctctttcacacatttccaccctcccgcacctcaaaacctctctcact

SEQ ID NO: 276358 - DNA, 954 bp, Glycine max
  unsure (1)..(954): unsure at all n locations
tactctctacactaccgattnccatcacntaaccnncacacgccagcatgganncttgatttcatcccctgttgataacctcttnaanaccagacactatagaatctcacgcttcatgacgaatcaagagtgattcattgtgtgtttgttgcaaacatagatgagaccaaaagcccaaaagtcaagatcactttatgatgaccaagatgatgaccttcatcaatgagttctagattgagcctcagaacactttgacgatccacaggaaatatgattttctgaaccacaaatcatagattcactgattcaagaatattcacgaatcaaaattaagagtcaaagatttttgaatcaagagagagactctattcaacaaaggtgttaaaaagagcttgtccaatatttgtgcagcacaagaaaattttggcagaagctttacccaagcattttcctttttgggatattttacccaatcctggtgacctttaccaggggttgtaaaactaataacttttgaatttccaatggacaaaccccctttggtcattggtacccattccccatattgggatttaaaaccctgcatggctttctaaaaattattttccaaaagtcacatttctccaagtggctggtgcctgaaaatttcttacaaaaccaactttttcttagggaaacactttaaggaaactcccccgagtaacaaattttacctggcgcctcagaaacaccacaactattggcccccgcagaaaaaaatttaaactatttctttccaaaccacaacactgtttcacaatctaagttttcaaacatttcggggaggttctgtacaaaatactgaggctagaatttctattaactttccagaaaatttgtgctaaaatacactcttccagaaaacttttgttgcaaactatagagagcacatcgttcttctctcccccttcgacg

SEQ ID NO: 276359 - DNA, 890 bp, Glycine max
  unsure (1)..(890): unsure at all n locations
tctcacttaccccactcaccttcctcctccacaatatcntctaatctaaaacccctcntccccgcccccgccttgtgcccccttaacccccctctataaacccgcgcggccgcctcctctcaaggagccaccgggccacaaattttactcgggccaacccgcagaaacaaggggcactgtgacatttgagagagacaacccccacctcaaatcccgaacgagttaaaaacacccagggcgcgacaacagaaaatctctcaaacctcgccgaacgcgcgccccccaaaaaaaacacaccaccaacagagcttaaacaaggaccgctggtgctggcgacaacccactctctaacggatcaacccccccaccaggaaggtcccccggggcaaacacactcactctaccgccccccaagaaatcgaaccgccgaacaataattgcgtcacgaaacgaaaaaacttcccgcaccccgccaacatccaaagtgcagaatcgccgctccactcaccagggccccaaacaagctccggtccaacaaccggcaaaagcacagtatgccccccaccccccaccagggaaaggccataaccaccccctggtatccccagccagaaccaccccccgcaaaggccccaaccctaacaaacaaaaacccggcacgtccgtgccccgtacctacacaccgcggctccagtcccccccgggcgacaggcggaatacaaatagctgtctctccacccagaccgcatccctccacaagacacacaccaccaccctccccgccccacactctagccatcaccaccacacagcgccccgctattccacacacgcaccccccacaacctcccgaacaaaacacggcggccaaccacgccacccccacaccg

SEQ ID NO: 276360 - DNA, 436 bp, Glycine max
tcttatccaaggcaattcttggtggtgaagctccttcttccttggcttattccctagtggatggtgcctcccctatcctcttctcctttgccttccgctgcatctccatggtgaaaaatcaccattgaaggacctcatcgaagctcaaagatccagcctccatagaagctccacaagcaagcttccatcaagtggtaatcagagcacaagagcttcaagtaggtgctccttaaacctccattaattttttttctttaccttctcttccattgttgtttcttcatttttctccatgtatctcctcacatgtcttggtctaaatgttgctaacatgattctttatagtttccaccgattaaacttgctatagaaactagatttgattgtctatggttcaaacttcttgctcttgttcttgaaccatgaattgtgttga

SEQ ID NO: 276361 - DNA, 951 bp, Glycine max
  unsure (1)..(951): unsure at all n locations
attagtccgaactcgcctcatccacccaccataacgatactcatcgtgcgtctaccttcgccccactcctccccccccccgcgcccnacgggcatgtgacntcctcgcnaaccccggatatagagacccgccgccagcaggcagcggacacaagcggacagcggcgggatattctttagatgcgcgacaccccccggaactcttgcggaacgacatgccagagtgcccaaacccctaaaacgggtcgagcattctacagaacacacccgcacccgcaccaacaagaaaacgccaccacctattggcggagacaggactacgacaaaaaacggaaggaacccttcaaacctatccatcccaacagaagagcgaaccccccccccgcaacagagaaaaaagccaatctgcagacaaaagaaccaatagtctcgtgaagtctcacatcccccacgcctgagggagcccacccgagaagtgacggcacaaccaggcgcaaagcctccccgagaaacaaagaaaaatcgctcgggaaacctccatccccaagggtcgagaagcccctcctgcgacaaagagacccataccgctgggaaagcccctaacctcaaacgggacggagaccccccggggcgaatccaaacccaggagagaaccccccacagagacaaaacccacccctccgagaaacgctcaaacccccagcccgagcgagccaacacaaggggacccaaatccaaccgcaaccagcccccatgaaacaaacgaacctacttccccggcacacctcctctcccccaatagccaaaacaaccccgcaaaacgccaaacgcttcccggacgagaaccccgcctggaacaaacaaacacaacaccccgccagaaacaatgctcacccaccgggctccgcccacactaccccgcgcccatgcggccgcgcccccaccccacccc

SEQ ID NO: 276362 - DNA, 213 bp, Glycine max
  unsure (1)..(213): unsure at all n locations
gctggtttgataattcagcttgtgtggtggtatatattttatcncattctcctaacccaatggctcgataaaatgtctaaactgatggatttaccaaattctatctcttcatgaatgatgcttgttctctctagctctatgacctcgagctaagtttgtatatatcatttgcatcttgagttatctaatctgttccataaaaatgcatacact

SEQ ID NO: 276363 - DNA, 451 bp, Glycine max
agctttcagccaaaattccgactcaccataaacctctgtttctaggtgacaatgtccatccttcacctgggaagccaaacgaatacaacggaaattttcaatcaaacacaaggaaccaacgaacacttccaatccaaaaccaagcccaaaagaaacgaacgaaaatccccccttcacagagtgggagaaagcaaaaacaacagaaagaacattcccaactaaacaatgggagaaagtccaccacggagaagaacaatgaaagaaccctcctgactaacgatccaagggaaacacaacaaatgtgcacaaaggtctttggaccgcaccatatctgcaccatacagaattggcaccccacgaaaaccaagaaggaaaggaaacccccacccaaaatggccctctccctttgattacacaccaaaatcccgtgcgctagcgactttttcccccc

SEQ ID NO: 276364 - DNA, 407 bp, Glycine max
ttggaacgagaaaccaagaaggcccgaaaggaagaacacgaccaaagcaaagttttgaggggctttatagggcagcaatagtgagctcaagctccgaagaagtgaaaggaatcatcacgggtcaaaggcatgatcttgaaggacgagctaaaggtttgccttaggtcgaaaagaaatttgtcccaacagttaagcgaaactgaagggaatatgtgggccatcatcgataagtgcaaagagaagctaaatctagcggcgactcacgagcaaaagctagaggatgagtatgccaagatatcagcccaaagggaagcaagggaaagggtaattgattcattgcaccaagaggcaacaatgtggacggaccgatttgctcttactttgaacaggagtcaaaaacttccccc

SEQ ID NO: 276365 - DNA, 494 bp, Glycine max
catgcaagcttggcatgaaagatattgtctatttacgactcttgtgtcaatctagacacacaaaccaagtccataatggaaaataagtaaagtacaaattatcctagtcattggcggaaatattgacttctgtaactgctactaaacttgcaatggaacacattgtatatatatcgatgaattttgcattcactaacacaaatttgtttaatttgtaccctcaaatctattaactcatgtgttcaacttgaaatatgaattttatattttacctcttttatttggcattatgtcaccttgtccaacacatcacaaatttttctttgatttctcttggccatagattagacctgttttatatagttctactttgttgtagctaaaatcaagattatacttgcgtaagccatcaatgaagtgaaaaattgccactgacatattgaacacatgattttagcacagcaatgatggctaaaaaaattgcagtgataaca

SEQ ID NO: 276366 - DNA, 419 bp, Glycine max
ttgcggatttggtcttcgccagtgaaagggtcgaagtggatctgaaaagaggcaaatttaatcatcctgcttggacgaatgagaaaactggggcaaataaagaaggtgacgatgagggagaaacccatgctgtgactgccattcctgtaccgccaagtttcccaccaacccaacaatgtcattactcaacccttctccttacctaccgcccatttatccacaaaggccatccctaaatcaaccacaaagtctgtctaccgcacttccaatgacgaacaccacctttagcacaaaccaaaaacaccaaccaaaaaatgaattttgcagcgagaaagcttgtagaattcaccccaattccagtgtcctatgctgacttgctcccatatctacttgataattcaaatggtaaccataaccct

SEQ ID NO: 276367 - DNA, 529 bp, Glycine max
tgaacacctattagtatttatattttttaaaaaaaatatgtatgacatcaactcgccattggctcccaggttagtggattaagctaaatagaccaatacaaactcacgggttaagtcacctaacccattgatccaaagtttacattgtcacctctacattagtgactttttgttgcctttgtttcctttaagctttttgtgtataaaaatatattttttcttgtgtgaaatatttgtttgtaattcagttttaactatataataaaattgatggctaagtttaatatatatttaaacagacttgatcatttgattatgaggacttggataaaatttatattcttcaaagttttgttaatataactcgttaaacataattctatttttataaactatgaaaaaatacaaaatttatatgaattcaagctcaacacattaaaacaagtaccaaccaatactatcatacctttgacattttaaaaactaatggcaacaaaataatcaatgggatcataatagtctaaagatg

SEQ ID NO: 276368 - DNA, 469 bp, Glycine max
agcttctcaaggaagctacctagtctataaatttaagcatgtgtaacacttgttgtaactttgatgaatgagagtcttgtgagacacaactcaaaattcaacttctctccctttttcttccttcaatttcgtgctcccccctctctctttctctccctctttcttttcctccattgaagcatccttccaagcttcttatccaaggctcatcttggtggtgaagctcttttttccatggcttattccttaatggatggcgcctcctctcacctcttctcctttgtcttccgctgcatctccatggtgaaaaatcaccattgaaggacctcattgaagctcaaagatccagcctccatagaagctccacaagccagcttccatcaaaatggctcgaaacggctttctacaccaatgtcaccaggagtgtagtggtcacattcatcaagaaggaactgatttgtccgtaccg

SEQ ID NO: 276369 - DNA, 408 bp, Glycine max
tgtaggattatggggtacccatcacatgtggtactatgtggtggtcgggcgatggtgcacaacaagttttccacatccacaatgcgcgcataaacccaccatcccctgttgcccacctccaactgagctcacgcactcccacgtagcccatatcctcgtttatctcaacaccgggtccccatcaatcctcccaagcttccacaacatccaagtaaaacaacattcaaacagcacaagctatcacagccaagcaaaacagagcaaaggcagaaaactctgctcaacacatcaaccaaaatcacagcttttctcactcaaagaccacagtaacaattccttcgatccaattcgttaaccggtggatcgacttcaaaatttactggaagtctattagtgcataaacctaca

SEQ ID NO: 276370 - DNA, 403 bp, Glycine max
cagcttacctttactactggtgtaaagttattatttaagattataatatctaaactttcttttgcaacttttgttccttggatgcccatagaaagaccaatatctgcctaaattacataatagcaaagcattgtatcaactataataaggatattaatataattgataaactctaaggtttaataatgaattttaaatttcaatttctaagcacccacacaatttgtttgcatgacatgagttatttgatgattaatttttcagcatgaccctcgtatatttgaatttgaaaatacgtgttttatggctaatatgaaaaatccgccgatgatagctggtattatatgcattaacaacttccctcattattttggtactcacttgagtaatgcttttgaaatat

SEQ ID NO: 276371 - DNA, 439 bp, Glycine max
ttataatgggctttctcttcatttctactagcatcaataatagtaacaaacttctcttccaacataacaagatcatgatccaaaacaccgaggtgaaattggacttgctcattttagtaagagaagttaagcccattaaaattggcacagatgataaataagaattcaatgaattgagaacatgtattacataataaaattcacataagttttttgagatataaaatacatgtcatacatatgattcattcatataatggtcaatgtatattgatgttctcctgtgggtgatacaccaacacacaacatacaaacattatgatgctaagaaaaattcttaacattatttggcaattaaatatgcaccaattagaagtatctatttcctttgggtatataaataaaactaatgatacacaccaatcgcctacaattatat

SEQ ID NO: 276372 - DNA, 906 bp, Glycine max
  unsure (1)..(906): unsure at all n locations
gtctgcggccgccttataccctcctccctctccccatccntccctccggtcctcatcaccctnttccctctacaacaccccccgcgcccgccgcatgttgacctcttctcaccacccggatcctatacatcgccctgcacgcatgcatgctcggagatgatgcgtcagtggcggacttttttgagagacagaaaccgacaggggggaggcccaaattgaacgaagaaacgacggacatacgttgaactttgaaggttgtctcagacgactctcattcatcacagccaccacacgtgttacacacgccttctatttatacacacaggcgcttcacttgagaaactctcttgaaagctttctcgacaagcttttttgggaaaccttcttgaaaagcaactttgaaaagcttccttgccaagctccaggctaactacacacactcctctaataactaaactcacctccttgagaagcttgcttgagaaacccacttgagaacattcctagagaacctagagcttacctacacacactctctgtaatagctaacctcccctccttggaatgagaaacttgagcttagcttcaccccgcttataaaaactaagtgaccccccatgccctcactcctgaaaatttaccgaaacggcccctacttcaagaaaacctccatgcccctgaaacaacggtaaaccctatacctcttcagggggcaaacaacacggccactaaaagggacacccactctacattcacccaacgaggggaccccctctcggcacgggtttaaaatcttcctcgcgggtctcgacaacctagcgcccttttccacccttactccacacccttaaaaccttctttaaatcacaccgcgggggcgaatcaccagacctctttctctctctc

SEQ ID NO: 276373 - DNA, 479 bp, Glycine max
ttgttagcacatcctttgatgcatgatgacattattctcagtgttcaacaatccaacttggttttgaaaatgaagggtttagcttttgtattttgtgaaatgtgatacatatatattatccctttaaaatgtaagaaattactaattttaaaatgttagaaataaaaccaattttatctaaattttaaagaaccatttttttgtttgttgaataacaagagctaccagccccaactagaacataatacactcaatattttaactatagattaatactaataagatcttcttaaacaaattaagtctcaagtttaaaaaaaaactcttaattaatattatggggggtttattatataggctattggaaatctgaaagtttaattctattggaaggtcctttatattcaattaatggaagcaattaatttatatctcttgcatgccggaatattactttaatatcaatagtggcctttttt

SEQ ID NO: 276374 - DNA, 59 bp, Glycine max
agcttaagaaaaacattattgttatcatatttttagttagcttgcagctaatcttactt

SEQ ID NO: 276375 - DNA, 401 bp, Glycine max
ttgatgttgttattgcaggcaatatcacaaataaaaacagtttatgctttcgttggagagagctctgcaaccaaatcctttatagagaacatggaaaaacaatatgttataagcaaaagggaagcacttgtgaagggagttgggataaggatgtatcaaacagagagtttctattcgtgggctctcattgtatgggttggagctattgcggttagagctggaagagcaactccataagacataatgactgcagtgatgagtattctctttggttccatgtaaggaaaaaaccaccttcacgattgtttagaatggagaaaatggttaataattaatgactaaataacgaaagtattcttgtgaattgcagatctctcacttatgtagcaccaggcatgcaa

SEQ ID NO: 276376 - DNA, 475 bp, Glycine max
agctttcaacacgagtggtgcgaataaccattttgaagcacaaaactaacagaactacccatcatatctcccaaaatcccatacccacgaaatttaagagagaaagaagtccacccaaacctgaaatttcgaagtcccactcgtagacacgcacttcacgactccgaaaatgctctcctttcacgatttggggcagaaatgatggccaaaggttgaagctttgtttggagcttcaatggagaatgaaggagaagacaatggcaacgtgagggagagagagagctgtctgaaaagtgtgggggctgagtgaagagagagaaaagctttttggttttaaataaaaaggggtttctctttttttctattattttatttaatcaatgccacatgtctccatttgagtggagcaaaaagggcccactttcccttttgactgcgacccatactcagccacaaaagtggggaaaatctgacc

SEQ ID NO: 276377 - DNA, 545 bp, Glycine max
tttatataagctgaaccattttatcaataagcgccatgttgagttttattcagaaaattagagtatatctcttttatcttggagagagtgattctcctaaattcttgagtgattcaagaacaccctggctgtatcaaaggactttcacaacctttgtgtgttgccctcgctggaaagagtgattctttccttcctatcatctccaccctcgttctttcaaaccacaattcccgaaaatccacctctgcccaaaattatgtcgtgaccataactcccattttacacactcacattaagtgattcttgagcctaaattgaatttcaaaacgagacctttcacctcgttttggaatcacctcatttggagccctgcagcttccgttattgccatttctatatttctggcccgccaccacttaacctacgttttaccattccatttcttcaatttatgccagaaaccaccttattaagacccacgaacataaccaccctactttcattcctttcttaataaattccgcattttccatcaaggtttaatt

SEQ ID NO: 276378 - DNA, 1123 bp, Glycine max
  unsure (1)..(1123): unsure at all n locations
tacgctctctcagtcatgtctctgactaccatcaacctccaactatcttttctcctcctgcatttatttantcttcatnnnnnnnnnnncccgaccgacaccgccggnttctttgaatcccttccancacnacccggcgancatctaaactgcacctgagcgaacgcaacgatctattctaaaggaggcgggcgtgtttttttagatactacgcttaaacattcgcgccggcatacatagcatgccacctataaaacgactaatatcctcttacagaagaatgccccgtccaaagacctgaacaaagctacccacgtgctcaccacaaaagaggattgctcaccattattattgccaccaaatacaaccgaacaaaaccctccgaaccttgtgcctcgctgacatggcacataaagatgatgaatttctcatgcgtgacacccgatacctgtgcgaaaaaaaaataccggtcacaaagtttacaccaacaatactcactccggagagcaacctcgagtgttaaactcccaggggacgccctacctaagagatgcctaacgtcacccttaacttggggtagcggctctactgaatctctttctccacaaaagagaaaaaccctttcccatggaccaagcatatccatctcagacgcatcttcgagccacacccaccaataggcctctttttcgggtctgacggtgcccacacgcccccacccaaatccgtcaccctctctccaatcacagcataaacaaaacttcttccatttgtcngctcgactcttcacagatcatactnattctgactcagctctctctttccacagctccgccacgcgcgctccgaggctctgttcatctgagagcgtcccacacacatagcacgcgacactaactcacaaatccacctccctcctcgcctctcgccccttctcactaacacaggtcttgcgcggataccctaattccacaactcacatccgccttatctggaccgcacaccacccctccttctcgtgcttcaccctatccaatctcccgccgaccctgccacacacctacaccgtcttccgaacaacactctttctcctccgcagcacaccccctcccacaaccacccg

SEQ ID NO: 276379 - DNA, 231 bp, Glycine max
tcataacatacttcttgacgatggagcttgtggtgactaataacttgtgtacaaacccatattttcgtcatgaagcatcttcggtacgctctattattgtcgtttttcggcgcaatcttcctattattattagccacagatttgtatggcccgctttctattgtctaacagcttggtattctgacgcatcaaacctatgtgaatctgacttgcttcttgtgaagagagcat

SEQ ID NO: 276380 - DNA, 956 bp, Glycine max
  unsure (1)..(956): unsure at all n locations
tgaaccacacagccacccttgtacccaaaccccacctgcccgaacccccccctccaatcacctccnnanccncccgccccgcgacctgatgacatcctttncccccccggatctttagatcaacccgcggcgcgcacctagcataacacgaagcgggagcacatttctatccctccccgcaccgacctgatttncaccccacacaccaacccccctcccaccacgcctccgctgccccccccctnaatacaccccccacccacatccctccaagtcccccacacccacccctccttcccccacaaaccccgacataaccccccccccaccccccgaaaacctccccccacccctcagggcccctaaacctttcaaacgttcacaaacactcccaacctccccgcaccccacccgaacccgtgggtcacgcccctcccctcccccaccgacacacctctaccccacagagcctatccccactccaggacgccctcccccaccctcactccaaaccaccaccccagctactccacaaataaaccgccagcctagaaaccaccccaaaccccctcccacacaccacccataccccgcccccacccacccccacaacaccccacgacccaccccaacctccccctctggaccacaacacccactccctcctcccccaccccagacccccccccccccccctccgacccctcacccgccccccccgcacccccaagcccacaccccccctacacccgacccaatcccacccactcacaacaaaaccacgagccaccaccctacccaacaaaccgcccaacctttcccgacacacacccctcccccaaccccccccgcgccaccacccccaaccaccccccctcaccccaccaacaccgacgcatcccatcacaccccgcctccgtgcacaccgcccccgcaccccacccccaaccccaccc

SEQ ID NO: 276381 - DNA, 257 bp, Glycine max
ttgtggggagcttcaatggtgaaagatggtatgaagaaaagcctcgtgagggaccaggagagagagctcttgaaaaagggttgctgagtgaggaaagacagggctgctttttgggtttaataaaaagggtgttctctatttctattatttgaatctaacaatgccacatgtgttcatttgagtggggcaagaaaggcccactttctctttttgactgagacccatactcagtcactaaaatggggaagatatgacct

SEQ ID NO: 276382 - DNA, 428 bp, Glycine max
agcttttcgattcattctatgtacccgtagtggttcacattgtgtttcgtgcatttttattctcggtttgtttactttttataccccctgttgacgtgcttaagccattttacttaagtcgtttctcgcttaacttaaaaataaaataaatttccaccgaacgtttgaattgtattatccattaacttccgttaaaataaattccgaccgttcggtcatgccgtaaccacgttggaaatcaaaaaagaggtaaaaaataatataaataataaaaaaaaaacatcttttagtaaaataaagcggaaaatcaatcggacgttttctctttgggatttctcattcttaaatcgaattgattaataactaaagcgaaacttacgcttaaaccaaaatcccctagtcaagctcgtccacaaaaataggctttt

SEQ ID NO: 276383 - DNA, 350 bp, Glycine max
tcttagtctcggctaatgaagatgaattcatggctactttatgcactcctctaatgacaatagcatcacttctgacactaaattgttgggagttggaagccatcttctcaattaaatttctggcttcatcaggggtcatgtctccaagggctccaccactggtagcatctatcatacttctttccatgttactgagtccttcataaaaatattggagaagaagctgctcacaaatctagtggtgaggacaactggcacatagtttcttaaatctctcccagtattcatataaactctctccattgagttgcataattcctgaaatatcttttctgatggttgtggtcttg

SEQ ID NO: 276384 - DNA, 249 bp, Glycine max
agcttaaatttttaagtgtccctgagccacttattgtgtatgatcttgttgagcgtgtcgcattaagggaaccgaaccgccctttagggaaagaaagtgaccatcaccagacacggccccttcagtcaaggtccgacatttgaacggcccgttactgaggcacagggttgtctttaacagatactattattacagagaagctcaatggcgtttctgatacaatagtaaagaattctgcccttttttttc

SEQ ID NO: 276385 - DNA, 174 bp, Glycine max
tcacgcttagagggatcttatggacaccatctgagaatgctttttgtctgccgcgctagctgacactgcttacacatcacctattctggagcacagaacattttcttcattaagtgaccctcaatggagggtaatttcttacagatttgagggatctactgagggaagatgagg

SEQ ID NO: 276386 - DNA, 852 bp, Glycine max
  unsure (1)..(852): unsure at all n locations
gcccccgcnnnatgataacttcaaaaacccccccccntacagaacaatccccgctcgcaagctattcatcaattaacgccgcacgagcttatctgttattttcccaccctntttctcccacatcgggacaacttatttaaataaactctcgattaccgcgtggtgtctcctcgaactcccaaaccctcaagaaacactttctggcagggggctataacacagccttaatttgacaacttaactaataaaacttataaatatttactttcctaagacaccattttaatggcgggaattaaacctacgaacattgatttttataagcaaacatttaaaggggtgacttaactgaatatactggaattcaaacttaatatttacttaatactacaactccacacctaaaaactatctagcggctcatctaaaacttcttgagccgttcctttttttaatattaaaattctttttgtaccaaaagtcccttttaaacttcgatctacctatcctctctccattttaactcactctgcactattcttcacaaaccacgcttccccctacttatccctccacccccacactcgtgtatccattcccacctcacgtccagcgatcatccaccctttatctctgcaccattatttctcccttattctcatatttactatgtttccagtctcctacctccgtcccaacagtaccagattcttctatctctcatacacttctctcctctcacccaacatcctatacttaccctcccattttccacattcctcctacacttatctctccctttcaccccctccacactccgtaccattctcgcgtccctattccccgcacccg

SEQ ID NO: 276387 - DNA, 406 bp, Glycine max
tttaagttaaaaaagatgatggctcttgtaatttctctgtagatcgagcagcacatgtgactcactcagggcacccatgtggtgcagtttgtggatgccaggaatgatggaccctgaaaaagttatagttgaagtttcttccgttttctatttaagatatagattagttacaagtagttttctctcgaggttcaacacactgcctggtcaaatcatatgtgaccatgcataatctgcctgtctattgtttatggtaatgggaatgcttttatagaaaatacttacgaatgtttggatttttgcttgttctaaaagtatgcttgagagtaaaatcattataagagtatgtttggctattctccaaaaatatgtttgaaaattaaaacttgtcttcaaacttaatttt

SEQ ID NO: 276388 - DNA, 469 bp, Glycine max
tttcactaaaaatttttttttcagaactctccctctttttcttgaagataggacaatcaaccctcagaagtccaggttgattgcattcaaagcattttggagtagaacatgaaactcatggccttcttttagatttaaaatttggtcggctttgacttcctttgattttcagaaacttgttgaacctttttacaaaaaggctaagatcatcatctttatctagatcaattttcttatcactttcttcttggattgaagatgaggctttaagagcaactcccttctttttcttgtcattttcttcatgttgatttaatctcaccaattccatttcatgttcctataactttcccaacacaggagcaagagtcatgttcgataaatctctggactaacaatgggtggtactttacgttgtcatctctacttaacatcttaatactttgttatgagaccttcttttgaaaat

SEQ ID NO: 276389 - DNA, 367 bp, Glycine max
tgtatactgaatgtcattacagcgatgaaccagtgtgaagttacacatatgtacagtcttcaataagatcaaataggaaaaagaaaatcaaccttcaaacccagagaatatgacttagaagcggactgatgaagccagataaactccacactaggggaaacacctactaataaaaaaatcacatttaagcaagatagagagttatagctgctccccttgttgaatgatattacagaatatttttaaaagtaaattaaaatgaaagggcaactcacagtgatgagaaggatcccataatgcagaagaaagtatcttcagcccgatgtgtgtgtgctatatggtcctgtagcgcactgccaaaaagaac

SEQ ID NO: 276390 - DNA, 413 bp, Glycine max
agcttcatggtgaatgtgattcaaaggcattttgatgatttcaatgatgacaataaaagatgatgacaaaggttatgaacaaaaagctcaaagaataaataaccactcaagtgaatcaagaacaagtcaagagttcaagaatccagaagaattcacgactcaagaagatagcctacaatcaagaatcaagattcaagattcaagatctcaagaatcaagatcaagattcacgaatgaagaaaagacttaatcaagataaatattcaaaaggtttttcaaaactttgaataacaaatgagtttttgaaaaaacctttaccacagagtttttactctctggtaatcgatgaccatattgttgtaatcgattacccgtagcaaaatgagtttgaaaaagttttccaactgaattta

SEQ ID NO: 276391 - DNA, 506 bp, Glycine max
atactcaagcttatcataggaaactatctagtctataaatagaagcatgtataacacttgttgtaacttttatgaatgaaagtcttatgagatacacttcaaagttccacttctctccctcttttagtccttcaatttcgttctccccccttctctctttattttcctccattaaagcatcctcttcaagattcttatccatggaaattcttggtggtgaagctccttcttccttggcttattccctagtggatggtgcctcccctctcctctcctcttctccttttccttccgatgcatctccatggtgtaaaatcaccattgaaggaccccactaaagctcaacgatccagcctccacagaagccccacaagcaagcttccatcaagtgctatcagagcgcacgagctctttgtgtcgagggaaggagcccatagttgaggaacctcggaattgaggtcaaatcctttgccagaaggagaggatgaggcaatcctaccccccca

SEQ ID NO: 276392 - DNA, 458 bp, Glycine max
agccttgtacgatcatgggggacccatcatatttttttctaggtggcgcgaccgcaatggtgcgcagcaaaattttcatatccccagtgggcgcataaaccaaccatctactgacgccaacctcaactgagctgacgtactcccacgtttccaccgtaagtttttatctgaacatcgcgtccccattagtcctcccagaccctaccgcatcgaaagtacacaagattcgtggagcacaagctattagagtcaagccaaacaccacacaggcagaaaactctgtcaaacacccaccaagggacagttttctcactttaagaacccaggaacaattccttcgaaccaatttgctaaccggcggatcggactccaaaattttacctggaagtctataatggataagccctacacttttgaacggctgggacccactccgcaaaatcccgaaactcctttct

SEQ ID NO: 276393 - DNA, 389 bp, Glycine max
tgccaagtccaactagtacacatgcccccaagctgtttatctggttgtaagagctttgtaaaaataatcttaagtctttaaccttgatgtcactatcttttagctgattttgagttatatttattttgggttgattgcaaccgagtcctaaagggattttaattttctatttagccaagtgttaccttagtctcaaaggaaaaatagacaatcattgtcttctaccgaatcggagtggttgagaatttgaagacatattttatcaacaattgtattgttcatatgcatttaatatctttgtgcatttttgagaaaggcgcaataattaggtcctttgattttcaaaatgctctcaagattaccaaaagtcatttcttttcctaatcgtg

SEQ ID NO: 276394 - DNA, 434 bp, Glycine max
catgcaagctttaccccaaacttgactgtaacccattattcttatcctaccaagccattgttggctctaaaaaaatcaacaagatttgttggaagtttacacactgactaaattgtgatcatcttatagatagataaatcactcggcattgttaatcttttctctcaagttatacaaagtgttttaagagcttagtatctatataaagatttatagaaagattttcaagaaagaatgaaagaatatgttcgcgtagatgatttgcgtcttgtttcttctaagcttattcaatttatagccttcatcttcaagtatttcgttgtctcccaacggttggattgtttactctgccctttatctgaagtcttgagtctattgcagcatttaatgcctgcattaaattaacttcccttttttatgcaaagttaatgcta

SEQ ID NO: 276395 - DNA, 1083 bp, Glycine max
  unsure (1)..(1083): unsure at all n locations
cggtactctcacgtgcnnncnnnttgtannntccactagtcacacatactcacgacaagcccctacttaatatatcaacacgctccacacatcttccattatggccaaattcgtcgcgcgctatatcatgctcgtggcaanagtattttattcatgtctctcgccgggctctttctgcttgacaaatagtgtgagtcatgtgactcaactcagcgtcgagagtctcctagaatcacctttctccaaagttcgtgtctgaaaaatatcgcataatctccacaacaataacaagggacgatggaatcgcctcatattcttttctattcgagactgcactacattctcgttataacaagtgacgaggattggtgcctcgtcaatcttgcacaaggaatacanaccatttagaccgtgcacctactgcttatagatctattanagcgacaagcacatcttagacgattacacaatgcgtaccttatcggatacacgaaggattacaataaccaggtctctaaaggaccttgggtcaacacccatttacggacgaagagatacacaagatctaattacgcctgctcgcgtgagtacatgtctcaaaaacgttcagaccctacatcaattcttttgcacccttttggagaagtgatttccactccaaggaagcatgtatgatttattctcttgatggcctactactgaacctgtgtccttggttactcttattaacagcacggctgacgctctttccatagatgaactcaagactttccttctcccttaagaaacactttttgataagactccccagcaatgggttgcttccatccacgtctacagatagctcgttacacactaattttacccccaatcctttcatcaaatgttccctacaccacgggatctcccacccacaagaactgttgctaggctcaaatagggttcttaatcccggtttcactcttccctatctggagaactcctctcttaccacgacgtggggtggcaaaatcatctctgaggccgtctggggttcgcgcttaacatgggaaggccaggagattagtgtcccaacacaatccg

SEQ ID NO: 276396 - DNA, 410 bp, Glycine max
agcttcaagtgatacagacagtgaaatcatttttgatgagcttgccacatcctatagagaactatgcatcaaaagcgagaagattcttcagcaagaagcacaactgaagaaggtcattgcaaatctggaggctgagaaggaggcacatgaagaggaaatctctgaacttaaaggagaaattggctttctgaattctaaaccggaaaatatgacaaagtcaataaagatgctgaataaaggctcagatgtgctcgatgaggtgctacagcttgggaagaatgttggaaaccagagaggacttggatttaatcataagtctggtggcagaacaaccatgacagaatttgttcctgccaaaaacagcactggagccacgatgtcacaacattggtctcgacatcatggaacgc

SEQ ID NO: 276397 - DNA, 418 bp, Glycine max
ttgagccaaaatcctgactcaccataaaccttgacccaggtgagaatgccaatccttaccctcggaagcaaaaaaagaatagaggggaaatttccaatcaaagaaaaagagaaggaaaatttccaatgaaagcaaaaaagaaatgaaggaaaattccccaatcaaagagtgggagaaagcaaaaaaaggaaaagaaggaaaattccccaatcaaagagtgggagaaagcaaaaagaaaagaaaggaaaattcccaatcaaagaatgggagaaagtaaaaaaggaagaagaagaaggaaagaaagctcctgatcaaggatcgaaagaaaccagaagaaatgtgcagagaggtctttggaccagacaatatctgaaccgtacagaattgtcaccaaatgaacgaaaaaagaagaaaggga

SEQ ID NO: 276398 - DNA, 387 bp, Glycine max
  unsure (1)..(387): unsure at all n locations
agcttntagattggtgtaccatgccacagctgttccgggtaagccgtcttgaaagaagtgcattaacagctttttcgtccgtagaatatgcccccatccttcggcaatacatgcgaagatgaccttttggacacgtcgtccctttgaatttatcaaaatctggtactttaaacttggggggaataatgatgtcaggtaccacacatagatccggtaaatacaagaacggatagttgccgaggccttctaccgctctcagcctctctttaagtagatcaatctttcccttgtcccttgcaaagggaagaagttccttaacgggtgcggatggagaccggacgtggcggactatgtctggttggggcaactcatggggggctgagtcct

SEQ ID NO: 276399 - DNA, 404 bp, Glycine max
tgaaggtgtgtagcccaccatctttttatagtagaacactggtaatgtgtctactatcatgcttatcatctccctttttgtcattggggctgccacctgggctgccagatccctccacctttgggtgtattctttgaaggattcatgctccttttcgcacatgttctatagttgcatcctatctagagccatatcagaattgtactgacactacctaacgaagacaaccattaagtccttccatgaatggactcgggaaggttccaagttagtgtaccaagtaacagctaccccagtaagactttcttggaagaaatgtatcaacagttcctcatcttttgcgtatacccccatcttccgacaatacaattttagatggttcttggggcaagtagtccccttgt

SEQ ID NO: 276400 - DNA, 370 bp, Glycine max
agcttgatgataaaagtgagaagtacgtgtttgtgggttaccactcaagatccaaggggtacaagctctatactcccaatagtagaaagatcgtcataagtcgcgacgtggagttcgacgaagaagattgttgggattggagtgttcaacaagataagtatgattctcttccttattttgaagaagatgatgaaattgaacccacccatcatagaggaacatattacaccacctgcctcaccgacaccaaggctggatgaaacaagttcaagtgaaaggacaccgcgactaaggagcattgaagagatttatgagctaacccaaaacctaaatgacattaacctcttttttctttttggggactgtgagc

SEQ ID NO: 276401 - DNA, 476 bp, Glycine max
tataagaacaaaattgcctcaatcatttccaaatatgcatgtgaattaggaagcatcaacaagaatcaagccaaggctattgtgcaagcaatcaatggggcaaaacacaccaaatgattatgatgatggatggctcaaattctcacaaaggtaaactcatcactttcaaattgagctttcaaaactatcatgtcaggtagaggaaaaacaaggatttcaaatcacaaaatgtcaagaggctttttttttcaaaacaattacccatttcttgaacatatcctataattcaaagaaaaacatgcaaagtcgtacatgcacacagaattgacccaaaatattaaactagaaacccaatgaaactaacaacattaacaaattaacacaactaacaaattaacaaaaccgacaaaactaccaaaaccaaagaaccactccccccccccccatacttaaacaacacattatcctcaatgtag

SEQ ID NO: 276402 - DNA, 826 bp, Glycine max
  unsure (1)..(826): unsure at all n locations
cggccccgccgaattaagcctgcatacccccccgntatttaaaagacatcccccgcatgtaagnttttaaaaggtttgaaattgaattttgatatgtaatngattactattgatgtgtaatggtaatngattaccagcaacaaaactcttgaaattaaacttgaagagtcatgaaccttcaaaaaaaaattcgtgtaatcgattaccacaaaccctgaatggattatcagtgaaaaaattaaaaaaaaagctttctgaaaagacacaatttctttaaaccatttttgaaaaaaggcacaaagggccatatataagtggctggacttaaaaagtaaaaaaaagaattttttaagaaaattcgttggtaaatgctttcttaacaacttttggggcaatacctaccaatctattgtgaggtcatttaagaacaatcaaatggattatgcccctcctaaagagagaaaaaattttttttatctaaaaaagggaagttggactcacaaaaactattggttcttttaaaaggggagttccttggcccccaggaaaagggggtcatctgggcgtccaaaattggaaaaagggtttttccaacggtaaccaaaacccccactgggtttttttgggactctaccccccccacggaaaacctttctccccaaaaaactaaaccgcaactcttccctcccgcgttaaaaaaaccccccacatcttcttttcccctggctcaaaaaaaaccctccccaaaacccacctccgcaaactcccccattattccacctcctccttaaccccttttccacctgcctctctctctctctagacg

SEQ ID NO: 276403 - DNA, 429 bp, Glycine max
tcattccttttttcactcatgtgtccaagtctttgatggcatagggttgaattgttgacagcctcagtaactgctaccatatcctcatctgcaatcatgtaaagagatcctcgcttcttttcacgagccacaatgagattgccttttgttaccttccaagctctatatccaaaagtggtgtaatgcccctcattatccaactaccctatagatgttagatttccctttaaggcaagaatatgtcaaacattgtacagtgtccatagggatccactagaggtcttgatgtcaatatcacctcttccgacaatgtcaagagattttccatctgcaaggtaaactttctcaaatcttccaaaaatatagttagaaaataaatctttaaagggagtggtgtggaatgacgcacctgattcataatctatgaat

SEQ ID NO: 276404 - DNA, 573 bp, Glycine max
agctttgaactgacaatttatatcatctgaatttttttttagcacaacgattgtgaattggatttttttgggttaaaaatacaaggtaaaatgagatttatgttttggtattactgacctttgattcttttcttttgtgattttcccttctctgaatttttttaaactccactcccctcactaccaaaaaaactaccagcaaaagtttgcaagagttatctagtttctagcacttttgttgtctccaagatccaaagagtcccattatcttcatgaacatgataaaaaaatgaaataaaataaaatttatatcattaaaaatatatgctccaccaaagaaagctgaatacctgtctttgttcaaaacctgacaactgcagagccttggccccaaaaactaaaaccacacagtatttacccatcttgcgtgacctatcatgtaaccacatcaccagagaggattaatataggaatgaccagagtctaattattaaacataattctctaactaacatgctacgtagcctttcagatcaacttgcatgaagaataatactaggtttcccatttcaa

SEQ ID NO: 276405 - DNA, 308 bp, Glycine max
  unsure (1)..(308): unsure at all n locations
ttttgaaaacaatctttgctattggtaatcgattacaataaactggtaatcgattactagagagtaaaaactctttggtaaaaggttttgtgaaaaattcatgtgctactcaatgttttgaaaaactttntagtacttatcttgattgaggcttttcttgattcttgaatcttgagtcttgaatcttattcttgattcttgattcttgaaaacttgaaacttgaaacttctcttggatctttctcttgattcttgaattgttcttgactcaatcttgaaatcattctcatgggctttttgtcatcatc

SEQ ID NO: 276406 - DNA, 808 bp, Glycine max
  unsure (1)..(808): unsure at all n locations
cgccnccgcccaactaaccctcgagaccgccccnntatgtgaggatgcttcctgnaagtnttgntgaatgagaggaggtgaaatntgattttttgtttggggaattggattanaattgggggtgggtggtaaatanatnaanaannaaaaaaaatttttgaaaattnaatttgaaaagtttatgaaantattaaaaatataattgtgtaaattgatttataagaaaaagtgtattgattattatgtgaagaattttaaaaaaaagtttttgaaaagatatattttttttaaanatttttgaaaaaaggatgaaaggggtatatatatgtgtttgagtttaaaaagtaagagagagatatttttagagaagtttgttgtgaaatggtgtttaaaaaattttggggaaatttttaaaaattattgagaagtgatttagaaaaataaattgtgttatttacttctaaagaaaaaattttttgttattttaaaaagaaagttgtattaaaaaaaaaattgttgtttgaatggaagtttttggaaaaaagaaaaggggttatttggttgttaaaaattgaaaaatgtttttaataggttatgaaaatttaaatgttgttttagtatttaatttagtatagtagttgtgtgaaaaaaattattaaattggtttgtttttgtttttttaagaaattttattgttattattaggttgctctttctcagcacacatctacctttctccccccacactttatctcctaccctctccctccctctcttgcatgcattgctcccacacccctcgtccccg

SEQ ID NO: 276407 - DNA, 410 bp, Glycine max
acaacactgcagctgcagcattcaatgctaacctttccaaccttcgtcacccttgttgcccaaattcctttgatctctaagtacatcagccaatatacgttccatttccaaattccatgtaaaataacttcttgtttcctcattattttttcctaaaacttttcttttgtccgtcattttttcattagatgactccattgaagttaatgtcacttattcaacctgcacataacaaatattagatatgacctactttattcatttgactagtccactgcacaatcatagaaaatatttcaagcaaagtttttatgcaatagcaaagtacataaaagtctatattcaatagaaaagtacaatagttacaaagcacacaaagtttggcagcaatagcaaattacatttgaaaa

SEQ ID NO: 276408 - DNA, 414 bp, Glycine max
  unsure (1)..(414): unsure at all n locations
gcaagcttttacaaaaggtctgccccatatttttctatacttgtagcaccacttgttgagttggtgaggaactatgttctctcatgggaagatggncagcaaaggggtttttagtccttaccctactctaacatacccaacataactaatacatatgtttttattctttttacaggtgttgaggaaagaatccctgagtttcaagaacctctggatttgaggtcaaatccttttcaagggagagggaatgatgcaatcctaccccacaaggtcattggatagaagactccaagaagattgggccagagatggccctagggttctcatgagccttagggtagatttcgagcccatggactaaatatgagcccacttatctttgtacatattaaattaaggtttcattattttttg

SEQ ID NO: 276409 - DNA, 449 bp, Glycine max
cctagccaaatagacttaccttgaattaattcctttgataacccctttgagcctatgttcccctttctttgttttgaagctcattacaagccttaagtgaaaaaccatgatatcaccttacccttaaagaattttggagctttggaattgttttgggaataagttgggaataagtgttggggggtatgtttcattggaagatatgaattttggccatgcttaatgttttattttggccatgcttgatgtatatatatattgcctagttcttgctttaatcttcaattgctgcaaaaaaaaatatatatcaattgctgcaaattcgtattgtttaaaaaaaaaaagaaaagagtgaagttgaattaatgaagtcttgttatgaagacttgatttggaagccttgggtgattttgtttatattaaagggttggggttactacttgtgctta

SEQ ID NO: 276410 - DNA, 891 bp, Glycine max
  unsure (1)..(891): unsure at all n locations
tttactttttgtttgatcgaatgccgcaacatatggagccccttcaaatacacatgttgaagacttcgtacccaaactctgaacacacgaattcacctcgttttatctgcggaccgttctgatctgcaatccccgtacatcatatctcgagaacgcttcgaaaacctgaaatgtgtcgcactcctctgggacgcccacatttaccaaccgaccaaccaactttttttaccccggaatgtcctgattgcagcccccgccctatattctcacacccctcgggaaatcgaatcgtctcgaaacttttgagcccacaatcanacccgactgataaacctttttactcccgatcgtatcgaatcgaagctccccgcacaccatataccgagcaacggctctaaatatcgcaattgtttgatccctcctgcatgcccattctccacggacacattaccctctctaactccggactaactcgacctgagctctcccccatttctcacctacacacctctccaatctgcaacgctcgccagctcctgaacccaatttacgagcagaaccaanatttctcatcctcggaacgcctcgcattgacgatccgcccccaccatcgcggaaccccttgacaattaaacgggggaaactcctgcacccctctcaacaccaccctaacccgtctaacttcgatcttctatatcccgcccccttttacttccccccacccccgccaatcatatgtcgcacctattcgcgcctaacacaacataagctacctcttccactgctgtgtcgcatctagcccccttctcttctggcaaactcccgccattgcaagctcgaacaccttgtgccatccccacaacccatcaacttttcccctcgggttccccg

SEQ ID NO: 276411 - DNA, 1213 bp, Glycine max
  unsure (1)..(1213): unsure at all n locations
acgaacaactctgtgaagtctcannttgacatnntnnnatactcagatgctcgaagncacnccncttgaacctctcctagccatntcattctgnacnacgncatcatgaactactccccacgccgtnctacactatctccatactcttcaccggctgctcctgcgtcatacaatatcaacatgtgcaccttcttgtttgaagaacaatctcccgangctatatatacggtgctacttcgctacgtgacctagcaatcttcgctacaacagacttctaaacaattatagatcttttcagcgctatcccatcatacttaacccgcgacgtcaattccagaaacaatcccgcaagtacacgaaagtgtcattcggttcgacttcgcacattttcgtctacaacagtctctcataccatgtccaatatttcacagccgtttcctgtctctattcattaggacctcacaccaccatcatcccgagtcaaatagttcattggacgtcttgaactttgcttcataagcttcgaaccatttcattatacgagccgtagttcgcttataattaacggcgacttctttccagaacctccccgcactacaacaagtatcataagcccgttgctgtaaatatgcttcaacagactttcaacacttaaactatttggagcggtcctccataatcgtcacngcgggactcacatcagcaccatccccagctaacaaaggttattcgtgtgtacgaatatctgcttcatatggtttctaaccccccaaattgccaccgctctcgctgatattattcggaaccgactctcaacactctcgagaaaaatagctcatttggcatctttgaatattggctcacaaactttctccattccaaatatctaagcctcgccgcctgtatttacgcggaactctatttatcacactcccactctaaaagatcttgatctcttcgaaatcgcgctctataggttccacaattccatatctccaggccggtgccatatataactggcgctcataccggactttccacctaaacaagttaattccctcctgaattcggctacaaggttctaaaatcataatcgcactgcccctgtttatctatcccgaccacctcatttctcctctcccaaggacttggcttctgattcactctaactcccacccttatctttaactcgcatatactatgcgcgtcccct

SEQ ID NO: 276412 - DNA, 472 bp, Glycine max
ctttatacaccggaggaaaagatacaagtatctattttggtaagctatttggttaacgaacttgtgtatgtacaatcatggcctttattatgtcctcatttatacatttcattctaaaattcaaaaaatcatgcaaagattattactcaaagccacctgttcacttacagtttaaagtcacactcttaccggtttttggttcaagcttttctttcacaatcaatctgtctactgactaacaattctaaatgcaagttcacattcttgttctttctttgttcaccattgccatttcgctaaactcatgaaaggaaacacaaattccatcaaatcatgcatttagttcaaaatgaaaccagaccaccattttcaccaaaagataaaagtgtttcagcgccatgtcataaaaaattaagttaaactgttccacatgctttacgaataaccattctaactattcctatattaaact

SEQ ID NO: 276413 - DNA, 535 bp, Glycine max
  unsure (1)..(535): unsure at all n locations
taggtagatgaaagttcgtttctatttttttgtgttggccattccatatctacagctaccaccttggagaaaagatcttcttaagcatcatcaaagcttcctctgttttctttagagataagcatgctaacatttttactaaatctttgtggggtcctacaataagatctacatgtgacaagcttaacgcacatgatatatatgctctagcttgacgggaaatgttgaactactgtacataactcgtgaagttaaatcgatgtttagattttgctgaatatttccctaaatagattaattctaattccataaacttatttactgtacaattatcattgaaatacaacacatgttattcggtccaatcaatggagtgatttttggtttttctagttcatagtcatagctgacccatgcattagcgcccttaacccacatatactaaagggctaaattgatttggggcattttgttcttttatttantggacggccaatgctaagtgggttgaaacaaggctaggttggttatccct

SEQ ID NO: 276414 - DNA, 1324 bp, Glycine max
  unsure (1)..(1324): unsure at all n locations
agtcacgactaagctcaactctacctctccaccccatcgacnaccctatcattatatactcttttctgtaccacaanactactnagcaatacccaccccaccaccacagcgtccgcgggcggacgntttggatagacantactntanttanaancacncccccgcagaattatatatntaacacacacacntctctccacggagtccgcctaaancttctgttctgaaataangaagcgaaagaagaccngggatctntctcttcttttatatccactccaacacntccactctatacaaatcacccatgtgacacagcgtccctcttgggaatatacatacaactatctcacacagacactactatcctcactgacaatccccgaacacatgcacacaacctcatacatcctctccaacgctacnttaatgcacaactcgctgcctcactcattcgtcatactttccaaccgatacaactaactctctatacaatacaattccacatgctctgacacgtaacaaaaaaaccccaataaacgctctagggatgcaacaaaccttatgacttgactttcacacacattcgcaccctacatgctaactctccatgtcgccaactctaaacacgagccatgcgtacgtaactcgcacgaaaacacacctatagttctgccacaaaaaaaaaatgacagcaaacatccccacacaaaactccaacttaaaaacctctcaccttcttcccgcgcaaaccccaacacccgtttccacaagcaacaaacccaaacacctgccaactaacaagaacaagctacacatcggtctcttcatctgtcctacaactaccccaccacacaacatcaatcatctgagggacagaactcataccacgacactcatcaaccngcacactaacctctatactaacaacccaaactcgcgcccacaacgcctacatcagaacaccacaacaccgaatagaggtgctctcgacattactacatataccaaccataatcgcatctaacactcgcgtccacatatcacacatactacacaaacctcaactcacacacgcacacaaccacctctcagcaaagcatcangtctctaccagactcaatatctcacactatcctaacacctcgcttctcgtcagctatcaccactccacatcncatgactcactcctctcaatacgctagcataccacaccctccatcacactctctcatcacgattcgacgcttataatcaactacactaactgcagtctcatctctacactacacgtgcacgcacctacagcacactcacccgctcg

SEQ ID NO: 276415 - DNA, 1019 bp, Glycine max
  unsure (1)..(1019): unsure at all n locations
cgtctgaacactatccccctcccnnnnnccccacgccacggcctttgatttgatgcccttgcaacacgcgacacatttatgctacgcccgttgagccaaagtgaccgaaaaagaggaaacattcttgtttctactaattacccgcgaccattccagcgacgagcgtgtgcgcactaacatcggggcgggcccacaccgactaaatatcgacaagggccggccacaacacgacgaaaggtaacccactgcactttacaaaccgaacccatgcccgctactcccgtgagggcaatccaaaaccactggccgcaaaggaaccgaaaagccacaaaggcctctcctatacaagaccgttttccccccatacagggaccatctgcccctcttctccggaaaaaagcggcgaggacattcactgcccgcctgaagtggcccgacctgttaacccaccaccgctaccttggggctgcagcccctcccaaacccacccaccccgctaactcgacaaaacgcgcccttgggacccgaaaccaagacccggtcccccgcccccccaagcttaaaagacccctcacccccggggggcgccccacaaaagatctggtggaccaccgtacccgtcccagagcgacaacccgcggcgaatcatactccgccacaggaggccattgacattagtcgcctccctcaaatcggggcgaggacaacaccacgatggattccgttcgaggctctaccccccacccccacctcaaacagagggcttcgagagacgaaggacttcaatacggcactcccgcctcacgcctaacgcacctcggtctggaggcggccgattattacaccacccgctcgcgcgcgcggacanaacatagatcgctcgccaaggaggatcctatctgccttcacattcgacacccttctaataccacagggcagtgatcttccaagtaatattcataggcacaccccgtacgcctcctcacttctccaaatctaacctctcgcggtgccggccg

SEQ ID NO: 276416 - DNA, 866 bp, Glycine max
  unsure (1)..(866): unsure at all n locations
agaggnagacgcccganttaggacccctggaaaaccggccggatgagttgaagattcttcgctcgnaagnaattttnaattaattggagaggataggattttttttatgtttttaatgttttatttgttgaagggggagtattggtgattatttatgtgnaagggtgatttataaaagataaggtagaggttatttgatatggatgaattttatggtgagaaggtgatttggttaaggaatattattgaaggaggagtatttgtgatttaaaattttgtaagtggaaggataaatttaaagatgatgtgaattgggaagaagaagtttttattagaggaaaagttgtttattttaaaattgaggaaaaggttgttgctaaggaggatggaattgattaaaattttattaaggaagtggggattgagagaattgttaatatggcaatgtttttgagagggtattataagaaaaattgaaaaggtaaaaaaaatgtatgatgtgggattaaaattaaataaaaattattnttatttaagtttgtagttttttattcatatttgtgtttaaaagaaatatttttatttagtagggggtaattgaatatattgtattgtgaaataggtatgaaagtattaaaattatttttttgtattggtataacatgttcacaatgttaatctgacctacctatatatataactcactttcttcatcccatgtttttctattgtttttattcgtggctttagtggcttatctctctattacataaacaaagtctccctccactcattattcttntctgtcaatgttagctacacccaatgttcggttaatttttcctaacacatagcaattgtttcct

SEQ ID NO: 276417 - DNA, 1009 bp, Glycine max
  unsure (1)..(1009): unsure at all n locations
tgcacctgggcnnntttgaatccatggcactacccncncccngtttgttaaaaanacctccacccctatacttgccaccaatggagttgagccgcgtaaccaattttttcttcttcncaactcttaaaaagtgcacttgtgagtcgtttggtttactcgtagtagcgcccgaattacattttctgaaatattctgtcttcgagtgattaggccacgtatttcgatcctactcacaaattaaaatgcgtgaaagatagttgattgaggttgcaacgtctcttgggaataaaaatacttctgaaacttcttaacatcccacagttcttgaccttcaattcggtaccatacaatggtaagaaaacacaggtatttaaaagacccatgactttttggagcaacctcatggggttcctttactagccattcgcaacaaaaacctttcgagaactaatttaatcacacacgagggttttgcagaaaactacttacaacttccaaccgtaaaggggagcataactatgttatattaacaagagcccaaagagaacgaaggttgtcggactagaatcgtgcgaccctggactaagtacctgggggcagaaggacagaggtgggttacaccaaccactctctccaaattctacactgggggacgaaagttggaattccaccagtataccatatgatcgtggataaagaaaattctctggtccaggttggccaaatcacaaattactcgcttccaattgccacaaacatgggtcccttcccctcccaatgtagatattcgcacaaggctgaacagaaaactactctttacaataacaaggcccgaagaaaatatttttgctctctcctggcaataaaatttaatagtaaagaaataagtgtcctttgccgcgcccgagttacctcttctcggggaaatactacttcttggaaaaaaaaagtcgcactgtcatgttcttttcgcaaaccttacattacccttctaggccgagggcaatct

SEQ ID NO: 276418 - DNA, 446 bp, Glycine max
agcttatgctgcaaatatttacaatagacctccttaacctcagcagcaaaatcaaccacagcagaacaattatgacctttccagcaacagataccaccctggatggaggaatcaccctaacctcagatggtccagccctcagcaacaatagcagcctgcttcttccttccaaaatgctgctggcccaagcagaccatacattcctccaccaatccaacaacagcaacaaccccagaaacagccaacaattgaggcccctccacaaccttccctcgaagaacttgtgaggcaaatgactatgcagaacatgcagtttcaccaagagaccagagcctccattcagagcttaaccaatcagatgggacaattagctaccccaattgaatcaacaacagtcccagaattctgacaagctggccttctaaactgtcccaaatcccaaaaat

SEQ ID NO: 276419 - DNA, 1048 bp, Glycine max
  unsure (1)..(1048): unsure at all n locations
gttagatattctataatccatnactctnccctccacctagaggagcggnngngcatannatttgcatntcccctacttaggttagcccgttcactattaacacacacctccaaggcttcgtgggtctgtctgccggtaggaattacaattccatggcgatacatttaacaaagcccttttatatctccattctgatgctgcaccacccaaatctctcctcaaaggaactattcctccagcattttcccaacttcggtcgattcttattgtcgtggcgtgcacaccattattgggaacagtcgaaaactgcgtattcacacaatcatgtcctttctaattgtcggcccctctggtatggagtgggcaactattattaatagaacattgagtatctgtactttggaaggactacgtaggagaaaccatttatggaaccctcaggtgtttaaaagtcaaaaaccttcttcatttttgatgcatgactctggatgaaaccttcattcttgatcctgtaagcttacttgtagcctttcgaaaaaatcttctattgttacgacctaattgatggctctaggattattatacgaatacatcctccacagggaagactctgcacctcctcaatatgaggcttcttttcaaaaatttcgaaaccttttcacctaaacacctaggttgatacattccagtccaagcttattttgaaccattcgaacgccaattatagatatgtttcttagaattctatccataaacacatacttaatatgtacactttcaaagccctttaggaatgaagctttgctttacaaaaactgtattgtgtcactgcaaagccatttaccttccttctcatacgcattctttaatgacaaggcgtgtcaaccgtggttcccaacattctgcgggcgactctggtgatcttctagcactgcaccacattacggctaacgcgaccatctcaaaaaactgtctccacgggcctcgatctcaatatattcccacaaatagcatccgctatgaattatattcactcctactcccggcc

SEQ ID NO: 276420 - DNA, 463 bp, Glycine max
agcttgccagtccgctagataataaatctcttttttttttaaatttgtatacttataagttatttggacctgatttgttaaacctgcggactctacaggcttaatccacatgtccatgggctaacccacaaaacctgcataacacatgtgtgttcgcaatgttcgcatattttagctgcaaatgttggcatatttttgcttaatagattttaccttaaaaattaaacaaaaaaaaacctactaatttggcccaccttttgttctttttttaaaatctcatattattattcaggttcgcggatcaaccctatttatctgttggtttcgtgaacccacatatggactctacaaataaaaaaatgtaattatttatttcgcaaatcacacttatctgactcctatatataaaaagcaggctccgcgggacccaccttacatgacccaaactagtccatctcccact

SEQ ID NO: 276421 - DNA, 436 bp, Glycine max
tgacactaaacatctaggtaaacttccagtctaaagatttgatgataaatccactacatcaagctcataattgcacgaaagattctcgaaaagcatcccgggtaatttgttcccagaaatatttcagataagtaatagaaggaagtgacaacaatcctggttgaaaaggccccacaaatgaattcgatgaaatatccaatcgctcaagctgatagtatgaactcaatttagcccgaataccacacctgaagctattttttcttacaactagtataaccaacctgttaccgagctgacgaaactgcggtccaaaagcattatcattcaattcaagcacttgaatattcgtcaaacggcttaaatcacgcaccggccccataaagggaatattataaagtgaaaagggtctcaaattctccacattaccaagcgaatt

SEQ ID NO: 276422 - DNA, 752 bp, Glycine max
  unsure (1)..(752): unsure at all n locations
aatcatagttaggaacattgccatattggttgctaaaggatacaaccaagaggaaggcattgactatgatgagaccaatgcccttattgcanngntggaacctattagggtgttgctttcttttgcttgtattatgaattctacgttatattaaatggatgtcaaaactgattttctaaatggatacattaaagaagagatatatgtggagttccatgttttgtagacttcgaacatcctaatcatgttcacaagttgaaaaaggcactctatggtttaaaacaagcacctagatcttggtatgaaagattgagcaatttcttaattgggcaatcttttgtaagaggtcaagttgacaaaacattgtttatcaagagatcaaatgatgagttgttgcttgtgcaaatttatgttgatgactgctcgacggtcgacaagtgcgctggatcatgccagtagtataaaacggtcaatgaatatccagtatccaacctttggggaacttgctttacttggtaagttgtggcctcctaaatcagtgtcttgtgaacaaaacttggggggcggcatggaccattatgtacacctaactattccaaacccaaccctgtcagtagtgcgtgtttaacacccaatcgacacctcgtcgccctcctactccgggactggctcttcacgagtcccttacactaacaccgtctcgggctcactcccgcccctaacctacaactcctcagcgctccctcccctcc

SEQ ID NO: 276423 - DNA, 385 bp, Glycine max
tgttgatacacctataaatccaagtatcaagctttttgccaaattaagggatattgccaaatttcaattcaaatggcaactagcgtatatattaactaagtcattgggtaagttacatgtgacaggcacggtgcatatgttttatatgctctatcttgtcttattattctccgcatctacaattgagttttgccatgtagtttagctacacattttaccacatgccattttttttatttctctcaacaaatgctaaaggcattgaatgtgatacaaaaattgtatgtggttattcaaacactatgttctcatgttttaatattcattatgctttgacctgtttacatctcaatcattgtaatgattgaaattttgaacatggaat

SEQ ID NO: 276424 - DNA, 459 bp, Glycine max
agctttgtgcctgattctgatgcgatttttgataatcttgaaaacataatacgataactcaaaaattgcattaaaaaaaagggaatcctcttaaacacgaaagggaatacaattattatttttattgaccaaattatacataattagtaggaatcaaatcctatcaccaaaagaaagaataaaatccccaattatgtcctttttgtaatgttggtttttagtgcccccaattaacagaataatcaattaagaattttctttttacattaagattaaggagaattttacaatatacttagagtatgtttgattaaatgacaaaattacgatatacataaatcttacttatttttaatgaaaataatacgtggtaaaaataaataatcatatatcttttaagaacagatcacgccttttttttttactggaaaaaaagagagatcaagctagttatacctt

SEQ ID NO: 276425 - DNA, 536 bp, Glycine max
  unsure (1)..(536): unsure at all n locations
tcatagacctgtaactcttacacttgtcgaggttaccgctctcaacatcacacaacatttgtccatacttgggggcttcacaaaattgtcacccttctacttatcaaggctattacccaggacattagacaaactccctcgatgtgggataacctccttcaaccctggacaacctcttttgcccacaagccgacttaaaactcggagggcttatgtgttgtccaaggtccacaaaatacatgtggcatcttatgtgacacttcaagacacatgtcaactctccatgtcaaccctagcacaagtgcacgaatgcccaacccttagcagctagtctccctaaccaataagttatctctaaccttctattatttgaatatattgtcatcttttatctcttggcaggtacttaattatctaccaagccacacattatctataaggtacaaattatctactagcttttatctctgaagtggatattatctctaactntatctatttcctaccagctattattcacaagttgataattgtct

SEQ ID NO: 276426 - DNA, 282 bp, Glycine max
  unsure (1)..(282): unsure at all n locations
agcttntcagcaatggtttgtttaacccttcatgttcatgaagggctcaaatgtacataaggatgtaaaaggtgaagagataaggaatcaacatgaatccgtggaagagaatgggctcctaatgattgcctttctcctctagctcaagctttaggattctctattcttctgaacaagctcctttcttttcttctcttcgtttttcacttaaaaacacttcctgagtttgagattctgtgactacgcgctgagcccaagcaaatggttgcacgctaaaccatc

SEQ ID NO: 276427 - DNA, 434 bp, Glycine max
tcggtcttttagtctgactatggaactaatctttggttcaaagtttaatcacacttaaagtttattattcatctctaagaatgtattttacaaggatcaaattatgtcttcccccacaaacttgacatgtgttgccaagtaagctacactcattaagtaattgtttatcaattgacaagtgcatcaatttgtccaagtagtaaattaaaacagatcgagtatcgtgtctacagaaaatttcttgtacttaaatgacacatattcaatttataaacaatttatagttggatgtaaatgaaagttagcaaataattcatgttgcacaataaactataacatttttcaagttaaaactgaatagtagaattaaacaccgagcttagcgaatgaaaataaatacccagggaattatgttcgggagtgccccactgaaa

SEQ ID NO: 276428 - DNA, 334 bp, Glycine max
agcttatgaatttgaggtaaacgctctatatgttctatgagttattcatggctgtatgattatatggctgtatgttgctaattgatttttcgcataacggcttgttttttgtcagcaaccaattgtcgtcttgcactctatgggatgatcattgtctccaatttttggaatatttggatcaccctgagactgaaagacctattattgtgttgttgaccaatgccccaattacagagggccacggtatactatgatatatagtttactggctttcatcttcatcctatccaacttatgctcctatttttgactggtgcccgatcctatccatcct

SEQ ID NO: 276429 - DNA, 431 bp, Glycine max
ttaaccgtttatttgagctgttttctcacctaataaatgataaaatgaatttcaaccgatcatttgtgctgtaatctcatttaatcactgttaaaacaaaatctaactgatcgttcacgctgtaaccacggttaaaccaaaaaaagcaaaataataaaataatcaaaatatcttgaaaaataataataaaataatcaaaatatctttgaataaaataatcaaaaaaatcaatcggacgtttttctttggaagtttccttggatcaattgactaataaccaaagtgaaactaaggctaaaatcaactcacaaatcaagctttgtccgcaaaaatcactaaaaaccgttttaaggtccaatgccttaaacagtcctctttgcttttatcgggtaacatggacccattcaaagcatgaaatcaacatgttactt

SEQ ID NO: 276430 - DNA, 1195 bp, Glycine max
  unsure (1)..(1195): unsure at all n locations
nacgacaaccncncnacggcaggcnnnttttngattttgagcactccgncttcagtgaaacnanannnccccnnnncnngcnnannttnntngngtagngaaaaaganactatgccacgncgnncanncnnnngnnnnngangnagnnnngncncnnnnncgcacagctgcgagcggtcagagaggncgantcctgtctatctattcgttagtcacgancgaaanngcggcncnacacaanangcnagcccacgacgacgggagagatcataatcatggagcggaattacagaatatacagttttctcaccgacagacaaccacactcgggcaaaacaagatcacggcgagctcacccacaagaaacggacacatcttcgccctcaaacacaaaaagagcgtaagcaacgacaccattcaccccgaaacaaaccaccgaaaaaaagaacaacacgcagagcaatctccgaccatacagcaaccgaaccccagaccagtgaaaaaacacagtggacacgcacgcatggaaggcgaaaaacacaacccaccaccaaagcccaagcaactgccgcagcacaagacagcaaaaccgcacaacgagcgaatgccaatgcacgcgataaatctcacgcccaactatccacacgcaccactcaacacgctacacggcgtgaaacaacaaaccaccacacgcctaccagcatcgatacgaccgcctcctccacgcgctaccaccgacgccacacaaacaccaaaggcaaacgacacgaacgcacggaagcaactcacccacgaaactaagcggccgcacctacacccactgaacccaccaccaaccccaactcacaatcccgcaaaagcaagaaccacacccccaacaaactccagcgcgcgcaacccaccaccatacaccatcgccggccagaaacaacacccccacaccccgaaacacacgacgacagggacaggcccacacacacagacaaaactcccgccaccaccaaccgccacgcgcgcacggcgccaacccccccaatgccgcaactccaacacacccggaccaaagaacactcggccaccgacaagcaccagccacctgccatcgcgccctccgccccgtactaaacaaccgcacaaccccacggcaagacggacacgtcgagacatgcaaaaccaacccagcgggcacaaaccc

SEQ ID NO: 276431 - DNA, 820 bp, Glycine max
  unsure (1)..(820): unsure at all n locations
cggccccaagcggccttttgaccccttgaaaaccccggacattggggaagaattcgcgcaagcaaagntcgcaccttaagacgagggaacccgttattggttcgagaacccaccaacgccaacggcgggggcctttataaacttaaagatttttccccccccgtcggctcccccactatcacactgcaaaaaacccctctaaaccgtccccaacaaatggcgcatccagaaaaatccggccaacaccaagccacaccatatggcccactggtagagcaagctcactactcatgaacccaaccgatctggaactattgccagagccgggcgccccaggaatcactcacgaaaacggcggacacccacaacactgacaaaaccacaggggacaacagctttaacccccggcggataaaacggccagtctgccgaaaaaacaaggcattccgggccctccatcaggtcaaggggggcgattgaacactccacggtcgcggccaaaaacagaaaagggcctctcaaaaccacgcccagcactttgacgaggtcagtaccacccctccccacagataagcggcgccccgcctccggcccaagtgcaacaattcctacggcacactccacctcgaccgtcgcccgcatcaaccacactacctcgactccacagacccaccgacgaatccgcgcacaatcgcacccccctacccctccccaccccgcccgcgcggactccctctccccgccaccatcgagccaacgcctcccacaacgcgctccacgaccagccccacccgcacacccaccaccccctgacctcacg

SEQ ID NO: 276432 - DNA, 962 bp, Glycine max
  unsure (1)..(962): unsure at all n locations
ttctatgttctngaacnnttatccanctcctcatactaggcgagagggacnnttggaatcctctgccactacgcgataccttaaaaaatacaacctcggtcctatgaagcctaccgtcctgaggtagtcttcacttttatcattcctgcctcctcctaaacaaacgcatttttttttaggctcctagctctcattcttgacattctaggtacccactattaaccttatgtatactcatagagcttttctaacccggaaacattaccagcggttatactattcctcttgaccattccatatccttaacccagtgtcataccgcctaactttgcggacacaatttacccttgataataactcccctcaatattaggaacaaatttggccttgaaccattcttccgtggatgaagctcttctacaatccaaaatcagggagcatcacgatacacaccgaatcggctcgaggtttaatcaatcactccattcattcaactcaactaagtggcaagggaaattcattcaatcccaaggggagcttttaccctaactaccatttataagaaggctgggccccatcatcctaaaattaatgcagccattactaccgtaaagaacacggccaaacagccctatagagaggcctctctctcaaatatctaagcaacaccctccaccggggaacacactaaggccttcgcgttacaaataaccggacaaccgggttactatattcgaaattaatgtcaatataaggccaatttcctttgaaggaacaccaaccgtggatacgaaacatcttccgcattccttcgaatgacaaatttttgtcaaccaatacaatatcaaagctctatgcgtgacaaaaattgacagggtagaaggtcacgcaatgcccggttgaaggactctgttgtgcagcacccaacatgctggctttcgaagtcagatgtgaaacggacg

SEQ ID NO: 276433 - DNA, 1246 bp, Glycine max
  unsure (1)..(1246): unsure at all n locations
caccttcctagacatgtcgttagacactctcntaccaccanactcntaactttttttttctcanntttatactntagctacgacatattcaaaatctcnncactctnccagcagaagacagagattgtttataatattctctaaagcctccaagtcgtaataactaagaccatgaccacgcgcgcacttccatacactatnatactcacaaagggaggaggtatactatatttttaccatatacactcaacatcacggctcctttagaacgagagtgcgtctacctatcacgcgcactaatgcgtgccatggcataacataacaccacccttcctgactcaccaaacgacaaacagtgagctctcagacagtcattcgggttaacgacacaagtgtcgagaaaaacagtgtccaaatcatcacgtgacctacctccagcagacaacgcaatgacacctctattagcctcgagctcgcnaccaacccaaccgtcaagagaaattacgacgaatggcactgctgcaatatccctatctcatcacacaactttaaaacgactctacctacaantgcaacctaaacacgcaaagaatacagcctctctaaatttctccganaaccgggtcgaggagaaacactataactcaacacagtccgtcaaaaatcgttactactcatccgcacttgatcagaaaagaccaattacaaccctacccacctcccctacatcctcctcagatagccctaactcactccatgcaccccctccgaactacgtgcaatatatgactataatgacatacttcggaccaaaaccaccacactagtacaaaaccaccatccgaacaaacataacactacacattccaaaccatatccctatccataccccatcatcaccaacacgaactctccactcacacagtacatcgtcaaccacacaccaccaccatcttatgatcatctatctcttcgtcctagacacactgaacggcatccagtgcggtcgcgactaacaccacgagtatacacgtcgcttntcctctctacctcttctcagatatactactccacctacacacactgtctaatactatactctatcccgtgacctattcactctacactgcaacactatcccttcagactcttctcctacattatatccgacgactaatagtcactgccgctctcacatatacacaccgcgaagacctctacatcactaaccccgattcaccaaccg

SEQ ID NO: 276434 - DNA, 1253 bp, Glycine max
  unsure (1)..(1253): unsure at all n locations
gctatctcnnntatcttcttacctctnctttcaagcccggggccacttactgattcccttttgtgtacggtcgctatagaatacatcatcttgtttttccccacgcgcttgacacctctggcggcggagagagagcccctccttcgcatttggcanaacacccccaccgagcatggacgccctcgttctcaacgcctgtgacccttgggctcttcccccggcctctaccctaggggggggaaaattcaacccttctataggagcccccttcgggagcctcccaataatcccattccttccatttaaaggcccccaacagccaggccttgccattaaggttgggaattacgaaccccaccgaaccctctcagctatggggcgctctctaaaaccctccattaaaactttttttgcgtttaccatttctctatccaattggatgggtgtgtttaaattttttctctcccactctatacctcctccaacaatgtgtctgggggaaaaaatgcgtgttctaaacactgaacatcttttagaagcnttccaccccccataaaaccctcgttttttcaaaacccttaactctgtatattttcctattgcggtgcacaacaatatcttgtgtctcttgtgttcttcgggacgcaacatacaattggtgcgtggaggtttacacgggtcccctcctgaaagctttacgctcctggtgaacattcatatggcgggggttcgaaaaactctcaaacccatctataaaatctcttctcaaacacaacttgttaaatgtctggaatgaaacaaacgctccatacaagattgctggaggtgggcggccgcggccccaccatatgaggactctcttcggctactatacaaacacctatgtgctctgtcgccgtcaagaacatacgctctccatcactaatagtcctttatacgtctgtgccagtccaaccgtcttactctcctatgcgttgtctcttcccgcacgcctgctgatacatccacatgcatctcctatgatcanactcatcttttgccgcactctatccatacatcatctaacacatatacctatagtgcagttatcctacaactatcatatcttcancgtcgtcctgttccgtcactcgtcactcgtggacgacttgttgctgcatgacctgccgacatcgtcctcttcgtcctncatgtcgctctcatagcctactcactcacatgtcactgttcgctacacatnaccctctactcct

SEQ ID NO: 276435 - DNA, 1135 bp, Glycine max
  unsure (1)..(1135): unsure at all n locations
tgactccgcacctatactcctgtactcctcttactcatacttgcacttattcactgctataatccattcagcctaatcctctctcgtccgcaggcctatgtttgcctctctcactccccccctcctatatccacgtgaggcagcaatcctattagtcaagcaaatgactggcgggaaatatttctttcctnaccttgtgcataatacacctacgtggaggggcgcgatacccctctcaccgctattcttctgcacttccgggtgaatgtcccaggtgaaaaatcatcatcgaaggacgtctctgaaggttaatcatgcagcctccatataacgccgcaaaagtaagacttccactcataatacggcaatctgcatgcctcctcctctgcattatttagtcatcaccaaaaaaagaggcccgggcggtcaccatactattcgcgcggggggttcatttctacaacattcttgacctggaccaacgccgcagaagaagcataccgcaccgggatccatcctgtcctgttaagcaccgctcttaatcctaagccccatctaaatgataaagattggtaggatcaaagtcacgtctgcacggggtacttcccgaatgcgtntccggtgcaaaaaaaaggggtgggctggggggacatccacggcggtatcgcgtttttcatgcgggaaaactgactctatcgcgaagtggacagcttcagctacatncctccaagcaaacgagcaaagcttctccacactgngtctgtttaacgttacagagagaacctaacgacgtncctcacaacatcaacaagngcttgggaaactcttatcaactattagaagagaagtatacaccatngctgtccactaccaacaaatgttgtaccagcactctcatctctaatagagaataacgccgccctctccttctgtctaaatgagagcaacaactagcctctgacctctcataagtaactacgctcgcccctccagctcttctaaagaggntcgaccctncaccccctctcacatatacgtatctctattgctgtataccaactttattactcacgacgtagttcgctctcgtgtattcatccgatcgtgtcaacacctctacacaccactaatacct

SEQ ID NO: 276436 - DNA, 429 bp, Glycine max
tcaaaagaaagtgatgaggtacaaaccctaaaggcaaagcttgaaagagcccgggtagtcaaagagaagttcaagtccatagccatcaaagtctgaagagagtatgatgaactaagggacgtcaatatggccaccgctgaagccttggaacgagaaaccaagaaggtctgaaaggaagaacacgaccaaaacaagttttgaggggctttatagggcagcaatagtgagctcaaactccgaagaggtgaaaggaatcatcacgggtcaaaggcatgatctggaaggacgagctaaaggcttgccttaggtcgaaaagaaatttgtcccaacagttaaggtgagactgaaaggaatatgtgggccatcatcgataagtgcaaagagaagctaaatctagcggcgactcaccaacaaaggctagaagatgag

SEQ ID NO: 276437 - DNA, 517 bp, Glycine max
  unsure (1)..(517): unsure at all n locations
agctttttagagtagaagcatgggaccaactcattttatttcagaaagtcgtatctagtcaaggtctgagagaccatacaggttttctagcgatttctaattatgtgggccattaagtctatcatatgctgacaatagccgagaagcccatgaatttcttcgggggcggaataggtgtccgccattgccttggccttggctaacaatcggggaagttcttgactcccgttcaaggtaagagcaaaccgatccatccacatggttgcctcttggtgtaaagagtcgatcacccttcctctagcctctttttccgcgtatacttgggcatactcgtccgcgaccctaagctcgtgggccgnggctagacctaactcttcttggtacttggcgatgatagctaacatgttggtctccgtctcgcataaacgctgagacaagctccttttggaccttgaacaggctactaactcctctttcaaaacctgctatgtacttccaacttgcccctcttttccct

SEQ ID NO: 276438 - DNA, 529 bp, Glycine max
tgcattacctcttagtaggtggtgtaagctctattggagcttgtatgcctatgatcttcttcattaatggatttctttgcttcttggaagatgaatggccgcggaatggagaaggaagagagagaggagatgccacttaaaggagaagatgagtctagaagaagctcaccaccataggaggccatggataagagcttggaggaagaatgaggataatgaaaggagaggaagcgaagagcatgaaattttgtgctctaaaagagctctgaaatctgaagtttaattttcaaatcatcaaagttgaaaaaaatgcacacacatgacctctatttatagcctaagtgtcacacaaaattggaggaaaatttgaatttcacttgaatatgtggagccaaactttggagccaaaatttcactaattatgataagcgaattttaagtatggtgttgcccacctatcccagatcaattccaagattctccactaagtgtgcttaggtgtcatgaagcatgtaaagcatgaacgaca

SEQ ID NO: 276439 - DNA, 462 bp, Glycine max
gcatgcaagctttgtattctaggtctagtgaccttgatattctttgaatcccttcattgtaaattctattattcataataaacttaacaattttgcccaatatttttttctccaactatcatctgaatagaatttctctaatctttcccaagaaattggtatcaagaatttcggttcaagattagttccacatatgtttcatggtagatcaagtcattagtaatcaaccattctatttgttattttgtttgtgttgcgtcttcaagattctattcaagaaaatggtcaacacaatcaagattgagaaattcacagggaataatagcttcaacctttggcgcatcaagatgcgagctttgctgaaagaacagggcatttgggctttctttctttggctaatcgttgaacattgataaatcaatgcttgagttacaagaggaaaaatgtgcattttctaattat

SEQ ID NO: 276440 - DNA, 316 bp, Glycine max
ctttaaaacaacatgttgcatcattgaaatcttaacaaattgatacaatcatgaacatttaaaatttaaggagtttggacaaacttcaaacacaacacactttggtgcctgtccacgaactacaacaactaaatataatgatatcaaagccaatttaacgctctatatttttgtttagctttccaaaaaaaattattctctatcatgaattttctatcaccataaaggaagatggattctgatacttggcctttataataacatatccctcaatttattacccttcaaccacggcccctacgggccattaacaatg

SEQ ID NO: 276441 - DNA, 1100 bp, Glycine max
  unsure (1)..(1100): unsure at all n locations
tctaatctanctctcttaccatcttcaacacaagacgaagcaagaacactcttgaaatccatacctcactgtcttatagcccgacaacacataaatatagagactcagntcttcttgaatgctatatccgcagcaagatgcaggcgcccccaatcctctttcgttctccaccccaaatatctattggaactaacccgcgtagaggctctaacttcaggcgataccagaatatatcgtaaacggtctccaacgcaaactcatgcatttgaacaacatcggagaaaggcttcacttttctaccagcgacaatctatgacaatcacccaataacgctcgaaaacctcgtgctcttcatgagcttcgttatagaaggaaagtttgctggctctaaaactctcgacgggtgacagcagtgaaccagcctgcgcgaagaaacccaattccctgaacatagcctcgagaaataacacaaatctaataacaatcgtgactaactactaggggaacgggtagtttcattcccaaaagcggaggaaaaaagttacaaaacgctcctccttctaaacgatccataagtgaatataacaaacccttttgcagaatttttctgtctatcactaaggcgctataatcccaattgaatggctccgttccatcgtggttatagcgcgcctcacctagaaagaaacggaatggtttgtacgccatacagaatcctcaagaatcccactcggtcttacaaacaatggcccggctctggcttataccatatgaacatagtgtccctctggagaggatactacgttatggcaatggagattcatacaataagtaacgcactctctcctttcttcccacaaattgtccgcgaatgctgtcacactgcatcttggaagtactacttaacaaaaaagttactccttccaatcctccctccataatcttgcaatcttatcctcgacccgccacacaaggtactataaagatcgcaaccaactacacattctgagtcctctatctgatccaacgtggtgggatatacaaagtcacagcagcgactactaaatcaccgcgggtgctacacaacttatctcatcccc

SEQ ID NO: 276442 - DNA, 330 bp, Glycine max
agcttgccacccagctcgcccaggcgagctaggttgcttcctccagaaggcggtgccttctggaggaacttcctggaaagcccatgtgggcctgcttgctatttgcacccctgcttactaaatacaccccctacctttttttgctgattctttttttgtaacgttacgtaactttatgaattccgtaacgatacttgttttccttccgtaatgttaccggaaccttacggattacataatcactccctttttggctttcacaatgctaccaaacctcacggattatgtaacaatgcttccttttgatttccggcctgttaccgaacttca

SEQ ID NO: 276443 - DNA, 481 bp, Glycine max
tcttatccaaggctgatcttggtggtgaaactccttcttccatggtttattccctagtggatggcgcctcctctcacctcttctcctttgtcttccgctgcatctccatggtggaaaatcaccattaaaggacctcattgaagctcaaagatccagcctccatagaagccccaacagcaagcttccatcaagttgtaatcagagcacaagagcttcaagtaggtgctccttaaacctccattaatttttttgctttaccttctcttccattgttgtttcttcatttttttctccatctatctcctcacatgtcttgtgataaatgttttaaacatgattctttagagtttccaccgattaaacttgttatagaagctagatttgattttctatggttcaaatttcttgttcttgttcttgaaccatgaattgtgttgagtttaggttcctttgagttttgcttgttattttttgtggctga

SEQ ID NO: 276444 - DNA, 942 bp, Glycine max
  unsure (1)..(942): unsure at all n locations
tccacccttgtctttctcatttcgaccatatcacccacttatactcaaccactatcttacncccaactctcgccgggccccctttccaccctttnacccccgtgtatcttcaagcacaacccgctagtcatgcaaccccaacacatcactgttggaggaaatgggtcctcttcagtgagctggttatcttcacagtcgaagtaactataactcgtaccagcagaattttctacctcaaagctttaatctcaattacccagctaatccggcaatctatctaagatatatatcacgttgagcacacatgtgctggcttttcaatgaatttccactttaattgattaccaagtgaatcacttaatcaaatctacttttatttcttaaagcgcggttcctagaagtgatcaagaatagtttaatcgattacctcaccaatctaatcgattacattgcccttgaatgttttttagaaagtaggacgaacactttaatcgaccgaaatgactaatataatcaattacttctccgaaaaacatcattacatcggatatttaattgactacaggggattataatcgtcctctctactaaaaccatattgcgctactaactttaagaaaggacaagagaatggaaaaagctcttacatacagtgcgcgacttacaacctttacacctcgtttctctctgaagccctcctgaaaccgactgaatgccgaccaccttggtgatccaaaaatagcctccgatcaccccgcccgggaccctgttcgaccacttgcgcctttcttcccctcatctctaccaacctcgccctcctcctacccactaatttcgcgtccctcacatttgttacactcatacggacactctcccgttctctccgaaacctataaccattctccaccctctaccctctccccctctccactcccaccaccc

SEQ ID NO: 276445 - DNA, 531 bp, Glycine max
tttcttaaaaatccaaaaagctagagcttatttacatacctctctaatagctaagctcatccccatgacaaaatacatgaaaatacaaaataaaaatccctattataaagactactcagaatgcctcgaaatacaaggctaaaaccctatactactagaatggacaaaatacaaggcccaaacaaaggaaaaccctattctaatatttacaaagataaccggcctcatacttagcccatgggcttgaaatctattctaaggctcatgagaaccctaagacctttccttggatctctggcctaatatacttggagtcttctatccaatgcccttgcggggtaggattgcatcaacttccttggcttcttgtacaaccattctttttagctctgagggaaaaccccaattcctaattttcccatccttaacttgtgttaccagggggataaaaggaacggctagctcctcggtttcattaccttcacaagactcattatccgatctatacccttttatcgcaacaaaaaaaaa

SEQ ID NO: 276446 - DNA, 389 bp, Glycine max
ttctatagcgaaacctcacgttccttctgtttctttacactgccagaatctgttaagcttgaagctcatagcttcttcaagtgcccaggaatgttgctccttgttttgggcctcgtaacttaatggtcgaaggtcctatttgtcaccccgaaggacttgaaactttgttctcaagcaatatacctaatactagctagaaactacccttatctaacaaaggtatcggactgctatgcttttttattaatctttcttctttaattgatcatttggtaatcctgtatctataagttttctggactagtttagtttgctttgtggggcatcaaaatgctcgacaagttaaccatcataactcccaaacagaacgcactttcctcaacagcaca

SEQ ID NO: 276447 - DNA, 378 bp, Glycine max
ctatagacaactcaagctttggtcccctcacgcgagccattcctgtgtacagtcgcctcttaaatcaatttttctttttttttttaaaaaaaaaagtgcaggttagctcgcctgggtgagctgagctcgcctgggcgagcaacccctgcaccaaaatattaaaaatgaagaagggggacgtttttgcattcaaaaacttcttttccccccattcaaaagcaatacccacggaatttacgagtttgcagccctagggtcactatttttcgcatttttcgattccggtttgcgcttttattcatcaccaacaagtaagtgttccatcctttagctttttagctattcattggtgtattctgatctccttttggtgctcta

SEQ ID NO: 276448 - DNA, 1204 bp, Glycine max
  unsure (1)..(1204): unsure at all n locations
aaccttcacacgcacgcgaccgctgcgcncgtcacacactctcctacgctcntnntnnnnncnnnntttnnnnnncgctaacatatannngtacatntaccatnaccaccacccacactacagcccgcgcgcgagnntggattagcanttgcgaatnnaacacncnaccnctgttagaatnctcacaccgcgacgccgtcccgacactgctaagcctctaatacacccactaggaagggacagaatatattgtgtgtatgccgctctccacccctaacgaatactccaccgatcgcaatctatgaggataaaaacacggaaggaataacatcggcacatccgcatcgagtgctcgcgcgggactctaatgacacacccaacaatcgtatatcantgactcantacacacacaggcgcgtgcatccagggaacctcactcaatcaaccgagggtagctctcctcccactccagcgagcctcaaactacatctaaggacatagcctcgccatcccggaagaactgatggacagactccaacaatcgtaattgggacatgggacacctaaactaacgaccgcaaagacccacgaactgaaacacccagtagcaggaaactcacacacaaaacctcgaataaattacacacactaccaaggcgccgaaatcgcctcccaaacgacagagacatcacagacaatctttactgagaaccgaagatagacatccacaagcgccttccgtacctctactatgtgcttggacacgggcctccaacccaataccacccacaaaaaatgccgccctttcccaaaccaaacaggattaaaccgtccgcgccgggggctaaatcggtccggcggaccgagacgtgaaccgcggccaataatttcacaggccacaggcacaccatactcaacgggacccctaactcccctcgcgctggccaagaatcacccctcacttctagggcccaaatcgcacaacccctggcgatcaccacaactgagcttaaaacgggcgcatcgaacaaaaacctggccctgggaccccccccacccccaaacaaacacccccccctccaaaaaacaccggagcgtacaaacacaacacctcccccgcgcgaaccccaaacacaaccacgcggccgacactcgcgcccacgaaacacaaaaaaccccccccacacctcgctacacccccccc

SEQ ID NO: 276449 - DNA, 1006 bp, Glycine max
  unsure (1)..(1006): unsure at all n locations
tcccccccccattnnntctnnncccaaagccaagagccttgattcatccacattcgaacgcctttgaaacaggggcnctattcagatctcaacctgtagcacatcgagcgcaagttttttttctccgaaggagccccacgggctctaattttcacctatcactctagatgggagaacaaggcaattacgaacccacctcttcaacgagggaataagtaacaaaaacaaaccttgaatactcacacaggcactaacgcccggaattacagaacaccattccccacacaccatgtgacaaagcactcccctcacggtaagcattataaacctcccctcagtgatcacagtccatgggcgaaaagggcgaactacatgaaaagagatcccaatatctattccccaacaatggatcctaaacccccaaacccacctgtgctggtcaaatacgcccaacctttccaagagcacgagccttcaatctccatcctttcaaagcaaactcattgctctgcacccctggaaaagactattacatgcccccgtagcaagacccagccaacgcgaactacgaaattcagaatcctcgcccccaatcaaaccacaagggatacaaacctgaagggcggggtgaaaaccccacctttctcggggaaggcaaatttgcaaaactcaacactctttgtctgggaaacttaaccccaatccctcggagtccccggccggaccttgccaatctttcaacaatcgggtacaacccaattctcaccgaataactttcctccccaatcgagaacaaaaataacaccactggaaaatccccggaacccggcggaaaataatctctccagaagagatccccacactgcgtcggcgaagagacctctaaaaagagacaaacctcccgcctccaaaaaccaaagttcgccgcgccataatcaactgaaaaatgtcacacgaatccactcccacgttcgacaacctcgctaacaacatacacgctgcgacc

SEQ ID NO: 276450 - DNA, 1289 bp, Glycine max
  unsure (1)..(1289): unsure at all n locations
cacgtcgctcacggtagttatcatcctcngtancnnctatcctncgccgcattnttttagtgtattctcnatctcaccgtatcaacactaccttctntnccttcacactagcgcgagcagggcctcgatttccatcnactttcccgggatccttggaacgttctacagagcacgtgatgacaacactctataccgttgaataattatagacgagtcgagcactctcctgtcacaaacaacaatgcgagcataccggaaactagtggatgacgcatttcaaggcaactataacacatatccgagggtagaagtgaaccgatttcaatatggtgcaacatcgggacaatgtacctatcgacaagtgagccaaaacaacatcattccatcgctcttctgaaacgtagactggcaccaccctcagtacatcatggtagactacctccatatgagagctctacacgcaagacagcctacttatccaatatgacggacaaacagagcaaccgtgtaggcgcctataacttaaaacttgtccgtagcaacgaaactcagtccgaaagcaggaccgcactcatgtctcgtaacaaatggatacagcgacgacgtgttaaaacgaaaaggaaagtcccttaatgtgcaccaggattgtacacaactaaataatggacggcaacactgtgcttgcgtcgcaactgagacatcatgtcttattttccatcagacggatttgaacaaaanaccgtgctctggccaacactcgtggcacgagatcccacgacaacaatgttggatcagcgcactcgcaccaatcagataggggtttagcacaaggcaacgtttgacgaggcggtcaatccatcgcgctgtcagaaaccacaccntctggcgacatggcactccatgggacaagtcctcttacttcataataaccgttgcagaaagagaaggggagtgaacaatagtccttggctactacaaagaacacaaaggcgctgcgtcaaaaagaaacatgtgtgcatggttacggtgggacacatgctcgtctccatccactttcccacgccttccagaacgcgctctccttatctctacgtcttctattgcactccctgtcggcgccgctcccctatactatataacatcggtcgcaaaatcgcgcatacagagacggaattcctcgggtgcatatatctcactaaaaaatcaactatgcgtgcagtgtcgaacgacnctggcgtgtgtcgtgccgcgttaagataccacatcgtcacgcgactaaatgcgcaccc

SEQ ID NO: 276451 - DNA, 353 bp, Glycine max
gagtacctccaagggactaacctctaactggccttcgatgcctgaacttggcaacacttgtccccctgcttgccctgccaattccaattggccgaattccatttccaccattaagtattatcatgttatgcaaaattccaaattctgttatttgtaattttgctgcaaatataatacttatgtactattgcaagacaatgaaaaatatcaagcattttcctctttcggtgtgggcgggtactgacccttgaagtccaactctaatcctctgtgccaaacatattccgtttaaactccaatatatatattttcttaccataatctgagaatactttgccgtgtgaaatgagctt

SEQ ID NO: 276452 - DNA, 384 bp, Glycine max
agctttagagttattcactagagaggtatgagatttggtgtgtattttctttttgcttcctactccttttattgatctaaggtagcttacttttcacgctgagttcgcgcttaatacgaattttcgcgctaagcacgcctctgggctttctcatgggttttcttcgggctaagccttgattgcgcaccgagcgagagtacacattaagactggacttactcgctaagcctaaattgcacgctgagcgaactttctaattctttcaatttttcttcaatgcttttttcttcttctagattttgcatgaatttttctctaaagttcttgaaattttattcttttgacttatgctgctaaaaaatttacaaagaaattaaatttttc

SEQ ID NO: 276453 - DNA, 453 bp, Glycine max
tacattctggtctagcactctatcacttagacttgggatatgttcaattctaatgaatggatcaagcacaaacttaattaataattcagataatcaaaattcgcaatcatagttatgcacaattgtcccttccaataacaaaaatgaataaaatcaccttttaataactcaaggagatagttacccaagttcaatacagtagtctatattagtagaacagaatagcttcataagaaaactaaagaacaaccttatggagaaagtaatttgcagatatgctagttttcgaaagagcctgagctgctattagaaaggtgcaattaaatatatgacaaaaatatcatttaaaggtaaacttactgaaacagagcttacacatccagtaaaatatataagcatggaacccacactatgaagaagaaacacttaccttggagtatccaaaatcacata

SEQ ID NO: 276454 - DNA, 378 bp, Glycine max
agcttacttgtgaagcttctatggaggctggatttttgttacttccttgagaagcttccttgagaagagtcctacagaagctagagcttatcttcacacacccctctaatagctaagctcacctccttgagatgagaagctagagcttagctacacacaccccttataataactaagctccccccatgccaaaatacatgaaaatacaaacaagtccctgctacaaagactactcaaaatgccctgaaatacaaggctaaaaccctatacctactacaatggccaaaataaaagaccccaaagaaggaaaaacctattcttaatatttaaaaagaagagtggacccaaccttggcccatgggcttagaaatctatcct

SEQ ID NO: 276455 - DNA, 456 bp, Glycine max
tcacacagtttatttttctcatacttgagttttggaagaccaatttctaagactttcctaactagaagaataagatgatgcatattaatgtgtgcatccctacgatgccacaaccaagaatcatctattttacttaccaagtaactcaactcatgaaatgatgcatgcttaacattcagcatatagatattacctattctcttgccaatgtggacaactttatcggacatggcttcacttgtaagacaacaatttttgttgaattcaattttgaagcctttgtcccaaagttgactaatgcttaaaaggttgtgttttagtccatccacatataacatgttctttatttgagttttgtgttgatttccaatatttccttctcctattatttttcctttgctattgcctccaaatgtgacatgtcctccatcttttgacacaaagtcagagagttta

SEQ ID NO: 276456 - DNA, 515 bp, Glycine max
agcttatgctgcaaacatttataatagacctccttagcaacaaaaccagccacaacagaatcattatgacctttcaagcaatagatacaatccaggttgaagaaatcatcccaatctgaaatggacaagtcctccacaacaacaacaacatattcctccttttcagaatgttgctggtccaagcaagccatatgttcctcctccaatgcagcaacagcagcagcaatcacaacaaagacaacaagcaactgaggcctcttctcaaccttccttagaagagttagtgaggcaaatgaccatccagaatatgcaatttcagcaagagacaaaagcctccattcagagtctgacaaataagatggggcagatggctacttagatgaaccaagctcagtcccaaaattctgacaaattggcttcacaaactgtacaaaatccaaaaaatgtgagtgccattaccttgaggtctggcaaccaaattcaagtggcctcaccagtagcagcacctgcacctg

SEQ ID NO: 276457 - DNA, 488 bp, Glycine max
ttaaaatttgaattaaaacgttcaataactgctggtaatcgattaccatatatgtgtaatcgattacacagtgcaaattttgaattcaaattttagtagctgttgtaaatcagttttggccactggtaatcgattacatcctctggtaatcgattaccagagagtaaatctcttgaaaaagactttttaacttaaatttcttggccaaaccttttgctacttcaataggaattccctttctattttaatatactctttctaagactctagaaactgtcttgatcattcatcttgaatatctttgtcttgaataaagctttgagaaacacgtaaccctttggcaagcttttcctttggcaccatcaaaacattcagcttgatcctttgtctacaatcttcccctttttgatgatgacaatcctgatatcaagacaagctatataccagatgatagcacgttcacacaacccttactccccctatctttt

SEQ ID NO: 276458 - DNA, 957 bp, Glycine max
  unsure (1)..(957): unsure at all n locations
tccgactaacgacccttcatgtntactttccctntccacactctctcaaccgctcatactttactctaccttctnccccccccccccccgcgccctttgtgacctccttnaccgcgatccttacagttgacctcgcagcctgccagcttgccaattgggaacactgtgcggctacccttgtgatgggatcgaacccccatgaatgccccaatgagcaaaacacccacccctgcacgggtaagaaaaaacttgtcatggacatggctcaacaatttgtaccccaacaccactaagttcccatctgcaacagaaattcctgaccctaccagcattctttgataaaccctcctactggtaaataaatccaaactcaactgcactggaggggaaagaaaaggacagctctctattaccaacaggcaacaagcataatccaataccaccctatgtcacctgtgtgccccactcgttacgaactattttggcattactgatccaccatctatcaattatcaactccatcgctatcaatatagccgcccactatggggattcatgttactattacacattttcctactatcaaaactctacacattccgacaccaaaaacactatttcctttggatgcggcgcctatcccaactgcccggtccacctctccctcttgtagaagtcctacaacctctcaaggccattccactccaaacacttttcacagctctcatggccacctttcttttctctactctacacccagcggcctcaccttaactcactccgcatttcatttctcccaccaccctgcacccctacccccctaaacatcaccaagcgcatcccctctccggccctatcacgcacccgcaccctcctctttccctcacagtacctcactactcaaccctctcccccccgcacctgtctcatacgcaaacaaacaccttctctccccct

SEQ ID NO: 276459 - DNA, 470 bp, Glycine max
  unsure (1)..(470): unsure at all n locations
tggacattccattccgaattntacagtttaatctactcgaatctttgcttattataatgacatcatttcatcatccttccaaagttcctggggaaatagaacttgctgacaatctcatataaatcttttctatggagagtaatcacaatgtctgctctgtaagtgcactatctcacggagggttaatgcttgatttcaaagcatgatgaattggagagacgaaccagaataaccgcatgcaacttataagcagcctcttcatttttcattgaatttgaatgtcacgtaattggggatagagccacagagaattccttcccggaaattcattctataaatcacgtactaaaccagcttgcaaggagccatctagtgaatgtttaactgggttggagaaaaaaaaaccactgcttgtctcacaatcangaagaacatatctgtctactggatcaatgtggaaatccttgaat

SEQ ID NO: 276460 - DNA, 433 bp, Glycine max
agctttgatggtgtcgagaagaaatcacatgtttgtctttatcaaaaagggggagaatgtgaatgtctgtatacatgattttgatgatgtcaaacaagaatctaacaaggctgcttcaactgataagcatttgcttcaagaataattcaagattgcttcaacaaacaaatccttgtttcaagaatcactaaagaccaagtcttgccttaaaacaaagtgctttcaagacatgcaaggctctggtaatcgattaccaggaagtgtaatcgattaccacaagacagggttgagaaatagctgttgaaaaaggttctgaatttgaatttttaacataaaatcgattaccatatgtttgtaatcgattaccagcaacggcactttggaaattccaattccaaagtcataaccccttcaaattatacctgtgtaatcc

SEQ ID NO: 276461 - DNA, 544 bp, Glycine max
ttgatggtgtcgagaagaaatcacatgtttgtcatcatcaaaaagggggagaatgtgaatgtatgtatacatgattttgatgatgtcaaagaagaatctaacaaggctacttcaaatgataagcatttgcttcaagaataattcaagattgcttcaacaaacaaagccttgtttcaagattcactaaagaccaagccttgccttaaaacaaagtgctttcaagacatgcaaggctctggtaatcgattaccaggaagtgtaatcgattacccgaagcacggttgagaaatagctgttgaaaaaggttttgaatttgaattttcaacatgtaatcgattaccatatgtctgtaatcgattaccagcaacgaaactttggaacatcaaattcaaaagtcataaccccttcaattataactgtgtaatcgattacacaaacattgtaatcgactaccagtggaaagtttttagaatatctgccaccgccacatcttttcattagatttgtgaatggtcatcaaaagcctaataataggtgacttggg

SEQ ID NO: 276462 - DNA, 891 bp, Glycine max
  unsure (1)..(891): unsure at all n locations
cgggccccgcggattgagacnctcgtananacnncacncattatatagagaccgcctgcatgcatgcattaaaagttatgaccatcgagcgggcccgcttttttttgtagtatgtgcaccgccggccccacggtggccttaatcgatctaaagaatgcattaatccttcacaccatacccactcatcttaattacgaaccatcttgtgcctaaagacgacctctgggccttcctcacaggctatttctttgtgcctatcaaccttgagtggccccatcgaatgacagcaacccattcacaacaggacttacttccctacgcttataattgcacgctgcatcaaactcctacctctttcggtccctcctgaacgctttgctcttccccaatacccagaacgaaacttcctttacttgattaggaaattcaaccctttctaccataccctgcctacaaccgctgcacacaatactcaaattttagcggacaccctctaccgctacccgccaaccactctgaaccggtggccttctcaccttaacaacattcaacaactcatacctacattccctcttccaaaaaccacacattccctcgcttcctcccgccctctgacccaaattactctgccgaattctctacttccaccctccgcccccaagaccctctctcgaacccctccccttctcccaccccatttccgtcccactgccactctacaacctcccaactcagtttccgcgccccggcttaatcccacctaacccttcccctcccctccaacaacctttcgtgcccaaaacccctaatctctgccgctttccacgtccccaacccccaactccacaagagctcccttgggaacacactccttcctccacacaccgtcct

SEQ ID NO: 276463 - DNA, 164 bp, Glycine max
taatgcaccccctatcaacaaacaagataacataaaattacaatggccagatacttatgtttgtaaagatggggcattacactctgtttgaacatatacttccaggcaagcatgtccaacagccacaagactttttccttagaatctgccacatcacacaaatt

SEQ ID NO: 276464 - DNA, 427 bp, Glycine max
agcttcatggtgaatcacgaatgattcatatatgttttgatgataaccaaagatgatgagcaaggtgatgacaaaaagcttaaagatcaatcaaagaacaactcaagtgaatcaagacccattcaagagttcaagataagaatcaagaagaattcaagactcaagaagaaagtttagagtccacaatccagattcaaggttcaagatctcaagaatccagattaagattcaagaatcaagagaaggcttaatcaagataagtatgaaaagtttttctcaaaaattgagtagcacatgattcttctcaaaaacatgttttaccaaagagtctttactctttggtaatccattaccagattgttgtaatcgattaccagttagcaaaattgttttgaaaaaattttcaaaattgaaatttacaccgttc

SEQ ID NO: 276465 - DNA, 423 bp, Glycine max
tctagtcgtccatagacctcctctgtggtacggtctagcaaacgttgcatctgtgcattcatcgcatccactaacagacgttgagcgccgtccaactgatggtactcgtcaccaccaccacctgcttcagccataattcaacaggaaaaaaaaaatgtgcaataaaaattattaaggtttcaggacctcacaacactctactcacgtctcttagatggtagtacactcgtgtttaatgctctcaataagcttttgtgtaatgtattccctcttgccttttaccactcgtgtttcctcttaagttcctggatggaccaaattagacacacaaggtaatataaaataaaaggaaagacaatataatgatcacaaacagatttgatttgggataacaacttggacttgattggataataatatatt

SEQ ID NO: 276466 - DNA, 1005 bp, Glycine max
  unsure (1)..(1005): unsure at all n locations
aacccaactaggaccactatcccttcactacctccccccccattataatacacgcatattcccccnncccccccgcccagggcctgatacctctacaccccccccatctatacacccacggtagcaagcatccctgcgccattgcgagagaataactctttaatcggacggctgaccgaccaccgcgggatactcccaaacctcgaaacaccaacgctaggagcgaacaacccatgcaaagcacaaacgcaccacaccctcgacgcccgcaacaacacatgcctcacacttaagaacgttgccagatgcatgtagacacctatgaacccacctccaaatcgcacaaacaagctccacccaagcaaaaacgaacagcccccggcacacaaaacggagaagcctcgaaaatcgcacacacccagactccccaccgcacatcgaccccaccagtaccacccttacgtccccaaggcagaactgaagccccccccttccatagtcccgaacgcaccaaacgtgagacgcccggagtctcctacacccaacagctcgcccaacgaccccaaaacttccgcccagagtcgccgatcacacaaccggaccaacacataacaaaacgcgcacaatcccacagcccaaaacgtcttagcacaaccccaaaacaagcgcttctctcctcctaccagcaaccccgaatcgcgcacctcgaacacacttcaacacccatcccgacacgaagagcgagcagacctccagtccaatcaaaacagaacattaccccttaaaacgtgggatcggcgcgcggacttccctccacacaatcccccaaccctccaacacggcaacctgtcttctccttacttccatccacccagaccactgtcaacctaacaccggcgcgacgactggagaccccggtatcccataccaaccccctcgacaatcaatgagcgaacgcttctcgcgaacatccacacccaacacaaaaccctcaccccacccccc

SEQ ID NO: 276467 - DNA, 273 bp, Glycine max
tacttaagctttatcctttggatctttaagtgtcgagtttggggaatttgatttatctcatccagcgccagtgttgcaacccacatactcacactgctttataaacatgaaggctgtcccagttttctaccaagttccggattgaagagttaattttgtgtagtttttgggactctgaactgtttttgtgagccaccttgatgtcaccctaacatcaagtgttggacctcactgtgtaaagttgatctctttgttagaaaagcacctctggtg

SEQ ID NO: 276468 - DNA, 1023 bp, Glycine max
  unsure (1)..(1023): unsure at all n locations
aactcaccactcgattgggcgtatgacttttctataccctnattaacanatctcctntttctccgccaagctcttgtacttcatactatcctctcccnnnntcacnccagccgcacgaccccttggttgaacatccttcgtacaccgccgcgcactctcatacagcaccacccgcagcgcatgccagccttgaatcggacaacgcagcgaacagttcttttcttttgaaaccctcacgagcatgcgcgggtcaacaacgaactcaccgacacacgatttcgaaccaatccgacatcgcgagagaacacatcctcccactacccccttcctaatcaacattcgcctgccaaacacagatcccctcacacctatagacctccttcgaaccacacaccccgcgggaaaaccaacataaactgaattcgccccgcaccctccaccaaatccaacgctacccccccatacacaccctgaggccaacacgcgacatccctgcacgaaaactctgcagccctcggagacacggaaaaactcccgccgccaaacaccccacccacccccaacataaccccacccccgcccggcaaactatcgcggaacaaccaacgcccaccatccacactctcacacagcccgcctcctctcaaactgcacccaccacgcaccaacaacagaaccacaatcttctccgacgctggccacacaccaccgcacaccttcaaacatcatgcctccccacccccacccatccaccgtcacgacaacctttacacacaaaatacccctaccgagcccctaatcgcacaaatactcccgtacaccataccaccctcgcgacccccctctcccaccactacccgatccccccacccctctcacccagaaccctccccccccccccgcctaaccacacccccgcctatacacaccacacacacctccctcttcacaaacaccgcccaccccctcaccacccatgtcaccagaccctctccacccgcgcgcacatcctcacacccaccg

SEQ ID NO: 276469 - DNA, 210 bp, Glycine max
ataccctagcgtcttatttagcgccacgctcggacttccgcgtgagaagctcttgccatattcatatagccatagctttcgacgcggaatttctagcggggcgctttattagtcgcgaggctcggaattgaacgtcggatgctcttgccatattcatatggccatagcttttcccgctgatgtccgaacctcgcttattatatattcgcc

SEQ ID NO: 276470 - DNA, 366 bp, Glycine max
acctcgagctatcacaagacacgcttactcatttagtgctaactcctctaccgccacattctagtccttttaagaactattataactgatcgaatcaaacacggcctcttaatgagcccattatatactatatgcatgaagaggaaaagatgaagccagaaacgactgaccgtgtttatattggaagcacctgccaagacaacggccccttaaaaacaattgaggacccctagaatgaagctgctcagggttccacacaaaaaaaacaaaatcaaggcgaccactgcttcttttgcagtaagcctggacacatgtcaataaaaaatgtattagatatcatgcttactgtgcaaagaaagggatgcc

SEQ ID NO: 276471 - DNA, 383 bp, Glycine max
ataggcctcaacaacttcttatttttagaaagaaattcactcatatacctcccatgttttatggagagggttaccactactggaacaccccaatgcaaatttttattgaggcgattagacttacatatttgggaagccatataaatagggccttatatacccaccacagtagaaagaaccataatatatggaagcacctcacgtggaagcacaacaatagaccaacctagagaaagatggtctgaacaagatagaagacgagtataatataatttaaaagcccaaaacataattacatctgccctgtgaatggatgaaatatttcaggtttcaaattgaaacagtgctaaggaaatgtgggacacctttacaagtaacacatg

SEQ ID NO: 276472 - DNA, 1058 bp, Glycine max
  unsure (1)..(1058): unsure at all n locations
cagaccnnncccgagaccgttgaatgcaatcccctttttgtancacccttttcataaccctgaccctatctactactcaagcatgcagaaactgccatggagggagagcttaaactctccccatctgttctagaggtcatgcgatgaaggatgggaagatgatatgcccaaattacctctcgaaaactggttcagatgtaaaagtcgagcatatcccagggttacaacgggagaatgtgacgactctaatggaacaagaagcaggcttttaaagtttgaaggcttatcacacgaatttctgcgggtccaaggcaggttccagtcgaatatgcatactagcgcttgcaaaatgcccatttcagcgacttgggaaaaaagccttgtgactgcgctcgacactaagaacgaactgacccatatcgtccaaggagccctttttagggcaactatgggggtcgaagaaccccaaacctttgattccgtgggaatttcaggcgtggaaccctcgttttggaccaagctataaaattggaatntatcggaccttgtgccggggggacagtttggttcaacattcgcgtctttcaaaattacctttttcatccctaggaaacccctctgaatttctggggggtgggaaccacctcaaaacattttcgttcccggcgcccgaaaaccctcgcattcgggcgtaaaacacggtgggacactcgacctggggactgtatcggacataattcgcgccaaatctgtatcgactcgtaggtcgctttttcacaacatctggcgccctctatataatatatactgcgtggccgtaaataacagtgcgcacatcggatttctctgacgtcttcttgcgtacaacaacaacgtctctgtgtcctacgagtacacgccatctcgacacatgacttctctcgtactcacacaatcactcttctgacctngatctccctcacacatctttctcattccgccaccacatatgcgcacgcgctcacacgttcctctcncatactgtccgagtacgataatcgtcgtgtgcaccgccacct

SEQ ID NO: 276473 - DNA, 904 bp, Glycine max
  unsure (1)..(904): unsure at all n locations
atccctctcatgtacccgccctctctctcccctccgagttgtcatcctctcccatactatcanacactaattctttccccccccccggcccccgtgctttgttgacattccttcgccaaccccgcgatcatctacaccgacccgcggcatgcaagcttccgcttttaattgggagcatccattttttaattgcgacactctgccgggcatgcgaggaaaaaggcactgcccgccagaatctcccaacaccttccgttctgtcttcgaagcgcctccacctattacaggactcaaccggaccatccctgggtcaaattatcgcgcctacaacacgttcacaactacgggcctccaatacagaacggtccacaccccacccacaccaaccggacacccgaggggaaaatcaccgccggcccgatctcccccccgcgtctgccctcaacccgggacctcactgaacaccgccacaccccttagagcatcccggtcaaacccaccatccgcccaattggccccaaaacaaaccgttcaacccgcagccccccccaacactacgggaccccaaccgaccccccgcctcaagccaccagccttccacctaaccacaccgcccacctcttcttgtcacacccccaaacacaacccaccccatcccggccccgcacaacaaccctcccgccctccaacccccctccaagctcccccccccactgcgaccccccccatccttaccgcaaccctcccccaccccccggccacatcaccccactcccccttccccagacccccccctccacacgacccccccccccccacccgctgtccaccgccctcccgcccaaacctcgcccgcgtaatcaccaccccatccccacgcactcctccccccccctcccccccc

SEQ ID NO: 276474 - DNA, 879 bp, Glycine max
  unsure (1)..(879): unsure at all n locations
cagcgcccattggttcattggccttttgaaaaccctttgtaaatcgtgacactatgggatactcatgctctcacggatttgctatgacgaaaatcttttttctccgacgcccaagtgccctcttagctacactattactcaacatattgtgacttcgagctccaagctaatttcaaggacaggtcctttttatctggacgccccatgaggctagtcctttattgtgaaggctctcatagaaaactaaagtgggtcgcccatccccaggataaacaaatcttacgcccaagtccgaatgagtggcgaaacatattcaaacgctgtggattgagaactgacaatcctatcccgtgggaaccacttatgaattttagcccgatggtccagcgaatcctgtaattaatcagaaggcgacggacaggaaacggatcctcgttgccaatttcgaaggacaatacctttgtattttcttgagcaacggaaatccgtcatattttgggaagagttaatatttggaacttgaagggcatcaacagcctggtacggggttaccctttttatccgtatggcgcggggaatccgggaaaatgttttcagcttcgaactgtgggcggatatcttgagcgttccaatgtgcacacctttgatccgaggggccttggatgcgggaaaattccaaggtccaaatgcggaccgggcttcatccttttctccaccctatctttttccggggtcccacttgggcccctatattcgaagggcaaatctaaacgagccctatacatttctcctaccataattttgtgcggcgtcccatggactccacaatttgtaggcgctcaatcggnagtgaagtctttacatatttagaccctctct

SEQ ID NO: 276475 - DNA, 248 bp, Glycine max
  unsure (1)..(248): unsure at all n locations
agcttggtcacntnctttttcaccacatccagaatgattatgttgagtcgcccgctgtggctgcctcactggcttatcttcatcctctaaaagcatcccatgcatgccggtagatgggctaatactaggaatgtttgctaaagtccatctaatggctttcttgtgcttcttgagaactatcaacaacctctcgtcttgcttaccagcaagggaggcacagatgatcactggacaatttttcttgtcct

SEQ ID NO: 276476 - DNA, 848 bp, Glycine max
  unsure (1)..(848): unsure at all n locations
agcgnnccggcgtgatgctcattagcgacccttgaatcttaagcttcaaccttaaaccttatctctggtccgattgttgacaattggtcttatccagttaagaacgcggggtttaatacaatttcacctataaaggccactccaactttgcttggtgtactttggtcttccaatgctcaccttcccttcgagaccctttgatatgggtcactggcctctatgccctgtcccacggtacaggtaatggcatactttaattttctgggttaaacatttgacggctgcattctaacaagactatgtttttttatttgctccttcccctttcagtggcggaaaactctatggcccccgcgtcctttattgagcagcgtttacatatttaacgggccatcttattcaccgctcacttggtttgaccccggattctacactggtgaccacaagccacctgccggcgttttttatatttcgggcgacacggggaacaccctcctttaatagggcaatttaaggttttaattaatcaactatccctttatttctccctcttcccctcggaaacacttggtcggacctaccactatctcacttactaattccttaacttgcaagaatggcttcccccgcaaggagtccccccttgtctcctctgcacttgcgccttctcgccccccctctatttgggggcactatcatcgcggcgacttgctcccgtgttctatacgtccaaccttttctaacccttccttccaactgcgttgaataatcccttgtcaacaccatatttcgttccttataactccccactcttcgctctgtcgacctgaatctcacataccggctcg

SEQ ID NO: 276477 - DNA, 851 bp, Glycine max
  unsure (1)..(851): unsure at all n locations
tagccgccnnnnnccgcgcgttagacntcgtcgncccggccatcctctagagtggacacggtgcacgcaagctttataagcgcgggtctgggagacgcaagtcaagttgtcgcgacatacgaagatgatgctccgaggacaatggatttggcacgaccatgccctcccgactcccaggcgggaaaatggcgagggggaggaacgccccggcatttacgcaaagagcacaatgtaaacccctaccggcttaaaaacccctacagttgcgcccacgctcaacagctcatctctgaccgccaggctccgcaggccccccctgaccctcccaacaacaaccaccccacccgccaccgccaccccgcgccaccccccgcgccccaagcacgccggcggcccgcccacctccccgcgccacctgccacccccccgcccagccccaccccccccaccccctcccccccccccctgccccccccaaccccccccccccgcccgaccccctcaccatcccccccccccacctaccgcccccgccccgcctaccccacctcccccgccgaacccccccacagaacgcctctcccccctccccacgccacacctcacacacgtccccccaccccctaccctccccacctccaccgccgccgggcgcgccgcgtcccgccccccgcacctcgccccccctcccgccccccgcccacccatccccacccgcgcgtcgcccaccccccctctcgtcgcacccacccacccaaccccgccccgcaccccaccacaccccgacctccggcccccccccgcccccgccctaccatcccccccccccccatcaactccaccccgcgacc

SEQ ID NO: 276478 - DNA, 786 bp, Glycine max
  unsure (1)..(786): unsure at all n locations
agcncccccgcgtgaatcatgcatggcagcacgttagttttaaccgacccgtcacttaaaaacggataggaagatagtttttttttttacaacagagaaaaccaaaggggtgcaattggtgacattgacccattttctatggagaggttcaaatagttatcgccttcattaacttcacatgagcttttaatgccactagtataaaaccgtcgcactgggacaaaataggcctagcgcatacatttaacttcacataaaccaaccacttgtgaaccacatatgccaacctccttaagcaaacctcgcaagcgggaacttatgtcataaaaacaaaccctcgaacccacatatcttacggggaaatcctataaacatcacatgatcacccggatctagaattggtgaaaacgaacaaccccctccattctctttatagaaaaatcgtaagaacatctttttctccaaacaaattttctttaaaaaaagcatgttaaatttttccgatcttctcaacaaaaatgttgcaacctcctcaccttgcctgtccatatagaggtacaaaacaagaacggcccactccccaattatcacccattcctccactgaagaaacgcccacttctgtgcccctatactcggcgacctctccatgtgtgagatgccccacatgtttaccgggacaccccctcgaaccactttatcgacatttcctctaaacaaatcaagcattccccgtgcgctctcgctaacgcaccccacttgcgtcagtaatcatactcacccctcg

SEQ ID NO: 276479 - DNA, 461 bp, Glycine max
agctttgatccgcctctatattttccacaatttcattttctctccagataatgagcttctggggaagggtagatgggacagccccaactccatgaatccacttccttcctaatagcaagttaaaattagccttagactgtatcaccacgaaaagagttggtcgaactatactgcctacagcaacatctacttgaatggctcccaaagaatagtcagctttaccctcataattccaaagcacaatgttgtgggcagatagatcagtgtcatgtttcccgatcttgtagagcatagatcgaggcattaagttgacagccgctccttcatcaatgagcactttgttgattccaacattctcaactcttgctctgatgaaaagaggtttgagatgactttttatctgaaaatctggcttttcgaaaaaagctaatttgctcttcccccacacccattattcataa

SEQ ID NO: 276480 - DNA, 478 bp, Glycine max
tactgtcgtcaatatggatcatcatcaggtcttcacatatcatatcaattcatctcccaagtactctcttagctacactattcctaaacatttttgacttcgttatccattatcttttcatgttttgctccttatatatgtcatccaccattttaaaatcctatattgatttaaattttcaaaagattttagtttggtttaccaaacagcataatagaatagctagtgccaagtttaaaataatatgataatttcttttaatcgatgttgatatacttttaacaatttcttcttgtggcattctcttaggaatttaagctcaatccagctgccaaaaccttctctccatcttttgtgaatcccatgccagcaacttcggctgcaaacatggtatacataccaaatagctctcctccagtacctgttactattcaaccttgagttggattcaatacttttgcttctcggccatcaatgc

SEQ ID NO: 276481 - DNA, 925 bp, Glycine max
  unsure (1)..(925): unsure at all n locations
gcacacccgaccgacacaacctccaccttacgacacgaccaatacccaccacccccgacgcnaaccaccnntataacacgggcccggcgcgtatgaccccctggaccccacgcaaacaccgaacccacccgcggcagccaaaacaacggggaaaggaccgcacaaccgccttcttttaccgggaccacaccctaacaaggccgaaggcacccgcgaaacagggcggcaccccccaccccagggaaagggacccgagaccccaagcaagaacaggccgaagaaccagcagcccagaccacacacgcaaccgctcccagacgcaagaccaaaagaacctgccaacaaccgaacagccgaaggcaacaacaccatgaccactcaccgagagaaaccacaccaacccaacgggcgggacaaacccccacaccacccaagcccagaaaaccacacatataaacccccgcccacaacaggcgccaaaccgggtccccaaccgacaaaaaaacaccccctacgccaagggaaacccacaacgccccccccacgcagccaaccacgacccccccgcccacacccacgacaccccgcccaaaaccgcacgaccctaacacaccacaccaccaccgccaaccagacccaacccaccaccaaaccactccgccccaccgcaccaacccaccccacccccccgacccacgaccccaccccccaccaccccacacccaccagcgccgaccccacgcacgcgcgcaccccccgacccacacccccaccccccacgacccccacggccccaccacccccccccgccccaaaccggccaccccgccacccccaacccacaccccggcggccaccacgagcccgcacccacccaccggccaacccgcccgcccgcccccccccccgaagccacaccacaccg

SEQ ID NO: 276482 - DNA, 363 bp, Glycine max
tgaacggcatgaacacggcgccagggtcttcgtgtacgaccagctcgaactctgacaccgatggattatagcataaattcatgagatcattttaacgataacgtaacagaaaatcgaaatcgcacgttcgcaaaaaagcgtattaccagagataaacgcttatcttgggactccatttcatttcatcgctcaaagttagaatgccgtaacataacgttaaggctatttgagtatcctcccaattataaaataaatgcgtgcaccgatgctttatgttaatacgcttaaacagagacaacaaatgctggaaaagcgcacgtgagttcggtcccccacaatatacttgttaagagaacgatgaat

SEQ ID NO: 276483 - DNA, 474 bp, Glycine max
agctttaggcaaaatcaaacgataataactttttactcgtatgcccgattgtgtcccgtagtatatcgagacgctcaaaattcagaacagaagctcttagaaaaatcaatcgacaataactttttactcggttgtccgattgtgtccgtagtatatcgagaagcttgtaattcacaatagaggctctgagcgaaatcaaacgataataactttttactacgatgtgcgaatgtgtcccgtagtatatcgagacactcgaaattcaaaacacatgctttgagaaaataaaacgataataacattttactctgatgtccgattgtgtcccgtcccatatcgagacgctctaaacttcaaacataagcccttagaaaaatcaatcgacaataactttttactccgatgtccgatttcgtcccgtaatatatcgagatgcttgaacatcacaatacaggctctgagcaaaaccaaacg

SEQ ID NO: 276484 - DNA, 355 bp, Glycine max
tcaattctgaatttcgagcgtctcgatatactatgggacactttcggacgtctgagtaagaagttattgtcgttttgaatttgcatagagcttttgttttcaatttcgagcgtctcgatatattacgagagtcaatcggacctccgagtaaaaagttgttgttgttagaatttgctcaaaacttcttttctgaatttcgagcgtctcaatatactacgggacacaatcgcaaatcagagtaaaaagttattgtcatttgattttgctcagagcttctgttctgaatttcgtgcatctcgatatactacgggacacaatcggacattcgagtaaaaagttattgtcgttagatttt

SEQ ID NO: 276485 - DNA, 290 bp, Glycine max
ccccgggatcttagatcacctgcagcatgcagcttgatgatacattaatatacacttttgatgaccgggagatcagcatatatattatagattttatttattttgacgacgcatcagcatacacaacggggtgacaatacatactgatacaaaattccaacattaattccgttgactttgtaagttaataagcaaaacaccatatagcctattttgatgttataagtgagaggtgcgtgtgatttaggaaaatgattgcatttgatagttactctgtgttaaaagatttt

SEQ ID NO: 276486 - DNA, 387 bp, Glycine max
  unsure (1)..(387): unsure at all n locations
ttggagcttctctgatggactatgatatcttgacaatgtcacttgcaccaagtgatgaacatcaatctcaagtacagtttgccctagaaaggggactcccagcattgcttggtgtactaagcattcacaggctaacattcccttcaagatcatttgatatggtccattgctctagatgccttgtcccatggactgattatggtattactttaatcttttcacttaaacattaaatgtatgcattagaaaaaatatatttttttaatttcctacttccattctgagtgttggaaagttctaggtcccctgcgtcagttattgggatgctttatatatctaatgggcatttttatttagtgttaattggntttgacacggaatctaaca

SEQ ID NO: 276487 - DNA, 174 bp, Glycine max
ccccccccccccccccccccccccacgccccgccaaccccgccccacccaacccctccacccccccccacccccccccaccccccccccccacccccaccccccccgcccccccccacccccccgccgcacacccccacccacccacccccgaccccaccccccccccccccac

SEQ ID NO: 276488 - DNA, 371 bp, Glycine max
tttcattttcaacaacgtttatggaaaccatcttttcttgatcaataatttttgttgaagaccatcaatgacctcaattttcttgatcattaacgagtttttctcattgagagctttgactaagttcctcctttcttctaaactagccttgaactttatctccaacttagtataccttgttctccaatggcgaatagtagcagcaggcccatagagttaaacctcaatagaatccaaactattgttggacccaacatagtccatcatctcttaatcaaccttcgtaagcaagttatctatggtaataaactcaaaccccttgatatcaacattcagtagcgaagaagatcatgagttacaatcacatgatc

SEQ ID NO: 276489 - DNA, 447 bp, Glycine max
  unsure (1)..(447): unsure at all n locations
agcttagtctagaccttgcatctatagactacatatctacggnttgtttcttatggtattttaaaacattactgacattttgttttcatagagacaattttatagaagataaaatccagaaataaagtctgagggacacaccgcacaaactactatgtgctgagatttactttcttgagcttttcagctcattcaaagaacatatctacccacaaatatggtttgtgaagaattagggaataggaattctaataactcaatttgcctcctttacctcactagaaacaagaagatcatcattatcaatatttgtaaccttaatttagttttgtgatgaaccaactctcaacccaacctaaatgtctattcaagaggaacggagtcttcaagttgttaatgcccaacccaaaatgtaagcttgtcccaccatgcccctttgcgggccac

SEQ ID NO: 276490 - DNA, 425 bp, Glycine max
ttaaccgatcgtttaagccgttttctcgcctaataaatgatgaaatgaatttcaatcgattatttgggttgtaatctcgtttaatcactgttaaaacataatctaaccgatcgtttacgttgtaacctctgtttaaccaaaaaagggcgaaataataataaaataatcaaaatatctttaaataaaataataaaaaaaaatcgatcagacgtctttctttggaagtttccatgaatgaattgactaataaccaaggtgaaactaaggttaaaatcaactcacaaatcaagctttgtccgcaaaaatcactgaaaaccgctttaaggtccaacgccttaaaatggtcctccttgcttttatcggctaacatggaccatttcaaagcataaaatcaacatgtgactttaccgcatatgcgagaacta

SEQ ID NO: 276491 - DNA, 419 bp, Glycine max
agcttcctttggaattagggacaatggctcctcttatcttgttgaaagcttcctacattatttcttttttctttttaaaagagagggtaaaagacacaattttgctctccgtgaaagcattgatttatttggttgtatcttatctggattgattatttatgaaaagttaatgtatgcattcctaaatttacatactttatccttattgttgaatttacctattctttttcctatttcattcatatttttcttaaactaaacatctgtatttaaatttttcatgaatgaaacaggtgaaaaaatcatttcaaaattatgtggagaattgaattctcagtgtgttcttttcatctaacattttctatataatttttgtgattctttttataattcttttttgaggctgtcatttttcttat

SEQ ID NO: 276492 - DNA, 446 bp, Glycine max
tttgtcactccacccatatttggccttcacattaaccaaacttaacaccgccaccaatagcgtcaaggaattcttgcaccccagatacaaaggcttctttgaatcagtttgcaatgtatcatacatagaggcatgtgcttgctgaaaagactcttttccaagatcacgaatcatatcctctaagtgatctcccatttctacatcaaatggttcagattgagacaccctctgcatgtctgtcaattcaccatgccatatcgatgtcgtgtaattcttcttaatcccatcacacaacaaatgctcccgtaagccgtccagtatttgtcatcttccgtttaaacaattgatgcaaggacaaaaaaatttttcatccttattcggtcgacttttttcagaagcaaaatgcaagaactgatcaatgccttcctcatatgcagggctcatgc

SEQ ID NO: 276493 - DNA, 1123 bp, Glycine max
  unsure (1)..(1123): unsure at all n locations
tcccaccctctctccantccttctctantcctatctctccatctacttctccannatccttacttatccacttacccacctnccccccccgccgccgcccctttttgactccctctagcgccccgcggcacctctacactcaccctgccgcgcatgcaacacttgcgtcgcggggctgatatggacgcttcatctttcaccatatacgatgacttccaatggggatgctccacacggagaagccccctagacaccagagcggacgcgacacgtagctccatccaccaagcaataacccattgaagacagagctctcccaccaccacgagacttagatcacaccccccgaatgacgcttttcggcaggcgcacaataacggacacaaatacacaaacgcgggagcatcaacaatgcccgtcttatactggcagacaaaggagaaattttacctcgtccccacaacaccctcgattcctgagacacatcggcagtcacacacgtctctattaatttacagagacccatccccgcgaacataccaatcaaacaacactccttctccaccaagcagatccgcagatctccttcccttcnatcgcgcaaaaaagctcaacccttcaccactacccccttcctccttatcgctcaagcatccacactttccttcgacgaaccttcttcttgtacactaaacaatatactacaaaacaagcgcgcgccgcgtcgtgtctctctctctgtcacctcctcacacatacagaccacacgtctcacgccttcccttcggaccacacgataaaagtcttaccacaactctacctttcaccctcaccaccgcttgacgaccatagctccaaggcctccacctccacctcgtgaccacgaacacaacatcgtaagtnactacaccacaacacacaacgctccctctctctaaccacccgagaccactctcgaacgacggctccccgcgaactacacacgcggttctaaacaacactcaactctacatcttagatagtggtacacatatatcccagcggcgccacacacacgcgggggaatacaccctattctctcacatccattctactcacataccacacacgacnggcgcttccg

SEQ ID NO: 276494 - DNA, 380 bp, Glycine max
tggagaggtttcttccattggtagagttcacttataataacagttttcactctaccattggcatgactccctatgaagctttgtatggtataaggtgtaggacacccctatgttggttagagcacggaaaaggcctcaccttacgaccagaagtggtacagtaaaccacttagaaagctaagctaatttaggaaaggatgagaactggtcagagtacgcagaaaagttatcatgataagaggaagaaagatctggaattcgacggtggtgatcatgtattcttgatagtcactccatggactggggttgggcgagcattgaaattccgaaaacttacacctcgcttaattggtcctttcctaaatcttaataaagttggc

SEQ ID NO: 276495 - DNA, 897 bp, Glycine max
  unsure (1)..(897): unsure at all n locations
cccgccgcgcccctcctcacctctaacccctctccctnnaccngnttaacatttatttttccaaactccccccaggcgcgcgggcnttgatgactcctttaacacccgggaattggaaaagttccgcgcgcagcaactagagggaatgaacagagaccgggcttttataaccacacagcactcattctgtctagggggacttttcaggaaaggaaaaagacggaaaaaccccatagaaaagcgccacacaaagcatccataaggcaccagacacaaaacaaaaacgatgggtgataaagaagagacacaagaacagctgaaagcacgactggcgggtctgaaaaaacagaagggcatcaagatgggacgaaatgaaaggaacgaggcacctcatggagaaatacgaggccaccgctggcgatgttcgggaagctgccgaagaaaaccaaaaacttaggctaacaaacaacaggcgtccacaacctaacaagatggggaagggaaaaaccggggggagaaggcacccgcgcaaaggggttcaaacaatcgcctagcgatatggatagacgagggctactaaccgcgaaaaaaacaagacaaagcgggggcgaatggttccgccggccctgaaaaaaagcctccttaaaggccggaagaagtgccaaaagaaactaacgaaaaggctccaaagaagggcaggaccaaccccccaaccctgacagggcgcgacacaaaaaacgggccttaacccacacacgcgaaccactcaaatagctcggccccgccgagacgccccccgcacccggagaaaggaaaaaactccccccctcgaagaaaaaacgaaaccccggaccgcactgggcactcaaccgcccgcacaccgcccccaacgcctcg

SEQ ID NO: 276496 - DNA, 819 bp, Glycine max
cctcggtaaagacaatgagcagccttcgtttaccgatggatcttttcgaaaattgggcgtgccactttacaagacaatggtcctgatctgaccgatggggatactttgtagacagaaccgctttgaattgtgcctattaaaactctcctttattgaaacctttctggaaaaaagcttttttaatgaaagctttctagaagaaaagcttcattgagcctgccttggtaaaaaaccctgtcaggcctttggtaacccgtggatgttcccaaatttggttgcactttccagacccttgccctgactgaccgtggaacttgaaaaacgttgaggggctataacatccttaccaaagcatccttatttagccttcccccttggtttggggacctgggaaaaccaaccccattctttttttttcacaaccacttcgaaaaatccaaaaaactttttcattactccccacccccattttgcccccccaaaaatcatttgtttcccttgaaaacccccccccggaggacccctttcccccgaggcgggaatcttccaatcttgggttggctttcccggaaaaaaaaaaaaccctatcgcacttttcgttgtttttgagcaacccggggcaatacttgggcttggggcaaaacaataccgctttacttatttttcggctttacaaccccaaaacccgtggattgcctcccttcaaaaccctctaaaaaaaaatctttcacaccctcacttctttaaacgcggtttttttgttaatcttttcagccccgccccctttgggggggggtgtatataacacaaccctcttat

SEQ ID NO: 276497 - DNA, 894 bp, Glycine max
  unsure (1)..(894): unsure at all n locations
ccctcagccaaccactttcctctccctcctcctcctcttntcccacatttnttcccctttacagcggccggcccntgtggaacccttcaaaccccgggaccttaagaccacccgcggcatcaattttatgcaacacgggaaccggacctttgttattggagaaaactgactacatctgcgacggttacccttacagacgagacggtcaaccacgacatatctgctccccgcgaaagcattgcgacactttgcgggatccctatcggagtggctgaattacccaaagatgccgtatgccaatacccactttacatactctatccccatcggcgaatctacccatgctgaaaccgcatcccgtcagattcatctcaaacctacactacgcaataacaatgttcacgagtgaagcaggggaatcaaagattttcaagacaatgaggagaaacggatcctcaaggggctccaaacgtccaacaccgacgaaaccccggagagaagcctcctatgattcgctcccgacgcaagcaattcttccccccgagaacccctgggcacccaccacaacacccgcgacactttaaaccctgacacctttatctcaattgacccccagccactcaccttcgcaactccaacaccttcccaggcgcaacgatcccaccctcgccagtctcgcgcgcgcaacaccgaaactggcccggccgctacactcacacccacgccccgcgcactcttccccatcccgactgctgcccacggcccccaaattatcgcccctccacatctcggccaccgccgctccctcccccaccccacatcctcgccccacacccctccgccgcgcccccacctctcttccccaccccgcccctccccccccccgccacaccc

SEQ ID NO: 276498 - DNA, 256 bp, Glycine max
gtgaaactttctgctcttattgttgaccacacagtggtaccttgtaatatgtctcgggggtcatgagaccttggggacgtcacgtggggtgctattgggcaaaaccaagcttgaccaatctccttccaacctcggcatagtcaggcactgagaacctgtgatgtacctaagcaagcgagctcctgtgagtcaccacatgaaaggaacccagaccaccaagcacggaggcttgtggtggctggccacctgtgaattt

SEQ ID NO: 276499 - DNA, 406 bp, Glycine max
agcttctgccactcactgttctaaattgagcctctacaacatgtcatgcgcagtgccaaaatcctttgtaaatatctcctatctagtcacactacatgttataagttagggcttgaatggttcttttccaaaagatatcttgcaaatatcaacgttgaagatgcttgacttctcagacaaacaagatcttgggggttctttgccaaacttcccacaacatggttctcttcatgacctgaatcttagctatacaaatttctcaggagagcttgcaagtgcaatttccaatttgaagcaggtatttgcaattgatctatcttactgccaaattaatggtacaccttctaattcattctcagaactcatccaacttgcttatctagacttgtcttacaataactttaca

SEQ ID NO: 276500 - DNA, 301 bp, Glycine max
agcttctcgatatattatgcgcctgaatcggatttacatttgaaaagttatgaccatttgaagttctcgagagcttccgttgttacatttcgagcatatccatatattatgcgcatgaatcggactttcaggcgataagccttgaccctatgaatttctcaagagctttcgatgataaattttgagagtctcgatatattatgagcctgaatagctgtaccgcgtgaaaagttatgacagtgtgagaccctcgagagatctcgttgtataattgagagagactaagtatattaagcgccgg

SEQ ID NO: 276501 - DNA, 450 bp, Glycine max
  unsure (1)..(450): unsure at all n locations
agcttcttataagctngaaccttttatcaataaacacaagttgagttttattcagaaaattagagtttatctcttttatcttagtgagagtgattctcctaaattcttgagtgattcaagaacaccctggctgtatcaaaggactttcacaacctttgtgtgttgcccttgcaggaaagagtgattgtttccttcctttcatcttcacccttgttatntgaaaccacaattccagaaaatccacctctgcccagaattatctcgtggccataactcctgttttacgcactcaaattaagtgattcttgagcctaaattgaatttcaaaacaagaccttttcacctcgttttagaatcacctcatttggagccctgtagcttcagttattgccatttctatatttctgtccagccaccacttaacctacgttttaccatcccactcatcca

SEQ ID NO: 276502 - DNA, 424 bp, Glycine max
gacccactaacctataattaatataacttaatgtcattaaccttgggaattaaaaaaaaaacttaatggctgagtgtaactaaaattgtggcaaccaaaagtcacccccaacagccaacaagtcagccaccatttggtctcccaaaaggctgatgcctaggttgccaattgggcccttattacaacttgaactaaacctactaaaaagcccttttagttgattaacccaaaacatatttttggtcagccaactttacaaggattgggccattatttaaacaaactaaacactctaaaattgagacaaagtggtgtcatttagtccttctccatttgggccatgatacaactcacaaccttggacttttctccttgaaactcgggcttgtattcaaatagtatggacaacactcgttgaagagct

SEQ ID NO: 276503 - DNA, 442 bp, Glycine max
  unsure (1)..(442): unsure at all n locations
agctcgtagctgatggatgctgctgaggtaaaaaaattcaacagataacctctntcttaattctttctaagcttctcattatattattcaacatttctattaagtctcttgacatggtaacttacagaagcttaagatataatttcttgggtgttcatctggcaatgaataccttatgttatttttagtagtgataaattcctaattatatatgacagcttaattataagggtttttatatttacatgcatcactatgaatgcctacgttattttgattcactttttgaatttattttgatgttttttctctcaattataaatatctcatgcatttaatttattctcgtaatcaaataactaggtggttttcttatcttatcattaaaacttaaaaggaatgctttcgaatatgattaatagaaccgttcttctttatttgt

SEQ ID NO: 276504 - DNA, 310 bp, Glycine max
aatgagaaacatcaccttgggtgcgagtactgcatcatcatgatggaacattaatcacaattttcattttataattatctcaagagtaaaatacaatccaataaaatttatcatcggcaaaaggatcacaggtgatgagcatctaacgaaaatcatacactacaagaacgaaaagaacacttttcttacgataaattcttccttacttaatcatcaactacgaaaataccaaaatgctacttaacacagaaacacgtaaatctcataaaacaactaatctgtcaaacaccatcaatccgcgattaaaaca

SEQ ID NO: 276505 - DNA, 302 bp, Glycine max
gctgaagacacctattgcgcttagcgctctggtctcttgcttagctctcggccttgatattcacgccctgccagattctccttcgtgctaagcgcgatgtgtagaaacaagcttcatgatgatgaatcaagttgattcatgtagttttgatgatgacatagatgatgacataatgcccaagagaatgattttaagattgagtctacaagttcaagatctagtttaatttcatgttctatgagaagaaatcaagaagattctagaatcaagagaaatttgatttcgagattctagagaagatg

SEQ ID NO: 276506 - DNA, 429 bp, Glycine max
actaagcttctaaagaagccacgagaaagcttcttggggaagcctcttaatgaagcttctcaaggaagctacatgaagctttctcggtaaaaacgctgtccagccttctttaaccgttggatcttctcgaaatttggtctggagctttagagaacacttttccacaatttgaccgttgggatctttgacaaaacatctggagtgtgcacaacgcttctgtttccgagagcattagtcacttgtgcgttttgagccttggagtccaagtagctttggaaaaacactatttcttctccttctttcttccaaagccatttttaacgtcccaagctctttctccatcacccacagccaccagtagccaccacaaaccgccattgttctccgttgaaaccccacatcgagaggaacccttcaaccgaagcggaa

SEQ ID NO: 276507 - DNA, 434 bp, Glycine max
  unsure (1)..(434): unsure at all n locations
agcttgcttctacaatgaggaattcagacctaagtagntttttaagtatgaatgtttgtgtgttaaattgatttttatgtttntgaaagattcattttaatagcgaacaaaaagtcgtttaaggcattggaccttgaaacgatgttttaaatattgaaaagcagagagaatctttaaggcattggaccttaaaacaatcttttaaatttgaaaagcagagagaatcattaaggcgttggaccttgaaatgatctcaagttatatttgataaaaacaaattagttatgagttggttttatcttggttttgtttattaactttcaatctctttaaagacgactttacaacactagtgatcggttaagattgaactttacaaagaaaaacgagatcaccaatgaaagatggagaagatggatgtgcacataataata

SEQ ID NO: 276508 - DNA, 440 bp, Glycine max
  unsure (1)..(440): unsure at all n locations
agctntgcgagattcctcacggaaaacgttactgaaacgtttcggaagcgcctcggcttagattttcttcacggaaacaatttttccaagcaaattcgaaagagagagaagtgcctaaggggctggacacttccttcttgctttcctcccctatttatagcaaaataggggaggtggttgccgcccagctcgcccaggcgagctcagctcgcccaggcgagcagggttgcttcctccagaagcaaccgccttctggaggaatcttctggagggcccaaatgggcctgggtgctatttgcacccccattnttactaagtacacccccctctgctattttttggtgattcntttatcgtaaagttacggaaacttacgaatttcgtaacgatacttgttttctttccgtaatgttacggaaccttgcggattacataatcat

SEQ ID NO: 276509 - DNA, 360 bp, Glycine max
  unsure (1)..(360): unsure at all n locations
cgtaactggttgaagatcgatgaacgatgtttaacgaatgaagaatagcgaagaatgatgaagaacatccacagaatggatcacaaaaacatcatggaagcgttacagaagcgcctcggcttggatatatctcttctgtcttctttttctgactaattttaagtgaaaactgaatatccaatgtgctgaaccccttcccctcantccctaaagtcattgtctagcaaaaatgagggagatggttgcccgcccaccctgccaggcgagctaggtacttcccacctgaagcaaccttcctcttgaatgtttcaaatggcgccaggactagatactctcgccctgattgatcacttcaccccc

SEQ ID NO: 276510 - DNA, 366 bp, Glycine max
  unsure (1)..(366): unsure at all n locations
agctntctagcctttcattggtgtatattgatctccttttggtgctctaaattgtgggaatgtgctcaaatatgtggggcaattttggtttgttttcttgcttgattgngttggattgggggtttgtatgggatggccctaggcctataatgcattttgaaacaatgggacatgccacattgtccccgttctcttgctattgatacctaaacgcgcgcacaccaagtgttcggtgaaatgcctcaatggcattagcgcgtgactttgtaaggaaacaacccatggggcattttggattgtacatatcttctattctttggcgacatgcattcattcccgaacaggctttactatttccccacatat

SEQ ID NO: 276511 - DNA, 427 bp, Glycine max
tactaagcttgacaaaaattaggaaggatcatcaaccaaaacctcacaatcattgtttcactcaagctcaagtgtttaggcttattccatcataaacaaccaacacaagttccaacctttgcatttcatctcatatcatacagcaatgaacatacaaaattgaatccgaaggactttctaggcttgtaatggggttaggctgccaacaaatcatgtttttttaagattgaaaagcttatgttctaggagagcattcatccatagaataaccttcactttttttcattcattcctaacccatactcgccctttatttaggcacttagctttcattattgtgtagcatacacacttattcattttatttgtacttacagttttttctaacacagaaaacattatatacatatacagtgtgtgtatacta

SEQ ID NO: 276512 - DNA, 556 bp, Glycine max
  unsure (1)..(556): unsure at all n locations
ctactatcacaattcatatattantgtaaagtgttcctttacttattgacatttctagtctacggcgagtgaaccatgagaccttgacaccagagcacagaagcatgcacgtgctaaaaccgtatagcgctactatctgactctgactataccagccgggacatcaccgctgcctatgctaactcgtctaagcgcgacgggtagaaacacgctatgtgatgatcaatcacggtgatgcacgcctntttgatgactgacctaaatgatcacaaaacgtcctatataatgattacaagattgagttcgcatgcttcaagatccagttgaatgtctagtggttgagaataaatcacgactatccaagaatcgtgatataactcgactccgagatgcaccagaccatgcattcaagagtctcgcagagaaatgaaccatacttgacatcggagtgcttgaggagactcttcaataatcacatctctgtgcatcttggttattagacgacgtntctccaactttctacattaccacatatacactctctcgtcatgaaccc

SEQ ID NO: 276513 - DNA, 536 bp, Glycine max
  unsure (1)..(536): unsure at all n locations
tataaacctannnccgccnnnnnnnnnnnnngggagcgggcgcatttaaacgtatttaacancntattacgtgcgagtatagacntactaaanaatnnacgagaaatcttcttgtggaagaatctacttatatcttctcatagacgcctcacgaagcgctttcggacacataccctgctcaactcctccctagccgtcggatcttctctaacaattggcctggagctccagagaacactggtccactacttgaccgtcgggatctctgacaaaactactggtcgctttaccacctctctcgtttatacatacatttttcactatttcaatcggcgccgtgtaggacacgcacctcctcctaacactctctgtttcctccttctctctgccacggccatctcttacggccaatctctttttccatactcacagccccagcatcccccctaaccctcatgtactccgttcacccccttctagagcaccctctaccgtattgaatctttcaactgcttgcttcttcgcggcacacaccg

SEQ ID NO: 276514 - DNA, 444 bp, Glycine max
agcttatgcggcaaacatctacaatagacctcctcaacctcagcagcagaatcagccacaacagaacaattatgacctctccaacaacaggtacaatctcgggtggaggaatcatgccaaacagcatcaacaacaatcttattttcaaaatgctattgccccaagcagaccatacattcctccaccaatccagcaacaacaacagcaacagccccagaaacagcagacagttgacgctccttcgcaaccttcccttgaagaacttgtgaggcaaatgactatgcaaaacatgcagtttcaacaagagaccagagcctccattcagagcttaactaatcagatgggacaattggctacacagttaaatcaacaacagtcccagaattctaatagattaccttctcaatctgtccagaatcccgataatgtgagtgccatacattg

SEQ ID NO: 276515 - DNA, 405 bp, Glycine max
  unsure (1)..(405): unsure at all n locations
agctnggatgactatcttacaggagtccttatggcttgccaatntcacttggtgctgtagagcggcaacactcgctggaaaagtaataaaggactgatatttcagaacatcgtccctcacccattcaaagctagcaacggcagggggatcgatggtgacccagcactatggctatgccacacacgaggggatgacctaacatccccgccacaacttttccttgctccctaaaatagaaggggggataatcatggtgaccagaataggatccctaactggggaagcagcggaaggcttcgctctcccatagaggcaagaagtgtctctactatgaagaggacttgttatcaaaagccctacaatgattctccttcaaggaggaattgccgatggagatgacctttt

SEQ ID NO: 276516 - DNA, 304 bp, Glycine max
aagcttcaccaagctccccatctgctgcttcgatttgaggcctatgttatcttgattcggtccctccactgcggctccacaaccccatttcccaaagtaaggtctcgggagctaggaactgcctcctgctgatggatggggctagaacgcccatcatactgcatctgaacattgaagttagaatggtcatctggctgccggctgtactagtcatcagaaaccagcactaccattggctgaactgatttcccatccaaacttgaattcacccgatgccgaggcaaatcgtcatcctccaatctcg

SEQ ID NO: 276517 - DNA, 443 bp, Glycine max
  unsure (1)..(443): unsure at all n locations
agctngtagggttaaagtctcacaattgtcacgtgctcatgncaaaaatgttagtcgtggctatacgagacatcttgccaaacaaagtcaggttagccataactcgcctgtgctttttcttccatgctatatgtagcaaagtcattgatcctgtcaagtttgatgagctggaaaatgaggccgcaattatactatgccagttggagatgtattttccccctgctttctttgacatcatgattctcttgattgtgcatctggtcagagaaatcaaatgttgtggtcctgtttatctacggtggatgtacccagttgagcgattcatgaagatcttaaaaggatatacaaagaatctatatcatccagaagcatctattgttgagaggtacattgcagaaaaagccattgtaatttgttcagaatacattcagaaggctaaacat

SEQ ID NO: 276518 - DNA, 460 bp, Glycine max
  unsure (1)..(460): unsure at all n locations
agcttagagtnttcttgtagagaaacagcatcttacttgagttctanggtctaagttacaacccaatattaacctttacgatgcaacaaattcgtcataaaacatacgattagtggtgaatccaggaaatttttctattgaagacaaataaataatttataatattttcataaaaaaagcgttaaatgtttttacaaatatgagaaaaaaatacttagatttctagaaattacaataattctctatatatttcaaatttttaaaaaaaattatgattttttattgtcaacattataaagataatagaatagtaaaatgataaaattattatgaattgattctctcctttatctttataacttttatgttaattcattntaaaatttgtcttatgggttaaaaccaattctntattgcggcaaaaataaaatatattgaatatactcaaatataaaaaatt

SEQ ID NO: 276519 - DNA, 436 bp, Glycine max
  unsure (1)..(436): unsure at all n locations
agcttggagaggatgcttcaatggagganaagatagagggagagaaagagagaggggggagcacgaaattgaaggaataaaagaggtatagaagtggaactttgaagtatgtctcacaagactctcattcatcaaagttacaacaagtgttacacatgcttctatttatagactaggtagcttccttgagaagctntcttgagagaacttccttgagaagcttctttgagaaaacttccttgagaagctagagcttagctacacacacccctctcataactaagcttacctccttgagaagcttccttaagaagattcctaaagaagctagagcttagctacacatacatctctaatagctaagctcacctccatgagatgagaagctagagcttagctacacacctcctataatagctaagctcacccccatgac

SEQ ID NO: 276520 - DNA, 443 bp, Glycine max
ttacacatatactgtaatcgattaccagagtagattcttataatatattctcaacagtcacatctttttatgtggttcttgaatgactatcaaaggcctatatatatgtgacttgagacacgaatttgcgaagagtttttcagaacaaaaaggtcttatcctcttataaagaaaaatcggtttatcctcttacaaattccttggccaaattacttatgattcaataaggaattatttgagtgctcaaattgttcaatctatctctttcaagagagatttcttcttttcttcttcttcattctgaaaagggattaagagaccgagggtctcttgttgtgaaagaattctaaacacaaaggaagggttgtccttgtgtgtttagaacttgttaaaggaacttacaagatagtggaactctcaagcgggtctgcttgtgactgaac

SEQ ID NO: 276521 - DNA, 406 bp, Glycine max
  unsure (1)..(406): unsure at all n locations
catgtacccatacttgcacctgcattntaaacaatttgatcttcacgacaaccctttgctctaacacctccacctacttaacctccaccaccaccgncaactcaggactgaatatgatatccatcactatttctctcttcaaaaccatcattttttctcatgacaaaaggggaagaagatggaattttgattggtaagagccattcaattatgaataaaagtggttttgcagtaaatctaagtgttttctttatcttttattccgctaccatatattatatattgccacactttttatgctatgttaaactccaggggagtntaaatgcattacattcatattactctcttcaaaattgaatatatttacactaataaaatttatattgttcgcatcataaaaagg

SEQ ID NO: 276522 - DNA, 416 bp, Glycine max
  unsure (1)..(416): unsure at all n locations
aancttctgatgactgggaagcacgttattctgttgttttccagatctgttccttcgccaagtatgtgtatatgtgtatatctgtattatattcgttgttctggttgttgtttgtattttgttttgtgcagaggaaaaaagaagaagtagagatgagagtcgtcatcgcgaaaaaggcaggacagacgaaattagtgtcctatctttgctttcctcttatctccgatgagaggtaagtaaagaggggcaactgtcataccctaatttcgtccggngattattactggatgacatgcaatctttggttagccgctctgagatacttggtgtcctttgttgcacaataaatgaagtcccgagacgtctcataaatctaaaggaagcaggcttgcgcgatccgagaaattacgtaacgt

SEQ ID NO: 276523 - DNA, 345 bp, Glycine max
tgcttgaaaccatgccctactcctcatcctatgcttctgtgcatccacaccctgcagattacatatctgactccgcaccatatgaagctagaggtgctgcactctaatgggtcatactccttgggttgaatctttaagaacacccaattctttgaatatcaacttactctcgaccatgagcgcctcaccatcgcctccttataatggaggcacctgtgtaggctaggctctcgtggatggccgcaatggccaacttacctcatggtgtggactccttcaagcactcgagactcgcattgccacattaacgtatgaggatcacaccatatctctgttcaaactgat

SEQ ID NO: 276524 - DNA, 433 bp, Glycine max
gcttagatgatgcagctgagtttgtagctacctcatgcactcctctaatgactatagcatcatttctggcgctaaactgctgggagttggaagccatcttctcaattaaatttctggcttcagcaggagtcatgtctccaagggctccacaccactggcagcatttatcatacttctctccatattactgagtccttcataaaaatattggagaagcagctgctccgaaatttgatggtgagggcaactggcacatagttttttaaatctctcccagtattcatacaggctctctccactgagttgtctaataccttagatatccttcctgatggttgtggtcctggaagcagggaaaaaaatttctaagaatactctcttaaggtcatcccagctcatgatggaccttggagcaaggtaatacagtcagtcc

SEQ ID NO: 276525 - DNA, 433 bp, Glycine max
  unsure (1)..(433): unsure at all n locations
agctantagatataaatttcttccaaaatattgattataaaaanaacacaaaaatctaagtgtaaatcacttaatccatgttgtcttagagtcatgtttagtcataggaattgtcacattatgatctaagtttgtgttgaatttttattttgttgattgaattgtagatacattggttcatgtattcttgtcattcttagcctatcttttgaatattgagtctaattcatgcatgttatttatttcataacatgttctaaatcaattcctagaagtactcttgttgttgaactctctttttgcttttgttttctaagtttcctacatgatgcctatgatgaagttgagttgtggtgctgagttgtagttggatttgtgaatcaaataagtcttaagctctcttcaattatgttattcaagatagttgagcata

SEQ ID NO: 276526 - DNA, 470 bp, Glycine max
  unsure (1)..(470): unsure at all n locations
nagctgtctgagctttgnncngtacataaagtttaaagacnggnagnngggaatnnntnttaanggatcnaancggncctcaatttatgcannattgancatccggcggtggatgattgagaaagctgggccaaccaaaaaggatgaaattgaggaaggaacccatgttgtggttgcctttcgtacatggccaaacttcccaccagcccaacaatgtcatcgctcagccaataacatcccttctccttacccaccacccagttatccacaaaggtaatccttacataagcacagaaccgacctaccacacaaccaattctaacaccacctttgcacgatccaaacaccaaccaggacggatttgtacaaaaagccgtaaattaccccattctcggggctatgttactgctccctactactgatatgcaggtacctaacccgctagttttcacctcatttttcagatcacc

SEQ ID NO: 276527 - DNA, 453 bp, Glycine max
  unsure (1)..(453): unsure at all n locations
agcttgcanaatataaaggcaaaagtcaagagatttacatgaagtaaaatatgttgaggatgtagaagtcttgatttcaaaagaagatattaaggaatgaacttagcaactagcactaggctatttaatgaaggacataattttttgaaatttgataggcaaaacacgggatgagggactaataaaatgccaaatgagtaatgaaatattttttttgattctaattataaggaacaagagatgggatattctcaattgagcaattttttttggaggaggtgagctctcgaggcatattaaagcaatgtaatttgtggttccctgcctaaggcacggcagacaaaggcacccattcaagattggctttgataccatgtcagaaagtgagttatgagtctaagtcaatgccacaaagtcaacttataaggtgaggattactccccacttatatag

SEQ ID NO: 276528 - DNA, 239 bp, Glycine max
  unsure (1)..(239): unsure at all n locations
agcttgtccacaaaaaaaaagtcactataaaaggttnngaaagttatcatctcagttttccttatcaagtaaatggatcatttttaaggtccaccgccttaaaatgatcacctttcaagtaaaangaatcgctggattcacgcttaagaangaactacgtaggtttgatttcctcatcgatggagggtccgtaggaccaaaagccccgtttttgtccacctcaaaaaataaaaagaaat

SEQ ID NO: 276529 - DNA, 335 bp, Glycine max
  unsure (1)..(335): unsure at all n locations
tctattacacataaaactactcctacatctcatctttatcatgctttntctttctttacccactcctcacgtttggctttttagggataaacaccataactaaacgcgccgcatgggatccctatcgcaccagatccaaatctataacgatgggtgatcaagacgacacgcatgaacagatgaaagccgacatgtcggctctgaaagaacaaatggcctccatgatggaggccatgttaggcatgaagcagctcatggagaagaacgcggccactgccgacgctgtcagctaggctgtcgaagcatacccgactctcttggcaactacgcaccat

SEQ ID NO: 276530 - DNA, 430 bp, Glycine max
  unsure (1)..(430): unsure at all n locations
ccaaaatgaggatcccaaattgcatgagctataggtcttacatgtaaaggatcctgtacccatgcttcaaaattcccttgccaagctacatgaaacagattcccggaagtccacagaaaaattattgctaattgcccgaaatgagaagcaaaaatattctgataaagacgttcctcagtaatatcatcatgactttcgaagtcatgtgcggtagcaataccaaaccaaatacgacgagtagtggggtcttgagctaagccttgactaaaccttggaaatcttaatgccataatgattntcaaatcctcctagctattatcctactgcaataattcttgctaagaagaatgcccatgttgtggcaattccacctagaaagtaatgtgttactcctacagcacgtncttgtacaatgctcaaggctctatgg

SEQ ID NO: 276531 - DNA, 532 bp, Glycine max
  unsure (1)..(532): unsure at all n locations
nnaagacgcgncnnnnnnnnnnnnnnnnnggggnnnggggacgaccgttcannacctgcannnacanannnannnnnagattancgcataatattctataaattgagctgacatacgtctcggtcgtcattcggttcaaagaatctgcgctccagaaccgtacgtgagattttcatctcatacggctccttccttatgtgtgtaatgataaaaatacatataatcaaaaaagattgcagtattctcattattaactgaacagggctagtgtttttacaaaaaaatatctagccaacctttctgtaaaaaatgatttgctaacattaagtatgttggtactggataaaaaaaacagtaactccaacaatttatttgtcctcaacgctggttaatttcgcggaattagtcacctcaataatctccgatggttatatgggtatccaaaatatgaacgagatggatatttattgtnccaaccattcttgtttgccgcaatctcgataagacatggatatctatctctgtatatacg

SEQ ID NO: 276532 - DNA, 445 bp, Glycine max
  unsure (1)..(445): unsure at all n locations
attatggngtacccatcacatgtggtactaggtggcggtcgggcgatggtgcacaacaagtttttccacatccacaatgcgcgcataaacccaccatcccctgttgcccacctccagctgagctcacgtactcccacgtagcccatatcctcgtttctctcaacaccgggtccccatcaatcctcccaagcttccacaacatccaagcaaaacaacattcacacagcacaagctatcacagccaagcaaaacagagcaaaggcagaaaactctgccaaaacaccaaccaaaaatcacagcttttcccactcaaagaccccagtaacaatttccttcgatccaattcgttaaccgttggatcgactccaaaattntactggaagtctatagtgcataagcctacattttgaccgttgggatctactagcaaacatccagaactcat

SEQ ID NO: 276533 - DNA, 248 bp, Glycine max
gcttagatgatgcagctgagtttgtagatacctcatgcacttctgtaaagaggataatttaatcatcctgcctggacgaatgagaaaactggggcaaataaagatggtgacgatgagggagaacaccatgctgtgactgtcattcctatacagccaagtttcccaccaacccaacaatgtcattacttatccaataacaaacatcgtgtctacccaccacccagctatccacaaaggccatccctaaa

SEQ ID NO: 276534 - DNA, 425 bp, Glycine max
  unsure (1)..(425): unsure at all n locations
agcttcttcttttccatataaataggggaaggagggaagaacaaaaatgttcaaccttcctggtatctgagaatcacttaaaattagtgagaaaaattgtttccgtgaagaatatccaagccgaggcacttccgtaacgcttcagagacgtttccgtgagtgatttcgcgaagattttctgccgntcttcgacgntcttcgttcgttcttcatcgttcttcgggcttcaaccggtaagttcccgaaatcgaacttttcaattcattctatgtacccttagtggtcctcatttgtttcacgtgcttttatttttatgtaatttacttttcgtacccccttttgacgtgctatagtcatttatttaagtcattttctcgcctaatcagaaataaaataaatttccaccgatcattcgaggataacat

SEQ ID NO: 276535 - DNA, 435 bp, Glycine max
  unsure (1)..(435): unsure at all n locations
agcttggagaggatgcttcaatggaggaaaagatagagggagagaaagagagaggggggagcacgaaattgaaggaagaaaaaagggagagaagttgaactttgagttgtgtctcacaaaactctcattcatcaaagttacaacaagtgttacacatgtntctatttatagactaggtagcttccttgaaaagctttcttgagaaaacttccttgagaagcttctttgagaaaacttccttgagaagctagagcttagctacacacacccctctaataactaagctcacctccttgagaagcttccttgaaaagattcctaaagatgctagagcttagctacacacacctctctaatagctaaactcacctccttgagatgagaagcttctttgagaaaacttccttgagaagctagagcttagctacacacacc

SEQ ID NO: 276536 - DNA, 114 bp, Glycine max
ataatttcttctataataaactcacccctcgcaattcttgtaccgcgtggctggtacctgtgatgatcgctaacctttgttcgctagagcataatgaccacagttgtggacaag

SEQ ID NO: 276537 - DNA, 412 bp, Glycine max
  unsure (1)..(412): unsure at all n locations
accactatgtatttgtgtntactaagacagctttatattttggtattattgtaggtctagaagcttttattctttgctttgccgaactgatatctatgacccttcatttttatttcttgagcaaactaatgctcagactaggtactttaactaatgtttggtcttcttttctatgacagccacaaaatgttccaggaataggtgagttggctcttggtccgctcatgcttgtggcttcaaatacactgcttaatgctgaccattacggtgtctatttcaaaggaatgcctctcttgaatggaaaggtgggcataccattctcctttatntatgtgagaattgggtatctggggtacctgaaaatttacggttgagttcctctaatcaggtattacggaggcatgaagatgta

SEQ ID NO: 276538 - DNA, 457 bp, Glycine max
agcttcacgttgcttattgattccagattgctgcaaagaatgatagagatctgtatggtgatctgtaggagaacatagaccacagactcttgcaacaggtgtagatttcttattcatggaaagctgagttactaggttgaccaaggtatcaagttttccttcaagctttttattttcagtagatgaagatgaatttgtggccacctcatggactcctctaagaacaataacatcatttcttgcactgaattgttgggagttggaagccatcttctcaatcaaattcctagcctcagcaggggtcatatcaccaagagctccaccattgctagcatcaatcatactcctctccatgttgctaagtccctcataaaaatattgaagaaggagttgctcagaaatctggtggtgaggacagctcgcacacaatttcttgaatctttcccagtactcatac

SEQ ID NO: 276539 - DNA, 506 bp, Glycine max
  unsure (1)..(506): unsure at all n locations
agggganttnnnnnnnnnnnnttnnngnnngcacgtacagtagctnctcnntannananganannnnncnnnnnnnanaggtgtaattgcataaaataatttaaatgtgaccttattagacatacgagcatgacgtagatgcaagactatagactggaaaacacatcaaattgaacgttgcagattgcgagatatcgtaaaatgctctcatgaatatcgcgaaatcagaaatggatgcgcggccaatctttacagtccgtttagagctaaacatgggatttgctaagatacataactgacttaaacactgaatcgcattttatacgtaagtacatgacactctaatatctaaagaaactataaagggaagctcaatctatgataatggaataccctcacaaatcgtaattttaaaaaatatccaagaactctttattctagcgtgagtaatacactgatacttttccatcctaaaacaatcatgactacaaaatctcagaggtccg

SEQ ID NO: 276540 - DNA, 453 bp, Glycine max
  unsure (1)..(453): unsure at all n locations
agcttgaaaaattagttcgtcttttacaaaataataacatcatataaaaagtagagtaggttaatcagcacaatcaccaaatagcaaccgaagcagagaatgagtgagaggtaatctctttcagatataaataaaaaaaataaaaactacagtttatatcctttcaggttaagctacaatatgagaaaataaagactagttttccttagaggaaacaacaaataatcaatcttataatggagcaaataagttctctccattttgatttgttcaaaatatacactttattgtagcattttggtgtgcagacaganaagaattgaaaaaacagaacaaaatgaaatgattctgcttcatttggttcttggtatcaccatctntagtagaaccaaaatgtaccacttcttaacctcatgtctaataccattcggattttagaatgcataatacata

SEQ ID NO: 276541 - DNA, 451 bp, Glycine max
  unsure (1)..(451): unsure at all n locations
ctaagctnggtacaattctctcatcctatcctccaactcccatgtagaatcaccctcatcggttccccactgcaccttcaccaacgcgatctcctttcctttcaacgacttcattcttcggtcagtgatcttctgaggttgtgctttataggtgaggttatccttcacctgtacctcgtccactgcaagaatatgtgatggatccgggttgtaccgtctcagttgagagacatggaacacagggtgcaaattcgataaactcggaggtaaggcgatatgataagctacaggcccaatcttcttcaaaatctgatatggacctagatacttgggtgtcaacttcctagccttgagagctcttccaactncggttatgggagaaaccttcaaaaacacatgttcttcttcctgaaaatctagtgggttccaccttctatcataatagctcttc

SEQ ID NO: 276542 - DNA, 431 bp, Glycine max
gctttatctcagtagtagtataatgtgcttgatcatcatctcacgtcctataagcataatatatcaccctgcgcaatttatcaattttttgagcaaggacagcccccaatgcataatttgatgcatcacacataagctcaaaaggggctgtccaatcacgtgcctggatgatgggggtggtagtaaacgctcttttgaggcaatcaaaagcctctttgcatctgtcattaaagtcaaactccacctccttttgcaacaagttggacagtggaagggctactttgctaaaattccttacaaagcgcctgtagaatcctgcatgaccaagaaaagatcgcacctctcgcacacaatagggtgtaggcaattgcgaaataacacaactctttgcaggatctacttcaatacccttattggaaataatgtggcct

SEQ ID NO: 276543 - DNA, 355 bp, Glycine max
aagagcagtttccaacaaaaaaatggaagaggcagagaaagagatcttggaaacgtttagaaaagtagaggtaaacatacctctgttggatgcaataaagcaaattccaagatatgccaaattcttgaaggagctgtgcactaataagcggaagcttaaaggaagtgaacgaattagcatgggcagaaatgtcttcgcattgattggtcaatctgttcctcaaattcctgaaaaatgcaaagatccaggtacattcagcataccttgtattatagggaatagtaagtttgacaatgccatgctagatttatgagcctctgttagtgttatgcctctgtcgatttttaattctcta

SEQ ID NO: 276544 - DNA, 417 bp, Glycine max
  unsure (1)..(417): unsure at all n locations
tcacatgtggtactaggtggcttgtcttcgatggtgcacaacaagtttttcacatccacaaagcgcgcataaacccaccatcccctgttgcccacctccatctgagctcacgtactcccacgtagcccatatcctcggtgctctcaacaccgggtccccatcaattctctcaagcttgcacaacatccaagcaaaacaacattcaaacagcacaatctatcacagccaagataactgagcaaaggcagataactctgccaaaacaccaaccaaaatcacatgcttttctcacgtaaagaccacagtaacaattncttcgatccaattcgttaaccggtggatcgcctcaatattttactggaagtctatagtgtatatgccctgcatttgaccgtcggatatctagcaaacatacag

SEQ ID NO: 276545 - DNA, 441 bp, Glycine max
  unsure (1)..(441): unsure at all n locations
agctntntggagtagaaacatgggaccaactcattntatttaaaaagttataactagtcaagatctgagcgacaatacaaacttcctagcggtttctaatcatatggtccattaagtctatcatatgttgacaatagctgagaagtccgtggatcttcttgggggcggagtaggtgtccgccattgctttggccttggctagcaatcggggaagttcttgactcctgttcaaagtaagagcaaatcggtccatcctcattgttgcctcttggtgcaacgaatcaattaccctttcccttgcttcgctttctgctgatatcttggcgtactcatcctctagcctctgctcatgagtcgccgctagatttagcttctctttgcactcatcgatgacggcccacatattcccttcagtctcgcttaactgttgggacaaatttc

SEQ ID NO: 276546 - DNA, 450 bp, Glycine max
  unsure (1)..(450): unsure at all n locations
agcttgcctgcccgatgcagcagtaatgatggcccgagttatgttggggaatagttacgaacccggaatgggtttaggcaaagacaacggcagcataactagcctgataaatgctaaaggaaatcgggggaagtatgggttaggctataagcccactcaggcagatatcaagaaaagcatcgtgggaaggaagagcggtagtcaaagctcgcggttgagacatgaaggtaaaggtagcccaccctgccacataagtaggagctttataagcgcaggtctgggggacgaaggtcaagtggtcgcgatgtacgaagatgatgttccgagtacattggatttggtacgaccatgccctcctaatttccagctggngaaatggcgagtggaagaaacgcccggcatttacgcgatgaacataatgtaaacctctacggctttaacagctctata

SEQ ID NO: 276547 - DNA, 183 bp, Glycine max
tcatgttaattaggaagcatcgacaagaatcaagccaaggttattgtgcaatcaatcaatggggtataacacaccaaattattattatgatggacggctcaaattgtcacaaaggcaaactcatcacttgtaaattgagctttccaaactatcatgacgtgtataggagaatcaacgatttaa

SEQ ID NO: 276548 - DNA, 443 bp, Glycine max
  unsure (1)..(443): unsure at all n locations
agcttgngagaggtagcaagagatgattagaagttgtccacaccattgcattactcaacaaaggctggtcaatatcttttatggtggagtgtcctcacataataggatgagcatgaatgctgcttatgcggccaacctattgttaaagcctcatgctaatgccatcaatcattgaagacatgtgctctagcccctacaacaactcaggggatatgaggataatgaagagaggcatctatcgggcagagatagatgaatcccaaattgaattgggaaaacaaatgcaagctcaatcacttaagattgagatactcatgagagctcaagctcaagtccccattactacacctcaattcccaacctgtgataaatgtgaaattgtgcatgggctaagagaatgcactattaatgacaagctagttgcattcatggatgagatcaac

SEQ ID NO: 276549 - DNA, 445 bp, Glycine max
  unsure (1)..(445): unsure at all n locations
nttcgattcattctatgcacccatggtggtccacattgtgtttcgtgcatttttattctcgttttgtttactttttataccccctgttgacgtgcttaagccattttacttaagtcatttctcgcttaacttaaaaataaaatcaatttccaccgaacgtttgaattgtattatccgttaacttcggttaaaatgaattccgaccgttcggtcgtgccgtaaccacgttggaaatcaaaaagaggtaaaaaaataatataataatcaaaaaacatcttttagtaaaataaagcggaaaatcaatcggacgttttctctttgggatttctcattcttaatcgaattgattaataactaaagtgaaactaaggctaaaatcaactcgcctagtcaagctcgtccataaaaaataggtttttgaagttggtcatttcaatttctcact

SEQ ID NO: 276550 - DNA, 624 bp, Glycine max
  unsure (1)..(624): unsure at all n locations
cgcgcaactgacccatcactnanacaccngacaatangtcgaaacagtgaatcattcgagagnctcgataactgctctcacgtcaacacnaaggggnncacgggagngnattgaagccctttganancnccgctcgagnacccgaagatcctctccagtngatccgcaagcatgcaagcttgctagtagaccagagaatctggaatatatttgccatagactcaacactatgaaaagcgcgcatgaaaccagtctggatcccttatctgcatctatcgctgcacaaatcccataaataaagtgctccccctgcgagagagtacacaaaaagagttattatatagacaaaagtcagaactcggccgtcatacttcagtgaagtatattaaatggatttcaaatgcactgaactcgaactccatcaatagataccgccaacgatatgtactggaatcaaaaaaaattgagtgaaacgcactactgaacacctcaattcacgccaacaaatgactgatacactgctttgtacagatactgcaccccacctaagagtaaaagactctgaataatgtgtagctgtcgtccaagatacaaagaaacagtgtgcttcaaataacgtaaccg

SEQ ID NO: 276551 - DNA, 311 bp, Glycine max
  unsure (1)..(311): unsure at all n locations
ctattaaagatataattaatgttgntttttacggataaaaaaaatgatataatgaagttgatgttctgctttatcaaanctgatgtgatcctgagcttgagtgagtagaccacccataaacacaacgatgaaagttatcggcattctgtaggatgacagatatacgagcaccatgttctgactttgaccctgaacggaatcctattggctgactaactggatcattgaaatcttatatgataacttggttcatcccaatcaatatcacactcagtaaattaatcactgtcaaaacagtgcaatgatatcac

SEQ ID NO: 276552 - DNA, 414 bp, Glycine max
  unsure (1)..(414): unsure at all n locations
atntttctcaacatacttacaaatgaacgaatatatgataataatcaatctagtcgtgtgaataaatgaggtgcgacaagggggaagacagagaaacaatttcttgatatataacattgaattactatagggcggagtaaaagtttgacttaaagaataccatatcggatattcttgtcataacaagctggcggagctaactaatacacacctattacattgcgtatgtagaccctctattatacaatgaagcaccctattcctaggaacctattcagctgaaatcaaaaaaaaatgtgttgtgaggcttggtgctgagcattggtcacatgccctcaaatcacttaactaaaagatcgtccacatatactaaacatagcgctttatttatgtaactcacacaggttcgcgtcg

SEQ ID NO: 276553 - DNA, 192 bp, Glycine max
  unsure (1)..(192): unsure at all n locations
atcaacttnatgttctatncttcttgaacgatgctctccatgaggaatctccttgggagggacatcttgaaattcctgcaatattgcgtgaacactaggagaaacataaatagttaactgactagaattatcactctctctctcttgcgtatcactccatctctccttgtgtataactcatccttttctatt

SEQ ID NO: 276554 - DNA, 432 bp, Glycine max
agcttaccagtgccatattcactgcaacttgctggtatataagatacaaagaaaatcacatgcatttgcaaataaacgtgatgatattctaactggacaatgttctgtcatgcattccaatattccatgatctttgctattatttttagtgatatatttatatatatgagatatgtgagtttgcgtttatgttttgaagataaggagtatggaccaagaactgtaaaagatttgaagttaattagtgccggataaatattggagaacaacagaacagtgggagaatgtcagagtcccctgtgtgatctacctggtggagttataacaatgcatgtggttgtgcaaccaccttctgtgtgagaagggttagtattactatatactcgtttatttataggcatgccacacagtctgtttactcgtatatacagc

SEQ ID NO: 276555 - DNA, 413 bp, Glycine max
gctatccagagaagtacatgtaggagaaacaataaaaaataatgaaagcagctccataagttaaaactaatttatacataaattaatttataaaatttctctgtcatatatttttctaaaaaatgagagaacttctataaattaatccgtgtataagttaatttgagcttatagaaaaatttgttttatttcttcttctcctaaagtgattctagataagcttactgaaacaattcctaaagtcatagctagtataaaactatattgttgttacaataatagttaataattatatcataaaatataaagttttaattttactctaaaattagtaaatagttcttggaaactattatttatctagatatctaaataatcataaagaacagagtcaaaacaaagtttcaacccct

SEQ ID NO: 276556 - DNA, 455 bp, Glycine max
agcttccttaagaagattcctaaagaagatggagcttagctacacatacatctctaatagctaagctcacctccttgagatgagaagctagagcttagctacacaccccctataatagctaagctcacccccatgacaaaaaacatgaaaatacaaaaaaaaaagtccttactacaaagactactcaaaatgccccgaaatacaaggctaaaaccctatactactagaatggccaaaatacaaggcccaaacgaagaaaaaacctattctaatatttacaaagataagcgggctcatgcttagcccatgggctcaaaatctaccctaaggttcatgagaaccctagggccttcgcttggatctctagcccaatctacttggagtcttctacccaatgcccttgtgggataggattgcatcaggtggacccttgtgtactagcaccctctccttca

SEQ ID NO: 276557 - DNA, 265 bp, Glycine max
aatcaatatgagtagaactcgcctcttatggaaaatacaggtgatttggtataaaaaaacactaattgactctcaatatattatctctagaaaagcaatataattactatatatatttgataaatattgtttaagactctcattcctaaaaacctaatttagttttcaacaaaaaaaataataatttagtgagaataaaaaatatcctaatattagtggcaccttaaataaaaataccattcatccctttgatttaattataaat

SEQ ID NO: 276558 - DNA, 434 bp, Glycine max
  unsure (1)..(434): unsure at all n locations
agcttgctctanatntacattgatgtttgtattgaggggaggaggttacatgccatttttgctttaagagtaacgtcccactggtaaaactaactttccaaatgtttgccttcgcaggaatggccccgaggaagcttgcctcaaagaggtccaggaaggacaaggcggccgaaggaactagttccgccccggagtacgacagtcaccgctttaggagcgttgtacaccagcagcgcttcgaagccatcaagggatggtcgtttctccgggagcgacgcgtccagctcagggacgacgagtatactgattntcaggaggaaatagggcgccggcggtgggcaccactggttactcctatgngccaagttgatccagaaatagtccttgaattttatgccaatgcttggccaacagaggagggcgtgcgtgacatg

SEQ ID NO: 276559 - DNA, 424 bp, Glycine max
  unsure (1)..(424): unsure at all n locations
tagaaactaagctggattcctanatgtacaactgancatggtgtttatataaatgtcatcaatactactaacttgactgtagtgtgcctgtatgtagatgacttgcttgtgacatgttataatgagactaaaattgccaacttttaaggagagatgatgagagaattcgatatgactgatttggaccttatttcttattttcttggaattgaattctagagagctgatgaaggagtgatcatgcatcaatggaagtatgcaagagatgtactgaagaagctcatcatggttgactcgaattctgcagacacatccactgccactggtgtgaacttggtgaaagatcctaatgaagaagacatagatgtactctgtatatacacatggtgtgctcactgaggtatctttagtgtactagacctga

SEQ ID NO: 276560 - DNA, 452 bp, Glycine max
  unsure (1)..(452): unsure at all n locations
agctntagttggatttgggaatcggtaattaactaggaaaggaatttcattaggattaggattggggaaaaattggtactagtgagtcataacccctggtcattcttatcatcaattaaacctctctttattttcatttagttgctttaaaaatataatcaattccattgttagtttaataagcataactaattgggaatacgactagttctttgagtttgatattcaaactttcgagttcattgttactattgcatagggtacacttgcccttgtggaagcctaacaaaatttacgcatcaagatgcaggtggatgtcaatactttttgttcaactaaaattagtatggtgtcatcattgaagatgcccccagatttaggaaaaatgctagaggtaactggtagtcatcgtttacgaactaactttgtatagaaatgttntccaagatgta

SEQ ID NO: 276561 - DNA, 450 bp, Glycine max
  unsure (1)..(450): unsure at all n locations
ctaagctttagccactacagatatttcctcaaagatcccaacggttaaatcatggtaaattgtcttgtgaagttgaaaaccaaatttagagaagatccaacggttaacgaaggctggacagtgtttctaccgaggcagcttcatgtagttttctctagaagcttcattaagaggcttcctccagaagcttcattaagaggcttctagcacactacagacatcttctaaacgatcccaacggtcagatcatggaaaagttttttgtgaagttgcagaccaaatttcgagaagatccaacggttaatgaaggctgggcagcgtttttaccgaggcagcttcatgtagctttctctagaagcttcattaagaggctttctctagaagcttgctcgtggcttctatgagaagctctctgaagaggattctttgagaagctacatncttatctat

SEQ ID NO: 276562 - DNA, 442 bp, Glycine max
  unsure (1)..(442): unsure at all n locations
gcttcttataagctgaaccattntatcaatatacacaagttgagttttattcagaaaattagagtttatctcttttatcttagtgagagtgattctcctaaattcttgagtgattcaagaacaccctggctgtatcaaaggactttcacaacctttgtgtgttgccctcgctggaaagagtgattctttccttcctttcatcttcacccttgttctttcaaaccacaattccagaaaatccacctctgcccagaattatctcgtggccataactcccattttacgcactcaaattaagtgattcttgaacctaaattgactttcaaaacgagacctttcacctcgtttcggaatcatctcatttggagccctgtagcttcaattattgccatttctatatttctggccagccaccacttaacctacattttaccatcccatt

SEQ ID NO: 276563 - DNA, 429 bp, Glycine max
  unsure (1)..(429): unsure at all n locations
aagctctacagcagaatttagtaatgacccactaacctanaattaatataacttaatgccattaacctagggaattaaaaaaaacttaatggctgagtgtaactgaaattgtggcaaccaaaagtcacccccaacagccaacaagtcagccaccatttggtctcccaaaaggctgatgcctaggttgccaattgggcccttattacaacttgaactaaacctaactaaagcccttttagttgattaacccaaaacatatttttggtcagccaactttacaaggattgggccattatttagacagactaaacactctaaaattgaaacaaagtggtgtcatttagtcctccttcatttgggccatgatacaactcacaaccttggacttttctccttgaaactagggcttgtatctaaatagtatggaca

SEQ ID NO: 276564 - DNA, 424 bp, Glycine max
  unsure (1)..(424): unsure at all n locations
agcttgtaggattttgtgatagtggatttgccggagatgttgatgatagaaaagtactaccggatttgtattttttatgggtgattgtgtttttacatggagttctaagaagcaagacattgtgacactttttacttgtgaagccgagtatgtagctgcaacttcttgcacatgtcatgccatttggcttagaagattgttggaggaacttcagttgttgcaaaaggaaagcacaaagatctatattgataatagatctgcacaagagcttgccaagaatccggtgttccatgaacgaagtaagtatatagatacaaggtagcatttcattagagagtgcattaccaaanaagaagtagaattgactcatgtgaaaactcaagatcaagttgcggatattntcaccaagcctcttcaaattgaa

SEQ ID NO: 276565 - DNA, 465 bp, Glycine max
  unsure (1)..(465): unsure at all n locations
tgtctcagcgtttatgcgagacggagaccaacatgctagctatcatcgccaagtaccaagaagagttaggtctagccacggcccacgagcatagaatcgcggacgagtatgctcaagtatacgcggaaaaagaggctagaggaagggtgatcgactctttacaccaagaggcaaccatgtggatggatcggtttgctcttaccttgaacgggagtcaagaacttccccgcttgttagccaaggccaaggcgatggcagacacctactccgcccccgaagagattcatgggcttctcggctattgtcagcatatgatagacttaatggcccacataattagaaatcgttaggaaacttgtatggtctctcagaccttgactagatacgacttcctttntgaaataaaatgagttggtcccatgtttctactccaaaaagcttgtgcaaatcaaatcactcctacat

SEQ ID NO: 276566 - DNA, 435 bp, Glycine max
  unsure (1)..(435): unsure at all n locations
agcttgacgtcaaatgtactgaaatatgtttaatgaanacttatattataagtctttccatgaattttattaaaataaattgaaagtattttaaaaatatcatgagttattttcatactcggttccaaacatttttaaaaaggaaaaattgtgtataatctttaaaatatgatattttattaaattgctttattttaatataagtaaatattttttattgtttaactacatgtctggaaatgtttaaaatatttgaaacttaatatacacgattagtaagataatgctgtttattggttatcttggaaaaaaattaatatttaaaaaataattattagaagtgtaaatttactaaatttaacataatataaatatatcttcgccgaataatcaatgtgtatatgagcttaacaattttaaacctatcaatctttc

SEQ ID NO: 276567 - DNA, 368 bp, Glycine max
  unsure (1)..(368): unsure at all n locations
ttgcttgtttaagaagttctagagagagacaggtccatgttctctaatagttctgagagatcttgttgtgttaagatctgcagagatgagagctcgaagcggaagccattctgagaactcgagatgagtctgtgagtgattgtgagatcctagaggtgaaggagacatcctcaccacttgcatctctgcaatctctcatcttgttcttctctgtattgcaaaggagggttccggaccatggaaagctaaatcctctgttggatcttcatgtaggtacctgatgtaaatatacttctatctatggaatgatgttttgcgcgtctctatgctatacgctttcattcgagcatgcncttaccttgatcaca

SEQ ID NO: 276568 - DNA, 445 bp, Glycine max
  unsure (1)..(445): unsure at all n locations
agcttcatagtcacatgcaggccttgttcctgctactcatagttaaaggtattgaacttcttggttnttatttttatttacagttctaggttatttctttctttttcaatcattcctgatttagttggaaaaagaatattagtaaaaaagcctccgcataattggataattatcttgcatcttggagatggatattttgtgttccttctttgtatcaatggtaactttcccaaaatgtaaaaaatggtgcgccaaaaattcatatgtaaagtcctagaagcaaacaagtagtaggacatctcatctgtcgtgtgcttttctaacattctctcaaagttattctttattgtgctaaacaacttagatgtatttattagcaagtgttaggataagacactcanatactaaagtatattttagaaggaataagagactagaggtaaaa

SEQ ID NO: 276569 - DNA, 345 bp, Glycine max
  unsure (1)..(345): unsure at all n locations
ctaactaagctttaagatatccctanacaaggatttttntttcttatcagcatccttgacaaggattataagtgtacaacatttaacagtcaacaagaaattaggctgtactttagaggataagaataatctcaaaaacaaaaatatcttttcttgtgatttagctcgtctaaaattaggctgtactttataggattaagtatagtcataaccaatgattagaaaatccattgccgagatttcactaatacatatgttatcaatgggtacaaccggagcttatcctcttaagacactcccttacttaaatggacaatcctttttcttgaaaataaaggaaagaat

SEQ ID NO: 276570 - DNA, 449 bp, Glycine max
  unsure (1)..(449): unsure at all n locations
agctntcttgagaaaacttccttgagaagcttctttgaganaacttccttgagaagctagagcttagctacacacacccctctcataactaagctcacctccttgagaagcttccttaagaagattcctaaagaagctagagcttagctacacatacctctctaatagctaagctcacctccttgagatgagaagctagagcttagctacacaccccctataatagccaagctcacccccatgacaaaaaacatgaaaatacaaaaaaaaagtccttactacaaagactactcaaaaggccccgaaatacaaaggctaaaaccctatactcctagaatgaccaaaatacaaggcccaaacgaaggaaaaacctattctaatatttacaaagataagcgagctcatacttagcccatgggctcgaaatctaccctaaggctcatgagaac

SEQ ID NO: 276571 - DNA, 420 bp, Glycine max
  unsure (1)..(420): unsure at all n locations
taagcttacaccaagagagagccttggataagaagcttatagaggttacttcaatggaggaagagaatgagagagagaggagggtgcatgggaattgaaggagattaggaagagaagttgaactttgaagtgtgtctcacaagtttctcattcatcaaagttaccacaagtgttacacatgcttctatttatagcctaggtagcttccttgagaagcttcattgagaagctagtgttacacccctctaatagctaagctcaccctcaagggaacacacacgcctncaatagctaagctcacccccaagggaacacacacgcctgcaatagctaagctcaccccccctcaaaaaacatataatacatgaaaaatacaagatagtccctactacaaagactactcataatgcgctgaaatac

SEQ ID NO: 276572 - DNA, 444 bp, Glycine max
  unsure (1)..(444): unsure at all n locations
agcttcacaaggagttacatcaatgaacatcacaaaataaaccccaatttgatactctaaggatccctacacatgttcattttaacccaaattgcaataaactcatcccttatctctaagcgggctcacgggtgcagctggcagggatatcaacgtctctagtggttccctaagatttctgaaatttttcctctgtttgctttgttagggtttccaagtgttagagagaaggagaagaaattggagcctccaattcactgtatatgttcaatgagaatttctccctccatagacattactttacaaatcccaacactagacatgtgtagaaattagttccaaaggtggtgtccaaatttcactaggatccaacagttaacaagtccgggatcgtagttntcttgggatgggtttggatgtatatgggaatgagatcctaatctc

SEQ ID NO: 276573 - DNA, 454 bp, Glycine max
tagacactaagctttaaacattggaagcttctccttaattcattttcgcaattcttcttcttcttcttcttcttcttcttcttcttctctccttatttcctttccttcctcctcccatggaattcctttaagctatgacatgagccccttatggctagttgttttatcctctttcttgagccaatgtgttgcaacctacccttcggtgggggtgcaaaaaggccaaaatagatgggccaaagcgtttgtctccaagggagaaaacgagcggtgtcggcaccaacatttatttgaggaaaacgttagaaaaaaccaaaaaagacgaacgtctgcaaatattgaaaagaagggttcgggagttgtttacgcacgaggaaggtattagcactccatgcacccgtcacaagggacggcagcccttaatcgagtgtgcaaacatgacttcaaaattatg

SEQ ID NO: 276574 - DNA, 431 bp, Glycine max
  unsure (1)..(431): unsure at all n locations
agctgaagaagtttgcctttacatgcccaactctnttaagtggcatttgtattaattgttgtattgtgtgttgcatcttagtctctatcgtttcatgtgtgcatcatgcatcatcatgtaggagtaagaagaaaggttctaaagttagaaaatttcttcagtgtggaaagctctatgttttaatcgattacaagcatgatcgtaatctgttacacaagtgtttgtagcttgtagagaagtttctcatatnggtttaatcgattacaagggaaccgtaatcaattacacagttcagatgagacaatgattggtttttatgagtctctactntaatcgatggccaggtaatcataatcgattacttctcttttaaagtgtttcagaaagatcaagaacactttaatcaattacatcaagaatctaattgatta

SEQ ID NO: 276575 - DNA, 447 bp, Glycine max
acaatcatctagtcattccaatccacttaaatcatataattgctcattcaaatcattctcaaacactcatttcattcaaaacaatccactgcatatcattttcaaccaattcaccattcaaacacgctttttgtacaagcaaacaactcaaagtactgaaatttaaagaactgaaacataaaaactgaaattaaaatgactgaacataaatcataaaataactaaaaataaactaaaatgttcaaaatgcacaaatttaaatgtcctgctcctgtggttgctcctgtgcatgctcattaagatccaacacttgagcaactggtgaatcctgagagataggctgctctaactcagatgctggtgcagatggtatggcatcattagttatgggtgttggggatggctctaggaattggtctgtggaagtctcctcctctgagccatgtg

SEQ ID NO: 276576 - DNA, 441 bp, Glycine max
  unsure (1)..(441): unsure at all n locations
agcttgtaaactagccatggtctagctacttgcataccctgagggatgaccatgtagacttcttcatttaaattaccatgtaagaaaacattgttcacatctagttgtttgagatgccacttattaatagcagctaaagccaataaaaatctcactatggttagtttaactactggagagaaagtgtccaggtagtcttgttcttccacctgagtatacccttttgccactaatggctttatacctctctatggaaccatcagatttgtgattgatcttatacacccatttacaatcaattatagtcttgtgatgaggaagatcagtgagaacctangtatcattaagctctagtgctttgatctcaacattcatggcttcaatccaattaggatccttagatgctccactgtataactgaggttcaacactctgtgtgat

SEQ ID NO: 276577 - DNA, 423 bp, Glycine max
atacaagaatgaagctctgataccacctgttgtacaagtggcctcaaatatcttaagaagggggggttgaattaagatattacaaattatttcccccaattacaaattctactttgattccaatacaagttccaagttcccttaaagatggatttctaaacaatgattcaaattaaacaatctgaatataaatgtaaagcaataataacataaaagagtttaatggaagagaaagtgccaactcatatttatactggttcggccacacccttgtgcctacgttcagtccacaagcaacctgcttgagagttccactatctttgtaaatccctttacaagttctgaaccacacaatgacaacccttactttgtgttctgatttgtttacatcaagagaccctccgtctcttaactcctttttga

SEQ ID NO: 276578 - DNA, 95 bp, Glycine max
  unsure (1)..(95): unsure at all n locations
agctntatnaattacattcaaatttctaaaggctgttataaaacgtttaaaacttctggtaatcgattacaagccttgtgcaatcgactataggc

SEQ ID NO: 276579 - DNA, 454 bp, Glycine max
agcttcagtaaaatgggacagctggcctagatgatgcaatcctacccccccccccaagggcattggatagaagactccaagaagattgggccagagatgcaagagaaggccgtaaggttctcatgagccttagggtagattttgggcccatgggctaagtatgagcccacttatctttgtacatattagattaggatttcattatttttgggtcttgtatgtagggcttcataatgtaggtagggtaccctagaaatgtaggatttttcagcccttgtattttagggcacctagactagtttttgtattacgggtagttttgtaatttcacatgcattaagtgaatatttgatgtgtgtgttgagaaatcaatttaattgaattgggagaagcccaatccaattataatttagagggggaggtgagcatttgcttgctgcacctcattgccaca

SEQ ID NO: 276580 - DNA, 420 bp, Glycine max
  unsure (1)..(420): unsure at all n locations
actaancttagaccaaacactctaatctaacatctaaactcctcattagtggatttcaaggtttgagaagtaaaatgacaatggcgtaaatctggagcaaactctcacctcacacaagtctataacctcaatctacacttgctcaaactggttttacgcctaaaattccaccaaatcaaaatctgactcctcaacacccaaactttaccctaaaaatggctctagccttcactttgggcttttgtctatttcctttgcgcatcccaagcttctccacagtcctatatgacatttaaaccaggattaaagactttaacctccaatttctactgcacccacatttagcctctcaaccctcaaagcatcacacttgtccactcataacactacatagttacttgctaaccctaatgtaactat

SEQ ID NO: 276581 - DNA, 430 bp, Glycine max
agcttcggtcttcaatttcgagcgtctcgacatatttcgggactcaatcagacatccgagtaaaaagttattgtcatttgaatttgctcagagctaaggcattcaagtccgagggtctcgatatattacaggactcaatcagacatccgagtaaaaaagttattgtcgtttgaatttgctcagagcttcggcattcaagtccgagcgtgtcgatatactacgggactcaatcagacatccgagtaaaaagttattgtcgtttgaattttctcagagcttcagtcttcaatttcgagcgtttcgatatattacgggactcaatcaaacatacgagtaaaaacttattgtcgcttgaatttgctcagagctttggtattcaatttccagcttctggatatattacgggtctcaatcagacatccgagtaaaa

SEQ ID NO: 276582 - DNA, 431 bp, Glycine max
  unsure (1)..(431): unsure at all n locations
ntcataggtgaaatcaggtgcagccatttcccttagagtcctctcacgaggtggaggttgtgccatgttctcagaatgtgcaaaatcagaatgctcagaatcagaatgctcaaaattataatgctcaagatcaggatgttcaaaatcaccaataacagaatgcacagattcaccagttatggaatgctcagaatgatcaaaaggtataaaatgatgcctaactaatctatgaaatgtcctatctatctcaggatcaaagggttgtaagtcagatggattgcctctagtcatacactacattcagcatgcacacagctagttgccttgtcatgtaaataaaggtgtaagtttgaactacaactaccctcaaatgatatccaaatgacttgaaattttgtgagcaaccttataaaatgatgagaagatagcac

SEQ ID NO: 276583 - DNA, 340 bp, Glycine max
agctgaatgatcgcaaaatggctgatgaccctcatcctattcatcgctctgaggatgatggcgcattctactatgattcaggataagaagagtgttttacaatcgcaattcccagaatcaagctatggaagcgtttcccaatgcaaaccatgacatgcattaacagttgaagaaaacactagcattgaagaacgcgatgcatatatgaccatatttcacaagatatacgtgacaatataaggtttaggtacataccactattttcctataatctagagaaaaaacattccattattgctacgtaatatgaacgataaatctatatgctatatagcaaaag

SEQ ID NO: 276584 - DNA, 453 bp, Glycine max
  unsure (1)..(453): unsure at all n locations
gacaaggcagtagtgagtgtaactcctgttgacagagagtgtatgaatgagatntggaattcctagaaaaaaactcacttctagaaaatccaatagcaacaagaaaacttaagagaaatgctagttattatgtcatagaaggaggagacctgtacaaaaaaggcttcacagcccctctattgaagtgcctaactcgggatcaagtaaagtatgtgataaacaaaatgcatagagggatttatggaatgaacttgggatcttgttccatgactacccgagtactcaaagtcagatactatctgtcaacaatgagaaatgactaaacaaaatacatgaagaatgcaaaacaattgcaacatatcccacctatcagcttaagagttacatggtatagtcactccatggccctttgccactagggtagtagtcatacttgaactggtttcccctaca

SEQ ID NO: 276585 - DNA, 450 bp, Glycine max
  unsure (1)..(450): unsure at all n locations
agcttctntgagaaaacttccttgagaagctagagcttagctacacacacccctctcataactaagctcacctccttgagaagcatccttaagaagattcgtaaagaagctagagcttagctacacatacctctctaatagctaagctcacctccttgagatgagaagctagagcttagctacacaccccctataatagctaagctcacccccatgacaaanaacatgaaaataaaaaaaagtccttattacaaagacaactcaaaatgccccgaaatacaaggctaaaaccctatactactagaatggccaaaataaaaggccttgacgaaggaaaaacctattcgaatgggtcataattttcacacggatgtccgattcggtacataactcatctagacgctcgaaattgaacaacgggagctcttgacaattcgaatggtctaacat

SEQ ID NO: 276586 - DNA, 430 bp, Glycine max
  unsure (1)..(430): unsure at all n locations
gcttacagcagatttagtaatgacccactaacctagaattaatataacttaatgccattaacctagggaattaaaacaaactaaatggctgagtgtaactgaaattgttggcaaccaaaagtcacccccaacagccaacaagtcagccaccatttggtctcccaaaaggctgatgcctaggttgccaattgggcccttattacaacttgaactaaagcccttttagttgattaacccaaaacatatttttggtcagccaactttacaaggattgggccattatttagacaaactaaacactctaaaattgaaataaagtggtgtcatttagtcctccatttgggccatgatacaactcacaaccttggacttttctncttgaaacttgggctcgtattcaaatagtatggacagcacttgttgaagagcg

SEQ ID NO: 276587 - DNA, 425 bp, Glycine max
cccatctctataaagtggcattagtattaatcgttgcatggcgcgatgcatcttattctctatcggtacatgtgtgcatcatgcatgataatgtacgacttagaagaaaggttctaaaattaaaaaatttcttctccgcggaaaactatacgttacacatcgaacacatgcatgatcgtaatctgttacacaagagagggcaacttggagagaagtctctcatacaggcttaatcgattagcacggaaccgtaatgaattgcacagttcataggagacactgaatcagtgataatgagccactactgtacacgtatgccgagtgggcacactctaatactgatctttctaggacgattcataggagatcaagaactctctcctcacttacatcaataggctgaatgaactcattgatctagaacg

SEQ ID NO: 276588 - DNA, 424 bp, Glycine max
  unsure (1)..(424): unsure at all n locations
tgatcaanacaatnatctantcattccaaaccacttttatctatccatgatctccatctttgcaattcccaatatctattgcttacaatatagatatgcctttgaaccttgagggaaattaccttggggaaaaaaaaggaaaagcttgtcataagaaaggacaatgatgagagaaaacttgggaaagagcttgagattataaggaatgactatgagagctaccttacgataaaggttgggatgaaggaaatgaaagacaacaagaacaatgaacttactcctggaaaatgtttccctccaccaatttcttgccttaaaaatattaaggttgcaaacacttcaagtatctagcatatgataaggaaagtgaaatctaagttgctgaagagataaaaattcctgaagggagtgcttttcatgctac

SEQ ID NO: 276589 - DNA, 431 bp, Glycine max
agctttaagcaaattcaaatgacaataatctttgactcggatgtccgattgagtcattttataatttgagacgctcaaaattgaatgcaggagctcttaccaaattcaaatgccaataactttttactcggatgtccgattgagtcccgtaatatatctagatgctcaaaattgaaaacagtaactctaagcaaattcaaacgacaataacttctaactcggatgttcgattgagtcatttaataattcttgacgctagaaattgaatacagaagctctcaccaaatttaaatgacaataactttttactcagaagtctgattgagtcctgtaatttatctagacgctcagaatcgaaaacatatgctcttaggaaattcaaacgaatgtaacttttgactcagatgttcgattgagtcatttaataattc

SEQ ID NO: 276590 - DNA, 439 bp, Glycine max
  unsure (1)..(439): unsure at all n locations
agcttgcttctataacattaaactggtgataaccacaacattgagaagggttggtgaaacaggtccacatggtagtttgagggcacaagtattttgattccagaggagagcaaccaccatgaccatcgaaatgtcaatgttaaaaacatcgagtttactgagctggagtaggtcaaaaatccctagtttcttccaataatcaaaataatcagtctcgggcctctctatccatgttacatagtaggtttgataagaagagaggttcaaataaaatatcattttactatccttcatgaagtctattttaagtttcttctatagtacttggaaaaaaaagagaaagacttcggtggcgggttggtacgaattggacctgcaaaagctatggacttttcagaaaaggaatatgggatcattacctgangcttccataacttct

SEQ ID NO: 276591 - DNA, 394 bp, Glycine max
  unsure (1)..(394): unsure at all n locations
gaatactaagcttgtgcttgttntacttaaattccaaggatcattatcaactatgtgtgttctgctatgacttgaaaaacaagagtgatcaaataacatgcagagatttaaaaggtactaagttgcctcctantaacgcttctttaacgtcttgagctggacgcgtcatggcttgtcaatcacggacctagttctttgcttacctttggctttggacttggtcgcctattggtcggtcatgggtcgtaagcaacgctttaaccttcttatggatgagctgaggtgaaccttataggtgatggcggtgcgtttgttgtccgctgccggccatccccaggccgctgtggtgtttcgcctgcgcctgcctgggacgcagtacttcttgatgaaagct

SEQ ID NO: 276592 - DNA, 444 bp, Glycine max
  unsure (1)..(444): unsure at all n locations
agctntaagatcaaactctnnttctatttttttctctcaaatgttcttcattcttcttcctctnttcactgttgttcttttttcttgcacaaaattttgtggctcttccactggtgatgatcatggaaggctaaacattcaatcaatccaaggatccactccaagcaatgctgaatttgagttttggtttagtatttctaatttgtgtgaatgttcatctttttcttcaatcctatttttgattttcatgattatgaatattcttaggattgaaaacgaattangttagggattcctttcctaatttcaaacttaatcacattgtttggatgatattccaacctaatntgagatctcaatgaatntagggattaattgaattgaactaactctaatggcattgattgactntcataacatgatcattcgctacagaactatgat

SEQ ID NO: 276593 - DNA, 458 bp, Glycine max
acggacactatgaaactaagcttaggctgctcaattgctccaggttgctgcatggaagggcaaaggtctgtatgatggtcagcagaggagcacaaaccacaaacccttgcgacaggtacagatttctgattcaaggccagctgggttaccaagttaaccaatgcatccaatttgccttcaagcttcttagtttcagatgatgcagatgggtttgtagctacctcatgcactcctctaatgactatggcatcatttctggcgctaaactgctgggagttggaggccatcttctcaattaaatttctggcttcagcaggagtcatgtctccaagggcttcaccactggcagcatctatcatacttctctccatattactgagtccttcataaaaatattggagaagaagctgctctgaaatctaatggtgggggtaactggcacatagtttcttaaatct

SEQ ID NO: 276594 - DNA, 129 bp, Glycine max
agcttgtttgaacagtgagctgattgaaaatgatatgtagtggattgtttcgtatgaaatgagtgtctgcgaatgaattaattgagcaaatgtatgaattgagtggattggaatgattagatgtttgtt

SEQ ID NO: 276595 - DNA, 426 bp, Glycine max
  unsure (1)..(426): unsure at all n locations
taanactcaattatcaataccaattttacaaatatttacgtagttatctaaactataatgaaatgcccaaacatttactagtagaaagaatagatataatatcattatgttgatatcgattttttagaaaatcgatattaataaaaacatggtggcatatttgttaataatgtgagttcgttaacgtcggatgttaacatcgattttttcaaaaatcgatgctaatgaactcatggaaaaccgatgttgtgttaattaaattaaatgtgtctcttcctttactcgtgttcattctaaattatctctcactctcactcatctctagcgctctcgctctctcttgctcactcacctctcgcactatccttttcattctcactctcacgcnctctatgcagcggtgtagccacatcgccgttctcacta

SEQ ID NO: 276596 - DNA, 442 bp, Glycine max
  unsure (1)..(442): unsure at all n locations
agctntatcgcataaggtcaataatattaaatactttntcaaacaaaacacatccttctggagaattccacctgagtcgtgcaaaattaggaatagtaactttctttgaatgatcaataagaaattattgatatgttgaaaaataaagcagatgtaattgaaaaaaatacgaagttttttaactggattttgtacttgtagcactcaatcatgcttcagtaggtttcttcttttgtatctttatgctttggacagtttcttttgaaacaatgctatttaaagtattagtagagtataatcaatgtaaccctacaaatattattccctctactcctatccatatacccagaagaattacacatctattaatagtttttgaaaaataatttatacaagtagtatactataacaagtaaccaaaataaccagaagcatgatgcag

SEQ ID NO: 276597 - DNA, 441 bp, Glycine max
tgctagttgcaacctatcaaccactaccagcagcattcacaaaggtactaaaatcccaaatctcaataacctctaaaaatagcacacagatttttatttcctgttgtcaaaactagtgttgttttggatgtaaaagctaaatgccttggtcatgtagtcaaagtagttaaataaccccacattatagtgcagtacctgacccctatatgctataatggtacagcaaagcagctgctacaccaaagcaaatagtttctatataacatgctcaaaactaaagtactcaaatcaaaactggagaaacagtgttgggcttggttggaaaaggatgaaagagaggctgagggacaggaaaatgcagagggtacagagaccaacaaagcatgaacaggagtttggctgctggaaacttgagagagcaaagtgcagagagtgagaaac

SEQ ID NO: 276598 - DNA, 434 bp, Glycine max
  unsure (1)..(434): unsure at all n locations
agcttcctcggggccatttcctgcgaaggcaaacatttggagagttagttntaccaagaaatgctattcttaaaacgcaaatggcatacgacctcccccagtaacacaaacatcaatgtaaatttagagcgaactcatgcacatacttcctttcgaacattcactcgcacaagatattcttctaactaagaaaaatgcacctaggcacaatcagggcaccttcgttacctagattatttatatgtacttccaaggtgtatttgctacctacatcacatgcacttcctttgctaaatttacatacatgcatactcaaagcattttgactaccaaaaattgcatacgtgcacattttggtatttctaatacctatacatatacaaactttgtgatgaatcttggctacctacacaataaggtgctacatttcatgc

SEQ ID NO: 276599 - DNA, 457 bp, Glycine max
  unsure (1)..(457): unsure at all n locations
agctnntgcatagtttggataaatatacacatgcgatcatgacaatgacaaaacagatcgatttatgttgtgtgaatttttcaattttgttacggaatgtatgtttttaatttgcgatataattcaaacactgaaaagattcttttttacatttttatttaatcatgaaatttaaatgattgagtttttgtaataatcacttanaaaattatatttaaaataatttctaattagttgatagtataattttttttttttacaataacaacatgttaaaagtaaaatgttaaattgattgaattttaattnttatggttacctcctttacgtggactaaactgtaatattttttaaacaattaagaaatttagtgtaatgtataaggagtgttgttataatatttntaaaataattaagaaatgttagtataggaatagaaaaaacatggagagattga

SEQ ID NO: 276600 - DNA, 115 bp, Glycine max
  unsure (1)..(115): unsure at all n locations
agctttcttaccatttacatatggntnattgttctgatccaatgcttgtactattactgcgtgctgttatatgaatgaaactatgaccatattatgctagaagtgcacgtctaaa

SEQ ID NO: 276601 - DNA, 404 bp, Glycine max
agcttgtagtcgatgccttgtagaccctcacggaaactctgagttatcttcctcaacagctacatgtagtgcagcctccattagtcatacaatggaggatacaacatttgtggaggtgctcatgagtcaggcgcatgcatggttcaaaatgatacaactgataaggtctgctccatgggaaatcaaaatcgtgaaggattccatcctggcggaccaccgggcttttatcatagaggttatttcttgcatggccactgctgaagatcttatccagggaattattggtacaggtcatgcataggaccgaggcacatgaaataagcacatatgcaacaatcagaaatctggaggttcagatgggccaattatctcagatgatatgtaaaggacccactaaaaccttt

SEQ ID NO: 276602 - DNA, 279 bp, Glycine max
tcacaaaacagacaataaaggcttagacagaacatccaacatacagacattgagaaagactaataataaattgattataactgacattgaacatattttatatggacatatatgcccctaaagtgtatcctcataacataattctaatcatatcaaccaaagtcgtagtacattgcagcattgaattattttacacatgtctcaactgtaaatctcacagacacttcttatgcacactttttgatactaaacaacataacattcatatgtatcaaactt

SEQ ID NO: 276603 - DNA, 274 bp, Glycine max
agcttcattaggcatcatcccttctactacccttgtaggaagtctattttaaaagtagacaactatgtttacaggttctacgtacccaaaaagaccttgacaatttcttctaaaaaatcatgcatctagccacctcaaggactaatatatttttcctctctgtcatatgcattttgttatagggtgaatataactcattaattataagctggtgcttaactcccaaaaaaaaggctttaagcttcaacaagggctttaaactcctttaaaaaga

SEQ ID NO: 276604 - DNA, 140 bp, Glycine max
  unsure (1)..(140): unsure at all n locations
ttaagaaaagttgttttaacatgaatttgttgnaaattaaggtgaaaatgagtaaataatgtnaagattatatgaagagaatatttgttagatactggagaaaaagtgtatttgtaatttattnnttnattttgagtaaa

SEQ ID NO: 276605 - DNA, 462 bp, Glycine max
  unsure (1)..(462): unsure at all n locations
cggatccttaagcacctgcggctgcagcttaggggtaacacgtagagatagatatatgccctttatcattcgagaacaacaagcttagtgggtcaacacgcagagatagattctgcgccctttatcattcaggaacaacaagctgagtgggtaaacgcgcagagatagattctgcaccctttatcattcaggaacaacaagttgagggggtaaacgcgcacagacagaatctgctccctttatcattcaagagcagcgaggcgggtgataaacgcgtaaagacagattctgcgccctttgtcatttacatttcacaagtggtgtgagtaacgcgcagagacaaattcagcgccctttgtcattcanaaacagcaagttgagaggtgggcggagacaaattatggtcattccgcacacctttacaccatccagaggcgatcgtgtgcggtggcacacagtgac

SEQ ID NO: 276606 - DNA, 454 bp, Glycine max
  unsure (1)..(454): unsure at all n locations
atggcgaatcaaaggcgattcanaggtgttatgatgataacaatgatgatgacagaggtgatgacaaaaagctcaaagatcaatcagagaacaactcaagtgaatcaagaataatggaagagttcaagagtcaagaagaatgcaagactcaggaggaaagcctagaatcaagaatcaagattgaagattcaagatctgaagaatcaagatcaagattcaagactcaagattcaagagtgaagaaaagactcaatcaagataagtattaagaagttttttcaaaactttgaatagcacatgagtttttgactaaacctttaagacagagttgttactctctggtgatcgaggagcatatagttgtaatcgactaccagtagcggagtgagtttgaaacagttttcacactgaatttacaacgttccaattattgtgataaggctgggatcgatta

SEQ ID NO: 276607 - DNA, 525 bp, Glycine max
  unsure (1)..(525): unsure at all n locations
agatattaaagggcgcnagggagggaggggaagattanaccgcatcnacacgctgagngaannataaaannnancnnanannnnnnnntanaaaggaacaggaanatttnacatttggtcatatattaatatacgccaataaggtgtgggtatagaaaacaaacttatattaactgtgttctagacacagtcagtcgcattagttctataaccagcctcagtcctgtctaataacgcgcgggaataaacccactaacatatgacaacatgtgctgtgtattctataacctacacctaaaccttggataataatcttcattcagttaatatcttaaaagctgaaaacctaaatccaatggatgccaactgcgaatgttagtctcgccatatatgaccaagctgtatcgggtgatatcgttagccatacaaatcttcggacattgccaatgccatcatttaaccaatatcgtagcggccaccgaacgtatctacgtccgacaagaccatgtggtcttattgactgcg

SEQ ID NO: 276608 - DNA, 423 bp, Glycine max
  unsure (1)..(423): unsure at all n locations
agctntgtctntgcgagtctatccctttctgcaaccttatcgccaccgtgacaccttgccaccatactcaagtatttttctacaaccttatttttcgtgactctatgttctctacagcttttcgcgactctggatttggctcacctcacctggatgagtttttgccaagtgccatggtagcggagtggccgcatggctgggcttttcttttttacaagggaaaagtccttgtgattgtcaatgttgcttctcaaaatccatgtcgtgttgtgtttgttacttcttctttttccctgattgcgccttctaatcaatttaaagctttgatattttcatctttnttattcttttcaataactactcttaccactaatgttataaacattgataatatttacaatatatgtntgggattgagacaac

SEQ ID NO: 276609 - DNA, 408 bp, Glycine max
  unsure (1)..(408): unsure at all n locations
actcctccatnccataataatagtacgtgtaagattatatacaattgacccaaaataattgtcatttcagcttgtcaatataatattaatcgtttcttttcacttatatcccttattatattaatgatatggactacaaaaactaaaaatgcattaatgatgataaggttaattttgtaacattattatcgcttttcatttgcttattagcttttcttgggctgactcacacacactggttcgggacgacactcataatgagatgaagggagtgtcaccctccattcgtggtgcatccagacacacaatttcagcttaatgcccttgacttcctcttcttaacatggcattggagcctatcctaaatctcttaccgataatctatcactttatcgatgcaccaaaccc

SEQ ID NO: 276610 - DNA, 448 bp, Glycine max
  unsure (1)..(448): unsure at all n locations
agctttnttcagtcgtctgtaaggatgattgggtgttagaaaacggcgatgcctactgtagactgtttttcttccatgttttagttgtatgtagcttgtgttttcttcacagatggggcatgcatgatgacccttaacactgtaaccgctgagatttccatatggtggaaagtcattaatggtacaaaaaagcattgcacgcatttcaaacgtttccttgcaaaacgcatcaaacactacaaccccctggtccaacaacttttccaggtcttcaaccaacggacttagataaacatcaatgtcatttcctggctgtcttaggcctgatatcatcatagacaacatcatgtattttcgcttcatgcacaaccaaggaggcaaattgtaaattactagcagaactagccatgaactgtgttgagtgcttaaggtgccatatggattcatt

SEQ ID NO: 276611 - DNA, 406 bp, Glycine max
  unsure (1)..(406): unsure at all n locations
agctnttaagtctccaggcatggttccctggttcttgaaaaaccgctagcttaattgctggtgatatatatatacatatactcagatttgtgggatataggatcagcaggattggggtaccaccatagttggaatgtccaccctttctgtgatgcctctctaagcctgttctttttgcttaaaaaaatagttctctgttgtggatgaaattatatataaaatatttaaatatagattataaccccgtataaaaaaaaatcaacaatcaatatattgattctttctctcacaaatgccatgaattccaatacaataatactgacatttggaaataataatatttacaaatgaagtatgggtattaaaattttaagcaatagaagataggatttcttcttatatattt

SEQ ID NO: 276612 - DNA, 399 bp, Glycine max
  unsure (1)..(399): unsure at all n locations
ggccatttantgcgataacaaacattttaaagttatttntacaagataatgcttatnttaacgcaaaaatgtcacactaatccctccggtttagaacgaactcatgcgcatgtttaaagtaacacatttatgcacatgcgtatgtgtagaatatcctactatttatatcaacatagaggccatccaacacattctaattgtcatacatatatatgcatttgaaaagaacacacattctcacgctcaaggcattgcgtcaaaatttacacttaactatgccctatacatttgctatcacaaactacctacacaccctcgaaatatatataccatacacacttttatcgtttcactcacacttatgcatatcggcaagctatctacattatgcacatactt

SEQ ID NO: 276613 - DNA, 449 bp, Glycine max
  unsure (1)..(449): unsure at all n locations
agctntgagccaaaatcccaacttatcataaaccttgacccagagtgagaatgtcaatccttgccctcggaagaaaacaaataaagagaataggaaaattcccaatcaaagagtgggagaaagtaaaaaaaagaaagtccccgatcaaagatcgaaagataacataagaaacatgcagaaaggtctttggaccagacaatatctgaacaatacagaattgtcaccaaataaacaagataaaaggaaaccacgacctagagtggccctctccctttgattgccaaccaaaatcctttgcgctagcgactttctcgccccgcactaaacaaaaacagataaggaaaaggcaaaaacactcaaagccaaattccccacctaaaaatcattctcaaaaaagtcctatcgatccatgatcacgcatgtaatctttgatttgataggaaatgatt

SEQ ID NO: 276614 - DNA, 438 bp, Glycine max
  unsure (1)..(438): unsure at all n locations
tagcgcgcaaggcgcgcttagcgcgacaacacanaaacatatactctggctaagagagacatactcgcttagctaaaacaacacaatggctaagcgagcatggctcgctaagccttattctctcacagagagctaattgcgcttagcgagactgacttgcttagcacgacacactacacaggcttagcgccagcaagcgtttagccaaacttgaccactggaacatgattggcttagcgagcaagctcactaagcctaattcaaaaataaagaagaaattgcgcttagcgagactaactcgcttagcgcatgaacaaaaactcggaaaactaaattgctttgggcttagcgagactgactcgcttagcccaagcttattcactaatagaggttgggtggcttagcgagactaactcacttagccactaacagaagacc

SEQ ID NO: 276615 - DNA, 338 bp, Glycine max
tgaagctgacaggatcaacaatggttggttgaattatctccttagctgggaagacaccccatgtgacagcattaacatcagtttgacccacattagatttccagctcccgtctttattcacagtcatataagttcaagatgtttgatccttgcattcatcaacaagtgcatccagcttttccttagagcagaagaactctacatatgccttctggtaaacatacccgcctggtccaccccagactatgccaaatttcaaacacaaacgatttactgtatctcatatccaccaaccaatatggaccagatatgaataccctcatcacaaactgcaccct

SEQ ID NO: 276616 - DNA, 433 bp, Glycine max
  unsure (1)..(433): unsure at all n locations
agcttgttaggctaaagatcatttaaattggtatcaatattttgtccttagaacaaagcactcaaaaagacacacatctccggttctctcttgtttctgtagcatctgccaaataataatacataaaataaaaaattcccctgtaactcaagctatatcgagcgatgtcctggttgtgttgtgcttaatgtgcatgaaatgcaccctcgttttattaattntgaagactaatataatttcaaggaccattaagatgaggatttatgcgttaagaaagtgattcaggcctcacattaaataataattggagacatatataatacaatagcagccatctccgcacttcattaatatggaataaaacaaaggagttaaagacagagcgttggttttgttctgtggaataattaatggatgcaaaaacataactatc

SEQ ID NO: 276617 - DNA, 205 bp, Glycine max
  unsure (1)..(205): unsure at all n locations
aacttttcttacttcccataactcttttaactttattnacccaaagactacttattgaaacacaagaggcggaacccaagcttggcatacataccacttgatgcaaacatagtctcagccgttggtacatcctagagtgcaaaacattctcacgttttcttagtcatatctcatgaaccatcgagaagctctttggtattctcct

SEQ ID NO: 276618 - DNA, 350 bp, Glycine max
  unsure (1)..(350): unsure at all n locations
agcttgtagaatggccagacatgatacatgtcaaggtttggtttggttcaagggtaaaagggatgccccacattatttccatgacacaaatgcaaaaatgatgatttggaaactttatgcaaaactggtcatgcatgcacctatgcggacactcaagtgtcaaatttttatggtcatgtgatgctagggctcangattcatttccttcattttagtcaacccaatatttccaaaatatgttcttttatcaatttgtgcattcatccgagtccatttcgggcgtccgggaaaattttcacagcattcacccttcaggtgtacacattntttttcaaaaactagttatgatc

SEQ ID NO: 276619 - DNA, 181 bp, Glycine max
gctaattatatgtctgttctacaacttttgtaacgcgactgacatgtttctcggagctcttagttgctgaggctatgctacatattccagatcctggattatagcatttgcgcgtgtttctaacatccggtatacgtcccaatatcgctcttaccgtgtggcagatcgtgcaaaggatccg

SEQ ID NO: 276620 - DNA, 448 bp, Glycine max
  unsure (1)..(448): unsure at all n locations
agcttgtggaggcttcagagaagaaaaaatagcatagttggtacttgtgttagtgaaaatcctacaagtgtagggatttgacgtagcccaaggttgttgatgaactaaagtaaattctatgtgtgctttatcctttttactggttatgattttttttcttttatatcttttctttgagaaacatattttacaatggtatatctttgatgtaaaatcattagaagtttctcaaactgtgttcaaagtgcaaaagcaacgtctactcgattgcataacagataaaatatagatcttacactgtctggactttgataattnttttgagtagtttcttgagtagtgtatgacaacacctttatgagatttttactagaaaactatttntatacaaaatgctgtcaaatgataaagattgctactaacaaagtttcttaagtagtgtattctt

SEQ ID NO: 276621 - DNA, 220 bp, Glycine max
tacaacaaacttatatcattttcacttatgagcatacaagcgggacatgtatctcatgttgaatatactaagctagatgcaaagaattaccttaaataaaaaggacaaagtatggtgcatagggaagttggcagttcgacgtaatacccccagcaacagctatcaaagaattcatcatttttctatgcatggtagatggacatcaatgagcgaatgacat

SEQ ID NO: 276622 - DNA, 417 bp, Glycine max
agcttgaaggaaaactggatgcattggttaacttggtaacccagctggctttgaaccagaaatctgtacctgttgcaagggtttgtggtttgtgctcctctgctgaccaccatacagacctttgcccttccatgcagcaacctggagcaattgagcagcccgaagcttatgctgcaaatatttacaatagagctcctcaacctcagcagcaaaatcaaccacagcagaacaattatgacctctccagcaacagatacaaccctggatggaggaatcaccctaatctcagatggtctagccctcagcaacaacaacagcagcagcctgcttcttccttccaaaatgatgctggcccaagcagactatacattcctccaccaatccaacaatagcaaaagcaccagaaacaaccaacag

SEQ ID NO: 276623 - DNA, 396 bp, Glycine max
  unsure (1)..(396): unsure at all n locations
acaaaattcttgaccgnttccnnnttgggaccntggacttcatgtcccggagggtctcctggagatgctcccctcactaccgttggaggaggcaaggaaggagacggacacggtgctcttcggggccgtcgacgagctcttggagaaaaccggtgttgaagccaaagacattgggattcttgtggtgaattgttgctcgttcaattccacaccatctttctctgactcaattgtcaaccggtacaagcttagagggaacattttggctataattctagtgggatggggtgcagtgctggggtcttgctgttgacttggcacacagttcctcagggtctctcttacatcatggctataaataatattcatgcattttgattgtttactgcatacata

SEQ ID NO: 276624 - DNA, 88 bp, Glycine max
  unsure (1)..(88): unsure at all n locations
gctttctgaaaggatgtgactnttacatttgaatttgaatttcaacgttcanaggcactggtaatcgattaccaaaanattgtaattg

SEQ ID NO: 276625 - DNA, 511 bp, Glycine max
  unsure (1)..(511): unsure at all n locations
ncggatatannnnnnanangnnnnnttcggacctatggtcctanncntcaannacttnagaatagagcacgactcagacatatactgatgtagtgngactttatgacgataaacttgtaatgatgagattctaccatccttttgtattttaactttctcaaaacagttctctctaagcatggtcactcttctggccaagtaccttcaatttctatatgcactgtctacatatacagccctttctcctcttttcactgaactgcctcctaatggcagcggaataccctacgcctatcgcatctcgctcctccacaccaacctctcccgcacccctcccgtcactcctcagcactccgtatctcacccaaccctacctcacacgagcccagtcccacctcaatacctcctcatcccccccaacaccccctctgctcgccccgcatcccatctctctcgctcccgaccactcccccgaccgccacgaccccaataccccctgccagacactcgg

SEQ ID NO: 276626 - DNA, 388 bp, Glycine max
agcttgagatgaggaagtgttgaagggtgaaacttcctgcttttattgttgaccacagagtggtacctggagatatgtcgcgggggtcaggagaccttgaggacgtcaggtggggtgctattgcccaaaaccaagcttgaccaatcccgacccaacccgggcatagtcggtcagtgagaacctgtgatgtacctaaacaggcgagctcctggcagtcaacaaataaaaggaacaaagaccacaaagcaaggaggcttgtggtggctggccagctgtgaactttgattgatatgtgggttatggcctctggtaattgattaccaagggtaggtaatcgattacaaggcttacaattgaagacatgaggctaagatggtctctggtaatc

SEQ ID NO: 276627 - DNA, 409 bp, Glycine max
agaatcattacgcataggcaaaagatcaagaggagttagtggattaaaaccataaacaacttcaaaaggagaacaattagtggtgctatgaacagctctattgtaagcaaattcaacatggggtaaacaagcttcccaagtttttaagttctttctcaaaactgtcctaagcaaagttcccaaagtactattaacaacttccgtttgcccatcggattgtgggtgacaagtggttgaaaataacaattttatgccccacttgctccacaaagtgcttccaaaatgacttatgaacttagagtccctatcactaacaatgattcctggcaaaccatggagtatcacaatctcccttgaaaacaaattagccacatgggaagcgtcatcaaactttttacatggaataaat

SEQ ID NO: 276628 - DNA, 477 bp, Glycine max
  unsure (1)..(477): unsure at all n locations
atctctaagcacctgcggcatgcaagcttctgcaattaattntcattacaatgctaacatttcctttcttcaattttaactgatagttgaagtaggaataatccatttatcatactctaaatatgcttagcattaatgtgacgaagaaatgtctccttgcagaaggttggtgtcctgtttttgcaacaagtcaggttcgtccttgaactatgaatttaatttctgatacattgtgcataaaccttcatgtaatgcagtttttactggctggtatagctaattaatttgattcaatacttgacagattcacaaagtattgcagcgggcaactatggactgcagttctcaagttgtggcgatattccaggttttagagacaacggaatcaccacctacctattgttgcacaaacaaattcacttcttctcaagaaattggtgatgcctatgggtaatttacgtagacctcagcatgtgc

SEQ ID NO: 276629 - DNA, 436 bp, Glycine max
atatgtatataaaatgacataacaaagctactaaaaatctaaaacatagattaacactaatagaaatcagagactagaaagagcagtaaaaaggtaaatcacctttggaggtttaattccaactcgaaggaagagctcaggattcattataggcagttcaattgactccctcaattccctgatctgatcagataagccaccaacagctgagtagctgatattaccaggatcttcatgcaacatattgtaaactactggatcaacctggcaactccaacgacaaagaattagagacaatagtgaccaccagggatccaataaatcagatcttagcacaacaggaaaagaacatgttcataaaatgaaaatattaaaataataaactacgacttacttctcgaggaagagctcgcattatggtgagtgttgtcatatc

SEQ ID NO: 276630 - DNA, 420 bp, Glycine max
agcttaggagtgaaacacttattgtgaggacaagttgctctgccattaaatttgattgtcattcttgttgcatatttctaaccttgtatttgatttgattgagctaaaaagttgaatgtgagcaccatacttagttaattgaagcacatgaacaaaaatttgttgaataaaggggaatgtaagaagtgtgtatgtaacttgtcattgtgtatccttagtctttagttttaatttgtcttttgttttttagtcttagtttaattttgtttttgagtccatatttctttttttaaagtattttttactatattagaaattttatttagtcttgcttgaggacaagcaaaggtctaagtttggagtgttgataaacgtcaaatttaccggagtttcatattgcattttttacgtttatttggc

SEQ ID NO: 276631 - DNA, 411 bp, Glycine max
agcttgtaatgagaagcaccaagataagtaatttttgtcttttttattcaatattttatttttttctctctatacaatacattcttgttatctcttacaacacttttttttgagaaaaattgaaaaaaaaattgtatcctatacgaagaattaattttttatatatatatatatatatatagatagatagatagatagatagatagatagatagatagatagatagataacaatcttgtctatttatatttttcctcttataaaattcattatcactatatgcttattgtgtcatttgcctatcttaaggtatgcggctgtacttgatttcattatcattatatgaaaatgactatatatatatatatatatatatatatatatatatatatatattcctattcattcatt

SEQ ID NO: 276632 - DNA, 451 bp, Glycine max
  unsure (1)..(451): unsure at all n locations
agctngcatttggacttgcgaaatccccactccatcattaggattattacctgtcatctcaaacaaacaaatcaaacgtaacaagacaattatagttgttgtttgaatacctcacccactcaagtgtatcacacaattatggcttttctctaatgaaaacactattgccttttaccactctaatttcccttgagttcttaggcaattcaagagattatggccacaacaaagaacaattcaccaatatgtgtaaggtaaggctagagagacaaggaaaaggttaaccaagaaaaaggctaacaatgtttttaggcacaattgaaggaaataaaattcagaatttaggaattcaagtaacaatccttcatacaaccaatatattaccttanagagaattttttttttaaaaaaagttcttcaatcatgaaccatnntagcccaattttttaat

SEQ ID NO: 276633 - DNA, 404 bp, Glycine max
  unsure (1)..(404): unsure at all n locations
ccttgtatatgcataacatcaaaatcgatangtataggacaatcatcaaagatgaccatctcgaatttacccatgaattctctcaaaacatggttcattaatctcataaaattgcttggtgcataagtcaaaccgaaaggcataaccaaccattcatataatccatgtttagttttgaaagcggatttccattcatctccttctttaatccttatttgatagtaaccacttttcaaatcaattttggaaaagaacaagcaccatgcaattcatcacgcaaatcattaagtctacgtattggatacctatatttaatggcaatattgtgtgaagctctacacatcggagcacattctccagaaccatgtctctttgaacccaattccccgacagcacatggacta

SEQ ID NO: 276634 - DNA, 438 bp, Glycine max
  unsure (1)..(438): unsure at all n locations
agctntgacccccttgattattcccttctgttactctaaactctgctctcagatatgttgattaatatttccataaagtttcatatggtattattaccttgctcataaattttcatatgattataccgtattgttgtacagtggaaagaagtaattcaatatagtttcttggttcttttggctagcactttcgtaggctttgtgaaagattaattgcgatgagagaaaaggacaagtggcataacgggcaaagtaggtttaatttacaacgatggacttgtattttatagagtaatttacaacgaaggacaagtataattttttttattgtatttattctatcccttgccgtggaagaaaagaatttgattatagaaaattccttggtataaaatattaatggtttattacgatttgaagaggtttttccgtaagtat

SEQ ID NO: 276635 - DNA, 383 bp, Glycine max
  unsure (1)..(383): unsure at all n locations
tgttatgcaattaaagcaaccttgatnntattatgaattagtctagtttatgcaaaccaagtattcttgtgatttcttttttggttctttgcaattttggtatgaatatcttcaagattgaattatagtttgatttgttagctgttatggtaaaattgttattgaaatcagtttccatgtactgtgttgtcttctgtccattctcatcttgttttcatactttagtcctctctctgtctaagacatgtgaataaaaataatatcatatntttcatattgacattgcataaatgtgcttatgttggaaagtcgctttaattacagccacccatggcctgcctcagttgtggcttctttgggctggcttaattgcagcagcattg

SEQ ID NO: 276636 - DNA, 479 bp, Glycine max
  unsure (1)..(479): unsure at all n locations
ctgacacattganccgttgtnccatggagacccgagatcctctcatcacccgcagcttcagcttcctagaaccctcgcaagtctagaatctatggaatgatagaatgcttaagctaagagattgagaagttccacccatgtcttttataaaataatttcaatcataaccactngttgtgatccttnttttcagcatgaacgtgaccctttcatgcttaacaagtgctttcctttgttctgacaacgtccagcctcaatcatacgaacatatgtgcgggagggggggaggaccatacacttggacaccattggaacgggctcattttcaacatcacactctacttcttcaatgataggatccacatgatgactgcagacgaatatgacgcaaggcctgaacaccctagaggaaaaggtgatccataccacactatacttattatattcttaatgcaactcatgaattgtatttcattcct

SEQ ID NO: 276637 - DNA, 589 bp, Glycine max
  unsure (1)..(589): unsure at all n locations
ttcgcggcannnnnggacgggcacganagtttacatgggccaatcntnaannacanacacgtagggggaggcgcaagctcgtacgacatatcgatcgcattgtatgaccactcactatcatatgaattggaagtagaggagcagcttcaacacatataatcgcaatcgtggcgcgacaacaagtggggtcagcataactctgaactgaatcgaccattgcacaactgcgcgataggtgattactgcgcattcaactactacagtgtctcgacacacttatatgaacgtgttgagagttacagactagcaatgaacatacgtactgatcattatagatgtgtttctaatctcaaacatagcactatcattggttcgcttacgcgcgnacattagagtggtcccgctgcgtgatgacagctggctgtgcatgcctcatgatgacccatccgactgtgcatactggtgaatactgagagatacgctgctcgtactccgatgctggcgcagatggtatggcgatatgagttgtgggcgtcggggatggccccaagcactggccgcggaagtgtcctctcctgatccagtgtcg

SEQ ID NO: 276638 - DNA, 109 bp, Glycine max
gaggaggagttcatttaattttcactttcctggttggaaggatagaattaagaaggaaggagggtcatcaacaaataatcccatggttccacttaaagaaattcaaatt

SEQ ID NO: 276639 - DNA, 487 bp, Glycine max
  unsure (1)..(487): unsure at all n locations
ngaggccccnggcccccctcnnnnagggccccttccttttcatcacctnntaannnnnnnnnannnannnnntaaannnananattgagannaattccaacnccggagnncggacccccagcggctaatgatagccgccgatgaccccattacggtttcccctaagctctctgtcctttcttaacgccgaatccaatgcctggggaactccttggagtaccctcgcgttgtggccactgaacccccgggcgaggaaaggcgggaggctttcgcctgatggcactcctctcatgaggaacccaagcggcttatggcgaggacgggataataattaatacaacccctggttcccatcaagggaacattggacattcctcgcatgatgatagaaatcggaatcttcccttctttagcgagggaaccaataacagacgccctccatgcagcaagagttggcccaattcgctttctttttgacgacgagcgc

SEQ ID NO: 276640 - DNA, 430 bp, Glycine max
  unsure (1)..(430): unsure at all n locations
agctntacccatgctcctcctttttgttggactgtcatcataacaaacttgagattgctcttttcggtcttgtattctcagaaaaaacacacgtagaacaaacgtcccataatcttgtaaagtattgagatttatttaaaaattaatttatcaataaatatttttcatatgtatgagtttataattgaatttctgagcacatttttgtttatcatttctgatcatatattttttatttataaaaattaaatacggtataaaagattcattctaatacccaaacattntatttaactaattgaattagatatcttaattctaatcacatatttaaaaaatgaagtgttgcgtattggtcataccacaaattaatattctagttaaaaattataatttgcatgcaacaatacaattacactggacactatac

SEQ ID NO: 276641 - DNA, 384 bp, Glycine max
  unsure (1)..(384): unsure at all n locations
agcttgctcgataagccagtgatgtccagtagagtagtcgcgctaagcgcaaatccttatctgttttgaaaatttgtggaattgggcatagcgagcctgctcgctaggccaattctgcagaaaaanaatggattgtgttcactcgctaagtgtgtggtagccacacgcttagcgcataagtcatttttcctaaggcacgttaagcgagtcacttgcgctaagcgcctagtctgattnntcaatttgttttatgatttttaatttgaataaattcttgtctaatcttatgttttgattcttttgtattgcagatggcttcccgtatgaggaaagccataactntagtgtctcagaccggttatgatagatcaagattngtatcac

SEQ ID NO: 276642 - DNA, 452 bp, Glycine max
  unsure (1)..(452): unsure at all n locations
agcttgtataaatggtatcaaactctcccaatttatggttattttgtagtgttataagtattttttgttaagcataggtaataaatacttagtatttttcattttgtgtgtttaataatcattttctctcaatttcaggttaattaggcaagctttggaaagtgttgttttcaccttctcgctaagccaatcagttggcttagcgagcgtccactaagcgcaacactcctgngctaagcgcgaggaagaatccagaagaagatgagctgtacaggttcgctaagcgcacctgtcgcaacctacccttttgcgggtgagcgaggcaaggctcacgggtgcgtcttccataggaggaaaatgcgcggagtcgccaccaacgtttattgaaaggaaaatgttagaaaaaccaaaggaaaccggtcatgaagaatattccagattcgggagttatc

SEQ ID NO: 276643 - DNA, 248 bp, Glycine max
gactataaaaaaaggaaatcaatggaccaataggaggaaggaaatgactctatggctaagattattataagtcacaaggtccatgcctatataatgactcttaagttctgaaactctgaagctttaaaactctgaagtagtaatcacaccttatcagctactctggagtcttaaatctagaaatagttaccatctttatagtactatctgaaaaataactatcccccatagtagtacatacaactaat

SEQ ID NO: 276644 - DNA, 454 bp, Glycine max
  unsure (1)..(454): unsure at all n locations
agctntgatnggtttgagaagaaatcacatgtttgtcatcatcaagaagggggagaatgtgaatgtatgtatacatgattttgatgatgtcaaaagaagaatcaaacaaggctcattttgcttcaagattaatacaagattgtttcaacaaacagagccttgattcgagatttcttcaagatcaagccttgcttcacaatgagaggtttcaagtcattcaaggcacatgtaatcgattaccaatacatgtaatcgattaccaatggtttgaaagtgtgtaatcgattacacatcatatgtaatcgattaccagagactctgaacgttgagaattgaaattttaaatgaagggtcacatctgttcaagcataataattgtgtaatcgattacactaattttgtaatcgattaccagagcggattttcaaggaatatcgccaacagtcacatcttt

SEQ ID NO: 276645 - DNA, 407 bp, Glycine max
  unsure (1)..(407): unsure at all n locations
ttaccatatatttttaatnaattacacantgcaaattttgaattcaaattttaatacctgctgtaaatcanttttnnccactgntaatcnattacatcctctggtaatcgattaccaaagagtaaatttctttgaaaaagactttttaagttaaaattcttggccaaaccttttgctacttcaattggaattcccttcctaattaatataccctttctaagactagagacttgtcttgatcatccatcttgaatatctttaatttctttgtcttgaataaagctttgaaacgcatgtgaaccttcggcatcatnaaaacattcaacttgatcctttgtctacacaaccaacgttcttcaaccttcatttttctgatgatacgacttgaatgtgacatgtgcttatca

SEQ ID NO: 276646 - DNA, 441 bp, Glycine max
  unsure (1)..(441): unsure at all n locations
agcttcccaaccagagccataatcccatcttccggttataacaaatttagaagcaattattccaattaatgaaggatgaccgatacctgagagtgagcccacattacacgagccataatagcccaccaaccccaaatagaatctcaacaatatttcaacatagagaagagtatattttaacttccctccactcacaaaataacccgagccctaaatgcatgaatatatattccaccaatcccctctaacgagggaagcataaaacgaatccccgtcaagaacggtgtaggcacagcaatattcatagaccaatccgaaaaggaggaaatgtttggggactntgtttaagccatgtccaactagaagacataacgttatccgagagtttctccaaatcaaattgctccccacgaaaatgttttcattacggaaattccagat

SEQ ID NO: 276647 - DNA, 397 bp, Glycine max
  unsure (1)..(397): unsure at all n locations
tataacgtttttctttaataaacattggtggaggntncgcacatttttctttcttgggagacgcacccgtgaatctcgcgtcaccctcccgccgaagggtaggtttccacaacgacaatcaaaaggcttcctccaaaacaaagctaagccaccgcttctaccaaaacaatcaacatagaaacaataatcaaaattcagctctacttttatttcatcaattctttagacatgaaccaacgttttagaaagaaaaatagcattcaatttatgagctcgaatgaggtcacagagaattaactgcatgtgggttgcccaggccctaacaattctaacttaaataactcattggccctagcaggcctaattactatgttcaccattaaaaaatgctctttac

SEQ ID NO: 276648 - DNA, 358 bp, Glycine max
cagctattcttggtgggttgatgtactctatctcgcagaatggcatgatcactggcagacatagtcataatcaattcacttgcctctttagggattctcaactttatcttccctcctgctgaagcatctaacaactgcttgggttgcggtctcagcccatctataaacatgttcaatagaattggctcagagaatccatgtgtaggagtctttcttaacaaacctcgaaacctctccaatgcttcactcaaagactcatcatggaatgggtgaaatgatgaaataacaactttcccttctgcagtctttgactcggagaagtatttcttcagaaattactcaacaacttcctcccacg

SEQ ID NO: 276649 - DNA, 237 bp, Glycine max
gaactgctattagcattgttaggcgagtcctctagcttatatgaatctgcgatgctcgctttctggactcattgttcaagttattgctggaatcatcaaaagaacggacaaatgttctgtttgccattttgcaattcgcagagctgcaaacatcaacttatgcattccatagcaccaggccaaggcatacatagaaacgtattatactactggatcgtgatacgcggattacgttaa

SEQ ID NO: 276650 - DNA, 451 bp, Glycine max
  unsure (1)..(451): unsure at all n locations
agcttgagaatcttcccaacagtctggcagtcttgcnttccacttctttgtcgtcaaacagtaagatattattacacatagtgataatttttagcctatcattatattaaattaattgtttgaaaatttaaaagaccgatggtgttaacaaaaaatcaaagaaagaacaaaaactaaacatttgaaacataaaggactaaaaatgatatttaacaaaaaaaaaaaaaattcttaagaaattggtcttattatcttaaatntcaactacttatatttttttacttaattgttaatttgattttatacatttctccaatgatttttttaattgtaaaatacgcttataataatagagataataattagttaaatatataaataaactctaaattgaaagacaaagacaaacatattaaatctaataaaatttagaagtttagacttaaatatt

SEQ ID NO: 276651 - DNA, 243 bp, Glycine max
agagtgaaaggtactagttccaaatagtttgagagattctgctgtgtgaagatctgcagagaccatagcttgaacaggacgctgtcctgagagcttgagatgattttgtgagtgattgtaatgtcctagatgtggatgagacataccgactacttgtatttctgcaatctctcatcttgctgctctgtatgttgtagaggaagcttcccatttttggaaagctaaattcttggctggatcttg

SEQ ID NO: 276652 - DNA, 434 bp, Glycine max
agcttgccacccagctcgcccaggcgagcaaggttgcttcctccagaagcaacagccttctggaggaatcttctggagggcccaagtgggtctggttgctatttgcacccccatttttactaaatacaccccctgcccttttttggtgattcttttttcgtaaagttacggaaacttacggatttcgcaacgatacttgttttctttccgtaatgttacgaaaccttgtgaattacataatcatccctttttttgacttacggaatgttacggaacctcactaattgtgcaacgatgcttccttttgatttccggtgtgtcacggaaccttacggattatgcatcaataccttcttttgatttccggcatgtcccggaacttcacaaattgcctaatgatgggtgccaaacacctcacaaggaccaaacaaaag

SEQ ID NO: 276653 - DNA, 434 bp, Glycine max
  unsure (1)..(434): unsure at all n locations
agcttaattagcanattcttttttctatgtgactctgacagcaaggagcatttgctttctgcagcaccttactacacaaaaggtggagtttgcctcattattttaacttctgtttgtttccctgttccatctgtagtctgaaacctgatatcattcttgtttctgtatatagccaagtatttacttgtggaaaggaagggaatcattgatgttattgtgcataaagattcgaatgctgctgatgtcctaaagttattctttcatgctcttgtcttggcaaagaatgttcataaaagcaaatctgtgcattcagagggccaaaaatggatagattatcaatatgaagtttttattcagaaggtaattctgtaatcctttagttaaattcgacttagcttctatatttgcagtaatattttaacagtccgatatat

SEQ ID NO: 276654 - DNA, 411 bp, Glycine max
  unsure (1)..(411): unsure at all n locations
agctnttgcccaatgaacttttcttgacaaagcatatgttgaacaaaaactcttagaaagatgttaagaataattttcttgaaattcgtgtcatggtcacgtattatagccatttgatggctcttgaagaaaccatgttaaaagttgtgactcttggcaatttcttcaaaatcagtcactgataatcgattaccataatggtgtaattgattacacagtttattttatcaaaggttgtgactcttcatgttgaggtttgaaatctaacgttcagaatcactggtaatcgattacaaatattgtgtaatcgattacattattttgaaaatacttttgaacgttacaagacaatggtaatcgattgcatgcccatgctaatcgattactacttggttaatcaattataaaact

SEQ ID NO: 276655 - DNA, 348 bp, Glycine max
  unsure (1)..(348): unsure at all n locations
tttcatcgtcattctgggcatgtacaagagccgtggttatgcgatcataaccttttttaatgtgcttgaataaatattcgacggacattgattgattgcaccattctatgttgaggtgagcctgatatttcaacaataagattggattgtatggtaccacgtatctatcgtctanggttattccatttttatctatattcttactatcattatgccttntataaataggatattcctcttgctcaacaacagtttcaggtngctttttctttgaaaacatctacaacatgtttcatgcatggcgactctctatttgcactgacacatgaatcatgcatatacgattct

SEQ ID NO: 276656 - DNA, 415 bp, Glycine max
  unsure (1)..(415): unsure at all n locations
agcttgtaggattatggagtacccatcacatgtggtactangtggcggtcgggcgatggtgcaaaacaattctccacatccacaaatcacatataaacccaccatcccctgttgcccactttcaactgagctcacgtactcccacgtagcccttatcctcgtttctttcaacactgggtccccatcaatcctcccaagcttccacaacatccaagtaattccacatccaatcatcatgaactaacaaaaccaagcaaaataggcaaaggcagaaaactctgcccacaacacaaaccaatatcacagcttttcacatacaaataccccagtaacattctcttcgttccaattcgttaaccggtggatcgactcgaaaattntactggaagtctctagcacataaatctacattatg

SEQ ID NO: 276657 - DNA, 357 bp, Glycine max
  unsure (1)..(357): unsure at all n locations
ctcaagcttcgcanaatttaattttctggaagaccaattactaagtctctcctaactagatgattgagatgatgcatgtttatgtgtgctgtcctacgatgccacaaccaagaatcatttatcttacttaccaaacaactcaactcatgaaatgatgcatgctcaatgtttaacatatacacactacctattctcttgccaatatggacaacctcactagacgtagattcaccaataagataacaattcttattgaattccaatttgaagcctctgtacatagttgactaatgctcaggaggttatgttgtagtccatccacatatagaagattctatatctatgttgtgtactaat

SEQ ID NO: 276658 - DNA, 300 bp, Glycine max
  unsure (1)..(300): unsure at all n locations
agcttcttgcgtagccgctcttgctgctcagaatatcccaaaaacaaatccctcttattactagctattttgaattctttagttcctgaatgtacaaccttcaaattgttgctcgttcccctctttgagaatgaggaggatcttcataggacttcatccagctgatgtttgtnnnccnnancatnatccaccacccttttcttctgtgcctactcatgtgtgatgttgtaaacacatatttatgcctcttaccgttgatgctgagattatcacatcgttcaacgattctcctatctatat

SEQ ID NO: 276659 - DNA, 495 bp, Glycine max
  unsure (1)..(495): unsure at all n locations
ngantcgaggnnnnncccccnnnnnnnnnnaggcacgcaacttagtactcgnnnnnnntnnnnnnnnnnnnnnnngnnnnnnnnnnnnannnttnnnanananaantactgtttatgtgnntacgatnattganctaattggttttcngtnattgagggtgccacttgggtcgtcaggactctccacctttgggcgtattctttgaaagatccgtgcccctttttggagatgttttgtagttgcatactatccggaaccatataaaaattgtcctgatctgcctaaccagggcaactgtaaggcctctccagaatggactcggaaggccttaattagcgttcaaggtaacagtcccagttagacttttctgaaaaaatgtttacctgttcctcatctttgcatatgccaccatcttacacaatacttatctaatgcgtttgggcaagtatcccttgaccttgtaagctcgtcacttgaccttggaagcgcagcct

SEQ ID NO: 276660 - DNA, 479 bp, Glycine max
  unsure (1)..(479): unsure at all n locations
agcccctattnntttgaaaaccattgtgtacccggaatctcttaagtcaacctcgcggcttgcagcctggtggaaggaatactaaggtgactctgttttggcttagagaatattgatggtaaaaccctttggaaccttcaggaaagaaaaaaagaatacctagttgtaggagccctatgaaggctttagaaaaagaaataatacccacaaggtactttgttcctaatggaaagcctatagttgtanggaattgtttgtagccgaagtcgaatggaccaatataactcctagttgtgttggcccctcttactacttttattactattgttggcacttaatttattttacaagcctatttgaacttaacttgatcctgatcatggttttattaaatgtttaccatagagcaccatttcagttatcagtgaaacagaatgtagtataattattgatcattggagtggtctgatcacacaaca

SEQ ID NO: 276661 - DNA, 145 bp, Glycine max
tctatagtgcatgctggcacctggaagcctcaagatggggggaaacatgtatttatcttatctgccacatctataagcacactctcaattagttaccatagccatattcagaattctttcgcacattgttgtcaattggttaaaa

SEQ ID NO: 276662 - DNA, 466 bp, Glycine max
  unsure (1)..(466): unsure at all n locations
cggatganccatccgaccgngatccttaagcatcgcggctgcagctacccaatcaatcgaatgaagtaacttaactaacaatggcccacttaaccgaaccaattaaccctaaatgccaaggttgggcgcctaacgcttgagaatcaccacctaacgcattaacagaagtgcgcttaaccccagggttgggcttaaagaaaagactatttttcaaaaaaaaagtttcttgagtatttttcagtcccttttcccagaaaatgaaacccttattgtaacattcaaagattggttgatatactcctatgtacagattatatagcacgttccaaatgattaaatgcatgaaaaacaaagaccacagaaataaaactgggttgctcccagaagcgctttttacgtcatagctgacctctacctcactgggatctatgtttggtctacttcaaacctctgactcctcataccg

SEQ ID NO: 276663 - DNA, 243 bp, Glycine max
aatgaaaatggggtaaacttggagcaaactcttatctcaaacaagtctatatcatcaatctaaactcgcttcaactggttttatgacaaaaaccctaccgaatcaaaatttgacttctcaatacccaattttaccctaaaaatggctcttggtttcactttggtcactcatattcctcatttgcacagtctaagctttctcataagtcctaaatgacatttcaaactaggattaactcccttt

SEQ ID NO: 276664 - DNA, 304 bp, Glycine max
tcgatctatggcaacttttaaatcgtctttcaaaatcatgccttcgacctaaactgatcctttttggctcttcagagcttaagatcggtggtgctgccccataaagctcttcagaacttggtttggccatgttcttcttttcgggccctcttggtttcttgttccaaggcttcacagtggccatattgatatcctttagttcatcatattcctttcggactttgatggtcgtcaacttaaaattctctttgactacttgggcttgttcaagcttcacttttaggggttggacttcctcactttc

SEQ ID NO: 276665 - DNA, 515 bp, Glycine max
  unsure (1)..(515): unsure at all n locations
cggtgggatgatacatggantacgtgacactatgacactaagctcaccatattggtaatagaacatttcagtggatccaacatactattagaataacacgtnatagatgagcctatccgataaaaaaaggtcaacatacgtgggtaacctgaattctatgccttagagttgcttgaatggtaaatagccttaaacggacccccaacaattggtttgagaagctaatcaagtaagtgtgacgagctcctctgaaccataatttgttatacaaggtaaaataacttaantagcacaacacagggtgaacacacaaatattaagctcaaactaaatgtgtttgtagagaagaaccagcattacgaaatcctttctctcactgtttctctgtggccacttgcacttctccatacccaatcacaacaacacatgtacaaactaggtgagtgagcagacaccctcgttgaaaatgattgaggacaaaatagttcatggtgatcatgaaagtagtgtgaagg

SEQ ID NO: 276666 - DNA, 338 bp, Glycine max
  unsure (1)..(338): unsure at all n locations
ttatatagagatgttttggtttgattgatacgacttanaatttaatcatgggttaaggagttgtacaactgatggagatatattacacttagttagggatgcttttgaaaatgagaatgagataaatgtttattttcatcatgaagtagatccaattttagaagaagtcccacaaatgttgtacttggaatgtgatccaattcgaaaagctgttgagaatgaggatgatttagatgatgtacctgttgctggccatgaggaagggaagttttaattcatctgtacttggtccgacatggntacccataataattaatatgataaattttactttatca

SEQ ID NO: 276667 - DNA, 527 bp, Glycine max
  unsure (1)..(527): unsure at all n locations
agcgtttgtcccttgattgcgccttgtatacgtgacctatgatactaagctctngattcatgagcatctncagttatttaccttatgatgcaaganctggtggtcagtccaatatcgntggatgtatnctttttgagatgtattaaaatgagtaataatttatacaccatggtattatatacgtatagtcattttaaaaaaaatacttattcatattaaatttagggttttgcactccctcaaaaataagtcaagaataaagctagagttgagggatcgatttgtgaagcgtacttagtggaggagacatctacccttgcctcgttttactatcctgatctaatngcaacaagaaggactangatgcctcaaaatgttgatgcggatgaanggtcttcatctcttcttctatatcaattttcaatatccaggaagagcgagtggtaaattncaaacatatttttggacaagttgatgtcatggtgctacttgtacgtctcaaattgtcagagttgagcctattaaag

SEQ ID NO: 276668 - DNA, 218 bp, Glycine max
gtcatgtctccaagggctccaccactggcaacatctatcatacttctctccatgttactgagtccttcataaaaatattggagaagaaggtgctcagaaatctggtggtgaaggcaactggcacataatttcttaaatctctcccagtattcatataagctctctccactgagttgcctaatttttgaaatatcttttctgatggtcgtggtcttgga

SEQ ID NO: 276669 - DNA, 364 bp, Glycine max
  unsure (1)..(364): unsure at all n locations
atgctaaagtatgccttagtcattcatccctatgagatgttgttgaagtattagcaatcagaattgccattccttggattatagggttgaaccaagctcatgcttttacaaaaaagttcatcaagtcaagttgaaatatggaagtaaccgtcttgcaaaattgaggcaaaagatgaatcgagtcacatcactgcttcgtctactgccaaacatatttaggattattgatgtccttgttacttccagtttcaccttgacaaagatgtcatggaccatgttgaaaatctaaattgattcaaccccatatcttgcgtaaaaattcgcaatacttcaactgtacatcattcgcatgcatncatgcttt

SEQ ID NO: 276670 - DNA, 340 bp, Glycine max
  unsure (1)..(340): unsure at all n locations
atgcacttgtatacagtacgtttgttttttttcttttcaattcattgtggaatatgaatatgaggaagatcaaacattggttgaagaaagtagggggaaatccattgatgaaccgttattcgcangcttttcggcaaatctcaaaatgtccaattaaacactcatgagaactttattatttctaataattttatttgactccaataaaattaagttttaataaagaatatttattgtttattatcacaaatcataattagattattaaaacaatatttataattggagtgtaatagcaaaaagtttccactactaggtanagtcatttggaaatgaatca

SEQ ID NO: 276671 - DNA, 272 bp, Glycine max
ctacatcttattctatttcgcgttcctttttctacctctttttttttcaattgaagctaaatgtgttaaactggaacgggttctcatgaagctgaaaacgaaaccgtttcaatcgagctaagaacggacagttgtcatggcaccttacggttctcttcctcttccgccttctcgaattttttgtcttcaccgctccatttgtgctgttttgttaaccctagtttctttccgcttaacctttatttagattagcctaagcattggtttcgatt

SEQ ID NO: 276672 - DNA, 342 bp, Glycine max
  unsure (1)..(342): unsure at all n locations
ctttcgattcattttatgtacccgtggtggtccacattgtgtttcgtgtatttttattcttgtttcatttactttntatacctccttttgacgtgcttaagccattttatntaagtaatttctcgcttaaactaaaaataaaataaatntccaccgatcgtttgaattgtattatccgttaacttcggttaaaataaattccgaccgttcggtcgtgccgtaaccacgttggaaatcaaaaaaagaggtaaaataataatataaaataaaaaaataccttctagtaaaataaagcggaaaatcaatcggacgttnttctctttggaattctcattcttaatc

SEQ ID NO: 276673 - DNA, 458 bp, Glycine max
  unsure (1)..(458): unsure at all n locations
ctggtgggacatcttgacttgctttccaatctgacattcttcacagattctgccttcttctattntcagattgggaatgcctctaacagcacttttgtcaaggattttcttcatgcctcttaagtgcagatgttcaaacctttgatgccatattctgacttcatcttctttggaggatagacatgtggaggaagtagctggttcttggggtgttcatangtaacaattgtcctttgacctgctgcccttcattagaacttcactcttctcatttgtcaccaaacattctgactttgtgaagttacattgaatcttcatacacagctgactgatgctgatcaagttgcagtagtccctcaccgcagtactttgtcagactngaagtcatcatgactactttcccatccatgactttcttagagcatctcaatgtacataacagtgacaagctaatgtcn

SEQ ID NO: 276674 - DNA, 299 bp, Glycine max
tgctgattacattctctctctatctcaagcatattcttctttacatcatcaaaatcttcatgatttagattctccccccatttgatgatgacaaccacctataagttatgagctaccacaaaaaaaatatctatttgcatataatttactcccccttggttttgcaatgtttgcttatatgagacaattgaagatttcatatttttcatatataaacagttgtctcataaagaatatataaattttcctactaatctaacttttattcttctctccccctttgtcaacatctaaaacaa

SEQ ID NO: 276675 - DNA, 310 bp, Glycine max
gaaaaaaattataatcttccttcggaacctcctctgattcataagcataaattggggagggaggaataaaaaaccgcaccctaaaaagccgcatcttttcctaagaagtgataaatcccaatggaattctgatcaaaaatcagccggaacactcatctctatagcccacagccacatatatacttatgtatcagaaacatcaccaataaaatgatgaaactacatttaccccaacttcagaagtatacttctgcatgagaataactcccatttcatacaacagctcctggtcatgcatgtaccctgatgt

SEQ ID NO: 276676 - DNA, 377 bp, Glycine max
  unsure (1)..(377): unsure at all n locations
agcttaacaattgcaactacctnctttggtgtctcaggctgaacctgtttctaaaggacatcacctttttcatcttctcactaaactgcagattccgactcgatatctcaccattgctgattgtgatgctggtgttacttcgcctgagttcttgctttgggagcaacaagatcagctccttctattgtggcttcaatctactgtttccggcgaggtgcttccgcggcttgttggttacaaaactgtgtggcatctttgggacaagctccacacacactnttactccattgttcgtgtgaaaaaaccggcactccacaatgatntacgtaacattttttctaaacaatagntcaatatctggctattttgtttgattc

SEQ ID NO: 276677 - DNA, 501 bp, Glycine max
  unsure (1)..(501): unsure at all n locations
tcgatgtttgaaaccttgattagtacanatgtaganacgtcaagcctctccaangggcatggttatntccagtttcctgaaaatatctataaatcacgcctttatggnggtgcttctccttcttggaaggtaccactggatatggtacttccacaccttcattcacagctttttctgtcatcttctatctaacttgttcacttctactactatctacactcatatatttggcattataacattgcctacataatctaatacttttacttaactcgggcattaattactttgcgtgaccaatattgttcgcattgcctgataccgtcaccctacataatattatttcataaaccattatttggcacctacttgtgggcagaaaaaattgctcatctcaactaataaaactatactcctgtaacaaagtcaattcaacttggataatataaaattcccgcaaacttgactatttaaatttttgtattatttaaaactatcacg

SEQ ID NO: 276678 - DNA, 185 bp, Glycine max
aatttcccatcaaaggaaaaaaggagaggaaaggaaattcccaatccaagagtgggagaaagccaaaagaaaagaaagaaaattcccaatccaagaatgggagaaagaaaaagagaacgagaagaaggaaggaaagctcctgatcaaagatcgaaagaaaacagaagaaatgtgcagaggggatc

SEQ ID NO: 276679 - DNA, 507 bp, Glycine max
  unsure (1)..(507): unsure at all n locations
aatngacaccatgattgactaatggccagccttgttgaccttgctaagncatgcttccgatgggaataatggttttggaaattaaacccaaaatgcttaaggagaacttaggaaaaatatgtaaaattggtttcttaaccaaacttcggaaatctaatctaaatggctaaaattaagggctaccttcctaaataatgtgtaaattcccttaggataccttgaccttcaaataaacttcacacagaaacatattacacccgtgactcagtgcacaagttgccaattctcttgcacaagatggganattctaacctccagacaaatttntaatttctctggtcangccttcactttaaatantcacatacctatatatatatatatatatatatatatatatatatatatatatatatatatatatatatatatatatatatataagcgcangagtgggaactaaaaacatatctcttgcaataactacatatatgtgagccacgattt

SEQ ID NO: 276680 - DNA, 203 bp, Glycine max
gatgaatatgaaggtaataagaattaagggacattatttttttgtaccattatgtattgaaagggtcatgacattatgttcatttagtgtcttaattgaataattatgtaatacttatggattggtatactggaaatagagcaccatgtaaccaaataaagagaatcttctctaaaatctctagtgtcttctctttttctaac

SEQ ID NO: 276681 - DNA, 270 bp, Glycine max
caatatcatgaacttatcttaagaatgtttaaatgtctattattatgttatatcaagtcttaagtaacaaagttgcattggtttcattaacatgttttatggtacatgttttatttcatgaagatttgctttcagtggcctgcagaaaaatcaagagatttcttttatgcccctatcaactcacaacccaggcatgaccttggatatccacaacagttgttattgaacctcatcgggaatattttaaatttatcaataagattcaaaatt

SEQ ID NO: 276682 - DNA, 434 bp, Glycine max
  unsure (1)..(434): unsure at all n locations
cgcaattccttactgccataagaagtccttctatctaagcgaatgtgatgcaatcctaccccccaagggcattggataaaaaactcgaagcagaatggacccaagatgccagaaaagggccaagggttctcatgaaccttatggtagatttcgggtccatgggctaagtatgagcccacttatctttgttgatattagattaagggttcattaattttgggccgtgtatttagggctccataatgtangcagggtaccctagaaatataggaattttcagcccttgtattttagggcacctagaactagttttgtattaggggtagntttgtaatttcacatgcactaagtgaatattngatgtgtgtggtgggaataaatttaattgaatggtagaagtccatccaattaaatttagaggggaggtgagcttc

SEQ ID NO: 276683 - DNA, 525 bp, Glycine max
  unsure (1)..(525): unsure at all n locations
ccgcttttgaaccatgcgaatgctacacttgaaaactcagctatgctgcaacatttcaatgaccttctaacctcagcattctaatcaaccacatttgaacatttattacctcttcaaccaccagatccacccttgattgangaatcaccctaatctcaaaatgtctaacccttaacaacaaccaccaccacctgcttctttctttccaaatggtggttggcccatcagaccattaatttcctcaccaatcccacaacaataaccaccccagaaaccacaaacaagtgaagcttcttcgcaatcttcccttcaagaaacttgtgatgcaaatgactatgccgaacatgccagtttcaacaagagaccagaccctcattcagagcttaactatcagatggacaatngcttcccaattattcacaacagtcccagaattttacatgctgcctctcagctgtccaaatcccaaaatgtcagtgtcatttcatgaagtcgggaagcagtgtcaatgactctacccgtact

SEQ ID NO: 276684 - DNA, 381 bp, Glycine max
  unsure (1)..(381): unsure at all n locations
agcttggttctgggctatagcancccacctgatttcctcaaggtctcctgacccccgcgacatatctccaggtaccactttgtggtcaacgaataaaagtaggaagtctcacccttccacacttcctcatttcaagcttgtaggattatggggtacccatctcatgtggtactaggtggcggtcaggcgatggtgcaaaacaattctccacatccacaaatcacatataaacccaccatcccctattgcccaccttcaactgagctcacgtactcccacgtagctcttatcctcgtttctctcaacaccgggtccccatcaatccttccaagcttncacaacatccaagtaattcaacattcaatcatcacanactaacac

SEQ ID NO: 276685 - DNA, 498 bp, Glycine max
  unsure (1)..(498): unsure at all n locations
ncgatgaatggggtctgattgatcccctgcatnacgcgacactatgatactaagcttgaagaagaaagcaatataagtggttatattaggttgttaatggcgatctagatntatagaattaaaaagcattttaagtcaaaaagtttaagtgggggcattttcataatgactatacattagtttaaaatagaatttagattaatagttggtgattatcaaagtgcctaattatatgatgtagaataattaaaataagttagaattgaatactccaaaaattacaactcagactgacagagaaaaacttgtgtttgtcttttgtgctgtgcgtattagctgcagcattatatgctttaaatatngatttcatgtatgtgtgtgtgtgtgtgtgtgtggtgtgtgtggcgtgtgtgtatgcaatggtnactaacctgacacaatctaaatttttggctaattttctatgtctcattgactggtttgtgacctgacagttcg

SEQ ID NO: 276686 - DNA, 148 bp, Glycine max
  unsure (1)..(148): unsure at all n locations
tatataagatctatgtatcaggggtgttacatgcttnctgctggcttagctntttgttttgaatttacttccttttcattctcggcccgttgcatggaattggttattctttttggtatttaaaatttttaattggggttttatgata

SEQ ID NO: 276687 - DNA, 190 bp, Glycine max
actaagcttctgaacacttcttagaactcttgagaactttctgagatgttctgaaactgagctggtaccaaaccctctaatactagctcactgctgaatgaagctgagtttctcacacctgttgatgctacgaccgcgtgcaacacatgaaatcaaaaagttctcttcaagactctctactgccgaaatc

SEQ ID NO: 276688 - DNA, 363 bp, Glycine max
  unsure (1)..(363): unsure at all n locations
naagctatgctgcanacatttacaatagacctcctcaaccttagcagcaaaatcaaccacagcagaacaattatgacctctncagtaacagatacaaccttggatggaggaatcaccctaatcttagatggtctagcccttaacaacaacaacagcagcctgctctttcttccaaatgttgctgcccaagcagacatatattcctcaccaatcaacaacaacacagccccagaaacagaaacagtgacgctctcgaaccttcctcgagaacttggagcaatgactatgcaaaatgcatttaacagagacagacctcatcagagttactaatagatgacaatgctacacataatcatacagtcc

SEQ ID NO: 276689 - DNA, 356 bp, Glycine max
  unsure (1)..(356): unsure at all n locations
tctcgacggttntggtttgacacgatgtatttctgacatgtttcgctatatttcatggtttcagaattttttttcctttctctttcttctttaatggtgatggattggattctcccagctagaaatggtttcaacacattccaacttgcgggggggtattagagataaaattcatttagttagttattagaagttatttgaggtagttagttggttactcacagtataggtactagaagttatttgagtaagttagtggtggttactcaagttactcattttctatctttgtataatacatcactttgtatacttgatgaatgaatgagtgaatctaaactatnttcatctatctt

SEQ ID NO: 276690 - DNA, 311 bp, Glycine max
agcttggaaggtagtcttacctcacaaatatatatatgtatgtttaggtttcttgataccttggatatgcatgtatgtggcaaaaaatacctcacaatatatatatgtatgtttaggtaacacgataccttggatatgcatgtatgtggcaaagaatacctcacaatatatatatgtatgtttaaggagcaagataccttggatatgcatgtatgtggcaaaaaatacctcacaatatatatatgtatgtttaggtagcaagataccttggatatgcatatatatagcaaaaatacctcacaaaaatatac

SEQ ID NO: 276691 - DNA, 482 bp, Glycine max
  unsure (1)..(482): unsure at all n locations
gtgggtgcnnccntatgaacctgctatacgtgacttgaatctaagcttaagaanaagatggcctcagcanactccttatttccatnatggaaatctatttatagacctnccatctttaatggagagggttaccattactgtgaaacccaaatgcgaatttggattgagggaatagaccttaatatttgggaagccatagaaataaggccctatatacccaccacaatggaaagaattaccattgattgcgcgtcattaagtgaaagtattaccttagaaaaacctaaagatagatggtcttgaaaggattaaaacgaattcatacaattaaaagccaaaacattatacatctgccttggaatgatgatattcagggtttcaatgtagaggctaggaatgtggacactttgataacctgaagactcaatgtaaagactggtaatgcctactatgaatgatattaatgatcaatgaatatcaan

SEQ ID NO: 276692 - DNA, 144 bp, Glycine max
  unsure (1)..(144): unsure at all n locations
ataaaataaagcatangacttttggtattttattatttatgatgatataaaatagtatattatcatttattagaataatttaaaaaaaaaaatccaaatgaccggctaaatggatttaatttggtaggattaaactctaaaaaa

SEQ ID NO: 276693 - DNA, 411 bp, Glycine max
  unsure (1)..(411): unsure at all n locations
acactatgatactaagctttagatctattcattccagtgtgaattcaccgagggtcttacatgcctatcacattttatttgggtagtcttcgaaccacatcatactttgagagaggtatgctctgatacccacaaacctactcacacataatgtctggttgcttttaggattgttggttgttcccataaattaatataagactttttggtatgttttgtccacacttactaaaaaaacttctcaaaggtcacccatcccataattactttaagctaaccactgttgactatagagttcttaagtgatggattaccgaanaatatattcatctcgttagtataggtaantactaataatttctaagtatcctcaatgtgcagttcatactacaccatcttagatctctctat

SEQ ID NO: 276694 - DNA, 225 bp, Glycine max
aatcaccattaaaggaccccattgaagcttaaagatccagccttcatagaagtcccacaagccagcttccatcaagtggtaatcagaacacaagaacttcaagtaggtgcaccttaaaccttcattatttttttttctttaccttctcttccattggtggttcttcatttttctccatgtatctcctcacatgtcttgttctaaatgttattaacatgattcttt

SEQ ID NO: 276695 - DNA, 267 bp, Glycine max
  unsure (1)..(267): unsure at all n locations
gacccggttatataaacagattggtctacggtgagactttatgctactttgaggtggtcaacatgggatggcggggctatgcacgcattgaggatgtggaataacttgttgtgcaccatcgccacgccgtcacctagttccacatgtgatgggtaccccatcatcctacnagcttgagacgaggaagtgccgataggagatacttcctgcttttattgatgaccacagagtggtacctggagatatgtcgcggagtgcatgatacct

SEQ ID NO: 276696 - DNA, 305 bp, Glycine max
  unsure (1)..(305): unsure at all n locations
cacgcagtcaatggggcgaaacataccacatgattatagtgatggatggctcaaattctcacacacgtaaaatcatcactttcaaattgagctttccaaactatcatgacatgtagagaagaatcaaggatctcaagtcacataatgtcaagaactattatttttaaaacaattacccatcntttgaacatatcctatgatccagagaataacatgcatagtcgtacatgcacactatattgacccaaaagattaaactgagaatccgacgaaactgacaacattaacagagtgacacaactcat

SEQ ID NO: 276697 - DNA, 277 bp, Glycine max
  unsure (1)..(277): unsure at all n locations
tattcttttcagtcggcgccggaatccaaaaaaatcaatcatgatatcttctatgaacttaaaataagattatataggtatatataaactccaataaaaaaatcacattaaaataataataattcatgacgttctgaataaataaaatacttaaatagacgataacaatacattcaaataaatacaatagatacaacttagtgatttccagaatcactaaactcattatntttgttcttgaaactagtgtggatctcatattctttaaaagacatac

SEQ ID NO: 276698 - DNA, 423 bp, Glycine max
  unsure (1)..(423): unsure at all n locations
tatataattctccaaggtccaaactctgccatgattgtaataaataacaaaaactggcttcttcaattaggcaaataaatttagtatgaagttagttntggtttcctactcaaattgtcagcctatggttctgtacatggatgatagataagaaaatgagtaaatgtcactaacaattagccaagtactgtcaaatgtcaatcgagagtagcaaaggatcatcatattctcaacatcatcagccacaccatgcactcctatagtgaagagtgacttaaccaaaccagacaatgggaaagtggagcaattaagggttgatacagtaacaaggaacattaagcaactaaaatcaatgtttgcatgaacaggtangctggtccagtctattccaagactcatggtttcagatattgacatgtaatg

SEQ ID NO: 276699 - DNA, 386 bp, Glycine max
  unsure (1)..(386): unsure at all n locations
gctttacagcagattntagtaatgacccactattctataattaaaataacttaatgccattaacctatggaattaaaaaaacttaatggctgagtgtaactgaaattgtggcaaccaaaagtcacccccaacagccaacaagtcagccaccatttggtctcccaaaaggctgatgcctaggttgccaattgggcccttattacaacttgaactaaacctaactaaagcccttttagttgattaaccaaaaacatatttttggtcagccaactttacaaggattgggccattatttagacaaactaaacactctaaaattgagacaaagtggtgtcatttagtcctccttcatttgggccatgatacaactcacaaccttggacttt

SEQ ID NO: 276700 - DNA, 132 bp, Glycine max
  unsure (1)..(132): unsure at all n locations
gctctcgagaaattcaaatggtcatttacttatcacacctaagttttattcangcgcataatataccgagacgctcgaaattgaacaacggaagctctcgagaattctaatgggccttacttatcacaccaa

SEQ ID NO: 276701 - DNA, 322 bp, Glycine max
actagctatgtgacatttggagatggctctaaaggaaagatcattggaatgggaaagctagtccatgatggaccttctaatctgaacaaagtactgctggtgaagggactgactgcaaacctgatcagcatcagtcagttgtgtgatgaaggattcaatgtaaacttcacaaagtcagaatgcttggtgacaaatgagaagagtgaagtcctaatgaagggcaggagatcaaaggacaactgttacctatggacacctcaagataccagctactcctccacatgtctatttctccaagaagatgaagtcagaatatggcatc

SEQ ID NO: 276702 - DNA, 330 bp, Glycine max
  unsure (1)..(330): unsure at all n locations
gcttcacactcttttggaatgaaaccctcatcttaaaatttctttaagactttataactaagcaactccttttgaaaccaacatcttagttggcgaaacattttttaaaaattacatggccttttcgtttaagcctaaaacaattcttcattctgaaccaatatcataataacaatttggtttcactcgtgttatttttgtcactcgaatatgaactagtgtctatttaatagttagttttgaatctctttatcacttcaattagataaaataaacacttcagggtaaataacaaagttgacaaatntggtgttgatttttttaagtctc

SEQ ID NO: 276703 - DNA, 101 bp, Glycine max
taaaactaagcttctatccatgctcatcttggcgatgaagcttcttcttcattgaataatccctaatggatggcgccggctcttaactcttcttctttggc

SEQ ID NO: 276704 - DNA, 304 bp, Glycine max
ccacagagtggtacctggagatatgtcgcgggggtcacgagaccttggtgacgtcaggtggggtgctattgcccaaaaccaagcttgaccaatcccgacccaacccgggcatagtctgtcagtgagaacctgtgatgtacctaaacaggcgagctcctggcagtcaacagataaaaggaacaaagaccacaaagcaaggaggcttgtggtggctggccagctgtgaaacttgactgatatgtgggttatggcctctggtaatcgattaccaacggtgggtaatcgattacaaggcttaaaaatg

SEQ ID NO: 276705 - DNA, 190 bp, Glycine max
  unsure (1)..(190): unsure at all n locations
agctccattatagcatatattggccatactctccttacacatattcttacttaagcatcatagtcatntgtgttccaggtcccccttcctatcaaaggcacctctccaagccgacgtgtgaagttcgagaccccactcaaccacatccatcctgacgtgtcacggatccagaatttggttagcacataga

SEQ ID NO: 276706 - DNA, 348 bp, Glycine max
  unsure (1)..(348): unsure at all n locations
ctgcagctttgagccattctacgatataactttttatctcgatggccgattgagtctcgtaatatatcgacacgctcgaaattgaatgttgaagctctaggcctattcaaacaacaataacgttttactcggaagtncgattcagtgacgtaatatatcgggacgctcgaaattgaatggtgaacctctgagccaactcaaacgacaataactttttactcggatgtctgattgagttccgtattatatcgagacgcttgaaattgaatgttgaacctctgagccaattcaaacgacaatatactnttactcggattgttgatggagtcccataatatatcgagacgc

SEQ ID NO: 276707 - DNA, 304 bp, Glycine max
  unsure (1)..(304): unsure at all n locations
gagcgtctcgatatattacgggactctatcatacatccgagtaaaaagttatggccgntttgaatggctcagaggttcaaaattcaatttcgagcgtctcgatatatttcgggactcaatcagacatccgagtaaaaagttattgccgtttgaattggctcagaggttcaaaattcaatttcgagcgtctcgatatattacgggactcaatcagacatccgagtaaaaagatattgtcgtttgaattggctcagaggttcaacattcaatttcgagcgtgtcgatatattactggactgaatca

SEQ ID NO: 276708 - DNA, 95 bp, Glycine max
cttaataaaattgaaaaaatattggatttctttaattcttaattttaaccttctggtatgggcctatttttaaatttaaattaaaaaccacttat

SEQ ID NO: 276709 - DNA, 208 bp, Glycine max
actactcatttttagaacggaaggagaaaatcacaaggagctgaattggagcacgttgaagattggtgaacaacacgcctgggcttagcgtgagttgtcatgcttagcgtgagctatttggcttatcccaattccaacttgagtagaaattaagcttagcgcacacctttagtgggctcaatgctagctgtctggcttaatgcacatc

SEQ ID NO: 276710 - DNA, 304 bp, Glycine max
  unsure (1)..(304): unsure at all n locations
tcatgatgatgaatcaagtntgattcatgttgtttgatattatgatgaatcaaggatgattcaagtcggtttggtgatgacaaaaagccccatagaatgatgtctagattgagtcgacaaggtcaagatccagatttaagaaaagaccttatgaagaatccagattcaagagaagatgaattccagattccagagaagaaacccaaaagcaacaagtcaagacttcacaagggaagtatcgaaaaagatatttcaaaaaccaaaaatagcacagttttgtgttacaagaaaaggttttccaaat

SEQ ID NO: 276711 - DNA, 458 bp, Glycine max
  unsure (1)..(458): unsure at all n locations
cgccgtgcttgaacatgattgcnncttgatnacttgcancatgngaaatatagatactcaagcttctattcatggctcatttgttgcgaacctctttcttcatgggggatgccgcctccctacctctattcttgtctttgcgcatctcatggtgaaatcacattagggactttgagctaaaatcacctcatgaagcccacagaagatccataaagttactaaggaacgatgagggaaggagcttaacaaggggactgacagcatgacatcgggacttttgagccccacataggacctgaagagacctacaatggtgaaggagtcgtatagtacaacataatgccatactgggggaaggacctactatggatgtctgccggcctattgatgcggtatcaaaaattcggttcactatggtctactactttatgctatacctatgcaactgtggccgaacg

SEQ ID NO: 276712 - DNA, 288 bp, Glycine max
  unsure (1)..(288): unsure at all n locations
gctctcgagaaagttttatggttattactnttcaaacgcaagtctgattaaggtgcataataaatcgagaagcttgaaattgaacaacggaagctctcgagaaattcaaatgggcattacatatcacacggaagtccgattcaggcgcctaatatattgagacgctcgaaattgaacaacgaatgctctcgagaaattaaaatggtcataacttgtcacacggaagtctgattcaggcgcataatatatcaagacgctcgaaattgaataacggaagctctcgagaaa

SEQ ID NO: 276713 - DNA, 208 bp, Glycine max
  unsure (1)..(208): unsure at all n locations
gacataacttttacacaaaactttttgataacctttgatatctttcttcttcttcctttgccaaaagctttctgagttttctggtttccaaactttgttctttcacagaanacaaaagtgtgctatatcttttcattctcttctcccttgccaaaaagaattctgcaaggactaacccacctgaatcttttgtgtctctcttctctct

SEQ ID NO: 276714 - DNA, 284 bp, Glycine max
  unsure (1)..(284): unsure at all n locations
actcaaagatctagcctncatagaagtcctacaagcaagctttcatcagtagagctaaagactagggtgatcccctaataactntatagtatataatttcattaacaattaattatccttatatttacattnttttatcatttcataatactatatatatataatacattaaatgcaaaattaaaataaatactttntactgtctccctttattggtcataaaatattttaaatcaatatgttgatccaaagtgaaattaataaataagaatttgatttaaagg

SEQ ID NO: 276715 - DNA, 364 bp, Glycine max
  unsure (1)..(364): unsure at all n locations
actcgcttagctcagcattctcacttagcgagctcatcgcgtnttctagaaaatgcagaaaacacagctcgttttcttgcactcttcaagcatctaaaaggaatattagacatgcaatgtgtgtgccatactcaattcaatatacaagcttacatagcccttatcttaaactaattctaacaaaacataaccctataaaaatctaaagctacagttaaaatcttctaccctaaagttaatacatggaaaagagaaaaaggatcaaggaacttatttggatggtgtatgatttgatgcttaaagtcgaaaatgcacaaagagagtacaaatgcaaaatgtgaaaattttttgagagagagaatgc

SEQ ID NO: 276716 - DNA, 389 bp, Glycine max
  unsure (1)..(389): unsure at all n locations
agctntntcaaaatccactttaaacaccaagcacaatttctttagcctnctatcctnctcaacaaccttattagcaatcaagactccatgcaacaactgtctacccttaacaaatgctgactgtctttcatcaacaaagtgattcaataccttactaagcctattagataggactttagcaataattntgtagacacaacctatgagggatatgggtctgaaatcacttatatgtcgaggatccttgagcttaaggataagagcaatgaatgatgaattgaggcccttaggaaaagcagcattcacatgaaattctgccaaaaaccttaagaaactcaagttcagctcattccataaatgcttaataaatatgaaattaaacccatctg

SEQ ID NO: 276717 - DNA, 400 bp, Glycine max
  unsure (1)..(400): unsure at all n locations
gtctagattaagtcgaccagctctagatccagattcaagaaaagacatcaagaagaatctagattcaagagaagatgaattcaagattcaagagaagaaacccagaagcaacaagttgagacttcaccacggaagtattggaaaagattcttcgaataccacacatagcacaattttgctgtacaagtggacatgcgattcgacgagatggactcaaggatcaccactggtgaaggtgatgtcacttatatccgcacatgctttgatctagcaccaccaccgacaccatcatcttagattgattattttaatattatagtacttggattctagcatgttttggcttatattatgacattgaacactagatnttttaatatttctagtatgctgacatata

SEQ ID NO: 276718 - DNA, 165 bp, Glycine max
acctatgtggcacggccggctttcttcactttcttgtattatacgcgagcttttactaccgctcttgcttccccggatgcgttcttttatatgctggctgagggggcttattacccaaaccatacattccaccaattttctttgaatttatcacgcctagtttgc

SEQ ID NO: 276719 - DNA, 178 bp, Glycine max
  unsure (1)..(178): unsure at all n locations
aactaactttagtcgtctagacctcttgttgttngctacatcttgcattgtcatcatcgatgcactacagacttgagcgcgtcaattatggtctcgtaccaccccacctgctcagccttattaacagaaaaaaaatgtgcataaaattattatgttcagacctacaacacttatacgt

SEQ ID NO: 276720 - DNA, 323 bp, Glycine max
  unsure (1)..(323): unsure at all n locations
agctttgagccaaaatcccaacttatcatanatctttgacccaggtgagaatgtcaatccttgccctcggaagaaaacaaaaaaagagaaaaggaaaattcccaatcaaagagtgggagaaaagaaaaaaaagaaagtccccgatccaagatcgaaagaaaacataagaaacatgcagaaaggtctttggaccagacaatatctgaacaatacagaattgtcaccaaataaacaagaaaaaaggaaaccacgacctaaagtggccctctccctttgatggccaaccaaaatcctttgcgctagcgactttctcgccccgcact

SEQ ID NO: 276721 - DNA, 469 bp, Glycine max
  unsure (1)..(469): unsure at all n locations
ctgagaggattgatggggacccggtgtttatagaaacgaatatatgggcttcctgggagtacctgagctcagntggaggttggcaacaagggattgttgggttatgcccgccttgtggattaggaaagccttgtgtgcaccatccgccgaccggcacctaataccacatgttatgggtaccccattattctacaagcttgagatgaggaaatgttgaagggtgaaactttctgcttntattgttgaccaacaagtggtaccttgagatatgtcgccgaggtcaggaagaccttgggacgtcatgtgggtgcttttgcccaaacccagcttgaccaattccgctcatccccggcatagtcggcagtgagaacctgtgttgtacttaacacgcgagctccttgcagtcaaccgttataggaaaccagacccctatcatgacgctgtgatgcttggcacctgtaatttgccg

SEQ ID NO: 276722 - DNA, 320 bp, Glycine max
tttccctctgagattttaaaataaaattttttatccggaaacagtttttataattaggatagtattacaatcttaacacttcgttgggcccttgtaaagacttattagagatgttgtcaagtttatccttggaacaaacatatgaggtcttgatgatgcggagacaatattttctataataaaatgacaatgaagaaatcggaatcaaattggcaaaataaaaatctcaaatgtaggagtaaatgaaacaagggctaaccaatacgctcaacttaggaagaaaagaaagagaaacttaaccactagctagaagatacact

SEQ ID NO: 276723 - DNA, 327 bp, Glycine max
  unsure (1)..(327): unsure at all n locations
gcaactcatgatttttttaaacttattttatgcttcttttatattctagaaccttatctatccacacccctctattaactaaattaacttccttaaaaataattacggatgaaaataacgcaacaaataatcaaacatcaaacataattaataataatatatagatatatatatcagggtgttactcagatacccaagtggttatccgtataaacactctttctctatccgtcagactcagagtccaatagcatgcagagactaacatcatcttctgcaccctttgtcaatcggnggccaacgaacccgctgacatgcggagactta

SEQ ID NO: 276724 - DNA, 511 bp, Glycine max
  unsure (1)..(511): unsure at all n locations
aggcacgagtgggaatganaccgnttgantttatcnacttttgagngacgcgacacacttgaataatcaagcggcagctctcatcacaaactacgaacactgcatctgacaacattgtgcactaggtcgccttgtatgagcggatgcacttaccgcaaataatgactcgctctcgcactgttattcattggagcactgctgcctataggaagagtgcctttnctaacctaccagtattagcttccatagctagacgtcgaatctatcttgaattttatgagctatcttctcatcataatataaggttgtcacacaatctaagttataagatatcatatggggtaattgtgttcaacctcaccttattacatgacaggcactacgtgtcatgctgatgtttgttgactagagaattcatttactaaacctctgatctgagatgatagaatttatgatattaggctctttttccttcgacatctgactttcttacggaaatcttgcttcgatt

SEQ ID NO: 276725 - DNA, 386 bp, Glycine max
  unsure (1)..(386): unsure at all n locations
caatttagaccaggtgaggtttattcaaaaaattaggagttatctcttttatcttaatgagagtgattcttctaaattcttgagtgattcaagaacaccctggctggatcaaaggactttcacaacctttgtgtgttgccctcgctggaaagagtgattctttccttcctttcatcttcacccttgttctttcaaaccacaattccagaaaatccacctctgcccagaattatctcgtggccataactcccattttacgcactcaaattaagtgattcttgagcctanaatgactttcaaacgagacctttacctcgttttgaatcactcatttgagccctgagcttcagtattgcattctatattttgtcagccacacttacctn

SEQ ID NO: 276726 - DNA, 282 bp, Glycine max
  unsure (1)..(282): unsure at all n locations
tcaccttctggtcctnctcatagttgttgcatgaaanaactattctctattgtcgtctcccactccaagtaggccttcggatcattctttcctttaaatggaggaatgttgagtttaataccatcaattcggttttgtctaggaacaccatcattccctcttctcctactttcttcttcattatgatctctattctccatttgatccaacctctcatggagtgcatcatctcgtttgttcattaacctctccaaatgttgcatcaaagcttggcattggaat

SEQ ID NO: 276727 - DNA, 185 bp, Glycine max
atctctaacaaacaaatcagacgttacaagacaattattgttgctcgttgaataccttacccactcaagtgtattacacaattatggcttttctctaatgaaacactcttgccttttaccactctaattccccttgagttcttaagccattcaagagaatatggccacaacaaagaacaattcac

SEQ ID NO: 276728 - DNA, 514 bp, Glycine max
  unsure (1)..(514): unsure at all n locations
cgcccccccaggggnnattgaaacccatctcgtactcgagatccttagagtcgaccgcaggcttgaaccttgaaggtgccgtacccaaccttctttcataatagaagatcgattatggggctaacaatacgaatattggcttccttttcattaatggggggaccaactgggccggccgaacccttcaacttttgggcgtgttctttggaaaaatccgcccccttttttgaaatggtctgtaattgcattctatccggaaccatatcaaaattgtactgatactgcctaacaaaggcaaccattaggtccttccaagaatggactcgggaagattccaagtagtgaccaggtaacagctaccccagtaagactttcttggaaggaatgtatagcaattcctcatcttttgcgtattcccccatcttctgacaatacatncttagatggttctggggacaagaagtccccttgtactgtcaaggtcagcacctttgacttggaagggtgatgattn

SEQ ID NO: 276729 - DNA, 253 bp, Glycine max
aaccaaaatgggctattaacctcttccattaataccaaccttcatggtaaattaaaaccagcttattcccctaatttcttaccaacggtctttttgccaaaaaatttattaacccgaaaaaatgccccatatacaatcaaggcagcttcggtaactagattatttacacgtacttcccaggtggaatttgtacttacatcacacacaatctcttggctaaattcacatacatgcatactcaaagcattttggg

SEQ ID NO: 276730 - DNA, 214 bp, Glycine max
  unsure (1)..(214): unsure at all n locations
agtgctngaaagaatcaatgacantgctttactaagtgagctgcccggtgagtataatgctagttccaccttcaatgtctctgatttatctctttttgatgcagatggagaatccgatttgatgacaaatccttctctagagggagagaatgatgacgacatgttcaaaagcaagggcaacgatccacttgaaggacttggacgacctatgaca

SEQ ID NO: 276731 - DNA, 381 bp, Glycine max
  unsure (1)..(381): unsure at all n locations
gctcgtgataaattacaaacaccatatatactataattcgttattctcttttccaccattggtaatgctagagtatactattgacctctatacattaataagtgcgcatggcccaaaaccaagaacctacagtaaatagttgctaacaagctggttggcattcattgttttggatgttggttttgtataggctggctttgattctttattcttattaattgctactcccactttgctggaaatacatgcgcgttaatggttcaatgaaccaacgtgtgattaatcaatattgagtggccttaccttnttttttcttgaattactcattttacctaacgctnggacgnngtttattggacaaacattntcaaataacttatc

SEQ ID NO: 276732 - DNA, 507 bp, Glycine max
  unsure (1)..(507): unsure at all n locations
cgcttaatgaaccatgctatacggcactgtagatctcaacctccacgaganagcccttctggtggagatganaganaccacattggtgttttatgagggtcgntcatattatgccagggtgttgggaatggtcatgatgttagcttcattggaacttgtaggcctatgatcttcttcattaatggattcctttgcttcttggaagatgaatggcaaccgaatggaaaaggaagagagagaggagattccacttcaaggagaagatgagtctagaagaagctcaacaccataggaggccatggattagaacttggaggaagaaggagatgaatgaanggagagggagagaagagcacgaaatttgtgctccaatgagccttgaatctgaagttaatttcaaatgatcaaagtgaaaaaatgccacacatacctctattataactagtgtccacaaattggaggaaattgaattaattcaatttacttgattaaatgattgttggccaa

SEQ ID NO: 276733 - DNA, 508 bp, Glycine max
  unsure (1)..(508): unsure at all n locations
cgggaatgaaaccctctcgtccctgagatccttgagtcaccctganngcatgcaagcttgcttttaaagcttgaccttctcactttcttctggagcttcaatctctttctttctcgcagtccttaactttgggagccaatccaacccttgtgtcccgactctcaaccacttatgataagcggtgatgaacccattacttgttcccctaagctcttttgcttcctttgcgccacatcctatgccttgcgtacctcttgaagcacctcatgttggggtcactgaaaccccgtgtgatgaaaggcatgatgctttcctccgatggtgctcctctaatggggtagccaagttgtcttaaggcgaggacgggattataantaatacaacccctttttcccatcaaggggacatttagaaatcctcgcatgagaacannaactcaactnttaattccttttcacggnggaaccantcgatggatgcccctaccacactagccaaagtgttgctn

SEQ ID NO: 276734 - DNA, 301 bp, Glycine max
agcttctttgagaaaactttcttgagaagcttgtagttagttacacacacccctctcataactaagctcaccttcttgagaagcttccttaagaagattcctaaagaagctagagcttagctacacacacatctctaatagctaagctcaccttcttgagatgagaagctagagcttagctacacaccccctataatacctaagctcacccccataacaaaatacatgaaaatacaataaattccctactacaaagactactcaaaatacctcgaaatacaaggcaaaaaccctataatac

SEQ ID NO: 276735 - DNA, 61 bp, Glycine max
acaaccccccccataaccaaaaaccccgaaaaaacggggaaaacccccaaaaccacaccac

SEQ ID NO: 276736 - DNA, 471 bp, Glycine max
agccgaggatgaacatgaatgctgcctgtaaaactcagcttggaagattgactaaacatgttggggaaagccgcgtttgaacatatctgttatttggtgggaagaggaaatcagaaggagggtcattagttcaaaaagaagctgttctcggactagatggcgagtaatttccaagggtctagtccgttcatgaaacaactggattgctgccatgtagaattcgctctggctattacagtattatggcacacgttttgaataaaacccgagagttctatggagtaaatatccatgcaatccacagtggtggtgcagggctctatataagctctgcgatatctaaactgagattgtttttgttttatgaacccaaactccatgaaaacattctatgcgatcgacagtgcaccagtggcatcttttacaaaccaatgtcggagattatttcggaaataccttcagactcctccg

SEQ ID NO: 276737 - DNA, 402 bp, Glycine max
  unsure (1)..(402): unsure at all n locations
gctttcagaaagattacacaaaaagctattattgaagaaaggataactaaaaccttccaggtgatcagtggcggagcttgaaaatataatttggaggggccaaactaaatcaaactatattctacaaattaaatataataattttaataataatttttataaacatttttaattatttaatttaaatattaactatttttgtaacaaattttcttttatgatatcaaaatacatatttttactttattaataatatttcttatatttttcttatgccttttatacacccattcagtactgaataaagcatnagaatttttttacaagtttttgtgaaaatattaaaataaatattaagttttcttatacgatagaaaaatatatggaatatataaaaaaact

SEQ ID NO: 276738 - DNA, 367 bp, Glycine max
  unsure (1)..(367): unsure at all n locations
gtagcttgtatggttcacttgtatgagctcatgagccatatgagtcatgtatgtaaagatcatcttacacgaggtagtaatctaatcttggaatcaccgttagttcacatttgtgatctaaagctttcaaccattgaattaatttcacacaacaaattcaacaaacttgatcgaataacacatccatcatcttttccaatcatacgagacctttgaagaagaagaattttcaaaaatcaaactctgattttgaatgcaaacatgaaacgattatcaccgaattgctttgaacacattgtaagattgaattcccactttcattgtgatgtgaggggtccaccangaacattactttctgagaaagaac

SEQ ID NO: 276739 - DNA, 409 bp, Glycine max
acgtataaagaagaagagagggggtaaaactgaggatatatttcagaattgtaacttagattttgcacactttgaacttgttacagcaagagcttaaatagagaaactaacaagttcctaattggctgaaataaacattaacttatagctaatctaaaatagacatcattagcaaacaactacaaattgcttcttctgaacacaagaaacctttaaacgaacttacaaacaaccacaaaatctgtagaaaaatctcaattgccaacactccttgagattttcttcaacactccaagctgatcttaacctttcccacatctatagaggatcacccttcagtagacaagcatttgcatcctcaccctaacatataatatatcatctgaacagaatcttgcaactcattcac

SEQ ID NO: 276740 - DNA, 196 bp, Glycine max
atttataacttacatataaatctggctagttcgaaagatactatataaagtaccacaaagagataccatttctagactgtcaacgcaacaaaacaagcactagctacctttatatttttatcctagctataagataatttggtatccactttgattatagctattacgagatacacatttatacatttactatata

SEQ ID NO: 276741 - DNA, 208 bp, Glycine max
tcagatatcttaagaagggggggtgaattaagatattaccaactatttccccgattaaaattctatttcactttctattcaaggtacaaattcccttaataatgaacttcttaaatattgattcaaatagaaaaatttggatattaatattaaaccaatattaattaaagagttttagggaagagaaagtgccaacttagatttatat

SEQ ID NO: 276742 - DNA, 299 bp, Glycine max
  unsure (1)..(299): unsure at all n locations
gctggatacttccagtgcattcaatagcatgatctactcctccattagtcatttcagcaatgaccttagcgccacatatcatagcaaaatagagaattaattctcttggatttgattaaattactttgtatagaataaagaatatttggaagctgaatagaagtaatgaatataatgaaactggaactatttgacaaatacataaattgaacttagtaataaatataataaatttgtcaattntataataattactttagaattcccaaagtgcatgcatgtaaaaatgctacataatc

SEQ ID NO: 276743 - DNA, 447 bp, Glycine max
  unsure (1)..(447): unsure at all n locations
ctatgatgcanntctattatgccacatagaatctcctgttctttacggtgatgctcacctgaagaatgaagttttttcttttttttggccaagtcttatggaatcttcattaacatcattattggcattaacattaacacctttggaaagaaaagttcccttcatttctctctcattattaaagggtggtggctcttgagtagaaacctgacctaactttccttgtataaatgtgctggaattggatatttcaccaaggatctcatagtcatgctcacantccattctctttgactgtttgtaaaatttccttgctgannatggtnnaatgaaaacttaaaagtacgtgtacattgctatacatatattaacaaatcattaactacctatcaaactgcttactctcagacattacttatagatcatatccagtactatgtcagatan

SEQ ID NO: 276744 - DNA, 321 bp, Glycine max
  unsure (1)..(321): unsure at all n locations
agctntaacctaattctctatttggcaaatcctatataataacaatcaaactttataggtgagtacgcaagaacagagcgtgataaagagaacacattttatctcacagttcggcacaaacgactataaggaatagctttatatcatacatagtataatcctttcaacataaacccaaaaaccatataggtcctataacctaatcaagtgtctaagttggtggaatgagatgaagattttacgtataacaatttgaatttagagaaaatatttaaaataaataaataatgaaagacaatagttaatgaaagatgatcggaa

SEQ ID NO: 276745 - DNA, 386 bp, Glycine max
  unsure (1)..(386): unsure at all n locations
acacttagggttgtntgttttagtgaaagagagaaggatcagtcgtggattgatggaaaacaatgaaaatatangaattttactatttggagtngtctaacaacaggaaagaaagaatacacatatgtgggtctcattaagaaatacctttcgtcccaaattggataaaaaaggtagaaaaataaagtttttttttatatgaagacaaagtacttctattatatcacatcggacatgtcttatttaagataattatatcattctataaaccaatttttcactctctatgtaactaaacaatagaagaaaanaatctctcttttcttttctttcatgttccctttctctaaataccacaactagagagtaaaccccaactaaagtca

SEQ ID NO: 276746 - DNA, 516 bp, Glycine max
  unsure (1)..(516): unsure at all n locations
tgnattgaaaacccctttagannnctttgaaancctttgtagnnatgangaccgtgctcgnacccgcgatactcttagtcgacctgcaggcattttatcttatgaagactaatctggctattcaaatgacttggcttacttggtcaagagtcttggcctctttttcattattcggggtgttccatagagaacttgaatcatgagagttttgggttcaatgaggggaggagattctagtgctgcagactgcgactccctctcactgtctagtgtctactggaaccgtttccagctttgggatctgctcagttcagagcaactgtagcgctgatctgcatggtgtataggtctgaatttttactacctatatttgtacagattccctctacccnctttctcagtttcgaagattcaatatgaatatagatatcggccgattatacaacaccacttnttacttaaaatagtccatttctgtcattgttttatgtaaatagtagacttgtgcatgatccn

SEQ ID NO: 276747 - DNA, 179 bp, Glycine max
actgattgcgagcaagataaatgatgtgcagtttgggaaatgtgcatgctttatggtactttatagatccatactaataattatcacttaaacaacaactttcggaagtgttcccaaccaacagggaaatgagtcattaatttggttattcctgacatcaataacctctagcattctac

SEQ ID NO: 276748 - DNA, 128 bp, Glycine max
  unsure (1)..(128): unsure at all n locations
aaaacatgattcaccgatattgatcgaaaaaaatgctagccgacgtcggccaggagagatgacagatcgaggtcttaaanggagcacgaccggatgaccccgatcgacattttctaatcgacatcaca

SEQ ID NO: 276749 - DNA, 310 bp, Glycine max
  unsure (1)..(310): unsure at all n locations
tcggtattcagtttcgagcgtctcaatatattactggactttatcagacatccgactaanaagttattgtcgtntgaattagctcggaggctcagaattcaatttcgaacgtctcaatagattaccggactcaatcagacatccgagctaaaaggtatttgtcgttgaattagctcagaacttcaaaattcaatttcgagcgtctcgatatattacaggactcaatcaaacatcctgagtaaaaaggtattgtcgttgaatttgctgaaagcttaactttaatttcaagcgttcatatatacaggactca

SEQ ID NO: 276750 - DNA, 282 bp, Glycine max
  unsure (1)..(282): unsure at all n locations
tggaaatttctttctttgctaatatgatgacaagcaaagagttgttcaaccttcatttcccaatctaggtagggctcaacattatctttttcatggaaatatgggaggctaatgttaacctcttgaggccgtctatcattttctcttctttgggaatggtgtttagtatgtgaactatggtgtcctctataatagtcgctaaagtcttcacttaaactctttgcagagtcatgatngctatangagacatgtnnttttcttttcatttctttcataattttc

SEQ ID NO: 276751 - DNA, 330 bp, Glycine max
  unsure (1)..(330): unsure at all n locations
ctattgcacattcattcaactaactcgttgcagttaatttttataaggacaattagactaatgattcaattaaaaaacaaatatgagttcaaagtccaanttttttttaaaagaagttgagacctaattaatattttaaaatagttctaagacctatatatgaatgtatttaacccataaaattctcttattcaatttataagtgtataaaaatagatacataatctcataaaaaatacattttatttcactgaataaataacaattntaacaaatatgaaaaagacattcacaattgtaacaattntacacaattttaacaaatattaa

SEQ ID NO: 276752 - DNA, 206 bp, Glycine max
actctacgggtgattcatcacatagtgagtctcgtcttgtagggaagaaggtgaagcttccactgtttgaaggagaggacccagtaacgtgcattacacgagctgagatctactttgatgtttaaaatacatcggaggagatgccgtgtgaaatggcgcgcctaagcatggaaggttcaaccattcacttgttcaatcttttgatg

SEQ ID NO: 276753 - DNA, 536 bp, Glycine max
  unsure (1)..(536): unsure at all n locations
cgatggtttgaaccctttgcattgcataccttgatnatactcaaccntatggatntagttntcaccggcgaaaggatcgatgttggttttgaaagaagaatatttgatcatcctactttgaccaatgagaaaacttgggcaaattgagaaaatgagaacgatgagggaacccctgttgtggctgccattcctacatgggccaaattttcacccacttcacaatacccatacttagcccatatcgacccttcttatatattgtcgtcctatcagccatgaaccctcaatcaaacaccaaagccacccctaaaaccatcaattgccaacaccactcttatacacaaccaagacaccaacccgagagggaatattccacgaaataagcctgtgaattcacgccaatgccggtgttctatgctaactngcttccatatttactcgataattcaatggttgcctaaccctaccagagttctcaacctccattttattgtgatacgacttgacgcacatgtgcttacatggaagagtctggg

SEQ ID NO: 276754 - DNA, 265 bp, Glycine max
  unsure (1)..(265): unsure at all n locations
aatgacaggagtccaaggcaagaagcctgacaaggtaaggtaccatcatttgtctgttaggcttaaatggtagattaaaagttactactgcagggataagattaacaatgtacagaaagaaggctgagatactaccgccattgtaatatgtcttataaatactggttttctttgataatatgattacaaggatgtagtggcagcaataagtaataacattgatcattgtatgaaagcttgttgggaacattntcatgaagaaact

SEQ ID NO: 276755 - DNA, 353 bp, Glycine max
  unsure (1)..(353): unsure at all n locations
gtacatttacataatagacaatgtntctaactctggtgcattgtagttntgtggatgctcactttgaagatgtatcaatagatactcaacattgtacccaacttgttggaagttctcaattgtctacaccatctcaatatcntgatcaagaaaaatntctttataaagccagtgtcaaaactttatctgaaattaatgatatagaaagagtcgagtcatatgagctttntaaatttaaatagtgtcttcatattggttacttctttaataattggaaatattttgatacgaaatgtttgtgtgactattgaacaactacaaaaaatttgttgaccaaatggatggactatctc

SEQ ID NO: 276756 - DNA, 350 bp, Glycine max
  unsure (1)..(350): unsure at all n locations
agcttgtacttcagttattcataaacctaaatgtaatatattntacatggctattgttaacctacactcgtcgtaatggatataaattatcaattaataaaaaagataccttataattatggtacttacatcatccatagttgtagtatagatatgttcaaacatttgtagcctgatataatttctgttacatatgcacttgtaatgaaaaaggatgtgtgtacattangaatcctaaattttggcccatcccatggcaactcaacgggcttctgataaacatcaaacaaactcttaatcaattctcccaatggatcctctcctgcaactatattgcacctttcaacatc

SEQ ID NO: 276757 - DNA, 266 bp, Glycine max
  unsure (1)..(266): unsure at all n locations
tttggatttttagctagaaatggataaagcaagcatagacaaaaatggtgaaaactactttttcaaaattgataattcctatcttaaacgtctagattaatgtgctaacttcatctattattgtgctaacctccctaggaatacgtctactcagagaaaacttcacagagaatctactcacatagagacaaattacattgcaactcaatgcacaatgcaatntttgcatatatgaaaatctagctctgacaagttctatttctcta

SEQ ID NO: 276758 - DNA, 287 bp, Glycine max
  unsure (1)..(287): unsure at all n locations
caagcttgtcacctttttataaaccagagattttatggccaatgccttaatggtttctcttctttccaaaaaatcgaaagatcgtttaatggtccatgccttaaatgacctttcattcaatcaaaatatatattgcaaaaaaggataaaaacaatttaaccaacgtttagttctcaaagaactacgtangtcagattttcttatcacaattgagggatacgtangagcaagggaaacacccttgtcgaccacaaaaagataaaaaatacaaaaggcatgaaaagaca

SEQ ID NO: 276759 - DNA, 293 bp, Glycine max
ctcagctggattcctttagtagggaatctattcttcctaagatggttccaaacccagtcaccctcattaagaactagctcttttcttcctctattgcctttagttgaatacacctttggttgattctctatttggttcttaaccctctcatgcatcttctttacaaattctgacctagattccccttctttatgtataaaagaagtgtccagtgggaggggaatgaggtctaacggtgttaggggattgaacccatagacaacctcaaaaggggactgcttggtggttctatg

SEQ ID NO: 276760 - DNA, 332 bp, Glycine max
  unsure (1)..(332): unsure at all n locations
agctctgcgtaatgattactagtattgngnaattctattacacaaggttttaatactttaaaacttgttaaacataagttataattcttgaaatttgaaatcttaatgttttaaaacactggtaactgattactaccttctggtaatcaattaccagagaagaaaactcttaaatatgattttgtgaaaacttcttgtgctactcaatattttgaaaaaaaattttagtacttatcttgaatgagtcttctctcgattcttgaatcttgatcttgattattcttgaatctcgattcttgaaacttgactcttgaatcttgaatcttgattct

SEQ ID NO: 276761 - DNA, 216 bp, Glycine max
taactggttttgtcaggtgtaggttttaacatttctggtttttggatgacatcttattgtatttttaacgtgtactaggtttttggtaaattgtaaatattttaccacattatatctttttgtcaggcaataagttccgcatattgtaggtcttcgaaaatggatattttttaacaagtgctagttttaactatttgtagtttttgtacttacaat

SEQ ID NO: 276762 - DNA, 200 bp, Glycine max
tccttgcaagaatggactccggaagattcaagttagtgtgccaggtaacagctaacccagtgagaactttttgggaaagatgtattagcaatgcctcatcttttgcggatcccgcatcttctgacagacataattagatagttcttgggacaacgagtccccttgtacttgtgaaggtcatcaccttgaacttgggaggg

SEQ ID NO: 276763 - DNA, 303 bp, Glycine max
  unsure (1)..(303): unsure at all n locations
ttcatgtctgatgctattgcatttaatgattaatttttggttaattcaccattgaaaacaaactattcagcttcttattttattcatttcatatgacaatacttgcttctccgctttcatcaacaacaatctatacttagtaatttactgcagagtgagattntatttacttagttcaagattgcctaacttgagctaatacaacatatccatacaaatgatagtacaaacttctatttatantgactagttntgtagntcacaatttaaatgcactatgtctcatgggttcaagtcacttgt

SEQ ID NO: 276764 - DNA, 249 bp, Glycine max
ctgcttataagaagaacataacaactaatttttcagcttatcagaacgaaaatgggtaaataccaccttaagcttatattaagaaggtggaaaagtgttttttttgtaagcaaaagggacacatgaagaagaattggcccagattcccaaaatggcttgagaagaaagggaaatcaatctcattagtatgttatgaatctaatatggctagtgttaatattaatacatggtggattgattctggatcta

SEQ ID NO: 276765 - DNA, 169 bp, Glycine max
tatgtcatatatatttatttctttattttattccgattaaaaatttaggattcatattatctacagctcatgtttcatcctttgtatcatgttacaatatatcatattctagtatcttgatcaaatcactatccttatattgtgattttcatataaatttaaccaacac

SEQ ID NO: 276766 - DNA, 501 bp, Glycine max
  unsure (1)..(501): unsure at all n locations
cgggattgaaccattgagacccgggatccttagagtcacctgcggcatgcaagcttccgcgagaagtcangaaaggacacttctctagaggtgtcgctacctacccttccgccggagggcgacgcctgacttgcgggtgcctgttccatggaaaagaataccccccgagtccccacccacgtttatttgatgaaaatggtggaaaaaccggaaaaagacgggtctaccaactttaaatgaaaggtttcggaagtgtatttacgcaacgggaatgtattagcaccccacacgtccgtcacaaaggacggcagcctttaatcaaatatgcaaatatgacttccaattatgttatctttcctttttacgttcttatngtcttttatgcccatttatatttttatctttttgtggtcacaagggtgtttccttttctcctacgtattcctcaattgtgataaggaaatcagacctacgtagttcttttgtgacaaagtgttttgn

SEQ ID NO: 276767 - DNA, 493 bp, Glycine max
  unsure (1)..(493): unsure at all n locations
nggtcctgaaccattgagacccgggatccttaagtcacctgcggctgcagctcaccctgaagagacaaccattcccagtgttgagaagaataactaccatggctaccagaatgaattggctaatgaagattatggtaatggcactttcaatggggctggactatctctttttgatgccgatgganggaccttggatttgaggacaaatccttttcaagggaggagtgatgaggacataaccaanggcaaggaccatgaagcacttgaaggtcccatgaccagaggcagacttaaacaagcccaacacatcatagagacaaggctggtcatttgtatagctgtcattgatgatgattgaagggcccagtggagaaagatgaaggccanangcagangcactaccaagactactaatttgtgctgaaggccacactaacttgaaggcccaaagtaataagtnnttagtataatttattttatggtantntggccn

SEQ ID NO: 276768 - DNA, 543 bp, Glycine max
  unsure (1)..(543): unsure at all n locations
cggggttgaaaacccatcattgacgncnattgttggatcactaagctttgcctaaagaagcccaagaaggattaagccgccgaanggactatttccgctccttattatgacagtcaccgctttatgagcgctgtacaccaatagcgcttcgaggccatcaagggatggtcgtttcgacgggagcgacgcgttcaactcanggacgacgagtatactgatttccaagaggagatatggcaccggcggtggacatcactggttacccccatggccaagttcgatccagaaataatccttgagttttatgccaatgcttggccaacagaggaaggcgtgcgtgacatgatgtcctgngtaaggggtcagtggatcccgtttgatgccgacgctatcngccagctcctatgatatccgttggtgttggaagaaagccaanagtgtgagtattgccacaggangaaccggtcttatgtggttcatgangagggcatcctccagcttgtatgtatacangggcacgaatntgtccggactgctgcaggg

SEQ ID NO: 276769 - DNA, 311 bp, Glycine max
  unsure (1)..(311): unsure at all n locations
ggatgttcccttgatggagaaggagaaagattgttcaagcacccgccgcagattccacttgtaagactaactcaactaggaccgcattaagacacacatactcaactaaattatcgcaccccgattcctcatgaatgcacgacaactcagccctgcactatcaaggactttagagtcagaccagtttccactattgaatgaccttaacaaagcatgcatctacgtgatgaagggtaaggcatactggaatgaanaacagatagcacagagaacacataaaacatcatttaatagatagaaatatatttaca

SEQ ID NO: 276770 - DNA, 409 bp, Glycine max
  unsure (1)..(409): unsure at all n locations
ccctgacctcatcggcccttacctgctctggagatcagtgatcaagtgtttgatgatacaaagcctagagatgattcaaatggtcaccgtcagaccaaataatcagatattcagatcagaatgactagaaacagatcgagaatgttcacaggagtctgaaatatttttcaaaaaccaacatgcacagtttgtttacacgaaagtgtttctctanatttctaagtactagagttttactctctgtaatcgataccagttcctgtatcgataccagggcaagtttgtttcaaagctttactgaattgcacgtccaatgattttaaatggtatcattacatatgctgtatgataccgtgatctgacgtgaattcagtctttggaaagccatcttctaaagcttggtacatan

SEQ ID NO: 276771 - DNA, 359 bp, Glycine max
  unsure (1)..(359): unsure at all n locations
tatctttcagtacagactttaatgggactaacagctcatcatctggaatggttatgtctggtttaacatttgaaagcgtaccaaagaagtttgtggtatcaactttggcaacagccatattgctaagaagtttattaatcatctgcttattatacttagggaggccaagctttttggtcattggaacctgataatcatccataaatctcggtccatatctgaaacaaaccaaccatgaggtgaaacatttaaaggcaattcacacctattttctnctctaagaggttaaaaaatggtatcagaaagcgttactactacctttccatagcatagttggcctctttttcatttattaaatg

SEQ ID NO: 276772 - DNA, 267 bp, Glycine max
  unsure (1)..(267): unsure at all n locations
agttgtgtgtgcatttttaagcacatctattatctgcataaatcactcgattttgaatgttctatagatctcctttatttaaaaagcatttttatcaaggaggangagaacaccattagaaaaaggaagtgataatattgcatcctctaaagcaggcaaaataatcttgaaaacaaatgaattaagaggtatggactgttagtaacagacttatgacccataacccttcattgtacatacatcaatctttgttgtgctatgacattc

SEQ ID NO: 276773 - DNA, 319 bp, Glycine max
  unsure (1)..(319): unsure at all n locations
cggataaaatggaatgttgcagatattgtctattcggngatgattcttagagactataaatattttcattagttgtaatatgtgagatctacccgttttatataagggtgattgttttcatttgtctttttatatgtatgccccactttattcgatagcttgacaatcacttcttctctgtttttaatcagcttatacaaataatgtatatcattgtgatatgaagacattagttaaggtgacatatgagaccagaatcatgttcattagaatgtatgtcatttatttgtggctatccagaggccctcgccattttttt

SEQ ID NO: 276774 - DNA, 515 bp, Glycine max
  unsure (1)..(515): unsure at all n locations
cgttgagccatgattgatccctgtataactcagcttgttganggctcttgtggaggctggatctttgagcttctatgacgtccttttatggtgattttccaccatggagatgcagcgtaagacaaacgagaagatgtgagatgaggcgccatcactaggaatagccatgagaagacttcccccagatgagcctggataaaagctggaaggatgcttcaatggaggaaaagaaagatggagagaaagagagaggggggagcacgaaatgacgaataaaagaggagagacgtggaactttgaagtatgtctcacaagactctcattcatcanagttacaacaagtgttacacatgcttctatttatagactangtaagcttcttgagaagctntcttaagaaaactttcttgaaaagcttctctgagagaacttccttgagaaagctagagttagctacacacacccaatctaaaactaagctcaccttcttgagaagcttcttgagaagctagacg

SEQ ID NO: 276775 - DNA, 292 bp, Glycine max
  unsure (1)..(292): unsure at all n locations
ttatgactaanaatgttagttagtttgtcagattgattatgaaagaatgcattgaccatatcccggtgagagtgtgatccttaaattttaagagaaacgactatcatttagtactaatttttgcatgaatctttgaagtatggattgaatgcatgaaattgaggatgatcaaggccatgtttgattgtgatagccacttagccaaaaagctgaccacgtgcttgaatgaattatcccttgctcccagtttgagttgaatgaattattgattgattgaaccctgagcctatac

SEQ ID NO: 276776 - DNA, 264 bp, Glycine max
  unsure (1)..(264): unsure at all n locations
ttacttttagaccgtaaaatgaacttttaaaagtctaaactcaatcctacgcgccactttctttctttaaagaactacgtaggtctgaattcctcatcacaattaaggaaacatangagcaagagccccactctttgtgaccccaaaagatataaaatgttaaaaagggaaaataaaataaatttaaagtcgtgattttcacatatgataaaggtcgtcgtcccttatgacggacacgtggggtgctaataccttccccatgtg

SEQ ID NO: 276777 - DNA, 252 bp, Glycine max
acattcattcccttattcttgacaatcataacaacaaaattttttcactacaccaaccatattgttttgctactcttttcaccacaaccagtttctttgatcatgagttaccccacggtttattcttcaaaacaacaagaatttttttatgaataggcaatagacattaatactaggttggagtaataccatatattgtgactcacattaacttgcgttgtttattcatatgcctaccataaaaattcacct

SEQ ID NO: 276778 - DNA, 169 bp, Glycine max
tcttctttggaattaatataaaatgatcctgggggtcctgctcctatgaattctcattgtccattacgctattatatgtcattttgtgatgctttttcaagggttacttgaatatattttctgaagaataactctgatgctttatcagtgtttaaacaattcaagtcac

SEQ ID NO: 276779 - DNA, 282 bp, Glycine max
aacgtaaatgaagctcaaggcagaaaacataaatgaaagcagaagaaggaacaaaaaaacgaaattgcaattgaaagagaaaaatggaaaatgccttaatgtgaacagtaatccaaagctaaaaacgtaaaaccctaaaaccctatgctctgaataatggaataacagaatagccccctacatgaatcccaaggctactatttataagggtcactcaaagtcactgggccctattacattattctggcccacaacgaaataaacattgaacaacataaaata

SEQ ID NO: 276780 - DNA, 471 bp, Glycine max
  unsure (1)..(471): unsure at all n locations
ctcttagtttcagatgatgcagatgggtctgtagctacctcattcactcctctaatgactatggcatcatttctggggctaaactgctgggaattggaagccatcctctcaattaaatttctggcttcaacaagaagtatgtcttcaagggcttcaacacttgccagatctatcatacctctcctcatattactgagtccttcataaaaatattggagaagaagctgttctgaaatctgatggtgggggcaactggcacataatttcttaaatctctcccagtactcatacaggctctcttcactgagtngtctaatacctgagatatccttcctgatggcctgggtcctggnagccaggaaatttttntctaagaatactctcttaaggtcatccaactcgtgatggaccttgagcaagtatacacgcagcctttgcattcctcttatgatgaggaaagcctccaatatt

SEQ ID NO: 276781 - DNA, 333 bp, Glycine max
  unsure (1)..(333): unsure at all n locations
gagaaagatatgagtgaatggtagaacaaaacttgtatgtatccttttgatttaaggattgtcatcatcaaaaagggggagattgtggaagcaatgtcttccaagattattttgatgatgcccaagaatcaagagtcaaccaagttccaaagaatcaagagtcaagccagtttcaagaatcaagatcaagatacaagattcaagaataatcaagatcaagattcaagattcaagtnaagaattaggactcangattcatgaatcaagagaagactcaatcaagataagtattaaaagaattttttcaaaactatatgaatagcacaattttgt

SEQ ID NO: 276782 - DNA, 424 bp, Glycine max
  unsure (1)..(424): unsure at all n locations
taactagctctcaataatatacttggccctcaattaactggctttgggcctggcgaacacgcttaacaaaatacttgccacacctaccggacggtgatttgaaccatgctggtattggaatggtgccacaaacccttaaaaccctattgataccttctgaaaaggtggttggcatgtggccatatcgacatccttatctatcataagccatccgccatttttcatttgaaatacgatcaatccatggtgctatggctggacttagtttgacgaaattttctaaattttgataaaaaatatgcttgccaggagtgtangcttgcctaaaatagttatgaataaccaatttaactatatattannagttaataacgtgaccatcanatatgaaatcctacccaatntccttaacatttctttttgg

SEQ ID NO: 276783 - DNA, 425 bp, Glycine max
  unsure (1)..(425): unsure at all n locations
gactttcttttgctaaaaaccaaaaccttaaggctaagccaaagaaccaaaagaagtaatggggttaaaccattaaccactttcaaaagaaaaccattaatggtgctattaaccactttattggtagccaaatccacatgggggtaaccagctttccaaagttttaaagttttcctcaaaactggtctaagccaaagttccaaaagtctattaacaacttncgtttgcccatcggtttgtgggtgacaagtggntgaaaataacaatttagtgcccaactttgctcacaaaagtcttcaaaaatggcttangaacttatagtccctatcactaacaatgcttcttgcanaccatggagtctcacaatcttccttgaaaacaaatcaagcacatgggaagcatcatcaacttttttacatggaatn

SEQ ID NO: 276784 - DNA, 140 bp, Glycine max
gctcacctttatcataacaccgttgagtttattcagattattagagtatatctcttttatcttaatgagagtgattctcctaaattcttgagtgattcaagaaccccctggctgtatcaaaggactttcacaacccttgt

SEQ ID NO: 276785 - DNA, 529 bp, Glycine max
  unsure (1)..(529): unsure at all n locations
cgggtttgataccattgattgacgtgcactgtagaacactcaagctttgagcaaattcacacganaataactgtgtacctcggaagtcttgatntgagtcctatttatatataagacgctcgaaagtgaatggtgaaacttttagccaaattaaacgacaataactttctagtcggatgtcttattgagtccttgaatatatagagacgctcaaaattgaatgaccaagctatgagccaattccaacgacaataactttttactcggacgtctgattgagtcccgtaatatatcgagaccctcgaatttgatattgaagctctgagcccatttcaaccacaataactctttactcggatgtcttaatgaagtccgtaatatatcgagacgctcgaaagtgatgttgaacgtctgagcaattcaaccacaataacgtttactcggttgttgattgagtctgtatatatggagacgctcgaattgattgtgagctttgagcaatcaaacgacaataacttntaatcggttt

SEQ ID NO: 276786 - DNA, 148 bp, Glycine max
ctcttgccttctcacttctactcctttcttttcctctcttaattttttcaaccctttaattttctccaatttctttttctacctctatttccttttcctgggcatttatttctttctccctgaccacttatggtttttcactcttttg

SEQ ID NO: 276787 - DNA, 509 bp, Glycine max
  unsure (1)..(509): unsure at all n locations
cgggttcgatacccatgcattagctgacactgtatagtcctcaagccttactntgcagagcactatncgangggaaataccctcatctgattagcataaatttttcttaggtatcctttccattattcaattccaaacatttaccacccaagatattaagatgtgagaaggttggttttctggccttggaccacctatattggagtttcttttaaatgggtcttatttaagccctaattaaaatggagcatgccgtggttaccgcttcaagcccaaagtattttggaagaggagtatcatttaattaaagtctaggcatctctttcaaagatctatttttctttcaacacaccatttgttgaggggtcttggtgcagaaaaatatgctcaattcatgcctatcacaaatattcaattcttattttcaactcacccatgacactcctatagattatctgagatttctatttgatgattttcaggttctaatgctgaatgctatctatagt

SEQ ID NO: 276788 - DNA, 337 bp, Glycine max
  unsure (1)..(337): unsure at all n locations
agcttctccccaatttctatanatagggggtataatgaagtgaaaaagggttcagccccttaggcacttctctctctcttcgaattgcttggaaaanatgtttctgtgaagaaaattcaagccgaggcgcttccgaaacgtttccgtaacgttttcgtgagaaatttcatgaaggtttcgaccgttcttcaagattcatcgntcgntctttgtttcttcagtcttcaacgggtaagtacctcaaaccaagcttttcaattcattctatgtacccatcggtggccacatttcgnttcatgtatttttattccccttttcatttactttttataccccc

SEQ ID NO: 276789 - DNA, 289 bp, Glycine max
  unsure (1)..(289): unsure at all n locations
aatttctatttattggggagatgtgaagtgttttatggttcagccccttaagcacttctctctctttcgaatntgcttggaaaaattctttccgtgaagaaaatctaagccgaggcgcttccgaaacgttttcgtaacgtttccgtgaggaattatgctaaggtttccaccgctcttcgacgttcttcattcgttcttcatcgatcttcgatcttcaacggggtagtacctctaaccaagcttttctattcattctttgtctccgtggggtccacattgtgtttcatgt

SEQ ID NO: 276790 - DNA, 293 bp, Glycine max
  unsure (1)..(293): unsure at all n locations
ccaattttttttactaatagtattattaatataaagtattttttaaaaacccacaatccattttttaagttttgcaaatgaaaagtcactcaagagtgactcagtaaatttctcagcggagcatataatccctattggctatttatacggttccaacattaatgcaattntaattttttttgacaaaaaaacgtcatttttggatcaacctctatngttcctctctagnctctctcattctcattctctatattctcaattttctattactacattcaagcaattattttgac

SEQ ID NO: 276791 - DNA, 541 bp, Glycine max
  unsure (1)..(541): unsure at all n locations
cggtttgacccgttgattagacaccctgctattacgtgacacatagagtactcaagcctggagacannatcatgaaatttgggtggtgccaatgcttttgttgagaaatctgncacttgatcacttgttgaaactggtagtaagcttagagtgcccttcaaaagcttctctcgcacaagatggcaatcaatttccaagtggtttgtgcgttcgtgaaaaaccggatttgaggcaatgtggactgcgctttggttgtcacagttaagagttggagttctgggtagctgaactctcaaatctgcaaaaagatacaacagccattgcaactcacaagcagctgaagacagaaccctgtactctgcttctgaagatgatctggacacagttgcttgcttttatcacgccatgacactatagatttgcctatgaagaaacaattatcagatatgggttttctagaattcatacagcctgcccaatcagcatcttaataacctataagttgcatttttgaggtcttgctaaggaaatacatnggctg

SEQ ID NO: 276792 - DNA, 229 bp, Glycine max
  unsure (1)..(229): unsure at all n locations
gtctttcggattcagnttgtgtgttcttgactatatgatatgagatgaagttgcaaagatgagacttatgttgggtgtngattgatggataacctagacacttgtgcttgagtgaaacagtgaccgtgagggcttgggtgatgatccttccctgatatctgtcattcttactaacctatttcagctgtgtttcttaataatcatgttcatattctttaaaagttgcatg

SEQ ID NO: 276793 - DNA, 379 bp, Glycine max
  unsure (1)..(379): unsure at all n locations
agctntcataagtgatgtatgtgcagccatcttcctaagagtcctctcacgaggtggagattgagccatgttcttagtatgaaaattagcagctgaatgctcaaaatcagaatgtttagaatcaccaacaacaaaatgctcggaatgcacacaatacatggaatgctcagaatgctcaaaatacacagaatgatcaggatgcatactatgcctaactaatctatgaaaggttatatctatttcagtatcaaagggttgtaaatcacctggattgcccctagtcatgtactatatgcagtagatcatgtatttctcanacaagcactaaaaagggggtaaaaactacactatactcanacatantcaaatgagctgaaaa

SEQ ID NO: 276794 - DNA, 231 bp, Glycine max
gctagcctattcatattttcattcaaaggattgccttacgcacagccggtgtagcgtttatcactacttgttgaatctttcagctgttgtttccattatgcatttggataatttgtaataatcttgtttattgtacgctgcttagacttcccatggattaatgtaaatctggcattttagtgaaagagctagttttatgcaaagtaaactggctacctatcaccgtaccac

SEQ ID NO: 276795 - DNA, 427 bp, Glycine max
  unsure (1)..(427): unsure at all n locations
agctntaacgaccttttctctttgaatccaatatgctaacacaccatatgatatctgtttccatccaaattcagtccccatttattagacattgcactaatgctgcacttttgtaagtcaataactattaaaattaagttcatacatgtctacatatgcaatagcattttattatgtattcatacaaaactcccccccatcccaaacaaaaatcatcctgaattcacttgcacaatgattagttaaacttattaagcattaacgtatgatgatttgattatttgtctatactttcacaatgaaacttactctacaagtacggtgcaatataatatattaatgtctaataatggaccanaaacaaattgtggttggggtcaattacaagaaaactatcatattanaagtatgatacanacacgactat

SEQ ID NO: 276796 - DNA, 451 bp, Glycine max
  unsure (1)..(451): unsure at all n locations
gccacatgatttngtgtaaatatattctcaattttntgttatatgtttaacattgccgggtaaggtgtcataatcctattatatactaatgggaaagtttttattaggatatgattaagatgaagaatcttaacttccatatgcctggtctaaattaaaggaattccttcccctattcctgatgttaagaccaccaagcctgactttggcttctattcagaacgtggtatttgactagtatacaagtttgtgtaaatagaaatattggttaaaatgataatgaatggtagactgctgacattttgtcaaatttaatgttgtcgagcacaaatgngtcatcttctttttctgaaatcaggtgttacaccacatgtactagggtatacnatgtagggatatctggattattgtagagaatctagatttttgagataaagaattctatttagca

SEQ ID NO: 276797 - DNA, 349 bp, Glycine max
cttattatttgatttatgagcaacatataatatatgctatggtaaattcctttccaaagaaattaaaaatatttatctagttcttatagtcctacacttaaaaatcatttattttaatccttggacaaacacttttggatctcttttggttccttgtgttacaaagtgacaaatagtaaaagataaaagttgtgtaataatagtgaccaaaagagatgatttttaagtgcagttaaaagagatgaattttccatttctaaaacttaaatggatggcattcatatccttgtcctttttttttattggtaacgtgtcatttatatgcaataatttaactacgtacatacat

SEQ ID NO: 276798 - DNA, 457 bp, Glycine max
  unsure (1)..(457): unsure at all n locations
agctctgtgnnatgancccttgagtgcgncntttgaacatgcattactgacacattgaaactcagcttttgcgtgccgctctttgtgctanaaattccaaaatttatcctcttattctagctatttgaattctttattcctgaatgacaaccttaaattattgcttgtcccctcttgagatgaggatgatcttataggacttcactatttctttttgttcatcgtctctattctctctataaaatataatataaatctatcatgtattattcgcttattatttcttatacttatctttgcatctcctttctaatttgaaaattcagaaatcactattttattaatttccatcttatatttagtgcagtaacttatcttctttttttcttttttttctcattctttaaattttcttaatttccttcttttttcatttatttcattcccctatatccct

SEQ ID NO: 276799 - DNA, 465 bp, Glycine max
  unsure (1)..(465): unsure at all n locations
cttgacccttggncttgggccttgagaccgggacttaagcaccgcggctgcagctctactatgtggagggcggcttncttcatcctcttgtctccacgcgaagccttgacaccggtctttctttccgccgagcttctctttatatctggctgagtgggcttataacctaaaccatactttccacgatttcctttggcatttaataggctagttatgccgncgttgcttttgctaaaccataccggttcgtaaccgtcccaacataactncggccatcantactgctgcatcggacaggcaagctngcccagagaaggagtncatggaggaaatgcttaccacctcaaaagactggaaagcggnntctaatgatncctctgcggncctcacantaggcatagaggacgggcaggtcactaagatgttttctcggctgcacgatgacaaatgccctcaatacgaatn

SEQ ID NO: 276800 - DNA, 328 bp, Glycine max
tcttaagaagggggggttgaattaagatattccaaacttgctcccctaattaaaaatctatttcactttttactcaaattatgaatttccttaatgaccatcttccttaatatttattcagatgaagcaacttgaatatgaatataagccataataaatcaaggagattaacggaagagaaaatgcaaacttcagtttatactggttcggccacacccttgtgcctacgtccagtccccaagcaacccgcttgaaagtgcactatcttgtaaattctttgacagttctaacacacaggacaatcttctttgtgttagaatccttacac

SEQ ID NO: 276801 - DNA, 445 bp, Glycine max
  unsure (1)..(445): unsure at all n locations
agcttagcgagacaacacnttttgaaccttcataattntctcccttttacctgaaattgaagtgaaatttacattaaattcaataagaaggcttctattgagcacaaatgaaaactaaaatagaaatatttacaatcctaccaaaaattaaccataaattgggagatttatttacattttggaaacttttctatacaaaaaattagtcataaaagatgactaacaccacctgtgatcgattaaataatcaatgtaatcgattgtttcgaagaattaatcaattattttatcatttcaatctatcaaagtgttattcccaacatctagaaagctttcaagaacaaagtaatcgattagattcttgatgtaatcgattaaagtgttcttgatcacttttgggaacacttttaagaacaaagtaatccgatatgatcacctggtaatc

SEQ ID NO: 276802 - DNA, 465 bp, Glycine max
  unsure (1)..(465): unsure at all n locations
tcctcgtggtttctttgagaagctntctcaagaagcttcttttagaagctagatccttatctatccacacccctctattaactaaattaacttccttaaaaataattatggatgaaaataacgcaacaaataatcaaacatcaaatataattactatatatatatatatatatatatatatatatatatatatatatatatatatcagggtgttacaactctcccacccttttagaaatttcgtcctcgaaatttaccttactcaaacaaggatgggtgagcttctcgcatctgactttctaattcctacgtggcatcttctcctgatgcacctccccagatcaccttgaccaacggaatctcttttcctcttaagtgtttggtcgcctatcctcgatcctcaaaagcaatggttcatatgtcaaattctccttcacttgtacatcatccaattcaatcacatgg

SEQ ID NO: 276803 - DNA, 342 bp, Glycine max
  unsure (1)..(342): unsure at all n locations
agctntgagccaaaatcctgactcaccataaaccttgacccattgtgagaatgtcaatccttaccctcggaagcaaagaaaaaaggagagaacgaaaatttccaatcacaggaaaaaaggagaggaaaggaaattcccaatctaagagtgggagaaagctaagagaaaagacagaaaattcccaatcaaagaatgggagaaagaaaaagagaatgagaagaacgaaggaaagctcctgatcaaggatcgaaagaaaacagaagacatgtgcagaggggatctctggaccatacaatatctaaacaaatacagaattgtcaccaaatgaacaaaagaaagaaa

SEQ ID NO: 276804 - DNA, 453 bp, Glycine max
cctcaatcatgtccaaatatgcatgttaattaggacgcatcatcaagaatcaagccaaggctattgtgcaagcaatcaatggggcaaaacacaccaaatgattatgatgatggatggctcaaattctcacaaaggtaaactcatcactttcaaattaagctttcaaaactatcatgacatgtagaggagaatcaaggatttcaagtcacaaaatgtcaaaaacttttattttcaaaacaattacccatttcttgaacatatcctataattcaaagaaaaacatgcaaagtcgtacatgcacacaaaattgaccctaaatattaaactaacaatccgacgaaactaacaacattaacaaattaacaaaaccaagaaaactagcaaaaccaaagaacactcgccccctacttaaacaacacattgtcctcaatgtagcacaactgaaagattaaa

SEQ ID NO: 276805 - DNA, 305 bp, Glycine max
  unsure (1)..(305): unsure at all n locations
agaaaacatgtgggccatcatcgaccaatacaaggaaaagttaagcctagcggtcactcacaaacaaaggctataggacgactgcgtgaaagtataagtcctgcaagtggaaagggaagcaagggaaagggtgatcgattcattacacagagaagcaatgatgtggatggataggttctcctttactgaaattctgatactggggacagatgtcctacaggatgtcacgacatcgcgcttcataacatgcagcttgtatatgaccgtatgaacagattaaacaagtntataacacaagagaattg

SEQ ID NO: 276806 - DNA, 465 bp, Glycine max
  unsure (1)..(465): unsure at all n locations
ataattgccattcctttntcaaagaatccaacctatttctgaatngcttatattcatatctncaaattgttgtcttattgaacttttctgcaatatttgcccaaccaagcttagtgaagtggttgtgaggtttatttccaacattcacctcttctatgcacactttcaacataatcttagtatttttatcacaccattctgctttctttcttttcacaggaacttgattgagagacatttcacaagcttaacgaaacaaacaaaagcatacaaaggaagaagaaaaagtgacgaaggaagaagaaaaaaacctgtgatgctaacaaaggaagaagaaaaaatgacgaaggatgattggaagagatgaccaaggatgatcggaagagatgacgaatgagatcggaagcatgggagaaaaatttcgaggaaggcacagcacgaccgttctcatgaacgagagaaaat

SEQ ID NO: 276807 - DNA, 156 bp, Glycine max
  unsure (1)..(156): unsure at all n locations
ttgcactcccctttttactaaatgcacccccttctatattgatggaaatcctttttacgtaaagttacgaaacttttcgaatttcgaatcgagacttatatttcttacacttgctacgaatgcttacagattatgtntctactctttcttagcttt

SEQ ID NO: 276808 - DNA, 441 bp, Glycine max
  unsure (1)..(441): unsure at all n locations
gcttgtggagcttctatggaggctggattttcaatgaggttctttaatggtgattttccaccatggagatgcagcggaagacaaaggagaagaggtaagaggcggcgccatccactatggaataagccatggaagaaggagcttcaccaccaagatgagccttggataagaagcttggagaggatgcttcaatggaggaaaagaaagagggagagaaagagagaggggggagcacgaaattgaaggaagaaaaagggagagaagttgaactttgagttgtgtctcacaagactctcattcatcaaagttacaacaagtgttacacatgcttctatttatagactaagtagcttgctngagaagctttcttgagaaaacttccttgagaagcttctttgagaaaacttncttgagaagctagagcttagctacacacacccc

SEQ ID NO: 276809 - DNA, 464 bp, Glycine max
  unsure (1)..(464): unsure at all n locations
ttaagtcacctgcggcatgcaagcttctcccccattntcctataaatagggggagaagtgaagggaaaaaaggttcatccctcctggtatctgagattcacttaaaattagtgagaaaaattgtttccatgaagaaaatccacgccgaggcgcttccgtaacgtttctgtaacgttttcgtgggtgatttcgcgaagattttcaaccattcttcgacgttcttcttttgttcttcgtcgttcttcggtcttcaaccggtaagttcccgaaatcgaactttttaattcattctatgtacccttggtggtccccatttgtttcgcgtacttttattttcgtttcatttactttccgtaactccttttgacgtgctntagtcatttactcgcctaatcaaaaataaaataaatttccaccgatcatttgaattgtaacatcctttaatttcagttaaatgaaatctg

SEQ ID NO: 276810 - DNA, 462 bp, Glycine max
tatggaggctggatcattgaacttcaatgaggtccttcaatggtgattgtccaccatggagatgcagcggaagacaaacgagaatatgtgagaggaggctccatccactacggaataagccatggaagaaggagctccaccaccatgatgagccttggataacaagctcggacaggatgcttcaatggaggaaaagacagacgaagagaaagatagagtggggagcacgaaattgaatgaagaaaaatggagagaagttgaactttgagttgtgtctcacaagactctcattcatcaaagctacaacaagtgttacacatgcttctatttatagactatgtagcttccttgagaagctttctcgagataacttccttgagaagcttctttgagataacttacttgagaagctagagcttagctgcacacactccaatcataactaagctcacctccttgaga

SEQ ID NO: 276811 - DNA, 375 bp, Glycine max
  unsure (1)..(375): unsure at all n locations
agagcttgatagagcccgggtagtcgaagagaagttcaagtccatagccatcaaagtctgaaaagagtatgatgaactaagggacgtccatatggccaccgctgaagccttggaatgagaaaccaagaatgcctgacaggaagaacacgaccaaagaanagttntgaggggctttatagggcagcaatagtgagctcaagctccgaagaggtgcaaggaatcatcacgggtcatgggcatgatcttgaaggacgagctaaaggctggccttatgtctgaaagaaatttgtcccaacacgttaagcgagactgaagggaatatgtgggccatcatcgatgagtgcatagagaagctaaatctagcggcgactcacg

SEQ ID NO: 276812 - DNA, 427 bp, Glycine max
tctggtgggacatcttgactcgcgtttctatctgacattcaccacagaatctagcttcttctattttcagattgggaatgcctctaacagcacctctgtcaatgattatcttcatgcctcttaagtgcagatgtccgaatctttgatgccatattctgacttcatcttctttggaggatagacatgtggaggagtagctggtttcttgaggtgtccataggtagcagttgtcctttgatctgctgcccttcattagaacttcactcttctcatttgtcaccaagcattctgactctgtgaggtttacattgaatccttcatcacacagctgactgatgctgatcaagtttgcagtcagtcccttcaccagcagtactttgtccagactaggaagtccatcatgaactagctttcccatttcatgatc

SEQ ID NO: 276813 - DNA, 419 bp, Glycine max
  unsure (1)..(419): unsure at all n locations
catcttctagttgagcataggcaggcacatgacacaccagcagggatttatccaaaactttttctctcacataaaatatgtctagttccatgtgttttgtccttgaatgaagaacaggattatgactcaaggcaatagtgctgagattatcacaatttacagctggagtagtgattttaatacagagttctcttagtaaggatagaatccatagagttctgatgcagtaacagccaggcttcgatattcagcttctgtcgttgatcaagcaacagaagtttgcttctttgaccaccaagaaacaggattaggactgaagaanataccctgaaattgatcttctgtcaaccatatccattccncaatcagcatcacaaaaagcttccaaagatagggttcaccttgaggagcagatttat

SEQ ID NO: 276814 - DNA, 419 bp, Glycine max
  unsure (1)..(419): unsure at all n locations
tacaaccacattcattggactgaacccatttcaagattacattgttgtgtcctgagacagaaagcatgggaaagctacattcaggacaatctttatttttctttcttgaaaagttatagaaaaagaaaataatcaagtccaaaaatatgctaatctggacatgtaagtgaagaccaaggtctagtttggattaacttgtggaagtcttttaattatgaaaccctagtagtattatttgtctatggcaatagattcaagtttcgataaatttaccggtgcttatgagcaatttggatgagggagcttctgaaaaattagagttgcataagttgattttatggacgaagcttaatttgttntacattcattttatattctactacaacaagtatttgttgagaacttttttcagattgact

SEQ ID NO: 276815 - DNA, 252 bp, Glycine max
cctgcttcagtgggttgccacagtatgggaaatgtttttctaccccaaatgcatacttaataataatgattctgatacctggagcaaaagttatggccgctttaagttttgctataaacaagttccaaaaaatcttgtctctctcaaataatgtcacaccaagtgctcctagtattcttcacacaaaatatgtttcaaatgaagctaccacacaaaaattcagccaaaaataacaactctaactatcaaaac

SEQ ID NO: 276816 - DNA, 381 bp, Glycine max
tccatcaactctataatcttaaatcaagaaagtctcactttgtcatataccaaagtgtaatagtccattgccatccttcaatggtgcatgtgattggtcccaaaaccttatatttcttttgttgtgaagaataatcgaggtttttaaaaagaaaggggaaaaccctaggatcaatatttcagttgattgattaaatgtcaaaatggctccattgtcataactccaaaattgtcaagtgactaaattaaacagaacatacactctaaaggagttcccgaagagatttgcaaaagataggatgaggttgcatgagttatcacatctttccaaaaagagacagtcaatctgtgttcttcacaaaaaaagaaaaaaagatcaaac

SEQ ID NO: 276817 - DNA, 289 bp, Glycine max
ttttttgatgatgaccaagaagatgagaaaaagctcgtgagaatgatttctagattgagtccaccaggtcaagatcaaaattaatttccagttcatgaagagaaatcaagaagattccagattccagagaagtttgatttcttgattccagagaagaaataaagaagacttctccagggaagtattgtagagattgttcaaaaccaacatagaaaaattttgtttttgaaaagagtttctcttaaaattttctaagttaccacaagtttcactctctggtgatcgatta

SEQ ID NO: 276818 - DNA, 439 bp, Glycine max
ttcgcagagcttacggtaaaatctgggacctagccatggtataagtcttcacagaggccattgcctccctcgcccagtattatgatcagccgttgaggtgcttcacctttggggacttgcagctatcacctatggtagaagaatttgaagagatcctaggatgccctctagggggaaggaaaccatacctcttctcagggttctatccctcattagctagaatttccaagatagtccaaatcttggcgcacgaattagaccacaggaagcaagtcgaaaatggggtggttggaataccgagaagatatttggaggcaaaagcaagaatcttggcaggtaaaggcgaatgggcctcgttcattgacattctcgcacttttgatctttggaggagtcctctttccgaatgtggatggtttggtggacctagcagcgatcga

SEQ ID NO: 276819 - DNA, 425 bp, Glycine max
  unsure (1)..(425): unsure at all n locations
agcttatgttacagacagttatttgaataactactcccatacattacataatttatattttaagagcaagaaatgaaatcaaatgaaacattacaactgaaataaagacatggctaatgaattaaagtcattaccttcaaattgatctcagatattgtttggcatgcagctccttccaagacagcgaccttaaactcctcaaatactgatgtagtcactacagtgatctgcttggatgagacgggaggcttgggtaagcagagtttgtcatcaaacacactagataaaatgcaatgaagatctttgtgatgcctaccttgcctgacttaactgtatcttttatgagcgtcttgtcttcatgatactgtcaaaaaaaaaaaatcatggtaaaaatngataattcagcaacaatcttcacccaaaaa

SEQ ID NO: 276820 - DNA, 352 bp, Glycine max
tcacgccagtaggaatggcgacatttatggtcataacagactttccttgcaatttgtgtaaaaacaaaccctgtttaataaataatttgtgaaagaaacgcccctacattaaatttatcgcgtcttaacataggattctgtctgatgcgtgcgaatattcgataatcgcaccacgacccttaaattaaatatgctactactattaaattcgtaggacaacatgaacatataagaatcaacaatagatcgttgtccactcaatctttcatatctactatttaatttcattaagaatcaacaataatcgtgtatcactcaacttttatatctactatgttatttcattctcttt

SEQ ID NO: 276821 - DNA, 359 bp, Glycine max
  unsure (1)..(359): unsure at all n locations
agcttgtgcctcttcatgtctggaatatgaatacatcatatagatccaaagacccttangtgctttgctgatggcttcttctcgttccaagcttcaattggagtcttgtttttactgacttagttggacatctcgttagtatgtaaacagcagtgtagactgcttcagcccagaatgtgttatgtagtcccttttccttgagcatcgatctagccatctccataattgtgcgattctttctctcggacanctccatttgttgaggagaatatgcgactgntaagtgtcgctcaatgccttcatccttacaaaatctttcacactcacgagaggtgtactctttgtcgcgatcacttctt

SEQ ID NO: 276822 - DNA, 425 bp, Glycine max
  unsure (1)..(425): unsure at all n locations
tctggtgggacatcttgacttgctttccaatctgacattcaccacagattctgccttcttctattntcagattgggaatgcctctaacagcacctttgtcaatgattttcttcatgcctcttaagtgcagatgtccaaatctttgatgccacattctgacttcatcttctttggagaatagacatgtggatgagtaactggtttcttgaggtgtccataggtaacagttgtcctttgatctgctgcccttcattagaacttcactcttctcatttgtcaccaagcattctgactttgtgaagtttacattgaatccttcatcacacaactgactgatagctgatcaagttgcagtcagtcccttcaccagcagtactttgtccagactaggaaagtcatcatggactagctttcccattcagtga

SEQ ID NO: 276823 - DNA, 299 bp, Glycine max
  unsure (1)..(299): unsure at all n locations
agcttggntatctccttctttactacatcaagaatcaccgggttgagtcttctctgtgggtgtcttactggtttagctccatcctctaaatttattcgatgcatacatgtggatgggctaataccaggaatgtccgccagggtccagcctataaccttcttatgcttcttgagaactgacaacaacttcttctcttgctcatcagcaagggaggcagatataatcactggaaaactcttgctatcatccaagtaagcgtattttaaatttgatggcagaagcttcaattctggtgtggt

SEQ ID NO: 276824 - DNA, 360 bp, Glycine max
tgagggaacataatcgagaatcaattgaagcaaacaataatgtcgtagaaaatagaagacaccatttgaaaagaatattgaattcaaacaaagccataccatttatcacaaggcttacaccagaaaggaacacacaaaacttataaacaaacaagaacgccataagcctcatataaccttcactttacaaatacatacaatgaatcaatcaatcatcaacatataaccacgaacaacaaaatcaaaccctcttttctaaattgcattggtgaaaatgaaacaaatcagtgagagtgagcgagagagaggcacctcgagtttagcagatttcataacgatggggatgtatatgagaacgat

SEQ ID NO: 276825 - DNA, 418 bp, Glycine max
  unsure (1)..(418): unsure at all n locations
agcttaccatagcttgtgtcctgggtagtatcttacttgattntatttgctnttttgtttttattnttagggttttggtaagtgggtggttttgaaattggtgcaatgcgggaaaaagaatagatttttggagtgtggaggtggaaagaggaaaagggtatgtgttaaatttgttggaacttgagagtgagcacatgatgtttgtgaaaagtgctctgagggatgtatggaataataccatgataaaattagttgagaactgagaatggaatttgccttttgtttatgagtgttgctcattcattggctttactgtcggtgtacgttgtgccaaggagcatggtgtatgcgcaaagtgttgttgcaatacnaancanatagttggaagggttgctttctcacatttgatggagcattc

SEQ ID NO: 276826 - DNA, 408 bp, Glycine max
cgattcattctatgtacccgtagtggtccacattgtgtttcgtggcattttattctcattgtgtttactttgtataccccctggtgacgtgcttaagccattttacttaagtcatttctcgcttaacttaaaaataaaataaatttccaccgaacgtttgaattgtattatccattaacttcggttaaaataaattccgaccgttcggtcgtgccgtaaccacgttggaagtcaaaaagaggtaaaaaataatataataatcaaaaagacatcttttagtaaaataaagcggaaaatcaatcgaacgttttctctttgggatttctcattcttaatcgaattgattaataactaaagtgaaactaaaggctaaaatcaattcgcctagtcaagctcgtccacaaaaat

SEQ ID NO: 276827 - DNA, 402 bp, Glycine max
tagcaggaatagcgagttttctagtctacatatctcttttagcggcgacattctcacgctaagccaaattctgaaaaaaaaatagaattttgaatttggttaagcgtgggaccgctgagtgggaagaaaaattgagaaaccaaacgtcttgtcttttcgctcagcgaaccgctccgctaagcgaaaagaacaaaacgttcttagtaggtgtaatgtcagttacacccactctttgaaaatttgcgccccttctgctccctttctctctcaaactgctccctatgtgtttttgcttcttctactctacatctacttgttttcatcaagcatctgcaacacaagtaagttctttgatctctatctttgttattttatcaaaccttaggttagacaactctagag

SEQ ID NO: 276828 - DNA, 438 bp, Glycine max
  unsure (1)..(438): unsure at all n locations
agcttctaaactntatacaagaatgaagctctgataccacttgttatacaagcggcctcagatatcttaagaagggggggttgaattaaaatattccaaactacttccccaattaaaaatctatttcactttttattcaagttatgaattccctcaatgacaatcttcttaaatattgattcaaataaaacaatttgaatatgaatataaagcaataataaataaaggagattaagggaagagaaagtgcaaactcagatttatactggttcggccacacccttgtgcctacgtncagtccccaagcaacccgcttgagagttccactatcttgtaaattccttttacaagttctaaacacacaaggacaatccttcctttgtgtttagaattcctttacaacaagagactcacggtctcttaatcccttagagaatg

SEQ ID NO: 276829 - DNA, 446 bp, Glycine max
  unsure (1)..(446): unsure at all n locations
tgttcttgattnttcctcagttctttaacaagctntgaacattatacttggccttcatttaactgtctttgggcttggcggccacgctcaacaaagtactttcgacacctactatacgttgatttcaccaatgctgttatgggaatgttgtgacaatcctttaaaaccttattgatacattctgagaggttcgttgtcatgtggccatatcgacgtccttctctatcgtaagccatcgtccatttttcctttgagatgcgatcaatccatgttgctatagctggactcagttcacaaaatttttctaaattttgataaaaaatgtgcttgcatggagtgtacgctgcataaaattagttatgaataacaattntaagtataaatgaaagtaaaataaacgtgaccatcaaatatgaaatcttacccaatttcttcaacatttcttt

SEQ ID NO: 276830 - DNA, 381 bp, Glycine max
  unsure (1)..(381): unsure at all n locations
agcttgcccagagaaggagtccacggaggaaatgcttaccacctcataagactggaaagtggtttctaatgactcctctgcggcttccacataaagaatagaggatgggcagctcaccaagatgtcttccttgcctgatacgatgaccagatgcccttccactacgaatttcaacttttggaggagtgttgagggaacaactcctactgagtggatccacgggcgccccaacagacagctgtagggagggttaatatccattatttggaaagtaacttgacaggtgtgagggcctatctgtactgggagatcgatctctcccctaacctctcggcgggtgccgtcgaaggcacgaaccaccattgaactcngctttaagtg

SEQ ID NO: 276831 - DNA, 423 bp, Glycine max
  unsure (1)..(423): unsure at all n locations
cttccttgagaagtttctntgagaaaactttcttgagaagctagagtttagctacacacacccatctaaaaactaagctcacctccttgagaagcttccttgagaagctagagcttagctacacacacccatctaaaaactaagctcacctccttgagaagctttcttgagaagctagagcttagctacacacccctataatagctaagctcacccccatgacaaaaaaacatgaaaatacaaaaaaaatcctactacaaagactactcaaaatgccctgaaatacaaggctaaaaccctatactactagaatggccaaaatacaaggcccaaaataagaaaacaacctattctactatttacaaagaagagtggacccaacctcggcccatgggctaaaaaatctaccctaagggtcatgag

SEQ ID NO: 276832 - DNA, 454 bp, Glycine max
agcgttgacttgagtcatcaagagagtataaatatgtgaccatggcatgaatttcaaaaataatctatcatccatctttcaatatctttcaacactttcaacaaaactttctgattcatttctcttcatctttctaaaagattttgctcaacactttctctttcaagaaaagttctttgttcaaaaacttctactattcatctttttcattctcttcttcctttgcctaaagaacaaaggactaacggcctaaattcttttgtgtctctcttctcccttacaagagaattcaaaggactaaccgcctgagaattcttttgattcttccctttcccttaagcaaaagatttcaaaggactaaccgcctgagaatgctctcgcccaacacattggagggtacatcctttgtggacaagtagagggacatctacttgggatcgtatactgaaacaag

SEQ ID NO: 276833 - DNA, 475 bp, Glycine max
  unsure (1)..(475): unsure at all n locations
ggtagaatggctagacatgatacatgtcagggtttggtttgtttcaaggataaaagggatgccccacattatttccatgacacaaatgcaaaaatgatgatttggaaattttatgcaaaactggtcatgcatgcacctatgtggacactcaagtgtcaaatttttatggtcatgtgatgctagggctcaagattcatttcctctattttaaatcaacccaatgtttccaaaatatgttcttttatcaatttgtgcattcatccgagtccatttcgggcgtccggngaaaacttcacagcattcacccttcaggtgtatacacatttttttcaaaaactagttatgatcaatgaatttttttcaaagaaaagttggaaatcatctcttttcaaaagcatgtcggttnttagctagacaanctatntttctttnntctccttcttttttttntatcattaatcagttgttatttctt

SEQ ID NO: 276834 - DNA, 389 bp, Glycine max
  unsure (1)..(389): unsure at all n locations
agcttctcgacatatgatgctctcgaatcggacatccgngtgaaaaggtatgaccatttaaatttcgcgagagctttcgatgtttaatttcgagcgtatcgatatattataagcctgagtcgtacatccgtgtgaaatgttatgaccatttgaatttctcaagagcttctcgtgttcaatttcgagcctctcgacatattatgcgcccgaatcggacatccgtgtgaaaagttatggccatttgaatttctcgagagcttccgatgtttaatttcgagcgtatcgatatattataagcctgaatcggacatccgtgtgaaaagttatgaccatttgaatttcacgagagcattcgttgttcaatttcgagcgtcactatatgtgatgcg

SEQ ID NO: 276835 - DNA, 444 bp, Glycine max
  unsure (1)..(444): unsure at all n locations
gcttataatatatcgatacgctcgaaatttaacatcagaaactctctagatattcaaatggtcataacttttcacacggatgtgcgattcgggcgcataatatcgcgaggggcttgaaattgaacaacggaagctcttgagaaattcaaatggtcatagcttctcacacggatgtccgattcgagcaaatcacatatcgagacgctcagaattgaacaacggaaggtcttgagaaatacaaatgatcttaacatttaactcgaatgtccaattcaggcgcatcacatatagtgacactcngaattgaacaacggaagctctcgagaaattcaaatggtcataactnttcacactgatgtccgattcacgcctataatatattgatacgctcgaaattaacatcgaagctcttgagatatcaaatggcataactttcacatgatg

SEQ ID NO: 276836 - DNA, 430 bp, Glycine max
  unsure (1)..(430): unsure at all n locations
agcttgtagagcatcgatcggtgtgtgggtgtatgggggcacgtataactgcacctgctagtcaggggagcatccgttgctacccatcacgtggcggaggtgcttgccggcgtggagggcctgagccaccatgccttgcattgttgattgaatgttatggttgggtgtggtggtgcacgtcaccgtgtcttggtgtccctgcaacttcatgtgttgcattaatattcttctctttggaagcacaccaaccatatgttctcttttctttgcattcattntctttcaccctcacaattttaattttttttatccatacataaaattttgaaaacacaagaatttctattgaagtatttaaaattcttagaattataaacttcttagaattttaaatttcctcatccaaacacacnctaaggcaatcaatata

SEQ ID NO: 276837 - DNA, 453 bp, Glycine max
  unsure (1)..(453): unsure at all n locations
ntagccttaagttgttcaccatgttgcttatgttgctccctctatctctaacaatctccccctttttggttttgatgatgccaaacatgaatacaactttgagtgcatttggagagtctggagattggattggagacttgatccttagtattatcttgaaaaattcttaacacttaagaagagattaattcatcatcatcgtctatgtcaatatataacaatctttatacaatatagtgttcaacatgctatgcaatgcattcaatatgcaatatgcaatagcggtagtgtatatcttcttctcccccttttggcattaacaaggcctaaaagttgattatgcacaaaacaacacatgtgtgaacatagaaataaagccatatttcattaagcatatagcattacatgatcataagacaaagactaacaaacttgatcattattttaaaacta

SEQ ID NO: 276838 - DNA, 411 bp, Glycine max
  unsure (1)..(411): unsure at all n locations
gatatgttaaaggacctcactaagacatccgagaaagaaggtattggcgtttgaattggctcaaaagctcaacattcaatttcgagcgtntcgatatgttacgggactcaatcagacatccgagtaaaaaggtatggtcctttgtattggctcagagcttcaacattcaatttcgagcgtctcgatatgttacgggactcaatcagacatccgagaaaaaagttattgccgtttgagttggctcagagcttcaacattcaatttcgagcgtctccatttgttacgggactcaatcagacatccgatataaacagtattgtccgctgatgtggctcagagcatcaacattcaatttccagcgttccatatagtacggactcaattagacttccgagaagaaagtattgtccg

SEQ ID NO: 276839 - DNA, 337 bp, Glycine max
  unsure (1)..(337): unsure at all n locations
cttgagccaactcanacgataataactttntactcggatgtctgattgagtcccgtaacatatcgagacgctcgaaattgaatgttgaacctctgagccaattcaaacgacaataacttttttcacggatgtctgattgagtcccgtaacatatcgagacgctcgaaattgaatgttgaacctctgagccaattcaaacgacaataactntttactcggatgtctgattgagtcccgtaacatatcgagacgctcgaaatngaatgttgaagctctgagccaatacaaacgaccatatacttttactcggatgtctgattgagtccccgaacatatc

SEQ ID NO: 276840 - DNA, 305 bp, Glycine max
  unsure (1)..(305): unsure at all n locations
agcttgctctaaatntacattgatgtttgtatttattggagggggttgtatgccatttttgttttaagggtagcatttcttggtaaaaactaactttccaaatgtttgccttcgcatgaatggccccgacgaagcttgcctcacagaggtccaagaaggacaaggccggcgaaggaactaattccgctccggagtacgacagtcaccgctttaggagcgctgtacaccagcagcgcttcgaggccatcaagggatggtcgtttctccgggagcgacgcgtgcagctcatggacgacgagtatact

SEQ ID NO: 276841 - DNA, 422 bp, Glycine max
  unsure (1)..(422): unsure at all n locations
tcaacaaaggggagatggaccatttcaagtgnttgaaagaatcaatgacaatgcttacaaagttgagcttcccggtgagtataatgttagttccaccttcaatgtctctgatttatctctttttgatgcagatggagaatccgatttgaggacaaatccttctcaagagggagagaatgatgaggacatgaccaagagcaagggcaaggatccacttgaaggacttggagggcctatgacaagggctagagcaaggaaagccaaggaagctcttcaacaagtgctgtccatactatttgaatacaagcccaagtttcaaggagaaaagtccaaggttgtgagttgtatcatggcccanatggaggaggactaaatggcaccactttgtctcaattttagagtggttagtttttctaaataat

SEQ ID NO: 276842 - DNA, 453 bp, Glycine max
  unsure (1)..(453): unsure at all n locations
agctntacactggtcgcaatatatgaggctcttcatatctcctttatcaccacatattagacatatattttcctgtcaagttcattgaaacaattatggacacacattctaatattatgccatgaaacaagctataagtttaaatgttcttaagataaaggaaaaacattgtctatcaatagtcatagataaattctaacttgactgaatatttacagtgaactgcacacaaagtcaacaaaacaatcacaagacccagtattcattattgcttacatatccactaaacatattaagaaaataagggcaacacaacaatcaacaaaatgtaaaatcaaatattccttagcatatctcctattggaacacgttaacaaataagagcattggcgttctcttggtcacctaaagcaactcanatgtgntgtcattacaagttacaacaagtttcta

SEQ ID NO: 276843 - DNA, 339 bp, Glycine max
  unsure (1)..(339): unsure at all n locations
cgagattaggtgataataatagttttataaactntatgccaatttatgttgtacaaggcttggattttagagattaggtgataataatagtttaaaaactttatgccaaataatgttgtgcaccattccatgttcccctaacaacatcatggaaagagttgttcacaagccagcaagcatgaaatttgaaaggcttcacacccccaacaaaattatcctgggttgtacgtaaaagaataaccttatggttagatttcaagaataggagatgaatacagtagagtcaagaaaaccaaaccttcttactcattccaactgcataagcaacatcttcttaca

SEQ ID NO: 276844 - DNA, 420 bp, Glycine max
agcttgcctgtccgatgcagcagtaatgatggcccgagttatgttggggaacggttacgaacccggaatgggtttaggcaaagacaacggcggcataactagcctgataaatgccaaaggaaatcatgggaagtatgggttaggctataagcccactcaggaagatataaagagaagcatcgcgggaaggaagagcggcagtcaaagctcgcggtcgagacaagaaggtgaaggaagcccgccctgccaaataagtagaagctttataagcgcgggtctggtggacgaaggtcaagtggtcgcgatatacgaagatgatgttccgagtacattggatttggtacgaccatgccctcctgatttccagctgggaaaatggcgagtggaggaacgccccggcattttatgcacaagcataat

SEQ ID NO: 276845 - DNA, 393 bp, Glycine max
  unsure (1)..(393): unsure at all n locations
tcaagaaaaagatggcctcaacaaattccttatttccagaatggaattctatcaatagacctccaatctttaatggagagggttaccactactggaaaacccgaatgcaaatttttatcgaggcaatagatctaaatatctgggaagccatagaaatagggccttatatacccaccacagtagaaagagtttcaatagatggtagttcatcaagtgaaagcataaccatagaaaaacctaaagatagatggtctgaagaggatagaaaacgagtacaatacaacttaaaagccaaaaacataataacatctgccctaggaatggatgaatatntcacggtttcaaaatgtaagagtgctaacgaaatgtngaacactcttcgattaacacatg

SEQ ID NO: 276846 - DNA, 303 bp, Glycine max
ctgcacttatgtaaatgcttttataagtacacatgtaaacttagcgcctacttgtaaagctactaatgggcatttactgttaatggctacttgggcgctatgacactgggggttagtcactcttaaaatgttaactataagtgatacctacctataatctttttactgtgagtgtctaaagcaaatctagatggataactgtcataatctccaaaaaactcgacatcattgcttgcgggtttaccctggtaggggcacccagagcatctgatcatgaccgcttttaaaatataaattttactg

SEQ ID NO: 276847 - DNA, 411 bp, Glycine max
ggcagcctagttgtagctttcacgcctgtttctctaatcagtcaaatgctacacaattcatatactaaaagctaccaaatactcctacgtggcattgctagaaatcgatagccgtcaaccttctacgtgagatgtgcttaccttaccacattaaagctagtactttacagtttctaccatttgttgtctgacttttctctatatcctttatatttacttttaatatgggtaatttagtaattttagttaagataacaaatgataataaagaaaaaaattaattaataaataattcagaatggaataaattctaaaaaacataaaatatgatgagacaaatattttttaaagcataatttgtctctggaaacttcaatgaatctcacaattaatggaatgtaattatatttc

SEQ ID NO: 276848 - DNA, 428 bp, Glycine max
  unsure (1)..(428): unsure at all n locations
agcttgcgcaacanatatttaattgttgcgtgatcagtgtaaatcactatcattgatcccactagataagatcgaaatttctcaagtgcaaacataattgccaacaattctttctcaatggtggcatagttaatctaagcatcattcaaaactttgctagcataatatatggtatgaaacattctgctcttccgctgccccaacacagcacctactgcataatcacttgcatcacacatcaattcaaactcttgtccccagtctggtgctgtaatcataggagcagaaaccaatttggctntgagagtgttaaaggcttctaaacattcttcattaaacacaaacacaacctccttgttcaacagatngcttangggtttaagcaatttggagaagtctttaatgaatcgccgataaaatccaacatg

SEQ ID NO: 276849 - DNA, 454 bp, Glycine max
  unsure (1)..(454): unsure at all n locations
agcttgcctgtaattntctaaaaatccttttggtgcttttattaccatttttaatcttgtctcctcccttgcattgctggaagtggcctaacaagctgttaatatttaaaagacaaaaaagaagcatgaaagctggtttgatgaagatgcatcttaaaatagagtgattgctcctgtgaatataatcatttttccttttgaatttgtttttctttttcatctttctcatctctagctcgttaaattcattggatccattatttctccatttctccgtctaattccatgtcacgccattntattttttggctttattttcaatgtatgacatgtagagctgaacatggcgataagtctgtcttgcgaagcccatataatccgtgaagcatgccattcataatggntcattntttttttcaagcctgtactcattccatatagtctatgagaatag

SEQ ID NO: 276850 - DNA, 454 bp, Glycine max
acttaactcttcttaccttaacgaattgagttgtggttaaagactctctactgtgggtaactactatccagcatgccctgaacctgaattaactatgggcgctgccaagcacacagatggtaacttcatgactttacttctacaagaccaaattggtggtcttcaagttcttcatcagaatcaatgggtcaatcttcctccagtacatggagctcttgttgtaaacgtaggagaccttctacaggtaaatattccaagttattattctcaatcgttagattatgcattttagagcttacttttaagtttaaatgtgttttaggttcctaatgaatcttagagcttactttctatgacaagtgattgatttttcttctagatatctaatcaagtgtgtcgtacaatctattcattatatatggaaagtttcgtttgagtcgatgttgcacttaaa

SEQ ID NO: 276851 - DNA, 334 bp, Glycine max
agcttctaaactctgtacaagaatgaagctctgataccactggttatacaagtggcctcagatatcttaaggagggggggttgaattaagatattccaaactgtctcccctaataaaaaatctatttcactttctacttaccttatgaattcccgtagtgacaatcttcttaaatattaattcaaacaaagcagcttgaatatgaatatgatgcaataatgcatgaaggagattaatggaatagaaactgcatactcagctatatactggttccgtcacactcttgagcctacatccaggccccaagcaacccgcttgagagaacactatcctg

SEQ ID NO: 276852 - DNA, 470 bp, Glycine max
  unsure (1)..(470): unsure at all n locations
taagaaatctatgtatggtttaaaataagcctcccgtcagtggtaccttaagtttcatgggataatttcctcatttggttttgatgaaaaccccatggatcaatgcatataccacaagattagtaggagtaaaatatgttttcttgttttatatgtagatgatattttacttacagccaatgatccgggtttgctacatgaggtgaaataatttctctctaagaattttgacttcaagaatatgggtgatacatcttatgtcattgacattaagattcatatagatagacctcgaggtattttaggtctatcacaggaaacctatattaacaaaattntagagagatttcggatgaaagattgttcactaagtgttgctcccattgtgaagggtgataggtttaatttgaaccaatacccacagaatgactntgagagagaacatatgagaaacattccttatgcttcac

SEQ ID NO: 276853 - DNA, 427 bp, Glycine max
  unsure (1)..(427): unsure at all n locations
gcttgtagaatggctagacatgatacatgtcatggctcggtttgtgtcaaggataaaaggggtgccccacattattttcatgacacaaatgcaaaaaatgatgatttggaaactttatgcaaaactggtcatgcatgcgcctatgcggacgctcaagtgtcaaatttttatggtcatgtgacgctagggctcaagattcatttcctctattttaaatcaacccaatgtttccaaaatatgttcttttatcaatttgtgcattcatccgagtccatttctggcgttcggggaaatntcacagtattcacccttcaagtgtagacacanttttttcaaaaactagttatgatcaatgaatnttttttcatagaaaagntggaaatcatctcttttctaagcatgtcgtttttagctaacaacttatttc

SEQ ID NO: 276854 - DNA, 461 bp, Glycine max
tgaacaaacaaaatggcatcatgcggcaaatgtgaaataacatcacacaatacccatattacccttcacttacccttgtctcaattttggtgtgatgttgatcatcactcaaaatgactctttatttatcctctgattcgcacgatgacaagatgaaaatggatgcatgcttatgatttggatgtttaagtgcaacaattaaacaggtgttatcgtgttcaatttttacttaaatgctcacgacaccccattgattgagcgaaatggctccagattcagtgggcaaaatggacagtgtatattgttaagaatttacacaggattataagactttgaaaatccgaatgagtccttggagaacaaacatgtattgagccttctagttgccccacgtactatgcataatatcgtttgacgatatcagaattcatgggcgaaggcaactcttcatcgtacatgct

SEQ ID NO: 276855 - DNA, 416 bp, Glycine max
  unsure (1)..(416): unsure at all n locations
catgcaagcttcgtgatcttggacaagagggttntatgttagcacatgcaccttattatgaaaaattagaaactgagttcaagaagccattgtatctcggatgcgcaaacttcacacgattatcgaaggtgttagctntggtgaatttgaaggcaagatttgggtggagtgacaaaagcttcaatgaattacttttgttattgaagaatatgcttcctatggataacacgttacccaagaatcattatgaggccaagaagaatttatgttcagtgggtatggaataccaaaaaatacatgcttgccctaatgattggtatttgtatagaaatcagtttacacaaatggcgcactgccctacatgtggngtgtcatgctacaaagtgaagtgatgatgcaaccacatacaaggatcg

SEQ ID NO: 276856 - DNA, 410 bp, Glycine max
cttggtggtgaagctccttcttgcaaagcttattccctagtggctggcacctcttttcacctcttctcctttgtcttccgctgcatatccatggtggaaaatcaccattgaaggacatcattgaagctcaaagatccagcctccacagaagcttcacatgcaagcttccatcaagtggtaatcagagcacaagagcttcaagtaggtgcttcttaaacctccattaattatttgctttaccttcttttccattgttgtttcctcattttttttccatgtatcgccacacatgtcttgtgctaaatgttgttaacatgattctttagaatttccactgattaatcttgctatagaagctagaattgattttctatggttcaaatttcttaattcatgtcttgaactatgag

SEQ ID NO: 276857 - DNA, 435 bp, Glycine max
  unsure (1)..(435): unsure at all n locations
agctngaaatgagtnagtgtttataggtgagacttcctacttttattcgctgaccataaaatggtacctggagatatgtcgcgggggtcacgagaccttggggacgtcaggtggggtgctattgcccaaaaccaagcttgaccaatcccgacccaacccgggcatagtcagtcagtgagaacctgtgatgtacctaaacaggcgagctcctgacagtcaacatataaaagaacaaagaccacatagcaaggaggcttgtgtggtggctggccagctgtgaactttgagtgttatatgggatatggcctctggtaatcgattaccaagggtgggtaatcaattacaatgcttaacagtgaagacaggaagctaagatggcctctgataatcgantaccaaggggtgtaatcgactaccaggcttaaaaacgagatc

SEQ ID NO: 276858 - DNA, 384 bp, Glycine max
ctaagcttctaagaacagccttgataccctttattctccatagaggcttctccaaagaagatggtatcatccgcaaactgaagaatattcactgggaccttgttcttccctaccataaagctgtgaaataagattctggacattgcttccctcatcaatcctagtagcccttcagcagccaagacaaataaaagaggggccaagggatccccttgtctcaatcctctttgaggcttaaattcttcagttggacttccatttacaagaatggatattgaagctgatgagaggcaacctttaacccaactaatccatttttcgtggaaccccattcttctcatcatataaaagatgaattgacaggccacagaatcataagctttt

SEQ ID NO: 276859 - DNA, 423 bp, Glycine max
  unsure (1)..(423): unsure at all n locations
agctntataagtgcgggtctgggagacgaatgtcaagtgttcgcgatatgtgaaaatgatgttccgagtacttcggatttggtccgaccatgccctcctgatttccagctggaaaattggcgagtggaggaacgccccggcgtttacgcaacaagcataatgtaaacctttacggttttaaaagctctatagttgggcctaggctttagagttttctttttgttaagggctntgtgtcttttgtttttgaatttataatacaaggatctttcttcatctgttcctggtctctacccattctcattcatttgcatgtttacttctttttctgaaacggcagattcgatgacgagtcccccgaaggtactaatacctgggacccgtctatcaacttcgagcangaaatgaaccaaacggaagatg

SEQ ID NO: 276860 - DNA, 451 bp, Glycine max
  unsure (1)..(451): unsure at all n locations
cttgaagagtgttgttnttcaccttctcgctaagccaatatgctggcttagcgagcttctgctatgcgcaacactcatgggctaagcgtgaggaagactctggaagaagatgagctatacaggttcactaagcgcactgcttcatctcactaagcgcaccgcttcagttcatccgctaagcgagaatggcacgtgcaagccaaaattcactattgtgtgctaagcgagccataattgcgctaagcgcacgagcacgaacaaggccacctatttaagcctgaaatcagattctagaagggagtttggactgggattcagagctttgcatgtctagagtntctagagagagaaaggtccaagttccagagagtnttgagagaatttgctgtgtgaagatctgcagagaccatagcttgaagcacgagccgatntgagagcttgagatgagttt

SEQ ID NO: 276861 - DNA, 429 bp, Glycine max
  unsure (1)..(429): unsure at all n locations
agcttggcttggccatatcataattaagggacctgcatttatttatataaagttatttatgttagattatgcatagtggttttagaaccttgccatttatttaatgtatgtacaacacaggacagagaccctgaataattntggtggttccttactccttagttttattagttagttntattgctaattgtctctctgctttggttttggctgtattttcttttcttggttgataccttattcagatcccattaacacttcactttctctcgtggaaaaatattttggcaaaaaaaaaaacatttataaaaaagtatgaactatgtagattagcatctttccaatttcacatctcatgttaaaaaattcagcttttttctcagtcttgactttcgaaagtgtacctttccaatatgtaagcttattgaa

SEQ ID NO: 276862 - DNA, 358 bp, Glycine max
  unsure (1)..(358): unsure at all n locations
taataagtccatctatggattgaaacaagcctcctgctagtggtatttaaaatttcatgaggttatttcttcattcagctttgaagagaatgtcatggatcactgtatatactagaaggtcagtgggagtaagatttgtttccttgtattatacatagatgatattctacttgcgactaatgataagggtatgctatatgaggtgaaacaatttctctcaaagaactttgatatgaaggatatgggagaggcatcttatgtcataggcataaagatccatagagaaagatctcgaggcattntaagcttgtctcaagaaacctatatcaacaaagttttagagagatttaacatgaaa

SEQ ID NO: 276863 - DNA, 158 bp, Glycine max
agctgggttcattcatctcatggatctgtgcgttttcatgatctaagggagtgatctaattataaccatgaacaattgtgtttcattagttgacatggataccgactgcatttatggatttgcatgctcctatgccgatcgctctatgagaaaactac

SEQ ID NO: 276864 - DNA, 429 bp, Glycine max
  unsure (1)..(429): unsure at all n locations
tgtaggattatggggtacccatcacatgtggtactaggtggttgtcgggcgatggtgcacaacaagttttccacatccacaatgcgcgcataaacccaccatcccctgttgcccacctccaactgagctcacgtactcccacgtagcccataccctcgtttctctcaacactgggtccccatcaatcctcccaagcttccacaacatccaagcaacacaacattcaaacagcacaagctatcacagccaagcaaaacagagcaaaggcagaaaactctgctcaacacaccaaccaaaatcacagctnttctcacttaaagaccccagtaataattccttcgatccaattcactnaaccgtggatcgactccaaaantttactggaagtctacagtgcataagcctacattgtgaaccgtgggatctact

SEQ ID NO: 276865 - DNA, 206 bp, Glycine max
agctcggctcctattagtgagtaccactaacctatttccttcattattatcatccaagtgccaattatgacagcaggctgatgccaatgtactttgtatttgatatgaggggtcagagtcttggaattctagcaatggcgtatgaaaagacccgacagctagcaagagatctaccatctgtaagatgcggagactcggatgttgat

SEQ ID NO: 276866 - DNA, 325 bp, Glycine max
attgattcagcctgacgaatgtatcaacgtttagtaatttatgctacaacatagaacacaagagcatgattgattagagaaatatatttatatgcataagcatgtttgttagaaagacacaatatttctacctactgctatcacttttacttactttgcattttatagttttagcataaaagttagtttaaattctatttgaaattatcaatcatacatgttgtctcaacgatgcttcatttctgaacttaattcaggctaacatttgttggatcaagtggcctccgaataattaagaacgtgggggatgaattattattaatgt

SEQ ID NO: 276867 - DNA, 408 bp, Glycine max
  unsure (1)..(408): unsure at all n locations
tgttttctgggcgaagacgactatcattctgtcttaacgacgccggagaataataccaattctacgataagggctaatgttgatctggccgcatgaacgtgaacatgccatatcctggctgagctaaaagtagtggtgcctctatcaagttaggctgcgcgccagccttataggactgttccggatcaccaaatctgtaaggctttgtctgcaataaaatatcacatttatgtctcaatcagttatgcttaaactactggttcatatatagtgatatgagatacaagcgaataatcatgaacacgagagctctggacgatttgtatacaatcacccttggatgatactactattgcgttcaggactaataagatagctgctttagcacgtggctcatttttcaacgcn

SEQ ID NO: 276868 - DNA, 403 bp, Glycine max
  unsure (1)..(403): unsure at all n locations
tcaccggatgacgccgatcgaacatttcctaacttacgtcatgcaaatttcgttcagggattgaattgaaaactcgttaggcgacatctgtcgtgaagtagcgaccgatatttttcagccgacattgcacaattctttttagaaaagctcgctggtcgataatggtctttttacggcagagtaagttttcttgttttggtgttgcataaaaaagttacaatgtacttcggctaggtttttcgtgcgagttcaaccgacatcttgtttccgccaggaaaacattagcccacctctgcaaaaaaaatatttgctaactcgcttcatgcatanttcattcaacgatggaatagaaaactcaatagccgacaacggtcgtgaaatagtcccgactgatatttttcag

SEQ ID NO: 276869 - DNA, 427 bp, Glycine max
agctagtactcacatcgttcgcgtgtatgatatccactccacaaggtttgaagtataagagagcttcaaccctataacgcaatgtggcggacaaaagtgggcagtaaacttgaatgatcgtcattgtcaatgcggaaggtattctgcgcttcactatccatgttcacacattattgcagtttgtggttacgtgagcatgaactactaccaatatatagatgttgtttatacaaatgagtacatcttaaaagcttactccacacaatagtggcctcttgggaatgaagcggctattcctccttctaatgacgcatggacacttatacctgacccaactacaactcgtgcgaaaggtcggtcaaaatcaacaaggataagatatgagatagaatgagtcgaaccatctgagcacctaacaaaatgcagt

SEQ ID NO: 276870 - DNA, 312 bp, Glycine max
taaacaatgatcaaacttactctgtggaactggctttgtgtacatatcagctggattgtgcagagtgctgatcttatgaactctgattcttctatctgaccgaatgaagtgatatctaacatctatatgcttggttctatcatgatgaacctgatccttggccaagcatatagcactaaggctatcacagtagatgttagcatattcttgattaattctgagatcatttatcagacctcttagccaaattcctttctttgcagcttcagtgagagccatatattcagcctcagtagttgagagggcaacaaa

SEQ ID NO: 276871 - DNA, 400 bp, Glycine max
  unsure (1)..(400): unsure at all n locations
agcttaagcgccaatcccttgacaacactgactctctgttgcgcttaagtgggacaagtttgtagaacaatgaattttctgccataatgaccctctattaagtcccaatacaactctaactcaaatctttcatttccatacatgaacatcaaattaaaacatcattaatgagctaaaaatagtgattccactattaagtttggttgtgtccaagtcgcattggactgtaccaaataattaaatctctaaggttttgatgttaataaagtataaattttatatattaatcttttatgcttaagctactggttcatatatatctctatgagatacaagcgaaaaagcatgaacagaanagctctggacgataggcaaagtatcaatcattggatgatactac

SEQ ID NO: 276872 - DNA, 384 bp, Glycine max
  unsure (1)..(384): unsure at all n locations
agctnggatagcaattagaagttagaacacctacttaataaaaaataatgaacttaagagggaaaatcagcagacatagttcaagcaacattaactntgataccaagaatatttcatcaaagagaaaatgatcagaacccactgatgaaagctcaaaagtgttaacagtactaagcactaacaacccaactaatgatcaaaagaagaaatccatatttttggacctcaatcgaaaaggaagaanttgaatatgttggagttggaccacaattagccataatttatctacagcttaacaggagaatgttcatcatataaccataagtcataattgcaacatcacaaggtatagatagcttccatatacacacaaataaacagtca

SEQ ID NO: 276873 - DNA, 468 bp, Glycine max
  unsure (1)..(468): unsure at all n locations
atggctagtgtaaacattttctatacatataagtcgtgattgagattgaacgtgatgctagtggaggaacacttatattttgatggttgtttaaaaggcattacatttgttcctatggatgtctttacttctggactaggttatagcttggaatcataaagcttttcacccccccttccccaattcaaaatgctgtttagagtattttctagtcttgagtttaatataattatatatacttgaataccacaaacatttctagttgtccttttgtgcctgcatgaatatatatattaacagttacaaatgatgtttaacagagtcccagatggcaactctntgtcttcttggtgtggatggcatactgaccacngttcactgacagggttgtattatatatatatatatatatattggtataggatatgggctgtgcgttcatatattttcactcagtgtaatataaac

SEQ ID NO: 276874 - DNA, 433 bp, Glycine max
  unsure (1)..(433): unsure at all n locations
agcttgtctcagcgtttatgcgagacagagactaacatgttagctatcatcgccaagtaccaagaagagttaggtctagccacggcccacgagcatagaatcgcggatgagtatgcccaagtatacgcggaaaaagaggctagaggaagggtgatcgactctttacaccaagaggcaaccatgtggatggatcggtttgctcttaccttgaacgggagtcaagaacttccccgattgttagccaaggccaaggcgatggcagacacctactccgcccccgaagagattcatgggcttctcggctattgccagcatatgatagacttaatggcccacataattagaaatcgttaggaaacttgtatggtctctcagaccttgactagatatgacttcctttntgaaataaaatgagttggtcccatgtttctac

SEQ ID NO: 276875 - DNA, 473 bp, Glycine max
  unsure (1)..(473): unsure at all n locations
tgtgcatccaataccctgatgaggatgtcccatatgttcttttaactggactaatccatttgcttccagagtttcatggccttgcaggtgaagacccacacaaacatctgaaagaattccatattgtttgctccaccatgaaacccccagatgtccaggaggatcacatatttttgaaggcctttcctcattctttagagggagtggcaaaggactggctatattaccttactccatggtccatcacgagctgggatgacctcaagagagtattcttagaaaaaaatttccctgcttccaggaccacgaccatcagaaaggatatttcaggtattagacaattcaatggagagagcctatatgaatactgngagagatttaaaaagttatgtgtcatttgcccgcaccaccaaatttcagagcagcttcttctccaatatttttatgaaggactcagtaacatggagagaagt

SEQ ID NO: 276876 - DNA, 413 bp, Glycine max
  unsure (1)..(413): unsure at all n locations
agctttcagtggatgaaacgtcgagttgcaatattgtagggaatatttntgtgcataatagtgactgaattgtacaataaagtggggaatagtttatttgtagaatgacttgttggcggtctatatgcgttcaaagcagaaagaatcacttaagaatatatagaataatgctattttttaacaattccttctcacaacatctttcttaataaagaaatagatggagaaaattgtagaacaaatgatggaaaaaaatataaaagaatgaattataaaaaaagtattatgaaaagtgttaaagataagaatattgccattgaataatacaaatgggaagcttcagtaccattgatagtgtatcaaggttccaaaatgataagaatgatggaagacaagtgagaaaagggataaca

SEQ ID NO: 276877 - DNA, 470 bp, Glycine max
  unsure (1)..(470): unsure at all n locations
ngtgcctcttcacgtctggaatatgaatgtagcatatagatctcaaagacccttaggttctttgctgatggcttcttcccgttccaagcttcaattggagtcttgtcttttacagacttagttggacatctgttgagtacgtaaacagtagtgtagactgcttcagcccagaatgtgttaggtagtcccttctctttgagcatcgatctagccatttccataattgtgcgattctttctctcggacactccattttgttgaggagaatatgcgactgtaagttgtcgctcaatgccttcatcctcacaaaatctttcaaactcgcgagaggtgtactctctgccgcgatcacttcttagtacttttatccgttttccactttgattttcagcaagggccttgaacttttngaatactccaaagactactgattttcttttagaaaatatacacatgtcattctagagaag

SEQ ID NO: 276878 - DNA, 425 bp, Glycine max
agcttaggcttagcgcgaagaggcccacaaagaaatccaaaggcacgcttagcgcgacattccgcgctaagcgtgtgaccagctcgttaagtccaaaagaggcgcgctcaacacgaagtcagcgtgaaaagtaagctaccttaggcctataaaaggagtaggaagcagaagggaaagatacaccaagtctcaaagctctttattgaagatattgagcctatctcatagggaaaatcctccctctctagtcattcctccattatcttcttctagtcatccaaccctttctttcatctacattagccactgaattgaaagtctctcatggctatgagagactaaatcccctctattgggagcctagcagccaacacccttggaatataactgctcttattatctattaaatgcaatttttggttata

SEQ ID NO: 276879 - DNA, 460 bp, Glycine max
  unsure (1)..(460): unsure at all n locations
ngaagaagttntgtcatttacatgtccaactctcttgagtgatatttgtattgattattgtattgtgtgttgcatcttagtctctatattttcatatgtacataatgcatcatcatgtaggaataagaagagtgtttttaaagtcggtaactttcttcagtgcataaaactctattttaattgattacaagcatgatcataatcgattacacaagtgtttgtagcttgtagagaagttttttgtatcgatttaatctattacaagctaattgtaatcgattacatagttcggttgagacaatggttggtttttcaggagtctgctttaatcgattatcagatgatcantaatcgattacttgctcttaaaagtgttcccagaagtgatcaataacactntaatcgattgaaatgataatataatcgatcacttctttgaaataatcgattacattggata

SEQ ID NO: 276880 - DNA, 410 bp, Glycine max
  unsure (1)..(410): unsure at all n locations
agcttagatttcagatgtattatctgcactaacatctactgctaacatttagatttcagttgtgacaacaatcgacaccaatttgattcccatttcgttccatctacaaanaaatctcaaatttgcttattttcatgatctttccattcattgcttcaaaactgaatacaagaacaagccttagcgaaccagcctatatcataatatatataaactacacaaaaatttcgcagcaacaaaactgagactaaaaactgagagaaaaacgcatatctacaacccccagaagaattatggacaatatactcacaaaacaatgacagtgcacactgattgcatntcatttcgacggatttaaattcaagaactaccagcagccggttccatcaacgctttcttcaacttctcgc

SEQ ID NO: 276881 - DNA, 433 bp, Glycine max
  unsure (1)..(433): unsure at all n locations
gaaagatgtgtgtgattacaatacanacttatacattctcgatgtcttactttcttgagaaaagacgatgaagaatcacaacagaaatatttttttaattctgaaaatttaaaaatgaaaacaatttttaaaaaataaaaattaaaaatatctctcaaaccaaatgtccccttattttccacttaaaaaataagtttacttttcaagttatttttcgtcttaacatgacatcaagaatgaaaatgaatcattaacaatagaatatgaattaaataaagaatactttgaatatgatttcaatatatataataaaattagttgagataatcatcgcacattgttgaagtcgctatcttatgtgtcttttttctctctaaatttataattntaggtggggtcttgctgctttcctatntccccaattcttcattat

SEQ ID NO: 276882 - DNA, 366 bp, Glycine max
  unsure (1)..(366): unsure at all n locations
agcttgaccaggaattatntggatgggttggatgttgaattcatgttgttcctggtgcggagatgatggtactgcgggtgaaccaaaagctgcagtttcttttggtgaggtagccatggaagagcagagcgtttggaatgatttcgtaaatctcagaaagctattgggaaatgctggagaaaacacgaatgccaagcagatataaatttgaatgaagaatgtagaggggcgtgtgaagcaacggtcgaatttgctttgtagtgaacgtgctattaatgttaagtgattcgtttgggcacgttcagattgcagtagctgctataattcctctagcagacaaatgcccagcttgcccctcagtttttc

SEQ ID NO: 276883 - DNA, 410 bp, Glycine max
tcttctattagcatctctctctaattgttatcccaccaaactttggcatattctgagaattcaactgctgctaacttgactttttgttcttcaatatagtcattgtaggagaaaacatgctcaattttcaactcccactccaggtaggtgtttgggtcactccagcctttgaaaggaggtacattgagttttactcactcaattctttgtttccccttaattctgttttgcctcggtccatcattgccccctttgttcccaccatttggctgtccagcattctgaatcagttggttctctagtccttccattaatccatagagctcttcattgttatgattcggcaaacattgcatctgtgtagtcatcacatccagtaaaaaacattgagctctgtctaagtgatgata

SEQ ID NO: 276884 - DNA, 382 bp, Glycine max
  unsure (1)..(382): unsure at all n locations
ntaagataatagannaataaaaacttatttacttaaataatgttaacctgttctaattaattntgacgaggacccttttacaaacacaattttttcttataaaagcaagtagaaaacttttcttcaaccacacaataaccattataaggacgaacagatgactcagctaaaacaaaagttaagattcatcttctatgtcttcattgctatatatgtatacctcttttgatcataaagcttcatcatccaaattaagagcttctaattggatttccattcacctcggcaacatatttgggtcataaatcatcaaagaggtacctaccagatcctaccacaagctcaaagcaagataagatnttatttgaaagttattcaataa

SEQ ID NO: 276885 - DNA, 400 bp, Glycine max
agcttgattgcaccacttttgttacaagcattttatccatgattccagatgataactcgttcaactcacagagcttctccacgttttttgaacccccatgaggtctagacttcacattaacatcgctgcttccagcagtagctgattgattaatcataggcaattttgtacgcaaattaataaagaacatacttgcctttgggttgtgctcctaccaacaatttgttcaaaacactattataataagtaaaagaagttcaattgataaatttaaattcttgtactcaccaaaaggtcaagctccattgctgaatttgatgcattgtcatcataagctcttggctctgcagcctccccaaattcttggtcatcaagaagagctatcataagaaaacatgtg

SEQ ID NO: 276886 - DNA, 444 bp, Glycine max
  unsure (1)..(444): unsure at all n locations
ggtcatcaatgaagcccttgtgcactggtccgaaacctccttcgccgagaaaattactcgaagagaaactctgcgtgatgatcttgagctccgagagcgaaaacacatgcaggttagaccccactagagaaacggagagatcctccgaaagcgttgagccagggaaactcaagtccgttatagagaccctgttggaagaagaaccaccctttgtagccaccactttggttggcttcggagaaggtgacacagactcaccctcataacaactagagaagctcgatcccatgtgaattatctttaatctattaagtcctatgctgcacaagtatctatgtttctataggaagagagatatgttngatgaacgtttataagtagatgggaaatgattggagatgatgtggttgaagattttaaaggggtagcatatatataaaatct

SEQ ID NO: 276887 - DNA, 387 bp, Glycine max
  unsure (1)..(387): unsure at all n locations
agcttcttagtttcagatgatgcagatgagtttgtggctacctcatgcactcctctaatgactatagcctcatttatggcgctaaactgttgggagtcggaagccatcttctcaattaaattcctggcttcaacaggggtcatgtcttcaagggctccaccactggcagcatctatcatacttctctccatgttactgagtccttgataaaaatattggagaagaagctgctcagaaatctggtggtgagggcaactggcacatagttntttaaatctctcccagtattcatataggctctctccactgagttgcctgatgcctaaaatatcctttctaatggtcgtggtcctggaagcacggaaaaagtttctaanaatactctct

SEQ ID NO: 276888 - DNA, 363 bp, Glycine max
  unsure (1)..(363): unsure at all n locations
ntagaatgttgattagcggattcccttgatgatggtgaatcttgtgattatgaatcagaaaaataagtctcctcctcaagaatggacgcaactgttctgtcttgtgacagtttccttctcctctcagccctgttccttcttagtgtagcttctatttctaagtccaaaggaactaaagttcctataggagatctatgcataaacagtactaacagagcagtggttatccagttcaatttgagaagataaatataaattaaagaacaaatattcacagaaacaatcaaagaataacaaataaagattagacacctaanaatgagctaacttcccaaataaaaagaagttccttggcaacgacac

SEQ ID NO: 276889 - DNA, 415 bp, Glycine max
  unsure (1)..(415): unsure at all n locations
agcttaaaaagttaactctcgtatcagtttaatcgattatggtagtactgtaatcgattacactattgtttgagacaatgactaattntttcatgagtctctactttaattgattactagatggatcaatcgattacttctctctagttcaagttgttcaaaggtgaacaagaacactataatctattacttatgtcatctaattgaatacattgttcttgaggtgttntccagatgttggatgaacacttcaatcgattactttattgaaataatcaattaccttatagatttaatcaattacatgcagttatgacggtttntcttataaataaccagcttatgttcacatctacatatcatgagatcattatagactacgcaatacatctagaaattacttcttaacctcaaa

SEQ ID NO: 276890 - DNA, 408 bp, Glycine max
  unsure (1)..(408): unsure at all n locations
tgagaaatcttagagaattgatagagatgctgctattgctgttcggactatgcacgtgaacccacttagagataagagatgagtttattacaattggggttagaatgaacacatgtagggatccttagaggatcaaatggggatttattatgagatgtttattgaattgtaattcttcttatatgattatgtgaaattgtttgaggggttttactccccatgttgtaagaaatattttcatataatttgtttgtattttgaacaagattattacattagcgtaataaatggttatattgggatcatganattgtgatngaaattgtgtgtaatggataaattgagtatgtgttgatttgtgagatacatgtaaacatgtgatggtgggattgtgacgtgtgatatgtt

SEQ ID NO: 276891 - DNA, 156 bp, Glycine max
  unsure (1)..(156): unsure at all n locations
agctctgtgtcatgtggcatagtgttatccttatttattcttgnggncagnatttctcttctttctttcttctttntcaatgagctctgatttgtataattatataagaatctgcgattcaatatattttttctattgctagctttttaatttcac

SEQ ID NO: 276892 - DNA, 369 bp, Glycine max
taagctccttcaactgcacaaggctcttaatatttgaagagtatccttgtggaaccttcacccgacgaagacactgacaaaaacttatcttctcattcttggacaaagtatggcaagctgggggcaagtaaattttcttcccatcagaccttggatgcaactgtgatcgtatacccatatcagctagatcttgacgggtattcaagccatccttcatcttgccttgaatgttaaggagcgtcccaatcacactgtcacaaacatttttctccacatgcataacatcaatacaatgtctaacgtcaagatcataccagtacggaagatcaaagaaaatggacctcttcttccatatgcaactctaacttt

SEQ ID NO: 276893 - DNA, 432 bp, Glycine max
  unsure (1)..(432): unsure at all n locations
catgcaagctngagatgaggaagtgttgaagggtgaaacttcctgctnttattgttgaccacagagtggtacctggagatatgtcgcggnggtcaggagaccttggggacgtcaggtggggtgctattgcccaaaaccaagcttgaccaatcccgacccaacccgggcatagtcggtcagtgagaacctgtgatgtacctaaacaggcgagctcctggcagtcaacagataaaaggaacaaagaccacaaagcaaggaggcttgtggtggctggccagctgtgaaacttgattgatatgtgggttatggcctctggtaatcgattaccaagggtgggtaatcgattacaaggcttaaaaatgaagacagggggctaagatggtctctggtaatcgattaccagcggatgtaatcgattaccaggcttgaaaa

SEQ ID NO: 276894 - DNA, 437 bp, Glycine max
  unsure (1)..(437): unsure at all n locations
tctctctctctctctntcactcatacgagctccattatagcatatatttgctatactctccttacacatattcttacttaagcatcatagtcatttgttttccaggtcccccttcctatcaaaggcacctctccaagccgacgtgtgaagttcgagaccccactcaaccacatccatcctgacgtgtcacggttccagattttggtaagcacatagagtgtgatttattttttatattgcctccttataaatagtaatgcaatgaaacacaattcgtattgatacttatgatttagcattaatcattaattgtagccatgcatataatattctttttaattcatagagtgtgtttgtaaagacaaatatcacaagacaggggattaaattgtgatttaaaaaactctagaaccttcttgatgaaaaataaagttacc

SEQ ID NO: 276895 - DNA, 479 bp, Glycine max
  unsure (1)..(479): unsure at all n locations
gatcttaagtcgacctgacgcatgcaatcttgtaggattatggngtacccatcacatgttgtactaggtggcggtcgggctatggtgcacaacaagttttccacatgcacaaagcgcgcataaacccaccatcccctgttgcccaccttcaactgagctcacgtactcccacgtagcccatatcctcgtttctctcaacatcgggtccccatcaatcctcccaagcttccccaacatccaagcaaaacaacattcaaacagcacagctatcacagctaaacaaaacagagcaaaggcagaaaactctgccaaaacaccaaccaaatcacagcttttctcacttaaagaccccagtaacaattccttcgatccaattcgttaaccgttggatcgactccaaaattntactggaagtctatagtacataagcctacatnttgaccgttgggatctactagcaaacatccgaaactcattct

SEQ ID NO: 276896 - DNA, 482 bp, Glycine max
  unsure (1)..(482): unsure at all n locations
actcagcttacaannactattatttgctntaagtaaaaaanaattaaatcatctttaacggtagattcttcatagatcttggcataaaagattccaactttccatgtttggtcattggacccccaatggagatatccatgttggatgatatgttctttagtaaaatccctaaagaatgggatggtatgaattaaaaaatatttaattgtaaaagtaagaatggttgaaaaataaccaagaaaaaagaccatagatgaagaacaacaacaaatgagagcctcgtggaagaataaattaaaccaaacaaaaattaaaagttaaagaagaatctcaaaatcaaaccacaaatcaacaattaactatgatcaaactcaaagttaaatatcaatcaacaatgaatttcaaattttaatcccaaaatcaacaatgaatntaaactatgtntgaataagaagaatattcaagaggaatcaagagaaaat

SEQ ID NO: 276897 - DNA, 400 bp, Glycine max
  unsure (1)..(400): unsure at all n locations
agctcgactaggcgagttgattntagccttagttccaccttagttattagtcaattcggttaagaatgagaaatcccaaagagaaaatgtccggttgattttccgctttattttactaaaagatgtttttttttattattattatattattttttacctctttttttgatttccaacgtggtttcggcacgaccgaacggtcggaattcattttaaccgaagtttacggataatacaattcaaacgatcggtggaaatttattttatttttatgttaagcgagaaatgacttaagtataatggtttaagcacgtcaagagggggtataaaaagtaaatgaaatgagaataaaaatacacganacacaatgtggaccaccacgtgtacatagaatgaatcg

SEQ ID NO: 276898 - DNA, 468 bp, Glycine max
tgccacccagctcgcccaggcgagcagggttgcttcctccatatagcaacagccttctgtaggaatcttctgcagggcccaagtgggcctggttgctatttgcacccccatttttactaagtacacccccctgccttttttttatgattcttttttcgtaaagttacggaaactcacgaatttcgtaacgatacttgttttctttccgtaattttacggaaccttgtggattacataataatcccctttttgacttacggaatgttacggaacctcactaattgtgctacgatgcttccatttgatttccggtgtgtcacggaaccttatggattttgcatcaatattttcttttgttttccggcatgtcccggaatttcacaaattgcctaatgatgggtgccaagcacctcacaaggaccaaacaaaagttacatgtcatcaagcataggtccccggacgaaatta

SEQ ID NO: 276899 - DNA, 428 bp, Glycine max
  unsure (1)..(428): unsure at all n locations
accttgtagaatggctagacatgatacatgtcatgacttggtttgtttcaaggataaaagggatgccccacattatttccatgacacaaatgcaaaaatgatgatttggaaattttatgcaaaactggttatgcatgcacctatgcggacactcaaatgtcaaatttttatggtcatgtgatgctacggctcaggattcatttactctattataaatcaacccaatgtttccaaaatatgttcttttatcaatgtgtgcattcatccgagtacatttcgggcgtccggngaaatttcatagcattcacccttcatgtgtacacattctttccaaaaactagttatgatcagtgaatctttttcaaagaaaagttggaagtcatctcttttcacagcatggtggtgttcagctagacaacttatttctt

SEQ ID NO: 276900 - DNA, 473 bp, Glycine max
  unsure (1)..(473): unsure at all n locations
aaccaaaaccggtgagagtgtgaacttaaactgtgagtgaacgactagctgtgagtgataatctttgcatgaatctctgaattttggaatgaaatgtataaatgagaacatgatgaaggccatgatttgtgtatacacaagccttttcaccaaatagcttaccttgcaaaataactgtatcctttgctccttttataagctgaatgattttgtcataaattgaaccttgaaattaaataattatttcctgataccttgcttagattctaggagagcatatggttcaaaacaaaatttaccccaaatttgagggagtaaagtcagttagaatgcaaagaaaaaaataaagcatcaacacacacaacaaataagttgtatgataaacaaaacaaattgntgtgttgttacaataaagtcaaaagcaaattaagaggaaaagatagtgagaaagctacttgtatgacacaagatca

SEQ ID NO: 276901 - DNA, 432 bp, Glycine max
  unsure (1)..(432): unsure at all n locations
agctngccgctggagctgccccattaactgctctaactcttttagactggtgattcctaggctcttgaccttgacttgatagaacctctttttaagcgaaggtgtttgacttgatcccatgttttactaaagtgaaacaaaatcgctgcgaatcaaaactccgacatctatcatgggtggaatggatgaatgcatgaagaaatgcatatgatacagatgcaatttatgaatacgggagcccgggaaattgtctccttcttagatacaacgtcttgnggtagcacagtgcccgacatatgtatttaagaaggtgacacggaccctccattggtttgccaaagagaggggatcaagacagaatccgtgcataatgcatatgtgaaaggcacaacacggggatgtacatagtacaacaatattcacaaacaaata

SEQ ID NO: 276902 - DNA, 455 bp, Glycine max
  unsure (1)..(455): unsure at all n locations
ntataagcgcgggttcgggagacatatgtcaagcgtttgcgatatgcgaagatgatattccgagtactttggatttggtacgaccatgccctcctgatttccagctgggaaattggcgagtggaggaacgccccggcatttacgcaacaagcataatgtaaacctttacggttttaaaagctctatagttgggcctaggctttagagttttcattntgttaaggctttgtgtcttttgtttttgaatntataatacaaggatctttcttcatctggtcttggtctctacccattctcattcatttgcatgtttacttctttttctgaaacggcagatccgatgacgagntccccgaaggtactaatacctgggacccgtctatcgacttcgagcaagaaatgaatcaaacggaagatgaaggaaatgaggatgtgggacttcccccagaactaga

SEQ ID NO: 276903 - DNA, 373 bp, Glycine max
  unsure (1)..(373): unsure at all n locations
agcttgttntgtgcataattagggtaaggagataattggcatagattccagagcaaccatagtgccaatttcgggaaaagagccctagaagcaacaaaaaggagcagcttgttcattgaagcctaggttttgtcattagagagagattattgagtagagagtgagtatgagatgttgagaagaggaggaagaatcccccttcttgtgtaagaaactatcattctctacttttaatctcatttattgttagggtttctttgtaatggctggctaaacaccctagttggggatttcttatgaacaactgatgtaaatacataatatctaattgattgtgttttctgtgttcaatgcttaattcaatggcttaatt

SEQ ID NO: 276904 - DNA, 454 bp, Glycine max
  unsure (1)..(454): unsure at all n locations
cttgatggtgtcgagaagaaatcacatgtntgtcatcatcattaaaggggagaatgtgaatgtatgtatacatgattttgatgatgccaaagaagaatctaacaaggctgcttcaaatgataagcatttgcttcaagaataattcaagattgcttcaacaaacaaagcccttgtttcaagattcactaaagaccaagccttgccttaaaacaatgtgctttcaagacatgcaaggctctggtaatcgattaccaggaagtgtaatcgattaccagaagacagggttgagaaatagctgttgaaaaaggttttgaatttgaattttcaacatgtaatcgattaccatatgtctgtaatcgattaccagcaacgaaactttggaaattcaaattcaaaagtcataacccttcaaattataattgtgtaatcgattacacaaacattgtaatcgatt

SEQ ID NO: 276905 - DNA, 369 bp, Glycine max
atactttcacaggcttatcttttatcaatgagttatatataaagagactattggtcaatatgtagcaaaacaaaatacttgctgtaataataataacgtgtaacaatagaaattaaataacctaaccacaaatatcctgattttaaagacttgtgttcacaggatcatttgaccaagtaagagataacttcctaaggcaggaatgaaagtagtgagatgtgtttagtctttcacataaactaactctaaaagcattgtatcttatacaaaaatacaattgacaaaaaaaatatttttcaacaatctcatactaatttaaagtttcaaaaaataaaataatataataaaaacattttaatataacataat

SEQ ID NO: 276906 - DNA, 444 bp, Glycine max
  unsure (1)..(444): unsure at all n locations
ngaagaagttgtggcttttagatgttcaactccattgagtgtcatttgtattggttgttgcatcttagtacatttgatatttgttttgcattgtgcatcatcatagtgtgtgtgaagaaaggtttctaagttagaaaattttcttcagaggcaaaaactccctattttaatcaattacaacctcgtaatcgattaaaacaagttgtttgaagcctgtagagttaagtctcgtatctgtttgagacaatgactaatttattcaggagtctctgacttaatcgattaccaagtggattaatcgattacttctctctcattcagttgttcaaaagtgaacaagaacactttaatcgattacttaggtcatctaatcgattacattgttcttgagttgtttctagatgctggatgaacacttntatcgattactttgataaactaatc

SEQ ID NO: 276907 - DNA, 483 bp, Glycine max
  unsure (1)..(483): unsure at all n locations
ganncctgaccctgatgacacatgtagacgtgatcttgagcactcgcggctgcagctgaacaaacggattgaatgcatttattgaatcttacccaggctacttgattgccatgaagatatctctgaaaaacacgattgagtaccaggcatgtaagacatacatcttgcagaattacgtgatatcgttatataattaatattataagaccatgcgacaaggacgctgtatttagaaacatcgtgttcacaggatcctttgaccgactaaaagaaaactaacaatggctcgaactggaatctttagcagtgttacatgtttcacctaacctaaccctataaaacccttattatatactgatattctagtgacattgcaatagtttacgacttctattactgatgcagcatatgaaaaacacggagcacatataatcgcactcttttatatcataatgcgtgggttgtagcctaaaaattgtacgc

SEQ ID NO: 276908 - DNA, 302 bp, Glycine max
agctgggttcgaggtacttacccgttgaagatcgaagaacgatgaagaacgaatgaagaacgtcgaagaacggttgaaacctttgcgagattcctcacggaaaacgttacggaaacgtttcggaagcgcctcggcttagattttcttcacggaaacaatttttccaagcaaattccaaagagagagaagtgcctaaggggctggaccccttccttcttcatttcctcccctatttatagcaaaataggggaggtggttgccgcccagctcgcccaggcgagcacagctcgcccaggcgagga

SEQ ID NO: 276909 - DNA, 331 bp, Glycine max
  unsure (1)..(331): unsure at all n locations
tcgacctacgcctccgaatttatgtcctcttgaacgaaccccttaaatgcaaagtcaaccatctctgtccccatccattcatttctgccgccgaacaggtgatctggatcttgacctccttcccctgcataaaagggttacagtaaataaacaaggcaccattgtaacataaatatgaagcctgacaaattcacctgtgcagcttaatcttatatgatgatggaagtntgtctgaaaaacataaatcttaatcttgaaaaactctggcaacaaacctggaagaatcaagagaagtatatggagaatgcctgcgctgagaatgcttgctatg

SEQ ID NO: 276910 - DNA, 425 bp, Glycine max
  unsure (1)..(425): unsure at all n locations
agcttagtgcaacaagcgcgctaagcgcacttccaagcatttcaaaaacagtaagggattggcgcttagtgcatcctactgctaatcccaactcgtgaaagttcaattctagaatggatatggngcttagcttaggacagcgcgcttagncgctgctacaataaattttccagagaaggagtgacgcttagcgcatcatctctgctaagcccacttcttgaagttcacttccaatggagatgttaggcttagcgcagtgatgtgcgcttagttgaactattcaatcaactagccaggggtctaagcgcttagtgcgagcaagctcaggctcagcacatgaagacatggcgcttagcgcaagggttgcgcttagcggatagacaactgannaaattttctaagtcttttctggtcatctcttcacc

SEQ ID NO: 276911 - DNA, 345 bp, Glycine max
tgtctcagcgtttatgcgagacggagaccaacatgctagctatcatcgccaagtaccaagtagagttaggtctagccacggcccacgagcataggatcgcggacgagtatgcccaagtatacacggaaaaagaggctagaggaagggtgatcgactctttacaccaagaggcaaccatgtggatggatcggtttgcccttaccttgaacgggagtcaagaacttccccgattgttagccaaggccaaggcgatggcggacacctactccgcccccgaagaaattcatgggcttctcgactattgtcagcatatgatagacctaatggccccacataatagaaatc

SEQ ID NO: 276912 - DNA, 345 bp, Glycine max
  unsure (1)..(345): unsure at all n locations
agcttgaggaattccattgagcttttgaccatatttgcttcactgaatagtaaaattagaacaacatcaagggaaagtggttcaacttgtggaatacccaattcccatatctctgcttgtgctcagctctacttggcaatagtttacaagcttcagaagaacaacaggatttgtgctaggcatttgctgcaagtattttgtgactctccttttttggccaagacttatttgcttcctgacctttgggagcatgtgttccttcctcaccttctccatcttaaaatttggtatgccgaggagctcgacgcagtttcngcctcaagtgaatgtcaaggtgagaaggac

SEQ ID NO: 276913 - DNA, 350 bp, Glycine max
  unsure (1)..(350): unsure at all n locations
ngacaagagatngtaaatgaaatctaattntctctaatgtttgttcaataattagcattgactctccaaactatacatagtactctcttctttatggtgcttaaagtggacagtttcctttaccatcctgctaaagctatatatacgctcatacaagtcacgaatcatctttcaacgtgtgcattgcctagttagttttggtcctaacacgagtgtcattcattgatgactggacacatccaatatcaattaattgggttctcaatattggtcaaaataactgagagcacaaaagctaagttgggctcatctgcgtaggcattctaaacagcacattaatggttttgata

SEQ ID NO: 276914 - DNA, 443 bp, Glycine max
  unsure (1)..(443): unsure at all n locations
agcttaaagtatgcccgagtcattcatccgtatgagatgttgttgaagtattggcgatcagaatngacattccttggattatagggttgaaccaaactcatgcttttacaaaaaggttcatcaagtcaagttgaaatatggaagtaaccgtcctgcaaaattggggcaaaagatgaattgagtcacatcactgcttcgtctactgccaaacatatttaggattgttgatgtccttgttacttccagtttcaccttgacaaagatgtcatggatcatgttgaaaatctaaattgattcaaccccatatcctgcgtaaaaattcgcaatacttcaactatacatcattcgcatacatccatgcttttcattggttgcattgctcattgcattctttcctttgaaaataaaataaaataaaatgaacttaatcatttgtataaaaa

SEQ ID NO: 276915 - DNA, 445 bp, Glycine max
caaaatgaaaactctaaagcctaagcccaactatagagcttttaaaaccgtaatggtttacattatgcttgttgcgtaaatgccggggcgttcctccactcgccaatttcccagctggaaatcaggagagcatggtcgtaccaaatccaaagtactcggaatatcatcttcgcatatcgcgaacgcttgacctttgtctcccgaacccgcacttataaagcttctacttatgtggcagggcgggcttccttcaccttcttgtctccaacgcgaactttgaccattgttcttccttcccgcaatgcttcttttcatgtctgcctgagcgggcttatagcctaaaccatacttcccacgatttccttgagtatttatcaggctagttatgccatccagtgtttttcctaaacccatcccgggttcaaaaccgttccccaacataact

SEQ ID NO: 276916 - DNA, 428 bp, Glycine max
  unsure (1)..(428): unsure at all n locations
catgcaagcttgtaacttatataatatatacattntattgtaattatattttaacacatcagaatggtgcgcctataacccacaggtcccaggatcgaaacctggttctgataaagagtggcttccgatctatcacatatatatatattntatgcgtaaaacatatatcattacgcaatgacatttgagtataataaaaaatagttctgcagggcctaacatttcagtgcttatattaatttagttaccatttaaattttattattgagtcaactttntaacgtatattcatattttctctttgttaattctaatttaatttgtttaagtaaacatatcttttatggataataatggcttccagtttcttagtgaaccacatctganaaattatactcgaacaagaagatgtgtttcactatgttcat

SEQ ID NO: 276917 - DNA, 459 bp, Glycine max
  unsure (1)..(459): unsure at all n locations
tcaatatcttacgtccattatagaatatactagtggtttccgtatattaaaagtaaacttagtaatttttctttaaacttactaatattttaaaaccatcagagtaaacaatgaaaatgataaaacttggggcgaaactatatatgaacgaatgtgaaatatgaacaacatgtttcataaagcaagttaaatattatcatgctaaaagtggcgatgtcttgtcccaactaataattaattttctgaaatgttttatttactgtaacttttgtttcaattggcatctttntttattttgagagagaatatttttaaaatagtagtgaataaaaaataagtgcaaataaagataaaaacacacacaattntgcatacattattaattatntaatgttcaaataattttcatgacacttgatggatgatacaaacatatacatacattgaaacaaaaacatg

SEQ ID NO: 276918 - DNA, 410 bp, Glycine max
  unsure (1)..(410): unsure at all n locations
agcttgccacccagctcgcccaggcgagctatgttgcttcctccagaaggcaccttctggagaacttcttggaaggcccaaatgggcctggttgctattttcacccccccccctttttactaaatacacctgttgcctttntttgcttattctttttccgtaacgttacgaaaacttatgaattaagtaacgatacgtgttttccttccgtaatgttacagaactttacggattgcgcactaacacttccttttaatttctggcatgtcacggaacttcacagattgtgctacaatgctttcttttgacttcccgcacatctcagaacttcacaaattgcctaacgatgggtgccaagtacctcgaagtggcaaacgagggtcgcatcccaacaatggatggtccccgga

SEQ ID NO: 276919 - DNA, 472 bp, Glycine max
  unsure (1)..(472): unsure at all n locations
tcttcccttcccttcctatntccattntttttccttttctgttgtttcttcgtgcattaattgtggcacagttatcaccacaccaatattttcattccggtcatttctacctattgtgcattaattgtggcacaattatcgatgcaccatgccgatacatagtgaatgaaataagttcataattaatcaaagcaaatcataaactgtttagtcaaaaataaaaagaaaccaaaaaattgtttgacacccaaaatttagctaacaacattaataaaaatatgaaaagatgacacataaaaaagtctntgggttgtatatgtccaaaattagaaagtgttgactgcattttttttttgtctccttttttattaagttccgtccactataaattaaagaaagtaattattggtgcttgaagtaaacatttagattccttaaatgtttttntatttgacaaaaaaaatcataccac

SEQ ID NO: 276920 - DNA, 431 bp, Glycine max
  unsure (1)..(431): unsure at all n locations
agcttatagatccaaaacccactaaggtattatatatagggatgatactgtcaagataaaacaattattcattctcatttattatctttgtttattgcttaacattgagatctgatttgagcattgaaatgcatgtgtttttcaggtacatccatagttttaaaacccggtccgacccagtccaattgggattcggtggcataaccgagtcgattttgttattggatcggtcatgcatctggttcgggataacccggccagactcgaccggtttaggataaacccaacaactcaagtcggtttttaaaacccattttgtgtaaaanaacaaaaaaatgttccatacaaaatccaaggattgtgtaattgtattatcgaattattatttctaaactngtgttattcaacttaatacttcaatggtcatttgg

SEQ ID NO: 276921 - DNA, 433 bp, Glycine max
  unsure (1)..(433): unsure at all n locations
tcaccaaaaatatgttggctataataaccaatctaatatgcagttaagtctttcagttatgtttattttttaaaaaaaggaacagaaaaaaaatgaagagtgctgattaagttcataaaaatgttattttctgtaaacaaaagtttttaaaaaattgaggtgtttaaatatcattacttttaattaattttaatgaactttcatacatttgggggtatctgttttttttataaaaaaattatcattgttttgaaagtcaaattatgttattattttaattaaaataacattgaacaaagttattttaataaactaagtcactttcatctaaaactagcatggtgcaacataagaacgggtataagaatcggggtcgagtgtggatgcggcgtaggatgtangacgaaaaatnggaagtaagcgacagctggat

SEQ ID NO: 276922 - DNA, 418 bp, Glycine max
  unsure (1)..(418): unsure at all n locations
catgcaagcttgttntcattntccttgtctacaaaggcttaaagatggtttcattcatttaaaggtaacagtcttaagacttgtgatgacgtggttgaaaaattcttgaagaaatacttcccagagtccaagaatactaaaggaaaagctgccatctcatcctttcatcaatttccagacgagtccttgagtgaggctttgaaaagatttcatgggttactaagaaagacacctactcatggattttcagaaccaatccaactcaatattttcattgacgggttaatgccacaatcgaggtagcttttagatgcttctgcaaggggaaaaataaaattgaagacccctaaagaagccatggaattaattgagaatatggctgctagtgaccatgcaatcttgcgtgatagagcacaca

SEQ ID NO: 276923 - DNA, 473 bp, Glycine max
  unsure (1)..(473): unsure at all n locations
gtgaagaaattcacccgttgngagacaacatacactntgtctatgaacctacacattaacattcattttctttgtgtaaaaaactctttataaatgtctatataactccgcaaaataacttgattatcttaagagaaatgactaagggctaagattgtatatttgtttgtaagacaattaagagccggtcattgtgcacacaaacaacaaatgtgtttgatttatataagggctaataagattgtatattcgtgtgtaagaagattaaaagctagccattgtacaaacaaacaacaaattcatttgatttatatagagtcaacagtggctatgtatgacaaaaatatcgagttttaacaaagttggggtagagtttgtcttgtgtagtaaagtgtggtcgtgacaaaatactcataactntganaaagttattgaaacttggttgctagctaagaactgaacgctatctcagt

SEQ ID NO: 276924 - DNA, 394 bp, Glycine max
  unsure (1)..(394): unsure at all n locations
agctntacttcaatattntccatatcatcaagtaatttgttgaaatcagccaattgttcagtggttgttcttgactctgtcatcttgaaggtgtacagttagtgcttcaagcatagccgatntgcaagggactttgtcatatacaatgactccagtttcagccacattgaggctgttgtcttttctcttgcaacttctcttaaagctttatctccaaggcataaaatgattgcacttctggatttagcaatcatctctgatttctcctttgagcttagagaatcagacatcttttcttctcctttaagagcttctgcacagccatgttgaatcaaaaatgctncatcttgattctcataacccgagtcattttccccttgaaactctctatatc

SEQ ID NO: 276925 - DNA, 434 bp, Glycine max
  unsure (1)..(434): unsure at all n locations
tgtttctcatatcaaggaatcaactataattcctgttcttgttcatgctggtaatgttcttccatataaatntcatattctgtagttagtatataggctntattttttgaatttgttcgtttcattatgcagatggaatttgtcatgtatatgttgacaagtctgctaatattgatatggcaaagcagattgttagggatgcaaagaccgattatcctgcagcttgcaatgcgatggtaattagcatttacacatcctttgcaatgcactaaataaaacatgttaatctgtatcctcctctcctnnttgggtttactgaattggtaggtgtgatgttattggaattatggactatgctcatcaaaatatnnttgtttggtattctagganactcttctcgtcacaaggatctgtcaataatggtggactcatga

SEQ ID NO: 276926 - DNA, 158 bp, Glycine max
agcttctcgatacattatccacctgaatcagacttccgtgtgataagttatgaccatttaaatttcttaagagcttccgttgatcaatttcgagcgtctcggtatactatgcgcccgaatcggactttcgtgtgataagttatgaccatatgaattct

SEQ ID NO: 276927 - DNA, 455 bp, Glycine max
  unsure (1)..(455): unsure at all n locations
tganatngaacaacagaagctctcgagatattcaaatggtcataacttatcacatggaagaccgattcaaacgcataatatatcgggaagctcgaaattgaacaacggaagctctcgagaaattcaaattgtcataacttatcacacggaggtccgattctggcggatagtatatcgagaagctcataattgaacaacgaaagctctcaagaatttcaaatcgtcataacttttcaaacggaagtccgattcaggtgcataatatatcgagaagcttgaatttgaacaacggaagctctcgagaaattcaaatggtcataacttttcacacggaagtccgattctggcgcataatatatcgagacgctcgaaattgaacaacagaagctctcgagaaattcaaatggtcataacttttcacacggaagtccgattcaagcgcataatatatcgag

SEQ ID NO: 276928 - DNA, 413 bp, Glycine max
  unsure (1)..(413): unsure at all n locations
gtggtatcatagcacaagagcttcaagtaggtgctctttaaaccttcattaattttttgctttaccttctcttctattggtgnttcttcattattctccatgtatctcctcacatgtcttgtgctaaatgttgttaacatgattctttaaagtttccaccgattaaacttgttatagaatctagatttgattttctatgggtcaaatttcttgttctttttcttgaaccatgaattgtgttgagtttaggttcctttaagttttgtcttgttattctttgtggctgaaacctaaaccataaaattcttacaaaaattttaaagtagaagaaaacctcaaaaatctagagtgacttgttcacctattgtagttttgtcgaagaagtcatgtctagtcatgaaacttgtcacata

SEQ ID NO: 276929 - DNA, 364 bp, Glycine max
  unsure (1)..(364): unsure at all n locations
tcccttatcttgcttggacaaaagcaccattgagtttggttctctttntgtgtttgaaattagcaggcttcaattacttaaggtgtggtgtagattaatattttggttttgatagaaattgaaattcgaagcaaactcatttatgcatttaatatgtatttatgactttgagctttgtttttggttaataaattggtttgatttcctttgttgcattttatacatcacaatttttatgatgtttgctatttgctcatgtggtctttgaaaccgtttttttgacacaagttgctgcccattgtgtggacccacataaacatgtactctttgcttcctcangtctcagagtggcaaactgtaaagt

SEQ ID NO: 276930 - DNA, 440 bp, Glycine max
  unsure (1)..(440): unsure at all n locations
atcacccgcggcatgccagcttgagaccgctttcacggtctatttcgaatgacacctattcatgggtttagcgatccaattcagataaatatatttaatgatggcttacaaccccattctgagcaactactcgatgcttctggtggtggaaagattaaattaaagacccctgatgaagctatggatcttatagagaatatgacaggcaatgatcatgttattctccgtgataaatcttacacacctgctaagaagattcttcttgagctcacgtctcaagatgcattgatggctcanaataagctcttagacaagcaacttgagaccctcatggagacattgaacaaactatctcaatagatgcattgtgtgcaacttgcttcatcctctgtgatgcaagttggnggatgtacactatatcgtgaagctcatgagtcata

SEQ ID NO: 276931 - DNA, 446 bp, Glycine max
  unsure (1)..(446): unsure at all n locations
ngccaggtgtntntcttgactctctactgattntttcgagcttgatttctttataatgcatgaatttcaacgaaagtttttcatttcattttaatttattcatttggtctttgcccggtactatccaaacgcatccattcgtttactgtgtatgaatacgttttgtttcttgaacaataatagtccttttcatttttggagtttcttttcttctgaaaacgacttgatttgttttctaagaatttaacattttaggttctacacggatggtaaaaagcataagcaatcgttttggggagcaagagcaactgagcctccagcacttaaacctagcagattgctaccactagggaaaaatagaattgctgaaacatttagaattggaggatcgaaggtgttcccggaggaccatgagccgtggcgtaaaagaatacttgacccgggta

SEQ ID NO: 276932 - DNA, 451 bp, Glycine max
  unsure (1)..(451): unsure at all n locations
agcttcacatggcactcccatgaagctgngataacgaaggaattgaattgaagattctcaattcgtgaaagggtatatatccgtacccaaaaaaacaaaaaagtatgggctgaacaagcatcaccaaagtggtgttaattaagtttcatgctaacaaagaaccttagccaatattgaagtaaaaaagttttggcgatgactatgggacatgaagacgtgattcaagcatcaatcatgtgacattgttgtcctttaaacacaattctgattcaatcacttgtcttgtccacgtatgatatngttcagacaaaaagggactctgacattttgaagttcacgtcacatgtcaagtagatatatgaatngaggaatttcatatctaacctgatgtaatcctgcagagaagctagctatctaatatnnttttttggtaagatatatatatatatat

SEQ ID NO: 276933 - DNA, 339 bp, Glycine max
  unsure (1)..(339): unsure at all n locations
ccaagctntgtgccaaccagaattatggtgacaccaggatcataatgcttcaactccggaatccactgaaaatgaaaccacacatgcaatttatcatcgactttttttataaatgaattattttcttaacatataacatgatccatacatccttcattacaggccatacagaaaccttataattatcaaaataaataagaagaaatacacccaaaacactatgaccacaataaattgccacgaagtacctttttagagacattttcataactggccttgcttatgagagagagagccagtatgaaaacatcggcaccacgggaactcaaaggtcttaat

SEQ ID NO: 276934 - DNA, 255 bp, Glycine max
  unsure (1)..(255): unsure at all n locations
agcttgtgtaaatcatgccaggtttgatgatgtcaaaaagaatattttgataatgagtgtcatcatgaaaaaggcggagaatatggatcaagcaggttttgataatgttgaaaagaatttgcttgataatgagtgtcatcatanaaaaaagggagaatgtggatcatgcttattttaatgatgtcgaaaagagatcacttgattgtcgtcatcaaaaagggggagaatgtgaatgtatgatgaatttgatgatgc

SEQ ID NO: 276935 - DNA, 449 bp, Glycine max
  unsure (1)..(449): unsure at all n locations
tcttattcacataacaccaatagtattccatttataagcagtgattgacgattcanattacatatttataagagaccaaccaaacacaaagcaaccacagcttaaaacacccgtaacaaatcctagaacatttgaatttgcaaaggcgggccatgaccactttattctaaaacttcaaacacaacacatacttattatttattgatacatgtattacagctatctctgcttgaaggttatgcatgttgatctcacttgcagctgcatgggtcgcaagtgcagtttgatccacagttgcagccaccgttctcagctgcaacacccatttcagcaccctcgaattgggccttcaccggcccaacacccaaaactagagtctcaattgtgatcttctcaacgtagtcaaaagagtacttgttgcacttgcatacatgaaaaataacatacat

SEQ ID NO: 276936 - DNA, 289 bp, Glycine max
  unsure (1)..(289): unsure at all n locations
agcttatcatgtctatggtagaagttacaaggcaanattttntgcgacaatgtgcaatatatgctatttgttgatgcatttagttggcgtcatttgagtccaaatcaagattctacttangatcaaaaggttagggaactataaattgtgtacttaataacactatcagtcaatcgcgagatcctacttaaaatataaaattgtgtttaaagatatacatatgcatagtaaaaagcattaatcttgcaaattatcttataataactaccagcatttgaataaactcatg

SEQ ID NO: 276937 - DNA, 332 bp, Glycine max
  unsure (1)..(332): unsure at all n locations
ntcaaccttggtgcccatttctgctccaaatcgcgaaaggatgacattttcggagtcgtgaagcgcgtctctacgtgtgggacttcgaaatttcaggtttgggtggacttctttctctcttgattttcgtgggtatggggttttgggagatataatgggtagttttgctaagtttatgcttcatgatagttatttgtgaaggaatttgttgaaagcatgttgaacttgccatgtttggatgagttaagcttacccattcagttttaggggttttatgatgatgcttgtgatgtttatgtgctgaaattgcttatggaaaactgttagagatg

SEQ ID NO: 276938 - DNA, 445 bp, Glycine max
  unsure (1)..(445): unsure at all n locations
agcttgtcttgacgtcttgtgctcatccgcagattaatgtataaattcatganaatgatttcttaaattagacacgaagctccaattctcagattcttagactcttgagtcccatccaatttatttattaccataaaatatggttagagacttagttgatatcttcattaagaccgaaagagccaaccaatatcttatcttcacttgacttgagataggattattctaaggccaagtcccatcccttttattaccacaaactattcttagagttagtcgatgttttcattaagaacgaaacccaaccaatatctaactacgggcaaatgcaaaccattcatttgagagactaanaatataattaaaactaattggaatctgaattgtgcgcagacgaagattggtaggaagttggaacttggaaccccgataggtagttagttac

SEQ ID NO: 276939 - DNA, 464 bp, Glycine max
  unsure (1)..(464): unsure at all n locations
ccttaattctatattacaaattgcattgctacatcacttcattataatcattttcaattgttctctctccttccttaaaaaaagtttaaattgtacttttatttccactatttttttttcattcagaagcaattttagttttttttttctttagttgactgttaacatgacatttatatgaaaaaaaattaaatgaagtaaaaaaaatgtcttaaagaattaaactcatcgccttattttatttaaataaaaggtaataaatcatgaatttacttactttatttagttaaacatattaatattattttctaggtatcattagtcaagaattattaaatcttttaaaaaattatcaaaatttataaattaaagaatatgtaatatataaatatttttaatgttatgttataccattttatatattnttatcttactaattgataattaaatttcataaattaata

SEQ ID NO: 276940 - DNA, 421 bp, Glycine max
  unsure (1)..(421): unsure at all n locations
tccttacagtcacctcgcggcatgcaagcttataaatatacaccctntaagaaagttaattaatatagttagtagcattaaattgttaactatntgtattatttttgtcaaaattattcttaaaattatcggaactcataattnttctcttttcacttaattactttcccacctaattaattaatgggtgctagtcttcctatctaatccttataagataggtaatgcatntatctttttagtatataacatttattgtaaaataattatgggtatttgggtcaaaaaataattaatacaaaagataacttgagaagactcttataagaagggaacaaataaaattgaaaaaagattattatatctatggatagagtgagtatgtccgagcactaagccccttgtgaaactaatggcatgc

SEQ ID NO: 276941 - DNA, 416 bp, Glycine max
gatgatgcggtctttaccgacgaaaggatcaaagtaggtctaaaaagaggcaaatctgatcatcatgctttgatacatgccaaaaaaaactagggcaaatgaagagggtgagaatgagggagaagcccatgctatggctgccattcctatacagccaagtttcccaccaacccaacaatgtcattactcagccaataacaaaccttctcattacccaccgcccagttatccacaaaggaaatccctaaatcaaccacaaagtctgtctaccgcacttccaatgacgaacaccacctttagcacaaaccaaaaacaccaaccaagaaatgaattttgcggcgagaaagcctgtagaattcaccccaattctggtgtcctatgctaacttgctcccatatctacttgataattcaatg

SEQ ID NO: 276942 - DNA, 465 bp, Glycine max
  unsure (1)..(465): unsure at all n locations
tcttacgtcacctgccgcatgcatgcttaaatacactcaatgaacactagcatataccgaataattataaattttcatactaatcttcttatatactatttttgaaatttccaagatattaaacatattctttntttgtgtttatattttcaataaaatattcgatcagagaatttgtagaagaatataattaagattactcttaatccaccttatatatgtgcgaattcatttggatcattaaaatatgttacaacaaaaatgaaatatttcaaggaaatttatataaaattttgcaaagagttttatganaatggtgcatataattttttctataaatatagatataataaaccacagttctttttgtacataaaatttgtgttgctttaatttcgtgtgtgtntgtggtgtatatataatatcttgaaatgtttccttaaaaaaatatcttgaaatgttttt

SEQ ID NO: 276943 - DNA, 469 bp, Glycine max
  unsure (1)..(469): unsure at all n locations
gtcacgaacgatgctgggacgattgtgaatgaacttgaagttcagcatcctgctgccaaggtgttggttntggctgggaaggctcaacaagaggagattgnggatggagctaatttaactatttcatttgctggggagctcctgcagggtgccgaggaacttatcangatgggtttgcatccgagcgagatcatcagtggatacactaaagcaatcaacaaggttttttcagtttttgatgaaagccttagtgatctgtctttaaatgtcatattgctgctctctctccctctaatttcttgttttgtttcagactgttcaaatattggatgaactagttgaggatggttctgacaatatggatgttcgtgataaggaacaagttatttcaagaatgaaagcagccgttgccagcaagcaatctggtcaagaagatatcatatgttcgcttgttgctgatgtgagtata

SEQ ID NO: 276944 - DNA, 440 bp, Glycine max
  unsure (1)..(440): unsure at all n locations
agcttgtagcagtacaatgganaactgcattcatagctttgtacatttggaaatgaacttaagcgtgtagagaaagataaagctattgtactggagtcccttaccatgttaaagggtcaacttactttgtctatggtaagtttgctcctctgtagtgtgaactatttcgattcagattcaagtagtcactgagtaagagagaaagaaatacttggaatctttgtagatgcctactactgttataagcataggaatatgtttagtgcaattttttttaatgaggatagatgattagaaagaatcttatgactaatttaatcttgattttggctaatggngatgtttagatgaagatgataattctggaatacaatgaatgcagtagatttttgtaaaatgtttttaatgataaaaacgatgcctctttttacgtaactatc

SEQ ID NO: 276945 - DNA, 457 bp, Glycine max
  unsure (1)..(457): unsure at all n locations
tgttcagcagggcaacagtgagttgtgactgccactgcccttctctctctcttgtattctctctatatatgtttttttattgaactgcaaaattaatatatacattaagcaataaataataccagaggtattacaggatagcacagtagagaagatctcctaaagcagagaacaaaaaacagaaatacatttgccctactacaaaccaccagaagcctgaccctacagagcacactctaattaaaagccatagacatagctgaggaccattgatggaaaggaacattaaagtccttttcccgccccctcagccaggaccaagtgagaaaatttctgttatccaccaacttagagatgtgaagaggctgattatganagatgatatcattgcggagcttccatattgaccttgtagctattatccaccatattttccttcttttattggaaaccttcg

SEQ ID NO: 276946 - DNA, 399 bp, Glycine max
  unsure (1)..(399): unsure at all n locations
agctntaacctcatcgtctctcacagtctttatatttgggagcctttccagtccttgtgttcggactctcagccacttatgatagccgccgatgatcccattactgcttcccctaagctctctgtcctttcttcacgccgcatcccatgccttgcgaactccttggagtaccctcgcgttgtggtcactgaaacctcatgcgatgaaaggcgtgatgctttcgtctgatggcactcctctcatgggacatccttcgcatgaagatagaatcctgattcttccttccttctagcgagggaaccatttaacagacgcccctccatgctagccaagagttggtgcacanaanacaattcttgcgccgctcttttcacatccccggtcgaacgtgtcatacat

SEQ ID NO: 276947 - DNA, 419 bp, Glycine max
  unsure (1)..(419): unsure at all n locations
tcgaagacgtccacgaacgacaaggcagccgaacgaactatttccgctccggagtatgatagtcaccgctttaggagtgctgtacaccagcagcgcttcgaggccatcaagggatggtcgtttctccgggagcgacgcgtccagctcagggacgacgagtatactgatttccaggaggaaatagggcgccggcggtgggcatcactggttactcccatggccaagtttgatccagaaatagtccttgagttttatgccaatgcttggccaacagatgagggcgtgcgtgacatgagatcctgngtaacgggtcagtggatcccgtttgatgccgacgctatcggccaactcctaggatatccgttggtgttggaagagggccaggaatgtgagtatggccagaggaggaaccggtctga

SEQ ID NO: 276948 - DNA, 428 bp, Glycine max
  unsure (1)..(428): unsure at all n locations
agcttgaaagagcccgggttgtcaaagagaagttcaagtccatagccatcanagtctgaagagagtatgatgaactaagggacgtcaatatggccaccgatgaagccttggaatgagaaaccaagaaggcccgaaaggaagaacacgaccaaaacaagttttgaggggctttatagggcagcaatagtgagctcaagctcctaagaggtgaaaggaatcatcacgggtcanaggcatgatctggaaggacgagctaaaggcttgccttangtcgaaaagaaatttgtcctaatagttaaagtgagactgaagggaatatgtgggccatcatcaatgagtgcaaagagaagctaaatctagcggcaactcacgagcaaaggctagaggatgagtacaccaagatatcaacagaaagggaagcaagggaa

SEQ ID NO: 276949 - DNA, 357 bp, Glycine max
  unsure (1)..(357): unsure at all n locations
tgtgactctnggcaaattctntatttctagtcaccttntaataattgtgactcttttgaaaactagtcacttaaaaagttgtgacttttgaaaaaatcttcagaaacaagtcacttgaagaattgtgacttttgtaaatttttttttcgaaatcagtcactggtaatcgattaccatgaaggtgtaatcgattacacatcaacagatgtgactcctcagtttaagttttgaaaatcaaaatgtttagaagctctggtaatcgattacatattttgtgtaatcgattacacaagttcaaaatgatttgaaaatgtttaaacacaagttgtcactctttgaatttgaatctaacattta

SEQ ID NO: 276950 - DNA, 359 bp, Glycine max
agcttcccagatccgatcatggaaggacttgtttactgccttcattcggcagtaccaatacaatacggatatggctcccgatcggaaccagcttcagggtatgactaaacgagagcatgagtccattaaggaatatgcccagagatggagagatctcgcagcccaagtcgtaccgcccatgacaaagagggagatgatcacaattatggtagatacgttacccacgttctactatgaaaagctgataagctacatgccagctaactttgcggatctcgtcttcgccggagaaaggattgaatccggactacgaaaaggcaagttcgaatatgctgccaatatggtccccaacaacaaca

SEQ ID NO: 276951 - DNA, 452 bp, Glycine max
  unsure (1)..(452): unsure at all n locations
ccttttggagtaganacatgggacctactcattttatttcatttagtcgtatctagtcaaggtctgagagaccatacaagtttcctagcgatttctaattatgtgggccattaagtctatcatatgctgaaaatagccgagaagcccatgaatttcttcgggggcggagtaggtgtccgccatcgccttggccttggctaacaatcggggaagttcttgactcccgttcaaggtaagagcaaaccgatccatccacatggttgcctcttggtgtaaagagtcgatcacccttcctctagcctctttttccgcgtatacttgggcatactcgtccgcgaccctatgctcgtgggtcgtggctagacctaactcttcttggtacttggcgatgatagctagcatgttggtctctgtctcgcataaacgctgagataagctccttttggaccttg

SEQ ID NO: 276952 - DNA, 270 bp, Glycine max
  unsure (1)..(270): unsure at all n locations
agcttatacagataattgattagttgggaacttctatttgtcaagccatggtcctatgaaaattagtattccagtggagaacttgagtatttgaattagctagctagcctaaattattgttcaaacttgtgtattgatcttataaagtgagttgaggtgaggtgatactctgtttgaaaatctgagctctataatttgtcatgattttctgatctttcacgtacctctgtagcttctaaatagtgttgtaaaatggtgccaaatnttaca

SEQ ID NO: 276953 - DNA, 409 bp, Glycine max
  unsure (1)..(409): unsure at all n locations
ngatgttcgtcttcgtgcctttatatgtgccactcatactcttggaggggtttacatctatagtaatcaccaaggctgtgatggcagtcgcctttactatggtaaaaaaatacttttctcttaatagaatgctattttgtacttttcacatttgtcccattgcatatcatcaaaattagtataagggcattntaatttccgcttagcttgtttatatttcatttacataagatttttccatatttctataattttatcttgcctttgcaacagatggctgtgctagtgctgtggtaaatggagatagtgtcgctcagggttcacaatttttctttaaaagatgttgacgttgtggttgctcaaataaatctagacgtggtatgtattgcatggtattccatatatcaat

SEQ ID NO: 276954 - DNA, 433 bp, Glycine max
  unsure (1)..(433): unsure at all n locations
agcttgcatttggaattgcgaaagccccactctatcattaggattagtacctgacatctcanacaaacaaatcatacgtaacaagacaattatagttgctgtttgaatacctcacccactcaagtgtatcacacaattatggcttttctctaatgaaacactcttgccttttaccactctaattccccttgagttcttatgtaattcaagagattatggccacaacaaagaacaattcaccaatatgtgtaaggtaaggctagagagacaaggaaaaggttaaccaagaaaaaggctaacaatggttttatgcacaaatgaaggaaataaaattcagaatttaggaattcaagtaacaatccttcatgcaaccaatatattaccttaaagagaattttttaaagttctcaagcatgaaccattcagcccaatt

SEQ ID NO: 276955 - DNA, 278 bp, Glycine max
  unsure (1)..(278): unsure at all n locations
agatatgatgaaccgtagaagggtgtaacttcctgctgttattgccgactcacatagtggtacatctagatatgtctcatgggtcacgagaccatgtggactgtccgcggggtgctcttgcccataaccaagcttgaccaatcccgaccctacccaggcatagtcggtcaatgagaacctgngatgtacctaatcacgcgaactcctgcctgtcaacagataataggaaaactacaccatctatcaaagatgcttgtggtggctggccagctgtgaat

SEQ ID NO: 276956 - DNA, 219 bp, Glycine max
  unsure (1)..(219): unsure at all n locations
agcttgngagaggtacactgatataattgtgcctatgaaactgcttctagagagcaatgtggtagtatattacaccaagtttgatgagttcaaggaggaactcgagaaaaggaaatangatgaagaattgacacattttactaatgacagcatcaatgttgccattgtgaaggaatattatgctaacctctacgacccggaagacaagtcactcaaaca

SEQ ID NO: 276957 - DNA, 105 bp, Glycine max
tgtatgtccaagctgccatcaccagttcaaattttcatgattatgcattgacaaaccacatgttcataatatacttgcagtaacagtaacgattgtggggggggg

SEQ ID NO: 276958 - DNA, 399 bp, Glycine max
  unsure (1)..(399): unsure at all n locations
agacacttctctaccagcttataccaacttgtgtaatcgattatagtaaggctgtaatagattaaaatagaaagctttaacattagaagaaattctctaacttcagaaactttcttcttactcctacatgatcatgcatgatacatatatgagatgacacagactaagatgccacacataatacaaccatcaataccaattccactcaagttaagtgcgcatgttaaacacacaaatttttcagctcttcttcaagcttcaacgctaagtcttcatgtttcttcgcctatctctaacaatcctcccctttttggctttgatgatgcgaaacttgattctccgctgagtgcatttgaagtctcgagcctgagaagaaaacactgctttctattcacctan

SEQ ID NO: 276959 - DNA, 421 bp, Glycine max
  unsure (1)..(421): unsure at all n locations
ggataatctttctcaagctgcttaagacaaatttataacaacaaatcaaattcttaaattgttcaatatataaaatctgagcaaaattatatgtagcaagcagttcattattgaaccataaactatagctactgctacttctatcaacaagtcagtctctttagaatctataatttataaagaaccaacggaccggaatgaaatcaatgaaaaagtattcctaaaaaagtttctttcaatcttaaaaacacagctcggttatataaaacactagtaccatacatgattagttntagaatctgagtttagattaactcaattacaaaaattagctctgagtgtgagggtngttcttcacttatatactntatgggaatcttatctttagctgatatgagactngagtttttttcaatacacg

SEQ ID NO: 276960 - DNA, 269 bp, Glycine max
  unsure (1)..(269): unsure at all n locations
agcttgctctatattacattgatgtttatggtaagaggttgtatgccattnttgttttaagagtagtgtcccactggtaaaactaactntccaaatgtttgccttcgcaggaaatggccccaaggaagcttgcctcaaagaggtctaagaaggacaaggcagccgaaggaactagttccgctcccgagtatgacagtcaccgctttaagagcgccgtacaccagcagcgcttcgaggccatcaagggatggtcgtttctccgggagcga

SEQ ID NO: 276961 - DNA, 393 bp, Glycine max
  unsure (1)..(393): unsure at all n locations
tccatcaataactnttcactcggatgtccgatcaggcgaattatatatcgagacacccgaaattgactaaaggaagttgtcgagaaattcaaatggtcacaacttttcactcggatttccgattcaggcgcataatatatcgacacgctcgaaattgaacaacggaagctctcaagaaatctaaatggtgataactttttactcggatgtccaattccggcatataatatttctagacgctcgaaattgaataactgaagctctcgggaaattcaaatggtcataacatttccgacagatgtctgattcaggcgcataatatatcgagacgctcgaaatntaacaacggaagctcacgagaaattcaatgtgtcataactttcacacggatgt

SEQ ID NO: 276962 - DNA, 409 bp, Glycine max
  unsure (1)..(409): unsure at all n locations
agctntgagggattggtctttgccagtgaaatgtatcgatgtgggtctgaaaaaaggaaaatttagtcatcctgcttggacgaatgagaaaactggggcaaatgaagagggtgagaaagagggagaaacccatgctgtgactgccattcctatacggccaagtttcccaccaacccaacaatgtcattactcagccaataacaaacctcctccttacccaccgcccagttatcctcaaaggccatccctaaatcaaccacaaagcctgtctaccgcactttcaatgacgaagaccacctttagcacaaaccaaaaaaacaccaacaaaaaggaaatttgcagcaaaaagcctgtagggttcaccccaaattcccgtgtcatatgctcgaacgcaacgtgtgcttatcat

SEQ ID NO: 276963 - DNA, 461 bp, Glycine max
tccttcttagctttgttttactagggaacaaccgggattcaacggtaatcgatcttgtacaatgccggggttcaaaccgggcatatcttggtacgaccaagcgaagatgtcttggtagtttcgtgcaaaacaaccaattcatctcagaccaatgtggtcatgcccgtaccaacctttacctctttcccttccttgccaacacccaagtttatgatttccgtctcttcttggtgtggcttcatttcttagtcttcttgagcgaccatcatttctagctttgagggaaaccccgtatcttcatcatcttcatccttagctcgatttgctacttgttcaaaatcgacgtcagggtccttgatattagtaccttcacagaacttgtcgttgaatctgtatcatttaatcgcaacagaaataaacatgcagatgaatgataatgggtgatggtgcaagaacaaatc

SEQ ID NO: 276964 - DNA, 420 bp, Glycine max
agcttgtgcttcaacaattgcaacaagacccactatccataatgagagaacaatttttttttaaaaccttgcatctcgtatgaaatatgttctctctttaggtttgggttaggtcagcggatttactcccaaggagccttctcaccattagaagatcaccttcttcatagggtaaacctcttcaatatgctcatcacccatggcttcaccttcatttccacttgaggaaggagaagaagtagcctcctcttggctactatagatgtcttgacccctcataatcatggttttctttgtgggggtattgagaagcaatgtggcctttcccaatacatttaaagcacttaatgttactagttctatcttatgaactagcctttggagtgatttcctctatgcatttacccttatcatcctttg

SEQ ID NO: 276965 - DNA, 440 bp, Glycine max
tatagttccaccaatctatggttattgtgtagtgacttttgttaataaatcttaatttttggttaacgccatctctagaacatttccattggatttaatgatgaaatctgtgcattttcaggtgaaaaagaggctaagttttgaattgcaaaatgtagcagttgggctaagtgcatatccaccgctaagcgtagcttcagcatgcttagcgcaaaggagaatctggcagagctaaatcagtgcgctaagcgcagcacgtgccttcagccaggctaagtgcgagactggcgttaagcccaatttcacttactcgtgctaagcgcgaggctggcgctacgcgcaatgttgcgatttcagagcctatttaaagcctgtcttgtgcagaattagggtacacatttttttatactgcttttagaccttttatgacagcttctaca

SEQ ID NO: 276966 - DNA, 379 bp, Glycine max
cctgccgcatgcattcttctactgccacttcttgaaagcagcccttttattctccagaattgtgaatgtatcatcctttacacatcgagctggtaaggataatcattataatccttacttctattattgactggtgaatcaactctttcagttcgattctattccataaattcttcgtcacattgtctctacaacagtgcttctcctatagaaactgatcaagctcttttctttaattactgatgtgcacgttgatgaaggaactgtttctgggaagagaatttttaaatcaatacaatatccatgtgctcacatctatgagtattctaaactgtaatggcaaatctcggattaagctatatagactaccctatgtctt

SEQ ID NO: 276967 - DNA, 415 bp, Glycine max
ctctcgcataacgggatgtgttagagacataatgttataccattcacgtgttcttcactatatataaactctagagattattggctcatgacaatttacttcgttcttaagtggctaaattaccctggtattttctatcattcaaactggggggaacgggttacaggagattatgcttccctcattcgtgctctgcattatttaaaataaacatatctttgaatcgacagcactggattatatctatttgctaagtcggcttattctaatttcatcttttatccaaatattgaaattgcagacggatcctgttgcggcattcaaaatgactacaatacacacactgatggatgtgtggaggcatgccattaaatggatccagatgttataattctgagtttttgatttctaatga

SEQ ID NO: 276968 - DNA, 460 bp, Glycine max
catgcaagcttaggtaataataaaatatgacaatgtggctcacagaatatgtatgaatcggtgttctattgtattatatacaaataataagataagcaaaaggggtgtcagcaatattacagcacagcacgcagtgcaacttccaggaaggttcgtatgtttcctacggaaaagaaaggaaatgtaatgactaattaaattactaatcttttgtaacggctattttatgaattgtttaagaaaatatccatttatgcacaggggcttttttctctttggtatattggaatacttattgtgtttgatttgatggtatgctaatcaacactctctcaaataaaattactcacactcataaaagatcatgaaaacacaacaaatattatattgtaggaaaaataatagcaaacataagaaattaacgtgattcacatctcttgctacaccacgaaatcgttta

SEQ ID NO: 276969 - DNA, 472 bp, Glycine max
  unsure (1)..(472): unsure at all n locations
gtagtcctctntgatcaaaggttcagtgataacaattctcaggccataatagggatgatagaaatagatcttagcaatttcatacaaaacataaacctagaagtccagacaataggatttggaagaaactntgagggacacaacttacacttggatattacctttattggtagaataagtgatcaaatatcccccagatacaggataaacactaatccattagtgatagccttatcatatgatggaatccaatttttgccacctgaaatctttgattcctccagaaaccataacaatcaatggcaaacacatattgaggctggatcctctatgaatgcaataaccactcacagattagctataataacaaacagaagaaatagtctntcagtaagatttactgattatgaagacatacaaaatcctccagaagaggaaatggaaccctctaggatgtctatgatgaatctat

SEQ ID NO: 276970 - DNA, 413 bp, Glycine max
  unsure (1)..(413): unsure at all n locations
ttattgttggctgaatggttcagctaagtgcacatcgctgcgctaagcccaacatcttcactgtaagttgcaccttaaacagtgggctttgcgtggatgatgcgctaagcgccacttcctctctgtgaaaatttattatagctgctctaagcgcgccatactgtgctaagctctagattcattctggtagttgagctttcaagctgggcttatccggaaaagatgcgctaagtgtcaacatcattctgttttgagatcattggaagagtgcttagtgcacgaagtggcgctaagcctggatcactcactggtaagaaaagctagatgtgatgctaagcctcgcattttaagctaagcacatattgcanaatggtttttggtgttgataaagcgctcaacgccacctgtccgcg

SEQ ID NO: 276971 - DNA, 328 bp, Glycine max
tgtctaagtccttcgattatttggatgaaaaaagagtttattcttggatgcatgtatgcatgattatgccaaagtacggagaaaacatggtgaagttaagtccaaaatgtaggagttaagggtaaacacgccgtttggtaaggactatggtttcatatgtacctgtatcacgggttctaccaagttcccaaagtcattgaccacttccggatattgtcggattacgggactactcccggtctaacaacgtccatatgaaagcctcgtttgagtgtagtatcgcgtatcaactaattcaagactactcttgattagtcaccgcactacg

SEQ ID NO: 276972 - DNA, 200 bp, Glycine max
agctctttgacaacaatctttgtctctggcaatctattactagagagaaaaactctttgtgtaaatgctttgagaaaagctcatgcgctactcaatgttttgaaaaactttttagtacttaccttaattgagccttttctagattcttgaatcttcaacttgaatattcttgattcctgattcttgaaacttaaatcttg

SEQ ID NO: 276973 - DNA, 444 bp, Glycine max
  unsure (1)..(444): unsure at all n locations
tgtattgtcactcagatcttgacttgttataactttctgaataaaatgagtttatcccacattnttactccaaaaatcagtgcgaatcaagtcactcccgcattttatctctagcaggcattgtatgttggtctcgtcctttgtcacgggaagctggaaggtccatatcaccttcttaactgtacacatggggcactgtgcccccaaatgtgcaagtaagaagagataatctttcgggctatcgtgtccgtaaatgcattcatatcatgcatcgcataagcatctcttcatggcatcataatgaacatatcattcctggcattgtgccgtattatattccaacctcacattttgcatgagtcattgcatcatcatgcatatgcgttcaacannactttttatctacanatttcataccannttgtttcatgtnttctcatacgt

SEQ ID NO: 276974 - DNA, 304 bp, Glycine max
  unsure (1)..(304): unsure at all n locations
agcttaaatgcttaatcacttctaattgattttatgttgcatagtagagtatttttattttttaaaaaattttacaggcttgatattttagctaacagaatttaatgtagatagaccttgtaagcctgtttcccatgtgtatgagtccaaatctaaagaatgtttgaaacccaattttactaaaaacttacagccaatcataatatttcactttggaactggataccggatagaacccttgaatagtaacagaataaacagatntcagaatcagggaatgcttgtgttgttcaataacaaacgt

SEQ ID NO: 276975 - DNA, 398 bp, Glycine max
tgttcttcctctgtcacatgaagacactagtcatggacacatcaaactcatcaacccctcgacctcaacctcaacctcaagactcatcctcctccaagaggcacttccactggaccaacaaggttggaaatgaagacccccaactcctccccacttcagaaacaatgtccaaaatcatagaagaagacacaaacacaaaggaagaagaagaacaacaagaaccagaagatgacaaggctgttccacttcctggccctgcagccacttctcaagcagcagcaacaaagagaaagcttcaagcagtggcaatctcaaggctccgctctgttctcactgtattcagcaagaaccgttccaacctccccttcggcctcggctccagagttgttggcaccctc

SEQ ID NO: 276976 - DNA, 271 bp, Glycine max
  unsure (1)..(271): unsure at all n locations
accatggaaatgcagcggaagacaaaggagaagaggtgagaggaggcaccatccactaaagaataagccatgaaagaacgagcttcaccaccaaaatgagccttggattagaagcctggagaggatgcttcaatggaggaaaagaaagagggagagaaagagagaggggggagcacgaaattgaatgatgaataagggagagaatttgaactttgagttgtgtctcacaagactctcattcatcanacttacaacaagtgttacacatgtt

SEQ ID NO: 276977 - DNA, 394 bp, Glycine max
  unsure (1)..(394): unsure at all n locations
ntattcatatntaattgtcatttgtgtagtaggtacatgtttcgctttcatattatgctacttttgcgttatttgttatttaaattttattattttattaacaagcatgatcagaaaagatccatcaataaaagtttctttgattcaagaaatgataaacagtgaatttgcctataaggtgtcgtacaaaaaagcttggatggcaaaacaaaaagtcattgcaattgaatatgacgattgggaagagtcatatgcgaaactttcatcgtggctaacacacatgcaaaatcattctcttggatcctatgttcaaatactatatgacgatnntattgttgagaatatggttggttgtgaacactgtcagtttcatagagtattttggacttttgat

SEQ ID NO: 276978 - DNA, 431 bp, Glycine max
  unsure (1)..(431): unsure at all n locations
agcttagcagccaactcctgatgatcaggccttctgaatgcttatctggaatatacacaaagggtttncccctctttcacaacaacaggggtctttcgagttcctccttgaactcatcaaactctgtatagtcgaccaccacattcctctctggcaaaagcttcctaggcacaataacatcagtgtatctttcccaagccctctgggaagtgaatctggatntgtcaaatctgactttggtaggtgtagaaggtgcctttcttttcctagaagccatctgccaaatataagacaaaacacacaagattagcatatgtttattcttaagaaaatagaanaattaaactaataacagagctgggcgcctagcgtggcatgctgacgcataccgcgccttatgaaaataacaaaagtgctaagcgtagcaagct

SEQ ID NO: 276979 - DNA, 378 bp, Glycine max
  unsure (1)..(378): unsure at all n locations
tctcccncaattgtctataaatagggggagaagtgaagtgtattagggttcagccccttaggcacttctctctctttcgaatttgcttggaaaaattgtttccgtgaagaaaatctaagccgaggcgcttccgaaacatttccgtaatgtttccgtaaggaatttcgcgaaggtttcgaccgttcttcgacgttcttcatccgttcttcatcgttcttcgatcttcaacgggtaagtacctcgaaccaagcttttcgattcattctatgtacccgtggtggtccacattgtgttttgtgtatttttattctcgttttatttactttttatacccncttttgacgtgcttaagccatcttatntaagtcatttctcact

SEQ ID NO: 276980 - DNA, 429 bp, Glycine max
agcttctaatatattgactatatatattatattattaattggaattgaatggtatcttttttctaaaaccctttatagcttcaaaattgagatgatcttatgtatgatttatatgtaatgatatcatgatgagatagcaggagatagcagaatctatgtggaattatgtgcaattattatattatctcgtattattagcctgtgatcatgtaaatcaatttggttttagtctaaatgtaatcttaggatttttatttgaagaatcaatctgtatagctcaatcttacgagattttggtgtaactctcttgtatatatttatgccttagcaaagcataaaacacaaaacaaaattattgcatcataatattctttatggtatcagagccaatacgctctcgctggaatttggtgacaatgagtcatcatg

SEQ ID NO: 276981 - DNA, 343 bp, Glycine max
  unsure (1)..(343): unsure at all n locations
nggagaggatgcttcaatggaggagaagaaagagggagagatagagagaggggggagcacgaaattgaatgaataaaagaggtatagaagtggaactttgaagtatgtctcacaagactctcattcatcaaagttaccacaagtgttacacatgcttctatttatagactaagtagcttccttgagaagctttcttgagaaaacttccttgagaagcttctttgagaaaacttccttgagaagctagagcttagctacacaaacccctctcataactaagctcaccttcttgagaagcttctataagaagattcctaaagaagctagagcttatctacacata

SEQ ID NO: 276982 - DNA, 276 bp, Glycine max
agcttgtatggttaaagactcacgattgtcacgtgctcatgcaacaattgttagcccgggctatacgagacatctttccaaacaaagtcaagttaaccataactcgcctgtgctttctcttccatgctatatgtagctaagtcattgatcctgtgaaggttgatgagctggaaaatgacgccgcaattatactgtgccaggtggagatgtattgttcccctgctttctctgacatcatgattcacttgattgtgcatctagacagagaaatcaaat

SEQ ID NO: 276983 - DNA, 435 bp, Glycine max
cgcttctacatgctatgcccaaaataaaagagggtgtatgtatagaggatgaggtttagttagtagtatttatttttattttagacttgacaaaaacgtgctatgcccaaaataaaaaggggtgtatgcatagaggagggggtgtaactactagtcccttttctctacaaactaggcctttgccgctcctccataaaaaaacacaaactccttactttgccattttttattgctccctcctttgtgctatttgacctaatgcgatcttaaagagaacccattaagtccttttgggctcttctttttatacatcttattcaccctcattagcattattattattttttaacaacaactacacctaaaagaaattatggtctggcaactgtctttctatactcgtgtttactgaaaataaagatagtagagatatga

SEQ ID NO: 276984 - DNA, 203 bp, Glycine max
  unsure (1)..(203): unsure at all n locations
agctggagttataaatcataaccagntatgagttatcgttgtgntggatacactcgattcagtgtatggcctgcttgctacctaccttgatcaaatctttgcaccatgaacgcccatattatggttagagaatatcgatggtgtgctacagactacaatggtattcttccaaaaacaatacatcaaatatctgaattattacc

SEQ ID NO: 276985 - DNA, 282 bp, Glycine max
  unsure (1)..(282): unsure at all n locations
acactatgaaactaacctatggacacatnataattaaattgccacactaaaatgtcataacaaaatacaaaaaaacccaaaataaagatatatcatcattgatatatgaaattatcacacgtgtcactattagtttaaagcatacttaacaagtcaataatggaacagagcaaaatcaaagcagggaaatggacacggctggaaataatgcaacattatctgggaacttcncaagaagagcatatagccaagtataacgagttaacatgtggcgaaaaaaaa

SEQ ID NO: 276986 - DNA, 469 bp, Glycine max
  unsure (1)..(469): unsure at all n locations
ttgaatagtaagatatattctaatgatgaaagtatggtgagtnntcnctttgatggatattgaaataggtagatagtgatgaagatgtaattatcncnnncncccnnnaataggggntttgaggtcattgtattgtgcaatatanaatataagnttccgaggagggtaaagatnaaatagagaggaaaaataaaagttatggtttttatttttataaggaagaatgaaagttgggtgtgaattaaaaagaatggggtagggtggtaaagatagaagaaatgtttgtggaaaaaaaggaattaaaggtttaaaaaggggagatggaagattttaagtgattgaaagaatgaatgtaaaaggttagaaaggatggattaagtggggagtataaaggaaaggtgaagaattaaagtaattggataaaagctgtttttggagaaagaagaaaaaagncggaataagggggaaa

SEQ ID NO: 276987 - DNA, 164 bp, Glycine max
atctgcttgcaaactatcattccctcatcatcgccgtttttttttttttacatacaagtaggaaactttgcgcacaacctcacgaaatatgctcttttcggcacaacacgcatatggtctcatgtaaactcatgggccattttgggtaacgaagtgatattcct

SEQ ID NO: 276988 - DNA, 111 bp, Glycine max
agcttgtggcatataaagctgggtatgatttctgtcatgtcaaatggttgtcaagcaaacaaatttgcatctttgtgtaccacctttgctataagccagtgctgatggctg

SEQ ID NO: 276989 - DNA, 359 bp, Glycine max
agcttgtggcatataaagctgggatggattcctggcatgtcaaatggttgtcaagcaaacaaatttgcatttttgtgtagcacctctgctataagccagtgctgatggctggtgaggtccctactgagctacgtacattgcctgggtttaagtgctaactacagagccttgctcgttttctctggactcacggcttaaatccctaagatggaatgctgcaatagtagctttaatgaaaaacctcccataatagaggcttaaattgggaaaggaaaaatgctgttattccttccaacacttttcctttctcaattgggacgcttcatatgaatttataatagtatccaaggtgctggaaa

SEQ ID NO: 276990 - DNA, 307 bp, Glycine max
taagctccttcaactgcacaaggctcttaatatttgaagagtatccttgtggaaccttcacccgatgaagacactgacaaaaacttatcttctccttcttggacaaagtatggcaggctgggggcaagtaaattttcttcccatcagaccttggatgcaactgtgatcttatacccatatcaactagatcttgacgggtattcaagccatgcttcgtcttgccttgaatgttaaggagcgtcccaatcacactgtcacaaacatttttctccacatgcataacatcaatacaatgtctaacgtcaag

SEQ ID NO: 276991 - DNA, 314 bp, Glycine max
agcttgaccaatcccgacccaacctttgcttagtcggtcagtgagaacctgtgatgtacctaaacaggcgagctcctggcagtcaacagataaaaggaacaaagaccacaaagcaaggaggcttgtggtggctggccagctgtgaattttgtgtaatatgtggattatggcctctggtaatcgattaccaagggtgggtaatctattacagggctgaaaattgaaaactggaagctaagacggcctctggaaaagcttaaattgggaaaggaaaaatgttggtattcctttcaacactttttcttttttaattg

SEQ ID NO: 276992 - DNA, 312 bp, Glycine max
  unsure (1)..(312): unsure at all n locations
tactcaagcttgcctcaaagaggtccaggaaggacaaggcggccgaaggaactagntccgttcctgtttatgacagtcaccactttaggagcgctgtacaccaagagcgcttcgaggccatcaagggatggtcgtttctccgggagcgacgcgtccagctcaaggacgacgagtatactgatttccaggaagaaatagggcgccggcggtggacatcactggatactcccatggccaagttcgatccagaaatagatcttgagatgtatgcccttgcttggccaacagaggaaggcgtgcgtgacatgagat

SEQ ID NO: 276993 - DNA, 351 bp, Glycine max
  unsure (1)..(351): unsure at all n locations
agctgcggtcatgacgacagcatgtactcatactggancgaccacgcgcaggcgggggctgaactaccccaccccacacttattcaacaagggcctgacccaagaccagaccccacaaaacacagcacgaccaaagagcgcccctatggcggagagagacaaagaaccccacacaaaaagactagccactaaaggtagaagcaagacgatcgaacaaaaccaaagccatggagacctacagagcgcgagagagaactgaccccaacgacatgcgacctaagacgaacaaaggaaagcgaaaacgcccagaagagtgtcatctctcgaccaccaagaaatagacgcaccacc

SEQ ID NO: 276994 - DNA, 195 bp, Glycine max
aatactcaagcttataagaacaaaattgcctcaatcatttccaaatatgcatgcgaatcacttttcaatacatgaacccagccaagactatcgcgcaagcaataaatggggcaaaacacaccaaatgattatgaagatggacggctcacattctcacaaaggtaaaccgatcactctcaccttgaccttccaaaa

SEQ ID NO: 276995 - DNA, 293 bp, Glycine max
agcttgccacccagctcgcccaggttagcatggtggcttcctccagaagcaaccgccttctggaggaatcttctggagggcccaagtgggcctggttgctatttgcacccccatttttactaaatacaccccctactttttttgtgcttctttttcgtaaagttacggaaacttacgattttcgtaacgatacttgttttctttctgtaatgttacggaaccttgtggattacataatcatcccttttctgacttactgaatgttacagaaccttacgatttgggtaactatg

SEQ ID NO: 276996 - DNA, 343 bp, Glycine max
ctacagacaactcaagctttacattaacatacatttgcttttctttcctaactcatattgttactggagcgttgtttgttctttattttgcaagtccccgctcctatcaaagatacctctcctagccgacgtatgaagttcggaacctcactcagccacatccaccttgacgtgttacggttctaaattttggtaagaacatttggcgtccactgtggggccacggtaaaacataccccacgacctctcatcaatcccctcacactcatctatggttagcacttagtctgccctctgatgtgagaccccccctaacgaactcccatctttgtccgacagttat

SEQ ID NO: 276997 - DNA, 357 bp, Glycine max
agcttcaaacattgtacactttggttagtggtggcgacccgaaaagacaacttaagatcttcgaattaagcgtcaacatataggattaattagaaacctttcatatagatatttacaccaacattttatctttcccaattggcataattgtgaagaaaaaagccttgctagttttctctcaactcacggttaaaatccctaaaatggaatgtttcaatagtagctttaatgaaaaacctcccataatagaggcttaaattgggaaaggaaaaatgttgttattccttccaacacttttcctttctcaattggcacgtttcaaatgaatttataatagtatccaagttgctgtaaaaa

SEQ ID NO: 276998 - DNA, 306 bp, Glycine max
taataaatctatatatggtttaaaacaagcttcccgtcagtggttctcttatttttcatgggataatttcttcatttggttttgaggaaaaccccatggatcaatgcatataccacaaggtcagtgggagtaaaatatatttccttgttttatatgtagatgatattttacttgcagccaatgatcggggtttgctacatgaggtgaaacaatttctctctaacaattttgacatgaaggatataggtgatgcatcttatgtcatcgacattaagattcatagagatagatcttgaagtattttgg

SEQ ID NO: 276999 - DNA, 56 bp, Glycine max
ccccacccgcaaccccaacaaggaatacaccaacaccaaaataattttccacttct

SEQ ID NO: 277000 - DNA, 318 bp, Glycine max
  unsure (1)..(318): unsure at all n locations
tttattcgtgaacaattatgttgattccaaattacttgggatgatttcattgtagttnccaccatcttttgaatttggtgcgcttccccctgagtatcctangtggtgtgtggctgagttggattcactgagtcaatgcaaagtaaattaacacttgtgctcatcagtttgaatatcaatatcagagagtatacaatccttcaacttagcataaacagacattggcacatggatcaatttgttctagacttagaaggatatataacccttcagtctcgagcatagaatgcaaagagacttaaacacgtaggtcagttt

SEQ ID NO: 277001 - DNA, 348 bp, Glycine max
  unsure (1)..(348): unsure at all n locations
agcttgtgcagagttgtgatcaattttggatctaaaaaatataaactaaaaattaataatcaaatagtattgataaaaaaaatgtgcataaatcaagtacaaatccttcaaaacaaagtaagatcaaatagtaattntagcagaaaagagaaaaagaagcaaaaaaaaaaagataagcaactaaagttagaagctaaacgtaagaacaaaaccaaaaccattgtaatttaaggtgtgtgtgagagaactgagccgaaggaattgtgacctatgaagaacaaatcaaagtgaaaatgcatagaagagtgtcattttttttaaactaagaaatatatactttacggcatg

SEQ ID NO: 277002 - DNA, 320 bp, Glycine max
tgaagacaagactatacgaggtatcttccttgggtatagcaatatcttttttgctaccgcgtcaacaacttgcaaactaagaaactcgtcatcagtcgagatgttgaagttgatgagtatgcttcttggaattgggatgaagaaaaagtggagaagaacattcttatacccgctcaataacctcaagaagaagctgaggaagaagacctatgtgaaccaccttcacctccaccacaacaacaagatcaagaactatcatcaccagagtctactccaagacgagtaagatctttggtggacatatatgaaacctttaactt

SEQ ID NO: 277003 - DNA, 262 bp, Glycine max
agggcaactgctcttcctctttagctgcttcaattatgagcggactccctctctctttctatctatatgtttctgttgctccaatgaaccaccctctccaagcttcctatccaaggctctctataggtggcgaaactccttcttacatggcttattccctagagggtggcgcctactctcacacggtctcctttatctactgctgcctcttcatggtggaaaatcaccattgaaggacctcattgaatctcaaagagccaac

SEQ ID NO: 277004 - DNA, 318 bp, Glycine max
ttgagaaaattcaaacgacaataactttttactcggatgtctgattgagtttcctaaatatatcgagacgctcgaaattgaataccgaagcgctaagcaaattcaaacgacaaaaactttttactcggatgtctgattgagtcccgtaatatatcgaaaagctcgaatgtgaatgtagaagctctgagcaaattcaaacaacaataactttttactcggatgtctgattgagtcccgtaatatatcgagatgctcgaaatggaataccgaagctcggagcaaattcaaacaataataactttttactcggatgtccga

SEQ ID NO: 277005 - DNA, 351 bp, Glycine max
agcttctcaacgagtttaatttatcttactgatctacatgtgccctctcctgctacaaaaatacaaaatatgaagacacccacctactgccctcatgagaatatgctattctttatgcaactcactgttaatttaacttatgaatcagcttgtgtttgaagacctgaaagcagctttagaggcagcacgagcggtatgttagactaaattttaagcttctgatcttttacttttggttttccccaccgggactaaatatttgttttacttttgttttcctttctgctatcctacttcagttgattacttctttcatatgaaaatagaaggaccatcatgcgcgctagtatt

SEQ ID NO: 277006 - DNA, 301 bp, Glycine max
ttgcatcactactatgttcaactggcttccacacattaaggtcagaattctaagtggtacaaaaaaataagtattaaatttaatcaacaacttaacaaatattacaagtgtgtattcaaatgacaatttggcagggggattattatattacttacataagataaaggtttcactagatgtctgggccatccaatgaatgagttcacgacatccctgacatactgaatctctgaagtgggtaacgggacaatggcttcaccatcgtatacagtgtcaacacacacccttactacatcatctc

SEQ ID NO: 277007 - DNA, 282 bp, Glycine max
agctcgcagacagttgattttctgttccctcacttccgagtggccgagtgcctatttgacatccatgggtatacccaataagaacagcttatgtgtgaacaagctgaaattactcacattcgtgcaaaagagcgagaatgtactctacatgaatcgtgactggcccgaccagaggctaagctgtcatatgaaaggctgcaccatgatccagatgatctcccttgaccaccgggatgactctgaactagtcgacctatgcatcagcattctattccactccga

SEQ ID NO: 277008 - DNA, 57 bp, Glycine max
tcactttgcaggcacattctcgggggagaacctccatgtgacttggtttattgccta

SEQ ID NO: 277009 - DNA, 358 bp, Glycine max
agcttggttcgaggtacttacccattgaatatcgaagaacaatgaagaacgaatgaagaacgttgaagaacgattgaaacctttgcgaaattcttcacggaaaacgtttcggaagcgcgtcggcttagattttcttcacggaaacaatttttccaagcaaattcgaaagagagagaagtgcctaagggcctgaacccttttcttcttcacttcctcccttattgatagccaattaggggaggtggttgccctgccttgctcacagtactgagcaaaatctagagtcgactatcgccagcgtggatgtagcttggcaaggctccatgatttcacacgcgggactatatgggcccttttt

SEQ ID NO: 277010 - DNA, 307 bp, Glycine max
tgactaggcgagttgattttagccttagtttcactttagttattagtcaattcaattattaatgagaaattccaagagaaaacgtccaattgatttttcgctttattttactaaaagggtatttttgattattatattattattttacctctttttttatttccaacgtggttacggcacgaccaaacgatcgaaattcattttaaccgaaattaacggatgatacaattcaaatgatcgggggaaatttattttattgttagattaagcgagaaatgacttaaataaatgacttaagcacgtcaaa

SEQ ID NO: 277011 - DNA, 361 bp, Glycine max
agcttcaagaaaaagatggcctcattaaatttcttatttccggaagggaattctatcaatagacctccaatctttaatggagagggttaccactactggaaaacccgaatgcaaatttttatcgaggcaatagatctaaatatctgggaagccatagaaatagggccttatatacccaccacagtagaaagagtttcaatagatggtagttcatcaagtgaaagcataaccatagaaaaacctagagatagatggtctgaagaggatagaaaacgagtacaatacaacttaaaagccaaaaacataataacatctgccctatgaatggatgaatatttcagggtttcaaattgtaagagtg

SEQ ID NO: 277012 - DNA, 312 bp, Glycine max
tcctcgataaaaatgctgcccagccttcattaaccgttggatcttctccaaattttgtcttcaacttcacaagacaccatgccatgatctgaccgttgggatctttaagaagatgtctggagtgtactagaagcctcttaatgaagcttctggagggagcctcttaatgaagcttctagagaaaactacatgaagctgcctcggcacaaacgcttcccagccttcgttaaccgttggatcttttcgaaatatggtttgcaacttctcaagacaattttccatgatctcaccgttgggatctttgagaagata

SEQ ID NO: 277013 - DNA, 357 bp, Glycine max
agcttgtcttttctcttcagtttcaaaaatcatatttacgagaattatgaatttgaattctgcgaaggacatttgggactacctcaaattagagtatcaaggtagtgatcgaaccaaaggtatgaaggtacttaacttggctagagaatttgagatgcagagcatgaaggagacagaaactatcaaaagttatgctgacaaactgttgagtattgcaaacaaggtacgtctccttggtaaggattttcctgacgaaaggatagtgcaaaaaatacttgttattgtacctgaaaaatatgaatctaaaatattagcattagaggagtcaaaagacttgtcaaatatcacccttggaga

SEQ ID NO: 277014 - DNA, 325 bp, Glycine max
tctcaaggaggtgagcttagtttttagatgggtgtgtgtagctaagctctatcttctcaaggaagcttctcaaggaggtgagcttagtttttagatgggtgtgtgtagctaaactctagcttctcaaggaagttttctcaaagaaacttctcaaggaagttttcttaagaaagcttctcaaggaagctacctagtctataaatagaagcatgtgtaacacttgttgtaactttgatgaatgaaagtcttatgagatacacttcaaagttccacttctttccttcttttattccttcaatttcgtgctccccccttctctctttct

SEQ ID NO: 277015 - DNA, 176 bp, Glycine max
agcttataacaataaacttgaccttctcttatattgtctttgggcttggcgaccacgatcaacaaagaactttcgacacctactatatgttgactagagcaacgctgttattggaaagccgcgacaatctttcaacaccttattcacacattctgataagatgggtggcatgtgac

SEQ ID NO: 277016 - DNA, 212 bp, Glycine max
gacgccagtagaaacgaaggccacccgggcgattttttctgtagaacccccagcacgggaggaacaccagggggatccccacaaagcaaagcccgggccccacccgcagccgacagtaaccccaaacgggccccaaaaggcgaagcccggggcccaacgggccctaaaccacgagaccaagcccaacacgcccctccgcgcgaaaacccaaa

SEQ ID NO: 277017 - DNA, 351 bp, Glycine max
  unsure (1)..(351): unsure at all n locations
agcttgtgcttgttttatttaaattcctaggatcttgaacaactaggtgtgtcctactatgacttgagaaacaaaggtgatcaaataacaagcaaagatttaaaaggtactaggttgcctcctagtagcgcttctttaacgtcttgagtcggacgcgtgatgacttgtcggtcatggacctagtacctttgctttcctttggctttggacttggtcgcctgctggtcgaccacgggtcgtaggcaacgctccagcctttgtatatgagccgaggggctctggaggtggcggcagtgcgtctattgcccgctactggccatccccaggctaatgttgatgcnntcctacctc

SEQ ID NO: 277018 - DNA, 321 bp, Glycine max
tctttgttaattcatctctgttaattgaaagtttgaaatgatgcttattaaggaagtatctgttaattgaaattctagcaaggctattgttagcttcattgtagtgttgagttttgagttctattgctaaattaagggagtatttgttaattgaaatctctgttaattgaaagtttgaaacgatgcttagtgttgaattctggcaatgctaagatggtcctccgaacatggacaaattatctgttaattgaaattctagcttcatcaagggtgggtagtgggttttgttgctgccttttgggtagtgggttctgttgctgc

SEQ ID NO: 277019 - DNA, 356 bp, Glycine max
agctttagatttctactttattattaatactcatgtcatccttgagtaatcattgatgatggagaggaagtaactttcccctcctagtaatggaactcttgaaggcccctagtagtcagaatggacgtagtcctatatggcctttgtagtgtgcatgaacttttggaattttgttcgatgctacttcccatagacacagtgctcacaaaattaaagaggttccaccttatgatttctaggtaagcctggcttgctaagtgtacttagcaaaatctagagttgactaacgccagggtggatgtagcttggaagggctccatgatttcacacgtcggactagaggtgccctcttttaa

SEQ ID NO: 277020 - DNA, 308 bp, Glycine max
tctagacatcattcttctaaattggtctagctttttttgcatttctttgtgtccagtattcattagatatagcgtcatccatgtgctttggctcgatcttggaaagtagtgttgtgtgcttgagagaattccttgtctggactttgcccttaggatcaccaatgatctaggactcttgatgatattttctcagcaagtgtctagttggttctctaacttctttaggttgatcatccattggtgagttggacacaagttggttctgactggatgcaacaatagacttgacgatatcttcaattttcatg

SEQ ID NO: 277021 - DNA, 356 bp, Glycine max
agctttcataagtgaaatttgtgtattcatctccctaagagtcctctcacgaggtggaggttgagccatgttctcagtataaaaattagcagtggaatgctcaaaatcagaatattcagaatcaccctcaacagaatgctcagaatgctcaaaatgcacagaatgaccaggatgcacactatgcctaactaatctatgaaaggttctatctatttcaagatcaaaggtttgtaaatcacctggattgcccctagtcatgcactatatgcagcaaataatgtgtttctcaacaagcacctaacaagggggtaaaactatagctatactcaaacgatatcaaaatgagctgaaatttt

SEQ ID NO: 277022 - DNA, 310 bp, Glycine max
tataagaacgaaattgcctaaatcatttccaaatatgcatgtgaattacttaatcatcaacaagaatcaagccaaggctattgtgcaagcaatcaatggggcaaaacacaccaaaagattatgatgacggatggctcgaattctcacaaaggtaaacttatcactttcaaattgagctttcaaaactatcatgacatgtaaaggaaaaacaaggatttcaaatcacacaatgtcaagagacttttattttcagaacaattaaccatttcttgaacatatcctataattcaaagaaaaacatgcaaatttg

SEQ ID NO: 277023 - DNA, 350 bp, Glycine max
agctttgcttctacaatattatattattacgatcgaaattgaacaacagaagctctcgagaaattcgaatggtcatgacttttcacacgaatgttcaattcggggacataactcatgtagacgctccaaattgaacagcggaagcattcgagaaatttgaatggtcataacttttcacacgaaagtccgattgggggacataactcatgtagacgctcgaaattgaaaaacgtaagctctcgaaaaattcgaatggtcataacttttcactcggatgtccgattcgtggacataactcatctagacgcttgaaattgaacaatagaagctctcgagaaattcgaatgctc

SEQ ID NO: 277024 - DNA, 320 bp, Glycine max
ttacagcagattttagtaatgacccactaacttagaattaaaatatcttattgccattaatctagggaattaaaaaaacttaatggctgagtgtaactgaaattgtggcaaccaaaagtcacccccaacagccaacaagtcagccaccatttggtctcccaaaaggctgatgcctaggttgccaattgggcccttattacaacttgaactaaacctactaaagcccttttagttgattaacccaaaacatatttttggtcagccaactttacaaggattgggccattatttagacaaactaaacactctaaaattgagac

SEQ ID NO: 277025 - DNA, 237 bp, Glycine max
cgcgagcaaaaccacaacacacctaacctaacagctaagcatacctgcccgagacgagaagctagaacttagctacacgcccccaataagagctaagctcacccccaagacagaaaacatgaaaatacacaaaaaggccctacgacaaagactacccacaaggccccgaaacacaaggctaaacacccatactactagaacagccaaaagacaaggcccaaacgaaggaaaaaccca

SEQ ID NO: 277026 - DNA, 188 bp, Glycine max
tggagaggagggtttgcgaggatacgggaaggcccacgctgtggtcgatgttttctttgtgtaaccgtcgatttctggaggaagatccattgttgatgctcgacgaaagtcaaaggtacgggttcggaatcggtggtggttgcgataaagggagaaagcgatggctgtataaactctcctaggcggga

SEQ ID NO: 277027 - DNA, 404 bp, Glycine max
gtgatttgttagccttgcaacggcgatccggtatagtcgagactgcacgcatgcgcactcgtgctctggctatggagtgttgtgttttttctacaaactgacgggggccgagtgagacctgctaatctgggcttgccttagataccgcaacgtttgcaaagcccattcgaatccattgaacacatgtatgatcactgcacctgatacaagagtaaacactgtctccgtattgaccgaacaactaccgtcagcctttgcggatttgcgagtggaaaaatggtgggaggggaaattttcgtggagaaacacttgttttacgtaaacctgaatggcataagggacgctgcagatgcctttgggctgtatggactcccaaaggagatgggcttgaaagtacccgccgc

SEQ ID NO: 277028 - DNA, 301 bp, Glycine max
  unsure (1)..(301): unsure at all n locations
ggatggaaacaaacctcccgtcaaaggtttttattatttcttgagagcaaannctaactcagctatggatagaatgacttggatcactgcttatactagctagtgcttgggagtaggattcgttgccttgtgtcatacttggaagatgatctgcttgccactaacgataagggcatactatctgagggcaaacaatgtcctctcaacaactacgatctgaatgatatgggaaaggcatcctatgtcatgggcgtaaagagccatacagaacgacctcccggcattttaggcttgtctcaag

SEQ ID NO: 277029 - DNA, 280 bp, Glycine max
  unsure (1)..(280): unsure at all n locations
aacttcttcacctttttgtctacttttggggacanaggaagtgaacgaggggtcagccccttaagcacttctatctctatcgaattagcgtggaaaaattgttcccgtgaagaaaattcaagccgaggcgcttgcgaaacgtgttcgtaacgtccccgataggaattacgcgaacgttgccaccgttcttcaacgttcgtcattcatacttcatcatccttcgatcttcaacaagtaagatcgtccaaccaagctctcttaatcattctatgtacccgtg

SEQ ID NO: 277030 - DNA, 306 bp, Glycine max
tctatggaggctggatctttgagcttcaatgaggtcctttttggtgtttttccaccatggagatgcagcggaagacaaaggagaagaggtgagaggaggcgccatccactagggaataagccatggaagaaggagcttcaccaccaagatgagccttggataagaagcttggaaatgatgcttcaatggaggaaaagaaagagggagagaaagagagaggggggagcacgaaaatgaatgaagaaaaagggagagaatttgaactttgagttgtgtctcacaagactctcattcatcaaagttact

SEQ ID NO: 277031 - DNA, 350 bp, Glycine max
agcttctttgagaatactttcttgttaagatagagcttagctacacacacccctctaataactatgctcacctccttgacaagcttccttgaaaagattcttaaagaagctagagcttaactacacacacctctctaatagctaagctcacctccttgagatgagaagctagaacttagctacacgccccctataatagctaagctcacccccatgacaaaatacatgaaaatacaaaaaaagtccctactacaaagactactcaaaatgcctcgaaatacaaggctaaaaccctatactactagaatagccaaaatacaaggcctaaacgaaggaaaaacctattctaa

SEQ ID NO: 277032 - DNA, 322 bp, Glycine max
tcatccttagaaggatggatagttagcaccagacatcctgtgctatttggctctctaaaaataggtgcgcaatattctcaccattggacaagcaaaggctacaataaggaaactattacacatcccttcttttgacaagaaaagtcaaaggtgtttctacaccaaaacatgtcacttatctttcctctcatattcactacaactaattattacaagccagaatcaatgaaattctataatacaattaacatcaaatatgcaatcaattttaatgcatgaagtacccaagaggtgattgtatcatcaaagtcactctcaatct

SEQ ID NO: 277033 - DNA, 215 bp, Glycine max
agcttcggaagaaagtgatgaggttctatctcctattggcagagcttgaaagagcccgagtagtcgaagagaagttaaaaaagagtatgatgaactaagggacgtcaatatggccaccgctgatgccttggaacgagaaaccaataaggcccgaaaggaagaacacgaccaaagcaaagttttgaggggctttatagggcagcaatagcgagctc

SEQ ID NO: 277034 - DNA, 311 bp, Glycine max
tccttgagaagctagagcttagctacacacacccctctaataactaagctcaccttcttaagaagagaagctagagcttagctacacacccctataatagctaagctcacccccatgacaaaatacatgaaaatacaaaaaaaaaatcctactacaaagactactcaaaatgccctgaaatacaaggctaaaaccctatactgctagaatggccaaaatacaaggcccaaaagaagaaaaaaaacctattctaatatttgcaaagaacggtggacccaaccttgacccatgggctcaaaaatatgccctaa

SEQ ID NO: 277035 - DNA, 307 bp, Glycine max
agctctctgggcattgctactagcatcagcaataggagcatttcttctttttcaagacagcaaggccaagacccaaaacaccgagatgaaagtggacttgctcattccaatcagagaagttaagcccattaaaaattggtacagatgatacatgagaattcaatgagttgggaacaggtactgcataataaaacttcacataagcattttggtacatgaaacacaagtcatacatataatctactcagataaaaatcaacgtatattgacgttctcctttgggcgacacaccaacacacaacatagc

SEQ ID NO: 277036 - DNA, 357 bp, Glycine max
agcttagtccataaggttttccatatgtggctaaggaacttagcatctctatctaacacaatggtcctaggcaaaccatgcggtctcacaacttccctgaaaaagagttttgagatgtgggaagcatcatccaccttgtggcatggtctaaagtgtgccatcttgataaacctatccaccaccacaaagatagagtctacacctctttgggatctaggaagcccaaggacaaagtccatactaatgtctacccaaggtgcagaagggatgggtaagggtgtgtatagcccatgaggcatcaccctagacttggcttgtaaacaagccacacacctagtgcaatgcttatggacatct

SEQ ID NO: 277037 - DNA, 294 bp, Glycine max
tgacaaaccaacatgtttaagtaataataacaataataataataataatatttataataataataataataataataataataaatattattattattaaataaaaaaattaaaactcttcagattcttataaaataataaatagaaaataaaagacattttcagacaatttaaatatttttgtttggctatattagtataaatcatctctaatccatacattttttaatattatgctctttttttattttcttttgatatactttgtgttttaacgacttgaatttaatatga

SEQ ID NO: 277038 - DNA, 357 bp, Glycine max
agcttataagaacaaaattgccttatatcatttccaaatatgcatgtgaattaggacgcatcaacaagaatcaagccaaggctattgtgcaagcaatcaatggggcaaaacacaccaaatgattataatgatggatggctcaaattctcacaaaggtaaaatcatcactttcaaattgagctttcaaaactatcatgacatgtagagaagaatcaaggatttcaagtcacaaaatgtcaagaacttttattttcaaaacaattacccatttcttgaacatatcctataattcaaagaaaaacatgcaaagtcgtacgtgcacacaaaattgacccaaaatattaaactgaaaatccg

SEQ ID NO: 277039 - DNA, 239 bp, Glycine max
tcaagaatcaagatcaagattcaagattcaagattcaagagaagacttattttgattaagtttgaaaaggatttttcaaaacctgagtaccccatggattttacaaaaaaccttgttaaccaaaaagttttaactttttggaaatcaatacccaaatacttgaatccaatacccagagccaaatttttttggaaaaggtttccaaatcaatttaccaccgtcccatttatttcaaaaag

SEQ ID NO: 277040 - DNA, 323 bp, Glycine max
  unsure (1)..(323): unsure at all n locations
agcttgtgacgctnnggaaanacttttatactactcactcaaaaagccgggacttttgaaaaaatcttcacaaaccagtctcttgaagaattgtgacttttggaaatttatttttcgaagtcaatcactggtaatcgattaccattaaggtgtaatcgattacacattcaacagatgcgactctttattttaaattttgaaaattaaaatgtttaaaagctctggtaatcgattacaagtattgggtaatcgattacacaagtttaaaatgatttgaaaatgtttaaacacaagttgtaactcttgaaatttgaaatcttaac

SEQ ID NO: 277041 - DNA, 300 bp, Glycine max
tgctgcctcatgaggaatgtcttgcgcttagatagcatgaagaaacccttttataatatttatgtaaatatgtagcatgaaatgccttgtaaaatgttgaataaaatgcctagcaaaatatgaatatatattgcatgaaaatgccttgcataatatgaatatatatagcgtgaagtgccttacaaagtgtttggatgggtaacgtaaaagtgcttgccaaaatatgtgtatttgagagtacgtagaaaaagaagccttccaaaaaaaaatgtgagtatatatagaagatgtaacatgaag

SEQ ID NO: 277042 - DNA, 355 bp, Glycine max
caagcttagttgatcaagatagatttctttatgagtaatcgaaccttagttccaacaacaggaacccactaaacgaaggaaatagaatccaatagctgaagctctgtcacaagaaattgtgtcgaaaatgacataccctaagcttttctcaacaacatcagaagaaaaaaaaataacattatactaaacttagtaagaacacacaaaatggatcaattacaaagtgaaaatgacattatactagatctaaacaaagtacttcccagataaagcataatttgatgccatgagtcagtcatacagttattttagcaaattatttttatgataaaactaactcactatgttggagaca

SEQ ID NO: 277043 - DNA, 310 bp, Glycine max
  unsure (1)..(310): unsure at all n locations
tgtcctattttgcccaacaaaaagtagacagtaccgtctctgtattattttatttgnacatcaaagctagtccaagtttttccctcaacaatgaaatatttgataaaggaatgaaagtgaatgtagaaggattaatgaacaagttatctggtatagggaaatccctcgtgatgaactacaaagaattttcaaagctcattagatttcacacaataaagaaaaaagcacttttgtctttgaaccaaaaaaatcgtgcaagaaagtaagtccaagttgtttggacaacaacaatgcaaatgcaatttttgca

SEQ ID NO: 277044 - DNA, 108 bp, Glycine max
tttttttaacaagaagatattattaataaaatttctcaccgtacacgtacccctaatttacccacctttaacgaatattggttttatgcataccgcgtaaagcatact

SEQ ID NO: 277045 - DNA, 353 bp, Glycine max
  unsure (1)..(353): unsure at all n locations
agcttttgatttcaatttttatcttttagatatatcacgncaagaattattaaatgactcaatcggacatccgatttaaaagtcatcgccgcttgaatttgcttagagtctactgttcctcaatttctgcgcgtgttcgatatactacaggactcaatcggactttccagcaaaaagttattgtcatttgaattggctgagagcttctatattcaatttcgagcgtctcgaattattaagggagtaaattcgacatccgagtcaaaattttttattgtttcaatttgctgagagctggtgtattcaatttcgagcgtctcgaattattacctggttcattcggatatcaaagt

SEQ ID NO: 277046 - DNA, 317 bp, Glycine max
  unsure (1)..(317): unsure at all n locations
ttaagcaaattcaaatgacaataacttttgactcggatgtccgatttagttattttataatttgagacgctcaaaattgaatgcaggagctcttaccaaattcaaatgccaataactttttactcggatgtccgattgagtcccgtaatatatctagatgctcaaaattgaaaacagtaactctaagcaaattcaaacgacaataacttctaactcggatgttcgattgagtcatttaataattcttgacgctagaaattgaatacagaagctctcaccannattaaatgacaataactctttactcagaagtctga

SEQ ID NO: 277047 - DNA, 353 bp, Glycine max
tactagtgcaaatcaaatctttttcttatctcatctctagcaagcatggtctttctttacccactccttacgtttggttttttaaggaaaaacaccataactaaacgccgccgaggggatccctatcgcaccatatccaaatctagaacgatgggtgatcaagaggagacgcaggaacagatgaaagccgacatgtcggctctgaaagaacaaatggcctccatgatggaggccatgttaggtatgaagcagctcatggagaagaacgcggccaccgtcgtcgctctcagttcagctgccgaagcagacccgactctcttggcaactacgcaccatcctccctcaaacatagt

SEQ ID NO: 277048 - DNA, 316 bp, Glycine max
tctcccccaattttctataaatagggggagaagtgtagtagaaaatggttcagtctcttaggcacttctctctctttcgaatttgcttaggaaaattgtttccgtgaagaaaatccaagccgaggcgcttccgtaacgtttccgtgagtgattttgcgaaggttttcgaccgttcttcgacgttcttcattcgttcttcatcgttcttcagtcttcaacgggtaagtacctcaaaccaagcttttcaattcattctatatacccgtggtggtccacatttggtttcatgtatttttattctcgttgcatttacttt

SEQ ID NO: 277049 - DNA, 358 bp, Glycine max
agcttgtaggccttggatcttctttatcaatggagtcctttgcttcttgaagatgaatggcagtggaatggagatggaagaaagatgattggagacgacacttcaaggagaagatgagtcaagaagaagctcaccatcataggaagccatggataagagcctgaaggcaggagaagatgagtggacagagagggagagaaggagcacgaaattttatgcctcaaatgaggtataaactttgaagtgtaattcttaaatgatcaaagttgaaaaaatgcacacacatggcctctatttatagcctaagtgtcacacaaaattggagggaaatttgaatttctattcaaatttcacttga

SEQ ID NO: 277050 - DNA, 319 bp, Glycine max
tgaaacgaggaagtgtagaagggtgaaacttcttgcttttattcgttgaccacatagtggtacctggagatatgtcgcgggggtcaggagaccttggggacgtcaggtggggtgctattgcccaaaaccaagcttgaccaatcccgacccaacccgggcatagttagtcaatgagaacctgtgatgtacctaagcaggcgagctcctggcagtcaacagataaaaggaacaaagaccacaaagcaaggaggcttgtgtggtggctggccagctgtgaatcttgtgtgatatatgggttatggcctctggtaatcgatta

SEQ ID NO: 277051 - DNA, 347 bp, Glycine max
agctcgtaaggcttttgtctctctattgtcacatgctcatgcaacaattattagccgtggctataccagacatcttgccaaacaaagtcaggttagccataactcgcctgtgctttttcttccatgctatatgtagcaaagtcattgattctgtcaagtttgatgagctagaaaatgaggccgcaattatactgtgccagttggagatgtattttccccttgctttctttgacatcatgattcacttgattgtgcatctggtcagagaaatcaaatgttatggtcctgtttatctacggtggatgtacccagttgagcgatacatgaagatcttaaaagggtataca

SEQ ID NO: 277052 - DNA, 308 bp, Glycine max
tgtattttccaattgaagaaaaaaaattcaaatatgcaatgatgatttttttcactagaacaccaatggagtaaaagaaaagctacatgaaaaaaatatagtagaaacaagcaatcatcattgcaattatggtaaagtagtgatgtttgtactcttatttcttagcatactagatcattgcattcatgagtttatagaggacatcgtgcatttcaattaatattttttagattcaaaaaataattaattaaacttgcgcagacttagtcaccacattagtatctttatgctaaagagcaaagtaaagt

SEQ ID NO: 277053 - DNA, 348 bp, Glycine max
agctttaccaaagtttctcgttcttttcttccatcaagcttagggaagtgacctccattctcaactctaatgttgattttcacttcatcttcttgctctatcctcacttgtagtttcaaaaccttattttgcacacttgacggttggaaacttgaacctaaactccctcattcttccttctaaatttggtggaacctataagggccaaatttcagttatttttgggattaaattgttagctataataactattggtttttataaaagccaaagcctaggctagttctcccatcttgctaaagattttggagaaagaggagaccatatttttcttcttcttccaagctt

SEQ ID NO: 277054 - DNA, 232 bp, Glycine max
  unsure (1)..(232): unsure at all n locations
tgtgctttcaatatcctgatgaggatgttccatatgttctcaagactggttttatacatttgctgcccaagtttcatggtcttgcaggtgaggatcctcataagcatcttaaagatttccatattgtctgttccaccatgaaaccccttgatgtccaggaatatcatatctttctaaaggctttttcttattctctgtanggagtggcgaaagattggctgtactaccttgc

SEQ ID NO: 277055 - DNA, 248 bp, Glycine max
gaatggcaaaccaatggagatggaagaaagacgatcgcagaccacacttcaaggaaaacacgacccaagaagaaccccaccatcataggaagccacggataagagcctgaaggcaggagaagaagagtggacagagagggagagaaggaccacgaaatcatacgcctcaaatgaggcataaactccgaagcgcaatcctcaaatgaccaaagtcgaaaaaacgcccacacatggcctccatccatagc

SEQ ID NO: 277056 - DNA, 312 bp, Glycine max
ttcatgaaaaccgagccttttctattggatgaagcctatgagccagcctttttggccttcaagaagactattgccatattgccagtcctatgcctacccaagctaggagtacctctacttttatacctcacagcgatgatgagcctgcctattcaccccccgtacaggaggaagggaaacacctgcttcccaattattatactcatcgtattcttcatgacgttgaaaagccgtaccagatgatacagaaggtcttggtgacaccttataaccttcactcgacaccctcaggcccaaacttccaagataccc

SEQ ID NO: 277057 - DNA, 358 bp, Glycine max
agcttgctgagaaagagaagtcattttacaagctactcatgaaaactgagccttttctattggatgaagcctatgagcaagccttcttggccttcaagaagactattgccatattgccagtcctaagtcgacccaagctaggagtacctctacttctatacctcacagtagatgatgagcctgttagttcagccctcgtacaggaggaagggaaacacctgcttcccatctattttactcatcgtatccttcatgatgttgaaaagctgtaccagatgataaagaaggtaatggtgacacttataacctcaactcgacacctcaagccatacttccaaagttaccaagtggtagtcaa

SEQ ID NO: 277058 - DNA, 317 bp, Glycine max
tgttacaaaacttaggaaaaatcaagaacaagcttgttcgcacatcgttttcgtgtatgatatccactcgacaaggtttgaagtagaggagaccttcaatcctataacgcaacgtggcagacaaaaatgggcagttaacttgaatggccattattgtcaatgcagaaggtattctgcgcttcactatccatgttcacacattattgcagcttgtggttacgtgagcataaactactaccaatatgtagatgttgtttacaccaatgagcacatcttataagcatactccgcacagtggtggcctcttgtgaatgaag

SEQ ID NO: 277059 - DNA, 357 bp, Glycine max
  unsure (1)..(357): unsure at all n locations
agcttgtacaatatactacctcatttttattttttatatntctaatattattaaatatgcatgtccttatcaacggggttgatcttgtgaagagaattagtctctcagtgacatgatgaatgaaagttcaaatctttaatgagaaatgcatttacaattagtatctgaccgtatatcgaacaagattttcttcgaacaaggatatttgtctgaatccaaatatatatatgcatgtctttgatgattatgatggttggtgatttcagggcatggagtggatgagaaatcattggtaacattactgggaaaatgggatcctctggagagagaatctttcaggaagaagacaccacattt

SEQ ID NO: 277060 - DNA, 321 bp, Glycine max
tgatcaaaacaaatatctaatcattcaaatccactcaattcatacatttgctcaatcaattcattcacaaacacttatttcatacaaaacaaccactgaatcaaattcaaccaattcactgttcaaacaagctttttgtacaagcactcaacaacactaaaataactggaatttcaaaagactggaattttaatgaataaaacataaataaattaaataactgataaactaaattgttcataatttgtagaaattaaatcaaaatagaatttaaacatcctgctcatcccgtggttgatcttcattcatatccaatactgg

SEQ ID NO: 277061 - DNA, 355 bp, Glycine max
agctttctagcttttcattggtgtattttgatctccttttggcgctctaaattatgggagtatgctcaaatatatagggcaattttggtttgttttcttgcttgattaggttgaattaggggtgtgtatgggatggccctaggcctataatgcatttttgaacaatgggacatgccacattgtccccgttctcttgctattgacgcctaaacgcgcgcccaccaagtgttcggtgaaatgcctcaatggcattagcgcgtgacttttgtaaggaaacaacccatggggcattttggtttgtacacattttctttttttggaatatgtattcattcctgaaaaaggctagagtaat

SEQ ID NO: 277062 - DNA, 322 bp, Glycine max
tgtagtgaggcttggctacaaaaattcattggtttttctaggattcaaaagcttatattctaagagagcaccaatcctaaacttatcccaatggtctttttaataaaattggcttgctcactggcttttcactttcatgcttttgacctttttacattagcacacttttctcttttacttttcttttttttaagcacacaacttatgtgttgtgtgtgatgatgctttatctctttctttgcatcccaattagttccactcccccaaatttggggtaaaaatgccttgaactacatgctctcctggaatctaaacaaggtat

SEQ ID NO: 277063 - DNA, 296 bp, Glycine max
agctttgcctttagggcttgcactttattttttctttcgaagctttaacctcattgtctctcacagtctttagatttgggagccaatccaatccttgtgtccggactctcagccacttatgatagccgccgatgatcccattactgcttcccctaagctctctgtcctttcttcacgccgcatcccatgccttgcgaactccttggagtacctttgcattggggtcactgaaaccccgtgtaatgaaaggcgtgatgcttctgtcttatggcgctcatgtcatggggtagccaatc

SEQ ID NO: 277064 - DNA, 321 bp, Glycine max
  unsure (1)..(321): unsure at all n locations
ttgagggtgcgcagcccaccatcttttcatagtaaagtaccgataatgtgtctaccttctcgattatcgnctccctttccattattgggggtgctacttgagttgccaagtctctccatctttgggcgtattcttcgaaagattcgtgcccccctttttgcacactttttgtagttgcatcctatccggagccatatcaaaattgtactgacactgcctaatgaaggcaaccattatgtccttccaagaatggactcaagaaggaccctaagtcaatataccaggggacagttgtcctaataagactttctcaggaaaaat

SEQ ID NO: 277065 - DNA, 362 bp, Glycine max
agcttctcaaggaagctacctagtttataaatagaagcatgtgtaacacttgtggtaactatgatgaatgagagtcttgtgagacaaacttcaaagtttaacttctcttcctcttttcttccttcaattttgtgctccccccctctctctttctctctctctctttcttttcctccattgaagcaccctctccaagcttcttatccaaggcactctcttggtggcgaagctccttcttccatggcttattccctagtggatggcgcctcctctcacctcttctcctttatctactgctgcatctccatggtggaaaatcaccattgaaggacctcattgaatctcaaagatccaacctccat

SEQ ID NO: 277066 - DNA, 324 bp, Glycine max
tgcttaagattgtatattgatttctttaatttgcacaccatgtgtttctgtccttttactgagaaccccattgactaatccatataaacattctcatctaaatatccattaagaaagagagttttcacatccatctgatgtagctccaagtcataataggctactaatgtcatgataatcctgaaagaatcctttcgtgaaaccagggaaaatgtctctttataatcaatgttatctttctaagtaaacctcttaacaacaagtctagccttgtaacgttcgaagttggcatgagagtcacatttagtcttgaagacccactta

SEQ ID NO: 277067 - DNA, 351 bp, Glycine max
agcttcttttggaccttgttcatgcttctaactcctctttcaaaaccatgccatgtgctcgcgactggtccctttcttcccttcgcaacttgagttcactattgctaccccatagagctccgtgaaatttgttccggccatactcttccttgcgagccctcttggtctcttgttcaagggctcttgcgataattgcattctcttcccgtaacccggcacactccttccgaacgtgtgtagcggccaacttgaacttctccttggcaagttttgcctttcctaactcgcttttgagagcttggacttctttgtcttcttccggtgcttcaaaattctcttcgctgacgactt

SEQ ID NO: 277068 - DNA, 313 bp, Glycine max
tttaaaaaataatacttataaaaaaataaaaaataaaacagtatcaatttatttacctattttttttataactttttaagttctttatatatatattttttaaaaatgtcttacgggaataacccctatattttatgggggcacaaaaatatttattcaatatcttcaagtgaaaaatataatcgtgggatcagatgctcccattgctcacaacctacatctgccattggttagggcaagttggcggggagcaaagtagagttgttgagcctccaggaactccgtcttccctccgacatcctctcaatttgaa

SEQ ID NO: 277069 - DNA, 329 bp, Glycine max
cttattttattccccgcgataggccgttgcatttacatatcgaacgcgcttctgttgggaaaagatatacacgtttcgtttactatacgaacgaaaaggaccttgtcgtgagagaaactgcccatccaaaagtacctgaccggccctcgaaccagatttacttctaccacgatatttgctcggaatcacatatatgatggcacggctttgacgattatgatggttggtgatttctacggcatggaatggacgagaaaacattggttaacccaccgggaaaactggatccctcggagagagatgtcttctggaaaacacaccacctttcg

SEQ ID NO: 277070 - DNA, 67 bp, Glycine max
gacaacatcacacagacaaacgagaacaaacgaaccaagaaacacaaagcccaaaaacgaaaacaaa

SEQ ID NO: 277071 - DNA, 350 bp, Glycine max
actgtagaattcacccttttttttgtcctatgctgacttgctcccatatctacttgataattcaatggtagccataaccctagccaaggttcatcaacctccatttctccgagaatacgactcgaacgcaacgtgtgcttgtcacggagaagccccggggcgttccattgagcatggtagggctctgaagcgtaaggtgcaaggtctaattgatgcgggctggctgaaatttgaggagaattgcgtgtaaatcctgacattgacaagagatgccacacatggggcaattttgaaagctgttgttaggtgtccctaatgactcatcagggtttccaagtttatgccattat

SEQ ID NO: 277072 - DNA, 320 bp, Glycine max
ttggctgcgcacgagctccgatttcgtgagtatttatagaagatgacgcattgtaatcgattacaggtattggtaatcgattacaggcccaataagccttctggtaatcgattacaggatgttgtaatcgattacaggctgcctgttcatgtgtaatcgattacagtggatggtaatcgattaccagagcctatcctaggctagtttctaagagaatatctatatttatgctcaaatacatcctatatgactaattttcactactaatacactaaattcaatcattcaattactatatacacaagaaatcataaattcta

SEQ ID NO: 277073 - DNA, 353 bp, Glycine max
agcttgcttctacaatcttttttttttttgatgactaccctgaaatcaagaaactcatacacaatatattgtaattgattacaccatttaaaaatcaattggaacattacaaattcatttaaaagcttttgaaatcaaacttttccactggtaatcgattaccatagagtaaaaactctggtaacgtagaaaattttgagaaaaaattttcttgtaaaacaaaactgtgctatgtttggtttttgaaaaaaaatcttttcaatacttccctttgtgaaatcatcttctcttgaatcttgattcttcttgatgtcatttcttgaatcttgaaattaatcttgatttaatattgg

SEQ ID NO: 277074 - DNA, 320 bp, Glycine max
tgtcactccacccatatctggccttcacattaaccacacttaacactcttttttttcaatgttagtgtttagctctactgagctttaaaagattggctaagattttgttaaaacataagcacttagacaatgaaggaaagctggagttgctgcacatgatgtccaacgttatgtcaaggaataagatcgggctgcacaatgtacaaggcaagataaaatggcaaatgaagaattgaagttgcaggatccacgatgtcggatacaatgtcctgacatcctgcccgagaatactggagttgctgtacaatgcaagataaaag

SEQ ID NO: 277075 - DNA, 359 bp, Glycine max
agcttatgaaaccaacatattgttctttcacaatcaacaacaataaactctaacttgaacaaatacaatcataagtacatagattgcccttaaaaggaagtatccccttccctccccattgacctctaaatgaaggttttgaaaactcactttctgaggcattcatcgtaaaatccgtatacttgagtgatctgtgcaaatatatatatatatatatatatatatatatatataaagaataaagaaaggaacaattagttcaacaactaacacatgagtcttaaaatcaaagcctgaacactgaacagtaacaaacagcacattatacaactagaaagcctccaagacaagttaatttt

SEQ ID NO: 277076 - DNA, 317 bp, Glycine max
  unsure (1)..(317): unsure at all n locations
tgcatttggaattgcgaaagccccactccatcattaggattagtatctgttatctcaaacaaacaaatcaaacgtaacacgacaattatagttgttgtttgaatacctcacccactcaagtgtatcacacaattatggctnttctctaatgaaacactcttgccttttaccactctaattccccttgagttcttaagcaattcaagagattatggccacaacaaagaaacaattcaccaatatgtgtaaagtaaggctagagagacaagaaaaagtaacccaaaaaaaagcttacatggtttttagcacaaatgaag

SEQ ID NO: 277077 - DNA, 486 bp, Glycine max
  unsure (1)..(486): unsure at all n locations
ccccctcccgcgcgcaaaatgcttatattgttagatatgctttcgtcatcccatttctgcnntcgggccccccacgcgggatgattcgattgcatcctcgcacaccnnccgagacacccggaggcgaccagncgcccgcccacctcgaccagtctagatttgttgttttccccagaaggaacaaccgcggagaggaatcctccacagggcccaagcgggccggggcgccatttgcaccccccgaagaaccaaaaggacccgcgcctatctgaacgcaagccagccccgatacgaagcaaaagcacaaaaacggagtaggagtaccaaaccctccgaccagcaggtctcaaaacccgacaggacgggaaaaaacacacaaaaaagggtccctagagcgaccggaagcccccggaaggcgcaggaaacaaggcccgtgaagacgaccctacaaagatacgtccccaacctcaccgcgggagcagatcc

SEQ ID NO: 277078 - DNA, 211 bp, Glycine max
  unsure (1)..(211): unsure at all n locations
cattatgatctgcatagcatgataaccactcaccaaacagtttatcttatttggngancacccatgcatcacgtatggcatcattattacattccatatacgctttattgtaagagtatgccataatttatacacgagtgaccacggagaataagctggagaaaagagtaccacaacacgacatgaatcgaaagagatgcttttcattatt

SEQ ID NO: 277079 - DNA, 350 bp, Glycine max
agcttgagaccaactttctttagtttgtatatgtggaagaagtgctcaatgtgtatggtgggctctccatcagtatgaaagatggttatctatatagaagggaagctcatctcttggggtgcactttcagaaggcatgttgagtttttgaattagggtttgcatgatgagttttctggttgttttttgagagatatgtgcaagagatttaaatatggaaagaagactgttactgatatgtgcataatatagggagaagaaagatgaatatggacgattttcttatgcttttgaagagaatttaacaagtctattactcaagcaccaacttagcagagcacacaatacatt

SEQ ID NO: 277080 - DNA, 317 bp, Glycine max
tgatcaaaacaatcatctaatcattccaatccactcaaatcatacaattgttcattcaaatcatactcaaacacttatttcataccaaacaatctactgcatatcattttcaatcaattcactgttcaaacacgcttttggtacaagcaaacaactcaaagtgctgaaatttaaataactgaaatgtaaaaactaaaattaaaatgactaaacataaatcataaaataactgaaaataaactaaaatgttcaagatgcacaaatttaaatgtcttgctcctgtggttgctcctctgcatgctcattaaggtccaaca

SEQ ID NO: 277081 - DNA, 347 bp, Glycine max
agcttgccgcccagctcgcccaggttagcaatgttgcttcctccagaagcaacaaccttctagaggaatcttctagagggcccaagtgggcctggttgctatttgcacccccctttttactaaatgcacccccttctatttttttgtaattctttttccgtaacgttacgaaactttacgaatttcgtaacgatacttattttccttccgcaaggttacgaatccttacagattatgtatttactcttttttagctttcgaagaagtttacggaaactcacggattgcgcaaaaacacctcttttcgatttgcgtcacattacggagtttcacggatcgcccaagcc

SEQ ID NO: 277082 - DNA, 319 bp, Glycine max
tgcctaattaacttgaaattgaaagaaaatgattattaaacacaaaatgaaaatactaagtatttattacctatacttaacataaaatacttatatcactacaaaataaccataaattgggagagtttgatataatttatacaagttttatacacaaaagttagtcgtgttcaccgactaacacaacacacattttctttgattgcttttttttttttacacaacttatttgttatgtgtgtgctgatgctttacctttttctttacaccccattcaactccactcccccaaatttggggtaagtttgccttgaaccat

SEQ ID NO: 277083 - DNA, 360 bp, Glycine max
agctttcaacaaatgtcttcacaaataatcatcacacagcagaaacctagcaagactacccatcatatctccccaaaccccatacccacgaaaattaaaggagaaagaagtccacccaaacctgaattttcgaagtcccactcgtagccacgcacttcacggccccgaaaatgccctcctttcgcgatttggggcagaaatgatggccaaaggttgaagctttgcttggagcttcaatggagaatgaagaaggagaaaatggcaacgtgagggagagagagagctgtctgaaaagtgtgggggctgagtgaagagagagaaaagctttttttggttttaaataaaagggttttctctttt

SEQ ID NO: 277084 - DNA, 323 bp, Glycine max
tccttgagaagctagagcttagctacacacccctataatagctaagctcacccccgtgacaaaaaaacatgaaaatacaaaaaaaatcctactacaaagactactcaaaatgccctaaaatacaaggctaaaaccctatactactagaatggccaaaatacaaggcccaaaagaagaaaacaacctattctactatttacaaagaagagtggacccaaccttggcccatgggctcaaaaatctaccctaaggttcatgagaaccctaaggccttctttatcaactctagcccaatcctcttggagcctcttgctcatggctct

SEQ ID NO: 277085 - DNA, 356 bp, Glycine max
agcttctccaaatggcatagttatttctagtttcttgaaaatatctaggaatctcgccaagtggcgttccttatctttcttggaaggtaccaaagggtatggcacttcctttccttcatctgaagctgtttctttactctttgctcttgctttttcactcttactcttttcctcttctttatttttttaaaatttttctttttcttatttttctttttattttcctccctctatttctttttcattgtcttttatttcttcccttccgacaattattggtttttctctccactgactcctctcatctcttacctcattcttctttttgtcagtagtgtccttcaaagcaacttgct

SEQ ID NO: 277086 - DNA, 324 bp, Glycine max
tgaagcacttcggttttactattcaaagcttgatgcttctacttgtgatgaaaagattatttacataaaagagaagatgtacaagctctttgatgaatatgtgattgtaaagtcaagttcatctactgcatcaagttctcaacaacctactgttgaagaagatttcagtatagaagaaaatcaagagatggatgatccatataatgttagtcttttgtttaactatttaattgttttatgattcaatttattttatttaatttttctcttatattgtcataggaatatatcaattatgtgagccaaaatgttaatgtcaatggc

SEQ ID NO: 277087 - DNA, 355 bp, Glycine max
agcttgtagttgctggaaatccttctggattattagtggacagcactgatgggtggaacacagcttctgttgtgggaacattctcagggcctaagcatcgcttggccacagcagcaactgtgaaggacgggaaggtgtatctgaaccatatggttggaattggatacccaaaaaagaagcatgcaattgttgaggcagttttttaacgcatactttctagaaatctaaacattggggaactgggaatgtggggatcatacatttacaggacgtttagttgaaatttggtgtacctttgcttatttatgtttggttttgttgcattacttggcctcagacctcaatgcttttccct

SEQ ID NO: 277088 - DNA, 324 bp, Glycine max
tattaattagtgcggtcacattcaaaaccgtcgccgtggttctttttttttaggttggcacaaactctttgactaggtcaccaatgttgaagttacggaccttacggtgcaacttggtatcacacactcatgatctcggcggcaactatcacgttttcacgtcaaagttcttacacagctatagttgcaacgacacaaagaacatgtgcatttccatagcttagaagtcgatgttgcaagagataatataaacaacaaaactaagattaagatgaacgacgtaaaaataaagaacgttaactgtgagatccataacttacctgg

SEQ ID NO: 277089 - DNA, 360 bp, Glycine max
agcttttggtcaatctaaggagtgttgtcttcatgctgcaaatcgacggtttctgagtggaaaatcctaatttggttaagcctgaaattctgcaacatttgcaaagcagattcaaattaatcgaagttatgtatgagcactgtagcttttacaagaataagcactgcagcttatttaaggcacaaattctgcagcatttgcagtatgtgggtggaaaaagggtgggagtggaaatttaaatggagaagacacttgtttgacagagaacttgagatggcagattgtttccgtaatgatgttgctggcagctgtattcagattcacaaaaaagatgactggatctggaaaatagaccctact

SEQ ID NO: 277090 - DNA, 317 bp, Glycine max
tcgtcctcagaaggaaacaacaccagaaaacttagccttccatagattcaataaatgcagaaaacgtaaatgaaaataaaagcaaaaacgtaaatgaagcagaaacgtaaatgaaagcagaagaagaaacaaaaccgaaattgtaattagaagcagaaaatagaaaattgcattatgtgaacagtagcatttgaacagaaaaacgtaaaacataaaccctatgctctgaataatagtctcacaaaatagccttgcacgaatcccaaggctgctatttaagagtcactcaaagtcactgagccctattacattattat

SEQ ID NO: 277091 - DNA, 351 bp, Glycine max
agcttatttacccattatattatatgtatttacgtgaatatgataaaacatgatttgtcagtttctccatttcagaatatctacccttgactctattgatggaggacctctggtgaacgaagagatctcaatgatgatcatcaaatcaggacctccaaaaaattatcacattaagaactaagacctaaaattgactaagtatagacactttctttgcaaaaaattacagggactaggaccaaaacataaaaactaggggtacaacacttatacacatatagaaacaggttacactagtgtggtggtggactgaaaaaatcaacgggtagcattaccaattggatgaaaaag

SEQ ID NO: 277092 - DNA, 314 bp, Glycine max
ttaactctagttcatgcccccaacaacagacatagttaaataaattgatatttcacttcacctcacctcaccaaacatctggctaacttcaagtgaggtgataaaatcaccttctgctccaaaaacatcttgattgatgtaataaccagctttaggatttgtcaaaacctcggacatgtactcacctagcgaaataaggccttcacgaaactgataataatgagaaacaataaataaaaacggtgagacccaagtggtaaaaacccaatttttatgatgctaaaattgaatagaatagaatataaccttgatta

SEQ ID NO: 277093 - DNA, 352 bp, Glycine max
  unsure (1)..(352): unsure at all n locations
agcttgacacaacactctgttcattttagtgtgccnactttcttagaatgtatataggtgtatggccattacaatatattagatgttcttgtatgttgacatgggtaatacgatactttatacacatgcgcgtgtgcataaatggattacatgagtttggcctaaatcacaggggctagcacgacatttttgcgttaatataagcattatcttgtaaaactaactcctaaatgtttggtctcgcaggaaatggccccgaggaaacttgcctcaaaaagatccaggaaggattaagcggccgaaggaactagttctgctcccgagtatgatagtcaccgctgtaggagcgctg

SEQ ID NO: 277094 - DNA, 295 bp, Glycine max
aagcaactcaactcctcgaaaggagagcagaggacaacacatataaagcgaacctttttccgtttttgagaacaagaagggacaaaaaacggcatgccacaaggagcagggaaaaggccctaaaatacaaggctaaaaccctgcacaactagaatggacgaaatacaagggcgaaacaaagaaaacaacctagggtagagaatatcaaaaagagaggacccaaccttggcccatgggcgcaaaaagagacccgaaggcacaagagaacccgaaggccaactggaacaacacctag

SEQ ID NO: 277095 - DNA, 356 bp, Glycine max
agcttgcctgtccgatgcttcagttatgatggcccgagtgatgttggggagtggttacgagcccggaatgggtttaggcaaggacaatggcggcataactagcctgataaacgccaaaggaaatcgtgggaagtatgggttaggctataaacccactcaggcagatgtaaagagaagcattgcggaaaggaaaatcggaagtcaaggttcgcggttgagacaagaaggcaaaggaagcccaccctgccacataagtaggagctttataagcgcgtgtctaggggacgaaggtcaagtcattacaatatacaaagatgatgttccgagtgcattgaatttggtacgaccgtgccctt

SEQ ID NO: 277096 - DNA, 321 bp, Glycine max
tgtaggattatggggtacccatcacatgtggtactaggtggcggtcgggcgatggcgcacaacaagttttccacatccacaaatcgcgcataaacccaccatcccctgttgcccacctccaactgagctcacgtactcccacgtagcccatatcctcgtttctctcaacaccgggtctccatcaatcctcccaagcttccccaacatccaagtaattcaacatccaaatcatcacaaactaacaaaccaagcaaaacagggcaaaggcagaaaactctgcccaaaacacaactcaaaatcacagcttttcacatacaaata

SEQ ID NO: 277097 - DNA, 343 bp, Glycine max
agcttttgaatgacagttttgaatttattttggtaacgacgatggaggggaaagctaactctaggtgtgtaacgcccttcattacaataacaccccgtgaaaaatatacaataaatataaaattgcatactgcataatagtctaaaaataccttatatataataaataaagccacatgaatgagttcttatataaataaaacaatatcctcaaatgtgggtatctaaactaaacaaatgctagaaatgtaaagaaagtaaccacatccaacatcttattctgaaggattaaccgaataaagtaaatgtaactaaagaaagctaagtcttcaagtatcctcagc

SEQ ID NO: 277098 - DNA, 319 bp, Glycine max
tcacgaacaaaatggcctcagcaaattccttatttccataagggatattctatcaatagacctccaatctttaatggggagggttaccactactggaaaacctgaatgcaaatttttattgaggcaatagatctgaatatttgggaagccatagaaatagggccttatatacccaccacagtagaaagagtttcaatagatggtagttcatcaagtgaaagcataactatagaaaaacctagagatagatggtctgaagaggatagaaaacgagtacaatacaacttaaaagccaaaaaaaaaaaacataataacatct

SEQ ID NO: 277099 - DNA, 340 bp, Glycine max
agcttgcacaacatttaacttattctattacttacaaaatgaagtaactaactaactaaataacttccactaatatatagagtgtctactcacaaggaagtgatggaccttgattaggcctatctaatctacctaattaaactaattacacaaaacaaaaccaaactcacaacacaattattcaagtgtagaggttatgacttccaagctcaatttgacccttgaaatgacataattgaccaaagcttatttgtaacaaaattgaatatctttttctcatctttccagggacacacattccatttagagtcttgtattgacctctaggccctgcacaaag

SEQ ID NO: 277100 - DNA, 314 bp, Glycine max
ttgcagatttggtcttcgccaatgaaaggattaatgtgggtccgaattttgcaaatttgatcatcctactaggacgattgagaaaactggggcaaatgaagagggtgagaaagagggagaaacccatgctgtgactgccattcctgtacggccaagtttcccaccaacccaataatgtcattactcagccaataacaaacctcctccttacccactgcccagttatccacaaaggccatccctaaatcaaccacaaagcctgtctactgcacttccaatgacgaagaccacctttagcacaaactagaaacacc

SEQ ID NO: 277101 - DNA, 348 bp, Glycine max
agctttccctctttgaacaaatactcctcagccaaatagaatccatcttgggcctttttcccacaactctcataaatgggagagagaaatgttcatctaaagcatacaagtccctaatattatcaaatcctaaaatttgagctcctagggagaaaaacaatgtgtgtctcctagagagggcatcagctaccacatttgtttttccctttttgtatttgataacatatggaaattgctctaggtactctacccattttgcatgcctcttgtttaacttgctttgccctctaatgtacttaagtgattgatgatcactatgaatgacaaattccttggaaacaaggtaat

SEQ ID NO: 277102 - DNA, 315 bp, Glycine max
tgtgaaatcaatggaatccaagatttcgtttgacacaagtcgatcaattctgttcttagaaatatgacctaagagtttatgccataatgatcctgagtttgtattatcaattctacacttagtaccatgcaattctgcattaaaggattcaccataggaagctacaatatcaagtaaatatagattatcattaaccaagagtgaaccagtttcaacaatatctgaattaaaagacaacctgaacacattgtttccaaatgaacaaaaataacccaatttgtccaaataagaaaatgaaaccaaattccgtctaaa

SEQ ID NO: 277103 - DNA, 351 bp, Glycine max
agcttatgttgctaacttgaattcttgggtcaggatgaaaaaaggctttcttaatcgcatttgagaacaaatttcaagatttttatgaatttattgagcattttgcactcagcatattgatgtttattgaacactgaaatcacacttgttgttccagacacaaaagtcccctttagagagtatcctcttttggggataaatgtatgttcatgatctaatctattatgttatcaattttggtaaaaaattattctttattttatttattattttgttaaattgttaatttgattagtccttgattaaaattagaaacttgttatcatggtatagattatgataatgagaaat

SEQ ID NO: 277104 - DNA, 317 bp, Glycine max
tgttgttcgcagtgaacttcattctccatcatgactgatattaaatggtctgggtacactgcaccaaaaatccttcattggaaaaggaaactccatggccattccttatttttacattggcattggcaactggtacatgattaaaataaaaataaaaaagtcaaaaggcaaaatcccatgtgctactttaatccaagggttgagaattaagcaactacaccttgcagttctcgccacaaagtcatggaatccaatcccatcttgaatgtatacaacttaagtaactcattttgtgtttcttcaattaattaattgac

SEQ ID NO: 277105 - DNA, 314 bp, Glycine max
agcttcatgggaaaccagtggttgtttggcaaggttggatggtgaagttgatgtgcgggagtcataatcatgaattgcgaagtcattagttggacatccatatgctgagtgattgactaaggatgaaaagataattattgctgatctgacaaagtcaatggtcaaaccaagaaacattctgctaacgttgaaggagcacaatgtcgatagttgcacaacgatcaaacaaatatacaatgcaagatgtgcgtatcattcttccattagaggacgcgagactgaaatgcatcatcttatgaagctccttaaacggg

SEQ ID NO: 277106 - DNA, 323 bp, Glycine max
tctttgagaaaacttccttgagaagctagagcttagctacacacacccctctcataactaagctcacctccttgagaagcttccttaagaagattcctaacgaagctagagcttagctacacatacctctctaatagctaagctcacctccttgagatgagaagctagagcttagctacacaccccctataatagctaagcttacccccatgacaaaaaacatgaaaatacaaaaaaaagtccttactagaaagactactcaaaataccccgaaatacaaggctaaaaccctatactactagaatggcaaaatacaaggccta

SEQ ID NO: 277107 - DNA, 351 bp, Glycine max
agctttcccttgcatgtaagtacttttttttagtctccttacacgtaagtattgaaatagaggatagaagaatctaaaatttactttaatttatttacatacaattaaaatttataataaaaaaatatttgttaatatatacatatactataattaaatatatttacatatataaattgtattttagatttataatgaataattcaaattataatataagtttgtttttaactgttgataatttctttcaaaaaaagttatgcaattcaatttagaaactgaataaaataaggtaaattgaaagaaatatacaattaagaaaatcaaatgtacatataaaagttaaggaag

SEQ ID NO: 277108 - DNA, 322 bp, Glycine max
ttaaaatttgaattaaaacgttcagaaactgctggtaatcgattactatatatgtgttatcgattacacagtgcaaactttgaattcaaattttaatagctgttgtaaatcagttttggccactggtaatcgattaccagagagtaaatttgttgaaaaatactttttaacttaaaattcttggccaaaccttttgctacttcaattggaattcccttcctatttaatataccctttctaagactctagagactgtcttgatcattcatcttgaatatctttaatttctttgtattgaataaagctttgagactttgagacg

SEQ ID NO: 277109 - DNA, 355 bp, Glycine max
agcttcttgaaaagttatactgactttagaacttgttgatggatcggatgctacattcattaaccaatacgaattgaatccatttaagtagtgtggtaagctttgcaattatgataaataatggctcattttgttgtcttttaaattattcgactcttcactgtgttttttgttgtttccaatataaatttaattttaagtagatatagtttctcatttgtatgcaaatgttgcttcagtttgaattccagtaatcttataagttttttttaatcagttcattcttcctctttaaaaatggtgctaaaatagatacctatccctacctaagaatcaggattatctttttattgta

SEQ ID NO: 277110 - DNA, 322 bp, Glycine max
ttttgaaaaccattttgctactggtaatcgattacaataatctggtaatttattaccagagagtaaaaactctttggtaaaaggttttgagaaaaattcatgtgctactcagttttcgaaaaaactttttaatacttatcttgattgagtcttctcttgattcttgaatcttgagtcttgaatcttgatcttgattcttggaacttcattcttgaatctttggaatttgcttgactcttgattctttgacatcatcaaaactccatgaatcaatcttgattcatcatcatgaagcttgcttctacagtatgccgccaacggc

SEQ ID NO: 277111 - DNA, 253 bp, Glycine max
agcttgaactcatgagtggtcacttttcgtttcttccgactggtcttgttgacgatagaaaggtacctgcttatggtacaggggagagcacacacctttgcacaatcatgagctgcgaggtcgacggacaccgacttagaccattcctgaccaacccttgtttattgcacgcagtgacagcatatactttcttactacacgctactttctgtccaccaagactataaggagatcttatactcctatcccctga

SEQ ID NO: 277112 - DNA, 321 bp, Glycine max
tgggcgtatgccagtggctgtaggacacggacgaacgtcgaaatagaatttttttgttcttcaccacgaacagaccaactcactagatggacatacatatgcggggcgaatgactaactctgtataaacagtaactgctgatatcaccaagtgcatggtgaaacccaaatacatcccgttcactctgacggaacacagtgccaattgctggtcagcccttacacagagatacaatgcacgaagtgcctcctgatctttcataatacgatgcgatcctgatatgcatgatccgaataagctatcagaacgcgatcagtgtat

SEQ ID NO: 277113 - DNA, 340 bp, Glycine max
  unsure (1)..(340): unsure at all n locations
agcttangggacgttttgattattcttatatngcagaaaaagactatgaaacttttgcacacaaatggttcgaaaaaagacattcctggttgcttgaaatgtaataacggtgttgcatacgccgaaaggcattacctaatacttataatgaccatcatgaatgtgaaaactcatctttgtaatgtcatgggtcagattcgatattgatggaagctcacggttagatcaagcttgtaaaaaatggtggccactcccacaataagcaaaggaatcttgtccttaactgtgagtgcattaatcacttgatagtccaagcacaagcactataaactgtgcttat

SEQ ID NO: 277114 - DNA, 315 bp, Glycine max
tgggtacactaggcacacacaccctatcctgaaacctcaatactccattttttcccaatctaaaactactctttctccctgcgactatggactctaactgagctgacaagaatgggtcagacttctgaccctcacggatctcgcttaagagttcgctggtgactctcaacatacccaacttaatgctactagaggtgatctcacatgccaaactcatgtctctaaactgctctaagagatccaactctctaaccatcaaagcagacatttgaagggactttctacttaaggcatcagctactacattggctttac

SEQ ID NO: 277115 - DNA, 352 bp, Glycine max
tatcttataaattataattttttgtctctccacgaattcgatttgtctcatgtcactgttactctctctctcacactcactcactttcttatttatttttttatttggctattaactcttacaaacaaattactagtcaagatccacgtttttaaaccttgtcaacatttgatttgtttttagtgtaaaaatgccaaattgttttgtagcatgttcatgctaatcaattaaaaagtacctttgtgatgcccgtatgaaaaatattggcgtaaatggaacttagtttcttcttttagtaaaattaattactgtgtgtattacgaaactgggaaaaaataaattcatttataat

SEQ ID NO: 277116 - DNA, 317 bp, Glycine max
taggcattggatgaataattatatcataagcaaaaatattagcatttaattttagaacattctatcacattacttttctcttataagaaatgcatggtgaagcatgtttacatgacaagccagttatctgccaatatttatagccacaataactatctttcaactttaccacaaaattagtaaacccatcctttacttgatactcatcattcccaatatgtgtgactaacattattgcaatctccacacttttatccaaaatacttttgaccttaggggtagcagtaaattgataagttacaaccttgtctctccta

SEQ ID NO: 277117 - DNA, 353 bp, Glycine max
agcttgaagctcaaggaatatcttgttgaagttcttttgaagaagttttgggttttacatgcccaactcccttgagtgacatttgtattggttgttatcttcattgttgcatcttagtacgtttgatatctattttgcattgcgcatcatcatagtgtgtgtgaagaaaagtttctaagttagagaaatttcttcagaggcaaaaactctttgttttaatagattaaagagttgtcgtaattgattacaataagttgtctgaagtttaaagagttaagtctcgtatcgatttaatcgattactgatatctcgtaattgattacattgttgtttgagacaatgattgatttatt

SEQ ID NO: 277118 - DNA, 315 bp, Glycine max
taacaacccaagcttttagtttcgatgcaaggaaacatagtttatatctataaatctgaattttggttttaaaagtagaaaggcatgaaagttaggatatgcttgtgagagtttttacccgaatttgggctgccccatgaggggtactttgcacctaggtagcatggaaaatacctttcgatggtatgtaaatatgtgtgtaaatataggtagcatggaaaacacctttcaatggtgtgtatatatgtgaatatatggcataaaatttcctggcaaagtgggaatgagtagcagaaaaatgtctttcaacatatg

SEQ ID NO: 277119 - DNA, 355 bp, Glycine max
agcttaaaggagcactcatatcggttgacccccaaggcctacactccgaagagtccgtcagggtctctccctcctgattcaggtccatcccttaaaataattttttgcatgcagacattgctcatgaattatacaatacacacaacctcacactcatgttttaaacacgtttaacacaattgcactacaatttaacactagttcctaaataggaaacctacactttctctttaacattggttcctaaataggaaatctacaatttttctttaacactgtgcatcaacacttttctcaaaataacactggtcgggttattgtacaattcacaacttacaacacaagtaatgtcaca

SEQ ID NO: 277120 - DNA, 320 bp, Glycine max
tctaggatttgaatctctcttggaaaaaaagaagagaaaaaaatttttgcttctatcaaaatgaagtttgaattgtgagggtttaggaaaaggtttatgacccttacaattcttcattttactccaaagatttctctgagcttgtccaacctcctaacataaatcaaggcccatctgttcaggctcaattcgccaaaactcactaaacacacacaagcataagcaagacatcaccacataaataattaattaattagaaatacttaatttaagtctaattattcttgaaatttaatcaaacacaacttaatcagattcta

SEQ ID NO: 277121 - DNA, 245 bp, Glycine max
  unsure (1)..(245): unsure at all n locations
ncctgttttctacaagcaacgaaaccttgtattttatcccccctggtcatttgttattcctccgcggattctcaagattgccgttacatattgtggaggttgctgtttgggtattcctcacctactatgttattggatttgatccaaatgttgggaggtaaataaactactttaaacatttaggagcatgcgaaagacgttgcttatactaatttgcgtggtacttatgatgtgagttcttgaat

SEQ ID NO: 277122 - DNA, 100 bp, Glycine max
acatgacgtcaagcgcttctgatgttggaccactgaccatatagtccctctcctggccatgcttatcatacgttgttgggcgtataatccactcgttatc

SEQ ID NO: 277123 - DNA, 348 bp, Glycine max
agctttagtgaagaaattcatcatttgagagacaatgaacacttgaagatgaatgcctataaataccagaagctttgaagaattaggttatgaacctatacactttcatttgaattctttgtgtaaaacgttttttgtatattttttgtatagttctaaaaagctctcaaaacattttgaataccttgagagaaaagactaagtgttgagattgtatattcatttgtaagtcgtttaagagttagccattgtgaaaaaaaataacaaatctatttgatttgtgtagagctaacagtgacttgatagaacaaagaatattaggttgtatcaagcttggggtagatcttg

SEQ ID NO: 277124 - DNA, 314 bp, Glycine max
ttgtatttctttaaaagaaattaatactagttcaactagctcaaccaaattgatttgctagttcaactagatcggttcaccaattcaatcactaaactaaccagtttaatttagatcaaccagattcgatagcttgcttgattcaagacaaggctcagatcggtcaaaccactgatttcatattcacctagttcaagtcgatattttttctaaaccacaattgtcatacactagagacaatcatattttagtcaagtatgataactatgagagctctctctttgaggatttagtgcaactacatatacataact

SEQ ID NO: 277125 - DNA, 350 bp, Glycine max
agcttctttgggaccttgatcattctctaactcctctttcaaaaccatgctatgtgctcgcgactggtccctttcttcccttcgcaacttgagttcactattgctaccccatagagctccgcgaaatttgttccggccatactcttccttgcgagccctcttggtctcttgttcaagggctcttgcggtaattgcattctcttcccgtaacccggcacactccttctgaacgtgtgtagcggccaacttgaacttctccttggcaagttttgcctttcctaactcgcttttgagagcttggacttcttcgtcctcttccggtgcttcaaaattctcttcgctgatgactt

SEQ ID NO: 277126 - DNA, 313 bp, Glycine max
  unsure (1)..(313): unsure at all n locations
tgggacatgcatggcagagatggggttgttctggtaacaaggagcttgttatttgcttcgntggntaaagaagtaatctatagtgaaaatagtgcaactatggaaggctggtcctggctgtattattttgcatattaaaagattactttaaaagatttcattttgttaccatcttgatcattgcttttgaaaactgacaagacaactcatgctactgaatagaatgactggccaaaccttgttatggaaggtactttggaattgtgttagcatgcaatatttaaaatgatattatttaggtcattgcaaactg

SEQ ID NO: 277127 - DNA, 438 bp, Glycine max
  unsure (1)..(438): unsure at all n locations
agctntgatggtgtcgagaagaaatcacatgtttgtnnnnatcaaaaagggggagaatgtgaatgtatgtatacatgattttgatgatgccacnnnnnaatcnnncnnnnntgcttcaaaggataagcatggctttaagattaatacaagattgattcaacaaacatagccttgcttcaagattaactcaagatcaagcctggccttaaaacaaagtgctttcaagacatgcaaggctctggtaatcgattaccaagcagtgtaatcgattaccagaagacagggttgagaaatatctgttgaaaacgggggggacnattgaatttcaacatgtaatcgattaccatatgttngtaatcgattaccagtggagagttttcaaaaaagtcatgacacttcaaattataactgtgtaatcgattacacaaacattgtaat

SEQ ID NO: 277128 - DNA, 519 bp, Glycine max
  unsure (1)..(519): unsure at all n locations
nagcgaactaggatnncnccncnnttngnaancaaccnggcggccaaggcgcaagtgtgtgactgttatctggagatcgtgtaaaggggtttgatgagaccgtgattgatattatttgagcatggtaatgggtccttgtttgtagggatggttgaagccttgtaaataatttttggcttgtaaataatacccaggagctaatagataatgttaggagaaaacatttattaataaataaaaggtagaacataatcgtaccttgtagataatgtgtggcattatagataattaattaccttgccatggataagatattcanatacgtttaaatattgatagggtagggacaacctatttgttacggagcctgactgctaagggtcatgcgtctgtcctcatttantanggcttacatagagagttgacacgttgtcttgagtgtcaagtaggatgtcaccgccgttttttgggtcctagataggacataaacaattacctaactaaaatgatgtaatactt

SEQ ID NO: 277129 - DNA, 342 bp, Glycine max
tgaattgcgcaatgtcggcagacaaatatcagtcgcggctatataacgaccgacgtcaggtatttttgcttcaaatcagaccctgaataattggtggatattgtacaatatgaaatgttcgatcggcgtcatcaagtgatgctttttattttatacctgctggatcggtcatatttcctggccgacatcgactatcatttttttttatcaatgtcgggcaagaatgctatatgtgcgacgagggctgatgtttttctagccgagtaaatgataacacaccagtgttggccgaaaacagcttcggttgggctcccactacaaacaaaaccgacctacgttgta

SEQ ID NO: 277130 - DNA, 75 bp, Glycine max
agcttcctatatatatatatatatatatttgacggtgagtgaaactttagtatgatataattacttttggttgga

SEQ ID NO: 277131 - DNA, 78 bp, Glycine max
aagaagaatcatgtgaagtactatccttctttttcttttgcacggttgatccatccgtttgtttctcagcaaccactt

SEQ ID NO: 277132 - DNA, 195 bp, Glycine max
tttcaaccaatcattggtgtagtaatgtcatttaatcaatgttaaaacaaaatctaaccgatcgttcacgctataacctcggttaaacaaaaaatggtaaaataatattaaaataatcaaaaaaatcattcggccgtttttctttgaaagtttccttgaattaattgactaataacccaagtgaaaccaaggcta

SEQ ID NO: 277133 - DNA, 337 bp, Glycine max
  unsure (1)..(337): unsure at all n locations
gctttgcatcagctctgataaatctgccatatactcatccgatattaggcctcatgagctttctcatatttagcagcttattggaattagcttgagtggcttcccttttagatacttgggtgttccccttttatcatctagattaaatgtatgccattatactcccttgctttccaagattactggcctgattcagtgatggagcangaagtctttatcttatgcaggtaagctagagttgatcagagtagttattcaagggaatgtgaatttctggatggggattattcctttgcctcaatctgttctggatcggatcaacacttcatgtcgtaat

SEQ ID NO: 277134 - DNA, 402 bp, Glycine max
aaagagggttagaaatgaagatttttgtggtgaccaccaaatttaaattaccaggagattccaggattgaaattgaaccgcaacacattttttccattttttggctaattcttttccttgtttgtatatttttttatctttttgaactttttctttttatactcccattttttctcttttcttttattattatatttttcttttgttttcttctctctggttttcttttcaacaagtcataagagaatgaaatgacacatataaggaactttcataaaacaaagtacaaattcccacacttgattgaaacccactcccaaacaattccaggcccttttctcctaaagttaagacaaatgatgttcacttttcgcttgaatgagcttcaaatgaaggagtaag

SEQ ID NO: 277135 - DNA, 437 bp, Glycine max
  unsure (1)..(437): unsure at all n locations
agcttaaggcaatgagcatagatttactccatgaattgtaaatagtaggattaagaataagtgaaactaaaggaatagttggattttcactacgatgaagagagtaaggattatgaacatttagggataaatctgattctaaactcatgatgaagagaacataagaaatcgaatcaaatgaaaatgagaaaagaagaaagaatcaagatgtcaaattgatatgagaaggagaatcagataaatgacttgcatagcaaaactcttcaattaaagagctttgataccatcatgaattgaggaagatgcatgaagaagatgagaaaaaaattgagaaaaaaaattgtttgcagagaaagtaatagaacatgatgaanaaagatgaaggattctcattgattcatttcacgctagaggtacacgtttatatagtaatacaa

SEQ ID NO: 277136 - DNA, 244 bp, Glycine max
aataattaaagcgaatgttccgtcattaatgtaataaaactcatcttaggtctagttaaagtttctaagaatgttttttatggtttgcagaaaataaaaaataaaaaatttcatgtttaaagaaaaatttgtgattagttaaatcgctaaaggatctagagtaaaatcgccaagattgtcacttgagggattcgttgagcttacaatctctagatcaaattctctgatgacattctatttactt

SEQ ID NO: 277137 - DNA, 239 bp, Glycine max
ttctgacattgccaccatgacccgtttgggaatagaggtggtccggcatggaaggcgcaattgattgacgagatcctgttggatgaagttgtgggtattgccactgtccaccagtaccacgacaggttggccagcgagcaggcccaataaacgcaaagtctctggggccaaaatgacccgctaaggagtttaaacttatttggtccgggcccggttcaagaggctccacaggatcaagc

SEQ ID NO: 277138 - DNA, 64 bp, Glycine max
agctatgagtaggttacggatcaatgcttactaatcacttgatccataaacagtcacaacttca

SEQ ID NO: 277139 - DNA, 292 bp, Glycine max
  unsure (1)..(292): unsure at all n locations
tcaactntcaaagtacataattctatctttaaatattgtcatcagataaaaataacatggtgtttgggatgaatcaaatggataaacacaagttaaaaaaccatcattctttaaatgggttaagaatctcgcccataatgtttggtgattccaaccttaaacctattaaaaaccagttccactttatcttatccccatcccttccacctggaataaaatgagaaaaactgcctatgctaacatttcataaggaattactcttccgtcagcatggggaattcaaatttgagat

SEQ ID NO: 277140 - DNA, 426 bp, Glycine max
agcttggcctatatgtaactaatgtaaatcctatttgctcattataaagtaaaggatgagtgtggtgtggtcattctagacacacaattacactaaacatgtttatatcttaaaatgtgactttgaatctaacccaacctcaaaagttagctcacaggatgattgttcttcacttatattctcactctatcttggtcttatctttagtcaatgggaaacttgagttttttcactccctcattcccaacacattttgggtttgatgtcatggatagcatggtggataatcctttgtatggatttagtataagctcttgtatcattttagaatgtagatttgtacttaactcaagtccacaagggagctcataggaatgcctctcacttttatactctatcttggcctcatctttaacaatgtgaaac

SEQ ID NO: 277141 - DNA, 114 bp, Glycine max
cttgaaaaaattttacatattttgcggatgctctaaacatatgacgggagatgcattaaagttcactcttatctttcccaagaaaagtggacatgtgacttatggcaccaccat

SEQ ID NO: 277142 - DNA, 58 bp, Glycine max
agcgttgagagtgaagttctgaacctgtgaactacaaaaatttgtgatatatgtttat

SEQ ID NO: 277143 - DNA, 434 bp, Glycine max
agcttttagagaaacaagaaagacgtcgtgtatttctatgataaacacaaaagtttataagaaatttcatcttgtaagtgatttttttttttttatgttgagaaatatagggtattttactgttgagaatcaaagaataacccctcaagtacatagatctatttataaaattgatttatctcgataaatattttctatacacacgaattgactgtccttatagcattttatctagaaatccacatttaccaatatgtttttgttgaccagttctataagaagctagtaatgatagtcctgaatattgttgtgaaggttgaaattgaagttagtggtgtgactaccggataatgaaagcagagaaaatatgctagctggaagaagaacataaaggaaaaaaattattaatttatccttttaagacatgaacaaaa

SEQ ID NO: 277144 - DNA, 454 bp, Glycine max
  unsure (1)..(454): unsure at all n locations
gtcacctgccgcatgcaagcttatttattgtagttatacttacaatattaaaattttattgttctttttattttctactaaatgcattgataactgatttgtataaatcacttttgaagtgaatagacatgagcttttgttggttgaattttatcattaatgcatgagaattgtttatgttaggattctttcttaaatcaattgatcttatcaagaattattcaatttttagtacgatcctcattgacgaatccaagatcctaagtcagtgggtataaatcataaaaaataaaatcaataggttcaattatattaatataaatcacatataatatacaaatataagattttatttacaaatttgatgaaatttaaaaaatgaggggatgcaagtgtacaccctcacagccatgtangtccgccactgacgatcctcaaggtttatcaaacatca

SEQ ID NO: 277145 - DNA, 248 bp, Glycine max
ctccaaaaggcctatacttaccttgggaatttggatcggataaactttggccacgaacttggtatgtgtgacatgattgcaccctacctttatgatcccgccataactttagagtataacaggtggtggaatgttataaacctaacaattccttctttaatccaatacgtattcatttaaatcatcctttaaaatattcccattttcccttacttacctttaataagtgaagtggcttcattattttt

SEQ ID NO: 277146 - DNA, 54 bp, Glycine max
agcttggacaaagaaaatggtatcatgcaacatgtgtgaaagaatattacaaga

SEQ ID NO: 277147 - DNA, 81 bp, Glycine max
  unsure (1)..(81): unsure at all n locations
agcttggtaaattataaaattaactataataatcagatagaaatntgaaaatgacaaataaaagatgacttgctatctcat

SEQ ID NO: 277148 - DNA, 146 bp, Glycine max
cctcctattcactggaaatgcatgaggaccccggcttaccacagctagtaccttacggttaaagttatgtggcctggttaagtttctttgtaggttggctttgttggattaatacaggattttattgtctacttttccatttatct

SEQ ID NO: 277149 - DNA, 370 bp, Glycine max
cctgtatagacgacctgtaagcatgcaagctacttatacaaggctcatcttggtggtgaatctctttctttcatggattattccctagcggatggcgcctaccctattctcttatcctttgccattcgctgcatcttcatgctgaaaaaacaccattggcgtgccacattgaagctcaaagatccatccttcatataagctgcacatgcaagcattcatcaagtggtaatcacaacacaagatcttcaagtaggtgctccttaaacctgcattaatttttatgctttaccttctcttccagttgagtttcttcattattttctccatgtatctcctcacatgtcttgtgctaaacgcttttagacatgat

SEQ ID NO: 277150 - DNA, 461 bp, Glycine max
  unsure (1)..(461): unsure at all n locations
acccacgacgatgangacgntcgcatttgcncancggccnnnnatgaggagataaatcagcctccttttcttctatggccantggaagnttcctgttccctgtgtctaccacacagcttgcgtgagacataaacggccgtccaagaattaggggaatgtcagcatcttctattatgtccatcactccaaattcaaccggaaagacaaatgtttaaccttaaccaaacggtttaatcactccatagggtctgggatggacgatcatccaatgtaggccagcgagtggcattattttaacttcaagttgctaacatgggagtgcattaattgtcctgttccaagcattaaagcctaccacgctacttacaatatacacggatgggacacttcagaactttggcttcgcgaaggatcttgaatacacactcatttctttacacctatggtacttggaatttccg

SEQ ID NO: 277151 - DNA, 424 bp, Glycine max
  unsure (1)..(424): unsure at all n locations
agctntgccaaagtaattgaaatagaaatnttgatctatatggactagtttagaaaggttttaactctgctttcttcaatttactcagacaaaaggatgagacttcaaaatccttagtgttctgcaaacaaaaaattccagatggaaccaactctgtaagattcagcaaaattcaaagtttgcaactgccaatgggtgatatttacgcctaagctccttaaatgtgcatttctttcactaatcatgactcacaccaccaaaaccaatttcaagggtcaattttcttgatggaatacacgtttatagaccaattcagaaaataaaatatttttccatctagttttcttgatgcaaacaggtggaattaaacaatttccttcactcaataccacatttgtcaaagaaaaaaactaacaggaagcaa

SEQ ID NO: 277152 - DNA, 176 bp, Glycine max
agctgtgaggaataattatatttatagttgattagaaactaatatgaaatatattgcatatacctattattgaatgaatcttctaatagttggtgtataaataaacaaaagtataactgtttacataaaattcaagagttaatggaccccaattcgtttttctgtgaaaaaatatt

SEQ ID NO: 277153 - DNA, 127 bp, Glycine max
agcttgtgtcggcttgtggtgccacactggaatccgcttcaatggtgcccttcctagaccacttcgcggggagcttcttcgtagccaattctaggttgcctcctaatagcacttttttaacgtcttg

SEQ ID NO: 277154 - DNA, 411 bp, Glycine max
  unsure (1)..(411): unsure at all n locations
agcttgccttttgcaattccaagacactagtgagcttccaagtatatgacatgtaccacttgtaattntcctatctaatttgcatcttccagaatcagagtctgaaaaaccttttaagtttagggaacttcttttgaataccacanacctacattggttgtgcccttaagatacttaatgatcctcttaacagtagttaagtgagattcctttggattggactgatatatngcacataatcaaacacttagcatgatatccggtctacttgcagttaggtagagaagtgatccaatcatacctatgtatcttgattcatccactgatttacctttctcatctaagtaagggagggtaatgttgtaacgcctttaaatttcaataactgaaaatagatgtttgatgtatttc

SEQ ID NO: 277155 - DNA, 514 bp, Glycine max
  unsure (1)..(514): unsure at all n locations
gccacgcgatttgcaccatgtaattgagaccttgttagcnctcgcggacccggtgatcctctccagtcgatctgaggcatgcaaacctggttgtacaatgaactgttatctctattgacacttattagagggcgtgaattgtgctctctacaaactactcggacagagtggagacacctccgctattcttagctgtaagcgttaacctattttaaggcacgtcgtatcttatctgtaacattttaacattatactcattctgacttgagtgatgcagactatacacgtccattgcgctgctagacgacgttccatcgtaaaaatgactcatatttcgcaattctacttaatacgagatatatatggaaggaatactacattgctctcttttacctaccttaaatagtcttgcatacaaattgtttaagtatgaaacaggcgcagaccgatactcttctcacatatactcctgtgcttttgtattgaaatacattgataaacatacccaatacct

SEQ ID NO: 277156 - DNA, 471 bp, Glycine max
  unsure (1)..(471): unsure at all n locations
nggttaactggactgaattacccgnntnnctnnntganacncnncngcgngagagagggagaaactnatttaatctannttttatttaactnaattncatcgaatcttatatgccatatttttttattgaattataggaatttgacttcatgcatatatgtgcgcgccaccacttcaaaataagcacacattatctatacttgctagagaatatgtagccatgatgtgccagaaataaaggtggtgtggtcagttgaccaataataaatggctcaaattgaaaatttttgcgtgaaatgatattaaaaagcgtctttggttacctttcatacttttggcagttttgttttaatatacgtattagtccaagaagaaaaaaaaattgtacactcatgtttcttcattatgcaacactttttatgatcattaggcactctattgggatcctagggcatatttgcgtaatttacg

SEQ ID NO: 277157 - DNA, 416 bp, Glycine max
  unsure (1)..(416): unsure at all n locations
cttattgatgccctacgtcttgctcataacacaaattattctggggtgctttaatgcgaccaattgacgcatgatttcatagattccccttggatcttctggtccaactaaanagaaaaaaggtttcccggcataaacctctgtccatgcctcataatctatcctctttaaaatgccaaaatggaagttcttatcggtccggccccctttcgtctgtttttaaaattatggaatttggttacttttngggcgctttaacatgttattttaaaaccctgtttttttgtgcccaacactcatttcatgggatttacccaactccctgggaggttgtcaagggcaccgccacacaaacacttctttgaaattaatctctttccacactcttgttcccccataaaccttttgaatgttcc

SEQ ID NO: 277158 - DNA, 465 bp, Glycine max
  unsure (1)..(465): unsure at all n locations
ttaagtcacctgcggcatgcaagcttagcatattgcaattcaataattccctctaccagtgaccgagcctctttgatagccctaaacatctttctttcatcaatgtgcacaccatattcttgtgtcacttgattatccatcattttttggatgcacatatacatagtctaggtcactttcagaatgataaaaaaagttagcatccttatcatgttctttaacttcatcatcatctacaccattattaacttgagtttcaactccaacaactttagttttagcatcttgcacatcaacttgagtttcaactccaacaactccagtttcaccatctagaccacctttacccacattgttagcaccatcaacatccatatcttcaataacattctgagtagagtcctcaagaacaaccactttctctgcattgcaatntagaggcaacacatctatttcaatctctag

SEQ ID NO: 277159 - DNA, 430 bp, Glycine max
  unsure (1)..(430): unsure at all n locations
agcttgttntggcactatcttttcaccaagtgtttcacttaaaagcattcgtgaaaatattgtcttgttgtcactaagacaactacctttgttctccctacacttgtttttctctgtaatggacgacctctatcatatcatcttgctaagcttgaacataacgtctttgttatcaaaagttagtatctttgattaacacactatttaaccctacttctagtgtgattgttgttattttaaaaaaaatataattgagaaggaaaaccccactaaaggtactcaactatgtttctcgatagatattattcgtcaatgaaatcgatgtatacttctcacccataacatggtaatccatgaaatataccatcgaacatgtggatcaactaatacgagaatattcaagcttaaccatggtctcaagtttgagtct

SEQ ID NO: 277160 - DNA, 126 bp, Glycine max
  unsure (1)..(126): unsure at all n locations
agcttcannaattttgctgatctctacaaattctgagtgtggagctctcaaagtccacctgcttagtgacatcgtttttcttgctcgaatctactacagacttagaatgtagtatggcgaggtcat

SEQ ID NO: 277161 - DNA, 154 bp, Glycine max
ctctatcaatgcacccccgaagcaccaaaaacacatcccatatgttctatcattacacacccaaagtgtctaatcctcccgtgaaatctatggcattttcgtatgggtcacccctttcccgaaagattccaggccatgcaaccttcctttcctt

SEQ ID NO: 277162 - DNA, 160 bp, Glycine max
  unsure (1)..(160): unsure at all n locations
agctntgaaaatataataccttgatttctaaaatatccattntctctccccctttggcaacatcaaaaatgccaaagtacgtaaaaataaaacatacataaataattctaaaacattcataaagcacaataccacatataaatatataccactagacata

SEQ ID NO: 277163 - DNA, 140 bp, Glycine max
attcaacactcatttggtagttatttcataagtgagcatcctttatatatcatgttattttacgtaatttaagtttgcaggagttctatgctttccatgttggtcctcaagtaataaatggaatccaaataaaccatttt

SEQ ID NO: 277164 - DNA, 382 bp, Glycine max
  unsure (1)..(382): unsure at all n locations
tctggttgtctaaaccttgaaaacttgtgctattcatcttttcattctcttctccctttgccaaaaagaattcgccaaggactaaccgcctgaattctttatgtgtctctcttctcccttttccaaaagaacaaaggactaaccgcctgaattcttttgtgtctcccttctcccttgtcaaagaattcaaaacaacacagtctgagaattcttatgattcttccctttccctaatacaaaagtgttcanatgactaaccgcctgagaattcttttgtatccccattcacaaagtatcaaaggtttaatagcctgagatctttgtcttaacacattggagggtacatcctttgtggtacaagtagagggtacatctacttggg

SEQ ID NO: 277165 - DNA, 345 bp, Glycine max
aatatgtatgtatgtaaatatgttgaataaaatgccttgcaaaatgttgaataaaatgccttgcaaaatatgaatatatatagcaggaaaatgcctggcataatatgattatatatagcatgaagtgccttacaaaatgcttagatgggtagcgtaaaagtgtttttcaaaatatgtgtatttgtgaataggtagcataagaagccttccaaaaaatgtgtatatatataggatgtagcatgaaaaggttgtcacacaatatgtcatggatatgtgtcgaaatgcttctcacaaattttatgtgtgatatgcgttgtgtcataaatacatggcccatatgatatt

SEQ ID NO: 277166 - DNA, 247 bp, Glycine max
agcttctagccaaatggacttaccttgaattaattcctgtgatagcccttatgagccttgtttccctttgcttgatttgaagctcactacaagccttaagtgaaaaaccatgatattaccatattcttaaggaattttggagctttggaatagttttgggaataagtgtgggggggttgttgtttcattggacaactatgtatgctggctatgctttatgatgtatttcgggccatacttgatgtac

SEQ ID NO: 277167 - DNA, 287 bp, Glycine max
  unsure (1)..(287): unsure at all n locations
ccgctcagtctcacaagtcccttcttatacttaaagctagatccaagtggattaaggaaggtgattttatttcaaggtttttccatttgatgatgaatgcgactcgcaggaacaacctattgaaaggggttatgattgacggattatgggtggatgaacctcaaaaagtgaatgaggaggtgagatcgttcttcctacagagatttcaggaatctgacctacatagacncacttttgatgggatcagtttcaaactctcatcatcgcagaatgatatgtgcttggag

SEQ ID NO: 277168 - DNA, 71 bp, Glycine max
agcttgtgtcccattgtctcagccgcgtgccttgtaggtatttattgatggattctcttataaactgagac

SEQ ID NO: 277169 - DNA, 241 bp, Glycine max
agcttctgcttatgtggtagggcgggcttcctccactttcttgtctccaacgcgagctttgaccaccgctcttccttcccgcgatgcttctcttcatatccgcctgagtgggcttatagcctaaaccatacttcccacgatttcctttggcatttatcaagctagttatgtcgccgttgtctttgcctaaacccattccgggttcgtaaccgttccccaacataaactcggccatcattac

SEQ ID NO: 277170 - DNA, 384 bp, Glycine max
  unsure (1)..(384): unsure at all n locations
acccttccaatcagtcctganatccgnagcacaacgctttatcttagtcaattagtttaaagagcaatctgtatgtactttttaatccaaaaacttggcaatgaaaggggaggaggaagagaacccggctggactccatccaatataccaagttcaccaaccacaatgtcatctcaccatacaaaccctttctacccacgccagtatcacaagtcatcctatataaccacaacctactcccacttccatacaaaccccttacgtaaccaacaccacaaaatgaatttgcacagaacctaaatcacccaatcatgtcttgcggtgcccatcacttatatcatgacctacctaccagttatactcatttcaaatacatgaccacgt

SEQ ID NO: 277171 - DNA, 186 bp, Glycine max
  unsure (1)..(186): unsure at all n locations
agctttcaaaaatcctatttttgtggacgagcttgactaggcgagttgattntagccttagtttcactttagttattagtcaattcaattaagaatgaggaatcccaaagagaaaacgtccgattgatctttcgcttttattttactaaaagggtattttatattattattttacctcttttttga

SEQ ID NO: 277172 - DNA, 406 bp, Glycine max
  unsure (1)..(406): unsure at all n locations
ggaagagggagagagagccttttaaaatgtggggctgagtgaggagagagagagttgctttttggtttaaaaaaaaaagctttttcctcttttcttattatttatttaagctatgccacatgtctccatttgagtggagcaaaaagggcccactttctcttttgattgtgacccatactcagccacaaaaagtgagaaaaaatctgacctttgaaacgctaaaatcctgccctcgtttgcgtgtcgtttctctggttccagttcttcgcgtttctctgcgttcgtcggtgccagttnttgaaagtaatcaatatatatatcaaaacgctcagaattagaccccgagcgtggtcagaggttggtttcgttaattctaagtcgcacgcaaacgatgatttttaactaa

SEQ ID NO: 277173 - DNA, 224 bp, Glycine max
  unsure (1)..(224): unsure at all n locations
aaaacaaatgatcaaagtgaaccaagagctctttctatggcaaaattgagtgttgaggagacaaattttgattcggtggaattttacgtgtaaatccagtttgagcaacgatagaatgatgttatggacttgtgtgaggtgagagtttgcttcacatttacctcattctaaatttcacttttcaagcctacganatccatttaattgatggcgtttggacacct

SEQ ID NO: 277174 - DNA, 161 bp, Glycine max
  unsure (1)..(161): unsure at all n locations
agctttctcggggccatttcctgcgaaggctaaaanttggaaagttagttntaccagtgggacactactcttaaaacaaaaatggcgtacaacctccttccataaatacaaacaataatggtaatttagagcaagcttatgcacatattttcttacgaacg

SEQ ID NO: 277175 - DNA, 117 bp, Glycine max
atttacaccatggatatgcaccggaaggcaaaggataagaggataagggaggcgccatccatctgggaataagccatggaagaaggagctccaccaccaatatgagccttggataag

SEQ ID NO: 277176 - DNA, 165 bp, Glycine max
  unsure (1)..(165): unsure at all n locations
agctnggtcttgttgggactcgttacagacaactgacgttgaggacggagtttgaccataacccaatcaccttctacatagtgtacttcttaatggntattgtctacaaaatgtttcattcgagcttgtgcttttaacacattatcacgtaagctatcaaaaact

SEQ ID NO: 277177 - DNA, 135 bp, Glycine max
atagtttaagttgagttaaatatagtctaatttttaactaatccaattaaacttaattgggttagatggacacatcaaatggattaattaaaaaaatttgaattctaaattcttaacaaaaaaaatctctcaaaa

SEQ ID NO: 277178 - DNA, 58 bp, Glycine max
taagtcacctgcggcatgcaagcttaaagtatgcccgagtcattcatccgtatgagat

SEQ ID NO: 277179 - DNA, 141 bp, Glycine max
  unsure (1)..(141): unsure at all n locations
agctnttcgattcattctatgtacccgtagtgtgtccacatgngtttcgtgcatttatattctcgcttcgtttactttttataccccctggtgacatgcttaagccattttgcttaagtcatttctcgcttaacttaaaaa

SEQ ID NO: 277180 - DNA, 118 bp, Glycine max
cgcaacttgagttcactattgctaccccatagagctctgtgaaatttgttccggccatactcttccttgcgagccctctgggcctctggttcaagggctcttgcggtaatggcatctt

SEQ ID NO: 277181 - DNA, 99 bp, Glycine max
  unsure (1)..(99): unsure at all n locations
agcttgtgcaaatcanatcactcctacatctcatctctagcatgcattttctttctttacccactcctcacgttgggtttttanggaaaacaccataac

SEQ ID NO: 277182 - DNA, 358 bp, Glycine max
agcttgtgaagacacttgaagagaaggagaatgatagaatgctaagagaggaagaatggaggaagcaagaggcaaacaggttagagagggagcaaaagttctgggccaaagagagagcatggattgaagcaagagatgctgctttgatggaggctttgcataagttaactggaagagaaataatgaaggttgaaactgatcctgagggtactataaatgtaatgactgcagctgaagttcaaaaccagaataacgaagatgagagtgaaattttgaacagcagtaatgttatcagaggtgctgatagctggcaagaatctgagatcacaagacttgaacagctgagagctgagatgga

SEQ ID NO: 277183 - DNA, 242 bp, Glycine max
  unsure (1)..(242): unsure at all n locations
ctctctctatcagctcatagtgcctaagtttcagtgtacttataccatatatcttgttttngcttgctgagctttcttgccttttccctcctcctcattcttgtcttgaggctttctgcttctgctccattcattctcaggtaacttggtgtttgtcttcagggattccgcaagattgacacagacaagtgggagttttcaacgaagcttccagcgagggaagaacacttgctgaaaacatc

SEQ ID NO: 277184 - DNA, 452 bp, Glycine max
acttcgatggtgtgtttgctaaattgcaatctttcatctgaaacctatccaagaattctccctcatatttcttttgacaaataaagattccattagttggttgattcacttctttatctccacttttaacatagagtgtgtgctcataatgacattttgtgaacatagcttaagaaaaatatgcttcaatgcgactataccatgctcgtggggctttgttcaacccgtacaagaacctttttaatcttgtaactttatgctcacttccaatcttgacataacccggtggttgttcaataaatacttgctccttcaagtatccatgtaagaatgttgatttaacatctagttggcaaatgggccatgatatttatgccactaaagcaatcatcaatctgatcgtgtcatgtcttgcaacttgagaaaaacttctgtatagtcaatcccatatt

SEQ ID NO: 277185 - DNA, 239 bp, Glycine max
  unsure (1)..(239): unsure at all n locations
agcttatgtgtttgtgtatgtgtgttcgcacatgcttcactactgcggtactgtcttacctcagcaacagtgtactctctgtcatgttcaatttcaggtatgcagcccttgccattaacaatcgcttnggaatcatcattatgcagtgattgttgctgtgaaatttgatcagtatcaacttggacaaaggcacgaatgggtaatggtgtcttgacttcttcattcaataactgtatttt

SEQ ID NO: 277186 - DNA, 407 bp, Glycine max
  unsure (1)..(407): unsure at all n locations
cactctccccacactgcatgttctgtcttggaaaaaaaataaataatatgatgcaattgctccaaatgaatgtgtcacgtttctttttccattctcacaaagttatgttggatcttatcacccaaaaagaaaagataggaaaaagttaagttggatcatggtatgcataattgaatcaattgggcaaaaatngacaacgcgacatgtgatcaataatgtnttgttaaactatgaaaaagaaaggttttggtaacccgggcatagggagttctgctntcagaatctactactantttttctgatttcagaaacagaaccataaaggctacaaacaaacacagcttagtaaccatacagcttgcttcaattcctcatctcatatggacccatcagccatctcacataat

SEQ ID NO: 277187 - DNA, 176 bp, Glycine max
agcttgtatcatctgaaagaacttgtcattattgagtaccaaaaaacattactgtttctattctgtgaggaaataaaagaaaatgcttatagatcatattttcatttcattgatgaatgattaccccgggttataattagtctcacaaacaagattgttattgcaatctttttaaa

SEQ ID NO: 277188 - DNA, 351 bp, Glycine max
  unsure (1)..(351): unsure at all n locations
gaagaacttgctacagtttctgtttagtttctttgattacctactgctacactccatagttttttttntattcttcttggaggatatatatacactgcatacttacaaacaataagtgcaagttgacagtgtttaaatacattgataatatattatcactaattacacanaaatcctaataaatggccgatcgaacagcttatatttcttcagcaaagcttggatttttggcctttatatgcatgtcacccgattattctcaatgtattagacaacaactggcatatttggttataacttggttatattgtgtagagatactatcaattcaactatgttctctttaattta

SEQ ID NO: 277189 - DNA, 384 bp, Glycine max
  unsure (1)..(384): unsure at all n locations
agcttacaaaacctatgtatctctgcaaaagctgctcatcttgatgcctccagagctctttccccaaaataggcactatggtgtctgtggaaatttgtgccctgggcattgtaccctaattctgcacaaaacaggctttacataggctctgaattcgtgacgttgcccttagcgccaccctcgcgcttagcgtggataagtggatntgggcttagcgccagtcgtgcgctgagcctggctgaagacacctgccgcgcttagcgcacagaactcgcgcttagcgcatggccttgatgctgagcgaatccaatngatgtgccattactttctcctatttcttaaccctttttgcaccattttaattactggattagtcttaatgtc

SEQ ID NO: 277190 - DNA, 165 bp, Glycine max
gcagcatggcgcgcttagctcagcctcattataatgacactcaggcttatctcacagggcccgcttagcctaaatccaaaaccttaaaggacattgagagagttggcctaatgccctggtccctacttcacttcatcacggggcctttgctcaacaaccctacct

SEQ ID NO: 277191 - DNA, 480 bp, Glycine max
  unsure (1)..(480): unsure at all n locations
ngggggggggnaagctatggaacgnttcgaancganntctgnnannntcnncgannnangngaagnnccaaancctatcccctcttgatacgagcncgggagagggagagggcacttcccaactccatgaatccactcccttccaatagaagttaaaatagccttaactgttcaccagaaaggagttggtgaactatactgccaccacaacatttactgtattggttccaaaagattagcaagttttacgctaataattcgaagcacaatgttgtggccgatagatcagtgcatgtttcccgatctggtgagctatgaccgaggctttaattgtcagccgttctccataatgagcacttggtgaattcacattctcactttggtctgataaaagaggttgggacgcttttttcttaaaatcggcttctcaattaggcaattgtctccacccgccttatcctacatatgacatactggttc

SEQ ID NO: 277192 - DNA, 55 bp, Glycine max
  unsure (1)..(55): unsure at all n locations
agcttgtaggattatggggtacccatcacatgtggtactangtggcgatcgggcg

SEQ ID NO: 277193 - DNA, 179 bp, Glycine max
  unsure (1)..(179): unsure at all n locations
atgagtctgaataatanataattattaatcaaataaaaacggaatcttttaatgaaacttcataattaggcttgatctgaccatctgaaaggtaatctttctcatcctcagttatatgaaatcaattacttcatatattttagagcactgatttagtaggaagatataggctagcaatc

SEQ ID NO: 277194 - DNA, 331 bp, Glycine max
  unsure (1)..(331): unsure at all n locations
ataattatatgctccagcttgaggaggagtgttataattatgggtattatnagatgnatctgtagagtagattcccctatttatcttgctgtagaagacagcagtgtgtactgtcttgtcaaaccttgccaagctgtctctctcctatttcgatatatatatgttatttgaatgaaatataactaagcaagtgaatgataagttttctcctcacatattcaaagcttcaagtgcatgtaagccatgtcanataaaatattcactcagtgtgattaatacctaatagctcctgtactattcctagaatttgggattgtggcctaaactcaat

SEQ ID NO: 277195 - DNA, 339 bp, Glycine max
  unsure (1)..(339): unsure at all n locations
agctntataggtgaaatcaggtgcagccatttcccttagagtcctctcacgaggtggaggctgtgccatgttctcagaatgtgcaaaatcagaatgctcataatcagaatgctcagaattataatgctcaagatcagggatgtcanaatcaccaataacagaatgcacagattcaccagttatggaatgctcataatgatcaaaanggtataaaaatgatgcctaactaatctatgaaatgtcctatctatctcangatcaaaagggtgtangtcagaatggatgcctccagtcatacactacattcagcatgcacacaactagttgccttgtcatgta

SEQ ID NO: 277196 - DNA, 472 bp, Glycine max
  unsure (1)..(472): unsure at all n locations
actctcncttgtagttgtctacctcaacctcaatttcatatattggctagcctagtatagttgctactgttaataataactcttgtgtggtttccaattctgttgtttcttcttctagtactcctagcctttggcattctagattaggtcaccctaatggtcatgtaatgaaactagtcttcaatcattgtaacatttctccatcaaataaaaatttctcaggtttttgttcttctagttgtatgggaaagtctcatagattaccatctcacactcttgtttttgtttacttctccttggagcttattttcacatatttgtggggaccttctcatntgacttcatatgctggttataaatattatgtatcctntattgatgtntttttccaagtacacctggatatttcttatcaagtctaaagttgaaactctntgttttcaagctttaaatctatggtgaactgcaacta

SEQ ID NO: 277197 - DNA, 387 bp, Glycine max
  unsure (1)..(387): unsure at all n locations
ataactctgttatctattaaaataaagaantttttgctggtgaagaattttttctaacttcaaaaactttcttcacactaaccatgatgatgcatgatgcaatacagacatcaaatgtactaagatgcaacaaccaagataacaaccaatacaaatgcctctcaagggagttaggcataaaagccaaaacttcaaaaattcttcaagctntattagcctttaggttgttcaccatgttgctccccctatttcaacaacgagaagccttaaatacttaaagttacaaagtagaagtcaatatttgaatttcatatatgctctctccttcaagctcattgatgattgcttttaacaccttantttgtgagcaattagcttagcttttct

SEQ ID NO: 277198 - DNA, 57 bp, Glycine max
agcttgaccaattccgacccaacccgggcatagtctgtcagtgagaacctgtgatgt

SEQ ID NO: 277199 - DNA, 464 bp, Glycine max
  unsure (1)..(464): unsure at all n locations
cttcctcactagcaattgctagtactatcatctcagattccatagtggactaagctaagatagtctgtttcttcgacttccaagaaacagccccaccagctatgctaaatatatagccactggttgctttggaatcatctgaaagagtgttccaatctgcatcactgtatccttcaagtacagcgggaaaccttttataatgtaatccaaggtttatgattcttttaaggtacctcattaccatttcaatagcgtgtcagtgctccatactaggtctgctggtaaacctacataataatcctacaacataggctatgtcgggtctagtacaatcagtggcatacctaagggtgccaatgatactngcgtactcagttggttgtataccttcaccagtgttcttaaacaagtttacacttggattatatggtgtactagcaggtntacagtcaaagtagtcatat

SEQ ID NO: 277200 - DNA, 157 bp, Glycine max
agctttgagccaaaattctgactcaccatattacttgcctcgtgtgagaatgtccatctttaccctcggaagccaaaaaaaagatatggaaaatctcaatcataggaaaaaaggacagaatgagaatttccatccacaaacaaagaaaaaaaaggaa

SEQ ID NO: 277201 - DNA, 385 bp, Glycine max
aggaagtgttgaagggtgaaacttcctgcttttattgttgaccacagagtggtacctggagatatgtcgtgggggtcaggagaccttggggacgtcaggtggggtgctattgcccaaaaccaagcttgaccaatcccgacccaacccgggcatagtcggtaagtgagaacctgtgatgtacctaaacaggcgagctcctggcagtcaacagataaaaggaacaaagaccacaaagcaaggaggcttgtggtggctggccagctcgtgaatttgtgtgatatatgggttgtggcctctggtaatcgattaccaagggtgggttatcgattacaaggcttaaaaatgaagacaggaggctaagatggtctctggtaatctattacca

SEQ ID NO: 277202 - DNA, 63 bp, Glycine max
  unsure (1)..(63): unsure at all n locations
agcttggagagaatgcttcaatgaatganatgaaagaacgatataaagagagagggggggggg

SEQ ID NO: 277203 - DNA, 263 bp, Glycine max
ggttggtgggttttgtctcgtaaaatgtcattatcactggctgacatgttctcaattatctctgttgcttcttctggggtcttcagttttatctttccccctacagaagcatttaacagttcaattgtggtctcagcccatctataaacatattcaattggattggctcggaaaacccatgagtgggagtttttcttaacaagcctctgaatctctccaatgcttcactcagagattcatcacgaaactgatgaaatgaagag

SEQ ID NO: 277204 - DNA, 409 bp, Glycine max
  unsure (1)..(409): unsure at all n locations
agctttataagcgcgggtctgggagacaaaggtcaagtgttcgcgatatgcgaagatgatgttccgagtactttggatttggtacgaccatgccctccttgattccagctggggaaatggcgagtggaagaacgccccggcatttacgcaacgagcataatgtaaacctttacgggtttaaaagctctatagttgggcctaggctntataagttttccttttgtaaggctgtgtgtcttttggttttgaatttataatacaaggatctttcttcatctgttcctacgtctctacccattctcattcattngcatgtttacttctttttctgaaacgacagatccgatgacgagtcccccgaaggtactaatacctgcgacccacctatcgacttcgagcacgaaatgaa

SEQ ID NO: 277205 - DNA, 94 bp, Glycine max
  unsure (1)..(94): unsure at all n locations
atacgggaaaatctgggacttanccatggttgatgtctctacatattgcctcccttgcccagtattatgaccagcccctaaggtgcttcacatt

SEQ ID NO: 277206 - DNA, 288 bp, Glycine max
ctacaacatagaacacaaaatcatgattgattagagaaatatccttatatgcatcaactggtttgttagaaagacccaacactcttacctactgctgtcaattttacttacttgcacttttattgtttttaacctaactaagttaattgctggtctaagcatcaatatcaatgttttttaataatgccgattctgaactaccatgtcaatattagcttctgattcgatctcggatcatccgtataattttaatactgatgatccgggcctttccggttttaattcctg

SEQ ID NO: 277207 - DNA, 114 bp, Glycine max
  unsure (1)..(114): unsure at all n locations
agcnttgtctaattcataatagaatggtaatttcagagacatgaatggaataagaatggagttttcaaatgcttggtagcattcaaaattctcatttgagaagaactccatatc

SEQ ID NO: 277208 - DNA, 129 bp, Glycine max
atccatccacaatgccaatcattcatgcttaatatgatgcatgcacctgacctcaactctcatatgcaatgtggtaccatccccaaggaagtagcctaagcgtgtccacataacactctcacttaggaa

SEQ ID NO: 277209 - DNA, 405 bp, Glycine max
  unsure (1)..(405): unsure at all n locations
gatacaaccaaatagtcatttataccaccgaccaagagaagaaagcttttgtgtgtccttttggggatatgcctataagagaatatcattgggatattgcattgcacccgttccatttaaaaggggtatgctagccattttttctaatttggttgagaaatgtattaaagttttccgtggatgactttttcatttttttggcccaatcctttgattcatgcttngggcaatttggatattatgttgaaaggatgtatagagactaatctcatccttcaatgggaaaaatgccacttcatgggtcaagtcagtaatcctggccataagatatttcaagaggaatgaggttgatcctgccacgtataggtaattgcaaacaccatcaccagtggtgtggtgaaaggg

SEQ ID NO: 277210 - DNA, 491 bp, Glycine max
  unsure (1)..(491): unsure at all n locations
ngggggggccgcggcggggatttccgnnagtcgantanntcnacnnnncnnnnnnnnnnnnnnnanaaaataancattcttttggacactttaggcagagacaacattggtccaattgcagaaagtcatgacttcatctccatggtaagctcttcctaatntccagctgcccttcattctggaaactaatgcttccgacactggtttggaaccagttttactctaaattggcctccaataccatgtttatcaagaaacttgacccaaagtggaaaagaatctgactatttagagagatgtaggcattgtgaaagctatgctaagttcaaccctacttggctggaccaaatttattatcaaaactgatcaaaaagcttgagattatgatggaccattccttctaccccgaacacatcagaggttccctgttttggatagatgtggattgaatcacgccataaaaaattagtttcgatctggctgaatataat

SEQ ID NO: 277211 - DNA, 229 bp, Glycine max
cgatcggatcttaagtcacctgcggctgcagctttaccaaggacttacctgaatattcttgaagccttgcctattccttttgttgactatcagctaggaaactgatactcctagattgacttgatgttggaaagcggatatggggggagttatgagaatattggctctaagttatggctgtgagcaaatgcattttttatttattgacgtataaaataattaaaataaa

SEQ ID NO: 277212 - DNA, 130 bp, Glycine max
taaaaaatgttgtatttgccctcgaagtcctttataaccataccgaaagttaaaagggaggaaccattgatatttcgtttgatgaaagctacttcctgacactttcatgatttttcctacctaacttttt

SEQ ID NO: 277213 - DNA, 376 bp, Glycine max
  unsure (1)..(376): unsure at all n locations
agcttgagnaatgtaaaggactacttaatagcatgaaattcgtcttagaagggaggattntctaagaccggtatgatgatgaaaccatcttnaaataactctcatntctaagagggtatctactcaaaaccatcgttgaaaaggactcattctangctctctatggntnnttttttttttttatgtnttagacctaataatttgctttaaaatgggagctattctaagatgatttcgttgcatagtcatcttatgtaacacccttattttttgtaaaataaattaaaacagattttatttaaaataaatagggttacgaaaataatgaggtttttgtaataaataaatacggaggaataatttataattaaataat

SEQ ID NO: 277214 - DNA, 184 bp, Glycine max
atgattatacttgatttaagacttttatgatctaatttgggcaaaattggatgaaggcaagagtgatttaaaaaatctgcactattatgcagaattttgctgttgaaaggtgcaacaaaattttgtgcttgtgcaaaaaatgcttatccatggctgattgtggaaagggttgtccatatctggg

SEQ ID NO: 277215 - DNA, 120 bp, Glycine max
agctttaacctcatcgtccctcacagtctttagatttgggagccaatccaatccttgtgttcggactctcagccacttatgatagccaccgatgatcccattactggcttccctaagctc

SEQ ID NO: 277216 - DNA, 445 bp, Glycine max
  unsure (1)..(445): unsure at all n locations
ctccttcttccattgctnatatccctagtggatggcgcctcctctctcctcttctcctttgtcttccgcttcatctccatggtgaaaaatcaccatcaaaggacctcattgaagctcaaagatccagcctccatagaagccccacaagcaagcttccatcacaaattccgcaccagcatgattggagtaccgaccttaagtgttaatntgtgattaggtatccctgatgtttcaatgagtttagaaatttatgtgtcagtaatccgaaagtaggattgagtagttcatcttatttatcaatgttatcagtgctacaatactccttttcgtcattgggtatcaatgataagacaataaattattttgcaacaatatctttttagaggcaagacaactccttttgcagtaatctgcttgctatatatgtgtaagttggatatgttgc

SEQ ID NO: 277217 - DNA, 76 bp, Glycine max
  unsure (1)..(76): unsure at all n locations
ggggggggggtttttnattttttttttccccctcaaggcgctggaatttaagctcccattaagacaccctccaacc

SEQ ID NO: 277218 - DNA, 125 bp, Glycine max
agcttgaccattgaatattatgaatggcactatcaactcagatgagcacctgaatttctacatcatgcaagtcaacttgtacaccgcaaacaatgttgtacacctgaatgtctacatcatgcaac

SEQ ID NO: 277219 - DNA, 225 bp, Glycine max
aaatcctaggatctgctgaaacatgatgggccatatcttccttcactatccataacgggccctatcgaaggcaaagggtgtgtctcttcctcagttagccttagacgcaactgtttctgaaaatctccacagaaggcaatgctcttgggggatttcagattcaaatatcttaaagcttgccgcataacagatctgcatcatcttgagatattgatgctgacttgg

SEQ ID NO: 277220 - DNA, 116 bp, Glycine max
agcttgtcaattaaattgatttagatccatatgacaaggaacagataatacaagatttaaaattggaattggagaatgacaataagaaggcaactaacaatatagaaatttccttt

SEQ ID NO: 277221 - DNA, 373 bp, Glycine max
atacttatttacacatacactactcaacataatttatgactacagatcacctataccatctcacctcattatcacattccataagactaagtaaccctgatcgaaatagaaaactcaaagactaaaaggctatggggtgtgagatttcttgaccattggtcttgccactcatttcttgtcgccttgcttggagctttgactccttcatgcttgatgcatctggttcgtgatatcatggctgctcgatgaaaccctacggagagtgcaagtttgcggcatcgttggtctcgatacttgagtctgatgcctctgccttggtgactccactctttggatacttgcacgatctctctctctctctctctctctctct

SEQ ID NO: 277222 - DNA, 162 bp, Glycine max
  unsure (1)..(162): unsure at all n locations
agcttgttgtggctagacattntgcagcttctgctatataactaaatntaacttatcaaagttctttgtttatatgaacaaggacttaaggcattttagcatcattattgatctcagacacctaanaacacctaataaaagatgcatatttggacatacatt

SEQ ID NO: 277223 - DNA, 176 bp, Glycine max
taagcacctgcggctgcagctttgccacaccttctgacttggtataaattttttaatagggatagtaaaaaataaaaatatacaggcttttctcaaatagttaccggaaattaaacaaaccattcaccccttgttcccgcactgaaaaagggaaaaaaaaaaaaatgaaaaaaata

SEQ ID NO: 277224 - DNA, 116 bp, Glycine max
agcttgtaaagatactcgtgttcataaaatgtatttgactattcgtagttcttctattagagatgaaataactatgattagaagttagcgagttggaaccagtttatctttacttt

SEQ ID NO: 277225 - DNA, 311 bp, Glycine max
  unsure (1)..(311): unsure at all n locations
agctctccaaaaattcaaatggtcataacttttcacacggaggtccgattcaggcacatgatatatcgagacgttcgtaatngaacaatggaagccctcgagaaattcaaatggtcataactttttactcggatgtccgattcaggcacatcacatatcgagacgctcggaattgaacaacggaagctatgaagaaatcaaatggtcataaactttactcgaatgtctgattcacgtgcatcacatatcgcgacgctcgaaattgaacaacggaagcaattgataaattcacatggtcatacttttttgtc

SEQ ID NO: 277226 - DNA, 235 bp, Glycine max
cagaccattctgtccctaactcttgccttttcacgcgatccatgctgcactcttgagtccttgatgggcactgaccccgtatgaaggggaactccgttatgcgcccttatgggtgcaactgtttgcaggcggtttttaccacccggtccactggacattgcacctcaggaacatccgtctctccttcaggacatacacccctctcaccaagtgtccattccttctttaaccacgt

SEQ ID NO: 277227 - DNA, 453 bp, Glycine max
catgcaagcttaatgtgtgtgcaaactttgagttcaattttgtatcagttatgcttcacccttatgtatgttgctgtcccatatgagagctccataatatatgaaaaaccaggctgcatgtcgtatatgactgcagtgatgctgcttccacatgttgttgttctgttttcatgtttttttcttcttctttctttcaacagaagtatatatatattattgtaatatagataccagagagcattaaccaaactgtcccaaaatacaacacatatagaggcagctcccccgaattgaatagaaagctgcccaataccagaccataaataaaacatgatgcacaacacagtttagcactacatagattgatcccatcaatatctcctcttcagctccaccaaagtaaagcttgaggcagcaatgatgtaaataaagggacttttctctacacatgct

SEQ ID NO: 277228 - DNA, 62 bp, Glycine max
agcttcttagtctcacctgatgaagaatgaattgtggctacttcatgtactcctctaatgac

SEQ ID NO: 277229 - DNA, 84 bp, Glycine max
tgtgcttgtgtggtgttgcaccctaattcggataatacaggctaaaatgggctctgaaatcgagacatcgcgctaagctccacc

SEQ ID NO: 277230 - DNA, 266 bp, Glycine max
agctgtcaaccgttcttctacgttcttcattcgttcttcatcgttcttcgatcttcaacgggtaagtacctcgaaccaagcttttcgattcattctatgtacccgtagtggtccacattgtgtttcgtgcatttatattctcgtttgtttactttttataccccctggtgacgtgcttaagccattttacttaagtcatttctcgcttaacttagaaaataaaataaatttccaccgaacgttctgaatgtattatccattaactt

SEQ ID NO: 277231 - DNA, 353 bp, Glycine max
  unsure (1)..(353): unsure at all n locations
agctttcttcaatataaatatcaatagtaattaattgaaaataacagctgattaatataattaaaaaaataataattacaattgaaacataacattaaattcacataacatatttaattaaaatgactaaattggatattaatcttttgaaatatctaacaaaanaaagtacaacacttatattaaaaaaaaatcagccaaacctttaattagcttcattagctagtattgactttattaactggtgtggctaacagtagtcacaccaatgagcaacctatcttcaatataaagtttttttttttactgtgattttcaactataaattagtacttataatcaaagtaaaaatt

SEQ ID NO: 277232 - DNA, 415 bp, Glycine max
  unsure (1)..(415): unsure at all n locations
agcttgcatcaagtggtaatcagagcacaagatcttcaagtaggtgctccttaaacctccattaattnttttctttaccgtctcttccattggtgtttcttcatttttttctccatgtatctcctcacatgtcttgtgataaatgtttttaacatgattctttagagtttccaccgatntaaaatgctatagaagctacatttgattttctatggttcaaatttcttgttcttgttcttgaaccatgaattgtgttaagtttacgttcctttgagttttgtcttgttatatttttgtggttgaaacctaaaccataaaattcttacataaatattaaagtagaagacaacctcaaaaatctagagtgacttgttcacctatttgtagtttgtcatagaagtcatgtctagtcatg

SEQ ID NO: 277233 - DNA, 79 bp, Glycine max
  unsure (1)..(79): unsure at all n locations
agcatttgttntaagttngatatgtaaagctgtttgatgatccacatttgccagtgtattcaaagatgaactataacta

SEQ ID NO: 277234 - DNA, 78 bp, Glycine max
taagtcacctgcggcatgcagcttgatataaatttttaattgctaatatagcattaatttctatataataatttatga

SEQ ID NO: 277235 - DNA, 90 bp, Glycine max
agcttaacatataacgcaccatgcgagagttttgcatatggatatttcaataaaattaggtgacgacagagatgaatagagtgtagtatg

SEQ ID NO: 277236 - DNA, 521 bp, Glycine max
  unsure (1)..(521): unsure at all n locations
nnnccttaattgaaaanacttttngaaagnntnnatcnnnaganngannaagnnnncnnaanataaaaaananaattcnttatgtcaatctcaatactnttttcggtctgtttacatgtataaaaaaaaaaccttattcccttttggngggccttaatccactttaaattttgcagttttatggtcctccttaaatcatttaatcctgagtattttttaaataatttttcaatctctgattctttaaatataagtaagtggcctatttgtaaggacgggaaggaatttgacttgtaatacctcgagtcttaatccaaaccctccctaacattaacctgctcaatttttcaaccttaaccctggtaaaagtgtttttgtgagccatttcgattaattgcagaggattgcgctaataacacctctcttgtgttatggtaaggaanggccctctctagcctcctaaaaagggggaaggaagtgatttctttatcaattataatttcatatgacacactctcgcg

SEQ ID NO: 277237 - DNA, 403 bp, Glycine max
  unsure (1)..(403): unsure at all n locations
agctntgagccaaaatcctgactcaccataaaccttgacccagggtgagaatgtcaatccttacccttggaagcaaaaaagaaaagaaggaaaatttgctatcaaagagaaagcaaaaagaaaagaaaggaaattcccaatcaaagagtgggagaaagcaaaaagaaaagaaagaaaattcccaatcgaaaaatgggagaaagtaaaaaaaagaagaagaagaagaagaaggaaagaaagctcctgatcaaggatcgaaagaaaaaaaaaagaaatgtgcagaaaggtctttagaccagacaatatctgaacaatacagaattgtcaccaaatgaacaaaagaaagaaaaggaaaccataacctaaaagtggtcttctccctttgattaccaaccaaaatcct

SEQ ID NO: 277238 - DNA, 65 bp, Glycine max
  unsure (1)..(65): unsure at all n locations
agcttcttgaacatgatcaatatcattagcatatattaaatgatgnaattttggtacgtgatcta

SEQ ID NO: 277239 - DNA, 445 bp, Glycine max
  unsure (1)..(445): unsure at all n locations
aaaanaaagaccctgggaatttggaagntgagacnatcncgcgaggggnnccaaaatcagtcatattttcnattattgaacatcaagaaagactcaaggatgctttattctcagaaggcatcactataattaaaaggattttccaaagaaaggatgaatggccaattttctaaatgattttccaaggaaaaacctttgcggaggttttacctctctggtatacgttatcttagggccggaatcgtttcccgaacccaaaccagttttttactggttacaaggagtatcctttcccgggccttgtactgattacaatggttttgacttggattcaatgtagcatgccactggataacacttcacttggtatccttcccactctgtatataccctattcaaccatggttcaatttactgacatgccaccggggggaaatttccctcc

SEQ ID NO: 277240 - DNA, 115 bp, Glycine max
agcttgaaggcaaactgtatgcgttggtcaacttggtaacccagctggacttgaatcagaaatctgtacctgtcgcaagggtttgtggattgtgctcctctgctgaccaccatac

SEQ ID NO: 277241 - DNA, 221 bp, Glycine max
agcttcataagcattggtcacacaaacgcaatggttttaccatagccagatggtgcacaagcgaagcattcacgaccctatacatataattgaagagatacagcagcgaaaacaatattatgtttaatgcctaactcaacgacaacataatttgcatataacatcatgatcaaacttcaggtacaactttctcaagaactaaaaattaaaagcagaacaat

SEQ ID NO: 277242 - DNA, 516 bp, Glycine max
  unsure (1)..(516): unsure at all n locations
nnnnnttttnnccggaggaggtcccagtnattgnagnnancnttncngagcnggcgaaggancgataaaatctttactttattcattttggnccaaacaggcccatttcagtgcagttggtctaggcaggatggtgatcatttataaggttcccagaatccaagaatttcctatgttcagagtacttgaggcgagagttcaagaattaattaatatgtgaggatactgctcccctttaattaaatggaggaatgatgcctcccttaggtgggaatattcttaattggtagcccgtcgatcttaccttccgtgaaatggcacctccttagacattacaatgacaaatttttattaagctttttggattctgctcttatacttttgggccctgctacttgtggcgcaggcttcatacaaatcatacatggttattcggcccgctggctattggactgacatggcctatgctttaaacttattaagctgttggcaactattctattcctcataagactc

SEQ ID NO: 277243 - DNA, 426 bp, Glycine max
  unsure (1)..(426): unsure at all n locations
agcnttgaacaatattatcataacttgaggtgagtatgacaattttacaagatgatgtttcaaagtcagcttataggaggataaaaaaaaaagagagagaatgcaatctgatgtttggcgtgctaaacgacattggtgtttttttttcacgagactccatcgttttaaaggtccaaacttgtgattaaaattgctgagacatctagtgtatacatttgttgtacatgaggtttgttatgttttgatttcttctatattggtatgtataagaactaaatgttttccatataattaagaaccgaatgaacaaaaatgtataaaggcagaagaggttgtaagttttcttccctgtcagaaatctcaaaaattgtatttatacctaatagaaaaaaacctaatcaacacctaaatttaaagtgatcacac

SEQ ID NO: 277244 - DNA, 65 bp, Glycine max
agctttatataggttaaccttgtattaggtttatctcaagatcatcatgggtcaagtttgagctc

SEQ ID NO: 277245 - DNA, 91 bp, Glycine max
agcttgtcatggcacttccattcataaccaattatgtcaacgaggaagtaacctccaaagagaattagagcctaatggaacatgcaaatta

SEQ ID NO: 277246 - DNA, 358 bp, Glycine max
  unsure (1)..(358): unsure at all n locations
tatctaccccatntctgacagtgctngngtaagcccagtccaggtggtaccaaagaaagggggcatgacagtcattcggaataaaaagaatgacctaattccaacaaggattgtcactggttggagaatatgcatcgactaccacaagctcaacgaagccacaaggaaagaccattttcctttgccattcatggaccanatgttggagaggcttgcgggacaagcttattactgcttcttggatggatactctagatacaatcaaattgcgataaaccccaaggatcaggagaagacggccttcacatgcccttttggcgtctntgcttacagacgaatgtcanttgggttatgtaat

SEQ ID NO: 277247 - DNA, 491 bp, Glycine max
  unsure (1)..(491): unsure at all n locations
agcagtgagcacactaagatgagatataaacttgagccagcacccactccaaccnccacggtgaggagctcgaactcgaagtcctcgacacttgagccaacacccactccaatctaagaaagttctcattcctcgcaagttcgattgaagccaatggtgagcgtttacaattgtgaggtgagaagcagtgagagagagggatgggctgacagtggaggcttnnttatttggggttagggttcccttatcanatcacacatgagagtgacaaagggctagggttgatggctttnntattgggggtaattnttaattctgacagaattgattccttctgtaaaatccgttggaatatatactttccggcagaatacatncttcacaaatatccgtgggaaaatacaatatntcggacggaataaattccgtgggaaatattccatcggaaatatctatnnttttgtagtgggtcctactcttgggtctgaaca

SEQ ID NO: 277248 - DNA, 464 bp, Glycine max
  unsure (1)..(464): unsure at all n locations
gcttgagatcctgacaggatccanacacaaacaaacatatggagtgagttatcatattcgtaaacaggtagagataaatgaagacacatatataatataagtataacaagctcaacttagcacaattcacatcattttaccactcatgtaacatcacttgtcccaagaatctaataaaaaaatcacatttcacactttcacataatcacgtgttcagaacaacacattcaagtacaatacaacatctcatgctcacacaattcattactcaccatcacgtaacaaatcacaatgatcattacatagacattatgcaacaaatacactaagactcaattntatatgcaatgtggtattaggtgagtgaaaaatctcatcaggcgcctaggaatacatgacaagacaagtcatacatcggtaagtcaagtcactctcactaggtaaaatcatagagagagcaatca

SEQ ID NO: 277249 - DNA, 337 bp, Glycine max
  unsure (1)..(337): unsure at all n locations
gcactcactcctatgttaacatgtgatatatttaagattgttatgactgtgacgattgacatcctctgacaactctttgatactgtgtaaaggaaacaattcacccaaaacttttaatatgttaaagcatgaagaggatggtttntgatgtttgagtaaacaacttaagtgcttatttaatagaagtttatcacgtgagcttattttgataaccttcaccacgtatccttatgagaagctaatgatcttctgatggaatgaagcttatgtgaaatgtcttgaaccaagtactttaagagcttagactattatgtgagaacacaaatgaatagacatt

SEQ ID NO: 277250 - DNA, 425 bp, Glycine max
  unsure (1)..(425): unsure at all n locations
ccactaactctcgcacagtgagacatgctcactgagcgtgtcttcataagctgagaagcccaaaagtctttaaaaactgagagaagaggggaaatgaagcgtcaagcaacgtggaaaggaaggaacaaggcagcaaggctaaaaagaagacattttcttcacatttttactttatcattccattcctacatcattttcacccttgtattaagccctccttgctaatggagggctaaaaacttcattgttggggagtttttccactgagtactcttgatgtaaaaactttaactatttatttaatattatttctagtattctttgcttctatctgtgtttattttccatatntttagcttgatcacccatttatatgttntgttaagntttgagtattggaaaatgcttntagtctttagaacttg

SEQ ID NO: 277251 - DNA, 468 bp, Glycine max
  unsure (1)..(468): unsure at all n locations
cctcatgaatcttgaagtgttcttcatctnttcttcttgagtcttgaattgttcttgattccatcttgaacattatgaactcattctttcattgacctttgtgccttttgtcattacctttgtcatcatcttttgttataatcattgttatcatcaaaacatctttgaatcattcttgattcaccatgaagctttgcttctacacgttagtccctcaagtcatagaaataagataacatacaaatgctaaatgatgaaacatgaaaagaatacgaatctggggatcccacggtcatgtggctccgcatgccaccggactcttgggtcacggtaacaaaaagtgaggtggtcgacaaaagcatggctnttgctcctacgtatcctcaatntgtgatgaggaactcagacctacgtagttcttgataactgtgagaactaaaatagtctcggtgttttcttcactaaaat

SEQ ID NO: 277252 - DNA, 484 bp, Glycine max
  unsure (1)..(484): unsure at all n locations
gcttgactntgcgagtggagtttagccttagtttcactttagttattagtcaattcattatataaagagaaatcccaaagagaaacgtccgattgtctttttttttggtttattttactaaaagatactttntgattattntacctttttttggtttccaacgtggttacggcatgaccgaacggtcggatttcattttaacaaaaattaacggatattacaaatcaaatgatcggtggaaatttattttattttttgattaggcgagaaaatgacttaagtaaatgactaaagcatgtcaaaagcgggtacggaaagtaaatgaaatgaaaataaaagcacacgaaacaagtggggaccaccaatggtacatagaatgaattgaanagttcgatttcnggaacttaccggttgaagaccgaagaacgacgaagaacgaacgacgaacgatgaagaacgggtgaaaatcttcgcgaaatcaccc

SEQ ID NO: 277253 - DNA, 481 bp, Glycine max
  unsure (1)..(481): unsure at all n locations
gctagagagatcctagagattctctaaggcttaatcttatatccttccctctacaagaatgttataaccctaaggacgataatttgngcaaggaaagcttttactatgtaatttattatttgcattgtgttttgatgttgattntgtgatgctcatttgatgaatattgggtgtttaagttgtttttatcattctttggtgttggtgtagattgagggttggatttctttgtttttaggtcaaatcatgatcggcataattntgcaatctcgctaagtgagcaaatccctctgatttaganaatttagaaatttcataagactcgctaagtgagcaaacctcactggaaaanaagaagattggaactcactaagtgagacacacaagtttgtcttagctagaaatgctcgctgagctcgtcacttctctgtattttggctttagaagttccaacattataattcaatagtattttctcttc

SEQ ID NO: 277254 - DNA, 421 bp, Glycine max
  unsure (1)..(421): unsure at all n locations
gcttctccttgaacccctntgtcgcttgttggagctccttgtgcgagaactgcactgtggcaccagatgcatactcaagaagcgcatagtgagcagataacccaccaaacctcgtgctgttcctacaacaccacatccacaaaccaccttccaaggcaatcaaacccaaaagggtacccaaaacaaccaccaccacaacccaagcaggcaccctggacctcttttccctcacaccccccatagagggtggcggatttggctccagtggcggacaaaccttgacataagaagtgctaggcagcgaaggattatgatatgcactaacaaaatcttctgatctcatcacacactgccccgtgccatctgacaaggaagtagatgcaaaacaggcacgtgaaccggaaagaacaattcctctaca

SEQ ID NO: 277255 - DNA, 566 bp, Glycine max
  unsure (1)..(566): unsure at all n locations
aaaatcacgcactagngcactcttgatactaagcttataaaatgataataaaaattaaaatagtaaaatntanaaggtataagtggataaaattaatatcaatttattctgtcttttatcttttacagctatttacattcattntattaaaaaaaatntatcttataggaacaagatctatttttttatgaggacaaaaaaatattcattcaatatattaaaataaaaaatattatttatccagcactgagatggactcaaaaatagagtttaaacataataataaagggataactcattaacaaaattaagttaaatagcanaaatgacaattagtacatatatatgcatatatatatatatatatatatatatatatatatatatatatatatatatatatatatatatatatatgcatatntntntatnttatgtgtgggaattanacagaatatataagatatcatttaaccaatngagctacactatatataataataataataataataataattaagattctgcgttatcattctttctagagtgactgtacttatatg

SEQ ID NO: 277256 - DNA, 91 bp, Glycine max
taagcataaaccttaataaaaatcatttttcataaaatataacctaattgacaatatttataattaaaaaatattctcaacgcttcacgcg

SEQ ID NO: 277257 - DNA, 287 bp, Glycine max
tcctctgaatcttgagtgtcttttctcttcctctcgagtcttgaatcgttctcgagttcatcttgaacattatgaactcattctatcattgacctttgtgctgttcgtcatcacctttgtcatcatctttagttataatcatcgttatcatcaaaacatctttgaatcattcttgattcaccatgaagctttgcttctacacgtcagtccctcaagtcattgaaatcagattacatactgatgctatatgatgaatcatgaaaagaatactaatttagggatcccac

SEQ ID NO: 277258 - DNA, 638 bp, Glycine max
  unsure (1)..(638): unsure at all n locations
gcgtcgatgacanccncncgcgtcnnctacagagtataacgagagacgatcacaaaagtgtaggnaccaaggcnnanacgcgaatgaggcatatggagccatgtanccctcgaacnncnganaantnannnaangccccnggggatcaagnaanccgcatgaagcctgtttatcaacttgatcccgatgcacccacaaggcgtcctacgagaatgcggagcatccacaacctacaccgatcatggacaaccctaccgtacgactactgcggatcaagtataatgcatacgcggatcaactanaagaaggcacggagcaactacaatgccgaacaactatggactaaacactacacaacaccaccaacaaaggaagcaccaacgactgggatggagaacagagctgactacgacaatgaccacgagcagaagacaacgacgaagaacaacaagacgaagacaccaacagacgccccgtacaggaagaagaggtcgcgaacaacagagctgccgaagaccataacagagccgacgaagactgcgcgacgaacaatacgcagctgggtgccgacgacctcacaagaaggaagctcagatgaagagctgcgatgaagaaaacgtgcacaacgcctaaacacg

SEQ ID NO: 277259 - DNA, 438 bp, Glycine max
  unsure (1)..(438): unsure at all n locations
ttctcgctngccaatatgttggctagcgagcattcgctaagtctatcactcctgngctaagcacgaggaagaatccagaagaagatgagttgtacaggttcactaagcgcaccgcttcagttcatctgctaagtgagaaaggcgcgctaagccaaaaatcactaacgtgcgctaagcgcccaagcacgaacaaggccacctatttaagcctgaaatcagattttgtgaagagagtttggactgggatttanagctttgtatgtctagggtttctagatgtagaagcaaagactttgagattgtagaagcaaatactttgcctttgatgttttgatgatgccatatgatcgtgatgatttgatgtcttatggaaatgcgcttcacaagttgaattcaagacaacaatccgagaatacaagatacaacatcaagaagatg

SEQ ID NO: 277260 - DNA, 412 bp, Glycine max
  unsure (1)..(412): unsure at all n locations
cgcctccaattctatttaaactcgttcaaattagtatgataaagtttcacattcattttcgaaaggatccttcggtctaaaatattatcgatatatcggttccaggcttcctctgattgaaatctcctattatcattctgatcctgtggtctagaatcactactcttatgtttcttagaggccatctacatataaaggaaccaaacaattaatcaggacacagttattcaaattttaaaactganaaagacactggccgcttagcaagacatggtccgcttagctggcctttgaaaaaaaaaaaaactatcgcttagtgacatgtgaaccactagcggaagtgtaaaattttaattctgaaatggcttacgggaaaccccgctactgaacatgtccgaggattgcctatgtc

SEQ ID NO: 277261 - DNA, 401 bp, Glycine max
  unsure (1)..(401): unsure at all n locations
gcttgcaatggaataccatgagaattacctctggtgtttctttgttaacctgttaatactactattaaactaacaacctattatacaaagtaaataagaaatnttgactctgatttcaaaactaggattgtacagaagaaacatgacaaataaaagtagaattaaaactaactgactagagctaccctgctatgtagattgtgcatggtgctaacttaataagacatagaaatggttaacggttatgtcaaaagacaagagactttgatgtattgtaatgatctcttaatgtgtcctaattacagcaaatacagcacgaaaagcaattcagccatttattacgtgcatttgtggatgatttcggggcctgatcagctgcactcggtgcttcatcttcatct

SEQ ID NO: 277262 - DNA, 380 bp, Glycine max
  unsure (1)..(380): unsure at all n locations
tggcattcaatattactatntgtgtttccacttctcacaccccttagtttctaactaatcctataacttatcatcctcaagacatctganaaatgcatcacgtttacggcaactggcagttatttctcaaaattaaaagcaaactccaattaattgcagaacgataaccagtaaacatcccanagagtgaactaatccanaaacttcaaaacatctagagtctctaaactntcccctcttagttctgcatgtacacatacacttcaactacaactatataaaagatgttcagcacanaattccatcatctccgcttctagttccagactcatattgcacccacaggacagaattggtaccaattttaacacctatcctaa

SEQ ID NO: 277263 - DNA, 410 bp, Glycine max
  unsure (1)..(410): unsure at all n locations
cacttccagngccctacattacgagtatatgtgtctagggtaatcatgcttcatatngaatttttgattacagcttcctcttttctaatggtcaatatcatgggtaagttggctattgtatccacttagaagttattattttgaaaaaaaaaaaaaagctatttgctgttttaagcataataattctggcaaaaaaatggaaaaactaaggccagaattagacattacagatggtatggggaagtatgagttcaagttcctatattgcttcaagaagctagttattacaatcaatggcanaactctaggacccagcatccagccataggaaggtgataccattattgttcaagttaataatagtttactcacagaanaccttttgatccattagcactggatcagacaag

SEQ ID NO: 277264 - DNA, 435 bp, Glycine max
atggatcaagttgatccacatgcttctggcggatcaagttaatccgtatgaagcttgtttatcaacttgatccgtattcagcttcaatcaatcctacaaattgcggagcatctacaacctacacggatcatgtacatccctaccttatgactactgcggatcaagtataaggcatacgcggatcaactaaatgaatgcacggatcaactaaaatgcggatcaactattatctaaacactacacaacaccaccaacaatggaaacacaaacgacagggatggagaagagagcttaccttgacaatgtctacgagcataagaagaagaagaagaagaagatgaagaagacaccaactgacgtgccgtagaggaagaagaggactctaaagaacggagctgctgaagactcaaacagatctgaagaagaatgcgtgaa

SEQ ID NO: 277265 - DNA, 448 bp, Glycine max
  unsure (1)..(448): unsure at all n locations
tcaagaacaagcttgttcgcacatcgttcgcgtgtatgatatccactcgacaaggtttgaagtagaggagaccttcaatcctataacgcaacgtggcggacaaaaatgggcagttaacttgaataaccattattgtcaatgcggaaggtattctgcgcttcactatccatgttcacacattattgcagcttgtggttacgtgagcatgaactactaccaatatatagatgttgtttacaccaatgagcacatcttaaaagcatactccgcacagtggtggcctcttgggaatgaagcggcaattcctccttctgatgaggcatggacactaatccctgacccaactacaattcgtgcgaaaggtcggccaanatcaacaaggataaggaatgagatggatngtgttgaaccatctgaccaccgacaaatatgtagtagatgtggagct

SEQ ID NO: 277266 - DNA, 523 bp, Glycine max
  unsure (1)..(523): unsure at all n locations
gctgtatgtggtcgggttagcanagtattcatggttntntgcggatgcttagcttangttttatgagagcattcacctattccctattntgttgctatcatgacttccttgctacatccctcttttctttgattaccctactaacatcacacaatagtctgttcgacataattgcttcaggtttctatttctcattcagtggattttttttttgaacaatggcattatgccacattntgcagtttacattgactgtgtgatgttgttacaatccctgcacatagatagttccaagcactcccccaaatttgaaccaaatatctttcctaggacaattctctcctacaacctaagacaaggtgtgcaaggcaatcatttcattcagttagggttcaaaaataaattcaatcatgttaggctcanagaggtgcaatgggttccttcatttgatgatacaaggtggatattnggcttaatagctaaatnttttttcacaacatggccttgatcatttccacatcat

SEQ ID NO: 277267 - DNA, 478 bp, Glycine max
  unsure (1)..(478): unsure at all n locations
gtgctcacctttagtagaggagaattcttcaagttgtttcatgtaaacctctttctctagatgaccattaaggaatgtcgttttcacatccatttgatgtaactcanagtcaaaatgagctactaatgccataattactcaaaaggaatctttcttagatacaggagaaaaaatctttgtgtaatcgattccttctctttgagtgaaccctttggcaacaagtcttgcctaatgtctctcaatgtttccttgtgagtctttattggttttaaaaacccatctacatccgatggctnttacaccactaggcaactgtataagatcccagacttggttaaatgtcatagaatccatctcatctttcatggcattgtaccacaagtttgattctttagaactcatggcttctgaaaacatttcaggatcatttgcagctccaatgttgtagtccgattcttgcagatacactacataatca

SEQ ID NO: 277268 - DNA, 439 bp, Glycine max
  unsure (1)..(439): unsure at all n locations
gagatgttggttntgttgtgtagtagtatgttatatctaatttctaccacaagaccccatataacataacaaaagaaaaactgaataccaatatagttttctggctcatgtagagtattatatcttaaggttaagatatatctataatccttcatatatatctgattntgtttttttatctctgataattttttattatttcttgaaatttgaaaagttttgtttttatccttattgttagtatttcttcgttaaccaaagatgtgatcattaactnttttaaaatacggagataaaagaaaaagatttgaaaactcatcatggtcacatatgacaacttgtgtaggatatggtgaaggcgacaaagaagtcgatgcggtttgnggacaaatcgattctacaaacttcatcattgtcaaagtagagcatgcaatgaaag

SEQ ID NO: 277269 - DNA, 316 bp, Glycine max
  unsure (1)..(316): unsure at all n locations
gttacctatatagaagtgtgttatttttttgtggtaaaacaactaggaatattaaagattaatgtgaagaagacttttaaataggttaccggctaggctacgctnttaaaaaggtcaagtcgaattaaaataaaagtctttgataagctatangtcaagctcatgcctnctcaaagtangctagacctcgcctgacctatttccattcctagtgggataggtatgtactcgatgacattnttnnttttttttactctttacttctaactttttaaattttatacgaaattcatattaactttttaatttgatatat

SEQ ID NO: 277270 - DNA, 377 bp, Glycine max
  unsure (1)..(377): unsure at all n locations
cagtcattccttgtcctggaacttattgattctagtcaagagaaaggagatgttctttgagtttaagatgatgtgcccaagcagtgacaatggctcttcacattgcaactctagggtgttggtgcaagttgaaaatgaaaggagtgcaaataggagggatgtcatgaatgatgcattggtaaaaatcgttatccttctcttgcctcgagaagcacatctgtcaatcattgaatctgtagatctttgttggacaaaagatttgcaccatacacatgtgattggatgtgtcttccttgtcatactctgaggtggacgcaagacgtgagntttcacacatgtctntgaagtaaaagagcatgccatcattctgatcaaac

SEQ ID NO: 277271 - DNA, 429 bp, Glycine max
  unsure (1)..(429): unsure at all n locations
tgaacaagcatataacatgctatatgttcttcatctaactgacgtatgcgctcggcagcctccatcaatatagtagtatggacgcctactatatgtcgatctgaccaacgctgttatcggcatgatacgacacatcttcaataccttacttatacatactgagaggttcgttattatgaggccatatcgacatgcgtctctatcataagccgatggacatctctcctttgaagtgcgatcaatgcatgttgctatggctggactcatcgactacatattatgaattgtgatcgcatcttgctcgccggagtgtaccctgcatgacatattagcacgatagattgagtatcatgaacttatatcacatgaccgtgataatgaaagatacctcatgtctcaacaantcttattgtcgggttattgaagcan

SEQ ID NO: 277272 - DNA, 505 bp, Glycine max
  unsure (1)..(505): unsure at all n locations
gagcgcgatccactagactcgtttcgagggttatagactctcctatgaacataatctcctacacccactcaggatcttgagttatagtacgccgatcaaaagtctttacatacgcgacaatatactgtggttcgacaccacttgcttacatccacagagtcgtctactatgtatttcccatcacataatgattcacaaattgcacgtcccccacactagtgattcactctagaaacccgagtatgccactcaatggctacctgacatgatcacgatataacacttcgacatttctctctcaacatagagacgttagatcacaattacggtcgctatgcactctctatacatgtgcagaaactgtacgaatgctcttgtgtgtntataacgaagattatgaccaacctatatagagtaactctcttgcgagtgaatgagacatgccttcagtgcatgcttcgactatcctcattaatataatacagacctactctcacttaagtct

SEQ ID NO: 277273 - DNA, 408 bp, Glycine max
agcttgccacccagctcttctatgcgagcagggttgctttctcctaaagcaacagccttctggaggaatcttctggacggcccaagtgggcctggttgctatttgcacacacattgttactaaacacacacctctgccttttttaggtgatgcatgttatcgtaaacgtactgatacttactaatatacgtaacgatacttgttgtctttccgtatgataccgaaccttgcggattacataatcatcccctattatgacttacggaatgttacataacctcactgattgtgcaacgatgctaccatttgatttccagtgtgtcacggaaccttaccgattgcgcatcaatattttatcttgtttaacggatgtcccagaaatcacaattgcctaagatgggtgccaac

SEQ ID NO: 277274 - DNA, 463 bp, Glycine max
  unsure (1)..(463): unsure at all n locations
gttccttcacanataatcatcacacaacttataactgactaaaccacccatcatatctcccaaaaccccatacccacgaaatttaagagagaaagaagtccacccaaacctggattttcgaagtcccactcgtagccacgcacttcacgaccccgaaaatgctctcatttcacgatttgnggcagaaatgatggccaaaggttgaagctntgtgtggagcttcaatggagaatgagggagaagaaaggcaacgtgagggagagggagagagaaggcttctgcaatgtttactgctgagtgaagagagagagagttgctntctggtttntaaaaggctttttcctctnttcttattattttattcaagctctgccacatgtccctatttgattggagcananagggcccactttctcttttngactgtgacccatactcagtcacaaaagtgagaaaaatctga

SEQ ID NO: 277275 - DNA, 229 bp, Glycine max
  unsure (1)..(229): unsure at all n locations
agcttctccccaattttttatttataggggagaagttaagtgataaagggttcagccccttaggcacttctctctctttcgaatntgcttgganaaattgttttcgtgaatataattcaagccgaggcgctttcgaaacgcttccgtaacgtctctgtgaggaatatctcgaacgcttcgaccgttcttcgacgctcttcattcattgttcatccgtcgtcgatcttca

SEQ ID NO: 277276 - DNA, 393 bp, Glycine max
  unsure (1)..(393): unsure at all n locations
tgtcgcaacgtgcccttcgcgggcgagcgaaggcgaagctcacangtgcgctttccanaggaggaaagatgcgtggagtcgccaccaacgtttatttgtggaaaacgtcnggaaaaccgaaggaaactggtcaaaatgaaaattctaagctcgggagttgtatttacgcttgaggaaggtattagcacctctcacgtttgtcccanaggacaacagtctattttttagaattgtggaattgtgttatcttaactnttatttctttttattttttgaggtcgacaaaagcggggcttttgctcctacgtaccctnctttggagaggaaattagacctacgtagttcttttttatgcgtgaatcaagtgattctttttacttgaaaagtgatcat

SEQ ID NO: 277277 - DNA, 455 bp, Glycine max
  unsure (1)..(455): unsure at all n locations
agcttctatacatcattcttctaaataggtctagctttttntgcatttctttggcccagtattcattagatatagcgtcatccatgtgctctggctcgatcttggaaagtagtgttgtgtgcttgagagaattccttgtctggactntgcccttaggatcaccaatgatctaggactctngatgatattttctcagcaagtgtctagttggttctctaacttctttaggttgatcatccattggtgagttggacacaagttggttctgactggatgcaacaatagacttgacgatatcttcaattttcatctctgcaaaggactcatccagttttgacatggtagtgttaggctcgttgtcattaaacctcacatgaatggcttcttccanagtcaaggctctggagttgtacactctatatgcctacactattatcantaaatttttattccct

SEQ ID NO: 277278 - DNA, 494 bp, Glycine max
  unsure (1)..(494): unsure at all n locations
gtagccatctccctaagagtcctctcattaggtggaggttgagccatgttctcagtatgaaaattagtagtcgaatgctcanaatcagaatattcaaaatcactagcaacagaatactcagaatgctcaaaatgctcacaatgctcgaaatgcacagaatgatcaggatgcacactatgcctaactaatctatgaaaggttctatctattttaggatcaaaggattgtaaatcacctggattgcccctagtcatgcactatgtgcagcanataatgtgttctcaaacaagcaccaagggagggttaaaactacaactatagttaaacgatatccaaatgagctgaaattntgtgagccaacaccctaaatcatgaagatagcacacaaattttcagacaaaaattcanagtctaactatgataaatgcctaaggaaagtttagtgaaattcttgataccagggacagatgtcgtaccggatgtcacgacatcac

SEQ ID NO: 277279 - DNA, 334 bp, Glycine max
  unsure (1)..(334): unsure at all n locations
agctttttttgtgccttgaacaagctattctactccctctttcagaaccatgctatgtagcatcgctgactggtcccttctcttccctctcgcaaccttgaagtaccattacttgctacgcccatagcagctcctcagaaatcctgttccgcggcatactctttccttgcgagcgcntacttggtctctatgtccaacggctacttgcggtaacttgctgttctcttctcgtaaccacggcgcactaccttccgaacgtgtgtagcaggcaacttgaacttctccatggtgagtcttgcctttcctatctcgcttctgagagctcggacttctt

SEQ ID NO: 277280 - DNA, 306 bp, Glycine max
tgcagagagactcacttgctgacgctagcgacactatgcttcctgccacagacctccctttactgcagaagacctttcactgctatatacctattcaaagggagcggcttatgtgatggtgttcttccaccacctttgacttgcgcttaacgttcgcacgttgcgtcgacgagtactgctgtgcaagcacactggcgctgcgggtcactcctctcgaacacgcgatattattctccttggctgacagcgagctaatgccggtggactctgatatcctttcacttggatgtgcatacgctcctaggg

SEQ ID NO: 277281 - DNA, 382 bp, Glycine max
  unsure (1)..(382): unsure at all n locations
tatgatcatggatctatcaatntaagttaaaggagtaaatcacttctaggaatgatntaataaaagataactaatctattagagattacccaaatagtttgatcatgcaattcagtgcaaaaaattctctacctagatctaccaattacatgcaggtgataactattatgcaatcgattgagtattagaatgacctatgccaaataaacattaaaataaggaagaaaattaattaacataaaacaatgagaaattccattaagaacaaggaaaggagtacatttggacaattacatcataaccctcgaactaaggggactatctactcaaaatcaaagcanaattagcaattctataaaataaaataaaaagtaaagataga

SEQ ID NO: 277282 - DNA, 343 bp, Glycine max
  unsure (1)..(343): unsure at all n locations
gagaatgagcatgtgatnggaattatgactgattatgttagttatgtttgtcagatngattgtgaaggaatgcattgactgtatcccggtaagagtgtgantccttaaatttgagagaaatgactatcatttagtactggattttgcgtgaatctcttaagtatggactgaatgcatgaaattgaggatgatgaanggccatgttgagtgtgatagccacttagccaaaaagctgactatgtgcttgaatgatttatcccttgcacccaatttgaactgaatgaattattgattgattgaaccctgagcctatacagtgttatctcctgctaccttgacttat

SEQ ID NO: 277283 - DNA, 467 bp, Glycine max
  unsure (1)..(467): unsure at all n locations
agaagaagaagaaattcanagagattcatggcttgtaaaagattgattgaatgaattggaaatgtatattgaaaagcanatcanagccttgcttttatagactcttcatgtctggtcaagaaaaccatttagaagagttacaacttttagaanaacttanaaccaatttgaaaaagtcaaaaaaccttttgaagagttacatcttttgatttattcagaaacagtcactggtaatcgattaccaaatcagtgtaatcgattacacaaggcttttaagtgaaaggatgtgactcttcacantttgaattgaatttcaacgttcaaaggcactggtaatcgattaccaaaacattgtaatcgattacagctttttgaaaataatttgaaacgtttaaattcaattttgaaaactttnntcaaaacaattttctactggtaatcgattacagcaatctggtaatcgatta

SEQ ID NO: 277284 - DNA, 496 bp, Glycine max
  unsure (1)..(496): unsure at all n locations
tgatagtgagactcaacttggatactcttcttgtgctttatcaattgcaacaagacccactatccataatgagagaacaattnttttttaaaaccttgcatctcgtatgaaatatgttctctctttaggtttgggttaggtcagcggatttactcccaaggagccttctcaccattagaagatcaccttcttcatagggtaaacctcttcaatatgctcatcacccatggcttcaccttcatttccacttgaggaaggagaagaagtagcctcctcttggctactatagatgtcttgacccctcataatcatggttttctttgtgggggtattgagaagcaatgtggcctttcccaatacatttaaagcacttaatgttactagttctatcttatngaactagccttggagtgatttcctctatgcatntacccttatcatccttnggcttagaaggtggtactccttgtctcttacttccatanttaaactactt

SEQ ID NO: 277285 - DNA, 475 bp, Glycine max
  unsure (1)..(475): unsure at all n locations
agcttctctgggaccttangcaaatcctcaattcattcttcatgagcaaattgtctactcgtgattggtccctttcctctctccggagcttaagctcgctgttactgccccacagagcccctcggaanttgttccggccatgttcttccctacgggcccttttggtctcttgttccaaggccttggtggtggctatatttacatctctcagttcggcgttctcctttcagatcctaatagctgctgtttgaacttttctttgactgtttgggctttctcgagttctgcctcttcgccctcccttggagctntaacttccacccccttagtggttctcanattcgggagccaatccagaccttgtgtgtaggctttcaaccacctatggtagccaccgataggcccgttgctactgcctctgagttccttgtccttctttngcaccatctncaatgccttgcgtaccttctgaagt

SEQ ID NO: 277286 - DNA, 463 bp, Glycine max
  unsure (1)..(463): unsure at all n locations
agagagaccctagtcggggttntgttgagcttcttaatgaccttgaactcgctttgctgaataatgcggagaaactcgcttgcttcctctagcgacacttccttcttgccacagccatcccttttctccggaagacctttcactggaatatcctcattcggagtgagggtagttttgtcattttgttcttccaccacctttgccttccccttaacgtttgcgggttgagtcggcaggtcagggggtgcaaacacgcgaccgctgcgggtcacgccgctcagccccgtgatattagtcaccttggctgacaacgagctaatgtcggtggcctcttctttcctttcacttggaggtgcatacctccaagggactacgtggttgtttcggtatgggaaaggaacaggtttaactaccgaggggtatcgggggctttgtggagctgcgtccttggtgaaatatacca

SEQ ID NO: 277287 - DNA, 306 bp, Glycine max
  unsure (1)..(306): unsure at all n locations
cttgtagtcaccaggagttatcctctaactcatgtgtttcaccttgcaagttcaatatgttttaacctaagcacaaagtcacaaacccaattcaatctagccttaaatatattttttatccttaatatatatctgacttttgcatttgatccctaacaaatatttttttacaatggatccctaatatttcaaaagttttgtgcgagatccctattgttaaaagggatttgttaactgctgatgtggccattaactcgacacgtcggntnngctcctatgatgtcacgtctgattaaatgtgacatg

SEQ ID NO: 277288 - DNA, 357 bp, Glycine max
  unsure (1)..(357): unsure at all n locations
atgtatatctatattcccttattttactttatttcggagnaaaatatcaagttttatatacttgacataacatattgcccgaattctattcaattatcaatgatccattatattaatgaaagtcaaaatagattcctttggttctttaataaaagccatatattctaaggcagatagttccgttatttaggtcttggctcagtcagtggtctgggatgccatggtgccttcaaaaaagaggacacatgtaggtcgtccaaagcctttgtatgttgagaagctcatgagagacctatgcactattcttcacgaacaacagtcttatttttctgcatcttctgaagaggatcttctttt

SEQ ID NO: 277289 - DNA, 474 bp, Glycine max
  unsure (1)..(474): unsure at all n locations
gcaagcttatngtatgcatgcttatggtttgatcacccattgttgtgtgctattangaactttagcattgactaatntactgtttccttggaacttgatagagcagggctagataactgtagtactagacatagtgtgcagggttctagtttttattacgttgtgcttataatgctgtttaaattaggctaagtttaacaagagacatctgcgaatgaagcttagtttaaattagtccaaactcacgagacatcggtgttggtatttttgtcctcagcatagaacacgggaataatttcaaatagagaaaaaccctaattgcatcaagtatctccgtggaaggacccaacgcttttacttatttgttttcacactcaattgttcacgtntattgtttctttgattactatagaatatatctctgttttcattcatgatnacttaattcttttacaaacagttgtattttaatga

SEQ ID NO: 277290 - DNA, 416 bp, Glycine max
  unsure (1)..(416): unsure at all n locations
cggtcctgtggaacaatgactgccaagaggtcttctagaagatcaaccagagtctcgcgaatcccncggtgctcatgccacctgtaacaggaagacctcttttcctgtacatgaccgtgttggacgagtctatggagtgcgtgttgggtcagcatgatgattctgggaaaaaggagcaagccatctactatctgagcaagaagtttaccgcatgtgagatgaattactcaatgctggaaaggacgtgttatgctctggtatgggcatcacatcggcttaggcagtacatgctcagccacaccacatggcttatttcaaaatggatcccgtgaaatacatctttgaaaaaccggccctcacgggacgaatcgctatgtggcaggtactattatctgaattcgatatcgtttacgtca

SEQ ID NO: 277291 - DNA, 403 bp, Glycine max
  unsure (1)..(403): unsure at all n locations
ctactcgatgatgtgagctgacgtaagataggagtgtgcgtatctaagctctatctattgaatgaactactctcacagacactatacagagaattgttcttaagagagctcctcctggaacgctccaactctctgaatctaatgctgtagaacactcgacggactttcataccgagacactggtgagacctacgcctacgncactacctatcacttcaggccaaaattggatggacgaccactccactctctatctgttcatcttctccatagagcatgctctcaaccttctatttaagcaattgtgggggaacaaaatatcatggcactacctagggatggacctactcagccttatctagtttccctggtctcctgaggtaactcatacatgaatgatgag

SEQ ID NO: 277292 - DNA, 119 bp, Glycine max
  unsure (1)..(119): unsure at all n locations
gctcagcgcatctctgaaccgcttagcgcgaatgagtgaatatcgagctcggcgcgtgctgttctcgatcatcggatggactgnagcagtgcgcttagcgagatgaccctctgctcaac

SEQ ID NO: 277293 - DNA, 367 bp, Glycine max
  unsure (1)..(367): unsure at all n locations
gtgaagactgaagattacgaagaactgacgatgaatcttgaagaacggtcgagaatcttcgcgtaattactcacggaaacgttacgggagcgcctcggcttggatnttcttcatggaactaattttcctcagcaatttcgagagagagagaagtgcctaaggaggtgaacccttttcttcttcacttctccccctatatatagcanaataggggttgtatatcctcatataataatccccggacaaaattagggtatgacagtcgcccctctttacttacctctcatcggagataagaggaaagcaaagataggacactgatttcgtccgtcctgcccttttccgtgatgacgactctcgtctctac

SEQ ID NO: 277294 - DNA, 294 bp, Glycine max
  unsure (1)..(294): unsure at all n locations
ttcgaggtacttacccgtngaagatcgaagatctatgaagaacttatgaagaacgtcgaagaacggttgaaatctttgcgaaattcctcacggaaaacgttacggaaacgtttcggaagcgcctcggcttagattgtcttcacggaaacaatntttccaagcaaattcgaaagagagagaagtgcctaaggggctgaaccccttccttcttgccttcctcccctatntatagcanaataggggaggtggttgccgcccagctcgcccaggcgagctcagctcgcccaggcgagc

SEQ ID NO: 277295 - DNA, 462 bp, Glycine max
  unsure (1)..(462): unsure at all n locations
agcttgttcgcacatcgttcttgtgtatgacatccacttctacaaggttgaagtagaggagaccttcaatcctattacgcaacgtggcggacaaaagtggacagttaacttgaatggtcattattgttaatgcggaaagtatnttgcgcttcactatccatgttcacatattatcgcagcttgtggttacgtgagcctgaactactaccaatatatagatgttgtttatacaaatgagcacatcgtaaaagcttattccgcacaatggtggcctcttgggaatgtagcggctattcctccttctaatgacgcatggacacttatccctgacccaactacaattcgtgcgaaaggtcggccaaaatcaacaacgataacgaatgagatggattgngtcgaaccatctgagcactgacaaaaatgcagtagatgtggagccgaagggcataacacgcgtcacta

SEQ ID NO: 277296 - DNA, 497 bp, Glycine max
  unsure (1)..(497): unsure at all n locations
ntnggagtagaaacatgggaccgaactcatttattttanaanaaagtattcatatctagtcaaggtctgagagaccatacaagtttcctaacgatttctaattatgtgggccattaagtctatcatatgctgacaatagccgagaagcccatgaatctcttcaggggcggagtaggtgtctgccatcgccttggctttggctaacaatcggggaagttcttgactcccgttcaaggtaagagcaaaccgatccatccacatggttgcctcttggtgtaaagagtcgatcacccttcctctagcctctntttccgcatatactcgggcatactcatccgcgattctatgctcgtgggccgtggctagacccaactcttctcggtacttggcgatgatagttaacatgatggtttctgtctcgcatagatgctgagacaagcttcttttggaccttgaacaagcaatcaactcctctgttagaaccatgctatgtgctc

SEQ ID NO: 277297 - DNA, 450 bp, Glycine max
catagaagctccacaagcaatatatatatatatatatatatatatatatatatatatatatatatatatatatatatatatatatatatatatatatatatatcagataaatgagatacaacttacttaaacacaactcacgtcctccaccacttatcgcgtaacatcacatctcaacacaatatgatgcattcctaccccacaaaggcgttggatagaacactccatgtagattgcgccagagatgcaagagaatacgctagggctctcatgagccttagggtagatgtcacgcccatgggctaagtatgagcccacttatctctgtacatattagaataacgtgtcattatctctgcgccgtgtatatagggctctataatataggtggggcacctacaaatgtagctcttgtttttagggcgcctacactatctttctattaggcgg

SEQ ID NO: 277298 - DNA, 423 bp, Glycine max
  unsure (1)..(423): unsure at all n locations
gcaagtgatatcacgagactcaagatctagaagtaatttcaattctttaactcgatactctcgtccgactataaacatttctctagataaatctttagaagatactattttgaaaatgtcagtagcaagatcatcaataaacttggattcgtccctcctgagaaaacaatgctctctaaattaagcaacaaattgattttgccaaattatattgtgtgtatattgatcagggttgggtagtaaaatatacagaacaaatctggtccaatccagctcacttatgatatgtttgggtacccatttggggacttgaaacatactattgaaactccagacttagtntagtaccatgtgtgaatttctcagaagataattctacgacctacttctagctggtgacaaannttgagttggatcataatc

SEQ ID NO: 277299 - DNA, 562 bp, Glycine max
  unsure (1)..(562): unsure at all n locations
cgacctcacgcggggaatgaaaaccgttcgtaccngcgttgcttacatggacctgccgcatgcagcatatagatgcatgcttatggcttgaacacgcactgttgtgtgctcttaagaacttctccacccgacgacattaactcggagccattggaaacttgatcttagcagggctaaatcactgaacctctatacatactagcgcatgtgctctagcgcactattacttgcgtgcttatcacgctgtttaaattgagcctaggtcaacaagagacatctggcaatgactcttattatagattaatgcatactcaccacacatgnggggcggtattcatgtcctccttatagaacaccggaataaattctcatagagactgaccctgatcgcatcacgtctctccgtggaatgacccaacgctcttacttatttgttatcacactcaattgatcacgtttacttgttctctgatactatataatatgtcgatgtatcattcatgagacataagtccttctacaaacagttgtctgttaatgacacttctcagggaaacaagcg

SEQ ID NO: 277300 - DNA, 403 bp, Glycine max
  unsure (1)..(403): unsure at all n locations
tgattacgcactgaagcttganagcgcaccaaacgctaacctatgaaaagtgccttgcaggagaaagttgngaaattataaaaannctgcgcagcgcagcgttaatcacctctacaatatacacctctcaatgagggtcttccttataatgataaaagattccagtaatataaaagagtggaacagttcgaaatcggactcaaatactccattgggtccatgtaagagtaactttctatcacctccagactctagggctaaatactttttttctctaaattatttaatataacttggccacacttttcccaaacattttgatcttcaaacaatactgttataattactgcgaatagcttgctaaaacttgactttttagtcaggaacttgtccaccccccgcg

SEQ ID NO: 277301 - DNA, 457 bp, Glycine max
  unsure (1)..(457): unsure at all n locations
gcttaacactttgttgatgggtgcaccatntattatgctgggtgcgtgtaacaaagccccattatggaatggacatccatcaactaccatagaatggacttaacttagtttattgggaccgataataatagtcgtttacaacacttgtcataaacttgtaaaaacaaatgtaataaattttgtagggagataattacattattttaaaaattaatatataagtatattttccttcaattatacattgtcgtatatgataaaattgttgattntaataataattattttaaaatcatattgatgatatcttttattaatcaataatgttaataaaaatatatatttacttaacttacatttaaaagattttttaaatgacctatagttntaccttttaaccaaataacgttttctttataaaattctatgcataaggttaactctttttatataaaaa

SEQ ID NO: 277302 - DNA, 424 bp, Glycine max
  unsure (1)..(424): unsure at all n locations
atgatatcatctctcanatattatggaagtgtgttgtctctaactactntttcaccttcaagcagcatcttttggattataatgattgacctgatcttagccctgaagatcgagatatgtggattgaagatctggtaccattcttgaactatttccattctacttaaccaccggtgtttgtaccccanaagtaaaaaatccactagttnttcagtgtggtagattatctntaaatgtgaatggatagtggatntcctttntctaacacactttatttctattctcatcaatcatattggctnttntaggtgggagagaaaacttcaatatggcagacagatgaacttaggcgttcaaaacccactccagttgatgaagctagggcaggtaagctggttgagtattatatggtagatatacttta

SEQ ID NO: 277303 - DNA, 412 bp, Glycine max
  unsure (1)..(412): unsure at all n locations
agcttcacaattatatnntatctttgtcaagtaagtgacagcttgatattgattttttaggccacattggtgcaagttgctgctacagtacctcttaactgttcaagtcaacaagatggcttaagggtgtggttggataaacaatttaattaattgcttattggataaatacttatcatgcaagcgcttatgtataagctatttctgtaatctaagaggaaataggattaaactcttttaatacaagttgtaagttattttcacaagttatcatggagattggagagcttattgaaataagctgaaaacaaattatggagagatcataagctatgtccatatngctctccaaacacttatacaagttcttatgtcataagataagaccaaacaaactgtaaataagttgttc

SEQ ID NO: 277304 - DNA, 396 bp, Glycine max
  unsure (1)..(396): unsure at all n locations
ccaagtggccaaccgtgtgaccttgattgcatcaaaagtacatccacgcatggctcaaccacagtttacacggaccatgttccatagtcactccctcctcgcgcattagtactatcatacaaaattaattaaacaacacacatttaaaatcttatacagtactgtatatcttagtgcattgttaattaaaaatgaatattattcttaaattagtttctattggaatgtaattaaataaaacataaataattaagattttttatatttaataaaaaaataagagaatntattgtttatatttaaaatatgagcaagcatatgtattgaagaatactactggatgtctaagataacaatagtggagtgatatttaaaaataaggatatatnttctatc

SEQ ID NO: 277305 - DNA, 349 bp, Glycine max
  unsure (1)..(349): unsure at all n locations
atctttaagatctcccagttcttctactaccagggaactccggaggaagaacaaactacggtcgcctcgttctatatggatggccttgcactcaactagttccagtggatgttcagaaacgacttcatcaccttttggccatgattggtgtaagccctagaaaatcgtttcgcaccgtcgttctacgacgatccctgtggagccttgttcaagctttgctagcgtgggtctgtgatagagtatttgacagagtttgagcatttggcgaaccgtataattggccttccgtcgccctttcttctcagttgctntgtctccgatctatcaccagagatccgtcgcgaagtct

SEQ ID NO: 277306 - DNA, 421 bp, Glycine max
  unsure (1)..(421): unsure at all n locations
gatgattatgagaaatggtgtgtaaaatatgaacatgtgtataatttataggttacaaaactatttatttattttttntaaaaaatagtaacaacaatgtttttaacattgagtggtccaacattcatagttnttttcctccaatgttcattttaattttttattttttaatttttctctcctgggctattccactttccctctacctttcctctatgtctcttcttttttccatctctctccccgaccgttccacttacccttcctctttatttctcttcctctatcgctgaccctttcacttcccttcttctcttcctctctttttattcttactctcccacataccctcttcctatctcccttttctctttttcctctcccaccacacgactattcctctccctttcctctttttctc

SEQ ID NO: 277307 - DNA, 464 bp, Glycine max
  unsure (1)..(464): unsure at all n locations
atgctcagttttgatggacggaatgaganatgtactagcttgtgatatcacagggtttaatggcgtaaactgtcctttttattntttcttcatgagaatacagaaattccaacttttaatccatgtgatactattntaattcttatntataagaattaattaatttatttattaaaattaaaaatatattaatttaatttacaaccataaatttaccctaaattcttcaaaatttatcataacgtagttgtcttaaagaaagtagtaataaatttgtcacgctctttgtgacaatatttatttcaataatacttttcttttacccccaaaacataaacaatttgtgtcataccctaatntagttcggggactatggtttgttgatcttttgatccttattagtcgacttatggtggtgaacgccagttacagtgcanaacagatgatcattcatgtatttgatc

SEQ ID NO: 277308 - DNA, 462 bp, Glycine max
  unsure (1)..(462): unsure at all n locations
cacatgtggtactaggtggcggtcgtgcgatggtgcttaacaattctccacatccacaaatcacgtataacccaccatcccctgttgcccacctcaactgagctcacgtactcccacgtancccttaacctcgttcctctcaacgccggttccccatcaatcctcccaagcttccacaacatccaagtaattcaacatccaagcatcatgaactaacacagtcaagaaaacagggcagaggcaganaactctgcccaaaacacaaaccaacatcacagcttttcacactcaaataccacagtaatattctcttcgttccaaatcgttaaccgttggatcgactcgaaaattntactggaagtctctagcacataaatatacattatgaaccgtggtatctgctagaaaacgtccagaaccaaatcttcacaactctntccacaaccagcanatacacaacac

SEQ ID NO: 277309 - DNA, 482 bp, Glycine max
  unsure (1)..(482): unsure at all n locations
agctctcctccttctccattctgctgctaatgatcttcattaagcaaaggactctatttatgaagaatattcaaggcctacaagttctacatggagctacattacatggtatcaaaagcattttcatctaggtgatgtttttttgcttcctctatcttttgtttggtcaatttactttagttccttgttcttcatcatcttcaccatgtatctcctccattgtcttatggtttggtgcaatttagagtatattaaaaaaataaaccaattaaatcttagatctacacttgttcttgcctttctatggttcacnatttatagatctactcttgaatcatattcttgtgttgattttaggttctatcacttttctgtcatagacttcttgtgttgaacccttatatctcaattttctcgcaaaatattgattggaaaagacaacacaacaatctaagtgtaaatcacttcattcatgttgtctt

SEQ ID NO: 277310 - DNA, 511 bp, Glycine max
  unsure (1)..(511): unsure at all n locations
cgagtccgacagtacattccctgaagaactttctatcaacaagttaattatcattgattacaagcacataacaaatcaaatagtggaacaagtttcccacttttgagatgatcaaaggcaagcaccaagaactgctttgatgaatatgacatcaattttgtccggaaattgatgcaaccaatcaattaggtccctaaaatttacatccaatttggttcttaacattatataatatcaactcaatcacttggtccttgaatntgacaaccattagtcaatttggttcctgatgttaggaatcaaatttactaataattaccataattaaagactaaattgcttttttcgtaatgtcaagaacaaaatgcatggataattgttaaggccaagggttaaatttcctttntcataatgcctangaccaaatangcccactgtgcanaanaactaaattgatgttttccttctaaatccatacttaagtaatcaatgtcatcacanattctagttt

SEQ ID NO: 277311 - DNA, 421 bp, Glycine max
  unsure (1)..(421): unsure at all n locations
gcttgtctntactgccagacgacacaacaatctgtatgatatagatatgataaatcttattcaatagaatgtaacgtgtttgctatctaaaaagatgaaggatggcttctgcacaaaagacttgggcatgtcaattcaaaacatatttcgaaactatccaagaagaattgtgatgcaatcctaccccccaagggtattggatagaagactccaagaggattgggctagagctactaaagaaggccctanggttctcatgaacctagggtagaattttcagcccatgggtcaaggttggattcacacttctttgtaaatgttagaattagtttttccttcttttgggccttgtattttggccattctagtagtatagggttttagcctcgtatttcagggcattttgagtacgtcttttaat

SEQ ID NO: 277312 - DNA, 424 bp, Glycine max
  unsure (1)..(424): unsure at all n locations
cagcttccatcagaagctcttataaatccttaattgaggaagagaaacaagttaccagaagattctntataaacacacactntattgccatgttgaatagtctacgtggcactaaaattgccaacaatgcacctcactaacggcgttactttcgaatttaacagcaaggactattttgcaacacttatgcaaagatagagactattttttacatttcaaaaggatagggaataatttgcaaaatggctacaaagacagggaccaaaattcctattcacttaatacacacacatacacacacatattgttggtataatggcatataacaaccacactctcaaggaatgggctacaccagatgttgtgtatcaaacttggtgtattaaatatcctaagatcgaggttagctatgagctaaagtcta

SEQ ID NO: 277313 - DNA, 383 bp, Glycine max
  unsure (1)..(383): unsure at all n locations
ctaatacgagacataactntgctagcttaaacaacttgtgtaatcaattcctttaaggttgtaatcaattaaaatagagagttttgccttcagaagaaaatttctaactttagaaattttcttctcactcatgatgatgcatgacgcactaatgatatgttaaagactaagatgcaacattcaatataacaagcaatacaaatgccagtcaagagagttaggcatgtaaaagacaaaacttcttcaagctcttctccaagcttcaagcttaagtcttcatgttgctcatgttgctcccgctatccctaatagaggcaacaaaataataatgcatattctatcccactaacccttcttttgcggtccttctacaactcttatgt

SEQ ID NO: 277314 - DNA, 227 bp, Glycine max
tatgtgtgtgtgtgtgtgtgagaggttgcttatgcaagacttggttatggaggaagctcatcctctatctgtcgaattatcatttgccatcagttggggtcttctacctgctacttcgtctctgaaaactgtcagctgtggaattagaaactctggactctctgaagaggaagctggagaccttgaaagtagtagtaagaattctaatccactaccaactggactac

SEQ ID NO: 277315 - DNA, 385 bp, Glycine max
  unsure (1)..(385): unsure at all n locations
agcttgaatagtaaaaccatagtgcttcaagcttcatccgtgggtcaagaatcatagcaattgaaagaatgacattatagtcactccaatacttgctaaactnttccatcatcaacactgccatattttgcaatattggatcatcacacttaagtgtttctcgcaacaatcattcaatcttccatacttgcatgaagtattcattggaagtcggataagatgtacctaaaaaaaattcaaataagataattaaactataaatataaatctaaaactatctattaaaattatgaagtttgaacaaatatacctgagatcaaattagtcatcttatataatggcttgaaaattcacacaatctttcagctcttttccattcctcatt

SEQ ID NO: 277316 - DNA, 421 bp, Glycine max
  unsure (1)..(421): unsure at all n locations
gctccagtcttgatctgaccctgttaaataatgacatagcaatatcttatatcagcttcagcttaaggtaaaaaaaaatcatttttcanaatttaaacaaaatttgtcccagaatgcaccactggaacaatgaataagaacatgatatgattgaaaaanaaaagcttctgattctggcaacttacagttgctaatccaactgagaggtcagcaatgaaggtatcctcagtttcaccactacaataaacaagatgaaacacattagtgtgcacaaagaataatacaatgtcacaaaacagaacaaatacctcctgtggctagccatgacaccccaaccagcttgtttagacattctcacagcttcaatactttcagttacactaccaatttgattcacctaacaatgatgaaataataataa

SEQ ID NO: 277317 - DNA, 347 bp, Glycine max
  unsure (1)..(347): unsure at all n locations
ttcatacatgtgactccattagcatgcatgatcatgtcttgcgcatggtgattacattaaactatnntgatatttgttgaaaataataattntaagattaaatgtntatttatttttcatcaatgcttttttttttgcaggcaatggaatntggtcattctgtacatattgatgaggtatttcaatagacccatataagaaatgatactagtgaatttgttgatgaaatatctaggacancgtgttaatttttttaattatttttttcttcattntattcacattaatatgttactgaaagttgtctttgcttgaataacaataagaatttcaaagaatatattctc

SEQ ID NO: 277318 - DNA, 240 bp, Glycine max
  unsure (1)..(240): unsure at all n locations
gttatgaatagaactgctcctatagtggtgttggaggcatctgtttcaatggtgaatagaatgttaaattctagagtggcgcggacacgggcctgagtcatncatggttttaactgttgaaaagcttcttgagctgtatggctccatgaaaatatgtccttacacaagagcttggttaacggtgctgctacggcgacataatttctaatgaattttcaatagaatactgtggatcaagtg

SEQ ID NO: 277319 - DNA, 440 bp, Glycine max
  unsure (1)..(440): unsure at all n locations
agctngccccgagaaggaatccacggagganatgcttatcacctcgaaagactgganagcggtttctaatgactcctctacggcctccacatacggcatagaggatgggcagctcaccaagatgtcttcctcgcctgatacgatgaccagatgcccttccactacgaatttcaacttttggtggagtgtagagggaacaactcccactgagtggatccacggacgccccaacagacagctgtagggggggttaatatccattatttggaaagtaactngacaggtgtgagggcctatctgtactgngagatcgatctctcccctaacctctcggcgggtgccgtcgaaggcacgaaccaccattgaactcagctttaagtgggaggcattgaatggtaatttctccaaagtgctcttaggcatcacgtntaaactggaac

SEQ ID NO: 277320 - DNA, 474 bp, Glycine max
  unsure (1)..(474): unsure at all n locations
gcttcacanatgtcttcacanataatcatcacacagtctanacctagctagactacccatcatatctccccaaaccccatacccacgaaaattaaaggagaaagaagtccacccaaacttgaatgttcgaagtcccactcgtagccacgcacttcacgaccccgaaaatgccctcctttcgcgatttgnggcagaaatgatggccaaaggttgaagctntgcttggagcttcaatggagaatgaagaagaagaaaatggcaacgtgagggagagagagagctgtctgaanagtgtggtggctgagtgaagagagagaaaagctntctttggttttaaataaaaggggtttctctctttctattattatatttgagcaatgccacatgtctccatttgagtggagcanaaagggcccactntctcttttgatggtgacccatactcagccacaaaaagtgagaganatatgacct

SEQ ID NO: 277321 - DNA, 470 bp, Glycine max
  unsure (1)..(470): unsure at all n locations
agcttcaagccagagccaaattctcgtgcatgcagatgctttttcaagatttactccaaactccctttgcaaatctgatntcaggcttaaataggtggccttgttcgtgctcgtgcgcttagcgcacgtatggaccgcttagcacacgttagtgaattttggcttaacgcgcttctctcgcttagcggatgagctgaagcggtgcgcttgataacctggagcggtgcgttcagcgaacctgacagctcatcttcttctggattcttcctcgcgcttagccactgagtgtcgcgcttagcgaatgctcgctaagccaaaatattggcttagcgagaaggtgaaaacaacactttttgccaattgcctaattaacctgaaattaagagaaatngattattaaacacacaaaacanaagtataaattatctattacctatatntaataaaaagtacttataatatgacaaaac

SEQ ID NO: 277322 - DNA, 446 bp, Glycine max
  unsure (1)..(446): unsure at all n locations
gaatcaagattcaagaatagtcaagtntcatgattcaagatcaatcaagatcaagattcaagactcaagattcaagaatcaagagaagacttaatcaagataagtactaaaaaagttnttcaaaacattgaatagcataagaatttttcacaaaatcttttaccaaagagttttactctctggtaatcgattaccataaggtagtaatcgattaccaatagccaacattgttttcaaaacttatttacaaagctgtaattgattaccatgagtatgtaatcgattaccaatgttntaaaacgttagatttcaaatttcacgagtcanaactagtgataaaacattntcaaatcattntaaacttgtggtaatcgattacactaaacatttgattntcaaatttaaacatgaagagtcacatcttttgatgtgtaaatcgatacact

SEQ ID NO: 277323 - DNA, 295 bp, Glycine max
  unsure (1)..(295): unsure at all n locations
tggaaaacaatcttacttaacatggacaaaattattatacaagatatttatgaattaatagggtattgggattcatgactaactatcagtattatgtaggacgtatttcactctatggagcgaaaaaaatcatgtaaaatgagagaggattatggatgtgtctattattaatataaatacaaaatcctataaacagaatccaattaaattaagaataataaaatacatgcacctttctattcactctgtacgcgcttctcaccttntacagccaaatagaacatctaaaattaat

SEQ ID NO: 277324 - DNA, 423 bp, Glycine max
  unsure (1)..(423): unsure at all n locations
atgatgcatgtnaatgtgtactgccctacaatgccacaaccatgaatcatctattttacttacgaaacaactcagctcatgaaatgatgcatgttcaacatttagcatatagatattacctattcccttactaatgcggacaactttaccgaatatggtttcacttataatacaacaatctctgttgaactctattttgaagcctttatcagcaaagtgactaacacattctttatcagagctttctattgattccctatatttccttctcccattatctatcctttggcattgactccaaatgtgacatatcctccattctttgacacataatcaaatagcttggacttgtcacctgtcatgtgccaagagcagccactatccaagtatcatagtgaatcccttgctttaggcacacctaca

SEQ ID NO: 277325 - DNA, 334 bp, Glycine max
  unsure (1)..(334): unsure at all n locations
agcttgctcaatatganatcattggttgtttagaccttggctataaanacaacgcagcatgtcgtccttngagcatatnncccattaaaacatctttacaatatgccagtcccttgtgctctctgctaaagaatttcttcatcttaattgacgtattctctttacatattgactcaatcaactttcatgacaacactcgggatgctcaacagcgccatttctcgatcttggaataacattttgactcaatgagtcttttgcgcatgactaccatcaagcatgacagcaacaaatgaactttatagatattcaatctctcattctgctcatggac

SEQ ID NO: 277326 - DNA, 161 bp, Glycine max
tgagacatgactatgggagcattccgacgaggccatccctgacaatcatctatcttacttaccacatagctaacctcatgagatgacgcgtgttcaatgatcgcaggagatgatctggacttatatgcgaatttcaatatcacatccaattatgttgccac

SEQ ID NO: 277327 - DNA, 426 bp, Glycine max
  unsure (1)..(426): unsure at all n locations
ctgtccacgtcaacccttctactggtagaggatctggccctcataaagaaaaatntcacagttatctgggggtagtggcacgggagaaaatccctatcgttcatactacttggaaggatgtcctagaaactctaaaagttcttgtatgggatgacattttggtaagtacgctaaagtggttactagatatttattattggagtaacttattcaaaagtatttagaagtaacatgtaagcaaaacagagaacataaaataatttcttttattttaaaattttaattntaaagtaacatgtaagcaaaatagaaaaatatgtaccaatccaaaggattcgaaggaacatgaaagatgtagtgatatgggaggagagggttggtgaatatatgcaattagatcagaacagtcatagtcaggttatgtac

SEQ ID NO: 277328 - DNA, 421 bp, Glycine max
  unsure (1)..(421): unsure at all n locations
tcgcgatnttatctctctcagactngagtgttggaagaccaattacttagtcttctctatccagatgatgtaaatgatgcatgttaatgtgtactgccctacaatgccacaaccatgaatcatctattttacttacgaaacaactcagctcatgaaatgatgcatgttcaacatttagcatatagatattacctattcccttactaatgcggacaactttaccgaatatggtttcacttataagacaacaatttctgttgaactctatnttgaagcctttatcacaaagttgactaacacattctntatcagagttttctattgagtccctatatttccttctcccattattgttcctttgttattgtctccaaatgtgacatatcctgcattnnttgacacaaaatcaaatagtttggac

SEQ ID NO: 277329 - DNA, 485 bp, Glycine max
  unsure (1)..(485): unsure at all n locations
catgcaagcttattgaatatccacgaataacacactgaatatgtgaagagatcgcacactctattcattatatgataatgaaatttataagccttacatacttgactctcagaacagaataacaataaaaacaaaaaccacaaaactgcatgacgcataaaataggattgtttattgacacattaaaataactaacattaatttgtattttaattctcttttaatcactatagtttgaaattgatctttntagttcctataatttgtattttaattaccttttagtccttactgcaataaatatataaaataattagctacaaattagttataaattatcaactatttttttattacaaattatcttgtgataaattagttatgaattacttgctaatattgttgtagctaattataattgataatattaactcatatttgatggtaagaactaaaatgaaatcaaaatataaagtatatggact

SEQ ID NO: 277330 - DNA, 565 bp, Glycine max
  unsure (1)..(565): unsure at all n locations
acgcacatagacgccagttgatngcgcttggtagangcctcacgcttgacagctaaggtctgccatgtgctctaggaggtgatgaacgctgttaacgtgcttatatcgctcatgaggagcaggatgtgaagcgagacttatagcagactcatcatcacataatatcatcacacatggcacaggaactgcggagcgaagaagtaacctgtgtaaccggtcgatttcagtagtaacagaacacaagacacgatattgagctgtagtggatgacattgaaacagtgggttgattcttataacgccgagaaagaatgttgtttaccgaagagacacaatagccagaagtggatcttctagtgtcatctcaagtggcccaatcagcatccgcacacgctgtgaggttgatagagtgctgancatggaataacacaccgtggccaggagcatatctgatatactgcacattatgatgaacaacatgtatgtgaggaactctatgcgctggtgtggactgacttaagtgatcacagcaacgtgatatatgccggagatgtcaataagcatct

SEQ ID NO: 277331 - DNA, 399 bp, Glycine max
  unsure (1)..(399): unsure at all n locations
gcagctggaaggatgctcgtggggaaagaagatgtataaagagagagaggtagctcgaaattgaggaagaanaaggagagaattgaactttgagttggtctcacaaaactctcattcataaagttacaacaagtgttacacatgtttctattatagataggtagcttccttgagaactttcttggaaaacttccttggaagctagagcttactacacacacccctctataactaactcacctcttgagaagcttcttaagaagattctaaagaactagagcttactgccacacctcctaatgctagctacctccttggatgaaactagacttactaccacccctatatactagctacccccttccaaatactgaaatcacaaaaatcctactcaaactc

SEQ ID NO: 277332 - DNA, 479 bp, Glycine max
  unsure (1)..(479): unsure at all n locations
acttattttctcagactngagtntaggaagaccaattactaagtctttcctatctatatgtttgacatgagacatgtntatttgtgctatcctacgatgccataactaagaatcatctatcttacttaccaaatagctaagctcatgaaatgatgcatgttcaatgttcaaaggagatgatatggactaagatgcaaaattcaatataacaaccaataaaaatgccactcaaaggagttgggcatgtaaaaaacaaaacatcttcaagcttttctccaagcttcaagctttagtcttcatgttgcttcccttatctctaacagttctcggttagttctaccccaatataagggagttcattagaaacactctgagatagatagatagatatatatagagagagagagagtttccttgtattatgtttgtcgttagtaataacatacacaacgtgtgctactctcttcttcttctttgac

SEQ ID NO: 277333 - DNA, 485 bp, Glycine max
  unsure (1)..(485): unsure at all n locations
gcttcttagtctcagatgatgccagctgagttgtagctacctcatgcactcctctttgattatggcatcatttctggcactaaactgctgatagttggaagccatcttctcaattaaatttctggcttcagcaggagtcatgtctccaagggctccaccactggcagcatctatcatacttctctccatattactgagtccttcataaaaatattggagaagctgctccgaaatctgatggtgagggcaactggcacatagttttttaaatcgctcccagtactcatacagactctctccacntgagtttctaatacttgagatacctttcctgatggctgtggtcctggaagcagggaanaaattntctaagaatactctcttaaggtcatcccagctcgtgatggaccttggagcaaggtaatacagccagtcctttgccactccctccagagaatgaagaaaagccttcagaaatatgtgat

SEQ ID NO: 277334 - DNA, 371 bp, Glycine max
  unsure (1)..(371): unsure at all n locations
tcctgactcaccatataccttgacccanggtgagaatgtcaatccttactcctcggaagcaaaaaagaatagaagggaaatttccaatcaaagaaaagagaaggaaaatttccaatgaaagaggaaaaaagaaaagaaaggaaattcccaatcaaagagtgggagaaagaaaaagaaaagaaagaaaattcccaaccaaagaatgggagaaagtaaaaagggaaggaagctcctggtcaaagaaaccagagaggtctttggaccagataatatctgaacagtacagaattgtcaccaaatgaacaaaaaggaaggaaaggaaaccacgacctanaatggtcttctccctttaattaccaaccaaaatcccg

SEQ ID NO: 277335 - DNA, 466 bp, Glycine max
  unsure (1)..(466): unsure at all n locations
gcaagctngtactagtcatatgtatgttacaaaacaacgaatgcaaaaattgaatcgattattgttgatacaaaaatacttaaacaaacctaccaattatgggttgtgcggctctttgcagattccgcccatgtttctggatcaaggccatacttgactgtaagatcagatatgtgctgacattcattgtcagcaaagacaaattttgaagtcaatgaagacttaaattacctccatcttgcttcaactgttgacatcaccttgtttttgcattttcaccttcaaggatatcaaatttgcgctgcacaacacaacgagttatgtaacagtatgtaaatgaatcctttaaaagtaacttaacaacaaaatcatgaatacaagtgtatttataattacttaccaaaatatcttttcatattaagctctttagatcattgnggacaacattncaattcgcgtgtacaat

SEQ ID NO: 277336 - DNA, 382 bp, Glycine max
ctgtgtctcatcgaggagaccgtaacggaacatccttcggagctgtgcctctccctcgaagatccggcgcgggttcttctcgtcgagggtgaggaggttccgcgcgttgttgcggatgcggctgagcgcgtactgcaccctccacagctctctcttgcaccgaagcccgtactcaccaaccagcttcaactccgcgtcgagacgctccttctcgtacggacgacgcggcttcttgaatgtcttcccatctgacaaacagaacaaaatataacagatcaatggcgttgctagggttacggttttcaaaacggcgtcgtgagaaactagaacgtggatcggttcgtggacttacagttcctgtagaaggagacgtgcaccatgg

SEQ ID NO: 277337 - DNA, 350 bp, Glycine max
  unsure (1)..(350): unsure at all n locations
ncaagcttgtgtcgtgtgttaagtgtgtcactaatcgtgtataatggttcgatgtaacctgtatttatattagttgagcgagggtgttggtccttgtttgtaggggctattgcaaccttgtatataatttttggcttatagatagtcgagagcttatagataatgttagagatacaacattgcttatagataaaaggtagaagataattgtaccttgtagataatgtgtggtgttatagataattaattacctgccaatggataagatattcaaatacatttgaatattagttaggttatagataacctgttcaaatacattttgaatattagttaggttatagataacc

SEQ ID NO: 277338 - DNA, 458 bp, Glycine max
gacatgagacatgtgtatgggtgtctttctactatgccatctctcacaatcatctatcttacttaccaaatagctaagctcatgaaatgatgcatgttcaatgttcacaggagatgatatggactaagatgcaaaattcaatataacaaccaataaaaatgccactcaaaggagttgggcatgtaaaaaacaaaacatcttcaagcttttctccacgcttcaagctttagtcttcatgttgcttcccttatctctaacagttctcggttagtcttaccccaatataagggagttcattagaaacactctgagatagatagatagatatatatagagagagagagagtttccttgtatctatgttttcgttagtaataacatacacaacgtgtgctactctcttcttcttctgtgacaatcttcttccttattctgaacttatcgtctcagtcttaatc

SEQ ID NO: 277339 - DNA, 534 bp, Glycine max
  unsure (1)..(534): unsure at all n locations
ttgaccacatgagctcttgananccncncnnnannaanannccatggcgtaaccngacccacgcgaaatttacccctttctttacaccaaagacccgaaggggagtttctttaacgacaagataccgaacactcccaatgaaagaggaaaatagaacacatccgaacttcccaatcaaagagtcgggagaaagataacgaagagaaacaaaattcccaaccgcggaacgggataaagtcaaaagggaatgaagcccctggtcaaagacaccagagaggtcttcggaccagataatatccgaacagtacataattgtcacctaatgaacaaaatggaacgaatggaaaccacgacctagaacggcacataccttcatataccagccaaatacccgtgcgctagcgacccttggttctcgtcccgcctacaaacaataaccgcacacggaaatcacgaaatcaaagccacaacacacaaagccgaagaggaaccacctaacaacacgctccaaccgaagccctatgatcctacccg

SEQ ID NO: 277340 - DNA, 415 bp, Glycine max
  unsure (1)..(415): unsure at all n locations
ttaagcacctgcaggctgcaactgagctcactgttgtttctcacannagccctctataacttgtttgtgccccattcttcctttcgggccctctttgtttctcgttctaacacttcagttgtggccacattgacgtccctcagcttgtcacactcttttctaaccctaatggttgtcgtcttgaacttttccttgaccacttgtgctctttcaagttccgccttcaaggcttgcacctctttgctctcctcggaggtttcaacctcttccaaacttgaaatctttagcttcgggaggcaagttatctcttgcattctagccttcagccacttgtgatagccgccgacgatcccattgccgctttctctaagcttcccatcctttcttttcaccacatttcattgcttttggactc

SEQ ID NO: 277341 - DNA, 347 bp, Glycine max
cctctctagcaacacgtacaatctcggttggaggaatcatcccagccttagatggtcgaatccttcacaatagcagtaacaacaacaacaacaacagcagcaacatctacagccccagatacagcaaacagttgaggctccttcgcaaccttcccttgaagaacttgtgaggcatatgactatgcaaaacatgtattttcagcatgagaccagagccttcattcagagctcaactaatcagatgggacaattgtctacacagttaaatcaacaacagtcccagaattctgacagattacattctctatctgtccagaatcccaaaaatgtgagttccattacattga

SEQ ID NO: 277342 - DNA, 148 bp, Glycine max
  unsure (1)..(148): unsure at all n locations
tctgtattcagcttcggcagaagatctacgtcacaattgttgaatgttggaccaagagttctatngggaccaatataaatcactgcgccagaggtagaccttngatcatctgggtccgatgcccactagcatcacatatggctttaat

SEQ ID NO: 277343 - DNA, 352 bp, Glycine max
  unsure (1)..(352): unsure at all n locations
cgctcatcttctcgctcagcggatgcatgcaagcggtgcacttagcgggatgagccctcgcttagcgcatgtgtccaactcatccttcttccagattcttcctcgcactcagctgcaggagtggtgtgctcagctaatggctcactaagcctacagattggcttagcaagaagctaaaaatcaacacttcacaactttgcctaattaacctgaaattgaaggaaatgattattaatacacacaatgggagtactaagtatttattacctatatttaacaaaaagtaattacaacactacaaaataaccataaatgggagaangtagatacaantttcatagatntcttacac

SEQ ID NO: 277344 - DNA, 212 bp, Glycine max
  unsure (1)..(212): unsure at all n locations
cgaggtacttacccgttgaagatcgaagaacgatgaagaacgtatgnaaaacgtctataaacggttganatctttgcgaaattcttcacggaaaacgtttcggaagcgcctcggcttagattntcttcacggaaacaatatttccaagcaaattcaaaagagagagaagtgcctaacgggctgaacccttttcttcttcacttccctcccta

SEQ ID NO: 277345 - DNA, 253 bp, Glycine max
  unsure (1)..(253): unsure at all n locations
cggaaacccaaacagtaccggatcggctgtcgtcaactccgccattgatatctctggtatggcgacatacttgggcgacgccctcatctgatatatcacctcaatcggcaatgtctccaaaaccctatacagaaccccttccacaccttccactctgtccatgacgatcttcaacctattcaccatccccccatgccgactgagagagacgaccactacgacgacgctgctntacgtgctggcactggcgtgt

SEQ ID NO: 277346 - DNA, 207 bp, Glycine max
ccattcttcattctgcaccttatcttcacaagtcgcagtcatcatccacacagtatgaggatctgtgccctgagccacattagcttcttcattattctgctgatccttcttgaaccagcactcatcagcaaaatgtgcatacgtctcacagctagtagcactgcactctactcttatcgaactccttcttgttggtatgagctctgt

SEQ ID NO: 277347 - DNA, 395 bp, Glycine max
  unsure (1)..(395): unsure at all n locations
gaacagttcccattttcctactccatactntttgtttgtcaaagcagctgtgtggctcttagacttgtcaaattcagtagcaagttcttcaacaaggcttcttccaacatgaaatgatctatgtgcctctgagaactctttggatgtgacaaatctataaggctgatctttgtctgcccagtactgctcctgatccttccttgatgttacctataacataataattaatggtcaaaattaaatgtatataacattcttttaccagtgcagacagattaaattattgggacagaacacaagaccacttacttcttgcaaaaagtctgccacacctttcctctcangacatttaaaacccattgattnaaaaattccacacatgtcgcggggaccct

SEQ ID NO: 277348 - DNA, 518 bp, Glycine max
  unsure (1)..(518): unsure at all n locations
gctacgtatggctaaacaagtaccatatcaatngcaaacgagacaaggtatcataacacattactgtaacactgctaattctaggaaatattgttacaccattgacattgtcacatggacaaggtactgaaggcaaccttattgtataagaaaattgaccatgacaacaattatcctaagtttgacattgcagttagactacacattgatctaccattactatatatggtcctaacagtaaaacaatgacgataattntatattttggttttagtcctatggtgggtgtatgcttatatttttgaagtgtctagtgtccctcaacaaaactactagaacttattagagcaattggacgtaattatcttagatcacaactaagtggatcaagtgtcaatattgaacgggaagttttatctatagaagacatgtgtcctaatagttatgttaccattattntgaatntctataagtaggcaaggttctgtaattattntttgattttttaaacatttctc

SEQ ID NO: 277349 - DNA, 452 bp, Glycine max
  unsure (1)..(452): unsure at all n locations
gctntgaattcattctatgcacccttagggatccattcttgctntgatgtcttcatcttcattcttctactatcgataatctttttctttgttttaagcgagttttgaccgaacatttaagtcgtaatctcacttaatcaatgttaaaatgaatttcaaccgatcgttcgtgttgtaatctcatttaatcacctttaaaataaaattaaacctatagtttatgttgtaacctcggttaatcatctaaaaaatgagtttcaaccggtcatttacattgaaagttctcttttaatgagttgagaaataaccaagtgaaaccaaagctaaaatcaactcataaacaagcttttgtccacaagaaaatcacttgaattcgttcaaaggtccaatgcattaaatggtattttacttttagacggtaaaatgaactttaaaagttaaactcaatctac

SEQ ID NO: 277350 - DNA, 444 bp, Glycine max
  unsure (1)..(444): unsure at all n locations
atcgattaccagggtgtntgaacattggaattcanatntaattgtgaagagtcacatcctttcacataaaagctntgtgtaatcgattacacttatttggtaatcgattaccagtgatagtttctgaacaaaatcaaaagatgtaactcttccaatagttntcaagcttttctgaaagttatatcttttccaaatggtttttaaggtttttctaaaggttataactcttctaatagttttcttgactagacttgaagagtctataaaagcaaggctnntgattgcaaacaacaactnttccaacaattctttagaaccatntttgagaaaaccttgatacttattcttcttcttcttcttcctttggccaaanagctnntctaagttntctagttntccanaccttgaanactgtgctattcatcttttcattcccttctccct

SEQ ID NO: 277351 - DNA, 445 bp, Glycine max
  unsure (1)..(445): unsure at all n locations
tgcaagctttgataatgatgttgtaaggcttttctcatatcttatgtgtctttaanaactcttgtaatttgacctcgacatcgaaattaattntcaatactaaatgggagtagcttagttaataacaaatgatgagtttgtgattgaagattgagtntgattcctacataatacatctttaaaaggaataaagaagtttaagtgaaataaagtctaaattaaagattcagctagataactggcaacacaagttaagtttatagaacaaagacccaagttggatccccgtgcaatacatctttgagaaggatactttnttttaagtgtgactaatttcaaaataaagattaattttatagccaactcaagagatcggaacttgtaaagatacggagatttcactagnaagtcaaaactctattagagtgatactataaagtcaaac

SEQ ID NO: 277352 - DNA, 196 bp, Glycine max
  unsure (1)..(196): unsure at all n locations
tactaagctatagccaagcttattaacggccccacactattatttccaagtttctntattgaaattatgtgtaattaatattaaatgtaaaaaatggcataaaaaataaaataaaaaactaatcgctctntaaaatgctttttttaagttcttaactaaattaggatgtacattcttgcannaaaaaaatccttta

SEQ ID NO: 277353 - DNA, 468 bp, Glycine max
  unsure (1)..(468): unsure at all n locations
agcttgaacgatgangactatatggagaaggaatggcttcttgagtgatgtatacagacaggtctttcgagcctgagccatgacgaagaaaagaagaagggttttggtaactgatcgcgtgggggaaaaatggatnttgggggtttaagttatgaataaaacaacatcggtttcttaaaaaaaatcgatgttaagatattaatgttaacatcacgttttggaaaaaccaatgttaacatcaacttgttaacatcggtttttttaanatcgatgttaattaagtcaacttatttaccaaaatgtcaccgcgcttttatttacatcgatttttgcgaaaactaatgctaagcttacgaggttaaatcaataaattgtagtagtgaccttctctcactcacgccaatatatgcaatctcccccttctacanatcatgacaactnnntgtgtcatccttttataagtcttta

SEQ ID NO: 277354 - DNA, 320 bp, Glycine max
  unsure (1)..(320): unsure at all n locations
gcttcttcttttcttttcgttttacctttgacatatcttaattattataagtatgtttatcttcttcattngaagaacaatttcggttgctaagttctctggattgcccctaatgttngtacctttcagttatattcaaaggtttttgttgttcttcattataggaatcacaatcgtcaggtgtgggtaccgtatttttctttccttattattgttttgggttggagtctgatgcatacacaatgtgtagctaacatttttgttccatctccatcttctccttcgcacaaatgcaacattatgttgtgggtgagttttcc

SEQ ID NO: 277355 - DNA, 352 bp, Glycine max
  unsure (1)..(352): unsure at all n locations
ctaaagntactatcatgccaagaagatactgtgtctgatgggtatggagtatcanaagattcatgcttgcccaaatgattgcatactgtaccaacatgaattcaagaaatggccatattcccaaggtgtgnggtatcacagtacaaagtgaacgatgatgacgactgtagtagtgacgaaaactcanagaaaggccccctagcgaaggtgatatggtatcttcccgtcattccaaggttaagcgtctggttgctaatggagacgacgcaaaagaccttaatccggctgattcctcacaatggaagaacattgatcgttngtatctggatttcaacaaagaggcaagaaatct

SEQ ID NO: 277356 - DNA, 506 bp, Glycine max
  unsure (1)..(506): unsure at all n locations
ccagctcgcccaggcgagcaagggtgcttcttccataagcatttgccttctggaggaatcttctggagggcccaagtgggcctggttgctatctacaccctctctttttaactaaatgcacccccttttctattgttttgtaattctttttccgtaacgttacgaaactttacgaatttcgtaacgatacttattttccttccgcaaggttacgaatccttacggattatgtatttactcttntttagctctcgaagaagttatggaaactcacggattgcgcacaaacacctctnttctatttccgccacattacggaatttcacgaaccacgcaagcctgcttcctttcgatttctgagacgtatanggacttcattcattgcatgtcatcaagtaataatccccggacgaaattagggtatgacaactctcagcatagaaatcagatatagaatcaaattcatactcagaatcagattcaatgcataaggagtgacaagtatg

SEQ ID NO: 277357 - DNA, 470 bp, Glycine max
  unsure (1)..(470): unsure at all n locations
agcttgtagaccaagtatttgagagtaanagaatgaatattatngacaacttattcacaataaataatgtataccaattattcctttataatcatttaagagttgtattgactctntttttaatgttgatctttgtattgactctntatctcaactttngggtggtttctatgtagttgttgatgcaatgtatataaaaattaaatttgaagaaaaatatttatatatggtaagatgacacactagaatttcnaatttctttttatctatctatcttctatatatatactatatactatatgtaaaagaaacttgaacttcaacaagctatcaaataaaatntttaatttgtaaagaaccattgacttaatatactatatgtaaagaaagtttgaagttttgacaatcgttggatcacaaatttaattnttcaacaacccattgattgatatactatatatagacatatg

SEQ ID NO: 277358 - DNA, 425 bp, Glycine max
  unsure (1)..(425): unsure at all n locations
tctngaacatgattagtatattcatgggcatagatttaaggatgattatgttgtacactatatgtnttggagtcatcctgatgcagtgaagctatgcaatgcnttgtaattggtatttttgatagataatacccacaaaacaaacaggtacaggctcctattacttgacattgttggtgtgacaccaacatggatgaatntctctactggttttcctttggagggagaatgtgtaaataatggtgtttgggctctagaatgctttcagggtcttttctcatacgtgattgccctcctggggttattngtaccgacaaagatctagcactgatgaatgcattgaaaactgtgttccaagtgtaccaacttgtgtgtagtttcacatgatagaatgtaaggcaagtgtaaatcttgttggaaaaaaa

SEQ ID NO: 277359 - DNA, 280 bp, Glycine max
  unsure (1)..(280): unsure at all n locations
agctngaaggtgcgtaactcatccattttgcatagaatgtttgtggttgttggcgaaattaaagcccctccaaagtgttttgcaggggtataccaccaactgcttgcccttcagtggcatatccgaggcaaggctcgaagtcggctagattgtggtggggaatttcatgtgtctcccccatagtttgagagacatgtgcatgatcagtttgaggttgtcggctttcaatgagtataggagtggagttattgacatcctcactgggagtgtatgccacaat

SEQ ID NO: 277360 - DNA, 395 bp, Glycine max
  unsure (1)..(395): unsure at all n locations
ctcttctcntattattttctctcaattgttcttcatttcttcttcctctttcacttacattcttcctttntcttgcacaaatttcgttgctcttccacttgtaatgatcatggaaggctaaatactcaatcaatccagggatccactccaagcaaggctattaatttgagtttgggtttagtatttgtattttgagtgaatgttcattttttcttcaatcctatnttcaattntcatgattatgaatatgtttangattgaagatggattangttatggattcatttcctaattttcaaaatgtttggatgatatttcaatcaatntaaggattaactcgattgaactaactctaatgacattgattgaactttcacaacgtgatcattctctgc

SEQ ID NO: 277361 - DNA, 460 bp, Glycine max
  unsure (1)..(460): unsure at all n locations
agcttgtangattatggngtacccatcacatgtggttcttgtggcggtcgggcgatggtgcacaacacgttttccacatncacaaagcacacataaacccaccatcccctgttgcccacctccaactgaggtcacgtactcccacgtagcccatatcctctnttctctcaacaccgggtccccatcaatcctcccaagcttccccaacatcaaagtaatacaacattcgcacagcacaagctatcacagccaagcaaaacagggcaaaggcagaanactctgctcanaacaccaaccaaaatcacagcttttcttacttaaagactccagtaacaattccttcgttccaattcgttaacccgtggatcgaactcgaaaatttactggaagtctctagtacttaagcctacattgtgaccgttgggatctactagcanacatccagaacacattctgtact

SEQ ID NO: 277362 - DNA, 422 bp, Glycine max
  unsure (1)..(422): unsure at all n locations
tagaatggctagacatgatacatgtcagggctnggttgggttcatagataaaanggatgccccacattatttccatgacacatatgcaaaaatgatgatttggaaactgtatgcaaaactggtcatgcatgcgcctatgcggacgctcaagtgtcaaattnttatggtcatgtgatgctagggctcatgattcatttcctctattntaaatcaacccaatgtttccaaaatatggtcttttatcaatatgtgcattcctccaagtccatttcgggcgtccgaggaaatttcacagcattcacccttcacgtgtagacacgttgtttcttgaaaagatcggtatgatcaatcgaatctntttcaaagataagttggatatcatctcttttcanaagcatgtcggtatttagctagacaactta

SEQ ID NO: 277363 - DNA, 454 bp, Glycine max
  unsure (1)..(454): unsure at all n locations
agctttatctctgtggatgaaaaatatcatggntgggatatataaactacactaaaggtggtcatccaagctctttgatgaatattagtcatcggtccaaccaataaattatctccaagagtacaaaaagggttatttctctatcagtccggtgtcatgcaactctacatagcaacactaataataaaaataaataaataaatgcttttttcttttttctttttacctatcacaccatactaacttaaatatttctcttcatctctaacatatttctctatgaccaaatatcttttatttatctctatntctcacatatgtctcttcttttcttttctcatcaactcgctccatgttatactatatgactgtttagagaaagaaagagtaatagtcattttcgaccctgaatgtgttaaatactaacacattgatcccttgaaagatgaaaatc

SEQ ID NO: 277364 - DNA, 328 bp, Glycine max
atcaacgctatgggtatatcatctagctagagatctcctctgacatctacccataatgtcttttcttagtctcactctcctcatttttacaggactaagaatcatgaaatctattcttctgagttacatctattgtattcatcaaaaagaagaacatagacttgcaccacttgcggccttgtttgtacatgtttaaactaagggtgtgcataaaaatcgcgtcatacctaatcagactataactaacccgacccaacctagtttcgtactcaaattgagtgtagagaataaactgccatgttctataactaatttggttcaatctaac

SEQ ID NO: 277365 - DNA, 484 bp, Glycine max
  unsure (1)..(484): unsure at all n locations
gctagaatatcctttcctatcaaaccatgacctcccttgtaaccgggananaanagttgtcactttttgtagccaatattaagtactaaaagcagtactgccaatttcaatccaccttattcgttattactatactnttcttatacagatgggcgataatatacttaaccaatacgtacaacataaaacattaacaccgtatactcctatttataacaaattaacaaaaatctatatcaagttcaaatatatgcagtacaaccaatacaatctcggtcaacaaaactcctaaaacgataaaactcccaagacctaacacgataacaatcctaacattcttacagataatttatcaacctcctttgacaattacaaccaatttcctctatctgaaaaccgctcanagcacttgcttaatcagtttcacattaccccattcaaatatctagcctctggtttcaggcctaataaacaatctaaccat

SEQ ID NO: 277366 - DNA, 309 bp, Glycine max
  unsure (1)..(309): unsure at all n locations
acaaacacggctggaaactgtttatgcaacttattgatgctatatatgtcggattattgttagattattgcagctntgatgggaaaaaaactaatggctagaatgatcagaacataaatgtgttagttggaatcttacatgaccaagaaagagattntgctggaatgatcattggtggaaattcctgccaagccattatacaccggaaaaaattaaaatttccctatgttgtcaanataactgttagaaagctgtttaactgtggtcgccttagcatgccttaattgcagagtctttgactcaccttca

SEQ ID NO: 277367 - DNA, 488 bp, Glycine max
  unsure (1)..(488): unsure at all n locations
ctgcagctaaatggatcacaatttctagattaaaagaatgattngtattaaaatggtttagagtatngttttgttagcaaaacggtgtgtntaaaacaaaaagcagtgttacccgtgtctgctgcgaaggagggatgataagtaagtagggttcggcactggtgttgatcgtaagcacacacacacaaaananaaaaaaanaaagtgactagagtccaaaggttggcgaagaaaacgtgtgtagtgtgcaaagagtagaaataggaaggggaaaaaaaatgtatatttgaggagttgtttacgttgaaaggaatggttaaatgaaaataaaaaaaagcatcgagtgagaaaaaatcacaaaaatatagaaaattacacttttttagcattatatatatatatattataaaatattttcataaaaaatattataaaatattatnttaattcgtaaaaggttaaattatattntaattctctcttttcaa

SEQ ID NO: 277368 - DNA, 213 bp, Glycine max
  unsure (1)..(213): unsure at all n locations
gcttcagcgctggagctctctngaaatgaatttcacagttgttntcattttattgtgacattatcacagctgcaaactgggcccttttagatttatcaaacaatcaaatgaagggacgacttccagaattgttgaaatctactgactcattactgtttcttgatttcagcaaccataaattggtacggaagaaccctacattcctaagaattc

SEQ ID NO: 277369 - DNA, 461 bp, Glycine max
agcttcttatccaaggctcatcttggtggtgaagctccttcttccatggcttattccctagtggatggcgcctcctctcacctcttctcctttgttttccactgcatctccatggtgtaaaatctctattaaagtacctcattgaagctcaaagatcctgcctccaaagaagctccacaagcaagcttccatcaacgactccactagggactgtttttacagagttaggccaatcaatcagtgtgcaacatctcatcatgacttctttatttatgttctcccttccattttatctttggttttttgtccatatttgtacataacctttgctatgttgttgtgtttggtgtgttcgtctatcaattacattcctagttagaaataccctttttctacacacacatgacacctacacctcacacacacattgagatatcaggccctatgcccgggtctatgtg

SEQ ID NO: 277370 - DNA, 473 bp, Glycine max
  unsure (1)..(473): unsure at all n locations
atcttactccattaagtgaggttggttacatcgatcacatgatgtcattcaacacggntaanaatcaaagctntgggtatatcatttagcttgagatctcctctaacatcaacccataatgtcttttcttagtctcactctcctcatttttacaggactaaaaatcatgaaatctattcttctgagttacatctcttgtattcatcaaaaagaagaaaaaagacttgcaccacttgcggccttgtttgtacatgtttaaactaggggtgtgcaaaaaaatngggtcagacctaatcagactataactaacccgacccaacctagtttcgtactcaaattgggtctagagaaaaaactgccatgttttataactagtttggttcaatctaacttgtttcggcaaaaggaactcagtgacccgaactagactctcttgattcccntgcgtctcgactcttgtctctcttggttct

SEQ ID NO: 277371 - DNA, 473 bp, Glycine max
  unsure (1)..(473): unsure at all n locations
gtgaagtcaaaaacttttaatgttgtagatntagtttggatttttatcctgcccatagatagtaaggatcgagccttgggcaaatggtccccanattgngaaggaccgtttaaaataattcagatctattcgaatggtgcttatgagttagaggagctaacccctcagaaacgtactttgagcataaatggtaagtatttgaaaaaatataaaccaacactgctcgaagttaaaataagcatagaataagagaaatacgggaaacataaaaatggcgataacagtaaattgccacgaaagggcatgtgtcaatattacatcgaanagtagaatcgaaatacagaattcgaaataaagaaatcataagttctactaagtcatgaccaaatcctcatacagctttttcaaggtggtcagctccttagttaagaacctgtcagcactcttcataacccttgcctcatctgctacag

SEQ ID NO: 277372 - DNA, 516 bp, Glycine max
  unsure (1)..(516): unsure at all n locations
agagcacactgngatgtttcggatgctattgcatggcaccatcgtacgcggcttctagtgtccattctcattaattatttttcgttttcattagaaatgattcttgcgagttagaacaattattcactgttcaaattgcggtgcgttctcgttcacattctcgtgccccctttaactcttgtaccactaattttgtcttctactgttctatgctagttagagacgacacaacgtagactggaccagttatattttctttctttctagtttcttcgattntttctactaattcatttgttgaggactgctctactataccctattaatgtactaccgaggaggagcatcactntgaaaatattatttgaaacatcttttattattgagtgtaatatgaatcttattaataaataaaaataatttaattattttttacaataaataaattattttaattttattttataagaattatatgaatttaataaataattgtaacannaactaatttcttaa

SEQ ID NO: 277373 - DNA, 540 bp, Glycine max
  unsure (1)..(540): unsure at all n locations
cggactacgaggcttgaaaacattgaaccngcgatgatcacattctaactgcgcgcatgcaagcttatatngaatcttgtaaggaagcgtctcaagtgatgtgatcttaggtatgagttgtgtgtgtgtagctcatcgtcagcgcctcaaggaagtattctcaaagacacttctcaaggaacgtttcatcaatagagctactcagcgaagctacctagtatataaatagaaacacgtgtaacacttgttgtaactctgatgaatgagagacttgtgagacatactctaaaaaaccacttatctacctctgataatcgttcaataacgagctccgccatggatgcttccctccctctgtcttgtgcaccattgaagcattctctgcaagcttgttatccaaagctcatgttggtggtgaacctcctatttcattgctatttcctaagggatgggcgctctctccctattatctttgcttgcgatcatctcatggtggaaatcacattaaagacctcatgaagcacaagatcagcctcatag

SEQ ID NO: 277374 - DNA, 372 bp, Glycine max
agcttgcttctacacctttttcaatgcagcagcaacttctacaacaacaaagacaacaagcaactggggcctctcctccaccttccttagaagagttagtgaggcaaatgaccatccacaatatgcaatttcagcaagagataagagcctccattcaaagtctaacaaatcagatggggcagatggctactcagttgaaccaagctcagtcccaaaattttgacaaattgccttcacaaactgtgcagaatccgaaaaatgtgagtgccatcaccttgaggtctggcaagcaagttgaagtgcctccaccagtagcaacacctgcacctgaacctgtcaagcttcattctgcacttgaaaaagaggatgaga

SEQ ID NO: 277375 - DNA, 551 bp, Glycine max
  unsure (1)..(551): unsure at all n locations
ttattgacccttatgncattcgtangcgacactatgatactcagctgaacgaattaagagacatctgcttcgacctgttgatctgacttcattcattgagcgcatgatcacttgtgactccaaagtatcaagacctgtcaccaaacananggtgtgaagaccatcgaacctgtccaagatctttgagataagagatgaatcttctccatcatgtccttcttcaccaacatgtcgagcaccctctttcacccaagagccatcatgctctttttgataaccaaacgatgcaatgactgaagcgcctattaaaaacgaccccttcattggaacatatggttcacaatcaagagggatgttatagtgttgaacgaagacggtgactaagtgtggatattcatccattcccagcgcagatgttattattgttttggcgtttagattgcattgaactcgtcttctatcctcttcagaccatctatctctaggttttctattgtatgcttcacttgatgtgctccatctgttgaattcttctactgggtggttatatn

SEQ ID NO: 277376 - DNA, 436 bp, Glycine max
  unsure (1)..(436): unsure at all n locations
agcttaaagagttaagtctcatatcgggttaatcgattacagtagtaatgtttcttgatgcatagtggaaatataaatcacgttgtagattagataactgcattagcttctctagaaatagacagtgaaccggtataaaagattgtgtttntatctcttgattcatgtatttcactcattcaaggtttaatcaactcattcaattcaccccccctcttggtttaatgagtcccanaactcacaaggcatcattctatcacacatgatccacctcanatatttnttttcaagcctactaatcacttccacaattgcaacaatgattcatatcaagcatgaaacctctcaactaaaaaanaatacatctctcacaatttatgcaagtgcctaaattcaaccgaaaaacattagacaacaacaactgcanaagtctata

SEQ ID NO: 277377 - DNA, 202 bp, Glycine max
gctggaggatgatgggacccgggttagagatattaggatatgtgttacgtgggagtacgtgagctcagttggaggtgggcaacaagggatggtgggtttatgcgcgccttgtggatgtggaaaacttgttgtgcaccatcgcccgaccgccacctagtaccacatgtgatgggtaccccataatcctacaagcttgagttga

SEQ ID NO: 277378 - DNA, 470 bp, Glycine max
  unsure (1)..(470): unsure at all n locations
agcttgacagcaatactctattttaccctntattcctctttttcaatgttttgctactacaatatcatcttcgaaaggcatgcattgnggtagcttcttggatatgcttggcacttcactaagactacatgctcatgctatcttatgcagttacgcaaaatcccattgatctcagaacatggacaatgcatgtccattataccatatgttaaaatataatttaattttgaagaacgggcggcaataattgaaatcctaaccacataatcgcaatggctctgatataatgtcaaagggtatctccaagacaagctntagtgtntgtttggttttccattagaatgaagcttagagcctgatggatgaacacaagctaagctgttaggtggagggttanggctagtcttatatctctaatatgctctatgagtnnntgtgtgttgggttcaaatagtgaagtttgtaatcat

SEQ ID NO: 277379 - DNA, 349 bp, Glycine max
catggtgctcatcttatgatgttgaatgcatgatcttgatattatgatgttctctgaagaagatgccttgcacaccctctaagagacactttcaaacttatatgtataattatatctcatcacagagtcactctaggaaaataacatgatggatatttcatgacaacaattataactatcataatcaattatcacacccaggtaatcgattattatgatcatataccctactgtgatgcatttgtagaccatggtgatcgagtgtaatatgtgggtgtgcgaccagaatacttatgaactccctctactatatcgagattactcgatcctatatgagagtggtcttact

SEQ ID NO: 277380 - DNA, 286 bp, Glycine max
  unsure (1)..(286): unsure at all n locations
atgacacannatgcaaaatgatgaattggaaactttatgcnaaactggtcatgcatgcgcctatgcggacgcttcaagtgtcaaatnttatggtcatgtgatgctanggctcangattcatttcctctattttanatcaacccaatgttccaaaatatgttcttttatcaatttgtgcattcctccaagtccatttcgggcgtccgaggaaattttcacagcattcacccttcaggtgtagacancgtttttcttcanaaatcggttatgaatcaatgaatttttt

SEQ ID NO: 277381 - DNA, 467 bp, Glycine max
  unsure (1)..(467): unsure at all n locations
tacccatcacatgtggtactatgtggcggtcttgcgatggtgcatcaacaagtttccacatccacaaagcacacataaacccaccatccnctgttgcccacctccaactgaggtcacgtactcccacgtagcccatatcctcttttctctcaacaccgggtccccatcaatcctcccaagcttccccaacatcaaagtaatacaacattcgcacagcacaagctatcacagccaagcaaaacagggcaaaggcagaaaactctgctcaaaacaccaaccaaaatcacagctnttcttacttaaagactccagtaacaattccttcgttccaattcgttaaccgttggatcgactcgaanattntactggaagtctctagtacttaagcctacattgtgaccgttgggatctactagcanacatccagaacacattctgtactactcttttcacagccaaccacacac

SEQ ID NO: 277382 - DNA, 291 bp, Glycine max
  unsure (1)..(291): unsure at all n locations
agcttgaatgtgcgtaacccaccatttttgcatagaattgttgnnggtggnggcgaaaataacgcctcctccaaagtgtttgcaggggtataccaccaactgcttgcccttcagtggcatatccgaggcaaggctcgaagtcggctagattgtggtggggaatntcatgtgtctcccccatatgttgagagacatgtgcatgatncagttgaggttgtcggcttccaatgagtataggagtggagttattgacatcctcactgcgagtgtatgccacaatgggtggtgtat

SEQ ID NO: 277383 - DNA, 449 bp, Glycine max
  unsure (1)..(449): unsure at all n locations
agcttcacgatatactacgggacacaatcggacatcctattaaaaagntattgtcattntaattntcttagagcttccgttttaattacgagcggctcgatatattacgggactgaatcagacatccgagggaaaacgttttgtcattagaatttgctcagaagctttgttttcaatatcaagcgtctcgttatattacgggacttaattgtacatctgagttaaaatttaatggggtttgaatttgctacgaccttctctttccaattacgagcgcctcgatatactacgggacacaatcggacatccgagatataagttatttttttttgcatttgctcagagacttatgtttcaatttcgagcatctcgatatattacgggactcaatcagacatccgagatataagttattggcctttgaatttgctttcgagcgtctcgatata

SEQ ID NO: 277384 - DNA, 394 bp, Glycine max
  unsure (1)..(394): unsure at all n locations
agcttgatatgaggaagtgtngaatgttgaaacttccttgctttattgntgaccacagagtggtacctggagatatgtcgcangggtcaggagaccttgnggacgtcaggtggggtgctattgcccanaaccaagcttgaccaatcccgacccaacccgggcatagtcggtcagtgagaacctgagatgtacctaagcaggcgagctcctggcagtcaacagataaaaggaaaacaagaccacaaagcaaggaggcttgtggtggctggccagctgtgaattttgtgtaatatgtggattgtggcctctggtaatcaattactaagggtgggtaatcgattacaaggcttataattgaagacaggaggctaagatggtctctggtaatcgatta

SEQ ID NO: 277385 - DNA, 546 bp, Glycine max
  unsure (1)..(546): unsure at all n locations
ntgancctttagcccctgatccatcgatagcaccatgaactcagcttccagttaagcatcccatactgcctaatcaagancttatgtcctattaacaacttccggttgcccatctggttgtgggtgacaagtggatgaaaataacaatataatgcccaacttgctccacaaaagtcttcaaaaatgcagatcattcagcctaggtataggatgcctatatttaatggtgatgttattaagggctctacaatcagaacacatgcgccatgttccatcctttntagggaccaaaatcactgggacagcacaaagactcgtactatctcttacccaacctttgctaatgagttcatccacttgtctttgaatctctatggtttcttgtgaattacttctataggctggcctattgngcaaagaagctcaccgaatgagatcaaatngatgctcaattcccctcanaagtggtagtccacttggcacatttggtggaaacatgtcatganaatcctgccnaagagtttaacactatgaagcacttcaaat

SEQ ID NO: 277386 - DNA, 340 bp, Glycine max
  unsure (1)..(340): unsure at all n locations
tgaatntcttttgtgtctctcttcctccttttccaaaagaacaaaggactaaccgcctgaattcttttgtgtctcccttctcccttgtcaaagaattcaaaacgacacagtctgagaattcttttgattctttcctttcccatatacaaaagatttcaaaggactaaccgcctgangaattctttgtatccccattcacaaagtttcaaaggtttaaccgcctgagatctttgtcttaacacattaaagggtacatcctttgtggtacaagtagagggtacatttacttgggtttaactgagaacaagagagggtacatctcttgtggatcagttctagt

SEQ ID NO: 277387 - DNA, 212 bp, Glycine max
  unsure (1)..(212): unsure at all n locations
agtctaggatacatccagttttcatgtcntccttttgaaaaaggttattggtgtttattctgtgcaaggggatctacccacagagctagaggttactgatatggatgaaatttatcctgagaaggtcattggttcacgcactatcactcaaggaggagtatctgtgcctcaaagtcttgtntagtggaagcacaagtccagtgatgatgtga

SEQ ID NO: 277388 - DNA, 442 bp, Glycine max
  unsure (1)..(442): unsure at all n locations
tgtctctantcaagttctatgaaatatagaatcggatgcgtgtaaaatatgagatntgtgaagtatgatagaagagtgaatgctgaataaccctacaccactttactaagcttggttgggcaaatattacagaanagttcaataagataacanaattgacatatgagtataaacaattcanaaataggtgagattctttaaaaaaaaggaatgacaattatgggctaattaagcttattgggaaggacactagtcttggctgagacggagacaaganaaccattgctcctagtgatgaatggtgggaagccaaaattcaagtgtgtactattcaaccaaaataaagttagttctagttgcatgtcattgaactttcttcagtaggaagtatgttaatcaaacacttcaatggaaattgcatgtaatggagagtaatgggttt

SEQ ID NO: 277389 - DNA, 413 bp, Glycine max
  unsure (1)..(413): unsure at all n locations
caacgaaatcaaaacatttgttgtggcattgtgcctgctgcaatttatggaagatgagaaatgaggcttatgatgggcaaaaattacttcaacattctaagattatatggcttgngcttatgatggatggcctgtgcaggaaccatatgttgtcggatgcaagaggattgatggatctgatgatgaggaatggggtttacccagatacaattgcttatagtactctcttgcatggatactgcagcagagggaaggtttttgaagctaaaagtgttcttcatgaaatgataaggaatggttgtcaacctaatacttacacctgcaacacattgctccaggaaatggttgtagtaagagtcttcanacttataatgcattgatccagatatttgcagttataacaatattatcac

SEQ ID NO: 277390 - DNA, 360 bp, Glycine max
  unsure (1)..(360): unsure at all n locations
gtataataacttcataaccttaatttttttgtgattntgaagactaatgggtctgtgttcttcgatgttgtggttgcatantttaatgaacctatgtccccaacatgccttgtgttcgcaaacatgaaacaaaaatattttttctgatatcttataatatagaataggatagtttcattatcaataaatagtgtgctaaagttgtggagtgaccttccactgctgctggacttctgttgtgtcatgtttttcagctgtggcagtagcaactgttatcttgacaaattttgaatatcacagctgttaccttaatcagaaaaatcccatctttacccacctggttggttttctttttgatga

SEQ ID NO: 277391 - DNA, 403 bp, Glycine max
  unsure (1)..(403): unsure at all n locations
gcttcgaaagtgtnngttttcaccttctcgctaagccaatctgctggcttatcgagcgtcctctaagcgcatcactcatgagctaanggcgaggaagactctggaagaagatgagctgtacaggttcgctaagtgcaccacttcatctcattaagcgcaccactttagttcacccgctaagcgagaaaggcacgcactaagccaaaattcactaatgtgcgctaagcggttcataagtgtgctaagcgcacgagcacgaacaaggccacctatttaagcttgaaatcagattttgtgaaaggaatttggactgngattcanagctttgcatgtctanggtttctagagagagaaaggtccaagttccagagagttntgagagaaatttgtgtgtgaagatctg

SEQ ID NO: 277392 - DNA, 467 bp, Glycine max
  unsure (1)..(467): unsure at all n locations
agagaagatcacanaactgaatgttactaagctcctganatgttatcaagagctcangcttattacaaatcacaatgaatcanaactgcaatagctcttgaaccanatacattcaaaacaaaaaggcaatagaaatgatgtcacaagaactagagattaagtccaaacaacttgaagatgtacaaaggcacagggatgaataggatgaggcattatcgaagcaaattcaattactcataattcaaattagaaagcttatggcagaggagcatgatttgtctaanattgagccaaaatagaacataactacgatgttaatgctagagaacatcaccactaccacccncttacaagtacactaaatagtaaatgaacctacatccttctctntctgtttatgcttctcttaactaaactctacaacccagttattgatactntattaatattagtaaatatcacttttc

SEQ ID NO: 277393 - DNA, 569 bp, Glycine max
  unsure (1)..(569): unsure at all n locations
cggattgacccccattgatgcnttgtatanactcaagctngngatganacangtgtgattcatcatagatacatctctgctgagattaactntcctctcatatggtgaccagatcctatagcctntcaccccatcaccataacccatgaacagactctntcttgatctangtaccagctttccttcattgacatgataataggcattgcagccaaatactcttacgtttgagtagtttgctggtttgccattccagaattcaatatggagtttaagtcctatagcagtagagggtgttctatcgattagaaagcaagctgtattgatagcttctccccaaaaacttttgttgagaccagcattggacaatagacatcttgttctttccaggagtgctctgttcattctttcagcaactctattttgctgaggagtgtntctaacagtaagttgtctagcaatcccttcatctctgcagaaattgtcnatntctgtgagcacaactccaagccattatcagttctgagtctttaactatcctttcagtttgttttcaatcagtgccttct

SEQ ID NO: 277394 - DNA, 355 bp, Glycine max
  unsure (1)..(355): unsure at all n locations
agcttgatatgaggaagtgtagaagggtgaacttcctgtttttattcgttgaccacagagtggtacctggagatatgtcgcgggggtcaggagaccttggggacgtcaggcggngtgctattgcccaaaaccaagcttgaccaatcccgacccaacccgggcatagtcagtcagtgagaacctgtgatgtacctaaacaggcgagctcctgacagtcaacagataaaagaaacaaagaccacaaagcaaggaggcttgtggtggctggccagctcgtgaatttgtgtgatatatggttgtggcctctggtaatcgattaccaagggtgggtaatcgattacaaggcttaaaaatg

SEQ ID NO: 277395 - DNA, 397 bp, Glycine max
  unsure (1)..(397): unsure at all n locations
agcttctatagaaggttctttcctaatttctctattattgaatcacctctcaataagctagtgaagaagaatgtggcatctacctgnggtgaaaaacaagagcaagcctttgctttgctcanagaaaagcttactaaggcacctgttctagctcttcttgactnttctaaaacttttgagctagaatgtgantgccttggagtgggagttggagctgtattgttacaaggtgggcaccctattgcttattntagtgaanaacttcatagtgccaccctcaactaccccacctatgataaagagctntatgccttaataagagccctccaaacttaggaacattaccttgtttccaaggaatttgtcattcatagtgatcatcaatcacttaagtaca

SEQ ID NO: 277396 - DNA, 412 bp, Glycine max
  unsure (1)..(412): unsure at all n locations
ntataagcgcggtttcgggagacanaggtcaagcgttcacgatatgttattatgatattccgagtactttggatntggtacgaccatgccctcctgatttccagctgggaaattggcgagtggaggaacgccccggcatttacgcaacaagcataatgtaaacctttacggttttaaaagctctatagttaggcctaggctttagagtatttccttttgttaaggctttgtgtcttttgtttttgaatttataatacaaggatctttcttcatctgttcctggcctctacccattctcattcattggcatgtatacttctttttctgaaacggcagatccgatgacgagtcccccgaaggtactaatacctgggacccgtctatcgacttcgagcaagaaatgaatcaaacg

SEQ ID NO: 277397 - DNA, 408 bp, Glycine max
  unsure (1)..(408): unsure at all n locations
tatgacagtcaccgttttaggagcgcggtacaccagcagggcttcgaggccatcaagggatggtcgtttctccgggagcgacgcgtccagctcaagacgttaaagaagcgctactaggaggcaacctagtaccttttaaatctctgcttgntatntgatcagctctgtttctcaagtcatagtgggacacacctagttgctcatgatcctaagaatttaaataaaacgagcacaagctcggaaggtagtcatacctcacanaatatatgtatgcgtgtttaggtagtgaaaaataccttatgcatgtatgtaatttaggtagcaaaaaactacctcacaaaatatatatatatgtatgtttaggtagaaagataccttagatatgcatgtatgtaaacaaaaacacac

SEQ ID NO: 277398 - DNA, 500 bp, Glycine max
  unsure (1)..(500): unsure at all n locations
acttgtatgtcttgaacaacagtaatgaagtttttcatacattttaagcataatagcttagtgaaatagaataatctgagaatgtcatagactngggtgttgaaaaagcataacaagactttctgtgagtagtttaaagatacaatctttgcagatgagattgcttcagacacattaagaaagctagcaaatgggcctaaatgaaatgttataacctggcagggatacgacataaacaagtattcattttacacaaaagcacaagatgacanaagtacagtgcagaatagcggggcaccctaggggctaaatctcaacactctgcaagtgtcaatgacgccaactcctggtgagcttccatcccatactttggggtcatggatgaaattggggacgctaattatgtgaatttatagtatgtgtttcaaatgtaatggtttgacaacaccaccggtgtcccactgatgattaggatcacgctgtagactaaacaactggcn

SEQ ID NO: 277399 - DNA, 396 bp, Glycine max
  unsure (1)..(396): unsure at all n locations
agcttcactactcccatgtattattcctaaattctccttattctcctttctcattctctccatcctttcttcattgtcataactcattcttctcattngatcactangtttaatcatctctgccatgagccttgtggtttttggagatggtggagtagcatctccacttgtagaagaaaaatcattattatcgatgaaaattttccgactgaatattttccatcagcaatatctcacttatcgacggaaaataccgatggaaagtattccgtgggaaaatgcttcaatttctgatggaatntacccaagacaaaattttcattggaaagtataaattaccaatggatttttccaatggaatgcatttccattggaaattaaaattatactcaaaat

SEQ ID NO: 277400 - DNA, 279 bp, Glycine max
  unsure (1)..(279): unsure at all n locations
tctcacaatctttagatttgggagccaatccaatccttgtgtccggactctcagccacttatgatagccgccgatgatcccattactgcttcccctaagctctctgtcctttcttcacgccgcatcccatgccttgcaaactccttggagtacctttgcattgtggtcactgaaaccccgtgtaatgaaaggcgtgatgctttngtctaatggcgctcctctcatggggtaaccaagctgtcttatggcgaagacatgattataatttatacaacccct

SEQ ID NO: 277401 - DNA, 321 bp, Glycine max
  unsure (1)..(321): unsure at all n locations
aaatctaagtagtcaccaacaaaatgttatgaatntattatagcttttttttatcgtggtttactatggcatctaatatatatatatatatatatatatatntggtgttcaagattataaaagaaagaaattagaattcatacacaacttaaataaacaatataatatatataaacattaaaaaatntcgatagcaagttgcacgacctcctaaataatatatgtaaaactntcaaaagaaccagtaatcaatntaaaaataatatatatagtccttattattactattctaagtcatacttagaaagaagctgaactcat

SEQ ID NO: 277402 - DNA, 493 bp, Glycine max
  unsure (1)..(493): unsure at all n locations
tctcctgatggtngaggttntccaagttgaccgatgtctagttcctatatagtagtctgcaaatntcccanaatcaaaatactttaacttccaatttacacaaataataacaaattaatgtcattgaaaagtaaacagtatttgaatttgaatagaacaatgtcacatacttcaaccgatgtagtaaaaacaaagtatttgcagttcgatttggattgaaagatttaacatcaattgaccataattgcttgtatggaccaatatccctcttcccaaattccaaacagatgccatatggatcctcanactctgttccttcatcacggttgtgaggttntagatcccacacgggtggcatgtcacatgtagaacctggattctntaaggcactcattctcaagataatgnttgataagcactttagaatatnttctgaaattattattggactctgagcttctggtgaaattttatgtggactatgattcttaca

SEQ ID NO: 277403 - DNA, 410 bp, Glycine max
  unsure (1)..(410): unsure at all n locations
agcttcttcaagttccaaggcatagtcttcatgttgctctccctatctctaacaatctctccctttttggctntgatgatgccaaacttgaatntccatttgagtgcatntggagagtcttgagagtagagacttttcttgggaaaacctaaagtttcttaacactaagagaaatgtgtcaattcatatcatcatcatcatcatcattagttggagttatatatgaatgtatgtatgcagtgcactaatcatatgcatctcanatccatgtttcatctgcttgacttgaagtccaaggaagaagttcaactctcccatcatagacatctcanattctttctgcatagaactgganaattccttacacanagtttcattagtagcaccaaaaattatatcatcaacataga

SEQ ID NO: 277404 - DNA, 333 bp, Glycine max
  unsure (1)..(333): unsure at all n locations
gatgaatgcgaaaacttgggcaaatgaagagggtgagaataaaggacanacccatgctgcgactgccattcctatacngcccagtttcccaccaacccaacaatgtcattactcaaccaataacgatccttttccttacctaccacccagttatccacaaaggccatccctaaatcaaccacaaagcctgtctaccacacttccaatgacgaacaccacctttagcacaaaccanaacaccaaccaagaaatgaattttgcagcaaanaaagcttgtagaattcacccncattctagtgtcctatgctgactttgctccatatctactcgata

SEQ ID NO: 277405 - DNA, 366 bp, Glycine max
  unsure (1)..(366): unsure at all n locations
caaatggtatagagagtgagtngttcgagtgggagaaaacaatggagagtgaaatgctcatcgttcttagtcatgtgtntatattactaggcaatgcaaagtatatccttacaaaatggatcccaaaaaaatggtcatgcatacagcagcaaccaccaacatgcatattgtcacaagatactcctcatgcaaatatgagggcatgaagatacgagaacttaactccattgagcaagccttaactttggctaaatctcattactaaaaacacagatcagattacctttaacaaacagacttggcattccatactattcttgggtgaactgtaaccatgatagacatacaccgaaccctacgtacact

SEQ ID NO: 277406 - DNA, 349 bp, Glycine max
  unsure (1)..(349): unsure at all n locations
tagttatgaacagaatccagaagcatccttggacttcgcatnttanctatgttggagaatagttntgatgtttggtgcagttcctgctgcactcacctactactggcgcatgaagatgccagagacagcacgttacactgcccttgtggccaagaatgcgaaacaagctgctgcagacatgtctaacgtgttgcaagtggaacttgaagctgaagaggagaatgtgacaaaattgacagagaatgagagccacaagtatgcgttggtcaccaacgaattagtgaaacgccatggnctgcatattgtgggaaccaccaccacgtgcgtcttggtggacatagcattctac

SEQ ID NO: 277407 - DNA, 447 bp, Glycine max
  unsure (1)..(447): unsure at all n locations
agcttaatcctcacggccactgtntctctcataagcactagtgtntaaagtaattcttcaatcaacaaccaacacaagtctcaactnttgcatttcatctcatgccatacaatcacaaacacacaaattgaatgtgaaggactntcttggcttgtgatggggctgggctacaaacaattcatggtttttctaggatgcaaaacttaagttctaggagagcattcatccttagatcactntttccctttaattcccaacttctattgatatgccaccgtcatataagacacttagcttgagcaataacacacacacacacacacacacagctttacttattcttgaaactttcatttttttttatttgagttgtntatgattgctacttctttaaaccaatttctgtggttggtgctttccttaccacaatcaanaacacccaataca

SEQ ID NO: 277408 - DNA, 542 bp, Glycine max
  unsure (1)..(542): unsure at all n locations
ntgaccgtgttgccttgatacatttttagcgccttaaatctcagctgtcactaacatgcctcttgtgaatgtatattctnaatctttacctttagcnggaactatacaaatcaactaacagttgtgaaaagtccaaggggctgaaaaaggatgattatattatgcacaatanttgaaatattggtgtatgattgtgcttatcctaattgtattgagaatattgctacatgattgtgctgatcttaattgattctatttggattaattctgaatgtatgattaattcctatcgtatcttaattttattttgtatcttgatctcttgattattgcgatcacttatntttatgatagatagntgtatcagatatgtcaggaaangctattagagaaatcttagttaggtgggtggatgaccttgtatatatatctatcaatngttttaatagaggcagaaccacacggaggaggttgaagcaaagctatgagaatgaaactccagatgtcattgagatcatngangangtganaagcagttcgct

SEQ ID NO: 277409 - DNA, 486 bp, Glycine max
  unsure (1)..(486): unsure at all n locations
catgcaagctggaacacagccataactgtactcagtcacatgacttatcaattctctctgtttttttccttannaaattacaagacacgtgcatgtggaatcaatcaacttcattntacgtacattaatagtttataaaaccccgataatatataacacactcacacatataactagactatatgagaaaatcaagtaagaagttctgtactgcatatgaaataaaataagctccgttttgtataagacttgtgctgttcatatactggtcattttatgcataagatgtttaattcggatgtacacgctcgattattctattaattctttgctgacatggtcttgggtttttcacaggatatatagtatatttataactaaatacttctgtagcatcatcgcttctattccttaattaccaatgggatcagggatagctacgtacatcgaacgggcaattatacatctggaaccatttctaacaag

SEQ ID NO: 277410 - DNA, 374 bp, Glycine max
  unsure (1)..(374): unsure at all n locations
aaaaaataaaactctactatgaatcagtttgatattcttcgagatagtaataatacattatccactcttcattttaaagcatggttaatatgtctatctattatctgataaatcttatgagtggtttttctgtctctttatttatagatgtatgataacatatataggatgggtgccaaacattgtgtctttaaaatatgacgtcttatatattaactcgttgagttagtacacactcagtcaccgagagttgttagtgtaagtgatacgtttggttataactattgtacaaggtaccctgaatntagagcctctcttaagcgatctcttagcggtttgagcaaagatgattccgatctatgagatgaattggc

SEQ ID NO: 277411 - DNA, 421 bp, Glycine max
  unsure (1)..(421): unsure at all n locations
nntcatagtagtgtatctataatgtgnctaccatcacgaaatatcgctccctttccatcattgggggaccacctgngccgncagatccctcaccttttgggcgtgttctttgaagaaccgtcccccttttgcacatgttctggagtgctcctatccaaaccatatcaaaattgacctgatcttgctaacaaggcaaccattagtccttccagatggactcggaaggttccagttagtgtccacgtacaactaccccntaagactctctggaagaatgtatancaattcctcatttttgcgtatccccatctttgacaaacatctttaatggtcttgggcaagattccctcgacttgtcaagtccccccctgaactggaggggtatgatattggactaggacactcctcttgttacaaagct

SEQ ID NO: 277412 - DNA, 498 bp, Glycine max
  unsure (1)..(498): unsure at all n locations
agcttgtaatcgattaaatcgatacgagacataactttgtctgcttaaacaacttgtgtaatcaattactgtaaggttgtaataaattaaaacagagagttnttacttctaaagaatttttctaattttagaaactttcttctaattcacacatgatggtgcgtgatgcacaaatgatatgatatagactaagatgcaacatacaatataacaatcaatacaaatgccactcaatagagttgggcatataaaagacaaaacttcttcaagctcttcttcaagcttcaaggctaagtcttcatgttgctcatgttactccacctatctctaacaattaattcgatgttgctagccaaatttcaagtagaagtaagttctgaagaaacttagagaataagaatacttcatccatttcatgtttaatccatcactaagcatgagaaaaaaagactaagactatatcacanacatgcctattaaaaaacattcaatacaaat

SEQ ID NO: 277413 - DNA, 404 bp, Glycine max
  unsure (1)..(404): unsure at all n locations
atgacttagttcanagctcgttacaagtttaatatcaacttttattttttatttgaattcagtttgatttaaacttgtgagtaattcaatttagctattttgttggattggtttaaaactataattattttaattcttttatgtatctatttattttgtgaaataaaattaattaaaaaactaattatgtcnaattactattttataatcaattagtagtattaacacatgtgaaattagaggatgaaattcagggagaaatgacactggctattggcgtgaagtgcgaaaacagccgaaaaacctgaactggacatttnttgcaccanaactagtacttaagtagtctctctgaacagtagctggtaaggtggtcagaagttgttatgatcactatattattc

SEQ ID NO: 277414 - DNA, 465 bp, Glycine max
  unsure (1)..(465): unsure at all n locations
agctnttagattcattctatgtacccgtgtttgtccacattngtgtttcgggtattntattctcgtttcatttactttttgtacccncttttgacgtgcttaagccattttacttaagtcatttctcgcttaacttanaaataaaataaatttccaccgaacgtttgaattgtattatccgttaacttcggttaaaataaattccgaccgttcggtcgtgccgtaaccatgttggaaatcaaaaaagaggtaaaaaataatataataataaaaaaaacatcttttagcaaaataaagcggaaaatcaatcggacgttttctctttgggatttctaattcttaatcaaattgactaaataactaaagtgaaactaaggctaanattaactcgcctagtcaagctcgtccataaaaataggtttttgaaagttgtcatttcaatttcttgctaagtaaaatggatca

SEQ ID NO: 277415 - DNA, 392 bp, Glycine max
  unsure (1)..(392): unsure at all n locations
tcttgcgtagccgctcttggtgctcagaanatcccatattctaatccctcnttattactagctatttgaattctntagttcctaaatgtacaaccttcaaattgttgcttgttcccctctttgttttctgcaaaaaagattatcaatatcaaagaaaacatggagagaattgtcatggttattattactcgaacctgaaggaataacatctaaacaagtcattntattcttagaatgtgaaaactctgcattattatggataacatggngtatggaggcaagtaagcatgtgaataccacaagtcattntctccaattcaagggcttgattaattgctctaggaaaaaagcatacatctggtatattgtttggtttgcagctgtttggagca

SEQ ID NO: 277416 - DNA, 374 bp, Glycine max
  unsure (1)..(374): unsure at all n locations
tgccgcatgcaagcttaggaatatcaaattcagcctgactaacaatatattaggttntatggttagtaaattataaatnttggctaataaagaaaatgaaagatgaaaactaanatacctgaatatccttccatatcgaatccttctgagcagcagggacttccttccaagtctcgtatgtcacatcgaccttatcacgagcgacaatctccaaatatgttcttaatttcttcttgtanggactgtcgaccttctcggtcgcaggatcgacgtggactactggtctctctgccctaggtggtctagttgccaaggatcgtagccgtgtggctntgcgtgtccacttcaaggtagacggagacgctaatgctact

SEQ ID NO: 277417 - DNA, 444 bp, Glycine max
  unsure (1)..(444): unsure at all n locations
tcgagatctgcgcctttagattccagatctggcttaaggttccagtttgatgtcattaacgatgtcattccagttctgctttgaggttccagattcgttgcacttgtctgagtctattctttacgcacttaggggagctaaacaccaccgtcacacgcggaactccacaaagttcatgaccaagggggtggaggaagaaaaaggagcatcctgnggtagctgtcatagcttgagtcgtcgattcaacaccgacaggcggtggctgctanggtcccgatgcactttggcacggnggagcgaatgttgctcgaggtgaagagcaacgataaacttgaaacttgttttattttttaanaacaataataaatatagtggtaggtgtngtttcactttctggtgttgtttcacattgaatggtatgatgtgatgtatatgcatactatg

SEQ ID NO: 277418 - DNA, 280 bp, Glycine max
caatcaatcattagtgcatatgctaccctaatatcatacgttaggcctagactaggctttaaacaatcattaacgtattatgcttatgttacactaaagtgatactataccttgattgggccatcattactgcatatgaatgtcacactagagtcatatactaagtcttattgggtttcaatcacactatagtgatattagaccttgattgagtcttattacaatttaatcaatcattacactaaagtcatattagaaagtggagaatacgtaaactaca

SEQ ID NO: 277419 - DNA, 418 bp, Glycine max
  unsure (1)..(418): unsure at all n locations
atatgaatactcaaagcgacctggttggcagaaaaacatatcgtctttctcgttggtgattgtgaattccaagagggggaatccctntatgtgtaacttgctttattaaatccttcaattcatcgatggtacatgttgaaggaatttgaaatttcttaagatttnttcctgtgaatgcgcatccaacaagtttgttctgcggtgccatgttccatttcccgttgtaatacaggatcgcgtcatgagtacggtgcatagtgcgttgaagtaagtttattactccatctggtgttcttccaatggtgcataataactcaatcggaccgagacacganaattgatcattacacattaacattgtgttgacatcgtcatcatttatcaatttcatacactgaaagtgagtttcatccaaaaa

SEQ ID NO: 277420 - DNA, 393 bp, Glycine max
  unsure (1)..(393): unsure at all n locations
agctngaaggtgcgtacccaccatttttataatagagcactggtaatgtgtctactatcattgttatcatttctttctccatcattgagggtgctacctaggctgccaggtctctccacctttgggtgtatactttgaaagatttcatgccccttnttgcacatgttatgtagttgcatcctatccggagccatatcagaattgtactgacactgcctaacgaacgcaaccattagtgatgcaagttccattggagcttgtaggcctaggatcttcttcatcaatggattcctttgcttcttggaagatgaatggcagtggaatggagaaaggaagagagagaggagacgccacttcaaggagaagatgagtctagaagaagctcaccaccat

SEQ ID NO: 277421 - DNA, 495 bp, Glycine max
  unsure (1)..(495): unsure at all n locations
tattattgagtggacgctactatctcttattcctgtcttaatgagccaatggctacggagctatcgtccaattgtaaatctgcaaaagactcatctagctctaataattctttatcaggcttatttttgtcaaatcttatatggatagcttcttcaacaactaaggttattgagttgtacactctaaatgcctttgaagtttcaaagtatcaaagaaatattccatagtcacttttcgagtcaaaattttcccagactatcatttgtgttaagaatgaaacacttgcacccaaaaggatgaaaatatgatatgttgggttttcttcccttccacaattcataaggagtctttntcaagatgggtcttatataaattatgttntgaagatagcatataagttcttaggggttaagttatcagttggcatggttctagccatctcttggagagaattgttctttctttcaactactccattttgtagcggagttctt

SEQ ID NO: 277422 - DNA, 474 bp, Glycine max
  unsure (1)..(474): unsure at all n locations
agctntataagctcaattgaagccatatctctagatgtgtgactaaaccaccacccttaaggctgcaattaaggcaaccacaaagaggctgcaactaaggcgggataggggtgaccatggttatcaaacactcgagttaactcattaactcttacaagtttacaaattcacttaccctctatgagttgactntgtataaactctctttttagtagaccctaggtagactttataaactctaagtaaactcggtagactctggagtttaccaccaagtcaacaagtcatcaagttaaaaaaattagaccaaaatgtaagtcattntgggttattntttgtctgtttagtgttcaacataccttcatttagtttgttattcccaaataanaaaattctcatctttaataacatcaaacccttgatgggaatgatctacgactactataacatctgcaagttattatctagtagtca

SEQ ID NO: 277423 - DNA, 394 bp, Glycine max
  unsure (1)..(394): unsure at all n locations
acaatatatcttgtcctgtnttcaccaacatacactgcannagtgccctttggcacatcttctggaagaccaccctcttcattgtagccctgctgcttcttcccaaaacttgaacaccttctcacaatttgcttgatcacatctgcttggggtagcttattggattntttgatggccattgtgatatgtgattgtgttacttagtactctttgcacaccttcaaaagggtctcttgagggtgctgaaagtgtgtgattcatggggcgagtttggataggcatttatcattgngacattggtgtaagtggaaatgagaaattgagttttagagaaacagggtcacgtggctgtggggacacatgtagcagaccacacccannatngtcgtacatg

SEQ ID NO: 277424 - DNA, 446 bp, Glycine max
  unsure (1)..(446): unsure at all n locations
gctatgctgcaacattataatagacccnctcagcttcaaaaccaacaacaccagaataattatgatctttcaagcaacagatacaatccaggttggagaaatcatccaaatctgacatgggcaagtcctccacaacaacaacagcctatccctcctttccagaatgttgctggtccaagcaagccatatgttccttctccaatacagcagcagcagtcacaacaaagacaacaagcagctgaggccccttctcaaccttccttagaggagttagtaaggcaaatgaccatccagaatatgcaatttcagcaagagacaagagcctccattcagagtgtgacaaatcanatggggcagatggctactcagttgaaccaagctcagtaccaaaattctgacaaaattccttcatagactatgcagaatccgaaaatgtgagtgcatca

SEQ ID NO: 277425 - DNA, 449 bp, Glycine max
  unsure (1)..(449): unsure at all n locations
acattcagaaactgctggtaatcaattaccatatatgtgtaatcgattacacagtgcaaattttgaattcaaattttaatagctgttgtaaatcagttctggccactggtaatcgattacatcctctggtaatcgaataccagagagtaaatttgttgaaaaaaactttttaacttaaatttcttggccaaaccttttgctacttcaattggaattcccttcctatttaatataccctttctaagactctagagactgtcttgatcatccatcttgaatatatttaatttctttgtcttgaataaagctttgagacgcatgtgaagctttggcatcatcaaaacattcagcttgatcatttgtctacaatctcccnctttttgatgatgacaatccctgaaatcaagacaagctatatacaagatgatagcacgttcacacaaccctta

SEQ ID NO: 277426 - DNA, 230 bp, Glycine max
  unsure (1)..(230): unsure at all n locations
agcttcaccttctggtcctcctcatagnntgtgcatgagtgaacatgctctantttcgtctcccactccaagtaggccttcggatcattctttcctttaaatggaggaatgttgagtttaataccatcaattcggttttgtctaggaacaccatcattccctcttcttctcctttcttcttcattatgatctctattctccatttgatccaacctctcatggagtgcatc

SEQ ID NO: 277427 - DNA, 208 bp, Glycine max
  unsure (1)..(208): unsure at all n locations
gctgatatgatcacacaagctctcgagaaatncaaatggtcataacttgttacactgttagtctattcangcgcataatatatcgagacgctcgaaattgaaccatggtagctctcgagaaattcaaatggtcataacctatcacacgaaagtccgattctggcagatagtataccgagacgctcgtaatcgtacaactaaagctctc

SEQ ID NO: 277428 - DNA, 494 bp, Glycine max
  unsure (1)..(494): unsure at all n locations
gcttgtgcgctntactcaacatttgtgcttaacatgctcatctntnttccanaattccaactcatcaaatcactatgatgactttcacccttgtaattaatgtaataattttcacgctgtcaattaattacttaattagaaatcagtatcgacgcaacttttttttccttttattagcatgcttctcatatnttaagaataatattnntaaacttnaataataaattattatananntatagtgtcactgaatgaaaatataaaaatatttatactggtaatgcatctattnttttttcgtaatattataaagcaaataggagtatgaaaaatgcaatagataattacttccaaatcaccataggctacaattaactgaattaattaattagaagcgtgagatattataaaggaaagcttgcgtaggttccttccagtatctacatgcagntgccacttcgcttatatcgtatcatccttcccatcattcttcg

SEQ ID NO: 277429 - DNA, 472 bp, Glycine max
  unsure (1)..(472): unsure at all n locations
gctacatctcctaaggatctccttagataatgcttaactcanaaaggcctatccttggacaacataattggagaaatatcaaagggagtttctactcgccctagactcgagctaaatcagtttaaaaggaatgaagtgtgagacttagttcctaaacctgcctctcacatgtcaatcggaaccaaatggatgtttcaaaacaaacttgatgaatcaggcatcatagtaagaaacaaagccagattggttgcataagggtacaaccaagaggaaggcattgactatgatgaaacctatgccctgttacaaggttagaagccattatgctgctggttgcttttgcatatatntatggatttagattattccatatgtatgtgaagagtgtctctctcaatggatacattgaagaagaggtatatgtagactagcctncaggtttcgtgcactatgaacatnctaatcatgttta

SEQ ID NO: 277430 - DNA, 418 bp, Glycine max
  unsure (1)..(418): unsure at all n locations
agtcacctgcngcatgcaagcttactaaggcacctgttctagctcttcctaacttttctaanactnttgagctagaatgtgatgcctctggagtgggagttggagctgttttgttgcaaggtgggcaccctattgcttattttagtgaanaacttcatggtgcgacccttaactaccccacctatgataaagagctttatgccttaataagagcactccgaacttgggaacattaccttgtttcccaggaaattgtcattcatagtgatcaacaatcacttaagtcattagagggcaaagcaagttaaacaaaaggcatgcaaaatgggtagagtacctagagcaatntccatatgttatcaaatacaaaaagggaaaaaaaaatgtggtagctgatgccctctctatgagacacaca

SEQ ID NO: 277431 - DNA, 306 bp, Glycine max
  unsure (1)..(306): unsure at all n locations
tcggacctcagtgtgaatagttatgagcatctcaacctcgcgagagctttcgttgatgactgtcgagcatctcgacatgttatgcgctcgaatcggacatccgtgtganaagttatgaccatntgagtctctcgagagcttacgtggttcaatttcgagcatctcgacatattatgcgcccgaatctgaccttcgtgtgataagttatgaccattagaatttctcgagagctttcgatgtttaatttcaagcgtctctatgtgttgtaagcctgaatcggatcgtaccgtgaatagatatgaccat

SEQ ID NO: 277432 - DNA, 186 bp, Glycine max
  unsure (1)..(186): unsure at all n locations
ccgcagctgcagcttaacattcaatntcgagggtctcgatataccactgtactcactctgatatccttgtaagaagntattgtccgctgacattgctcatagcttcacgatacaatctcaagcgtctcgatatattacaggactcactcagacatccgagtaacaagtcattgtcgctagaatatg

SEQ ID NO: 277433 - DNA, 123 bp, Glycine max
  unsure (1)..(123): unsure at all n locations
gacgatcganattgaattttgaagctctgagctaattcaaacgacaataactctttgctcggatgtctgattgagtcccgtagtctattgagacgctctatattgatttctgaacctccgagc

SEQ ID NO: 277434 - DNA, 558 bp, Glycine max
  unsure (1)..(558): unsure at all n locations
agtgtaccgaagccatttgaacnnccctgancctctacagtanactctagagtctacctgcngcatgcaacgcttcatccaatagcctaacgcatctttantccttgttctagngtgagacacgccaaccttaccctcggaagcgaaaagaatacaacggacatctccaatcaaagaaatagaaccaacgaacacttccaatccaagacaaagcaacaaaagataagaacgaaaattccccatcaaagagtgggagaaagcacaaagacaagaaagaaaactctcaatcaatcaatgcgagaatagtcaataacgatgacgaccaaggaaagaaagctcctgatcacggatcgaaataaaacagaagaaatgtgccgataggtccttggacccgacaatatctgaataatacagaattgtcacccaatgaacgataagaaagacatgaaaccacgacctcagattggcttctctccttgataacaaccacaatccctgccgctacgactattctcccccactcaacataaccgataagcaaagccacaacaaatccct

SEQ ID NO: 277435 - DNA, 651 bp, Glycine max
  unsure (1)..(651): unsure at all n locations
acacacactctcgacgacgttgtcacacaacgagtacagttgcgtagacgtatngcacgcgatantattanngtataatantaaaannnnnnnnnnnnnnaagtgactgaaaccnctgtacagtcgcactatgcnanncanagannacncngactggtcaatggatagaccatggctaccagagaaaaggtatcttataatatttcttcctcaggcagggaaggactttgtgaatgtactatataccttcttaacatttactgttggaaacaatgctatacaaatggaaaagcagacaattgaagtatgatcactgagctcactcgattgatatgtggcaaacatagacaacagattggctgtccaaagaaatgcaactgcaactcatgatctcatcatacgcttatatgaataatccgaacgtgaacatcgatgacaattggctcacagactatgtatgatgtgacgactcgcacaagtagcgacacaaaagccacggcttatgaagaacctccagagatggaagaagcagatgcggacatgtgtcggctaaccaatctctcccaaagtgaaagaagaagtgccatgaagcggacggtcacgtcaaaatacagcacgattataacacacatgaattgcatgtctggtccc

SEQ ID NO: 277436 - DNA, 474 bp, Glycine max
  unsure (1)..(474): unsure at all n locations
agctntaagaatcgntgtatctctatgactcctttaaagagaggcacgaataaccagagggatgtntaatatacaagggaacaaagaaataatgaaatacattgacagacaagaagaagtagtgttgaacacataacctctcaaatgcaagaataaagccccaggcatttggatggagttgggaagggaaaattctaagaaaattcaaaaccctganttggaaatcactaaggggtaacatcnttttaagcatggtgtcatctggagttctaaattagtggtcatatccctgtcacaaacaaaatggggattaaatttgtcaccagaatctgtaatgccctgaaattttgataattgaaaatatatgtttgatgtttttcttgtgttatttgattaccttgattaattggatgaattgaggtatcgtgtgaattanccatgtattatntgcttgatgcggatgttgagttatgt

SEQ ID NO: 277437 - DNA, 438 bp, Glycine max
  unsure (1)..(438): unsure at all n locations
gctcctcgggccattcctgcgaaggcaaacgattggaaagttagttntaccagtgggacgttactcttaaagcacatatggcatataacctcctcccataaatacaaacatcaatgtaaatntagagtaagcttatgcgcatatttccttacaaatgttctcttgcacaagacattctattaaccgaaaaaacgcacccatatacaatcaaggcagctccgttacctagattatntacacgtatntccaagtgtatttgttacttacatcacacacatctccttggctaaattcacatacatgcatacccaaagcattgtggggtaccaaaaattgcacatgtacacctcttggtatttctaatacctatacatacacaaactntatgatgaatcttgactatctacacaataaggtgctacatttcatgctcttttc

SEQ ID NO: 277438 - DNA, 415 bp, Glycine max
  unsure (1)..(415): unsure at all n locations
agctnntgcggattggtcttcgttggtgttatgatcgatgtgggtttgaaaagaggcaactctgatcatcatgctttggtaaatgcaaaaactgnggtaaatgaagagggtgagaatgagggagaaacccatgttgtgattgtcattcctatacggccaagtttcccaccaacccaacaatgtcattactcaaccaataacaacccttctccttaccaaccacccagttatccacaaaggccatccctaaatcaaccacaaaacccacctaccacacaaccaatgctaaacaccacctttagcacaaaccanaacactaaccaaggaaggaattttgcagcaaaaagcctgtagaattcaccccaattctggtgtcctatgctaactngctcccttatctacttgataatgcaat

SEQ ID NO: 277439 - DNA, 429 bp, Glycine max
  unsure (1)..(429): unsure at all n locations
ctacatcagaatttagtaatgacccattaacctagaattaatataacttaatgccattaacctagggaattaaaagaacttaatgactgagtgtaactgaaattgtggcaaccaaaagtcacccccaacagccaacaagtcagtcaccatttggtctcccaaaaggctgatgcctatgttgccaattgggctcttattacaacttgaactaaacctaactaaaacccttntagttgattaacccaaaacatatttttggtcagccaactttacaaggattgagccattatttagacaaactaaacactctaaaattgagacaaagtggtgtcatttagtcctcctccatttgggtcatgatacaactcacaaccttggacttttctccttgaaacttgggcttgtattcaaatagtatggacaatactt

SEQ ID NO: 277440 - DNA, 411 bp, Glycine max
  unsure (1)..(411): unsure at all n locations
cgtggttcctctctgaaatctacggtttgagcacttatcttgtagagtagaataagcttaacatgaaaacttcatgtttctntcttggtaagactacctttagaatagcttacaaatccagaagtgctagttctttcgtagagtacactctcttctcttacatttaagatgagtgaaacaagatacatcagaggaaacaactaagttgatccaataactgtaaacagattttagccaattggcacacacaaatatttggcaagcatgagatgccatacattttcagtcataaataaaagttcttagtatgacttttaagctagaaacttattgtagatgatagcgtatgatcgactatctactaaaatgggaccaccagaacatgtatttttcaatcaatctaataataaa

SEQ ID NO: 277441 - DNA, 418 bp, Glycine max
  unsure (1)..(418): unsure at all n locations
agcttctagccaaatggacttaccttgaattaattcctttgatagccnctntgagcctattttcccctttctttgttttgaagctcattacaagccttaagtgaaaaaccatgatatcaccttacccttaagggaatttggagctttggaattgttttaggaataagttgggaataagtgtggaggggtatgtttcattggaagatatgatttttggccatgcttgatgtatatatatatngcctagttctttcttttaatctacaatttatactgttcaatcaaaaaataaaaaataaatcaaaataaaaaaaaatcagttgctgcaaattctgcaatttcgtacccttcanaanaaaagaagaagaaaagaagtgaagttgaataaataaggtcttgatatgagaacttgatttga

SEQ ID NO: 277442 - DNA, 391 bp, Glycine max
  unsure (1)..(391): unsure at all n locations
ttcttcgtgggttgatgggttctatctcgtagaatggcttgatcactggctaacatgttctcaattagctcagttgcttctttcggngtcttcagttntatcttaccccctacagaagcaactaacaattgcttggtttgtggtctcagcccatctataaacatattcaattggattagctcggaaaacccatgagtgggagttcttctcaacaagcctctgaacctctccaatgcttcactcagagattcatcangaaattgattaaatgaagagattgcagctttcccttccgcaatcttggactctgggaagtatttttttaggaactnttcaacaacttcttcccaggttttcaacctattacctntgaatgagtagagccacctct

SEQ ID NO: 277443 - DNA, 473 bp, Glycine max
  unsure (1)..(473): unsure at all n locations
agctggcttatacaatctctctccttttgatgatgacatacctganatcaagaaacacatacacattctttttcctagccaatcactcacttaattctccatattctccccctttgtttgtgagtttaagctctacttgaaattaagttattcaatcttgtgagttcttgatttaatccctattttctctccccctttggcatcaacaaaaagccaaagtgcgtaacaaatataaaacatacataaatgactaatcatacacaagacattcattgaanaatctaaaccaatcatgaagcaaaaacatgaataacccaaattaatatataaaccacatagtcatataacataattcataaaaattcagtcatactaaacaaatattaaaagaaatactagatgttcaaatgtcataataatatagccaaatacatggctagaaatcanagtactaataatactaaagaattata

SEQ ID NO: 277444 - DNA, 389 bp, Glycine max
  unsure (1)..(389): unsure at all n locations
gctttagccaatggactaccttgaataattcctttgtagcccttttgagcctgttcccttccttgtttgaagctactacatgcctangtgaaaaacctgatataccatatccttaaggaattttggagctctggaattgttttgggaataagtgtgaggggttttttgtttcattggacaanctgttttgttggctatgcttcatgatgtatnttgngccatacttgatgtacattgtatatnggctaaatgtcggacatgttgaatgaaatgatgtttctcaaaggctaaagagtaaaaaaaaaatcgaaaaaagaagaagagcagcaataatagtgagtgaataagatcttaaatggcacaagaatgatgaaactcttggttctact

SEQ ID NO: 277445 - DNA, 419 bp, Glycine max
  unsure (1)..(419): unsure at all n locations
agcttagcgccagtcatgcgctgagcctatctgaagacacctactttgcttagcgcattaatctcgggcttagcgcgcggccttgatgctgatgctctaccagattctccttcgcgctaagcgcactgaagctgcgcttagcggtggatgcgcgcttagcccaattggtgagctaagctcaactgtcactttttgcacttcatgacttagcctctnttttacctgagaatgcacagatttcatcattaaatccaatggacatattctaaagacagctttaaccataaaacaagatttatttacaagattactccaaaacaaccataaatgggggaactatacacagtttggaaaataatttctatgcaaaagttagtcgtataaggcgactatacaaactccccanattatcagttcac

SEQ ID NO: 277446 - DNA, 466 bp, Glycine max
  unsure (1)..(466): unsure at all n locations
taataaatctatatatggtttataacaagcttctcgtcagtgtttccttatgtttcatgggataatttcttcatttggttttgatgaaaaccccatggatcaatgcatataccacaaggttagtgggagtaaaatatgctntcttgttttatatgtagatgatattntacttgcagccaatgatcggngtttgctacatgaggtgaaacaatttctctctaagaatcttgacatgaaggatatgggtgatgcatcttatgtcatcggcattaagattcatagagatagatctcgaggtattntgggtctatcacaggacacctatattaacaaaattctagagagatttcggatgatagaatgttcaccaagtgttgctcccattgtgaagggtgataggtttaatttgaaccaatgtccaaagaatgactttgagagggaacaaattgagaacattccttatgct

SEQ ID NO: 277447 - DNA, 442 bp, Glycine max
  unsure (1)..(442): unsure at all n locations
agcttcttatccaaggcacattcttggtggtgaagctccttcttccatggcttattccctagtggatggcgcctcctctcacatcttctcctttatcttccgctgcatctccatggtggaaaatcaccattgaaggacctcattgaagctcanagatctagcctccatagaagcttcacaagcaagcttccatcactctcacttaggaaaactatgtagcaagtgtcaaggtcaccctgttgtgcacaggcaagtccccccatggtgatcagcttgagtcacaagggatttccaaaccgaatgacatacccctaagtacaggtattttccttcatgaaaaactacaagtacttactgaanaagtttatactatgtccatacaatatgaagtatgaaacatgggcaccatcaatgtactgatcatggataattaaagattcta

SEQ ID NO: 277448 - DNA, 478 bp, Glycine max
  unsure (1)..(478): unsure at all n locations
tgcagtcatgtcccttagagtcctctcactgtgtggaggttgtgccatgttctcagaatgtgcaaaatcagaatgctcataatcagaatcctcagaatcagaatgctcaaaattataatgctccaaatcaggatgttcaaaatcaccaataacataatgcacagattcaccagtaatggaatgctcangatgatcaaaaggtataaaatgatgcctaactaatctatgaaatgtcctatctatctcagggtcaaagggttgtaagtcagatggattgcctcgagtcatacactacattcagcatgcacaactagttgccttgtcatgtaaataaaggtgcaagtttgaactacagctaccctcanatgatatccaaatgacttgataatttgtgaggaccttataaaatgatgagaagatagcacaaaaactttcagaccaaaattcanagtctaactatgaaagctaaaaatggtgg

SEQ ID NO: 277449 - DNA, 496 bp, Glycine max
  unsure (1)..(496): unsure at all n locations
agcttgtaaactntatacaagaatgaagctctgataccacttgttagacactcagatatcttaagaaggggggttgaattaagatattgcaaactatttccccaattaaaattctacttcaatttcaatgcaagttacaagttcccttaaaaatgaactcttaaataatgattcaaatagaacaatctgaatataaatataaagcaataataaataaacgagtttaagggaagagaaagtgcaaactcagttttatactggttcggccacacccttgtgcctacgtctagtccccaagcaacccgcttgagagttccactatcttgtaaaatccttttacaagttctaaacacacaaggacaatccttcctttgtgttcagatttctttacaacaagagaacctcggtctctctantccctntgagaatttagaaagaaaagaagaataaatctctcttgaaagagatagaatgtacaatctgagcactcaattat

SEQ ID NO: 277450 - DNA, 502 bp, Glycine max
  unsure (1)..(502): unsure at all n locations
gcttatggataagctctntatttagtctcatttanaagaagttatttacagcttgttttgacttattttatgccataagcatttgtgcaagtgtttgagaaaactcttgaaaataacttgtgaaatgtccataagctgtttttaagcttatttctataagctcttcaggatagctaatgaaaacagcttacaacttatatgaaaacagtttaacccgaatttctcttcgattatcgaaacaacatatacaaaattgttacatgataagtacttacctaatatgcctttaattaagttgtttttccaatcaggcctaagagattattgaataaacacttaattaagttgtttacactaagatgctgttcatgtgtgcaggggaaatantcaccaatttgccaaagagctgtcgatacattccaacctgcagtgagtattccatggaggcatataagcgatatggatgcggtgaagggtacagtttaactgcgtggcgtatatg

SEQ ID NO: 277451 - DNA, 415 bp, Glycine max
  unsure (1)..(415): unsure at all n locations
agctntgcttctacaatgccgatgtatgaagaggcacctctataaagaagaagtaggggcatgggccagcaacaaaggccgtaagtgaatgaagcccctccatgccacatcaacaagagtttcgtgagtgtgggttggaggtgtgaagggcaagtcgccatgatacatgattaagcccgccaagagtgttcaagcttggtacattcgtgccttcctaatttccaattaggaaactagcgagtggttgaatggcctgaggtttccgtggtggagataatgtaattctttagttttaaccctacagctgggcctaggctttagggttcttctccttgttaaggcattatgtcttttgctattaagatatataatacaagatctttccttcatctattcttgcatcttcacccattct

SEQ ID NO: 277452 - DNA, 395 bp, Glycine max
  unsure (1)..(395): unsure at all n locations
gccttcttggtttcttgttccaaggcgtctgtggtggccatattgatgtcttttagttcatcatactcctttcagactttgatnggccgtgacttgaacttctctttgactgctcgggcttgttcaagctctgcttttagggcttgtacctcttcactttcttcttgtgtccagactctcaaccacttatgatagccgccgatgatcccattactgctttccctaagctctttgtccttcctttgcgcagcatcccattccttgcggactccttgaagcaccctcgcgttggggtcgctgaaaccccgtgtgatgaaaggcgtgatggtgctcctctcatggngtagccaagttgtcttatggtgaggacatgattataattaatacaacccctt

SEQ ID NO: 277453 - DNA, 353 bp, Glycine max
  unsure (1)..(353): unsure at all n locations
gccagctcgcccaggcgagcaaggttgttgtttctggatgtatcttctggagggcccaagtgggcctggttgctatttgcacccccctttttactaaatagcacccccttctatntgtttgtaattatttntccgtaacgttacgaaactttgtgaatttcgtaacgatacttattttccttccgcaaggttacgaatccttacggattatcgtattactctttcttagctttcgaagaagtacggaaactaccgattgcgcaaaaacacctcttttgacttccgccattaggaattcacggatcggcagcctgcttctttgattctgagacgttcggacttattattggcac

SEQ ID NO: 277454 - DNA, 183 bp, Glycine max
atgagttaaacatacccattctgttttatggtttttgtgatgatgtttatgatgtttatatgctgaaattgctgatggaaaactgttagagatgaagggtagaattaacctacggttagaaagtgagaatgtggtgtatgagtggaataagagtgaggctttgatcctagcttaaaatgggtt

SEQ ID NO: 277455 - DNA, 371 bp, Glycine max
  unsure (1)..(371): unsure at all n locations
ttcttagtgagagtgattctactaaattcttgagtgattcaagaacaccctgcctgtatcaaaggactatcacaacctttgtgtgtagccctcgctggaaagagtgattctttccttcctatcatctccaccctagttctttcanaccacaattccatagaatacaccattgccccaaatatatcgtgaccatatctaccatttgacacactctaattaagtgattcttgagcctaaattgaatttcaaaacgagacctttcatcctcgtttggaatcacctcatttggagccctgtagcttcccgtattgccatttctatatatctgtccagccaccacttaacctacgttttaccatcccattcatcca

SEQ ID NO: 277456 - DNA, 473 bp, Glycine max
  unsure (1)..(473): unsure at all n locations
agctnggttcaaaacaaatntatcccatatttgtgggagtaattatcaaggtaaatttgttccaaatttgggggagatattgtgtaagaattgaaatggtcaaagtaaatagcatacacacaccatttctgtatatacacatattgtttctgtattctgttaaaaaaactataagtataaatgaaattaataagtgtgtatgctataagtccatgaatgaaagctaagtgcccaaataaaaggcaagtatggggtaggaatgaatgaaaaagtgaaggtttatctatggatgaatgctctcctagaacctaagcttttgaatcctagaaaaaccatgacttgttggcagcctaaccctattacaagcctagaaagtccttcagatgcactttgtgtgttcattggtgtatgatatgagatgaaatgcanaggttgcgactcgtgttagttgttatgatggaatancctaatca

SEQ ID NO: 277457 - DNA, 467 bp, Glycine max
  unsure (1)..(467): unsure at all n locations
tctaatatcaatttcgagcatgtcgatatattatgggtctcaatcggacatccaagtaaaaagttattatcgtttgaattngctctgagattctctttcaatttcgagcgtctcgaaatattaagggactcaatcagacatacgagttaaaatttattgttgtcttaatttgctatgagctttcgttttcaatttcaaacgtctcgatatattacgagacttaatcggacatccgagtaacgagttactggtgttttgaattgctacgagtattcattttcatcttcgagcgttttgatatattacgggacttaattggacatccgaataataagttattgtcgtttgaatntgctcagagcttctgttttcaatttcgagcgtctcgatatattacgggactcaatcaaacatccgaatangatacgtattggcgttgaatttcacagatgttttgtttcaatcac

SEQ ID NO: 277458 - DNA, 482 bp, Glycine max
  unsure (1)..(482): unsure at all n locations
atctctaagtcacctgccgcatgcaagcttcaacttacagtgagtgattcaggcttagcgccattacctgtgctaagcgcacttccaatgaattcaaaacagaatgatgctagcacttagttcatcctttcccgctaagctcagcttgaaagctcaacttacagaatgaatctggggcttatcgcaggatggcgcgcttagtgcagctataataaattttcacaaagaggaagtggcgcttagcgcatcatcccaactatacccacttgcttaaggtgcaacttacagcgaagatgtcgcgcttagcgtancgatgtgtgcttagctaaaccattcatccaatcaatcagggatccttgcgcttaacgcacgcaagcttggcttancacatgaagagatggcgcttagcgcaaggtttgcgctctgctgataagcaatttgaaaattttctaagtcattttctacttatctcttcacacata

SEQ ID NO: 277459 - DNA, 389 bp, Glycine max
  unsure (1)..(389): unsure at all n locations
cgtctcagcgtttatgcgagacagagaccaacatgttagctatcatcgtcatgtacgaagaagagttaggtctagccacggcccacgagcatagaatcgcggatgagtatgctcaagtatatgcggaaaaagaggctagaggaagggtgatcgactctntacaccaagaggcaaccatgtggatggatcggtttgctcttaccttgaatgggagtcaagaacttccccgattgttatcaaaagccaatgcgatggcagacacctactccacccncgaagagattcatgggcttctcggctattgtcagcatatgatagacttaatggcccacataattagaaatcgttaggaaactcgtatggtctctcagaccttgactggatacgac

SEQ ID NO: 277460 - DNA, 450 bp, Glycine max
ttatacatactattatttggtctgcggtcagcgacacactttataaattatgccatgagctctctgcctcatttcaagaaacttgtgggttggctatagaggcgatggagtcaatctagcacattatcataaaccatgctgttatctgatctaaaagcgtgagcgccaggccatctttgtcaaataaactactaactcagctaacataaactgaatattacctaccattattctcttgaagaattaactcgaggcagagctgctataagatgcatctctactgacggagatggctattcagtagtccatttcaccttatactagatgagtgacataatgctcgatgaaagagaaaaatatataatgcggttagccacttctcacttatacaaaacctacagatgagtgaatgagagcctcaccttagacgtctgttgtctactctgaccc

SEQ ID NO: 277461 - DNA, 187 bp, Glycine max
cgagtcactcagacgaggctgaggatgagtaccttgatctgtataatttttctatataacctttgtgagtgagacgctataaatgctggaccatgaactattacacacacgtttagctctataagttgttgacgatgactctgatgaacaccattctctgatagagcgtgcaggtgatatactataa

SEQ ID NO: 277462 - DNA, 540 bp, Glycine max
  unsure (1)..(540): unsure at all n locations
nttgacgccattggggccttgaaancncngatcctcagagtcgacctgccgcatgcaagcttataggtatgatcaagatcatctaactcatcaaatgatttcaatatgagatagaanagaaaaactattaagtctatgtttactgtttatccaacaatgagacagagcattgaatcatagtccttaaaatatcacgactaanattagtaagtccatgaccaatcaagaagttagaacatattacaacaattcaatatatatatatatatatatatacatatatatatatatatatatatatatatatatatatatatataatcatataattattgtggcagatccactcatacacataagttctgccaacttaactgtcgataactatatctctcatggtctcgagctctctctctataagtaatgattcttaatttcagcagaggagaacccatctcttgatttctagtttctagataaaaatganggctgttctttctcttatcagacaggcctctcactttctctttatccatgtgn

SEQ ID NO: 277463 - DNA, 487 bp, Glycine max
  unsure (1)..(487): unsure at all n locations
cttgaaggtgcgtagcccaccattntccatagtagaatactggtaatgtgtctactatcattgtcatcgttttttcgtcattgaggtgccacttgagctgccaggttctccacctttgggcgtattttttgaaagattcgtgccccctttntgcacatgttctgttggtgcatcctatccgaagacattatactgacactgcctaacgaaggcaaccactangtccttccaagaatggactcgggaaggttccaagttagtgtaccaggtaacagctaccccagtaagactntcttggaaggaatgtatcagtaattcctcatcttttgtgcatgcccccatcttccgacaatacatctttagatggttcttggggcaagtaatccccttgtacttgtcaaagtccagcaccttgaacttgagaggtgtgatgatatngngtattgngaacaactcttctaggttagcanaggaataatcttcacct

SEQ ID NO: 277464 - DNA, 411 bp, Glycine max
  unsure (1)..(411): unsure at all n locations
atccttgagtcacctgcggcatgccaagcttaaagggaaatataaataataataataataccattaaaaaactntnngaaaaaattgcaaaaaataaaaattaactcgcctaggcgagcataggctgacaaaaaaataaaaaggggagggatgaaatcagattcaccccatttcccccaaaaatcataaaaagcttcacaaacacccacgggacctccatttttgcagcatcttcaagctttntctgcacatttgcctcaattattttttcattccctacatcccattcaagtaagtgccatctccatctaattntacctttgccttgtgatgtttggtgctttgtttgttgttttctttgtaatgtttgtgagatgagttgtgtgtaaacccatggtccaatgctttgat

SEQ ID NO: 277465 - DNA, 389 bp, Glycine max
  unsure (1)..(389): unsure at all n locations
agcttctgcatatnggagagttctagagagagnaaggtccatgttccagattagttgagagaatatgttgtgtgaagatctgcagagaccagagcttgaagaggaagccgtcctgagagcttgagatgagtttgtgagtgattatgaggtcctagaggtggaggagacatccccactacttgtatttctgcaatctttcatctttctcttctctttgttgaaaggaagctaagctttccagttattggaagctaaatactctgttggatctttcttgtangtactcgatgtaaatatcttttttatctatctaatgatgtnttgngtgttcactgtgctatcagaacttcattctaccatgcattgccttgatcatgtagatgcatgtg

SEQ ID NO: 277466 - DNA, 415 bp, Glycine max
  unsure (1)..(415): unsure at all n locations
agctngaaccanaaccggtgagggtgtgatcttaaactgtgagtgaacgactagctgtgagtaataatctttgcatcaatctatngaatttagaatgaaatgtatgaatgaggacatgatgaaggccatgattgtgtatatacaagccatttgaccaaaaagcttaccttaaattataattgtatcatttgcaccctttgtgagctgaatgatattgtcaataattgaaccctaaacataaatgattatctccagataccttgcttagattctagaagagcatatggttcaaggaaaatttaccccaaatttgggggagtggagttgattgtgatgtaaagtaaaaggtaaagcatcagcacacacaacaattaagttgtacgttaaataaaaaaaaaagagaagagcaatcgaa

SEQ ID NO: 277467 - DNA, 422 bp, Glycine max
  unsure (1)..(422): unsure at all n locations
gtgcaaatcanatcactcctacatctcatctctagcatgcattntctttctttacccactcctcacgtttggttntttagggaaaaacaccataactaaacgcgccgcaagggatccctatcgcaccagatccaaatctagaacgatgggtgatcaagaggagacgcaggaacagatgaaagccgacatgtcggctctgaaagaacaaatggcctccatgatggaggccatgttaggtatgaaacagatcatggagatgaacgcggccactgccgccgctgtcagttcggctgccgaagcagacccgactctcttggcaactacgcaccatccttcctcaaacatagtaggacggngaagggacacactgtggcacgatggcagccctcacctgggatacaaccgagcggcttacccttatg

SEQ ID NO: 277468 - DNA, 404 bp, Glycine max
  unsure (1)..(404): unsure at all n locations
agcttcgagatncaaaactaactggttgatgctcgacgtacgaatgaagaacggcgaagaatgacgaagaaactntcacggaatcgatcacggaaatgtctcagaagcattacggaagcgtctcggcttggattttntccttccctctccttctcctcactaattttatgtgatttctgagctatcaaggaactcaacaccaaaactcagcccccctcatgatattttataagaaaatgggggaggtggttgctgcccagctcgcccaggcgagctgggttgtttccacctgaagcaatccctttttctggaatattntagatgggcccaagtgctacgtacaccctctagtttgattagtgcacccccattcttgtgctatagatgatctctttcgaaacatc

SEQ ID NO: 277469 - DNA, 452 bp, Glycine max
  unsure (1)..(452): unsure at all n locations
cgggagttgtatttacacacggngaaggtattatcaccccacgcggccgtcataagagacggcaacctttaatcaaatgtgcaaatatgacttcaatttatattcttttccctttttacgttcttatgtttttttatgcctttttatgtttttatctttttgtggtcgacaagggcgtttccctttgctcctacgtattcctcgattntgatgaganaatcagacctacgtagttcttttgtgaacaaagcgttttggttaaattattttttatccttttttgcaagatatgtttttatcgaatgaaaggtcatttaaggcgttggaccgctagacaatctttcgattcttttgaaaagtgagaaaacattaaggcatcggaccattaatgatctctttatttattgaaagaggtgcanagtacatattgatttaggcttttagaatctaca

SEQ ID NO: 277470 - DNA, 333 bp, Glycine max
  unsure (1)..(333): unsure at all n locations
agcttctatggaggctggatctttgttcttcaatgatgtccttcaatggtaattntacaccatggagatgcagcggaagccaaaggaaaagaggtgagaggaggcgccatccattaacgaataagccatggaagaaggagctctaccaccaagatgagccttggataagaagcttggagatgatgcttcaatggaggaaaagaaagagagaaggggggagcactaaaatgaacgaatacaagagggagagaagtggaactctgaagtgtgtctcataagactttcattcatcaaaggtacaacaagtgttacacatgcttctatgtatatact

SEQ ID NO: 277471 - DNA, 333 bp, Glycine max
  unsure (1)..(333): unsure at all n locations
ttacatcgagagtcctcattgatatgtgctacatttggttttacatgaattactagttgttataacttatgactcatggatatctacgcattctttcggtctttacattgtaagcctatgccaaacaactatcctaatgtatattattttatcatttgcaagccctgtgagccaaacacttgatatttagctggaacactaacctaggatgacaggnttcgtaccttaacttaatgttaagagaacaagggtgtcttgattgggattcctatcatgtggtggctcatctgatgtaaatactttgtttttatgggtattaaaggaaaataaata

SEQ ID NO: 277472 - DNA, 469 bp, Glycine max
  unsure (1)..(469): unsure at all n locations
ttacagtcacctgccgcatgcaagctngcatctgttttcccaattcaagttgggaatcatttttctccacctggttggtgcctttcttcataatcctcctatcccctgagttattataggggttggagcacatatcttcaatgaccttgatggcatcaataagggttttaacatgaggttacccctacaagcaacatccaaacttgtccttntatgtgcgaacactctaccatggaaaatgtgaattagcctttgtagggagaaacgatgatgtggatagcttctgatcatctcttggaactttcccaggcttcaggtagactctcttgttccctctgcacaaagtttccaatggctctgatatattgattngtattcatggtagataaatacctccataagaaagcacttgtgcactggtttcatgtagtgatgttngtctcaagtagtaaacacaagtcggcccatg

SEQ ID NO: 277473 - DNA, 481 bp, Glycine max
  unsure (1)..(481): unsure at all n locations
ctgagaanttgccaagttctntaagcaaatggttgtggaccaactaccaagagtcttcacccatacctaataaaccggcaaccgaccgatatccatagtttccatcagctntgacatcaacaatattatcaatgaagtcgtggataaatggctgaaaatgatccaacataggcatgatccttcttggattgggctgctcagaagatgatgcactacgtctcactgacgaattgctattttgcactanatgaaaaacatctacatactcccagtaagatgaatcacacattgttgaccttgggtttctgttcattggtttctttagtgcaccttttgtgttaacctttgctggaggaggacacatcaaattntgatcaaggtatgcaatttcccgaactttactcttcagagtaaacttaccacanatatcaagttcttcaaatcntttggatatnggttccatctctttcttgatgctcac

SEQ ID NO: 277474 - DNA, 479 bp, Glycine max
  unsure (1)..(479): unsure at all n locations
agctngcttcctttcccattggttacaagagtaactaacttgtaactaacttaactaactaagctaactctagttacatggtaaacaaattgaattaacaatgatcaactatatctatgccaagaaaaatatcttgccgaacatagcaataacattgacctactttggccatcctactatattcacaagacttggggcacgactatggtgaagattgcttatggtggacaacgatgaggaatcaacanataacctgtaataacatgttattaataggaagaaaaatactaacaaaaaattaaaacaacacaaaacatgaataaaataaaaagataaacgaaacaaatattacaactttagtaggtattaggtttgagctcaaagaaaggacacttggtgaactggatattnttttaatacatttgaatctattttntccttataatanaaatttntcctttttntctttctaatctcat

SEQ ID NO: 277475 - DNA, 366 bp, Glycine max
  unsure (1)..(366): unsure at all n locations
tcatgggagtgagcttagctattggaggagtgtaagactagcttcccaaggaagcttctcaaggaagttacctaggctataaatagaagcatgtgtaacacttatggtaactttgatgaatgagagtattgtgagacacacttcaaagttcaacttctctccctatctttctttcattcccacgccactttntttctctctctcacctcttctcctttatctntcattgcaactccatggtngaaaatcaccattgaaggacctcattgaagttcatagatccagcctccatagaaacttctcaagcaagcgttcatcatcttgactagcattgcaaacagcatagggcaaaacacttgacaaaaa

SEQ ID NO: 277476 - DNA, 441 bp, Glycine max
  unsure (1)..(441): unsure at all n locations
agcttctagaaggagatcaacttgatgttctatgcttcttgaaggtggctgtccatgaggaatctccttgggaaagacatctttaaattcctgcaataagggttgaacactacgagaaacataaatagttaactgattagaattatcactctctctctcttgtgtatcactcttttcctcgggtgtatcactcttctttttcatattcctttgtggtgcctcactatattctttctctcgtctctctcttctctcattctgatttggtcatcacacacttttctaggggatagaggtttaagagtaaacgaggaagatttggctattcgtctgtagggctcttctttgtacggttcaacaaacgttgcatttgtgtagtccacgcgtccaanaataagcgctgagattcgtccaattgatgatatacaccaccattgtcac

SEQ ID NO: 277477 - DNA, 468 bp, Glycine max
  unsure (1)..(468): unsure at all n locations
ctcgcatgtccgattcaggcgcatagcgtatcgagacgctagatatctaacatatgaagctctcgagaaattcaaatggtcataacttttcactcgcatgtccgattcaggcgcataacatatcgagacgcttgaaattgaacaactgattctctcgagaaattcaaatggtcataacttttaactcgcatgtccgaatcaggcgcataacatatcgagacgctcgaaattgaacaacggatgttctcgagaaattcanatggtcataacttttcactctcatgtgcgattcaggcgaataacttatcgagacgctcgaaattgaacaacggaagctctcgagatattcaaatagtcataacttttcactcggatgtccattcaggcgcatagcgtatcgagacgctagaaattgaacaacggatattctcgagaaatcatatggcataacttttactcgcatgccga

SEQ ID NO: 277478 - DNA, 416 bp, Glycine max
  unsure (1)..(416): unsure at all n locations
cctaagttccacattggctagaaatagtgccaagatagagtatgtaagtagagggcaaccctcacccagtgagctagttnttggggttgagttaggctcaaacccacattttaactctaaatatactaaaatatgacaataaaaattgagatttatcatcttaaaaagaacataaaggaaaagaaaatatatcaccacttacaatacttccaaattagtcaattttccaagattctctggcaaggatccaataatgttgcaactcctcaatattctggcaaccaatcatacaatatgcaaagtgatagcaacaacacataagcatatctttattttcattccctgaaacactttcttatcaagacaataactcgaatagtaaaaataataatcataatcaaatcatctgactcaca

SEQ ID NO: 277479 - DNA, 332 bp, Glycine max
  unsure (1)..(332): unsure at all n locations
gtcagcttataaatagaaagtaactccttgcctccctctntgttctgatctgtgactacttcatacctgtatatnggtttgtttattgtattgagtngtcctttatccagactgttgttgcccgtagttnttgcanaaccattgatatttatgatcaagacatncacattcgcacattacgaccatangtggntntattttctgttttcatggttaattctgtggaagtaaaatatgtatctatctattatttctccatcattcattctaattctaatcctttcatgtgattgatgtaatggtgaggacatgcacctctaanacatttgata

SEQ ID NO: 277480 - DNA, 487 bp, Glycine max
  unsure (1)..(487): unsure at all n locations
atactctagcgtcacctgccgcatgcaagcttcacaatcccacaacaccttaattgatgcagtatataagaaattctaaataagattaacaatattctcaggcaaatctgttggatcaagtggcctcagaataattaagaagggggggttgaattaattattcctaaacctttactaattaaaaaattactcttctaaggcttttactaagttgttaagagaataaggagtagaagagaaacttaatagaaagtacaagcggaaattaaatgcacaacggaaattaaaagagtagggaagaaggagacaaatacataagaagttttatactggttccgcaacaacccgtgcctacatccagtccccaagcgacctgcggtccttgagaattctttcaaccttgtaaaacnacctttacaagcaaagatccacaagggatgtacccctccttgttctctttgaaaccctagtggatgtacccttcact

SEQ ID NO: 277481 - DNA, 407 bp, Glycine max
  unsure (1)..(407): unsure at all n locations
acactatagaaactcagcttctntaggaatcttcttaaggaagcttctcaaggaggtgatcttagttatgagaggggtgtgtgtagctaagctctagcttctcaaggaagttttctcatagaagcttctcaaggaagttctctcaagaaagcttctcaaggaagctacctagtctataaatagaagcatgtgtaacacttgttgtaactttgatgaatgagagtcttgtgagacacaactcaaacttcaacttctctccctttttcttccttcaatatcgtgctcccctcctctctctgtctctccctctttcttttcctccattgaagcatcctctccaagcttcttatccaaggctcatcttggtggtgaagctccttcttccatggcttattcattaatggatg

SEQ ID NO: 277482 - DNA, 450 bp, Glycine max
  unsure (1)..(450): unsure at all n locations
tgaattaaccaanactaaacacagactaccggataaaataggacacacctaattgggaccaaaacacaaaaatcacacnagagcgacacgcgcccacatacggacttacatcacacgtaacacatacacgcaacaatcaatcataggacaaaacgcgagaacgacactacccgagagcatgagacaacgcttgcgtatgaggaaacaacttaaccgaaaaaaactaatcactttttggtaatccaccagagtgaaagacgaggctgttgaccacacacttcacacacctcagaactgatgatggctacgcgagcatcgcagctaacaattgctccgtacgatagaacatagagacagagaagcgaaatgtaggaaacgaagacaatataccgacggagagacaaacataaaataacaatgacagcgatagaagaggaagacaaacacgcg

SEQ ID NO: 277483 - DNA, 478 bp, Glycine max
  unsure (1)..(478): unsure at all n locations
ntgaaaaaattagnggagcacactacacacatagagctcatatatctttgatatccaaacggaccaggccagacttatgacatatcgcagcaagatgtgcagggcctatataagccacatgccacacatgtatctgtcacgaagctgataaatgactgacttatcatctacaaatgcccccatctcctgggattggactcctcatacatagatcaaactatgtcaaaacactacaatagaaaagagttcaatagcatgcctacctgatactcccactacgaagaatcacacacctgctgccactgtgttgccgttcataggtcaaagaatcgccgtgttatgacgacaaatctgaagcgggacgattcaattctacacatggaccagctaccggacttcccctcaaagattactacgacaagcacgaaagatagagctcagaatggtgtcaaactgattgggacacacaggcgacact

SEQ ID NO: 277484 - DNA, 522 bp, Glycine max
aatgagaccattgacaccgttgcatcaccggcacctgagagcctacctgcatgcatgcattctcatcccaaaaagagcaactgattttgtgctcttttatctgactgactccaactcttcttacatggtcaacaaatcggattaacgatgatcaactatgtctctgccatgagaaatatcgtgtcgtacatatgaatcacaacgacctactttggccatcctacaatattcacaagacgtagggcacaaagatggagacgatcagttatggtggacgtacgatgacgacataactaaaaacctgtaattacactgtattattaggacgaaccttcattcggcagatacattctcgcacagcgcgatcatctctcacgatatccgaagtaggttgcctcctaagtagggatacgatcagctcagaataggacctggcgaaccggtatcttttaataatgcgatatactctccctcatatacaagttttccttgttatctggaaacaatccgccttacatcccg

SEQ ID NO: 277485 - DNA, 483 bp, Glycine max
agcttagagttgcaatagtgctaaggtttctggttgtatttactccatattgtcgataattaacttgggttcctgtcttcatgatttttaagttcactgtgcaaagttgtttcaagtttggtctttggcaagtgcgtacaaagatattcatgacccgctgattaataggaaagattcaacacctataggatatgaggagactgttggtgtactgctaaatcgctgatttcttaatatgatgcaaggctaactcaatgatgtctactccaatatcaatgatatagagtcttggacattgtgggtttttgcttaaaaaaattcaaatattgaaagttttatttccttaatatcttggctctataaagaatccaatcaacacgaagagaagagacacttatcttcaaataattgtattgtctcttacattgaagaattcaaataaaatggtcgattctgttctgttagttcctatcactatatata

SEQ ID NO: 277486 - DNA, 190 bp, Glycine max
gtcctgtctttatgatatttaagtataatgtgccaacctagttcaggatttatctttggccaatgtgttaaagacatgcatgttgattaataggaacgaatcatcacctataagatttgaatagactatatattgcggtattgtcaactaccgatatctgaatctgatgcatggctaactcgatgatatc

SEQ ID NO: 277487 - DNA, 340 bp, Glycine max
  unsure (1)..(340): unsure at all n locations
agcttccattgttcaatttcgagcgtctcgatatattattcgcctgtatctgactttcgagttaaaagttatgaccatgtgaatttctcgagagcttccgttgttgaatttggagcgtctcgatatattatgtgccggaatcggacatccgagttaaaagttatgaccgtctgaatttcttataagcttncgttgttcaatttcgaccatcttcatatattatgcgcctgaatctgacactcgagttcaaagttatgaccatttcaatttccgagcgcttccattgttcactttctagcgtctctatatatgatgcgcgtgaatctgacctccgagttat

SEQ ID NO: 277488 - DNA, 347 bp, Glycine max
  unsure (1)..(347): unsure at all n locations
aagctatagaaattaaatggtcataatctttaactcggatgtccgattctgtcgtataatatatcgagacgctcgaaattgaacaacggaggcattagagaaattcaaatggtcataactattcacacggaggtcagactcaggcgcataatatatagagacgctaaaaattgaacaacggacgccttcgtgatattcaaatgggcataactattcactcggatgtcagagtcatgcgcataatatatctagacgctcgacattgaacaacggaatctctagagaaagtcaaatggtcataactgttaactcggatgtctgattcangcgcataatctatctagacg

SEQ ID NO: 277489 - DNA, 456 bp, Glycine max
  unsure (1)..(456): unsure at all n locations
agctagtcatttatactatttcttanagttattgtcatataagcaatgcctaggctatatatatatatatatataaggaattntcagatctatttgtttgtaacacaaaagcaagattattattctttatttaaaggcctgaagtaatttgtaaagcgtttattcaatatatgcattcttaagctcttaaataagaacaatataacgttaaggtaattaaattgcttaattaccatgaattcaattaatatttttcagtagtttattattcattataattaaatcattctatctaatactcgctgttaattaacgctaatattctaatcatgcgaatttaattactttaactaaaatcaaataccatcatttatgtttttaattatcataagtttttgctataattcttaaaaaagtagagacaaactcattaattaaagtgatgaattgaattta

SEQ ID NO: 277490 - DNA, 342 bp, Glycine max
tactagattgctacgtgattcaattggaggtaagattcagtgtttatattaattcatactttatctgtgttcatttatataaagcagtaagattctcaattatggcatgctatgtagtggatgctgacaggcaacacactttggtaacctggatcagtcacaattttctgcctggaggaataaaaagatgccccactaaataaagaattattccaggagacattcaattgtacataaggaacacattgtgaagctaggacactctggggtagtaatctgacattaagaataattcctgactcagagtaatgcttgtattatacttgccataaagctctaaaa

SEQ ID NO: 277491 - DNA, 353 bp, Glycine max
  unsure (1)..(353): unsure at all n locations
agctngctccagagaatgaaggcttagtggctgccataatattaagtcttctgatcgcatgttcgttggacactagtgatcggagacttatatctacttttgcggagaggtaacataaggaaactagtagtttccatcttccagtaggagaagtgaccatcaccctggatgatgtggcatcgttgctacatttgcccattataggcgcattccatagctttgaggattttcttgtggatgaagtcgttttcctgttagtggaatctcttgaagttagttcagaagaagctagagctgagacagtacaatgtcatgggacatatgttaggatatcctgggttgagacatttatc

SEQ ID NO: 277492 - DNA, 460 bp, Glycine max
  unsure (1)..(460): unsure at all n locations
ggagctattgaagaattttgaaaggcttgaagatcaagttgaagcatttccaaaatagtacagcaagagcaaatctctaagtgagaaatctgcattttagcttcaactctcttcatgagagcgaccatgttctgtattgaacttganaagtctgtaataatcttagatagaagnttgagattaatattctaagtggaatcccttgttttgaggtgaaaacctatatttatgtagttaaacacaaatcaatttttntgcaaaagtcctataatggcaggcaatttaaacagaaatcattntttctgaaaaagtccggtaatggctggaaaaggtgaaacctactggtgtaactagtcttgtcaaggccgagattaaagtcaaatgggaaatngaatggttattaaaacccagtagttactggtccaacanagaactgattgtgcttgtannatctcttctt

SEQ ID NO: 277493 - DNA, 442 bp, Glycine max
  unsure (1)..(442): unsure at all n locations
tctctgagtcacctgcggcatgcaagctnggagtggaaggagaccatcaattagacaccttagtagttttgggtacataacatatgcatatgttttagaccaactcaagaagatattggacgacaaaggtgaaaggtgtattttcattggttacgacatagatttaaaggcatacaaactttacaatccatagacaacgaaagtgattatcagttgatatgtgacgtttgatgagaaaggcatgtgggattggtcgacaagatcccagaggaagctagtggtgactcttgacaactatgaagaaaatgataaacaactagatctaacccccgatgaaccaaaatcatctaggaggccacagaggaaacctcaattgctagttagattacatgcttgtatcatgtctaatgataatgatccttccaacaaggagaatatcaat

SEQ ID NO: 277494 - DNA, 518 bp, Glycine max
  unsure (1)..(518): unsure at all n locations
tttgacnccatttgacnccntatcctctcagtcacctgcggcatgcaagcttgtatacgatgctncaatggatgagaagaaagatgtttaccactttactgctgtgtacgcgacatngaaggacaaacacggtacataatatcatccttgagtgtgtcttgacctattctgaattattaangttgcaacttttgttacacctgttatcactaaatgactaggtaattttcttgatactcgttagtgagaacactctccttgataatcagacccgttattggccaacccctctcttactaggctgatctgctctggaacgttcttataaagatcattatacaactttagcttgcttgacacacttcctaagtgtatactatcttctggtatgataagttggagaatcttcactccccttttgtactccgcgttacctctcccataaaccaggaaatcctaaaaactccttactcttcgatgtcacatgcgtgtaatctatggggacccgtactgcgccc

SEQ ID NO: 277495 - DNA, 582 bp, Glycine max
  unsure (1)..(582): unsure at all n locations
cccgctccccgcgtctccctacataaccatagtatgggacggcgtttatgttactattataggggtagcgagtgtgccctggtcgctccttacatactcagcttaagacataagttctaatctggtctcggaaaccaatgcttatcgtttctttcttatgatagacatgagacatgtttgtttgtgcactcctacgatgccatgactcacgaaggtgtattctacctacggaagagctgagctcatgacatgatgcatgctcaatgtgcagaggagaggatatggactaagatgcaaaatttagtataacatccagatcagaagccgctacaaagagttgggcatgtagaagacaaaacatgttcaagcgcntgaccaagcttcaagctctagacgtcacgcggcttgcctgaaatataacagctctcggttcgattgacccaagtgacggagccattccaacagcctgtgaacgaaggtgatcatgtcagagagagagagttgccacgttatgttacagccatagaacatacacaagtggctaagtgtgttacgcttgaaacatgcccctatgtgaagtcn

SEQ ID NO: 277496 - DNA, 376 bp, Glycine max
  unsure (1)..(376): unsure at all n locations
agcttctcgatatattatgtgcctgaatcggacttccgtttganaaattattaccatttgaatctctcgagagcnttggctgttcagtttcgagtgtctcgatatattatgcgcctgaatcggacttttgtgtgacaagttatgaacatttgaatttctcgagacctttcggttttcaatatagatcgtctcgatatgtgatgcgccagaatcggacttccgtgtgacaagttatgaccattggaattatcgagaccttcggtgttaatttgagggctcgatatattatggcctgaatcggctttcggtgaaagtatgaacatggaattctcgagccatacgatgtccattcgagctcttgatatattatgccctg

SEQ ID NO: 277497 - DNA, 390 bp, Glycine max
  unsure (1)..(390): unsure at all n locations
gctctcgatatattatgcgcctgaatcagacttccgttacaaaagttatgatcatatgaatntctcgatatattatgcgccttaatcggactntcgtgtgacaagttatgtccatttgaatttctcgatagcattcgttgttcaatatcgagcgtctcgatatattatgcgcctgaatcggacttccgtgtgacaagttatgaccatttgaatttttcgagagcatcacgtgttagatttcgagcatctcgatatattatgcgcctgaatcggacatccgtgtgacaagttatggccatatgaatgtctcgagagcatatcgtgctcaatttcgagcgtctcgatatagtatgcgcgttaatcgaacttccgtgtgacaagttatgacca

SEQ ID NO: 277498 - DNA, 436 bp, Glycine max
  unsure (1)..(436): unsure at all n locations
tcactcctgcattntatctctatcatgcattctttctttctttacccactcctcacatttggttntttagggaaaaataccataactaaatgcaccacaaggcatccctatcgcaccagatccaaatctagaatgatgggtgatcaagaggagacacaggaacagatgaaagccgacatgtcggctctgaaagaacagatggcttccatgatggaggccatgttangaatgaggcagctcatggagaaaaacgtggccaccgctgccactgtcagttcggctgccgaagcagacccaactctcttggctaccgcgcgccatcctccctcanacatagtaggacgaggaaggaacacgctggggcatgatggcaaccctcatctgggatacaaccgagcggcttacccttacggattgccacccaactactcaccac

SEQ ID NO: 277499 - DNA, 415 bp, Glycine max
  unsure (1)..(415): unsure at all n locations
gttctatgcttcttgaaggtggcgtccatgatgaatcttcttggaaaagacatctttaaattcctgcaataagggttgaacactatgagaaacataaatagttaactgattagaattatcactctctctcttttgtgtatcactctttttctcgggtgtatcactcttctttatcatattcctttgtggagcctcactattatctttctcttgttctctcttttctctcattctgatttggacatcacacacttctctaggggatagaggtttaagagtaaacgaggaagatatgactatttgtctgtagggctcttctttgttacggttcaacanacgttgcatttgtgtagtccacgcgtccagaaataagcactgagattcgtccagtngatgatatacaccaccattgtca

SEQ ID NO: 277500 - DNA, 462 bp, Glycine max
  unsure (1)..(462): unsure at all n locations
agctngtattgatngcgaatntacgaatgtgggcagcttttatatatatatatatagagagagagagagagagctatgttattattacagtaagattgnggcattatttttccttccattgattcacatgcaggctatattgntattattattttttttttgagaaagttatgttattactgggtaaagattggggagttatttttccttccattgtttcacatgcaggctatgtaatatggatatcnattcgcacgtgcagcaagtcatttgctttgctttccatgatagtaggttgctcatggaaacttgtcaagaagcanaaaatttgcggaagattgtgactcttttctacctcgactgacaattnttatccatgtctatgcattatgtctccgcataagagtgggctgngggagagtagtgcttctttttggtttgaattaataatattcagtgata

SEQ ID NO: 277501 - DNA, 426 bp, Glycine max
  unsure (1)..(426): unsure at all n locations
tagcgacacttagatactcagcttaactanagtaagcaatctatacttctttcacagatactatacattgccatatgctgcaatgccatgtntctatggcagaattttggccttccggcatattccgctatccatcattgataacactgccactactccactggaggaacaaaaacaaaattctaccctgtgaatttttttacagaggattctagacactattctcttccattcagtaactaacataccccaatgccaaaagcctcctcactatgtaaaggtacagggaggatcattatatgaaaccttattcttgcatatgcaaagagactatttctagatgaatccatgactgatcagtcaccaaggcacaactttttcactgcgccagggcccgccctacattcagtatntatattaatacta

SEQ ID NO: 277502 - DNA, 362 bp, Glycine max
  unsure (1)..(362): unsure at all n locations
agcttataagttntaattgactcactcttttataatattctaaaagtttgttatttcttacataaaagttgaaacatcacaatcttaanatgctcaaactttgaaatagcggtaaacaacaattattgatgtggatgtatatgtatgtgatttcagggtcattggagctattctcatagtaatgggactctactcagttctgtggggcaagcacaaggagaacaaagagacagaggcagagataactattgaggtattgaagtgttgtttagaaaatgggatgacgttggagactatggtaaaagatgtcgaaacaaacaatgacattgacatgcanaagggtgaagcctcaagagagttaa

SEQ ID NO: 277503 - DNA, 351 bp, Glycine max
gcttcgaggggagagagaccaatcacgagcacatagcatggtcttaaattggatttagctgcttgctcaaggtccaagagaagctggtctcagtgtttatgcgagacagagaccaacatgttagccatcgtcagcaagtaccaagaagaattaaatctagccacggcccacaagtacaaagtggtgaacgagtatgcccgagtgtatgctgaaaaggaggctagaggaatggtgatcgactcgttacatcaagaggaaacaatgtggatggaccgatttgctcttactttgaacgggagtaaagaacttccccaattgctagccacggctaaagcaatggcggacacctac

SEQ ID NO: 277504 - DNA, 436 bp, Glycine max
  unsure (1)..(436): unsure at all n locations
agcttgtgggttcaccccanattccgtcgtcatatgctatacttgatcccatatctacttgataattcaatggtagccataaccctagccaaggttcatcaacctccatttctccgagaatacgactcgaacacaacgtgtgcttgtcacgaagaagccccggggcgttccattgagcattgtatggctctgaagtgtagggtgcgaggtctaattgatgctggctgaaatttgaggagaatcgtgtgtaaatcctgacattgacaagagatgccacacatggggcaatnttgaaagctggtgttagatgtctctaatgactcaccaggattntcaactttcaccggaatgtgggtgtaagccattggtctgtttgctcaagcaacctgcgctcctgagtgttgacttccaagaccgttcaatcagagattactca

SEQ ID NO: 277505 - DNA, 416 bp, Glycine max
  unsure (1)..(416): unsure at all n locations
gtaaagaactntcgaaaaatcaagaacaagctgggtctcacatcgttcgcgtgtatgacatccactccacaaggtttgaagttgaggagaccttcaatcctattacacaacgtggccgacaaaagtgggcagttaacttgaatggtcattattgtcaatgcagaaggtattctgcgcttcactatccatgttcacatattattgcagcttgtggttacgtgagcctgaactactaccaatatatagatgttgtntatacaaatgagcacatcgtanaagcttactccgcacaatggtggcctcttgggaatgaagcgactattcctccttctaatgacgcatggacacttatccctgacccaacagcaattcgtgcgaaaggtcggnctatatcaacaaggataaggaatgagatg

SEQ ID NO: 277506 - DNA, 461 bp, Glycine max
  unsure (1)..(461): unsure at all n locations
agcttcgaattanaagaggcgttaatcttgcaattcgttatgctcgtaccagcgatccgtatgtcgtcgtcaacatgggtgatcaggtttgaatttgcagtttgaggaaattttgttcttctaggtgtgtttgatttagaggaaaggaataaaaaaaaaagattttttttatcaagatagatagtaagagatgtggatcacgagataccacgaaatattgtatacattntttttgttatataattgccctttgaaacaaacacaacctgaaggaggatttggtgaactgcggttgtttgagttgagagacgggagcaaatcacacaaatggttntttgatacaactantttttgaacattntctacgagattntntttgattntttgtggtattatgggttttcttaatatatntcttttggganaatatatntacagaccttngtacactcaagtttttg

SEQ ID NO: 277507 - DNA, 440 bp, Glycine max
  unsure (1)..(440): unsure at all n locations
ttaaggctgaagttgagaaacaatgtggataacaaattaagaatgtgagatcagatagacggaggatggacaagcacggaggatggacaagcaccaggttcatttgcgaaatttcttcaagaacatgggattgttgcccaatacactatgcctggttctccaaatcagaatggtgtcgtagaacgaagaaatcgaaccttattagacatgatgagaagcatgaggagtaatgtaaagcttcctcaattnttttggattgatgctcttaagatggatgcgtatatattaaaccgagttccaaccaaggctatctcanagacaccttttgagttattcaagggttggaaaccaagtttgcaacatatatgcatttggngatgaccatcttgagtangaattataatccacaagagaagaaactagaccctangactattact

SEQ ID NO: 277508 - DNA, 395 bp, Glycine max
  unsure (1)..(395): unsure at all n locations
agcttgttagctngatgacttgtcaganacaatttgtttactagcgtcaaatcagagaattaaacctggacatcttttagaaatgcttgttaagtcaagacaggtagaaatccagtgtctccatttgggacctactgctcagtaaatctgttgagggaaaaattcacagcctccgtcttaacatcattggggttctgaatccattcacactgaataagaattccttgaagaccattataatgtcttctgaaattgatgactttatggaaatacgttgagttgctgtccccttcttttagccatttagctctagatttctgccttaataaagattcataagctattgaggcctcccacaattcttggtgaattctctctaacctttatctcatcat

SEQ ID NO: 277509 - DNA, 474 bp, Glycine max
  unsure (1)..(474): unsure at all n locations
ggtctcagcgtntatgcgagacagagaccaacatgttagctatcatcttcaagtaccaagaagagttaggtctagccacggcccacgagcatagaatcgcggatgagtatgcccaagtatatgcggaaaaagaggctagaggaagggtgatcgactctttacaccaagaggcaaccatgtggatggatcggtttgctcttaccttgaacgggagtcaagaacttccccgattgttagccaaggccaatgcgatggcagacacctactccgcccccgaagagattcatgggcttctcggctattgtcagcatatgatagacttaatggcccacataattagaaatcgttaggaaacttgtatggtctctcagaccttgactagatatgactctctctttgaaatanaatgagttggcccatgttctactccaaaagctggtcanatcatatactcctacatctcatctctagcat

SEQ ID NO: 277510 - DNA, 328 bp, Glycine max
agcttgaaggatgcttaatggaggataagatagaggtatagatagagagaggggggagcacgatattgaacgaataaaagagggggagaagtataactttgaagtgtgtctcataagactttcattcatcaaagctacaacaagtgtacacatcttctattatagactagtagcttcttgaaagcttcttgaaaacttcttgaaagctcttgaaaacttctgagagctgagctactaccacaccccttcatactagctcactcttgaagctccttagagattctaagaactaagctagctacacacacatttaatactagctactcct

SEQ ID NO: 277511 - DNA, 502 bp, Glycine max
  unsure (1)..(502): unsure at all n locations
nggagcacagtgtacagcggcaacgtgagagtgaatcccattaccttctagagacacctatacataaagaagaatggcgggctacctgacactgtcctcctgaaacggacgtaattatttccacaagactgatccgatcatttgcangactgctcagagcttggcaactccacctagcagtgcacagcaatgactctcgccgcacaggtgaaagaagacttacacttcataacgttgtcccttactcactgatagccagtgactacaagagtggatgacagctacctagaactatggctatatcacacgctgcgagatgccctgtcatctatactgtcaatacctctcctgacacgcccacaacataactggaggaggatcacaataaccgtgatacgctactgcgaagcattggatcgtcacgctctcccatgtggatgagaggtgccccaccagtatgacacgaagcgctcacactctccaacgaggaggactcgctatt

SEQ ID NO: 277512 - DNA, 345 bp, Glycine max
  unsure (1)..(345): unsure at all n locations
gcttganatgaacaacggaagccctcgagaaattcatatggtcataactcgtcatattgaagtccgattcacgcgcatactatatcgagacgcttgaaattgaacaacgaatgctctcgaaaaaatcctatggccatatctgggaccaccggtgtcggattcatgcgcatgatatatcgagacgctcgaaatctaacaacggatgctcttgacaacattcaacgtgcataacttgtcatacggaacaccgatatacgcgcataatatatcgacacgctcgaaattgaacaacgaatgctctccataaattaaatggtcatcacttgagacacggcatacagagga

SEQ ID NO: 277513 - DNA, 147 bp, Glycine max
  unsure (1)..(147): unsure at all n locations
gcttctcgatatatatgcgcctgaatcggacttccgttcganaagttattatccatgtgtatctcttgagagtattcgnagtacagattcgagcgtctcgatatattatgagcctgaatcagacctccgtgtaatatggtatgacca

SEQ ID NO: 277514 - DNA, 436 bp, Glycine max
tgctcctaccataagtgcctcgtggagacaattatagcctctttctgcaccgtcatcgacccgtacctcatcggaaacccaaacagtacctcatcggcggtcgacaactccgccattgttatctctggtatggcgtcatccttgggcgacgccctcatctgatctatcacctcaatcggcaatgtcctcaaaaccctatacagaaccccctccacaccttccactctgtccatgtcggtctacaacctcttcgccatccctccatgccgtctgagagagacgaccactacgacgacgctgctttacgtgctggcactggcgtgtaatgtcacgcgcgcggcattgtctggaagaacatcagcggcagatggcggtgcggtgacatcgggggagtggagcatctccagctttgaaccctaattgggctgagatcatg

SEQ ID NO: 277515 - DNA, 97 bp, Glycine max
ggttaaccattctctatgtgcagtcatatgattggaacatccagaatcaacatactattcttcattctgcaccttatcttcacaagttgtagtcatc

SEQ ID NO: 277516 - DNA, 466 bp, Glycine max
  unsure (1)..(466): unsure at all n locations
tacccatcacatgtggtactatgtggcggtttggcgatggngcacaacaagtttccacatccacaatgcgcgcataaacccaccatcctctgttgcccacctccaactgagctcacgtatacccacgtagcccatatcctcgtttctctcaacaccgggtccccatcaatcctcccaagcttccacaacatccaagcaaaacaacattcatacagcacaagctatcacagtcaagcaaaacagggcaaaggcagaaaactctgctcaacacaccaaccaaaaatcacagcttttctcacttaaagaccccagtaacaattcctttgatccaattcgttaaccgttggatcgactccaaaattttactggaagtctatagtgcataaggctacattgtgaccgttgggatctactaganaacatccagaaactcatttgtactactctnntcacagccaaccacaca

SEQ ID NO: 277517 - DNA, 288 bp, Glycine max
  unsure (1)..(288): unsure at all n locations
agaagtctacacccaaggaagacaacggtgtggctgtatttcaaccagttcagccgcctattcaaaatcttaatattgatgttcagaatgatgttggagttcagcaacctggagatgaggtagatgttcctattgatgatgatgatgaagaggagcatgacatgtcactagatgagaatcttggtgatgctatcgaaccacctcangttcaactcatgaggtccaacatggagagacaaccttctaagaggcattctcctactgagtatgttatcctaacacaagatg

SEQ ID NO: 277518 - DNA, 423 bp, Glycine max
  unsure (1)..(423): unsure at all n locations
cgacaataagcttttacttgtgatgtccgattgatatcgggtaatatatcgagacgctcaaaattgagactagaagctcttatcacattgaaatgacaataactttatacacggatgtccggttgagtcccgtaatatatcgtgacgctccaaattgaaaacggaaactcttagaaaattcaaacgacaataactttttactcggatgcccgacagattgtcgtaatttatcgagagatgctccacatcgaacatagaacctcggatcaaattgagacgacgataactttttactcggatgtctgatcgagctccgcaatatatcgagacgctcaaaattctaatccgaagctctaagaannatgaattgacaatgactttatacacggatgtccggctgagtcctttaatatatcgagacgc

SEQ ID NO: 277519 - DNA, 558 bp, Glycine max
  unsure (1)..(558): unsure at all n locations
agtnaatatcctgatacgctcactatcatactaagctgccaacagctataatcatccctttngacttacngaatgatactgaacctctctaatngtgcaacgatgcttacatatgattttcggtgtgtcacggaaccttacagatagtgcatcaatatttatttttgatatccggcacataccgagaattgacagatagcctaatgatgggtgttaagcacctcacaaggaccacacagaaatcgcatgtcatcaagcaaatggcccccgaacgaaaactagggtatgacaagttgcccctctttactcgtcttgtattggagataacaggacagtaaagtatgacactaatctcgttcctctcgtgtaacgagagtcgccggtgatccatacatntccgcatgcaaatgacttgttgttacccgaggaacaacaggtgcagaagacgatgtcagtatcttcatgctatcaagcgttctgtcttacagatagcacaagaatgtgtatacngataaccactctggtattaccgcccgtcagcgtgactcaagagtcacg

SEQ ID NO: 277520 - DNA, 473 bp, Glycine max
  unsure (1)..(473): unsure at all n locations
agctngagaatgataatcttctaacactttgtttgttattgtgcagttagtctcaattgtcactattataaaatacatcttctacatcggntatgtaggactntctacatcnggttttaaccaatgttgaaagtattattgttaacatcagttttccaagaccgatgttgacatagaattgacaacgtcggttatctaaataaccgatgttatataataagaattacaccaaaaaaagtgtatgaatggtgatagttgacatcggtttttcacaaaaccgatgttaacttatagattaacatctttgttgtataaaaatcgatgttaacttatatattatcatcagctttttataaaaactgatgttanatggttataggttaacatcagttcttaaacaaaaactgatgttaatctataagttaacatccgttcttatacaaagccgatgttaacggtttgaatataacatc

SEQ ID NO: 277521 - DNA, 473 bp, Glycine max
  unsure (1)..(473): unsure at all n locations
cgacactatgaaactcagctanacatactntattntcttcatatggntattatttaatgtctactattacnccttgatctgtttaaaaggttaagttctaatttgacctaacaatgtattcaaatgtctgttttatagtacgatttataaatacatcaattatattttgccaacagcttgggcagttattcaggtatgtgttgaatggttgttgcctattgccttggtgtttttggtctcatttgatcatgcttaatatacagtagactttaatttgtgtcctgtactcatttgatactggcttagtaagtttgatcttcaatatcaagtcatctagtatttgatttnttaagatctatctatttgctgctggtattggttgagtagttctatatatgtaagtatgaactagagttattcacttaattagatcctcgcaaggaagatatatatatgccatcacagatttttat

SEQ ID NO: 277522 - DNA, 440 bp, Glycine max
  unsure (1)..(440): unsure at all n locations
agctngaagaggatgctntaatggaggattttatagtattaaggngggagcacganattgaaggaataaaagagggaaagaagtggaactttgaagtgtatctcataagactttcattcatcanagttacaacaagtgttacacatgcttctatctatagactaggtagcttccttgagaagctttcttaagaaaacttccttgagaagtttctttgagaaaacttccttgagaagctagagtttagctacacacacccatctaaatactaagctcacctccttgagaagcttccttgagaagctagagattagctacacacacccatctaataactaagctcacctccgtgagaagctctcttgagaagctagagcttagctacacacccctataatagctaagctcacccgcatgataaataaacatgataatacaaa

SEQ ID NO: 277523 - DNA, 439 bp, Glycine max
  unsure (1)..(439): unsure at all n locations
tgttaccttgcagtttgtaaaggccattctgccttgtacccttcattacttgtaatgaacctttgaatacctttaaagttccaccttctcctttgaatgaacatccagattaatctagcattcccaaagagagtatgttccttttaagctcaggaacatgcctcacatcagggagcagctttacagatccatcttgtatcttcaatataatagttccaatgccaatgacattacatgccatattgtttcccatgagaacattccctccatctatctccttataagagctgaaccattccatattgggtgtcatatggaatgagcaacccgagtctagaatccattcctcattgtgctnttcagtagagatggagagcacttaatcactttcatatgcatcatccaccactgctatatcagagtcatcattgtatcacca

SEQ ID NO: 277524 - DNA, 448 bp, Glycine max
agcttctcaaggtggtgagcttagttatgatacgggtgtgtgtagctaagctctagtttctcaaggaagttttctcaaagaagcttctcaaggaagttttctcaagaaagcttctcaaggaagctacctagtctataaatagaagtatgtgtaacacttgttgtaactttgatgaatgagagtcttgtgagacatacttcaaagttccacttctctccctcttttattccttcaatttcgtgttcccccctctctctttctctccctctttcttttcttcattgaagcatcctctccaagcttcttatccaaggctcatcttggtggtgaaactccttcttccatggcttattccctagtggatggcgcctcctctcacctcttctcatttgtcttccgctgcatctccatggtggaaaatcaccattaaaggacctcattgaagctc

SEQ ID NO: 277525 - DNA, 477 bp, Glycine max
  unsure (1)..(477): unsure at all n locations
ggtgtttgatgatacaatgttgataacaaaagatgatgacaaaggtgatgacaaanagctcatagatcaatcaagaacaattcaagtgttcaagataagaatcaagaagaattcaagactcaagaagaaagtctagagacaagaatcaagattcatggttcaagatctcaagaatcaagatcaagattcaagaatgaagagaagactcaatcaagataagtattaacacagtttttaaaactttgaacagcacatgagttnttgacaaaaccctntaccaaagattntttactctctcggtaatcgattaccagatggtggtaatcgataccagtagcanaattggttttgaaaagttttcanattgaatatacaacgttccaattattttcanaaagctataatcgattacaatggtttggtaatcgataccagtgcctttgaacgttgaaattcatattcaaatatgaagagtca

SEQ ID NO: 277526 - DNA, 452 bp, Glycine max
  unsure (1)..(452): unsure at all n locations
agctngacatgtgtccaattngttggttttttgggcatttccgcatcacacttccacctctattggttgctccacgtatttctcaatgtgtcttctttntcagccttcatcccgagccttcttgctttctgtattatctttccatctctctctctctcgagctttctagagaagtctctgtttttcttcgttgctttgcctctcttcttcttcaactaagtcctaatgtaagatgcgtgcggttcttgagacttgacgtgatagatttgatagctagcactgcaaagttgggttctctttcattcatgggaacgancccattgttgttttcatttgggggagaaaagggtggtcttggtctgggtttgttttttactacccttggtttccctttggaatccgaaacttgtcatggtagtatggctctggtatttagtgggatcgctaatttt

SEQ ID NO: 277527 - DNA, 440 bp, Glycine max
  unsure (1)..(440): unsure at all n locations
tcttcctgtttcgtcttccatgcagctcgctgatattttcacgaagcctctatctccagctctctntcaaggtctctgttccaagctgggaatgatgaacatccattcctagcttgcggtgggctctcaacaatagcttgttagttagaaaaagctgttagagttagttttctctctggtgtaactaactaaccacccgttttctctatccttcatatgtgtataaatatcttacgaattcagtaatanagacatgcaattatttggtcatctcacgtacacttgcgtcgtttctctctcctttatggctgttgatccatttaatatttgttccgtgctttcccctgnacgacgttttcgagtagagaaatgatgcatttcgaccggtgtcgttggaagcgaacgacgaattgtgtagtgaaagagaaggactctcgcgt

SEQ ID NO: 277528 - DNA, 386 bp, Glycine max
  unsure (1)..(386): unsure at all n locations
agcttaanagggaaatatanataataataataataccatataaaacactnntgaaaaaatttgcanaaaataaaaattaactcgcctaggcgagcataggctgacaaaaaaataaaaaggggagggatgaaatcagattcaccccatttcccccaaaaatcataaaaagcttcacaaacacccacgggacctccatttttgcagcatcttcaagctttttctgcacatttgcctcaattaatttttcattccctacatcccattcaagtaagtgccatctccatctaattttacctttgccttgtgatgtttggtgctttgtttggtgttttctttgtaatgtttgtgagatgagttgtgtgtaaacccatggtccaatgctttga

SEQ ID NO: 277529 - DNA, 420 bp, Glycine max
  unsure (1)..(420): unsure at all n locations
tctgcataatggagagttctagagagaganaggtccaagttccagtatagttgagagaatntgttgtgtgaagatctgcagagaccagagcttgaagaggaagccgtcctgagagcttgagatgagtttgtgagtgattatgaggtcctagaggtggaggagacatccccactacttgtatttctgcaatctttcatctttctcttctctttgttgaaaggaagctaagctttccagttatggaaagctaaatcctctggtggatcttccttgtangtacttgatgtaaatatcttttttatctatntaatgatgttttgtgtgttcactgtgctatcagaacttcattctaccatgcattgccttgatcatgtagatgcatgtgtntntangatcattcaacagtggaaactggtctga

SEQ ID NO: 277530 - DNA, 469 bp, Glycine max
  unsure (1)..(469): unsure at all n locations
agcttaatacaccaattatttatatttttttaatagattgtaggtattttatatgaaagataatcttatttaaactggataaataagataattataagtgataaaactctgtctccaaatatttaacgtaattatatatgtaagactaattaatctaaaataactttgcatgattaacatactcagtgctataacactaatagtttggtaataactaattcattgataaatattataaaatcatcaatatctgagagtattagaataaatcttacttcgtattagaataaaattaattagatgcaaacctattaacgaaatgctttaacttcaccaaatatgtgattatgaaagcaaagggtagatggcagaagaaagagcacgataaataccatgggacggtggcattngagagtgtattggaaaggaagcangggcacttgtgcggaattgactttgaatcttataa

SEQ ID NO: 277531 - DNA, 220 bp, Glycine max
  unsure (1)..(220): unsure at all n locations
agcttatagccaaatggaactaccttgaattaattcctttgatagccccttgagcctatgttcccctttctttgttttgaagctcattacaagccttaagtgaaaaaccatgatatcaccttacccttaaggaattttggagctttggaattgttttgggaataagtgtgtgtgtgtgtgggggggggggggatctcatncttattctataacaatttct

SEQ ID NO: 277532 - DNA, 533 bp, Glycine max
  unsure (1)..(533): unsure at all n locations
taaacttatgantccctgattagcgacactatgatactcagctgataaggggtcggacataactactgaaataacgtcactctaaagcatggaccactaaaggcgcatagagtgaattgagacattcgatttcgtgaacttaccacttgaataccgaacgactactcggatctatgcgagaactgtgaagagcaatcaagaacggtgaataatcttctcgagagcactttcagtaacatgttgaatgcattatggaacctcctcggcttgtatttttctcacggacaaggtttttctcactaatttcgacagtattcttgataccacatggtctgagccgattagctctaccctccttcctctacttataggagaacagaaggatgtggttttcgtctaactatgccactcgagctgtgttgctgtctccatatggcgacgtctatatttgagacctttggattgactacgtgcgnctagtcgctattcgtccgcgactatggtagacactctcctgtgcgctgtgatttgcg

SEQ ID NO: 277533 - DNA, 143 bp, Glycine max
ctctaaaccaacgaccctatcctctcttccttctctctctctacccttcgccgactctattactacgcagaacccttctcgaccttgtcctgtctactcacacccgcatgactatcacgatgacaagcagctcgccttacctc

SEQ ID NO: 277534 - DNA, 630 bp, Glycine max
  unsure (1)..(630): unsure at all n locations
acacgccctctccgctcgtcaacnctcaatcgttatcagtctatacgcacgantngacagacactctaatatattaggaatannnnnnnnannnnattatgactcagtcgacagccaactatagaaactctagctataacantnatataataatacagaagagactactcatcgcgaaagtgtttgttctgtgcanaatcgagcgaccatcgagggccagtacctccataagctcaaggacaaagacaaaggacactgcacaaggtaatattcatatgcttgacggatcataacatggctatacataagagtcgccactatcataacctgtactctgctgcctatagaatactctatacggtcatacaagtctagccgtgaaggacacagatacaaacaagcagagtatggagcacatctgaccttcgcgctgatgatgctacccactatacccctacgcatagcacttcaagcaatcaggtctcgaaacctatcatttgagcatctctgctactcgcaccactggcacttccatatgttgcttcgcgacatcgaccaaggcgactgtcagcagcaatggaaagcgaacactcccaccctagaacacacctagcctcaaggggagaggcc

SEQ ID NO: 277535 - DNA, 508 bp, Glycine max
  unsure (1)..(508): unsure at all n locations
ttacagcacctgcggcatgcaagcttcagcttctanaatactagaatntctgctagctctgcacgtattgtttgtcttttcagcagccgaggataaatttatttgtgattgaatgactcaagggtgatattcgagtaaacacgatgaatctgaattacaatccgcaaaagcatgctacatgatctaatttaaaacccttcaaacgctacaacagcttatccatgtttgtcacctcattcaaaagtttaaacttgcatcaacacattatcgatactttacaatataaggaaactttgatgaatgccttaaaaaggaagatattttgatacgtatccccatatacagatatacaccacattcagatgataaatagttgtacatcttaataactaattttgtcaggtcgtttctattgaatttgtatcctatatctttccatgaataaattacacgcgtctgcagcagtctgcagaaatagaccagcaattccttggatactaagcgtgaa

SEQ ID NO: 277536 - DNA, 469 bp, Glycine max
  unsure (1)..(469): unsure at all n locations
gcttataagcgcggctctgggagacgaaggtcaagtggtcgcgatatacttggatgatgttccgagtacattggatttggtacgaccatgccctcctgatttccagctgggaaattggcgagtggaggaacgccccaacatttacgcagcgagcataatgtaaacctttacggttttaaaagctctatagttgggcctaggctttagagtttttcttttggttaaggctntgtgtattttggtttttttttaaatttataatacaaggatctttcttcatctgttcctacgtctctacccattctcatccatttgcatgtttacttcttttctgaaacggcagatccgatgacgagtcccccgaaggtactaatacctgtgacccgcctatcaacttcgagcaagatatgaatcatacggaagatgaagggaacgaggatgtgggacttcccccagaattagaaaggat

SEQ ID NO: 277537 - DNA, 480 bp, Glycine max
  unsure (1)..(480): unsure at all n locations
agctnggagaggatgcttcaatggaggataagcaagatgtagagaaagatagatggtggagcacgaaattgaaggaagaaaaagggagagaagttgaactttgaattgtgtctcacaagactctcattcatcaaagctacaacaagtgttacacatgcttctatttatagactacgtagcttccttgagaagctttcttgagaaaacttccttgagaagcttctttgagaaaacttccttgagaacctagagcttagctacacacacccctctcataactaagctcacctccttgagaaacttccttaagaagattcctaaagaagctagagcttagctacacatacctctctaatagctaagctcacctccttgagatgagaagctagagcttatctatacacaccctataatagctaagctcaccctcatgacacataacatgaaaatacaataataaatgtccttactacaaagact

SEQ ID NO: 277538 - DNA, 61 bp, Glycine max
ctccctaagagtcctgtcacgaggtggaggttgagccatgttctttgtataaaaatttgta

SEQ ID NO: 277539 - DNA, 515 bp, Glycine max
  unsure (1)..(515): unsure at all n locations
cttgggccattgaaacccttgcaacaccngatcctgagagatgaatgcngtgttntacttaagaggacncgtaataaacttatnactctgatatccttgaaaaaactgcacaaagaatatataactcgcctatgcgagcatatgctgacaaataaatataagggggaagttaattgtacatccaccccatattccctgagattttaatatgctttacacacacccactggaccttcattcttgtagcttctttaagctttttctgcacatatgcctcaattatattttatgtccttgatcccatacaaggctggcgttctcctacaattatacctttgtcttgtgaagttcggtgccatgtttgacgaacactttgtacgtttgcgagatgactagagagtcacccaagtccaatgctttgatgtcggttgtgcacattgttcatccctattttgtttctgttttcgaattgccgtactgttgtcctatccccaaccccgctgcttacggaacct

SEQ ID NO: 277540 - DNA, 191 bp, Glycine max
agcttactgctagatcactacgcgtgcttccagacttatatctgcgacaagcacgcacgacaactggtgcctgtggctcccaatacttagaggagaatgtggagctgcactccgcactcactacgcgttgttaccaacagataggagcgctgcattcagagcctaacatattacatggggctcatggctac

SEQ ID NO: 277541 - DNA, 472 bp, Glycine max
  unsure (1)..(472): unsure at all n locations
cgacacttagatactcaagctgacgattatggngtacccatcacacgagcgactaggtgttggactgtctatggtgcacaacaaggtttacacatacacaatgcgcgcataaacccaccatcccctgtggcccacctccatctgagctcacgtactcccacgtagcccatattctcgcttctctcatcagcgggtcctcatcaatcctctcaagcttccacaacatccaagcacaactacagttcttcatgacacgctatgacagccaagactgacagggcaaatgcagagaactctgcctagcaccaaccagatcacagctattatgacttatagacccgagtaacaatactttcgatccaattggataaccgtcggatcgactgcgaaattctactggaggtctatagtacattatcctacatagtgaccgtngggatctactagcacacatccagaacgcgatttacat

SEQ ID NO: 277542 - DNA, 452 bp, Glycine max
  unsure (1)..(452): unsure at all n locations
gatccttaagtcacctgcggcatgcaagcttatgatattggttaatggtttcttactaatagttgttatntgatntttatatcaatttgttatagtaaactcacccctcgcaattcttgtaccgcgtggttggtacctgtgatgatcgtgaacctttgttcgtgggagcagaatgacggtaatagagtacgagaagtgagatntctttgtggagccgccgagccaacgtgatgacgttgggattattttgcgagagagttgtgttttgataatcaacttcttcgtagctgagtacgtaattctttttggtgaattgaggatgtaaatcacaaatttaattatatgtatgacacaaattacttttcattatttgaatgatatgtactgagttactaaacctatatatatatattcacttaagttatggtgcgttggttggtgaatgtatatcg

SEQ ID NO: 277543 - DNA, 223 bp, Glycine max
  unsure (1)..(223): unsure at all n locations
ngcgagatccatttcacgcgaacaatntaaggaggcggctttcctaatgctaccattttcatcttgattgagttcgtacccgaatcatataaacattaaaaatgcagtatctaggaagtgatcctatgtcgtctcccaacgagcaatggtcaaccaaatgttcataacagatagaaataaaacagtaacgaattgtgggggggggttgtttgtcttcgctatg

SEQ ID NO: 277544 - DNA, 362 bp, Glycine max
  unsure (1)..(362): unsure at all n locations
atcctcagagtcacctgccgcatgcaagcttaanacanagcaacacagaatctatgtganccatatcccctcaattcaatggattctctagggttgagaagtgaaatttagaacgaggtaaatttgaagcaaacccttacctcacacaagagcataacatcaatctaaacttgctcaaactggatttacacctaaaattccaccgaatcaaaagttgactcctcaacacccaactttgccctataaatggctcttggtacactttgggcatttgatactctctctagcccagaccaaactctctcataagtcctaaatgacctgtagagctatgattaacatactttaacctccctttacca

SEQ ID NO: 277545 - DNA, 405 bp, Glycine max
ctaagcttattaagaggcttcctccagaagcttcattaagagacttctagcgctctccagacatcttcgcagagatcccaacggtgagatcatggacaagtgtcttgtgatgctgcagaccaaatttcgagaagatccaacggctcatgaaggctggaaagcgtgctaccgaagaagcttcatgtaactgtttctagaatcttcattaagaggcttcctccagaagcttcctcgtggcttctttgagaagctttctcaagaggcttctttgagaagctagatccttatctatccacacccctctattaactaaattaacttccttaagaataatcaccgatgaaaattacgcaacaaatattcaaacatcaaacataattactaatagtatatagatatatatat

SEQ ID NO: 277546 - DNA, 430 bp, Glycine max
  unsure (1)..(430): unsure at all n locations
agcttgttcttgattntttctcagttctttaacaagctatgaacaatatacttagccttcatttaactgtctctgggcttggcgaccacactcaacaaagtactttcgacacctactgtacgttgattacaccaatgctgttatgagaatgttgcgacaatcctttaaaaccttattgatacattctgagaggttcgttgtcatgtggccatatcgacgtccttctctatcgtaagccatcgtccatctttcctttgagatgcgatccatccatgttgctatggctggactcagttcacgatatttttctaaattctgataaaaaacatgtgcttgcaaggagtgtatgctgcataaaattagttatgaataacaattttaagtataaatgaaagtaaaatatacgtgaccatcatatatgaaatcttac

SEQ ID NO: 277547 - DNA, 494 bp, Glycine max
  unsure (1)..(494): unsure at all n locations
actcagcttatgttcgtctgtagccctgaaccatgccacanactatttcatatattatatagagaaccatactagtaactatattgcaataataattcttactaattttctactagtaaaatacaaccatactgttatcactcttcatattgcccatcttcattactgcaacatttacaatggatcatatagtctgttctgaagtaacaaaaatgctaggcattgtatttgtaatgaggaaaggagaatatagagctaaagaagtagcatgagataatttaccatgtcaagtctcgacgcttcagccatttgcttactgttagcctcctcatcttcaacctagtcaggtgaataatccatattgcaaattgaaatcaaggggagaagtatttcagcaaanatgcaaaataataataaaaatgtggaccacttacaatttgaagcttcaattcatttatttccttatctagcgtcaaaatacgaaagttcaatga

SEQ ID NO: 277548 - DNA, 430 bp, Glycine max
  unsure (1)..(430): unsure at all n locations
agcttgtangattatggngtacccatcatatgtggtactatgtggcggncgggcgatggtgcacaacaagttttccacatccacaatgcgcgcataaacccaccatcccctgttgcctacctncaactgagctcacgtactcccacgtagcccatatcctcgtttctctcaacaccgggtccccatcaatcctcccaagcttccccaacatcaaagtaatacaacatttaaacagcacaaactatcacagccaagataacagagcaaaggcagaaaactctgccaaaacaccaaccataatcacaagctttctcacttatagacnccagtaacaattccttcgttccaattcgttaaccggtggatcgactccacattttactggaagtctctagtacantaagcctacatttgaccgttgggatctact

SEQ ID NO: 277549 - DNA, 485 bp, Glycine max
  unsure (1)..(485): unsure at all n locations
ataatggagaatcgcactaagcaatcactacgcatagctcttctctctaaggcgagggacacatgaacgagaacacagtgaatggggcctacgaatcttgtgatgatactgatcatattacctgaggactcactactcattgctccgaactctgaggtgtaagacacataaacgatatactctattcgtggggctcctcactgataggcaatgtgcaatatgctatccccatgctctacgcattatctctacacacgaaggttgatgacntaatttacatacaactattcatggcgcttcgattagattgataaggtgtaacttcactaatctatcgatacgctatactcaacacgtgtatgtggtcgcacatgacactaacgttgttttgttcttcaaaagagtgctatggtatanccctaataaagactcgcgtcctgctgctttcgtgacgagctgtagactccactgtgttgttcttaact

SEQ ID NO: 277550 - DNA, 465 bp, Glycine max
  unsure (1)..(465): unsure at all n locations
acgctgcagcttaacttgctaactaataaatganaataatactgaaactaaaacataaactgaacataaaatgtatcaaaagcagaaaaataaatggtaatcctgtcatggctcttcctgtgctgctgtgggctcatcctgaggtaaggagggagcatcctgngctggctgagggatatccttagctgtaacaggccatggatcccaagtgttttgcgctactaccatatctgctacataatctatatctgcagcgccatactcctcatctgagacctctacccctggtgtagtaactgaagaagtctgcggngtggtctctggagtggccttcggctgaggccaaggctctagctgaggctcctaggctacgaaagcctcacctccccccaaaggagaaggttggactcctggtcaggccacttgagttgtaaattcctccatgctcatgatgggccgatgctg

SEQ ID NO: 277551 - DNA, 427 bp, Glycine max
  unsure (1)..(427): unsure at all n locations
tactaagctnataagtgcggtntaagacgcgaaggccaagtcatcgcgatatgctgtgatgactcccctaagagatcggatttggtacggccatgtcctcccggtttctgactaggaaattggcgagtggaggaacgcccagacgtttacgcgaaaagcataatgtaaccttntgtagctntaaaactctacggttgggcctaggctntagagtttcctttttgttaaagcattatgtcttttggttttgaggtataatataaagatctttcttcatatgttcctgtgcctctatccattctcattcattttcatgtntatttctttactcttaaagcgccagatccgacgacgagtccctcgaatgtactaatatccgggacccgaccgtcaatttcgagcaagaagcgggtcggatagagagtga

SEQ ID NO: 277552 - DNA, 452 bp, Glycine max
  unsure (1)..(452): unsure at all n locations
accttaccttggctntcatcanatntgccttttacctcaagataatcccaaacaacttttcacactcatggtggacattacaagtatcatgtgatgtcgtttgacctctgtaatgctccgacaacatttcgagccactatgaatgacattttttgccctctgttgtgcaaaacggtgattgcattttctgatgatattttggtctatagtgctgaccatgatcttcacatatcccatctctcttaagtttttgaaagtttggctcatcattagttnttttctattaaacttgagaaatgtgtgttctatcagccttagttgtctacttaggccatgtcattttttgcgggtttagtggcccttattccttccaaggtccaggcgattcttaagtggccaattcctaagaatattaaaggcttgcacatcctcttatgtttgttgggctttta

SEQ ID NO: 277553 - DNA, 465 bp, Glycine max
  unsure (1)..(465): unsure at all n locations
ttccaattattcacattatatggaagaattaagagagaaaaattaacaattcctacataatttaatcccaaaatttacctataaatagcagttatcactaaccaaactttgtgtaagtgtaaattgaagatcttagtcaaacttaaatcactcttatgtgacttaaataaaaaggatataacaaaataggcctcttgctagatgtggaaagcaagttttcttataggccataaatatatttgctcgtctgactcatctaacccattgtgttaggccaaattgaccatttgcctaatattatataattntttgacaaggaaattaaataaaatagtaatatttcatcaaataggtgttatgatntntggagggaactatngttaactntatcactttngntattcacactatccatatatgtnngtttttatgtaactcannaatacactnttcatataaacacaa

SEQ ID NO: 277554 - DNA, 380 bp, Glycine max
tgcaagcttgaagaccagtccgaacctatattttctatagtctaggccaatgttttcaaaagggtgaaaagaaattgaagagaaagatcaagagaagaacacatacgttgcaatttggaaagaatatacaaccttgccacacagtagtatgtccaaacagcatgtgcactccaaagtccaaggataatagcagaatttccaatgacaataatggcaaatgcaattggacctatcagtgcacctgccagaaagaaaccaccaccttgtcatgaatgtaaccagtaactatatttatcaaattatatattagcagacagattctgttaagtttgaatatgattattatatatttttcatgtgtctaagtctaactaagaata

SEQ ID NO: 277555 - DNA, 358 bp, Glycine max
gacaaaatgggatatatattatatcatccttcaactcatcgtgtttaggttcctattgatgtacacattcggcgtgtagcaatataaaatcttgagtcccacccccatgggagtggatttcaaaagcctactccttctctgaatacttctatccttctaatggcattcctctatctttgcttcatgagcccgtaccaatgtgcaggtcaatcgacgctaccctgtctaatgtgcatgtgatctagcacctcttcttggtgtaccacatgtaaaatagataaggtcaacctacctatagccccgacaccaacgttggtgtattaaaatgagagcggacctatattgcgataattagtat

SEQ ID NO: 277556 - DNA, 435 bp, Glycine max
  unsure (1)..(435): unsure at all n locations
cttcccttttgaagctcgatgtgagccatatctcattggatgtgaatctgctgaaagaattngcttatcttaagaattcgacccttatggaccttatgaataacagattctctggagggttgacattgagtattcaagagatgtattctttagaggaaatggttctgtccaacaatgcaataggtggngatatcatgacccttaagtgggaaaaccttcacaacttgatcattttggatctctctaacatggagttgaaaggggaaattcctgagtctatatcggaattaaagaggttgaggtttttaggccttagtgacaacaacctcacaggcaacctttcaccaaatctatctactcttccttgtctcaatgcactatatgttagtggcaacaattngacaggagagcttatattctctgtgtgagtttatg

SEQ ID NO: 277557 - DNA, 490 bp, Glycine max
  unsure (1)..(490): unsure at all n locations
gcttgtcgattagtgttcaccgcgaaggatcgaagtgggtctaagattaggcatatatgaatttctcgcattgacaagtaaaaagcttggggcaaatagagagaatgagaaggnggaaggaacccatgttctgactgccattcctacatggccaatatttccacctgctcaacaatgtcattactcagccgacgttagcccttctcattacccaccacccaatcatccacgaaggccatcactaaatcagccacaaagcctgcctaccacacaaccaatgctaaacaccacctttagcacaaaccataacaccaaccaaggaaggaagtttgcagcataaaaacttgtagaattcaccccaattttggtgtcctatgctaacttgctcccatgtctactccataattcaatggtagccataaccccaaccaanggttcctcgacctccatttttcgaggatacgactcanatangacatgtgcttatcat

SEQ ID NO: 277558 - DNA, 412 bp, Glycine max
  unsure (1)..(412): unsure at all n locations
agcttcatgcttatgtatgtatggcanaacttcattattgttgttcaagacatacaagtgagcttgtaaaaaatcttctacacttgaagtgatcacatgcaatcctcttgaacccttaccacccactctgtcatcatgccgagacttatgaaggccaacaggtttagccttctcaatttattctgaacaaaattcaatggcttcttcagcaatgtacctctcaacaatagatgcttctggatgataaagattctttgtataccctttcaagatcatcatgtatcgctcaaccgggtacatccaccatagataaacaggaccacaacatttgatttctctgactagatgcacaatcaagtgaatcatgatgtctaagacagcaggcggagaatacatctccaactgacacagt

SEQ ID NO: 277559 - DNA, 231 bp, Glycine max
gagtcatcaaaagattataaatatgtgaccatggaatgatatttaagatgatatcaatcatctatctttcaatcttctctcaaacatcattcaatatctttcaactctttctacaaaattttctgattctttttctttccatctttctagaagattttgttcaaaactttctcttccaataaataatgttcaaaaacttgtgctattcatcttattcattctcttctccct

SEQ ID NO: 277560 - DNA, 441 bp, Glycine max
  unsure (1)..(441): unsure at all n locations
acctgcngcatgcaagcttcctagcggnttctaattatatgtgtctcattacatctatcatatgctgaccatagccgagaagttcgnggatctcctcggcggcggagtaggtgtccgccatcactttggccttggctagcaatcggggaagttctagactcccgttcaaggtaagagcaaatcggtccatccacatcgttgcctcttgatgtaacgagtcgatcacccttcctctagccttcttttacgcatacacatgggcatactcgtctgccactctatgcttgtgggccgtggcaagatttagatcttctcggcacttgctgatgatggctaacatgttggactctgtctcgcataactactgagacaggtttcttttatacctcgagcaaacctttgactcatctttcaagatcaaactgtctactcgtgattggt

SEQ ID NO: 277561 - DNA, 271 bp, Glycine max
ttattcccatagcgcttctatgcccttgggatttagctactatcccatactttcatctacctttggcttggccccactacaaccttaaaagaccttttgatcctcatgtgcatgtgctagtgatgtggtcgtcaactttaaagtcttgccaagtctatgtggagttagtatcatgggtgccctgagaggtaacaggagcctagatacttgagagataaagtgcacatcttgtgaggctttatcacttttcattcttgagctaattgacaat

SEQ ID NO: 277562 - DNA, 207 bp, Glycine max
  unsure (1)..(207): unsure at all n locations
agcttgcttatacacactcttcaatgattaagctacgactacaacagatgagacgacctgttccttgngtccaaatctcctctccctgagttaagttatagaagctcaccactcatccctatctgcaagatgagatgacgactacaacctacgtcccgggacactcatattagctggtggagaaggctactccattgatcccttctt

SEQ ID NO: 277563 - DNA, 323 bp, Glycine max
tggtgacagatctgccagtgatgattatatcatctacatataccagtggacttgtgacttgagaagcatcttcgataacacagagagactgtccacatcagcttgcctagaacccatgatgcaaatgactggatataagtctgtctaaccaccgtcctgaccttcgcttaagccactatagagctccgattagcctacatgctatagtagtatagcgattgtcacagactgtggggcgcctcatataaatggcctcttctttagaaccattggagaaagcattataggtatgatgttgagatagatgccgatgattgcttaga

SEQ ID NO: 277564 - DNA, 485 bp, Glycine max
  unsure (1)..(485): unsure at all n locations
agcttaagtgcttatacaaaanatgggcttcaagatactataatgtggaaaataataaataaagtttctctcgaanaaagactaacaaagaanacatcattggtgatgctagctattttagtttgtcaaattatttatatggaagttatttaataatttagagacaaatgtgtataattgtatattattgtaaaaagatattattcaacattgatttatttttcttcataaaattcttttaaaaatgaaataataaatgaattgctatcgagaactaagaacaactgattaatcgtcttaatacaattgattgatgcaggaaatgtatccctataaccacctaaagggaaacatcattttatataaaaaaactggttctatatntacttgactgagtctttcgttataatctagaaatgtaataaataaatagacacctctttagcatcatagatattttttatatgatatatggtcacattatg

SEQ ID NO: 277565 - DNA, 475 bp, Glycine max
  unsure (1)..(475): unsure at all n locations
gattcagctatcggcgaagctgttcatggtcatgtntggaaacatgggtttgattctcatgtgtttgtgcagactactctgattgagttttattcaactntcggtgatgtgggtggctcaagaagggtgtttgatgatatgcctgacagagatngttttgcttggacgacgatgatttcggctcatgttcgggatggggatatggcttctgcaggcagattgtttgatgagaatgcctgaaagaatgtagctacatggaatgccatgattgatgggtatggaaaattatggaatgctgagtctgtctgagttttgtttaaccaaatgcctgcaagggatattatttcttggacaaccatgatgaattgctattctcggaacanaaggtataaagaagtgatagcactttttcatgacgtgattgacaaaggaatgattcctgatgaagtgactatgaccaccgtcatttcagcat

SEQ ID NO: 277566 - DNA, 425 bp, Glycine max
  unsure (1)..(425): unsure at all n locations
agcttgaattcaatctatgaacccttatgggtccttcttgttgcttttcacatcttcatctcattcttctacatcagtgatctcatttctttgtgtgaagcgattntagccgattgtttgtgtcgtaatctcacataatcatcgtaagataaaatttcaaccgatcgtttgtatcgtaatctcacttaatcattgtaaaataaagtttcaactgatcggttgtgtcataacctcggtttatcaatgtagaataaagtttcaatcggtcatttactttgcaagtcatcttttaatgagtttgaaagtaaataagtgaaaccaaagttaaaatcaacacataaacaagcttttatccatganaatcgctngaatatgttcaaaggtccaacgccttaacggtctcttttacttttatgggtaaaatc

SEQ ID NO: 277567 - DNA, 484 bp, Glycine max
  unsure (1)..(484): unsure at all n locations
gctgaattattcttctatactctctctctctatatatntcttgtacacatacaactaaacgtaccgaataaaatctttagtttatccatcttctatataggatcaaataagcctataatttcatagtcctctctcagaaactattcatggcttcctcacttctggaaataaccactgcatccacccttcccatcaaactcactgcccccagtcaaatcactcattgtagaagcaaagcttcatggtgaatcanaggtgattgaaatggtgtttgatgataacaatgatgataacaaaagatgatgacaaaggtgatgacaaaaagctcatagatcaatcaaagaacaactcatgtgaatcaagaacaattcaagagttcaagataagaatcaagaagaattcaagacttaagaagagagttaagagtcaagaatcaagattcaaggttcaagatctcanatatcacgatcaagattcaagactc

SEQ ID NO: 277568 - DNA, 97 bp, Glycine max
cgcgcgcacggggggatcaaacgacatacccagggaccagggaggcacaggaagcggaaacaggacaaggaagaggggtcacagagacgaagaaaag

SEQ ID NO: 277569 - DNA, 403 bp, Glycine max
agcttatcattgcttgctgttctttcgaccagattattgtaatgatactgcacatgagccatctgaactaggaacatcaaatgttggtcagcatgagaattctaagttgggacagatgatctaacaatagaggaagatatgacaaatccaatagaacaattgatgagtttgcttcttggaaggcattcctacgcataaggtaaatgagagatctgtcagctatgttttaaatacgatatattgaaatgaaaatggaatctttgatagtgatggaagaactttaagaggaagtgacatgtctaatcctggggaccaacacagtctgacatattaattggtggctaactggatctctcaagcatactaataagagtcgaattattgacacctgtattgaaaaact

SEQ ID NO: 277570 - DNA, 428 bp, Glycine max
  unsure (1)..(428): unsure at all n locations
tgccctctccnctcggcggagatntcttctttggcgattgctttatagttattggcagtgatattattgaccagccctccgaaaccttctaccgagatgtcttgtgccacatgggcctcggtcagaacttttactagcagagcccgatgaggctcggagctcatgagtaactccaacagcgagaccctggccggtgttntgttgagctgttcgataaccttgaattcgctctgctgaattatagggaggaactcgctggcttcctctagtgatacctcctttataccatcctttntctccggaagaccttttgccggaatatctntattcgaagcgtggggtgcttcgccatcttgtttctacaccacatttcctttttccttgacgttcgcgggttagactggtaggtccggaagcgcgaacacacg

SEQ ID NO: 277571 - DNA, 362 bp, Glycine max
  unsure (1)..(362): unsure at all n locations
agcttgccacccagctcgttcaagtgagccagctatttgcacccncctgtntactaaatacacccccttgctcttttttggtgtttctttttccgttatgttacgaaactttacgaatttcgtaacgatacttgttttctttctgtaatgttacagaaccttacggatcacataatcatccccttttttggcttctgggatgttacggagcttacggattgcgcactaacacttcctcttgacttctggcatgtcacggaacttcacgggttgtgcaacaatgctttcttttgacttccggcatgtcacagaacttcacgaattacctaacgatgggtgccaagtacctcgaagtagtcaaa

SEQ ID NO: 277572 - DNA, 415 bp, Glycine max
  unsure (1)..(415): unsure at all n locations
caccttgagatgcaggtgtttgagcgcttagcacaggctaaccttgcttagcgaaagaaggagatgcactcagcgtatgatatgtgcttagcgagtggactattttcatgaaaatgttnttaagttattttcaatccacttttttaaaaacattttaatccaaccccaaatatctatgactcattataagttgatatccccctttctcaatgattataaagcaaatttcaacgtatgcaatgcatganaaacaaaatgaaaggaatcaaaactgggttgcctcccaggaagcgctcttttaacgtcattagctngacgcatatacctcaatgggtgataaaatatatggtgttgtgagcctttntaaaatctccaccatggtacaatttcaacctctgtccatttaccacccatg

SEQ ID NO: 277573 - DNA, 95 bp, Glycine max
  unsure (1)..(95): unsure at all n locations
agcttcgtcacgacaaccttaggttatgccncttctnttgattactaagagaatgtctnttatattgttctcaaggctttatcttggcatttcag

SEQ ID NO: 277574 - DNA, 341 bp, Glycine max
  unsure (1)..(341): unsure at all n locations
taagatgccgagattcatctggaagtgttattttgcacaatgcatctgttatggtgaccagccactttccaaaagtctcagcagtgaaatgaatacgctgcaatgngcaaagaacagcacatacgttgctatgccaacaattagatatgagtctgtactcattcactgcaaatgatgcctgtgaattaatgatcacctatctggaaaatccaactcactgctatccagctctcttcatgtgatgcatgatctcctgaaaaaaaaaaagactatcaaaaagcccttcggcctcacctgaactaaagggaccagagcccaatatagccatgcccctcacctcc

SEQ ID NO: 277575 - DNA, 119 bp, Glycine max
ttggactttcaagacgactcaatataacctgttttctagacgacgcgaaaaaaccttgctcgagtcgactctttggaagttttgatcgggacgacacgtggctaattttgatcgccccg

SEQ ID NO: 277576 - DNA, 591 bp, Glycine max
  unsure (1)..(591): unsure at all n locations
atganncccttganctngcacctcaatatgancgctgctgcagctcgagaacaccnagatgtaagaccaaattttgaaagaagtgtatattttgaaacattattagcttatatactatcagatacctggaagtgatnatttatggtgctatgaaccctaacaatggattattaggccctggtagaatacatttatctttacatgatcttcgatataataatacacaaaaacctatgaatctgactgatgatgtattacctaataatcagtaattgattgatatgaaacaatattggatctgatttctccattataaatagagatgagatgtggtcatctaagactacaatatacagtanaactataacactggtatatggtatcaaagctttaggtattcttgacagaggaataacaaaanttcgtcctccacaaactactgtcccagatggacctctctgctagtcatcctatgcagcaacctaatttcacatccagaggacctgtctgcttttcggcaaactattcagatttctatgagccttttacncantgatggccctnntctctctttcngcanntctttcattg

SEQ ID NO: 277577 - DNA, 517 bp, Glycine max
  unsure (1)..(517): unsure at all n locations
ataaactgantgacnnnctatacgcgcgcagcttggatgtagatcttctctttgcactganatatatttcaacttcttagttgtgatatggntgngctgatgggtgaacctaactagtagtaggtggtcatggttgaacaatgntgtaaccaccccagcattgtcactaccactaccactaccaatggtgaatagtagcacgaatatctgtctttgattttttccgctagctatcgtgaccaacttgtttgtgtggaaatgatgaagattgtgagtaaagagatcgattaatgattgttgtaaaatatatcgatgactctctttgaattntctttatatttgcctcttttgtccttctaacatgttctatgtaaacattattttatattgacaattttgacctgatcatggcttgaactttactttaatgtaatatatgatggttgcggaatatgataaagatctcgacctctgttcttcatcttatactcacctcatactattaacctataaactt

SEQ ID NO: 277578 - DNA, 200 bp, Glycine max
taggaaaaaaatcatatttggcaactgacaaatttccagttctcacttaggacatcttcatcattgcctagagtaggtggggctcggcaacgtgagatacctgagatgagaatactatcgtctataagacatcaattataatatgctcattatgatagttatcacttaaaacagccaacctcgcatgagagattggacta

SEQ ID NO: 277579 - DNA, 216 bp, Glycine max
atgtggataatggattaaaagcagtgataatcttcaaaattactatatattaatcataatctcttcatgaacaagttctaaactgtggaaatttatatgaacatatacaacagaaattgttatgcttctatatcatacgatctacaacaagtaagaataataactcatattgtatctagaaccttatgtaactttactcctatagacatacttctt

SEQ ID NO: 277580 - DNA, 575 bp, Glycine max
  unsure (1)..(575): unsure at all n locations
tgaatcccttgaccgccaccttaagtcgacgcggctgcagcttgaacaataactgaatcangcccnctangattagtcaaatatctgctgtctgatcattggaattaatgaattcagtgacaatctctttagacagtagcttcttccacataaagtgacaatcaatctttatgtgcttggttctctcatggaagactggatttgaaacaatatgaagagcagccttgatatcacaatacagcttcatttgcatcactttgcagaagttcaactcttcaagaaattgtctgacccacatacagtcacatgtnagtatagccatagatctatattcagcctctgcactagatctagcaataacagtttgcttcttacttcttcaagagataacattctcttcaatagagacacaatntccggatgtggatctnctatccataggacaaccagcctantcttgatcacagtattcagatacttatgtatacccttgtctcataaagtatccttgacctggagctctttaatggatctagaatcgcttacaacattccatgatcacacgaggatttgct

SEQ ID NO: 277581 - DNA, 93 bp, Glycine max
gtcagaaaagcttgatattcccttatagactaaagtaagatactcctctaataaatgaacggctaagcatgaggtgcactatacaaataagga

SEQ ID NO: 277582 - DNA, 435 bp, Glycine max
  unsure (1)..(435): unsure at all n locations
actgaaaccttgatcgacatcctctaatcgacctgcggctgcaagctgcgccactaccagcagcaagtgtccttttatcacagctctaagatctttgaggcccaatggccgtgtattacacccctgttactaatgctccctttattttttgattcttttcgaacgtacaaacttacaattcatacgatcttatttcttcgcaggtacaatcttacgatangattactttttagctcaaaagtacngactacgatgccaaacacttttcgatcgccatacgaattacataccagctgctcttcatttagatgctgactattatgatgctagaaaacccgacaataggttaccatgactgatgatactccataatatgtcaccagagctaattctcatataaaataccaacttagtgttccactcctaccgcatcct

SEQ ID NO: 277583 - DNA, 468 bp, Glycine max
  unsure (1)..(468): unsure at all n locations
gtgncccccnnnnnatgacnccctatagccactataagcgacgaggctgcagctgatgcattanaaccactatgtatatctaacgaagtttttcatgcattgttatgtaaatgatcatagcgaataatagtgtacccgctctaccaattatatatcagtactcgttggtaagcaggaatgtggtcaaaaaatattaccgtgcgcaacatatatatatgacacactatgactgctgcgtatacagttgagcggacacacatggctgactaagacacattgcgaaacacatggctgctgatacaattacccggctattttttgaacaagttaacatggtcgcacaacttatttatgatctagctctaacaccatatctgtttaatagttccactgtcacaactatgattttagagaactacgcaacatgcactaagtgtttttatcaatgacatatacatgactggttat

SEQ ID NO: 277584 - DNA, 594 bp, Glycine max
  unsure (1)..(594): unsure at all n locations
atgnccccttgattgncanccttgatganaccctganagccactgcaggctgcagctttagattggaaacatgaatatgcttacttctggtatatgtnncatgttattgngagangntcangcagcttaaatacaacacatccataccagttgtaatcttgtgaccctgtaaagagctcgtactttgaggatcaatatagttgtagtttatttagttngatagcaactataggatgcttgcngaatgtttagttgagctcattccatgcaacatggttccatttgaagtatatgatgaagttttgagcatgcataacatgcagctaggcacgacgaattatagtttgacatatagaatactagattcaatttgattctaattagtgggagatatggtgcacgcactacgtatctagggttctgatcgtcggatcttctctcctagaggattgacgtcgcgacaacgctgtgatgttattctaatctatctctctctatcctctactatgtcttantactatattacaatgcctcatatctttcactttgcacatatatatcatgctacctactacgctcatttacacttctccg

SEQ ID NO: 277585 - DNA, 132 bp, Glycine max
tggataaagacatggaaactcttggacttggtgctcacatgtgctcatactcatctattcctcatcatcacccctttcatggaccaacacccctttattatggggctaacatgcaccccatggctcacatgt

SEQ ID NO: 277586 - DNA, 255 bp, Glycine max
caggcacagcagcacgagcaggaccatcagcagacagccgcagatgcatcatcgacccctctacagcagccaccatccctagaatccatccctgctcacatgcagaggatgggactctatatgcagcatgtggctgaccaacaggaggctaatcataggggtcagatgtagctgaatgagagctttcatcgatacaacctgcatcagcatagccacggacccagcctctacttatggtctactctatagcagttc

SEQ ID NO: 277587 - DNA, 473 bp, Glycine max
  unsure (1)..(473): unsure at all n locations
atgggccttgantatgatccttatcgcacctaagtgacgagctgagctctaggaagttctaagaagctctcanggagcattctattataatagagcatgtgtacacttgtggactttgtgatgaaagctatgagaacactcaaggtcacttctttcctctttattcttcaattcgtgccccccttctctcttcttttctcattaagcatctcttcagctcttatcaaggcattcttgtggggagctcctcttctggcttattcctagggatgggctccctctctctttctttgccttcgtgatctcatgggaaaatcacattgaggactcattgagctaagatcagctcatagatctcacagcagcttcataactttttctgacagatgggagacaagcatggagcgtgggtaaatgagatctggaaagacagcttacacctacaagtaccgtgggagaatacacgcggagct

SEQ ID NO: 277588 - DNA, 646 bp, Glycine max
  unsure (1)..(646): unsure at all n locations
gtaanccccntgaanattgcnnncntatgattctctttgaccgcgatcctcagagtcgacctgaggcatgcaagcttcctcggngccttttcctgcgaaggcaatcatttggaaagttagtttaccaagaaatgctactctcaaaacagaaatggcatacaacccttctcattagacactaacatcaatgtaaaattagagcacactcatgcacatactttcttttacgaatgntcaccttgcaccaagacattgcttgataaactanagaaaaagtgcacgcccatgccacanagtcaangggcaccttgcgntaacctaagaatgatnntatatcgtacctntcccaagnngtgtaatttnngctaaacncacanntcacatnnngcacttcctttggggctaaatnnntacatacatgccattctcaaaagcccctcttgggctacaaaaagntgcacacatgcacgattccagtatttctaatacctatgcatataccaaacttatgatgagntcttgctatctacacaataaggtgctacatttcatgctttattcaaagtgttntgtacctaaagccgatgcaaatcaagatatttcttttgtgataaactgatcaaataaaagtatttgacgacttctn

SEQ ID NO: 277589 - DNA, 193 bp, Glycine max
gctgactcaaggctatgtgaaacgacataacctaaagatcattagaaatgagctgtttactgtctagactttaataaatagattatttttgctgagtaaataacactattaattaaaacacctagtattatgatagactatataacagtatatgctacaacactcttaattaaaggacaccttttaatttgtt

SEQ ID NO: 277590 - DNA, 596 bp, Glycine max
  unsure (1)..(596): unsure at all n locations
ttggcccccttgnnnatggannncccttgatcgcatcctgcacgtcgcttgagaggtgcttaatgaggaaagaacgaggagagattatgagagcgtgttcttanantgatagaagaaacaggagagaagttgaactttgagtngtgctcacaagactctcattcatcaaaagtacaacaagtgttacacatgcttctatttatagactacgtagcttgcctgagaagaattcttgagaaaacttnctcgagaaacttctntgagaaaacttccttgagaagctagagcttagctacacacactcctctcataactaagctcacctccgtgagaagcntgcttaagaagaatnctagagaagctagaagctagctacacatacctctctaatagctaagctcacgtncgtgagatgagaagctagagcttagctacacatncnctataatagctaagctcatcccatgacanatacatgaaatacaaacanaagtccctactacaagactactcaaatgcctcgaatacanggctaaaccctatctacttgatggcannatcanggcttacaaaggananatctattctatatacat

SEQ ID NO: 277591 - DNA, 570 bp, Glycine max
  unsure (1)..(570): unsure at all n locations
atgttccttgangccatccttaagtgaccatgctgcangctgctaaccatggaagctctaatatctccacactttntgttgttggccattcttgatggnctngattttctcacggtccaactggaccccatttctaccaactatcaaaccctatgaaaactatattatctacacaaaaggacacttcttatatngcataggggtggtttcctaggactgaaaaacttgtctgagatgtcctaagtgatcatctagccttctactatacactaanatatcatcaaaataaacaactacaaatctacctatgaaatctctaagacatgatgcataagcctcatcaaggtgctnggtgcattagtgagcccagaaagcatcactagccattcatacaaaccaaacttgtcttgaagcagtntncactcataccctttncatcctgactggtgataacactttaacaacaatttgcaaaaattgcacctcgaactactctgcaatnttcagttatgattgcggctatcctttactatctgttattctactcttctagcttatacatatcgtccg

SEQ ID NO: 277592 - DNA, 331 bp, Glycine max
  unsure (1)..(331): unsure at all n locations
agctntgtcaatgtgggatggatgtgcgatgtactggttgccatgataaacgatgaaacccctcaaggccaatcaaattgggtgcgtgtaacaccctgaaatattacaagttacaaatcgctggttaattgtatttattgcgttatttgactatatgattgacttgaatgagttgaagtatgccttgaattagttatgtttgaatttattgatgtggatgtagagatatatggagttttgttgagcaaagttgaaattatgagattttagattgttgcataaacctagttcaagaagattgcaatcctgaattcgataaccgctgaatcgt

SEQ ID NO: 277593 - DNA, 434 bp, Glycine max
  unsure (1)..(434): unsure at all n locations
ctgccaacccatggaagctcctaatatctcccacactntgtgtggtgtgccattcttggatggccttgattttctcatggtccactaggaccccatttctaccaactacaaaccctaaaaaaactatattatctacacaaaacgtacacttctctatatttgcataaagggtgtttttgctaaggaccgaaagaacttgcctgagatgtcctcagagatcatctaagctcctactgtgcactaaaatatcatcaaaataaacaactacaaatctacctatgaaatgccttaagacatgatgcataagcctcataaaggtgcttggtgcattagtgagcccaaaaggcatcactatccattcatacaaaccaaacttggtcttgaaagcggttatacactcatcaccctttttcataccgatgtggtgataccca

SEQ ID NO: 277594 - DNA, 303 bp, Glycine max
  unsure (1)..(303): unsure at all n locations
agtcacctgcngctgcagcttgcaaaattcaacggttagaacttgtcacttgtatgtccgactcaggcgcatcacatatagaggcgctcgacaaggaacaacggaagatctcaagaaattcaaatggtcataactcttcacacggatgttcgattatggcgaatcacatatctcaacgctaaaaaatatacaacggaagctcttgagaaattcaaatggtcataacttttaactgggatctccgattcacgcgcatcacatatagaggcgctcgaagatgaacaacgaaagctctcgagaaat

SEQ ID NO: 277595 - DNA, 316 bp, Glycine max
  unsure (1)..(316): unsure at all n locations
ggaatcatacctcactgtgataagttatgagcgtatgaatttcacgttatcttgcgctgnccaatttgcagcatctcgtcttattatgcgcccgaatcggacatccgcgtgaaaagttatgaccatttggatctgtcgagagctttccatgacgaatttccgacgtatcgatttaatgttatccaccgctcggacatcgcgagtgaatacgttctgacgcatttgaatttcacgagagctttcgttgctcaatttcgagcgtctctatatgtgatgcgccccaattggacatccgagttgaatgttatgaccattt

SEQ ID NO: 277596 - DNA, 432 bp, Glycine max
agcttcaccttctggtcctcctcatagctgttgcatgatataacatgctctatcttcatctcccactcaacgtaggcctccggatcattctttcctttaaatggaggaatgttgagtttaataccatcaattcggttttgtctatgaacaccatcattccctcttctcctcctttcttcttcattatgatctctattctacattcgatccaacctctcatggagcgcatcatctcgttgtttcattaacctctccaaatgttgcatcaaagcttgcatttggaattgcgaaagccccactccatcattaagattaatacctgacatctcaaacaaacaaatcagacgtaacaagacaattatagttgctgtttgaatacctcacccactcaagtgtatcacccacttatggcttttctctaatgaaacactc

SEQ ID NO: 277597 - DNA, 426 bp, Glycine max
  unsure (1)..(426): unsure at all n locations
tgtgccaatccacatggttggagcattcatgcaaaacagagtgaccttgactggtcttcctatgatttcacttagtgagagtgacctgacttacctattgtgaggcatgtcttgtcatgtactcataggcgcctgacgaggtttttcactgaaaatggtaccacattgcatgtaggcttgagtctagtatatttgttgcatcacacttatgtttaactttcattgagttaacgattgaggttttggtattattttttggagtgtgtgaactagaataagcgtgaatactcgtgtgtgatttggtgaagtgatgttgattatgtaaattcaactctatgtatttatatgtttcacatgctctagtgtnttattatatacgaatgtgataactcattcccggtatgtgtttgtgcttgggttgaatgc

SEQ ID NO: 277598 - DNA, 441 bp, Glycine max
  unsure (1)..(441): unsure at all n locations
gagctntacaaaatcaagaaatagattagaccatctatatttttacactactttagtcttgagtaataagtcatttaccgtatacactaggcaatattagagagacaaaatatacaaacatttatgcgcacatccacaaagacaacctcctcctcgtgcgttcacgcacactattagctaagctagggtggcaaattaacaagaaacccactcttgcatttaccccatttcatacgggacgtgtccttctttatatttacctctctctctctctttaacttctccttgccactttttgtaccaaccgtaactacccaaccacgctctccaatctttacataatanataacattatattaatgtaacttatatatatcccatcaccattcatatttcatagtatctatcacacaacttcactttcagtcaccgagtaccata

SEQ ID NO: 277599 - DNA, 478 bp, Glycine max
  unsure (1)..(478): unsure at all n locations
gacactataaatactaagcttcataaggtaagggggtctttccacttctcaaactntgatcttgtttcctttggaagctaaacttcattgcatgttgtattgatgttcaaaatttcatagctactgtcttggctggaactgtgtgatatgttgtttttcttgaagttttaaggttaaaaatgtgttctttaagtgtcaaacttagggttagccttaaatttcacttaaatcggagttttctagcaaaagttatgaataaaacaagtttaaggttgtttttgtaggaataaatctatcacaaaactaaactgattgttatagatgtaaggattgctcttcttaaagatttgacttcaaaaataaattttttaggtgtgaaaatacagggtagcatagaatattcatgataaaccgactcccagaacacctagaaaattgaaaataagtttaagagcaaaactttgtaaaactagacagt

SEQ ID NO: 277600 - DNA, 345 bp, Glycine max
agcttagaatgcagaagaagcaacaataggttcccagctacaaggtcatgacgaaagataacaattggtacctcaaagccttacactggggcaatgaggggcatcgtgcatgagccttaagtgaacataggggcagatcaaaagttcacacccatcgatgtttttaaacaagaaaaaaaagggggagacatgccctggaatttcaatagattgattaaacatcaaacggctccattcccgtcactcaaaaacggtcaagtgactaaatcaaacagaacatacactctgagggagttcccggagagattttcaaaaagataggatgaggttgcatgaattatcacc

SEQ ID NO: 277601 - DNA, 429 bp, Glycine max
ctcagcttctaaggaggtgagcttagttatgagaggggtgtgtgtagctaagctcttgcttctcaaggaagttttctcaaagaagctcctcaaggaagttttctcaagaaagcttctcaaggaagctacctagtctataaatagaatcatgtgtaacacttgttgtaactttgatgaatgagagtcttgttagacatacttcagagttccacttctctccctcttttattccttcaattttgtgctcccccctctctctttccctccctctttcttttcctccattgaagcatgctctccaagcttcttatccaaggatcatcttggtggtgaagctccttcttccatggcttattccctaatggatggcgcctcctctcacctcttctcctttgtcttacgctgcatctacatggtggaaaatcacca

SEQ ID NO: 277602 - DNA, 505 bp, Glycine max
  unsure (1)..(505): unsure at all n locations
ntttggccccatggtagccccgcgatcctcgagagtctacctgcacgcactcgaggcatgcanacttgcagacgcgatgctcatttttactagaagagaagccttcagggcgtttcatataaacgtccttctctaaatccccactgagaaaagttggaatcacatccatttattgcaactcaagggcaaaatgagcaacttatgcccaaataatacgaagagaatctttattagatactggagaaaaagtctttgtggaggttattccttctttttgagtaaatcccttagcaacaagtcttgccttgtatctctcaatgatgtctaatgaatcccttgtggtcttaaagacccatttacatccaatggccgtttgcccattatgcaactctaaaagggtctaaacattggtactctgcatgaactcatctaatcttcatgctttataccataaattgattttacaactatgctagatcaaagtttgggacatttcactccaaat

SEQ ID NO: 277603 - DNA, 427 bp, Glycine max
  unsure (1)..(427): unsure at all n locations
tctnccncaattttctatatatagggggagaagtttagtgttaaatggttcagccccttatgcacttctctctctttcgaatntgcttggaaaaattgtttccgtgaagaaaatccaagctgaggcgcttccgaaacgtttccgtaacgtttctgtgaggaatttcgcgaaggttttcgaccgttcttcgatgttcttcattcgttcttcatcgttcttcagtcttcaacgggtaagtacctcaaaccaagcttttcaattcattctatgtacccgtggtggtccacacttggtttcgtgtatttatattctcgtttcatttactttntatacccccttttgacgtgcttaagccattttatttaagttatttctcgcttaacctaaaaataaaataaatttccaccgatcggttgaattgtattat

SEQ ID NO: 277604 - DNA, 349 bp, Glycine max
  unsure (1)..(349): unsure at all n locations
agcttgatccggaggtcaatgatccgctttatctgatgacattgaccatcccagagcttttcttgaggccttatcangttagatgggatgccaccgtgttcggggtcgttaatccagatttccccctgtacataaagcacgaagacctctctgaaatcgcacacggttgtcaatgtctcagcatatcagtgttacgggtgtggattctgtaagtctttatataaaaggcttttatttacctaagttatggctttcaattcataaatatttaactntgacttaacataaacaggcatctcactgaaacatgtatgtgagcggggaattttgatatctatggattcctcga

SEQ ID NO: 277605 - DNA, 449 bp, Glycine max
  unsure (1)..(449): unsure at all n locations
tatcctcagtcgctaagccattgttgtctcacttatcgatttggtctcgctaagcgcatggttcaagcttagcgagatagcaacttttgcaccttcataattttctcctttttacctgaaattgaggtgaaatttacattaaattcataaggaaggcttctattgagcacatataaaaactaaactagaaatatttacaatcctaccaaacataaccataaattgngagatttatatacattntataaaagttttctatacaaaatttagtcttatgagatgactaacagtaatcaagccacaagcatgtaaaataagcatagatagaagcaatgaacacagagaaatagcattaaatagatagtaagagtattacatcaagaggttcagtagtaactccccaacanagagagttagccttccattacaagcaaaacttcataaataca

SEQ ID NO: 277606 - DNA, 385 bp, Glycine max
  unsure (1)..(385): unsure at all n locations
agcttgttcttgtgtgctctcctccacctttattcttaattgagccagtaaacaagtcaaagcagtttggattgcaattgttgaagatctgatcttatggaaattgttgaagagattgtctgaggcggatgaatttttcgatgaccgtgattttcttgattaatggcactgtaaggtctatgtcttaatagtgacagctttactttattttatttaaaaaaattgtgcatcaatgtctcattgacataggacttttccttgtttgcataaaactcctttacatttacgtagaactctctcgcatttgcataanatgttagcatatataactattatgtgtttattttgtagtattggcttttgatgaaagagcacaataataaaa

SEQ ID NO: 277607 - DNA, 457 bp, Glycine max
  unsure (1)..(457): unsure at all n locations
tggcacacttgacagccacaacagggccatcttgaagaattctccttgtagacttcaccatagcctccaacacctagaagccggtcactggagaagtcgtttgtggctttctttaactctttgccactgaaaagtttagcggctctgccaccattactggcattcagaatcccttcacgctctttggctaggcgtgcttgtgcttctttgatgcgcctgtggcgtttgtagagtagaaaggcaatgacggcaagaatgagtgcagctccaaccccacatactgaacctgcacattgttgcaatcaaagttttaaaaaattagttacaaaagaggccacaagataccagtgttcagaatagccatccaattttcattcaacaaggatattgagaagactntntttcccctcaatggatgaaatatgagcaatttatcaactccaagtcacataaaaag

SEQ ID NO: 277608 - DNA, 427 bp, Glycine max
agcttccatcaagtggtaatcagagcacattagcttcaagtaggtgctccttaaacctccattaattttttttctttaccttctcttccattggtgtctcttcatttttctccatgtatctcctcacatgtcttgttctaaatgttgttaacatgattctttagagtttccaccaattaaacttgctataaaaactagatttgattttctatggctcaaatttcttgttcttgttcttgaaccatgaattgtgttgagtttaggttcctttgagttttgtcttgttattttcggtggctgaaacctaaaccataaaattcttacaaaaatattaaagtagaagataacctcagaaaatctatagtgactcgttcacctattgtagttttgtcatagaaaacatgtctagtcatgaaacccgtcacat

SEQ ID NO: 277609 - DNA, 347 bp, Glycine max
ccttgcggattggtcttcgctggcgaaatgatcgaagtgtgtctaaaaagaggcaaatctgatcatcatgctttgataaatgcaaaaaaaaaaattggggcaagtgaagagggtgagaataagggacaaacccatgctgtgactgccattcctatacagccaagtttcccaccaacccaacaatgtcattactcagccaataacaaaccttctccttacccaccacccagttatccataaaggccatccctaaatcaaccacaaagcctgtctaccgcacttccaatgatgaacaccacctttagcacaaaccaaaacaccaaccaagaaatgaattttgcagcgaa

SEQ ID NO: 277610 - DNA, 329 bp, Glycine max
agcttctctatgatatcatgataagatggatgtttatagcccaacccatatctcgcaaccatgtcacaaaaatttgcaaaagctggatttttaattacattgaatgaaatgacacttgtgtaccaaaattcagcacattgatcatcaactttatctttttcaccttttttgtacaattgatttaaagttgcttgaactccctcaccactagcttgaacaaattttgcttttcctcttcctttgaaagtaaacatcactttcccttctattccactttgagtggtatttgtctccaccccctcagtatatataccttcttcatgaaaact

SEQ ID NO: 277611 - DNA, 467 bp, Glycine max
  unsure (1)..(467): unsure at all n locations
tatnntgaattgtactctattgtataaaggatcgattataagttattntgaacttatttgtataaaggatcgattatgcatgattcacaaacataaatctatggaaatataaaacttaagattgtttatccaataccatataatttacttattttaaccaacatttatatcgagaacttgtttaataacaagttttagtgaaataatatttatttattacactttacggcaattatagatcctaaaatgccttcttaatagctgctgccaattcatcataggctacttcccaagcactgctcaactcgtcactccatttgtccccaactgtcttcttaatagcatatgccaattcatctcaatttccttccacccaatcaatggggaacagtgacaggacgactactagtcctagatgggtatatgtatatngcttaattaacttcattntattctttaattacata

SEQ ID NO: 277612 - DNA, 262 bp, Glycine max
agcttctacttatgtggcatggcgggcttccctcactttcttgactccaatgcgagctctggccactgctcttccttaccgcgatgctatttttcatatctgcctgagtgggcttatagcctaaaccatacttcccacgatttcctttggcatttatcagactaggtatgccgacggtgtccttgcctaaacccattccgggttcgtaaccgttccctaacataactcgggccatcattactgctgcatcggacaggcaagg

SEQ ID NO: 277613 - DNA, 162 bp, Glycine max
actcagcttaatggagcttacatcaatttcttctcctttctttcttccaaaaccatttcaaacgtgccaagcactttctccatcacccacagccaccattagccaccacaaaaacatcgttgttctccgttgaaactccacaacgaaaggacccggtgattg

SEQ ID NO: 277614 - DNA, 325 bp, Glycine max
  unsure (1)..(325): unsure at all n locations
agctntgattcatgtttatggcggtattataacacttattttatggcaaaacacaacttctatcccacactttaatttatctaaaatcatgaaactaaaatgcttaatggtgtgttttgtcacaaaggttgttgcataattttttttttgtatagttaagagggatatcaaaccagctagataacaattggcataaaggtggaatagttntaattaagaagaacaaatttttaatcaaacttttactaggggagagaataaacccaacattaaaatgatgcaataaagaacatcaacttatcaaaatcaacactttacctttgtc

SEQ ID NO: 277615 - DNA, 301 bp, Glycine max
  unsure (1)..(301): unsure at all n locations
tctggtgggacatcttgacttgctttccaatctgacattcaccacagattctgccttcttctattntcagattgggaatgcctctaacagcatctttgtcaatgattttcttcatgcctcttaagtgcagatgtccaaatctttgatgccatattctgacttcatcttctttggagaatagacatgtggaggagtagctggtttcttgaggtgtccataagtaacagatgtactttgatctcctgcccttcattaggacttcactcttctcatttgtcaccaagcattctgatctttgtga

SEQ ID NO: 277616 - DNA, 299 bp, Glycine max
  unsure (1)..(299): unsure at all n locations
agcttatagacaatctccaaaggcttagacttatgagtatgagtgttgaagaatatagaaaacaaatggaactactccttttaagagctggacttagggaggaggaaagaacaagcacagctaggttacttagtgggcttaatatggaagtgagggataaggttgaactcctcccatatatggacctagatgggctagcccaacttcgtataagagtggagcaacaaattaaaagaaatccttcttcaaaatcttatggctttcactatccaacgaaggaccaagcccaaggaatnttt

SEQ ID NO: 277617 - DNA, 133 bp, Glycine max
  unsure (1)..(133): unsure at all n locations
gtcttaccaagattnttaccaagatattcctaacctatcttagtcaaagattattgagggatagggataattgaaatattttttgccctttccggtgacagatccaacggggactccaggggactaatgggac

SEQ ID NO: 277618 - DNA, 276 bp, Glycine max
  unsure (1)..(276): unsure at all n locations
agctngaatcggacatccgngtgaaaagttattaccatttgaatttctcaagagcttccgttgttcaatttcgatcctctcgacatattatgcacccgaatcggacatctgtgtgaaaagtcatgatcatttgaatttctcgagagtttccgatgtttaatttcgagcgtatcgatatattataaccctgaatcggacctcagtgtgaaaagttatgaccatttgaatttgacgagagcttccgttgttcaatttctaatatcactgtatgtgatg

SEQ ID NO: 277619 - DNA, 363 bp, Glycine max
tgcctcaaagaggtccaggaaggacaaggcggccgaaggatctagtttctccccggagtacgacagtcaccgctttaagagcgttgtacatcatcagcgcttcgaagccatcaagggatggtcgtttctccgggagcgacgcgtacagctcaaggacgacgagtatactgatttccaggaggaaatatggcgccggcggtgggcaccactggttactcccatggccaagtttgatccataaatagtccttgagttttacgccaatgcttggccaacagaggaaggcgtgcgtgacatgaggtcctgtgttaggggtcagtggatcccgttcgatgccgacgctatcagccagctcctgagata

SEQ ID NO: 277620 - DNA, 403 bp, Glycine max
  unsure (1)..(403): unsure at all n locations
agcttatgctgcaaacatttataatagacctcctcagcagcaaaaccaacaacaacagaataattatgatctttcaagcaacagatacaatccaggttggagaaatcatccaaatctgagatgggcaagtcctccagaacaacaacagcatgtccctcctttctagaatgctcctggtccaagcaagccatatgttcctcctccaatacaacagcagcagtcataacaaagacaacaagcaactaaggctcctcctcaaccttccttagaagagttagtgaggcaaatgaccatccagaatatgcaatttcagcaagagacaagagcctccattcagagtctaacanataagatggggcagatggctactacagtgaaccaagctcagtcccaaaattatgac

SEQ ID NO: 277621 - DNA, 382 bp, Glycine max
  unsure (1)..(382): unsure at all n locations
ctcaagctgcataggctcattcaatcacttagtgcaccaaaagtntttggatctcattccttataagcccgagggagttatgaaacaaagtattaatattttgcttaataccatatcaaagagaagaagtaatatgtgcccaagtgaaatgatgattgtttgcaactctagctcacaacgttaaagcccattgcacatctgtagaaactagctcccaatcaagttgccttgttgatatccaagaccaatgataaacctgaatttgactatattttgatgtgaattttcatgtcatatccatgcatattgatatattttattttggcaaaactcaggttgggtattaatttgtgaaagacatgtgcttaaacctaatgtggaa

SEQ ID NO: 277622 - DNA, 429 bp, Glycine max
agcttctatataagctgaaccattttatcatttaacacaagttgagttttattcagaaaattagagtttatctcttttatcttagtgagagtgattctcctaaattcttgagtgattcaagaacaccctggctgtatcaaaggactttcacaacctttgtgtgttgccctcgctggaaagagtgattctttccttcctatcatctccacccttgttctttcaaaccacaattccagaaaatccacctctgcccaaaattatctcgtgaccataactcccatttcacacactcaaattaagtgattcttgagcctaaattgaatttcaaaacgagacctttcacctcgttttggaatcacctcatttggagccctgtagcttccgttattgccatttctatatttctgtccagccaccacttaacctacg

SEQ ID NO: 277623 - DNA, 325 bp, Glycine max
  unsure (1)..(325): unsure at all n locations
tctagatgagttatgtctgcgaatcggacatcctgtgaaattgtttttctcatttgaatttctcgagtgcttccgttgtttaatttcaagcgtctcgatattntatgtcctcaaatcagacatcggagcgaaatgttatgaccattcgaatttgtcgagagcttccgttgttcaatttcgagcgtctagatgagttatgtcaccgaatcagacatctgagtgaaatgttatgaccattcgaatgtgtcgagagcttccgttgttcaatttcgagcgtctagatgagttatgtcaccgaatcggacatccgtgtaaaaagtatgac

SEQ ID NO: 277624 - DNA, 388 bp, Glycine max
  unsure (1)..(388): unsure at all n locations
agcttccatcacctatggaggctagccatctcttactctgatggcattggaagtatgatggggatgttgtccacaatggtgtcataaacaagttttcatttgtacataaagggcaaatggttacccttaaacctatgtctccaagtgaggtttgtgaggatcaaataaaaataagagtgaaaagagaacaagagagaaaagaagagaaaaacaaaattgatgaaaagagagaaacatgaaaggaaagaaaataaagaaaagagtggagataaaaaaatgaaactgaaaaaacaaagatgaaaatcaagagagaaaatacagagcttgttcatgagagaaaaaaggtgaagagagtgatgctagctangcaacctatgtatntactaat

SEQ ID NO: 277625 - DNA, 294 bp, Glycine max
  unsure (1)..(294): unsure at all n locations
gctcaatggaatgccccggngctcctccatgataagcacacattgcgttcgagtcgtatcctcgagaagatggaggttgaggaaacctagcaagggttatggctaccattgcgatatcaagtcaataatggagcaagttaacatatgacaccagaattggtgtgatatctacatgcttattgctgcaaaatatcttccttggatgctgttaatggtcgagctaaaggaggcgaaacacattggtgtgcggaaggtgggttttgaggcagatttatggatggtctttgagcataa

SEQ ID NO: 277626 - DNA, 232 bp, Glycine max
cttgtcgctggagctgacccatatatagtctttactctttcagactggcgactcctaggctcttgatcttggacttgatagaacttctttttaagccaaggcacctgactcgatcccatgttttactaaagtggaataaaaactagtgtgaatcaagactccgacatctatcacaggtgaaatggatgaatgcatgaagaaatgcgtatggcatagatgcattttacggata

SEQ ID NO: 277627 - DNA, 311 bp, Glycine max
agcttcacaaggagctacatctgtgaagcttcaccttccatggcttattctcttgtagatggcacctcctctcacctcttctcctttatctttcactgcaactccatggttgaaaatcaccattgaaggaccttattgaagctcaaagatccaacctccatagaagcttctcaagcaagcttccatcagaaacattataaactatgtcagtaaggactcgcagtttttcatgaggaaaaatacttgtacttgggggcatgtcactccgtttggaacttccttgagactcaagttaatcaccatgggggggg

SEQ ID NO: 277628 - DNA, 464 bp, Glycine max
  unsure (1)..(464): unsure at all n locations
acactatgaatactaagcttctaaggaagttntctcaagagagcttctcaaggaagcttctctagtctataaatagaaacaagcgtaacacttgttgtaactntgatgaatgagagtcttgtgagacacaactcaaagttaaacttttctccgtttttcttccttcaatttcgtgctcccccctctctctttctctacctctgtcttttcctccattgaagcctgctctccaagcttcttatccaacgctcatcttggtggtgaagctccttcttccatggcttattccctagtggatggcgcctcctctcacctcttctgctttgtcttccgctgcatctccatggtggaaaaccaccattaaaggacctcattgaagctcagagatccagcctctatagaagctccacaagcaagcttccatcatgtggtctcaacccatctataaatatgttgagctgcat

SEQ ID NO: 277629 - DNA, 318 bp, Glycine max
agcttttgagaaattcaaatggttataacttttcacacggatgttagattaaggcgcatcacatatagagacgcacgaaaatgaacaacggtagctctcgagaaattcaaatggtcatcacttttcacactgaggtctgattcgggcttataatatattgatatgctcgaaattaaagatcggaagctctctagatattcaaatggtcataacttttcacacggatgtccgattcgggcgcataatatgtcgagaggctcgaaattgaacaacggaagcactcgagaaatacaaatggtcataacttttcacacggat

SEQ ID NO: 277630 - DNA, 314 bp, Glycine max
  unsure (1)..(314): unsure at all n locations
ggaatcggacatccgtgtganaagttatgaccatttgaacttctcaagagcttccgctggtgagtttcgatcctctcgacatattatgcgcccgaatcggacatctgtgtgaaaagtcatgagcgttcgaatgtctcgagagttttcgatgtttaatttcgagcgtatcgatatattataaccctgaatcggacctcagtctgaaaagatatgaccatttgaatttgacgagagcttccgttgctcaatttcgaatgtcactgtatgtgatgcgcctaaattggacattcgagttaaaagttatgaccatttga

SEQ ID NO: 277631 - DNA, 384 bp, Glycine max
  unsure (1)..(384): unsure at all n locations
agcttgagcatactagctntcatgtatggttggtccattcatttctctacctataatcacgccaagtgggttataaaactaacacttaatagttaacactgacttgagtttcagaggaagtactctgcaaagcttaagtttcacctcacactatggcagtgaaggtttcagaaccaaaagatatgaactatgggccagtatgaaagcatttattggatcatagaaatgaagcatttaaggctgagcctctgaccgccatatatactcattcaacaagacatcaattaacttatcactcttctaaatagatcagaagttcagttagaaagaaaatctgttagttttgattcttaatatgccaaatgtagatatattacttggcac

SEQ ID NO: 277632 - DNA, 355 bp, Glycine max
  unsure (1)..(355): unsure at all n locations
ngagatgaggaagagtagaagggtgaaacttcctgctnttattcgttgaccacagagtggtacctggagatatgtcgcgggggtcaggagaccttgggggcgtcaggtggggtgctattgcccacaaccaagcttgaccaatcctgacccaacccgggcatagtcagtcagtgagaacctgtgatgtacctaagcaagcaagctcttggcagtcaacagataaaaggaacaaagaccacaaagcaaggaggcttgtgtggtggctggccagctgtgaatcttgtgtgatatatgggttatggcctctggtaatcgattaccaagggtgggtaatcgattacaaggcttaaaaatg

SEQ ID NO: 277633 - DNA, 391 bp, Glycine max
agcttcacatggagctacattacttacccttgtcgagataggttttgactcatgtgaatgaatataacgtttaagaatatattcacagtccttgtcactttcttaacaagagttactcatcataacgcagatacttacgagtagaggatgtgagttcttatatcagtgcattggatgttggtttaaagtagtcgtccattgtgattggacgcttcctcataagagctttgtagaatacatgtgaagaccaaaagcttgttatgtagtttttcagtcacaaaattacataattaatcaataagttatatttttgtcaaatatcaaaattcacaataagattaggttgtttagtgactaatacttcgtccagacttaacatccaatacacaat

SEQ ID NO: 277634 - DNA, 460 bp, Glycine max
  unsure (1)..(460): unsure at all n locations
cttgaattcattatatgcacacttaggggtccatctcttgctttgcatgtcttcatcttcattcttctaccatcggtgatctttttctttgttttaagcgagtttcaaccgattttttaagccgtaatctcacttaatcaatgttaaaatgaatttcaaccgattgtttgtgttataatctcttttaatcgtcgttaaattaaaattcaaccgatcatttgtgctataacctcggttaatcatcaaaatataagtttcaaccagtcatttactttgaaagttctcttttaaaaagttggaaaataaccaagtgaaaccaatgttagacaagtggcctcagatatcttaagaagggggggttgaattaagatatcacaaacttttcctaattaaaaaattctattttgatttatacccaaatctcaagattcctttcanaatgaactcgtaaataattatt

SEQ ID NO: 277635 - DNA, 313 bp, Glycine max
  unsure (1)..(313): unsure at all n locations
agcttttcgatttattctatgtacccatggtggtccacattgtgtntcgtgtatttttattctcatttcatttactttttataccccctggtgacgtgcttaagccattntacttaaggcgnttctcgcttaacttaaaaataaaataaatttccaccgaacgtttgaattgtattatccgttaacttcggttaaaatgaattctgaccgttcgttcgtgccgtaaccacgttggagatcaaaaagaggcaaaataataatacaataacaaaagatataccttttagtaaaatagagcggaaaatcaatcgga

SEQ ID NO: 277636 - DNA, 423 bp, Glycine max
tccatcagagcttcaccaccaagatgagccttggatatgaagctgggagaggatgcttcaatggaggaaaagaaagagggagagaaagagagaggggggagcacgaaattgaaggaagaaaaaaggagagaagttgaactttgagtagtgtctcacaagactctcattcatcaaagttacaacaaatgttacacatgcttctatttatagactaggtagcttccttgagaaaacttccttgagaagcttctttgagaaaacttccttgagaagctagagcttagctacacacacccctctcataactaagctcacctccttaagaagcttccttaagaagattcctaaagaagctagagcttagctacacatacctttctaatagctaagctcacctccttgagatgagaagctagagcttag

SEQ ID NO: 277637 - DNA, 332 bp, Glycine max
agcttcctatggatttaatagtgtcaccatttttcaccaagtaaaccagcaaagaggggatccctcttgctgtctgattttcaattggacaagcacgtgaattggaattgtgagcttagcaccaattacaatgttgacaagagcataataattctgacccatcattgcctgacatgtggtgaggccttggaaggtttcttttaccaactcataataagtgtcattcttgcttgtagagtagggtgtgttatactggtaaatgtttcctgaaacaaaacatatgaacaatgattgacttatcggactttttaaatatacattataaaactaat

SEQ ID NO: 277638 - DNA, 353 bp, Glycine max
  unsure (1)..(353): unsure at all n locations
taaatgcatgttgttatgacgtgtttgatgtttaaatgtttatttctagatgtggatgctaacactatgtgtttttgaaattattgaagcattangtgtcattttggaaagccatggagtgattcttgaatttcgttgaaagttatcgaccttcggcttaagtgtaatgccttgattatagacatttcaatggctcacactctatgatacttcacatggtggcacaccactcaacatttttgttggtcaaaaacctttatgggtagccctttccgaggcctcgacaatctgctttagctgcttccaatatcaatgactatcccccataaacaaacatgagacttatcaacatg

SEQ ID NO: 277639 - DNA, 242 bp, Glycine max
actactatatacatgaatgtcattctacgtggcctttctacatcctttgttaaacgaccgatgaagaaagtgtggtggtggaatttttgcaaatagtttacatcgatttactggctgaggatcgatgcagctatactagtccactcacgttgagatggtggttctaaactgtgattgacttgccactggtggtggagtgattcgagatcatgcatgaaatcctatctacggaaattctatat

SEQ ID NO: 277640 - DNA, 431 bp, Glycine max
  unsure (1)..(431): unsure at all n locations
ttcagagataaacggtgaaattatgatggaaataggaatattgtcttagatntgtgaactcgagatctcaccgcctttgaaaagcactgctatgtggtggttctgctctgttcttctgaggtgtgtgtagagactgagactgagactgagactgagaatgtgaagctgctataacctataaccctctgaaatccacgctgacctaaattatggctttggctctgcaaattgacacgtggctattcgatattttatttctgactaactatattgagttcaattggcatgaacaattaataacaattttaatataagttataaaataattattatgatggtaaaaaaattaacatatgtaaaaatttataatttagtagctatgtacaaataaatttaattaaagtatttgtagactatataagtatctttca

SEQ ID NO: 277641 - DNA, 351 bp, Glycine max
  unsure (1)..(351): unsure at all n locations
agctntctaaacagttaaaattgagaagagatacaactgcataaagagtcatctatttttgaccaaactcaaattttgattttttataaattatttcttgttataaatttgattttgtataaattctctattgttattttgattttgtatgaattctctcttgttatantttattttcattaaccttgatgcgtacgatttgntttagcttgttctttttcctttatgtgaggtaaatttcctacaaataaatcattatttgatccagatattatcaagactaataggaagaacaagaaggaaaagaaacaaacaacaactaagccaccgggtgaatcttcttgtactaat

SEQ ID NO: 277642 - DNA, 433 bp, Glycine max
  unsure (1)..(433): unsure at all n locations
tcacacaatnntattttctcatacttaagttgtggaagaccatttactaagtctttcctaactagatgattaagatgatgcatatttatgtgtgcaatcctaagatgccataaaccagtcttatctgtagtatgcttttgcacgttgagcaagtgattaagatcactctttcctttgtttaattttccaaacatatctttaagatagaaaaaatcaatttgcaacttcatacgttcagcatagtgatccttttttatattttaaaatttagtgtgcaaagacttgtaatcatccatgttaaaagaaatagaggtacaatcacaactagtggctntatagnttgaaacaagtttttcattntcttgcttcaatttatctatctcactttgtgttgaagccaatttagtgtaagcaatttgaaatcacttttcag

SEQ ID NO: 277643 - DNA, 428 bp, Glycine max
  unsure (1)..(428): unsure at all n locations
agctntagcaactctttctttntgtttagtcaaaacctctaatgctcttaatctctcctcatctaaatcaaccaactcatctaacatcattttccaataatggtcgattggaatgtccatttgtttttgtaccctggctgattgcaaatgtatttcgaccggaagtacagcatcatgcccataagtcagtcgaaatggggtagtattagttgattccttaggagaatttctacatgcccatagaacttgatctaacgtcttattccaatttcttggcttttgggcaatgtgatttttaatcaagttaattacaatcttattggctgcttcgacctgaccattagtttgcgcgtaatatggtgttgaggttaataatccaaagccaatttttgggcaaattcttttattttctgtcacgaaaaactgaa

SEQ ID NO: 277644 - DNA, 333 bp, Glycine max
  unsure (1)..(333): unsure at all n locations
gctgacaaccggcttgtttaagtaataataataataataatttctattatctattttcattttatgacattatgaatgacttcatgaattgagataaagtgcttaaagaattcacttgcatgtgaaaaattttcaaaaagaaaaagactcaagttaaaaggataatgcaaccagattaatactttcaaagaaaaaaatgttttgtaaagacattttcagacaatttaaatatttttatttgactatattagtataaatcatctctaatccatgtattttttaatattatactctctttttcattttgttttgatagtacntgtgtttaaataa

SEQ ID NO: 277645 - DNA, 370 bp, Glycine max
agcttctcgatatattatgcgcctgattcttattttcgtgtgaaaagttatgaccattggaatttctcgagagcttccgatgttctatttcgagcgtctcgatatattatgcacctgaatcggacttccgtgtgacatgttatgaccattttagtttctcgagagtttctgttgttcaatttcaagcttctcgatatattatgtggctgaatcggactttcgtttgaaaagttatgaccatttgaatttctcgggagctttggttgttcaatttcgagcgtctcgatatattatgctcctgaatcggactctcgtgtgacaagttatgaccatttgaatttcacgagagcattccgtgttcaaattcgag

SEQ ID NO: 277646 - DNA, 316 bp, Glycine max
tctcgatatattatgcgcctgaatcagacttccgttacattatttatgaccatatgaatttctcgagagccttcgttgttcaatttcgagcgtcttgatatagtatgcgcctgaatcggacttccgtgtgataagttatgaccatttgaatttgtcgagagcttccgattttcaatttagagcttctcgatatattatgaacctgaatcggacttccgtgtgacaagttatgaccatttgaatacctagatagcattcggtgttcaatttcgagcgtctcgatatattatgcgcctgaatcggactttcgtgtgac

SEQ ID NO: 277647 - DNA, 386 bp, Glycine max
  unsure (1)..(386): unsure at all n locations
agcttcttcaaacctttagcattgccaatgtatgtaaaataatcattcaagagcaaaaaatcaaggtcaagacaagatgacacactcatcagcaagaagaagataaggaaattcttaccaaagaacaatagatgaagaacatgaagtgacaaaccttatcttctagtggcacaacagtcttgtccaaagattactcctattaagagaaatctaaggcattccactgagtaggtgtacaaggcttaactactgagggaactaagtgaaacagaggatgaagctccttttatcatcctaaggaagcgcatggttaaacaatcactaattcttattgtccanaaaaagcagaagattgaaaaagggcaacaaacaattcctctacattc

SEQ ID NO: 277648 - DNA, 460 bp, Glycine max
tcctggtttgtttataactgtctattctattcatctatgatagatgtcacactagaatgacttaacaacagacatttatagatgaaaacaaattaaatctgactctaaatgtaaaatgttaattaaagacatatgagactaattttatttttttagtctttaactttcatttttaattatttttttcttgtagcattgttgttgaaaataagcctcatatctttttgatattatttatctttaaaatattatgattctaaaaaaaaaatacgaggatttgatcttatcttttagatctaggaggttaggagtttgattttaagattaagataatgtacgtagctagctgaattttgtgttacactttttgcgggatatatagaggccatgagtataatatttcacaagttccttaacaaattatatttcctacttttacaaatatatatctctccacaca

SEQ ID NO: 277649 - DNA, 406 bp, Glycine max
cttgaaatctgaagtttaatattcaaatgatcaatgttcttataaaatgcacacacatgacctctatttatagcctaagtgtcacacaaaattggagggtttgaaattgaatttgtggagccaaactttggagccaaaatttcactaattatgattagtgaattttatttatggttcagcccactaatccaagatcaaatataatattctccactaagtgtgcttaggtgtcatgaggcatgaaaagcatgatggacatgcacaaagtgtgactatatgatgtggcaatgatgtgtagtaagcaaatgctcacctgcccctctaaaatttaattggatggagcttctaccaattcaattaaatttatttccaaccacacacattatatatccacttaatgcatgtg

SEQ ID NO: 277650 - DNA, 215 bp, Glycine max
ctttactatcagttgaaattgatttataacttgccaactccgacaaataatgatttttaataaagtgcaaccgataataaagattgtgtgttgctaacagcatacgcattatctggaagttaggagtgcagcttactagtatgttgaccaaaatgccacgagctggcttagccttggctaactcctaaaatgctgacagggtgacaaattctcca

SEQ ID NO: 277651 - DNA, 308 bp, Glycine max
ctgtcaaattgctgggattactattgctgcgaccataactctatgcaattcctctcatgatacccagatatgtaagaattgtaagataggaaaacaggttccgcgtcagccaggactatgtggagcaattgttcctcgatcctgtgatcatgttccataagtttagtccttgctttagttcgctttgcttgactcatgatatgctctactcttttattactattttgggatgtctcttactaggtaaaggatatttgcaacctggtgtagaaacatgtccaattgatccctggctcgtggatcctgac

SEQ ID NO: 277652 - DNA, 419 bp, Glycine max
agctagcatggggctttggcttgtgtgatatggccattcactccgccacagtggatggagcttgaacattttgctaatttagttgatgaacaattatttagttattaatacatagcttttttgttttgttaataatataattctcaccattatttagttattaatatttagttttttatgcattaacactagattgctttttaatggtatattgcatattaaaaaacgacccgtgcgttacgcacgggtttatattataataacgatattgtgatagcaatataggtcattttaaacttattaatactatttagtttttggattggactacataaaccaatcattttatgtctaaaaatatttctttttaaatatgataatagtgtcataatgattttttaattcatagcctcctcctt

SEQ ID NO: 277653 - DNA, 331 bp, Glycine max
  unsure (1)..(331): unsure at all n locations
ngagtaattggccaacaagaggtagagagatggcttacattgttaagatattatggataaactatagtccttaatctttggaaaagtccttaatcccttcctttttattttcttaaacgcgattggcttggctatgagatgatatgcctttatgtagtgtgaaagacctcaccatattgctactttccatatattaatcttcaagatttgtcataaccattctcttattactttgtttattttgcccatgtatggcacttcttgtagtgataccaacaagttaaagatagttgacgtcacgagactacttgatgttacattaatacatatg

SEQ ID NO: 277654 - DNA, 245 bp, Glycine max
agctttctctaccggtgaaaatttattgtctgtcagcgcttgtaaaaaaatggcgcaatgtctgatgataaacatcagtatgggctgcgtaactaccgatgctggctactgcttagtctttccacccctgtgatattcttgtgcgatgtcgatttggaaatgtgggatacagagtatcgcgtcttgcttttttttatgacctaaatctgttatcttattctggcctacgacagttagcatctctt

SEQ ID NO: 277655 - DNA, 317 bp, Glycine max
ctgcatttggaattgcgaaagccccactccatcattatgattattacctgacatctcaaacaaacaaatcaaacgtaacaagacaattatagttgctgtttgaatacctcacccactcaagtgtatcacacaattatggcttttctctaatgaaacactcttgccttttaccactctaattccccttgagttcttaggcaattcaagagattatggccacaacaaagaacaattcaccaatatgtgtaaggtaaggctagagagacaaggaaaaggttaaccaagaaaaaggctaacaatgtttttaggcacaaatg

SEQ ID NO: 277656 - DNA, 321 bp, Glycine max
agcttcaacatcagaccactttttggtgctggaactacttcacatggacttgatggggcctatgcaagttgaaagccttggaggaaagaggtatgcctatgttgttgtggatgaatccttcaaatataaacgtgacgagactatccttatcttctagtggcacaacagtctagtccaaagattactcctattaagtcaaagagaaagcgactgtgtgatcaagagaaccaggattgaccactggcggaacttagagaacacaggatgaatctacttttatcatcctgaggaagcgcatggttaaacaatcactaattctta

SEQ ID NO: 277657 - DNA, 465 bp, Glycine max
  unsure (1)..(465): unsure at all n locations
ggcttgtggagcttctatggaggctggatcntgagcttattgaggtcctctaatggtgattttccaccatggagatgcagcggaagacaaaggagaagaggtaagaggtggcgccatccattagggaataagccatggaagaaggagcttcaccaccaagatgagcattggataagaagcttggagaggatgcttcaatggaggaaaagaaagagggagagaaagagagaggggggagcacgaaattgaaggaagaaaaagggagagaagttgaactttgagttgtgctcacaagactctcattcatcaaagttacaacaagtgttacacatgcttctatttatagactaggtagcttccttgagaagatttcttgagagaacttccttgagaaacttctttgagaaaacttccttgagaagctagagcttagctacacacacccctctcataactaagctcacc

SEQ ID NO: 277658 - DNA, 325 bp, Glycine max
agcttaccaaagactacatgtttcctgcataatggccacataactgtacagtcaggcattttaccttgccaacccccacaatcaaaaatcaaaatagaacatccatgtaagaagtaaaatgctgccaataattaaccagacacacaaacctatcaagatgatgatcagctttcaaagtgataatgaaatgggaaccgagtgtgtcacggtctgcaattgccattgataaaaggccagtagcatcatgctttagcctatgtgaactcatctaaacaaatcacagatacataatacattaattattaaatacaacactacagtacta

SEQ ID NO: 277659 - DNA, 403 bp, Glycine max
  unsure (1)..(403): unsure at all n locations
tcttaattggctggntgattntatccttcacttttattcgtactatatatatcatgactatgagggttcgtttattgtattgctgttgcttatgagtgactcattgtgttttgtcttgctttgggagagttaattagatggggtagaacttattaggcacttaatttaatgcatattcaggggaggctagctcgttctatgagcaatatattaattgtatttgttgttctttttggctgggcgcacaccggccctgtgcttttaaccaaacgatttctatttaaataaaatgacttcacttatcctaaaaataaatcatgattgaattaaatttacacgagcatgatcatttgatggagaacagtgtttccttcatgaacttgagcaagattaaatttactat

SEQ ID NO: 277660 - DNA, 406 bp, Glycine max
  unsure (1)..(406): unsure at all n locations
agcttcttgcatatccgctcttggtgctcagaanatcccaaaaaaaaatctctcttattactagctattttgaattctttagttcctgaatgtacaaccttcaaattgttgctcattcccctctttcttttctgcaaaaaagaaaatcaaatgctgtcaaaacatggatgaagtcctaagaaaatcaatatcaaagaaaacatggatgaaatcacaattaaaaagcacaactacctatctttcagagtcctttggttaatttgtcttgtctccttatgtggtggggntttgttaataatcttatactttntccttccaaaaaaaacttatcactaatcctctttcattaatcaatttttatgttattgataaaagacatgggttctcacctgctcactactctctt

SEQ ID NO: 277661 - DNA, 301 bp, Glycine max
tatttcagtacaatacccaaagcttgttgattttctccttcattctgctcccaattccaattcttttgttcttcaaagattacatctttgctaattataatatttctgttgactggatcaaataatctatatgccttggattcatcactgactccaaacaaaacacattgcttactcttgtcatccaacttaacccgctgttggtctggtgtatgaacatgagctaggcaatcaaatacccaaaaataattaacagaaggcgtaattccactccatgcttctttaggagttttgtcttgca

SEQ ID NO: 277662 - DNA, 368 bp, Glycine max
  unsure (1)..(368): unsure at all n locations
agctntagcccacatatgcatcttgagtattcagtgttgggcttaatttgctctccaaattattgtcttcaagtctgctaaaataatctcgaaattgtagatataagataattcatggattgggctataatttagctaaatattttttagctttcacatgcctaaaaatcaaaccattggggttgggagcaacagtgtgtttgatggggaaatccttgatcactggttccctttccctatatactccaagagcatctccctcttcttctggatgcattaatcatagagaataattgaagggatcaatcttgggatatgatccttccaaagcttgactaaatcaagtatttcaagtcaacttgctgcat

SEQ ID NO: 277663 - DNA, 376 bp, Glycine max
gctcgcccaggcgagcagcgttgcttcctccataagcatcagccttctggagggccaagtgggcctggttgctatttgcacccccatttttactaagtacaccccctaccttttttggtgattcttttttcgtaaagttacggaaacgtacgaatttcgtaacgatacttgttttctttccgtaatgttacggaaccttgtggattacataatcatcccctttttgacttacggaatgttacggaacctcactaattgtgcaacgatgcttccatttgatttccggtgtgtcacggaaccttacggattgtgcatcaatattttcttttgttttccggcatatgccggaatttcacaaattgcctaatgatggatg

SEQ ID NO: 277664 - DNA, 395 bp, Glycine max
  unsure (1)..(395): unsure at all n locations
agcttgatagcatcatcaccttgtcttactacaattgcaaggtgagctgaatggcttacatcacttgttttcggagttgcttaagcatgatttgatcaaccttggaatcaacaaaatctttagctttccaaataatggctaaactatcatctagtttgcaggggtgtgaactaagttgcacacaataatcaacaatgttgaggacagaaccgggaagctaactaccaaaatgtttagaaaggtcagaagtatctaaaatgaacttgggaggttgaacaaaggaaactgaaagttccttgagaataagggactagtacacctgcattgacaaataatagcaaatgatacttgttggagtgtttggattactctctganatcanaatgcaaaaatta

SEQ ID NO: 277665 - DNA, 464 bp, Glycine max
taagataccacctcgcctgggcgagctgcccctgccccatatggctttttctataaatagctatgcaggggaagggctttgggggttcaaaaagtttagagaggaagaaaaatgaagggagaggaaggaaaaagaagaaaaccgaagccgaggcacttttgaatcgcaaccgaggatcattccctacatcacttctcttgctagccttgtttcctgtgcaacaaccggttagttcttcttccttttcttttcttttcttaagagttgaatgtaatccatgtagccttatgggtcctctttgatattatgtatgtatgcaccttctcccctttattgttgataatttcattttatttgtaaggtttaattctagccaaccatcagtgtcgtgaaatcgttttcttttcttttgtgagactagagactaataaacaaagaaaaaacaaataaaggaaatcaattca

SEQ ID NO: 277666 - DNA, 400 bp, Glycine max
  unsure (1)..(400): unsure at all n locations
agcttgtncctttttgtgcatcanaataacttctaaatttcagctaaggtcttgttaagtgctacatgatagcaaagcaaaataagtctttcatatgtttggctagattatttgcttgcttatatgaaaggaaaaaaacaaatatttagtggacagagcatttaattaagttgacacttgcaggatctaacgtccaggccaaattaccttgtaaccttcactgttggctatgatcagaaaaataatattgatgcagctgtgaaaaaggtcttaatcagctcattcctctctctgtttgcatatgcttgtgtatgtgtcttttaactgaaaatttgcttgaacagttctcagggaacttcactattcctgctatttattatgatggccgaaccactgaatg

SEQ ID NO: 277667 - DNA, 452 bp, Glycine max
tctcatcaatggtattataatttccatcaagtcattacctcatatggttttgaggcaaatgtagttgatgattgtgtgtatcataagttcagtgggagtaaatacatattattgctagcaatgatataggcttcttggaagaggccaaaagatttctaacgaaaattttgaaatgaaagattttggggaagccttttttgtgatttcaagatactaagagatcactctcaaggtatcctaaggttgttacacgtgaactatatcgataaggccctagatagattcagcataaaagatagtaaataaggagattccccaatagctaaaggagataaatgcagtctcaaacaatgcctcaataatgacctttaaagaattgagatgcaagagatttcatatatgtcaacagtaggaggtctaatgtacacctccagttgtactcatcccgacat

SEQ ID NO: 277668 - DNA, 369 bp, Glycine max
  unsure (1)..(369): unsure at all n locations
agcnttgagccaattaagacgacaatatctttttactctgatgtctgattgagtcccgtcatatatcgagacgctcgaaattgaatgttgaagctctgagccaattcaaacgacaataactttttactcggatgtctgattgagtccgataatataacgagacgctcgaaattgaatgttgaagctctgagaaaattcaaacgacaataactttttactcggatgtctgattgagtcccgtaatatatcgacacgctcgaaattgaatgttgaagctctgagccaattcaaacgacaataaatatttactcggatgtctgatttagtcccgtcatatatcgagacgctcgaaattgaatgctgaagctc

SEQ ID NO: 277669 - DNA, 421 bp, Glycine max
gacactatgaaactaagcttaacattcaatttcgagcatctcgatatgttacgggactgaatcttacatccgagtaaaaagatattgtcgtttgaatttgctcagagcatcaacattcaatttcaagcatctcgatacatgacgggactgaatcagacattcgagtaaaaagttattgtcgtttgaatttgctcagagcatgaacattcaatttcgagcgtctcgatatattacgggactcaatcaaacatccgagtaaaaagatattgtcgtttgaatttgcttagagcatcaacattcaatttcgagcacctcgatatgtgacgggactgaatcagacatccgagtaaaaagttattgtcgcttgaattggctcagagcttcaacattcaatttcgagcgtctcgatatgtgacgggac

SEQ ID NO: 277670 - DNA, 383 bp, Glycine max
  unsure (1)..(383): unsure at all n locations
agtatcttaccacactctntacttctgattcttgttatatttgagttgaggaaacaatgcttagtgtcccagtcccactatatgtgtgggttttatgttttaattcaaactttgtcttcaaatctttcaaacatttaaaaaattaagaatcaatatctactcagatttctaaatttaacaatcctacttgagagaccatttgtttgtgacaatatggcttcttttttttttaatctttttctgatcttattattctgcagtcagttgcaactttcttcagtcaagttatggctaagattggtggaaacactgctggcccaggtacataataaacttcaatgaattgtgtgccagtttgctgactctgtaatgtgactaattga

SEQ ID NO: 277671 - DNA, 275 bp, Glycine max
tgactatgtaacatcacttacatgtcacaccttcacattaatcatgtattcaaaataacacatcttaagtacaacacatcatctcatactgaaacaattcattactcaccatcatggaacaggtgacaataatcattataccagcgttctgcaagagatatactaggactcagtcatatatgcagtgaggtaccatgtcagggaacaacctcatcgagcgcctaggagtagatgacaaaacaaatcacacactgggaaggcaggacactctcact

SEQ ID NO: 277672 - DNA, 393 bp, Glycine max
  unsure (1)..(393): unsure at all n locations
ntactgaaagagatcactcctcgatgtaccaaggttgaattgcatgatcctcaatggttagatacaatgaaggaagaatacatggttctgacgcagaataaaacatgggatctcgtccctttgcctcctcataggaaggctattggttctaaatggatatatcggttgaaatacaatgttgatggctctgtagccagacataaagctagactggtagctcaggggtattctcaacgaccaggacttgattataatgagacattcagtcccgttatcaaacacgtaaccattcgaacggtcttgagcattgctgtcaccagaaaatggaatatacgacaagtagacgttaacaatgctttcctaaatggttccattcaagaggaagtatatatg

SEQ ID NO: 277673 - DNA, 386 bp, Glycine max
agcttctacttatatactgcaaccataatataagctttctgtttttccctcccatggatgtagcctttctcaaggtgaaccacgtaatcctgtgtttgttctttctcattcttctctctttcacctttgttgcacaattctgcgtgtatgatatttctgttctgctacatctactgctgctgttcttgtttgttcttcatcacttccataacaaactggtatcaagagctctagttgcgatcaagggaattcaagattctcgtctgaatacaaagatcaagctgtgggagtcttgtttctggttctttcgctgcttctttgtgatcaagaacattcaagaaatcatgtcaaacacaatcaggattgagaacatcaatggaaagaat

SEQ ID NO: 277674 - DNA, 455 bp, Glycine max
  unsure (1)..(455): unsure at all n locations
ntannaattgaattaaaacgttcagaaactgctgtgtaatctattaccatatatgtgtaatcgattacacagtgcaaattttgaattcaaattttaatagctgttgtaaatcagttttggccattggtaatcgattacatcctctggtaatcgattaccagagagtaaatttgttgaaaaagactttttaacttaaatttcttggccaaaccttttgctacttcaattggaattcctttcctatttaatataccctttctaagactctagagactatcttgatcatccatcttgaatatctttaatttctttgtcttgaataaagctttgagatgcatgtgaaactttggcatcatccaaacattcaacttgatcctttgtctacaatctcccncttttgatgatgagcaatcctgaaatcaagacaagctatatacaagatgatagcacgttca

SEQ ID NO: 277675 - DNA, 283 bp, Glycine max
ggctgcagctatgagtttccacccattatgtaatctctcttgaacaacttgatctttcatcttgttcaagtcttgagagttttccagaaattttaggaaagatggaaaatataacacagcttgagttgaagtacactcctttaaaagaattcccattttcattcaaaaatcttgctcgacttcgagatttagtgctggttgactgtggaaatgttcagctaccgaatagcattgtcatgttgccagaactggctcaaatttatgctctgggatgcaaagggtt

SEQ ID NO: 277676 - DNA, 456 bp, Glycine max
  unsure (1)..(456): unsure at all n locations
tattcgttgatgacatgcatggaaacaataaatggggacgtgaaaacagagataacaagtgtgctgtaccatgaaatggtgcacgtttggcagtggaatggggatggtcgtgctcctgctggattaatataaaaactgttactatttatcaaaaactctgntgatttcagaacacaaacaattgtctacatatttttatttttaaagaatgtcactactcaagtgctacttttctttaactaagaacagaatttccatcaattcctactgcacccaactagttgtcattttatagcattaacacctaaaattttccaaacaattaagcatacaaagtcagtattctccccatggtctaaaagagcatagtagaaatatttccaaagaaacaagacaattgtgtttaagagcaaaggtaacgccatttacatgatagggtttgtcaagagtttacct

SEQ ID NO: 277677 - DNA, 332 bp, Glycine max
agcttctagccaaatggacttatcttgaattaattcctttgattgcccctttgagcctatgttaccctttctttgtgttgaagctcattacaagccttatgtgaaaaaccatgatatcaccttacccttaaggaattctggagctttggaattgtcttgggaataagctgggaataagtgtgggggggtatgtttcattggaagatataattcttggccatgcttaatgtttattctggccatacttcatgtatatatatatagcctacttcttgctttaatcttcaatctataaaaaaaacgaaaaaaaaaaattcaattgctgcaaattc

SEQ ID NO: 277678 - DNA, 432 bp, Glycine max
cttgatggtgtcgagaagaaatcacatgtttgtcatcatcaaaaagggggagaatgtgaatgtatgtatacatgattttgatgatgtcaaagaagaatctaacaaggctacttcaaatgataagcatttgcttcaagaataattcaagattgcttcaacaaacaaagccttgtttcaagattcactaaagaccaagccttgccttataacaaagtgctttcaagacatgcaaggctctggtaatcgattaccaggaagtgtaatcgattacccgaagcagggttgagaaatagctgttgaaaaaggttttgaatttgaattttcaacatgtaatcgattaccatatgtctgtaatcgattaccagcaacgaaactttggaaattcatattcaaaagtcataacccttcatattataactgtgtaatcgatta

SEQ ID NO: 277679 - DNA, 395 bp, Glycine max
agcttcaaattaatatttttaaattatacgtaccaatgcattaattatccaaaaatttggttgcaaaattaatctttcatgtttttctaacagctattgtttttcactacgtacttattgctatatgtttataatacttttgaaataatagtatgcatattttaaaactcgaagtatatcttcatgtaatttaagtattggaggtcaaaatattttgtttttattatgacaaacaatgatgatgcacaccccatattggccacccacgtcccagtattcaaaaagcatcaaaatgtggcagccaaaccaagatcccaccaattgataacaccaccaagaattagatagattatcttcctaattaaaggctagataattttcatttttcttttttt

SEQ ID NO: 277680 - DNA, 426 bp, Glycine max
  unsure (1)..(426): unsure at all n locations
agtggtatcagagcacaagagcttcaagtaggttctcctcaaacctctattaattttcagctttaccttctccttcattgttgtttcttcatttttctccatgtatctcctcatatgtcttgtgctaaatgttgttaacatgattttttagaatttccaccgattaaacttgctatagaagctagatttgtttntctatggctaaaatttcttgttcttgttcttgaaccatgaattgtgttgagtttaggttcctttgagttttgttttgctattttttgtgactgaaacctaaaccataaaattcttacacaaaaattaaagtagaagaaaatctccaaaatctagagtgacttgttcacctattgtagttttgtcatagaagtcatgtctagtcatgaaacatgtcacataagaatccttatg

SEQ ID NO: 277681 - DNA, 338 bp, Glycine max
agcttcaacattcaatttcgaccgtcttgatatgttaagggactcaatcagacatccgagaaaaaagttattgtcgtttgagttggctcagaacttcaacattcaatttcgaccgtctcgatatgttaagggactcaatcaaacatccgagtaaaaagttatggtcctttgtattggctcaaagcttcaacattcaatttcgagcgtctcgatatgttacgggactcaatcagacatccgagaaaaaagttatcgtcgtttgagttggctcaaagcttcaacattcaatttcgagcgtctcgatatgttacgggactcaatcagacatccgagtaaaa

SEQ ID NO: 277682 - DNA, 430 bp, Glycine max
  unsure (1)..(430): unsure at all n locations
tgagccaactcanacgataataactttntactcggatgtctgattgagtcccgtaacatatcgagacgctcgaaattgaatgttgaacctctgagccaattcaaacgacaataacttttttcacggatgtctgattgagtcccgtaacatattgagacgctcgaaattgaatgttgaacctctgagcaaattcaaacgacaatatacttttactcggatgtctgattgagtcccgtaacatatcgagacgctcgaaattgaatgttgaagctctgagccaatacaaacgaccataactttttactcggatgtctgattgagtcccgtaacatatcgagacgctcgaaaatgaatggtgaagctctgagccaattcaaacgaccataactttttactcggatgtctgattgagtcccgtacatatcgagac

SEQ ID NO: 277683 - DNA, 308 bp, Glycine max
agcttgtaggaaattcaaacgacaataactttttactcggatgtccgattgaatcgggtaatatatcgagacgctcaaaattgagactagaagctctgagcaaaatgaaatgacaatatacttatacacggatgtccgggtgagtcccgtaatatatcgagacgctccaaattgaaacggaaactcttagaaaattcaacgacaataactttttactcggatgcccgacagattgccgtaatttatcgagagatgctccaaattgaaaacagaagctcgtatcaaatacaaacgacaataacttttta

SEQ ID NO: 277684 - DNA, 447 bp, Glycine max
  unsure (1)..(447): unsure at all n locations
ntcacaatatccaaacaattcaatcccatttgtcatgaatctaccttaaacaatgaaaaacagagtggaggcaaaaatctttgcacaagattcattcaaactccatagagttttttcctaccctcatacctcagcaaaatcctctttgtttcgattcgttaaccattggattaccttgaaaatttaacaaggggttcctaatacagaaatctaaattttgaccgttgggatctgctagaaaatgtctagaacacgagatatactacctttcctgtgacagcaaaaactagaactgcacaaccatttttttctgcataattggcagaatttgctgcaggcaccaggcaccaagtcaataatgaattccacttctctcttaggtggtaattcacanatgtcatcaagaaagacctctgggaattcctgacaccaccgtatactggtaac

SEQ ID NO: 277685 - DNA, 380 bp, Glycine max
agcttgccacccagctcgcccaggcgagctatgttgcttccttcagaagcaaccgccttctggaggaattttttggaaggccaaagtgggcctgggtgctatttgcacccccatttttactaaatacacccccttgctcttttttggtaattctttttccgtaactttacgaaactttacgaattttgtaacgatgcttgttttctttccgtaatgttacgaaaccttacggattatgtaatcatcccctttttgccttccagaacgttacaaaactttatggattgcgcactaacacttccttttaatttcaggcatgtcacggaacttcacggattgtgtacaatgccttgttttgactttggatgtcacaaacttca

SEQ ID NO: 277686 - DNA, 300 bp, Glycine max
  unsure (1)..(300): unsure at all n locations
ngagatgaggaagtgttgaagggtgaaacttcctgctnttattgttgaccacagagtggtacctggagatatgtcgtgggggtcaggagaccttggggacgtcaggtggggtgctattgcccaaaaccaagcttgaccaatcccgacccaacccgggcatagtcggtaagtgagaacctgtgatgtacctaaacaggcgagctcctggcagtcaacagataaaaggaacaaagaccacaaagcaaggaggcttgtggtggctggccagctgtgaattttgtgtgatatatgggttgtggc

SEQ ID NO: 277687 - DNA, 444 bp, Glycine max
  unsure (1)..(444): unsure at all n locations
agcttcaccaccaaccaagtgccttggatattaagcctatagaggaagcttcaacggaggaagagaatgagagagagagagagtgacatggaaattgaaggagaatagggataaaagttgaactttgaagtgtgtctcacaagtttcttattcatcaaagttatgacaagggttacacatttttctatgtatagcctaggtcattgttgtgaatttcatttttatttcatgcgaatctaaaaggaatattccaagaatataccaaaaacatcttatcatattccctttagataccacaagcatggaaggtgtgactctagcacatgaaaaacttccttgggaagtaagaaaggttccttgagaagctagagggggggggacatgatgtaagctccattggagctngtangcctangatcttcttcatcaatggattcctttgct

SEQ ID NO: 277688 - DNA, 288 bp, Glycine max
tctaagggaagagagagatcaatcacgagtacatagcatgttcttaaaggaggagttagcggagttagctgcttgctcaagatccaagaggagtttgacccaacacttagaagccacagagcaaagcatgctagctataatagggcagtacaaagaggagctaaaccaatctttggctcatgagcaaaagctagtagaggacttcgcacaagcatacgccgagaaggaggcaagagggagggtgattgatgcattgcatcaagaagcgaccatgtggatggataggtt

SEQ ID NO: 277689 - DNA, 401 bp, Glycine max
  unsure (1)..(401): unsure at all n locations
agcttgcatttggaattgcgaaagccccctcttcaccattaggatntgttcctgccatctcaaacaaacaaatcaaacgtaacaagacaattatagttgttgtttgaatacctcacccactcaagtgtatcacacaattatggcttttctccaatgaaacactcttgccttttaccactctaattccccttgagttcttaggcaattcaagagattatggccacaacaaagaacaattcaccaatatgtgtaaggtaaggctagagagacaaggaaaaggttaaccaagaaaaaggctaacaatgtttttaggcacaaatgaaggaaattaaattcagaatttacgaattcaagttacaattcttcatgcgaccaatatattaccttaaagagatattttt

SEQ ID NO: 277690 - DNA, 379 bp, Glycine max
  unsure (1)..(379): unsure at all n locations
ntatgtgttgtcatgttgagtgtgtgggaagctgagtatctaatccttatccaatggcagctttccccctctctctctttctctgtactatatgtatgtatatgcagcgactgagaaaaatacttagcacttctctattgtcttgtgtatctcaaatctttcagcaatttagtcctatatttataacatgtattagagcgggtacgatcccgttttgactgtctacattcgacgccgccgttcgccgtccgccgccgtcaaattttctggcaaaaccagggttgggtgcgcctcgaggagcacgacccacccctgcaagttgcgtgaccagcagcacagccacgcgccaccacagcagcgcctcgtttctggcgcgtga

SEQ ID NO: 277691 - DNA, 416 bp, Glycine max
ctgcaagcttgcggatttggtcttcgccagtgaaaggatcgaagtggatctgaaaagaggcaaatttaatcatcctgcttagacgaatgagaaaactggggcaaataaagagggtgaggatgagggagaaacccatgatgtgactgccattcctatacggccaagtttcccaccaaacccaacaatgtcattactcagtcaataacaaaccaccttcttacccaccacccagttatccacaaaggccatccctaaatcaaccacaaagcctgtctaccgcactttcaatgacgaagaccacctttagcacaaaccaaaaaaaacaccaaccaagaaatgatatttgcagcgaaaagcctgtaggattcaccccaaattccggtgcatatgctaacttgctcccatatttacttgat

SEQ ID NO: 277692 - DNA, 369 bp, Glycine max
  unsure (1)..(369): unsure at all n locations
ntacagcagaatttagtaatgacccactaacctagaattattatatcttaatgccattaacctagggaattaaaacaaactaaatggctgagtgtaactgaaattgttggcaaccaaaagtcacccccaacagccaacaagtcagccaccatttggtctcccaaaaggctgatgcctatgttgccaattgggcccttattacaacttgaactaaagcccttttagttgattaacccaaaacatatttttggtcagccaactttacaaggattgggccattatttagacaaactaaacactctaaaattgaaataaagtggtgtcatttagtcctcctttgggccatgatacaactcacaaccttggact

SEQ ID NO: 277693 - DNA, 584 bp, Glycine max
  unsure (1)..(584): unsure at all n locations
gtgagcttagtcctattatcaacataaaggcattcactcgctcgtctattataactgtgtctaaaaaannnnnaaggggaagggggagnntttgaaacctgagcacctttcgagatccncgagagncaccanagagcaccgagcctgcaaacgcgagatcaagaaagcaataaatagttatctgaagcctcagtgaggcagaacttgggcagggagaaacaacgatgatggcggccaacagctataggaaacaccaagaacagtctgtgggaaggaaatcgcaccgcactaaaaatagtgcgcatataggaaaaccacaaggatatcttcatgataaccaaggagtggaggtcaaaataaattgactttataatgacacacattgatgacgcactacactgcatgtgcccgaccgtcacagcattcagaaagcatcaaaatgaggcagccagaccaagatccccccagtagataacaccaccaaggaatagatgaaagatggtcctaactaaacgctagaaatattcattttctttcctgcgatgcaggctactgaagggagagggaatgttgtggacgaaaaa

SEQ ID NO: 277694 - DNA, 341 bp, Glycine max
cttcttactgatggtatacacatgcatgtgttcattcttatttgtatacaaatatctatgatatgattggtagaatatatatgaaaaatctccaagagtgtctcgattttatcttagaatatgttatcacagcacatcttacttcatcttatctctcgaggatccttagggatcttatcttatctctaggaagttaggtgttttgtgaaattaacgtctagtattagtataaataagtgttaatgcttcatgttgatcatctaactgtatcacatcactatatgaagaaaatattatgtgaaggcttccttctctcaattcctttcctcagtatctataac

SEQ ID NO: 277695 - DNA, 285 bp, Glycine max
tcagctgtagaagtcaatttcgagcgtatactagattctttactcaagcagacatccgagcaatacattactgtcgttggaattagctcagagcttcagaattcattttcgatcgtctcgatatattacgggtctcaatcagacatctgagtaaaaaagttattatcgttcgaatatgctgagagcttcatcattcaatatcgagcgtctcgatgttctatgggacttaatcagacatgcgagtaaaaagctattgccgattgaatacgctgagagctgcaacat

SEQ ID NO: 277696 - DNA, 413 bp, Glycine max
  unsure (1)..(413): unsure at all n locations
atctaaagcattctagtaacaggcaagagagtgtggatctgttcctcatcctgacacaagatactgaacctggataagtccgcacatcaaggtgagcctcacaagtacggtgcatacactagatagaacaggctttcactagatgatcatggtatgacgacgacattataggtggacttactgtcttagaagcatttggaaacatgttcttgagctgttgcatcacaaaacttgcagctgcttcatcatatagttgctcaatgtcggaagcgaaccttctcagctccatgtagacaagaacacgatggcctagtgctttgtgaccattgaaaaatatcctctagtattaaaggtctgaagcacacntgccaagagtgtttcattagggcacaagactttgtgagatctttacg

SEQ ID NO: 277697 - DNA, 232 bp, Glycine max
tgcatgcctctctcattcatttccatgcctattgcagtctagaccaagtgtcatacatcagtatagtgtttcgagccatcacattatatctacagaacttgggttcctatctatgggaaattccttacttgacgaacatagcttcattctcgccctcgtcatcaacatccttcacgactatattcttttgaccactaatgatgtgtaacactgcatggtcatagctgcatgt

SEQ ID NO: 277698 - DNA, 264 bp, Glycine max
  unsure (1)..(264): unsure at all n locations
agctttgtggagtagaaacctgtgaccaactcattntatttcaaaaaggaagtcatatctagtcaaggtctgagagaccatacaagtttcctaacgattactaattatgtgggccattaagtctatcatatgctgacaatagccgagaagcccatgaatctctctagcggcggagtatgtgtctgccatcgccttggccttggctaacaatcggggaagttcttgactcccgttcaatgttagagcaaaccgatccatccacat

SEQ ID NO: 277699 - DNA, 352 bp, Glycine max
  unsure (1)..(352): unsure at all n locations
nganatgaggaagtgtggaagggtgagacttcctacttttattcgttgaccacagagtggtacctggagatatgtcgcgggggtcagaagaccttggggacgtcaggtggggtgctattgcccaaaaccaagcttgaccaatcccgacccaacccaggcatagtcagtcagtgagaacctgtgatgtacctaaacaggcgagctcctggcagttaaccgataaaagaacaaagaccacaaagcaaggaggcttgtgtggtggctggccaactgtgaatcttgagtgatatatgggatatggcctctggtaatcgattaccaagggtaggtaatcgattacaaggcttaaaaa

SEQ ID NO: 277700 - DNA, 238 bp, Glycine max
agcttttgagaaattcaaatggtcattacttttcactcggttgtcagattcaggcgtataatatatcgagacgctcaaaatagaacagtggaagctattgagcgagagaaatggtcataactgttcactcggaggtccgattcaagcacataatatatcgagaggcccgaaattgaacaacagaagctcttgaaaaattcgaatggccaattctttacactcggatgtccgatcaggc

SEQ ID NO: 277701 - DNA, 350 bp, Glycine max
aacgctagacgaaatatatatgggaattgaggttacaatggcggttatgacggaccgaggcaaaaccgggttgatggagtaaagctcaatgttcctcccttcaaaggtagaagtgacccatatgcctacctggactgggaaatgaagactgagcacgtatttgcctgcattgactacactgatgcgcataaagtcaagctagcagcagccgaattctccgactatgcccttgcttggtggcatatataccatatagatatgttgagagaggaacggcgagaggtagatacatggactgagatgaaaagggtgatgagaaaatagcatgtgcccactagctatatcagaac

SEQ ID NO: 277702 - DNA, 347 bp, Glycine max
  unsure (1)..(347): unsure at all n locations
agctttaaaacatattagacttttntttgttactgaaaaatcactagaaattatttcattacttcaagcccggtttcgatggtatggggacgtctgcgagattcaaaactaagaacttttttttggtgctgaaaactgaggatttagttgttttttttcttttggttaagaagattcttaagatgaaaggtttgaagtataataaaattaagttagaaaactattttgaaaatattaaagtatacctgaataatagtatatcttttataagttattgattaaagcatatgtaaccaaagaaaaagntacgattaaaatcccctttcatcatcttcttcacatatctg

SEQ ID NO: 277703 - DNA, 466 bp, Glycine max
  unsure (1)..(466): unsure at all n locations
ngcaactttctcagcagccacgtaacacaacacttcatggccttcatccttctcttccaccttaacctcaaccctcttcttcttctgctcacattccccatacacctcttcctcagcttcatcatcatcttcatcaatttcaacaacctcaaaaggaccatcatcctcactctctcccagaaactcaaaacccctttccatagatttttcaatcttcgcactcgcaccttcacctccacccttgagttctttcacgaaaaccaattcatcatcatcgtaatccaccactctcctcctcttccgactcctgatcaaaccaccccgaacctcgactcctttgcttcgcgtcctacgagctggtccagtatactcattcatttcaaacaacaaaaccaacacanaaaaaagacccttttctntcctgtttcttcgaacaataatcagaaacaccccacaacgcaagatc

SEQ ID NO: 277704 - DNA, 534 bp, Glycine max
aaactttatatatcgatatcactcttcccaaaaccaacgtcatatccgaccacatgaacctgaaaacgtgacccgttgtgaaccgggacctctaagcgactgcagcatgcagcttgactgtttaaagtggtatgatctcaaaagcacttaaatctgaatcttagtgctgaattttaacacttataaatgagtcagcaaactatcaaccgccaatttctcataaaatgtgactaaaataggcattcttattgccaatctacaagtgtgacttatcaagacactcagcgaaaatatgacttataaaagcactattattgccaaccgaaatttaaatcgacagaaagatagagggagaaactttaccggaattgcatcagctcgtttatcggacggagaacgaaatagtgaggaaatggccctcacaccggggcatggaagaaagaataacacgacacttcttctagataaacagtggaacactctttcaggggtatatctcgagcgaaaggggacactgaaacttccgttatcccc

SEQ ID NO: 277705 - DNA, 336 bp, Glycine max
  unsure (1)..(336): unsure at all n locations
cttgatattacatctaaaattcagtgtcaatatttaattgtttatctgaactagaatgtgatccgcgattgttgaatcggatggtccacgctcaattttgatgacttgcataagactggtatttattcttgggattatttctatcatctaggaagcaacaagtttacccttatgagaaattacattaaaactctgaagaaatatgggcttagtcgggatccacgtggaaggaaatgatgcagacttcagttaatcacccanatgtaatttgagatttggtggcagttgtcaattatcaacatgacactctgatagcttcatttgttgaaagtgaaa

SEQ ID NO: 277706 - DNA, 323 bp, Glycine max
agcttgaagaactacaaagttcacttgaagttcatgagcagagattaagagaaaggaatcctgagaagcacaatgatcaagccttacaagctcaaacaagcagaaagtttgacaagcaaggagacaaatccaaaaagaacaaaggaaagtggcgtgatgagaagtggagaaagactgaagattcaaaatgtggtgattctggatcatcttcacagaaagctgtgtcaaatccaagaagccaattctcagagaaaaagaaatggatcgacaagaagaaggtgcagtgttacaactgcttgaactttggccatttgcagctgatt

SEQ ID NO: 277707 - DNA, 383 bp, Glycine max
  unsure (1)..(383): unsure at all n locations
tgcaatggaccatgcatcctttgaaacaatactgaattccgtatttttctcgcaaaaatatcaacactcacactctaatcgccatgtatttataaacataaatctacaataaaaaaaatcaatcttaatagtaatctaggatttgagacttccctagaagttaaaagacattcaagataattattaaactcgtaaatactacttggtacgaataagtaacctaactaagcacaaaacttatttggggcctattttggatacaaaacaagtattttttgacaactttttttgaaaacataaaactttttcaatagagaagctctcaagagcactnttaaccttgtatccaaaccgactttaatgtaagactaaactagatggat

SEQ ID NO: 277708 - DNA, 389 bp, Glycine max
  unsure (1)..(389): unsure at all n locations
agctttgagccaaaatcctgactcaccatattccttgacccagggtgagaatgtcaattcttaccctcggaagcaaaaaaaaaggggagagggaaaatttccaatcaaagaggaagcaaaaaaggagagaaggaaaatttccaatcaaaggaaaaaaagagaagaaagggaattcccaatcaaagagtgggagaaagcaaaaagaaaagaaagaaaattcccaatcaaagaatgggagaaagaaaaaagagaagaagaaagggaagaaagttcccgatcaaaaaaaaataatatgcagaaaggtctttggaccggacaatatctgaacaatacagaattgcaccaaatgaataanaagaggaaagggaaccatgacctanaatggtctt

SEQ ID NO: 277709 - DNA, 292 bp, Glycine max
  unsure (1)..(292): unsure at all n locations
nnttggagtagaaacatgggaccaactcattntattttcataaagaaagtcgtatctagtcaagatctgagagaccatacaagtttcctaacgatttctaattatgtgggccattaagtctatcatatgctgacaatagccgagaagcccatgaatctcttcgaaggcggagtaggtgtccgccatcgccttggccttggctaacaagcggggaagttcttgactcccgttcaaggtaagagcaaaccgatccatccacatggttgcctcttggtgtaaagagtcgatcacc

SEQ ID NO: 277710 - DNA, 409 bp, Glycine max
tctaagcgactgcagcatgcaagcttgtagagttaagtctcatatccggttattcgattattgatatctcataatcaattacactgtttgttgaggcaatgactaatttagtcaggaatctctgctttaatcgattaccaagtggattaatcgattacttttctcttgttcaagtgtttagaggtgaacaagaacactttaatcaattacttaggtcatctaatcgactacatagttcttgagttgttttctagatgttggatgtacactttagtcgatcacttagataatctaataaattactttgttaatataatccattaccttttagatttaatcgattcatgccggtataactgttatttctataattacccactttgagtcacatctatacatcatgagaata

SEQ ID NO: 277711 - DNA, 315 bp, Glycine max
tataagaacataactgcctatatcatttgcaaatatgcatgtgaactatgaagcatcaacaagaatcaagccaaggctattgtgcaagcaatcaatggggcataacacaccaaaagattatgatgatggatggctcaaattctcacaaaggtgaacttatcactttcaaattgagctttcaaaactatcatgacatgtagaggaaaaacaaggatttcaaatcacaaaatgtcaagagacttttattctcagaacaactacccattacttgaacatatcctataattcaaagaaaaatatgcaaagttgtacatg

SEQ ID NO: 277712 - DNA, 351 bp, Glycine max
  unsure (1)..(351): unsure at all n locations
agcttgactaggcgagttgattttagccttattttcactcttagttattagtcaattcggttaagaatgagaaatcccaaagagaaaatgtctggttgattttccgctctattttactaaaaggtatatttttgttattatattattatattattattttatctctttttgatttccaacgtggttacggcacgaccgaacggtcggaatttatattaaccaaagtttacggatcatacaattcaaacgttcggtggaaatntattttatttttaagttaagcgagaaatgacttaagtaaaatggcttaagcacgtcaacagggggtattaaaagtaaatgatatgagaa

SEQ ID NO: 277713 - DNA, 399 bp, Glycine max
cacattatataccttcggatatgagaattgatccttctctacagtttatagatgaccactacattacatgcacacagtcataaatcaagcatgagagactatatacattttccacatcttagaaactaaaactagtaaatgttaattcataggactataaaagatacatgctaaatctaagagattaaatacatattgaaatctatgttaaaaattgaccttaatttctaaagctagacttgctaacaagagtgaacaagagcagagacagtgtgtcacacatgtcttcttctgtgcatttcgtcaccatttctcgttaaagtcgggctccaactctaaccactaatgtattccttgaaattcgcatatctcaaggaataaaatcttaaagtagtctat

SEQ ID NO: 277714 - DNA, 383 bp, Glycine max
  unsure (1)..(383): unsure at all n locations
agctgggttntgggcaatggcaccccaccttacgtccttaaggtctcctgacccctgcgacatatctccaggtaccactctgtggtcaacgaataaaagcaggaagtttcacccttctacacttcctcaactcaagcttgtaggattatggggtacccatcacatgtggtactaggtggcggtcgggcgatggtgcacaacaagttttccacatccacaaagcgcgcataaacccaccatcccctgttgcccacctccatctgagctcacgtactcccatgtagcccatatcctcgtttctctcaacaccgggtccccatcaatcctcccaagcttccacaacatccaagcaaaacaacattcaaacagcacaagctatcaca

SEQ ID NO: 277715 - DNA, 473 bp, Glycine max
  unsure (1)..(473): unsure at all n locations
actaagctttacatgccttcaatgagatgcatgaagaggctaaaaaattatcttatgccaacaactatctcaagggaaagttgagatgacacgtggataagatacttagttgtcaaaaaaagttatctagttagaaattgaaaaatgaagaacttgaaaaagccctaaaaaactcttcttgcaatgacaaaactatctccacatcttctcctcccaatgtgaaatgtgcaaggcacttaaatcaaaaaatgggtatttactaaaaaaccttatccaaattcacaacgggaagagataatctagatgcattttttgcacaacaaaagtgcatgtttaacaaagagggaattggctttatatttaacaagaaacaaaagtcttttaaaaatatcttcaactntgtcaaaacatctagcaaccctttcacaacatgtcactattgcatgcataagggccattcctctaaaactcgt

SEQ ID NO: 277716 - DNA, 302 bp, Glycine max
  unsure (1)..(302): unsure at all n locations
nttatatgtgcaattaataaaaagttatcctagtgtagtcgtggatgtaggcacatacattgtgtgttgatccacgttaaaacttgtgtcttttctctcttccctttattcatttctcttcttttattgctctatactaacattcctcaccatgacaacattggccaaccaagtcgagtatctgacttctatgatgagctggactttgagtagcttgtcaatctctcctcatattgctttacatagttcttctcccatctaccttttcttttgtgatactggtttggcttgagggcagttaa

SEQ ID NO: 277717 - DNA, 216 bp, Glycine max
ttccaggactcctgaatgatgacggcattggctcatatcctggttaagtggtggacttctgtccactcatgtggtgctcgacaagccaccatgggatgactgcatttctggagctactacttggggggaggcaatagttggcgctgacggacacatgtggagtgagctgcttggtcgtaccaagacaggctggctaacatactgagctgaccaatt

SEQ ID NO: 277718 - DNA, 598 bp, Glycine max
  unsure (1)..(598): unsure at all n locations
aagcatagtcaacatgngtggcactacngntgatgcagtgattactgtgcgtatatttgtataaantgtanataatanaaaagttcaaggaaggnnaattgatttcatgnacatgccatacacgcgacactatcgaanacctcagcttaatcatgagttcattaccactggaatgcatatgttgaattaagcacatcgtgtaaaaacaaggcaaagacgtcgaactagtaagtaattttttgttaacacgacatatggaacctacgacagttccataccttgctcttttataatcactccaccatgtccgcatatgcattaaataagatgtgacttacaattgattatgaatcgatattcaatccacaaaagaaagcggactcaaaaccgagaacaaagtgcctgaatactgtatagctggtatattcatatttacactttagctaacatctagagcttcatggttgcttttattgtagtcttgatcacaatatatacgctcatttaagatagacggcataataattgcattttatgacaacacaaaattatagccggctgcgccatgacgaaaaaggaggaaatctaccggcaacag

SEQ ID NO: 277719 - DNA, 378 bp, Glycine max
agcttagccctagaggggatggtctcttctatgttttgaagaggatcaataacaatgcctataggttggacctccaagaagagtatggagtcagcaccacttttaacatttccgatttaattccttttgcaggtggagctgatattgaggcggaggaactaacagatttgaggtcaaatcctcttcaagggggaggggatgatgcaatcctccctaggaagggaccagtcactagagccatgagcaagaggctccaagaggattgggctagagctgctgaagaaggccctatggttctcatgaaccttagggtagatttcttcatgctttacatgtttcatgacacctatgcacacttagtggagaatcttggacttg

SEQ ID NO: 277720 - DNA, 346 bp, Glycine max
tctcgatatattacgtcccaaattcggacatccgtgtgatatgttatgaccattcgaatttctctagagcttccattgttcaatttcgagagtctagatgagttatgtacgcgaatcggacatccgtgtgaaaagttatgaccattcgaatttctcgagagcttccgttgttcaatttctagcgtctagatgagttatgtacgcgaatcggacatccgtgtgaaaagttatgaccattcaaatatctcgagtgcttccgttgtgcattttcgagcatctcgatatattatgtcccccaattcagacatccgtgtgaaaagttatgaccattcgaattctcgagagc

SEQ ID NO: 277721 - DNA, 414 bp, Glycine max
  unsure (1)..(414): unsure at all n locations
agcttgtgctggtttattntaattcctatgtttatgagcaaactaggcatattcaaactatgacttaagaaacataggcgaataaataacaagctgaattttaaaagatactaggctgcctcctagtagcgcttctttaacgtcttgaaccggacgcgggatgatgatctattgatcacgggcctagcacctgctcgtatatgcccctaagtctttgaaaacaggaaatggcactacacagtaaaatatgactacgctaccacttacttttgctatgaatttggcgtggtattgaccaaatctctacttatcctccgactcacgggatgacaaanatgcatatgcatgcacgctcatgattaggcagttcaagtgcaacaatttaaacgaatgttgatatgttcaatttactta

SEQ ID NO: 277722 - DNA, 404 bp, Glycine max
  unsure (1)..(404): unsure at all n locations
taattagtggtgaaggaacagtggaatcatttaaggttattattttttctgttgncattgataaatttctatatatatcatttcttttgtgtccataaaaaaattatcattttttcgcgctaacagtaacctattggagcctggaaagcaggcaggttgactgaacatgatagagaaattggttgaataggatctgtgttctggctttgagaacagaatgaacgtgtcactttctccaatgcttatagcgtgaatgtgggatgggtactgccagaattacttttgtggataaccgtttgatatgttttttttgtaagttttgataccactgatgggtctttataatactctgtatggacatagtgtgtgagtgtgtgtggttgtcacaagtttttatgaaaaac

SEQ ID NO: 277723 - DNA, 454 bp, Glycine max
  unsure (1)..(454): unsure at all n locations
taacataaggcatgtgaagtgggtggaattcctatagcaattcccttatgttatcaaacataaaaagggaaaaggtaatattgtagccgatgctctttctcggcgtcatgcattactttctatgcttgaaacaaaattgattggtcttgaatgtttgaaaagcatgtatgaaaatgatgaaactgttggagaaatttgtaaaaattgtgaaaaatattcagaaaatggtttctttagacatgaaggctttcttttcaaagaaaacaaattgcgtgtgcctaaatgttctactagaaatttgcttgtttgtgaagcacatgaaggaggtttaatggggcattttggggtccaaaagactctatanacattacaagaacatctttattggcctcatatgaaaaaggatgtgcagaaatattgtgaacatcgcattgtattgtaaaaggcaaagtct

SEQ ID NO: 277724 - DNA, 297 bp, Glycine max
agctatctttggaccttgaacaagctatcaactcctctttcagaaccatgctatgtgctcgcgactggtccctttcttcccttcgcaacttgagttcattattgctaccccgtagagctccgcgaaatttgttccggccatactcttccttgcgagccctcttggtctctcgttcaagggctctgagggaattgcattctattcccgtaacccggcacactacttccgaacgtgtgtggcaaccaacttgaacttctccttggcgagttttgcctatgctaactcgcttttgagagc

SEQ ID NO: 277725 - DNA, 448 bp, Glycine max
  unsure (1)..(448): unsure at all n locations
tcaggctgctcaattgctccaggttgttgcatggaagggcaaaggtctgtatggtggtcagcagaggagcacaaaccacaaactcttgtgacaggaacaaatttctgattcaaggccagctgggttaccaagttaactaatgcatccagtttgccttcaagcttcttagttttagatgatgcagatgggtttgtagctacctcatgcactcctctaatgactatggcatcatttctggcgctaaactgctgggagttggaagccatcttctcaattaaatttctggcttcagcagaagtcatgtctccaagggctccaccactggcagcatctatcatacttctctccatattactgagtccttcataaaaatatnggagaagaagctgctctgaaatctgatggtgggggcaactagaacatagtttcttaaatctctccagtactc

SEQ ID NO: 277726 - DNA, 328 bp, Glycine max
agcttttatgggtgagctctttaatgccatggatacaaggatcacttgactcgaagatgatataagcttcatcaggcgttgcttcgatccccgaccgactcttagttatttttcttatgttttatttccttaagctttgtggttatttctttaagccttgtattttggcttttattgcttaataatttggttattgttgtcttggatgtttaccattttgttttgctgtgcgtttggttattttagactttgttttggatgattaagacttgcttggtttattctatggattgaatcagtttatggatgcattatgctatgaatttga

SEQ ID NO: 277727 - DNA, 395 bp, Glycine max
  unsure (1)..(395): unsure at all n locations
ntatgaagttgtgatgctcaattntcttctctttatagcctttctagcaataatgtatccgtgttaattaaaaaatggcttaaatacatttttctttcttatagttgaatcttaataattttttttggttacagaagaatcttttttcttagtttttgtcattaatgcgttttggtaacattttttttcaatattcaaagtattttttatatgttcaacatgttatctaaaatgcagataaaaaaataaaacaaactgatgcaatcctacccctcaagggcattggatagaagactccaagaagattgagccaaagatgcatgagaaggccttaaggttctcatgagccttagggtagatttcaggcccatgggctaagtatgagctcacttatc

SEQ ID NO: 277728 - DNA, 289 bp, Glycine max
tctttgtgaggtattggtgcaatggcatgtcggcatggcatccctacatcaaaggtgtaaaatcaacacacatggtgggtaggaatgaaaaaaaaaacctataaaaacaccacctgttagttgccatactccacaagtgcatgtccattcacctaaattgacctcaaccttattcccccacatgtggacctcatatctcaggcccatgttatcaccacaccaaatgggagtccattgattaacaaaatggaaattcttttctagtcttttatactgcactggacataat

SEQ ID NO: 277729 - DNA, 333 bp, Glycine max
tccttaagaagattcctaaagaagctagagcttagctacacttacctctctaatagctaagctcacctccttgagatgagaagctagaacttagctacacaccccctataatagctaagctcacccccatgacaaaaaacatgaaaatacaaaaaaaaagtccttactacaaagactactcaaaatgtcccaaaatacaaggctaaaaccctatactactagaatggccaaaatacaaggctaaaacgaaggaaaaacctattctaatatttacaaagataagcgggctcatacttagcccattggctcgaaatctaccctaaggctcatgag

SEQ ID NO: 277730 - DNA, 585 bp, Glycine max
  unsure (1)..(585): unsure at all n locations
ataatccactctgtcgtaacgccgaatactcgactacttcagtaactgtaaatagcgtaacacgcatcctgttgacaaggggaggcnnttganccatgacgaccttcgagancccgagagaccaccaggaggcatgcgcacgcaggcaaccatgctattctccacgcgcatcacaatattctagcacataccttacgctgaatatttagaaagacgagaatatgatgagacaacaatgagccacatcacatgcttacgagaggatgatgtggtaacttgcggaggcctcataagcaaaaaacactccttaattgacatacgcccgatgaacaacaacacctaagaactaaagtcacttgctctctgttagatgcatcacgagtagcataaaccatgaggcaggcgtgtgcattaccaacctcttaacgaagttcatatatcacctaattaccgaacacatgtagaatattttcacggataacgggtgaagaggcctcgctctttgagggaaatacgacaccttcacatattctcctctaaatagaagccaaagagcctatcgttcacagaaagaacactgggtcc

SEQ ID NO: 277731 - DNA, 343 bp, Glycine max
  unsure (1)..(343): unsure at all n locations
gacacttaaatactaagctgtatatgatcccctatcaatgataattcaacattatatattgtgttgctgctatttctgaagaataaatggtgtatgtacgaacaataattctttttatatgttgctatttaatcagaaatgattatacataataaatntattaatatttatcataattatataaaaagttatattaatattttttatattaatgctatatatgcaaattatgacactaataatacatgtgtattaaactcattgtgaaatcttgaacgcttactcattctagttataatgtcacactgaatgtgtggagtaacaagaggtgaaatccaataca

SEQ ID NO: 277732 - DNA, 399 bp, Glycine max
  unsure (1)..(399): unsure at all n locations
tacggacactataaaactcaagctngtaaacgattctatgaaccataccaagttttggaccatattggctaggttgcatacaaacttctattgcctgagagatcccgcattcatcctgctttccattgttccttccttaaacccttccaccaaacatctgaagaatattgtgtcccactagcattgacttccaatgatgttgaaaatcaaccagctatctctcttttagccattctgggcactcattatgcctctgagtctactgatccaaagctaaggtattagttcaatgggcagggttgtctcttgatgacattacatgggaagattgggaagaactcaagactgtctatcaccttgtggacaaagtgtttttggatggcgcaagggatgatagga

SEQ ID NO: 277733 - DNA, 327 bp, Glycine max
  unsure (1)..(327): unsure at all n locations
agctntagatcttntttcattagagcgttgacaaagtttgtctcaataactaggtgaaaaaaactaagataaagaggaaaatgaatagcgccagcaaacccaatatcatcatgatatggccctttgtactagccttcttcatgaccattgacacttatttctgatatcataaacaataagacacacttcaactttcacattcagcattaaaaaattttctccatatattattactaattaatcacaacaatcagccaaatagatcatacattttaatgcaataatgaagactcgaaacataaactcacttggacaaaatctagctag

SEQ ID NO: 277734 - DNA, 463 bp, Glycine max
  unsure (1)..(463): unsure at all n locations
tatacaaactgactcattacctttgttatgcaaacgctattattattatcaagttcagaaggatcaatctcatactccgggacttcacgagcattttgcacatgcatgggagccatctaccaaaaaaaaaaaagaagttcacaattgaaacagatatcataaaccaactattctaaaaagagtttaacaattatgcaatgtcagttgaattgttttatacgtaaaaatcaaccctttttttttactctctaacagtaattccgatattattatagtctttttagtgaataatacaaaagaaaataatagaagaaacttttttgaataatagttacaaattccttcatatntttagagacaaccaacttatatgataatttgtaactaaacatatatcanaaactgctggtatgtgtgttgactttcataatcattatcttaaaagtcatacaaaactactaaa

SEQ ID NO: 277735 - DNA, 443 bp, Glycine max
  unsure (1)..(443): unsure at all n locations
gttctacaaccgagctcagtttagtttgaataacttaactgattgcccttggatttgattgtaacacaattacaaaatagcatataggataatcttctagagccaatatcctcttgccatgcaatcattgtcttggctggacttccttgacgtaatcttgcagatactgaggtttgtntgctacattatttggtttgtgattcatatgtatgctttgtatggtttgctctgctgatgattttgaaatctcttatccacaaataaagttgtatggtggcaataattgcccaactgcatatagtcatagcaattaatatcccttagtgtcacatatcatagtgaaaattataaagctatagtattgaatattgactgactcaaaggaagaataaccaaatacggctacgaatatgagtgtgactgattacttctcagttctcgat

SEQ ID NO: 277736 - DNA, 408 bp, Glycine max
  unsure (1)..(408): unsure at all n locations
agcttctacctgtntctttcatgaatcatgataacacatttgactacccttgatacatagaaaacattataataattaggttagtcaaaggcatgcttgtgtaatacatgaaatgatatgatatggtaggtagcgcacgcaccgtggtactttaggttactatatataatttgttgaaactgtgatttcctcatatagcatcttctctttttcattggtagcttggatagcaatttcaaaacttagtgcttgtgaattgtgattagagtttagagatgtctatacacagaaagaaaatccttatcaaaacttagtgcttgtgaattgtgattggagtttagagatgctatacatataaagaaaattcacttgaatctaacaactcgtattttctgtcgttatataaca

SEQ ID NO: 277737 - DNA, 365 bp, Glycine max
  unsure (1)..(365): unsure at all n locations
tctgggcgagtaatggaatccaggttctccgctcatcttctacttcggggtgccgntatcgctgtcgtcagaatcgatctctttcgacgacctgatggcgctccgacaatggtgaatgcgctttccggcttcactccaatttttttcaatgatgtgcactttgtggacctccccgctgatgtgaacttcaaccgtatgttggaatataagtctccatggggttctgataagaaccctggccttatctagccttcgcaactcttcaacatcgtcatccacctctaccaagtcccctattgttgccacgatttttcgaatttgtccaatatcccacgcttctaatgggatgccccaacactgagccc

SEQ ID NO: 277738 - DNA, 343 bp, Glycine max
  unsure (1)..(343): unsure at all n locations
agcttctggtgggacatcttgacttgctttccaatctgacattcaccacagattctgccttcttctattttcagattgggaatgcctctaacagcacctttgtcaatgattttcttcatgcctcttaagtgcagatgtccaaatctttgatgccatattctgacttcatcttctctggagaatagacatgtggaggagtaactggtttcttgaggtgtccataggtaacagttgtcctttgatctgttgcccttcattaggactttactcttctcattngtcaccaaacattctgactttgtgaagtttacattgaatccttcatcacacagctgactgatgc

SEQ ID NO: 277739 - DNA, 432 bp, Glycine max
  unsure (1)..(432): unsure at all n locations
nncaagaatcaagatcaagattcaagactcaagattcatgtatcaagagaagactcaatcaaaataagtctgaaaaggttctttcaaaaactgagtagcacatggatttttctcaaaacatgtttaccaaagaggttttactctctagtaatcgattaccagattattgtaatcgattaccagtagcaaaatggatttgaaaaagccttcaaatgaatatgtaacgttccaattgatttcaaaaagttgtaatcgattagaatgctttggtaatcaattaccagtgcctttaaacgttgaaattcacatgtgaagagtcacatcctttcacataaaagctctgtgtaatcgaatacactgatttggtaatcgattaccactgatcgtttctgaataaatcaaaagatgttactcttcaaatggttcttgact

SEQ ID NO: 277740 - DNA, 346 bp, Glycine max
agcttcgggttgctcaattgctccaggttgttgcatggaatttcaaaggtctgtatggtggtcaacagaggagcacaaaccacaaacccttgcgacaggtacagatttctgattcaaggccagctgggttaccaagttaaccaatgcatccaatttgccttcaagcttcttagtctcagatgatgcagctgagtttgtagctacctcatgcactcctctaatgactatggcatcatttctggcgctaaactgctgggagttggaagccatcttctcaataaaattcggcttcagctgagtcatgtttcaaggcttcccactgacagatctatcatactctctcata

SEQ ID NO: 277741 - DNA, 392 bp, Glycine max
  unsure (1)..(392): unsure at all n locations
cttgtcctctnttcgtctggaacatgggtataggcaatgctttcaaacactntgaggtgagagatcccgggcttccttccactccatgcttcttgtggtgtcttctcatgcacgctttttgttggggaacagtttgttaggtaaactgcacatgccactgctttagcccaaaactccttcggcatcttcttgctcttgagcatgcttcgcaccatgttaagtatggtccggttctttctctctgctactccattttgttgtggcgatcttggcactgtcagtgggcgacggattccatggtcttcacaatatttgttgaacttaattgaagtgaactctcctcctcgatcagatctcatggccttgatggaaagaccagtttctttctccac

SEQ ID NO: 277742 - DNA, 429 bp, Glycine max
  unsure (1)..(429): unsure at all n locations
atgcgcatatntcattacgaacgttctcttgtccaagacattctattaaccgaagaanatgcacccatatacaatcaaggcagctttgttacctagattatttacacgtgcttccaaggtgtatttgttacttacatcacacacatctccttggctaaattcacatacatgcatactccgagcattttggggtaccaaaaattgcacatgtgcacatcttggtatttctaatacctatacatacacaaatttcatgatgaatcttgactatctacacaataaagtgctacatttcatgcctttttccaagttttcgctacctaaagccgcatgcaaattcaagcatattttcctttgttgactaaaattgtattcaaattatatatatatattttgtggaatatgctgtctttcacatacattcaacat

SEQ ID NO: 277743 - DNA, 336 bp, Glycine max
  unsure (1)..(336): unsure at all n locations
agctntaattctggtaagcatatttgattcaagttgaatcacagaaacaacattacactcaactaaacttccttaagacaatgcatcaaccaccaaattttcttgaccctgcttgtattctatgcaaaaatcaaattccatgagttttactaaccatttctaatggaatgttgtagctaacctctgatccaaaatatacttgaggatcctatgatcggctctaattacaaactacaagatgattgctgcacataagtggataacaattccttctcataagtggatagggactgttgctgcacattcaatctcctactgatgaaagctatatgatga

SEQ ID NO: 277744 - DNA, 399 bp, Glycine max
tctatagaaggttcggtcctaatttctctacaattgcatcacctctcaatgagctggtgaagaagaatgtggcatttacatggggtgaaaaacaggagctcttgttgtagtttatctttagagctcacccctacaggaattccaaggtaaagaaaagggaaattccagttgactgcagttgagagaaaaagctgcctccctacaccagccttcagatttacccagacacccgaattggctcttattgtagtttatctttagaccagaaaccaattcaaagcatttcaagatacactttaaaactctaacattatcattagtggcagccccaaagaacaaggtgtcatttgcatatttaagtatataaacttcctcttttttctatcccacttgatagct

SEQ ID NO: 277745 - DNA, 378 bp, Glycine max
  unsure (1)..(378): unsure at all n locations
agctttaaaatttgaattaaaacgttcaatttctgctcgtaatcgattaccatatatgtgtaatcgattacacagtgcaaatttagaattcaaattttaatagctgttgtaaatcatttttggccactggtaatcgattacatcctctggtaatcgattaccagagagtaaatctcttgaaaaagactttttaacttaaatttcttggccaaatcgtttgctacttcaaataggaattcccttcttatttaatatacccttcctaagactctacagactgtcttgatcatccatcttgaatatctttaatttctttgtcttgaataaagctntgagaaacatgtgatcctttggcatcaatcaaacattcagcttgat

SEQ ID NO: 277746 - DNA, 299 bp, Glycine max
  unsure (1)..(299): unsure at all n locations
ntctcttttgtgcagctatctcatctctcttttctagtgtataatgaagctcgacaggttcatgtgcatgtgctgctactaatggaggcacttgaatatggttgccagacctcaaggtgatggcactcacatttttcggattttgcacaatatgtgaaggcaatttgtcaaagatttgggactgagcttgattcatctgagtagccatctgtcccatctggtttgtcagactctgaatggaggctcttgtctcttgttgaaattgcatattctggatggtcatttgcctcactaactct

SEQ ID NO: 277747 - DNA, 543 bp, Glycine max
gcgcacacgcattacatactacaccctctcttaccacatcatctcatacatcatgtcgatagattgaccctgagcctcggaacccagaactcctgagatgcaacgatccagttaaaggatacagagtcacgtgttatgtgtgacgtaaaagcaaatcacgcgacgcccacaggtattccggtccagggcatttggaatggactcacgcaactaacattgaatgattggatttaaccgccaaccaataaccggcataaaaggtgactgcacagaaactgtttcacagcgccacaagaaaacgtgcaacaaagtcatgaccgtattatcgatgctggtaattctcactacttaaaaataatgaggacggagaaatggctactctacattcaaaggacagctgggtgattagctgatacgatattaaacacaattattttcacataggatactaatttatgtgaggggtcatagaaactattcttcttcaatgttgataaattatacatagcaccgctaatactggcagaagaaggtatcattccg

SEQ ID NO: 277748 - DNA, 418 bp, Glycine max
ctaagctttatagacctatactctggctatatctatagtcaatttgttatctcatcacatactgtttttatgaatgcttagtctcactagggttatctatagtcaatgtgagatctcaacacatactgtttttatgaatgcttagtctcactagggttgactacatttttctttgaatgagctctgtcatcaagattttgtacagcttttatgtatatcaccttatgtagcatacgttttggcttgaaaatgctgtgtttctaggagttctatagtttggttatcttgtctttgcatcttttaattgccttgtggatctgtcttcattctttatgagacagacaaggaatttgttgaagaaagggatagatactattggtagacaacaagcattcctcaaaataataaaaataatgtt

SEQ ID NO: 277749 - DNA, 409 bp, Glycine max
  unsure (1)..(409): unsure at all n locations
agctngtcactggtaatcgattatcaaatccttgtaatctattacacaaagcttttatgaaaggatgtgactcttcacacttgattttgaatttcaacgttcagatacactggtaatcgattaccaatatcttgtaatcgattacacccttttgaaatcaattggaacgttgcaaattcagttaaaagcttttgaaatcaaactttgtcactgttaaccgattaccagagagtaaaaactctggtaactaagaaaattttgagaaaaactcttttgaaaaacaaaattgtgctatgtttgttttttgaaaaagcttttcaatacttcccttgtgaagtcttcttgatttcttttcttgaaccttgaattcatcttttcttgaatcttgaaatcaaacttctcttgattc

SEQ ID NO: 277750 - DNA, 470 bp, Glycine max
  unsure (1)..(470): unsure at all n locations
acacttaaatctaagctttaaattanattaaatgtctaanaagttgttacaaacatttttatcttctggtaatcgattacatactttgtgtaatcgattacaggctttgaaaatcaaattcgaaatttttaaaattgtttcagaaatcaattcatccactggtaatcgattacatcctctgctaatcgattaccagagagaaaatatcatatttttgaaatcttataaaacttttgtaaaatatcctttagtcaaacctgtgcaacattaattaaggaattctttctaagatcctaggaactaagtacatcattcttcttgaatttttggattctggacttggatcgtgctcatcttaggcatcatcaaaacttcatatcatatatgcttctacacaaggtaggtgaggattatctcattagttaggccattataaattattttcctatcatattgcccatggcctacct

SEQ ID NO: 277751 - DNA, 323 bp, Glycine max
agcttattaaactgtaaacagagttaattattctcaaaccaaaacgaattctagcagattgttctagaggacctagggataattctagcatattgttcttctggttttaactgtgaggccaatgttctcccatacataatatttagaggctataagatgttaaattttattggaccaattgacaaattcttggtatgcttggctagggataattctagcagattgttctggtttcaagtgtgaggtcaaagttccccatacataatatttagaggctataagatgttaaattctattggaccaattgaccaattcttggcatg

SEQ ID NO: 277752 - DNA, 463 bp, Glycine max
tcttaggtgttattccttccaatctctttgaagggctcttattctaaatgaagacagctgtagacactgcctctccccacaagtacttgggcagactcttgcctttcaacatgctccttaccatattcattatggttctgttttttctttctgcagctccaatatgttgaggtgtgtagggaggagtcacttcatgaattatgccttcttgatcacaaaattcttgaaattctgtagaaacatattcaccaccaccatctgttctcaatatcttgattaatgagtcactttgcctttctgccatatttttgaacttctcaaagacttcaaagacatcactcttccttcttattaggtaaacccatactttcctagtcaattcatcaataaaggatatgaagtatctgtttccacccagagattcagtttgcatagggccacacacatcagagtaaatcacctc

SEQ ID NO: 277753 - DNA, 300 bp, Glycine max
agcttcacgttcctttccgaaaggatgttcttgccaatatcattgtcagcgtagcggttccaggcgtcctcagaggtgaatctgtgagtatcgtagtgcggctggagcctggaagctgcgactttccttttactagaagccgtctgcataaaagaaacatagaaaccaagttaaaataggtttttatttgaaacgacaagctgttaaataaaactgaaattcatattgggtgcttagcgcgccttatgaaaaattactcaagcgcgtagcacgacagccacgtgcttagcgagttgacac

SEQ ID NO: 277754 - DNA, 323 bp, Glycine max
ggtgtattcactcgctttgtttgttatcagctatacactcagtataagagtgttaacaaaagaatgatattgtatctatgtgctcataagcttcaaccatcttaatgtacaatggctgtgtggtatggaaactataattgatactctattgtggcataatcgaagtgattcttgaggaatacacaaatctatgatcattactatatgcaacgaaccatagttgctgtgacttatggcattactccattacaaacttaaaatggaaaccatgtgctcttacaggataaaaaatgagaaaccaaaatgaactaagcttattctat

SEQ ID NO: 277755 - DNA, 450 bp, Glycine max
  unsure (1)..(450): unsure at all n locations
ntaagacactagtccttggccaactttgttttaacaccaatgcaattaccatggctgttcataaatccatatttacagaacaaaattggggcatggggctcaatacaaatcaaaaacaggttctaaatatgtattagactaacaacggcaaccaattagacaaagagagacttagtgctctaagaatcaaattcgcatgcaaattgaaaattataggattaggaaaatcctcatcttttcccacctatctttactcttcaaaacccaaaatgattccaactcttgtcttttccttagagagaaatacatgaagaaaggatggatgaagattatttcctgcacccaaatggagattctaggagcttaaaaattcactctttaaaatatcaaaattcaaggaatcttaaaaattactacctagaacctatatggatcacaacaacttgacac

SEQ ID NO: 277756 - DNA, 352 bp, Glycine max
  unsure (1)..(352): unsure at all n locations
agcttanaaggatactgatacatggagtgtgatagagctgaaaaaaaanaaataacatgcgaccaatagggtataacggttaaggggttttgagagggtttaacgctataactagccatgtcagttttcacctttacgacaaagcagaaaagtgaggacataaattagtgtctttgacattgattaaaaagataaaaagaaaaattataaaaagatattttgataatcatagctcacattttgagagaaaaaaaacaatgaaagattgatatacatatgatacataggtgatatgatttaataagaaaaaacaataaaaaatacttacattatcaattaagtttttttaatt

SEQ ID NO: 277757 - DNA, 451 bp, Glycine max
  unsure (1)..(451): unsure at all n locations
tgtagtgcttctaggaatagatgttattnggatactttatctgttgttgacctgccatttattggcgacagattaagaagcagggaaattaggctgatacttctcaatttcggactcagttggatgctccgggctcatgcgttgttgaagtgactgcagatggtaattgtttctttaggtcagtttgaatgctttgcatccattttcacttattatattatttgtattgtattgtgtgtgtgtgtgcctgtgtgtgcgcgtgtgtgtgtataatagagtattaatttgcttcagctagtacctagcagttgtgtgtgcttctacatactactacactagatatattcacttgcacacgaaatgccaatcttgttatttntatgctgaaactgacttangttaacgaccctaaaattcatggaaacgatggtacatgggctggacatatgga

SEQ ID NO: 277758 - DNA, 352 bp, Glycine max
  unsure (1)..(352): unsure at all n locations
agctntacttaggagctatccttttcatggttactctgattacacccaaatctccatgtttttaaaaggaacaactaaggaatatagaagaatgataaatgcttcagcaggaagatactatgtcaatgggaccacaacaaaagtaaagaaaattatagaagatgtagcagctagtgaacgaggccgtgattgcaaccgcacctctccaaaggacattcccaaataagataccgaagatgaatcccttaaacaacaaacacaaatgaaagctatgatggagagcataaccaatagcatagtaaaacaacttctaccaatgatacccccaaaacaatcagttctcccatgtgaa

SEQ ID NO: 277759 - DNA, 458 bp, Glycine max
  unsure (1)..(458): unsure at all n locations
ntacaacacagcaacacataatctaggtgtccaacacccctcaattcaatgggttttctaggtttgaaaagtgaaattgagaatgaggtaagtttgaagcaaactctcacctcacacaagtccataacctcaatctaaacttgctcaaactgaatttacacctaaaattccaccgaatcaaaatttgactcttcaacacccaattttgccctagaaatggctctttattcactttgatcatttgtttttctctctagcacagtccaagttttctcccaagtcctaaatgacatttcaagctagtattaactcactttaacctccatttaccacagaattcagacttaaccttccaactctcaacgcctcactctttttccactcataacgtcacattctcactttctaaccctaggttagttctacccttcatctctaacagttttccattcagcaat

SEQ ID NO: 277760 - DNA, 364 bp, Glycine max
  unsure (1)..(364): unsure at all n locations
agctntagaaaccctaatttgatgaagaagaagcaagtgaagaagaaaatatttgacaactttttaaattgttcatcaaagtccagtttacatgtcacaatctgggacaatttgccacgttggatagtctatgtggcactaaaattgccaacaatgcacttcactaacagcgttacttttaaatntaacggtaaggactattttgcaaaacttatgcaaagatagggactattttttacatttcaaaaagatagggactaatttgcagaagggatcaaaattcaaggaccaaaatgcctatttactctaataaaaattttagtntataaaanatattggtgtttaaaacaaaaacataattaaa

SEQ ID NO: 277761 - DNA, 432 bp, Glycine max
  unsure (1)..(432): unsure at all n locations
tcttgagatgcctttcagttatctcattagagctcttggttaagtctacaacatatggaaattcataatccattagtcgtcggcttttcaacataatatcttcaatcaacagtacccaattcatttgaatacttgatttcagcccatatataatctgcaagttgtcatcaataacctgagtatgattgttggatattggtgacagaatatatataattatatacaccaacattctgtccttctctgttagaccaccaacatctagtatgtttcttataatccttgttgggttaaggagcatacctctatatgtctgcattgttatagccatccacagattcctcaatattacaaacttgacccatgtctattcctactactgctntccgaacttcggcatcaataaccatctctacaccattgacaatagag

SEQ ID NO: 277762 - DNA, 409 bp, Glycine max
  unsure (1)..(409): unsure at all n locations
agctnggactcaaggagaaacttataatggctctagagtagagtaaaaaaaactataaagaaagactcaacaaacctctagctntggcccatgtttttcacgctaattttcaattgaaatttaggaactaagattggtataaaataggaaccaattatagaataaattttgagccaaaacaacaagcacacttccctttcaccttttttttcctggatactgatttttcttccaaattgtgtgatttttatcatttttaaattttatccaaatcacttggttctttttttataacttttttccagatgcctagaaaattcagtanaaatttcagctcaaaattcgaagtaactaattntcagtaatttttacaagtcgatgtcaagctgcaccacagcggatttgtttt

SEQ ID NO: 277763 - DNA, 460 bp, Glycine max
  unsure (1)..(460): unsure at all n locations
tagtaaagctaagcactaacaatctcccnncttggcaaattttgtctaaaacatacttagacacttcctgagcaggtacgagcagttatgcaagtgggatcagcaactttcattatcagagtaatcaagcacagcggaaattctgcaagttgcaaatctacaagtcttctccaggatgtcaagacatctcacgtgacatcagctntctgctcctgctccccctgtctccatgcttactgcagcatcttctatcagctactagtcttttccaggatgtcgagacttctcatgtgacatcagctntttgctccccctgtcttcatgctcttactgcagcatcttttatcagctagtagcttacaccaatcatcagcagcagtctccccctcaaagtcatatacatacaactccccctcanaatcatgaatcatgcgtacatcgtatcctactgccatacatc

SEQ ID NO: 277764 - DNA, 369 bp, Glycine max
agcttcacagtggtagcagccacgatcctcatcgatccaatgagccttcgcctactgtgccgtcgccttcgtgcgccaccgatcagtctgagagctccgccgccactccgccgagtccttcttcggcgtcgacgtcgtcgtcgccgtccacgctggtggtaactcccagctgcggcggcggcggcgcgagtccggtggtgaatcggcaggactttttctcgtcggaggaagagtttcaggtgcagctagccctagctatcagcgcttccaattcggagttccgcgaggatcctgagaaggatcatatccacgcggcgacgctggtgagcttgggatgccatcggatcgattcgacgaggaacacggacg

SEQ ID NO: 277765 - DNA, 425 bp, Glycine max
  unsure (1)..(425): unsure at all n locations
tagtaaatggtttgtaatatgtacacgaggtcaacaaacaagtcgatctttaggtgacaaaaagagaaaactgcaataacatgagagtaaggtagtcgcaatgcttgaaattcctcacagttacaccattcatttaatttaatagtataggccgttgttcgtcgcttaattagggatttgctagctcttgcaccttaaactcatgtttcacgagtgtacctttgcacatgatgcatcctagcacaatgacaattttcttgcaacatgatagctaccttttcggggtagtcgtgtcttgtctgtaaaatgcaggatgcatgtattcctctttcaacaaatcacgattttattctcttanatggtgttttcaccaaggcaattataggcaagacacatgttccttctaaaacagaattcattcattc

SEQ ID NO: 277766 - DNA, 223 bp, Glycine max
agcttccatcaagttatgactcatttgaattctcgagatcttccgtggttcaatttcgggcgtctccatatgtcatgtgcctgaatcggaccttcgtaagaaaatttatgaccatttggacctctcttgagcttccgtggttaatttcgagcttttctatatctgatgtgcctgaatcgggcatccgagtgataagttgtgacaatttcaatttctacagagc

SEQ ID NO: 277767 - DNA, 351 bp, Glycine max
tcaccggatgatgccgatcgaacatttcctaatcgacatcatgcaattgttattcagggattgaatagaataaccaatggccggtgtcggtcgttatatgaccccgactgatatctttcagccgacattgcgcaatttcttttacaaacgctggccgataatgtttttttatttacggtagaggaagttttttgttttggtgttgcctaaaaaatttacaacgtaggacggctaggtttttctgtgcgagctcaaccgagggttcgttccgaccgacactggcatgttgttcttctcatttatgaggataagaaaacgttcgcccaccccggcaaaaacaacaaaaaaaaa

SEQ ID NO: 277768 - DNA, 409 bp, Glycine max
  unsure (1)..(409): unsure at all n locations
agcttatatgcatcattgttctgagctgtcaagatcactatccattcttgaagcanaattctaccctccctaactccttcctgcaaagaggctaatataacctgcagaatacagtaaattaatcaaaaaattaagttggaagaatgacaacagagaactcataaattataaaacaaaaagagaaggacgagaataatattgtttggtaatttatatcagtgacaatagttggcagatttaaaaaactaaaacaaaaataaaagtgaagcaagcataccacattcagaaattagttggaagagtggaaccaaaaaaaacatcaatccaaatggcatagaagtaaggttgattntatatattcaccttgtgaacaagcanagatagaacaacttcgggatcacagctatca

SEQ ID NO: 277769 - DNA, 356 bp, Glycine max
  unsure (1)..(356): unsure at all n locations
tatccncttctctcnttgaaagnttctatggtctcaagtgattntgagattatgaagaatatcttttcaattgttaaactgggtttgttgattaacattggtaccttgttcacattgtattaattgaaagctatatatatatatatataatgtggctntgttatcgaacaaaactaaattgattgacctttataggtgcaaatttaattaaaacgtatttgcctgaatgattatattgtatacgtggcaatcaaaacaaatgacatttaaaaaaaaaatcactttctaagacgattctagcaaaaaccatcttagaatatacgtgatgcaatcctaccccccaagggcattggata

SEQ ID NO: 277770 - DNA, 570 bp, Glycine max
  unsure (1)..(570): unsure at all n locations
atggaattttgaaaacccctttgaaattanacccgngngcannctnntangaagatcgacactcgcancgcgctngtcgcagcgttttataaaattttgtaaatatataaaacagcgtcacaatttacttgtgttcgcttaatctcatatacaccatattattggtgtaaatccgaattaccacagttgccgaaatttaggaattcaaaattttaaatagcttgttggttaatcatttatggccactggtaatcgaatacattctctgggaaatcgaataccagagagtaaatctcttgaaaaaagacttgttaacttaaatatcttggccaatcgtttgctcttcaaataggaattcccttcttatttaatatacccttcctaagactctacagactgtcttgatcatccatcttgaatatctttaatttctttgtctagaataaagctttgagaaacatgtgatcctttggcatcatcaaaacattcagcttgatcctttgctacaaaagcgataaataacataagacaagtcatgagttttgaagacatggtaaggcctgatctctt

SEQ ID NO: 277771 - DNA, 301 bp, Glycine max
ctcttttgtgcagctatctcatcctctttttcaagtgtataatgaagcttgacaggttcaggtgcaggtgctgctactagtggaggcacttgaatttggttgccagacctcaatgtgatggcactcacatttttcggattttgcacaatttgtgaaggcaatctgtcaaaattttgggactgagcttgattcatctgagtagccatctgtcccatctggtttgtcagactctgaatggaggctcttgtctcttgttgaaattgcatattctggatggtcatttgcctcactaactctttct

SEQ ID NO: 277772 - DNA, 416 bp, Glycine max
tacacagaagaaaatgaaacactttattagtttgggatctaaaaataccgccaaaggtggcaacttttcatgtggagattgatcctaaataggttgccatcgcgagataaacttcttcagcacaacatcatcactaatgtaactgatgtttgttggagcaaaatacgagaaacaagaaacacaaaaatcagtctaaacacatgaactcgtgagagagaaagaatggagggaaattttttttattctattgtatgtattctgatacacataatgatatgtctatatatagactaactcaactaactaaccaccataattactaacaaactagtaactgttttttgaattatccttaacacccccctttgattcataaacagtgaatcaacaacaagaacattacaacaacatttact

SEQ ID NO: 277773 - DNA, 224 bp, Glycine max
tgactctcaatgaaagcaccaaatgttatgtgctgggtttgttgtaaatggttctatggttcaacacctacagaagatgaagagaataagaagacttactctacggaatgaggaaattctacttctcatatgctatgtgtttatttacatggccttttatagaggaattcaaatacagacttgtgtcaattcatatccaatatgaatacttctattacagatat

SEQ ID NO: 277774 - DNA, 286 bp, Glycine max
  unsure (1)..(286): unsure at all n locations
agcttcaattcactcagtcannttttttggtattatatccatttctttctgtatttagatatagttcttgaattgagccgagtgctaagaaatcattatagatgctatatttactgtaaagtcagtgacaaagaataggaaaataaaagtaatatttgttttcctagggggctgagaccactaatatttaaaaagtgggactaaaacaattactcactcatatatacaatagcacaagctaggacaagtaaattgaatcgacaaattaatcttaaccttgacagga

SEQ ID NO: 277775 - DNA, 449 bp, Glycine max
  unsure (1)..(449): unsure at all n locations
aaatctcagcttcttaataagcaaactctcacacctaccctataaatggttgattgcatgaacagctctcttcattaacaacaattttttctcattctcttcaatggagggtctccagaaattccttcatttcttctatgtagcttctcttctcatcagcactacagcaatttcagatcacactcccaaggttcatacatatacacacaacttcactttagcttattatgttcaaatttgttatatgccaaattctcaaaagcttattttgttctatgcagccttatgtngtttatatgggaaattcatcaccaaacacaattggagtagaaagccaaataacaaaatcatcgcacctacagctattgtcattaattattccaaggttcattatctagttatttatacttcacattattcactctttatctataaccataatcaccgtt

SEQ ID NO: 277776 - DNA, 430 bp, Glycine max
agcttccatcactaaccctatgtcgtaaacttttatcactgacccctatatatagaagtcatattcactttcgtttaacacatccacacaacactatcttgctttattactttcttccaactttgcaaacacaaaccctctgtcacatttctttctctattatttctctattacacaacgtgtcttccttatttgtcaaatggttagtgcgcttcaatggtcatataatcaaaacaaatgaaggggataagtttcaatgcccccacccattgttctttaaaacaaagcgaggcctcccacttgaagccttaaaaataaaaatccatgaaaggcttcatctttaacagtggataaagtatgcatatttcattctaatacccacaagtagtggacgtggaatgctcaagtttatagtaatgcgacttgttga

SEQ ID NO: 277777 - DNA, 350 bp, Glycine max
agaatctcagctgcttctcaatcaatccgacctacagttgtcttttggggcgttcatggatccactcagtaggagtcgtcccctccacactccaccaaaagctgaagtttgtagtagaaagacatttggtcatagtatcaggtgaggaagatgtcctggtaagttgatcttcctctatgccatatgtggaatctgcggaggagtcattggaaacgactttccaatcttttgaggtagtaagcatcgcttcctgtgattccctccatatgcagcccctcctgtctggtgcggcaatgatggtggcccaagtgatgttagggcatggcttatgagcccataatggtgttggg

SEQ ID NO: 277778 - DNA, 253 bp, Glycine max
gccttaagcactgggcgcagctttatcctggccctagggggtttttttaactcactctcttagggcattcttcttttctttcatcgtgcatctttccgagcaagatcatgagaaaaatctaggctaaactcatgggctactcaactaccttgatctaaaaccatgatttttgaccaactactcagttatggagcttgattgtatcatttgcttatcgtgaagaatcaaatggctttgtgtgtagacttccttg

SEQ ID NO: 277779 - DNA, 290 bp, Glycine max
tctagccaaatgggacttaccttgaattaattccttgatatcccttttgagccttgtttccctttccttgttttgaagctcactacaagccttaagtgaaaaaccatgatattaccatatccttaaggaattttggagctttggaattgttttgggaataagtgtggggggtttttgtttcattggacaacttgtttcgttgactattgcttatgatgtatattgggccatacttgatgtacattggatattggttaaatgttggacatgctgaatgaaatgttgtttct

SEQ ID NO: 277780 - DNA, 492 bp, Glycine max
  unsure (1)..(492): unsure at all n locations
nttgattacatctatacacgggcngcgatccttagagtcgacctgaggcatgctagcttcgaagaaaaagatagaactggattctttattaatttgcaatgctcatgcttctcgaacatttttcttcacagggtagtataaaataccagtgaaccttgtggtttagttcgtcactatccaaatgccaattcttgccacatacattaaatggtggccccatctttctttgatgatgggtcatggtctaagaatttatacttctacagcgtaacgtgactcatcccgaaattaaggagtgcctttggtccatagaattcatgtcttctctttcaataattagaccgntctaaaaagtgcatgggtttacaactttagccactttctcgtttgacgtagggaccatgatgaaatcgtttcactaacccgtagatgaatagcacatggaccacaaaagaggggtccctgttctaatggagttcgcccttcgcactc

SEQ ID NO: 277781 - DNA, 335 bp, Glycine max
  unsure (1)..(335): unsure at all n locations
atcaccaagctcgaacaagtcaatattcgtagtcctactaagtcattgctagctctaaaacaaattagaagctcactaattagttcttaatcgtataacacttaatttttattttcaagatcctcaaggtgttttgagagttttttaactttacaacaatatgcaaaaaaacttttacagaaagaatntgaatgataacatgtcgatttgtgacccaattcttcaaagtttctagtatttataagtcatcttctttaagtgtatgttgctttaaacatatatatttcttcatttgagtgagcttgcatctaaatattgtggtctgtggagcattt

SEQ ID NO: 277782 - DNA, 482 bp, Glycine max
  unsure (1)..(482): unsure at all n locations
ntgtgatcttgccatcgcgaccttaagtcgacgaggctgcagctgcatttgaattggaaagttacctttctattatgtattgttcctgccatcttcaacaaacaaatcagacgtaacgagacaattattgttgctggttgaatacctcacccacttcagtgtatcacacaattatggctgttctctaatgaaacactcttgccttttaccactctaattccccttgaggtcttaggcaattcaagagattatggccacaacaaagaacaattcaccaatatgttgtagggaaggctagagagacaaggagaaggttaaccaagaaaaaggctaacaatggttttaggcacagatgaaggatataaaattcnaatttaggaattgaagaacaattcttcatgaaccaataaagattcacttaaagaaatttttttatgaagttcttcagctgaaccatcagcccaatttttttttgtatttgt

SEQ ID NO: 277783 - DNA, 447 bp, Glycine max
tgtgcaaatcaaatcactcccgcatcttatctctagcatgcattctttctttctttacccactcctcacgtttggttttttagggaaaaacaccataactaaacgcgccacaaggcatccctatcgcaccagatccaaatctagaacgatgggtgatcaagaggagacacaggaacaaatgaaagccgacatgtcggctttgaaagaacagatggcttccatgatggaggccatgttaggaatgaggcagctcatggagaaaaatgtggccaccgctgccgctgtcagttcggctgccgaagcagacccaactctcttggcaactgcgcaccatcctccctcaaacatagtatgatggggaagggacacactgtggcacgatggcaaccctcacctgtgatacaaccgagcggcttacccttatggattgccgcccaactactcacc

SEQ ID NO: 277784 - DNA, 115 bp, Glycine max
acgcacgcaagctttggcaagacttattcatgactatattgtgccctacaggaagtatggtaattggtggaggaacacatactcacaaacattgtcgatgcatacttacttgcaa

SEQ ID NO: 277785 - DNA, 353 bp, Glycine max
gggtcttagggaagaacctagctagcccaaagtctctaatcttatgctgaaacttctcatcaagaagaatgttgcttgctttgatgtctcggtgaacaattcttaaatgtgaattctctgggaggtattgtaatccccgtgctacaccaagaataatttggaatctagagctccaatgtagaaattgatcactcttttctgacatcacagaaacatcctaataaggaattattctcttaaaactactttcagttctttgaattactcatgacacattggacatggtgtacattttcacaagatctactacttctaggaaagcacttatctttacatatgataaacaccatgct

SEQ ID NO: 277786 - DNA, 320 bp, Glycine max
agcttataagaaacaaaatgcttcaatcatttccaaatatgcatgtgaattaggaagcatcaacaagaatcaagccaaggctattgtgcaagcaatcaatggggcaaaacacaccaaatgattatgatgatggatggctcaaattctcacaaaggtaaactcatcacttccaaattgagctttcaaaactatcatgacatgtagaggagaatcaaggatttcaagtcacataatgtcaaaaacttttattttcaaaacaattacccatttcttgaacatatactataattcaaagaaaaacatgcaaagtcgtacatgca

SEQ ID NO: 277787 - DNA, 385 bp, Glycine max
  unsure (1)..(385): unsure at all n locations
tctntaggaccttgaacaggcaactaactcctctgtcaatttcatgctatgtgctcgcgactggtccctttcttcccttcgcaacttgagttcattattgctaccccatagagctccgcgaaatttgttccggccatactcttccttgcgagccctcttggtctcttgttcaagggctcttgcaggaattgcattctcttaccgtaacccggcacactccttccgaacgtgtgtagcaaccaacttgaacttctccttggcgagttttgcctttcctaactcgctcttgagagcttggacttcttcgtcctctttctgtgcttcaaaattctctttgctgacgacttgttacttggcgagcctatctatacctcgtatgctaact

SEQ ID NO: 277788 - DNA, 226 bp, Glycine max
agcttccatcaagtggtaatcagagtatattatcttcaagtaggttctccttaaacctccattaattttcagctttacctcatcctccattgggtgttcttcctttttctccatgtatctccacacatgtcttgtgttaaatgctgttaacatgattcattataatttccaccgaataaacttgctatataagctagatttgattttctatggttcaaaaatcttg

SEQ ID NO: 277789 - DNA, 234 bp, Glycine max
tcggtgctccattactacctttattactaatgcctatctaacttcacgaagcggaaagttgagtttcccacattacgctggaaagtaccaaagaatgcctaacatctattaagagttcacataggatggacatataatgcttgaaaaatctgcctaaacccttactattctaacacacacacacaaactaataattcacaaccataaagagtgaaaagcttgaagaacagtata

SEQ ID NO: 277790 - DNA, 194 bp, Glycine max
aataccaaaaaaaaaaaagtctctactactaagactacttaaaatgccctgaaaacaaggttaaaaacctatactaatagaatggtcaaatacaaggcctaaaagaaggaaaacctatttaatatttacaaagaatagtggatccaacttgacccatgggctcaaaaatctaccctaaggttcatgagaaccct

SEQ ID NO: 277791 - DNA, 282 bp, Glycine max
  unsure (1)..(282): unsure at all n locations
atcgtatactgccattactaccgttaattaccaagggcctatcataacttcacgaagcggaaaagtctgaatttcctcaacattacgctggagaagtaaccagagcaatgccctaacaatctattacgagtttcacataggatgagacaatataatagcagtgaaaaaatctgacctaaaacccttactattcctaatacaacacacacacagnactataataaattcacatacacataaaaagagtgaagaaggcatttgaaagaagcgagtaataaccaa

SEQ ID NO: 277792 - DNA, 212 bp, Glycine max
  unsure (1)..(212): unsure at all n locations
agctntgagctaattcaaacgacaataatgtttcgctcggatgaccgattgagacccgctatacatcgagacgctcgatattgaatgatgaagctctccacatattcacacgacaataactttttactcggatgtccgattgagttccgttatacatcgtgacgactcgaacatgaatgttgaagctcttagccaattcaaacgacaataac

SEQ ID NO: 277793 - DNA, 344 bp, Glycine max
tcagaattcaatttcgagcgtctcgatgtattactggacttaatcagacattcgagttaaaagtgattgtcgtttgaattaactctgaagttcagaattcaattacgagcgtctcaacagattacgagactcaatcagacatccgagcaaaaagttattggcgtttgaattaagctagagcttcaaatatcaatttcgagcgtctcgatgtattacgggacttaatcagacattcgagtaaaaagttattggccgttggatttggtttgaagtttcaaattctaattcgagcgtcttgaatgatttccggactccatctcacctcccatgtaaaaggctctggc

SEQ ID NO: 277794 - DNA, 465 bp, Glycine max
  unsure (1)..(465): unsure at all n locations
ctaagctaagctaatgatcaaagatttacactattggattggacttcacatcaatgatacttcctttgtttgtataaaaattgaatagaaatattgctagataagaagggaaaaatagaaaagcatgtgtgtgggctacacaagtaatctgaaggggaaaaggagagcaaaactttccatacaaaactacaaaacaaacacctataaatggataggccataaagggaaccaccacaaatgtcacaaaaccttcataggatactttctccccactaaacacctgcagcattagtgataccctaatacaaaattgggtaatgcaaaattagttattgtgtttatctaagttcaatgtatctctgtaaatagttctcttgaaaatagtagactagtggctatcattatctntcgtatcaatgttatataaatagatcaccctgctgagttggtaactctagcatattc

SEQ ID NO: 277795 - DNA, 287 bp, Glycine max
tgcgggccaacttgtatttacacaaaaaaaaataattaaaattcttaaaaattgtgaattgtttaaataaatcattctaaatgcacataaaataaatacaatacaccgctctagtcactatcaccgctatcgtcattatcaccaccattacatgaccaccactatcgttgtcaccaatattgtcactaatacaattgacattgctaccaccaccgccaccaccactaataccaatgttatcattgtcaccaccaatgttgttgtcattatcaataataccaccttta

SEQ ID NO: 277796 - DNA, 423 bp, Glycine max
  unsure (1)..(423): unsure at all n locations
gcaatatctgtaaacccaacttgaactaacaaagattctattcttagattttaagaatgagttacttgagcatatgactggattacatcatatgttacatgtagaaatcaaaatattaacaacatgaatatttgtaatcataacataattaacattcaattaaacaaaatgtattacatacttcttcagatctatgaaagtgttgtttccaaagaagatgaacaactatttaggctttgatactaacatcaagaagaagttaaagagggatatatgagaacgagagacagcgagtttgttagtgtatatgatggcaatacatgcattgtatttataggacaaaaatttaatagttacacaacttatatagtgagatcttggttgtcaacatgcattgttncaattaatgtaatctaagccatt

SEQ ID NO: 277797 - DNA, 354 bp, Glycine max
ttaagtgacgcggctgcagcttgatagttccccaatttatgggcattttttagtaatatttgtaaataaatcttgttttatggttagcgctgtctctagaccattcccattggatttaatgatgaaatctgcgcattcttaggtgaaaaagaggctaagattctaattgcaaatagtataagctgggctaagcgcttattcaccgctcagcgcagctttaccgtgcttagcgcacaggagaatctggcaaagcattagcatcaaagccttgcgcttagtgcgagatcagtgtgctaagcgcaacatgtgcctttagccaggctaagctcgagactgtttctaagctcaaattca

SEQ ID NO: 277798 - DNA, 467 bp, Glycine max
  unsure (1)..(467): unsure at all n locations
tatataacatggccatcattcacaaactntgtatacatgcatctattagcatcactactagaagaaccatcaacaagttaagtctcattaaacttttcatgccattgtttaggaacttgttttaaaccatatagggatttcaaaagtttgcacattttgttctcttgaccatccaccacacaccccttaagttgagtcatatatatcctcttcgctatatcaccattcaagatagttgtcttaacacccatctgatgaatcactaacttatggattgtagctaaggctatcataatcctaatggaggaaatccttgtaatatgtgcaaaggtataaaaaaaatctatgttaggtttctaagtaaaccctttagcaatcaaccttgctatgttattatctatagattcatcacgattatacattctcttatagatccatttacattcaataggattagcacccttaga

SEQ ID NO: 277799 - DNA, 391 bp, Glycine max
  unsure (1)..(391): unsure at all n locations
agctcgtaggattatggggtacccgacatatgttgttctaggttgttatcaggcganggtgcaaatcaactctgccacatccacaaatcaaacatgaacccaccatccccagttgcccaccttcaactgatctcatgtacccccacgtagcccttatcctcgtttctctcagcaccgggtccccatcaacccctccaagcttccacaacatccaagcaattcaatatgtaaacatcataaactatccaaaaccaagaaaacagggcatatgcggaaaacttggctcaaaacacatttcaatacgacagctttttctacttaaataccccagtaacattttctttgtttcgattcgttaaccgttggatcgacttggaaatttactggagat

SEQ ID NO: 277800 - DNA, 468 bp, Glycine max
  unsure (1)..(468): unsure at all n locations
cggaatggtgcctgctgtagccgctcaanacacncaancctgctctaaattacatggatgttcgcatttatgggaggagtgtattttccacttttgtacgaagagcagtgccccactggtgaaactaatatgtcagccttcacccgaaattgccctctagaatcttgtctcatatacgtctaagaaggactatgcatccgtacgatctagttccactctcttgtatgaccaccaccctcttatgagcgctgttcaccttttgcgctctcggccataatggatggtgtacttcaggggcaacggactccttggtctcgcgcttctgtttcctacgtatttttctccctttcgcttcctctcacccccttctcatatcttcccaaacttctcttattttgacctccttgtcttccgagagggctctttaatctgacttgtcttggtattgttcacttgattgcgtttgcg

SEQ ID NO: 277801 - DNA, 298 bp, Glycine max
  unsure (1)..(298): unsure at all n locations
agctntgagaaaaatcaaacgacaataatttttaacgctgatgttcgantgagacccgtaatatatcgagacgctcctaattgaaaaccgacgctctgagcagatttaaaggacaataaattttcactctgatgtccgattgtgtcccgtaagatatcgagacgctcttaattgaaaacggatgctcttagaaaattctacgacaataacttttaactccgatgtctaattgagccgctaaatatatcgggacccctgaaaatgaaactgagctctatgaaagttaacgacataactt

SEQ ID NO: 277802 - DNA, 429 bp, Glycine max
gaatctcagcttccatttcaatttcgagcgtctcgatatattacagggctgtttaggatattcgagttaaaacttattgtcatttcattttactcagagcttccgttttcaattacgaacgtcacgataccgtacgggactcaatcggatatccgattgaaaagttattgtcgttagaatttactcagagcttctgttttcaatcacgaacgacttgatattctacgggacacaatcggacattcgagtcaaaaattattggcgtttgactattcttagagcttccgttttcaattctaagcgtctcgatatattagagagctcaatcggacatctgagttaaaagttattgtcgttcgacttttcttagaggttccgttttgaatttcgacggtctcgatataatacatggctcaatcggacatccga

SEQ ID NO: 277803 - DNA, 315 bp, Glycine max
acctcaagatataaaaaatgctatatagaattattatagcctataatacttaataatataaaataataatattggtaaattttcttactgttaatttctttaataaaggaacaatacagaaagaaaaatgttattaccaaacaaatgtcaatcctttttacagagaactatattaaaagtaattatactataataattgtgatgtgggccgacattgcatgagaggaccaactacaagaaatggctcatataagctggtttcttgttattagctggatatctacttgtatatcacaagaaataattttcatattt

SEQ ID NO: 277804 - DNA, 472 bp, Glycine max
ctataaaactcagctataatcagagcatgaggagcacattaatgtttgggtcctcggctgacattagtaggtggcgtcaacagatggagttaatacctttcgtagagcttatcagcattaatacaagaaagtatagcctggaatccacgtatatatctatgttgatgctgtgtaatagtctaatactagggatctcactaactagggtatttattactgtatttagagtattggttaacatatcaatataaaaaaaatatttattatgaaaatcataaaaaaataataaataatacaattttggatattctaataattttttgttaattattaatcaatgttctaaatatactagtgaacatttatttagtactatttcttgtatcgtagttgacatgttttgaaaattgaagacactctcttctaggtaaataaaattgaatactcacccattaggaaatctctttatggg

SEQ ID NO: 277805 - DNA, 293 bp, Glycine max
  unsure (1)..(293): unsure at all n locations
aaaaaaaaaggaggggcgttatgataaaaacaacaaccccccgggnnggaaagggataatgtaggggaagaggtatggagtgaaggggatgggatagaaggtgaaggaaaagaagaggaatgagaaggggagggaagggaagagggggaaggagaggagagggagggggtgaaaggggggaggggggggggagaatggggaaggaggagaagggaggaagggtggagatggagagggggggggggtgaaggagagggtgtgaaggatatggaagggagaaaggggggggggta

SEQ ID NO: 277806 - DNA, 364 bp, Glycine max
agctattacttatgtggcagggcgtttctttcttaccttcttgtctccaacgcgaactttgaccattgtgcttccttcccgcgacgcttcttttcatgtctgcctgagtgggcttatagcctaaaccatacttcccacgattaccttgggtatttatcagtctagttatgccgccgttgttttttcctaaacccatcccgggctcataaccgatccccaacataactcgggccatcattaccgctgcatcggacaaactatgctgcccaaagagggagtccacggaggaaatgctgaccacctcataagactgtaaagcagtttctaacgattcttctgcggcttcacataaggcatggaggat

SEQ ID NO: 277807 - DNA, 376 bp, Glycine max
tgcttgtggagcttctatggaggctggaactttgttctttttgtggatctctaatggtgattttccaccatggagatgcaccggataacaaaggaaaagatgtgagaggatgcgccatccatttagaaatatgccatggaagaaggagctttaccaccaagatgagccttggataagaagcttggagaggatgctttaatggaggaataaaaagatggagagaaatatagaggggggagcactaaattatggaagatattgggagagaagttgaacctttagttgtgtttacaagactctcattatcaaagttcatctagtgttcacatcctttattatagactatgtactacttgataaacttttgagaaacttc

SEQ ID NO: 277808 - DNA, 215 bp, Glycine max
ccttactactttcttgatgtacaactccactagcgttgccattctatacttcatccgagtgaaatgttatgaccattcgaatttttcgagagcttccgttgtgcaactatgagcgtcatgatataatatgggctcgaatcgaacattcgagtgaaatggtttgacaatttcgaattttcgagagacttcgttgttcaatttgagcggctagaaga

SEQ ID NO: 277809 - DNA, 505 bp, Glycine max
  unsure (1)..(505): unsure at all n locations
ngcgccctgatgcnttcaattatccttgnannnncnaanactanagctaacatggatgggcgattcggagacataagacatctagtcgcccgatatcttacatcggaagctctcgataaattcgaagggttataacattttactcggatgtccgattctgggacattaatatatcttgacacttcttaatcgtacaacggtagctctctagatattcaaatgctcataacaattcacatcgatgtcctgacctgtgacatatctcatctagacgctcgaaatagaacaacggtagctctcggagattccacggtctttagattacacactaatgtccgatcctgggcacaatatatcgaacgctcaaaattgtacaacggtagccctctagacattcgaatgcgcnnncggggtccccntattctnnntcttggtcttatttattaatactcttgaagttgacaacttaagcttctgcaaatacgaatggttgtattgttcgacc

SEQ ID NO: 277810 - DNA, 221 bp, Glycine max
aagagaaagggaaggaaaggaacaccccccccggaggaagggaaaggggagggagataagaccagcgaggcagagaaggaaggaagggagtagagaagaagaaagggagggaaggaaggaaggaaaggaaggaagggagaaaagggaaagaaaaaagggggcggagaagggaacgagagagaaaaggaggaaggaagggcaaacaaaagcaaggagaagaa

SEQ ID NO: 277811 - DNA, 140 bp, Glycine max
aaaaaaaaaaaaaccgcgggtagataaaaacaacagcccgggggggggagggaggaagagggggggggagaggaggaagagaggagggatggagaggggagaaggggggaaggggaggagggggagggaaagaagggggg

SEQ ID NO: 277812 - DNA, 450 bp, Glycine max
  unsure (1)..(450): unsure at all n locations
ctgagngatgcaagctttgacaagacagnacacactgttgtcttcttcaacaagattaattttggaaatctactctaaagatacgtgtaattatacccataattatacacactccccctcaagctggagcatataaattatatgcaccaagcttggaacatataaactgaattctaggcccccttaaggatttagtcaaaatatctgctggctgatcattggaattaatgaattcagtaacaatctctttagacagtagcttctcccgaataaagtgacagtcaatctctatgtgcttggttctctcatggaagactggatttgaagcaatatgcagagcagtctgattatcacaatacaacttcatttgcatcactttgcagaatttcaactcttcaagaaattgtttganccacataagttcacatgtgactacagccatagatctat

SEQ ID NO: 277813 - DNA, 460 bp, Glycine max
gctctggactgagcaccagatcgtcgctgtggcagaaactacgctgctcactctcttgaattaggcaacgccgttcccaaggttccttccttctctgattctgtctgataagttgttatcttaattgaagaatctaagcttttgaattttcatgagccggtgttgtttctgaaaccgacgtcgtcttacttgaaaaacggcggaaccatccaaattccacacaacgagggctctctgcatcacgaggttgagctcgctgtggtcatcgccaagaaagcacgtgacgtctccgaatcctctgcgatggattatgtcgccggtattcactattcatttatcttatgccttatcctgctgttaaccgtgaaaatcgttaatagatttcttaaagtattttttatctctaagaagttaattctcactgctgattttatctagagtgagatattatattcatttt

SEQ ID NO: 277814 - DNA, 341 bp, Glycine max
ggctgatttaggggtggccactgttgttgtttgagtgttctaggttgatagggtggtgggtaatgagaagggctgatattggcttaatattgatattgttgagctggtgggaaatttggccatgtatgaatggtaatcacaacatggattccttcctccttctcattctctctattgtccccaggctttttatttattaaaataggataatcaaatttggctctcttcagacccactttgatccttttgctagtgaaaactaaatcagctaagcttgaacgtgtgtaacccaccaccatctcatagtagaacaccggctacgtctcttctatcattgttat

SEQ ID NO: 277815 - DNA, 393 bp, Glycine max
  unsure (1)..(393): unsure at all n locations
actcaagctctcttgagantacatccttgagaagcatctttgagagaacttccttgagaagcttgagcttagctacacacaccctgcttataactaagctcacctgctcgagaagatgccttattattattcctaatgatgcttgagcttagctacacatacctctcttatagctaagctcacctccttgagatgagaagctagagcttagctacacaccccctataatagctaagctcagccctatgaccaaaaacatgataatgcaaaaaaaaagtccttactacgaagactactcactatgccccgaaatacaaggcttaaacccgtttctactagaatggccaaaatacaatgtccagacgaacgaaatacctattctatatttacaag

SEQ ID NO: 277816 - DNA, 198 bp, Glycine max
ctgagttatctctttttgatgcagatggagaatccgatttgaggacaaattcttctcaagagggagagaatgatgaggacatgttcaagagcaagggcaaggatccacttgaaggacttggaggacctatgacaagggctatagcaaggaaagccaatgaagctctttaacaagagctgtccatattatttgaataca

SEQ ID NO: 277817 - DNA, 369 bp, Glycine max
  unsure (1)..(369): unsure at all n locations
tgctggaactacttcatatggacttgatgtggtcctatgcaagntgaaagccttggaggagagaggtatgcctaatttgttgtggatgatttttccagatatacctgggtcaactttttcatgatagaaatcagactccttcgaagtattcaaagagttgagtctataacttcaaagagatatagactgcgtcatctagagaatatggagtgaccattgctgagagtttgataactgcaagtttactgaattctgcacatctgaaagcatcactcatgagttctctgcagccattacaccacaacaaaatggcatagttgaaaggaaaaacatgactttgcaaaaanctgctagggncatgcttcatgc

SEQ ID NO: 277818 - DNA, 556 bp, Glycine max
  unsure (1)..(556): unsure at all n locations
caacggaacgctcgtaaaatcaactgtggtctaacttcaaacccacacgtccaacaatatacatgattgatgccatgccggagccctctanacacgacctgcacgcatgcaagctgtagaccctagatactctattaggggattctagctttagagtgaaagagaagggatggacgcctccaatgtattgtcaccgtgcaagggacatttcactatctgtgaaaatcatgacacacatcccaacactggtggcgtgcgaatgaaaacagaacacatggcgtctaaacctcatgaggaaccaacgggtaatgaagtgcagcacaaacgttgactaacaattggcctgggccattgggaaatatgagcactatgttcaaaccagggtcggaatgctcacaccgtgggaatagcgaaacaatgccagaggtgagagagaagccccacgcaacgtagctatagtttgtccggctacacccaaacctaggtcagaaatactcagagaccacaactgtgaatagctggatccaagtgacacacggaacacatgctcctcacg

SEQ ID NO: 277819 - DNA, 584 bp, Glycine max
  unsure (1)..(584): unsure at all n locations
cgttactcactatacacactctancgttacttatatactatttatatttnntngnnaattaaagggcaannatgttanaatgatcctagcattaccgactctatanaatactcaaccttgaaagaatactggatgcatagttaactaggttacccatcttatttctaaatataaatctgcacctatatcaaggtgcagtggttagagctctccatgcagaccaccattcagacctttgccgcttcatgcaggaacctgtagcatacgatcagcctgaagcttatgctgcatatatttacaataaaactgctcaacttcatcatctatattaaccactacatagctactatgacctctccatcaatagattcaaccctggatggaggaaacaccctaacctcagatggtccaatcctcagcaacaacaacagcagtctgctcctttctttcaaatgctgctggcccaagcaaccattcatttctccaccattccacaacatcaacaaccccagaaacagcacacaatagatgcccctccacagccttcgcgaagaactagtaagcaatgaatatgctaacaagcg

SEQ ID NO: 277820 - DNA, 591 bp, Glycine max
  unsure (1)..(591): unsure at all n locations
gcactgccccacacaaacattatacttcctagtatttcacttctcttacnnntannaaatagacttcccncaaggggttgatgcatcgtagacacaactggaacccccanacnnnagcnnnanccccaaagcggaggacacaagaacagccctttgccttaacgctttctgtgctccaaacaaaggagagaatggaggatagcctatgaggcccttcacttacgcaataaataataaacagcctcagacgcaaaagcggaggacacatgatcagcgcttggccataacatccatggggcttccaacaagggcgagatcggacgaccgccttgagggaccacacctacgcactatgaaacggctccaactcgaatgcggaggaaacaggaacagccctcagcgataacactcacggggctcccaaaaatggtgagaatcgacgacatccttgagggtcctcactcaagcaactaagaaacacagctccatactccaacgtggatgacacatgaaccatccctacgctcgacaccacatggggctcctacctactgggtactatccgatgattgctcttcaggcactcacccg

SEQ ID NO: 277821 - DNA, 431 bp, Glycine max
  unsure (1)..(431): unsure at all n locations
agcttgcaacttttataaccgncgatcaaatttttaatttaataacaactcttgatttaatttaatcatgattagccattgatcaaaaattacaattaaaaattgtcgttcattaagtgttaccatatttaacattaattaaagattaaattgatcatattcatactacttttaatgatttataatgttttactctacttattaagaaatatttaaacacacataagtctattttttaaattaatgtactttaaaatatattttatgagcaataataattaaaaacaatgattctataatataaaaataatacattttatattaacgaacagtaattatagtatgtgttataaatgaattacagatacgtaatatatttaaacaatcataataagctacgtattttttaataactatatatatttttaaaa

SEQ ID NO: 277822 - DNA, 407 bp, Glycine max
  unsure (1)..(407): unsure at all n locations
agcttgcatagttttatgcaactntttntattccaaaatatctntcctaantngctatctgaaaagtattacatgaacaaaaatatgagttggattaaccctttatactggtggccgttttacacattattttgtttttaataaaggacaaacatcatggacttcacgccctaaactctcattgtataagttttgcgcaacttgagctctgagcccccatagtcataagtttaattttcctatctctttcgtaagctccttctgtatctcttgattgaaattatatttgttcgttctttcgatcacttcttactttcacacacacacaacaagagttttatatttctgattttgttgaattttaggggggaaaattatgtccataataattattcctatcttggtat

SEQ ID NO: 277823 - DNA, 113 bp, Glycine max
gacaaagagagcacttttaatttagcgcataacagatgagaagaaacgaaggtaagatatccaaatacaggcggatcgaaaataagcaattgtgaacatggagtgaccacaaa

SEQ ID NO: 277824 - DNA, 313 bp, Glycine max
  unsure (1)..(313): unsure at all n locations
agctttaggatatctaattgatattataggttatgtttgttatctgntcgcctatcccttttattgccttagtaccatcctttttgcattatctcatattgcttttgtttgcttcttcattctgtatcatatttgacagtggctggaaaaagattgaagcaattgttgtttcaaagacaatcatgcatgttatttcaaatgcaagttgtaactggttatttacattatctattgtttctgggttgttatccataaattatgtggattgaactaagcatgttattactttttgaagtgcgactgataatgttac

SEQ ID NO: 277825 - DNA, 410 bp, Glycine max
ttactatgcagagaatatccaaagagaatacctccatctttcttagcatcatattttcctaaattatcttttccattattcaatacaaagcatatacaaccaaagatatgaatatgtgagatgtttggttttctgtcactgaacaaatcatatggagttgtctttaagatggggcttattaaagcccttatttaatgatgtagctatgcgagtgttaacgactttaacccaaaaatattatggaagacgtgtatcatttaataaagttctagcaatcttttcaaagatctattatgtctttcaacaacaccattttgttgaggggatcctggtgcagaaaagttagctcaatcccatgcttatcacacaataagtcaaattctatatttcatactcaccctcatgattac

SEQ ID NO: 277826 - DNA, 209 bp, Glycine max
ccctctaacggcattagtagggcaaggtttggatttattatgcaattattatgtttctttttttaaagatagaactcattatcatccattagttctgatcaaaatcgcttttgggtattggtcgtgaaggatggacaataaatctaacattaaacataaatctataaattaaagtggagacaatatttacttattagctcatttaaaat

SEQ ID NO: 277827 - DNA, 455 bp, Glycine max
  unsure (1)..(455): unsure at all n locations
tcgctaaatcaatcacatacatacatacatacatacttacatattctttcatggaantctatggttgaaaatatataactactaaaattaaattcatacatgagcagatgacatatcacagagtttcctctatcagtctgagtagtaattattcagggtgttacaactctaacttattttaagtattctacatcatataattagacactttaattagtcaccaacttattaaactaaaattctatttttaaactagttatatggtcatttacgaaaatgcccttcactttaaaatcttatgatttaattaccctatttctaattctatggaatctaaatcaccattaatcaaccttaattatcctcacttaatttgtaactttacttacattaattactaattttatttcaagcttctatattctatttctagaccaaaattcaattattaacat

SEQ ID NO: 277828 - DNA, 317 bp, Glycine max
  unsure (1)..(317): unsure at all n locations
agcttcttgcgttgccgcttttggttctcatattattccaanaacaaatccctcttatttccagctattttgaaatctttaattcctgaatgtataaccttcaaattgtcgctcgttcccctctttcttttctgcaaaaaagaaaatcaatatcaaaaaaaacatggatgaagtcctaaggatgccatgtacatgtgtatttttgaagatatagtatttatattccatcaagcatacattgactgttgattacatgtaatagacttttataacatgggtgccccaaatcacaaataataagcacaactaccaatctt

SEQ ID NO: 277829 - DNA, 430 bp, Glycine max
aatcaatcacatacatacatacattcatacatacatttcatagcatggaattctatgggtgaaaatatataactactaaaattaaattcatacatgagcatatgacataacacagagtgtcctctatcagtctgagttgtaattattcagggtgttacaactctaacttaatttaattattccacatcatataattagacactttaattagtcaccaactaattaaactaaaattctatttttaaactagttatatggtcatttacgaaaatgccctccactttaaaaacttatgatttaattacccttgttctaattctatggaatctaaatcaccattaatcaaccttaattatccccacttaatattgtactttacttacattaattactaaatttatttcaagcttctagattctatttctagacc

SEQ ID NO: 277830 - DNA, 358 bp, Glycine max
agcttgagggtgcttcactgtctatagagttttcggattcatggagatggactcaatcaaattctgaaacgaatgatacaaaatctgcatattccgccttgtgtgcaatgttgatgggatcctcttgtgatgactttcttcctgaaatttataagttaaaagttccaccaaaataaacattttcacgtggatgctttctagaaataggttacaaagtggagataacttggctaagagaaatgtggctgtcagtggtggcacatatttttgcatggtttgtggtatttatgaagaatcaatctctcactttattatggtcccctctagtcataaatatctggaaacgttgctatgcatg

SEQ ID NO: 277831 - DNA, 268 bp, Glycine max
  unsure (1)..(268): unsure at all n locations
ggaatggctgtgctcaaagnctttggataatggtgcaacctacccttctacaagagtgtgggctaaaagccaaaggagtggcttccgaaaagctaaaatgtatgggagtcgccaccaacgtttatttaggaaaatgctagaaaaaccaaagaggttgggaattttgaaaataaggtgtcaagagctatttacgcatatggaagggtctagcaccccacgcgcctgtcacaagggacggcggccattaatcgattgtgtataacgtgac

SEQ ID NO: 277832 - DNA, 446 bp, Glycine max
agaatgtcgctctgataccacttgttacaccactggcctcagacttcttaggaaggggggtgtgtactaacatgaatcataatatgtcctctatggaaagctgtatatcactatattgcgtcagtgtaaatgtgaccttaatgacaaatgtatatagagtttaatatgccatggaccactgtggatctgcatgtaaagcagaaattgattttggttgttcaaggaagacaaagtgcacacttccttatagactgggttctgtcgcacccgatgagcctgcgtccatacacacaagcaagcccgtgtgagagagacactatagtggtaaagactgatacatgactctagacacaacgacattccctccttcgcgcttatatgtccacacagcgaggagaccccagtctccttgtgcgctggagaatgagaataacattataagtagt

SEQ ID NO: 277833 - DNA, 274 bp, Glycine max
tgagatcaggaagtgtagaacggcgctacctcctgctttttggtcgaccgctgaatgattcctcgagacatgactcagtgctcaagacaccttactgacacaaagtcgcgtgatcttgatccaataacaatctagacctattcctaccatacccaggcatttgcgtactcacacaccctacaatgtaccttaccgcgcgatctcctgcctgaacacatgtaatgacaaaccaacaccacataacatggtcgctagatgtggctggcctgctgtg

SEQ ID NO: 277834 - DNA, 387 bp, Glycine max
  unsure (1)..(387): unsure at all n locations
agcttcacttgcatgccaaaatattcatcattaaaccttaacttttcctcaggtttctctcctctacattctagcatgccgcaatcaccttggaacaggtatagtggttactccaactctggaacactntatcaaaatagacaccaaggtggtaattacatgttaaacacgggaaatcaaaatcagccacattctgtagggcatctccatcaacctatttacatgagcaacaatagtaccatttctcagcattctttccctaatcccattgttgctgcaactgaggcaataatcaaaagcaacccaaaatttcaatcagcactagcaactgctctcacaacatatgttggcaatgaagctagtagtggtaggacaagagaaaatatg

SEQ ID NO: 277835 - DNA, 460 bp, Glycine max
  unsure (1)..(460): unsure at all n locations
ntcagaaagcgtngatgtcgagtgtatactatntttcttgcatgttgttcgtagcttgtgtcttcttcatagatagggcatgcatgatggcccttaacactgtatccactcaaattcccatatgttggaaagtcattaatgatacaaaatatcattgcacacaacttgaatgtttcattntgatacggcaaccccctcgtcccacaactttgtcaagtcttcaatcaagggactgagatgaacatcaatgtcatttcttggttgtcttgggcccgatatcatcatacacaacatcatgtattttcgcttcatgcacaactaaggaggcaagctatacattactagcaaaataggccacgaactgtgttgagtgcttaaactgccatacagatccattccatcactggcaagtccaagcctaggatntcttgcctctttttcgaattctggatacaaacta

SEQ ID NO: 277836 - DNA, 362 bp, Glycine max
  unsure (1)..(362): unsure at all n locations
gatccttaagcacctgagctgcagcttaacaacttgctctggataccatatgttggagctngagtgcttcactgcacttcacacacacacacgaagatgaagagagagagtttgttcaactgaataacagaaaaatcaatcagtgtgcgcccatttatttattacttatatactcaatacatgtgtcactcatgtatgagtctgcaatagggaaagtcaaaaatacatttggagacaatgcacactagcttatacaccttttattaacatgaagaacatcatcactgcccggccgctggccaatattttaggtcacgtctcaacatgcatgagtgcttgacaattatttaatgaaatttaat

SEQ ID NO: 277837 - DNA, 406 bp, Glycine max
gctatcttggaattacagattctgttggtcgatatcaatgtgtctggctaaaacaggcaaatgaaatcattggcaccaccactgaagagcttgtccttaaggcaaaacatggaagcatgactctctgatggtgttgtcaaaacgtgcttatctgtctcatgtacatgtagcgtgggttgataatgacaatcctgaaattgcctaatgttagaattttcctttacacaatcctagattgatgtaccatctcttagatggaaagtatgtactgctttctagatacagtcttctgtatttttcatggtagtctattgcaatgagctctctataatttattcttttgttcaagagtttgtgctaataaaacctaatccctgaatttatatcacactctattaccatgctt

SEQ ID NO: 277838 - DNA, 180 bp, Glycine max
agcctgtccgcctaacaattctaatgtagacatgataaaatcgtttatctgctattcaaccgctatattacttattccggcgtatttacatgctcttataggcaccactaattgcttaataaactactccacgacattcctaattgagtaattgggtacttcctaatctatcgtacacac

SEQ ID NO: 277839 - DNA, 495 bp, Glycine max
  unsure (1)..(495): unsure at all n locations
gagcacnnnttganacttgatgtgtcntagcnnacanngannganngacgaagcnggaaacaaaagattccanannngccccctttttttttgtacgcaacacagcacaggggggttttataaacatagatagacccccccccagctgtcaacgacaaagtgagtttatgtagatgctatgactttccttctcatttgtcaaacacaaaacttgtcactgcctttatttatcctatagctacctccattgctttggctgcaacccgtcagcacacaatgtgacccacttctattgtttgggtggcatataatttgcgcgaaaaaggttgctttctatatgataaagatagatcctcgaagatgttcgcatggaacttatatatatgctaaacaatggaatttttcttttctataccagactaacattcatgtatcttggaacaacaaaggttgtgatttgtgagtagggtctttctcacacactatacagaaaag

SEQ ID NO: 277840 - DNA, 301 bp, Glycine max
tgacaagatgtctcaagtgaccctgttaaatatatcacattaagctaaaaaagaataaaccaaaataacctctcaaaggaaaggaggcaaaaatatctgaaagattagccccgttctgaaactaatagagaccaaacattaaaacctagtatcattgtccttcccttataacatttttactttttcactaaattagaggggcaaaagtggagcgatgtattataactacgaaatttgaaaaaccattcacggcaacatattaaacctataaattgatatagaggctcacaccttaaaatgc

SEQ ID NO: 277841 - DNA, 238 bp, Glycine max
gcatatctgcgcaaaatcgctcgaattaggaagatgttcgccatcatacttatgttcataatgaatagcaatttgagtttccccaataataatctcaagcactggggctatgctgttgccataatcctgacacactcttgatgacaaattacagctcgatatgggtctaaaatgattaacctgagaggcctgatcatgcttaggaattagcgcaatactaacatggttgagctgcttt

SEQ ID NO: 277842 - DNA, 321 bp, Glycine max
gccgcagctgcacgacaacgagtttagaccgttcggaaagacaacattcgctgctggggagagacagagacacacatggacaccaaccgcgacaagggaaaggccattcaaaagcatgagagacaccggaaggggaggagaaggccactatctaagagggctgggaagacaggcgtcagaacccaaacagaccggctagacgctacgtggaacgaacggaataaggagctcaggaaagacttgggaggcggggtccgcaccaccgtgaccaggaaaccccgaataaaggtgggggccccactcctagcgaaataagcccac

SEQ ID NO: 277843 - DNA, 409 bp, Glycine max
  unsure (1)..(409): unsure at all n locations
tctnatttcagcagatgaagatgaatctgcggccatattatggacttctctaaagacaatagcatcattgcttgcgttgaattgacggaagctggaagccatcttctcaatcagattcctagccctaatatgagtcatatcaccaagagcttcaccactggcagcatcaatcattctcctctccatgttgctaatcccttatagaaatattgctcaaagagatgctcatatatctggtggagaggacagcctgcacacaattagttgaatgtttcccagttctcatgcaagctctctccactaaatggcctgatgcctgaaatatcttattctatggccgtggtcctaaatgtagggaagatattgtccaataacaccttcttaaggtcatcccaacttgttatggacc

SEQ ID NO: 277844 - DNA, 516 bp, Glycine max
  unsure (1)..(516): unsure at all n locations
ttacaggctcaggacaccacatgttcacccctccacagaccctcagaatgatctgcatgcgacccgatataaagtcaccgagcagcagctctacagaaagacgactttagtccatacgactggngaagaaactctgcatatatttcacgtgaaagctggatcccaggggcaaggggacctttatgataaaaacttaggcagaatagcgataaatccaacaacaactcttatgcgaaagcaagatccaatgtccaaaacctataggcataataacgcgcacatcttaattttaggatcggatcacggacataaattgtacatatgcaggaacaacaatgacgaactccctgcgattaaacacatcataacttgcgaaactagaaccttggatttatgaaaaagataattaaaaatgttattggaacaacattatatgggctggaaaaaaaacaatcacgaatgaatagctgataggcgcggggctggtaactcattactacaacacgacattttacc

SEQ ID NO: 277845 - DNA, 414 bp, Glycine max
  unsure (1)..(414): unsure at all n locations
cgtgatagaatgtggaaacctctggaatattctagttatgtttggaaccttctggaaccatatggaaggatatgaaaaagagtacaagagtgtagagactcctagaatgtgtggagcattctagagaattaatctccaccctatgatacaagatatctccaccattcattgtggagatggcagactataaataaggtgtggagccttcattcctaatagatccaagttgagataaatagctcgggaagtctctatcctcaagcttgagtgagccaccatagactgagacaattctgtaaacacatccttgataccctactatcactntgtatagtggaagaatctccatatcggagaattataaaccngtgctcccattactacctttaattactaagagtctatcttaacttc

SEQ ID NO: 277846 - DNA, 181 bp, Glycine max
  unsure (1)..(181): unsure at all n locations
actatttaatcggatgcctgaatggatcccgtaatatatcgaaacgctcgacattgaatgatgaagccctaggcaaactcaaaccacactaactttntactcggatgtctacctgagccccagaatatatcgagacgctcgaaattgaatgtggaaccgatgagccaattcaaacgacaat

SEQ ID NO: 277847 - DNA, 403 bp, Glycine max
aactcagcttcacattcaacttctagcgatcgctaattatcatactctattattcatcctagtcaatagctattgtcgtttgaatttgctcatagcttctacattcaattccgaccgtctccatatattacgggacttaatcagacattcgcatgaaaagttatcggcgttcgaatttgctcatagcttcaacattcaacttctagcgcctcgttatattatacgactcaattagacatccgattaaaaatatattgtcgtttgaatttgcttagagcttcaacattcacattcgagcgtggtgatatattactggactcaatcaaacatccgagttaaaagttattgccgtagaatacgctaaagcttctcattcaacttcgagcgtctcttttatatagga

SEQ ID NO: 277848 - DNA, 150 bp, Glycine max
ctttctcgctgaagaatacactttttagttgttgttttcggttcgtgctaaaggtggtgttctgtattggaagtgctgaacacagactttgtggtagattatggatggcctctgtggataactgggtggtgggtaacgaggtggttcttc

SEQ ID NO: 277849 - DNA, 464 bp, Glycine max
  unsure (1)..(464): unsure at all n locations
aagcttcatggaggaagagaatgagagagagagagaggatggggttggcatgggaattgaaggagattaacgagagaagttgaactctgaagtgtgtctcacaagttctcattcatcgaagttatgaaaagtgtgacatatgtttctatttatagcttagcacatgggaagcttccttgagaagctaagaatgtgacttacttgggaagctataggaagaaagcttccttgagaagctaaaggggggctactcacacccctccaacagcttagctcaccccatgccagaatatatgaaaatacaatgggaagcttccttgagaagcaaggaagaaagcttccttgagaagctagaagggggctactcacacccctacaatagctaagctcacccccatgccataatacatgataatactacanaagtccctactacaaagactactcataatgccctgaaatca

SEQ ID NO: 277850 - DNA, 365 bp, Glycine max
  unsure (1)..(365): unsure at all n locations
agcttggcaatggtataacatgcagtggtggtttgatgtgaggtgaaaatctctgaaaacatgttaaagaaaacaattntttaaaaacatttttctactcaaccaacagatattggatgacaaagttttaaaaaaaataaaatgaaataaaactaaaaatccaaacagatttatgtgtttattttttaaaagcaggctatagtaaattaaagtgttttcatgaatgcactctaatttcatgtgtatatgtatgcatgtatnatttattgtgatgctagaattttctttcatctgtgactgaattttgtggaaggattgaaactttgtgtgttctactggtatgcacatgttgagcagtctttata

SEQ ID NO: 277851 - DNA, 420 bp, Glycine max
tacgtctctaaataagtcgattctgagtggaaaccttatctccggagtgatcccggagacgctggggctgtgtaaggctttgcagttgctggatataagtaacaataggatcactggttctattcctgatgagatcggttatttgcaagaattagatatcctcttgaacttgagttggaattctcttactggccccattccagagaccttctcaaatctctcaaaactatccatcttggatctctctcacaacaagctcacaggtacactcacagttctggttagtcttgacaatctagtgtctctaaatgtctcctacaatagcttttctggttctcttcctgatacaaaggtcttccgggatctacccactgctgtcgttgctggtaaccctgtaccttgcattagcatgtgtcatgc

SEQ ID NO: 277852 - DNA, 411 bp, Glycine max
agcttcaagacttcaacagttcaaacctcattcttattgactcataaatattatgatccttttacacgctatcaaagttgtcccagcaattgcaatttaaattgacttgacttggaactcattttttctgcaaacttgatttattttatttttctacttcatatctttgtttaaattacacatagaaatgaaataacattacacatgcatgtattgtcttgaaaccttcacggcaaattcttctttttaatgcattttttcaactgtcaaggtaaaacactatcttagtgtatggactgagttgctctctgaaatttaatttaaaaatgttacatcttcataatcttaatatccacaagtcaagatgtactagacggaaattataagtctggttcaagagaattgcataat

SEQ ID NO: 277853 - DNA, 435 bp, Glycine max
  unsure (1)..(435): unsure at all n locations
cgaaagctatntcagtataagtaattaaatagttgtanttgcttattaagataagatctaacttcaacgcattgctagaataactcttaattacacattcatcatatcatctgtcaatcaatcatgaaatttgaatcgagcaatattatccatttcataattccataaaagggtgaaaaacttaatttaccatgcatttatttttcagatcacatacgtacaagtatttttaatgacaaaaaatcattctaatgggtgacatgatttgttgaataataatcagagacgagaccactcttattatgctagaacaccgtgcgccattccattcatatgttccgttgtgactctccatcatgtttaaagttcaatggatcactctaggttcaattatttaatatttcaaagatggatttttaaggctttctatgaaaa

SEQ ID NO: 277854 - DNA, 253 bp, Glycine max
  unsure (1)..(253): unsure at all n locations
attgtagtaccctttcttgagtgctntgattttggaggatatttaatctccatttatatgtaccgttctgtccttagtcctttatttttgctttcattatttaaaaaatatcttcaagttaagcagcatttacatgtatactgtttgattcttttcagtacataaatatgagaaatcagagggtatcacttctcctgaagaagaggtttacaacccctaattgggtaaggtcagcctgtcatatacccttttt

SEQ ID NO: 277855 - DNA, 395 bp, Glycine max
tcggactcgacaacgttattaaactctatgacactctcccatatcccagtgttgatccaatgccatggaagaagagcatgaatacccctctccactcgatgccattttgtcgcgacacgcatcactcaccctcactaccatgtcattgttgtctatctcttcactcaagtcccaaaccacacatgttgttttcggaagccaactatccaaaatgtcactaatgccctccatttggcacagtcccaagatgtcttcatcgttactttcatcaacgctcctgtcacatttatttacctctgtctctagctactctattcttggctcattcacatctgccacgtcagcgtccaagacccggaaatcactatttcgttgagtaaacgtatggttgggtc

SEQ ID NO: 277856 - DNA, 347 bp, Glycine max
  unsure (1)..(347): unsure at all n locations
agcttaaaggaagtgaacgaattagcatggttataattgtctccacattgattggtaaatctgctccccaaattcctgaaaaatgtaaagatccaggtacattcagcataccttgtattatagggaatagtaagtttgacaatgccatgctagatttaggagcttctgttagtgttatgcctctgtctatatttaattctctatctctaggtcccttgcagtcaactgatgtggtaattcatttagctaatagaagtgttgcctaccctgttggtttcatagaagatgtcttagttagagttggtgaactggattttcctggtgattnttatatattgaatatggaa

SEQ ID NO: 277857 - DNA, 439 bp, Glycine max
  unsure (1)..(439): unsure at all n locations
tatatcnncccttttaatgattataaagcaaattccaacttatgcaatgcatgaaaaacaaaatgaaaggaatcagaactgggttgcctcccaggaagcgctcttttaacgtcattagcttgatgcatatacctcaataggtgatattaaatttggccctcactttcaggacctcccttacctgtaagcaaacattttgttctggcacaggcttgtcttctacaaataaatcaaaatcaattctttgatcttcaaaacccatttctagtttctttcttcccaagattaagggaatgtcattatcttcacagatatccattacaacaaagtctgttgggaagataaaatgttttactctgacctaaacatcttcaattactccgtatggtctggtaatggagcggtcaaccaactgtagagtcattctagtgggcatgat

SEQ ID NO: 277858 - DNA, 345 bp, Glycine max
  unsure (1)..(345): unsure at all n locations
agcttgtgacagagaacaaagaggcttagtcttcgttctgggactagtcagngttgtctgttcttcgctttttcaagtctgggctctctaacaccaaccaaacaaggttttcatggctcaccaaggttatgttggcttcaaagtccaaacttgagaaattagtttattaattaataagtatatttggtaaaactatgatttattttaaaaaaataattagaaaattggataaatatattaaagataaaaatatataatataaaaaactaaacgataaaagtagcatttcaaaaaatattaaaatgtattaaaaaaaatatgtttatcaaactgtcaaataaattt

SEQ ID NO: 277859 - DNA, 471 bp, Glycine max
atacaatactcaagcttatgagataggactaccattcattaaaaagcctggcccataacacaagaatgacttcatagagtctcaagctttaccagtccttgataaactcctagaagatgtaagcatgcatctctacagcactattgtccctatcacgtttcatatcagatgcgtgagtgtgcatcttaattagcaatagaaataggtaggtttgttagtaaaatacctgtctacacattaaattaacgcaatgtggggaggaactgtttccttgcctgaaaaggcattttcggaatcgaaacgagaatggagacgattatcacttgtttcaacaaagccatttcaaatgattggcgtgtcgaaattgctcttgtttcaatatgtgacagagtcattatctgcagacgtcttcgctgaaatgatatgaccaatatatttaagccactccagaacataattaaaatacatttt

SEQ ID NO: 277860 - DNA, 424 bp, Glycine max
  unsure (1)..(424): unsure at all n locations
agcttgtagaatggctagacatgatacatgttatggcttggtttggttcaaggataaaagggatgccccacattatttccatgacacaaatgcaaaaaatgatgatttggaaactttatgcaaaactggtcatgcatgcacctatgcggacactcaaatgtcaaatttttatggtcatgtgatgctagggctcaggattcatttcctctattntaatcaacccaatgtttccaaaatatgttcttttatcaatttgtgcattcatccgagtccatttcgggcgtctgggaaaatcttcacagcattcacccttcaggtgtatacacatttttttcaaaaactagttatgatcagttgaattttccaagaaaagtggaagtcatctcttttcaaagcatgttgttttttagtttgaaacttattt

SEQ ID NO: 277861 - DNA, 456 bp, Glycine max
gggcaagagacagacgactcatttagcgagctgatctcgcgcttatcacgctgcttcaatttaggtgctcttctggattccttcttcacgctaagcgtgttgaagccgcgcttagcgatggatacgagctaagcccactgagttcgcttagcgcgacagccactttggcatttcaagaaattagctcctttttacctgaaattgacagattttaacattaattccaataaaagagatcctaatgacaaagatctaaacacagcaaagtttatttacaattcctacaaatgaactataaattggggaaaactatacatattttgcaatggttcgggttcgggtgaagcatcttatctttcccgctgacttcgttgtaatggacattgaggaagatgcagatattcccttaattttgggaacgtccattatgtctattgcaagctgtgtagtggacat

SEQ ID NO: 277862 - DNA, 406 bp, Glycine max
agcttcaaaggcttagacaagggactatgagtgttgtttaatatagacaaaaaatggaattactccttttaagagctggacttagggaggaggaaagaacaagcatagctaggttccttagtgggcttaatatggaagtgagggacaaggttgaactccttccatatagggacctagatgagctagtccaactttgtataagagtggagcaacaacttaaaagaaagccttcttcaaaatcttatggctctcactcttatccaaggaaggaccaagcctatggaattttaggggctgcaccttcaaaacccaaggaagaatagggtaagaccatagagaaatacacccctaagactagttcccaagaaaggactaacaacattaaatgctttaaatgtcttgggag

SEQ ID NO: 277863 - DNA, 445 bp, Glycine max
  unsure (1)..(445): unsure at all n locations
acatcaactatatcataattcgatcaatgcatggtatctgtgaaatggaagatgattatgttgtgatggataagttgcaatttcctctattattntaatttgaagaacaaattactttcttaacctgtttctttgttggaatttctgttgtgacaatattatgttttgtaacatcccaatnttctcaagttgggaagtttgatgtaaaaaatgtctatgcttgttgatatgcaatgtagtagtattattcttagtgtaatcatacatataagacatagaaccatcatcattagatagtcatgtgacctagattaagtcttgagtctaacgagtagtggtttagatacatagagcccttattcaaattgtaacgccctgtctcgtaccataattattcctcatgaagaaccacaggtacttactaacaaatatatactattttcac

SEQ ID NO: 277864 - DNA, 263 bp, Glycine max
  unsure (1)..(263): unsure at all n locations
accacttgtattttttcaatctttcatcttgctcttctctttgttgtaaagaaggctccctggttatggaaagttaaatcctctattggatctttcctgtaggtacctgatgtaaatatatttctatctaattaatgatgttttgtgtgttccctgcgctatctgctnttcactccaatatgcctttaccttgaccacgtagatgcatgctttgttagggtcatacaacagtggacactggtctgaatctaaagtccttgata

SEQ ID NO: 277865 - DNA, 469 bp, Glycine max
acacatgaatactcagcttctaagggaagtttctaagagatcttctcaggtagcttcctagtctataaatagaagcatgtgtaacacttgttgtaactttgatgaatgagagtcttgtgagacacaactcaaagttcaacttctctccctgtttcttccttcaatttcgtgctcccccctctctctttctctccctctatctttgtctccattgaagcatcctcttcaagcttcttatccaaagctcattttggtggcaaagctccttcttccatggcttattccctagtggatggcgcctcctctcacctcttctcctttgtcttccgctgcatctccatggcggaaaatcaccattgaaggacctcattgaagctcaaagatccagcctccatagaagctccacaagcaagctttcatcaataatggagttccaaaccaagtgacttgcccctaagtacaaatattt

SEQ ID NO: 277866 - DNA, 310 bp, Glycine max
  unsure (1)..(310): unsure at all n locations
tcatgcttaatgaacatttatgagtaattggtgtatgtgttgcttaatcacataacgaatgtcttatgttaaatttctcttaataatttaatttagggttggattaagtggttaaactgataaaggataaattctcgcaacctaagataagagacttgcttgtgaatcaaggggaagcaatgcattttaattctaatattttctagttcaagtttactcgctgtgtaatttacaaaagcagacacccaccccccccaatttgttgccatttcctactnatctgtatgaaccattgatttatcaatgctca

SEQ ID NO: 277867 - DNA, 427 bp, Glycine max
  unsure (1)..(427): unsure at all n locations
gcctaagtgcttgattcaatattgattcaagacttcaagatcaagcatcaagaatccaatccaagattcaagagaagaaatctagaagcaacaagtcaagacttcatataggataaatattaaaagagattttcaaaaaccaaatagcacagctttgttttacaaaagaattttctcaaatgttctaggttaccagagtgattactctctggtaatcgattaccaattggcattaatcgattaccagtgaccagtttgggtttcaaaatgttttcaaatgatttataattttccaaaatgattctcaaatagtgtaatcgattactatattagtaatcgattacaagtgaatctgaacgttggaattcaaattcaattgtgaggagtcacaactntncataaaatacattgtgttatcgagtacacc

SEQ ID NO: 277868 - DNA, 362 bp, Glycine max
atgaggataactccaatataattactgaactctccaccacagaaagaactagtaaacataggaaagccatggatgccttagtgtttgtcttgcagtaagccttcttttggggttgatgctaagtaagtatctgacaaagtcgataaacgtagtatcagtgacctgtaggtgctgctccaatgatgactcttctggaattatgtactccagctgatcagtctcctgtgcaatgtgtacaatgttaaagattagatggaaagaactaaaatgaaatttagaacgaggtatcaaaacaaattatgctgatgcatgaaaggctttattttcttcctttatttgcaaactagacggtgaaattccct

SEQ ID NO: 277869 - DNA, 465 bp, Glycine max
taagcaaaagtttcatttaaactactcttccaaaacttttatataaaagtaaataaatgatattgtctattgtacttaaatataaataaatttaattaattttatgccatttaatgttatcattcctaaaatattattctttcgtctaattctttttctatcttgaatgactctcttatttatgataataagtttcaaatgaaagatattttaaaagaaaagaaaattattatttttactttttcacgtaagattaaatgatggtaggagatgtggagtggacttgagaatagatatgttttgcttaccttcataggctagttttttctaaaagataatttattctttggtacagagactcctttgtcatgtatatgatagcattacttaaaagtaatgcatgtattatctcatggaattcaagataatgatatatgatagtttattcattctttgatatcatac

SEQ ID NO: 277870 - DNA, 221 bp, Glycine max
agcttccatcaagtggtaatcagagcacattatcttttttaggtgctccttaaacctccattaattttctttctttaccttctcttccattgttgtttcttcattcttctccatgcatctcctcacatgtcttgttctaaatgttgctaacatgattacttataagtctccacaaattacacttgctatacaaactatatttgattttctatggctcaaat

SEQ ID NO: 277871 - DNA, 401 bp, Glycine max
  unsure (1)..(401): unsure at all n locations
gaagaagaagctcaaagagactcttatatcattgaggaaaacttgcttgtgtcaagaatgaattggaaaagattgatttagtgaatgattgatttgaaatgcaaaacaaatccttgcttttatagactcttcatgtctggtcaagagaacatttgaagagctatgacttttagaaaaacttaaaaccaatttgaaaaagtcaaaaactatttgaagagttacattctttgatttgttcagaaactatcactggtaatcgattaccaaatcagggtaatcgattacacaaagcttttttgtgaaagaatgtgactctttacatntgaatttgaatttcaacgttcaagcacactggtaatcgattaccaaaacattggaatngattatagctttttgaaatc

SEQ ID NO: 277872 - DNA, 378 bp, Glycine max
  unsure (1)..(378): unsure at all n locations
agcttcatctggaaaagtatcatagatattgttctccttggaagtgactttttcattcacaagtctagataggtggttagccactaaattntcacttcccttcttatcctttatttcttgatcaaattcctacaacataagtatccacctaataagtatttgtttggaattaggcttagttaagaggtacttaatgttagacaagtggcctcagatatcttaagaagggggggttgaattaagatattccaaacttttctcctaattaaaaatctatcttactttntacttaagttatgaattcccttaatgacaatcttcttacatattaattcatatgaagcaacttgaattatgaatattaagcattaatatata

SEQ ID NO: 277873 - DNA, 350 bp, Glycine max
ggcttgtacctcatcactttcttccgaagctttaacctcattgtctctcacagtctttagatttgggagccaatccaatccttgtgtccggactctcagccacttatgatagccgccgatgatcccattactgcttcccctaagctctctgtcctttcttcacgccgcatgccatgccttgcgaactccttggagtaccctcgcgttgtggtcactgaaaccccgtgcgatgaaaggcgtgatgctttcgtctgatggcactcctctcatggggtagccaagctgtcttatggcgaggacgggattataattaatacaaccccttgttcctatcaagggaacatttggac

SEQ ID NO: 277874 - DNA, 444 bp, Glycine max
  unsure (1)..(444): unsure at all n locations
tgacttttcactnttgnngaaaagcaaccatgatcaatttttaagtctctacctatatatgtttagggataagtaataggaatttgccttcaattttttttggtnntttttttaattcctctaattggctagnntntctttttttcaaaaagggatcacttnatccctttaaccctcttaagtcttgttatctaacaaaacaaaaaagaaatacatttcaactcgcaagcgtatttaaaaggtagaagaaatgtttncttggacaccccatgtgctattctacacctagagaaagaaagacaatagagaaaagtgatagatgcaacagatatttgatgtgacaaaaagagagagatagggacanaaaagagtggcaagtgtcaaatattaaggttatactactagatacattacccgctaattcctacacttaaatatataaac

SEQ ID NO: 277875 - DNA, 444 bp, Glycine max
  unsure (1)..(444): unsure at all n locations
ntaatggttaaagaggaggataaggaggttagtgtctcctccaagaggttagctaagaaggaaagtcatttttcaataaagacaaacattaaagaaacttcctctcttagacaacctccacatcttctcctttgtaaaaagacacttgttagcattgccacacctattgggcttgaggttattcctcaagtaaaggagttattggacgaaggtttggtttgtaagagcttaaatcattgtgctctgctggtgcccaaaataggtattattaggcaccaaatccctaaaatagatgatatgatgaatgtgttgagtggtgcaaccctcttttgtaaaatcattcatgcacccaacatctttatgattcgtgtacatagggactcattaattaggtttgttcttatttttggtttcaatacaaacctaggtgctcatatgggacac

SEQ ID NO: 277876 - DNA, 400 bp, Glycine max
  unsure (1)..(400): unsure at all n locations
agctntcatcactcagcaatggcaactcatctggctcttcatcaaagtggcgcttcctaggactccacgtgtcctcgtacacccccatcatcgtacccccgttattatggctctcgtcgaaaacggcgctgtcctctgtgcaaaggaggctagaagcaaagtcaaaactgggtgccattgcaagacctcgaattgaaactcaactaccctcttcctccaaattcttcacgcacaaaaaaaaaaacgaaactttatgttcagattattgatagggtctgtgtgtgagtaggcgagtggagtttcttttatgaacttgttaaaatgaagaaatgacaatctgtggaaataagaacaaaaccactatagagctccacgcaatcgtgttggttctctctctctc

SEQ ID NO: 277877 - DNA, 464 bp, Glycine max
  unsure (1)..(464): unsure at all n locations
acacttgaaactaagctttaagagcnttgacttacattcgggagttgtgcgccatcaccacagttgtgaagaagtggcgccagtacctattgggccgccacttctacaatataactcatcaccggagtttgacggaattgtagacttaggtgatccagacaccagagcaacacatgtacctcgacagattaatgggttatgactacgacatacaatatcgctcttgtgtgactcaccaggccgcagatgctcggtcacggctatcggaatcacagaccaccatgcacatgatactctttgttccctgtttgacatttctcacagaattacgccaacaattagcttgtgaacaaggaatacaggcaacgtcggagtgctatcctcgaatcaccagctgctcattctggattcttggtggtgcacgatctgatcctgcacaatggccgcatttggctctatcacga

SEQ ID NO: 277878 - DNA, 315 bp, Glycine max
  unsure (1)..(315): unsure at all n locations
actgtagctcttagagaatttaacatggaagcatctttattaattacaattgaagtatataagttggttttaacatataggagataaggtttaataagcattnttggaaagagctgaaacctgagtttctaaggtttattgcagaatttcatgtgaatgcttcatttcctaagggactcaattcctcattcattgaaaccagtatgcaacattttaaatgaaacacctgtgtataacattttaaagcaaacaccagtatataatattttaaatgaaacagcagtatatacatactagttcctacgtacgtacctt

SEQ ID NO: 277879 - DNA, 444 bp, Glycine max
tatgcgcatatttccttacaaatgttctcttgcacaagacattctattaactcgaaaaaaaatgcacccatatacaatcaaggcagcttcgttacctagattatttacacgtacttccaaggtgtatttgttacttacatcacacacatctccttggctaaattcacatacatgcatactcaaagcattttggggtaccaaaaattgcacatgtgcacatcttggtatttctaatacctatacatacacaaacttcatgatgaatcttgactatctacacaataaggtgctacatttcatgctcttttcaagtttttgctacctaaagccgcatgcaaattcaagtattatttcctttgctgactaaaattgtattcaaattaataggtatacatattttggtaatgtgtcttctttacataacatgcaacatatctatgtata

SEQ ID NO: 277880 - DNA, 239 bp, Glycine max
cggacggatccctgctgacacatgagctagcgtgaatagacatgatcgcgtgcctttcatgcaatgtgacagagcagttaaattgattcaatcacatggacgggttatgttctttgcacacagactgggtgtttcctaataggaggctttggcatactggtcattttgctgtctgcctatgccgcctcctacataacgctttttttatcgcactatctcaacgcttgtttcctgtatgc

SEQ ID NO: 277881 - DNA, 336 bp, Glycine max
gctaagcttggctttagtcccatttgtgtaattcttacagaatggtggggagttatattagctacgttatcccttgggttaccagccaatttcatcactaagttgatagatgaaatgccagatgatgagcttccaactcctaccactgtcaagtgtagtcaaaagagaatatttgattctaattcagctgtctaacaattattgcatactcatccttgaattctcaactgtctatcacttctcctagctcatctttgtcttctttcttcatatccacctttacggtctatatgagcctacccagtggatatagatgctcttcttgaatcatctaag

SEQ ID NO: 277882 - DNA, 285 bp, Glycine max
gcaagctttgatgatttactgcttctagctctgtatgtcaccttgaaaactttcctcactcccctttatctccaacaaggcctttttaatctcttctttggtgcctgcaacctcttcatttattataagctctatttctttttttgctgcttctgtatcggacttgagcttatcaagagtttttgacaagttactgactattgatttggcctttttctctgcagcagacacggcttctaatttagattatgctctcaagagcttgtaactgaggtttcaaacctt

SEQ ID NO: 277883 - DNA, 373 bp, Glycine max
ttatatgttctagctctcatatatatatagatttatatatatatatatatatatatatattaactaagtcctatgtcgtatataggtgtatctaacgaaacttccaaaagataagctcatatgctctaagtctctttcaagcaaggacggaggctcgttggaatggccggaatctattcatatattcgacgctaaagaaagtttatctaatatgaatatattaaaatcaaatttttcacgaaatatttattcttatatattttttaaatggtgcgatattatattaataaaaaatatatttacaatgtttatagtcagtatcgcatgttaccacgaacattcatggaattataataaaaactactatttacct

SEQ ID NO: 277884 - DNA, 495 bp, Glycine max
  unsure (1)..(495): unsure at all n locations
ccctaccaattgggttaggcagttctaggnaactntgagatganccgcggcatgcaagctgtgcgtantgacttcttaatgcaactttccatttgtatctctttacggagccccacgaatcgagtttttgattatgcgtcctccacctaccagcgcggagccatgcatagtgattgcctagagcaaatctccatatccaacccttattccaaaccacaagaattgcggaatcaggcataggtaacacgccttcaaggttggacattttcccaatgattggttaggaaagtacggctttcttaacacttttcatagcccaaagaaattgccatctctatatgtgtctccctcttctaatacgacccatgcgagtcgtttgatatatcaaattcccatcacaaacttttcagagccacttaaatcgagttttctatctccctcccatccccctaattgtactccaccgtgagattgctactcaaccctcacgctcac

SEQ ID NO: 277885 - DNA, 582 bp, Glycine max
  unsure (1)..(582): unsure at all n locations
gtgtggacacgcatcgcagtaacctcgaaacacttctctatatctctnaatanttcgcaaaggggnnnnnnnngtgggatgattgactgcattgcaaacccatannaaacncaagcnncgacacatgcggcaaggcgggcaaccataacaaccggactacaattcttaactagaccatnggacagccttacagctaggcagcctattccaagtctgcctgagtgggcttatagcccaaaccatacttcccacgaatcccaggagtgtttaacatgcaaattctgcccccgctgcatgccgctaaacccaccccgggtacaaaaccgagccccaacatagcgcgggccatgaaaaccgctgcaacgaacagacagaggcgcccatataaggagcccactgacgaaaggcagaccacctgaaaagacgggaggacaggtattaactatactccagcggctaccacataacagaggaacagatgggcatcctacgatagatatacaatcctgacactacaccaattagccaggaaccaattacagactcgcgagatcgagaccgaagaggccacaatagcatccc

SEQ ID NO: 277886 - DNA, 358 bp, Glycine max
ctacaaaaacttgcgacaagaatttaatttgtgttcaaagatcataaggaacttgaaaaaatccttaaataaagtacatgtttctttagataagtccactcagacaagtgatgcttgtgaaattcttaaggataaagaatccaagctatgtcttgagaatgagacaattgccaaagaaaaatctactctattagagaactttaggagttggaaaacatattgaaaggtttataaaaggacctaaaggaactaaacaaactttacgatcatcatagtgaagatagacatgatctatggatggaatatgcacaagcacccatagattatgaggaccttataataagtaaacataatcttt

SEQ ID NO: 277887 - DNA, 396 bp, Glycine max
  unsure (1)..(396): unsure at all n locations
tcattaactgatgcagatcctaacactaatgatattttaatatacagttccttcatgaacatagacaccatctatgtttcaaatgatcaacttgagaacattattatgtcatctaatggtaccatgcctttctatcacatgcctgaattgaaaacacatccttgttcatatgaagcaccaataagttataaggacatgtgtcaattttctcgaggagaaagttatcccaattcttcatggcttctttcatgttcaagcactataccttcttctccttcttcccttgtggctccacctgtgacggagatttcattgactaatgtggaagataatcgcactatntggccggagctcctactagaggaccctctgttcaaaatgatttcctagtatgag

SEQ ID NO: 277888 - DNA, 384 bp, Glycine max
  unsure (1)..(384): unsure at all n locations
gtgactgaggatgcaagctttaccaaggacttaccttgaatatcnntttgatttaccnncnnagccnngnttcccttttcttgttatgaagctcactacaacgccttaagtgaaaaaccatgatattaccatatccttaaggaattttggagctttggaattgttctgggaataagtgtggggggtttttgtttattggacaacttgttatgttggctatgcttcatgatgtatattgggccatacttgatgtacattgtatattcggtaaatgttggacatgctgaatgacatgttgtttcttcaaggcaaaaaataaaaaaacaaagcattaaagttgagtgaataacatctttaatggcacagaatgagaaactcttgttc

SEQ ID NO: 277889 - DNA, 428 bp, Glycine max
  unsure (1)..(428): unsure at all n locations
ctcaagcttgtaggactatggngtatccatcacatgtgtgactatgtggtggtctttatatggtgcaaaacaattctccacattcacatatctcgtataaacccaccatccacttgtgcccacctccatctgagctcacgtactctcacgttacccttatcctcattcctctcaatgccgggtccccatcaatcctcccaagctttgacaacatccaagttattcaacatccaatcatcacaaactaacacagtcaagaaaacagggcaaaggcaaaatactctgcccaaaacacaaaccaatatcacagnttttcacattcaaataccccaagaacattctcttcattcctattcgctaaccgttggatcgactcataattttactgaagtctctagtcacaattctacatttngaccgttgggatc

SEQ ID NO: 277890 - DNA, 330 bp, Glycine max
gggacactattcttatagcacaaatggtctataaccttcctcgtataaatacaaacatcaatgtaaatctagagcaagcttatgcgcatattttcttacgaacgttctcttgcacaagacattctattaactaagaaaaatgctcccatatacaatcaagacagcttcgttacctagattatttacacgtactttcaaggtgtatttgttacttacataacacacatctccttggctaaaattacatacatggctactcaaagcatttggggtaccaataattgccatgagcacattttggtattctaatgctatactaaccaacttatg

SEQ ID NO: 277891 - DNA, 414 bp, Glycine max
  unsure (1)..(414): unsure at all n locations
atggggtacccgtcatatgtggtactatgtggttgncgggcgatggtgcaagatgactctccatatccacaaatcacacataaaaccaccatccttagttgcccaccttcaattgagctcacgtactcccacgtagcccttattctcgttcttctcaacaccggatccctatcaatcccgcctagcgttcacaacatccaagaaattcaacatccaaacatcttgaactatcaaaaccaataaaatatggcagaggcagataactctgcccaaaacacaaaccaataccacagctgttcttactcatataccccagtaacattctcttcgtccaatttgtgtaccgctggatcgactcgaaaattttactggaggtgcctagtacataaatctacatcttgaccgttgggatct

SEQ ID NO: 277892 - DNA, 195 bp, Glycine max
tatattttcctctcggctactctattttgctgaggggaattatgacatgatgtttaatgatcaattccaacatatctcctaaaattagtcagctcatttttgtaatatttccctccatttggacgacctgactatgcttattggagtattaaactatgtgcttatcattatgcgaaaaaattgagaaaccttaca

SEQ ID NO: 277893 - DNA, 300 bp, Glycine max
attctataatgtattcaatgggacaacatattttgctttgcttgctttcactgtctttcatctacaatcatcacacatattcctatctattaaagtacctgttttagtaagtcgagaaatcatatgatgatgatgattaaatcacctcataacatgaaaaaatgattctgaatttcaacgcttttaaattgcctttacaacagtatatattatcggttatgcctctcataatgatcgactagttgatcaaatcttaataataatgatatatgtccaatattactggaagattatcactct

SEQ ID NO: 277894 - DNA, 200 bp, Glycine max
ggaaagaaaggaaagtgataaataaagaaacaaaaatataatgagctgaaacaaaaataagagaggaaaggaagggaggatatttgagaaaaaaaaaagggaggaaagaagaaaagaggaaagggggaggaaggagaagagaggaaaagaaggaaggaggaggagggggaggaagaagagaagagaaagaaaggaagagg

SEQ ID NO: 277895 - DNA, 386 bp, Glycine max
ctcgcccaggtgagctcatctcgcccaggtagtatggttgcttcctccagaagcaacagccttctggaggaatcttttggagggcccaagtgggcctggttgctatttgcacccccatttttactaagtacaccccctgtcttttttggtgattcttttttcgtaaagttacagaaacttacgaatttcgtaacgatacttgttttctttccctaatgttacggaaccttgtggattacataattatcctctttttgattacggaatgtttctgaactatactaattgtgcaactatgcttccattaattttctgtgtgttactgaccccttcatatatttcaatactatttttttatgtatactgtctcattctgaaatttacta

SEQ ID NO: 277896 - DNA, 387 bp, Glycine max
  unsure (1)..(387): unsure at all n locations
gagctgaagcataagaaagattcttcttctaagttagatgttgtgtttaagcttgattgcttgattgaaacccatgactgaaactcagttgtctgccaaactggaaagggctccctcctaatggagttgatgcttccaaatacaaaactngattgaactggggcaggctgctgacttgtgtggatgtagaggctgctgctgttggagtgaatgaggattgaggagttgatgcattggaggttgattaaaaacattgagggagaactatgctaagtnacaaacacattggatggcgatgatgtactaaatgtggaaccaaatgcaaacttagtgggtttccaactaaagtataacttggaccacattggagctaacatagtataccac

SEQ ID NO: 277897 - DNA, 325 bp, Glycine max
  unsure (1)..(325): unsure at all n locations
agcttcattcactaatccttccttacacaatgtttctataattctactatacataaccacattgngtttaacattaaaaacacaatgttgtatcatcctcaacaatctaacagcgacttttgttnttcctgcatcacagagtccgttaattaaagtcccgtaggtgatttcgttgaattcgaatccatccgcgagcatttcgtcgtgaaatttgagcgcggtggaaacggcgccgttgaggcagatgccgttgatgagggtgttgaccgtgacgacgtcgtacgggagaccgcgctngagaagcttcccgaagacggagaatgcg

SEQ ID NO: 277898 - DNA, 449 bp, Glycine max
tgtattgaaactaataataagaacaaacctacttaatgggtccctatgtacacacaccatgaagatgttaggtgtatgagtgattttacaaaagaaggttgcaccactcaaaacattcatcataccacctattttagggacttggtgcctaataatacctattctgggcactaacaaagcacaaagaattaagctcttgctaaccagaccctcatccaacaacttctttacttgaagaataaactcaagcccaagaggtgtggcaatgctagcaagtgtctctatacataagagaaaatgtggaggttgtctaagagggaaaatctatttaatgtttgtctttattgtaaaatgagtttccttcttaactaacctcttggaggagacactaacctccttacacttctctttaaccactaatggatagtcatcttcttgggggtagattc

SEQ ID NO: 277899 - DNA, 361 bp, Glycine max
agctattccttgagcttcaagctatggcctttatgttgttcactcatgttgctcccctatctctagcatcttccatagacaataaatgactagcaaatcatggttactcgcttcttggagtgtgccaactcaaggcaacacagagtgcatgcaaatccagtgcacaattctcccaaaagatgtcaagaattttggacttaaactcatcatcattctcccttaataactttttcataatcttgctctttttgaggcatgtgatgtcaaacaaatcaccatagagccttttgctgtcacatgtacccccaaaagatttaccaatgctttctataatagacccttattactttcaaaaaccttt

SEQ ID NO: 277900 - DNA, 451 bp, Glycine max
agctcctaaaagctacttgaaaacttactgagaagcttccttgataagctagagcttatctatacacacccctctaatagctaagctcacctccttgagattagaagctagagcttagctacacacacccctcaaacagctaagctcaccccatgccaaaatatatgaaaatacaaaaaggtccctactacaaagactactccaaatgccctgaaatacaaggctaaaatcctatactactagaatggtcaaaatacaaggcctaaaagaaggaaacactattctaatatttacaaagaagagtggacccagccttggcccatgggctcagaaatctaccctgaggtacatgagaagcctagaagccttcttagctgctctagcccaatcctctatggagtctctatccaataagcttgaggggttggattgcatcaaaatacaatgccta

SEQ ID NO: 277901 - DNA, 305 bp, Glycine max
agcttgcaaactaggtacttatttgcaacctgaaagctaggaggacgctgtgtcataaatactgactcctcaagaaacccatttagaaaagcattgttcacatcaaactgaaataactctcacccatgtgaaagagcaagagtgagaacaatacgaattgtgacaggcttgaccacaggagaaaatgtctcatgaaagtcaaaaccccatgatgaaaacccttagctaccaaccttgctttaaacttgttgatggaaccatcaacattttcttttactctaaaaacccacttacactcaatggca

SEQ ID NO: 277902 - DNA, 416 bp, Glycine max
gcttctcaggaagctacctactctataaatagagacgtgtgtatcacttgttgtaactttgatgaatgagagtcttgtgagacacaactcaaagttcaacttctctccctttttctaccttcaatttcgtgctcccccctctctctttttctaccttttacttttcctccattgaagcatcctctccaagcttcttatccaaggctcatcttggtggtgaagctccttcttccatggcttattccctagtggatggcgccgcctcttacctcttatcctttgtcttccgttgcatctcatggtggaaaatcaccattaaaggacctcattgaagctcatagatccagccgtcatagaagttccacaagcaagtttccatcaatgatgatgagtgcagtagtgaacagaactgaaag

SEQ ID NO: 277903 - DNA, 240 bp, Glycine max
  unsure (1)..(240): unsure at all n locations
ccccgggnaggggagaaaggagagaaagagaaggacagcacagggaaaacggggaggaaacagacggggaggaaaagaggaaaaaagacaggagtgaaaaaagggaaagagaaagaaagaaagaggaagcaacgaagaaaaagaagacgaagagagaaaagggaaggggaaggagagaacccaaagaagggaaagaaggaggaaaaaggaaaagggagaaggagaaaaaaagatgagagg

SEQ ID NO: 277904 - DNA, 278 bp, Glycine max
  unsure (1)..(278): unsure at all n locations
agctntatgagaaaccatanaatagtttactcctaattttatttgaggggcgacagagatactttcctaactatggtttacacaagagactatcgtctacaacctttttggaaagaaaaatttctagccggtcttcccaaatcattaagagataaggttagagataaaatccgtagtcaatctgccaatggagatattccatatgaaagtttaagttatggccaattaatttcttacgttcacaaggtagccttaaatatttgtcatgatgacaaaat

SEQ ID NO: 277905 - DNA, 449 bp, Glycine max
  unsure (1)..(449): unsure at all n locations
nnttaccanaagtttggtcataccttattgaaattctacatatgtgagttcttgattaccctatttaattggcatcatctaatttctgtcttttcaattatataacgataatctcgaacgctttgctagatgtttaattctttgtcactcaattatgtgagatcaaatctatatcatgtagattcctcttcaaatactctttgctctgtcttgaaagggacttggtagctttgctccattgatgtttttctgcttgcttactttgcattctctcttgctaagggagatcaattatccttcatattcctcatctccttgtacttttctgtccatcatgatgaattntgttacccctctgaaatctgatatgaagaggaatggaaagacggatattaatatataactgaaaatgcatcactatatgctgaaagaattgataagcattctta

SEQ ID NO: 277906 - DNA, 358 bp, Glycine max
agcttgattagagagacaagcctgttggattatagctatattacgtgctacgcactcttgatttggatgggattgttaagctcttcaatttggaggaaggggttgtctttactgtcaatagaactcccaatatcttgctctattggatagtatttactctacaatgaccctgataatgattatgatttggcttatgtgatctctagatggttggatatgtagaaatcctattagtactagtatcctctcaaaataagaaactagacgatgtcattattggtaccataccaaagcatattgacaatgtataacccctagatacctatacttcataaggtcgagtattgcatatttgctt

SEQ ID NO: 277907 - DNA, 438 bp, Glycine max
ctcagctctcaggagctcctatcttaataaagcatgtgttacacttgtgaactttgatgaatgagagtcttgtgagacacaactgaaagtttaacttctctcctttttttcttccttcaattccgtgctcccccctctctctttctctccctctttcttttcctccatagaaacatcctcttcaagcttcttatccaaagctcatcttggtggtgaagctccttcttccatggcttattccctaatggatgacgcatcctctcacctctactcctttgtcttccgttgcatctccatggtggaaaatcaccattaaaggacctcattgaagctcaaagatccagcctccatagaagccccacaagcaagcttccatcagcatatacttatgtctgtgcatgcccaagattaacgagcttcattatgacctgaattacc

SEQ ID NO: 277908 - DNA, 190 bp, Glycine max
agctttaccgcaacatctaacctattagatttattcttctgacgcttcagctcatgttccatgcttggatcacttatctcatatgctccagcttgagggggagcgttaaagcattatattgcgcacacaactgtcgtaagtgtagacaactgtattgtgtactatttgtatctttgtaatagtattcttg

SEQ ID NO: 277909 - DNA, 357 bp, Glycine max
tgaagacaccatcacactcagcagcaggatgatgttgatcttcattaatggcatatctcacatacataggtcggtccatgaatcgatctacgacatctggaatccgaactatccgttcaacaccaggagaagacacctgaaggaacacatatcataaagcgctattagaaccaataacatgaaacattgatgatcaaaatttcaatcccttagcatcatccctcaaaatctagagggaaaaacataataaccgttgccctatatgctgtgacgaattcaaaaaatttaaattgtaggaggcatattcatatatataaatctgtgggggcaataactcagatggacttctatacgaca

SEQ ID NO: 277910 - DNA, 258 bp, Glycine max
  unsure (1)..(258): unsure at all n locations
agctcgtggctacattacaaccatcattggttnttaacaccatgaggaacatcacacaataaaactgaattggagagacactggaattacaagatttgctaccactttcttaactctgcaaagattgcataataaagagcccaatcttacaaggatgtttactcctgatgaatggttgaagtctaaggtgttggatcaagtggcctctgaaaattaaaacgggggggggggttgaatcacttattattgatccttttt

SEQ ID NO: 277911 - DNA, 431 bp, Glycine max
  unsure (1)..(431): unsure at all n locations
cggacactaagaatctcaagctttgagtgaacaatggactcttacatgtaaatttgaatttctactntcaaggacactggtaatcgattaccaaaacattgtaatcgattacagcctcttgaaaatatttggaacgtttgaaattcagtgtgaaaacattttcaaacttattttgctactggtaatcgattactacaatatggctatcgattaccagagagtaaaaacttattggtaaaggttttgcacaaactcatgtgctattcaaagttttgaagaaactttttaatacttatcttgattgagtcttttcttcattcttgaatcttgagtttcgaatcttgattgcaggctttctacatgagtttgagtatttttgatcttgactttagacttgtcttgattctctgagatggtgttcttgattactt

SEQ ID NO: 277912 - DNA, 301 bp, Glycine max
gatccttgagtcacctgctgcatgcaagctaaattatctattttatttatgtttgactcacatgattcgaccgtcaaaagatatgctactagatgaggcctatcacatgttgggaacacttggtactgttttaaataaaatagttttctaggcctcccatcagaattaagaggaaaaagctagagttttgagatactattgagaatattgcctcggacacctttttttctgcttaaatttggactccttgataagttgcagacgaactaatgggcattcttgaatacaagcatcatttatg

SEQ ID NO: 277913 - DNA, 399 bp, Glycine max
atgatactgaggatcctcttatacaactatcattatctttaaaaacagcaaatatgtctgggatgagaacaactgaatacgtgcattctggcagccaccattgggaaaagatgaggactgggatcctgaaaggctgtatacggcccctggtgggaggatcttgggaataagaaggggcatacagggagccatggaagctgctaccttgcaatgaaaagcacgcacccggggtttgctagctagagaatggctgctacatatatagtatcataggaaaacagctttgcgaagatctgactgttgaactgaaaaggggaaagacgcattgggtatggagatatcgcccaaagaaaaaaacgaaaaaggcctatggtactggttaaactgtttcactgcgcc

SEQ ID NO: 277914 - DNA, 291 bp, Glycine max
  unsure (1)..(291): unsure at all n locations
agctntcctaacatcaatttttcgtaccatattaccaccaaaattattagaatgcaacatgttgaacatttcatatgtgatgccaatacactctttaattntcttccttgaatgaaacccttttgctctaatgaaatgattttcggatccactctatcaagcttgtcaacaagtactttggtaaataccttaaacttaaaagttgccaaagctaagggatgaaattctctatacaatcaacacgaggaatttttggaatcaagattaccatgtcagagtttacatttggag

SEQ ID NO: 277915 - DNA, 415 bp, Glycine max
cggacactatgaatctcagcttgcaaatattaaagtgtagccatttgagtataattacctgacgaaagatcatgagttaaatttactggctatctgggttttagcttaaatgtttagatagatgtcttgggtctgaatcatggggtatccaaaataaaaatattatgcttatcaataagttttaattgttaattcatggaaacaaaattgtatattcaatgtgctacatatgttaccatttgcatgtgctatctcaagttaaaccagatcataaaaagaagttcataaatgaattacacataaataaaaacattgttgcatgaaattgaacttggaaatgctccattaactcaaaaaccataatgcataaaaggaagaaattggcactgacctaatgaagaaattggcactgacc

SEQ ID NO: 277916 - DNA, 316 bp, Glycine max
  unsure (1)..(316): unsure at all n locations
agcttgcatgatttacattctccccctttctcaagcaaattcttaattcttcttcacatcttcaaaatcttcatgatttacattctccccttttttgatgatgacaatataagtcctgaaatcaagattgaagcaagcaaagcaagcaacgtatatatataaaatttgcgtttactccccctatctnttggagttgatgatcacttgatttctaagctctttctaagcttttctacaccccaattttctccccctttggcaacatcaaacagccaaagtacatgggaatcaaaccagatataaaatgaagtggaaa

SEQ ID NO: 277917 - DNA, 382 bp, Glycine max
  unsure (1)..(382): unsure at all n locations
atgtagcgcgtactgatgggtaccatgatgtgtttgctggggtntgacccatgcgggcgttgaagagacggtatgggcatcatctttcttcctttatgcccctgttgccccgatacttttggcgttcacgtctgtggaggaaacgtaattaaactttcctctcttcaatcccacctcgattctttcctctgcaaacaccatatccgccaagctggacggcatgtaacccactagcttctcatattataacaccggcagagtgtctaccatcatggtgatcatctctcttttaaccatgggaggatctacttgcgccgtcaaatccctccatcgctgcgcatattctctaaagggttcaccctctttcttgaacatattctgc

SEQ ID NO: 277918 - DNA, 333 bp, Glycine max
gcttcatcaatgtttcctggttcaacctgataaacaaaagccatgttgttacaaaaatcccttagtctagatcgagtagagacaccctttcaaaatttatccaattatgttatccaaggagagttctttctaagttctccattctctaggaaattctttaggcattgtggttgagatctctttgctttgttcaagttcttcagacttgatgtcatcttcaagagcaaaatccttttcctgaaaaccaacatcttattcttctaaagagttatcttgaacaatagagttagtttcatcacatactacatgaacagagtcttccacacttagagt

SEQ ID NO: 277919 - DNA, 428 bp, Glycine max
  unsure (1)..(428): unsure at all n locations
actcagcttaacataaacataaatctaaattataaagtgtactaaagactagataatattaaaactattcaagaagtagggaaataaaaatcctgatcctgtcaatgatcctgtgcaaagtccatggcatgctcattcataccctgtgcaagagtgcctgatggtgaatcctaaggaagaggtaggtctggcactggcgttgatgacttacgttgataataagacatgtcctacactgatgtgagaaggctttggtgtcacctgtggggtagctgctactagatcagcttaaaaaatgaaaggctcaagtggagtgggctctgaggcctttanaatgatctcctcctcngttgcataggcactcctcccttccttatgattaggctgtgcttctgggatatcctcctttgaataactcttccaactta

SEQ ID NO: 277920 - DNA, 357 bp, Glycine max
  unsure (1)..(357): unsure at all n locations
agcttgttntgatgcaagaaaacacaagagtgtgtgtatattgggtgaagctaccctttttggccagcaatcagctataagccacgctataatagtataggtattagaaatacctgaatgtgcacgtatgcaatttttggtagccagagtgccttgagtatgtatgtatgtaaatttagcaaaggaaatgcatgtgatgtatgtatcaaatacaccttggaagtgcatataatggatctatgtaacgaaggagccttgattgtgcacgggtgcatttttttgttacttagaataatattttgtgcgagtgaatgttcttaacaaagtttgtgcatgagtatgctttaaatttacatt

SEQ ID NO: 277921 - DNA, 445 bp, Glycine max
  unsure (1)..(445): unsure at all n locations
aatgcctcaatcatntccaaatatgcatgtgaattatgacgcatcaacaagaatcaagccaaggctattgtgcaagcaatcaatggggcaaaacacaccaaatgattatgatgatggatggctcaaattctcacaaaggtaaactcatcactttcaaattgatctttcaaaactatcatgacatgtagagaagaatcaaggtattcaagtcacaaaatgtcaagaacntttattttcaaaacaattacccatttcttgaacatatcctataattcaaagaaaaacatgcaaagtcgtacgtgcacaaaatattgacccaaaatattaaactaaaaatccgacgaaactgacaacatttacaaatttacaaatttacaaaactagcataaccaaagaacacttcctcacccccattacttatcaacacattgtcctcaatgtaaca

SEQ ID NO: 277922 - DNA, 270 bp, Glycine max
  unsure (1)..(270): unsure at all n locations
ttaagtcacctgatgcatgcaagcttccanacccttctctgacccttagcattggtcgtacctctgatgttctaccacgagatattcatatcattaaatggattcataaaactatttaaaaataagaaaaagaaggaaccgaccttaatggctcacaacaacatccctaggcatcgacgaggatccctcttcattgncaccacctaacgaagcatgacttgggcctttgagacgcactcacgacacccttctacctttaacgcccttgaa

SEQ ID NO: 277923 - DNA, 117 bp, Glycine max
tctcatgcagatttgcagtgctcaactcgagtaacatctccatcgcgtctattattattcaatttgactcttattgcattatgaaactattgctattattggtcaacactgataatt

SEQ ID NO: 277924 - DNA, 180 bp, Glycine max
agcttcgccggatgatgccgatcgaacattttctcaattgacatcatcaaattggtattcagggattgaatagaataaacaatggccggtgtcggtcgctatatggccccgactgatatcctatagccgacattgcgcaatttcatttagaaaagcaggccgataatgttcttttacggt

SEQ ID NO: 277925 - DNA, 338 bp, Glycine max
tagctgacgtacattgtaaatgggaacatgctagtttcggttctttctatacgtcagttgagctcgcacaaaataaccttgccgacctacattgtacattctttatgcaacaccataacacgaaaacatacttccactgacgtaataaaaacattattcgtcagcgagggtttttttaattaaaattgcgcaatgtcagctgaaaaatatcaaacgcggtgaataatttttaattgccgtggtgggctaatgttttctggccgaataaatgtgaacatgccattttctgtcgaaacaaaacgttggttgagctcttctctaaaaaacctagccgacct

SEQ ID NO: 277926 - DNA, 201 bp, Glycine max
acagaatattttagacatttaccaaaaaaaaagattgatatggtaacactcccaattaggagaaaaatgatttcttttatataaagaaaaaggataagcaactactaaatcagaaagatcaatgacatggaataaaaataatgatgtggtgagggtttattttttatatggaggtgggagggtgaataaaggatgtaatag

SEQ ID NO: 277927 - DNA, 254 bp, Glycine max
tgaactgctgtgccgggactaacaatgggtggaggaggatgacttgggaggagacccaattttcttatcatatttgcaaatttaaatgattgacaactttgttgtaagtgtttactgttcaagatgtatttccatattgttttagtattaagaaacttgactcttacatattaaacacctatatgttcatatcttttttaatgatatcatagacaaacctgccctatttattggagtaatgtgtgcaaagaaag

SEQ ID NO: 277928 - DNA, 372 bp, Glycine max
  unsure (1)..(372): unsure at all n locations
agcttgngccaaccgcaggaccgtatgcgaaatggatttccttatgtcacatcagtgaaagctttgtcaatgcaggctggatgtgtaaagggcgggtcgccacgatccacgataaagttcctcaagagcaatcaaattgcgtacggtcgtgccctcctgagttcgagttagggaattggcaaattgtcgagcaactcggaatttccgtggtaaacataatgtaatttgttagtccttaccgtatagttgggcctaggctttagggttctctccctgtctaggcttgtcttttgctatcaaatatatataaatacaatctttcttcatttgttcgtgcactttcatccattctcattcgtcccatggttattt

SEQ ID NO: 277929 - DNA, 474 bp, Glycine max
  unsure (1)..(474): unsure at all n locations
acggaccttgaaactaagcttaaggaagtgaaagaattagtatgggcagaaatgtctccttattgattggtaaatctgttccccaaatccctgaaaaatgtaaagatccaggtacattctccatacctagtattatagggaacaataagtttgacaatgccatgctagaattaggagcttctgttagtgttatgcctctgtctatttttaattctctatctcttggccctttgcagtcaactgatgttggaattcatttagctaatagaagtgttgcttatcctgctagtttcatagaggatgtcttagttagagttggtgaactgatttttcccgttgattnttatattatgaatatggaggagggattttcttaaggatcagttcccatcattctaggcagacctttatgaaaactgctagaacttagatagatgtatatgtaggcacactatctatggagttttgtgatat

SEQ ID NO: 277930 - DNA, 320 bp, Glycine max
  unsure (1)..(320): unsure at all n locations
agctntntctaaaaaaaaaaactgaaaagatttactataaaccaacattctttagaaaaaaatgatcgccagttttctttgtaaaaatcatggatcaaaatgcaaaaggtttttgaaaaaaaaaaagaaatgtgcacctagagggtgaacgcaacaaaagattttcccaaatgtcaaaatggactcggatgtttgtctgacttgatagaaagagcaatctttgaaacactggtttgattataatgaggaaacaaaccctgagccttattgtttgcatggccacaaagccttatgttcgagtgtccacatggacgcgtgct

SEQ ID NO: 277931 - DNA, 464 bp, Glycine max
tgtctcagcgtttatgcgagacagagaccaacatgctatctatcatcgccaagtaccaagaagagttaggtctagccgcggcccacgagcataggattgcggacgaatatgcccaagtatacgcggaaaaagaggctagaggaagggtgatcgactctttacaccaagaggcaaccatgtggatggatcggtttgctcttaccttgaacgggagtcaagaacttccccgattgttagccaaggccaaagcgatggcagacacctactccacccccgaagagattcacgggcttcttggctattgtcagcatatgatagacttaatggcccacataattagaaatcgttaggaaaacttgtatggtctctcagaccttgactagatatgagcttccttttgaaataaaatgaggtggtcccatgtttctactccaataacttgtgcaatcaaatcactcctacgt

SEQ ID NO: 277932 - DNA, 321 bp, Glycine max
agcttagtttaagttagtctaaacttatgtttgctgtctaaattaagcctagctcaacaagacggatctgaggatgaagcttggattgattaagtctaactagggatcgaggtttattaatttaggctacaacatagaacacaaaagtataattgattagagaaacatctctatatacatcaactgggtcattagaaagacccaacactcttacctattgttggcagtcttactggttttagcctagacgtatgttaattctgctcgtaaatattaattataaatgtttctatcaaacatgtcttatctttgaatataacc

SEQ ID NO: 277933 - DNA, 384 bp, Glycine max
  unsure (1)..(384): unsure at all n locations
tggaacctgaatcttgattctcgaaatcaaatctcctctttaaccttgaaatgttcttgatttaatcttgaacatcttgaactcattctttgattcttgagatcatcttctttgttatcatgaagtgttcttgacctttgagctttttgtcatcacctttgttatcatcaaaacttctttgaatcaatcttgattcatcatgaagcttgcttctacattgaacgttggttaagttgttttgatcttttttcgcaagatcgattntaaccaaacaaaaatcgtttaagacgttggacctttaaacgatcttttgatttttggaaaggggagagagttgcttaaggcgttggaccttgaaacaacctctcgaatttgaagggagag

SEQ ID NO: 277934 - DNA, 350 bp, Glycine max
  unsure (1)..(350): unsure at all n locations
agcttatcattctctacgtnganttattagttaactgtcttncgcctctcacattcttggttcttacttccctctaaatttggcttagagctttgctcatactcattgcttcttattttcctttccgaacaagaaattcctaataccaacaacacaaattttatgagttggaaaccttgattttttgttagcatgtctccaacaaaaaacaattagaaaagaattgcattttagaccttagaaagcattatcctcgctccaacatgcttgttatcccatccaaaggtattgtcagaatctgcagcccccagtgtctgtccattaatcttaatgtagtttaggtacattgg

SEQ ID NO: 277935 - DNA, 442 bp, Glycine max
  unsure (1)..(442): unsure at all n locations
acacatgaaactcagctactagctccatgattagttgctgagagattccttgcattctgttatgtctataaatgctacgggtctcattgatgataacccaagatacgccataaagtgcgctgaagccggaattataggcctactttctgattatgaaaactcgtacccttggtccaagaccaatncagctgatgagcatcccctggggatcaaagtcaataactgagaagaaagtgaacaacaattgatgtcattggtagctttgtagttactaaaatcctgcagcaaggatttgttaaaagcactcttattagattaagtagtggatagtttcttatgcctgaaaattctaattaagacaccatataggtgatattaggggaagatactgctagaagttatagtcctgtttggaaaaatataaatatactgattatatttt

SEQ ID NO: 277936 - DNA, 361 bp, Glycine max
agcttcaacattcaatttcgaccgtcttgtttgttaagggactcaatcatacatccgagaaaaaagttattgtcgtttgagttggcacacagcttcaacattcaatttcgagcgtctcgatatgttacgggactcaatcagacatacgagtaaaaagttatggtcctttgtattggctcagaacttcaacattcaattgcgagcgtctctatatgttacgggacttaatcacatatccgagaaaaaagttatcgtcgtttgagttggctcacagcatcaacattcaattactagcgtctctatatgtaacgtgactcaatcagacatccgaagaaacagttattggtctttgaattggctc

SEQ ID NO: 277937 - DNA, 387 bp, Glycine max
  unsure (1)..(387): unsure at all n locations
agcttcctcggggccattttctgcataggctttacatttggaaaattagttntaccaagaaatgctactcttaaaacaaaaatggcatacaacctcctccaataaacacaaacatcaatgtaaatttagagcanacttatgcacatacttctttacgaacgttcacttgcacaagacattcttataactaagaganatgcacccatgtacaatcaaggcaccttcgttacctagattatntatatgtacttccaaggtgtattttctacctacatcacatgcacnttcttgctaaatttacatacatgcatactcaaagcatttgggtaccaaaaattgcacatgtgcacattccggtattttaatacttatgcatatacaaacttt

SEQ ID NO: 277938 - DNA, 431 bp, Glycine max
  unsure (1)..(431): unsure at all n locations
tgtgtgatgttgcgcgtactgatgggtaccatgaggtgtttgctggggtttgacccatgcgggtgttgaagagacggcatgggcatctccttccttcctttttgcccctgttgccccgattcttttggcgttcacgtatgtggaggaaacgtaatcaaactttcctctcttcaacccaacctcgattctttccccggcaaacaccagatccgcaaagctggatggcatgtaacccactagcttctcatagtagaacactggcagagtgtctaccatcatggtgatcatctctctctcaaccatgggaggagctacttgtgccgccaaatccctccatcgctgcgcatattctttaaaggtttcaccctctttcttaaacatattctgcagttgaatactgtcaggagccatatcanaattgtactgatatt

SEQ ID NO: 277939 - DNA, 403 bp, Glycine max
  unsure (1)..(403): unsure at all n locations
agcttgaaagagttctgattctgcaacatataccaactgggctgcttgactcaggagaagcaacaccctaccctcttcatttttttacctcanttgtcctctctcccttaccccactgtctgcctcttcaatttctcatccatttctcctctcttcctctcaaacctcaattttcctttgtctctgtcctaaatccatctgcctctgttcaaatctctggtcatgttccagatcaacatagtttgtgctatgtggttctctgccatttatgagtttgagacttatgagttggtatttgaccttcttattcatgttctatctaagttaaattanatgttgtgatttgaacgtatttcttttactgttactttattgcactatacatgttatatataaccttttg

SEQ ID NO: 277940 - DNA, 434 bp, Glycine max
  unsure (1)..(434): unsure at all n locations
ggtgggtntgatacacacaagaatagaagctcataattgattatttcatcttctaattttgccggatcaactagttaactcgaaattgaagagcgagtaatatgtttcacccttcataacttataagtacatgttgataacaaaaaatagcatcttcaaatgacaaacacattaaatttattttaatcatnttgaaaattatgtattttaaaaaatattgggcttcactatggtcacaaagttgtatagatcttgtggctggtgggcataattatctctaacattagattgttattttaaggaaaaaaaatcttgaaagatgatagagaatgaattcggtgatngaataataataacagttatataacaatgatgattgttgtttattgaaaaagcacataatattcatcttctaatttcatcggatcaactag

SEQ ID NO: 277941 - DNA, 577 bp, Glycine max
  unsure (1)..(577): unsure at all n locations
tcctcttagtcacctgccgcatgcaagcttacattaaatttccaagatggaagtttgggaacaagggaatgcacatgaacaagtttgggaagtcgtgtagaagctgtaattttggatgtaattaaactttcctgcaattatttcccatcctcgtactcgtagtggaccactatgaccaaattattcatcccaagttaaagatagacttcttttcttccagcatcaagtggaaatcccaagtatttctctcctcctataccttccctcacaccaagagtagacgtaatcaaagttcttaaactaacctccacatttatactataagtaacttcaattctcacttatgcaaatgtagcatttggccatatactgtagcatactcatccataattcttattattgcttttgcttctctttcctatgctttaaagaaaagaaagctattatttgcaaaggtaaatgagacatagtaggagcttccttgcanatcttcactccatgggataacacgcagggtttaagtactaataatatatgttggtcaaagagtggttgcccaaaaaaaagttcctaaaaa

SEQ ID NO: 277942 - DNA, 549 bp, Glycine max
tccttaagtagacctgccgcatgcaagcttctcccccaattttctataaatagggggagaagtgaagtagaaaagggttcagcccctttggcacttctctgtctctcgaaatagctgaggaaaattagttccgtgaagaaaatccaagccgaggcgcttccgtaacgtttccgtgagtaattacgcgaagattttcgaccgttcttcaagattcttcgttttcttcagtcttcaacgggtaagtacctcaaaccaagcttttcaattcattctatgtacccgtggtggtccacattttgtttcatgtatttttattctcgatttcatttactttttatacccccttttgacgtgcttaagccatttatttaagtcatttctcgcttaatctaaaaataaaataataatataataataaaaaataccttttagtaaaataaagtgaaaaatcaatcagacgttttctctttgagatttctcattcttaattgaaattgactaatgactaaagtgaaactaaggctaaaatcaactcgcctagtcaagctc

SEQ ID NO: 277943 - DNA, 528 bp, Glycine max
  unsure (1)..(528): unsure at all n locations
ccttaagtcacctgccgcatgcaagcttgtaaatttggaaggacccatctcaaaatttgttttgtgtaatcaaaggggagagtggtatatgcatacgtgaaggtttatggtgggtttttgcttttgggggtgtcaacgtgtgtattcagagactcacaactcacaagtggtgaaaccaggggaaatttagaactatgcgagcaaaagggtgtgcgagtggaggggtttatatgagagagggcacaaaggtgttaaaatcaaactttttcgagttaatgcagcaagagttggaacaagtctcgtcactggttggctagcgtgggtcccacgcgctccatctattgcttgaacatcatttttttttttctctcaattgggctgagtcacctgtgtggttacgtttcactcactcacactctatccctttcgctatgggaatataatttttttccctcttattagcctcttcaactgttgcacatcacanccagaggtttgagggaaaaaacagttattatactgtttgtg

SEQ ID NO: 277944 - DNA, 883 bp, Glycine max
  unsure (1)..(883): unsure at all n locations
cacaaacagcgcacgcgccccccacgcccaagactacccgaaaccggcgacaaaaaaacattcagnnnnnntnnnnnnnnaagagggatgatccctgtgagccccgggaattnnaaaannaccgcgagcagcaagcngngaacnaggacaaagagaaagtcttttttagnggagggagagcagagtcggcggggggaaacacgagcttacaagtgggactacaaaacttcaggccagggcggacagacacccccccctaacacccagggggatggggccccgggaaaaaccacagaggcgctgaaggagaaagccagaaccacgaaggaaatcacgggacactaacgctaaaagcccagggaacacggcatggcgggaggacaaagacccccccaccctggagtaggagccctatgacgaggccagccgacgacacgggctgacacggcgcatggacaaccgccgcaaatacaggggagaaccaaccctggggggaaaagccgccaacgcggcgaaagggacggaaaacgagaaaatcgatggccggccggagggcccaaccccggaccgagtcgcatccaaaaggcgggacgagacccaacccaactcggaaaggcaactaaaggactcaaaaaaaagctgaggccggccctccgggaacaaaaccaacccccacaaaccgaacccacaaacccagcttccgggcaaacccgggcaggcgaaaaacccataccggacgaggaggcacaacagaggcacaacacgccagggaacctgcacagagaggccgagccaccagcgcgggagggaaagccgacacaagaggagccgcgcgggaggtgctcggactacaaccaacacacacacggagggggaggggggc

SEQ ID NO: 277945 - DNA, 525 bp, Glycine max
gacccgcgatccttaagtcacctgccgcatgcaagctttaggctagtcatgtagcattctcgggctgtcttttgattcgcatggaccatgataatcgacccatcattggtcgggaacttcaaggcgagatgcagggtgaacataatagctcctatagtgttgattaatggctgaccaagcaaatagatataagaggtggttggcatgaataaccaagtacttgactacaacatatttatacccatccttcttagtgttgaatcttgttattagctctatggaccctctcattcctactctttcacaggaaaatccaaagagtggatcatcatgttgttgtagtgtcgatactagtatgtccaactgcttaaaggtgtaccacaataggatgtatgccatgcttcgttggtctacaagcatttttcttactaagcatttcgactctgtttcttgtgctatcatatttatggatcaaacattgcgcatatgctttttacttgctgaggaggtacattcttcactttg

SEQ ID NO: 277946 - DNA, 587 bp, Glycine max
  unsure (1)..(587): unsure at all n locations
agctttgaatgcactatttaatggagttgactagaacatcttcagactgatcaacacttgcacagtggccaaagatgcatgggagatcctgaaaatcactcatgaaggaacctccaaagtgaagatttccagattgcaactcttggctacaaaattcgaaaatctgaagatgaaggaggaagagtgtattcatgacttccacatgaacattcttgaaattgccaatgcctgcactgccttgggagagaggataacagatgaaaagctggtgagaaagatcctcagatccttgcctaagagatttgacatgaaagtcactgcaatagaggaggcccaagacatttgcaacatgagagtagatgaactcattggttctcttcaaacctttgagctaagactctcggatagggctgaaaagaagagcaagaatccggctttcgtgttcaatgatgaaggagaaaaaaatgaagttgacctggatactgatgaaggtctgacaaatgcaggtgtgcttctttggnagcaggtcaacaaagtgctaaacagaatggacaagaggcagaaaccacatgtccagaacatccctt

SEQ ID NO: 277947 - DNA, 499 bp, Glycine max
agctttaagatatctaattgatattttaggatatgtaagttatttgtttgtttttcccttttattgccttagtaccatcctttttgcattatctcatattgtttttttttgtttcttcattctgtatcagatttgacagtggctggaaaaagattgaagcaattgttgtatcaaagacaatcatgcaggtaatttcaaatgcaagttgtaactggttatttacattagctattgtttctgggttgttatccataaattttgtggattgaattaggcatgttatactttttgaagtgtgtttgattatgttacattagtttggagtggatctccacatactttgattggttaatttgaagccctattaaaaaaaaactactacattgcatacaagtaaacaataaatcaaataatattttaaaagactctcatctaactgtgaaatgtttttaaacattagaatctaatcggcaagaatattatcatgcacactaaattt

SEQ ID NO: 277948 - DNA, 534 bp, Glycine max
agctttgagccaattcaaacgacaataactttttactccgatgtctgattgagtcccttcatatatcgagacgctcgaaattgaatgttgaagctctgagccaattcaaacgacaataactttttactcggatgtctgattgagtcccgtaatatatcgagacgctctaaattgaatgttgaacctctgagctaattcaaacgacactaactttatactcggatgtctgattgagtgccgtaacatatcgagacgctcgaaattgaatgttgaacctctaagccaattaaaacaacaataacgttttactcggatgtctgattgagtcccgtcatatatcgagacgctcgaaattgaatgttgaagctctgagccaattcaaacgacaataactttttactcggatgtctgattgagtcccataatatatcgagacgctcgaaatgaatgttgaagctctgagccaattcaaacgacaataactttttactcggatgtctgattgagtccccgtatatatcgagaccctcgaaa

SEQ ID NO: 277949 - DNA, 531 bp, Glycine max
  unsure (1)..(531): unsure at all n locations
agctttaacctttggccatcatttatgccccaaatcgtgaaaggagagcattttcggggtcgtgaagtgcgtgtctacgagtgggacttcgaaatttcaggtttgggtggacttctttctcctttgattttcgtgggtatggggttttgggagatatgatgggtagttttgttagttttctgcttcatgatagttatttgtgaagactcttgttgaaagcttgttgaacttgccatgtttggatgagttagacatacccattctgttttagggtttttatgatgatgcttgtgatgttcatgtgctgaaattgcttatggaaaactgttagagatgaagggtagaactaacctatggttaaaaagtgagaatgtggtgttaggagtggaaaaagagtgaatttttgatggctgaaaggccaaatctggaattggtagtanttaaaggttagagtgagtaaatcttagtttgaaatgtcatttangacttatgagaaagcctggactgtgctatgtagaaaaacaaaccacc

SEQ ID NO: 277950 - DNA, 337 bp, Glycine max
  unsure (1)..(337): unsure at all n locations
agcttgcagcaaatgcaaaccacaagaacttttaactccaatatccgattgagtcccgtaatatatcgagacgctcgaaattgaaaacagaagctctgagcaaattaaaacaacaattactttttactcggatgtccgaatgaatccagtaatatatcgagaactagaaattgaaaacagaagctcgttacaattgcaaaccacaattagttntaactcggatgtccgaataagtctcgtaatatatcgagacgcttgaaattgaaaacagaagctttgagcaaattcaaatgacaattactttttactcggatgttcgaatgaatcccgtaatata

SEQ ID NO: 277951 - DNA, 415 bp, Glycine max
  unsure (1)..(415): unsure at all n locations
agcttgcattcagactttgatcatgtgcgtgatcaagtacttgctggagaccagattccatcgatggattccctcattactaggcttctccgcatgcctcatttattgaaggatgagaatcctactgatggagtggagacgtcagccatggttgcatctcaaagaagaggaagtagctgccacaacagaggaggtcgtagtggaaggggtggacgtccttattgcacttattgcaagaggatgggtcacacccaacagaattgttattcgttgcatgggtttcccgacaaggtcgcacaggtctctcgttcagagaaagcagagtctagattttctgatgaggagtatcangagtatttgaagcttaaatccgagaaacccagcaaccaagctcaatcctcatctgtaccatgtg

SEQ ID NO: 277952 - DNA, 311 bp, Glycine max
agcttgcaaaccaaatgctcatcactgctagaggagaagccttcaagttgtttcatataaatctcctcctctaaatcaccattaagaaagattgttttcacatccatttgtttcaactgaaggtcaaaatgagaaactaatgcccacataatacaaagagaatattacttatatacaagagaaaaagtcttaatgaaatcgattccttctttggagtaaatcccttagcaacgagtcttgccttgtatctctcaatgatgcctaatgaatcctttttggtcttaaagacccatttaataccaatatacttt

SEQ ID NO: 277953 - DNA, 573 bp, Glycine max
  unsure (1)..(573): unsure at all n locations
agcttctgatgatttcactgcttctagctcctgcatggcaccttgaaatctttcctcactcccctttatctccaacaaggcctttttaatctcttctttggtgcctgcaacctctccatttattataagctctttttctttttttgctgcttctgtttcggacttgagcttatcaagagtttttgacaagttactgactattgatttggccttttcctctgcagcagacacggcttctaatttagattttgctctcaagagcttgtaactgaggtttcgaacttttgcaccaattttcgattccgagttctttaaatgattcgaggctgcactcacatgcttcagctcatttcttgtgacatccatagaggccataaacttaaaaccttgttctctaatggaagccaagtctttctttgctgcttctatttcttcttttgtagcctctaacacaccaacatctcttgattgatcttcttctatatgctccatgctctcaccacctctttcatgtaccctttntcccgttttcttaacaaacttcactcattcttcaacatatcaatatcagac

SEQ ID NO: 277954 - DNA, 517 bp, Glycine max
agcttctagttagttaggtgccagctgtcaatgttaattggataactaacttacatactctgaaccgagtacaatactcacataactcttgaccactaatccaaaggagaatgtcagaagcccatgtaaagtaattggaaccatcaaacttcttcatggatagtgtgaagtttgaaagtagggcctcaagtttagatgtttcagtagcttcggtagacgccataggacacacaaacagaaccggcaacaacaaagaacgatacagcgaaagttcagataacaaagggagtgcaagcaatgcaactctgatggccactaaactccgggggttaagtcccaaggagggggcgtcgacggtgtggaaaacactgcttgaatgagcctacacactctggcagtacacatctgagcgtggctgtttggcgcatggtcaaaacgtgtgtgagggcatgtccatgtccagaaaaggatgtcatcaatggtgttgtgtagattggcgaactgtgattctgacgat

SEQ ID NO: 277955 - DNA, 539 bp, Glycine max
agcttgaggatgtgctcgaggtttttggggtctcacgtgacagtcaccaggcactgttttcgggcgaggaaggggagggcgcatatgcaggtctggtacgtgccgccgcacgcgcggaggttgtcagcgatccagtcgtgcatgcggttggcgtgttggatgaggccagggaggctgcccaataggggccagacacgtggacctttgagggagcgagtgaccaaggtgaaccatattaaataggccgctattgctgataggatcattaaagccgttgctgcgtccatgtgagtgctgggcccaactcccaaaacaaaaaattaaacctttattgcttgcaccttccctcaccggaggagctagaggctgctattaccatcaccacgcaaattcaattggatccattgcagcttaaatgaggaaagtaaaccctagctgtgtagtattcaagtgggggctaaaacgggagtgatagatgaaattattgtgttcaactaaaaaatgtgcaagtggttttgattggtgaataattgagatct

SEQ ID NO: 277956 - DNA, 620 bp, Glycine max
agctttatcaactttaagatccgttcgattgttttaaaaaaaggtgaattaaaataaaaattttaaattaaaataaaatataaaaatgtatattctagattattttatatttcattttttttttatcattttttactttctttcctgacaaacaaatacacagacagcgtgttgaaaagaacatgaaagttgtccagcgtgtgttaattggtaaacccaaaatattaccatagacagagtgtagcatcctaaattaagaaaaacaaagagagaaaattgtgagaggagttttcacgtctttgagaaatgggtgcttcgctatcggtctcggaaaaatccatccatgaattcatggtcaaggtatacttgaatctcaacaacagaaaacctcaatttttttattatttcattttttgaagaatgattatagaaatctcttattatattggtcatggttgacacacgatgctaagggcagagacgtgaacctcagcatctacaaagggaaggttcttcttgtagtaaatgtcgcttcaaaatggtatttttacacacaccctttttttctaacccaactttttccatatgcttgctgtaaaaaaccaaactttcttttcttt

SEQ ID NO: 277957 - DNA, 461 bp, Glycine max
  unsure (1)..(461): unsure at all n locations
agcttcttatccaaaacactctcttggnggtgaagtttctccttccatggcttattccctagtggatggcgcctcctcttacctcttctcctttatctttcgctacatctccatggtggaaaatcaccatcgaaggacctcattgaagctcaaagatccaacctccatagaagcttctcaagcaagcttccatcacttttctttactctaaccatgatgatgaatgatgtaatacaaatatcatatgtattagaagacacaacacaagataacaaccaatacaaattccacttaagggagttaggcatgtaaaagtctaaaaatcttcaaaacttctttaacatttgccttgagaggttgttcaccatattgctgatctcatgttactccccctatctctaacaatctcccttttttttggcttgatgatgccaaacttaaatatgacattgagtgcattt

SEQ ID NO: 277958 - DNA, 523 bp, Glycine max
  unsure (1)..(523): unsure at all n locations
agcttgtaagattatggggtacccgtcacatgtggtactaggtggcgatcgggtgatggggcaaatcaactctccacatccacaaatcacacatgaacccaccatccctagttgcccaccttcaactgagctcacgtactcccacgtagcccttatccttgttcctctcagcaccgggtccccatcaatccctccaagcttccacaacatccaagcaattcaatatccaaacatcatgaactatccaaaaccaagaaaacagggcagaggcagaaaactatgcccaaaacacattccaataccacaactttccttactcaaatactccaataacattctcttcgttccgattcgttcaccgttggatcgactcaaaaattntactggaggtcccttgtacataagtctacattttgaccattgggatctgctagaaaatgtacagaacccaatgtgtaaaaccctttccacaaccagcaatacacaaacatttttctgcacaagagccaaattctgctacaca

SEQ ID NO: 277959 - DNA, 566 bp, Glycine max
  unsure (1)..(566): unsure at all n locations
gcttgacgccattttccttgagatatgattaaaaactgtctagagcgtcatccgctgggcggtagtgtccactgttagccgagatagaccgaaaaatcaaagtcattgtgccattgataatcagacatttgcaattcacataaattggacttgtcacatttacaatccactatgtccttgtcactataaaagctagcaggcaaatatcataagaagttccattagcacaatagtttaatcatgcaacctatgaagttaattcaccttaagaatttcattctctgccaccagccttccagcagctaatgtagctcctccagccaaaaaactagaatgatgaaataatcccttctttttctagaaggctaatgcaatgtatagtggcacaagaaagacatggtaattgtctttaaagaaaataacaaactttaaaaagtaactgcgctcgatttgttaccttgccagcataaagtttcttagaagtgctcatgacanatatccatattgcatcttcagaatcttcattctgatgaaacaaatctccatattgctagttgataattttg

SEQ ID NO: 277960 - DNA, 537 bp, Glycine max
agcttgtgcatccaataccctgatgaggatgtcccatatgttcttaaaactgggctgattcatttgcttccaaagtttcatggccttgcaggtgaagacccgcataaacatttgaaagaatttcacattgtctgctccaccatgaaacccccagatgtctaagaggatcacatatttctgaaggcttttcctcattcattagagggagtggcaaaggactggctgtattaccttgctccaaggtccatcacgagctgggatgaccttaagagagtatttttagaaaaatttttccctgcttccaggaccacaaccatcaagaaagatatctaaggtattagacaactcagtggagagagcctgtatgagtacttggagcgatttaagaaactatgtgccagttgccctcaccatcagatttcggagcaacttcttctccaatatttttatgaaggactccagtatatggagagaagtatgatagatgctgccagtggtggagccccttgagacatgactcctgtgaagccaggaatt

SEQ ID NO: 277961 - DNA, 561 bp, Glycine max
  unsure (1)..(561): unsure at all n locations
agcttacccctatggcttgcctccggactttactccccgtgccgccccggaagatttaagccaagcccctaccttcgaggggcaactcccaccttatgacgactatcccgggcaagacgatgaggaaggagatacccatctcggccccctgctccacctcaaagatccatccccccatgaactaccccaaccaaacatagtccgccatatcccggcttcacccacgcccgtaaaagaatctattcccttcgcggaagataagggaaagattgaggcgcttgaagagaggttaagagcagtcgagggcctcggcaattacccattctcggatttagcggacttatgtctcgtgcccaacctcgtcatccctcccaagttcaaaataccagactttgataagtacaaagggacgacatgtccaaaagggcatctccggatgtattgccgaaaaatgggggcgtattctgcggacgaanagtttgtggtccatttctttcaagacagcttggccggagcagctgtagcatggtacaccaatctggaagctcccagatccgatca

SEQ ID NO: 277962 - DNA, 761 bp, Glycine max
tggaattggtctgtcggccccggatcttaagccccggcggtgcctcctgatgtgataaacttgggggtttttatttcgtgctgccaaaaccccagagggatttccacattcggtcccccagctccagaaccagataaatctccaggctcgtgagaagaactcccacagatgaccgcatccagagaaagttgatctcccgattcaagagaagaaatcgctaagacttcccccgggggagttttgaaagatttttcaaaaaacaaaccttagcacatttttgttttttcaaagagattctctccaaaatttctaagtgaccacaagttttactctgtggtgattgatttcccagtttctattattctataccagtggtaaaatttgatcttaaacgcctttaattgaatttgcaatgttccgattgtttccaaaaggtggcatccactaccagatattgttatcgattactagcgtatcttgaccgtgaaagctaaaacaaatgtgaagagtcgtattttttcttaaaagctttgtgtaacccgatacattgtttatgggattcgaataccaccggcccgatttgtattaaaacaagaaaggatactcctctcctgggtttccggttttttaaagggggtacacttttatgggtttttttgcccgcccggaagagccttttaagccctacccttcttttgtttttatacaacaatattttacttttgcccccccctttttgtatacttcggaaattttttctt

SEQ ID NO: 277963 - DNA, 377 bp, Glycine max
agcttgaataccctttcaagaataaagatacctaatagatgggtgttcagtgggtaactgtgttagctgtgtgactgggtagacattattgtctctctttggggtcccaacattttattattttgtttttgggaaaattttggttccatagattcaaatgctatcttaagcttcattgatccatgaagtactcttttggtaaaatgtatatgtatattgttgagctattagtgcttaacatgtgtgtgtaaacaatcgatttgtttatatggcatttttcccccctgcacatgagaaatacaattagcttggaaaagatttaccacacgaaatgatattttgtaaatggattactagaccatatttcatgtataaaa

SEQ ID NO: 277964 - DNA, 827 bp, Glycine max
  unsure (1)..(827): unsure at all n locations
cccacaacatcactcnctcccccccccccgntccacctccctcctccttacagatcactnaccccntcacacccnncccgggttgtgaccctgagaccactggacccggaaccctacgcagctgcagcttccccttggtaaaacggggagtttattaacgttgggaagcaaaagacacaaacaagccccgaccacttagggggcactccaagcaatggacgactctacttcgggaacatatgagggaagaccgaccaacctcagacaactgatgaagaacggagaaaaatccccccgaaaactattacagaaacatatagaaagcgataccaaaacatcttcctgaaaagagggagagggtagtcccccaactcgacacaacgaaaaaagtgtctttctctaaaaggcgccgacttcttttggaaccctcaggaaaggcccagtgggccctggatctatttgcactcccttttccaatgaaaacacccccctttagtgtaatataacagacttctatctgaaacgatgccaaacttttccgaatatgcaatgacacctggtttcctttcgaacgggcctaaatttaaggaaaaaaccacaaagctctttttccttagaatgggccaaactctccggataggcaccaatctcggtccagggctccaaaggaacaaaagagtaaagcccacccccaggctcccggcaaaactagggatggcccccggtcaaacattccaaatttccatcccgaaaggtaagggagagataaaattcttttaccccgaaagaaccacactgggggtcgaaaaaatatttaaacggaaatc

SEQ ID NO: 277965 - DNA, 497 bp, Glycine max
agctttagaccgttgctccctcaaaacaaaaagcaacaacttgttggttgttgcttcctgaacttctcaagttgttttctgcacttttttcaaaatatgtttttaaccttttaaattggctgtttcaaaagtcaaaaaaagaagtacattccagaatgtaactttacattctggattggtcatcccgaaggataaaaagggagtgcaagaagcaatagctcaatttgttgaagctggttcgtttcggtccaaatcgcttactagttcgatgtagcccagtactgcattttatttgagtctgtactttatgaaagtagtttggttttgcatatattcttaacaaattacacttaattatggaacggaggaatcacattcttaaaattaattatatacatatcctatttataacttcaagcattttgcttgtaattgatattttttataatttattttgaattaattactcataaaattgctataaataaataaaatct

SEQ ID NO: 277966 - DNA, 486 bp, Glycine max
agcttgtcccccaattttctataaacagggggagaagtgaagtagaaaacggttcagccccttaggcacttctctctctttcgaatttgcttaggaaaattgtttttgtgaagaaaatccaagccgaggcgcttccgtaacgtttccgtgagtgatttcgcgaaggttttcgaccgttcttcgacgttcttcatcgttcttcagtcttcaacgggtaagtacctcaaaccaagcttttcaattcattctatgtacccgtggtggtccaaatttggtttcatgtatttttagtctcgttttcatttactttttatacccccttttgacgtgcttaagccatttatttaagtcatttctcgcttaacctaaaaataaaataaatttccaccgatcatttgaattgtatcatccgttaactttggttgaaataaattccgaccgatcggtcgtgccgcaaccacattggaaataaaaaaaaaaaaaaga

SEQ ID NO: 277967 - DNA, 608 bp, Glycine max
agcttgagactttaactaaaaaatctaacctctgatctgtaacctttatggcgtgtctgttattttattcccactttcctatgcacatttaacagaatattttagacatttaccaaaaaaaaagattgatatggtaacactcccaattaggagaaaaatgatttcttttataaaaagaaaaaggataagcaactactaaatcagaaagatcaatgacatggaataaaaataatgatgtggtgagggttttttttttgacaggttgtggtgaggttctttaccagccttttgaactaatcccatgacttcaagggcatgcatcgatttaaattgagaccataatattaaaaaaaatcactgtggattcattgggttcaattttggttcatccatgagtgatgtggttagctgatcaagatggttaccctttttgagttcaaaaccgtggaatccttaagcctaacccttaggaacacactctctacaatgattgaacaatgcaagaacccgagaaagctcaaaaaaatcatacccagattctaagtcaccaactttacacactggggaacaatattatctcactacccggctcctattttttggtcctt

SEQ ID NO: 277968 - DNA, 542 bp, Glycine max
  unsure (1)..(542): unsure at all n locations
agcttaggtcatggttcggtgtatggattccttgagcttcagttcatacacaatgcaaaggatagacatgttgaatgtcaacattacgttgaaacatgggtgaaggattcccaacgagaggtctacctaggagcttacttgaatcaataagtaagatttatgaaattcctgtaaagaatatttgcattatacgtacctaattattatcgaattcaaggcccattggcagttggttgttctatgtcttaagaacaatgttgttgtctggttttgttcgttgaataagaagcttgatattcatatcaaagctgcaattaacaagttaagttttgtattataactcatttaatctattctaaacttggatagataaatggtgttatcatcgtatatacgttggtgttnttttcctaaccaatgcaatgaagatattaaagactagtgtggatggtaaaactgatcaagttgttcctcagtggattgaagtaaaggttagtctttaataaatgcttatttttgactggggatgttttgtaacttcc

SEQ ID NO: 277969 - DNA, 248 bp, Glycine max
agcttttcgattcattctatgtacccgtggtggtccacattgtgtttcgtgtatttttattctcgtgtcatttactatttatacccccttttgacgtgcttaagccattttatttaagtcatttctcgcttaacctaaaaataaaataaatttccaccgatcgtttgaattgtattatccgttaacttcggttaaaatgaattacgaccgttcgatcgtgccgtaaccacgttgaaaaagaaaaagag

SEQ ID NO: 277970 - DNA, 527 bp, Glycine max
agcttgcttcaaagagatccaggaaggattttgcggctgaaggaaccagtttcgctcccgaatatgatagtcatcgttttaggagcgctgagcaccagcagcgcttcgaggccatcaagggatggtcatttctccgggagcgacgcgtccagctcagggacgacgagtataccgacttccaggaggagatagttcgccggcggtgggcatcgctggttacccccatggccaagttcgacccagacatagtcctcgagttttgtgccaatgcttggcctacagtggagggtgtacgagatatgtgatcctgggtgaggggtcagtggatcccattcgatgcggatgctctcagccagttcctgagatatcctttaatgctggaggagggccaggagtgcgagtatggccagaggaggaaccaagccgatgggtttgatgaggaggccattgcccaattgctgtgttaccggggcaagattttgccccgactgttgcggggagacaggtgctgatcatgcgcaccaaca

SEQ ID NO: 277971 - DNA, 543 bp, Glycine max
agcttgtttatcccatgttgaatttgcttctttagagctgttcatagcaccactaattgttctccttttgaagttgtttatggttttaacccactaactcttcttgatcttttgcctatgcctaatgtttctgtttttaagcataaagaaggtcaagcaaaggtggactatgtgaagaagcttcatgagagggtcaaagatcaaattgagaggaaaaataaaagctatgcttaacaagccaacaaagggagaaagaaggttgtcttctaacccggagattgggtttgggtgcacatgagaaaagaaaggtttccggaacaaaggaaatcaaagcttcaaccaaagggagatggaccatttcaagtgcttgaaagaataatgacaatgctatcaagttgagctacccagtgagtataatgttagtttcaccttcaatgtctctgacttatctctttatgatgcagatggagaattccgatttgaggataaatccttctcaagagggagagaatgatgaggacatgaccaagagcaagggccaag

SEQ ID NO: 277972 - DNA, 409 bp, Glycine max
agcttctcgatatattattcgcctgaatcttacatctgagtgaaatttatgaccatttgaatttctcgagagcaattgttgcccaatttcgtgcgtctggatatattattcccctgaatcggacatctgagtgaaaagttatgaccatttgaatttctcgagagcttccgtttttcaatttcgagcatctagatatattatttcccggaatctgacatccgtgtgaaaagttatgaccatttaaatttcttgagagcttccattgttcaatgtcaagcgtcctgatatgttatgcgcctaaatcggacatccgagtgaaaagtcaggacaatttgaatttctagagagcttttgttgtttaatttcgaccgtgtcgatatattatgggccggaatcgaatacctgagta

SEQ ID NO: 277973 - DNA, 488 bp, Glycine max
agcttgtcttgacatattagaagtttatactcatgataaaaacattctgaagaattgcttatgattaatagcatgttttcgttatatttcttttaataaaaagagattttaagtgaattagtaattagtgaggatagaagtaaaaagaaaaaaagaaaaaggaaaaaagccagtaatatgtaagttataagctagttgaagtaataagccaaaaattacataaataaaatagcataatgtatatctaataaatttattttgattaaaataactagtcaaactaacttatactagagtgttgtgttaaacacaattggaaaaaattgttgacggtaattattatttaaatacgtttatgatttatattattatcaaaaattataatcttaatagaaggaaaaaaaaaacaccttaatggttctaaagctattgaaagcaaagaaaatattgatgaaaaaaaaaagaagtgaagttgaccggttcaaaca

SEQ ID NO: 277974 - DNA, 386 bp, Glycine max
  unsure (1)..(386): unsure at all n locations
agacctcctcaacctcagcagcaaaatcaaccacagcagagcaattatgacctctccagcaacagatacaatcctagatggaggaatcaccctaacctcagatggtccagccctcagcaacaacaacagcagcctgctccttccttccaaaatgctgctggcccaagcagaccatacattcctccaccaatccaacaacagcaacaaccccagaaacaaccaacagttgaggcccctccacaaccttccctcgaagaacttgtgaggcaaatgactatgcttaacattcagtttcnnnnngaaatcagagccttcattcagagcttaaccaatcagatgggacaattggatacccaattgaatcaacaacagtcccagaattctga

SEQ ID NO: 277975 - DNA, 793 bp, Glycine max
  unsure (1)..(793): unsure at all n locations
ntagaccctgagaccactcgagacccgggatcctctaaaggcgacctcggagcctgcgagcttatttcctggtgatgagttttacacatttatctcggtgcgaacacggtaaaataaatctttggattaataattcagataataccttttatatatttagaatacatgatgaaaactcttaaaatatttttaggttaaatatttattaacccttttaagtgaaaataatataggtcgattttatatatacctgttttgtgtcatggtaaaaataatattggccggtgtgggtattattcatggggggggagaacgtggatttttgggactatgaaaaaggggggagcgcgtgttaaaaacaaaatgtctgttctgttaaaaattaagacacccccccctttgaaatattggggggggttaattcttagatatgaattggtcactccaccactgttgtggcgctctaagaaaaaaaataatagccccggaagattttttttgaatccactcgggggaacccccaggttaatttctttttgactcccttggttctaaatttatttgataacaaataggagggggggctttttttttttttcctcataaaagaaatggtgggggaaaaaatttttgttacacccttgcttaagaaaggggggggggccccaccaccctctctaaagcttggctttgggagggaaatccacccggggggggggtttttttaaattgtggggcgcccccggggggggagaccaatacccaaatttccgttttttttgttcttccctct

SEQ ID NO: 277976 - DNA, 315 bp, Glycine max
agctttgtatgaagttaacctatttgtagtttcttacctttccaaacttagtttatggagtaacaaagttttctacgccacatcagtttcaccttaatcgacttacactgcattgaataaaattacaaaaatgaaagatggtgacttaatagagtatatagttgcaacaaaaaaatatctacaaaatcttctaagatctactaagtctactaagatggagactaaaagattgctaaaagtggactaagtctaacatagactaaaagttgtcaacaagttggtttgactacaaaagcctacacaaaaattggacta

SEQ ID NO: 277977 - DNA, 475 bp, Glycine max
agcttgcctaattagcctgaaattgagggattatgattattaaacacccaaaatggaagtactaagtatttattacctatacttaacagaaaatacttataacactacaatttacacaagttttatacaccaaagttagtcgtattcaccgactaacacaagtacttgatgtaaataccagtatatctatttaatgatgttttatgtgttctctgtgctatcagtacttcatttcagtgtgcttttgccttgatcacgtagatgcatgctttgttaggatcattcaacaattgaaactggtctgattcttagaacttgataggacagggctagtttatcgtattatcactagggatcggggtacggtaacctagttgtttgtatgtttgtcttaatgcgggtctggtctagttcagtccagcaagaggaatctgaggatgatgcttgatcagaattaggctagactatcacgggg

SEQ ID NO: 277978 - DNA, 613 bp, Glycine max
  unsure (1)..(613): unsure at all n locations
agcttcaatggagcttacatcattgtccttggatgtattagttttacttttatcagatgttcacacatgtgcgcagaaagaagctggttaggaaccaaattggaattatatatgtgcagctgtggtgatgccaattttcaagtgtacaggtctctaatttttgtgtgggcttggtgctgataaaaagtaaagttgaagggtgattatatgaaggcttggtggtgggttactacttactagtgcctcttattttcttcataaggtttaaggggttaggcgttttttgtttatatcggcctatagaatatatgtatttttgttttacatttatgagtatgatggattaatttactttctaaagtgagttggtgatcacttatttagaagatcactcttatttattagtaagtcattgataatagttaattaagagtttattttgaggttaaattatataaaaaaatataatttttttctcataattttttctttttgagcaaataattgatanattaacatcatttaagttgttatgtagatgatactaaaaggggataatctattatgtttagtgagtaaataaagcccagaaaacaagaatagttagaaaaac

SEQ ID NO: 277979 - DNA, 562 bp, Glycine max
taagtgacctgccgcatgcaagcttgaggaatcttacataactgctagagatgtcgctattactgccaaaatacaaacgtgatctcgcttagaggtaagggatgagtttatcgcaattggggttagaatgaacatatgtagggatccttagaggaccaaattggggtttattttggtatgtttattgtgtttgaattattcctatatgattgtgtgaaattttttgaggggttttactcccatgttgtgagaggcatttttgtttaaattatttatactttggacaagattttctagattgacatgataaattgttatattgagattatgaaattgtgattcaaattgtgagtaagtgacaaattaaacctgtgatgaatggagaaatacacgtgtattgagattttgtatgtattgagttgtgagttatgaattgtgcaatcacacaattgtaagaccctttaagggcgacaagtttttgtgcgatgagtattgtgataaaatccattgtgggaacccaacgaattgaatcactttgaagcgcaacaagcttaaatgattt

SEQ ID NO: 277980 - DNA, 557 bp, Glycine max
agctttctatcttttttattctttggagaatttttagctttctatctattaattatttatcccaagggttcttatacgaagatccatcacttattatagatcaacaagcttttttgataggaagattaaaagaaatgttaatgcactttttttttgtgaaaactaattcacttgttatgtacaagtttatgaccaagagaatttttcaagtaatgctttttagatacacggcctgatggccaagagattttttcaagcagtgatcgctttttactgttgcattttttaccaacacttattataattcttttttctttgaacaattccatctcaatttattttctttgctcaaacagtttgaattgataggtggtccttttcgattacaaaatttatgtgtgaatgctattttgaaggaacttatttattgcgatgaaaatctctttcaatcaagaatttgttttatggatcagtttcaatagactgtactatatgatgcctttattaatcatcctaaaagcacagccgcattgagtttttttactaaacctttaaaa

SEQ ID NO: 277981 - DNA, 615 bp, Glycine max
  unsure (1)..(615): unsure at all n locations
agcttcgggaacacctaatctagaatgtatctcacaaaggtatttcaagaatataaaaacatacatttcaaaaagggtcactgcttcgatggaccatgatccattatggaccatgattcctgacccttagattaattttagtattgtaggccattcacaccaaattcctcacctcctcccagcaatcacctttcacccccactgaaaattgcctccatcagcaacattttttttcaaccacatccacctttttctctaaggaaaagaaagtgagagagagagagaaagaaagagtgagagagaacaacttctcttgtgacaacatttttttttttttttgcttcatcttccctccaccaatctcatcctccacacacccatttatcaccaatcaccacaaccacaaacacacccttcaaccctccacttgcctttccccctcttccccaaatctctgttacgagaactaaaaaaacttgcaagcaaaataataaaacactaaaaaactctatcctatataaattcaatttgtctatctttatttngaaattctaacatttgaatttgaaggagggatattatagaaaaaaaatagaaggtcttcacaaaatattt

SEQ ID NO: 277982 - DNA, 590 bp, Glycine max
  unsure (1)..(590): unsure at all n locations
agcttgatgttatccgccaatcacatgattctaatgatgttttacgttttttcaaagatccaagaaagctaaaaatccttatatctcaagagtagtcatattggtgtcaggggcaaaagttctatgaccaaaagatggagatatcaattcaaaaaaatttcacaaatcagcaagtgtttggaaagccacaaatataatttcttctctcactcatgaggatggaactttggtccataacctcaaggatctgcctgatgtaactacttatttcaataatttgtttcaagctaagaatcaattaccaagtaatcaattacaaattgttagtacaaggaaaaaaattcacttctcttgaaatttggcaagaattatcaaatgaatcgattaccattttaattaatcaattacataagctagaatgaagtctttgtggctcaagataatcgactaccacatttagtaattgattagactgcgtctggaaacttttagagttcttcatgtgttgaaaaatcaattaccacatttganaattcatttcttaaccataaaaacttgagaagctctttctaaatgagaaatcgattacc

SEQ ID NO: 277983 - DNA, 572 bp, Glycine max
  unsure (1)..(572): unsure at all n locations
agcttctagaagtccttctagagtgtatccaaacaggctcaaagatactaaaagttacagcagttactgcattttttcaaacaaaaggtaacattggatcactagataaattcagacaatataattcccaatgaatttgcatagttcatagtaaaagatatgctcagtgtctatattaacagcaatcataaattcatgattaacttgagaagggaaaagggtaaaaattctgccccctcaaatggcatttcaaatgaagaggacataaagaaacaaacaaataataaaacaaaaccttagttcactaggtggggctggccacaccgcaagaatcaaatgatgctattgtgctatgtcaacgactgttagaatggtataacatatattaattagaagttgtacattattgtggacaatgtagtgttgattctaatatgctagaaaaatcaactacaaaagtggaaggcactcaatatgataggatacctgcacatctncagcagcaaatacaccttcaactgaagttttgcagtaccctcctgaacttgtacataaccagagtggtctaattc

SEQ ID NO: 277984 - DNA, 542 bp, Glycine max
  unsure (1)..(542): unsure at all n locations
agcttgtctaaagctctgaaagtgtagatgtatgaatctgatggattagacaactctgatggatccatagatcatgaagtagccctcatgtccaaaaatttcaaacatataatgaagaagaaaggaaaatttcaacattcctctaaacacaaagattccattttcaaaaagaaaaacaaggaggaaagcaatgagatcatctggtttgagtgtagaaagcctacatacatgaaggttgaatgtccttggctgaagaaaaagagatattttggggacaagaagaagaaaagtttgatggtcacttgggatgactcagacaatgataagagtggcagtttagatgatgaactagccaacatttgtcccgtggtagataaagacgataatgtcaagattaaaacatgttctaaatttgctacctcttcttttgcttcattagacgatgaagagggtatgctttataatgttcttcttcagaattgtcatatgatttctctttagtgtaaaactntaaaggaaaattcaaagttatgctttctaaa

SEQ ID NO: 277985 - DNA, 1037 bp, Glycine max
  unsure (1)..(1037): unsure at all n locations
acctcgggacccgcctaactctccttgcgccacttctccactactctataantgaactnctccttctcnnnaacccgcgccccaggngnatgtgacactgaagcactgcaagacccccaagagaacccccccagcatgcaagcttcgactctgagcatacgaaaggcggagattttctgtaattcttatcggaanaacgacagagggcgcgagcggcagcccatcatgactcactgtacaaaacacccctacatagctgcgaaaccgaattgaaacacatacgaatcgcctcacaaaaacgagatgcattaacaatcgtctcactacatgaaactacaaacgaatcccagtatttcccctactaatatacccaaccgaatgcaaagacaatcgacgaccactcagggtcagaaatgcaagaagaggcctccaatacactgaagagctggaaccgctcccctgggcctgaagaaaacaacagagaaattgtggcggcacaaagacaaaacaacatagacatgaggggtgaactcgggacggacatcatcaacaatggaataagagatggcgactctctgtatagatggaactcaggaccaacccttttgaaaccgcgggacagaatatcgacagacaaaggtccaagacaaaaaaccatggaggcacaaccatcgaacacccttctttatcgcttacattaacaccaatcaagcagggtacatccctaaaaatgacctactctcacaacttaattttaggacgtccttcttagcgncaaaaacctttacacgaagagccaaagcctcaggcatctgacacgccaacccaagtgaatacacaaacgggctcgtaccagaaaccccaaccaaaaatcatgggggcttggaaccttttcgttatacacacagggacaactactctgtggaaaaactctgaggacaaaacacaccatgctgtctcctatgcattctgggaccgacgcagggagaggctacaaagaacctccgcacaccgcaacctgtaacggcactaaaccg

SEQ ID NO: 277986 - DNA, 510 bp, Glycine max
  unsure (1)..(510): unsure at all n locations
agcttcgtgaagaggttttgaatgaccgggatttgatttgaatcaagggggctttgcattccaacccagcagccatgtctgattatactttgagagatggtttaatgtttttcaagggcagacttatattgtctaagagctccaacttgattcctactttgttgattgaataggaggacactccagatttaccaagactaacaaacggatggcagcaaccttctattggaaaggtatgaaaaagacaataatggaatatatccttcgttgtgatgtgtgccagtggcataagtatcaggccatgtcaccaaccgatctgctgcaatccattcccatcctagaggtggtttggacagatatctctatggattttattacaggattgccccttttacagccaaaacagttgcagaaaagttcatcagagatgtggccaaactgcacgtgtntcccaaattctattattgatcgagaaccccctctttctgagtaaattttggggaaactttt

SEQ ID NO: 277987 - DNA, 571 bp, Glycine max
  unsure (1)..(571): unsure at all n locations
agcttatgcgcatatttccttacaaacgttctcttgcacaagacattctattaaccgaaaaaaatgcacccatatacaatcaaggcagcttcgttacctagattatttacacgtacttccaaggtgtatttgttacttacatcacacacatctccttggctaaattcacatacatgcatactcaaagcattttgggggaccaaaaattgcacatgtgcacatcttggtatttctaatacctatacatacacaaacctcatgatgaatcttgactatctacacaataaggtgctacatttcatgctcttttcaagtttttgctacctaaggccgcatgcaaattcaagtatattttccttcgctggctaaaattgtattcaaattaaaaggtatacatttttttggtaatgtatcttctttacatagcatgcaacatatttatgtatatttttttgtgagacatnttgactaccaaaattatatgtacatacatccaagtattgtgctattatacccaaagcgtaaatngccaaaggtattttgctacctattctaaacctacacatttatg

SEQ ID NO: 277988 - DNA, 617 bp, Glycine max
  unsure (1)..(617): unsure at all n locations
atccttaagtcacccgcggcatgcaagctttcataagtgaaattagttgcattcatatccctaagagtcctctcacgaggtggaggttgagccatgttctcggtatgaaaattagtagtggaatgttcaaaatcagaatcaccttcaacagaatgcttagaatgctcacaatgcacaaaatgaccaggatgcacactatgtctaactaatctatgaaaggatttatctatttcaggatcaaagggttgtaaatcacttggattgcccctagtcatgcactattgcaacaaataatgtgtttctcaacaagcacttaacaagggggtaaaactacatctatactcaaacgatatcaaaatgagctgaaattttgtgaggaacaccctataatcatgaaaagatagcacaaaaaatttcaaacaaaaattcaaagtctaactatgaaaactacctaagcaaagtttagaaaaataggacaataatacttaaaanaaatagtaaacggcttattttttggagtcttggaagtcccccatcggcttcattgggttgccatagtataggaaaattttttctacccccaatgcatatacaataatagttattctgataccccg

SEQ ID NO: 277989 - DNA, 601 bp, Glycine max
ctttagtaacctgccgcatgcaagcttctttgtcttgctgatttgactctatattgttatactttttattattataattttctatgtatctcaaataaaaaatctctctgatttatttttcttttcaatgttcagataattatttagagtaactcagtgtatttgggattacattgagtacatctttttctaacctaattaaaaaattatttttatttgcctgaaataaaaaaaatggaactgatttattttccttttcattgttcggataattattgaacttaatccatgtgctttctggttacatttgattacatctttttataactttaaaaaaatataatttcccatttgtcttaaaaaatactatcttgaaattatgatcgtgctaggatttgggtataggcgcaagagttaatgtctcttacacatgtgatttatgtggatactaataaataaataattaattattaaatatttaattgtatttgaattaaatggaagaaatctttaaaaataaatttgaagagagtaataattttaaaaaagagttactcttattgattgtaaataagatctccctttgaaaaaaaatgattaa

SEQ ID NO: 277990 - DNA, 171 bp, Glycine max
agcttcttgcgtagccgctcttgctgctcatatattcccaaaaacaaatccctcttattactagctattttgaattctttagttcctgaatgtacaaccttcaaattgttgctcgttcccctctttgagaatgaggaggatcttcataggacttcatccagctgaggttag

SEQ ID NO: 277991 - DNA, 367 bp, Glycine max
agcttcaggtcaatgaaattgtagactattatcttctactcgatgacgacaattatgcagtcgcggtggagcctgacgttgcggacgacaacgcagaagaagagtttatcgatgtagcgactctggtggtcatcccagatcatggccatgttggtgcctattgcggatggagcctgttgacaatgagatggtcgtaaatcgagttccgtagcggatgacggcggcacacggtggccaaaaatcacctcacagcagcagagactaaaactagaggggttttgttgcaaacatggagaggatgtgattgatggaagtggtttcttgttcaccaccacagttgggtggaaaaaggaagggaaaaaatgtt

SEQ ID NO: 277992 - DNA, 605 bp, Glycine max
agcttggccataagaatcaaagatgtcttttataacgacacggtctctatattatctaccttgtaaaatagaaaacaaaaggtgtgtgaggatatgagttcctttacacatctttactctatgaatgtcacatttcatttcatgatattttaaaagtgtagaaagataatgagtcatcctacctaagttctctcctgagaaaaatttgtccaattgagtatccattaataatcatagcatattggacaatctgaagacatatattaatccaactaagtcatttttcatgaaagcccatttttttattactaccaaatagccccaattaactctatcaaaagctttgctaatgtcaatttcaaagtaacttgcccaatttttcctttgtacttacacctcatgtgatgaataatttcataagctaaaagaacattgtaaagaatggatcgatcctctacaaaacattattgctcttcataattatgcaatttggaaagagaagttaaagacacttggctaaaactttggacacatgatttttgttaggacattgcacggagagattgaccaaagtcttttatacaaacagggtttttaattttgga

SEQ ID NO: 277993 - DNA, 465 bp, Glycine max
gcctgcaagcttcttttggaccttgaacaagcaatcaactcctctttcagaaccatgctatgtgctcgcgactggtccctttcttcccttcgcaacttgagttcactattgctaccccatagagctccgcgaaatttgttccggccatactcttccttgcgagccctcttggtctctcgttcaagggctcttgcggtaattgcattctcttcccgtaacccggcacacttcttccgaacgtgtgtagcagccaacttgaacttctccttggcgagttttgcctttcctaactcgcttttgagagcttggacttcctcgtcctcttccggtgcttcaaaattctcttcgctgacgacttttaacttggcgagccaatctaaacctcgtatgcgaactttcagccattcgtggtacccaccaatgatgccattacgaatgcctctaagctcttgatctttccttaac

SEQ ID NO: 277994 - DNA, 518 bp, Glycine max
  unsure (1)..(518): unsure at all n locations
agcttggattgattgagtctagctagggatctaggtttantaatttacgctacaatgtagaacacaaaagcaggattaattagagaaatatcttgatatgcatcaactggtctgttagaaagacccaacacttctacctactgttgtcaattttacttacttgcatttttactatttttagcctagacttagtttaattttgttctaaatcatcaattatcaatgtttctgtcatcaatgccttatttctaaatttaaccctatctaagactagttccctgagttcgatacttggattcatccattttaattttaaatacttgacgatcttgtgcactttcccggaaaccggatttcccttgaacttatttgtataaagagaaagtggaccaaaaagtacctgtacgggaaatccaacagcaacctttatatcaagtgtgcaaaacatgacttcaaaattatgatttgtccctttttatggttattatccttttccctcttttataattttaattttt

SEQ ID NO: 277995 - DNA, 478 bp, Glycine max
  unsure (1)..(478): unsure at all n locations
agcttcaaataaggtagtagggttgacaatcaagcttcatatggttctagtcactactttgtgaatacatttaaaatgcataaggtaaagagagggggtaaagaatgaggcaagcactagaaggaggaaaataaggtagtatcaaacaatagatcctacattgttaaataattcttttgacaaattaattactaccttattattttatttttatggacaaaccattaaaacttagtttgcaccatcttctaactccatcctttataattttttgttgtcttcttcaagtggcgttgtgtttgatactgtttgaaaactatttcttatcatgtttccttaacatgattgaaagttcctaaagttcttaaagttaattcgcccaactgtatttttctacctagcctaaagaaccaactctaattttcttcatttgttcttataaatgtcccacaacttgaatcanactcaataaaaaaaa

SEQ ID NO: 277996 - DNA, 415 bp, Glycine max
  unsure (1)..(415): unsure at all n locations
agcttgagatgaggaagtgtataaaggtgaaacttcctgcttttattcgttgaccacagagtggtacctggagatatgtcgcgggggtcaagagaccttggggacgtcaggtggggtgctattgcccaaaaccaagcttgaccaatcccgacccaacccgagcatagtcggtcagtgagaacctgtgatgtacctaaacaggcgagctcttggaagtcaacagataaaaggaacaaagaccacaaagcaaggaggcttgtggtggctggccagctgtgaaacttgattgatatgtgagatatggtctctggtaatcgattaccaagggtgggtnatcgattacaaggcttataaatgaagacaggaggcttagatggtctcttgtaatcgattaccaaaaggtgtaatcgattac

SEQ ID NO: 277997 - DNA, 396 bp, Glycine max
  unsure (1)..(396): unsure at all n locations
agcttgggaggattgatggggacccggcgttgagaggaacgaggataagggctacgtgggagtacgtgagcttagttggaggtgggcaacaggggatggtgggtttatacgtgatttgtggatgtggagaattgttttgcaccatcgcccgaccgccacctagtaccacatgtgatgggtaccccataatcctacaagcttgaaatgaggaagtgtagaagggtgaaacttcctgcttttattcgttgaccacagagtggtacctggagatatgtcgcgggggtcaggagaccttggggacgtcaggtggggtgctattgcccaaaagcaagcttgaccaatcccganccaaccccggcatagtcagtcagtgagaacctgggatgtacctaaaca

SEQ ID NO: 277998 - DNA, 512 bp, Glycine max
agctttgagaatatggttgcagccattggtcaatatgggccacatttgcccattcctagctatcatgacatcagagttccactcttgaagaaggaagttgaatatactgaaaatttgatgaaaggccataaggagcaatgggtcaagtatggatgtactattatgtccgatgcatggactgatcggaaacaaagatgcatcattaattttttgattaactctcaagctggtacgatgtttttgaagactgttgatggctctgattttgtaaagacaggtgaaaagctttttgagttgcttgatgccattgtggaggaagttggagaagagaatgttgttcaagttgtaaccgataatgggagcaactatgttttatcgggtaagttgttggacgagaaaaggaaacatatttattggactccttgagcagctcattgtattgatttgatgcttgaagatattgggaagcttcccttgatgaggaagacaattagaacgaattaatctagttg

SEQ ID NO: 277999 - DNA, 530 bp, Glycine max
agcttgtaactaccatgcttgggtatgtgaaatgaaattatggctgagccatgttggttctctggtttaggaagtgtcaaatgatatttgctagcagttctctagactaggaccactgttaaaccttacatcagcttctagactttgaaacataatcacatgatttaatgtcatgtttcttctctttctttaataatttacacactgttttggatttggagttggagtaggaccacctagtttagtgctacttcaataacttcaacaagctatacaacaacaaattatattttataaactgcatatttcagcaacaaattatatttaattgaaatgggtaactgacagtagcaacaaatttcttcctactacaaattcttcagcaaaacaacaattacaatatcaaaatatgctattacaaattttacctaaaatgcattccccttaaaactaacattataatttaaaaatgaaaaacctaataacacaatatttgttaaatttctcattttcttctgcaaagcttcaaa

SEQ ID NO: 278000 - DNA, 514 bp, Glycine max
  unsure (1)..(514): unsure at all n locations
agcttgtgtcacaattcactgtgacagtcaaagttccattcacttagcaaatcaccaaatgtaccatgagaggataaagcacatagatgtgattgaatctgagaaggtgaaggtggagaaggtttcaacaaaagaaaacttggctgatatgttcacaaagtccgtctctagtgtcaagttcaagcacttcctggacttgataaattttgaagatgcctaaagcatattggtagaagtgcagccctgaatcgcaagatagacactcgctgatttggagtcaaggtggagatttgtggtgtgtgactcaaaatcacaaaaggcacaagtgggaaggctttaagaggtgtcataactgaattcagttattataactgaattggttttggcaccaaagcatagttagagtgtatatatactcttgatcatgtaatgcanaagggtggttgttttttacagaggctgataaatagagaggctgaaaaatcagagttgttgccgaaaatagagagttcaa

SEQ ID NO: 278001 - DNA, 574 bp, Glycine max
agcttttctttgagcaaagcaaaggcttgatcttgtttatcacccaaggtaaatgccacattcttcttcaccagctcattgagaggtgatgcaattgtagagaaattaggaatgaaccttctatagaagcttgctaacccatggaagctcttaatatctcccacacttttcgggatgggccattcttggatggccttgattttctcagggtccacttgaaccccatttctaccaactacaaaccctaagaaaactatattatctacacaaaaagtacacttctctatatttgaatagagggtatttttcctaaggactgaaagaacttgcctgagatgtcctaagtgatcatctaggctcctactatacactaaaatatcatcaaaataaacaactacaaatctacctatgaaatcccttaagacatgatgcataagccttgtcgcaacctaaccttcggcgggagggcaacgcgtgactcgcggatgcgtgttccaagaaaggaatacgtgcggagtcgccaccaacgtttattcgaggagaacgttcggaaaacccgaaaagacgtgatcta

SEQ ID NO: 278002 - DNA, 367 bp, Glycine max
tcctcttattagacctgcatgcatgctagcttcattgtgtccataataatggaaccatcacatcctatctatctatatataaactttgaaccgcacaaccatatgctgccatgtgactttattaatcttgtcacatatgcacaattgcttacaggccaattattctactgcttttattactcattgttctctatccataatcattaatgtttactattcactttcagatttaatcttcagtttaatatacatcactattttttattgtaagtcattactcacattcaacggatatacttaatagtattcattgtttggtaaggactatttaccgattcacacaagttatatataaaaccgtaagacc

SEQ ID NO: 278003 - DNA, 445 bp, Glycine max
  unsure (1)..(445): unsure at all n locations
tatgccactttttttttttcaaaacatctttcctaatttgctttttgaaaaagattacatgaaccaaaatattaattggattaaccctttatactggggggcggtttacacattattttggttttaataaaggaccaacattaaggactttacgccctaaactcttattgtataaagttttgcgccacttgagctctgaacccccataatcataaagttaattttcctatctctttcgtaagctccttctgtatctcttgattgaaaatatatttgtttgttctttcgatcacttcttactttcacacacacacaacaagatttttattnttctgattttgttatttttaaggtgggaaatttatgtccataataataattccaatcttggtataatgacttactgaaaacattttcccctctcttgagagacatgatatgctca

SEQ ID NO: 278004 - DNA, 468 bp, Glycine max
agctttgcatgtctagtgattcaagagagagaaaggtccaagttccagagagttttgagagattttactatgtgaagatctgcagagaccagagcttgaagaggaagttgttctgagagctttagatgagtttatgagtggttgtgagatcctagaggtgaaggagacatcctcaccacttgtatttttgcaatctttcatcttgttcttctctttgttgtaaaggaggcttcctagttatagaaagctaaaatcctctgttggatcttccgtgtaggtacttgatgtaaatatctttctatctatttaatgatgttttgtgtgttctctgtgctatctgcttttcattctagtatgcctttaccttgatcacatagatgcatgctttgttagggtcattcaacagtggaaactggtctgattctgatgaccttgataggacaggactaagttgttgtactatcacga

SEQ ID NO: 278005 - DNA, 644 bp, Glycine max
actaaactttgacatattaaatgcggtcaatttttcccccacatttcaaatttatgttctacgagtataaaaatatatctacccaaatgaagctcattttatattaataatattatttttttaaccaaaaattaaaattattatcattaattattaaatcttaattttgaatttcaagtaaggattaggtttgctttattaattaaaatattattttttgagattataatagttcaacattatgattaattaattaaatctttttgtatcccgtagtttgatgtattttctttatacatttgacattttaaataagtcattcatccttatttgaaatacacactaatagcattaatttcaataactgaaattaatctaacagcccaaccgatgaattaatatggaaacaatattttaaaattttactttaaactaatttattcactaaaatatatgtataatttattcttacttactgcccaattcaaattgaacaacttacacaaatgttaagaaaaatgttaaatccaaaagtcattgacttccaatcaactattgtttttaacaatagaataaaatgactctaaatatttttgaaaacctcggaaaatatcaaattttatctatgaacccctataaaaaaa

SEQ ID NO: 278006 - DNA, 493 bp, Glycine max
agcttgataatcatatcaggctttcattctgaaatgaaagatttggcacatttactcactccactccaaaaacctattgaggcaccatgcattatcattgcctcctcaatgaccctagcaaagatatgtgcaagaggaaggtatgataggtatacatctttttcattcaactgcaagcaggaaaaaggagggtaagtcaaagagaggatagcaaaatattcattatcctaaaactgaaaacatttctagagactagagctctcaaaataccaacactagcttactttttcattacaactcttcagcaattgctgaatcccagctaagagtgtaataatgctttcgttggttatcaacactcccttgggatcacctgtagttccactcgtatacattattgtacacacatcacttttctttttaacaggaagatcaaaactctgattatgaccctgctctagacataaaaaactggaatgagtattgagaaatg

SEQ ID NO: 278007 - DNA, 337 bp, Glycine max
agcttctagagctttctttgctgcatcaatgacatagaatgcatgcaaagaaacatttggtggcccgtctttttctgctttgttgtttccttttgaatttagcagcacagaggcatcacaccccttcaagagtataggaaaaaagaaaacaatatgatttgatttcatgatgcatcaaatgaggcggaagcagtcaagaggaaaggagggaggaggggtcaaaatagcattacccgaacgaaacaatcatggaagtgcattcgcagaattgctgctggaacagttttgtccctagcagtggcatcctttactgccttggcaacaatgaactccacat

SEQ ID NO: 278008 - DNA, 412 bp, Glycine max
agcttgtaaacatgattaggatgttaaaagtctacaaaacttgaagactggtctacatgtatctcttcttcaatgtatccattgagaaaagcactcttcagatccatttggtataacttgatatccataatccatgcaaatgcaagtagcaatctaatggcttccaaccttgcaatagggacataggtttcatcatagtcaatgccttcctcttggttgtatccttttgcaaacaatctagtcttgttccttaatatgatgcgtgattcgtcagggttatttcgaaacactcatttggttttgattgacttatgagaggcaggtttagttccacacttcatccgtttaaactgattagttcttcatgcatagccagcaaccaatgctcatcgtacaaagcttcatctatgtt

SEQ ID NO: 278009 - DNA, 537 bp, Glycine max
agctttttgaagaaaaaaaaatagttaattataaaatatgttctagtaaatttacgttggaaatagtttgggactgctttatctcctattatttatttattttattgtaaacctttatctcctattattaaaatttgtacttcagtcctccaagcgagaggttggtgaaatttttttggtaagaccggtagttcatcatatgttacctgtttgttgttacaataatttatatttatctctcttcataaatttcatacataccgacaaggtcttacctacttaatatgtagaccctccattcctaattataacattatttcaactaattcacacttcttaaaaaataattaatttagttaattatattaaatatattaattatttatattattattctaaaattattttttattttgtatgtttattcacttaattacttctcatttggggagaataattaaataagagtatgtaaaaaaatctagaaataaaaaataatcttataaaaaaataaatctctaaaaaggatttaataat

SEQ ID NO: 278010 - DNA, 578 bp, Glycine max
agcttccatcactaaccctatgtcgtaaacccttatcactgacccctatatatagaagtcatattcactttcgtttaacacatccacacaacactatcttgctttattactttcttccaactttgcaaacacaaaccctctgtcacatttctttctctattatttctctattacacaacgtgtcttccttatttgtcaaatggttagtgcgcttcaatggtcatataatcaaaacaaatgaaggggataagtttcaatgcccccacccattgttctttaaaacaaagcgaggcctcccacttgaagccttaaaaataaaaatccatgaaaggcttcatcttcaacagtggataaagtatgcaatatttcattctaatacccacaagtagtggacgtggaatgctcaagtttataatagtgcgacttgttgacgacgaggacgtcaaaggtatgatttttgttattcgccaaagtaagattcttcaatgctgtgaattgtatgcaaacatcgagctacatatacttccctccacaaaccctcaaccaataccttcataaccatagtattatccccaatc

SEQ ID NO: 278011 - DNA, 495 bp, Glycine max
  unsure (1)..(495): unsure at all n locations
agcttcgaaaaaggtgtagagaatggagaattacactaagcaatcactacgcatggctccaaactcgtgggcggaggatgcatgaacgctccaaactcaagggtggaggatgcatgaatgaaaacgcaattcatgaggctccgaaaaagggtagagaatggagaaatgcacaaatcaacactacgcatggctccaaacttgtgggtggaggatgcatgaacgaaaacgtaattcgcggggctccaaaaaagggtagagaatggagaattgcactaagcaatcagtacacatggctccaaactcgtgggcgaaggatgcagaaatgaaaacgcaattcatggggctccaaaaaagggtagagaatggagaattgcactaagcaatcaatacgcatggctccaaagtcgtgggcgaaggatgcatgaacgaaaacgcaattcatggggctccgaaaatagggtagagaatggagaatngcactaagcaatcactacg

SEQ ID NO: 278012 - DNA, 420 bp, Glycine max
agcttgcatgtggagcttctatggaggttggatctttgagctttaatgaggtcctttaatggtgattttccaccatggagatgcagcggaagacaaagaagaagaggtgagaggaggcgccatccactagggaataagccatggaagaaggagcttcaccaccaagatgagtgtcataccagaattttgtccggggactattgcttgatggcatacaacctttgattgaccgcttcgaggtacttggcaccctttgttgcacaatatgtgaagtcccgagacgtgtcgggaatcaaaaggaagcgtggttacgcaatccgtgaaatttcgtaatgtgacggaaaccaaaaggaagtattgttacgcaatccgtgagtttccgtaactttttcaaaagctaaaaaagagtgaatacatgat

SEQ ID NO: 278013 - DNA, 473 bp, Glycine max
agcttagccaaaagatctctgcacacatattttcctctcccaacgtgtgttggatactgaaatttcacgatctggccatgatttcttttttctatcgaaaaatattaatttgtttattagtttttttatcttaatggtaaaaaaaaaggtcatgaggataatcatgattgaccatgttggggagattaagaggtggcaccagctatttaaaaaaaaaaaaacaaatcaccctctggtatctctaaattattccaattacaactgtgaatcccatgataaagagccaggatttcagcatgcaagatatctgtagcaccacaactaccattgaagccagcaataaaacttcctttcatgatcacgaatgatcccgtcgaacccagcacaatgctccttgcgtatcacgctaccatcaatgtttaatgcaaaaagagccaacggggttgcataaagatcaagccatatttcatgac

SEQ ID NO: 278014 - DNA, 597 bp, Glycine max
agcttcatctggaaaagtatcatagatatcgtgctccttggaagtgactttttcattcacaagtctagataggtggttagccactaaattttcacttcccttcttatcctttatttcttgatcaaattcctacaacataagtatccacctaataagtatttgtttggaattaggcttagttaagaggtacttaatgttagacaagtggcctcagatatcttaagaagggggggttgaattaagatattccaaacttttctcctaattaaaaatctatcttactttttacttaagttatgaattcccttaatgacaatcttcttaaatattaattcaaatgaagcaacttgaattatgaatataaagcaataataaataaaggagattaagggaagagaaaatgcaaactcagttttatactggttcggccacacccttgtgcctacgtccagtccccaagcaacccgcttgagagttccactaacttgtaaattccttttacaagttctaaacacacaaagacaaccccttccttttgtgtttagagattctttacaacaagagactcacagtctcttaatcccttagagaatgaga

SEQ ID NO: 278015 - DNA, 533 bp, Glycine max
  unsure (1)..(533): unsure at all n locations
agcttgcaagaggattggtagaggggatctcatccaaggcttttatgtcttagacctcagggacactcttgattgtaaatttactttttttgttatcaattcacatacaacttccattccttgtaaaaatgctcatatttggcattctagatttggtcatatctcagacaaagttttcaaacatttgaataataaaattggtctacacctttctcccaatttctcttcttctaattgttttgtttgccctcttgctaaatttagaagattatattttcctaactctaaccatttattagaattatcatttgacttaattcgctgtgatatatagggtccctatgctcaccctacctatgagggaaagagaattttccttacattggttgatgactactcaagattcacttgactatttctgcttaagcacaaatctgaagctttaatctatgtgcaacaatttttcaccatggttcagactcagtttggtgtatctatcanatgccttcggtctgataatgctaaggaacttg

SEQ ID NO: 278016 - DNA, 469 bp, Glycine max
  unsure (1)..(469): unsure at all n locations
agcttgtgattgatggggatcctcatggaagtgccccataaggttctctttctctacccgggactggttcgtcgtctacaaagggtgaatctccttccactgataagcataatcctaatccatctgaagactctagtcccaatccaaagtctagtagctcttttgagtcgaataattcttccaatgggaaaaaaatagttccaattgtggttcctattgcaggtgttgcagctgccgcttttgtgctcattccgctttatgtgtattgtttcaggaagaaaaagggtgtctctgagggtccagggtcattggtgattcaccctagggatgcttctgatccggacaacgtgctgaagattgttgttgctaacaacagcantctgagtgtttccaccgtgactggaagtgggtctgggactatgactctaagtggtgagtctcgtgtcattgaagctgggaaccttgtgat

SEQ ID NO: 278017 - DNA, 1120 bp, Glycine max
  unsure (1)..(1120): unsure at all n locations
accactatactagatgacctctctcactncactctccctgtatntaattctcttcccgctaattctcctacactacatccanataacaaagaagagagnanatgagaccctcgagaacctccgcaacnccgaggcacctgcaagcagcaagcggcatataacaaaaaagaaatggaggttgtatctcccctacaagcgcaaaccctagtggatggagcccccctcttaacgttgcaaagtaactgtgacaacacatccctggaggaaagagcccaacgaaagaccacagttgaagcacaatagaagctcgccaccgaataaataaatttcaaggaaggctccacacagtctgccgaaacaacctacccgtagacggataaaaacgagagggaggaccaaatattggcacggggtcgtataaagaacacctgcaacaacgaaataacggaccaaataccacatttgtcgcatctaaggtgagatttaaggcagtggtgacaaggacttaaagaaaaattgcaataatctttttttatacacataagccctcgagaaagggatggttaaccaaaaaagaacgagacacaaagataactcggccccttaacactaaacacatcgaccgctcttatttagcggttcgaaagacgtcccaaaccctaaaaaattaacantctaaatgaaatcatcaaggagtctagcgggcctagaagaaatggcaatctgtgggatcccttctcttcctacttcccgtgaaataaattcttataccccctatacggacaagacaatgcacgtacctacacgcgtcactcctccgcgaagaggcatatcacaaccaccgtctcacgcaaatacactatacacgtanctttacctaatatacacagacccacagcgctacaatggctctcatagagacagagacaataaaacaatctccnntcaatntnttacacactaaagatgcgtgacataattttcacgcaccactcttcggtgcactatagaaacatacgcgccgataacaagtgtgtctgatactgcgcgcntcacaactaatatctaagntttcccctagtgacacnatagatggacatacgatatcatacactcctcg

SEQ ID NO: 278018 - DNA, 400 bp, Glycine max
agcttccttcagacgaccacaatgactgaatgtgcatcttcctttcatgataggctctcagtttttatgtctcgcacgctctggaactaagttccaatttgcagtggacaagccagttccaattcttgaggcagattgctacaagggcaaggagaagatggacccccaacatgcaatgttaaagcaagaccaggcaggctcaaacatgaagtatttgcactgcatcaaaagtgagaacttacaggcagggattggtaagtctctacagaggtattacaaacttggagcccattactctggtatggaacctgaggagaatccatcattagatggagttcatcacaagataaaccgctgctattagactattaatcacaattccttttgtggtgattcacta

SEQ ID NO: 278019 - DNA, 162 bp, Glycine max
agctttatgtttcgtcgttatatatttaacatttttacacatgcaattcaattcatataattaatttttgatcggtttcaaaataattttattttatgtatgaaataaataaatcaaaacatataacataataaatgctgagtgacaaaagctagttctatc

SEQ ID NO: 278020 - DNA, 509 bp, Glycine max
agcttgaaaagagaaaatgtagaagggtgaatcttcctgcttttattcgttgaccacagagtggtacctggagatatgtcgcgggggtcaagagaccttggggacgtcaggtggggtgctattgcccaaaaccaagcttgaccaatctcgacccaacccgggcatagtcagtcagtgagaacctgtgatgtacctaaacaggcgagctcctagcagtcaacagataaaaggaacaaagaccacaaagcaaggaggcttgtgtggtggctggccagctgtgaatcttgtgttatatatgggttatggcctctggtaatcaattaccaaggatgggtaatcgattacaaggcttaaaaatgaagacaggagactaagatggtctctggtaatcgattaccaaggggtgtaatcgattaccaggcttgaaaacgaggtcacgaagctaggagagcttctggtaatcgattaccaaagggtgtaatcgattaccaggcttaaaaagggaactg

SEQ ID NO: 278021 - DNA, 552 bp, Glycine max
  unsure (1)..(552): unsure at all n locations
agcttatcaaatatgctttcaggtgataaacttttatcaattaagtaattaattaagttgtttatccaaacgcaccctttgcataaaaacttttactactctctagctgatataagtgaatgtttattgcaggctgtggtaaaaaggttgatgactgatgttccctttggtgttttgctctctggaggtttggactcttcattggttgcagccgtcacggctcgctacctggcaggcacaaatgctgccaagcaatggggaaccaaattacactctttctgtgtaggccttgaggtatgtaagcgtacatattcttgaattagcagtggatgtttttaatataagaaggaagccatgaaatttgtcttaatctttaatcatcttatgttgagtagggtgcacctgacctaaaggcagcaaaggaagtagcagactacataggtactgtacatcatgaanttcactacactgttcaggtatatctaaatgagatagtgttgttactgctaagaaattcggggggtttgatgcctaaaattataatttgtaaat

SEQ ID NO: 278022 - DNA, 367 bp, Glycine max
  unsure (1)..(367): unsure at all n locations
ttaaaaaaaatacgccctcgcctgtgactaagctccattgtgatgtgctttaattaagaatttctgccgacacgggatctcctctaaaaacgcaaaattaatccaaaggttgcattgtggcatataactagacccctcagttttaatctacgtggcctttgcttttgcttatattgcatggcaggatttttatctgtntcgttcttaaggaatncctaaaaaccttctcttctcttggaaggttctccataatntttctttcctctatttcgttaggttggggctgaaatttaaacttgactggaaggaagtttaaatgtatcttcttatgcctatacaagtcttgttatttgctttaaaaaacccn

SEQ ID NO: 278023 - DNA, 559 bp, Glycine max
  unsure (1)..(559): unsure at all n locations
agctttcaaattactatacgagtaattttcaacttaaaataatattgagtattttatttttattaacaggaataaactaaacgtaatgtttgaaattgaaaaaatataaagtttgatgaagagatattatgttcaattgatgtgatgtgtcaaaaattaatattaaaaaaactataaatttaatttaagattaacttatattataataattttactttcacttcatctagaaaaagaaatactttcaatatattaagattcacattttaaaatttaaagaaaaattaaaatgattgattaagaaataataattataaataaaaaataaaaatgaaatacccaatgcaataaaagtcacaaacttaatatggaagaaaaagattgggctaattattggacagaggaatcaaagtacgcatcagactcaactcccagagtgttatgaagagtttttcttttatcgataaatattacgatattagtttaatttggttggttttattaataaagaatcttnggtccatcacttaattttttataattctaaattttttatatg

SEQ ID NO: 278024 - DNA, 549 bp, Glycine max
  unsure (1)..(549): unsure at all n locations
agctttgctatatggggaaaataagctttatagatcacgattgatgaggataactccaatagaattactgaactctccaccagagaaagaactagtaaacataggaaagccatggatgcctcagtgcttgtcttgcagtaggccttcttttggggttgatgctaagtaagtatctgacaaagtcgataaacgtagtatcagtgacctgtaggtgctgctccaatgatgactcttctggaattatgtactccagttgatcagtctcctgtgcaatgtgtacaatgttaaagattagatggaaagaactaaaatgaaatttagaaggaggattcaaattcaaattatgctgatgcatgaaaggcctttatttntcttccctttattgtgcataactagtacgtgtgtatattcccctttcatttactctactttctcactcaaaatagacatactaatccatctgagcttttcctcacatcaaacttacccttctcgtcatatattctgaaaaggtgtggattttcattggctgcttttgcaaatttgaaa

SEQ ID NO: 278025 - DNA, 477 bp, Glycine max
agcttgctctaaatttacattgatgtttgtatttatgggaggaggttatatgccatttttgctttaagagtaacgtcccactggtaaaactaactttccaaatgtttgccttcgcaagaatggccccgaggaagcttgcctcaaagaggtccaggaaggacaaggcggccgaaggaactagttccgccccggagtacgacagtcaccgctttaggagcgttgtacaccagcagcgcttcgaagccatcaagggatggtcgtttctccgggagcgacgcgtccagctcagggacgacgagtatactgatttccaggaggaaatagggcgccggcggtgggcaccactggttactcccatggccaagtttgatccagaaatagtccttgagttttatgccaatgcttggccaacagaggagggcgtgcgtgacatgagatcctgggttaggggtcagtggatcccgttcgatgccgacg

SEQ ID NO: 278026 - DNA, 556 bp, Glycine max
agcttctattgctcttattcatctttacttgggctatctcagaccttttatttttgttgtctaagattttgcatacacctccttcaaagtgaagtgtgtagcctctctccatcatttggccaatgcttagaagattttcttttaggctgggaactagtaagacatcatggatgagtcgcgtacctttatttgtctccaccatgacagtgcctttgccttttgattcaaccacacttctatttcccagtcgacctttgactttgacagactcatcaatacatttgaaaatagtctcatccttggccatgtgattgctacatccactatccaagtaccagcttcctcccttttcttttattgagtcttgagtggcgtagaatgtacattgttcttgatcatgctcctttgtgatatgcttgatgcctatttttgttgcgacaatttttctctacgtgcccgaacttctttgcatggttgcattgtggcatattacagaaccaacaatttttctctacgtggcctttgccttttgcatatattgcatggaggattttta

SEQ ID NO: 278027 - DNA, 74 bp, Glycine max
agcttcgctattcaatttcgaacgtctcagtatattacgggactcaatccgacatccgagttaaaagatattgc

SEQ ID NO: 278028 - DNA, 752 bp, Glycine max
  unsure (1)..(752): unsure at all n locations
gaagannactganacctgggccctcgananccanaanaannatctgggagctgaagcntcaaataagcacgaaggccgattttttttctttatatgggcccccccactaactccgcgaattcatcatcaactgcccccccccttacgacgggctgtaaccatcccgtataactcctaatgaggaaaaccatgtagcatcaaacaacacaccctacattgttaaaatatttttttgacgaacttccggccaactgaatatccctacttctatgggcccaccccctacaattaagttccaccatgttgtaacttctaccttcaatcaaaatagaatcccttcttaactggnnnnccnnnncctaaagtagtaaagacgcgtgnaggggggggggnnnttatttaaattgtacatatccaacagtaaacagaaagcttaaaaaactggcctattcaaccccccccaaaaaaaacggtattnactttatttgtcctttatttgctcccaaaatggttattctaaggcacaccccctaaaagatcccttttttaaaaaaaatacctttttaaaaaaaactcccttgatgaaatnnantngcnactggaaaacttggagaaaagaaaccccttgttccccccacaagaaaaattataaggggttacggtttcaccacctaagggggccgnnnnntatcctcctcttccccctcctttaaaggtgcacccctaaaaaaaaaatgggggcctatctcccg

SEQ ID NO: 278029 - DNA, 228 bp, Glycine max
gtttttattggaggagggtatatgccattgttgtttttatactaacaccccactggctaaacttacttttcaaaagtttgccttcgcaagaatggcccacaggaagcttgccttaaagaagtccaggaaagacaaggcggtcgaaagaactaattccgccccggaggacgacagtcacccgttttaggagcgttgttcaccatcagcgcttctaatccatcaagggat

SEQ ID NO: 278030 - DNA, 1007 bp, Glycine max
  unsure (1)..(1007): unsure at all n locations
tggaccaattgagaccatagtaggacactggcganaancncaagaaganctagctagacggcaacaattatggctaatatgtagcaggacacctgtatttttttttgtttctcatgggaccaatgattaagcgactccctacattggtgcgggtaaccttcaagcgcgcagatgcaacgggtgaaccattaaatcgctccatataagggttgattatatggtctgactacacctcaactcgatcataataatgggcgggtggcgatcgaataaaccacagatacttcgatctacatatcatatttattgaccctttgctctcttagtggttgaaatcttcgctattaatctgctatggaacctcttttcattctctaattcgttttacacagggaaaaatctccaaggagttggattcattctatcattggtttgcgaggggtcaaacacattagcaatgttccactctcgcgttttagggtcgtattcacaaactaagcatgcaatagccaactggtttcgtagggttatgcanaacaatctctttcttaacttaagcaatatctcccccttaggttgcttctggtgccacgtaatcactttttgggaatataactatctgtgctcattaactcttttaccttgttcgatggacggccctattttcttccatttttcaaacctcctctgtcattctnaggctctatgaaccccttcccaaggtcggcgtctacttttgattctctcgccctctactccttgccaatgaacttctctcggtgaacctcgttccatctattttctgngtcatcataatggagagtgacggaaaaccatttacctttgtgcacttgaatcttatcactctcttggtctcatcaagaacgaggctgtttggtatatggaactacttatcctagggctatatatctcctgatgcacgatatctctaacatatgcacctgtaatgtgatgaatactgtcactctcttagctacagtataccg

SEQ ID NO: 278031 - DNA, 420 bp, Glycine max
agcttgacattgcgggttgattttagcctttgtttcactttagttattagtcaattcaattaagaaagagaaatcccaaagagaaacgtccgattgattttttttcgctttattatactaaaagggtgatttttgattattatattattattttacctcttttttgatttccaacgtggttacggcacgaccgaacggtcagatttcattttaacagaaattaactgatattacaaatcaaatgatcggtgaaaatttattttatttttttattacgcgagaaattacttaaataaatgactgaagcacgttaaaaggaggtgcggaaagtctaatgaaacgagaataaaagtacacaaaacaaatggcgaccaccacgggtacatagaatgaattgaaaaggtcgatgtggggtactta

SEQ ID NO: 278032 - DNA, 274 bp, Glycine max
  unsure (1)..(274): unsure at all n locations
tgggggagaaaagttgaaaagaatgaaaagaaaaaggttaagcattagcacacacaacaaataagttgtatgttaattataagaaaaaataataagttgtgttgttacaataaggtcaaaagcaaattaagaaaagggaatagtgagaaggctatttgtacaaaacaagacaagatcattgggattagtctangactngtgctctcttagaattaaacctttgatcctaaaaaaccaatgaattttgtagccaacctactacagcctgaaaagg

SEQ ID NO: 278033 - DNA, 410 bp, Glycine max
agcttgcagatgctctagggagaattgctgataaattgtttagcaaggaggatccgaatagaatagtgtacataacaatttggagtcaacaatagtgattcccataatttatctcaggatagtttttagaagatgaacatcatactagttacccttttttttttaatcttctgtctgcattttgccacttttttgtggtttactactgcactaaggcattttatacacaaatttggaggttactgcattttatttattttcttctttcagtgaggttatatgaatctttcctcggtcaataatagcggttgtacagataaagttactattactaattaaggtacatttttattagaggtatctctttgcgggctcatgcaatattttgcttctcttgtataagtcatctt

SEQ ID NO: 278034 - DNA, 437 bp, Glycine max
tggaacacaacacaaggaggactgtcggaagtacaagcctatgtcattatcaacgtcagcagtctcactctcaatcttactcaaattggtagctgacccaaaccaatatcaaagtcaagtattttttcaggctccaatattagttttggtgaggagttggacgcaatttatatgcttcataatgaaataaaaagcatactcgacagtttttgaaaagcaatgtctgcacacaagcgcacccactatatgataatatcatatccagatatgagaaattatgctattgcaagtttgcaactaatgcaacaggttaaattactatgaacaaacatgcatggtattggtatctgagttcatgacttatgagaaattaatgtccactaacagcaacagatcaaaagtaatagacatacacaatacataatcgcacacattac

SEQ ID NO: 278035 - DNA, 443 bp, Glycine max
  unsure (1)..(443): unsure at all n locations
agtcacctgcggcatgcaagcttatgactcttggcaatttctttaaaactagtcacttaaaaattttgtgacttttcaaaaaatcttcagaaacaagtcacttgaagaattgtgacttttggaaatgtatttttcgaaatcaatcactagtaatcgattaccattaaggtgtaatcgattacacatcaacagatgtgactcttcattttgaattttgaaaattaaaacgtttagaagctctggtaatcaattacaagtattgtgtaatcgattatacaagtttaaaattatttaaaactgtttaaacataagttgtaactcttgaaatttgaaatcttaacgttttaaaacactggtaatcgattactaccttctggtaattgattaccagatagtaaaactctttggtaatgattttgtgaaaactttntgtgctactcaat

SEQ ID NO: 278036 - DNA, 446 bp, Glycine max
  unsure (1)..(446): unsure at all n locations
tctaaactntatacaagactgaagctctgatatcacttgttggacaagtggcctcagatatcttaagaaggggggttgaattaagatatcacagactattccccaattaaaaaaattctacttttaatttaacccaacaacccaagatttcttttaaacaagaactcctagataattatgcaaattaatcttactaaatagaaataataaccaataaaggagtttaagggaagagaaaatgcaaactcagatttatactggttcggccacacccttgtgcctacgtccactccccaagcaacccgcttgagagttccactatcgtgtaaaatccctttacaagttttgaaccacacaaggacaacccttcctttgtttcagatttctttacaacaagagaccctcggtctcttaatcccttttgagaaatagaaagaagagaagac

SEQ ID NO: 278037 - DNA, 436 bp, Glycine max
agcttctgtatcagttcttctaagaacatcatatatagggatagtgaaagaaagaatataatcaaccttatcccaccatttatcatccaacaaagtatctttcacaaatttagcctttgcaacatcattttccgtataagaagaccattggtcactaatgaccatatcttggagtcctttcttcaattgcttgaatctctctagcattacaatagtggaggcaaatcttgttggagcaatggataacaatttcaatgaattgaatgaattgaaaattgatagtctcatagagtgactcatgacaaagtttttcacaaacattgcatcatccacaatttgggtgatccaagaacattcttcataaacaacattgtcttttttattcttggctacacatatgttctttagagccagaattaatgtatggacaacacat

SEQ ID NO: 278038 - DNA, 442 bp, Glycine max
  unsure (1)..(442): unsure at all n locations
ntgagttactnntattttcttctagttcatagtgggatagagttagtcgttcttctaactaaaataggttgaaagcctagcggtcaaacatgtggcagtaggaagttactttcttaagctgcttttctagctgagattgagacaatgtattgccccaaattaataggacaaaaaatgcatgttttcaatacccttctgttgattggtgaacctctttgatataacaggcaattcttttggacttatgagtatgtgttcgtcagaattcagtttaatcttcagatattttggtcaaataaaagctctaacaaatttcatgtactgttacttttgtaatatgttcttgtcaattgtttctagtgtgacattgaagaacattatacaaaagaacttcccagaggaatatgcagataggaagcaagagcatgacggtttaatcaat

SEQ ID NO: 278039 - DNA, 400 bp, Glycine max
agcttccttaagaagattcctaaagaagattgagcttagctacacatacatctctaatagctaagctcacctccttgagatgagaagctagagcttagctacacaccccctataatagctaagctcacccccatgacaaaaaacatgaaaatacaaaaaaaagtccttactacaaaaactactcaaaatgccccgaaatacaaagctaaaaccctatactattagaatggccaaaatataaggcccagacgaaggaaatacctattctaatatttacaaagataagcgggctcatacttagctcatgggctcgaaatctaccctaaggctcatgagaaccctagggccttcccttggatctctagcccaatctacttggagtcttctacccaatgccctt

SEQ ID NO: 278040 - DNA, 393 bp, Glycine max
actggatgcattggttaacttggtaacccagctggccttgaaccaaaaatctgtacctgtcgcaagggtctgcggtttgtgctcctctgctgaccaccatacagacctttgcccttccatgcagcaacctggagcaattgagcagcccgaagcttatgttgcaaatattttcaatagacctcctcaacctcagcagcaaaatcaaccacagcagaacaattatgacctctccagcaacagatacaaccctggatggaggaatcaccctaatctcagatggtctagccctcagcaacaacaacaacagcctgctccttcattccaaaatgttgctggcccaagcagaccatacattcctccaccaatccaacaacagcaacagccccagaaata

SEQ ID NO: 278041 - DNA, 416 bp, Glycine max
  unsure (1)..(416): unsure at all n locations
agcttctcaaggaggtgagcttattttttatatgggtgtgtgtagctaaactctagcttctcaaggaagctttctcaaagaagcttctcaaggaagttttcttaagaaagcttctcaaggaagctacctagtctataaatagaagcatgtgtaacacttgttgtaactttgatgaatgaaagtcttatgagatacacttcanagttccacttctttccctcttttattccttcaatttcgtgctccccccttctctctttcttttcctccattgaagcatcctctccaagcttcttattcaaggctcatcttggtggtgaagctccttcttccatggcttattccctagtggatggcgtcgcctcttacctcttctcctttgtcttccgctgcatctccatggtggaaaatcacca

SEQ ID NO: 278042 - DNA, 452 bp, Glycine max
  unsure (1)..(452): unsure at all n locations
tcatgcttaactatgtatggcaaaacttcattactgttgttcaagacatacaagtgagcttgtaacaaatcttctacacttggagtgatcacatgcaatcctcttgaacccttaccacccactctgtcatcatgccgagactcaagaaggccaacaggtttagccttctctaagtattatgaacaaaattcaatggcttcttctgcaatgtacctctcaacaatagatgcttctagatgatatagattctttgtatacctttttaagatcttcatgtatcgctcaaccgggtacatccaccgtagataaacaggaccacgacatttgatttctctgaccagatgcacaatcaagtgaatcatgatgtcaaagaaagcaggaggaaaatacatctncaactggcacagtataattgcggcctcattttccaactcataanacatgactggatc

SEQ ID NO: 278043 - DNA, 399 bp, Glycine max
agcttggattaattcggcctatctagggatctatgatttagtaatttaggctacaacatagaacacaagagcatgattgattagagaaatatatttctatacatcaacttgtttgttagaaagacccaacatatctaccttgtgctgtcattttatttaccttgcattttatggttttaaccatactagtttagtttaaattctatctgaaattatcacttatacatgttctctcaacaatgcttcaattctgaacttaattcaggctaacattcgatccctgtgttcgatacttggattcatccatattaattttcaatacttgacgatccgatgcgcttttcggtaaacccctattgaaattccttgagaataaatgaacaaaagtaactgcaatga

SEQ ID NO: 278044 - DNA, 395 bp, Glycine max
  unsure (1)..(395): unsure at all n locations
ntgcctgactccttcatttcctatgacccattcttctatctatgtccctttctttntacatttaattgttcatctttctatagctctttatttattttcttgctttattgaaatcattttcaaaaatacttagtcgaatatatctcataaaaaattacatattttatattcaaatctgtattttcatgaaaaggtgccaagaattgttatatttcttcaaatctagctgttattggaaatcaacttttagtacattgtcttttcaataaagattactacaaaatttgaataacttgattttttgctgatttgaataaaaataatttgctgatttgaataaaaataattcacatctttgaatcttgcgattctaaatcttaagaactcaagaatac

SEQ ID NO: 278045 - DNA, 430 bp, Glycine max
  unsure (1)..(430): unsure at all n locations
agcttgtggaagataatgctgtggtggattcctagcatgtcagatggcttccaagcaaacaagtccgcattcctatgtaggacgtcaatgatgcatctatgctcatggatggtgaggttcctgcttagttgcatgcattgcccgagtttgcgtctaagcagcatcttaacgagctcttcaataggctttgggcctctgtcaaaagtatcatcacgcagatctacatcaagttcgttgtctaggctttcttggtagacagtcagggcttggactgaagaccctcatccacactcatgacttgagtaccttcgaccactgtggggtgaggcttgacaggctttctggtttctactagctcccctacaaagctgatgagtggactancatgaggttggaaggtattangaaaacttctagtctttggaatgtc

SEQ ID NO: 278046 - DNA, 425 bp, Glycine max
tctccttcttttccctataaataggggaaggagggaagaacaaaaatgtttaaccctcctggtatctgagaatcacttaaaattagtgaggaaaattgtttccgtgaagaaaatccatgccgaggcacttcggtaacacttccgagacgtttccgtgagtaatttcgcgaagattttccgccgttcttcgacgatcttcgttcgatcttcgtcgttcttcggtcttcaaccggtaagttcccgaaattgaacatttcaattcattctatgtacccttagaggtccacatttgtttcgcgtgctgttatttttatttcatttactttccgcacccccttttgacgtgctttagtcatttatttaagtcattttcttgcctagtcaaaaataaaataaattttcaccgatcattcgtattgtaacat

SEQ ID NO: 278047 - DNA, 352 bp, Glycine max
  unsure (1)..(352): unsure at all n locations
nttcgttcactttgcatgagntttgccaccatatgttcccatttccatggatggtaccaccacctttaactgatagtttctcaacactgtcgaaagtaagccagtgagtgagatcttcgctgtaatctgataggttttctgatgcttcaatggttccagaaatctgaaaaacaaaacaatgaaaaatcatcccaaattcatatatacagatatcgaacaattgaagatctcttcaatgtttataattcaatttttaaaaatatttgaactagcaaatttaatttgttccaaactataacctgcacttcgatgttggatctgcaagggccagacaatctgaatggcttgagta

SEQ ID NO: 278048 - DNA, 415 bp, Glycine max
agcttccatcaagtggtaatcttatcacaagagcttcaagtaggtgctccttaaacctccattaatttttttgctttaccttctcttccattgttgtttcttcattttttttctccatgtatttcctcacatgtcttgtgctaaatgtttttaacatgattcgttagagtttccaccgattaaacttgctatagaagctagatttgatttcctatggttcaaatttcttgttcgtgttcttgaaccatgaattgtgttgagtttaggttcctttgagatttgtcttgttattttttgtggctgaaacctaaaccataaaattcttacaaaaatattaaagtagaagaaaacctcaaaaatctagagtgacttgttcaactattgtagttttgtcatagaagtcatgtctagtcat

SEQ ID NO: 278049 - DNA, 441 bp, Glycine max
tctcttcttcctctcgagtcccttctcctcctagttctctctctaaactcgcgttttttctctctctctgcgagttccttcgagctctcacaggtcacgcgtatcgtgaaggttccctagcccttgaaagctaggtatcattggtgctttcattgagcacaagttaagatgtatggcggaaggcatgagatcaaaagctctatcatcagaaaaaatggaggaattgtttgcgaaatttgcagcaacagtcgaggcaaagatggagaccttgttagagcggttagcacatctcgaagctaacatatataatcctcagcaagcacaaccagaggcgacttcgtttccggtatcaggatcacacatagcgccgcattggatgaagcttgatgtgccgagattcgatggatctgacgccataggctggatcttcaagataacaca

SEQ ID NO: 278050 - DNA, 285 bp, Glycine max
gagcttggttcgaggttcttacccgttggatatcgaagaacgatgaagaacgaatgacgaacgtccaataacggctgagaccttagcgaaattcttcacggaaaacgttgcggaaacgacccggaagcgcctcggcttacagtctcttcacggaaacaatttttccaagcaaattccaaagagagagaagtgcctaaggagctgaacccttctcttcatcactgtctcctctatttagagcaaaataggggaggtggttgcggtccagctcgcccaggcgagctc

SEQ ID NO: 278051 - DNA, 354 bp, Glycine max
  unsure (1)..(354): unsure at all n locations
ntgcctttagggctggtacctcatcactttcttccgtagctttaacctcattgtctctcacagtctttagatttgggagccaatccaatccttgtgtgcggactctcagccacttatgatagccgccgatgatcccattactgcttcccctaagctctctgtcctttcttcacaccgcatcacatgccttgcgaactccttggagtaccctcgcgttgtggtcactgaaaccccgtgcgatgaaaggcgtgatgctttcgtctgatggatctcctctcatgggacatctttcgcatgaagatagaatcttgattcttccttccttctagcgagggaacaaattaacagacgccc

SEQ ID NO: 278052 - DNA, 388 bp, Glycine max
tgtctcagcgtctatgcgagacagagaccaacatgttagctatcatcgccaagtacgaagaagagttaggtctagccacggcccacgagcatagaatcgcggatgagtatgctcaagtatatgcggaaaaagaggctagaggaagggtgatcgactctttacaccaagaggcaaccatgtggatggagcggtttgctcttaccttgaacgggagtcaagaacttccccgattgttagccaaggccaaggcgatggcagacacctactccacccccgaagagattcacgggcttctcggctattgtcagcatatgatagacttaatggcccacataattagaaatcgttaggaaacttgtatggtctctcagaccttgactagatatga

SEQ ID NO: 278053 - DNA, 409 bp, Glycine max
  unsure (1)..(409): unsure at all n locations
agctntataagcgcggtgtcataccctaatttcgtccggtgacctttgcttgatgacatgcgacctttctttggtccttgtgaggtgcttggcacccatcattaggcaatttgtgaaattccaggacatgccggaaaaccaaaaaatattgatgcacaatccgtaagtttccgtgacacaccggaaatcaaatggaagcatcgttgcataattaagtgagattccgtaacattccataagtcaaaaaggggatgattatgtaatccgcaaggttccgtaacattacggaaagaaaacaagtatcgttacgagattcgtaagtttccgtaactttacgaaaaaagaatcaccaaaaaaggtaaggggggtgaacttatcaagataggggtgtaaatagcaattcaaatct

SEQ ID NO: 278054 - DNA, 403 bp, Glycine max
  unsure (1)..(403): unsure at all n locations
ttaggttgctcattgattctagattgctgcanagaaagactgagattatcataagctctaggttgcccacgaaattaaccacattattttccatcctttccttaatcaatttccgcattttccatcaaagtttaatcttacacgatcctaagtcagcccttgtgccatgagggtgcatatcatttggtaatcagagctccggttctaggatcaacacttcctttgctggagatattgggtaacatccttctatatgctctatgccatttatattaccttcttattcatatttttttaggctgaaccattgcaaaagttaagccttttgatctctttgttataaaaaaaaagcagaatttcgcattagcaaaattaaaaaaaaatgggctgaatggttcatgct

SEQ ID NO: 278055 - DNA, 443 bp, Glycine max
  unsure (1)..(443): unsure at all n locations
agctnttatatttttggctaanatgctctctggtaatcttttaccatattagngtaatcaattacaggcagttatttttggctaatatgctctctggtaatcgattaccatattagtgtaatcaattaccacgcgtccctgcacctatatatacaaatttcaaaataaaaaatctgcaacctctcttattttcgaaaacccttgttcccaattctcttctgccatatctcactcatttcttgtccaaatcactccccacaaagcccaaacttcatcttttttcattctctttcatttgaatcgattgaaatttcaaaaaatctcttctaatggcagaaccatcaaagaagcgaaagggttcttcaaatcagagtcaacgacattccgagactcaggaaacgccaattccttcctctattccctctgcctcattggtttcattc

SEQ ID NO: 278056 - DNA, 451 bp, Glycine max
  unsure (1)..(451): unsure at all n locations
cggacctataaaactaagctaggtgtgggaatcaaaacaaaattgaataagatttatttattgaattgaagtgagctcaagaactattatagaagtgtaaaatattatcttattagccaaatgcctaataaactatgatttcccataacagaccccctattcttcaatacaattatgtgtgtctcttatgtatatggcacgtgactttgtccagtgtttttcttttggtgtttggtatctattgtaactttgttttatggtttaatccagaaaatatatataaaaaatacttagtttgtgtgtagtactcttgagtctaacaaagaacatttgcattattaagaaaatccatgcaaagcaaatcaagatactcttggatagaattntatcttcaatttagatggaatttgtgccttgaattcatagttntatatatatgatcgaattntac

SEQ ID NO: 278057 - DNA, 444 bp, Glycine max
  unsure (1)..(444): unsure at all n locations
agctggtcacgaagntgctgcatttctccctataagaatgcaacnttttaataagcggaaagcgaagccaaatgtgggaaattaatataaaagaagaaatataagcaaaaagagtcatggaagtcaagaactcaaccactaaattcagatgaattggcagagtaaagcaaaaaaatattacctgcaagaatcgacgttcttcaagccactgtttgacaggcatcactttatcattagcatctttccattcatttgcaaccacaacagctactctggttgctgttaccttggcacgagccaactccctgtctagagtctntctttcctcctaaagaatgtcaaataaaccgcgcaaaaataaatatgatcttaactagaggcagtacaatcaagaataaagcaaatgtgagtttgaacatgctgaagacttttcacacaatacat

SEQ ID NO: 278058 - DNA, 427 bp, Glycine max
  unsure (1)..(427): unsure at all n locations
ntgtatccaagtgatgccaataaaacttgcccgggcgagtagataacttcaggctaaaggaatgtcactcgcccaggagagtgatggctagcccatgcgagttcaccctaaaactcccctaatttgcatgtaggctcgccctagtgagctctaattagaggacttcacctattcataattatcctcaacactcttcaacttggttctatttctagtttgaacaattgaacatcaaagcataagagaggcatggatgaatcttctatattgtaaacgaaaacacttataaatatacaatatataaaacaaatagaattaagggaagtttataagagaactattaaaataaaaaagattagtgctaaacattctgatcccaaaaataactaagatatgaaacttaccacttatgcagaagatacaaaaa

SEQ ID NO: 278059 - DNA, 436 bp, Glycine max
agcttgtagagttatgtctcgtatcagtttaattgattacaaccttatcataatcgattacacagttatttttgagacaatgactgatttattttggagtctctgctttaatcgattaccgtgtgatataatcaattacttctctttctataagtgtttcagaagtgaacaagaacactttaatctattactttgagtatctaattgattacattgttcttgagttgtttctaggttttgggaagaacactttaatcgattaaaaagataatctaatcatttattcattgaattaatcgattaccttgaagatttaatcgattacaggcggttataactgttttctctataaataaccacactgtgttctcttcataacataacaaaataagcttctaagtgagctaagatcatgtgttgttattagttaaagaaa

SEQ ID NO: 278060 - DNA, 449 bp, Glycine max
  unsure (1)..(449): unsure at all n locations
gggagagggtgcttcaatggaggaaaagaaagagggagagttagagagaggggggagcacgaaattgaagaanaagggagagaagttgaactttgagttgtgtctcacaagactcttattcatcaaagttacaacaagtgtcacacatgcttctatttatagactaggtagcttccttaagaagctttctcgagaaaacttccttcagaagcttctttgagataacttccttgggaagctagagcttagctacacacacccctctcataactaagctcacctccttgagaagattcctaaagaagctagagcttagctacacacacctttctaatagctaagctcacctccttaagaagagaagctagagcttagctacacaccccctataatagctaatctcacccccatggcaaaatacatgaaaaaacaaaaaaagtccctactac

SEQ ID NO: 278061 - DNA, 417 bp, Glycine max
cctgaggcatgcaagcttagaacaataaactaggcctactcttatttggcttttggcttggcgaccgcgatcaacaaagtactttcggcacctactatatgttgacttgaccaacgctgttattggaatgctgcgacaatctttcaacaccttattcacacattctgataggctggttgtcatgtgaccatatcgtcgtccagatgtatcggaagccatgctccatttttcctttgaaatgcgatcaatccatcttgctatggctggactcaattgacgaaatttttctaagtatagaacaaacacatgcttgcgaggagcgttcgctaaataacatttgttcttgtgctgatgtacgtagacttcatactccactcaattgatgtattacataaaccttaacaattctcaacatct

SEQ ID NO: 278062 - DNA, 409 bp, Glycine max
caagacatatggaaagatctgggattcggctatgatttaagtttcttgttaagccatggcatccctcgctcaatattaccaccagctgctcaggcgcttcacgtttggggactttcagttagtaccaaccgtagaagaatatgaagggatcttgggacgcctgctaggaggaaggaggtcatatctattttctggattatacccctccatggcaaggatagccagagtggtcaaagtctagacgcaagaattggaccgagtataacatatcaacaatggtgtgattgggataccaaggaagcatttggaagagaaagcaaatgccttgtcagatcaaggaaaatgggcctcaatcattgatgttttagcgctattggtggtcggagccatcctctttccaaacatggat

SEQ ID NO: 278063 - DNA, 427 bp, Glycine max
  unsure (1)..(427): unsure at all n locations
agctnngatgaagataaaggatgtaagatgttggatgttataaggcacaagatattattcctattccaattgcatttcatatgatgaacacactttttttttatttgcagagtattcgccttgccttctctacaattaaacatttctcttctgccgctaaagaggtatatattatttttgtcatctcttatctcttactatctaatatcaaaatcgccgttgtttcgatacagatgactgttaaggagactctcaactccgcactcgatgatgaaatgttagttgatcctaagttcgagtgaaaagctttgataaagaaaatagaaatattctataattgattttatctagaatataaattagataacttatgtataagttgttcaatgttttaatattacaattatgtaaataaaaattaacaaat

SEQ ID NO: 278064 - DNA, 408 bp, Glycine max
  unsure (1)..(408): unsure at all n locations
tctagtcatgctaccaaagttagagattgttaacctaccatgatactatagnttctaaagggctcaaagctaaacaacatccatctggggattttttggatgctcatcttagggcataattcgagttttgtttggtgtagtattcatgcttcatggatagtgataaaggaaggcttgcaatggaggataggaaatgataattctattaaagtctggtcccaaccttagttaaattctggtgataactgtaacatcacatctcctataattgctggccacaaaagcttactagtgagtacactaattgatcaacaaacaaagacctggaagaaagatgttctaaaanttttacaattacggtatgtatagtgttaaaagttcttatcataacactatggatactggttt

SEQ ID NO: 278065 - DNA, 438 bp, Glycine max
  unsure (1)..(438): unsure at all n locations
agcttggagttgcattagtgctaaggtttctggttntagttactccatattgtcgacaattaacttgggttccagtcttcatgatttttaagtttaatgtgctaagttgtttcaattttcaaagactatttttcagcctagacgccttagatgtgcaatgcaagccacacaaaagttaaatgcttgtattatttttttcaaatagaaaattccatataaaatattatgcatgaatctatatggagattgtgtttaactatttttttatttttcaaaatctttcatgctaaataaaactgagagaatcgctcaagctctatgagttattggaaaaagccaaatatactttgataaaaatcctaagggtataaacatagcttcgctgatgttgaagaaatgaattttgcacaataaattaacatggaaataatgtacatg

SEQ ID NO: 278066 - DNA, 410 bp, Glycine max
agcttcaccttttggtcctcctcatagttgttgcatgagaaaacatgctctattttcatctcccactccaagtaggccttcggatcattctttcctttaaagggaggaatgttgagtttaataccatcaattcggttttgtctaggaacaccatcattttctcttctcctcctttcttcttcattatgatctctattctccatttgatccaacctctcatggagcgcatcatctcgttgtttcgttaacctcttcaaatgttgcaccaaagcttgcatttggaattgcaaaagcccccactccatcattaggattagtacttgacatctcaaacaaacaaatcaaacgtaacaagacaattatagttgctggttgaatacctcatccactcaagtgtatcacacaactat

SEQ ID NO: 278067 - DNA, 538 bp, Glycine max
  unsure (1)..(538): unsure at all n locations
gccccatttaccacccccagagccacccaccaccaaattcccccaccccagccnccncccagcgatgaccctgcacacggacccnncaacnnaaccggagcgaggcgaccacgccgaagaaagngcgagaagttataaagatcgccgaaccaccagacagagggacgagggccagaacccgagccagggacccacaaccaccatacccgcgaagagacaaggcacacgcagcaggagcaaagcaaggaggaagacacggacacgccaacgaacaaagcagggccgagaagaaaaaggtgcaaagcccaattgaaacaggcagcatgaaatgcgaggacaaccgccggcagaaaccgaacatgaacaagcgacaccacacaggaagaaaccgacaaagaggaggacagatgccaccacagcctcccacgacaaaccgaccacgccaaaaaagaaaaccacgagcacagcggcgcaacccaacatcaaggaacctcaaccccccggaaaacaccaggagaaacaaacgaagcccgcgccn

SEQ ID NO: 278068 - DNA, 441 bp, Glycine max
  unsure (1)..(441): unsure at all n locations
tataagagagtaattnttttttttgctaaaatcttgtaaattaatttcttttgttgacaacatttcttaagcatttcaagttactagtacactatattgaaaatgttgagtcaccttggttgtgtctttaatgaatcatgttttctagaaatgtgcattatggagagaggttgaaggaaaggaaagttaacaaagagaagtatatcagggactgatcaagtacgacaatcactttattcttaactttacatgttgtgtccatgtataatgaaacatattgcttagaaaatgtgcatggggagtcatttcgatgaaggagaatgaaacagttgggtgatggaatgtagagaaagacttaatgtttagccattgtccgcctcgttagacgcttagttggagtaaatttttttacaaagcctatttaatgtctatagataaaaa

SEQ ID NO: 278069 - DNA, 417 bp, Glycine max
agctctcataaattcacgaaactattccaaatgctctgcttctccatggctaccgcaccaaaagaaacctcagctcctggatcaccctctgtaccatcatccaccatagcaccatcaaaccaggaacaacctgaattccatatccaacccatacaaatgattcctggtcaagctcctgtccttgagaaactggttcccaaacgacaacagggagtgaagacttctgaaaaccctagccttgcaacaagtcctatggaagtagacacggagatggacaagaaaatccgcagtattgtgagtaacattctgaaaaaagcttctgtccctgatgctgatgaagatgttccaacatctttcaccccgaatgtttctgtgcctgatgctgagaaagaatgttcaacatcttccactccaaat

SEQ ID NO: 278070 - DNA, 452 bp, Glycine max
  unsure (1)..(452): unsure at all n locations
tgtgcctcctcacgtctggaatatgaatgtagcttatattattcaaagacccttaggtgctttgttgatggcttcttctcgttccaagcttcaattggagtcttgtcttttacagacttagttggacatctgttgagtatgtaaacaacattgtagactgcttcagcccaaaatgtgttaggtagtcccttctccttgagcattcatctagccatttccataactgtgcgattctttctctcggacacttcattttgttgaggagaatatgcgactgtaagttgtcgctcaatgccttcatcctcacaaaatctttcaaactcacgagagatgtactctttgtcgngatcacttcttagtacttttattcgttttccactttgatttcaacaagggccttgaactttttgaatactccagagacttctgattnttcttttaanaaatatacc

SEQ ID NO: 278071 - DNA, 363 bp, Glycine max
agcttgtagggttaatgtctcacgattatcacatgcttatgcaacaattgttagtcgtggctatacgagacatcttgccatacaaagtcaggttaacgataactcgcctgtgatttttcttccatgctatatgtagcaaagtcattgatccagtcatgtttgatgagttggaaaataaggccacaattatactgtgccaattggagatgtattttccccctgctttctttgacatcatgattcacttgattgtgcatctggtcagagaaatcaaatgttgcggtcctgtttatctacggcgaatgtacccgattgagcgatacatgaagatcttaagagggtatacacagaatctatatcatc

SEQ ID NO: 278072 - DNA, 468 bp, Glycine max
  unsure (1)..(468): unsure at all n locations
tacggacctatgaaactcagcttcttataatgattcttgtaaatgtaaactttgaataaatgtgcacacatattctattccatttaaaatttgattgcttggtattcgatgggatgcgggtattgatgatattttttttttgtcaacccgcacctgcctgtgaccaaccatataaaactacttttgtttttcttttttaacctgaaacccatatctatccaaccaaaatacgcatgtacgagttagtttgatcgattttcaggcaagttccttaattttgccctaccttgactaattaagtgtataggtgattaaccattaaaaggtaaagtaatccaaaaggttatgcggctataactnttgccagaaattgtattactctttggtatagtattgaaaaacaaaccaaatattgactcaatcatggtactagggtaggttaatggtggaaacaatgaatcacttact

SEQ ID NO: 278073 - DNA, 369 bp, Glycine max
agcttcttggggttgtttggctattatagatagttcattgaaggattttctaaattggcattgcccctaactaagttgactcgtaagaatgagaagttattctggaatgagaagagtgatcaaagtttccaagagttgaagaggcggttgacgacagctccagtgttaattttgcccgaccctaagagaacatatgaagtgtattgcgatgcaagcgggcaaggcttggggtgtgtgttgatgcatgagggaagagtactggcttatgcttcgcgtcaattacgtgctcatgaatttaactatccgactcatgactaggaactagcggcggtggtcttagccttaaagatttggaggcattatttgtac

SEQ ID NO: 278074 - DNA, 432 bp, Glycine max
  unsure (1)..(432): unsure at all n locations
gggagaagatgcttcaatggaggaaaagaatgagggttagatagagagaggggggagcacgaaattgaaggaataaaagaggtatagaagtggaactttgaagtatgtctcacaagactctcattcatcaaagttacaacaagtgttacacatgcttctatttatagactaggtagcttccttgagaagctttcttgagaaaacttccttgagaagcttctttgagaaaacttccttgagaagctagagcttagctacacacacccctctcataactaagctcacctccttgagaagcttccttaagaagattcctaaagaagctagagcttagctacacatacctctctaatagctaagctcacctccttgagatgagaagctagagcttatctacacacccnctataatagctaagctcacccccatgac

SEQ ID NO: 278075 - DNA, 447 bp, Glycine max
  unsure (1)..(447): unsure at all n locations
agcnttgagccaaaatcctgactcaccatattccttgacccanggtgagaatgtcaatccttaccctcggaagcaaaaaggaatagaagggaaatttccaatcaaagaaaaagagaaggaaaatttccaatgaaagcaaaaaagaaaagaaggaaaattccccaatcaaagagtgggagaaagcaaaaagaaaagaaaggaaattcccaatcaaagaatgggagaaagtaaaaaagggaaggaaagaaagttcttgaaggaaaaacagaaggaatatgcagagaggtctttggaccggacaatatctgaacaatacagaattgtcaccaaatgaacgaaaaaagaaggaaagggaaccacgacctanaatagtcttctccctttgattaccaaccaaaatcccgtgcgctagcgactnttttttctcgccccgcactaaacaaaaac

SEQ ID NO: 278076 - DNA, 456 bp, Glycine max
  unsure (1)..(456): unsure at all n locations
agcatggagctacttggaaaaagtntagtatggtttgtgtctcccaatgtatgggattttagtggatgttaatgtatctntcttatgtttttgtaaaagacatatgagtcaagagatttgtattagtttgttcatgtaatgtatgttttaacttttaagttttagtttctgcgtaggttactctcataatttttatatgctaagttttataatttagtgatataagaagacaaatgtaatatcccattgggtgtgatagaccagtcaacatgcatgaagcccaacacggaaggcctcaaaggaaggtcacacctcttcaacgtttttgcaattacgtttaagtgctgattttccaaaagcatagctggacngtgttagaattctattatntagtgcatgtctntgtcaagtgatgggtagcagtatgctattangcaattatatttatatatgctt

SEQ ID NO: 278077 - DNA, 440 bp, Glycine max
  unsure (1)..(440): unsure at all n locations
agcttgttaatccatggaagctcctaatatctcccacactttntggggtgggtcattcttggatggccttgattttctcaggttccacttggaacccatttctaccaactacaaaacctaagaaaactatattatctacacaaaaggtacacttctctatatttgcatagagggtgtttttcctaaggattgaaagaacttgcctgagatgtcctaagtgatcatctaggctcctactgtacactaaaatatcatcaaaataaacaactacaaatctacctatgaaatcccttaagacataatgcataagcctcataaaggtgcttggtgcattagtgagcccaaaaggcatcactagccattcatacaaaccaaacttggtcttgaaagccgttttccactcatcaccctttttcatcctgaattggtgataaccactt

SEQ ID NO: 278078 - DNA, 454 bp, Glycine max
  unsure (1)..(454): unsure at all n locations
ngatcttgaattaatcttgaagcaatgcttgtttgttgaatcaaccttgtattaatcttaaagcaatacttaacctttgaatgtttgttgaagtaatcttgaacgcaaccttgtttgattattctttgacatcatcaaaatcatgtattcatacattcacacgtcactgtcgcgattgaggtacgtactgcattgctgagagttttagatttgaatagtctcaacttcaaatgagttggggttcgtccctaatcgaaccttgtgtggtctgagtgtgttctgtttataaataactgatcttgaatgcaanaattgtcaactattacaaatttatgaggactaagtgtgttttgtttataaaagtgctttgtttgccactaatactagtcaataaagttattaccactaatactagtcaataaaagttctttgtttgctaagtagtaagcacaca

SEQ ID NO: 278079 - DNA, 431 bp, Glycine max
  unsure (1)..(431): unsure at all n locations
agcttgtanggttaaagtctcacgattatcttatgcttatgcaacaattgttagtcgtggctatacgagacatcttgccaaacaaagtcaggttaacgataactcgcctgtgatttttcttccatgctatatgtagcaaagtcattgatccagtcatgtttgatgagttggaaaataaggccacaattatactgtgccaattggagatgtattttccccctgctttctttgacatcatgattcacttgattgtgcatctggtcagagaaatcaaatgttgtggtcctgtttatctacggtgaatgtacccgattgagcgatacatgaagatcttaaaagggtatacaaagaatctatatcattcagaagcatctattggtaagaggtacattgcaaaagaagccattgaattntgttcagaatacttagag

SEQ ID NO: 278080 - DNA, 463 bp, Glycine max
  unsure (1)..(463): unsure at all n locations
gacacttgaatactcagcttcttaatatgattcttgtaaatgtaaactntgaataaatgtgcacacatattctattccatttaaaatttgattgcttggtattcgatgggatgcgggtattgatgatattttttttttgtcaacccgcacctgcctgtgaccaaccatataaaactacttttgtttttcttttttaacctgaaacccatatctatccaaccaaaatacgcatgtacgagttagtttgatcgattttcaggcaagttccttaattttgccctaccttgactaattaagtgtataggtgattaaccattaaaaggtaaagtaatccaaaaggttatgcggctataacttttgccagaaattgtattactctctggtatagtattgaaaaacaaaccaaatattgactcaatcatggtactaggttaggttaatggtggaaacaatgaatcactta

SEQ ID NO: 278081 - DNA, 443 bp, Glycine max
agcttgcttgtgaagcttctatggaggaaggatctttgagcttcaattaggtccttcaatggtgattttccaccatggagatgcagcggagacaaagaagcagaggtgagaggaggtgccatccactagggaataagccatggaagaaggagcttcgccactaagaatgtgccttggataagaagcttggagaggatgcttcaatgaaggaaaagaaagagagagagaaagagagaggagggagcatgaaattgaaggagtaaaagagggagagaagttgaactttgagttgtgtctcacaagactctcattcatcaaagttacaacaagtgttacacatgcttctatttatagcctaggtagcttccttaaaaagcttcattgagaagcttccttgaaaagattccttgagaagtttccttgagaagcttctttgagaagct

SEQ ID NO: 278082 - DNA, 435 bp, Glycine max
  unsure (1)..(435): unsure at all n locations
tctacttatgtggcagggcgggcttccttcactttcttgtcttcaattcgagctttgaccactggtcttccttcccgcgatgcttcttttcatgtccgcctgagtgggcttatagcctaaaccatacttcccacgatttccttgggtatttatcaggctagttatgccgccgttgtctttgcctaaacccatcccgggttcataaccgttccccaacataactcgggccatcattaccgctgcatcggacagacaaggctgcccaaagagggagtccacggaggaaatgctgaccacctcaaaagactggaaagcagtttctaacgattcttctgcggcttccacataaggcatggaggatgggcagcttaccaagatatcttcctcgcctgacacgatgaccaagtgcccctccactacgaatntcagcttttg

SEQ ID NO: 278083 - DNA, 184 bp, Glycine max
agcttctagcgcattggacttacctcgaatttattcctttgatatctgtctttgagcctatgttcctctttctgtgttttgaagcgcattacaagccttaagtgaataaccgtgatatcaccttacccttaaggaattttggagctttggaattgtattgggaataagtgtgtggggggggggg

SEQ ID NO: 278084 - DNA, 391 bp, Glycine max
acacataaaactaagcttaagttgctcatagactccagattgctgcatagaaggacttagatctgtatattgatctgtgaaagaacgtggaccaccgactcttgcgacatgtgtaaatttctgattcatgacaagctgagttactatgttgaccaaggcatcaagatctccctcaagctttttattttcacgtaaaggaagatgaatgtgtggccaccttatggactcctctaaggacaataacatcatttcttgtattaaattgttgggagttggaagtcatcttctcaatcaaattcctagcctcagcaggagtcatatcaccaagagctccaccattggcaacatcaatcatactcctctccatgttgctaagtccctcatagaaata

SEQ ID NO: 278085 - DNA, 384 bp, Glycine max
agcttgttacagaacttaggaatattcaagatcaagcttgttcgcacatcgttcgcgtgtatgatatccactcgacaaggtttgaagtagaggagaccttcaatcctataacgcaacgtggcggacaaaaatgggcagttaactcgaatgtccattattgtcaatgcggaaggtattctgcgcttcactatccatgttcacacattattgcagcttgtggttacgtgagcatgaactactaccaatatatagatgttgtttacaccaatgagcacatcttataagcatactccgcacagtggtggcctcttgggaatgaagcggcaattccttcttctgatgaggcatggacactaatccctgacccaactacaattcgtgcga

SEQ ID NO: 278086 - DNA, 378 bp, Glycine max
  unsure (1)..(378): unsure at all n locations
agcttatntcatcaattaaccttttcttttcttttttttcttatttcttaaatgtgactcttatatttcctttaccaattgctttctcctcttttcgtttcattctacatggctcaagctgcaggcacaacgaccaaatgcaatgtaatcatattgtatttttctcttaacgggcatgttattggagtggattaaaacttctatatattgtgcaaatatagtaatgcaagttaacttggtttcttacgcgtgtactttttgatcgtatatcttcatttctaccttcttcattattttaagaaaatcgttcttgagattgagatcataaaaagctcattgttaaatattttcatgtgtctttaaagatatatttaaaaa

SEQ ID NO: 278087 - DNA, 558 bp, Glycine max
  unsure (1)..(558): unsure at all n locations
acttactctntagtcttcattccgcancagtcccgaccgacactatctacattacctattnnntcagcanccatgcanngcatgatttcgtgtccctgcctattacgnacccttatcaatcttaagctattgctcacagacaatattcaaaagttgagattcttctaacttcactacctctcaaccatgaagaaaaatcatctatcaatacatctatgctacattgggcaaggacatatcttgatgtcccacctatcattggcataagaatagcgtatacacccttaaagtggcacctatttatctaaaggacggaaagaagtcctcagtaatcccgtgctcaagttatcccctattattggatgagtgatttcttgctcctaataacctcttaagatgacgctcggaaaactatgaactcattatggcggcgacatagaaagtctactgcaaatgaactacatcgttatattggggtgcttcccatgagaaggacaacgatggtctcgctctgaaacctcaggattctactatccatccttaggaacacagttaaag

SEQ ID NO: 278088 - DNA, 412 bp, Glycine max
  unsure (1)..(412): unsure at all n locations
agctntgtgtaatcgattattcttattggttatcgattaccagtgattgtttctgaataaatcaaaagatgtaactcttcaaatggtttttgactttttcaaattggttttaagtttttctaaaagatataactcttctaaatgatcctcttggccaaacatgaatagtctataaaagcaaggcttcgatttgctttacaatatacttttccaatcaatctattacaattctttacaagccttgaatcctcttgaaattcttcttcttcttcttctttgtgccaaaagatttccaaagatttctggttgtctaaaccttgaaaacttgtggtattcattctgttcatctcttctcccttttgccaaaagaattcggtaaggactaaccacctaaattctttttatgtctctc

SEQ ID NO: 278089 - DNA, 365 bp, Glycine max
tagtaaatctccgtatggcctcaaacaatctcctttgtgttttgacaggctaacaaaagttgtcaagcaagatgattttgcttaatgccaaacaagccatactatgtttgttaagcatttcttggatggaaagatagcttttttattgtctatgtagatgatattgtaattacaagagacgattatgatcaaataaatcatctgaagaatcttctagccaaggaatttgaagtcaaggatctaggccaacacaagtattttctaaggatggaaattgctcggacaaagaatggtatttttgttcattaaaggaagtacactttggatttacttcaagaaatatggatgcttggatgaaaagcagc

SEQ ID NO: 278090 - DNA, 444 bp, Glycine max
tggagcagagcataaccaccctacctgacgactccgatgtttattgaacccatacacatatctccaggtaccactctgtggtcaacaaataaaagtacgaagactgactctttcacgctttctcacctcaagcttattggattatggggcacccgtcatatgtggtactacgtggtgatcgggcgatggcacaaatcaattctcccatttccacaagtcaggcataaacacaccatccccagttgcccacctttacattgagctcacgcactcctacgtattccttatcctcgttcctctcagcaccgggtccccatcaacccctccaagctttcacaatatccaaacaattcaatttcatttgtcatgaaactaccctaaaccaagaaaacagattggaggcagatgactcttgcacaatactcattcaaattccacagtttt

SEQ ID NO: 278091 - DNA, 376 bp, Glycine max
agcttctatttcgaacaaaaatctcttcatcttcttcgcacctcttcaattcacaattattgacaaccgtgtggcattggaaagaagcaaatattaaataccacactctataaaggcctatcatctactttcttctgcaaatcctttttcatttctctgtccaaactctactttcacgccatgcacaaaatgagcaccacatcttcaaccgcatcaaccgaagtaagtcatttctactctcctcttcacggcacctacctttttgttgggtttagtgtcattttcatgggtttttggtttgtggtttttctgctatgtgtctgatgcacgtggtttgagggttttgtgcaatgtcgttggtttttgtcgagtcatt

SEQ ID NO: 278092 - DNA, 431 bp, Glycine max
  unsure (1)..(431): unsure at all n locations
ctttaccagaaaggaatgttattcttcatcacactgtttntgttgaatatactgaagaactcgagggtagaaactggcacaaagagttgaaaaaccttgtggagggtagtattgatgtggccattgtaaaggagttttatgcaaacctctatggccctgaggataaaccatctaaataggtgaaggtgagaggtcgtttggtgaaatttgatgcagacaccttgaactcattcctgaagaccccaatgatacttgaggagggggagaactttccagtatactccaggttctatcgctcgaagccagaaccgcacgaattggcagctcaattatgcatccctggaaggggattcgagttaaatgctgatggactgcctctaaagatcttactgaagaatctaactacacttgctcagacagagagcattctt

SEQ ID NO: 278093 - DNA, 344 bp, Glycine max
agcttgcttgtggagtttgtatggaggtcggatctttgagcttcaatgaggtccttcaatggtgattttccaccatggagatgcagtggaaggaaaaggagaagaggagaaaggaggcaccatccactagggaataagccatggtagaaggagtttcgccaccaagaatgtgccttggataagaagcttggagaggatgattcaatggaggaaaagagagaggggggagcacaaaattgaagaagaaaaaggggaagagaagttgaacttagagttgtgtctcacacgactctcattcatcaaagttacaacatgtgttacacatgcttttatttatagactag

SEQ ID NO: 278094 - DNA, 439 bp, Glycine max
  unsure (1)..(439): unsure at all n locations
nttacatccattaatcaacaatttaacacgtatatgagatcaaatttcctttntagagctatacttactaaaatctagagttgtcccttgtcagggtggacgtggccaaggtaggctctaagatctcgcacgtcgaactgagagtagcctttgttaaaaggacaagaggggggacctgcaaaataaaggacttcgacactgaagtaagtacgagagttaggtgagaataaattttgtaaaagggtgagatagaacctggtacttatagagtggagtggaagctgcgggtccttattggttgggattgttacggtgttgtaacaacccttgcagataatgactagcttgtagataattgtagcttacagataatgtgtaccttgtagataattgaatacctgccacgagaaananaggtcacaacatattcanataatgg

SEQ ID NO: 278095 - DNA, 400 bp, Glycine max
  unsure (1)..(400): unsure at all n locations
agctntaagcttatattggaatatattaatgtcttgcctgtaagtgcttcaatgtattttcttttaattgtggcataagctacaatgtttttatacgcttgtctaatgttcactgtttatgtattgtaaatcaatagttcaattgataatgacaatgtaagttgtgagatgaacgaggataaaatagtttttcccttttttcttctactggagataataaagttctaggattccatcaatagtatggagtatggagtatggactataaaggatgacatttgtttattttattagaatctttatttctctatttttttcaagatgtggttattcttgtaaatgtggatatcttttacaaactatgactattttattagagttctttgaagtatttttgttg

SEQ ID NO: 278096 - DNA, 426 bp, Glycine max
  unsure (1)..(426): unsure at all n locations
tgtatgaatatcgaggatgggattcaaaagcagctttcctttaacatcgccgntttacatggggacttagagcagctgaggtaattgcattaatctgttcattcttttctaatcagattgccaaattttcaaatttgataaaatattcaggatttcttgatatgcatttgccatggaggtgaattagatagtgtgttttctcatagaatatactttgcttaaatgaactgttgagagagaaacaaaaaagaggcatttaccgaactgtatgtagattgtagaatcacaatatatattaatctaataataaatacatggatcattacttccctagttatatgaacttactaacttatantaccatgaattggacctaaataattatatgtagttatgtacaatgaacctggacacaaatgtaaatta

SEQ ID NO: 278097 - DNA, 443 bp, Glycine max
  unsure (1)..(443): unsure at all n locations
agctttcatnntttaattatttttattatatttgatattgatacaaaatatttgtctaaatagttatttttgtctttgattgtgtaattcgttgacaaatgtgggatgaaaatacaaaatttaggattcaagagtgtaaaaagtgcgataaaaatatatctggccgttaaaaaaatagtctacttaacttttgtttgtcatagttaataaaataatctacgtggtatagagagatgaatttctcaatgaaatgattaccaacgtggttatatttatatttaattgtcagtataggagcatatttgtcatataatattttttttattttttgtcttctaccttattggtaaattgtgattaattatcataatttgaaaaaaaattataatgattgtggcaaaattttttagcanactctaaaataaattaagtttaaaagaaaa

SEQ ID NO: 278098 - DNA, 449 bp, Glycine max
gcttaggtctgcttaatataacactttttagtttattattttcttagttgcttcctgctattagtgcaaaccattttgctatgtttcatgtttttctgtttgtgttgtggttttgagtttgaaagttgaacgattgtgcctagctttttgaactttaggggacattgttgttgttgaatggcactatatcacatgaatgcattttggtttgcaacctgctgagtttgcaaggggttgtgaagcaaatttaataataaataaaaataaatgttttctctctggctctctttgtatatttattgaaaaagtatacaatatttatagagtatcaatacttaaaaaaattaagtattataataaaaaaaatatttacattaagtgacttaaatatattttttaatccaaagttttacgatacttaggtagacgtaggcacttacctttgatat

SEQ ID NO: 278099 - DNA, 437 bp, Glycine max
  unsure (1)..(437): unsure at all n locations
agcttaaggctntagcgggtagaagatggctctggcttcttgttgcagctttaaggagattccttagaaaaaacctgtcagcatggtactcaaacatagccacattgagaacaatcagttgaaacagtggcattgtgcctttctctaataatctcaacaaaaaacaaaatcaagagacataaacactagcattgtgcctttctctaataatctatttctataacgataaaacgcaaaaaataggcataaacgacgaaaaaacacatgtacacatccatataaaaaacaaatgttaaccttttaagagaacaaaaccttgttgccgtcatgagagtgacactgatagaggttgtgcaaaaggtttcaatgtcgatggtgagagagttttaggcaccagacaattattataaaagatccaacaatataaatttttaaat

SEQ ID NO: 278100 - DNA, 395 bp, Glycine max
  unsure (1)..(395): unsure at all n locations
ntagcttgttagaatacaataacttgaccaaaaatgcgattcttgaccagattgaaccccaagaacaacaattgggtcaatgattgggacaaagaccaaactagtgcatttgggacaaggatgggccagtacatccaaaacaaagatgggccactgcaactaagacatattgggatatatctctaatagtccctagcaagctggaaggtggactcaactcttgtagcttggaatgaaaaatacaagtcccaaatgaaagtgaaatccaatgaaaaatgccaaaaataaaatggttgaaaatgacatgaacaaagattaaccactatatatgcaagaagctaaaatcatcaaagacataatgcaaaggcttaatcactaataacaacgttgaatca

SEQ ID NO: 278101 - DNA, 398 bp, Glycine max
  unsure (1)..(398): unsure at all n locations
agcttgctgccacggagttntccgactatgctcttgtgtggtggatcaagctacaaaaggagagagcaagatatgaagagccaatggttgatacatggacggagatgaaaaagatcatgaggaagcggtatgtgccggctagttactcaagggacttgaaattcaagctccaaaaactaacccaaggcaacaagggggttgaggagtatttcaaggaaatggatgtgctcatgattcaagcaaatattgaagaagatgaggaggtaactatggctcgatttcttaatggtttgactaatgatatccgtgatattgttgagctgcaggagtttgttgaaatggatgatttgcttcacaaagcaatccaagtgtgagcaacaataaaaaggaagggagtg

SEQ ID NO: 278102 - DNA, 443 bp, Glycine max
tccattgttcaatttcgagcgtctcgatataatatgcgccttaatcttacctccgagtgaaaagttatgaccattagaattgctcaagagcttccattgttcaatttcgagcgtctcgatatatatatacgcctgaatcggatctctgagtgaaaagttatgaccttttgaattgctcaagagcttccattgttcattttcaggcgtctcgatatattatgcgccagaatcggacatccgatttaaaagttatgaccatttgaatttcttgagagcttccgttgttcaattttgagcgtctcgatatattatgcgcctgaatcggacctccgagtgaaaaggtatgaccatttgaattactaaggagctttcattgttcactttcgagcgtctcgatatattatgcgcctgaatcggacgtccgagtgaaaagttatgaccct

SEQ ID NO: 278103 - DNA, 436 bp, Glycine max
  unsure (1)..(436): unsure at all n locations
agctntntccattnggttcagcatccctggttctgttgaacaaagcttgtaaataaataaacctgcttgctagcattttttgaaatttacatacaattaaagcttctagacttcaggtttctattgtttatggtggatctgttttttggaaaaaaaattcacattctaacatcaatctttttctgagatatcctgttttttttttttttatcagccaaaaaaagaatgatattaatagagatactagatgtacccaaaatacaaaaaagtcaaacagaagataaggaaagggtcagcaagtggttatgcaacattaatatgcaggtgtgctcataaatgtgaaataatcaaatgaacatcctgagacccctgcaaaaagggagaagaaatcctatctgcccccaatcccttcccccaacaagcgttacaatatact

SEQ ID NO: 278104 - DNA, 439 bp, Glycine max
  unsure (1)..(439): unsure at all n locations
tcaagctgtacantggtaaatctgtgaatcatttgcgaactcatattaacttttttattcagaagaaagccaggggtttagttgacacatggaaaaaacgtgttgaagctgaaatgattataaatgatgctaggtcttgttcagttcagactgtcccctggccagccagacaacgactttctgaagttgctcaaggcgggaataaacattcaagtgggtcagctgatgttgccatgaagagctcagttacacagctttctgcatccaaaactgcctctccgaagattgccccatgagagaatactacaagatctacatctgcatctccagggtctacgaaatcagtgccttcacctgcacccgcaaccgcatacttgaaagatggacagccccatgctgcagcctgtagtggctcatctgatcttcctgtggcaaatgc

SEQ ID NO: 278105 - DNA, 436 bp, Glycine max
agcttgcaggaactggctcagcaaaggccatttatgagtgtagagcttttcattgagaaggtggcctggcctggagcccgaccttcttttgtgggggataatgaaagttttacagcccaagcacctcaacaccatgagctagagccagaaaatgatcactcatttgaagccatcatccctggagctggtgatttttcaaaaagaagattagagacgagatctagtgaggcagctcatcctggaccaacgccagtattagctgatgaaccatttccaggagtggatccatcttcacctcagcatgcagcagactcttccactcctatcttagagatacctgagggccagaccatagcagtcctggctctggacacttctcctccagctactccagtattgcatctgacagataaggaggatgttcagacacaggata

SEQ ID NO: 278106 - DNA, 436 bp, Glycine max
  unsure (1)..(436): unsure at all n locations
ntccatagccagcaagaacaactcaatttcattgttggaatgtccaatacaatgtctagaatgaactcatcctattgatgaaattccattctgagtgtgttgcaccaatggtattcttcatgtcatgttcattatgcagatcttcatgtttgtaacattcttcttgtcctatagttgctaattacttctcatggcttaaagtttttcttttcatccaatgagcatgttgacttcttcattgtagtacatagcaaaagacactttttttgagctttcaagcttatgatcctttctgagtgactcatganagccttgaatttacttcaatttttgttntttttacaaaccttgtcttttctgaatacacttaagaaaactcattagcagacataaacttataaggctcgtgaattttgtttagaatgtttatcataat

SEQ ID NO: 278107 - DNA, 416 bp, Glycine max
  unsure (1)..(416): unsure at all n locations
agcttagcattagcatgtgttgttactggattactaatcattgggtacgtgtttgttactttagtggatcctatcaaagaacctccgcttataactacaaacatagttctgtctgtttttgttgtgtattgtcatgtggacaaagttccatgccatgtttgagacatctaagattggcgtcttgcctttgcccagtattattttttgcaacatcttcctttcttaaccttgtcattacctcgaaattttaatatggcaacttactcttgtggaaaataatttttaagaattaatataacactttaaaattaaatttagaatattaaaaaaatataaaacatagatataattctttaggtgttattgatacttttctnctgttagaattaaaatcgtactttcagtatccacataat

SEQ ID NO: 278108 - DNA, 417 bp, Glycine max
tcatgggtcctcccgttttattttctctccatctctcttttttccaactggagcagacatgttcatatgtctgttgggtttgaaatggcagcactgtccctcattgagctttaatataatcatgaaataccaagcaataactacccttcattttcatgtgtttgtcaattatctgagggagggtagtaaggccatgtctttatgtgctatacgtatgactaccaaatactaacttgttacagaaaaatagagatagatagagatctcaagatatgtatggcattgctttgcaccacttgtcatatccttatatcatatatatatgcttggcctaatcataaatatcagcttgtctttgtatgtacgtaaaaggaaaagtagagtgtaacacttatatacactcacacttgatatttt

SEQ ID NO: 278109 - DNA, 435 bp, Glycine max
  unsure (1)..(435): unsure at all n locations
agcttagtaaagctaagcactatcaatctcctcttcttgtgcaaatttgtctaaaacatacttagacacttcctgagcaggtacgagcagttatgcaagtgggatcagcaactttcattatcagagtaatcaagcacagcggaatctgtagtttagacaagttgcaagtcgtttccaggatgtcaagacatctcacatgacatctgctttctgcttctgctccccctgtttccatgcttactgcagcatcttctaacagctactagtcttctccaggatgtcaagacatctcctgtgacatcagctatctgctccccctgtctccatgctcttactgcagcatcttctagtagcttccatcagtcatcatcagcagcagcagtctccccctcagaatcgtatacatacaactccncctcaaaatcatgaatcatg

SEQ ID NO: 278110 - DNA, 351 bp, Glycine max
aaatgcttagatgaacaatgaacttagatctatatgtctcaagcttcaaaggatgaaaaaaaagaaatttggaaccaagaatgagagcttgcatcaaaatggtgaggaaacaagaagagaaggaagatgaagagcctcttaccaaagctttgagggaagaagcttcaagaatacttgtaagaagtttggaaaaagaagaaaaatggattcctcttctattgaagaactcgtgcacaaccatggagaatgaaggtttcaagtttgatttttggagaaataaggagataagtgatgcaatcctactccccaagggcattggatagaagactccaagaagattgagtcaaagct

SEQ ID NO: 278111 - DNA, 436 bp, Glycine max
  unsure (1)..(436): unsure at all n locations
agctntataatatagtgcaaaagtttttttctgccatttgtaatttttatttacaataatttttttcatgcaggattatcaaactataacatcaccacccgtctatattagtccacttgacttaggtcccaagtatgctgacaaattgggagcaggatttcaggagtatcgaaagatatacggtgaaaattattgtttagggcaactgattttttggcataatcagagtaacgcggagccagattgcaccctggctagaataagcaggggttgcttgtcattaccagacatcagttccttttatgccaaagctcagaagccttcacgacatcgtgtttatggtccaaggactgtcagatctatgctggcaaggatggatagttattctgtatttatgaagctctcattcctaactttcttttttgtggtggggggg

SEQ ID NO: 278112 - DNA, 417 bp, Glycine max
  unsure (1)..(417): unsure at all n locations
ntgaacatgagacatccaagccctctagctcataacatcttttcaaattcaaatcttcaagagccctacatccaacatgaaggtattttaaccccaaacacgaatcgaggtttagggtcttgagaagagggaaagatgattccgagaacaaatcaggaagagaaggttggttgttcaaaatgactagggaaagagatagggtttgtagggattgaaagccatgtctcataaccgatgaaggaggcaaacgaaaccctgattttagtttcaaaaccctaagagtttcacttccaataacacacctaggaaagttgaagtaatcatctgtacacactgtggaagctccaatatcaagctctctaacgttgtgcctaatggccctacggatcaaactattcagccgcgaaaaactcaaac

SEQ ID NO: 278113 - DNA, 398 bp, Glycine max
  unsure (1)..(398): unsure at all n locations
gttaatctacattagatattctcttggctcgaagttattgatgagaatagatccacttccgatgttgaacaaacaagatgagtgcttatatagctgggganaccatccccttatgaaccggaatttaatgggacatattggatgcctttgctgcattataaaatttaatatttatcgctcctactctgactttaactgggatattaagtgcgccatttgactattatgcaaattatctaatgcaatgacttgatcaatttatcacaccgagatgctgcaaatattttctagagtttccttaaactgaaacagcatcctttattctctggagacaaacaaccgtgatatccttctaccagtctttacctatcaaaccacctccctgtttaaatgcttcg

SEQ ID NO: 278114 - DNA, 437 bp, Glycine max
  unsure (1)..(437): unsure at all n locations
tacggaccttaaatctcagcttctcttcttttctgcaacttctacaattgtttcttttcttatcctagcggtatggcaaggccggggaataagatcattcaagccaagctggtgggtatgtctcacctcgtggntaatttttttcatttttcttttctgatttcacataaaaatccattacatatattgcattgtccatgcagtatcaaattttcgtacttgtcagatatacaaaggaaagaataattaatatgtgaagaataacaatcatatgaatagatcgttattaaattaaatatgaaatagaaacagaaaaagtatatcaatatatagtgcatgatcgattagccggcaagattttttattgtaattaaccaaaatatcaatttgatactcatagttggaactaactcaactctaaaactaattcaacagat

SEQ ID NO: 278115 - DNA, 424 bp, Glycine max
  unsure (1)..(424): unsure at all n locations
agctnnttattttttggctaatatgctctctggtaatcgattaccatattagtgtaatcaattacaggcagttatttttggctaatatgctctctggtaatcgattaccatattagtgtaatcaattaccacgcgtccctgcacctatatatacaaatttcaaaataaaaaatctgcaacctctcttattttcgaaaacccttgttcccaattctcttctgccatatctcactcatttcttgtccaaatcactccccacaaagcccaaacttcatcttttttcattctctttcatttgaatcgattgaaatttcaaaaaatctcttctaatggcagaaccatcaaagaagcgaaagggttcttcaaatcagagtcaacgacattccgagactcaggaaacgccaattccttcctctattccctc

SEQ ID NO: 278116 - DNA, 451 bp, Glycine max
  unsure (1)..(451): unsure at all n locations
taggtgatgggaatccaganaacaaaaatctgaataagatgaattttattgaattgaagcgagctcaagaactattatagaagtgtaaaatattatcttattagccaaatgcctaataaactatgatttcccataacagaccccctattcttcaatacaattatgtgtgtctcttatgtatatggcacgtgactntgtccagtgtttttcttttggtgtttggtatctattgtaactttgttttatggcttaatccagaaaatatatataaaaaatacttagtttgtgtgtagtactcttgagtctaacaaagaacatttgcattattaagaaaatccatgcaaagcaaatcaagatactcttggatagaattttatcttcaatttagatggaatntgtgccttgaattcatagttttatatatatgatcgaatttactcgatatatccaa

SEQ ID NO: 278117 - DNA, 412 bp, Glycine max
  unsure (1)..(412): unsure at all n locations
agcttctcccccaattttctataaatagggtgagaagtgaagtgaaaaagggttcagccccttaggcacctctctctctttcgaatttgcttggaaaaattgtttccgtgaagaaaatccaagccgaggcgcttccgaaacgtttccgtaacgtttccgtgaggaatttcgcgaaggtttcgaccgttcttcgacgttcttcattcgttcttcatcgttcttcgatcttcaacgggtaagtacctcaaaccaagcttttcgattcattctatgtacccgtggtggtccacattgtgtntcgtgtatttttattctcgtttcatttacttttataccccccttttgacgtgcttaagccattttatttaagtcatttctcgctaatcctaaaatacataacattccaccgatc

SEQ ID NO: 278118 - DNA, 432 bp, Glycine max
  unsure (1)..(432): unsure at all n locations
tcagaccaaagcaacacanaatctaggtatccaaaacccctcaatttaatggattttcaaggtttgagaagtgaaattgagaatggggtgaatttggagcaaactctcacctcacacaagtctataacatcaatttaaacttgttcaaactggatttacacctaaaatttcaccgaaccaaaatttgactcctcaacccccaattttaccctagaaatggctctttattcactttggtcatttgtttttctctctagcacagcccanactttctcctatgtcctaaatgacatttcaagctaggattaactcactttaacctccaaataccactaaatccagatttggccttccaactcccaaaatctcactctntttcctctcataacaccatattctcactttcaaaccctanggtaactctacccttca

SEQ ID NO: 278119 - DNA, 367 bp, Glycine max
agctttccggcgttgtatgtatggatcaattttatgaggaaaggctctatatatatgacttattacatgactaattttactatgtactaaaacacatattacattagtactattggaggatgtcttctccggtagttaaataggctgtatacaacaatattaatgattaatttgcgctaccatattaaagatattgaagtgtctcggcatactatctaacaaaggtaggcgcgtgtggtgccgcaagacatacaaagagatactgatgcggtgccggcaaacaatactcatgatgagactagaatctgcaatacctcgattcttctctctgtggtctttgaattattaaattccaggctataactgc

SEQ ID NO: 278120 - DNA, 257 bp, Glycine max
cgcgagccggtgcgataggatggagggcgacttctacataggtccgtactccttttcgtccgtatcaacacaggattttcttggtactgttggagatgtggacactatctcttatgaatcttcgtacgactcgtgactcacgagctactatttatgacccaagtcttcgagattggaatcttctcctatagaactgacgtgatgagcgttgaactctttctagagaggtagacctctaactatgatactctcggcga

SEQ ID NO: 278121 - DNA, 407 bp, Glycine max
agcttgccacccagctcgcccaggcgagcattgttgctttctccagaagcaacaaccttctggagggcccaagtgggcctggttgctatttgcacccccctttttactaaatgcaccccttctattttttttgtaattctttttccgtaacgttacgaaactttgcaaatttcgtaacgatacttattttccttccgcaaggttacgaatccttacggattatgtatttactcttttttagctttcgaagaagttacgcaaactcacggattgcgcaaaaacacctcttttcgacttccgccacattacggaatttcacggatcgcgcaagcctgcttccttttgatttctgagacgtcttgggacttcatttattgtgcaaaaaaggacgccaagtatctcaaagc

SEQ ID NO: 278122 - DNA, 297 bp, Glycine max
atggacatgatggggcctgagctagatgaacgccttggaagaacagaagtgtgcactctgttgtatgagcatgatatcttcagaattacctgagtcgacttgtgtctagagatatcagacacctttgagagtttcaaggagttgagtctaagactatgtatatacctagagtggggaatgaagagaatcatgagtgaccatggcactgtatgctgcacatctgaaggcatcactcatgagttctgtgcagccattacaccacatcggaatggcatagatgagaggatagacaggact

SEQ ID NO: 278123 - DNA, 417 bp, Glycine max
  unsure (1)..(417): unsure at all n locations
agcttaactaggcgagttgattntagccttattttcactttagttattagtcaattcaattaagaatgagaaataccaaagagaaaacgtccgattgattttttgctttattttactaaaaggtattttttattattatattattattttacctcttttttgatttccagtgtggttacggcacgaccgaacggtcggaattcattttaacagaaattaacggatgatacaattcaaatgatcggtgagaatttattttatttttagattaggcgagaaaggacttaaataaatgactaaagcacgtcaaaagggggtacggaaagtaaatgaaaacgagaataaaaatacatgaaacaaaatgtggaccaccacggatgcatagaatgaattgaaaagctcggtttgaggtactta

SEQ ID NO: 278124 - DNA, 435 bp, Glycine max
  unsure (1)..(435): unsure at all n locations
tattgtttgaaacaacaagctnttgggcttcctcatgcatttcattaaaggcttccttaacttcctcaaatttggaatttacctcaatttcttcatggttgaggagtcatccgttgaatcaaccattacgcacacatttgcaatttcttcttcactaaaagagtaaaaggatattgacacattatcttcccaagctataaaggcctttttagatttcaacaagatgctttttgaggtagcaggacaatctgacttaatgtgaccttgcttcctgcattcaaagcatgtaaaggtgttgttgttggttntcaccttctttcaaggtttagagattnttttgtctttggaccttttaaggaatttgccaaacttcttgacaatcaaattcaaattctttgcatcttcatcatcactagagtcttcttagtggtcttc

SEQ ID NO: 278125 - DNA, 438 bp, Glycine max
  unsure (1)..(438): unsure at all n locations
agcttggagggttgatggngacccggngctgttaggaactatgagaaggctatgtatgtgcacgtgagctaaaatttaaaggtgggcaactggggatggtgtgcttatgcttggcttgtggaaatgggaaagttgatttgtgccatcgcccgatcgccacctagtaccatatatgacgggtgccccataatccaataagcttgatgtgagaaagcgtggaagagtcagtcttcctacttttatttgttgaccacagagtggtacctggagatatgtcgcgggggtcaggagaccttggggacgtcaggtggggtgctattgcccaaaaccaagcttggtcaatcccgacccaacccgggcatagtcagtcagtgagaacctgtgacgtacctatgcaggcgagctcctagcagtcaaccaataaaagaacatagtcta

SEQ ID NO: 278126 - DNA, 431 bp, Glycine max
  unsure (1)..(431): unsure at all n locations
actntgtcactggtaatcgattaccagagagtaaaaactcttgtaacttcccttgaggtaaaaactctggtagcttttgagaaaaactcttttgaaaaacaaaattgtgctatgtttgttttttgaaaaatcttttcaattcttcccttgtgaagtcttcttgatttcttctcttgaatcttgaattcatcttctcttgaatcttgaaatcaaacttctcttgattcttgaatcttcttgatttcttctcatgaaacttgaaattaatcttgatcttgaacttgttgactcaatcttgaaatcattctttgggttttttgtcatcatcaaaactacttgaatcaacttgattcatcatcatgaagcttgcttctacagtcaagagtttattctgagctacaattgcattctgagtatccagctccactata

SEQ ID NO: 278127 - DNA, 419 bp, Glycine max
  unsure (1)..(419): unsure at all n locations
agctntcttgaattgttatattcaagataattgagcatattcaaacacaaattgtagcaatccaagccttaagcaacatatacactactcttgatttctaggttgaaattgctggtgctggcagcttgaacataagaacttggataaattattggaaattagtcactacgttttgtgagcttaaatttttactgaaatttctagacatctggaacaaaattatgaaaaaagaatcaatcgatttggattaaaggaaaaaataagaaaaatcacacaagttggcaaaaaaatcagtgtccaggaaaaaaaagtgaaaggaaagtgtgcttgttgttttggctcanaatttgttctacaattggtgcctattttataccaatcctagttctgaaacttcaatttgaaattattgtgaaaac

SEQ ID NO: 278128 - DNA, 436 bp, Glycine max
  unsure (1)..(436): unsure at all n locations
tagatctcggcttagcgaaagctacaggttnttaggtctgtagatcttgctaagtggtatatttaacttgctaagctaagtatttatgtgctataaaaaaaacacccaaacaactcttctgcttagcgcgagccccactaagcaactagccttggaaaatcaaacgactctcccgcttagcgaacgcttcgctaagcgggagcatcgaaaaaagcattggttaagtgtaacttcagcacaatgacaagtgctgagtgtagggatagctagagaattttgcataaaccatatcatctctttctctctctcatctaatgcagcatctgcattgggtcaactgtaccagcaattcaagtaagttcctcatgatccttatcgtttttaatttgctcaaccttaggatagacaacttttaaaactagctttaggaattata

SEQ ID NO: 278129 - DNA, 438 bp, Glycine max
  unsure (1)..(438): unsure at all n locations
agcttatggtactcattatggttttcctcttttattgattaatgaatcggctgatatgttccaccatagacttgtcaccttcgcaagaaaaggttgtaaaatttggaattataaaactcatttgcaaaggcttcatcttttcaatccaattaggataaggtttgctatatgtcgacttggttaacggtttcagctgaatgccgaaacactttttcatggtttcggctaacatgcttaggaaatcattaaagaagttgctaactgagccgngttgtgcatgacaactgttttgattgcttctcacataaggtcataggttgaaatccatgctgatcaactaaggtaggtggaataatactccatggaggctttaccaaaccatcatcaatatgtttgcaaacatgtattttgtgcctcctgtagtacatctaacacatg

SEQ ID NO: 278130 - DNA, 495 bp, Glycine max
  unsure (1)..(495): unsure at all n locations
ntgaattgtgctctatacgagaacgactngagtctcgagctcgtctcctactattgatagaatgactctctgcatctggctattggaaccctaatatgctcaccacagtgattcttggcgacttgtagcgaactccgatggaacattgtggtgctgacaccatgatgagcactgactaaatacatggttctcaagcttgaaacgagatacatattctagagggctgtgaggagttgaagtacccaaatgacatatcctttcggtgaatagtaaacaatgctcccctcattggtctcttgtcatgatatattgtacatgcataaggctcttgttaatggtgaacatcatcatacaaagcatgcttcgcatgtaagaacaaaaccatatgtactttgcttacgcgcgactctctgggacctgacgttagtgttgatatatccggatgagaatagcttatcgattaacccctgacttaagggatctttacttcgtaat

SEQ ID NO: 278131 - DNA, 435 bp, Glycine max
  unsure (1)..(435): unsure at all n locations
agcttgtcacctctntcaaattttcaagatatcattaatggcccaacgccttaacgtttctctcctttcaaaaacaaagagatcgttaatggtccaatgtcttaatgtttctctcctttcaaaaaccaagagatcgttaatggtccaacgccttaacgtttctctcctttcaaaatcaaaagatcatttaatggtccaacaccttaaatgacctttgttgaaattaaaatctatctttcaaaaaaaggataaaaacaacttaaccaacgttcagttctcaaagaactacgtaagtctgatttccttatcacaattaaggaatacgtaggagcaaaggaaacacccttgtcgaccacaaaaagataaaatatacaaaaggcataaaaagacataaaaaacgtaaagggaaaataaaataaattgaagtcatatttg

SEQ ID NO: 278132 - DNA, 390 bp, Glycine max
cccgtcatatgtggcactatgtggcgatctggcgatggtgcaagtcgactctcgacatccacaaatcacacataaatccaccatccccagttgcccaccttcaactgagctcatgtactcccacatagcccttatcctcgttcctctcaacatcgggtccccatcaatccctccaagattccacaacatccaagcaattcaacatccacacatcatgaactatcaaaatccaagaaaaacggggcagaagcagaaaactctgcccaaaacacaaaccaataccacaactttccttacacaaataccccagtaacattctctttgttcaattcaatcaccattggatcgactcgaacattttactggaggtccctagtacataagtctaca

SEQ ID NO: 278133 - DNA, 368 bp, Glycine max
  unsure (1)..(368): unsure at all n locations
agctngttgtgcaccatcgccttaccgccttctagtaccacatgtgatgggtaccccataattctacaagcttgagatgaggaagtgttgaagggtgaaacttcctgcttttattgttgaccacagagtggtacctggagatatgtcgcgggggtcaggagaccttggggacgtcaggtggggtgctattgcccaaaaccaagcttgaccaatcccgacccaacccgggcatagtcggtcagtgagaacctgtgatgtacctaagcaggcgagctcctggcagtcaacagataaaaggaaaacaagaccacacagcaaggaggcttgtggtggctggccaactgtgaattttgcgtaatatgtggatg

SEQ ID NO: 278134 - DNA, 286 bp, Glycine max
  unsure (1)..(286): unsure at all n locations
gaaacttcctgcttttattgttgaccacagagtggtacctggagatatgtcgcggnggtcaagagaccttggggacgtcaagtggggtgctattgcccaaaaccaagcttgaccaatcccgacccaacccgggcataatcggtcagtgagaacctgtgatgtacctaagcaggcgagctcctggcagtcaacagattaaaggaacatagaccacaaagcaaggaggcttgtggtggctggccagctgtgaaacttgattgatatgtgagatatggtctctggtaat

SEQ ID NO: 278135 - DNA, 330 bp, Glycine max
agcttctcgatatattatgcactctgaatcttatttccatttgaaaagttatgaccaattgaatttctggagagcttccgttgtgcaatttcgagcgtctcgatatattatgcacctgaatcagacttccgtttgaaaagttatgaccatttgaatttatggagagctttcgttgtgcaattccgagcgtcttgatatattatgcgcctgaattggacttccgtgtgatatgttatgaccatttgaatttctcgacagcttccattgctaatttcgagcgtctcgatatattatgcgcctgaatcggactttcgtgtcataagttatgac

SEQ ID NO: 278136 - DNA, 436 bp, Glycine max
tctcgatatattgtgcgcctgaacaagaacgaaacaagacctgaagacgcaaacaagaacgaaacaagatgtaaacaaaaacgcaaataacagaacaaggacaaaacacgaacctggacaaattacaaagaaaaataataggataggatagaacctgtatcaagacccgaagctctgataccagatgatgtgaacctgagtaggagcggatcgtttgatacaggctacggaggtttggatgacgccacctccggtgaaggaagataagtcagggtagacgccacaaggattaccttgataagtctgataattggttcaacaaggaacccagagagaaactctcacccaattttatcaaatgcccaaaagtgtttttttattcaaaacaaaaaccaatacttatagtgtagctgaacaaaaagataaaaatagacat

SEQ ID NO: 278137 - DNA, 366 bp, Glycine max
agactgcacttaactcatgttacattcagtcttgatggacacgaggttctcctcagctatagtggagagcacgtttacttgatgaatgtaaatcatggtaaagcataccacattgtttatttgattgccactagttgtataatgtaatgagattttatgttcgttcgaggtatgggtaaaattttcaagaatagtataatgtaatgtattcttactttttcaacttatatgggagtattggataaattatagaagttctttaatacccaacagtttaatttatgaatggccggaagaggaatacattgtctttgcatggtgttatcttatttggatatgctatgttcgttattagtgtaaccttta

SEQ ID NO: 278138 - DNA, 430 bp, Glycine max
  unsure (1)..(430): unsure at all n locations
tctaaattaaatgttcccgaaacgtatcctataacaatttagttctcttcctgtgtgatagatgttctcgtttattttcaactgttttgatctctcctcctttttttttgttctatgtctctccttttctccctcgattttcttgatctttatttatagtaattcctaacaacttatctaatcatttcactgcacatttcttatcttattttatcatatatatacatataaaataaatctaataatttatcttctttcatttatcttatatttatataagataaactaatatgctcaaaaatagcaaataaactaaatatattattttatcttatctaaattatatatatatattctatcctaccaaatatattattttatttttataaaaagtgctattctttntttnnttttggatgttacacttgac

SEQ ID NO: 278139 - DNA, 379 bp, Glycine max
  unsure (1)..(379): unsure at all n locations
agcttagatcaggcatccgagtcaaacgttatggccgtccgaatatgcatgggcattccatttcaacttttaatcgtcatgatatattacgggcctcaatcggacatgcgagtcaaaactttagcccgtcagaattcacccgagtcttccatgttaaattttgagcgtcgcgataggttacttggcttattcgaagatccggaggaaaagttatggccgtttgtatttgcgatgggcttcattnttattctaagagcatctcgatatattatgagcttcaatcgggaatccgagccaaacgttatggctgtccgaatttggcgggtcagtccatttctactttcgagggcgatgatatattatgggcctccatcggaca

SEQ ID NO: 278140 - DNA, 446 bp, Glycine max
tcaagaaaaagatggcctcagcaaattccttatttttcagaaggaattctatcaatagacctccaatctttaatggagagggttaccactactggaaaacccgaatgcaaatttttatcgaggcaatagatctaaatatctgggaagccattgaaatagggccttatatacccaccacagtagaaagagtttcaatagatggtagttcatcaagtgaaagcataaccatagaaaaacctatagatagatggtctgaagaggatagaaaacgagtacaatacaacctaaaagccaaaaacataataacatctgccctaagaatggatgaatatttcagagtttcaaattgcaagagtgctaatgaaatgtgggacactcttcgattaacacatgaaggaactacagatgttaaaagatctatgataaatgcactaactcatgagtat

SEQ ID NO: 278141 - DNA, 386 bp, Glycine max
  unsure (1)..(386): unsure at all n locations
agctngaacaaagcttcttgagggttgttgtagaaggaaggaacaaaacgagactacaattcttggagcattgttggccataaagtgaggaacccaatccaggacatgcacaggtactagcacagggtcagtccttccatgtaaaatgaagacatcatgaggaactcatgatcacgtatgccctgataatccaagaactgtgaaatttaaaaaatccaactcatagggccctatctgtagaattgggaacatcatgcttcatgtgaggcaatgagtatgatggtggggtgggtgttgttggagatttgggggaagtcaaagtggcggtgagggcaacaaatcattccatattgtaatcgcatttgctgatcattgttgcttgggat

SEQ ID NO: 278142 - DNA, 418 bp, Glycine max
  unsure (1)..(418): unsure at all n locations
tatcattngactcaacttgcatacccacttctaaaacaatctagatacgggagcatagtattaaatccatccaatgcagctataaacggttttcccattttatctgcttattcagcctctaaaggtatgcatttctagctagtttttttttcatatcccagtatcccaacattgtaagtaaatataacctttgaatttgaatgacactactaaaaaaccctttttttacgtttctagggaactgtcttanaatgtgactcagtggcatttgtgtaattaatgcaaatataactacgatgatctctcacacccgtctttgtaggtaggacgcaatgaaactttttaaattgaagacttcattaaagatgggatatagaagcaaatcgtcattgtaattaagaaaataattaaaaataag

SEQ ID NO: 278143 - DNA, 395 bp, Glycine max
  unsure (1)..(395): unsure at all n locations
agctntgaaatatggaagagganaactcaatctataggggactgtatattgtaggatatttttggaaaaaaataaaataaaagggaagtacattagtaataaaggaaagtagaaatagcaatagcctttgattctccttttgggtcattttggatcgaatgttgttattaccttttttgggcataaccatcgattttgggctttggcccaaataatgacatattttacccatcttagtatccaaatagactagggaattgcttgggacatccagtaaatttcataaatgtcagaaataaaattatgggtattttcagttataaatagcaggagcagctttttatttctgcagcgtcattttttttccgcanaatcttgatcacttagtatacgtt

SEQ ID NO: 278144 - DNA, 445 bp, Glycine max
tgtctctttttgttagttcacttacctgtaaagctgttctatcattacacttcttattttccctgttctcaccgtatcccaatgagttactatagtccaacttaagttatttggagtgttgagttcaatggatattttgtttttcttggatagtgtacttgattttagtttttcatgaatgttacacacattttctgtaattaaaaggcggtgattttcgttctgtggcttaagaatttagtttgtgtaatttggacttgtttctggatggttatgaaataatagaagcgtggatgcttatgacatggatagcaactggatatcgatactatttctatgtaaccatagatgatagatttgtgggtttgctaccccaactgtgcaaatataattgtaagtgtgtgtgttttggatgagcttacaaaattggctttaatttgaattg

SEQ ID NO: 278145 - DNA, 431 bp, Glycine max
  unsure (1)..(431): unsure at all n locations
agcttgtcctaagtgtagntntcatcttctttgtgtgctaactaaacttcaccacagggatcataccatccttcaatgtagctgcagggttgttggggtttgcagtgatcaaggcctacactacactcctcaacaattgtggccttctcaaacaacccttcactcgtcaagaaaacactgtcatacaatacaattttatgcatcttaataaaaatcttttttcttttagtttagttccttaaccagtgtctatttgtcttaaagatctcaccttaaattttaatttgagaaaggctaacaacatactctattattattggttcaaatttataaactntagtgaatctacctcttatttaataactttgtatcttgatttataattttaataaaaatctcgaccaataaaaaaaagtgttaaaaggaatggg

SEQ ID NO: 278146 - DNA, 356 bp, Glycine max
  unsure (1)..(356): unsure at all n locations
ngaaccttcngatctcacacgaggagtatgtctcatggaattcgaattttattaattatatcatgacacacactatctgcgtcacaagtagaatagtgaatctctgtgcagtatggaactggttccctttcattattttgatcataacattggataaaggccctagacaaacgcgtgagtctttctaagtttaaccattacgtggattcgaggagtgatcctatattcctatatattgacatattaatcttggtctgtggagggggatgtatattatttgccatttctatctactggctattgctctatcaagcaccatcattatattaatcatgtaaatgttaatatgttaaata

SEQ ID NO: 278147 - DNA, 270 bp, Glycine max
aaacgccatttcttctcttttctttattccaaattcattcctaacaggccaagcactttctccaatcacccacagcgccaattagccaccacaaccgcgctttgttctccggtgaaaccccacaccgagaggaactcttcaatcgacgcgataccttccaactggctttggggtttgggtagagaacgaaaccctaatctgacctttcattatctatcgaggaaaccatgggtctacgcttgtgtcttgttagatacagcttgtctttgc

SEQ ID NO: 278148 - DNA, 426 bp, Glycine max
ggggaaatgcattgggcgtctatttcgactttcctatgctgtctctttatacataaaacagccccaccatcccaattttgcaaaatcatatacatatatcattggggcatttcaccgagcacttgatgggcgcatgttaggacataaattgcatgagaatgggggcaatgtggcatcccacatcgcttcagaatacaacatatgcctaaggccttctcattcaaggtctcaactacacacaacaagcatgcattcagatgcaaattgcttcacgaattttgcaaaatatgagcaactaaagcaccaaaacacatcaatggagagccaaataaccaagggaaatcgcacttacttgtggggagtgaattaaagcgtgaaaagggaagcataattcgtaaatggaagcttgggggctgctgttctcgt

SEQ ID NO: 278149 - DNA, 420 bp, Glycine max
agcttgtagagtatagacttattccttaactatgaaacatgttcataacgaattacaatgatggttatttttggagcttcatcataaatcttactaaactgttagatttgtagtatcccacgatatttgtagtatcaccatattgcaaaaaacaaggtagctatgacagtgtaataaacttcagagatttgtgttgactacatttgtagatgagctcataattgtttgatattgttcagactttaattagagcaaatgctaaaaacttaatgactgcattacaaagcctccttaatgaacatagacaggaaagcaagttccaaaatgaaaatagggtaaacaaaatgaaaacaagccagatataacattgtaataaacttcagagatttgtcttgacaacatttgtagatgaggtcataa

SEQ ID NO: 278150 - DNA, 444 bp, Glycine max
  unsure (1)..(444): unsure at all n locations
ctcaagctggtcaataaaaggaaaccttgtgcatgcatgcaagtatttcatagtgtaagcatggtatgtctagaaggtatcatgataatatctagcatgcatgatatttggacagattctctccctctcccgacttgagacacacacacacacctcacatgtccattattagacaaaatatgtgttgctacacacatatcttagtgtttttggatcgaattcgattcaactattaaaataagttaacttttgggctagaacacaacttttgatttctaaacttattggctctttagtccaacccgngaactcatttttttataattattattattattattatcatcataatagttagtgaagactacatatcactcttatattatatacgttcttttcactcacatggtcgaagttaagagacgctcatggagttttatgcat

SEQ ID NO: 278151 - DNA, 428 bp, Glycine max
  unsure (1)..(428): unsure at all n locations
agcttgatgcatgccatgtgtttggagaaattgctatcaatatatcgactntgctcttctccgttttcatagtctttcatcatgatactcaaacttatgattttattctctgaatcacttgaagaatttatgacattatcttcccaagtgatgtatcctttgttttctttcttctctttgaaattcctcttgtcagatttttcattcttcttttgaagacaggacaattgaatctcatgtgcctagattgatcgcattcagcattttggggctaaggaggaatcttcttctttcttctttcatcatcatcttctttcttctcaagtttttttttatgtagttgcatttctctctaccattatgggaataaaggaatcaaattcaatggcttcccatatctttaaatctattacttctttanagatctg

SEQ ID NO: 278152 - DNA, 436 bp, Glycine max
ggtgtgagaaagcatggaagagttagtcttcctacttttatttgttgaccatagagttgtacctggagatatgtcgcgggggtcaggggaccttggggacgtcaggtggggtgctattgcccaaaaccaagcttgaccaatcctgacccaacccgggcatagtcagttagtgagaacctatgacgtacctaagcaagcgagctcttggcagtccaccaataaaagaacaaagtccacgaagcaaggaggcttgtgtggcggctgaccagctatgtatcttgggtggtttctgaaaattaccctctggtaatcgattaccattcgtgggtaatcgattacaaggtttaaaaatggagacaggatgttaagtagcttctggtaatcgattaccaattgtgtgtaatcgaatacacagtatgatagagcacttgtaatc

SEQ ID NO: 278153 - DNA, 431 bp, Glycine max
  unsure (1)..(431): unsure at all n locations
agctntggcgtgttgttcagtattcctcaacgtactttatttcagctccttgtgattttctccttccttgcctttgatgagtagtccatccttgatccttttgatcatctcttcttgtagaaggttgactctagatcttatcattggtcccttcaactaatgtagtatttctaggtccttaagctctttgaataaccctctatcaaatactatacaattaacaatacatatacgctagaaactatatgattgataaaaaaatatacattagaaattagggttattagattattgtaatcatgtacataaaaaaatcaagctgaattagtttgttacccagctttatgttattagtgtattgtaaagaggagaanaaaataaatgttagaaactgaaatgaaagacatatagtatatatagttagttataat

SEQ ID NO: 278154 - DNA, 440 bp, Glycine max
  unsure (1)..(440): unsure at all n locations
ntgagccaaaatcctaactcaccataaaccttgacccagtgtgagaatgtcaatccttaccctcggaagcaaaaaagaagagaaggaaaatttccaatcaaagaaaaaaaaaagagaaggaaaatttccaatcaaagagaaagcaaaaaaaaaagagaaggaaaatttccaatcaaagagaaagcaaaaaaaaaaaagagaaggaaaatttccaatcaaaggaaaaaagagaggaaaggaaattcccaatcaaagagtgggagaaagcgaaaagaaaagaaagaaaattcccaaccaaagagtgggagaaagtaaaaggaaggaaagaaagctcctgatcaaggatcgaaagaaatcagaagaaatgtgcataaaggtctttggaccggacaatatctgtacaatacagaattgtcaccaaatgaacaaaaaaaagggaa

SEQ ID NO: 278155 - DNA, 394 bp, Glycine max
agcttgttctaaaacaacacagtcttgtgctttaaaattggcttctttccccccaaaaaattgtaagccctgcacaagtaaactatcaatggagtgactcaaaaagccacattgttgtatgagtataccacattgttttttaagaaaatctttaggatatgattgcattgataaaccattcatgttcaagataagctatttaaacaatatacctgagtggtcagcatggattgttgagatgctactacatcattttgcataggttctatatttaaattgctgccactaggttgtgaagttggtggatcttaattttgttgttgtcactgacaaaaaatttctacacatatatgtaagagatgaaatataactttttgtaagagtagtggaaaat

SEQ ID NO: 278156 - DNA, 402 bp, Glycine max
tgaatatcactccactgagtgtgtcttccttggatattctttcagtattaaagggtacaagtgtatgtctccctctggtcgtatttttatctccaaagatgttctctttaatgaacagcagttttcctatcctaaattgttttcttcttcaacttcctctccagcttcaccaacacccttacctatctccacctctttaaccattgttttttctaaacctgtcccctcaatacgcaggagtgacacaaccaaagtcacgatcttcaagagttgcaaacctctccggaatctgcaagttcgcaatgaagtgatgaagatagtgtccacaaatcacaggcaaaacctgtgatttccaaaagagataattgacgaagccgagcttttctgttatgaccgaactct

SEQ ID NO: 278157 - DNA, 560 bp, Glycine max
  unsure (1)..(560): unsure at all n locations
tctatccctccacgaccgatcctatacatactcctatgcactctactacatcgacttctcaccaagcnacacagctgnacntttgaaacttgaaacccttgcgnatccgagatccttagagtcgacctgcagcatgcagctgaagctccctacatttaaggatatttactaaagaacgaagaaataaattaagagcagaagcttgtagctcccctacttcagaacggatttctccacgaagagaatcttcacttacacctagaagtaggcaacatgaaagcacacctactctatacaggattacgcaactaagagaatggacgcttagatctaaatgctgaacacaggcaagcactccctaccgagaaagccaaggtccatgagatagattccatttaagatcaacatacatcaactctggtagatttcccaattcataaggatatgtaccacctaacgccccacatgatagaataagaatatgtaacttggagacccacccacacaattatggatgcgacctctttataaacataatcgaaagagcccatatttcaccg

SEQ ID NO: 278158 - DNA, 394 bp, Glycine max
tgtagcataaatgacggaactttgcccttaaatttgttgttttcaaacttatagatggcccattaagaagctttagtggcaaattcggaattgaacctgtgagataggtgtgtgacatattcaatatttgcacattgtgcaagttcttccaaaaccattctggcactgaaccattaagcccactatcataaatattcagaaaagttatggaaagttgagtcttgagccaactaagataagtggggcccaactcgcaagatctgactgccaagtattctaattggagtggaggaacccaactcgggacaaatttcagagacaacgaagttcctgataagtacacatattctaatttggaacaaacacaaagatgggattcagtgacgtcaccctg

SEQ ID NO: 278159 - DNA, 404 bp, Glycine max
agcttccatcaagggagtgatgtctaagatgtgacctatgccttccttcgtaatagtcacgaagttcttcacttaggttcttgcaagagttatgactactattggaggcatgtttttctcttttcatttctttcattatttttcttctttcttcctctcttattttctttctttcatcttgacttatttcttctacttttgtttttcatttttcttttctctcttgtttttcttttcataacctgagggaactcaactcatctaagattctagataaagggtctttatgactagtaccctcgccattaacactagatgaatgatgactcatgttggctcctaagttgttgttctttcttgttggaggtttgaaaacataaggaaaaagaaactatggttgaaac

SEQ ID NO: 278160 - DNA, 441 bp, Glycine max
  unsure (1)..(441): unsure at all n locations
ctataagtgtgggtctgtgagacaaaggtcaagttttcgctatatacgaagatgatgttccgagtacattagatttggtacgaccatgccctcctgatttccagctgggaaattggcgagtggaggaacgccccggcatttacgcaacgagcataatgtaaacctttacggttttaaaagctctatagttgggcctaggctttagagtttttccttttgttaaggctttgagtcttttgtttttgaatntataatacaaggatctttcttcatctgttcctacgtctctacccattctcattcatttgcatgtttacttctttttctgaaatggcagatccgatgacgagtcccccgaaggtactaatacctgggacccgcctatcgacttcgagcaagaaatgaatcatacggaagatgaaggaaacgaggatgtgggac

SEQ ID NO: 278161 - DNA, 399 bp, Glycine max
  unsure (1)..(399): unsure at all n locations
agcttgcgtgcttgatcgtctaataagaatatttactactgatctctgtctgaagtaaactaccaaggccgtctaattcacacatgcatacacgtatgctgctagtttattaaaatgaaagcaatactaggcccactaattgtagcattcatcagtgtgtttggataaacttttttagtacaagttttcacaatgaacttttttttccacaaagcaactttctctatttgaaaaacaacccaacccagttttactttttatagaaaacaaacatgtttggtaaaagattaatttactgcccatgtttcanaagctatttcaagaagctagcaaaattctcctgcataactgaatcaaacatgcactacgatgtttctccatgctgctactgccaagtcg

SEQ ID NO: 278162 - DNA, 317 bp, Glycine max
  unsure (1)..(317): unsure at all n locations
ntagaataattatcattggtttctttagtctgcgagagattcgatttctgcgtgaacaggtagtgcagctagcgcatatttttgtatcttttgagaaaatgataaaaataccaagatgagatggatggttggatacttgtttgtttttcttaacatgtaatgactagacataatttttatataagttttcaattttcatcctcttttaaacttaatggaatggctgccaatgttcaatctctagatgtgatttgaacctactgctagcaacactatgcacccgctcaatacaaacccgagaaggaaatatcatgaaa

SEQ ID NO: 278163 - DNA, 373 bp, Glycine max
agcttgtctcagcgtttatgcgagacggagaccaacatgctagctatcatcgctaagtaccaagaagagttgggtctagccacggcccacgagcatagaatcgcggatgagtatgctcaagtatacgcagaaaaagaggctagaggaagggtgatcgactctttacaccaagaggcaaccatgtggatggaccggtttgctcttaccttgaacgggagtcaagaacttccccgcttgttagccaaggccaaggcgatggcagacacctactccacccccgaagagattcatgggcttctcggctattgtcagcatatgatagacttaatggcccacataattagaaatcgttaggaaacttgtatggtctctc

SEQ ID NO: 278164 - DNA, 343 bp, Glycine max
  unsure (1)..(343): unsure at all n locations
nttaactcggaggtccgattcaagcgcattatatatcgagacgctcgaaattaaccaacggaagctctcgagaaattcaaatggtcataacttttaactcggaggtccgattcaggcgcataatatatcgagacgctcgaaattgaacaacggaagctctcgagaaattcaaatggtcataacttttcacacggaggtctgattcaggcgcataatatatcgagaccctcaaaattgaacaacggaagctctcgagaaataccaatggtcataacttttcactgggatgtccgattcatgcgcataatacattgagacgctccanatgaacaacggaagctct

SEQ ID NO: 278165 - DNA, 437 bp, Glycine max
  unsure (1)..(437): unsure at all n locations
agcttgttgtcaacaaacaaatcanaatcaattttctgatcatcaaaacctagctccaacttcctcttccccatatcaactatgcagcttgcagtcaacatgaatggccttcccaatattacagggatgtcagtatcttcagagatatccattaccacaaagtctgtcaggaagataaaatgtttttctctgaccaacacatcttcaattactccatatggcctggtaatggaacagtcagctaattgtaaagtcattcgagtgggcattatttccaactcccccaatcttctgcacatggagagtggcatcaaattgacactggctcccaggtcaataagagcttttcccacattgacttctccaattgaataaggaatagttacactcccaggatctttatgcttgggtggaaggatcttttggatcatagcact

SEQ ID NO: 278166 - DNA, 448 bp, Glycine max
cttttattgtaatcttgaaattcaggacagcactctaatttctgaaatttttgggataaaaatggtcattgaccagtcccttttccatgacttaaccaaattacccagtgacggtgtaccatttgaaggttcactgaatgacgactggaaatttgatttctctgcccatgatgcccgccagttggtttgcaccaacaatgcggatatgaccggacgtcttcttgccgggtcattggcttttgaaagccgcatccttcactatttaattgtgcgtattttgcttccacggtcttccaaccttgccctggtttctgaggaagatctaattatcatgtgggcctttcatacagggcgtcaacttgactgggcacacttagtcaaatatcgcatgcataaggcattgcgattaaatgctccactaccatatccacagcttgtcactctcttt

SEQ ID NO: 278167 - DNA, 441 bp, Glycine max
  unsure (1)..(441): unsure at all n locations
agcttcatccatctctaagcccaaagaaaatgataaaaggttactgggaaccatgctcaaagcaatacaaggggcaaaggtagagagagaataaaaatctaacgtgccccggtgccagaatgcttcttgctatgtgaaggtatgggggagggtcattatacgcagccttagccttgcatatgcaaagagactgtttccggattctaacccatgaccaaccagtcactaaggtgcaactttaccattatgccagggctcttcctcaaaggtagagggagaataatcagaagaaaatcactcaagtttactccacctctaagccaaaagaaaagaggaggaaaaaataaaccatgctcaaagaagtgcaagtggcaacggaagattataaaggaaacatattntagacagtaagtagatacagaanatgtagtaaatatacct

SEQ ID NO: 278168 - DNA, 434 bp, Glycine max
  unsure (1)..(434): unsure at all n locations
gggatttcctttagtagggaatctatccttcctaagatggagccattcttaatcaccctcattaagaactagcttgtttcttcctctattgcttttagttgaatacacctttgtttggttctctatttggntcttaaccctctcatgcaacttctttacaaactctgacctagattccccttctttatgtataaaagaagtgtctagcgggaggggaataaggtctaacagtgttaggcgattgaacccatatacaacctcaaaaggggactgcttggtggttctatcaacccccctattgtatgaaaattctacatgaggaagatactcatcccatgacttatggttgcctttcagaagagcccttagaagggtggataaagacctattcactacctatgtttgcccatcagtttgtggatgacaagtggtag

SEQ ID NO: 278169 - DNA, 348 bp, Glycine max
gccactttgagatactcagagccattactggctttgtctttcttttagaaaataaagaaacctcattaagtgactactcttgcctaattgattatggtccaagactaagctacatgaaacaatttacaaggaaatgtaagatccaatgctcagcttaatacatagatatttaatcatgtgcacattactctgcagccttgcactttgaaatattttgaataaaagccttcatttttgtttatgacctcatcctacatcgacagagtttataaatcatataagcttcattacgcaccttatatttcacgttatatgagacaaatgttacatcacacattttttaaatgt

SEQ ID NO: 278170 - DNA, 299 bp, Glycine max
tatctcagatggagtgatctgattcgtcctgagcagaacatccaagatgggaaaggtcaagagactgaagcttctgctttcagaaatgcagatatttgtgacaataaacttgtcgaggggaaaagttgttatggaataacttttgggagccaaaaacatcttccttctcgggtgatgaaaaatgttgttcaagtggagcacgatccacacggaaaggaaaagtattgaggttttgaaacacgcattccattatattagataaaagagtatgaagaacgtcatggaaatatgccatgtaa

SEQ ID NO: 278171 - DNA, 423 bp, Glycine max
  unsure (1)..(423): unsure at all n locations
agctntttctcatcaacattagtaggtgctattttntaactgacgtcaagcaaaaaaatatcacaagcctatgtcgtccaaaaaagtccaagccgacgtttgccaaaaaattgccccaactggcatccgatcaaaaatagtctcgattgatgtcgataaaaaaaattaattgaaaatgactttcgaatcgttcaaaagtaagtaaaacttggaaattccgcaacacgggattaacttaggtcgaactcagaaatatgattcaatatcattcctatgttcattcgcttataaatagaaatggggaatttttttttaatagtttgtatgcgactataaaggaatgtgaaaacacacaaaaagagggatgaaggataaaaatagagcaacaatacaagtgatgtntaatagcatcagtccaattta

SEQ ID NO: 278172 - DNA, 409 bp, Glycine max
  unsure (1)..(409): unsure at all n locations
tcattggagcttgtaggcctaagatcttcttcatcaatggattccttcntttcttggaagataaatggcagcggaatggagaatgaagagagagaggagacgccacttcaaggagaagatgagtctagaagaagctcaccaccatacgaggccatggataagagcttggaggaagaaggagatgaatgaagggagagggagagaagagcacgaaattttgtgctcaaaaggagctctgaaatctgaagttaatattcaaatgatcaaagttgaaaaaaatgcacacacatgacctctatttatagcctaactgtcacacaaaattggagggaaattcacatttcacttgaatttgatattgaatttgtggagccagactttggagccaaaatttcacgtaatatgacta

SEQ ID NO: 278173 - DNA, 428 bp, Glycine max
  unsure (1)..(428): unsure at all n locations
agctntgagccaattcaaacgacaataactttttcatggatgtctgattgagtcctgtcatatatcgagacgctcgaaattgaatgttgaatctctgagccaatccaaacgacaataactttttactcggatgtctgattgtgtctcgtaatataacgagactctcaaaattgaatgttgaagctctgagctaattcaaacgacaataacttttaactcggatgtctgattgagtcctgtcatacatcgagacgctcgaaattgaatgttgaagctctgagccaattcaaacgacaataactttntacttggatgtctgattgactctcgtcacatatcgagacgctcgaaattgaatgttgaagctctgagccaattcaaacgacaataactttttactcggatgtctgattgagtcctgtcatata

SEQ ID NO: 278174 - DNA, 450 bp, Glycine max
  unsure (1)..(450): unsure at all n locations
gacactatgatactcagcttaancattcaatttgagcgtctcgtaatattacgggactctttcatacatccgagtaaaaatttattgtcgtttggattggctcagagattcaacattcaatttcgagcgtctccatatattacgggactcattcagacatccgagtaaaaagttattgtagtttgaattagcttagagcttcaacaatcaatttcgagcgtctcgttatatcacgagactcaatcagacatccgagtaaaaagttattgttgtttgaattagctcagagcttcaacattcaattttgagcgtctcgatgtatgacgagactcaatcagacatccgagtaaaaagttattgtcctttgaattggctcacagcttcaacattcaattttgagcgtctcgatatatgacgggactcaatcagacatccgagtataaagttatt

SEQ ID NO: 278175 - DNA, 413 bp, Glycine max
  unsure (1)..(413): unsure at all n locations
agcttcggggacgggttcggattcactgtttttatagaggattgactntaagtccctgaggtttttggtcaagtcgggcatgttatcgtcatctcgggaggtgagacggagaagaagatctcgcgtttgtttgacgatatcggaaggagtgcggggcttgggcttgaagaggctcttcatggtgggggaatccggaggggaatatagcaccgcctccgatgaagagcccctccgaagccccttgggtttggaggcgcacactcctatctccgcttctttaagggtatccgattctaatattcaggctcttctctcctcacattcacgccattctcatttttctcctaccatccctctttcattcattcctttctttctttctacgacgtcgctctgtctgtctctttcgatat

SEQ ID NO: 278176 - DNA, 444 bp, Glycine max
  unsure (1)..(444): unsure at all n locations
ntattttaattntaaatccaaattatgtgaatggtgatgtttggtgtttgaagnttatatatttttttatctgttttgagaaataacaaaaatttgtttacaaagaattttgatttgttcttatcgaactttagggaatagtcttgcgcttcaaagttgagagctataacactcttatactctaatagtttcgtgatctcaaaagggttttgtacttttagttactcaaaacaatttttaacaaattatcgaaaaacttaaaatctttaaaactcgtgtaaatttacttaatgtatagctgagtctagagagagttaagattctagtcatcattgctccaaatgtcgcataccatgaagtcaatgtcatggatatctacacactacacaggtaacaccatacaaaaagagctttttagaatccaagatngatgccaaaagctcg

SEQ ID NO: 278177 - DNA, 363 bp, Glycine max
gtgcagccccttaggcacttctctctctttctaatttgcttacgaaaattgtgtccgcgatgataatccaaaccgaggcgcttgcgaaacgtatactctagtgatttctagaaggtctttgatcgttcttcgacgttctgaattcgctcgttatcgtactttaatcttcaacggatgagtacctcataccaagctttctaattcattctatgtgcccgtggtggtccacatttggcttcatgtgtttatattctctggtcctttagctattaatcccccttttgacatgcttaagccattttattaagagcgtttcttgcttaacctaaacatacaataaatttcaccgattgttgaattgat

SEQ ID NO: 278178 - DNA, 441 bp, Glycine max
  unsure (1)..(441): unsure at all n locations
tgccctgctgaaggattgcttgtaactagcatgcactggttatgtgcgcatcatatgccttggtctgtgaatgaaattatattttcccttctgtctattattgttattgatatgtgatttctgatacgtaggtgaaggacccatatcacatgcacaaccatataccactccttcaataacagtatttagtatttacagaaaaataaatatgatatgactagtgacttcatgcaaaatttgcatgattgaaaacaaaatcagaaataatgatgtaaattttgaagagaaattttccaatttggaataaaaataatgttaaattcattttaatcgcatcacaattcacaactaatctaacataggaaattatntaanaatgctcttattgttcactcccaatatagtagttactagaaataacatacttatacatagagttta

SEQ ID NO: 278179 - DNA, 406 bp, Glycine max
  unsure (1)..(406): unsure at all n locations
agcttctcaaggaggtgagcttatttatgatatgggtgtgtgtagctaagctctagcttctcaaggaagttttctcaaagaagcttctcaaggaagttttctcaagaaagcttctcaaggaagctacctagtctataaatagaagcatgtgtaacacttgttgtaactttgatgaatgagagtcttatgagacacacttcaaagttccacttctctccctcttttattccttcaattttgtgctctcccctctctctttctctccctctttcttttcctccattgaagcatccttccaagcttcttatccaaggctcatcttggtggtgaagctccttcttccatggcttattccctagtggatggcgcctcctctcnacctcttctctttgtcttccgctgcatc

SEQ ID NO: 278180 - DNA, 447 bp, Glycine max
tatcaattctcaagaagcataagaaggctataggctggactctggcggacattcctggtattagcccatccacatgtatgcatcggataaatttagaggatggggctaaaccagtaagacagccatagagaagactcaacccggtgattcttgatgttgtgaagaaggaggtaaccaaacttttgcaagctggaatcatctatcctatctccgacaaccaatgggtgagtcccgtccaggtagtcccgaagaaaaccggcctcaccgtgataaaaaaatgagaaggaggagttgattcctactcgggtgcagaacagttggagagtctgcatcgactataggaggctgaaccaggttaccaaaaaggaccattttcccctgccattcattgaccagatgcttgaacgcctggcaggtaaatctcactactgttaccttgatggtttt

SEQ ID NO: 278181 - DNA, 407 bp, Glycine max
  unsure (1)..(407): unsure at all n locations
agctnggtgttagaggataagttataggctttttagatgttgaagagaattttaacggaacaattgagcaaaatagaagagaatatgttgataatcatttatccatataaggagaaggtgaacctggctgctagttatgggcagatgctggaagatgaacatgtaaaggtatcacttctacagattgaaagggaagcgagagagagggtgatatagttattgcaccgggaagccatgaaatggatgaatatattcgctcacactctgaatgagagtcaagagcttccgaggttgttagctagagccaaggcagtggctgacacgtactcggctctcgacaaagctcatgatcttttttattactgccaacacctggccgactaatgacccaataattcagagtcatg

SEQ ID NO: 278182 - DNA, 440 bp, Glycine max
  unsure (1)..(440): unsure at all n locations
tgaaggtgtgtagcccaccatctggtaatgtgtctactattattgtcatcatttttttttcgtcattgaggtgccacttgagctgccaggtctctccacctttgggcgtattctttgaaagatctgtgcccctttttgcacatgttctgttgttgcatcctatccggaaccatatcaaaattgtactgatactgcctaatgaaggcaaacattaggtccttccaagagtggactcgagaaggttccaggttggtgtaccaggtaacagctaccccagtaagattttcttggaaggaatgtatcagcaattcctcattttttgcgtatgcccccatcttccgataatacatctttagatggttcttggngcaagtagtccccttgtacttgtcaaagtcagctccttgacttgggaggggatgatattgggtctaggacaa

SEQ ID NO: 278183 - DNA, 449 bp, Glycine max
  unsure (1)..(449): unsure at all n locations
ngaaatngaacaacggaagctctcgagatattcaaatggttataacttgtgacactttagtcctattcaggcgcataatataccgagacgctcaaaattgaaaacggaagctctcgagaaattcaaatggtcataacttatcacacggaaggccgactccggcggatagtatatcgagaaggtcggaattgaaaaccgaaagctctcgagaaattcaaatggtcataacttaccaaacgaaagtccgattcaggcgcataatatatcgagaagcttgaaattgatcaacggaagcactcgagaaattcaaatggtcataacttatcacacggaagtccgattcaggcgcataatatatcgagacgctcgaaattgaacaacgaatgctctcgagaaaataaagtggtcataatttgtcacacggaaagtcgattcatgcgcatactata

SEQ ID NO: 278184 - DNA, 415 bp, Glycine max
  unsure (1)..(415): unsure at all n locations
agcttgacactaatcttccttngcgcanatgtctttcctacaattctgctcacaacttgttgtctgtgggtgacaaagatgaggatatcattttctgaatgtgctgctgctgctgctgctgatgggtgagactgaaactactctgctattgtttaggtctcagttgagtgtatcatgaataaaggatgatactgggtagtatatgtttatttatttctttggtcatttaattcagacattcatcgtttttaagtatgtgatcttatggaagatttttgacagttttgtgattagctgtattttcgtttcgaaatatattacatctcacaagagttatgagacttgtggaaagaaaggcatatttgttgaagttaccttttgagataattattactttagcttatcatcacttata

SEQ ID NO: 278185 - DNA, 404 bp, Glycine max
tcacagtctgagtcatgaataaggggtcatttaatttttttattggataagttattaaggttttttttttactcaaatgcataggagtagtaagttaattaagttgataatcacgaaaagagacataccgacagtggcagctctataagtgttcgttccatctatgaagtttttgttaccagatattcgtgtctttttccccccttcaccaataaacaccacatgggtcatttattttgtaacttcaacatactcttggaaaacgccttccttgatgtagatcacaaatggctttctgtgtttctacggcacttgcttcaatgcctcattgatgcttttgaaatctccactaccatctatggctcagtaacattacgcttgcggtttaatggacttgcattttc

SEQ ID NO: 278186 - DNA, 377 bp, Glycine max
agcttgccttgttcttccattaattggagttcccaccattttttctgctccaactctttgctctttattgtctaggaggagcacatcaccctcaaaattctgaaacctcagcatgataaaagattatatttttaagtatggtggtgcaatgaaacttaagaacaagaacaacccatgatttaaaaaaacaaaagggtacctttgaatttgaaggaggtggtggtgtggatgtgagtgataatggaggccggttctggtttttggtgaccattttgaagcacaagcacttagttagagagacatatgaaagagagagaaactctgactaatgtggggccatgaattgtttgaaagataacaacaacataaatcaaaac

SEQ ID NO: 278187 - DNA, 376 bp, Glycine max
tctaaatttgcatctgctggttaacaaattattgtttcttatagcaaaggtgatatcctataactgaattctgtctaaatcgaaatttagcactgcttaacacaccaataaaaacaaagatacagttagtaaattcctatgcaaattcagtttaaatgtttcataagacagtccataactttttttagaggaaaagaagacaatccataacttaagaccaaattgaacactccttaagacacaaaagaagacaccaaactgaacatccctatttgtattattatctctgcttcaagtgtaagacatttacattttttttgtatgtgagaaagaaactaatttgaagctgcgacaggttggctaattcctacaacac

SEQ ID NO: 278188 - DNA, 411 bp, Glycine max
  unsure (1)..(411): unsure at all n locations
agctntaaccaattcaggataaacaggcaattgtaatgacatgaaaggtataagacctaggttctgaaaggctngaatgcaatcaaaagtttcagcataaaagaattccatatcaatgaacttagggtcgataatggaacgagatgagaaaagatttgagtaccgtttctgctgttcttcggaagaaaatagtgtggacgaagatatggagggtggaattggtgctgtggatgcgctgttggctccggaacgatgagctcttgaagccgaagtggaggtggatgaacccttacgtttctttgacgattcttccatttgaaggagtttttgcagatttcaatcggtgaaatcaaaagaaaaatgaanaagaagaagaatgcacgttacgggagtcgatttgatgaagaaatg

SEQ ID NO: 278189 - DNA, 462 bp, Glycine max
gacactataaaactaagcttctagttcctcccatttaagtccctaaaataggggcacatagcaatttctctgcgtgcgttataaacactgccatgcatataacctaaatgtcatgtatgtaaaagcaaatgactttggtgtttttatgatgatcatgatgatttgatgcaaatgatgcaaatgggcttttcaagtttaaattcaagacaatgattcaagaatacaagccacaacatcaagatgatcactagtattttaggaagggaattcctaattgatatagcaaaaggtttggccaagtaatttaagttaaaaagtttttttccaggagatttactctctggtaatcgattactagtggccaaaaatgatttataacagctactaaatatttgaattcaaattttagactgtgtaatcgattacacaatattggtaattgattactagaagttaataaat

SEQ ID NO: 278190 - DNA, 418 bp, Glycine max
agcttgcgcgaaggaagaatggaagaagacttatgaagattttattggagggagattgttgggtgcacagatggagaataagcgcggaagaagaaaagtttttttttttaaaatatattaacttttgttttttaaacgaagggtatttttggtagttcattgaattgctgggtgcacctaacaacgcccttacgtttgccgttaattttccttaacattatatgcatccgttataagaaattgctggaccatacttttttttttccaaactgtatgtgatcctagctagtccaacatatagagtgaacactaaagagaaagaaaaatgaaattagtgaaaaaacacagaaataatacgtaatgtatttatattcgactggcaaataaaataaaagagagataagtaggttctttaaaa

SEQ ID NO: 278191 - DNA, 411 bp, Glycine max
tgagggttgaatcgtgcctggatagattagaactatagcttcatttttttttccaacttgtggattttaacttttagaaattggattttaaaattttaaaaaaataccttgtaggtttagataggttccaaaatatctaaaccttgctttgagcccaaaagtagcacattataattttatagggacaaaactagacggaaatttttgcaggactaaattcgaactttggtaattttcaatgacaaaaaatatattttagccaaaaatttaaagaagtgttacccatcacattgaaattaatctaaaatgagctaagtatgatttttgttattttggtattgattgctaatggcaaaatatgataacatttttcaggcttaaataaatatattttccattcttgtaatttag

SEQ ID NO: 278192 - DNA, 435 bp, Glycine max
agcttataagaacaaaattgccttaatcatttccaaatatgtcatgttaattaggacgcatcaacaagaatcaagccaaggttattgtgcaagcaatcaatggggcaaaacacaccaaatgattataatgatggatggctcaaattctaacaaaggtaaaatcatcactttcaaattgagctttcaaaactatcatgacatgtagagaagaatcaaggatttcaagtcacaaaatgtcaagaacttttattttcaaaacaattacccatttcttgaacatatcctataattcaaagaaaaacatgcaaagtcgtacgtgcacacaaaattgacccaaaatattaaactaaaaacccgacgaaactaacaacattaacaaattaacacaactaacaaattaacaaaaccatcaaaactagcagaaccaaagaacac

SEQ ID NO: 278193 - DNA, 435 bp, Glycine max
  unsure (1)..(435): unsure at all n locations
cttcttcccttttgcttcttcactttcaatagaggaaggtgatttagtcgtcttatcttggctactataaatgtcttggcccctcataatcatggttttcttggtggggcattgacaagtaatgtgtcctcttccaagacatttaaagcactttatagagctagtcttctcttgcatactagccttagggggttgcttttctattgtcttccccttatcatctttgggcttagaaggtgctgcccctaagatgcctagaccttggtctttctttggataagagtgagagccgtaaggttttaaagtagactttcttttatgtttttactctacccttatttcccaatctaagttagcctctacattgtccttcccatggaagtataggaggttaacgttagcctcttgaggctntctttcattntctctcctatg

SEQ ID NO: 278194 - DNA, 406 bp, Glycine max
  unsure (1)..(406): unsure at all n locations
agctntgagacctgagtctggcctatagcctatcaaaggtttttattttggctcagcctgacctttttaaaagcatggcctagcctgataggctttttaaaagccttcttcacaataaatattttatggagcatgaacgtaataggaaagttaaaggaaaaagaaagtcaataaaaataatgaggaatataaaagggcacatgactcacacctaaattgtaattaaagtcttacttgattataggaatagaaattatggaatagtaatgtgtactgatagtttcaaatatatccaaaaaataatataagtatatatatatatataggccgacctatcaggcttataagattttttaacaagcctaagtctggtctatttaatttaataggctcttaaaaaaacctg

SEQ ID NO: 278195 - DNA, 397 bp, Glycine max
ctcttgtggggcttctatagaggctagatctttgagcttctatgaggtcctttaatggaaattttccaccatggagatgcagcggaagacaaatgagaagaggtgagaggaggcgccatctactagggaataagccatggaagaaggagcttcaccaccaagatgagccttggataagaagcttggagaggatgcttctatggatgaaaagaaagagggagtgaaagagagaggggggagcataaaattgaaggaggaaaaagggagagaagtttaactttgagttgtgtctcacaagactctcattcatcagagttacaacaagtgttacacatgcttctatttatagactaggtagctttcttgagaagctctttgagaaagatccttgagaagc

SEQ ID NO: 278196 - DNA, 360 bp, Glycine max
agcttttaatggaagtcaggagaatgaaagtgcgctgcaaccattagctggaaacgaagttcatgattgggtgatgacctaaaagaagacaccatctgacacaaacatatggaagaaaagctcaatattctttgatcttccatactggtctgatctacatgtgcatctagatgttatgcatatcgagaaaaatgtgtgtgatagtttaattggtacccttcttaacattaaaggcaagacaaatgatggtttgaaatgtcatcaagacctggttgacatgagaatacaagagcagttgcatccgatatcacatgatcgttaaacgtatcttcccccagcatgccacacaatgtcagcaac

SEQ ID NO: 278197 - DNA, 449 bp, Glycine max
  unsure (1)..(449): unsure at all n locations
gggaaggatgcttcaatggaggaaaagattgagggagagaaagagagaggggggagcacgaaattgaaggaataaaagagggggagaagtagaactttgaagtgtgtctcataagactttcattcatcaaagttacaacaagtgttacacatgcttctatttatagactaggtagcttccttgagaagctttcttgagaaaacttccttgagaagcttctttgagaaaacttccttgagaagctagagcttagctacacacacccctctcataactaagctcacctccttgagaagcttccttaagaagattccttaagaagctagagcttagctacacatacctctataatagctaagctcacctccttgagatgagaagctagagcttagctacacacccnctataatagctaagctcacccccatgacanaaaacatgaaaataac

SEQ ID NO: 278198 - DNA, 429 bp, Glycine max
  unsure (1)..(429): unsure at all n locations
agcttatagacaatctccaaagtgcttagacatatgagtatgagtgttgaagaatatagaaaacaaatggaactactccttttaagagctggacttagggaggaggaaagaacaagcacagctaggttacttagtgggcttaatatggaagtgagggataaggttgaactcctcccatatagggacctagatgggctagcccaacttcgtataagagtggagcaacaaattaaaagaaatccttcttcaaaatcttatggctttcactatccaacgaaggaccaagcccaaggaatttttagggctgcaccttcaaaacccaaggaagataagggtaagaccatagagaaattgttagtcgatgaatacgactaacttttgtgtaagaaacctgggtaaatngtataaactcctccaattatggttatt

SEQ ID NO: 278199 - DNA, 447 bp, Glycine max
  unsure (1)..(447): unsure at all n locations
gacactataaaactaagcttgacaagcgttngggtctgttgttgaacgtggtggtgcgtgaagtagcagtacccaaaccttcaggtcataccgccacttgaaaaccacaaccatctttcaaaaccctgtgttgtgcgtcaagttctcccactatgaaatcctctaagccaccccaacccttcgcatctaggatgacaccatgtcaagatccacacctaggatgatgatgttttatgcatcaacttcaagatcctcattatatttgctaattatttttaaaataaaaagtccatttattacgtgaaaccctaactcagacttggagaacaagtggcattacaagtggttggttgacatgtaaagttaacagtcacatcaacacctaatggaacccttctaacaacagagatctattacaaaagtttttaaatgttagtgacatatcgc

SEQ ID NO: 278200 - DNA, 412 bp, Glycine max
  unsure (1)..(412): unsure at all n locations
agcttataatatatcgataggctcgaaattttacatttaaactctcgcgaaattcaaatgggcataaattttcacacggatgtccgattcgggcgcataatatgtcaagagtctcgaaattgaacaacggaagctcttgagaaattcaaatggttataaaatttcacacggatgaccgattcaggcaaatcacatatcgagacgatcagaattgaacaacggaagctcttgagaaattcaaatggtcataacatttatctcgaatgtccaatttaggcgcatcacatatagtgatattcgaaattgaacaacagaagctctcgngaaattcaaatggtcataacttttcacactgaggtccgattcacggttataatatatcgatacgctcgaaattaaacatcggaaactc

SEQ ID NO: 278201 - DNA, 413 bp, Glycine max
tccgttgttcaatttctagcctctcgacatcttatgcgctcgaatcggacatccctgtgaaaagatatgaccatttgaatttctcgagactttccgatgtttaatttcgagcgtatcgatatattataagccagaatcggacattcgtgtgaaaaggtacgaccatttgaatttctcaaaagcttctattggtgaatttccagcctctcaacatcttatgcgcacgaatcagacatccgtgtgaaaaggtatgaccatttgtatttctcgagagtctccgatgtttaatttccagcgtatcgaaatcttatgagcctgaatcggacctccgagtgaaaaggaatgaccattcgaatttctcaagagcttccgttgttcaattgcaagcctctcacatactatgcgcccgaatc

SEQ ID NO: 278202 - DNA, 414 bp, Glycine max
  unsure (1)..(414): unsure at all n locations
agcttgcctagttaacctaaaattgagagattattattattgaacacacaaaataaaagtactaagtatttattacctatacttaacagaaaatacttataatcttacaaaataaccataaattgggagagtttgatacaatttatacaagttttatacacaaaagttagtcattttcaccgactaagaagtcccccaaatttacagttttgcttgtcctcaagcaaaaagagaacaactcacttgtcctcaagtgacaatgacatgcagtgactatgtacaaaggtgtatgctacaaagtgactgattgcatgataagagaatggagtaaaatgccctcatcacttgtctttcacaaggtatgcagttatccaaagagaagaataanatgtaacctgaacagatagatgaagt

SEQ ID NO: 278203 - DNA, 402 bp, Glycine max
  unsure (1)..(402): unsure at all n locations
tccatcaagagccatcaacaacatcacggtaaatatatacatcccattcctaggctagacgatatgttggatgaattgcatggagcctgtgttttctctaaaattgatttgaaaggtgggtaccatcaaattaggattagagagggggatgaatgaaaaacaactttcaaaactaagtatgggctgtatgaatcgcttgttatgccctttgtgctaaccaatgctcctaacactttcataagattaatgaaccatgtgttaagggaatttctaggaaaatttgttgtggttattttgatgatatcttgatttacagcaaattccatgatgaacatcttgtgcatctgagaagagttttagaggcctttangcgtgagagcttgtatgctaacatggataaat

SEQ ID NO: 278204 - DNA, 386 bp, Glycine max
agcttggttcgaggtacttacccgttgaatatcgaataacgatgaagaacgaatgaagaacgtcgaagaacggttgaaatctttgcgaaattcctcacggaaaacgttacggaaacatttcggaagcgccttggcttagattttcttcacggaaacaatttttccaagcaaatgcgaaagagagagaagtgcctaaggggctgaaccccttccttcttgccttcctcccctatttatagcaaaataggggaggtggttgccgcccagctcgcccaggcgagcagggttgcttcctccagaagcaaccgccttctggaggaatattccggagggcccaagtgggcctgggtgctatttgcacccccatttttactaagtacaccccc

SEQ ID NO: 278205 - DNA, 402 bp, Glycine max
  unsure (1)..(402): unsure at all n locations
tggatttcctcttagtagggaatctatccttcctaagatggagccaaacccagncccccctattaagaactagctcctttcttcctctattgcctttagttgcatacacctttgtttggttctttatttggttcccaaccctctcatgaaacttctttacaaactctgacctagattctccttctttatgtataaaagaagtgtcaagtaggagggtaattaggtctaatggtgttagaggattgaacccataaacaacctcaaaaggggattgcttggtggttctatggacccccctattgtaggcaaattctacatgaggaagatactcattccatgacttatnggtgcttttcagaagagcccttataagggtgtatagagactattcactacctttat

SEQ ID NO: 278206 - DNA, 413 bp, Glycine max
  unsure (1)..(413): unsure at all n locations
agctntaaccaattcaggataaacaggcaattgtaatgacatgaaaggtataagacctaggttctgaaaggcttgaatgcaatcaaaagtttcagcataaaagaattccatatcaatgaacttagggtcgataatggaacgagatgagaaaagatttgagtaccgtttctgctgttcttcggaagaaaatagtgtggacgaagatatggagggtggaattggtgctgtggatgcgctgttggctccggaacgatgagctcttgaagccgaagtggaggtggatgaacccttacgtttctttgacgattcttccatttgaaggagtttttgcagatttcaatcggtgaaatcaaaagaaaaatgaaaaagaagaagattgcagttacgggagtcgatttgatgaagaaatgagt

SEQ ID NO: 278207 - DNA, 416 bp, Glycine max
gcttttagttcctcccatttaagtccctaaaatatgggcacatatcaaacacgctgcgtgcgttttaaacactgccatgcatataacctaaatgtcatgtatgtaaaagcaaatgactttggtgtttttatgatgatcatgatgatttgatgcaaatgatgcaaatgggcttttcaagtttaaattcaagacaatgattcaagaatacaagccacaacatcaagatgatcactagtattttaggaagggaattcctaattgatatagcaaaaggtttggccaagtaatttaagttaaaaagtttttttccaggagatttactctctggtaatcgattactagtggccaaaaatgatttataacagctactaaatatttgaattcaaattttagactgtgtaatcgattacacaata

SEQ ID NO: 278208 - DNA, 423 bp, Glycine max
  unsure (1)..(423): unsure at all n locations
agcttgaaatgttatgaccatttgtttntctttagggctttcgatgtttaatttcgagcgtatgaatatattataagcctgaatcggacctcagtgtgaaaagttatgaccatttgaatttctcgagagcttccgttgttcaatttcgagcgtctctgtatgggatgctcccgaatcggacatccgagtgaaaagatttgaccatttgaatttctcgagagctttcgttgttcattttcgagcgcctctatatgtgatgcgcctgaatcggacctcagtgtgaaaagctattactgtttgaatttctcgagggctctcgatgtttaatttcgagcgtatcaatatattataagcctgaatcggacctcaacgtgaaaggttatgaccatttgaatttctcaagaacttccggtgttcaatttc

SEQ ID NO: 278209 - DNA, 349 bp, Glycine max
gtgcctgtatattgatgcacgctgaatcagagatccgagtgacgagtgatgaccattcgaatttgtcgagagctgtctatgtttaatgatcagcgtctcgatatattattcgcctgaatcgaagctaagggtgaaaagctatgaccattcgaatttctctagagcatccggtgttcattttctagcgactatatatgtgaggcacctgaatcagacctgcgtgtgaaaaggtatgaccattagaattactcgagagctgacgttgatgaatttgcagcgtctacacatgttatgctccgtaatctgacatccttgggaaaaggtatgagtattcgaatttatgcgagag

SEQ ID NO: 278210 - DNA, 354 bp, Glycine max
  unsure (1)..(354): unsure at all n locations
agcttcctcccttcatcaaaccatttatatatcaaaggaccacaaattctataaaaaaaaaatggagatttatacaccggactcatgctactaataacatcaatcataggttgataatatgtcgagttaattgcattaaatggcactatagcatctatcatccattttgcaatggctttgtcacacttttctacaattttcttattttgcaagacactcttcaagctaggttgagctttaggagttgttctaggcatgaaatagtcatctacatgaatagtgttctttcctttntgagacttggaagaaacaggtgaatttggagttcttcttaattcctcaactattctcaca

SEQ ID NO: 278211 - DNA, 396 bp, Glycine max
  unsure (1)..(396): unsure at all n locations
tctttaggggaataacccaatttggataactttntgtggatcccatgattccacataaaatgctagaacttttgtcattttttactttcaaggataaaattcaatttgagttcttgaattttatttatacaattttttttttaaaataagagttcttttgctgaaactcaaccaacaacatgaagaactcttgagtaaaaataatgatagatttggtgaataaaggtttttgagctcaagaatctagctcaaaaacttcaattaaagatgctctaagattcaaagtttcagaatttgttcctctctctcccttcctcacgtcaactcgtctctctctctctctgtctcaccctctcccattctcatttctttttcatcgtcttttattttgggtgg

SEQ ID NO: 278212 - DNA, 327 bp, Glycine max
  unsure (1)..(327): unsure at all n locations
agcttatactgtgtggtggagacccaggaatgttattacttttcctactaacatagggtctcgacagctatcattgttcggcacatttggaaatgagaatatttatatctctattcttcttaccggaaacatagtgaaaagaaagtgatacttttgtgattattagtgaaagtaaaatatggaaataggaaattttccataaaccaaatagacctataatnttttattttaagaaaaagatgtcggcaccttaaagtggacttttctaatatataagactatttgtcaagtaacattagctacagagaagagaaacttttactttct

SEQ ID NO: 278213 - DNA, 219 bp, Glycine max
agctttatcacttttcattcttgaggtgatctactatctttctctgttagagatgcttgggtgattttcatgacggccttgattctttaactctttacgtgtgggatgttacccattcttttcattccttgagattcattgagaaatatgtaattgtcgtcgtgtctgttcctctttaatgcctctggattagccctttgctctggtttttttttttgc

SEQ ID NO: 278214 - DNA, 204 bp, Glycine max
agcttcttatccaagcctcatcttggtggtgatccttcttcttccatggcttattccctagtggatggcgcctcctctcacctctactcctttgtcttccgctgcatctccattgcggaaaatcaccattaaaggacctcattgaagctcaaagatccagcctctatagaagctccacaagcatgctttcatcagaggcggcga

SEQ ID NO: 278215 - DNA, 459 bp, Glycine max
  unsure (1)..(459): unsure at all n locations
tctntgaganaacttccttgagaagctagagcttagctacacacacccttctcataactaagctcacctgcttgagaagcttccttgagaatattcctaaagaagctagagcttagctacacacacctctctaatagctaagatcacctccttgagatgagaagctagagcttagctacacaccccctataatagctaagctcacccccatgacaaaatacatgaaaatacaaaaaaaagtccctactacaaagattactcaaaatgccctgaaatacaaggctaaaaccctatactactagaatggccaaaatacaaggcccaaaagaaggagaaaacctattataatatttacaaagaagagtggatccaacattgacccatgggcttaaaaatctaccctaagggtcatgagaaccctagggccttctttagtagctctagccgaagcctcttgga

SEQ ID NO: 278216 - DNA, 382 bp, Glycine max
  unsure (1)..(382): unsure at all n locations
agctntacaacagatnttagtaatgacccattattctatatttataaaaacttaatgccattaaccttgggaattaaaaaaaaaacttaatggctgagtgtaactaaaattgtggcaaccaaaagtcacccccaacagccaacaagtcagccaccatttggtctcccaaaaggctgatgcctaggttgccaattgggcccttattacaacttgaactaaacctactaaaaagcccttttagttgattaacccacaacatattttttgtcagccaactttacaggattgggcccttattagacaaactaacactctaaattgataaaagtgtgcatttatccttttcattgggcatgaacaactacaccttgactttttcttg

SEQ ID NO: 278217 - DNA, 160 bp, Glycine max
  unsure (1)..(160): unsure at all n locations
agcttgtgactcttggcaatttctttaacaaatccagtcacttaaaaaagctgtgacttttgaaaaaatcttcagaaccaagtcacttgaagaattgtgacttttggaaatgtatctntcaaaatcagtcattggtatccattaccattaaggtgtaatc

SEQ ID NO: 278218 - DNA, 459 bp, Glycine max
  unsure (1)..(459): unsure at all n locations
cgaatacaataaaagttgctaacttagcatagctaaatntcacttgattcgttcaagtttctttcatccaactaaattgacaacattacaacactttgttcattttgactcaaaagattctctagtgattcaataacttcatcactaacatcttcaagcttcatataaacttcatagcttcaatcctttgagagaccctagctagccattgtctaatagcatgggtgctttacatgtggcacgttactgtgtagagaccacaaacatcttatgtagcatatcttcaaagaagtacaacttatcagtgccgccttttgcttggaactgactnttagtgtacaattcaaatacaacattaatagcacaggacaaaaggaataaaaaatgtcaagacaagaataattaaaacttcccttctgtgcacaatggtactatgattgactaaaccatagacattac

SEQ ID NO: 278219 - DNA, 223 bp, Glycine max
  unsure (1)..(223): unsure at all n locations
tgaatagcttaggtgggaaacacaaagttaaactttttttttactcctctcatagtgaccgttaataatgtactgccaaccgcaagttcttcagatctgtggagcaggttgttaaattacatatacgaattcacttggcgaataaaaaacagcgganagattaaacngtatataaatcgacatccaatttgtttttaccattgttacccttctgcagttataa

SEQ ID NO: 278220 - DNA, 348 bp, Glycine max
  unsure (1)..(348): unsure at all n locations
atatcctgattataactacacactnnnggatcttacttttgatatataccgtgagttaactagatgttttagtacantcttagctcaatctatcagcagcaatggtgtntgggtcagacatatgtaatagttgcatcatgaactaactaaacaagtagactttttcttgtgaataagaacagtcattgcgtaagtatatgcttgcacactctctgatgcaacgcatcaatactacttgctgcttagatgattgatttcccataattataatgcattagttgcgcaaattaaccttaattcacatttacattctaatcatgcttgagtctattcatttcatgaacattc
